United States Patent Application Publication US 2015/0052636 A1 - sequence listing, part 10

SEQ ID NO: 32124 - DNA, 966 bp, Medicago truncatula
  Intron number 4 from transcript Medtr5g073980.1 (locus Med tr5g073980) derived from phytozome v7.0 (chr-ID MtChr5; po s 26642387 to 26643352 reverse strand)
agaacgcacaagcgaccaaaagagcaaagcctgtggtatgaattcaatattatatatcatatgataatagttgtagtaaaggcgtgtctagtatctgacatgtttctagacatgacgcttatgcgtgtggttattacttttagcttcatgtctggtgtccgtatgagtgcttcataggtagtaaccaaggtttacgaattgaatttagtgtaaggatttaatttgtacatactcgatcagtgtaaaactgtatttacaatgtacattgaataatatctcatcatgtaaatatttgtggagatatttaggaacataataaagtggccttgtggtataatttggttgaatgtatgcgtaaaacagttttacaatgtctgattaacagttacaacaattaatatcttaagtgtaattgtcaaattgtgcttgtgtctgcaacccatgtttgttgtttgttgtgttttctcatagtctacatactctatactaataccatgcatattgaagaatgggcaattcttaaataggtgtgtataagcaatcagaaattataaagggtggctcagtgtacgaggctcccataaggtagagtttgtggagggtagatgtatgcagtcttacactagaagcaatcaaaagttatgatatatcaaaataatcgagaaaaaaaacatcacaacggcagaagattagacaattataaatagaatgtggtttagactagagagaatattgtttttggacacatttttgctagctttgttagttcaaatgattagtttacaaatattttcattgcatcttttattagtcttcatataagctacatttgtaaaaagcttggtgtatatcttcttacagagggttaaaaatatagctatcgtcacaccctaagaatagttcacgatagagtaatcctcattcacgatagagtgatcctcacaccctaagaatattgggacggag

SEQ ID NO: 32125 - DNA, 589 bp, Medicago truncatula
  Intron number 2 from transcript Medtr4g080580.1 (locus Med tr4g080580) derived from phytozome v7.0 (chr-ID MtChr4; po s 16576453 to 16577041 reverse strand)
attgaagcaagagtttgggttaatcttcttctaaggtaagggggttagttattatcataatcaatttcaaattttacatcttctcatgttgtatgaaaatgggttgatgaacaattcatgtcaaattcatgctcttgttatgttgctgtttcttatacatgaattgatgattatggtatgtttgtggatgaaattacatggttcaatgtatgtataaatgtcaagttgtgaaattttgcctaagttgtgttgaattgaggtgagaaacaagtttcaatggatgttgttgttgacaaaacatgttgttgtgagtgaattataacttgggtatacttaattatggattgatgatgagaaatgagatgttgttgttgttttgagaaaatgggtcaaatggtgagtttgtttaaaatgatgtttgattcaagtttgtatatgaatttgagtatcttttcatgtctaaaaacatttgggtaaacctttggaatcaatttgggtattgggaggtcaaaaattgggattttggggtgaaaatggatttttcacgaaaacagaattttctgcaaactgtcgtcactcgcgaggctag

SEQ ID NO: 32126 - DNA, 703 bp, Medicago truncatula
  Intron number 1 from transcript Medtr5g082690.1 (locus Med tr5g082690) derived from phytozome v7.0 (chr-ID MtChr5; po s 31163480 to 31164182 reverse strand)
actgctttgttaacgtaagtttgttaatttcataaatttatgatgctatttctagaatcattaagtaaagtcaatataatgtacattctctaaataaaaatgtttgtaaattattgtttatgttagttttgagtgtttaaactttattttttgatatttcttagtcccccaaccaagctacatgcatttcttttacacattattattcaaacaacgtatatgaaaaaataaaagttaaattgttgaaggaaaaataaaattagtttctaaaggaacataaattaattcattatttttgtagtagtataactatatatttgagcaaggcaatatctaatatgaatagtggatattttactcttctattgatgtttttatatctaataatcatgtcaaacaattaggtatcaatggtgcaagtttgcaagaaaagtagttgggttcatgttgtactcatgcaagagacttaaacttttttgtatactctctatagaattagatgtaaaaatacaacaataattttttgaaggaaaaatacaacaataattaaaaagcgataattttgtaacatgctaaaatatagatccttctttattcaaaatttatatttctatattaatttcaaacttattatgagttaaattataagtgcatcatattcatgtcacaaatacatatgaacaatttccattatagggttgtg

SEQ ID NO: 32127 - DNA, 1025 bp, Medicago truncatula
  Intron number 3 from transcript Medtr4g141000.2 (locus Med tr4g141000) derived from phytozome v7.0 (chr-ID MtChr4; po s 34703816 to 34704840)
acaagagggaggtaatctttcactgtttcatcattgatttatctttgacactaatctttcatgtttgaattttctacatcatgcaaaatacatgttacagattaattttagaccgattgtatttggataacttcatacaaacttatcttgcaatttacaaacaaataaccgatgttcggtaaatgtataagcttttagaaatgtacaaggataagtattatggaaaatctgagaactagtcagtttaattttggtctttgttttttcaaaagtataaaagcacaaagaacacatgtaaggatgtatatattaaaaaatttggttgacattcctagactctcaaacttctatgtgcttggatagctttcactaacattttgtataatggacatttttttctttgactactttagacctttttggcctacaatgttaacacatttccaagaggtaattgtatgcccagttctgttatttgaacatctggtttgaggcacctaatgtgatactgtatacctctctatctttatctttcagtaacttacttttcgtcatatacaacgcacactacaacaacaacaaccaccataccttatcccactaagtgtaagtgggatcggccacatggatgaaattacgccataatattctatcatataccatatttcgatcccactcattaatctgtagatctttcttaatggtttctcatatagtttttctaggtcttcctctgtctatagtgagctgactacccttcatctgacctactctcctcactacagaatcaacatgtcttctctctaattggtgtccaattttgatgatcaattctaacatcatttcccttgtttgtctttgttccccgaccaacaacttgtagtcctttattacttatgtggttattatattgcttgtgctaaataaattcgtgttttatattctgataatacaagtcccttattctgtttagatcgtcttgtttcataggtgcttgtggttcaagaaaccagtggtaaatttgg

SEQ ID NO: 32128 - DNA, 732 bp, Medicago truncatula
  Intron number 1 from transcript Medtr4g024490.1 (locus Med tr4g024490) derived from phytozome v7.0 (chr-ID MtChr4; po s 5605081 to 5605812)
cgataatcacctcgttcgttcttcatcttcctgctgtttgaatctttatttccatttttcattttcaggtctctctctctctctctctctgattgataattttcctgtatttgaatctgttatttgactgctggaaataattgaatcttctctgattagggtttaaaatctataatattggggttttttttagaccgagagattttgagaaattgaaccctaaatcttttattcgctgtttgttcttttctttcactcactatgaaattaaaccctaaaattttgggctgtgttttgattcacacgtgggtaatagtatgatgttgttattttgttttttggtgattttgttgatgcccgttacatgtttgataaaattcccgagaaaagtttgagtcattggacttcgatgctttgtaggctaggcattataatgctaaaatgatacttcgttaagttgtggtttaaaatttagccttaatatgtactttgtttctgttttttgtcatgatgtctaagtttaaggtttgcaatttcctctgttttccggtgttagtttatgcctttttcgcctatcatattcatcagtcaactagttggatctgtgtagtggcaatatgttgtggttttgctctgattttgttttgcttattctggtttatctactctgaggccttatatcggattttgttgcttgtttgctgcagctaaagtttgaggtaccggctgctg

SEQ ID NO: 32129 - DNA, 704 bp, Medicago truncatula
  Intron number 1 from transcript Medtr5g076290.1 (locus Med tr5g076290) derived from phytozome v7.0 (chr-ID MtChr5; po s 27889502 to 27890205 reverse strand)
ctaatcgtccaagcagcgcgtaatcaaatagccgacgctttggatgctatagtggcgtagcgaatagtggccgccgctatttgattttagtaggaaatttttaaattgactctgtttttaaaactttttttaaggcattttgaggattttgtaaaccctatcgtttttcaactctttttctcttcttacctaccaagaaacacactcttctatcttatggtttctcttgttttatggttttttaatatttgttctctatcttttgttcttaggtattttgatttatgagtgtctcacgagatttaagtgttaaatttaattttatattaaaagtaagttttttttttgttgagaaatatacaagtttatttatagcttataatattgtttatgtaatttgtccaaaaaaaatcaaatattggtgaccgtcatttgtcatatggctaccctatctcactttttaggtcagctgctacacaccactagccacaatttttattatgtaaaaatttgagctgaggtttcaaggaaagtttctccaagaaagaattttagttttggaaatcataaaattgttcttataaggcaattaatgatatcaaggatcattgtaattaatatgataaatatttatttttgatggattttatattttggttgaattgaaatagcttgaagattgagatttgaagcatagaagtaag

SEQ ID NO: 32130 - DNA, 449 bp, Medicago truncatula
  Intron number 1 from transcript Medtr6g092690.1 (locus Med tr6g092690) derived from phytozome v7.0 (chr-ID MtChr6; po s 19538483 to 19538931)
atttgtatcgaactaagtaaattacttgtgtgttgtgtgcttgtttgttgtcttgcattttaagctatttgtgtgacccgtacttagtttgttgtattgcattttatttatgttaagaaaataaaaataaataatttaaataaattttgtttttacaaaaaaaaaaaaattgttaagtgtttcttcattttaatttaattataatcgataattgtaattttatgtaattataaaaacaaaaatataaaattaaataagaataagaaataaaaggtggtggggtagggtgttgaataaaaaaccattggagaggtaaaaattgaatgggtgttgaattaagagagagaaaatgatgtggagtgttgggaattgaaaaagtgagtgttgaaggttattgaatgtattttaccattgtaaatggtcttatagttcttggaagaaacccttga

SEQ ID NO: 32131 - DNA, 401 bp, Medicago truncatula
  Intron number 1 from transcript Medtr5g035120.1 (locus Med tr5g035120) derived from phytozome v7.0 (chr-ID MtChr5; po s 14480613 to 14481013 reverse strand)
aaggttaattttccttgctatttttttatatatttttttagttactttcattgagatctttggtagaatttttgaacaataaaggtttataatttgataatttaaggtacataagttgagtttatttgccaatttaattaagttgtaaaacttggaagcttaattaatggttagtgctacttaatattacttattttctttcaattttttgtgtggagattttaagcactaactaattatctatcatataatagctgcaaagatcttaattggttcctttttccaaggatgtttatattatttttttattcatcattttttttatgttcttgtaaaataagataaattttgagatggaagttcttacactcttcttttatttattaacagttgttgctttg

SEQ ID NO: 32132 - DNA, 724 bp, Medicago truncatula; identical to SEQ ID NO: 31326
  Intron number 2 from transcript Medtr6g035690.1 (locus Med tr6g035690) derived from phytozome v7.0 (chr-ID MtChr6; po s 7671710 to 7672433 reverse strand)

SEQ ID NO: 32133 - DNA, 993 bp, Medicago truncatula
  Intron number 2 from transcript Medtr4g165660.1 (locus Med tr4g165660) derived from phytozome v7.0 (chr-ID MtChr4; po s 41779525 to 41780517 reverse strand)
acggggtaagtcacttactgtgtccaatcagttgcttatggatagtttaccttcagtcggacatttataaagaagggccaaataggaaaagtactgcaagtattatttttattttttacatttccatatatttgatttacttcactgttgatagatttgtatctttggaagtctagacaattgttgctaaatttgttatcacttctgtcatgtcatcttcactgttgaggttgagggtcttttttatttccaaagggggtataaatgtcaaagttatcgtcgtgttaattagaaataagatgtgttagatttagcaagtgtaaatacatagtcgattaacataataatggttattgtatataagtcaatgatcaggttgcacattagctaatgattagcacatttattggtgagaattatactacgaataagagatcagtgttcatcctagatatacataattcagcatactctccctcatatttatatggtatgaagcagtatcagcacctttctcttgacatactcgcgtagtattcaattggctgggctcctacataatctagaacttctattccacagtgtatgtctcatgattcttcttttccaattggccgggcagttatatctgcttctgtttggagtttttgtttcatcagttgttagatgattaagcctgtttctctctcttggtatttagctactttattttgcgtcatgaaattatttgagcctacacatcatgagtgcttgcttgcttagaattgcccaactgtgtttgactgcctcaaattagtcagcacttaagattgcttctaatggacctccgatttttcttcacatgcgggttgctgaaatctggctataaatgactcatcgatgcatgagagtgtgagttactttctccggccagtttctcaatagacttgctcactccgtaaagcaccgtctctgctagtcctcaactcagatttactacaattcaaccttccc

SEQ ID NO: 32134 - DNA, 709 bp, Medicago truncatula
  Intron number 3 from transcript Medtr5g045420.1 (locus Med tr5g045420) derived from phytozome v7.0 (chr-ID MtChr5; po s 18993178 to 18993886 reverse strand)
agtattcagtgaaggttggcagtggaaatcagattgttgagacctctttcatttttcccttcactacattttgatgacagaagtaatttgatattgagaatgacgataggatttagggaaaatttttaaactgcatatttgaaaaatttgtcaaagatatatcctacctaaactcatcttgtcggttattggagagacattgatgctacacactgccttctttggtgtctggagaagatttttctatacatctgctagacaatgctaatattttcacaatttgatttctattgtatatatgtatgctcagttcagttggttatgacagtcagatttgtaaattttcttgagtcaattatatggtaatcaacttgtatatagacctagttctcaagtattgaattaaggatttttgttttctgcaaaatcaagtatattttattgctcacagctcttatactgaagttctgatgtgcaatcttctcattctcaaaacatcttcaatgatagagctgtcccctaacagttaagcagaactagcaattgctaatccttcatatagaacccatcaaaccagtattacttacagagtgaaatccaagtggggcatttgttgctcttccaatggatggaacaaattatcatttttttcagtagagctatttggaaaatgaagttttctgatggtttgtttgtagtttcatattca

SEQ ID NO: 32135 - DNA, 410 bp, Medicago truncatula
  Intron number 3 from transcript Medtr7g008880.1 (locus Med tr7g008880) derived from phytozome v7.0 (chr-ID MtChr7; po s 1412684 to 1413093 reverse strand)
tggctccatacttctctgagtgcattacatcagaggtaaatcatctccagaattatcgtttcccttttctttggttcaacttcaatcagtctgcgtgttgaatgctgtagtatagttttattgcataaacctgaaattatctatatctacccctaattttcaccaaatagactgaaaaaaaatgtaatgtaaaactataaaaaaaattggaaggcaaatagctcttggttgccatccagaagacaattttcctactttgatattataggcattaatttggattatgcacatgcaatagtacaatagtaccaaaactttgatattataggcattaatttcgttggcatagcttcatatgtttatttctttgatttatgtgctcatggttttggttaattttcaggacttgg

SEQ ID NO: 32136 - DNA, 902 bp, Medicago truncatula
  Intron number 1 from transcript Medtr6g028410.1 (locus Med tr6g028410) derived from phytozome v7.0 (chr-ID MtChr6; po s 6463237 to 6464138 reverse strand)
tgatctcaacaagtctgaaccttgggaccttccaggttatttttgttcatatctctctttcttaaaaactatccctttttttgttctatatattttgtttgattatagatttccaaggggttttgttctttgacaaatataaacttatttaaggattgcaatttttttttaggaaattagaaggatattgtaacttgttgatgaatatatactaattcaaaaattgaagaaatttaaaatagtagacaatattattaattatttttctgattaattaagagttaacatcatttctcttaattttctacatattcttcaattttattttcactagcttaataaatttcttaaccaattaataacttatatataaaattttatttttctttgatgaaataaaatttaaattttgtatatattgatttggtagctgcaaattgatcatttacatctccttttcagttttattatccaaagtagttaaaatcaacaaagtcttttgttattttttcttcaaaaaataaaaaaaattctttgttattttgtttatatatctctcttaattcattactatatagtagcttgacccattcttactttgaaaataacctaagtacaccatgtaactaattttcaaaatataacatacacaaattcaaaatatattatggtatttcaactcttataaaaaaagttaatagttagtttgaatagtaacaaaagttgacaaattaattggtatagctactagctaattcctttgcttataaaaataaagtaacaaaagttgacattatattggtatagctactagctaattttttatctagtttacacaaaatcactaactaattaattaatcatgttttgtgtggtatataatttatacaggtaaggcttca

SEQ ID NO: 32137 - DNA, 866 bp, Medicago truncatula
  Intron number 1 from transcript Medtr4g124610.2 (locus Med tr4g124610) derived from phytozome v7.0 (chr-ID MtChr4; po s 29200451 to 29201316 reverse strand)
attcattcaaacctagcacccaattccgtttcaaggtataatctactttctattcttctgtcaataattgatgataattcgatctgtcggctttgttttttgctttcatatgattgaaatccttctgattgatttgaaccgtttaattcgatctgtcggtattgtatgattcaatcattttttgatcaaagacagtcttcagattgtgacaaggggttcatataaaattgttagatcggattatgtattgtatgattccaaaatgtcctttaattaggttagctcatgaatattgtttcgattgattcattgattggaagcaatttttgtgaatgagtagcttttcaatgtaacttgagtctttttcactctgttataacaataatgaatagttgatgattgattcatttgattttgtctattttgcataaggcttatcccacttagtagaataaggttgttgttgatggatgagtatgttttttaaatgtctgccgtaatttgaatcgattataattgctgatcttctgcttccagttttctatagtccacccccttttaaccttgttgtacttataatataatgaagaatattggtgattgattcatttggttttctttgttttggatttatatagatgcaaatcttcgttaagaccctcactggaaagaccatcactctcgaagttgagagttcagataccatagacaatgttaaggcaaagattcaagacaaggaaggaatcccacctgaccagcagcgtctgatttttgctggaaagcagctggaggatgggcgtacccttgctgattataacatccagaaggagtccaccctccatttggtgctccgtctccgtggtggt

SEQ ID NO: 32138 - DNA, 801 bp, Medicago truncatula
  Intron number 2 from transcript Medtr5g067500.1 (locus Med tr5g067500) derived from phytozome v7.0 (chr-ID MtChr5; po s 23942198 to 23942998)
tactcctgactctgtttgcagttacaataacaaaagtaagcagcaacaaacttttatattctcctatcattgttttatgttcatttcactgatcaattacccttaatgtagattttaatgtgtagattttttattttagaaaaaaatatgtggattgtttttgaggggtgggtggggtgtggttattgcgtagattgttgttcaaatataattggttgccaaaataaaataaaataaaataatactaagacatgattggacgccagtgtaccacgctgcaataaaatatgatagtaggtctttgtttgttattaaagtttttgccacgtgggcatggtccatagaaatattgagaaatgttaagcctactaattatgctacacgtggacatccaattaagacatgtttacattacctttctaggagtatttttcttcctttgaagagtgctagaccagagatattcttatagaacctgtgaaatgatcatgaatgcgtcttacatcggtttcatgatcatgaatgcatctcgcatgatcttgcaatatcaaattcaattttgcaatcctttcaatcaattcaagaaatttgacattacagtattgatataatttatttttttggaatcatagaaagacgttacgtgaccaaatcaataatgtttggacacacacataaaaagattctcctcaaaatattcaatcatcatttttatcaatttcttctttttttttttttttttgagcaaaagcagaatcaattcatttcattcataattaggcggtacaaagtaggcaatac

SEQ ID NO: 32139 - DNA, 318 bp, Medicago truncatula; identical to SEQ ID NO: 30938
  Intron number 2 from transcript Medtr6g076440.1 (locus Med tr6g076440) derived from phytozome v7.0 (chr-ID MtChr6; po s 14694273 to 14694590 reverse strand)

SEQ ID NO: 32140 - DNA, 994 bp, Medicago truncatula
  Intron number 1 from transcript Medtr4g159870.1 (locus Med tr4g159870) derived from phytozome v7.0 (chr-ID MtChr4; po s 40419035 to 40420028 reverse strand)
gtggttggtagatcaaattgatctaatttattattctttggtgcatttttggtcgagtgttttaaatggtgggaggaatcctagttccattttttcattgcccattcaatccattttatttttcagtgcaaaccttcctatggattcattgtaacagttatgtgatataatttgggttaaatattctaactttttattttattcttgcttaaaaacttcgacttttatccaaaaattttcaatcatcacttttatttcatgcttttaagctacacatgtgcatcattcaaaaatataattttttttttctgtttgcaatcatttttttttgttttgaatcttttctattttcaatcatgtttagattattattataagaatttcccaaaaataagaatttttttaaaaagattttggcatttaataattcatattttgttaaaaaaattctatttattttagagattcttataatattgtaaaaaaattgcatcatttaaacacatgagtctacttaaaagttgcgattctttaaaaaaaaaaaaaaaaacttaaaagttgcgataaaaaatagtaataatttttttttgaagagaccaaaagtcgaagaaaattcttatgaggattaaaacgaaaaaaattgaatatttttttggtcaaaaataaattgaatatttatatagacctgaaacatatttaatcttaaaatttatgcaacaacatagacgcaaaatgaaaaaaattaaacggaatttcaagaaaaacatgtaatttcaatttcacagcttgttggccctttcttccatcaagcatcatgacatgttgcctccttcctcttgaaaagcatcatcaatttttaaggttgttaatcacaacaggttctttcaactacatagcagccattcatttcctttcagctacatacataaccaccatcccttttcaaccctctgtctatgttacatgtttctttaatttaaggtgtttatcattt

SEQ ID NO: 32141 - DNA, 774 bp, Medicago truncatula
  Intron number 2 from transcript Medtr7g080250.1 (locus Med tr7g080250) derived from phytozome v7.0 (chr-ID MtChr7; po s 16902031 to 16902804)
tggcttgttccactgcacttggagctatagcttctgtgaaccaatattgttgtttaataacttatgaaaattgttataagctgttttcataagttcttccaaatagtctcacaaaactatgttaatcgacaaattcaaataagccataggccaccagccaaaacaacacataaaccaacccgacaaagatgaaaatagattaacaacaaagtacaataatcgttggaccaacactgatgaagtacttatgaaaataggtgtactataagaagctgccttccaaaactaatacacaaaagaactactagcaatttagaactactaataaaccatacactaataaccatgtcaaatatgcaaaacgaaattaaccatgtctctgattagaacagaacaaaagcaatagaaaaaacatatgttgtactttaatccaattctagtatatataacctcctacatcaaccaaaattgaaattgcaaatatgcccaacacagtgcagcaactcactttatgatttaaaaaatcctcttaggttaaaaaatcctctttcacgcaccaagacttaaaaaaatcctctttgaaaaatcctctttataatctcttcctactggttggttacaaggacctcaaatcacataaactattcaattacttaggcatgcaatttgtgtaaaagaagagaatgaagagttttcactaacctttgattttgacggaagctggtttggatttcgagagagagagagagtgactgaagcttgcttcgagagaga

SEQ ID NO: 32142 - DNA, 635 bp, Medicago truncatula
  Intron number 2 from transcript Medtr4g133480.1 (locus Med tr4g133480) derived from phytozome v7.0 (chr-ID MtChr4; po s 31992385 to 31993019)
atttaacactgttaactcaaacagtaggcttgcaggtgaaaatatataccgttcttctttgacctgtgtgtgtaagtttgcagagtaggtaataactgattttggtgtaagatttcataatttatacactagcatttgtataacttcacatgaaatacttttttcaattcaaccattgaattttcatatttacttagatttacggagtgctaagtaattcgtgattagtaaaccatagaaaattatgaacatgttatgtattggaagcttttcatttgacactggattttttaataaaaaaaaaaaaaacactttccctataaaaatgtgtttaatgatgtgagaatgattttattgtcaccaatgtaaattagtggtagagatttaccgttagcttagttgtctattagaaggttatccaataatgaagggtgggtatgcattttccaatgtgtacacatgaatgtgcatatcatattcctttccacctgtattttttttttttttgccatctttctctattttcttcaacttactcttgtatcaaacaactaagggataatgtttactcactttactatattccgcactattttaaacaatgttacagaattacggtgccttcattgagaaag

SEQ ID NO: 32143 - DNA, 739 bp, Medicago truncatula
  Intron number 2 from transcript Medtr5g074610.1 (locus Med tr5g074610) derived from phytozome v7.0 (chr-ID MtChr5; po s 26982435 to 26983173)
tttgcagtgttgaaggacaattaccaggttctattatggtgtttcaacttgcaagcttgtcaaacaattgaaaagcacaaccaataaattaaattttcttagtgttttaacttgcttcttagatactctcatggctagtataattaagattaataggttcgcctggagcatattgtttcattgtattagttatcaagaaatttagtctaaatgttgatccaaaagtagagctatgatttgcattgattatgtaaagcttatttgtcatgtaattttcagattcaataattggatgatttcactagtaatgtttctatcacaaaaagtttgataatgaaccaacgatgttatgtgaatgtcgaaattttggttgatgttttcaagttttaacaggccaatacgtttggactaactacaaaaacttatgtagctaattaactttttcttaatatatacaaaatagtaacatattttgcatgttacaagaaacataaagtgtggtaacatttatttcatggtacatataataaactcaagtgttacaataatgtacataatacttaagcactaatcgacggccaattggccgccactgttgttctgcttgagcgtccaccttgttgtctccaattggacgccagttattctgcttgagcgtccaccttattgtcttctttgatgtttccttttattaaggtatttgactataaaccagatacatacaccaatagcggctagg

SEQ ID NO: 32144 - DNA, 620 bp, Medicago truncatula
  Intron number 2 from transcript Medtr5g030100.1 (locus Med tr5g030100) derived from phytozome v7.0 (chr-ID MtChr5; po s 12608771 to 12609390 reverse strand)
tggtgaaaattgcaattgcacgctgtatgtcaaacactgctattgttactgttattttaactgcaaatttaacaatttgacaagaaagttatcttgataaaaataaaaaaataaaaaactcaaagcagtacatgacattttcatattgatgacaaattagtccatctattataaatctataatgagtcaatgatcaatttaccctaagttatgaatgttagggattactttgagttttatttttattgacgtctaaattgatttggaagaaaattgtgaagaactaaattaggtttcactttttatttattagtttttttaaaatattttctacttattttattatttgtttgtaatatggtccaaccatcgttgaagtgattgaaccatgacatgaagatcttacctatagacttttacctaataagtcgaataaaaaaaattaattctaaacagaaaagccctaaatcgcaatttcatattataattaactcttgaggtaaaatcaattgactcgatcactcaaacaagcacaattaaatttatgcttatagagtcatttttgtctagcttttatatataattcatttttgaagatttttacaataatatatgcagtg

SEQ ID NO: 32145 - DNA, 858 bp, Medicago truncatula
  Intron number 5 from transcript Medtr6g093410.1 (locus Med tr6g093410) derived from phytozome v7.0 (chr-ID MtChr6; po s 20024223 to 20025080)
cagctctaccaattttggataaactgctagaagacgtaagcgtgtttttttctgtttattatctgtttggattgactgatttgagcttatctcctagcataaacacttttgtgagaacttatgaaaacaacctatgacatgtatgaaaaaatttgactttatgccctcttttgttttagaaatagcttacagataagcacatgttaataaaagcttaattgtaaagtttgtccaaacatggcctagtagcaaatcactggttttaatccctaaaagttgttgagaatacaatttgttctttggatttaacgaacctccaaactgattaaccgagggttttcaatttgtgttagtttagttctagtagatcttctgttaagttaattagttagacctgtttagctttttggacaagttagtcggtgtttcagttataaccaacttcataactactctgtgataggagtagtatattagccgatgtatccttgtaaaactagagacatatcattgaattattgatcaagagaaaaaatagaacgttcaagtgagcgggctgtgattttctctctaaaaagtcttgtaacattagcactacaacattcaacatgatcgtagttgatgagatcgacctcaacgaggatgtaggattcaaagttgatccaaatatcgataaatcttgtgtcttttagaatcttttattctgcgcgtgtttaagtttcaattcggttctcaagaatcttattattgtgtccaatttcgacctacgtaacattaaaaatcattttaaattcagctaatttcataaactaaattggtaactaatttcattctgaatgttattgatgcagcctacaa

SEQ ID NO: 32146 - DNA, 943 bp, Medicago truncatula
  Intron number 1 from transcript Medtr7g005920.1 (locus Med tr7g005920) derived from phytozome v7.0 (chr-ID MtChr7; po s 743001 to 743943 reverse strand)
gacgcaccaattcgttctgtttggatctgaatcaggttcgatcaatttttcagatctaccatttcatttcttctcgttttcttcgatcttgctcaatttttctttaatctttttgttttttttttttgctttataattatgattaggattataattataatttgaatgatttagctgtgaggatgtgatttaggctttaattttgatcattttttgattcgttatgattgatttcaatgctcatcgaccttgaatgattcatgttgaagatttttgaatcttttagttttcaattttgagtttatgagatgtgatgtggtgtttggatgttgatttgatctaagaaatttgtgtatgaattgattttctagatttatttttatttttatttttttataaaagttgttatgttgattcaatttttctttataggtttttgtataattgaatttttgatgaagattgaattatcaattaattacatgtttgatgccatggagacatttatatttttgtgtgttattgatgattatgaatctgtttttcgataaatggatttagtttgcgattaattggcttttttattaatattattgtgaactgctatattagctaaacaacaattggagaatgatgcttgaaaaattatttttttgtagttcagagtaaccgttatgttgttgtgaaaatctgggctttttattgaattggatgcgtggaaaaaaaaattgaagtggattttatcgaaattactgtgaactgctatattagctaaacaacaatcgagaatgctgtttgaaaatatatttattggaattcgagtaactgatgtgttgcgaaaatctgagctttaattgaatcggatatgtagcaaaaatttgaagtggattttattttgtagatagcagtttgagccttttggtgctggctcgtgctgaacacc

SEQ ID NO: 32147 - DNA, 1012 bp, Medicago truncatula
  Intron number 2 from transcript Medtr5g092850.1 (locus Med tr5g092850) derived from phytozome v7.0 (chr-ID MtChr5; po s 36433008 to 36434019)
agcacatcatttgtactggaaacttgtgtattaaagtatgtccatcttattcgatataactattactgattcagtttaacagttgcataatcagttgcatctactttatacttttctaattcaatatttgcaatggtctgaatattttacctcttggggttgaccatatgaatcaaaggacatcttaatgcttatcatggaatcataactaaattgtgttttttgtgtgttaaatgcatatttttctcataagatcttgtagttgtagaattcgagttcattaggaaacattaactcattacaatgtatgtgtactagatcatttagctgtaggacacctcaaattttgtgttgtcacattttgtatgttttctgtatcgttgtccaagcttcttagttaggtggaaaactggtgactattaaacaactgataaaattgggtaatcctgggtactcttatggaaagtttataacagctcctgtggccggtggtgaagccattttggagcttgacaggcttccccttggttttctaacatgccgtgcccactagttcgaaagggcgtgttgaacttttgataattgactcctttaccttcttttcttgttaattttttcatacaatattatgattttctaaccatattttatgcatataaaactggttgaccacctcccttgagatcagtgatactatgctattgatgacaagaaagtagttgaataatgattgcaggttattttactatcctgcctacgtagcatggctactactactgctgtaggattgtagcaaaactttagtccatgcattatttactccctttgtattacacctattatctttctgcatctatcaacaatagtacagtacgtttgttatggttttatttttaatatttatatgatatttatttctatttccattgtctaatacgatgatttgaaagtcgaacatttttaggattgaacttctaagataagttttatggcatttaaattcaggaagtcc

SEQ ID NO: 32148 - DNA, 605 bp, Medicago truncatula
  Intron number 1 from transcript Medtr5g040420.1 (locus Med tr5g040420) derived from phytozome v7.0 (chr-ID MtChr5; po s 17261046 to 17261650)
tacacgagcacttccaccggatatctgaagttccggtctactccagataattggagctagaaggaggggaattgtatcattgattccttcggatttccccaaatccaccactgtaacttttttctgttatactttcggttggttggaactctaaacaaaattaattattccataaaaaattatcatcagactaatataaccaaaaaacaatcaataacgcaagttaacattgtcttctaaggtatagagagattaatagtctgatcaagccaaatgctcaaaatcaaaccacataggaaaattaatatttcacacaggttaaaaatgctacagattggcccaaacttcaaactcttaactttataaagatttgtttgacacatcaatgggtagtttatgctgtttttttactcgatcttatcttctgagtatttttacaaatcctactttgtctttgatcgacaagaaaagaactcaacaacttagagcattgggaatatccatatcatgttctagattgtgtttcatctcatctaacatcatttaaaatatagactatgaaccattggaagctgattttcgaatcacgacatatattttgcaga

SEQ ID NO: 32149 - DNA, 672 bp, Medicago truncatula
  Intron number 1 from transcript Medtr4g033100.1 (locus Med tr4g033100) derived from phytozome v7.0 (chr-ID MtChr4; po s 8111587 to 8112258)
ctggtaatctgcaagggacagtgccatttggtgaggtcaattctggagtttggcctcatttattaccttgaaggatcttttctcaatttagtcccaattttttattttatggtgatttagttttttaattatttcttatgtgtgtgaagatacaatcgtaattcattacgttgtaatcttgatttagtcccaattctggtgcgtatttgaataaaaaatcactatttcttaagttctatgtactggtttacttgaatcaaaaatctaacatgtatgttgctgctttcaatgcttttgtcgtaatcattaattttagctactaacataactggttttttttttttttttgagcaaaaaaaaaataacgaatgatttatctcatatattatgcagaccatgtaaaagaaatattattcttttgttccaaaaaaaaatctgtgttggatagttaaatataagttatttttaggtcacacagaaatacatttttttagggaaggtcacacagaaatacatgtctacaggtaagtgatgacactttatcatatcatatttttagagtctttttaattaagtttttaatctatgtttatttatttagtatttaattttaactcattttattttcgtttttgagtatttaattttaaatcaataccaccaacctacgga

SEQ ID NO: 32150 - DNA, 981 bp, Medicago truncatula
  Intron number 2 from transcript Medtr6g014410.1 (locus Med tr6g014410) derived from phytozome v7.0 (chr-ID MtChr6; po s 3320103 to 3321083 reverse strand)
aacttggacaaagttattaaggaggtgttgcttaaacaaaattagattaaaatgattttatgtctgcaaaagtgtattgtactagttccttgattttcttgtattgacaatctttcattgacaagaaaaaacaatgcattctttagaacagtttatttgtatctaaatggcatgttatcacagatcttgtatttttcagtatgcattgttcattaatcataaagatattaaaaccatgtgaagctttttagaattttcctaaggcttgattagtgtctctatattctagctatgttatggttggatcttctagttcttgctatatgttaccaaaatctctactgttttttgtccggataatgtgactagaattcttaatactcacgttatcctcagttaccgaagataagcggttttggcgtgtggcgaataatgcgaatatttggtgaaaagtgattattacctttgttcgaaaaaattagttgatacatctccttttagatttgggggagcagtgacatttgatttggtaaataaaaactccagcgaaggttaaaaaaaattgtggtggatgtgtagacggtgccacccaacacgtacggttaatttcccaaccaattgtgatttatgatgatgcatcggaagacagctcgcacatattcattacctgtccgacagtcgcagtgtctggcagaaaagcggtttttctgctactgtttctgctagcccgtggttctgctgctgcagatgtggttcttcagctccgataccagttttcggagaaagaaccgtcgtattttgctgatatcatgttaagcattttgaatgaaggaaatcataagattggaaaaacacttccgttgcacaaaattttgcgattacttgagctgaagcgcttataaaccatttgcaagctgcccgtaatattcagcttcatacaggtttggatcagatttaaaaaaataacgataaacagagtaa

SEQ ID NO: 32151 - DNA, 458 bp, Medicago truncatula
  Intron number 3 from transcript Medtr6g071200.1 (locus Med tr6g071200) derived from phytozome v7.0 (chr-ID MtChr6; po s 13658867 to 13659324)
actatacaggtgtaactacattctcagcttgcaaaaaggaacaaatgacagctgaacctacaattgctgaagctcttggcatccgctggtgtatgcagcacacgaaggatcaaagaattaaagaaaagaaatcattgtgcagtcagatgtgttggttttagtggaatgcattagggcagattgtaaaactcttatgaatgcctttagtaaggtatctgttaactttattggtagagatttgaatgttttagcgcatagacttgtaggttatgatatgcaagtagggaacaaatcttggtttggatatccccttcctttgaatgatgttattgtctcttgtaatgcctctgttatataacgaagttgttagaatatcaaacagaaagaaaagaaaaaaaaagagattgactaatgcttttgaccatcttgtttctatgaccatgtagactgtaattacc

SEQ ID NO: 32152 - DNA, 460 bp, Medicago truncatula
  Intron number 1 from transcript Medtr6g028340.1 (locus Med tr6g028340) derived from phytozome v7.0 (chr-ID MtChr6; po s 6417190 to 6417649)
tttgcaagccttgggattggagagtttaagaggaagttcaggatatttaatttgattaacatatgcaacaacttttttattaaaaataataattatttaatagaaaattatattttctgttcgttctaagatatttaattaattttgtgtggaaaaaatatattatacgttgttttacaaatttgtccttaataaatgaaaatatgttaacgataaatgaaaaaattgaaagaagagagaataaatagttgaagatataatagaaaagtaaaattaattcttcattggtattgcaaatcgacatataatttgagaggatagtgtccgagtataaggcaaaaccaaaaagtagaaaccttctgttattttgtttcgtgtggattttttttttggttttcgtacgtaatgatttaatgttattgattaaacttcttaaactttcaggccacaatctcgagag

SEQ ID NO: 32153 - DNA, 729 bp, Medicago truncatula
  Intron number 1 from transcript Medtr5g016910.1 (locus Med tr5g016910) derived from phytozome v7.0 (chr-ID MtChr5; po s 6020602 to 6021330 reverse strand)
ggaagtggatttgtggaagtggaagccggaagagggtgaagtttttttttggaaagtcttgttatactttattggaaaaattaattgtttttgttagccgagggagttagtgtagaggaggaggtggttttctagtatcattggaagagtttgactccgtcaaaggttctggctatctcttggacgcttctacttgattgtatcgcaatgaaataaaatcttgcaaagagacatctcttgaatgttgatatgttaagactgtgcattttttgtgacatagaggaaacattggttcacttgtttatccattgtgatgtgatttcataagtgtgggttaaggtgattaattggttgcaattcaatttgaattctgctcattacttaaatggattcgctcattcccaaagtaaatgtctaaaataccctacgtatgttaactcacgctaatgttaattcaacgtaacttaactcacgctgcgtgaattaacttacactgcataagttaactcgcgctagttttaatttccacgtgagttactcacgttaattttaaacaatgacttctacgtgtgttatgattattgctcatgttactatcttttttgttgttatatttgctgggatgtagtaaagaaggatattacccctttacaggaactgaaaacagtatctaacaattatgtattctttgcaggccccacagacgagtgctgctcctactttaacccc

SEQ ID NO: 32154 - DNA, 1036 bp, Medicago truncatula
  Intron number 2 from transcript Medtr5g087260.1 (locus Med tr5g087260) derived from phytozome v7.0 (chr-ID MtChr5; po s 33667045 to 33668080)
agtcttcaggaatcgtggcacgttttctagaaatcgtgacacgatttgcttctttgtattttctacagaatttctgcttttcttgctgcataagttgctttgtgaactccaaaatgtgataaaaagtacataaaaattacgtaatgacaagatgtcatcagtgtgaattatccttaaatgactagaaatgagaacgaatcgtatgcgagccatctaccccatttgggttcctatgccccctctatttagtatggttgcctacactctttctctacgagtgttgttcgtcgctgtctccttgtctagtacacacctatgtgggttgtcagccatatctacacaacaaaaaacaatgaaaaaaaatcaattaaaaactcattcaggaatttcataaaacacttggagtgaaaaatacatattcttgattcattgtgttatttcaagttttaaacgaccacattgaacttaaacctagtctgaacaatattcacattgtattcttggctcattgctattttcatattagtcagaatgtagcgatggttaactgccgcttggaaaaacgaacaactgttatatgtcgtttgagagtgaatgactattaaatgtcattgggtattaaggtaatttggaggtgcatgagaaaaaatttaaaagcttaaagatcaatttcaatattgtttcaagctaggtccacataatgaccaaagcccaaaccattgtctaacccacacttgacatattgcattgttgcatgagatacacctaaccttattgcatgatgtgcacttggcttattgcatgtgtttatcttgacactttgcatgttgcatgctattttttgacacttgtgttctcgcatgaaagccttttaatttttcttctcctataaatatgagttcatagtttacttattgaatcattcaagtattagaaatcaaagagtgtgtttttgttaatcagagtgactcaattctttctagtactaatccatttatcaggcataagaatcttaaaaggcagcaaatagcaaaaa

SEQ ID NO: 32155 - DNA, 923 bp, Medicago truncatula
  Intron number 1 from transcript Medtr4g078920.1 (locus Med tr4g078920) derived from phytozome v7.0 (chr-ID MtChr4; po s 15563122 to 15564044)
gaatctctcatcctaaagataagtttggaacttaatttcgactatctctctcttttttctttttcttttgtctcgttacattgtaacaaaaaaaaaatctcaccaatgaacttctttactctcatttttttttattatattgcctacataatgcagctgtctcctaattttttttttataaaacaataatgtttatatggtcttggatttaagtctttattatgtcaccatgctctcttataacttataagtttgaacctatacggaacttggattttagatgggaaagacgacaaaatggcccctctaagtctctttgccaaacaggataggttcatgggttcgtggaactagttagttgatgtccaatggcacatgatatgcatcagttggataatcataatttttagaaaaaccgtgttaatcataattaagaatgtgtgttaaacattgagtaaaaaaaaaagtttgttaagcatatagaaaggacaaattaagtctatgaaatatggtcggacttatgatttgaaaatattttaccaattaatcaatgagtaaataagcaattatcatttgaaattgtaagttttcgtcaattaccctcccgacattaacaaaatttcaattaccccctaaaattgcacaatgttgatcaatttaccccctccgttaaattcttctgttagtcaacatgacattttgcaaatacccccctaaaattttgcacttgtgtgcaaaataccacccgaacttaattttttttttttctttcttatccatgaaggccaaaatggaaatgaaggctccttagcagagacttgtagcacaaacaactaccaatttataaacatagcttttctatccactttggcaatggccaaaatcacaactaaaccttgcaggccattgtgatccatccacaa

SEQ ID NO: 32156 - DNA, 586 bp, Medicago truncatula
  Intron number 2 from transcript Medtr5g077310.1 (locus Med tr5g077310) derived from phytozome v7.0 (chr-ID MtChr5; po s 28476750 to 28477335)
cctcttacagaagtggtaattatgtaatgagtttttgaatacatatcatatgattagtacttccatttcaattgtgttcagttgtagttgtaaagaggtttttttttaagttttcaaacatttaatagtttcttatattaaactagggtttaagaaattctgcaaccacaatctgggctgtgatatcaagagttgtgatgtcttcgtgtctacgattgagaccgcatttgattgcacttatcagcaatgctaagattcgtggcatgagtgcaattttaaatcttgaatagaacaccatttttgtataaattctagaaagtaagacataaagtggaaaaaagtaaaaattttgttaactattagtcaaaattgtttgctaaagccaaaccggacacccataacatggtggtccaaggttcagatccccgttgggagaggtactcacatttagtgttcaactttgcctcaaataggattgcctccaatagaagatacctgttgaaaaccaaaatttgaaaaagacaaaccaaccccaatttactccatgtctgatacttttttctccttataaatatatttgcagata

SEQ ID NO: 32157 - DNA, 544 bp, Medicago truncatula
  Intron number 1 from transcript Medtr5g073210.1 (locus Med tr5g073210) derived from phytozome v7.0 (chr-ID MtChr5; po s 26240629 to 26241172 reverse strand)
ggcttgggattggttatgcatagcaaagctaaacatataggcagcattatatatgatccctaatattatacgaatgttgaggctctaggagtattgtacccatttccttgtttttagtatcttctccatattgtgaatgaatatcatgttttaagaatgtagaatatgatggatatgtgtattgtgaatctcaattatttcctagcacattgggatgatatggtttgacttttctataatatgtcgtcttttgtgatgctgtgactgttatatatatatatggattgacatgttaatggattttgttggtaaaaaaaatggtatataatgtctctcacacaaatggtatacaatgtctcgtttttttaaaaagtattaacatagttgagcttggtcatctagcaacagttggaatctgtttcattgattcatgacattttttgcaatctgtttggttcctttccaaaccagcgtaatcaactttaattggttcaggtgcttgctttttagatttcattttttttttctttctgttccacagaat

SEQ ID NO: 32158 - DNA, 740 bp, Medicago truncatula
  Intron number 1 from transcript Medtr5g044680.1 (locus Med tr5g044680) derived from phytozome v7.0 (chr-ID MtChr5; po s 18571066 to 18571805)
caaagagatataaggtatgtgctatgccataatgattctatttgaagaattttattttctttaaaattatgtttctagctagtaggtttgactcaaaaaatttatcttttttggtagtctttcgctataaaaagtgttatactgtcaataaatcatagtcaatcacatgtataatataactatagaagtagttagatgattaaagttgttttatgctaaccttttctcatagttgaatactagaattatgagtgtacatccatctctttatttctgaaattaagagggattatcatgctgaattgataaatcatacacggggcctctcattattcatatatttcgatcctaacaacaatataaagagagatgctttttgttctctcaaacatgaaaatgcaaaacataaataaaatagaatatcaaggaccaacatgaattttctgttgtttatttatatataagaacaaataaatcagatactatatgcttatgcagcactgacattttagtataaagttgtgttttgtgtccaacacgacgtcaatacatgtaacattcaatatgtcttcaaaattttcaaattatcggtgtcgtatttgatgttcgtgtctatgtcggtgcttcatagctttatactgtcaatttataaaccaataaaactttgtggctcatattttggtcatatctaactgctatatatcaacttcaggaaacatcaagaaaagaactcatcgagg

SEQ ID NO: 32159 - DNA, 884 bp, Medicago truncatula
  Intron number 2 from transcript Medtr7g089310.1 (locus Med tr7g089310) derived from phytozome v7.0 (chr-ID MtChr7; po s 19592492 to 19593375 reverse strand)
gaagggattttgatttagaaggtttgtctcagattttgttgctagatagagttgatcacttagtattttaatctcatgtgtgatgaattgaacaaatataattataactttatcagatgtagattacttgttaatataataaataaaaattccattttttttaagaattgctggttgcatattatgaaattttggttaaaaaatgaagataatttggaggtacaaattaaatgtggtttacgcatatggtctggattattatttattatgtatattactacaaaacatgtaagcttttcttttctcacttttgccaaaaacaatgttatggttctttattactcaaaataaagaccagttctctagtacatgatgtacttgtacacctgaacataagtccagaccacagagccccaaaatagttgtagaaatgaaaccaaaatagttgtggaatgcgcaagcaatggatatttcaacaaaccaccattcatatagacaagatattatgtgttgtctatcgcatccaaattctacaccacttgactctcgttgaattagtgtgaatttagtttttatgcacgacattgtaaatggtaatatattttgggtcattattaacattaaggtagataagttagagttacactacaaacaagtcctcattttccaatataaactgttgtctttatcctaccttcaccagctatatgttacttttatgtgctaattgaaataggtcagtaatttggtgtcaacgttaaaattcaacgagagcattcataatgtactccttgtatcatttttgtgctccaaacccctctattttgatatagccactgacttgcatgtgttcttctatttctatgacaggccttaaaacttgt

SEQ ID NO: 32160 - DNA, 267 bp, Medicago truncatula
  Intron number 1 from transcript Medtr7g089310.1 (locus Med tr7g089310) derived from phytozome v7.0 (chr-ID MtChr7; po s 19593379 to 19593645 reverse strand)
aggtaaaactaaaataaagcattaaattttgataaaattcattgcaaaattaagtgaccctttttcatgttatgtataaagattgaatcttttttacaattatgaatttaaaaatgcaattggggaatttgggtatgcttgttttgatgttatcttctcaaatttcttagaacttttgtattaaatgtattgataatttgatagtttctgcttttatcagtagttttcttttctttcaggcagagctagaaagaaagttttttaagg

SEQ ID NO: 32161 - DNA, 557 bp, Medicago truncatula
  Intron number 2 from transcript Medtr5g095050.1 (locus Med tr5g095050) derived from phytozome v7.0 (chr-ID MtChr5; po s 37688545 to 37689101)
gaaggccaaatatccaaaaagaaggtgaccatgtgaatgaacttcattgactttatgtagtgacttttttgttactgttgaagattttagcctcgttttcttgattaagtttcaagattctagcttaaccctgtggtgcttttttgggtattgttttcctgatcttgtcttttatatgcctaatataactaatctttaatattcttactttgataccattgaagtggattttagttgcaacatgatgttttacgatgagtgttttttattgtcattatgatatcttcttgttatggttctgtaattggtttgagtaattggccaagtaattttcttaacttacatgattggctagttcatctgattaaggcatagttgatttgattaaggcatcattttttgagtaaaccgggtgaggctagggactaagaattaagaagatttaactggtatctaacatatttttaccattcaaaaaatattatgcatgtcgatataattcaaattagatgaaattggttttgaattcttatagttgtatttttggtatagaaagc

SEQ ID NO: 32162 - DNA, 797 bp, Medicago truncatula
  Intron number 2 from transcript Medtr5g044180.1 (locus Med tr5g044180) derived from phytozome v7.0 (chr-ID MtChr5; po s 18303052 to 18303848 reverse strand)
acaaaattctgattagttttatttgtggtaatttatcttgagatgtatataaatacaaaactagatatggaaaaacaaaaatgtcatgattctaagggttatcttacattatcatctatactcagttttccagttagctccatgaacatagaattaaatgagctaaaacatatatggaaccaagcattggttatgaaaccaaaccaatcattgatttatttgtttggttcatgataatattgaggatatactttaaactaattttgatctttcccaacatcaatgactaatagaatacagattaatgttggagaagattattataatgtacaaattattgatattggggtaggccaaaagaactcgtttgtataatttacataaactaaagtagttttctttgcaaccaaaataatcattagataaagtaacagcatattttaacttacaattaaatactctctctcactctatatatatacttgatgcatgttattacgccatacaaaatgatgcatcgggtaagtttgatctttcattttattttttataactattttataagtacaaacacttttttcctttctcggtgattaatcggcgttgaagagtttgttggtcatacaaagtggatttttccctctcgtttggttttcaccactcccaagatcattttatttttatgtacttccaacctacataagaatagttaaatttactgaattaaaaataataatttaatgatatttatattttaataaaaataattatgatattttcgtaaaacttatttgaag

SEQ ID NO: 32163 - DNA, 853 bp, Medicago truncatula
  Intron number 3 from transcript Medtr4g129570.1 (locus Med tr4g129570) derived from phytozome v7.0 (chr-ID MtChr4; po s 30845724 to 30846576)
ccccatattttgctctaaggttaacatatcctgaggtgagagttgtaactacatatcttttattgtgtttgtactgcttcgtcacatcaacctaaactgattttaattgcctctatgagagtttgttatgagttggtgtaggttacttagcaccactgtgagtggtggtggatagtgatcatcaaaattctcttgtaatttgatcttcaagatcaaaaattcatatttagaaatatagaaaagttgtcttcacattttctctcatttatctactctaaaatgtctttgctgcttatataaatctgatgatcttagatagaaaaaaccatcttttcccgtgttacaacctgtgtaaattaaaggaaacaagcattcttattcatctggttagtaatttgttctcggcagccaaactttggctttttaattcttcctgagcattagaaacatagattaagattttactatattgtgatgtgtaaacgtgtaatgtagtaaatttaacacgttgacaaaccaatgataacgcatgccgtcattttttactatattgtgatgtgtaatttgacaagcattcttattcatctggttagtaatttgttctcggcagccaaactttggctttttaattcttcctgagcattagaaacatagattaagattttactatattgtgatgtgtaaacgtgtaatgtagtaaatttaacacgttgacaaaccaatgataacgcatgccgtcattttttaatattgtaattgtttactattttgtatgataatctctttcctgccattgtttttttgttgttttaatatattgcagagagtgactccttggaattcagccaagtta

SEQ ID NO: 32164 - DNA, 933 bp, Medicago truncatula
  Intron number 2 from transcript Medtr4g141040.1 (locus Med tr4g141040) derived from phytozome v7.0 (chr-ID MtChr4; po s 34723695 to 34724627 reverse strand)
tgactccatcattgaatacaaaggttttgtaattggtatgtcttcctattctatttcttatcattaagtattaacatttttaattctttagctgatatgctttagctgcatgcaatatcttcaaatgtaatatgggtttcagtctcgatgaaaatcttaattatgaacttttgttgttgttgttgttgcacagcgggtgtggctgttttgtttcaatgtgggtatgaatatttggcttgtttttctatgggagagcgagattcaaccaagtataaatgttatcaaactagtgcttcaatgataatagaaactgagtggttcgatttcaaattaaactttttcgctgataggaattaattaatctttctagagacatcttcctctattaactatcatatccgtctttgcttcatgtatcaacaaagtttaatctgtcatagtattatttttaagaaatgcaagccagctgccagcactttgttaagcaggaaaaaaaaattaactcttaagacttgattgaaagcttgttcacctctacattatctttttcatttcgttttaagctgtttttactggtttttgcagcaattgttggttaaacagcagttaaaactttttttttatggctgtgcttgggttgattttagtagtaattaagcttactatatttggcaaacgaaagatggaacatttaaattctatcgtatgacatatatcaaaagaaggttgctttttatggctctcaggcaaaaacattgtgactttggtagaggaaacttttctgtgtatttctattgttaatgtaccaactgcaacgctccatgttccaatttttgtcaactcataaactctttaagtcaccgcatgacatatttgacttcttcgtttgttttcgcagtttgtgatcctaagagcctactcttcgtatttgga

SEQ ID NO: 32165 - DNA, 395 bp, Medicago truncatula
  Intron number 2 from transcript Medtr7g046190.1 (locus Med tr7g046190) derived from phytozome v7.0 (chr-ID MtChr7; po s 11300329 to 11300723 reverse strand)
ttggaattaccctcttttgtcttgccactatacaggttaacaatcaatattttctaatttttattatatatgaaatcgatgaatcactactaaaaaattaaatttagtgagggaaatttagtgaggaaaaacgtaaaatccctctctaatttcgtcactaaattttgcgaccaaggaatttgtgaggaatttcattttttccgtcactaatttccctcgctaattttgctttttctagtagtgaatgcacgaaacccaaattcaaatccaaagtagagcacgagcgaattttgaaaatgccgcttgtagtaactttttctctattttgatgagctcttccttcccgattatattttgcagattttcgcattgttcctaaggccaagcaaggatca

SEQ ID NO: 32166 - DNA, 965 bp, Medicago truncatula
  Intron number 3 from transcript Medtr4g029040.1 (locus Med tr4g029040) derived from phytozome v7.0 (chr-ID MtChr4; po s 6821959 to 6822923 reverse strand)
tctacttgtgatattataggttttcttctctccatctctctctaccttcttcactctcccttttgctatcaaaagtacaatgacatgcaaagaataataaattcggtcgaattagactttacaagactcaagtatgtcctaatctaaaagttcaaggtcgactactagaaaattcgtttttagcgacggaaatttgtgagggtttaattccgtcgcaaattttgacggattttgtgaagggtactcttttgatgtcattagcgacgggttttacgagggtctgtgtcattagcatgtcataggtttatttttagtctcaagtctagtatttttgaatgtcttgtaggactatctatcttacttatagacatttttaatatgaatatatatttaaataagtaatttcattattagaaacccaattttcctgcggaattaccagcggattttagaatattccgcagaacacctgtttcctgcagatttagactgggattttggttcacttctaatatcttcatagataattgtttcttttgattttaggatcagaagaaaagaagaatccccaggaaaagtgaaaattataggatcatattcaatattatcaataaagaaattcaaaatcttacaaatttcctgtaaaaaaaaaaaattacaaatttcatcatattaaaataaaccgcatgaaaattcgcaggaaaaacttgagtttctattattgttttagctatttttgtaggcctatttatcctacttagtataaatagtagggttcatttttgggtcgtaccgcagacatccccttttctaacaaagtaccatccttgtttacagtgtcatggatatgttggcataatgtttacatgggatttagttgcacaatgtcatgtgttctgttcttttatactcacttttataactaagtagcatcattttttacttaatgactctttatagttaca

SEQ ID NO: 32167 - DNA, 685 bp, Medicago truncatula
  Intron number 1 from transcript Medtr4g104490.1 (locus Med tr4g104490) derived from phytozome v7.0 (chr-ID MtChr4; po s 22839970 to 22840654)
gcacctcctcacaagctcaattctcccacggtaattctttcatttcaattttcaactctttatacaactatttccttctagggtttttctttattgttaacattatttgcttctgtaaattaccctgctaggatttatctgtgtttttggaatcatctgctattacaacatatcaaaattcatttttttttttaaatttgaaaataatgggcatgctcaattttgacttaaaacttcatttttactttgactccctaactgcttatagggtatgatcagtctgatgatgcggacttaggaccttggactgtgctctatggtctcaggttcgaatccttttggtgcctatttccgtgggatagtccatagctttgactttaattgggttccccgctagtggacggtgggattggtcctagattagtcggtcctcggaccggatactaagttttcaaaaccaaaaaaaaataaatcaagtgttctgtaggaagaatgaactcttcgagtgtgttacttaatagttctgttaatttatctatttttttttttaaactgttgcatattttactgtttctttgagatgcagtttcacaatatgttagtattaggttacaagtttgtattttggtttttctgatttccttcatggaacagggaaattcgagtgtgacgtcgcaggctgaga

SEQ ID NO: 32168 - DNA, 214 bp, Medicago truncatula
  Intron number 1 from transcript Medtr7g009550.1 (locus Med tr7g009550) derived from phytozome v7.0 (chr-ID MtChr7; po s 1748288 to 1748501 reverse strand)
caaatccaaccagcatcgtgttgttaagacacctggtaatgttttctttgtctaattcttctgttttttcttgttctgatctatgtaatgatgtttttttattttttcttaaaaattggattttttgttgttgaagtgttttttgattaatttgtgaaaatgggtttgtgttgttttaggtggaaagttggtttatcagacaactaagaagaga

SEQ ID NO: 32169 - DNA, 637 bp, Medicago truncatula
  Intron number 2 from transcript Medtr7g022140.1 (locus Med tr7g022140) derived from phytozome v7.0 (chr-ID MtChr7; po s 5449692 to 5450328 reverse strand)
agaacattctgacatctggggagactgctgacaaggttttgcttttgttctgtgttttttactctctgtcctattttcatttgtttcagacggtgttgttaaatagtggctatagcagcgttgcagcatagcataatttgaacaaatcgctattgtttctctatttgaacaaattgttgttattctgccatacactatttagtagagtgttgtcagatacctgccttatggcgcggtagcggaatgtgaaaaaactgctcttttctgcgatccgggattgacaacactggtttgtggtttgtggctgttgggaggcagggaagtacacccttcattcactgctgttataaacaaaatttaatatttaatattttaagttcatttaataaatgatgtatgtggtctatattaaagaccacatacatcataccataaaaaaaaaaaaaagaccacatacatcttgtattgaatgaacctaaaatgtcaatttttgcttataacagtgaccagagggtgtaagtagcattagaaattgtttgacaaatgttttgatactcaaaaggttaatgtttttttcttttcttttttgtttggtgtttcaggattgcaaacaagtgcagaagggtgataaatacta

SEQ ID NO: 32170 - DNA, 526 bp, Medicago truncatula
  Intron number 3 from transcript Medtr7g017850.1 (locus Med tr7g017850) derived from phytozome v7.0 (chr-ID MtChr7; po s 4204148 to 4204673)
aaaggaaacgatctcaggtttgttaaatacttgatcaattattatttatttatatatatatatacacacttatatataacttaatgctattattcaaaatatacccttagattaagccattaatattgggaataaataatgaccattattaatattgtgaataaataatgaccattattaatgctgttttttgaagggagattttttgctttgaaagtattttttgaagggagttagtaagccttttttttttttttttttacattaaattaaaaaaaaaaaaaaaatgtttactatctttaaagaatgtgaagcggatatatattttttagccgtcagaattgcacctcttaatatgaataagtgaggatttatgagttcgaacttccgtctctacttattgtattatccttatcaactgaacgaagatatagtatgattaatatttatttgatgtcatatgaaataccttagagttaaaaggttttcttattaacattatttttcaatgttgttgcatagtcca

SEQ ID NO: 32171 - DNA, 531 bp, Medicago truncatula
  Intron number 1 from transcript Medtr6g077440.1 (locus Med tr6g077440) derived from phytozome v7.0 (chr-ID MtChr6; po s 15360981 to 15361511)
atcgaaagcatgtttgtgttctcaattttgttttgatcgtgcgattcggtaaccgtatatgtatcgttttgttcttcgtgtatacacatctatcactttgaaatatgtgtgtaatgtatatcaattaacggtgcatcacccatttagtttggaactatgatcacgagtaatagtgcataattaaacaatataaaataaaatccaagagttgaattttctattacttttgaaaggtgaatttgacttacggtaatacttgttcaatgtgatgcaatcaaaaggaaatttgatttcctttatttaataagtttttgaatgcaaatccgataactgataataatattaagtgttaatattttattatttaaataattagaattaattaaatttgatatcatatatgtgatatatgattctaatgcaacatcattatatgtgatatattgatgatgtcattcgttcaatatgttttatgaaattgattgtgaatttgtagtcaattcgtgagattgagcttcgatatccgaatat

SEQ ID NO: 32172 - DNA, 530 bp, Medicago truncatula
  Intron number 1 from transcript Medtr5g046810.1 (locus Med tr5g046810) derived from phytozome v7.0 (chr-ID MtChr5; po s 19713359 to 19713888 reverse strand)
ttaactggtatgaaaagaatttttctttgatcactttgcatcagattaattagtagacgtggcttgaataaagaagctacaattatgagggtggggatattcgatggacctcattatgatacattattttattttccttgaaacttgtcttgagacttggaataaaatttcgccaaattggtttacgcgcatgccaccttaaaatcagcgttttatcccacgacacttacaagacgtgggttcacactcacgccaaccattttgagtttatttttatgatgtttgaccttactaaatccttaaccactttttaagggacatggatttgaattttctcacaatttttgaggtggtttgtgatcatcttctttgacgatataatgacttgtaccaagtacctaattgatcatttggtgaatcctgaattagttttgaattgattgattacgaattatttatatgtgaagctttccaaatgtttttttttttgtcaaggatgtgttgattatctggccatatagtctcgtctt

SEQ ID NO: 32173 - DNA, 581 bp, Medicago truncatula
  Intron number 2 from transcript Medtr5g089250.1 (locus Med tr5g089250) derived from phytozome v7.0 (chr-ID MtChr5; po s 34661833 to 34662413 reverse strand)
tgtcaggtttatgtcttttttaacaaagatcatgtgattgtttggttaatgtttggccgtgaggaaaatttgattttgagtcaattgtttggtaaaagtcatttatgtttcaacaaaaaaaattgagtgtaaacatcaattctagaagcaaaatttgtattttttgttccacttgaattgattcttgaggtgcaaaattgattttgcctctagaattgattttacttgaagctagaaatcataggttcttatcctagaattgatttttttttttttccactcaaatttattgttcaactcactttcatatgaatgtatctgaacataaatcattttaccttcaactcaattttagacagaatcaagtttacataatcaattcactcaaattctgcacatgtagaatcgattttggctcctccaaaagtggagacaaaaacacacagaaaaatggaaacttgataatggtttttgggactgaatgaaagttggtaattttttattttatgtttgttatattgggattagttgtttagagattgcggttatgcgaatgcattgtaggttgtgaaacaagaggg

SEQ ID NO: 32174 - DNA, 471 bp, Medicago truncatula
  Intron number 1 from transcript Medtr4g073040.1 (locus Med tr4g073040) derived from phytozome v7.0 (chr-ID MtChr4; po s 14302332 to 14302802 reverse strand)
gtcctgtgttggaatattgtatgtttagaaaactgtattaaagagattattctatttgagttattgatagttgtgcgattcttgttttgacatttgacaagctttcataaccaaatttggaaattttcatattttctagaattctgcatattttttagtgaatttttcacatactgcctgtgtccttatgacaccttttggggttacttggaagttagaccaacaactctaagatactggctagatgcgttgttgattaggatatcaagaagaaagctgaatttgagtagtgtccggttcttaatccccagcataatgaagaaacaagataagtaggagtgatataactaacttgcatgcattgccttaatagtctgagtgaagggcttatatttattggctgttgatctcctatatttcttcttggtgaaccaagtgatagttctgattgtgtctttcactttgcaggtt

SEQ ID NO: 32175 - DNA, 500 bp, Medicago truncatula
  Intron number 2 from transcript Medtr5g079580.1 (locus Med tr5g079580) derived from phytozome v7.0 (chr-ID MtChr5; po s 29685059 to 29685558)
cccattagcgagtctgatcatcaaggtttattccatttttataagtttttgttggtcttctttatttaagttatatgttgtttggcttcctctttgcttagttttgataataatttgcagaaataaaagtttttgaatgtaattatatgggttggtgtcatatcagtatctaaacatcagacatgtcatcgatgtgaagttttgagtataggtgaatgattgtttggtgcagaacaaaggttgcaattactttgatggatcatttaggttcgaaaaaggctcatgtttttgggcactcaatgggtttctattttgtgtgtttttttgtctgttttactttttgatttagttaaaattcagatggtctgtcctacgatttggttaggttaagtttttttgtttgtgtttatttttaaatatgtttgcctattgaaacaggatctatgatagtttgtaaaatagcagcaacagttcttgatagagttctctccttggctttg

SEQ ID NO: 32176 - DNA, 776 bp, Medicago truncatula
  Intron number 1 from transcript Medtr6g038800.1 (locus Med tr6g038800) derived from phytozome v7.0 (chr-ID MtChr6; po s 8438244 to 8439019 reverse strand)
gagaaaaggtaaacttggaagaaacataattttcttttaatttttaatgattattaaattaatataataaatatatattatattttattgtgaattatttgattttattctaatgagtaatattttatataatttatttatttgatactatttattatgtttttcatcttttgctaagagtattttaaaaattatgataaatttaaaaggagtaattctttacttgatttatatccactatctatatgttttttggttaatttagagtcgatagtgtgtatttcaattttttgttttaggtccggttttatgtaagtttcacgagttatgttgatcagatcgaacatatgaatgcgtgaatctataagaaatcattttatgttaggtttgatcgttgattattctcgattccacccatatattggtcgttcttattgggttttgaataataatttcaactctcatttgaaactttgtacataaatttcttttctattttacttttcattcctccaatataaaactataaagttaaattataaaaaaaaattagagatagagaaaaataaaatatttaaaacttgagacaattattatttctcatttctttgcctaattcttaaagaaaataaaaaaaaatattatttctctgccgctaaattttgttgtgctaattcaactttctttatcgataagagttgattattgagtctaatttacatttgattgctactattgtaggagcttgaaactttcgataagaaattcattcgcag

SEQ ID NO: 32177 - DNA, 481 bp, Medicago truncatula
  Intron number 1 from transcript Medtr4g073080.1 (locus Med tr4g073080) derived from phytozome v7.0 (chr-ID MtChr4; po s 14343123 to 14343603 reverse strand)
gaattgacaaagtttgtaaagtaaagaaagaatgtggtcttgtacccaaaaaaaaaaagatgtggtctaagattttaatttatttaccacactgccccgttagctaacatccctgtattctttctttcgataactgcactactttttcctcgaaaaaaaacactactctttcactttacaaacttcaaaatttcacatcatctagtcaaatctcaaccatagaaactagcatgtcatcgatctaactttacttatctaattaaatatcaaccaaaataaatatacctcatcaatttgctaagctctcaaataagaaaagaaacacatccatccatatatgtatatagcctatgaacagtaaaataattaagaacttttcagtaaaaagtgaaaaatacagtgtcatctttctccccctataaacattcactctttccacaaaagaggtcctccgatcccaattctgacgaagggaatcaga

SEQ ID NO: 32178 - DNA, 765 bp, Medicago truncatula
  Intron number 3 from transcript Medtr4g101080.1 (locus Med tr4g101080) derived from phytozome v7.0 (chr-ID MtChr4; po s 21777656 to 21778420)
tcacaaggtcagttttttttttttttttttttttatcaacaacaaaagatattgtattaagggaatgaggcagagtagaaataggaggaggattagaatgcattgaaatcctaaaaaaaaacaagaaagaaaataaatacaaataatgcaacaaagctagccagttagtttctttgcatattagtggaggaaagtgccgggaaacatgcacaagagccctagagagaggccgttgtttcatttattcaaaaccttgtctctgattgaaattgatgttggcgttccactgcgattaaattcaccatgtctatagtgtgaaaatcacccatcaccactgaatttgccacttcaatcttcaaaatatttttagaacaaacatggacgatgattcaaagtaaagatgataacattagattaatgctgcatcttaaacaacttattccaagggaagttgggtcatcaccacttagaaataaataaatgggctacttttctgaattgaaatgcaaataacaccaatgtcaggggaagggaggtttatggggaaaacatcaaattcatccagcattgcaaacagcttcatggttcttttcctcaaattgggccctatgtgatcatgttttatgaatgacaattacagcattacttgaccttgactacaactttacctcattcattgaaattaaattttgtttgaatatgtatattttctattttgggtggtttgcaggttttgaggttgtggcttgagaggaaaattttgcc

SEQ ID NO: 32179 - DNA, 464 bp, Medicago truncatula
  Intron number 3 from transcript Medtr5g025930.1 (locus Med tr5g025930) derived from phytozome v7.0 (chr-ID MtChr5; po s 10437389 to 10437852)
ttataaagtaagtaaaactacctcgaagtagatatgagctggttatgtttaatttgtgttgcaaagctgtgtttgtgacccaacacctatgcggtaagggaaatatgtcaacatgtgatctgcttcaatatatctagaaactcagtcaagtttcactgatctatattattgagtcttttctctgcttttaaagatttcataaaacttctgatcatatcctcaaaattctctaatgaaaattgtcaatcattacatttctctcatgaggaatatatcatcaaacgaagaaaaattaggagaccaaaaccaaagttcatcttgtggacgtgaaactatattagtaattcattcctttctatagatactctaagtttaaatcttgttccttgcttgttatgaacttcttttgatcccttttattgtaatttttacagtctcatagtcttcgttgtactgaatccttc

SEQ ID NO: 32180 - DNA, 367 bp, Medicago truncatula
  Intron number 1 from transcript Medtr6g059570.1 (locus Med tr6g059570) derived from phytozome v7.0 (chr-ID MtChr6; po s 10805973 to 10806339)
ataaaggtacacccacacacgtcgaaatcaaatagtgtatatcttctaattatcatatgtagttatttttcttaataattattgtcatgtacaaaatcatgcctccattcaaaatgatacgtagcaaatcaggtagattaatttgtgattattacgtagatctatttataaacggtgttcttcatgagtatcttaggacactaagaaatattgttgtttatattgtaggtagaaaattgaatatgaatagaagattgtagtaacaaactatagatgacaattttgttaatttaatttttttatttttatttttattttttatgattgatcaggtcttggtcctattccaaaaaagtggaggggagtt

SEQ ID NO: 32181 - DNA, 901 bp, Medicago truncatula
  Intron number 1 from transcript Medtr7g010850.1 (locus Med tr7g010850) derived from phytozome v7.0 (chr-ID MtChr7; po s 2446979 to 2447879)
ggaataacacctctgctaagattgatcatcatcaagtatgtgctcgttttctttgtgttttgttcattttgggtaatgggtatgttgaaaaattgttaatttgagaaaatgacataattgaatgtaatccgatgcgtcggtgctaaagagttttctatctaatgttttcttggtttggggtactggatatgtgacaaaattgttcattttgtatccaatgttttctgagtaaatgtccacattggtaattgaaattgtataggacagcatcactctagttatttacattatcgatcctccaaaataatccacgaagttgcaaaattgaaaccaaattcatcgctctgtttgtagggactagaatgacattaagtttataatgttttttggtaaaccaaagatattctccgcgcataactgcactgactaatcccctcaaggtaactaagatccatttaaggggttgacctctttcaacaaatgtttttccatacgcattggtcagggatcaacccatagacaaaatggttagagatgtaatattaacgatggatttgaaactaagcgaattatgttaagagatgtatttgattacatattcagaatgagggacacatttattaacattttgcaattccatagatcttttggaatattgataatatgtggactaggtttgtgcagtcctacaatttgaagaccaatttgggtatttatttactcgatgttttttcatttggggtaatgggtatgtgtaaaaaatgttcattttgtttttaatgttgcagctatatggtttagttggtatgtgtcaaaattgttcatgccttaattttttttggggttgtcgtggatttttgttgcagcctgctagggtgattggaactgggacgtttggttg

SEQ ID NO: 32182 - DNA, 524 bp, Medicago truncatula
  Intron number 1 from transcript Medtr5g083060.1 (locus Med tr5g083060) derived from phytozome v7.0 (chr-ID MtChr5; po s 31450075 to 31450598 reverse strand)
gtagggtaagttctaaaatactctgttttctctctgttttttcctctgtttcttgtaacatgtgttatgttatatcattcaagttttagtatgttatttgtgttacataagtatgttgttttacaaggaacatgattttttcttttcatttttgtgtacatggttagtgttgcaagatatgttaagcaatttgctatatggttattaggtttattaagataattttaaattggaccgtgtcgcgatctttgatattatagagagcagtcgaatgatactaatgtgaccgtcttaacaacggttgcagagacatcaaaaactttatattgtgatactgatcgcatgccgtttgtttaaaaccatgattaagatacttaatctcctaaaattatagatagttgagagaaaaaatgtgtttttaatctttgttatctatcaagtgaaaatgattgaaagaaaccgtctcatataatggaattaatgtgacaaatattgtatgttctgtgtgattgattagtttggag

SEQ ID NO: 32183 - DNA, 910 bp, Medicago truncatula
  Intron number 1 from transcript Medtr7g047560.1 (locus Med tr7g047560) derived from phytozome v7.0 (chr-ID MtChr7; po s 11968397 to 11969306 reverse strand)
taatacttgctcaaaatcttcaggaaggaaagcttgtaagcctttgacttagattctattatttttcttctgataatctcgagttagattctttgttcagttagtttatattgtttgtatatcttataacatgattacattactttgtattttgcttgcatgcttttattatgacacaagatttgttggtcatagtttgtgggttagtagcattattgcctttactcgtctatgtcgctacatgttccataagtcctaggtcaactggcatgtcgaaattgttaggccggacgtcatgatcagagttcgaaccccggcacctccacttgtgtgtgtgagtttatgatgactttgtcatttcgcctatctaccaaaaaaggaaatttatgtcgctgcatggcttcatcgccaatttgaactttttctttcttaacttttttttttttttaaaaccaaaccagcaagtaattaacttgggtaagatagcatgtatcatgacatattggactaccaaaatggaagggcgattgatataaatgctctctaacaggggacttataattaagaaaaatgcacatggtaaactgcatatgagcttatatttagggacaaatttgtttggtaactcgcgcatgtgtattctctgcgtgagttaactcacgcaggtgtatttcttgatgggaatgagcaaaaacagatgggagaaaagcaattctcccaaatttgtagcctaatgaaactatgggctggtgcaacctgtttactcaattcggcccacttggcttggacaagttaggttaagcggcctgattagaaaactaagtaattattctgataaatgtgatataggagtctcacattacttagaaagtactatcatgcatactaatttggtttaattaattgatag

SEQ ID NO: 32184 - DNA, 905 bp, Medicago truncatula
  Intron number 3 from transcript Medtr4g136460.1 (locus Med tr4g136460) derived from phytozome v7.0 (chr-ID MtChr4; po s 33328648 to 33329552 reverse strand)
ttcgcaacactcgcaatattaggtaatgtatttctgacataatcctgatattcattttccattggagtttcataacaaatagcatgatttgtgaccatctatatacctgtttatcacaggccaaaagctgtggacttgaaccaatttgcatatgtaccaaaacaaagactagatgaatagctcatgggaattacttcaagttgtttaagaagaaatttccagttttgattcaggttaacgtcatccctcggatgccattctgccctagccaggacctgtactgagttaattcttatttggcagctgtaaattgtattcttaatccaaccactaatttacttgggatttgggaattagttgtcttaatgtgatcttcatgtaataccgcaaggcaaacttggttgaatttcattattaaacagtggaagcttcggtattagttgtatatcatgttgtatgtcaccatgcttggcatttttcacaattgatgctaattgaaaaatagaaacattaattttctatcactggttcatttttggtgttcagatagttttttgtcatttacaaattatgcaacatggtatttaccttcagattcattagtacctttcctccttttgatagggaggaaggttgagatagcaggttaaatgtcattgatgatcatgtgttttaaatcaatcaagaagctaaaactcattgatgtggctttgcaattcataaactgtgtggaaatagcttgcatgcagaacttgttttttgtgtatacatggcacatgtgattttaaaagcgccaaatagggattcattccattcacggatacatttaaatgaatgtcgatcgatggagtattaatggtttggggtttctcttttaacagctagttttagagaggtttctccaa

SEQ ID NO: 32185 - DNA, 533 bp, Medicago truncatula
  Intron number 1 from transcript Medtr7g065190.1 (locus Med tr7g065190) derived from phytozome v7.0 (chr-ID MtChr7; po s 13363190 to 13363722 reverse strand)
gttattgcctttggtatgatttcttttgtgatgccctttttatgttattgttgttgcttttattttcttatagagatggaacaactagggatcctcttcatttcacaaagaaatgaagagttctgttactatagtttttttgtgtataatagcacacatttctaaaacatgtggtatttattaagcatatatgttgatttatacacacaaaactatagtaacggtgctttcaattatttttttaaagaatggagaggatcctaacccgagatgggacaaaagcttgaaatattcaatgtcaattcgaattgtattttgggaagaatgggagatgatgtttttcttgaaatttttgtgtttcaatgcgttttagtatgtgtttgttgtggttaacaagaaaagtattgtttttttagtgattgttactatactgcatttggtttgatttcttaggtatttaccttttagcttcttaaaagtcctttgtgtgtcttccagagacagcactgaaacttgatacattggttggtgat

SEQ ID NO: 32186 - DNA, 1034 bp, Medicago truncatula
  Intron number 1 from transcript Medtr5g041570.1 (locus Med tr5g041570) derived from phytozome v7.0 (chr-ID MtChr5; po s 17827603 to 17828636 reverse strand)
tgaaatcctgtccgacttgcttattccaagttcaggtaatcctattgcatctattgttgaaagcagttacccaaatttgttaggaaacattggtaaagcagaatattttcaaagtagagcaatattggcaccaaagaatacaattgttgatcaggttaatgattatgtgttagacttgattcctgatgaggaaaaaatttatttgagttatgatacaccttatcgtgaaaacctagacggtgacacgatgaacgacatccatacgcctgagtttctcaacaccatttttgcgtccggattgtcaaatcataggattcgattgaaagtaggagtacctgtgatgttattgaggaccatagatcaaaatttgggcttatgtaacggtacaagattgattattacaaagattgggtaaatttgtgctcgaggcagaggtaatatctggatctaatataggtgaaaaagtgtttactccaaggttatcgctacgaccgtctgatactagaattccgttcaagtttaaacgaaggcagtttccgttgtctgtctcatttgcaatgactattaacaagagtcagggtcagtctttgaaaaatgttggtgtctatctaccgtctcctgttttttcacatggacaattgtacgtcgcaatattgagggttacttcgaggtatggtttcaagatattgatcaatgatgaggacggtcaagatactgatgtgacatcaaatgtggtctacagagaagttttccgtaatgtgtaacacttttttttttgttacaatgatgtgtagcactttgttttgtagtattgttgttatcagtactatttttatgtcgatagactttggattttcttttcttcaataacagggtcgatgtcatggaaattgtttaatatagtacattaaaaacgtttatggcaatttattttatgagttgaattatactattttttcgattcaagtagagtatttattcttatatttgcactatattttttttttgtatgatccgtgcgtcagcacgggtca

SEQ ID NO: 32187 - DNA, 732 bp, Medicago truncatula
  Intron number 1 from transcript Medtr4g031690.1 (locus Med tr4g031690) derived from phytozome v7.0 (chr-ID MtChr4; po s 7349198 to 7349929)
cctcaagcttcttctgaggtatacaaacataaatatcaatattatttttattattattataaactttatcattatttggattcgagttactttactactatcaaaatcatttggagtttagtacttttcattttttgtttgtacttgtattctttattttattaatctgttactttatcatcttaattaaccctaattatttataaacaaaccaaaaattcttggctagttgcatttttattaatatttttttgcaatcttagacacatgcattacacgacattttcttagatcatgataatgatgtttagtagttttttgtttttcttcattccaagtttttgtttgactaatttgattaagatagttgagtgcaaatcaagaaatttgaaatcaaccatgcttgtgcacgttgttattaatttaattgaataaaatccaatataactatataaaattggacaagattgcagattcaatgccatagtagttggcaggattgaattttccctatttaattatatttaattgaatcatagactaaaattttcatctatatattcatagtcctttgcctctattattcaattgaaagcaattgcaatagtaatagcaatagcataggattttaattttaattttaatagcaattagcaatggcattggatgatttagttccaatttcaactaattctaattctattgagcaggaaaaagtgattccttcaacag

SEQ ID NO: 32188 - DNA, 866 bp, Medicago truncatula
  Intron number 1 from transcript Medtr5g006190.1 (locus Med tr5g006190) derived from phytozome v7.0 (chr-ID MtChr5; po s 601436 to 602301 reverse strand)
tcaatctcaggttagcatttttttctttctgtttttcttgtaataatcagtgttttatcattcactgttatattattgttattgttattaattagttttagttaattttagtttttcattttgtggtgtttagaatttaactggattttggatctgtgaaattgtttatgtattatacgtagttagttatagtttgtttgattgtgaaagattctgccaaatggattgttttatcatgggtagtggaagaaggcttttggttttttttcaatgttgtttttattcgtagttattggaacgtacccactttttagttttaaatttgtcagattctcagtttaatgttaatttgaagctttgtattcctccacatccataggagtatattttttatgatttatgaagcagaagcaaatacatggacaccggatactgataataatttaagaaaatgaacgttattgaatgtaaccacgcatgacggtgtcagacaccgacatgcatcgacgacatacacactttcgataagaaatgtttgtgctacatagatcatgataggcagtattatggttaaatttgtctaataagggttatagaagttgttactgtgtttcatcacaaaaaaggttgaggtctaggaaggtgggggcggagaaggaaaattgctaggtaagaagcagaaatgattgacaatttgaacataaacaagtcatgacatgatcaatgttggcctgaagataaaacattgagtttgctagtcattgtcgaagttttgaatctatttgcaaacttggctcgccattatagttgaaaattctccagaaagtaaaattatgttcattgatgtctttattctgtagggcttc

SEQ ID NO: 32189 - DNA, 578 bp, Medicago truncatula
  Intron number 2 from transcript Medtr4g121890.1 (locus Med tr4g121890) derived from phytozome v7.0 (chr-ID MtChr4; po s 28724802 to 28725379 reverse strand)
agcagggggaagaactgctattcacaagctgcaaggtgtgtctttgaattttgattaaaaagtatttttagttttagatgatatggatttgtttactgtcggtgctactcaggaaaatttatgtcaacgtttcatcatcctattataaaaaatgagtcgtccgcggatatttattgcataacattgtagatatcatgtgaacaacattgcttcttatataaatcaactacaaatttccgtagaaatggaatgagttcagtgattgatgagtcatagtcttctacattgttaattaatcatatcagtgcaaaaaaaatatgagggaagaaaaggtctactggtgttttttttcattcttatcatgttaaatatagcaattgctcgatatagacatgcgaaagtgtgaatggcattcaaccaacagagtcagatattaattcagcgaaaactctgacaggatatggaaatatagaattttaaccaatatttctttgtaatgaggcaaaacgtaattttattactttctcttatttgcaattgtagacactttcgaaggcgccaaaagcaatacgaggagg

SEQ ID NO: 32190 - DNA, 212 bp, Medicago truncatula
  Intron number 2 from transcript Medtr5g079040.1 (locus Med tr5g079040) derived from phytozome v7.0 (chr-ID MtChr5; po s 29329182 to 29329393 reverse strand)
ggagattcaagcttcgtgttgttcgtttgtgggaggtgcgtgattttcttcaatcataacagatcaattcaattgagatggtgtttgttgatgagaaggtttgtattgctgtttgtttgcctttgattattattttggttaatttggttaatgattattgcttttcttttaaagcctttttgcctgttcatctttgaagggttgcaagatta

SEQ ID NO: 32191 - DNA, 698 bp, Medicago truncatula
  Intron number 1 from transcript Medtr5g094260.1 (locus Med tr5g094260) derived from phytozome v7.0 (chr-ID MtChr5; po s 37209332 to 37210029)
ttaacaagtgattctgattctgatgtaagttttatccctttttatctgcgagataggtttggtactttgagtgtatgcatttatgaggtctctttttgttatatttgttgctcagttgcttgtagtgatagagattttcaacgctgatctagtagctttttgtagcaatttttgtttgtttcgttttgttggttgactgattgtttattgagtaaatagccatctgggtccatgaatgtgttgggcgttttacaccgtccttgaattttcaaaattacaattgcaaaaaatcctcaaatatatctttcgtttggcgttttgatcctcaaacgtgtcttttgtttgtgaatatggtcgttaaatgtatcgaccattaatcgagagctgagacacatttatggatgtttatataaatttgatacagttaaggactttagcgatacggtctcgctcatttgaggactaaaatgactgtttactctttgtttatcctcattatttatctgtttatggtttttgatattataaatgcatgcggtatttttgtgttttcattgttggtgttattttgttgacaagataatttattttgagtattttattgttgattatctggaaaatgtaaatggtcgaatgtgttcttttgatggactaaattgatagattgcccttatcttcatatttctttctattccaga

SEQ ID NO: 32192 - DNA, 345 bp, Medicago truncatula
  Intron number 1 from transcript Medtr5g101620.1 (locus Med tr5g101620) derived from phytozome v7.0 (chr-ID MtChr5; po s 40674385 to 40674729 reverse strand)
tatctcggtatgttctcatttattactactttagttcactcgtgtcttcgttcttacaccaagatttcaaatgcatcacacccttttcttatcaatgaatttttcttcatttttagatcatgattcatgatggtgtgtcttttgatataataatatgtaaccaatctaacaagtaacaaactctgtgtttatttttttattgttgttaaatatgaaattttgttatttacatattctttgttctacttgtcaaaaaaaaatatattatttgttctatttttagcttatgtttttgtttgtgctttgtcaggataacgttggacagattgatcacttacacgacct

SEQ ID NO: 32193 - DNA, 970 bp, Medicago truncatula
  Intron number 1 from transcript Medtr4g143890.1 (locus Med tr4g143890) derived from phytozome v7.0 (chr-ID MtChr4; po s 36059675 to 36060644)
cattgaattggtgtgattcttatcacaagactcttgtcaataattactcaaagtcttttacatattttatgtttatcgttcaacaaagcttttaatttggttgactctctaaacatctatcctcaacactatctttaggtttggatgactaatctaatatttttctgtcgtttaaacttgttaagtttccttattttttttatttgatagcttaatacttatttcattcattttgctattaaattaggcacttttccaagcaggcagaaatttggtgaaagaacccttgttcatggctctggacagagatagctcagtttgttaaaaggaatacgtcaattgactttatgagtttgaaagtaacaatgctttgctgtctttttggtattttactgtgcaaattgcccttcaaatttttgctgtctactgaggtagtttacctatctttgtaaatttccttgttttggttttttgttttggctcatacaaaggctattgttcaactctctttcaatttttcgtcacttttcttaactttctctgcttctctacttataatacattgatattaaaaaaccgtgccttgatgccgtttattgatacatcaaattttagtctcacaattctctttttgaacaccaactacaaattacaaatcaattataactgagatattgttgtgtgtcagtcatgtgtttcggacaacctaacaaaactacgggatccatttcaaaattttaaaaatccaaaatattatggccattacattacggctgactggatgtgtactgtgtctcttctatggctacacaatcatagaagatttgggtttaatatgccaaaaagatttgaatttggcaactggttattttaaatatgaaaagtgtagtatcttgggcagaactgctaatttttttatttgttttcttgttactgatctatgaattggtagggttgcagaccccttgcc

SEQ ID NO: 32194 - DNA, 221 bp, Medicago truncatula
  Intron number 2 from transcript Medtr5g006900.1 (locus Med tr5g006900) derived from phytozome v7.0 (chr-ID MtChr5; po s 891195 to 891415)
ttggaagagtttctgattcaggtatgttctatgatacatgcaaagaaacttctatctcttcaaattatccaagtttctttgcatgaagatacatgcctaaaataattttgaaatgacataaaacataaatcagtgattttgttgatttgaacttctttgcttttgattgacctgcaatgcatctatctgttcttttcccccaactacagtttttcagccaa

SEQ ID NO: 32195 - DNA, 786 bp, Medicago truncatula
  Intron number 2 from transcript Medtr7g065340.1 (locus Med tr7g065340) derived from phytozome v7.0 (chr-ID MtChr7; po s 13418999 to 13419784 reverse strand)
gacaagagtttccttacacacattgtaatttctaggtaaatcctctaatctcaggttcctatttttctctagaagtttatgtagctattgaatggtgaaaagaaagaagtctgtgtactgttaggtgtgacacaatttatcattccatgattttaattattagataggagtttaatataagatattgaaaaaccagaatattgactatgtatagaactttaccacaatttataaattccaatttaatcccaaacttgcggtaaatagttaaattgctgaagaaaaatctgacatatccttgttattattgtactaaaaaggtcctgcaagttttcagttttccttgtcaatggctctttttccttattattttatttgataggaagtatgtgacaatggcaattaaactccattgagctttggatgctctattttattgattactctcaaatcctagtccaattacactagatcactagcttatataggaccacctcaattatactgtctgatgtgagttgctgcaccagtgacttatctgagtcactttcacacaaaaccgctctttaccatcttttcttaattttttgtctcctctcctttcctagaacatagtgaataccttcagtatcttctctttaactatgttagtccaagtaagcaccttaacatagtctctgtttatagcagatttttgttcattcaaatgcactttgccctgctgtttgtttgtttgctgccttgtacatgttcagattttgaattgttattgaatattttaggtat

SEQ ID NO: 32196 - DNA, 681 bp, Medicago truncatula; identical to SEQ ID NO: 30414
  Intron number 2 from transcript Medtr5g062450.1 (locus Med tr5g062450) derived from phytozome v7.0 (chr-ID MtChr5; po s 22006825 to 22007505 reverse strand)

SEQ ID NO: 32197 - DNA, 349 bp, Medicago truncatula
  Intron number 4 from transcript Medtr4g081580.2 (locus Med tr4g081580) derived from phytozome v7.0 (chr-ID MtChr4; po s 17083551 to 17083899)
ttctacgtgaggtatattttgtcattacatctttaatttttttctgagtctggatcgatagtggaaatatgattcaaatatacatgccaaactttgttaatttattggatattccttcacatctgctactttatgagaactcgtcctgtggcaggctacatatagaaagtagatatattatttctttgccaaatttttaccttcaaattttaaaggaaatttgttttccaaggatttacattttattttgcttccaattgtgtgtttatttcttatttgatcattctagctgttgtgctactgtcgttgtagttggttaaaagacatactttcttttcaggttttcatt

SEQ ID NO: 32198 - DNA, 693 bp, Medicago truncatula
  Intron number 2 from transcript Medtr5g014210.1 (locus Med tr5g014210) derived from phytozome v7.0 (chr-ID MtChr5; po s 4497512 to 4498204 reverse strand)
gcttctacaattctttgcacactagcaaaagaaatgttggaattttctatctcaaaactattaagcccaatagactttgagaaatacaacacactttgtatgatgagatttgtttggatcaaataaatacttaattctttgtttgagttttacaatagcaaattcgaaagagaagatccaagagatatagtgagggagcttggaatttgctttgtttgcagtgatgattttcacttagagagatattagcttgcaaaactctagcttatgaccttcaaagacccttgtatttataggtgaggagtgtcttggtgatcaagggagaaaatagagctgttggatgcgtttttgatagttgtccaaagtctcaattgatttttcttttcttctttaaaatagctagaatgttctcaaaatgttctttctgatttgcctggctttgaaagcactattgcttgcttgcgcgtgagagaaccagttgtaatgagttgtataacttgttgcgcactgctgatgatgtcatgtccttttgctttagtgatgtcatgcttaaataagtcatgtgatcttatccatgagatattaatgggctttcttttccaaatgggcttaaagcttttcttatggcccaatagacatttattaaaacataatcagccatgttttcttgctgtgcagacttgttcacttttg

SEQ ID NO: 32199 - DNA, 550 bp, Medicago truncatula
  Intron number 1 from transcript Medtr5g077560.1 (locus Med tr5g077560) derived from phytozome v7.0 (chr-ID MtChr5; po s 28592198 to 28592747 reverse strand)
aaatctgatttccaggtttgtatgatgaagatttgggtttgtttgagtttgatgaatttgtttttttttggagattttgattattattatttataaaaaatgataattatgttgacattttatattattgggactaatgtattcctattatgaaaaactgatactaataatgttctaatatagtaaggaatgttctactcactaacttcttaagttggagtttatccacaaaagcaattgcaagttgcatctcaatactgaaatccacacaggaaaatataataatgaataccttaggctgcacatgacatacaactctttggcacaaacacttagaaaccatagccaccacctatatatatatagttgtcaagtatgcctgcgttttcattatctccctcaggagtattggcaacctataactttatttgagattgatggagctactggtactcctataacgattgatgagaacactagaaaccatgcatttggtcattatgcgcgggtgctagttgatttggctggctttcttcctgacactttgttg

SEQ ID NO: 32200 - DNA, 1000 bp, Medicago truncatula
  Intron number 1 from transcript Medtr4g134690.1 (locus Med tr4g134690) derived from phytozome v7.0 (chr-ID MtChr4; po s 32529738 to 32530737 reverse strand)
cagctgaacgcgtgaactccgtttccagcatagaggtaacaacactctttcactttgtctcttcgattcgttcttgcgttttgtacgatgatgtttcctcgtcttttattccttaatcttcatgctttgacttgttttgaattgttttcaatcggtgattgcgatccaatttgtggatttatttggttttgcaatcgatttttcttgttacattcctagatctggtgattttatattgagattatgaaaaattgtttgaaaactcatgatattgtgatgttttagttctgttattatggatctgtttaagactattataagattcttaatgctcatctatttggtttaagggttgtgattttgtgtcataggagtgttaattgtgtgtaattgttacaaattttgttttggattttttttttattgtttgtggatttctctgatttgaattgtttcttgtatttatttgttttgattttgattaagtttgaattgtgatttccgattttcatgaatggccctgtatgcttttgttgtaattcatatgaaaatattatgtttgttgatcgagttttatttaattttgtttagtgcatgagcaatgatgtttctgaatatctcttattgatggatcatttttagggtttgtaattgtttagttgaataggagaaaaacagagtggtgcaccaattaattaaaattttatggtttgtttgtttattttcggatactgttagggttagggcacctttgcagtagataggataaggctttaccgatcttaaaaattgttagtttttctaacttgagattgattgttatgttggaggaacgattagttattaaaactgatattttcctgccaaaactacttatcatctgttgctcatatgattatgttgtgcattacattttcattgttttgagagtctgcaaagtgtttttaggtatttgcatttggtttttagtttaacatttcaaatgcatgtgtttcagaaa

SEQ ID NO: 32201 - DNA, 889 bp, Medicago truncatula
  Intron number 1 from transcript Medtr4g095360.1 (locus Med tr4g095360) derived from phytozome v7.0 (chr-ID MtChr4; po s 19815945 to 19816833)
ctcttgctgtgcttactctcctcttccttttcttggtttgaatttccttttacagttttttattttttgtacatttaaaatttatacattttttattttggtgaaaatatttataattatttatggatatagtctcaattataagtagagtttactttttatattcatttaataattaatgtatttggtctctgagaagtgaacttttgcttataattgagactgaatggtgtactttacaaatgtaaaacttttttagatgtgttttcaatcaaataatacaaaatagatatttgtaaagatattttataaactaaattcaaagaatgttattttagtgtaatttgattgaatgaatgtgtaaaaaaggtgtacacattcgatgtatgaaaattattctcatattttttagtaatattattggttatttaaaatgaaatataaaaaagtaaaatttacatttcttgatcaaatccttctttcatgaataatgtcaaacaataattttgtataattccataaatagtaagttattatagaaagtcatgaatttaatgcattgaaaattaaaatatatgattttttcaataaacattttgttttttttgaacaaataaataatttttcaataatttttttcaataaacattttgttaattaaggatctttaaagaatgtctttagaagacttgttaagaggactctaattttattggcattcttttgctaaaaacagaaacataattgatgttccctagaaaaaacattagtcttttttgtcaataaatctagagtttagaaattacgatgtactactaaccaccattttcctttttcttgtcttctcattataatccggagaagtttgctgctactatagaatcaagaa

SEQ ID NO: 32202 - DNA, 361 bp, Medicago truncatula
  Intron number 1 from transcript Medtr7g010800.1 (locus Med tr7g010800) derived from phytozome v7.0 (chr-ID MtChr7; po s 2423726 to 2424086)
gattagctattctcttcttgttataaggtttatgttaatttgtgtttatttgaatttgtacttttcaattttctgaatatcaaatgggacaatttcttctgtggaccgttgcttgaaaattgttcaaaaacactgatgacgacagaggtgccaccttccagaagtagcattttactgtcctcttcgtcctcgtgactaagaaggtgacttgatcattgccggtttgacaaaaacaaacgaaaacaaatatgagctgagttttgaggcacgcaaatttattttctattgttgtttccaaattgacatcaatcatagcactttctcaggcgttgcaataaggaggacaataaacttctacttc

SEQ ID NO: 32203 - DNA, 641 bp, Medicago truncatula
  Intron number 1 from transcript Medtr5g026340.1 (locus Med tr5g026340) derived from phytozome v7.0 (chr-ID MtChr5; po s 10620004 to 10620644)
taaagtttgaagtatgttagtagtaatttgctttttattttatgatgatctgctataaaacttcagtggataccttgcagcagaagagattttctataatcacgcgcgcggttaggatatcatggtcgatcgattaagattgaatagtcaaaattcaaactacgtgaatgttgaaccgttaactacatagaaatatccaaattccagtgtgaatgataatgtctcttttcgatagaaaactgtagttttctgttttgaataaaaaagaatatggcagataagaaaacctaatagagaaagaagtagatggataaatttgtgatatagtacttgggatttagaatttgaatcttttggtgccaaatctaaagaagtaatagcaatagaaaacctaatagaaagaagtatagatgaataaaaaatatttgatataggtagactacaataacaatagtggtgctacttgatttaatggttaaagatctacttttctatagtggaaaatttttatattttctcaccttaactgcagcctactggaaaatcagtgcagtttgtaatttaaataaattctatttttgttttctattagcttgactgacaaaagtttctttaggtgtggaatattggaaactaacatt

SEQ ID NO: 32204 - DNA, 722 bp, Medicago truncatula
  Intron number 2 from transcript Medtr7g037550.1 (locus Med tr7g037550) derived from phytozome v7.0 (chr-ID MtChr7; po s 8956157 to 8956878 reverse strand)
tttaggaaatattgtgttatttggtaggttgtaaaaagcagctaaaattgggaacttatgattattgcctagatcatttttacgaggttttaaattgtggttgtggctatgttgtgctgcttggaattgctgaaaattgtgataaatgtggttgcttttgtggtcacaattgctgtcgtgatgcgatcgctgctcagacctcaaatacattggtgttgcagaccacgatttaattcctatggaagaattttgtttagttgtaggagattgattcttgagtgctttatttattaggtagtatgattaacatgtagaccaaaatatgcatatctagctagctactttcatagccttggaattgctaacatgttgggccaaggtatttgattgaagctagggtcatatttatttttaaatggtttttaatctggatattttaagttcttcatggcagtagaattcaccatcctttttattagaataattgaaaaaccaagataagaagaaaaattaaaatttttgtctaaaagtggagaaatatgatatagaagatcccatacaagttatgaagctaacattgataatgattgtttgttgaggttattctataattgtttttttttattattacaacattcttggtactatttttgcccaaaattttatatttctatgaacacataataggtgcggtctttggcagcagaatctgatagggcata

SEQ ID NO: 32205 - DNA, 908 bp, Medicago truncatula
  Intron number 3 from transcript Medtr4g121930.1 (locus Med tr4g121930) derived from phytozome v7.0 (chr-ID MtChr4; po s 28753235 to 28754142 reverse strand)
gcatccagcttcaccggaacttaaggtcctgtcttattaattacggataaactaatgaaaatttgataatactgtatttgttagattgagacctgattttagttcatttggtagcaaacattaaataagaaccttaatttgcatgttacaatcacacctaagtgttgtaagctagttttgcgaatgattgcaaaaaacaaatcatgcttgtttgtgtatgtttaagtgagtgagagagagtaaataagatcttgcaccaaatcatcttttgcacacaaaaatagtaattttaatttgctactatatttattgggcactgctatttttcttatacaaaaggataacgttagtgggatagggcttgattgtttatgttgttgttgtaaaaggataacatttccggtgtataagaacttagttctgagagtattttatatatgtaaatcagaaaggaaataagttctgccagagaaagacagaaaattgagcatggaaatttgaaatagaattcacatgtagcacagaaactcaaataactgtatgtataagatctgagagtagtttcatagaagacagaaaacaatgaaagaaaatataaaattttaatttgagagtgcacgcatattaagaaaagaagactcaaatcaaattaattagccaaactgctgatttcccccatatgatatattgaacgaatgatcactgcattcaatatttttggcagataagagagttgcctcctagtactcaatgatgtttgtggacattttgaacaatgtctctcatgaatcactgttttctgcttatggtctggtacattgcatatttcatcaaaactaaactagttctatgtgttttgtttggaatatgcagtctgcttgtagagctgctgcaacttattgcaaaga

SEQ ID NO: 32206 - DNA, 534 bp, Medicago truncatula
  Intron number 2 from transcript Medtr4g097010.1 (locus Med tr4g097010) derived from phytozome v7.0 (chr-ID MtChr4; po s 20605879 to 20606412 reverse strand)
cgaagcttcgagaacaagtcgctcgccaacaacaggttcgttcgttaccagacaaattcttctttagatctttcgttcaaattcgtttcactttcttatggttttcatttgctacgattcgtttctgttttcgtcgaatttttgttattcttatcaatttttcatgattggaatttattttcggttacagaacattgtgattgtgaatccgcatattactattggatctaatcaaatttcacatttacatttcagaaatcaataaataaatgttatagattaagttgaatcttaactcttaagcttgtagctgatattgaaatcaatgagagatgcgtaattgcttagtatatataagtatttcgtcgtttaatatctgttaatcttgatttataagctttaattcatgtattttattttattttttctgattattgtcttagttgtttgatagatttgaatgctatgtgtgttgatgaaatcttgaattattgttattctaggctgttttgaagcagtttggaggtggcggtt

SEQ ID NO: 32207 - DNA, 778 bp, Medicago truncatula
  Intron number 1 from transcript Medtr7g006270.1 (locus Med tr7g006270) derived from phytozome v7.0 (chr-ID MtChr7; po s 968532 to 969309 reverse strand)
ctttcaattttgggtatgtaatgctacttgaaaagttatttttagtttagatttcaaaattctcaaactgtatagtatctcagtgcttctaaaaacaaattctttcaaatctcaatattcattcctaatttgtattccacaattgtcctgcaggtatctccagcttatgaaataattaacaaagtgacgtataaggtggcgaatttatagattggcaccaccaatatcaactgcacttttaacaatagatatcataattaaaaatttggatggcgaagatatgagaagggtgacctatatgaggagtaactagcaatattttgtattttttcccttacaatactttgtgtatggttaatagttaaaattatgcattgttagaatatattttttttggaaaaaaatatcaaatatatattttaaaaatatgaatttgcatgttaaacagcaaagttctggacagatcattgggtgcctcaatgtggaaagatgttgaattacactcacattcacctatcacatgatttgagttacacaattaattgttttcttactaataatgggggctgagatttgctttagccgaatcaagttttgcccgcgcatttagttgataaagtctgaaccttacatctccggtttagatgatgtcaatgatagccttgcttggacagagattacagattagtgacaacctctacaccaacaagttggcttactgcagaattttgcagatcggtcatcctcaaaattctcaacgtttttcgttgatttagag

SEQ ID NO: 32208 - DNA, 995 bp, Medicago truncatula
  Intron number 1 from transcript Medtr5g082590.1 (locus Med tr5g082590) derived from phytozome v7.0 (chr-ID MtChr5; po s 31113415 to 31114409)
caattttgttgaaggtaaaaatgttgaaatattaagagaaactccatagataatgttttaatttggtatttttggtaccctctacgtaattttataaaaaaaataaattgttttattatatgtcaatttacaatatcaatgcatcattaattatcttttggctaaattgcacttttgaccttccaactttcaataaccgtcgattttagccccaaattttcaaaatagcacttttggctcccggcttagcaacttttgcaaaatgatgccccgttgattttgaccaaaccaacacatacgtggacaacaaatttgacgatttggatgctacatatgtattttattatttggttaaattgcacttttgatccctcaacttacataaaccggcgattttaatttgaccccaacgccgacgttgacctggtcaaaatcaaggggggcatcaccttttcaaatgtggttaaacttggtgggactaaaagtgctattttaaaagtttaggggctaaaattgccggtttgtgaaatttaaggggtcaaaagtgcaatttaattagtctgaacttttttcaattataccatctaattttcattgcagcactttcaattcattatcttccacggtgaatagaccaatacttgatgagaatactttagtaaaaaaaaaaaaaaaaatctctctctttcacttgtacaaacttcccaattgcataaaattataaaaatgtcattcattatgagacaaaaggaatagtaacaaagaacaaattgtagaactcctacattttttatgtcttaacccatgccactttaccactcattcgaggacaagtccattctactcctaccctagtccacttctcctacattttaataatcgtcccatcatattctccttatactttatcttcttttcacattaggttattctcttttgtttatctttctttcataactcaaacaaagtcttaatgaaattgcagtggatattgc

SEQ ID NO: 32209 - DNA, 510 bp, Medicago truncatula
  Intron number 1 from transcript Medtr5g020490.1 (locus Med tr5g020490) derived from phytozome v7.0 (chr-ID MtChr5; po s 7752466 to 7752975)
ctgttgaagcagcaataaagaaataccaatttgatgtgagttatatgcaaatagtatactatatatataagtatggtcaaaatcataattagcatgctactatttatttatttatttatcgaacactttactaaaacgtgacaaaatttcacatgttttttttatcattaatttttatacatttttggttcgtttgttacatattataagaaaatgatttcaatacatttattaatttagattctttcaaaaaaaaacatttattaatttagatattattgtgaaaaatcactttttcaaataataatgaaaaatcactttttaactattttgagtttgttaccataataataattttttttttaaatatctttcgagaaaatgattcatttttcaagagactaatcaaatcaacttcatagtttaagcaattttatctatttttttcttcagacccttatattagttaatatgtcattaataatttttatgaaattattgcagattcaa

SEQ ID NO: 32210 - DNA, 1010 bp, Medicago truncatula
  Intron number 2 from transcript Medtr5g091270.1 (locus Med tr5g091270) derived from phytozome v7.0 (chr-ID MtChr5; po s 35693734 to 35694743 reverse strand)
gcaaggtatgtacgtgcatgtatattttttttttttgttttgaattagttgttatgattggtttaatttgaaatttgaagagaaattaagtgttggattggatgtggtttttgcagaagtaggagaaacattgagaatggcaacttggaaggcatgtataagctgactgctgggtgggagttacaacatcttaggatacatcttaccgcagtgtaggatttgattttgtttttcagtagcaattgatttgtgcttttttgttttcaatgttgattttagtcccgtagggatcagttcatttttgttataagaataattatcttatgagatgtcattgggggagtgattgcagtttctggttctataatgttttcatacagctttgtagtgtttcagataacgaagatgctataataatgtttgacaattttaaactttggtttccattattttactatattacatgatacttattttatgtgtttgatcttgatgaattgtttatggtgaaaatttaactttcacaatgcgtttatgagattgcatcagacccctatctattacagaaaaatagagattttctgcaattgaaaatgataggtaaatatattatattgtacttattttatgtgtttgatcttgttgaattgttcatggtgaaaatttaatatcacttgtcatattgcatttataagattgcatcagacccatatctattatagaaaaatagaggttttctgcaattgaaagttataggtaaatatataattgaaatatgaagagtataaaatcgactaaggaaagttattagaggactaaccaacgaaacttatttccaacataacttagtaattcatagtatcaacctaaccgtaatttttaagaatcaagatagtttgaaagattaaggtattaaaaaaaagtgtccaaaggggtccaccttttagttgtgtaacgtttttcaaacttgcattgttatttccaggaagaagaaaaagcaaagagtttgt

SEQ ID NO: 32211 - DNA, 1031 bp, Medicago truncatula
  Intron number 3 from transcript Medtr4g072910.1 (locus Med tr4g072910) derived from phytozome v7.0 (chr-ID MtChr4; po s 14207354 to 14208384)
gtccattttgctgcctctaccaaatttgacgaaaggtgaaatctaattttttataaaaaaaaaaaaaaaaaaaagagttaatataagagtttttctatttacaccccatgtttttctggttgcacccaaattttcttaaaaaaaaattataataccaaaattgcccttttatataaattttcttaaaaccctaattttattcattgtcagtgagtttcaccctcttttaccccacaaagcgattgatcaaacaatttgatgttcaatatcaatctccatgaaaattaaagagtgaaaatatttttcatccatactcaattggatataagtgagtgaatttcttcttctatttgctagtttcaattttttccttcaactgcactgatgcactgtaccattacggttttaatttacattggcaaggttaacttaaactcagtttaagtaggttcatgtaaacttagtttacatgaacctacttaaactgagtttacatgaaccttcttaaactgagttaacatgaacctacttaaactgagtttacatgaacatacttaaactgagtttacatgaacctacttaaattgagtttacatgaacctacttaaattgagtttacaaaatcgcagaactgtgaatcgcagaacaaggaaaacacaaaatcagaactgagaacccataacaagaaaaacacaatcgattgaagaacaacacttgctaacctgatttgcttcgaattttctttgaaatcatgaatggacgtgagaaagtatggttttgaaaatcttcgcagaacacaatcgatcgattggagaattatggttttggaagaagggttttggggtgtaaccaaaaaagaaggaataggctttttgaaaatcaaattttatgaaagggtaatcttgtcattttagggtgcaaccatgattaagtagggtgcaagtagaaaaactcttaatataattgttgtcaaatataaatttaattatttgagatataatatttcatttctctataggtttgacatatta

SEQ ID NO: 32212 - DNA, 553 bp, Medicago truncatula
  Intron number 1 from transcript Medtr7g008460.1 (locus Med tr7g008460) derived from phytozome v7.0 (chr-ID MtChr7; po s 1241657 to 1242209)
tggcttcgaggttcaatctctctttttcattttattttcttcttcgttatggtttttaactaactctgtagcactgacacctctgatcaaaggtgtgtcgtgtcatctacacacatctaatttgaaactgacacgaatatactgacatatgtgattacattaattgattcattttctcaaataattactgtcgtccactggtgtcagtgtcgtgaccagctttagtgcttcgtagcttttttagctttgaagcactaacacatctgatcaaagatgtgttcggtatctcacatgtgtcagtatgcaacaacacatgtgattaagttcaactaattcattttttttattcttcaaattattactgatgtgtccggtgtcaatgttgtggtgtccgtgagtgtctgtgtcagcgcttcttaggtttttagtgttggatccagattttatattctttggtttctggtttagttttaagttgaaaacatagaggcgttgttatgaatgtatatgattctgttgctctgtttttcatttgcaggtttcttcagctcct

SEQ ID NO: 32213 - DNA, 444 bp, Medicago truncatula
  Intron number 1 from transcript Medtr5g045110.1 (locus Med tr5g045110) derived from phytozome v7.0 (chr-ID MtChr5; po s 18821187 to 18821630 reverse strand)
agtagtgtcttcctcttatttggagttatctttttgactggttgggtaagtattaattttcctgtttctttctggctgtattgatacattgagttggatttagacaggatgattgacaatggttgtttatgattcttagtaccatgtattttttttttatgaatgatcaaagtctcaagcaattatgcggtgaaaaaccatgttaactgaagaagcttggttctggagcttctgtagatcgcgaggaaaccatccacaaacacacgtttggtgacggaaatacgctaccaaacagatacgtcctctaagaaatacgctttcagccttaaaattttgattaaactacctttgtatgttgtgttagttttaacttttaaagaatgtaattgtagacttaagtttcattcatgcaatctttgtgtggttggcttctacaggttgcaa

SEQ ID NO: 32214 - DNA, 439 bp, Medicago truncatula
  Intron number 1 from transcript Medtr5g010160.1 (locus Med tr5g010160) derived from phytozome v7.0 (chr-ID MtChr5; po s 2441266 to 2441704)
tgtctcagtaatttcaagggcttcaacttcatctggtttgctttctccaagaaaaaactagtctcagttgatatgtattattatagtataaggacatttttgtttgtatattgtatctagttttcatgttttcctctataataataataataatatgtctttggtttactaagcgtttgatccatgccacctcccttcttatcttccttatttttagtttttgataacaatcatttgactgattgtaagaaaatgttaaatgaactattaattaattaactaattgtttggattgaaactaataagttgttaaaaaattatacttagtcacttattttatctttatattcagtaaacatgtaattaagtaaatatgttctaatatctttcgatttcttttacctaatgacttaataatatgatgttagaagagttggta

SEQ ID NO: 32215 - DNA, 545 bp, Medicago truncatula
  Intron number 1 from transcript Medtr4g143990.1 (locus Med tr4g143990) derived from phytozome v7.0 (chr-ID MtChr4; po s 36098067 to 36098611 reverse strand)
tgtagtagaaggtaaagtacaattatatccctactcatgtctctttcaactttacatttttctgatttttttattttattttttgaatccctggtatggtaggtgtgtaattgtcagataagttgttacaattttgtgcgtgtgaagtaaaagacattcaatctatcaattttgacgtatgatgatattaattaataacaataaagtgtggcggtgatcttaattcaaagcagtatccttatttgggaagcttcataacttgttcaaaatggaggtagatagatacatatatgaatattcaattgaattgaattctaagcaaagttcataactaaccccaccttctgtttttttactatattttaaatatcattctgtattttacacttgtttctttgttttcttttcattttttttgacaattcagatttgatacttgattggttgcattgttgatttttcgcagatcgaaaacttatgattttctctcttgatttgatgaatttgtaggtgaaatcattgtgagggagtgaggtaggtggttg

SEQ ID NO: 32216 - DNA, 750 bp, Medicago truncatula
  Intron number 2 from transcript Medtr5g022500.1 (locus Med tr5g022500) derived from phytozome v7.0 (chr-ID MtChr5; po s 8775990 to 8776739)
tgttgatttcttacaccagcaatactttccccacggtttgtcattcttcccctttttcttttttttcctttttgaatttcaaattttcatttttgggtatttgggttgtgtttaaattcctggctttttcaattgattttttttttatttttgcttatttgtgttatttttaaattcctgtttttgagattttgaattgaaatattttatttttggttgtttgagttgtgtttaaattcctgttttttcaactttgaattgaaaattttgatttttccgtgtttgggttatatttaaattcttgtaaatttgaaatctggcatggagaatgctttgtaaggcaaccgagtatgtaaattatgatttggaatgatgggttggatattaatttaaaggttgaaatggatacaatgtgggattttggtttggaatttatatgtaattgggttgagtttgttgaatttaaaatttaggcgtttcgattatatttaagttcatgtaaatttcaattttggtatggaaaatactttgtaaggcaactgggtatgtaaattgtgatttgaaatgatacatttagtgtttggtgtaaaggttgaaatggatataatgtgagattttgggttcgagtttatgtgtgattgttggaattaaaagttgggttgagtttgtgttgacgatgatattgatttgtgaatttgctggattatcaatttattttattgaacttgctttttgattgaaaacaggatt

SEQ ID NO: 32217 - DNA, 645 bp, Medicago truncatula
  Intron number 2 from transcript Medtr4g079010.1 (locus Med tr4g079010) derived from phytozome v7.0 (chr-ID MtChr4; po s 15620374 to 15621018 reverse strand)
cttgcttgctccttaaaattgccactggtggactggtgagaaacattacattatatatttattcattttaaatcgaatcgattgtgtcggaagtgatggtaacatgactttccctcatgtttccctcttgaaaagaacctgaattccattcctgaagtcatccatttagttggcagaccaactcaaggattagctcatagcgcatccaaatgacttaaaccataggataccttataggagtctagtggaatgaaataccttaactatggtcgaaagttaaaaaatttcagtcacataatttttaagagctaggggtgataaagaaagtctcgtagacgactatccaaattttttaatgagatcaaatatttttaattcttaagtatcattttgaaaattcgttaatttctttcaaagaccaaattgttttatgcttatagtttcggtaacaaaatgtaaaataaagtcaaacagttttcatacgatttgtttcaaagtattattttagattcacatgttagttattacaatgattgttcttgccctattatgtaattaacttttcttttttagtgctgaattttagtattcatatgtatgtctattgcaggaaacatctgcattctcattgtcttctggtgtggg

SEQ ID NO: 32218 - DNA, 501 bp, Medicago truncatula
  Intron number 2 from transcript Medtr5g104100.1 (locus Med tr5g104100) derived from phytozome v7.0 (chr-ID MtChr5; po s 41740976 to 41741476)
ctattcctttaacaaagtccgtggtattggtctttttaaaatatcactccctattattcttttcatgtttaaatatgtatatggtccctgcaaatatatgccaccttttggttttagtcccggtaaatttttgttttttatccttgtaaatataccacttttctcttttttgttttaatctctgtaaaatttgttcttgttggaattagtccctgtaatatgtgtctaatatttgtttaagtccttctgttgtctgtattagagggcctaaaatcaaatactttgcatattatgggactaattccaacatgaacaaatttttaagaaactaaaacagaacatcaaaaatcaaaatataaaaggctgttcatcgctgtatcttcgtaaggatgaaaaaacaaaacttttacagggaccaaaaacatttaagctttcttttcatcaagttgtaacaaaaccaagagaaatttacagaaccttgttgattttgaaattgcagcc

SEQ ID NO: 32219 - DNA, 858 bp, Medicago truncatula
  Intron number 1 from transcript Medtr5g074910.1 (locus Med tr5g074910) derived from phytozome v7.0 (chr-ID MtChr5; po s 27139308 to 27140165 reverse strand)
tggaagagaaagagagggagtttgtgttttttcaacaatccatcatcaaaacaagctcttcaatagaaatcaaattgagtttttccttcgtttgaatcttgaaaagaaaaatttctaactccattgacttaagaggctcgatgatattaaacaaattcaacaattgaaaacttggcatgactaagtgaactcacatgcatgttgatattttcacccttaatatttcaaccagcgctccttaatggtatactctacacaaccagcacatattttatcaatcattggatattttcacccttaatatttgctataccatatgctgtttccttgatccaatgattgataaaatatgtgcaagatgtcatacctattgtccttctgcatgttgaaataatctgtgtttacattcataaaactataaaaactgaaacatgaatgctatatgtgccaaattattttcgggaaatttcacgagcgtgtgcatttgtttttttttttttgaaataagtaaatttattaaaaaccagatccctgttcaagacgaactgagaccagtgaaactgaggatacaaacgaaaggcgccatatataggcggaacacccgaaaaataaactccataaaaaatcctacacacaaacacctagtcaaaccctacctgacaacaccccccaaaataaacatcaccgcctaaaaacaaaccccttcacgaaaccaccactaaaactaaatccataacccatcgccactactcaacccaaaataaccccccctctaaatgaaacactccagccgcatcccataagttgagccactattctaaagatcaataagtttccaccacctgacaacctctagac

SEQ ID NO: 32220 - DNA, 466 bp, Medicago truncatula
  Intron number 1 from transcript Medtr5g075160.1 (locus Med tr5g075160) derived from phytozome v7.0 (chr-ID MtChr5; po s 27334264 to 27334729)
tgaggcgtaagtacatgttttctgttttctcggtcgccaagtttttagagctggatgaatactataattaagaagctggggttgatagtttaagtgagtttaaaagacaaacctatagaagaagaaaaaaagagggaacctttagggaatcagtaggctaaaggttgagggtttttgggataggttctagggtttcaaaacaccattcaaacatcttggatgtgaaatcattgagtctctttgacatcgaaagagattcggaaaaatagtaaagattaggatttgaaattgataatgaagaatcaaacttaaaacttcgaaatatacatacttttaaagttttaaactaagcatcaccggaacaactcaagtggatttacgcaccatattatatttatttgatacatgcatatccttttcctcttttattcctcatccttaattatttatttcggtttgttaaagt

SEQ ID NO: 32221 - DNA, 412 bp, Medicago truncatula
  Intron number 2 from transcript Medtr4g154690.1 (locus Med tr4g154690) derived from phytozome v7.0 (chr-ID MtChr4; po s 38039144 to 38039555 reverse strand)
gatcaggttcggccattgcgtttcttttttgttagcataaggaacttactttttattttgtcattagtacattcatttggctcttttgtccatgcttaccatattaatttctgtaagaatatgaaacctacttttctgctgcatcgaaggctacataatttagtgtgctttagttttgaattttaggagactcaaaattccatttatgttttgtgaaaacaagtttccataacattatttacaatgggtaaacaattcaccctgttgcttgaagaagccctcaatacaaccattcatatatatgcacaagatttacataataatccaggaaagtttatagaagagaaaatcataaaagaggaaactagcacaatacaaaatactctccccaaataggtgatactttccaaca

SEQ ID NO: 32222 - DNA, 981 bp, Medicago truncatula
  Intron number 1 from transcript Medtr4g041600.1 (locus Med tr4g041600) derived from phytozome v7.0 (chr-ID MtChr4; po s 9887094 to 9888074)
aaatacttcatacaactctactgaaaaattttcaggttagttaatcacactcaaatattatatcatattttagttcttacttctgaatttttttatttactattcttgatgaaaattcttctcatttcaatatttattcatcttctttttctttgtatccttgttctcaatactaaaaacaaaataaaagagaaaaactagaatatggaaagagatctgaagagtattctccaggctaaggcttgaagctttaacattttttaattatattattattacttttttttaataagttaagagtatttttttaagagattataagttaagagtattaacatgcacataaatggatacatactcataataatataatcttattattattttttattataattattccaattgtaaagaactctccaaaataattagtatcattctaaatttccaatgtccatggttgttataatagtaggatcagtaactcatgattataaaagccctaaaagaaaaaactcatgattaaaaataattctaaatttatttaatcataattattacttatttgtgccttgcttgcatttagagcaaaatagatttaaaactattgtgcaaaagatgtgaaatgagtgacttcaaagcattatatatctatctctttcttcaattctttgattagaattatagtaattacagttcaatcattattattaacactcactaacaaaattgacacttcaacgtcacctttcttttttgtcttacttcacactgtttttgtttctttatttgcattatttatttcataatgttatgttttatttttgtattttaataccagtgcatgttttctaggactgtgacctttttaccttcaatcatgtttcattgatcattaaacttcaaatttcatccatatccactcaaccaagtagctttatttcaggaccacggcgtggccacaattgacgccacagcagc

SEQ ID NO: 32223 - DNA, 811 bp, Medicago truncatula
  Intron number 1 from transcript Medtr6g070860.1 (locus Med tr6g070860) derived from phytozome v7.0 (chr-ID MtChr6; po s 13530901 to 13531711)
gacattggtgctccacacaaggttctggatgagtttttcataacattttcttaatggacaatcagagacgcgactctattcttcttagtattttctctcccttcccgtcatgtcttttcactttcccattaaacacttttctaggagccttcacatctttttcgatgttgtcctctccctggatgcctgcatctctacctgtaaattgcattcattcctttttgttgaaatttggggcctaactcatccttacaaaaccggcttgtaaggtgaggagtgcctcgtctttataaactcttctcaagagtgctatctatccgatgtgggactaaatccaccccctcaaagccaacacaatgaaggtgttggaggctgcaatgaaggctaaccaaagggcgcaatttaggcgactaggggcggaccgcaattaaggcagaatttccaacacttttcaattttctggatgaatggctattgtgtaatagccagattgattggtcgcgagaccgctggtactgaaatgatatttttccctttggtgctatatgttcaagaacaaatgtttttccctttcaataaatattgtctgtcttttgctgtataaactgtttgctagttacacatcatttcatcctactcctactcatggcattttaaattagaatggattgaaaaagcaaatctttgactttgtggattatttatcctttatccttagtctcatatctgtttggttttcttcaaatactaggtgggagtctttttttatggcagcacagcattcctcataggtcctaaaaggcaagtatcg

SEQ ID NO: 32224 - DNA, 947 bp, Medicago truncatula
  Intron number 1 from transcript Medtr6g014550.1 (locus Med tr6g014550) derived from phytozome v7.0 (chr-ID MtChr6; po s 3408348 to 3409294 reverse strand)
ttcctttgtagaaaaaggtctcacgccactcaaaggtactaagttgagttttttattcacaaagtatatatatatatatatatatatatatatatatatatatatatatatatatatatatattgtgattaatatttactttgatatactattagtgtaaaaagttttacggtgtcagcaaatcacaaccaatcatatgatttactttagaagtagttaagattaaagttcatattttctattatcttacaatatatcatgatttattgacagtgtaaaaaatctttacattaactatatatatgaattaaatttatatatatcttcgtgtgcgagataatcaacttactccaagagtaactctcgatatagtttcagttaatatatagctcaatgtcgacactaaatttcaataaagcaacactcaaattaaaaaatcttattgaatagatgacctccacaaatttgatcgataaaacttcaaaactaaaatttatacttcaataaatgacttttattcaatttataataccttatacatgcatgtttctgtcgaaaacaaaatatacacgtgtgtatgtatgtatgactttcaaatggccgtttctgagattcaggtggcctacggatgaacctacagtttgggccctaactaataagtacaaaaaaaaaattgaattcctaaagtgtaaaaataattttcttgaagatgatagtttttattatgttaggaaatgtacatcaattcctgatatgtcctttttaagttaaaatgtatatgattttagcatatcctaatatgttttttacccaatgaacccctagttttatatttttgacccaaattttaaacttattttttgggaccttgggacggtcgtcctcctcgccctgcctcagatacggccctccttcaagctattaactttgctacttttgatatgcag

SEQ ID NO: 32225 - DNA, 930 bp, Medicago truncatula
  Intron number 1 from transcript Medtr5g038990.1 (locus Med tr5g038990) derived from phytozome v7.0 (chr-ID MtChr5; po s 16468753 to 16469682)
acgggtcataactttgatcgactattttcagcaaagtaaacaactttaaagtgtttattgagcaaccatttaagtgaaatcatctcaaagaaatcaaacatgcgaaggagtcggattttagtgtataaacacatctacacactcctaattcatttctcaaattttgaatagtataatgaaactttaatctgttttctttttcttttcaaacggctcaatttagtttgactctataactagggtaacaaccccgatttaaaaaaaaaaatgctaaatttaggatgaaggaatcatgcctcagttaaagacatgttacttaatttctgatctaaaatctgactcccttatatgttcgatttcttttagataatttcttagatggttgctcaataggcaccttaaagttattcacttggctgaaaaaagttgatgaagttacgacctaatcatattctacacacaaaaagaattgatcagaaattacaacctaatcgggagcgagattgaggtaaacaactttctttcacttatccatccactagagctggtttctaggaacattaatcgagtccaaaattccaacaaaagcccaaagcccattgggtttcattttccatcccttacaaatactctcatagatatcatacttacaatacaacatcaatcttctctcaaacttctcaccatcaccaacccacaaaaacccaatcagcgccttcgcacacagcggcgccaccacaatccactaccaaattcaccaaacccctcagttcaataacgacgccttcttcaacaactagcggcggacccgtcatgaacctcatcaacaaatgcctctgtgtactctgcaataagcttaactgtatcacttccatggaataatatctctcccaaggaaaatccctcaacaacgaacaacaagaagttctc

SEQ ID NO: 32226 - DNA, 710 bp, Medicago truncatula
  Intron number 1 from transcript Medtr4g084330.1 (locus Med tr4g084330) derived from phytozome v7.0 (chr-ID MtChr4; po s 17715854 to 17716563 reverse strand)
ctagaattggttgttgttccaaaacgtcgtcgtaggtgtgattagcaccaccatgtgactttgttttgtggtacaaattatgaaagatcatgtccttttgtcgattcttagagatcatgggagcaccgttcattcaccggttcctcaaagagagacttccttccctaggaaatcaagaaattccttaaacctcaacaatttttcctccacatgtatcatcgtctttcattcaccagaacacgcaaggccataaccactaggcacaattctttcaacactcaattgtaccgtttggtgtccctaacccaaatggtatgctcgcaaacattttcatcctactcttgcaatagaatgtgcgccttgctcgagtaaaggaaaatatggataaattcttactgcaatcacgagccaaatcggggtcgttcaacacaattaatagacgactagtctaataaacatggtgtcaaatgttgcatcaagggaagagaaacattgagatgaggaggaaataatggaactcccccttcttatagtagacataagaaatatcatgtgtgtcggcacaacataagcatcatgacaaatctctaggtaaaacctcccccgtcattaatgaggaccattcaaaaagaaaatatataattatggcattccatggtccctcaagaagcctcctaagttggaatcttatgatggaatcagggactcag

SEQ ID NO: 32227 - DNA, 737 bp, Medicago truncatula
  Intron number 1 from transcript Medtr5g040320.1 (locus Med tr5g040320) derived from phytozome v7.0 (chr-ID MtChr5; po s 17197608 to 17198344 reverse strand)
gtaaatagatgtttataatgtatgctgaaccccttattggcaaatttaatttcactcatctaaaagtgactgattttgatttcacccatctaaaagtgactaattgttaagtgaaacaatcaaagaataaattaaatttgactcaagtgaataatcataaagtgaaacaattattttaagaaatgcatattttgttatggtgtttctttattctgcattatcattgaattattcatctatatgccaattgttaatctatggagtacttgacaatactgggttcacacaaaaaaaaatgttgttcactttatattaatcgactaaaagaagcttactagagaatgattattttagtttaccatcattgtaatttttctcaaaattatttctttattttattcagtttttatattttaaattatttcttcatttcattcagtttttatattttattcgattataaaacaaaattctatggcatattagtttgagaaattttttataatgaatcgctacaaacctatatgggccacataggaaatttaaagaaggctgaagttctccaattggaaatttgcttttcccacttcaaaaaatgcttaaaaacaccaggaaattactaatataatcccaacgacaattagcagccgccggttattgagcaacgacaattagctgccatcggttatcttacaacggtagttagcattggcgtatctctacagggttagaaggca

SEQ ID NO: 32228 - DNA, 408 bp, Medicago truncatula
  Intron number 2 from transcript Medtr5g006830.1 (locus Med tr5g006830) derived from phytozome v7.0 (chr-ID MtChr5; po s 859028 to 859435)
ttggaagagtttctaattctagtatgtatttatttcctcatataaatttgaagattattttagttcgatgttgtttgttattgttggatttagattgtgtgtcagcgtgcatgcagtcaaccacatcaagatcggctgtctagatttcaatgaaaattttgacttttttaaatctaaattagtgagcttgaaatccggactgtccaatattgatcggacgtgtctgaataaatgcagtcacaactccttgattatacacaacccaaatctgttttttttttcttttagtattactactattaagaggcaactgctttctgattttttaagtaatatatatgcacacatttatacaaataaaatacttactctgtgtgtccatgttattctcaacaggttttcaaccga

SEQ ID NO: 32229 - DNA, 694 bp, Medicago truncatula
  Intron number 2 from transcript Medtr6g012730.1 (locus Med tr6g012730) derived from phytozome v7.0 (chr-ID MtChr6; po s 2386281 to 2386974)
aaagtgacaacattatcttgatagcttggttgcaaacttagttaatgtgctacttctagtaccgttttgatagcttggttgcaaacttattttgagagttttcttgtgactctatgtattttgagagttgaacaatggttgtaaacttattgagagtttccttatgacttttatggtgatgaatgtatgtgatgagtatgaagacaattttttattgtatatttataatttccatcaagttcaatatggtttaatatagtaaatgcatttacaatcttaatataattaattaatgaaatctgatttgaaattgaatattaatcttttgtttgaattagtgagggaaataaatttatcactaaaccaaagattgtagtttgtgagggaattaagtttcatcacaatttatgccttcaaaatttgaaagggaaaaccaatccgtcattaattagtgacggaaataatggtaaaacatgatggaatactccctcactattagaaagggaacaagaatccctcactaattactgacagatttgtagtgagggattgtatccgtgtcaatattcttaagggattacccgtcgtcactaaattagtttgtgagggaattatggtagtttagtgacggatttctaccctctctaaaattgatttttctagtagtgagctatcactttcttactcacttcag

SEQ ID NO: 32230 - DNA, 1005 bp, Medicago truncatula
  Intron number 1 from transcript Medtr4g134090.1 (locus Med tr4g134090) derived from phytozome v7.0 (chr-ID MtChr4; po s 32275686 to 32276690)
aaagctaagctagaccgaagttttgttgtgacaagttcaactcaaatcacactagcacggttttgaattgctatcagtagcggtgattttcatttgtttttgaaccagtttgggaattttataatacgaccctgcatctttgcttttgagtaagatttgaggaaatcatttgcagtactaaaattggataaaaatataaccctgtacgtctgaaaaggtgaccaaacaatattagtggtaccaaaaagcaggataaaggaccctggtaccaaaaaacaatgttgtgtgaataatggattcgtcttggtttggctctacattgagaggaagactttgagtttcccttggatataggcaagcaaagcaatttctatagaagaagtaatacttaaacggattttgaaagaatttttatttttattttttaagatgaaacaagattgattagttctcccctccttatgaatgatgacagaatatggggatgaatagttaaacgaggagcgcctagaacattcttttcaacactcactttgatattaattatcgtacaacaaatgttttaggaggaaaaattatttgatcagggtcaaatataagatatagatacgtgacataaatccagttggacaatcatgtaatactcaagttacaacaattaccaaaagatgcaagtaagtaacaatagacacaatgttaacatcattagctcaacaagatacttccattggtttcacgtatttgtggaaaaacactccaatgattattattcataaatagaacagaagtatttaacacaaaagaacaaagaaaaaaagccaccaagttctgttttgatatctaagaaccatatggcgtaagacaagatggatcattgatgataaagccgttgaagtttaatgttttcaccatacacaacacaatggaagaggtgagggaaggggaattacaaaagaaaatcaaagtatagggaaaatttgttgcagagattcgagattcagctaa

SEQ ID NO: 32231 - DNA, 905 bp, Medicago truncatula
  Intron number 1 from transcript Medtr5g090350.1 (locus Med tr5g090350) derived from phytozome v7.0 (chr-ID MtChr5; po s 35245384 to 35246288 reverse strand)
cgcggtgatcacgagcttttcgtgagaggaaatcggtaatttgtttgttcatttcttgctgaaaattgaaaatcactcgtttcggtagttagttagttttgtaagagaagaaaaagacgaaaataagttgaatctgaagttgcattttcgaattcgtttctgaatttgttacttgagttttacgaactcactgatttcgtgtactgaaaattgaaaatcacttgtttcactacttagttagttctgtaagagaagaaaaagatggaaaaaagttgaatctgaagttgcgttttcgaatgcagttgtgaatttgttgctttgcattttatgaactcaatgatttcgtgtactgaaaattgaaaattacttgtttcaatacttggttagttctgtaagggaagaaaaagactgaaaaagttgaatttgaagatgctttttcgtatgcgtttgctaatttgttactttgagttttatgaactcactgattttgtgtactgaaaatttaaaatcacctgaaatcagtaaaaaagatttgattcagaagttgcgcggttgtgattttgttactttgtgttttatgaactcactgatttctggtattgaagactggaaatcactcgaaatcagtaaaaaaaaaagtcgaatctgaagtttaattttcgagtgaagttgtgaatttgtatgtaactttgcgttttatgaactcactgatttcgtgtactggaaattggaaatcacttgaaatctgtaaaaaaaaattgaaactgaagttttgaatttaaatgctgctgtgattttgttaatttgcgttttatgaactcaatgattttgattactgttttgtttaataagtgtattgatttgttacaggattatttggtcgattggtgcaagggtatttaaga

SEQ ID NO: 32232 - DNA, 701 bp, Medicago truncatula
  Intron number 2 from transcript Medtr4g128610.1 (locus Med tr4g128610) derived from phytozome v7.0 (chr-ID MtChr4; po s 30320575 to 30321275 reverse strand)
agcttgaattcaaaattaacccatttttaagcaaggtttttctttcactcttattctttgtttatacctgcccattttttctacgagtagttccaaaactatgtgaagaggttcacatgtatttttattaaataaatagtcaaagcctactgtaattgaagtttaatgaatatcccctttttgtttggtgaaaaatgccatattcatattatgaaaaccatgtaacctaatgaaagcatgctcattgtgaatgacttggaatggcatattgccggaaaatggttccggggtcggtggactctagaagattagaatcagtcaattgatatttatatattcatcaaaaatatatctagcaaggtttaatttttattatcttagttatttcctcctttcattttttgcatctctttaaactttaggtgcttttcgttttattctgtttaccgagacattggggaccctgtgaggaattatactagtgttataattatatttccactgtttttaagtgtatctgtctcttgatctatccattttatgattttatttagaatataaactcttattgttcatacctatatacaatagttttttttttattgtacttatttatgttgttctacttggatgtgaatgaagtccatattgtgttacaatttatttcatctcttgtgaaggttaaaaagggggaaatagtt

SEQ ID NO: 32233 - DNA, 794 bp, Medicago truncatula
  Intron number 1 from transcript Medtr5g027540.1 (locus Med tr5g027540) derived from phytozome v7.0 (chr-ID MtChr5; po s 11240635 to 11241428 reverse strand)
ggtcgttcgttcgatcgattgaaatcactcactctgtaagtaaacaacgttttcattctgtttcttagattattgtttttgattttttactttttctttctttctggaataatttattgttctgttttaccaattcctagttctctctgtagttatggctatcgagtaattcaatattgatgatatctattttgggcttgtctggataaacagcttattttcagcttatataacaaaagtgcttatcatgtttaagcttgcataagtttttttttcttttttctttttttatagcaaaaagtaaaataatgttcaattgaaaataagctgaaaaaagcttatgaaaaactgtcttaagctttttccataacttatgccactatataagctcaaataagtgaatccaaacatgcccatctttgaatggaaaattggttggttacccttaggcagatttgtatgcccccttttgatccatcaaagaaattatttctgctcttgtagtcaaaacaaagaaatttgctagctttaggatgctttcaccattcatttatcaatattttactctaattttacaatttgtatctcagtttccgcttatcttgattgaagttgtaatttttttttgtacaaaactcatgcactttttttgttgccatttgcccctaagtctctctttctgcgtctatttcatgatatttatcaaatatgaatcacttttttacgtgttttatttttgcttgtttgcatacagcatcaccatgaaaagaacaagggagtcaattgcctcttcc

SEQ ID NO: 32234 - DNA, 764 bp, Medicago truncatula
  Intron number 1 from transcript Medtr5g035580.2 (locus Med tr5g035580) derived from phytozome v7.0 (chr-ID MtChr5; po s 14701641 to 14702404)
agtccaatctctccaatcatattttagttacattggtactctcttttactccacctctacaattatttactgtttcatacatgtctttacaattttcaatttttacttgtttctggtggtagaaatgacatttggttcttgacaaaaaaaaaaaaaattggttatgaactttattttaattgtgatagaaagaaaatgaaagtttactagagtgaattcattttgggtgacacttaaaatattattttgaatttgtttagaatttttaaaaaaattcctaatgtcttctgtaatgtttatttgacgataaatattaacaaatgaccttaaaccatttgttaataaaataatataaataatttacattgttattataaaatcttaacttttttattccttaagaaattatcttgagacatttgtcagcaaaatccttactttattagtagaaatgagaaaggaagcaccacagtaaatgggccttctgtcttccattttccaacattttgatgtaactaattaaaacattactgcttttaacacccccatattaatacattttcatccgcttgcttttgatagtaaattaacgtttcttattctaaagtaggcctccaagtccaactttcatgtagctcaagggtccaacaaaatacacaacaatttccataaccaaattatttggttctatttatgtttgagatgactgattttgtttttctttctgtaaatgcaaagcagggtgaagaagaccaaagagagta

SEQ ID NO: 32235 - DNA, 819 bp, Medicago truncatula
  Intron number 1 from transcript Medtr4g144280.1 (locus Med tr4g144280) derived from phytozome v7.0 (chr-ID MtChr4; po s 36292462 to 36293280 reverse strand)
ttctttcttttcagcaggtccttgcttttctttctttttttctttttttttatctttcttaactataaataataaagtttcttctttttttttggttttagctcaagtttattatgtgggtcttggtaactaaattgttgtgtttttctctgttggattctagaaatttttaatttaacttaccaattttagagttaataccaatttagtttcccatgtaaaaaaaaaaaaaaaatttatagtttccaaaataagagaggtttaggcaatttggtcgttaatgatttctgtaattaaaaaggtttatgatagtactagttattcaacacaatttcataactaaattgaccaacccaaatggactaaatgatctaatatgatataagatttttaaaccctaaggtttggccttgtggcgtaggcttgcggcctagaagtgtgctcctctctaggtctcgggtccgaatcctgcatgtgccaacaattcccatgttgggccagtccttacaaggctttgctctggcttcaattgtgcttcctgcaaatggacggtgagattgatcctcaaattagtcgatacttgggctggattccaaaaaaaaattatataagattcttaattgcatgattatttcagggtttcgttaatttcatgaccaaattgttttacagttttaagaactaaaataattattctggtgaaatggaattctttggcatgtgtattgttgatattattgttttagtattgaagagtagtagtaattgtttgtatgactaactaggcgtatatgtctcttgttttgttttaccttatag

SEQ ID NO: 32236 - DNA, 513 bp, Medicago truncatula
  Intron number 1 from transcript Medtr4g101400.1 (locus Med tr4g101400) derived from phytozome v7.0 (chr-ID MtChr4; po s 22027411 to 22027923 reverse strand)
ctaccaaaagaaaggacaacttggactctccattggtaattctatatacagtctcccttctcactttaattctgtgatattagcatgccttttcttatatccatgattttgtgttaagatcacaagtagagttcatagtgtttttagtccctgttatgtaagttcaatctggccttctgtccttacaatttcacattcctccacttttagtccttagtggaatatttttcatatccgtgctagtaaaagcaagttattttgttttctcttttgtttttcttctctcttaaatgtatcaaatatcatttagaatgttcaatcagattgaagttttgtaatttgtaaatgctaataagtagtaagtggagctgatgtgctgtgctgtgtgcataacatatattcatagtaaattttgcaatacaaatagtgtcttgaaatttcatttttaatatggtttcctctatgtgattaaatcaagattgggaagaacacaaatagggcaacccgccgtct

SEQ ID NO: 32237 - DNA, 759 bp, Medicago truncatula; identical to SEQ ID NO: 30346
  Intron number 1 from transcript Medtr5g049370.1 (locus Med tr5g049370) derived from phytozome v7.0 (chr-ID MtChr5; po s 21110143 to 21110901)

SEQ ID NO: 32238 - DNA, 522 bp, Medicago truncatula
  Intron number 2 from transcript Medtr5g045940.1 (locus Med tr5g045940) derived from phytozome v7.0 (chr-ID MtChr5; po s 19288539 to 19289060 reverse strand)
gattcattcgaaggttttcatctttctctctctttcttgttatttatttatttattatgacatttattttactgaaatggtcaaattttcgttgaaaggggcaagcaaatctatgttattatatttaaattgagggataaattattattcattaaaccgacattaatgattgttttacaattgttctagttgattttgaactcagtcgaactaacatcgtgaagacaaatcaatgtcatttcattagcaataacaatataaaaaacatgttggaatttatgtttacccaaaagacttaaccgttaaccctagccgcatgttgtgggccaagaagcccccactcgaagaagaacacccccaaatccccatgtgctagggctgcctcacaagccctaacagcatttttttcaaattttgtagtaatagatagataaaagatgtccaattttgtagtaatcatgatgcatgttttacagtttctttagtttgtttttgactcctgttaagctgaaatttataggt

SEQ ID NO: 32239 - DNA, 680 bp, Medicago truncatula; identical to SEQ ID NO: 31172
  Intron number 1 from transcript Medtr4g087150.1 (locus Med tr4g087150) derived from phytozome v7.0 (chr-ID MtChr4; po s 18257841 to 18258520)

SEQ ID NO: 32240 - DNA, 620 bp, Medicago truncatula
  Intron number 1 from transcript Medtr4g101180.1 (locus Med tr4g101180) derived from phytozome v7.0 (chr-ID MtChr4; po s 21899302 to 21899921)
ttctactaaatcctcatttttctcctacattgccggtaactccccgtctagttgttttgttttgttttgagttgtaagggtttttaacttttaaaatctcaaactgtttatggcttttattcaaaattacaacttttattcatttcccataactgtcgtctttgaatgatttaatttgagctaaacttttcttctttttgttgatttgagctgcattctgtttgtttatgtactgtaccaagctttattttcagtttggtaaaaattgcggatcttgaaaattgtttcatgaaatatgcttaaaacatcataagttgtttgattttaacgctgattctcactgatttttgtgactgtatataaaaggtttagatttcattacgtgttaattttattttaaactttttttttttttttttggttatattggcctagtggccacacatgattaagctgctttttgaaaaatttgtaatttgcaatgtatttaaacactcatgctataagtgctcatccaaacaaggctttaagtcttttctgcagtgctttatatgctatagctactgattcagtttcctgatgtaggtttagggtttcttctgccacaccacacacattga

SEQ ID NO: 32241 - DNA, 748 bp, Medicago truncatula
  Intron number 1 from transcript Medtr7g093160.1 (locus Med tr7g093160) derived from phytozome v7.0 (chr-ID MtChr7; po s 20746544 to 20747291)
ttcgaattgcttgcaaggagtttggtgtctttcaggtaaaaattaatacacccttggtttgcatttcatgagaatttgaaatcacttgttctttttttgttcatatgacattgcaataaaataaaaaaaaactaacaactaaaagataatgtattactttttaaggggaaagagtgtgttttatcaatataagggataaaatgtttgatgacttgttaaaacatcctatgtttattttagtacatgtaaatgtacacgtgtattcatatattgttggatatcaaataaacacatttatattattatatacacacgtttgtatgtattaatttttattttattaatatagcatatgcttatactcatttttggaaaaaacaatatattcgtaataaaaaacattaaaaataatattttcaataattcttttataaaacataaatatttcaaccattcttatacttctgatttctcaggaccatttatttactatattttccccaaatcaagatacattgtatttgtcacctttgcttataaatgagccgaatataaagccaactaggattgttttctttgcactactaaatatagtaaggtacttgtcttgtcttctcttttcaaaatcaagatacactatatggtctacgttcattcgtctctgattttatggtcacttaatttcattcattggcaatatttattaaattaacatatatgacactcacattgttgtaggtaattaacc

SEQ ID NO: 32242 - DNA, 995 bp, Medicago truncatula
  Intron number 4 from transcript Medtr8g133340.1 (locus Med tr8g133340) derived from phytozome v7.0 (chr-ID MtChr8; po s 31738026 to 31739020 reverse strand)
ttgagttcttggttcacgcttctcctcctcctccagtatttaaggacatccttacaacaaaaagtaaaaataagttataaatatcattttatttttgggtgtgcttatcacatgtgtaagcaaggttaaaaagcagaagatttattaaaaatatgttatctatattttcgaaatattttatgagaccttaattttcaaacagagaagttatatcatctcccctctaaattctcttttttgtcctctcttcatcagggagatgagtgattttgaatccatttttgttgttcatctttgtacgtagttgtttgattttttttcactttttgaatcacttaaatagactttgaaaaattattgacaaggactttatgtatatttctaaaaagttagaatttacttatgtacttggcattctctctaagttctctttctctttcaatcatcaaagagggatggttttaaataatttttgacctagaatcacctctctgcgtcatttttttcttttctttcattctaaataatttttcacaaaggtttaagtaatttttcttttgcgttttttcgtgattttgtcatctgagtgtgccgtcttgtacggcgttgtttgatttcatatcttgttgcgatgttcgtctggttcctattgaaaaatacattcggtcaatcacaaatttaataatcaatgaattgggcgtcaatattgcagatctataagcatgggtattttggtgatttaaatttatcatattaggtatttattcgttatacgttgttaacttagatgttgtgagtttgtttgttgtttgaccatgttattgtatcttatgtattttatcaatttgaatgaataatattgttttgtttttgtcgaaaaaaggttagaatttatgtgtctttgttcggaggggttgaatcaatttttgttcttactaaactcatttagggttggcctagtggttgacttgggatcttggagtttgctcctccac

SEQ ID NO: 32243 - DNA, 491 bp, Medicago truncatula
  Intron number 1 from transcript Medtr8g026820.1 (locus Med tr8g026820) derived from phytozome v7.0 (chr-ID MtChr8; po s 5914110 to 5914600)
gatttgatctccaacaggacttttccctggtatttatttcttttcaattgttgtttttcaacacagttagtacgtctttgaattgacgttgagtttgacttaatcaaagtgattttgacataaactatacgttataactttacaaaatcatggtagcattgtgatttcatcaaactcgccgtgatttcaaatacagttacatctgatttcatgcatgtttggattggcggagagttttgatgaaatcactgtaacaccttgattttgttcaagctttaaatttaagtttttgcggaatatcagctattcgtcctgattgtgccaaactcaccgtcaatctaaacatgcacgaagtatgtatgctcaaatcgacaatattatttaattgattgtatacattcatctacatttgatgttttatctatatacttctttcattatctctctcttttatcttggctctcactagtttctggctgaagcaaaggaac

SEQ ID NO: 32244 - DNA, 350 bp, Medicago truncatula
  Intron number 1 from transcript Medtr7g139670.1 (locus Med tr7g139670) derived from phytozome v7.0 (chr-ID MtChr7; po s 33468636 to 33468985)
ggagataaatcttaccaggtactcttttcctccttgatttcattattattaattaattattcacaccataaactcatttaacaaacaattttttttttttttattcatttttactaaggcatgtctccatctaacaaactaactcaaatgcttctctttattttatatatatattttttttggaatccatttttttacaatgggtttgtcagaatcatatattgtaccaccaagtagcttttacaaaatcactgtgattgcacttattagtcctggcgtaaataaattaggtttaaaaagaagaacaaaaattataattttttttcttcttctaattacagaaatcagga

SEQ ID NO: 32245 - DNA, 327 bp, Medicago truncatula
  Intron number 1 from transcript Medtr8g133640.1 (locus Med tr8g133640) derived from phytozome v7.0 (chr-ID MtChr8; po s 31945818 to 31946144 reverse strand)
accaacaacaagggatcctaagaagtctcaaacaggtttgtttgtacatgtcatcccacaatcttaaatcttcagaattttttttatttttattttaaatattttcttactttttttaattattttcaaaactaaaaataaaacacttgttgtaattgtatgataattattcaaatagtattttgtcggttaatagtactattattccttataatttagaattgtacttttattaattgtactcttatagaatcaaaagaaattgtactttcaattccacattatttaattcatttttcattgtttacagaacaagagaggcgtata

SEQ ID NO: 32246 - DNA, 376 bp, Medicago truncatula
  Intron number 3 from transcript Medtr8g078920.1 (locus Med tr8g078920) derived from phytozome v7.0 (chr-ID MtChr8; po s 16258696 to 16259071 reverse strand)
atctactctattctatcttcaaaagatatttccaggtattgtttcttttctctttgatccccttttacaatatttatataattctttcagttgtaacagttagtgttagttgaatttcctctaattttttgtaagcattatttaaatattgtactctatcactgaaagaatcaacaatacaatcatttcattcgtcacagaattgaactttgctctcttcactcagaaaaacactaatacaatgttatatttcggtaagcaaaaattctgatactcatcatactgatatctagtattgtaacagcaacatttgattcctagctcaaagccacttaattatctttggtctatatttccaggaatttttaagggaacc

SEQ ID NO: 32247 - DNA, 707 bp, Medicago truncatula
  Intron number 1 from transcript Medtr8g044950.1 (locus Med tr8g044950) derived from phytozome v7.0 (chr-ID MtChr8; po s 10194934 to 10195640 reverse strand)
acaaacaggatctccatctcctttgccaaatccaggtaatattaattgtttgttttttaatttggatgcctttcaatgttgtaaattgcagactcatcaatcttaggaaagataattaattagttgcttgaggcacacttgtaggagatgtctcaagtcgcaattccaacgaattgagatgtttagacatcttcagatcttcactagctcctcttcataagccggcacgtcagaccaatgatgtaaatgcggaaatcagtggctcaagccactaagcttccctcagcttctactccccttatagaaatcatgcttgtgttttttgggccaaatgattgggccatctatcctgttggaccttggtgtcctatcttatacacatacataacatatacaaaaaaatctgtctattgtttcatattgttatgcaaaaaccacaagggaaggtctaatatatgagcaacaagaaaaatgtaaatacatattttaaacaaacaatgaacttgcaaaatatgttaatcaaattttttaataattatttaatcctaggcctccactctgtttttctagtttgatgcattcgaaaagttagaatctatagtatttgaaatgaattcagcctatatattaagaaagaaaaatgcaacatttttatatatgatagtattgcaggcaagcaggaaggggcaagtcataccaaaactttg

SEQ ID NO: 32248 - DNA, 397 bp, Medicago truncatula
  Intron number 1 from transcript Medtr8g068370.1 (locus Med tr8g068370) derived from phytozome v7.0 (chr-ID MtChr8; po s 13095314 to 13095710 reverse strand)
ttctcaatcacaaccctgccctgatcattgctcaggtcatctaaatcttctttttttctcttttctttttctaaatttttattttttcttccttgctgagttgaatcattaattattacaaagagggtattttatgagtttgcttctattgcatgcatgatcggttgaagtttctagaatctatgactttattttttgaatatgatagatctgttttcaaaaattgtaaaagaaaacaacgaaaaaaatattggatctgtattttcttatgtttagagtttaatttaaaatgaaaacagaaaatatgggaactaactgagacctttaatatttgatgcactttcaaatatttattcagtgtttgagttaacttggtgtaatatttattcagtgtgtg

SEQ ID NO: 32249 - DNA, 789 bp, Medicago truncatula
  Intron number 1 from transcript Medtr8g115360.1 (locus Med tr8g115360) derived from phytozome v7.0 (chr-ID MtChr8; po s 25885786 to 25886574)
ctattaataataaaccatctgagtatttgatgtttttcttctgttagtggccgttggtgttaattgattttagttggctttggtttattttttctggtgtactactatgtaatgtcagcgcctgttctttagtttgggagctagtgtttgaagcaatagtatgctttgttgggttctagtgtactgccaatgctattttggttcctgctatatttttacccctttctatattttagctttagcactagttgggaggtggactgttcggtttggttttttacggttcctggagtattttagtttgtattcggtgttccgcctttgtacggcgttgatttgtttgtcctttatcgttttatccgcgagtggtacagttgtggtataactcgacgtgaataaattttggtgattaaatatatatatatatatatatatatatatatatatatatatatatattcagtgagttttgtttgtggtgatgatgttgaggagctcgtatgttgctttttggttggtttgtcacccttcctggtggttttcatggtggtgttaatattgggtcttttgtggtggtgttcgtggtggtttttggtggtgatgctcgtggtggctggtgttggttttttatggtgatgctcgtggtgtttggtgcttgtttttggtgaggattaatggtggtttttgtggtggttaatggtagttttggtggtggtggtggtgcttgtggtggttatgctttttatgggttttcttctatgagtttgttgttgaggggttttcagatac

SEQ ID NO: 32250 - DNA, 425 bp, Medicago truncatula
  Intron number 2 from transcript Medtr7g135060.1 (locus Med tr7g135060) derived from phytozome v7.0 (chr-ID MtChr7; po s 32045440 to 32045864 reverse strand)
gaatagtagctgtaactgtgaaggtataacttgtttgactttgcttttattgattatattgctctcttttttcaatttgtatatgggaggagttccaatgttcctatcatacgactcttcttaatcatcagccatttagagagatcttacttttgctttgatcatattgagctcctcaaccgatatcaatggacaacatttaaaggttccatgatatgctaatgcggctatatactcttaaaattagggttgctttgaatatatggttgttgagtacgagagatatgcagctaaaatatgaaagacttaaacaagtgaaaccatttcctttttcatttgaattcaacttgtttttttaattttatgtacttggataattgttattttggaatttaattctttatctatttcacaaggtagctgcc

SEQ ID NO: 32251 - DNA, 431 bp, Medicago truncatula
  Intron number 1 from transcript Medtr7g135060.1 (locus Med tr7g135060) derived from phytozome v7.0 (chr-ID MtChr7; po s 32045868 to 32046298 reverse strand)
aagtaaatttggatttatgtttatgtagttttcaatattttcttctttagatgttgtgttgaatgtgtggtaagcttagaagagatacggttagaaatgacaacattagatagagagttgagtaacacctataatagaaaagacggtggaaactaggtttagttggtttgggcatgcagtgagatgacctgtacattttgtagcaaggagcataaatcagatggagcgtagtcgccagatcactagagacagaggaacacctagaaaaattacgagagaaactattaagaaaatgctttagatagaaatatgatatagagtattatgatgtcgtttgatccatgtagctgaccccaattagtggtataagacttggttgttgttgttgttcaaataattctaactctgttttggtcctgaccagattgcaa

SEQ ID NO: 32252 - DNA, 261 bp, Medicago truncatula
  Intron number 2 from transcript Medtr8g005470.1 (locus Med tr8g005470) derived from phytozome v7.0 (chr-ID MtChr8; po s 286763 to 287023 reverse strand)
ttcataacactcgttctagtggtagaccaccaaattaatttgagttacattggttggtttcgtttctttccttgctctcttttggtttttttgttgctttttattttattttatttccttgctttgtttttcttgtttttcttttttcttttatgagaaggttttggtttatgttccccttcttcttttgttcttgttttttttttttatatctatatatttttaggaagttgcaattggttcaccatctgcacctctttt

SEQ ID NO: 32253 - DNA, 812 bp, Medicago truncatula
  Intron number 2 from transcript Medtr7g135450.1 (locus Med tr7g135450) derived from phytozome v7.0 (chr-ID MtChr7; po s 32211430 to 32212241)
gaaacttttgaacaggttggtcattttcttggtttatttttttatttataggtgtgtcataattataacattttcttggtttattttcatggaatttgtttttctgataagcttgttgtgtctttttgctagcaacaaattgaaacgagttatgtaattagatcaatttatgtttttgtttgttttgaactgaattatataaaatacaaatgaatttgattttttatttagcatacttttggtatatgtaacaatgaataatctgttggttggtatagacgaagacacttatttataggcttttctcgttccatgaaacacaagttctcattgatgctacatgctcctcctttgcttggtgttttcgttttcgatggaaaacgcagggtgcaattcattgtggtcttccataaaagaaaaatattccattgcttaatatatatttattttttcttgaaaaagaattgtttaatacttaggaagctttaatttatcacctatatatcaatgtttataagatgctatttttatgtgtcatgatttgacagaaattgtatgccactaaaatttggatagaagtttagattttgatcaaactcattaacctctaaatcttcatttcagggatgccgtagcctctgcctttgttcgttcttttgctctcaattgaaaaaaagcatctctttttccttttttttttttttttttttgatacttaacttgaatttatcttactgtatttagataaatcatttactatttttgctttacactttttttgtagaaactcatctttgataaaccacctccaa

SEQ ID NO: 32254 - DNA, 949 bp, Medicago truncatula
  Intron number 4 from transcript Medtr8g146410.1 (locus Med tr8g146410) derived from phytozome v7.0 (chr-ID MtChr8; po s 35783591 to 35784539)
ggagcgaagaaattgaaacgtaagttttctttttggttgagatgacagattctgtgggagtatattatacttctgcaaatatgtcagcattcaaaaacacaattacggttgtgtgcatattttacaacttacagttttggatgcggaagcaatgttgataatctagatcagtaatttgtccattgaattttttgaggttaccggcacagtaacacttaacaaaagccattgcaaagatttacagcatggtaaatttatttttgacacaccaaagatgagttcatcataaagcatattcaataccaagtctcaacaaacatgaaagacttgataacagcgttatgaactatgaagttgttcgataactgtaaatgctaggaatgttttgtcacacaagtattggggtctgacactctggtttaccattacatgcatgttagcatctcaattttctagattccgccctctcagccatagggttatgatatctgggaaggagttgggttgattctagaatccaacacttaaaacaaaaatggaaacaatatcaatatttgaacataagttgttgctggcttgctgctttctcttatgtctgaaatgatttccattccgtgtctcacgtccaatgttgagaatcctcgtaagtatcaaatgcccaactggcttttcactgattgtgacctgtgaacgttaaccttgctcaggatagattatgcaattattgttgtaccttgctcgtatattctatttgatgtcagttgtgcatcatgtgagtgtaactgatcaaattactagttaaatatagattggagtagtagcatttttggttaagtacatcagggcaccatatcttcattttagaaaacattacttgtcatttttctgatatgctccttactcttcaagacaacattatgcaggatatctgtcacttttgttgataagg

SEQ ID NO: 32255 - DNA, 1012 bp, Medicago truncatula
  Intron number 1 from transcript Medtr7g138870.1 (locus Med tr7g138870) derived from phytozome v7.0 (chr-ID MtChr7; po s 33047998 to 33049009 reverse strand)
attattatatctctagatttcaggttcttctatttctttactaccacttttctacctttctctctgtatcccctaatttactttaagcaatccataatattttatgagtcgagtttgtaaaaatgtcaagagttactaattataaaacattaaagatcacttttttattttattttatatatatagatgtaggagagactagagaataatacttttgtttgagtggtgtttgatgtgggctattgacatgatactgatgtaggatcagtggattactaaacgcctgttgggatagatttaattgagaggatttacggtttgtgagattgtttaatagaatttaggaggttcttttgagattcttattttcataagctcttcaaatggcatctgaaaataccaaacttatataaaaacagtttgactttattttatcttttgctataagcacttgattaaggtattttttaagaactcgaactagcccaccgaaattgacacaagaatatcgaatctctcagtttgagaggaacacactccggtcccaagacgacaccaccaggccaacccaagtgggtttaacacttgattgacttgtttatttaaggagtctaaatcaaaagaggaaaccttatgggttgatcagttaattctagaagcaagcatgactcagtttaatatagattgacatgttgtgcattttgttagggagtaattttgattattgaatatgttagggtgaagttctcttattttgggtctgcatcaactttagaatagtatgacatcataatggtcatgaatgaagaaattaatctgttttcctttcttttagctacatatcattcctaaagtatgaccctactcagattgaatcgtatcgtgaagctacaatataatattttgaaacagaattctttgtttatgactttatgtaaaatgaagtggaaagttgctgtatagatctgaataacataattgcttttggtccgtatcacaggaaccaggcaaa

SEQ ID NO: 32256 - DNA, 119 bp, Medicago truncatula
  Intron number 2 from transcript Medtr8g139920.2 (locus Med tr8g139920) derived from phytozome v7.0 (chr-ID MtChr8; po s 34267086 to 34267204 reverse strand)
tctccaaggtccgtttatttactcaattttgattataataatccatctttgttttcttcaataaaatagtaactttctttcctaatttcatgcagttagaggttttcagaaagacgctt

SEQ ID NO: 32257 - DNA, 913 bp, Medicago truncatula
  Intron number 1 from transcript Medtr8g043950.1 (locus Med tr8g043950) derived from phytozome v7.0 (chr-ID MtChr8; po s 9653527 to 9654439 reverse strand)
tggttcaaaggttgaagttttatcactattatttttttttttggtcaagaacactaattattttttttattttacgtaaatgtggcttgcaagttatatgtggctcatatagtctagctccattttttatggaccctgtatattcaattcctttaaaaaattatggctcaaatttttagacttaaaccctccatttttttggactttatgtgacactatttgatatttaaccagcatagtgctaataaccctctcttttcaaaattaacactcactttttattaaataaaactcattaatattaaaactttaaattagttataaataatttcaacttcatttgggttggtttggtggtgagtggtgttgggttcggaccttggaggatacttatctcaagttccattcttcctaatgccttttttagtgggctggtttgtcttcttaaaaaaaaattgaggaaatttttttttttttatcacgcaaaatagttttgcatgtctttttttttttaaggagttttgtatgtctattcactaacatatcagtatttacatatttgtataggccataaaaaaaattacatatttgtataggtattttagagaattatattatgattatttaaataagggaaatgttaaccggtacctccggacactggttaaggaatcaaatctagtaagttttatattaaaacttgtgttgtcaactcctaaaaaatataaaaagtgttattttcattttaaaatttcttttttttagtttccttaaccagtgcccgggggcaccagctaacataaccctttaaataaataagatttgagcttttatttgtcgtagatgagtcaaatatagtttaatgttgcgacaatgaatgcaggttgtttcacgttgatctttttgatcaaac

SEQ ID NO: 32258 - DNA, 702 bp, Medicago truncatula
  Intron number 1 from transcript Medtr7g126780.2 (locus Med tr7g126780) derived from phytozome v7.0 (chr-ID MtChr7; po s 29525614 to 29526315 reverse strand)
aagaagaaactaaacgtcttgctaccattcgtgaggtttatattttcaacctttttttttttttttttagatttatcttgaatttcattttcactcaaactttgaaaccctttttatttttggaaaaaaaatattaatttttttgaaaaaaataaattgaccaaacataagtacaaaaatttaaggattcaatacgaggaagtagttgttgtgttggaatctggtgaacaagagtttgttggaataaattaaattttattttatttatttatattttctttaattgaactatttatttatttttgcaaaaacaacaaggtacttgggtcattttcttgcatattattcttaataaatcaagttttgttgtaataattagattaatttaggcttgtagaacatgcagagcacttgattaagcccgatctgttgttttgttctaaaaacagagtgaatttgaattcaaaaataattatatttttcttttctcttgtcttttatgattcccctggatttgttcttgtcagaaagtagtattagtatatgaaacaaataattaataatttgtctttaaataatatattcatccattaatttttttttccttccataagcatgttgatatattgatatgtaattgaacaaattgcaaactttttgttatttgaggaatatcaggagcttgaagcccttgcagatcca

SEQ ID NO: 32259 - DNA, 867 bp, Medicago truncatula
  Intron number 1 from transcript Medtr8g043170.1 (locus Med tr8g043170) derived from phytozome v7.0 (chr-ID MtChr8; po s 9233929 to 9234795 reverse strand)
gattcgcctcaatctgctaatcaccgaacatcaaggtaattcaaaaacacaaatcaataactctcttattttttttattttgggattttttttggatttcttcaaaattgggaaatctgaacattgtaagtaatctgtgcattgccgatggggattttgttgttatgtgtatctggtttgtgcattgccgatttgaatttcattgagtcatgttttaaagttttgagcgtcacactatgcatgaaactgaaatgtaagcatatgcttcttagatagccttttattctttcgattatatcgaagatactattggtttttgactaaaccatcaatttagtttctaaactatcaccctttattcaatttagtattaaatatgataggtaatgctatataaaatctgtcaatttagtctcttttttaagttgttagctttaaagcacggacactcccctgattatgtgtgtctcagtgtcagacacacgtccgtttccgacacagacatgataccgacacctatagttacactgaattatgtcatttctcaaattattatctgtgtcagagtgtcagtgtccgtatcgggtccaatgtttgtgcctttgtcggtgctttataggttgccagggactaattgacaaattcttctacactttaaggactacttattggatggatttatacaatttagggactaaattggaaaaaagtgttattgtttatggacttgggtgatcgtttattcattgattttcatttctacgtatgcatgcatgctgcagactaagaacttgatgatagtggtaaggatatttttgacaatttttgttgttatttgtgttcaatggatacagcttcagtaacaaa

SEQ ID NO: 32260 - DNA, 969 bp, Medicago truncatula
  Intron number 1 from transcript Medtr8g102350.1 (locus Med tr8g102350) derived from phytozome v7.0 (chr-ID MtChr8; po s 22444265 to 22445233 reverse strand)
aacattgcttcagttcggtctaccatctcggtccggtaagatcactacttttgatcaatattcatttgaaacatgaaaattgctcttctccctttcgtttttgctcattcccttaattcggcgtgagttaactcacactgacacttttaagattagttcaatcactttttaagttggttaaacaaattataatagagtcagtatgagttaatttctgttaaaaaatatcaattgtgagttaacagagataataaacaattttaaaagggaaaaaagctattttcttgaaacatagggcaaagccccttgtggacttgattataccttgacataacggacccatatatggtcggtgatcttatgttattccaaacttaaagacaaaagcatcagcataatattgattttgatttagtcgtccctttctctttttttttctttttccgcttgatcaaaaagactcattctccttttcccactagctttatcctaaaacttgcccatcaattttgaaactgaaacagaaacactgcgaatgtgaaaattccaccagtactaactactacatttaacgtcaaaaaaaaactactacatggtccatgtattgatacaacggaatttgaaacctacatcaataaaaaaaattatttttaaacatttaaaaaatgaagagtatttaactcatactcaactaactttcgtttttattgttaatattttttttgagaggttgtattgtcaatatatatttgagttgtacatctctccaaatcaatatgatatttttttcattagcacttgttaatactattttcataagaactttcctcaatactcttttttgagtaattgcaaattgaagaaaatagacaacaatgcttgactttttaaactttttttgacatattttaagtacagtagtatatttataatttaataattacatgaattataccctcaagttcctaa

SEQ ID NO: 32261 - DNA, 823 bp, Medicago truncatula
  Intron number 7 from transcript Medtr8g078080.3 (locus Med tr8g078080) derived from phytozome v7.0 (chr-ID MtChr8; po s 15714559 to 15715381)
gagctagtttggtaggattctttgacaattcttaattcaaaagaaaatggaaaattggaaagacacgtcttacttgagaatgtttgaaaaatttcatattaaatattttatttggtatactaatccaacaacagggtgattgattaccttgcgaagtagttttgatggtcaaattccttctttcatgaaggtattttaagtttgaaatattaaatgatatcaggcaatttttcatggcatatatttctgtttatcaatgaaaaaaatagttttaaattttgttaaaagtatttttagaagtcaaggggaggggatgtaggttcccaattttcttggttcgaacttatattataatgccagagtctatacaaacatttccctctctctcccctgcttcttcaaaaaaaaataaaaaattccctcctcctcattaaagcaggttatttgggggagcattgtctctatggactccagttcactctttagcaaggttaatttatctgaagggattcgaggcctcttttaacctatgcattcaatttctgtgtatttggttttgacataggggtttctcgtcgtccactatagtgcacttcagtatactatattacttatcacttgtaaatttttattttgaacggctgtaaattacttctatttgttgattatatgaagttacaattttgatctctgtttctctccaactgttttatggactctagtctgtacatactatttgatgcattaatttatgttgctaacaagatgtatagtcaatactttgattgttctgttgagattagaaattacttctgccttgcag

SEQ ID NO: 32262 - DNA, 830 bp, Medicago truncatula
  Intron number 14 from transcript Medtr8g078080.3 (locus Me dtr8g078080) derived from phytozome v7.0 (chr-ID MtChr8; p os 15718591 to 15719420)
gtgttggctgacaatctacaggtcactatctctctcacctctgttctgttcattggatcagtgtttaataaattgtgatggtttgtagcttatattgtagttgccactttaggattcttttgttggctctatcttgtttagtgttttaaattatatttattcaattgaatatttttgtaataatctgacatacgtagtgcagtaatgacttgttaaatttgaaaaaacatagattagtttcttagaattatttttatacacggtcagtgattggtgcgcagggtatgtgagtgttgtatacttcagggtattgactttgatacctactgataaaaaataagtgtaaacatttcgacacatgcatccaatcatatctcaacatgtagatatttgaggagataaagtgaatcttggtgtaatttgatgtgacacacgtgttaaaatgttttaaagtgtcagtgcatagatattaatctcttaatttcttatatcattgttgctgtttagttttcaaatcaaacaacgacttgtataaatatcttattctaattcagaaacttattctcaatggaggctatttaatgtcaggaaaaaaaatccacaagtcattgtttgaattgaaaacttggacaagaaacttggtctaagtttaatcctatggatttctcaatcactactataatcttaattttgcagcattgcatacttgagctatatccgacattgtaattgttaatttgacatctgattttggatttgattcgagtatttaatctgaatgtcactctttttcagctattgtcaattctaacactggccgatcttattcc

SEQ ID NO: 32263 - DNA, 1028 bp, Medicago truncatula
  Intron number 1 from transcript Medtr8g101550.1 (locus Med tr8g101550) derived from phytozome v7.0 (chr-ID MtChr8; po s 22048841 to 22049868 reverse strand)
tctgctaccgtgtctgtaaccatgccatttgttctctgctttttgtctgcttataatcatatgcaaagacgaggtgatattgtattttttgcctctttctgatgtaaactagtactccaggaactcactcttaatcatttagcaaatcttattaaatttttatttataagtgatatggtatgagatgaattgttacggaagcttttcttgttaatactacacccaattttcttttcttcttctagactagataagtgaagatggcagaccatcaaccagttcaacctacgagtcagtcattttttcaaaccaaacagtcaaacactgggaaaatttgttgagtgacgtaacatgttcaatgctcacgataggcaaggctttaaaacaacatatatcatccttgaattttttcattcatgcccttttgagaacataacgctcttagcaatgaatgcattctaatttattaattttctttactgatcttgatttcataactattgattctgcacttcctgactgtctttgtatggtttggaactatggccatgttttgattttcatgtttcaagacaaattttgatgtgaaaatagaagttgcaaagtgtatcttcgcatacaacgcacgcccacactcttgtcatggtacaaacaaacaggttattactgtgttgttcaaacttcaatgccaataaacaagaaccaagaaagtagtaaggcttaccaaagcataagtacttttgttcaccatttcaacagcaccccaaactcgggatctcctctaagaacaatattttatttttttgttaaaaactaacttcctatccactatagcattttgaattattagctagacaattttcaaaggtgtaaaagtcaactcaaagttttttttttttaagagtagtcaaccaatgctagttaactttgaagaataatttactagtacatttcatgtatctcaatataatctcaatccctatgcagtaccaggcatcggtaccacacagaaatcataagaactccct

SEQ ID NO: 32264 - DNA, 1047 bp, Medicago truncatula
  Intron number 1 from transcript Medtr8g109600.1 (locus Med tr8g109600) derived from phytozome v7.0 (chr-ID MtChr8; po s 24622772 to 24623818)
tcctcctgtcatcatttccataatcccttcttcaggtctgtctgcacttcacatttttttgtcaattgttatcttcatttgattcaattcaattttgattaaaaaccattctatgttgcttgcttaaaaattgggggaaacttgaacctataaatctaaaatttgggggaacttggtgaaaatcaagagctactttggtattcaatagtttttatgctaagaaagagaatagttaactggtttatcaaatttctctgtacatggaaaatgaaataaaatgtaagatatttctctaatcttgaaaggctattcatgcagtttgaacatttgaaacacaaaccactttttacgagcttaatattctcttcaagttcaacagtcctagctttatttgactggtttacactttggtgttttatgttattatttgtattttcaattgtttgcatttttattaatagtttgcatttagttagtatttgtgtttcaccgttacttcaatattttgctttgatgaataaatgttgtcatgttgcaaagatagtgatattttctttctttctaagccctttttaatggaagcaatactattaagaattttcagtcgtactcataacatcaatgcatgttggtctctcatcagtcaaagcaaagagctgtccagtctcagtagtttgtgcaattgttattatctgcgttttacagttagttcaatagtttgcattaaaagcattggttagttttgtcgctccctcaatattttaggcaagatctgccactctgtttccacatattcttcaacctccctgccccggcccggcaaaacaatatatccacctctaactgggaacttgcttttcaggacaatcactccatgcatggggaccacgttctagaaagttttttttttttttttaattaaaaaaagggaaagaacaaattgaaaataaaaacctaggtaaaggggaaacaaggtgcatggatgctaacactggtttggtttttttcacagacatctctctgcatcggtgttaccagcaagaagaa

SEQ ID NO: 32265 - DNA, 396 bp, Medicago truncatula
  Intron number 1 from transcript Medtr7g134490.1 (locus Med tr7g134490) derived from phytozome v7.0 (chr-ID MtChr7; po s 31786442 to 31786837)
gagacgtcaggtgtctattgaaatatattgcaagctagtaatcgatggcataggggacacatttacaaaccaatatgagttgacaaaattgctctatgataaataaatgctcgttttcaacacttttcaaactttaagataagtttagttagaagacaagttgatttcgttacccatcactaacaaaaaactgtcaaaattttatgctaaccgtcatatctttgattttatttcatcttgtatttctcacatcctgattaatgaaataatctaacaagattatttcattgaaatacaagattaatgaaataaccttttaaaattttcatatatataatattatgatcattatttttcaattttcagattaaaattttacatctgagacagtcacat

SEQ ID NO: 32266 - DNA, 483 bp, Medicago truncatula
  Intron number 2 from transcript Medtr7g104820.3 (locus Med tr7g104820) derived from phytozome v7.0 (chr-ID MtChr7; po s 23896634 to 23897116)
aattgcttgaacttttgggaaaactcaaacaagaggttctttttttattcatagaacaaattttcatgtttctagtgttgttaaagggtttaagaaactgtctgcaattgtaattatggttgcgattcactgtgtcaaggtttttgatgtctctttgagaccacaacttcaattataagctaattattatgcatttgactgcaatttttcataataccaattatggttttaaattggggttgatgtattgtggcaaaatgttgagacctaaaatcctgtatgttgtcgttgcaattggaggtgcggactgcaatttgaaatcaagataccaactttcgcaatgcaaccaactaggataaaaccttgattttgttttacttttaattttattcttgtctccatgttttgaacaagaatttgtatttaaaagatgggttttttgtttctatttgggaactttgtgtttgtttctttcaaaatagg

SEQ ID NO: 32267 - DNA, 414 bp, Medicago truncatula
  Intron number 2 from transcript Medtr8g112550.1 (locus Med tr8g112550) derived from phytozome v7.0 (chr-ID MtChr8; po s 25286756 to 25287169 reverse strand)
attgagccatcaaataacaggttagagattcagaaattgttttttttgttaatacagtatattgaacttccattctttcactgttttcctttgaagaagttttctgaaatgatgtgataaatttgatttatttacttggtttgggtatgaatactgaatatataactatctatttgttttctttgattgaattttgaagctgttaataacttcatctggcagtaattgttactactacttgtcgcaaaatcacgaattttagatttagccataactgcttagaagtagcagtgatggtagtgacagtgatagtagtagtcatgataccaatagcatagtttttgtggaacaacatatttggttttggactcaatatgtgtacgcttgattgacctcaggtctgatcctggtaca

SEQ ID NO: 32268 - DNA, 699 bp, Medicago truncatula
  Intron number 1 from transcript Medtr8g146360.1 (locus Med tr8g146360) derived from phytozome v7.0 (chr-ID MtChr8; po s 35760230 to 35760928)
aagttaatttggagttttggaaggccttgtttcctgtaagcatgcaaactcttttggtttcttttttcttaattttattgcttttcacatcatatgataaaattgattttataagcttcaaattgattcttatttatatgtatgaatgtttctgagtacagttaattttcactttagaattaagtgtgtttctgccgtgataaaattgattttgagtgaattggttatgtaagtttgattcttgctaaaagtaggctgaaaaataaatgaggtaaaaaacttggagttctaattaatttgagaggcataatcaattctattagacaatatctagatatataaaaatcaatcatataattctagaatcaatttttattggttggccaaagtatcccaagtagaaagtaagagactaatccttcaagatacggagatctacgggagcttacctcttttaaaaagtgctctaccatgaccacatgcttaagggacacatttatcttctaaatgtgccacactatgttagttctagaattaattttttcctctccgaaattgtagccaaacatagactatattaaagctagaatatgagacttttgcatcaagtaagattcttgcttttgaaatacggaaatattgatttagtactgaatggagaatttaaactgcaggttgctgtggcacatacaattgggc

SEQ ID NO: 32269 - DNA, 723 bp, Medicago truncatula
  Intron number 2 from transcript Medtr8g076970.1 (locus Med tr8g076970) derived from phytozome v7.0 (chr-ID MtChr8; po s 15233570 to 15234292)
tggtggccttttctgcaactctaaatagatatgattaaaggctacatacataagattgaagtgtgtaacgcacttaatgctgaaatgtggggcatgcatcttggtttggatatggcttgacgagggcgtattctgcaactcattgtggaaagtgattctaattttttttagtaatatgactacatataattgcaagtttagtggtcggtttccacattggtgcagcgtattcacaatcttttgactttgtatgatgcgtccaatttcttcatagatggaggaagacaatcaatgtgctgatttaccaactaattttagccaatctttagactctttaaattatactagaatgtagactctgcctaataaacttcatagatttatttttgatgatatcttcaaggttcgcatgtcaaaaaatgttaagctaatttcttaatttttatgttggacctttgaatctctttaatttggtaaaaataaataataaaaaatcaacaattgtattcaattattgatccaagagaatttacaaacacgttgtttccggctgtcaaaagaagcttagaagcacgttggcttccaaatttcgctcaacttaacaattttaaaagaagaaaacataacaatttttctcattccttttttattaatacataatatattttctttttaaaaatttcaagctcatttcagttctttgggatttggataaaaacaagg

SEQ ID NO: 32270 - DNA, 878 bp, Medicago truncatula
  Intron number 1 from transcript Medtr8g137370.1 (locus Med tr8g137370) derived from phytozome v7.0 (chr-ID MtChr8; po s 32916012 to 32916889 reverse strand)
tcacgtgtggtggcattttgcttgctaatctatccgtttaaatgcctatttaattgatcaaccaaatggtcaaaagaaaaccaaagatgttgtgaaataaaataaatgagagcaaaattgagtataaaattaagagtaatgagatgaaactgtgagataaaaatttattattcctcaaattatagcagccattttgtttgctctgtctacgattgatttgtaacattcagttgttcccttttctttttatgaatgaatgaatattcaacgatattctaaaagaaaaaagtttatttgtatttacggtagtacttgcatgaaagttggcaaatgagactgatcggataattttgttatcaaacaaaaccttaaacctaggggaccgatcattttgagcaatttggaggtcttgtttggggggtggcagagtttttgagtgtcgagtaaaagtggtttgtttgttagcattttgggcaatccggaaggctagaaatatgacagtgtttcacggtaaggaagtgagggcggaaaatttgtttcgaagagataaaaaaattgtcttagaactggttgaaaatcatcaaattaaatagtatcaactggaattggactctccgaagcatggacacctttaagattaggcatgttcttgtgtcgaacagcaaaacatgtgtttacattcaattaactcattttctcaagttatcacatgtgtcaatgttaatcagttcaaatatgatttagattgtggaaatttgtacaacgtgatatcagtttttccaactggtacatcaattctgctttccttgctgattcgttgatctcaaaagcattttggatcaggatttgcaaactggaaggattggcaacaattcttt

SEQ ID NO: 32271 - DNA, 744 bp, Medicago truncatula
  Intron number 1 from transcript Medtr8g021690.2 (locus Med tr8g021690) derived from phytozome v7.0 (chr-ID MtChr8; po s 4108612 to 4109355 reverse strand)
ggctcttaaattgattagtgctacaagtgctggtaacaataacttctctctcactacatagatatatcataaaactcataacaagtgtcccattaatttatgcaaaaatgattgtcattataaatatattattattagttttttttttcttcttctttttgttaaaaaacaaatacttattttctttctaattctaccatctaattagtagaactatgttataacccaaaagaattagtagcactatgtagatcactctcaagtcattatatttttattaataacgatggacaaagatgcaagtcaaaaaaataaaataaaataaacttttggtaaaattagtattcttttttttttaatcaaataacttaatggttagaaataagactattgtatgtaatttgtcttatattcataaaggaattaatttcctagtttcccaccttatgagctctaactatgtcttccaccagcatcaacaaccctttaattgataatctattaacaattattagaaaaaaaattccaaattatttcacttatatcagtacaactcagacttaagccggatcgatgaaaataaatttagattgagtttagatttagtagggaaaaaatgagctataaaaaactttagatttacaatagctataactaggttgttaatttgagaatcatgatttcagtattcattttgaaatttttgtaggaagtggaaaaggaaaagtgggaaagcaaacattc

SEQ ID NO: 32272 - DNA, 984 bp, Medicago truncatula
  Intron number 1 from transcript Medtr7g094440.1 (locus Med tr7g094440) derived from phytozome v7.0 (chr-ID MtChr7; po s 21416609 to 21417592 reverse strand)
cttctgaccatgtcaatcttgatctcactcttcacctttgaaaaagttttcatttttttaaggtttttgtcttttggtttttttttttttactacaaaaaaaaaaaaaaaaacattatccttttctgttatgtttgttttatgggtctttattaattttaggttttggggtataattagtggttagtactatgagaaacttgttggaaatagagagggttttctctctctctcttttctgttatggattatgatgaaaggaatcttagggtttaattttgttctttaagtgttgaactgttcggttcaaatcttatgctgtatgttaccagattttgttttaaccttaattttctgttcatgttaatgtcattttgtttatctttctttgttgttcatgtttctttacttccaccacgttaagttagttatgttaactgatgcatttaaacacaagaatttttatctctagtattcattatgagaaactttgttggtaatggtaaagaggtaaataactttttgtgtgaccattttgttggtagttaaaagaaattttgcatttactacatgtactccatttgatttggaatcgtactatagtgtctgtcaattattctcatttcacatgaaccatcaatcactttaatcataaaaacaaatgttgaacgtccatccatttgtttggttgattgattttgatgggatagacttaagttgagttaatcaatgaatattcacttgtctctcttctcaacctatagtaattaatttccattttggcataaaaattggtaatcaaattttaatataaaacatatgatgtgattatgacaagatgaagcccacggtttcaaatcatcaagtggtttcctactcagaaagtgaatgtgatgagacctttggtattttgatctttatgctattttttagttttgttattgttgaagcctaaagaaggaccttctcaacgtatttcattttt

SEQ ID NO: 32273 - DNA, 541 bp, Medicago truncatula
  Intron number 3 from transcript Medtr7g123880.1 (locus Med tr7g123880) derived from phytozome v7.0 (chr-ID MtChr7; po s 28929176 to 28929716 reverse strand)
ccttatttctgcattccaaaacaattcgtctgccggtaaaaccaatctgttcatttccttaactagttttctaaaatcttgggtttgtttactttctaaaagtgttgttcagttttcattttttaaaatttgtcttcgttttaaattgctaggaaagagggtgaaattctcatgtaatgaacaactgtgatagagaaaagatggaaggcaagataagaataatgtatttttagaacaatgagtacagtgttttaaataattgtagaagaaaatattaaatctatgtttgttagttgaaggggaaatgaaaacaagaaacatgagaagtaaatgggtcccaagcttttctcattttgaagtgtggattgtcggtagacatgaaattgttgtatatggacatccaataaaataactaccattgcattaatttctttttaatatgttatttgtaataaagcaaacatcgattctatttctgtaacatggtatcagcatattattttcaggagaatttctacgcccttttgggcaagattgcgga

SEQ ID NO: 32274 - DNA, 767 bp, Medicago truncatula
  Intron number 2 from transcript Medtr7g120710.1 (locus Med tr7g120710) derived from phytozome v7.0 (chr-ID MtChr7; po s 28243719 to 28244485 reverse strand)
tgtcacaaacaaccgtctctctgttggcaaacgtcagtatctacacacacatatcatacacttctttctcacatgcatatgagttagcttagttagttttatttctgttatattttgttactttattattcatcctatatataatccttcatttgtaatcttttttgttcaaccaattgatcaatgatatgagtttattcagaaagtttactcttcattcatcaagcaatatagatgttttgagatggttgacagtcatattaagcaagaataacattgtaagtgacagcaactcgcttattatatgctaagtctaaataaaaaatcaaatatgttatcaaatcctatcttagatttgttggaccacctgcagatgtttaggcatgtaaactttacgctccagatgtcgtgttttggatgtgagcacattggttagtgcaatgatataaacgatgattataagtgaggggacaacccctcattccgtgagctaacttcggaggttgagttaactccaaaaccaaattctaacagaaatttccaaaataaattatccgctacatttgtgtcagtgactattggaattttttattgggttactcaaccttacaaaatcaacttgtaaagtgagaggtgcctctttttataaaactaattttagattttatctcttttcaaacgagacttggattttccctaatacttacctccctttctcttcttctggagaagggaatttgcagtactaatcagcaacaaccacagaa

SEQ ID NO: 32275 - DNA, 824 bp, Medicago truncatula
  Intron number 1 from transcript Medtr8g122540.1 (locus Med tr8g122540) derived from phytozome v7.0 (chr-ID MtChr8; po s 28728970 to 28729793)
caagtgaccaaatcagtgctcctaattcatttcctgttagtatttgatttccttcatcttctttttcttttgttccttcttgttatgccattttttctttcttttttgttcttcttttcttcccctatattatattataagctagttttggatttttttttaagatgattttccaataaggcctcttagactttcattatacttaggacatgtttagattgacttatgaaactgtttgagagagcttgtgaaaacaactttgacctgcctataagttgttttgagtttttttttcttttgttttaaattcttctctaattatcttttttataaatttgaaattgattttttcttgtatgcttcttctgtatctttggttgaagagaggctgcaaatgaaattatgatttttaagggttgcttgaccttgaaattctcttagagatgattttcaaaggctatagatgatgttagcctttgatataagatgtgattagtctctagggatgtatttgttagcacaaattgttgataagataaatgtaaattggagtgtttaattaattgcattcattttctaattataataactttgtgtacattttagctggaaataggctataagtatatccaaagcttttgatagttactgttataggctagaattctaatttgcttctgcttgttttgccttagtttggcttcggtgtaattctcttgtgtacatgggtttaggtcccaaaatcctgactttttagtgttttttgtgccttatcaaaaaaaaaaaaagctggaaagcatttgtgaggatacagagattgcaga

SEQ ID NO: 32276 - DNA, 363 bp, Medicago truncatula
  Intron number 1 from transcript Medtr8g145100.1 (locus Med tr8g145100) derived from phytozome v7.0 (chr-ID MtChr8; po s 35208270 to 35208632)
aacatcaacaacaaaacctccatcaacatcttcaggttctctactttgattctcttctctctactgctctattttctatttacttctattctctctaatgttttgttcttctcccttgaatatcttcttttctctttaattttctcttttgtttcacaaaaaatgtttactttcttctttataagattgtttgtattaatgattgtttttagcatatgtaaacaataaaccctagatttattttttctttttatttataataccaacctcttgttaatgttttattattgtttcttttgttaatagttatgcctccaattgaagaaagtgttactagttcgtttgcttcaaaagaaccccaag

SEQ ID NO: 32277 - DNA, 799 bp, Medicago truncatula
  Intron number 1 from transcript Medtr8g027040.1 (locus Med tr8g027040) derived from phytozome v7.0 (chr-ID MtChr8; po s 6008925 to 6009723)
atatcgctctcctcaaaacctacgtaatcctctctctcttaaaccctaatttcccaatttctctgttttaccttcaccgatctcgttttttgtaacaattgattaatgttctactcctgtctgctctattgtatgcttagtaatatcgaatttcaaccatgcttagtgttttttggaaaatttgttgattctggatctagggttagttaaaaatctgtttttttttttgttggttttaaaattttacaacgttgaaggtgtaatcagaagaaagaaattagtatccttttgattgatccgcttttcagattttgattgggtttgtataaattggtgcttgtagtaactgtgaactatatgtggtaattgttaatatatcatgttaatatgatgtagatgcatagattgtgttatgatgttaggtaaagtttaaactttttatatggtttgacaaaagttgagtgtacccaatcaatatctttcatcaagaattactgaggtgaggagctactagtttgtgtggcaatgcatttagggttgatgatgtgattgtggaatctatttgtgatatttttagagatgatttgctcatttgttgattcatgactttcactgccaggcttcttggttgttagactgaaaatatttttctctaatctgtgatttactaattattagtgtatttttctctaatctgtgtttagcattctccttatttatttatatgcagtctcttatgtaatattctgttctgctttatgtagggtttgggaccttattccacaagcataaaaaaagt

SEQ ID NO: 32278 - DNA, 739 bp, Medicago truncatula
  Intron number 1 from transcript Medtr7g127360.1 (locus Med tr7g127360) derived from phytozome v7.0 (chr-ID MtChr7; po s 29847800 to 29848538)
tttcttctaactctttcaatcaggtttcaattctactttcacttttttgttaattgttcaatttcaattcatcaggattagcttagttaagttaagtttatcatattcaatttgtgataaggtttttattagcatctttaattcggacaatctgggagattttacttgggaaaagttctttataagtttatgatagatgtttattattacgaagaagtaaagttggatagcaaaaatgagaggaggaatggttagaaattgtgtttgttgacgcagttgcggttatactgtgaaccttgaatattatggcgaaattagggccaatatggctgtgatgctgttgtggagacctttaaagcctttatattgcggccacaaattgcagttgtgatacttttgcggaaacctctaaagtctttatattgtggctgcaattggagctgggaaccgtagtttagagttatgcgcaaaagttaattttgttaatgaatgtttctagttaagtttatcggaactggctcgtactagtatatttatttgctcacttgtgcctctatctaccttgtcatagctcaaaagacaattggatgtatcttagttggttgttgattattgccggccagcttgtttcattttattttgcagtcaaaatgttctctcttgtcatatatttaatttgttttttctgcttcatttttaactaggaaaacaaacctcagcctgaagagacgggaagacc

SEQ ID NO: 32279 - DNA, 881 bp, Medicago truncatula
  Intron number 1 from transcript Medtr7g108060.1 (locus Med tr7g108060) derived from phytozome v7.0 (chr-ID MtChr7; po s 25353572 to 25354452 reverse strand)
ctcctcttcatcctataacggaaaaccacctttaggttcgttcgttcttcagtttttgcatggattgatctttgatgtgaaactgtttttattttctcttttttcttttaatttttttgatgcatagtagaaaaagtgggtgaatgttagaaattagaattgataaatatatcatgatattgtgaatagttgctgtcacatgcaggttgatgcagcacaattgtgttgtggagacatcaaaaccaaaccttgattgtgaccactttacttttgaattggttcaattggggttttttggttttaacaattggggtttttcaattaaagttgatagataactatgtttctgtttgtgttggatattctgctgattatgttctgtaataatttttgtctgtgttgtgctttgaattcatgcggtctacggtttgctatttcgaattgaatatctagaaatcatctcttggtgaaacgttgttaagaaaaccctatgccattaaattgcttattcttgtatgcagctaaattgtgtatctttttgtacatgaatctgttttgattatggttatatttgatctgaaaatgtcttgattttggccatgttcaaggagatgtttattggttagacttaaaatcgcctgatgatgatgtttgtcgcctaaatttcctgcttacttcaactacattcttctttatactaactggtatatcgtgttttaaactgaagctgcctagatttgactattcaatgaataaataatttatttttcacaagtttttgcatgatttttaaactgaagctgccttaaattatcaattgattctatttattcttttggttcacagataataggtttccaacagtgcctttgtgggaaaag

SEQ ID NO: 32280 - DNA, 879 bp, Medicago truncatula
  Intron number 3 from transcript Medtr8g090140.1 (locus Med tr8g090140) derived from phytozome v7.0 (chr-ID MtChr8; po s 19583650 to 19584528 reverse strand)
gagagaaaataaaggtaaattcaacaacatgcgtccactcctatagtcattacatgttctagtttgagtttaacttataattataattaaatcacgcacacattgaatccgtttgaaggagatgacaattagactattcgtttgactgcattacattttgatgatgaaactagtaggtgattgctgtcttgttattcttatgaaactttgatttgtaaaagttgaatgagtttgcatgaatgaatatgagactcctctgaccatattttttctatccttgaattaaattgttcagaattattttgtgtatattgaggatttcttagttcttatatattatatagcactaattatgcatcatttacgcttttctgaatcccaagcaacttgaactatcttgttaatcagttgaagacgatttttatacgtacagttaaaattagaacaatgtttggtgaattttcttgtgttgtgtaagcaggatccgtggagggaaaagttgttgatatgggtctaacaaggactactttattaagtaacgaaaaatatctttagctacaaccccaaactcaaaatttactgatgaggtattttcttgtaaaatttgttttacttattgtcttttgataagttgatacattctatgtttttttaaatttgcatgcaaatcctattatagaaataaatatcttctgtccacccttttacgagtggcatttttgtagcctatacatttgagtatgttttgtgttttagtactactatccctatggcctgagaactgatggcaaaaacttgaaactctaacttaaaactttcctttttatgaatctttttattgcaggtagttgtgaatcagtcacaggttgcttataaagc

SEQ ID NO: 32281 - DNA, 843 bp, Medicago truncatula
  Intron number 2 from transcript Medtr8g025210.1 (locus Med tr8g025210) derived from phytozome v7.0 (chr-ID MtChr8; po s 4985206 to 4986048 reverse strand)
acgtttaaggtacgaaactctactctacggagtaaagaaaatggagctaattgatcacaatattatacttttgtttggtattgtatattttttcagtattagtgtttgtataccaatggaattagaaactgtaacacttggtattgctcgttttttcatgcattggattcatgttcaagttcttgttgactgctcattgagcctcaatgattttttaaaagttatactataattgaagtttgttactattcttcttacttatgtgagatagtcactcattttgatttcaacatgatcacgtcggtagagtaatataaaagtcacaatgaaagggttgaaaacaaatttacaactacaatttcttaaaacaagacttgcatatgaagcagaaagctttcgtcggagtcggaatatgaatagctttgcttggtgttaccgtttccatttgaatgaaaagtcacccaaggttgaataagaataactttcattaccttgattggtttggtaattgttgttaacttgttggcagcatgcattgccacactgtactacccatcaaaatgttcaaatgctaggtgctcacagaaaccgtacagtattattctgagcaaaataatcttggaatttaggatacttctacgaaatttgtaaacaaaaaaaaaaaacagaacacacactagcgcacccattttctcaaatttctttccaaattactaactagattacgatcccttaaaatttaaacggggaaggcaaaagtttacttgaaaaccacaccttgagctctctctataggaagatagtaaaacttctaactcaattttggtgcttttgtaaagaatc

SEQ ID NO: 32282 - DNA, 820 bp, Medicago truncatula
  Intron number 1 from transcript Medtr7g106010.1 (locus Med tr7g106010) derived from phytozome v7.0 (chr-ID MtChr7; po s 24405171 to 24405990 reverse strand)
tttgaggtgtaattagttctttcaactaaatataagtgagtttggttaaattatgatggcacatacgttttattagaggttcaaaatgtaaattttgtcaaatttgtatatgattctatcaaccttatgattaattcaaacatgcatcaccctatccctacaaagtactgaaaattactccctccgtcttatttttggtgtttcatttaaattttacacgattaataagataatgattaataatgttgttttaatggtaaaatatgtactactcatttttttggtggtggtcagagtttaaacctcataccttgcatatattatgcattgtccctaccaactgaactaaagtcatgaggacatagtactacttatttactaaaacactcttattaattataattaatggaataaagacatgtgattgaaatgcaaataactaagagtatgttagtagaaaagaatagtaaatgttatattaatattataaaagagacaaaaaagtaagaaagattacatctaatttatgacaaagggagttcgaagtaatacaatatacttataaacattacgataggttttggattttggatttttatatagcaacttgtgtagacttgattgaggttttatcatttgtgggattatgtgttgggctttttacggtatgataggcagctctaaaagttgtcaatcaaagtagccaaatatgagaaagtgtgttcggacaattaatatgtttttataccatttgcttttgaaactttcaatttcttagattagaggttgttgaccttctacataaacttcaaaaagtcat

SEQ ID NO: 32283 - DNA, 943 bp, Medicago truncatula
  Intron number 1 from transcript Medtr7g097090.1 (locus Med tr7g097090) derived from phytozome v7.0 (chr-ID MtChr7; po s 21894701 to 21895643)
cttctattggcctcgattgcaccctcgattttgaggtacccttttttttttttacccctttccatcattatcattacttttgcttcttttttgaattattatttgaaaaatgctatcttttaacattgctgttgttgttatgttctttaatttgaatttggccaattttgtttatttgattagaggaacaatactgtgaaaaatagattgaagtggtggtcttgaagtaataataaagattatgcttttgaaattctaatagaaccagtttcactcaacttatgccctgtttggttaaacaaattaatttgcagcatataacacaagcacttatcatgataagtaatgtatgtataagctattcatagaaccaatcaaccaaacaaaattaatttaatctgtttttgtactagttgagttgttttcataagctatcttggggaatttatggaaataagttgtaaaatagcttataaagattccttaagctgttttcataagttattcaaaacagtttcacaaatgcttatgccaatagataagctcaaataagccaatccaagacaggcccttattagagcaatcaaaatttgctatgaggttttctcttctaaattcaacattttcctttagagggtgatattgttagtcttgatgacaaaattaattgatgatgatccaacaaatctgcaattagtacacgggatataaagttatgttttctggtttaagaatactttctttattattctttgataaagtagaatgataaatttgaaagagctaaattcaggtagtacttacccttctcgtttttggttgctttgaatttgtgtttcttgttttatattgttactgtttgttgcaacttgcaattcttttcattcttaagttttgattgagactaaaaaagaaagaacttgactgaatcactttatgcagg

SEQ ID NO: 32284 - DNA, 325 bp, Medicago truncatula
  Intron number 2 from transcript Medtr8g044660.1 (locus Med tr8g044660) derived from phytozome v7.0 (chr-ID MtChr8; po s 10078343 to 10078667)
ttcgtagcaggtgcagaacaactcaaagtgctaaggtatttctgcatcaataggatttatttccacatcttctaatctagttagaagtaactttgtaagtggtattccattgacaaggttagctggagataaatgtgcatcatagttatgtgactcttttgtgcccccctcaagatttggataactatatttttcttcatgccaatcattttgatatttctggcttagatatagtaatcagattgatttcaagagagatgttgattaatttatctaccttcttgggaattgtttttttcaaactgctacaatttctagaattcca

SEQ ID NO: 32285 - DNA, 661 bp, Medicago truncatula
  Intron number 2 from transcript Medtr8g132520.1 (locus Med tr8g132520) derived from phytozome v7.0 (chr-ID MtChr8; po s 31335821 to 31336481 reverse strand)
cctcctggctttgattcgagtacttgccgcagtgtgtgagtattaatagacacttcattatatttacaatttaaaaaaatatattctactgttctttctttttttggctaaatttgtatgtttggtccctttctcttattttagtttttaagttggtctcctgtgttttgaaagtttcaatttggtaccttatgatatactgatgtttgcataagttttccctttttgtcaaattttgaattaaacttgtataaagcgtccatgtggcacccccaaagttatccgcgcgttcatctctgttagccacgtggatgttttaaacggaaatttgactaaaatactaaacttattgtaatgtaagagaccaacatcaaactttttaaaatagggaccaacttgaaatttcaaataaatgtaagggaccaaacatgcaatttaaccttagttttttgtttatctagtgatttttcctagtttagcagccttaagtgacttgttgatttcattgcctcgaaaataatctttagtgtaaattgtttctacttttttgtagttagtgggattcaattttttttttttgtccgcaggctccttgagttcttctttgtttttatattttgtgttttgtatatctaataatcacttttggggaaatgcagtt

SEQ ID NO: 32286 - DNA, 858 bp, Medicago truncatula
  Intron number 1 from transcript Medtr8g045080.2 (locus Med tr8g045080) derived from phytozome v7.0 (chr-ID MtChr8; po s 10234993 to 10235850 reverse strand)
aagctgtccacaaatgtacatatactaaattcctttctaaatcttcacaactaggagtttagtttataggtcaaatgcatcttaaggttttttaagtttttcatttttcctaaagtggtcctttaagtttcaaaagctccaaataagtccttttagtttttgaatcgtttcaaacaagtcctattgtagatagcatagttggtaattgcttccttgaactcatctttggtaccaaatctggctcctaacacccacttaaaattagtcatctttttaggcatggcaaatggtggataatcaccatcatcctctaaaaggacatgtttgaaacgattcaaaaactaaaatgacttgtttgagacttttgaaacttaaaaggacttgtttggaacttttgaaacttaaaggaccactttgggaaaaacgaacaacttaaaggacctttagatgcatttgacctagtttatattatcagatgcaagggccaaacatgcatgaaatggacttgatgttaatatcaaatcacaaatagatatccagtcctccataagtcaagtgttaagtatggtttatattcactgataagtgggaagatgctctagcataatagagcaagtaaagctgaaagagcaacgagcttagcgaagtatttaaacttatcttgtactatgtaatcttaagcattgcataatagaaaattacaactgccacattgctctctgagacgtaaacacaattggtagaactttgtaatcaagcattgcattcttgcgcgtttatctatctgtttactttggagtcgggtttaatttgttgttctaacataaaggatatatatgcaggaaagaattccttttt

SEQ ID NO: 32287 - DNA, 943 bp, Medicago truncatula
  Intron number 4 from transcript Medtr8g005340.1 (locus Med tr8g005340) derived from phytozome v7.0 (chr-ID MtChr8; po s 218330 to 219272)
tgtgttctttgggctccttctcgtaaccctactaggtatgtcctttatggggtcttcatgaatggtgttattaagagggttacatgtctgtttaatgctaatcatatatgaaactttatttagaatgtccatccattgctagttatgttagttgttgtaaattgtaacagaaaatgatgttttggatctaccttgtgctaatgtaattttttcatcatttcgttgcgaacttgcaatttatgctgcacactttggtggttatcggtcttgtgtgttttgtaaacttttagatgaactagttttgtaaactcttagatgaactaggataggtttcttttaacttgtagataaaaatgctagttttcatttgatatctttatacctttcttgccaaggcaattattgctacttcttgcacactgctacatatgccatgatgggtttctattgtatttaatgatcaataataggtttattactagggaagcagggattaatgcatactccttttgaccaaatgccttattttctagatagataacacatcctgccacttttcagtccaattgtcaacaaataccgtttacaaaatttctctgcctatacatgttgtttgtgaagaactttaggtcatctgatcaatgaaagtgatgaaaaatctttgattgttgttatactagtctctagccttatggtgaattttgagaagatttagattaggtatttattgccaatttaacccaaaagtggcatggaaaaacacaggactcctgagaagttgcattagtaactcaataatctgtttttacctccatcatttgattcatttcactttctctctaattctcctgattcacgggaactaaatgttatcccaccttttttgtttttgctggtgtctacgtcgaaagactgattgcatttgtatattttatttctagat

SEQ ID NO: 32288 - DNA, 952 bp, Medicago truncatula
  Intron number 2 from transcript Medtr7g107260.2 (locus Med tr7g107260) derived from phytozome v7.0 (chr-ID MtChr7; po s 25040886 to 25041837)
cttgaaagtatgattacttgccgaatatttttcagctattctgtataggttcattggtttaaaatattttttttttagcatttatgtttttcattgattgagcttaatcatcttcatatgctcatatgaatttcccatattcatagcatttcaatgctatattgcatactcggtataatagtctttgcatgtgtttgctttggcgtttaagaggccatccacgtgtttaaaagcctttgcaccgtgaaaaatagaagctgaaaatagtaacttctctttggatgtatgtctagtggccgtgtaccgcataaacaaacataggcttaatcattttccttctctcacatatagctgctaacttagatttatctgcctgttgtgctcaaattaatgtaacgtctcttggaaaataaaatatccaatgtattcatcgctagttgtttgattattctgccagcctgaaacgaaaattcaaactgcatcaagagtaacatatgcaagactactacgatgatggaccttcaaaatgccaccaaagtggctatggggtcattgtgtctttttctttcattatcatacaaactttaatgtaggacggtagatttactaaattagcgtgtgaagggcaccattataattggaccagcctgagaggaaaatctaatagaaaatgttgttccatggtctaaacttcctccaacaatgcaaatcagatttcttctgttacagagcttcaaatttaattacttttaagaaaagaccagcctgagatgcttgtggcgtgaatgtagataacttccttgccttagggccactgcagtccctcctttcttgctatgtgttttttatatagcccttaagagatatgattgatgttgaagtattctgcccattatatgcatggctgaccttgtacatccttaattattctgattcacagcttctttgggca

SEQ ID NO: 32289 - DNA, 839 bp, Medicago truncatula
  Intron number 3 from transcript Medtr7g143110.1 (locus Med tr7g143110) derived from phytozome v7.0 (chr-ID MtChr7; po s 34276391 to 34277229)
ggtgccaattttgcatccactggattgtattcaaggtttgtaagtgtaattaaactattaattcaattcaattcaaattgttttaaacatcaattttgccaaactatatttgtgatgggtaattatgaataagataattttaactttgttctgctctagattaaacctcatcataaatctgtccgatcgtcacaaacaattgcaagcatgttaacaatgtgatgctgccttgcgatttttttttcttctgaccttgttgtcaaaaaaaatttcatgtctgaccccctatgaatattttattcaccaaaatgacccactttctatttctgttggtttttttgtcgttttcctcattcccgccatttgaaacggagggaatgagcccccttccctgacacttgtctgcgcgtgacatgtttgaataaagtaatatgtttttatttattattattatttgtgttttaaataaacaaatgttgccccaaaaaacaaaaaaaaaaaaattcattcccgccaattcaaacgacgataatgaaaagaaaaaaaaaacagtcaaatggccagtcaggattagacatgtgtcagagaggcggctcattcccgccgtttcaaacggcgggaatgaggaaaacgacaaaaaaatggacaaaaatagaaaatgggtgagtttgggaaataaatctgatagggggtcagaaaaaaaaaattcctgccttgcatcccataagatggatgaaataacattgctagcttgtaaagaaaactcaatcagagagatacttaagaagaaaatgcgagtgtgtgtttaagcatcaaattgaagtaagcaagtttaagac

SEQ ID NO: 32290 - DNA, 478 bp, Medicago truncatula
  Intron number 1 from transcript Medtr8g009310.1 (locus Med tr8g009310) derived from phytozome v7.0 (chr-ID MtChr8; po s 1311871 to 1312348)
ggaaatcaaaacaaacagagtcgttcagagacgacgaaatcacaaaaacaaacgaaagaaaacaaaaaatatgtgaaatcacttattcaactaggatagaaggaaaaacaattcgaaggggtgatttttggatcaaaattaaccctagatcacccttttaaaaagaagaagaagaagaagaaaagagtgacagttagggtttgagaaggagagaagtgaggcttgagacaaaagttgttcaatactttaaaattatgtaaaaaaataatatagaattaaaaaaaatgacatggcaaaatgacataaatctaattagttgacaaagattgtaaaactggttttacactgtcggtgcacctatcctaaaatttattgaaacatttgatatcaatatttacatccttcaattgtgaatagttgattttttctacgactcagatcagatccgtttgagaagaacgaacactctacagctcaa

SEQ ID NO: 32291 - DNA, 897 bp, Medicago truncatula
  Intron number 3 from transcript Medtr8g009310.1 (locus Med tr8g009310) derived from phytozome v7.0 (chr-ID MtChr8; po s 1312751 to 1313647)
tcagaaaccgttgcctggttcaagacaaagaagaggttggttgctataacaattgtatttgaatcattacactgacacggacactgacactgacacggatatgttgatagtgtagaaatttgaaaaaatgaattattcgaatataatcacatgtgtcggtgtctgaaactgacacgtgttgaacatcgactggacacatattccatcagaagtgctgtagagatatagagtatgtttagtttgacttattcgagcttacctaccagcataagcatttgtgacagtgtttagcaaaacatatgaaaatagtttatgacatgttcataagtcgtttttagctcatttccataagctctttaagataccttatgaaaacagctctgcgaaagcagtttgatttagtttcattatgtgttatagaaatagttacggtataagctgcaaaataatttgtttatctaaacagggtctcaatgtcttttagagtttaccacatttgtccctgaatattgaaccctgttaactaaatcacagagagttaaaaaaattggtagtagtattaaatttattgacaatttctattgtttcaaaattgtaccttttatgagagataattagtgtatgattccgtcgttcttaccgaacaatatttaacataattaagagtatgttcataaaaaaattaatgttccctaaaaaaaatgttatttgaaatttagaaaatggtcatataaaaaggaagaagaaaaaatcttcaagagtcctatgtttagggacggatgtagtagttatttgggtggtgattgttttgccttaattttgaaagcactggcgataatttttagcttcattaccgtattgttgttgttgaattttgcatttttgtttcaggtgaac

SEQ ID NO: 32292 - DNA, 912 bp, Medicago truncatula
  Intron number 1 from transcript Medtr7g107380.1 (locus Med tr7g107380) derived from phytozome v7.0 (chr-ID MtChr7; po s 25090548 to 25091459)
tagagataagcctgcacttcaatcaagagatagaggtaggaaggtttgaatcttatctgtttgtaagagtgatattttgctaaactggccttcagagtcacgagatggttttgaattctatttgcttatacatgcataagcacttaatagttaatactgtaaaatgtactggttaaacaccgagagtaaattccatgtatcaccactatttgttactgacattaccgcctaccggcacggtgagtgattattccccgatataagtataattgatggtgtcctgttgatgcttttgaatacgaaattttaaaacgcttatgtttgaatatgtctttcaagtctttgagtatatgaaccgtcaattagtttggaatgaattttcggtacttctcttcgtccagttttttgttcttagtttgtggaatcctatggcctgcttaaacatgatacttttactttttgaaatttcttatgacctcggttttatttacattagggctcttcatatgttgggcaaaactcttggcacgcattgacaacattgttttccatcttttccttagaatgctgggaaatttgatattcatggctttcaataattcaatgaatctgagattctgtctgttgaagtgtgctgtactgctgttagcgctgtgatgatttattcgtcaaattgattaatccctacttgacacattcgttatataaacattcacaatactaaaagtgtttgctgcatacactattgcctattatttgttttgggcattttatgccaacatgaacagctggatgctatctcgcaaccagatgcatccctctggatatgatagcaaatgaatttgcaaacacgtttaacttgtgattttctaaaactgtgatcgtaattatgtctggttctgatggcaggca

SEQ ID NO: 32293 - DNA, 1029 bp, Medicago truncatula
  Intron number 1 from transcript Medtr8g139830.1 (locus Med tr8g139830) derived from phytozome v7.0 (chr-ID MtChr8; po s 34213166 to 34214194 reverse strand)
tttaccttccgagaaactattacactgggtatcgtctcttctcttctaacttttttttatagtaacaattcaacccctttcaataagatattactatgtatatttgattttgctgtgattagaattgattgagtaaattgtttctgattaaaagtgatttcaaggtcaattgatttgtgcttgaatgcattgtataaaagttgagttgaactataagcttgtgtataaaaatcaattttagaatcaaaagttacaaatcctagcttcaagtagaataagtttggaggcaaaatcaattttacttgaaaacaaccaaacatgtgttacaaatcctatcttcaagtagaacaagcttgcaggcacaatcaattttacttgaaaacaaccaaacatgtcagaatcaattctacacctctagaatcaattttggccactttagaagtggaaccaaacatacactgtgaaattgtgtgtatttcataggaacttgtgtaatatggggtgtctaagtctcacatggattaaaactgctcgaggttagcctttgactttcggagtgtgctcctatcaaggtgtcaagttcaattcctccacgtgttaacatttcttgtgttgggccggtccatactctggtttcaattgggtttgttaggagacagtgggattggtcccttggattagtttgtcatttggttggatatcgagtttcaaaacaaaagaaagtccgcatggaattgggatgcttggtggagtgttgaactggtttgaggaacctatggaaagctagctattttgagtagaatcaagccacttaaatacatcgccaaccataccatactattcaatgtgggacttggcaccatataatacccaagtctctaggagtattttgaccatagacttatttttttacttgtatgttaataatatattgtttttaaatttgtgattggtttgatttcaccgttgaatttttgttgaattggttttgtagtgagcctcgtggctttggatttgtgaaataccgac

SEQ ID NO: 32294 - DNA, 535 bp, Medicago truncatula
  Intron number 1 from transcript Medtr8g089700.1 (locus Med tr8g089700) derived from phytozome v7.0 (chr-ID MtChr8; po s 19339718 to 19340252)
agcgagcgtgtgtgaaaccctaaaatccaaaacataaatatttaaatttaaagtactttttaaaaaattctctttgaaagacattttgtagcgaagaaaattaatataaacaaacacgtattcgagctctaaacaactgcatgataagtcagctagcatgtgtgggaaacaatgccctactaggagagcaccatttcattcttagccttttcagcttcttacaatagtgaccaagtgcttctaatccattgtctccaattaaattcaatggctgtccacaaggaaaagattattggttcattctaaatattcaaaatgtactcatgctcattcaaagtaaatgttttcacctttccagattatccatatcattgtagttaattatttttcaccgattaatttgataaaattctagaatcttaccttgaagatttctaagttgaggcatctttcgattattaatcgaacatatattgatttgaatattttttagttggaaaggaaaacatgaaaccaaaaaataattgaagatgag

SEQ ID NO: 32295 - DNA, 1014 bp, Medicago truncatula
  Intron number 2 from transcript Medtr8g110080.1 (locus Med tr8g110080) derived from phytozome v7.0 (chr-ID MtChr8; po s 24867428 to 24868441)
gaaagttagggcgggctaagaagggtgagttgtgtgttctttggatattttattttgaattgattctatatgctatgctgtggttattgctgttacgttcgtaagctgtagtatttttgcttgggctgttggatttcttgaaaaggttttagaagaaagacgtttgagaaggaatataatgtagtatatatttagatgaataggtgatagattaggattttcgaagtttattccggactaggttgatcgctgcaataagaaaattttaagtattactttatttcgtcttttgcggctaatgcctttttttgcaatggaaaatatttccttttgattaaatgtttgctcagttattgtttctgataaatgtggaattatttgatgttattgttatatgatgatttagctgtagtcgatcagcctccccaatcaattagagccgataggttgaagttttaaccagccagatatgataccactttttaggaaaataatttatacatataacggtaatctgtgaacaaatgcctttttggtacatgggtattttgtcgtatttgcattttcggtacatgggtattttgtcgtattggaacacgagagctgctttcttcccattattcccaagggtggaaagccattcatatttctgaaggcaaagctgtgtaatttgtgattattttagttaacactcttaccaacaaaaatgattttgcttccatgaagccaatcttattgatcatgaggtacagatctggacatcaatgcaaaactaggctgatacttcaattgttttaagagtaaatttacctaaatttctagtaaattcacttacacatattatttggataattttcataaacttgagaggaatggtaagcttctaggtttgatttttttcccccccttcaaaattcagggctaatatgtgattgtgttgtcattgtttaccaattgttttttataatggtcttcatgtggtaataatctacattgttcatcttgtggatgcag

SEQ ID NO: 32296 - DNA, 683 bp, Medicago truncatula
  Intron number 1 from transcript Medtr8g125280.1 (locus Med tr8g125280) derived from phytozome v7.0 (chr-ID MtChr8; po s 29161189 to 29161871)
tgcatctataaggtgtaacattctgtggtggtgtatagtctttggttaaattaagtgaaaaatgtcattgttcataaggtaaaggtaattcttcttctagttaccaagacttgtctatggtttacaccttttcaatggtcgagtttatagaacttggacattgaggttttagaaattgtttatgtcattaacaaaaaagatggttgaaaaataaaaatgtatcataaactgcatgaaaaaattaccagatttagatgtaacattgagttagaattctaaattctacgttcaatacataaagaatcgttggattaagattaaacattctaatttcaaattcgatgcagttcattatagataattgttttatggcatgaataatatttagcataaaacatacaatgtagtatgtcttggttttctaaagagtgaaagaaccttcaagtttttgcttgattcaaatattgatattagcacgaaacatccaatgcttgattcacatttgacaaaacacgcgaatatatccatttatttccgtttgtttgatgttggagcaaaacaacatttaccttaatattaaaaagaaaatatgaatatgcacattttgtgagtaggtcgatatgcgtagatcattttgacaatgagattttcaattgcagagtggactaatacaagtcaaccct

SEQ ID NO: 32297 - DNA, 1031 bp, Medicago truncatula
  Intron number 2 from transcript Medtr8g129450.1 (locus Med tr8g129450) derived from phytozome v7.0 (chr-ID MtChr8; po s 30586688 to 30587718 reverse strand)
tgatcttgaaggtaagtcacgtgttctcgatgacttttcgttcatataatgctagcctcatgtcggtattcacatttgcaagaaacttgtttttttgtttattattactgtgttatatagagattgatattttaagaaaacaaaacttatatacaatgctatcgacattgttattattgttcttatggggctaatgttagactcaaagaaactaagaaatgagggatgtttaaactcagagagactaagagaaatgagggtcaaaactgtgtccctcttcattctgatttctcatataaatacaatgcaattacaagctttcaagttgactttcaacccaataaattagctaaactgacatatatacatttacagctaattatgctaattgatagaatgattatttgactatttacaaataaatgtgcaatcttataaaatttgatttgccattaattccattgacagctaacacttatataagagaaaattctgaagcttagatatttacaccgccaggtcctttgattgtcgtcatgtattaagaaatacaaggaaagggaaattgtgttataaaataattcatacaggaatctaattcaactgggtcagttttatttaataggaacttttgtttcctcatgcttttgagttttgggacaaaatgatggttgcaacaatgattttcttcatttacaacatataacattttgtcttaaatttaaatatacatgaagacattgatggcttcttttgacaagttttatttttctcttgttgaggaatataatttattaaatctttggttcaaatctcaaacctctatcacttatttaggctagattcacactatttgttgttctttggtttttgtggataatgttgttaatccagtaatttataatttttctgagtttatggtactccctcataatagattatgcaacaatgtatttaatcagtattaatttttttctttttctttatcatcttcacgtagacaacggcatcaaaaagtggtgctctgcgcc

SEQ ID NO: 32298 - DNA, 967 bp, Medicago truncatula
  Intron number 1 from transcript Medtr8g086620.1 (locus Med tr8g086620) derived from phytozome v7.0 (chr-ID MtChr8; po s 17788362 to 17789328 reverse strand)
ctaggactaggtggaggataggtccttttcgttctgttaaatattcttgtcatttgaattgttacctcaagtttcgtcccttgaatggtagttatatacattccaagtgctcatccaaatcaaaatgattctttttacccattttctcatctcatctttattctgtagattatgttcaacttctatattttgattttgacttcatgtttatatatatatagatatagattttatggcaataaaactgagtatttttttagagtttttaaggaagttcatagctttgaactctagttaattgtatttctctatccgtgtatgagacaagtttatgtttataaaatttagtttggtttgatgaaatcgcttgttcttcctttgctgatttaacttatgccttattttagccattttattccctaatgttttagggatttaaaatcaatagatttgaaaaattaagaaaatgtagccgaaacatattttaaataattttaaaagtaaattttttatttatgtttgtaatatatattaggatctctagtcattgactcattagtcattgacacatgttctagctcattgtattatcctataatataaatatgtcttcgattgtaacagaaatcaaattattgaagattataatacaatataatacctcttgttttctctctcttttttgataaatgaagaggattcttactcgtttttaacatgtgttagttttaattttgtatcaatgattattgacaaaactaataaaatttcatcaattgtgaaattagtaaaattgattcaacacttaatattactccactttttgttataactcttttttgttttttgttggattggttcagtattcaacatccctactcatggttatagtaattttgaatgtttgatttgatgataactttcaattattatcatgctttgtaagagttggatgatattataagga

SEQ ID NO: 32299 - DNA, 518 bp, Medicago truncatula
  Intron number 1 from transcript Medtr8g113070.1 (locus Med tr8g113070) derived from phytozome v7.0 (chr-ID MtChr8; po s 25597842 to 25598359)
tcattccttaagtgacattctctggccttctgcaggttccttttttttatttatttttaagatgaatttaattactatactatgcatatgcaacaatggtataaaataactttttttatttgcgactgtaaatgagctgtacttccaattttatctcactatcatgtaactttgttatattaattaatttttaaattatatccagaatatggatatactaattaaactttttagtaatatatctaatctaagttatttaaatacttcgcaactattaaaagaaatagtattataacaacatgacaattgactccacaagatcttattttataaaaaaaaaatcactttttctaaacaaaataatattttcatttgttgtctaaaatgtttttattttcttaatttgtgttgaatagcacttgtaaataatttttggtatgaaaatctgatgactttatatgtttcttccttttgtttttgatgtgtgtttataaaaatcatcaggggcatttgcagca

SEQ ID NO: 32300 - DNA, 584 bp, Medicago truncatula
  Intron number 2 from transcript Medtr7g100050.1 (locus Med tr7g100050) derived from phytozome v7.0 (chr-ID MtChr7; po s 22459518 to 22460101)
ttaatctgcaacccaaaacacccgttaagcttggggtgggttttctaacaatgtcttaattttgatggttgactatcacttttttatttagattataactttttttagaggagattacaacttaaaatttagtaactttttttgtaaattaatactaaaaaaccaaaattatttgtcatgtttgttgtagaaaacaatatttgttaatgttgaatcattacagaaatttattaagagaaaaatatgaaacttatctttatttctttttttttttttttttagtacaaatcttatcttaggtgtcaattagctacagaaatttactttttctattattattttttttgtgtcaattagtcttgtgattagaaattaacctttttaagataaataagtagagaatcaggatttcaaaattagcctctggatatattatacgatatctctatcaattgagcaatactcaccacgactttttacttcttattttggtcattaattctctagtgttttcttctaataataaaacttttttttaaaaatttatatgataatgcaggcaacagccggtttaaggcttttgg

SEQ ID NO: 32301 - DNA, 642 bp, Medicago truncatula
  Intron number 4 from transcript Medtr7g133070.1 (locus Med tr7g133070) derived from phytozome v7.0 (chr-ID MtChr7; po s 31010994 to 31011635 reverse strand)
tatcggacagctccagaccgcgccaaaagcaacaggtaattctgtttttgatgtaattgtcgcttatatatcatttatggttattcagtatgttagagatataaaaccgtttaagtgttttcacctaaaagtttacactttaggagatttggaccttgataagttaacatagatttgtttcaattcttcatttaaatgtaagcaacactatatagagtgggcctgaacattgatcgtatccttcaagcccaaataacttttgcatggggaatttaacatattaaaagtacctccgcctaaaagtttagctaactgtcgatgcataatatggatattggccatacgatatttgacgttttgataagtaatcattagttggttttttttattttttttatttttatttatcaaatgttgttttgtttcacgagaatattgaggcgtatcgtatctgatgtgtctgcaagcattctagggtatttagattttacttttatggaaaaatatttgcggtcttgatttcttctctataaatgcaatgatttcctttatcctttttaacttataaaacccatttgatcgtgttgatcaaattgcgttattacagagtaattcagacgataatatttctccgtctgctaa

SEQ ID NO: 32302 - DNA, 980 bp, Medicago truncatula
  Intron number 3 from transcript Medtr7g133070.1 (locus Med tr7g133070) derived from phytozome v7.0 (chr-ID MtChr7; po s 31012790 to 31013769 reverse strand)
ggtgacgaccttgaggtgatttggtaccacatgcatatatgtgtcgataggtgaatatcatgacatgagtcttattgatgtatgtgattggtgattgtgtatgaataattgtgaattgatatttgttcatgacacatgcgattggtgattattgatgtgagatattggggttttgatgtaagtataagtatgagaatattattattgatcaagtacatgatgtttaaattgaaatattcatgttaactgttatttggattataatgatgtaatacttacccccagtggttttgacagcatacctgtctgtgtggatgggtagacgttgtgcagggatagttgctcgttgagtttttgtgcttggtgttgagagtttagtcggctctgatctaggcttcgttgtgtcggtttagattatcttttactttggattttgttatgtttggagatttacccgtatgttgggaattttgaaattcatctatgttgatataataattgattcatgacatgtatatttggattattctggtttatattccgctgcgactattgaagtttatatacatgtttattggttttgaatttttgtttgatggcgtagcctctatttcttgaataaatctaggacttgttttaagctataaatatgcttcaatcttgaacaaataccttcattcttcacttcacctcttttcttccattttcttcaaatgttttttagttttttaggggtgtcgatggtgtcatggtcattgttgaccgttcatagaaccctgcaatttcaatgcattgcagtttgtgtggggttcatataacggtcaacagagacccttaacatcaaagaaagacacagaaaattacataacatctggtttggatttctgttttcggaaataactaacaatttgctacggattatataatccagaccatgagtattttagtaaattttgcagggtgcgcgaggaggcagcaag

SEQ ID NO: 32303 - DNA, 756 bp, Medicago truncatula
  Intron number 3 from transcript Medtr8g119580.1 (locus Med tr8g119580) derived from phytozome v7.0 (chr-ID MtChr8; po s 27154950 to 27155705 reverse strand)
atgttagcaacttataaaacgtaatgagagcgtctcttgatggctttccttcctcgagtgatcattctttggccttcaaatgtttattcaagctcttcaatgctctctctgggataaaacatctatcattgggttgttcaacaacaaaggtataatatattatcatagttggatatagatatgataccaaattgtaaatgactgatgtttttcgctgataaaatgcgcgcacatatatacaagtcttagaatacaatcgatcccgcaatatacctaatatcactaacaataatcctaggatagtagagtaaatgatatgtacattttacacacacattagaactcgttgttgtcaccaaacaatggcttctgggtgaccccgttgatctacattttccagaattctgccatttaattcatttggaactcattcttctgtggttcaactcgaattttctattgagtctgcttcatacatgtcatctgcttcaagttctcataatacaaaatgacaaggtttgatgagttctaatgtttgtttaatggtttatccttgcttcatgtacaccacttattgatgtgaaattatgaattcaatgtttttaagaaatagattacactaagaccttgttttatacatactcaaaatgatcactatgacatataacatgatttattaccatatatgcatgattacatcttatatgtatgttgtggtgtcttttgtcgtctataggaagagtcgcctttaccagg

SEQ ID NO: 32304 - DNA, 980 bp, Medicago truncatula
  Intron number 2 from transcript Medtr8g012340.2 (locus Med tr8g012340) derived from phytozome v7.0 (chr-ID MtChr8; po s 1935446 to 1936425 reverse strand)
ggaagaaaacgccgctgaactcaaaatcggagacggtaattactcattctcggttttctccactaatttgcttctttacttgcgttctgttttgcttgaattacgtagtgtttcattattagtaattttttaaatccctaatttgaaaattttaccttcgtacatagtaattcttcgttcagtgtttctttgagatcagtacttcatcttcgtatggtttcaaagatgtttgagctatgatgtttatatatctttttttttttttttttttttaaggatgatgtttatatatctgaacatttaacaagttaatgaattataattatgtgttttatatataaattcgtatttgagttaatgaactaatgctattttttaccatagttgatacgctagcttatgacggatgaacttatttatagaggataaccgataagctagctcacagcggataatctagttgaatgaatttgtacgagcacttgagcagaaagctgttttataagctatcctatagagtgtatagaaataagctgaaaacagcttatgaacatgtcataagctgttttcttaagttcttctcacaagtgcttatgccagtagataagctcaagtaaaccaatccaattcccttattcttttagcatgtgctacgttgaataatacctaaactcatattctgaagtgatatactataatactatctatatttttaggtgattagttagtatatgagggtaataagtaatgggtgttgctttgattagttgcggcgtatcaccatactcctttcagatagctattttattacaccattcaaaatctgattggttcattgatagacaacgatcttatgttttgtcatgttggattgattgaacatgtttcaagtttggtataattgttgtgactttttgttttttcgctaaagaagtagtttttttttttttcttccagagtttttgaaagcaaagtgcttg

SEQ ID NO: 32305 - DNA, 266 bp, Medicago truncatula
  Intron number 1 from transcript Medtr8g121080.1 (locus Med tr8g121080) derived from phytozome v7.0 (chr-ID MtChr8; po s 27930358 to 27930623)
aggtaagaaataacaactttcagtcatgtttaatttcaattttgtgtttatcatcatttgttttactgtattttaattcatactatttgaagaacgaaagttagcaacattaccattatttgaataaagaaaatcaccatgtttgtatttcttttctatcttgttaataatgcaggaaaggaatgttgtttggaaatgagtttgcaaactaaaattaagtgatcatttcgttgatgatttgagttttgtttgtttcaggggggagg

SEQ ID NO: 32306 - DNA, 811 bp, Medicago truncatula
  Intron number 2 from transcript Medtr8g121080.1 (locus Med tr8g121080) derived from phytozome v7.0 (chr-ID MtChr8; po s 27931092 to 27931902)
agaggtttaacatccaagtgaataatttgactcaagtaagtttatgacctgcaatcagtatacttcatggtactagactatagtgttactcacagttttcattttgcttagtttaactccggactactctttaatttatttatttatttatcgtgttgtattctagaactttttgcttctgtatgtcaacaaaccacctccagttagttacagttattcagttacattaatttgaaaattaatagaactctataaatggctctggcttggttaagttaaacgaggttgaacattcattttcatcaatgaaatttcattcagttcctcttctgtcagagttcttgaattcattacaccaacctgtcagagtcaaacgacgttgaacattcattttcataaacggcctgtggaattttttctcctttgctttctccactgccaacttctgccatcattacatcagcttcccccctcaaactcttcacattctgggggccattccaattttttggattagaagggacaccctgttttgaaacgatgtgccccaggacaccagttttttcttaccacaagaacacatgtttttgttggcgaatagccaatggttcctcaacacatgctgcacccttgaccctcttgagatgtttggcatggctttccacacacctgttgtgaatgaggatatcatcaaaaaacactaatgcaaacttcctcaaataggtcctcaagtcccttaaacacctcgagagtctaggtttaagcatctacaaacacttctaatatcaattcctgccttagctgcttggaa

SEQ ID NO: 32307 - DNA, 540 bp, Medicago truncatula
  Intron number 1 from transcript Medtr8g008610.1 (locus Med tr8g008610) derived from phytozome v7.0 (chr-ID MtChr8; po s 1001976 to 1002515)
gcttgtcgtccaacaggtttgtaatgattagaacataaaaagtttggatttagattgtgtgtagtgtgattgcatgcggttaggatcgtatgatcaagattagacaatccatattttgatacagtttttccttcttttttttttttttttggtcaggtagccagcctagtggttagaattcaccttataaacagttttttcttctttatatctaaaataccgatcttactatttggactgcctgatcttaaccagacggtccataagtggctgaatgcgcgcagggttgtgtatttttgttagtcatgtcagtgtcaaataattagattgagtttgcaagaattaaaaagcaaaaacctctatatttgcatgaccaaaactcttcatgcatcttacattattcttatacttagttgccaactggttttgtaaaaatgcatactttcaaatttcaatgaattcaaacaaaattgcatatataagcacaagaagcaatctgatgcttatttgaattgaacaggtagagcaaagacacataga

SEQ ID NO: 32308 - DNA, 808 bp, Medicago truncatula
  Intron number 1 from transcript Medtr7g100530.1 (locus Med tr7g100530) derived from phytozome v7.0 (chr-ID MtChr7; po s 22674757 to 22675564)
ctacccaggaagtttgtgcggttgggcgtggtcaggtatatagtcttgtctttgttgtcttataagatcaaagtttgaacagtttcttgcatctggctttggattgttgttttaggtgtgtgttttcaattgataaagccttgattgtgaccatgtttggataaaacttagatgagaacttatcatataagtgcttatgtataacataacccagttatgcatgcaaatgtttggaccaaattgatatgcataacagggccaaattgacatgcaacctagatgtcatatgttattttcataagttgtcccaaacaatctcacaaatgttgatgccagcagataaggtaaaatatgccagtccaaacaagccgtatgtgttatttcgagatttcacttaagtatagaatagaattgagagaatgttttgcattgcaattgtggttgtggcagctacatcatggtagttgcaaactattgcagtcacgatgcagttgctaagatctccaaaactgtaatattgtggctaaaatgtggttatgactgcatatagagttaaattcttaccaatgatcctttgttgctacaataagccatgtggcttgtgtggcataccctgaccttggagtggagcaatctcttctttctataatgattttctcacttctataacagaaatttttgaagttattacttttaacatttcatgttctcgctaacgaattccagatattgctcaaggccctgattcttaataccgagtctgtgtttgacagggaactgctgtttacaaggtctcatccattgctta

SEQ ID NO: 32309 - DNA, 908 bp, Medicago truncatula
  Intron number 2 from transcript Medtr8g077150.1 (locus Med tr8g077150) derived from phytozome v7.0 (chr-ID MtChr8; po s 15302205 to 15303112 reverse strand)
gtatctcgagtacaaaggtaattatgtatactttttgtatgacatagtttatgtatgtctcttaaagactaaacttatatttaaaaggtgttattaaaagttttttttttttagtctgggtttgaaccccagaccttgcatatattatgtgttattcaagccaactgagttaagctcatgaggacattaaaaacttttatacatgagtgtttgtttcaagaattcaatatttattttagaaatgtaatgaaagttacatttaggtgttttctttttacaaaacatttaggtgctttttattgttatgatatatgttttgcatttgtttatttttaataagcaaatattggtaaaatagttattgtgttagactttcatggtttagaccttaaactttatgacaagatcaaactctttatagggtctttttgagagacgaggaatttagaggcctaagtctatattttaaaatatattagatatttttgaaaaaattgaaataaaaatataatatttctttttgttttttggtggtggccggggtttgaactcccgaccttgtatattttatgcattgtcaatatcaactttattgtgcacatatctttgaaaagaaaagtaagtcacccttctctcctctccaaaatcttccacctaatgtttcttagctcgttaatcgtattgtctatttgagacatacttttctatagattgaaataaaacataatcaagtactcctataacttttcaactcccatttgttttattttttaaaattaaagaaattcgactttagaaatggtggactattttcataagttttataaaataggggatcaaaagtgtaattacgcagtacttttttattatgctaactactatgtatatgggactttttgagcaggcaa

SEQ ID NO: 32310 - DNA, 934 bp, Medicago truncatula
  Intron number 1 from transcript Medtr8g078770.1 (locus Med tr8g078770) derived from phytozome v7.0 (chr-ID MtChr8; po s 16182201 to 16183134 reverse strand)
gaaaacaggttacaaaaagttaagtaaattttgttactcgcaaagttacaatgtgttagtcatgtttggtaaatttgagaagtttttcattcatgttgattttcatgatttttcctcaggaaagttgccactataatgctcaatctacgaattatcctttcttatatgcattgttgatttttattaatggttccgtttttatttgtgactctttcataacttgtaggcatttgttgttatgtttttatggaatatttggcaattggcattggcttcattctcacaaggagataaaagaaattaagatttgaaggtaataactatctttcttgattgttttcgagtcttctaatattggatgttcttacaggcacattgttcattctctaaagtcattatacttttttgtcttcatcaccatgatactgaagagggttgttgatcatttagcatgccgttgtgtggtcaatttggtaggagtggagtggttttatttttaataataaagtggtgcattgaagaggttgtggataatgtaaaggccatgtcgtggtggtatctaggaagaaccgctgaaaatccttgtatgctatatgagcggatttgggagttgataggtttctttgatatgtaaatttggttgacaatatcgtgaggtaagaactagttttctgctgttaggctgagtctgtttatgttgtgtggttttgtggtggctgtcctgttttagccctggtgcttttcacatgctttcgactagcttttttgctactgctccctgttgctgttttactaattagctttggttattgtttggcttttaagttgtttgaggtgtatgtgggtttgtttctttgtagtgtatttttgggttatactcttgacagttttgatgttatcttatctgatagtgccacaagagaagctctgatag

SEQ ID NO: 32311 - DNA, 740 bp, Medicago truncatula
  Intron number 1 from transcript Medtr8g077790.1 (locus Med tr8g077790) derived from phytozome v7.0 (chr-ID MtChr8; po s 15613614 to 15614353 reverse strand)
gatttatctaataggtgtgttatatttttgttcaggtaaattttgatttctcatcccatatgacctttcaaacctaaatttgaacctaaatatccacctgatcaatatcatgtatgacgaacaaaccttagcagaatcaaacaatatcaaccgtgtcacataacttttccaaaactctatcagcaattgtcttcaacaaaccctaaaaaaaatgttgtttatgatgatcgaaagtagaaagctctgctataagaatcctaaactgtcaaattcaaataaataattttttcttattgatgttcttcaagggtatatctaagcaatatttaacacattctccttatttatgatgcatgggaagatttttggtgatgaaaaactttaatgatgttgataagagccatccactgcctatagtttgcatttagttttatgttatacaatagcaaatggaaaaattgtttgaaaatattttttgcacatttgaacaattcctgaacagttcagtgactgttgcaataggaaaaaatggtctctcatcaaggattttcatttgagattctaagcttctccctctttaaacaaaatagggtgtttgacacttagcattgttttcatggatctacatgcatgttattagcaatacgatttgtgagacaaaaatcagttcattcaaatcaagtatacttgctatttatatcctaatttgtgatacaggaaacgccttttcactccgatta

SEQ ID NO: 32312 - DNA, 257 bp, Medicago truncatula
  Intron number 1 from transcript Medtr7g123920.1 (locus Med tr7g123920) derived from phytozome v7.0 (chr-ID MtChr7; po s 28946904 to 28947160)
tttttgtaaaccaagtggagttggctttcttgcttgtaactttgatctattccttatgcattggctttcatttgtatgtttatcctagttttttccaatttacttttctattttgtttcacctttcttaagaaacgcaatgtcttcttctgttttgattttgcttcagcttctctaggtaataaaactactcatgttttagttaaaattgtaacttgtatctgaattaatccttgcaattgttttgctacagattga

SEQ ID NO: 32313 - DNA, 768 bp, Medicago truncatula
  Intron number 1 from transcript Medtr8g073360.1 (locus Med tr8g073360) derived from phytozome v7.0 (chr-ID MtChr8; po s 14300482 to 14301249 reverse strand)
aaagagtgagcatcgggaaggtttattacctggaaatctaatccatcaggaagattgttgatgaaagagtgagcatctgaaaggtccaaagcacgattaactagtccaatttgatgtctaagccatgcattttggatcaaattcctttatatcacttctatctaatagaattttaccagaagtagttcatagaaacactcagtttatgatatatagttgtgctttttcctgaaccactccctcctacaagggccaaaactagcatcctagaagggaaaactgaaaactaacttgtaaccatatatgctacatcagcaacagtttctctacaccaccaaaaaaaaaggacaacaggatttcaaatgaatatcctaacattcaaacccatgatttcaattatatataagtttttattaaaagttatgagtgattaaataattctattatatatgttggataaactatgtaaatatatgcaacgtattacatctaaatgtcaaacctaccattgcaataaaattatatttaatttgttaaaaaaaattaattgaatattcatatttttgtaatttaaataaaaaattaattaaacaaattataatttcaataaatttcagtttttattttttatttaatatcaaattactttctttcttcttttgtcacattttttctcatttcagtttttaattcttaactctctctatatatctattgttcaattttcgatcagaagtgaaaagtcaaaacacaacgtatataatctgt

SEQ ID NO: 32314 - DNA, 843 bp, Medicago truncatula
  Intron number 2 from transcript Medtr7g132670.1 (locus Med tr7g132670) derived from phytozome v7.0 (chr-ID MtChr7; po s 30810991 to 30811833)
atttctaggtttgttgctgttcttctctataggatgattatcaattttagattttagttcaccttattttagctaaatagaagtcttattttaaggtttctaggttcgcatgtctttagattcaccatgttatcataatagtagacttatttgatggttccaaataatagccatcctatttggacatctctgtgaactaatttctcattcatatatggtgaattacctcttatctactttcaaaaatcaatatctaaacaaaggcttcttaaataccatggaagtcgtaataacaagatgctttgaaagtaacttttccactatcaattgaacaggatttgatacatacatgtattataggatagcttatcctggataaggcagcataagttgttaattccactagaaattgtggcatgcagaacatgttcattctagcatctgattcaaatatacacttatttttataaagatatgagcataattctcaagacacggttgttttaactttggttttctatgatgatttggtttaacaattataggacatgctggtctgcttttggtcacgaatagatctttaagcatcccttacattaattttggttgagggaaccattttaggtgatataagctagctagcaatggttatacctttattagtctagattgagccttgagttccactgctttaatattgcagggtaagaaacatataaaaatacatgtaaatgacatctgattagagtttattatctaattttttatcatgtctgtgtccgtattaatgatacatttgatcacctggccccgttttgatagcatgacagtaattgggagatt

SEQ ID NO: 32315 - DNA, 676 bp, Medicago truncatula
  Intron number 3 from transcript Medtr7g132670.1 (locus Med tr7g132670) derived from phytozome v7.0 (chr-ID MtChr7; po s 30812034 to 30812709)
gaacaaccattttttgtttaaggtctcgttattcgacaaattcagatgaaaattcttttttatatatttttgaaatatatgctttgtttgtatcaaatcatcttttgtgttgtcttgctacagttgggatttgtctttagatttgcattcatttttgcatttgctaaaatagaaaaacatcatggtaatagaataactttaagataatcttacctgaacatgtacccaatgtttgacgcccattataaatctgcattataaatctgtttgatggtttttaaactctcttcattatgacccctaaatgtgattaatatatttctaggtttagccatattctttgttatgtcactgagtaaatttttctcttgatgagataatcgaccaaaataattcaatttgagtctgaatttcgggtttagttattggacaaaatttacagagctctacatttttttttttttttttttggtcaagcctagcggctggagaaattcaccttaaaggtgaaatagtggggtgtccggggttcgaaccccggcccctgcatacataatgcattatcccttacctagtgagctaagctcacagggactctacattattatttatactttagtgttatttctcatattggtaattgatctgggtaatttaatcgtgacagctttttact

SEQ ID NO: 32316 - DNA, 987 bp, Medicago truncatula
  Intron number 1 from transcript Medtr8g146260.1 (locus Med tr8g146260) derived from phytozome v7.0 (chr-ID MtChr8; po s 35714441 to 35715427)
tggaagagaccgagaggggtttgagagaggggtgggtgatgttttggaaggaatggggaatcaaaccaatgcttcgggttaagccacagagaaggagaatatctatagggaatggaaaaccagacccatgacatacatagagaaagacaatatctttgggaatataacggaactaggcccgtgcctttggcggttgcacatacaggaggcggtacaaatgaggaatactgggttgtggtgtgcattaaatctggttcacatgaaccataactgaaaattcagtgaactaatttaaaaaactcaaaccattatttacagaaaccaacccagtccacttgcaaactctcttcttcaagaacccccttacattagaaataccattccatcatacttacccagccatatgcatcctctccaaaattggcaagggtgagtttccaacacttttctcaagttggggactaccgttctttcatttttttacttccttttccccaaagctctcctctcctctccccagctcccctcataaactcccatacatagcttaagtgactcgattcattaattagtagttacagtgtgtacaaaataataggatggaaaaagagggaagtaacaatttcatttgatagtgttgggatcttttgggtttttagaggcgtagaccctcaaaattctgcatgtttccgtcctcataatctttggagcatcgctcctgttaggaactttagtcaaaagggtccatgcttatttcattgaacatgcatttcactgtgaaaggttgccacctatgtaatattttgcatcttgactctaaatcggtgaaattgttactgtgcatgttgctgtgtgtatgaaatttatttatttatatatttttcaacaggtcccttgctgcttttaagcagctcatttcattggttcattatatcatattcctttctgatgcatgttttttaatcaattatcaaacttgtgcagttc

SEQ ID NO: 32317 - DNA, 541 bp, Medicago truncatula
  Intron number 1 from transcript Medtr7g143090.1 (locus Med tr7g143090) derived from phytozome v7.0 (chr-ID MtChr7; po s 34267764 to 34268304 reverse strand)
tttattttggtgggtgttgtcaggtaggactcgactgggtgttctatgtgtagggttttttagggtgttccgcctatatatgacgcctttcgtttgtattctctatttcaccggtctctgtttgtcttgagcagagatatggtttttaataaaattttgctgattaaaaaaaatagtaaaagaatttagattttgattcaaattatcaaaaaaaaaattgagatttttcaagtaagatattttattgattttattgtaagagtctttccaaattccactttttacccaaattcaacttccattatattcgatatccatgttcatctacatcaaactatatagttcggatatgctcgaggacttacttaattcctccggttttccaatcctttgctcagatttatcttgccacattaaaaatcaatggatgagattaaaaaagcaaaaacctcctttcaattttcctattcttcccaaccattaaaaataaaatttgatgtaaatgttgtactattttgcattcttgatttttagggcaata

SEQ ID NO: 32318 - DNA, 540 bp, Medicago truncatula
  Intron number 4 from transcript Medtr8g133200.1 (locus Med tr8g133200) derived from phytozome v7.0 (chr-ID MtChr8; po s 31643792 to 31644331)
tcagcctgtgtctctttttgattccagaacgtgtggtatggttcttacaaagtattcttttctttgtagttgtttttcttgttctcatgcatcatttattggatatttgaatgattcagtcactcttgttagatgcctttgattgagaaggacctaacaatcaattttaattttatgaaattgactgtcaatctttagtattacataggatttcggggggttgggtagctcaactggttttagccaagggttaaagaacatggttcaaacctttgcaaaggagagaaaaatactaatataacaactaacgtgctgacatttcctctaaaaaaaattaaatactgacatttgtctataaaaaaaattacatagggtttctatgtgtctggtattcatctgggttttataaattttctatttgattttgagaattgtgtaactgtattactgatctattcatttctttcttattaagcagtaccctgtggcgtcttgttttcttttagtgtaataatttttgtttcctatgaataatagcaa

SEQ ID NO: 32319 - DNA, 360 bp, Medicago truncatula
  Intron number 3 from transcript Medtr8g133420.1 (locus Med tr8g133420) derived from phytozome v7.0 (chr-ID MtChr8; po s 31789974 to 31790333 reverse strand)
cttctcaaccatcttctccagttagggtaatatgctgttttattgtggcaatataaaggcctgtttggttttagaaaatgttttatgttcaattttaattataaaaatggcacattgttttcacttcatttcttgttcttaaatttttatagaaaatattggaaacagttttttattatcactgtttcatgtacaaaacttcaaaacaagaaacaaagtgaagacaaggcgcattcttaaaattattaaaactgaaaacaaaaatgaagccagacaggccctaatatttttcctatggataattgcatgagtacgtccattatttcactccattttaggttgctgatactgtagagcctg

SEQ ID NO: 32320 - DNA, 304 bp, Medicago truncatula
  Intron number 2 from transcript Medtr8g133420.1 (locus Med tr8g133420) derived from phytozome v7.0 (chr-ID MtChr8; po s 31790452 to 31790755 reverse strand)
gatcagtctgaaggttagagtttttaaatttgtagttgattgcatgtttaagtatgctcctttcttcagtaagataactgatatgcagtatcaattatcaaaataaatcataaaagtgaaatggtggattcaaaattcctacacctcaatggtgggacttttgaacttatgatgaaagaaaaatgaagtgggaactctgcattagttgaaactgaagaataaataaatgaagtttgcgaaaattaaggagttttttttaattattgtaggccttccatctccatcaggaagaactcctaaagct

SEQ ID NO: 32321 - DNA, 843 bp, Medicago truncatula
  Intron number 1 from transcript Medtr7g120960.1 (locus Med tr7g120960) derived from phytozome v7.0 (chr-ID MtChr7; po s 28375327 to 28376169)
tattgtctttaccgtttttcttcttgccttcgcaggtttctttcttgattcaactcaacttaactccatttatttttttattttatttatttggtacttgttagtagttttagtttactttactttaatggttccacagttgcaatcaatcttaattttaattcaatgaacttgttgtgctgaattcaactatttgttgttctgttgctatttttgtggattggtttgactgggccttcgggtcttcagttgacaaaaacacaggattggtttggtttgatgttgttaatgttatgttccaatttcaattcttatcatgtgaaccttattaattaatttgggttattattggcaagtcttttaatgtttctatgtgtttacagaagagattattacaaatataaatgtatcacttactccctccggttacgaatataagcaaacaaacatcaaacaaagtagatgtatatggttcaaactgtgaaccagatacactcctttatttgtttggcttttttgctcttttgcttatatttgagatcagattcgaacaaacggataattaactaattaatttctataaatgcaagtcaaatattctcagtccatttctttatgacataaatgaaccttcatattttcctacttgttgattttctatctctgtaaaacttagtcaagtatggtttatattcttatggattttgagggaaaaaagctattcagttgcttacagatgatctttgccgttaagcaatctgggcctggcataagttttgctaacttttaatgaaaaaattatttgcagctataagtgtagactctaatcaccaaacctcaacc

SEQ ID NO: 32322 - DNA, 508 bp, Medicago truncatula
  Intron number 1 from transcript Medtr7g094180.1 (locus Med tr7g094180) derived from phytozome v7.0 (chr-ID MtChr7; po s 21284790 to 21285297)
atttagaatctgatttcaaacttctttttattagggttttatattattttataattttatattaatttttaggttaaaatatgcttttggtccctgcaaatatatctaatttggattttggttcctggtaaaaaaaaaacttttgaaaaatgtccctgcaaaattttttgttttttaaaatagtccctggacccacttacttgatgattaagcgcatttttgcttatgtggcacttgctgattgtacaaaaccgtcgacgtggcgtttacatggaattaagaaattagaaaatgaaataaaaattcagaaaatgatttattattatttttatttccttattttaaaagttgaaaatagaaaggaggagattaaaaattagggtttgtgccattattcaccttcttcctccattcgctatctcttcctcttgtctctcctctcatcttcttattctttttcttcttcttcatagttctggaaatcaaaaccaagcaagattgtgttgca

SEQ ID NO: 32323 - DNA, 685 bp, Medicago truncatula
  Intron number 1 from transcript Medtr8g146470.1 (locus Med tr8g146470) derived from phytozome v7.0 (chr-ID MtChr8; po s 35808890 to 35809574)
ctgtgggtcagagttggtaatttgatttttttaaggaagcaattggattgctggagggagtcgctggtggttgattaaaaggaagcttcaataccatattataagttaagcagaagagaaaatgaagaaattagtggaaagtgaaaaaaattattttctgaatctgaagccgtgtctaaattgtatgtatgtcaacgagttacaaaagttctacttatagaggactagtcagtttgaattagttaaaatgaactaactaactaggagtgataaggtgacttggtggtttggtttgggggagggacataagcgttggagtgatttggaggtcataggttcaactcccttcactaataatataacatctgatacttgtcattaaaaaaccctaaactaactgatagttttgtcagtgtgtttgaactaactgatagttttgtcagtttgttggaactaagtgactaataacaaatttcaactatgacataaatgcaactagaagctgctacacaagctagataggtattaaaaaagtgcataatgtatctttttatctgcagctattagctatttggacagctatatctattatctatttatctatgtatttctatgccctaaaaggagtattttgacttattgtcttgcagcacagtgcagatcagtttgagaggctattgaagga

SEQ ID NO: 32324 - DNA, 715 bp, Medicago truncatula
  Intron number 1 from transcript Medtr8g134440.1 (locus Med tr8g134440) derived from phytozome v7.0 (chr-ID MtChr8; po s 32330126 to 32330840)
aacactggcttaattttttctttcccttttcaaaggtaaataattcaatcctctttcagattttcttttgtttgcttagttattttctctcttagttcatatcgttatttgattttgagattgggtattgttttctagggtaagaaaaagggggattttgtttatgcggtggaatttgttttcttaattactaagtttctctatttcaaagtcaaaccgtgttgaatttcctactttttttttttacacaacttatccatattttaagtgggtgttaaacaaagttcatataccagatagatactgtgaagcataggttttatttttgtttccttggtatgtgtttgtccccattttatttgttgtttttttattttttgtaatttcctattgagatggtttaatctgctgctgatgaatgaaaaccatcatttccgcctaacaccatttttttgcgttagagaagatcgtatatgttgttgattgtttatttactttgcactgtgattgtctgcagtgatggaagtcctggtttgtaataattttattatagaaatgcaaatgcttattttgtgattttattatagataacatgacattggcgtgtagcctaggtcactttcatgtcatcttttaatttgtgcgacaatcaaattaattactggtatattgactttcagattgaaggtgctgatttatactcacaattaacaag

SEQ ID NO: 32325 - DNA, 926 bp, Medicago truncatula
  Intron number 2 from transcript Medtr7g132780.1 (locus Med tr7g132780) derived from phytozome v7.0 (chr-ID MtChr7; po s 30856968 to 30857893 reverse strand)
gaggtaatttctcttgaaccgtgtttcaactttcacattcattatttttaatattttattattacttctgtttcattgcttttacattgcaaatttgaaatctgtctctcatttagaagtttttttaataagggtatttatttcattattttggttgacgaaattaatgagtttttacttcttaggtgagagatcagatcgaagttagcgtatttgttactctttctatacaggtttgagtaaatgctcatgccagctattagctagtgaggctaaatggtttacagctttttatgtttataaaaagaatctaatcaaattcaatgcacaataaaaagttggagtagtacaatttactgttttgaattactattatttttaatttaaatttaaattattcacattttcacagaggattgctttttaccgtcaatcacaaaggttaataattgttacccagggaaattcttggttgtatggtgaacaatgtttgagaaccatggtatcatgttcatattagattagattagattgtgttagtctctttttctaccatttctacaatgcattgtctctttcatcttctattgtcaatggaagatcaaagagataatgcattcttgaagtggcaagaagaggtaataagggatgaaagacaatacaattcctcaacaaatctcaaagactattttttattgtatggttctcaaacattgtccacaacactgatccttgccaaataatagcttcactgaaatggttaactaataatggcaataacaagatttgttccaaaaaaataaatcaaattgaatgtttttccttggtgaattgttttttttttttgttgaatggaatcaaattcgatgttcattgttactaaataagtttgattgtgtgtgcagatacttggttttgggtgaagc

SEQ ID NO: 32326 - DNA, 757 bp, Medicago truncatula
  Intron number 1 from transcript Medtr7g138190.1 (locus Med tr7g138190) derived from phytozome v7.0 (chr-ID MtChr7; po s 32728963 to 32729719 reverse strand)
agattcctccaccattccgtcgccgtcagttcacggttttaagcatataattatataaaaaaaatctggagtaatcaacttctaaattaatttagttttacccataactcattttttgttttgtttttcaatttgatacgggattgttattgaatgttcaatcgcaactcataagaaattactgtgtaaatcgttgatactcgtatgtttaaaatgttgttactgtgcaagaaccttaaaaaattatctgcgattggtttgtggatttgcaaatgaagtatgtgctttctacttctctttcaattcccattaaaactatgtaaaaaaaagttgaatttcattgcgtaacaaaggagatctgatcgggtcaaatcgcgggtcaaaacgacccattttatggttagcgggcaaagaagaaaagatgagtaaaaaaacaaaaagaaaaacaaacaaaactagaaaagcaaagtttcgtaccagcgacccctctcacacagttcataacattaccaactgcactacagatgttattctattaatatgggattttaattttgttttacttatattctgagttttgaatttcatcatttaattcattttgttatcggttttttatagaccaagtcttaaatagacacaagcctaaataaattttaaacgaccacgcttatataaatgataaattttatggttaaatatatttttgatctggttcacagaggtacgtcatccggacgaactatcacctcataga

SEQ ID NO: 32327 - DNA, 945 bp, Medicago truncatula
  Intron number 1 from transcript Medtr8g139750.1 (locus Med tr8g139750) derived from phytozome v7.0 (chr-ID MtChr8; po s 34185538 to 34186482 reverse strand)
tggtgttgccactctggtataattcaaataatgtaagtgtattttttttaattgttttttctttatgttaaaatattttctttaatttaaatgtgtgtttgtttaattattaaatccacttttatatgtgtttttttttaattggtttttctttatgttaaaatattttctttaatttaaatgtgtgtttgtttaattattaaatccacttttatatgtgttttttttaattggtttttctttatgttaaaatattttctttaaatgtgtgtttgtttttattattatatccacctctatatgtgttttttttaattctttttctttatgtttaattattttctttaaatgtgtgtttgttttaagggttaatagtgttttacccccctgtaatataggtcatttccggttttaccccctgtaaaatatattttttgaatttcgtccttgtaatttgatgatttttggttttggaccttcatgaattttgacagtacaaaatcgaagatatgatagggggtaaaccgaaatttgctcaaattaacggggggtaaaccgaaattttctcaaattacaagggggtaaacctaaatttgctcaaattacagggagtgaaattttccatgaaggtccaaaaccaaaaaatcttcaaattacaaggatgaaattcaaaaaaaatattttacaggggggaaaaccggaaatgacctatattacaggggggtaaaacactattaacccttgttttaattattatatacactgttatatgtttatttttttaattctattttttatgtttaattgttttgtttatatgtgtttttaattattatatacattgttatacattgttatgtgtttttatgtttaattattatatccatattttttttttctattatttcaggttcgtaagacccgcgtgcttaaaccgattaatca

SEQ ID NO: 32328 - DNA, 461 bp, Medicago truncatula
  Intron number 1 from transcript Medtr8g016100.1 (locus Med tr8g016100) derived from phytozome v7.0 (chr-ID MtChr8; po s 3047061 to 3047521 reverse strand)
cttcaatttcgtatcgtcccgactcgtaagcgattgtatgtatatgatcgttagatattgttttgtttctttgttttctgctctttcttttcgattatgttaataatacttggcttatgtgtcttatttataaccgttgttattctgaatccagatagatatagtgatattcgtttatgttttcttaacataacatactagaaaaagcacagtttctgttgttgtacatgtttgtttttcgattatgctgtgcagtgagagtattcgattttttaaaatttgctgtattttttaccctgtacctatgtatcataggttatcattggttttgctttttttgacttgtcaaaatgttattcttttgttttgttggtagctagcatactgaaagtaatttattttacttatgtcctgttgttttctgtgttgaattggcagaattccaagattaaggtgcaata

SEQ ID NO: 32329 - DNA, 1024 bp, Medicago truncatula
  Intron number 3 from transcript Medtr8g106280.1 (locus Med tr8g106280) derived from phytozome v7.0 (chr-ID MtChr8; po s 23758043 to 23759066 reverse strand)
agcttccacgcccaccaatcataaacagacgtgagattcattatctatacttattttgtttgagtaacttaggtttccctcaatcaaaacgatggtttttttggtcactactatgattttgttcatcttctaaaatattattattttacttgaaagcaaggttggtttagttaaataaaagatgttgagatcaaattaataaattatgggaaaagctaattagtataatatgcttataagcttttttttaaaaaaattaataaattaattactcaaaaaaatagtaaataaaaaaaaaaatctttactttatgtggttgctattgattggacagtgttgttgaggtactcttggtcttgttccactttcttttggtaaaaggaaggaagtcttttatggcatcatctcgacattaccttaaaccattccttactttaaagtgtgcatgccctaaaagatattataacgtctctataagtaatgacaggcttacatcaaaagatagaatattttcaccttaatttagcttatcatagaacagtttgtaatactggaaattatttattaattttagggcacagcccttcttcacgaggctgtgtttttctttttttaatgtcctttttgctaatttctcggtacaagcaccaatatatatagatgaaagcaaacttaggtaaatattgtatgtttaaaaaaatttgtatattattatatatgtgaaatttggaaaatatgtggtggatagaaaaaagatagggtacttttcttctcccccggaatagtagttgtttaaagcttgtaacactcagtaataagtatcaactgaatcataaggcatagattgcagacagttgcaataatacctcatgaaaaataggcaacagattaattaaattgaaaggttgaataaatgaaaatttccaactaaatgaaagtataacaggaagtgattttgatatatatgataacggtgtgttaatgtccagctccagagaaaagacagagagttccctcagcatac

SEQ ID NO: 32330 - DNA, 916 bp, Medicago truncatula
  Intron number 1 from transcript Medtr7g124050.1 (locus Med tr7g124050) derived from phytozome v7.0 (chr-ID MtChr7; po s 29041660 to 29042575)
tgctctttgcattattttggcattctccttctgtggtatgataacaattaatcctttccttttcctttctaaatttaatatgctatgatttccatatatttgatgcatgacttgctagcttagctatcttcgttatttttttaataggaactttattagagaatttatactgttcatttgtgaaaaacactaaacagtttagttttttttttcttctaataaaacaatagaaaattacttattttttttctaagaaaaactatggataaactaaaataacactaactatctgattcgtggttcttgaaaaacacttttaaatatatatgttttgaatttattatgaacattgtaactaaatacataaaaatacggtaggaacggtaataattgattattttcttttatttagcatatgaaccatgataatgaattttattttttcggtttttttaatgaaattattcagaaaatccaaaatagatatttaaaagcaattttaagagctacaaaagggcaataagtgttattttagtttaatacttacatataacgaatttaagattataacttaccaacttaattaactgttcttgtacaaataacttcaaaagcattctcaattaatttgttcatacacaaacgacaaacgtctttaattttttgggtgaacaataaatgtcttattgtatctgacccgtatgattatttctggcaataatattagaattagaaaatataaataattagacgtccagtgcaacatttaaacataataattattaccctcctagaaagtatgtgagattgaccaaaaaaagaaagtatgtgagattactttaggcatcgatttttcataataagtcaactaatcaatattttcatgcatgtgttgcattgcatcttgtaggagctt

SEQ ID NO: 32331 - DNA, 941 bp, Medicago truncatula
  Intron number 1 from transcript Medtr8g050180.1 (locus Med tr8g050180) derived from phytozome v7.0 (chr-ID MtChr8; po s 11247569 to 11248509 reverse strand)
ttgtatattaggaacatcttcccaggtcaggtttggtgaatccaagctctgataatgtttctatggctttgttcttttaacttgttttgaggttgttttactttgttttcctctaatcaatgagtcacttaactaatataaaataattgcaaatttactgttttatgtgatgagttggagaaaccggcatactcaagcttaatgttcatgactaagagggtttagagcaacatggttgaatacaaaaagttcctcgctgccatatcattggttcattgataaagaaaaattgatgtgtatatacaaaagttagtaaattggtgcatatgtctgtcttaataatttgtatgactatttttagttatttattatatgaatgcttttaaatgttgtgatctattattgcaattgttgaagattgtaaatctaagacatcatttgggattggatgaaccattaaaatttgttgtagaatatagtcgtgttttagagcgctttatctgtgtaccgctcctctgaaaccataggtaaaataagcatttgatgaatctcataggtaaaataagcatttgagctggaaagaaatagaaactcattggaattcctattgacacttgataaagatggtaaatgagaattgagatgctctatatgtggagcttttgttattttttttattttttattggattagaataccctttagactatttttaaaaagaaaaagcagatcactggaagcacatttgatacaaagtaagctatggaaaaccacaaatgtcattaatgacttacaattgagtttatttataacatactaactgagaagttttgaacttaaaatccatgtcgtgaaagccaaagatttaaccatatatgtcaatcacagttggtcctagaacccagtttctatatgtgcttgcaggtttgaggtttttgacc

SEQ ID NO: 32332 - DNA, 863 bp, Medicago truncatula
  Intron number 3 from transcript Medtr8g012120.1 (locus Med tr8g012120) derived from phytozome v7.0 (chr-ID MtChr8; po s 1820676 to 1821538 reverse strand)
caatagagctaatatctctttgtatataggtaaactttttatgattttgcctttttcatatatattaactactttttttttttggacagaatactaacttttggttttgattagtcacatttttcagggctatgaacatagaaattgtaatgaaaaattattgttttgttgcaggagtaatttcagtgttattttctgcaaaggttactataaagttcacatttataggaccgaaaaaaaatgttttgatctgcttgaagaatatatttgagtttccagttctccagtttgtatcataacttctaatgtaaataacaagtacatgtatttgattttctctgttgtgcttttggatcattctttctcccttccaatttatatgcaataggtattttcaacttttaacaccaatatcaatagagcacaattattattatcgttcctattatttacacatcttttgctacatatttttaaatttattttagaagcatcatgaagcttaaaaattatcttattttgatgtgatgtgtttgatatttcaagtatataatataaccaatcttatcttaaatttcataacacaaattttagtataaaatattttattttgaatttaattagtgctaaagtttcctgtgcaccccgtctaatgtcgcgtatgatgaagtatttcaaaatgtgtaatacccctattatgtattttgttgtaacatacttggtaggcaatatgatatttcaccaaaggataaattttgtgactctgataattgttctttaagtttcatttcaaaatattatattttactgagtatcaaaagatttcagctcgccggacggcgcacgggtcgggacgttctagt

SEQ ID NO: 32333 - DNA, 1019 bp, Medicago truncatula
  Intron number 1 from transcript Medtr8g077670.2 (locus Med tr8g077670) derived from phytozome v7.0 (chr-ID MtChr8; po s 15535981 to 15536999)
tctctccacaaaccctaattgttgtaacttgtaaggtaatgtgaaattgaatgtaatttccttcaattctgattctgattctgatttgatgattacatgttctttagtaatgtgaaattgaatttttttagttttcgattgctactgattactacagaagacatgaatgttctgcttattattatggtttagaacatgaactctgattgctactgaactgttacttgtgtttaaataattgtattgagtgtgagagactcggttttaaataattgtcttaaacaatagtagaatatgaaagcctgataactagtcaaattgttttagagttactatatgtaattaagaaaagttaacttacttcctttgccaatgactttgagaggaggacgtaatcaataatcctaaatagtagaggtggaaaagatggaaaatgtaagcttatttgattcaaaataatgtaagcatatcttcaacttctagcatgcctagatgagctaatcttcctctatttttgatagtgtttggtttttctgtatatgactagcatgttctagcaacttgtcatgaaaagtagcaacattcatggcattttccatcagaaagatctatcaaacctggctcaacttttgtattcagctatcatcgtcttctgtttatgaaaatcaagtgaaattggttcattttgaaatcatttatgttatttcaatgaaattgaaaccggctattgttatgaaatttgaatgttattagaattgatgtaacattgaaaccatgtattgttagttgattttgaaactgtttcaacaggaaaagttaagatgaaaagttgggatgcgtaaagcatcactttgaatatgatgatcggtttttagtattattttgttgaaattttttatgaacgacaccgaaatgggtcgtattgtatattatatgatttatatattttagtttatttttaaagctgccaccccaaaattttaggtctggctccgccactggtgttccgtcgtcggcgc

SEQ ID NO: 32334 - DNA, 664 bp, Medicago truncatula
  Intron number 6 from transcript Medtr8g077670.2 (locus Med tr8g077670) derived from phytozome v7.0 (chr-ID MtChr8; po s 15540877 to 15541540)
cacgatatcaagtaaggctgttataattcagtttatatcttaatgtcattgttagctaaccatgcccttcacatttgcttgactctgatgtttggcaaaggaagagagtatgtatttttttaaggtactatcaccaagaaagaatcaccattttaatccctaaagttgtaaggatttggtccataaaattaacaaaaaatttaatgacctatgaaattgaaaatcttcaggaacatttctgggtcaattacttttatccctaaatttgtcacaaacaggctaatatgattaaggatttttaattgtagaggccattttgaaattttgttactttcaatcaaagaccaaattgcacaacattcataattccggggaccaagttggcaattcaactcatcgccttatgtttaattgcttcatctaaagatcatgatataattctcacaacttgcatacttttatatccattagtactatatgttgtaattatatactagtactaatactagtattactaaagtttgtccttttgcacgaataaaaaaagttttcctgaacaaagtactatactagattactagtgttgctgtaggttgtcccttatcaggtaaattgcagtattgcctcatctcacattttccccctcttcttttgcagcctctga

SEQ ID NO: 32335 - DNA, 950 bp, Medicago truncatula
  Intron number 2 from transcript Medtr8g009150.1 (locus Med tr8g009150) derived from phytozome v7.0 (chr-ID MtChr8; po s 1236404 to 1237353 reverse strand)
gaagaatcaactaattcctttgatacaaaggtacccaatccttttgatttaccttctttcccactattatacttttctttatagcttttacattcttgctgttcaaagagaaaaaagcagaagaaaaaaaactcataaatacatataaatatatagtacattatgcttaccctatattaaacatgtcatcaaatgctcggtctcgttggtcgctcttgttttaattactcaagtatgcctactttgagttacgataaaccaccctaaaatctaaaaacagcagcatctttggaatcttattcatacttctgaaaacaagtgcaatatcatttttggaaatgactattatttcgtggacagctgatatcatcattttgatcgtttggagcatgattattgcatcactttatcattgctaattggtaagtcatctctagtgaagatatagtattcaaaaggaattaagaaaccatagcaattatttgggtcatattcctattttacactatgaaatgcatggtgtacaataagcattcataattttgttttcttctcctatatagaccaactacgattttgtttatctaagtagaaacatcatttatgaataaagtacaccgaatgtggtgttttggatttgaggtcacgttactttagaggtacctttccaattcgaatgtagaaatttcataattgtgcaaggttttgataaatcaatatcatacggtacaacatatgcttccatgtcagcatcaaccaaaattctagcttgactttctataaatttgagtatcttaaacaaaatgcaaagataataattaaaaaacaattgttcctgatagaattcaattgtgaatcattatgtagtccattctcatttaacatcaaattcaaatatttaccatatcaattgagtgggccgcggtgttgggccgtattaagggttggtg

SEQ ID NO: 32336 - DNA, 828 bp, Medicago truncatula
  Intron number 3 from transcript Medtr7g117600.2 (locus Med tr7g117600) derived from phytozome v7.0 (chr-ID MtChr7; po s 27499315 to 27500142)
ttgaggattttctccttgctaagggaatctctgcggtataatactctcttaatatcatttttgttgttttcattgtgttttcctgtgatatctttgtttctggaaaattgataaaaataggggcttaagttgaactgattttattgaggtatagaaacagtcttgaactggcttaagttcacacttgtttcaaactggtttagaactgaacttaacctgttatatttcatgttgattgcttaagaacaatcagcatgttgcaccattgattaaggtagtcagaaaaaataatctattgttttatatttcataaatttgaatatatcatagggaatcatgtaatcatcatcattattaatatgttataggttttgattctggttctattctagtgctattttgaagtaaaaatatgaagttaaggagttgtttatggttatgaccatggatatcaaaatgttgaggtaacttgtaaaatcctacaagttgacaaccttagcattcaaaatttagtcaagtcgcttataaaattgtttcttgcattattgcatagatttgtagattgaatttgaatcgtgagtttgatgacagttgaatagctctgtcctggtttggtttagtttttcaatccgggaatctgaatattgtgggagaaattgttgaaattccagagactgaaatatgatattgaaacaataacacaccctttcttttaatcttcacataagccatggttatgtttgtctctaatgtcgtaagcccatagctaactacggtgaatgattaattataggaaaggatattggaaattgagtacataaggtctgt

SEQ ID NO: 32337 - DNA, 582 bp, Medicago truncatula
  Intron number 1 from transcript Medtr8g096700.1 (locus Med tr8g096700) derived from phytozome v7.0 (chr-ID MtChr8; po s 21284577 to 21285158)
aagaagttagtaagtcataaatcctttttgccttatctcatgcatgtttggattagcagtgtgttagacagaatcatgaaaacttgaaagaaaaaattacgctgccaccataattttgccaaattcaatttgattctaaacatgaacttatacatgaattatatatatcattgccttagatggtactcaataatatatggatgtttttttagtaaagaatggatggaaataaggacataagaattttttcatataaatatttcttatgtgtagagcagcttaaagctgtattcattctcattgattgcagatagtttgtccttagagaatattatgtttaggagcggttcattattttccaaattacatcataggaaaacattgtaggctattccctgcaaatgacgatttaacatattaaagaagcatttttctttgaattagattaattaaccttcttttctgtcaagtgttcatttagttgagcatgttaaatgtaaaagacattaacttcttttgtcttacaatctgtctttggttttactaggtaaattcaaggaaaacattatatttgtcaccttc

SEQ ID NO: 32338 - DNA, 932 bp, Medicago truncatula
  Intron number 1 from transcript Medtr8g026450.1 (locus Med tr8g026450) derived from phytozome v7.0 (chr-ID MtChr8; po s 5671261 to 5672192 reverse strand)
gcctattgaattggcatctgagagacttgtaagttgtaagtagatctgacaagttattttatttatttcttttcaaatcttatagttttttttttttacaaacttttcaagtttttacattagctagtttattaccaattatactattggtttatcaattattttgcctctatattaatgaaatgaaagtaaataagtaagtgaatcaaatagaggtataaaattttgaaagtttaagttttagtcccaataaaatttttcatcaattttttgtctctaaaaatttttccgtcacaacttttggtccttgcatttaaatacaattaagtgtatcctttaaaattttgtattattttttttatggtcatgtttagtacgatataaaaatctctcttgcaaaagtttaatttttttaacaagtgatgaattaaatataaatttttaagtttttagcgcttaaaaatttatattttattcacatctcgttaaaaaattattttttgtacaagagattgttataatattataaacatctctataaaaatttatttaaaaatgtgaagtatgcacatgatttgatttaaaaatagggatcataagtggcagtagaaagattttgagggaccaaaaattgatgttcgtcttctatttattttgcgactatttaataaatatgcatttacagttattgcagttgtttatcagtggcggtcggacctgttgttttgtttggatattggctagtgcctgctttttgttattgcactgacagactcattgtattttgagcgacctatttaatacgtcttatactaaagagacgcattggtttttgtgaatatatactattttaacttcttaaaaaaataaatatgcatttgcctgctctgccttgtctttttcttttttaactttcagtctatacgagtctg

SEQ ID NO: 32339 - DNA, 778 bp, Medicago truncatula
  Intron number 1 from transcript Medtr8g005560.1 (locus Med tr8g005560) derived from phytozome v7.0 (chr-ID MtChr8; po s 312782 to 313559)
acaaaaagcagtaattgttgatctgataaagagtcgtacaatataaaattagctataggggatggtgagtttttcataatcatatctgaaatagtctgcagtttatatgtgtactttgtttgggggactgagcagtgattgataaggatttgtcaataagttaggcttctttttcacttaatgtgtcacaggaacttttaatttttaaatatgttttcaaaattagacctatgatttctcctgtttgtaattgactactttagacagggatcggattttgatataggacaattttggtgttggttatttagttctgtcaatttctaccgcaatgttgtctttgtttaattctattctggtgagatatagttttctttggaagctattctcttatgtatgtttttatacggttaactgttatctcatttctcattcttttaggcagaaacatgagccgaactgttatttttaatatttttacctaatcgcaggcatttgatcgagacatgtgaaaaatattgtatccatattctggtgtgaatatttgtcattttacaatagactgatcttccagcttcagcaaatccttgttcaaattttaatatgtctttttacaaattttctttttgaaatagttgcatcctttataaaaaatttattgattccaaggcagtatctttcttgtgttccgggtatatattatgcaaagctttttccacaacttatgcattgacacattggagttgtgttgtattctattctgggatatacacacaca

SEQ ID NO: 32340 - DNA, 854 bp, Medicago truncatula
  Intron number 1 from transcript Medtr7g096550.1 (locus Med tr7g096550) derived from phytozome v7.0 (chr-ID MtChr7; po s 21600847 to 21601700 reverse strand)
gaaaggaagcaatgttagtaccactcattctggatttcgttttctttttgttgttatttgattcacccttttttacttttattaattgcttattcaattcgttattggtttgtcatagttcgaaaattttcacatttttttgttgcaattatttgatatgctttttaattttaagtagcctttcttttgttgaacttgtgtgtgtaactgtaagagagattatttttactttataccagtattgtgctatgaagcacaaacactgacacactaacgcgcaatgatcaaaatttgagaaaaatgacataattcaatgtaaatacatgtctggtgtcggtgtcggtgtcaaactcacacgagtctgacaccagacaattcaatcagaagtgtcgatgttacataggtattgtgtacataacatatgttaggggtgttaccgttttgaaaggagtttatgtattgattaagagaaataatgtttacaaagaaatggatggatatttgatatttcttagccaaggaattgatttattatgattcatatatttgaaggtgcttttctgttttgttgtgttgcttttaactcgtactgaaatagtttgaaagctatacttgctttggagtttggacatgatgggaaaggatcaaagttttgtacagttttttgaaactgtagagaatcttcagtattaaaaaaacacttctttactcactgttatgtctttatctgccatctcagttatgttttggattataggtgattctgatctatcataaatatggagattcttatttgttgctttcatctttttcttgcagaaattttttcttcagggaaggttcatatttggacc

SEQ ID NO: 32341 - DNA, 512 bp, Medicago truncatula
  Intron number 2 from transcript Medtr8g043010.1 (locus Med tr8g043010) derived from phytozome v7.0 (chr-ID MtChr8; po s 9172214 to 9172725 reverse strand)
atcaaagagaaccggaaaagggttgtgaagaaaatgtaagaaacatgactacacaaaaatatgatttgaattgcacattctcttttaatttatcagaaacctatgtatcatgtgtttataatatccagttgtgtaacagattgtgttaagcataagttcaaatgttaaaatcttcttgttttctacttgagcacttgcaatactccattaatatcgttgtcattgaattgttcttttcaagtctgttttctcttaactccttttggaagttaactttatcttatgataataaattgacatcctccttttattgcaaagaatataagaatgccattgttgagcattttgttaattgacttgatatgttatttagactttagaactatgggcgtttaacttctaatatttgacttccttttataacattttctgaagctcttcaatattctgacatgatctaccatctgtgtaaatgtaatatatttgatgcagcttggaagagtttatcaagc

SEQ ID NO: 32342 - DNA, 933 bp, Medicago truncatula
  Intron number 2 from transcript Medtr7g106600.1 (locus Med tr7g106600) derived from phytozome v7.0 (chr-ID MtChr7; po s 24716337 to 24717269 reverse strand)
aagaggtgtacgaagcttaagagtgagttgcctgattctattatatcttatatcttttccaagttagctttgaaggatttggtgaaaactagtgcattgtctaaacgatgggttcacgaatggggattaagggcggacctcaactttgatcttcataccatgtttgactataacacaattcaagacttaccaaacatccttccactctttcaaatatttcactttcaatctgaatttaccacaagattggatcaatttatgctccattataaaggtcccatcatcagttcaatccgagtcaattttccattagtaaattctgaacacggggatgccattaatgttgccattaatagattgatctccaaaggaattgctaagggtgtcaaacgaattgaacttctcttgtcatctgattttgttttgccatacatatttcccccatacatattcccccctactctcttatctggcaatgattctctcacttatctgcacctacaaaactgcctcagtgcagaacatctggactactctggattcaataatttgagaactcctgtgttgcatctaattaatgtgacgccgaaactgcttcagagtctgtgctccaattgcacccgtcttgtagacttgacccttgatggttgtcaattattatgtttcttcataaaaatcatcctttccaaagtaaaattaaatgcaaattgcattgaatttgttctccttttcattttctccataatcattatccaataagaattgtttttacatctttttatgaaacttatttcaagaagaacacaaaaaactataactcaaattactgtgttttagttttcttattaagtgtgaatttgtgtttttttgcttataaattgggacggagggagtatattttaacaactgtgttcgttattgcttgcagtggca

SEQ ID NO: 32343 - DNA, 763 bp, Medicago truncatula
  Intron number 2 from transcript Medtr8g132830.2 (locus Med tr8g132830) derived from phytozome v7.0 (chr-ID MtChr8; po s 31468737 to 31469499)
tggttgttaaagctgccactgttgttgcccccaaggtatggattttcttaattatcttaggcaaaatcattctcttcagtagtatatatattatgatgataattgcttatttataagtttccataactatttctaaaggagaggattgagttaagttatttttgtacatgctttaagttgtgttcaaaaataaagcttatgaaaagtttcataacttgttttcgtaacaaaacttatgccattagataagctcaaatatgtcagtcaatccaaactggcctttgttatggaccaatagttaatccaaaacttataattgtatcataagttataagctcttgcaaacacttatgcaagtgcattatcatcataagataagttcaaataagttcttactagtgccccttattataatagaaaatgtacagatttatgagtagattgagaatgcggaaaccacagggagagatcaaagtaggagttagtaagagtgaaaaattcatttggaactaaatttcagaccaaaacttatgaatatttttcgtaccgaagatcgttggctttttatttgtaaatgaaatagcagactattgatatacattttatcttgaattaacatgttcattgatatacataagccctgacccatgggattgtttctagtgtttttacttctacattttacaattcaatgctacatgtgcctgattggtaatttcatcttgtagcatacaaccgtcaagccactaggtgatagagtact

SEQ ID NO: 32344 - DNA, 876 bp, Medicago truncatula
  Intron number 1 from transcript Medtr7g121170.1 (locus Med tr7g121170) derived from phytozome v7.0 (chr-ID MtChr7; po s 28463171 to 28464046)
aatcaagtaagttcttaagcccttctttggtaataaggttggctacgcttactataaatcttgtcatgaaacacaaatggaaagatgggaaccccttgatgagtgggattaggcaataagtgatacttttggaagtttttaaatacttcaggataatgtttgatactgttatgattttaagtttggaagttctccctagttttttatcaccatgtgatgattcattggtgctgccaattggggaaaagatgcatgtatacatgggatttttttgatgatgagagtgcttttagggaaactacattgattgagaaagatagaaaatatgagcatgtttctcagacacgagcttgtattcagattggagcaaaattacatgaccttgtgtggaatgcattgttgtgtgggtatgaaattaaattacactctgtaccttctttcaacatgatattctggtgttcatccttttttatgagccaacaagactcaagagaattcagtttttctatggtagttgctgttaatgaaatttgttggataatgttcttcactttgaatggattgctcaactttgtatttgatagaggcaagttttgttgcaaaggaaagatgttgcagcaagggatgcatatttcagccttgaagctcttaaatattttagtgatcacatgctcttccattccacattatctcagtgattatttgctcttcatgcatggactagactttcaatggactccattgagttcaacagtataaagcaagcaattgggaattattttttctctgccttgaggacaaggcagattttaagggggtggcattgataggatctaatatgtacacataggcccacttagagggagagttagttac

SEQ ID NO: 32345 - DNA, 331 bp, Medicago truncatula
  Intron number 2 from transcript Medtr8g112340.1 (locus Med tr8g112340) derived from phytozome v7.0 (chr-ID MtChr8; po s 25195678 to 25196008)
gcttttcaccgccgacaatcactcctttgcacagagtatataacatgttttttttcctcttattattatgtttcaaatttaaattgttttgtgtgtttagttttaagttgatttccaaaatactgataataatttgagtaaatgaattaatttgtgatgccggtgaacagatctcataaccctttatgtttgaggattgcaatttaaaaccatgtgttaacatataaaatcaaattttgcctattgtataagtgaaacctaacatgcactttgccttgtttgtttgcctcatatttacttgtttattctttgcataggcgtgactgacaat

SEQ ID NO: 32346 - DNA, 998 bp, Medicago truncatula
  Intron number 1 from transcript Medtr8g027080.1 (locus Med tr8g027080) derived from phytozome v7.0 (chr-ID MtChr8; po s 6031679 to 6032676)
atttcaagttctcctcttctcagtatttatagtgtgtgagtctaaccattaggtatttaagaaaaaaatagaatggagagtgtatattactttttttaggtggacttaagagttctttcaaaaaaaaaaaaaaaaaaagttggacttagagtaagggcttgtgtatgtttggtctgcctctgaattttgtcttctacaacactaattttggtccatgcattaagctacttttgagtgataagagggtttgaggaggacttcattggtttttcaactgtgcattggcaatgcatatggatatggttgatattttgttcgatgctctttaggctctgtgttgcttagtttttaccggaagttagctcataataatttatctttttactcttttttttcgatatactattttacctgtttttatgaaaggtttcatgtttgatttttgtagaagcaatcaaattttttgtgttacatattgggtgtgaactctgaaaattgctgagctttactggctagtgaattataatattcatgagttaaacaatgatcaagtgcacatcctttgcattaagggtggtaaaatggatggattacatggatatggatttggatcataatggatggataaaaaaaatccattagtccattaaaatccaacaattttttttaaaaaaaaaaaaaaaaccatccaatctatccattaggttttatgtccatccaatccatccattattaaatttaaatggatggattatccatccaatcggtttaataaaatgtattatttatttttaattttttagttaattaattggtttgttaataaattggtgcagaaagtaatgacattcataattccttttttaattaagtctaatgcttatttttgtataagtttttgtataagcccaaaacatatttttttaaaagtccaaaggtgaaaataaaataaataaataaaaggtggtggtgcaccggcgttgactaccggacaccac

SEQ ID NO: 32347 - DNA, 407 bp, Medicago truncatula
  Intron number 1 from transcript Medtr8g150870.1 (locus Med tr8g150870) derived from phytozome v7.0 (chr-ID MtChr8; po s 37068182 to 37068588)
ttttctggagagaaaaggacggcctcagaaataaggttcataattttatcactctcttcaaaaaaattgatcaattatcattcccttaaataaatttgtgaataacacatatctctttggttatgaaaaaaaatgctaataagtgttcttaaaacacttgttaagaagctagaaagataaagtttatcttagaaatagtgtattcaacatcttgacactttaaaagttaactttttctgcatcaaatttataatttatttttatttttgatttcttaactagtgctctaagggcacttgttaacgaaacgcattgattttatgttgcatcagtcacattactttgttttttttctttcttttcttccaaaaggtttgcaacggaccagactttgcccttaccagtgt

SEQ ID NO: 32348 - DNA, 614 bp, Medicago truncatula
  Intron number 3 from transcript Medtr7g127070.2 (locus Med tr7g127070) derived from phytozome v7.0 (chr-ID MtChr7; po s 29722380 to 29722993 reverse strand)
tcatatattgctcacttgctccttttgttctgaaggttagttttgatttgttttccaatcttttcataaagtttaaattatttagcttcggttacatgtgatcttttttgctgaattatatagatagaagtgctaaatttgtttttaatccccgtaaaatgtcatctatgaaaacttggtggatacgttttctttcatataactacacttgacatttataatcaccaagtgtatatttagtattgtggtagatttgctcaaatcacacagagtcactatacaaaaacttcatttatagcttttacaaaatcatggtggtcttcttcaaaataacaaaatcatggtgggtcaatgtgatttcgaaaaatccactttaatactaaaaatgcactaaaatgggcataaatagttaattgggttgttctaatggttgacttgggatctgagagtgtgctcctcctaaaggtctcagattcaattctctcttgtgccaaattggatgggttaatttaccttcttcattttctttttgggaactaaactatttatctagttttaaatagtgtgatggaatttgagtggaattttgtctcatgcagttcggcggatcagca

SEQ ID NO: 32349 - DNA, 631 bp, Medicago truncatula
  Intron number 1 from transcript Medtr8g132500.1 (locus Med tr8g132500) derived from phytozome v7.0 (chr-ID MtChr8; po s 31325891 to 31326521)
cttgaaagagagataggttttctagaggtttgttttcttgcttctcaaaatgctttctatgctgaaattgagaattctgttacatttatatatacactattttgtgacatctatttttttttttagttttttgaatggaagtgtttgtaactttcaaaatggaagaagaaacgtcatgtgtcagaacttctatgtcatttctaacgatccatgacagtaaatttgaagaaaaaacttctctgtgcataacattttcatgatcaatgcagtactaattttgagcatgaaaaaatagagtactacaacagagtagttcaacaaatgtactaggttctattgtgtgacattttaaaattcagagacaaggttttcaaatttactaaaatttaaaattaaactaattcttgacctcttctggttttaattttagtaaccaaaaaaaagtgaagatgctcttttcatttgcagagaatctttttgtctgtgactcattttgtgtccaatttgaaggacataaatggatttcctatgtggaatcatatgtgttattagaaaattaatttttaattatcaacatgccaccttcatggcaatttgatgattttgcatctaccaggaagaattgaaatct

SEQ ID NO: 32350 - DNA, 672 bp, Medicago truncatula
  Intron number 1 from transcript Medtr8g148650.1 (locus Med tr8g148650) derived from phytozome v7.0 (chr-ID MtChr8; po s 36774705 to 36775376)
gttggagattaatcgtttgcataaccaattcaaaggttctttgtttatctctctttcattcttctatgttttttctgtttccatcatcaggactattgagtttgatttagtttccatctggtcagtttgattcccactgttcttatataatattgatatgcatttgttttcattgatttacttagcctatagggtgaagaagcgtcacatgtgacaaagttcaaaaattgtttaaaacttctaactacaacgtcatcatttttaagaaaattcgaggtccttatatctgagagagagagtaatttgatcattgttagtgttgattcaacaaaatcaagagaaaacaaatttgagactagatcagtgtcaaactagtattgattggatatttacccaaaaaaaaaaagtattgaccagatcagtgtctcagtcgtgagaacgagtaataccgtactttctgcttgtgaggagcagcaccgatctttattatagttttaaatgattttaatttttcaagtatcagtccactgtccaccataggtgatatgaaagacttccttatcctagaagccaccatttgtataagttgaatacaaaatgaactattcaagtcagtggtttgtctaaaaaccttataactttatgtaatcattgttgcagaaaaagttaagg

SEQ ID NO: 32351 - DNA, 572 bp, Medicago truncatula
  Intron number 1 from transcript Medtr7g117940.1 (locus Med tr7g117940) derived from phytozome v7.0 (chr-ID MtChr7; po s 27663532 to 27664103)
acatgtccataagctggtttcatcttatttccacaagctctccaatttagcttatggaacagcttatagcttatatgataattatttgactttattttatcttgttatataaatagcttatactgcagcacttatatgttatacgcttatgctagaagcagttaattaaattgtttatctaaacagggtctaggaccaaaaactaccactgtcgagggataagagtaaacttttgtttcatttgaagaggagagtattaggatcccagttctataaaactgggggatgtgggcttatttagggccttaaactttagtttcattttttaatataaattgatcagagttccgagccgacatttcattgagtctgttatgtattttgaattatcttctttgttcatatctatttttttaattaattttttgtcaatatttaaggaaaaatagctgtacattattgtaattttaactgagctatttttgtgtaatacagttatttttatttttgtgtctgtgtaatgattgctgaatcttcttaatactctccttgtcaggcgctgctgattatcc

SEQ ID NO: 32352 - DNA, 456 bp, Medicago truncatula
  Intron number 1 from transcript Medtr8g119950.1 (locus Med tr8g119950) derived from phytozome v7.0 (chr-ID MtChr8; po s 27338261 to 27338716 reverse strand)
taaattgcctgcagcttgttttccaaactggatcggtgcgaaaagtctagatttcttctcctacaccctaattaattattttctataaatagagacccttgcactaattattattcatttagaacattgacggttcaagacaagggtcaagcatcaaagcctcaaggcaagatttcttccttctcttgttctctctaaggtatatttttctattgttttgttatgatgtttgttgtcatgagctacgaaacctcttaattagggttccaagatgaatctcttcttatttgtttgatattattaataaagtttttcattcagtttatgcttttattgtgcccgattaaattagatcatgcctacttataatgcttttttcgattagttaatttgaattgtaatattaaagaatgacttgtaggataaagtagacactgacaacccgaatttatatca

SEQ ID NO: 32353 - DNA, 1004 bp, Medicago truncatula
  Intron number 5 from transcript Medtr8g102140.1 (locus Med tr8g102140) derived from phytozome v7.0 (chr-ID MtChr8; po s 22351804 to 22352807 reverse strand)
acttactccattctttggaatcatcaccatattgtgtaagtaaataaagacaagcaagaacaaaaagtgtgataaaatgaaccaaaaaaaaagttaagcataatggtttaaatcacaaagttgcactcctatattttattttgcagcgttgttatttaaacattgattgtaaacaactttagcaataacctttttaagtaattgatgttgttcaaaattcaaatagatggatgatttggttcgatagaaatagttatggatataacatatgtcaaaacctattaatcataacttcattgactacaatttgagtgtgattaaccacaactttcaagtgttcaaacctacatgcagttaaatacttgaaaattatggtaaccatctccaaatttgaggttagattatggtaactatgtccaaatttgaggttagtagagttatattgatagttaataaatttagacatctaatgtatttactaaacatatactgaaggtagttagccactatttgaaccgagttagttgtcaaagttgtttgaatttaattgttaaaaaaacatttctcttgataatgcaaaaccataaaaaaaaaaaaaaaaatagcgatgacagaaatttatacattagaaatatgtaaaatccgaatatctttaatttaaaaaaaaaaaaaaatctaattttggtgacttactatatttttaatacaagacatgacaacaattacctttttttgatggagactacaattacttacatagattgtgatatatgtccatgtggttcttaaatatacaaaaaactcgcatttattgtctttcacatggggatggtacaatgtgtgtatgaagaaaagggtatctatgaaacattatccattatttatagtcacaatattgtcacagaatcataaaaaatataaaaaataaaaaactttgattttgtggccaaaattgcattctaagacgtgagactaacgtaagaccttacacacatgcagcttct

SEQ ID NO: 32354 - DNA, 355 bp, Medicago truncatula
  Intron number 1 from transcript Medtr7g112000.1 (locus Med tr7g112000) derived from phytozome v7.0 (chr-ID MtChr7; po s 26447010 to 26447364)
gagcttttcttagtatcatcttcagttctgtatgtagctttttcaggatatttgttgcttaaacaacctttcatattgtttccgggcttcaaaatttattggaacaatccctttagctttttattttttatttttttatttttttattttttaattattattattattatcttttataacaatcgatttagcttgccttaaggccattatatttgagtagatgttcttgctttcttctttcttttactatatgagcatacaatcttctattatttccattgctttgttttttattttatcgttatttttccagatgattccaagttaaatcaaatctttttttttttttagacgc

SEQ ID NO: 32355 - DNA, 839 bp, Medicago truncatula
  Intron number 2 from transcript Medtr8g068520.1 (locus Med tr8g068520) derived from phytozome v7.0 (chr-ID MtChr8; po s 13165284 to 13166122 reverse strand)
aacaaggtatgattgttgtttatgtaatttatgttagttggtaatcattttttacattacagatagtacaggatcatagaatatgaaacctgattgtctttttccaggttcccatgctttccgagttcatgattgatgtataacccaaatggtcttgaattttcatttgtaaagtttaactactttgcgtttagcatttatgaagctttctaaatttcaaaattcaaacatgaatttgtttgttaaattaatggttgttggattttattatacaatagattacatttgaataggattgctgttctcccttttatgattggaaaaaaccttgtcacataactgaggaggaattaagatggtatgtttttttttttttttttttggatttcaataatgccttacaaattattgaattgtaatctcctctctatttaatgtccccctcctctcagtatttttatcgttcttcctcttaaccaactatgtagaaaggtataacaacaatgatcagtgttgtcaaatatcggccatggcgttggattgcagcagtgatttttttttttttacaaccgccatggtgtttgaagtgggatatggcagcataaaatgataaattttcgggttttagctgttgtcctccatccgccatcaatgtaataacatatatgacttagaataattgaatacgattcttttaggaaaattccatactcaattactcatgccaaaaagtaatagcaccaagtacgctgtttaaatttctgtttacaatgctttcattatttgactgaatttccattgttttttgttgtttgtgatgcttgataggtttctatagt

SEQ ID NO: 32356 - DNA, 955 bp, Medicago truncatula
  Intron number 5 from transcript Medtr7g094360.3 (locus Med tr7g094360) derived from phytozome v7.0 (chr-ID MtChr7; po s 21384186 to 21385140)
tcctgccctgcctaacattctcagtttgacagcaggtttgttcatctttctttgccgtatttttaatatgaactattttctcaagatccatgtctggtgtgtttagtccaatccaatttccatttttattgctctctatatcttgaaaatgttgaacgttacgcagaaaacaagaaaagcattagctcgtttacctaaaaactgaatcgtggtaatgtttagaaacgggactattcctgaaacatgtaacttgatgccggagacctagtgaaaggctccatttgttggttgttcgcattaccagatagttgtctcaataattagtgacttaaatttagtcagttgtaggtttctggttcttttttatgcttcaaatgatgggcataatccctcgtgttctttacttcagtctggtaacgggaaacgtcaatggattatatgttattcaatataaatgtcatattatatcctcacgttcatactttcataggatttacccatcatggtttatgttgtatgggattgttgcagattttttcttccttcaccatataaatgtttcatgcctgtgctcgttcttctctttgattctttttcgtcattttccccttctgcattcctttcaatacaatgtttaaatttgaactagttaaacaatatttcccgacgactaaaagaaatatatgtttccctacctttgttgcttctgctaatattttattcattcacgaattttagttttctagttaattaaattcgtaagttcttaacttctaggttacggggaacttatgctaaatttccactccaatatccttaaggacctaatttttaggtcaagttcatttatcatagatgagaacttgtattctgtctttatcttttactaaagaaaatgatacttcctccgtttatgccttcaacttttcttttaacattaggtgaccctctgaga

SEQ ID NO: 32357 - DNA, 764 bp, Medicago truncatula
  Intron number 3 from transcript Medtr8g142320.1 (locus Med tr8g142320) derived from phytozome v7.0 (chr-ID MtChr8; po s 34681103 to 34681866 reverse strand)
tggtttcccttcgttttcttgattttcttgctatgcacaccctgtttcttgctatgtgaaccctctgttgtctaatttttcttgtaaaaattcctaaaaaatttctatgtgtttcttgatgcatttttgatatttttgtgatgtttttacatattaaaaatgataaaaaaatatacgtgatgttttcttgttgatttgttcgtttttgactaaacttgtgaattgtcttgctataatttgttcatgaggtcttggcatgatatgaatgattgatatgcaatttcgtggtgaatatgtctctgatcatgtgtttgtttgtactgtttttgatgtgatttgctaatttcttgtgttgcaagtaatgtgtactttttacattttggttattgttgttgcttttaccgtttatctcgtatttctttgcttacttgttctatcattttatgtcctattctactaaccattttatttcttgtttcattcacctcataagcattctatcatttcatctccatttcttatagtttaggtcttttactattcatttctatgttggagttggcatgtaaggtttagatagttttaatttctcttttaaattcttgcaagaccatagaatgtaaactagggtctatgtaatggacaatggactctaatgatgtacaccgacacaagcaccgacacgcacacacgttgtatgttgatttaccgtcttagatgcatgcttagggaacgcgatacttagaaaaatattcatttcccaa

SEQ ID NO: 32358 - DNA, 878 bp, Medicago truncatula
  Intron number 3 from transcript Medtr7g139240.1 (locus Med tr7g139240) derived from phytozome v7.0 (chr-ID MtChr7; po s 33260861 to 33261738)
agattaaaggtgaacagtcactaccctactaatacagagttccgttttatgcattgttgccatgatctctccatagtgtatgcattgttgccatgttatctccattggtccaaccgtggaaaaactttaatctacaaagggcctgtttggattggcttacttttgagctcatgcaaataaataagattttatgtattatttatccataagcttgtcaggtagttaatgaaaaaacagcatatgaagatacaattttcgttagtgagaacttacgaattaacataaaagcttatttattttcataagctataaaataagtcgatccattcaggcccaaaaattagttacaaatttgatctatatacttttctgcatgcttggctagtaaatacttaaaattatatgttatttagaagtttggttacaatgttttatatgatcctgcagtttataatccattcttatgatgcgagtataacctttcaatttctttccaatccttaaaaaacagttttttgagttttctaatataatttaatgatagcttgttcgacccttgaatgctccataaaaagtattcactgaaataatgggttcaactaggttatatttttggcaggttatagcagtatttcatttgtggggatgattttgccttttctccctaatggtttaaaagtacacaatgttctggttttaattccatacagttattcattttttttgtacttctgtgctagctgcctcgccatgcatcaggatttttttccccatagtgatctctattattatgaaattaactatatgcattttcatattttaatttccttttttaaattacagggaagcacaaatttagaatctgtccagattataaa

SEQ ID NO: 32359 - DNA, 527 bp, Medicago truncatula
  Intron number 1 from transcript Medtr7g105140.1 (locus Med tr7g105140) derived from phytozome v7.0 (chr-ID MtChr7; po s 24032022 to 24032548 reverse strand)
ttcttctctacaaagagcttggaaggagacttaaggtttgttttttttctttatttctttataaaccttattcaacattcattttagcataattgatgatgagtatatcataaatttagcaagttggttcatgaagctaataaattttgaaataggactaatatgattgtaaatttgcaaattcaagggttattttgaaatattaataatttcagggactgaattgacaacatcatgcaatcttaatgaaaaacagttctttgaacttttttatggtctgaaaagtatttttggggacatgcaaagtaaaaaatcatcatttagacaactttgtttgcaacactacgtactaggattttggttttatgacatttgggtagtttaatgtaattttgctacatttaatgtcttgttagatgctgttgttctttatacacttttttttgtcttctattcatggtctgatatattgcatgggatttgatatggcagaaaaccaaccctgtggtggctgagattttctctct

SEQ ID NO: 32360 - DNA, 776 bp, Medicago truncatula
  Intron number 1 from transcript Medtr7g093370.1 (locus Med tr7g093370) derived from phytozome v7.0 (chr-ID MtChr7; po s 20922023 to 20922798)
ttgagttcaatcttctccagcaagagcaagaaaaagtagcattattttgcattactatatatttttgtgaacggatatctctgcatgcaactgtagagactaattcatcaagtcaaataagaccgcaacgtatgacaaaacttattttactttattgcatgtgagtttgacttctctagagtgattggttagtagagttaagaaatcaaggttgatatgttaatcatccataattatgtttgtgcatataatatatgaaccattgatttgtttatctattattgatattactcactttagactagccttatcctatatttgcatatcaatggggtgtgtcaatttttttttctttgaacttgttgggtttaacatgcggagtaaaccatcaaattggtctttagatcattcttaaattaatcctgaactttattaatatttcaaattagttattattttgtcaaaagttttacaatttgatcttttgttatgtgacaaaaatataaagatagagacctaattgagaaatttttgacaaattaaaatagagactaatttaaaatataaatagacttgggaactaatttgagaatgattttaaagatatagaccaatttgatagtttactcttaacatgtgattaggaaaatagagatagaggttaaattttggaaaggtgagtggtttgcatcaagaaggttaaagtgataaagaagagatgtgtgtgaaggtgatacttgatagacaagaatggcataatgcaggattggaagcac

SEQ ID NO: 32361 - DNA, 995 bp, Medicago truncatula
  Intron number 2 from transcript Medtr8g121880.1 (locus Med tr8g121880) derived from phytozome v7.0 (chr-ID MtChr8; po s 28352607 to 28353601 reverse strand)
gagaggtaagaatttcttttggattagtaaagaaataattaacacagttaaaaattgttattttttcaaatgacatcaatgtggagggagtatgatgatttcatttaagatttgtctgtttaagcatatatgcttgatataggtggatagactaaaaatcatcgctacatgaagtgttgctatatacaaaaccaatcatctgctatcacttaataatttgggataattggttcatgacatgtaacatagtctctaaataaagtgatctaaagtgacagaggccaatagtttggtgtggaatatatatgtatgaaaatgattgggaattgggatatagtttgggaaacgtggacagtaagacaaaggtagatcttaaagaaggaaatgtaaaagttgttttgtgtggaaaatatgtatgaaaatgaatggtgggttgttattttttctttcacttttgcttattattattattattattattattatcatgaaagggctatgttctttacccacttgtgttgtatgaaaaacaagaaaaacatatggagaagttgccatgaagttggtgtcaattgctgcattatgagtggataaagtattttgatgggtaaacaattattgttcttatcataataatgacagacatctaaggttcatataaaccactaaatggctcttgtattaacttcagtcttctacacatgccaaacatgtatttctctcaattatttgattttcttacaagcaaagcatgaaatacaattactgggactctgccttctaagactaatatcttgggggtctgcttttattgcttttgaaatacaataactggcttgaccaacatcaccttgtttcctgcatttaaattatagtacaaattaagttatcagttaaattcagttacaaggcagttagcacatttacaacaatccagaccgttaattataatcataataactaatcagggattctagagctaatcaaaatatcac

SEQ ID NO: 32362 - DNA, 676 bp, Medicago truncatula
  Intron number 1 from transcript Medtr8g121880.1 (locus Med tr8g121880) derived from phytozome v7.0 (chr-ID MtChr8; po s 28353922 to 28354597 reverse strand)
gtaagagttttgttagggttatctccaaagttaaggtataatctccacttaaattttaagtttcagtttctagtatataactattgattgcaatattattgctacagttgttctgtatttgatactcagtttctaaactgcttgattcttcatgtatacaataataatcccattccaaattgcttgtatttggttcctttatgttatgcttgtaatgaaatctaattggttactggctgccttttttttgtatatttgaattggatttaagtagtttgttttaggcttaattgcacttttggacccctatatttccaaaagttgcggttatggacccctaactaatttaaatacaaaacagcccccgatgttttgattctttggcagttttggacccctagtccattgttgacccggtcaacgctgacgtgggtggcaccctaagtgaaatgccacgtgtcaatttttttattttatttttgtcttggggtccaaaaatgccaaagaatcaaaacatagggggctgttttgtatttaaattagttaggtgtccataaccgcaacttttgaaaagataggggtccaaaagtgcaattaagcctttgttttaacgtgttccaagtgttcgacaaaatgcctgaatgattaattttttttttttttttttgtagtatat

SEQ ID NO: 32363 - DNA, 561 bp, Medicago truncatula
  Intron number 2 from transcript Medtr8g138210.1 (locus Med tr8g138210) derived from phytozome v7.0 (chr-ID MtChr8; po s 33249115 to 33249675)
ctctaggtatttatcagttactgttgcgcaaacttcatatatgccaaaaaatatgttaattgtatatattatgtttcttcctaacaaaaatattcaattcttggtcagactttgtacatgcagttttattatgattttaataataaaaagaaaattttgtgcatcgagtacttagcatcaagtgagcctattttttactgtaaaatagtcttaatctttgctttttataggggtgttgtttcttgccaaccaaaaattggtgtaataataatgatgaacttttaaaatttcagcttttaaatcaaaatctctaaactatagttaacactggaagctcaaggaaaggaatgtagcattgctaatgtgttaggattcattcatattcatattgctctccgttttttaaagatatgcatctccaaaaagttttgaaagtgtgcatctgatttatatctatcctaattcacccaaaaaatgaaaaagtcttgttatattttgttctatatctatttatggactgtcctgtttctacatcaatatggcagcaaaacgggtacaaga

SEQ ID NO: 32364 - DNA, 847 bp, Medicago truncatula
  Intron number 2 from transcript Medtr7g094340.2 (locus Med tr7g094340) derived from phytozome v7.0 (chr-ID MtChr7; po s 21374014 to 21374860 reverse strand)
aagactactatttcttactatttttggttgatttggtaagcttaatcttttcatttttaatccttcatgttcaaaaaagaagatatatgtctgaaaacagaaattgcaggtccatgttaaaatgttattggcttagacatgttttgtcggtaaaaatagatttttttttgaattttttttatgtaattctggtatcatatacccccaattgtaactcatttaggttggtttggtttggtggttttgactctgactttagagcatactctttttaaagttttagtttcaatttttaccgatgtcaattttagagggctagtaaagcttatttgagcaataaaaaatcttgttaatttatgatattttaaaataatccctaatttaatgttttagtcaagtcaatttccgtttgcctagtgctgaggtaattaaccaagttatacatgtcattgtttatcatggaatatatgattgataatatgtggcaacaatgacattatgtttttttagggggatgacattatatttttgttatctatgtcaaagtcgagcaaagtaaacgcatattggtcacatagactgaaatttaattgttcacatacataatccatatgtttgttagaaggtgaatgtaaatttctgtattagtgtccatctaaaatataattacgacttttacatatatttaacttgtatttttaagataattttttttctgtaaatttcttaaacaatgtccttaagacactattagcaaaacccaaacaacataatcacggtttttctttctttctaatttctattatggcatgtttgttatgaaaaattggtgaattttgatcaggtg

SEQ ID NO: 32365 - DNA, 757 bp, Medicago truncatula
  Intron number 1 from transcript Medtr8g044020.1 (locus Med tr8g044020) derived from phytozome v7.0 (chr-ID MtChr8; po s 9679371 to 9680127)
tttttcttcttcttttctctgtttttttcttatatattgttattttttgagtgtttttatggatgttcatgttttgtagctttgatgtgaaatatatgtggtgtgtttaagtattttgataaagttttaatttttttctggtttttttgtttttgatgcttggttttgaagattttaaagcttaactgaagtgggttttgattatttttgtaagggttgaaaagggttaagagtagtggttccattagttttaattttactcttttgtatgaagtttcctatgattggttcaaagagtttttccaaatcttcagctttttgaagttggcttttatgtagatgaaatgcttttatggtctagtttcttcaagttcatgctaagaacttgaatctattggttctttatgtacaattcaattctagtaagtttgttactttgttgaacttaatcagtgttgttaaatagcgtctatatatcccacaatagtttgatgaacaaactactattttctgcgatctgcgttgacaacacggttttaaagggatactgtaagaaaccatgttcaattaagttttcattaattgaggatctagaaggagaaagagattggtgatagatccaacatagtttatagaaggatcataggatagttgtgttttagtctatgagttagcaaactctacatattttcaattataaattccattttctatatgctgatcttgttatgtttctaacatttacagactattcacc

SEQ ID NO: 32366 - DNA, 955 bp, Medicago truncatula
  Intron number 1 from transcript Medtr7g106330.1 (locus Med tr7g106330) derived from phytozome v7.0 (chr-ID MtChr7; po s 24558797 to 24559751 reverse strand)
ccgctggaattttgttaccggagaaaatctccaaggttttttcattctcctcttaatccattcatacccatttcatttccaccttctgggtcttcgtttttcatctcaaaattgcatcttttcttcatttcattgaatatgaaaaatagttgatagttatgttcttatcacatttttcaagttgtttttcatgaattgccttgacaagtttatgaataatacagataagtttatttatttgcatcagctgttttgcataagctaataaaaaagaccaatccagacaggcccttgttaccaaaccaaacaaatgtttgttttttgatgttgtttatattccggttcttatagagtaatagttattgtgtattttcagtagctgcacacatgtgttgtgcgagtttgcaattgaattttacaccgcaaggtagaacaaattaagggtggactgatttagtaaattttcctagtagaattttgattatctattctaacctagttcttacttcttagtaaaccttttcttgagcttttgcttctaggatttctaaaatagaagtttgaactaagtttttatttgtttttctacttgttttagttttaagccccaaaatattttagattttaattgaatgttcttgattcagggtatttttcgattttatggttcatttcattagactgattggatttaatttattactgcaaccatgcatttttattatatatatccgtgctttgttgaaactattaagaaagatctagagatagagttggatcgaaatatggtttatgatagaacttaatggcgtaatttgatccatgtagccgatcccacttagcgggataagactattgtattcgtgctttgttgacgtacactgatgaactgagaatttatttttgtcttgttgctttagctgaattctggaaaagttgttgctgttggccctgg

SEQ ID NO: 32367 - DNA, 564 bp, Medicago truncatula
  Intron number 1 from transcript Medtr8g071230.1 (locus Med tr8g071230) derived from phytozome v7.0 (chr-ID MtChr8; po s 14064439 to 14065002)
attaccctgaggtgaatattgaaattctgtaatgatagtgggaatttcagaatattccataggcaacactaagtaattcttccaaaatccttctttcaatactgtggtcatgtttcctctcaagtggcaatcttgatgcagtttggacctaatttttgggaactcaaacaacgaagttacagaggatggaaccagactctaataccatgttaaatttaatcgtattttagataaaagaagagaaataataaggagtttgaataagatgtgtactatgataacttgatgcaaaagactaaacgtcatcccgtttgtatactaattaagtaatatgaaaaataatcttcaaagctactctaggctaagaaactaatcctatgagatagaagatatgataagataataacacgatattatgatatatatttatatattcgaacaagtttgtaattgtattcatcacccaaaaagagttgaattatgtttgtcaggtatttgcttgcttcttttgtttttgggcattaaattaaacccaatgctaaccattactgaattttgtatagg

SEQ ID NO: 32368 - DNA, 613 bp, Medicago truncatula; identical to SEQ ID NO: 30454
  Intron number 2 from transcript Medtr8g071230.1 (locus Med tr8g071230) derived from phytozome v7.0 (chr-ID MtChr8; po s 14065135 to 14065747)

SEQ ID NO: 32369 - DNA, 842 bp, Medicago truncatula
  Intron number 2 from transcript Medtr8g025530.1 (locus Med tr8g025530) derived from phytozome v7.0 (chr-ID MtChr8; po s 5199912 to 5200753 reverse strand)
gacacgtaaaattacaggcccagttatttttggaggttagtaatttctttgcaagtgttttcttttctatatcattccgggttgtatcatatatgcctaatgtgcgtatgttatgtagatgattagatgatgttataaaacatgacctagaataaaatacaaactatgaagacttgcacaacaaaacaaactatgaaagtagtatgaaatgtgctctttaaggattttctgcgtaatatacgataatctcctaggatttaatagactattctcaatgaccgaggatacagcaagaaaaattttaatatcaggaagatgtacccagaaaacaattggaaatgagggggcggtttgtgtttgttgtgtgtgtgttgtggttttttctcaatcttatatcaccactaatatgtcattagaacaaaatttgcatttgggtttcagcttttaaaataaaataaaatgctccaataaaatcaagatgaaaagttaagtgtcatacaagagggaagaaaatcagtttctagttcattcaaccaattttattatgtttctactttctacaagagagcaattatgatcctttgatattaaggtgttcaatttttgtatttccatggtataatatttgtaatctccaatctttttacttacgataatgatgtcataatttttttattatgaatttatatatttttgtatgaatatgataaatgtcattgaaccagatcatattgaaattttttgatccgtccttaagcacataatatatttaaaacttttgaaatatatatttaaaatttacaacagacgacgcggtcagaagaaaagtaagccacttaaaa

SEQ ID NO: 32370 - DNA, 822 bp, Medicago truncatula
  Intron number 1 from transcript Medtr8g122240.1 (locus Med tr8g122240) derived from phytozome v7.0 (chr-ID MtChr8; po s 28533036 to 28533857)
ataaccgcactgctgctgctcagtacattattgaggtttttttccatccatccatccatccattgttctagactctagctgctacttactcaattaaacaaaacaaaataaacgcttatgactttaaaattaataaaaattatttttttattaaaagtaattctaagaagagctcaaataaactcacccttgataggattataaatgacaacgttaaagagagagagttggggaagagagtggattagattgaggatagttaaatcactagaggcagaggaagacttaagaaaactataagagaaactattaagaaatatctggaaattaatgatttgtatagaaatatcaatggtagaatattaagggggtgtcttgacgcaacggtaaagttgttatcacgcgattggaagatcacatgtacaagtccgtgtaaggcagctgtgtataatacaccaaaatggtggggacccctttgtggaccttgcgtatgcgggagctttagtgcacctgattgccttttttttaatggtgttatttgacccatgtagtcgaccccgcttagtggaacaaggcttgattgttgtttttgttgttgtagtaattgatgtttaaaaagggatacttacgcaaatggaaatttgaatatgttattttattatgttgcagttgaatgttcttgtctgtctgtgtgtttgtgtttgattttcaaaattttgaatgatagtaagtatggaattaatgtttgttatctctatgtaatgcatagagttggttggtgtttatgtattaacttgttttgaattgctattgtttggcagc

SEQ ID NO: 32371 - DNA, 428 bp, Medicago truncatula
  Intron number 2 from transcript Medtr7g094280.1 (locus Med tr7g094280) derived from phytozome v7.0 (chr-ID MtChr7; po s 21336581 to 21337008 reverse strand)
ctgctcatcaacctacattattcggttgttgagaagtttaagacttagtaagtttgcattatgatttcacaatacaatgttagagtaaattattatttcacaatctaatttgattttttttttttaccatgtttcttgaattgttgtcgtgaccttaacacttctcaagcttagagtcaaagcatcagtcataacttaagtcagagttcggcttcttctcaatgtacttcgtacaacgattttttcaatctgtctcaagttaggccaattgttgaatttataaacttagtcaaggtcttctttttttatgtacaaacatgctttgaattttttacacacaaattaaaaatacatattgcattattatttatttcatgtgcatatttgtgttaggatacatattgcatcaccatttggaaagcagctaa

SEQ ID NO: 32372 - DNA, 774 bp, Medicago truncatula
  Intron number 2 from transcript Medtr8g139140.1 (locus Med tr8g139140) derived from phytozome v7.0 (chr-ID MtChr8; po s 33865323 to 33866096)
acaaggaaacatttgaagagtacatcaaatcaacggtgagtaacacaacgcatttaaacatttggctatcataatcttgcatactgcattactgctaaacgtgaagaagaaagagttatttgtttaataggaatttcttgtacagttttagaaacaaaggattgaatggaaagggatagagtaaattggacataggagcaaatttgtagaagcaaaatatttttctttttcttctttcttgtaaagaagaaaattgaaacagagaaataaaactctattggtaccatctctgctatagcaccaataccaagcttttgagcaggagaaacaacttttccaactttaatctagcacctacaggtaacgacaaacagatacagcagcacttccatcacacaaaacaaaagcatgaatctcagtatattaattaacttgcagactctatggcagcacttactaaggcatgtccttcttatgcattaatttcctaagacaattatagaatcatcaaacatatttaaaactgtattcttgaacttgacttacatgtaccaaacataactgtccaaataatctacaagggaagttctgaagcctaaataacttcagcatctataaagggaaatttttgtagttcaagactaaggagtaataatgtttgaattgatagcagggcaaattccctcagatgcttctgacataaacattctcagcatgattaaaactaatgattttcttatcactaggttcttccatctttgagagaaaataaag

SEQ ID NO: 32373 - DNA, 972 bp, Medicago truncatula
  Intron number 1 from transcript Medtr7g106130.1 (locus Med tr7g106130) derived from phytozome v7.0 (chr-ID MtChr7; po s 24448996 to 24449967)
cgtgtgggttgaatcattgtggtaccgaggtttatgttttttctgattgttcttttacagcggggactggtgtttggcgggatgtcgttcttttgaccagtgtgtttcctgaaatgaccctgtattttttattttatttacagtatttgccaccactaattatgatgttaatttgtttgaataggaaaaaagaaatatatttgatggatacttgatcatgtgaataactgtagttgacaattgacgtggaatatgttgttgagattgagaaaatgtaaattacaaaatagggacaaagacaaaagtgttcgttttgtggttttttagttagccaaccgtaaaattgtgacagtttaagattattatattttgtttatcaaaagaatagtttaaaagactttatcctaaaaaactttttttttttttttctgaaagaaatatattaacatatagggatttttttcccttcaaatttctgtatttgtatactgtgtctaacgtgattggtacagaaattctatgaagaatttaacaaaatggatgtagaatcacgtgcaatatctgcaactgctacatatctctctctcataaagtactatacaataatattgatattatcacaacttaagtcaagtatcaacaaccctatgcatgtgttaagagtttcacatagatgtattgaatgtgttgagagtttaaatttataagtaaatgatcttctagatgtgaaattttatcgattatacttatattttaaggatcgtaatttgtcacattattttgactattttataagcagatatggatattatcttacaaattagttttataaatgttgagttaggtcgaaatcaaattttaagattgtattaaagcatatttgagattaatcgtctcttttgtgtcacactctaaatattgaattctaagtgcgaaggagaaaataaggggaagtcgtttagaggtgaaaga

SEQ ID NO: 32374 - DNA, 712 bp, Medicago truncatula
  Intron number 4 from transcript Medtr7g105780.1 (locus Med tr7g105780) derived from phytozome v7.0 (chr-ID MtChr7; po s 24322129 to 24322840)
tactttgtcctccccgagattcccagtatgtgacaattgatgacttttatgctcaataaaatatacttttggtgaaaatttctcattgattttcttgatatatctttagcaccatttactgaataaagggttaaaagttttctgattggaatttagttatgaatgatgttttctaagtggtcattaaccttaattggggatagagtctgatataccctgtcaagttcacgaatcagaatgtaccagatgttgtttagttgaattcacaagatggcaactttgctcttggttgacttaaatttgtcaagtcttatgttgcttttgtttaatcagaaattgtacttgaaagatagcgatttaatgtttgctatcatctttggcaacaaggcacaaaatgtatcatctttggttttatttactttgtttatcgttgtgttatatttaattgagaaggattatattgggacaatatggaagagatcatgcttcttgaactgcctaggagagtcaatatattttgtttgtgttttttctatctatcattgttattgatactttaatatcaatgacagattttcagtaccaatatagtaacagatcatgcttctcgaacttctgttttgttaggctatcgtttgatattattgatcccactattttacactgtctacatgcagaagagataaagatttccgaattgtttccctacttt

SEQ ID NO: 32375 - DNA, 915 bp, Medicago truncatula
  Intron number 1 from transcript Medtr7g138170.1 (locus Med tr7g138170) derived from phytozome v7.0 (chr-ID MtChr7; po s 32721829 to 32722743)
ctgcatcagttcaatctaatctactcgagaaaaaggtctagattcttttgatctcactactttacgtgttctttccgattttctttttcttttattaattaattacttccatacttgtttaattgtgaaattgatagtagtggttaggttaaccgcaaaattgatagtagcgattaggttaattgagaaattgatactactggattaggttaattgcaaaattgatgatagtaataattaggttaattttcctgtttatgttttttttgaaggaattttcctgtttttgttgttttgattcactttattattattattattattattattattattattattattattattattattattattattattattattattattattattattattattattattattattattattattattattattattattattattattattattattattattattattattattattattattattattattattattattattattattatttgtgtatatatatactaattgcacagcttataattctttgactgaattcaaattatgtttaaatgtctatctcattccgccaatagcgattaggttaattgactaattgtaactttgtttttttagtttatcttgttaattgttatggttcatttgtgatttagcagtgtttattaattctaagggttatactatgattataatataaacatgttcatgatattcactggttatatgttcccgacttgtgaacgtgtctttcccatctgtatgtagctacaaggtttgataatattatggtaggttttgatgaacttaagcatgctgaagtttaccgaattgttcttcgatgtgtatgtctatcattctgcagttggaacacctaccagccttggttacaggaatctg

SEQ ID NO: 32376 - DNA, 673 bp, Medicago truncatula
  Intron number 2 from transcript Medtr8g109040.1 (locus Med tr8g109040) derived from phytozome v7.0 (chr-ID MtChr8; po s 24359614 to 24360286 reverse strand)
gagaacaaagaaggctggcatcgttggcaaatacggtatgtctgtaatctgacaacttctctgtgttttcattactgtcatttgcttgctgttgctgttatgttcttctatgttgtaaatatatggtttagtttaagatggaattattaagatctaaataattaatcgtatgaaaatttgcctgaaagcttgctgtttaaaatacttaatacttaatttgatccatgtaaccacccccacgtgagattaactgttgttgttgttgttgatgttgtatagtgaacgtttggattggtttatgtttgagcttatgcaaataaataaccttttctgtaaggtattgtatgtaaaaacagcttatgaagttactgttctcatcagtgagaacttataaattaacataaaaagcttatttatttgcataagctaaaaaaataagccaatccaaacaggccctaggtagttacattctaggtggtttaatattttgggggtaaaattgatgttcctggactgttacccaattcatgaaatgtatttgtagagcactattccttttgtttttttttacataaaatatgtagtggatttatttctaactcttcaaggagaagtttgttgatttctgataatttaatttgtttattttcttgtatgatattaggtacccgtt

SEQ ID NO: 32377 - DNA, 420 bp, Medicago truncatula
  Intron number 1 from transcript Medtr8g121480.1 (locus Med tr8g121480) derived from phytozome v7.0 (chr-ID MtChr8; po s 28177855 to 28178274 reverse strand)
atccactccttttcttcttgcttcaacaaatttctgtgagctcactttttcttctcaacaatgcgttactttctcttctttttcaatcaaaatcatatacctctatttttcttgttcttcttgtttatgtcttagttcttcttgctttaagataaaataattttgttcacttattattattattcaactatgtttcttgatgattttattcataccttgttgctcattattttattttattgtcggtgattattgttttttttagttggatctgataacactgattaactaaaccttattatcaacttcaattttaagatttatcaaattcttctatttgtcaatgactaattattattattattttttttaattttttgatgatgtttttcaggattttggaattgtgaaaggaagaat

SEQ ID NO: 32378 - DNA, 972 bp, Medicago truncatula
  Intron number 4 from transcript Medtr8g106140.1 (locus Med tr8g106140) derived from phytozome v7.0 (chr-ID MtChr8; po s 23614523 to 23615494)
aagagcagacgcttcttgaccgaaatcctcgccaggtaggaggttctaccggtactttatgacaactttagagcatggtcttttgtttccaatccatatatttattacaaacccaatttctcatttagttttattttttgttcaatttactgcaacatttgtttttagggtaaattgcactcccggcactttgtgagaaacttcagttaaaataatttcatgtgtcaaaatttacacttctacacttttactttttttgagatacaatatttaagtatgaattatattttatattctgattgtaatttattttaagcgagacatttaatggcagtgaatgattttaaacaatgctttcaataattttttgttgaacacttccactccctagagcttggttggatatagcatgcaacatccatcacattactttttatgttaaattattttttattttatgtgaatttgaatttctgagtaattttaccggcaccaaacttttaccatggatatcaaagagttctaattttttcctcactttttagaatttctaatttgattgataactaatttccaacactatatattttattttaagactttggacagtaaacagaaacttcaagtacccatgttatcgattttgaagaaacatttttattttatcttttataattttattgtattatggataatagaaaaaaatcatatgtcaatgatattaagagctaaaaataaagataaaagaggataaaatgtttgattatatttaaataaaagtgcaatgtgtattttttttctcaagaaaggttttaaacgtctttcagaagacacatgtgtaaatttctagcatttagcttattttggatcatctgttggcaattgcatgtgggcacattccaaatttctggaggaaacttatctttatacgccctttcttctaattaggtgactggatttgttgaagataca

SEQ ID NO: 32379 - DNA, 873 bp, Medicago truncatula
  Intron number 1 from transcript Medtr8g011890.1 (locus Med tr8g011890) derived from phytozome v7.0 (chr-ID MtChr8; po s 1706413 to 1707285)
aaaatcttatcggctattacgatcctcctgttcaagtacgttcctccctctctctctctctcacttatcgaaccattctcagatctattgtcacctatcaactttttgttctcttcattttggtgcttgtttttcgaatttctgtgtagtctctaagaatgtgattgctcaagtattctctagtagtgtaattgccttcgattctattcaatttttacctaacattttatcttagttcaaaaacctaacttcaattcaaaatacatatgtttatactgtatataagcttttttatacggcacattgctcggaattaagaaaatgtactatttgttatgccaagggaaggaccttttttttttcaattttttttttttaacaaattagacaaagtgaactatgctatgattattggtaagaaattaaggtcctggctatgctttgtagtgtcatcaagtagcggctatagcagaaacagaattttaacatatcgttatggttttatgacacacattttagttcaaagtatcctcaaatatcggatataggaaagcatagcataatttgaacaaactactacattgcaatctgtgattgacaacaatgttattctttcatcaaactgcatagattaggttttttaaatatttttgaaaattatttcactttgtgtcctctatatgctgccatcttatttggcttggtgttgtattggtttttaaagttttctctttgtgtgtgtatgtattcatttctattcatatgtattcaagtactgtgtatatctgcattcatattcaatttagggtttcaagatttaaaaatttaagctattgttttgttctactgaaatataggagcttattgttattg

SEQ ID NO: 32380 - DNA, 625 bp, Medicago truncatula
  Intron number 2 from transcript Medtr8g101710.1 (locus Med tr8g101710) derived from phytozome v7.0 (chr-ID MtChr8; po s 22130980 to 22131604 reverse strand)
gagtaggtggacttcaacaattccgatctgggaatgttacaaaaaaaaaaaaaaaaaaaaaaattgctgagttgctgaaatcattgattgatgtggaaaataaggcatcttttagatattataatattttgcatgttaaatcaacctgatttttgttgaatttggaagtaggagtcaatggatgtgatggttggaattgatttttaattatggacatgtttaatggtcataataataaacaatgaaatcttaaaattcttaggatatgttttgcaatttgatcaaatatgaattttgttgaattaggaaataattgttggaattaatttattaattaatcacatcatgttttctcttaattcaaatataagcatgctatattaagcatataaacaggaaatcctaatgatttttggatatatgacaaattgatttaggaatacacatatacattgtttaatcatgataaccttaagatctgccacatgtgtgtatttgtttgcttctatgatttgatctttatctattaatctttgttgatgttctaatattgatgtgtttgtagaagagaataattgaaatttgtgttttgtattgcagtttggctgcactctgctgttgttgc

SEQ ID NO: 32381 - DNA, 305 bp, Medicago truncatula
  Intron number 1 from transcript Medtr8g093510.1 (locus Med tr8g093510) derived from phytozome v7.0 (chr-ID MtChr8; po s 20551087 to 20551391 reverse strand)
gaaaatcacatagcaaggtaattattactgtccacacccccattttctgtttcatgaaaaacaaaagaaaaggattaaactttaattaaagagaaatgatatttgaacaaccactttttgacaacttttatgacaactttctccctcatacacacattgttcttctactttctctctctgttgctttgatatttgtgcaactacctaaatttctttgtataatgtggttgtccaacaaattgtcacataaaaaggttgttcaaataacattgctcttaattaaaacctgtcctatatgtgcaggt

SEQ ID NO: 32382 - DNA, 988 bp, Medicago truncatula
  Intron number 1 from transcript Medtr8g133060.1 (locus Med tr8g133060) derived from phytozome v7.0 (chr-ID MtChr8; po s 31562559 to 31563546)
gcatgtgcttttgtaacataatcttcaatcaaatctggttttgagctggctctgatccattcagaccatatgtatatttattattgaagtaaataatgattaaagtgttcttcatgttctgataataaagcatcctttattctctcttctctcaaaaaaaaagcatcctttattctctgcatcgaatctgtgcacatggagaagtaacagtgtgaacctatattgtcacactttgaattattagagtaataaaattacagagagattgttgggtcttgtttagaataatctcctgaacaatgaaattgggcctactgttgttgtgattgtggcccaagttttttttgtattgtttaatctgttaagtttgttagaaaaataattagagttagcttgtgtacataacagcattctgaagattaatgaattgaatttattcattttgttaattcgtattactgccaagaatagtgtaaagctttgtagttaaaatcctctccagaaaaatactttgcggcaaactcaaattttttgaaattcaaatgctcactaaaatacaaagaagattctctttcttctttcttgacactgacacccacttcctcaaagactcatacctagcagcagatttctttttctctcataacctaaacccctcttctctcatcctgtactttcttctcctctttcaccatttcttcttctccttcttctttcaatgctgagttcttcatcgttcttcttttttcatcagtttttttttgttctaccacaccatattttttaagggtaggtgatctctcatttccttactcatatttctccattaaatccataaaccctaccttttatttgtaacctagccccgttttcttcaaatctgaaatttgaacttaataatattttaaagattcatttgatttatttttgttttagtcttgtgttaatcttactgttttttttttagggacaattttgcttcatttgt

SEQ ID NO: 32383 - DNA, 872 bp, Medicago truncatula
  Intron number 1 from transcript Medtr8g112310.1 (locus Med tr8g112310) derived from phytozome v7.0 (chr-ID MtChr8; po s 25174656 to 25175527)
atagaaaggagcacctgcacatacttctgcaggtgcaaatacatcgactgtaagcatcaggtcaaacaacatcctaagtagcatctgcacatacttctgcaggtgctggtctgctttcatccaagcccaactaactacatcaaccactacatgattgctcatggaaggtatgacaggtttaattcttttgaaatgcggagctttctgcagacagtgaacccttgtgttataaggtcacaacttcagcacacattggaggataggagacatgagcacgtgcaggagacctaagagtcagttgatgtccctaaaccacactatgtttaaggaaattctggccaataaatcacatttttcttttgctttttgtttgcttgtgcttgagaagtaacatatttttaggaatactccaactattggctagtgcattgactaagtttggtttatgttggtatcattatttataccgttttagtcacatccatcacttaatgctactatgtgtactcccttaacaatacccgttactcaacaatgactcatattaatgctggtttatttacacagtattacatgttctcgtgtttactgttggcttcaaattgtctagttggttcttatctgaatctattagttacatgagtttgttcttgagtttattgttgtcttcgagtttgaatgctggtttatttaaatcacttaatgttgatcacaccagttaaccgcaccagttaatgtatcaatctgaatgatagtttacttttttctctctcgatagaacgatagtttatttaatggtggtttatttgaatgtgtttattcttatgttgtttacaggtgctcaagtttcttgattcccgttttactaaata

SEQ ID NO: 32384 - DNA, 816 bp, Medicago truncatula
  Intron number 1 from transcript Medtr7g107450.1 (locus Med tr7g107450) derived from phytozome v7.0 (chr-ID MtChr7; po s 25117302 to 25118117)
cacttcgttcacttcttcccggtgaagatcaaacggtaataattcatatatatatatatatatatatatatatccttcctattttctataatttggtatgaattaacaacttaacactagtgacagaagataagctaaaatcacaggtttatatttagctttatacaactccatggttggtctgatgatgaaagtttgagacctatgagtatgcttatctctaggtctcattttcgattctcccaggtgatcacaatttttgtgtttggttactctataagagttttgatctgacttttattggacccccactcgagtggatggtatggttggtcctctggattaatcgatcgatggatcagagactattctttgatcaacattctaactaattttgtccaaaataaaaatctaaccaatatgtttgcaaaataaatttaaacaacaaatgttagtattgtttgcaaagaaattatgaaatttgtctaaaaattagagacggatttatttttcaaattctcattttgatagctaattattcttttaaaggaattattctattattttaggtgtaacctactttaagaaaaaagggtgtgttagttcttctataactattgtttttactatttgtttcgtaatgttttggaactatgtcacagtataaattgaaaatgacattttcttttatagaaatgaaagtgacgtattcataatatgaatggaatcatatcaatataaaattgaaattaaactttgcacataaaatattgtcattaatatatattttattccatgttgatgttgcagaaaaaa

SEQ ID NO: 32385 - DNA, 1031 bp, Medicago truncatula
  Intron number 1 from transcript Medtr8g042650.1 (locus Med tr8g042650) derived from phytozome v7.0 (chr-ID MtChr8; po s 8910254 to 8911284)
caactgctgctgtgtttataccaatatatcttcaggtaaactaattgaatttttatgattaaacatttatattttaaatagtaaatttatatcaaattttgagttgatattatttttttgtaagaaatgagagatattttggagaaaaaacaagacaagggaacttgttaaaataatagagaggaatccaaaccctaccatatacactaacttttacaatgttttcttttgaaaagaattattcgagaatcaaaatgttgtaatgcatagttagataattaacatttcaagtaacgagaatcaattttgcttaattttagttttgtttgtttgtgtttcacttttttatacgtatctacaacatttacgtgtaacatatctcaactattttttcttttactttgtacctttggtcaagttgtacacaagcttttcaacacttctttatcagtcactatccacgttaacttgtataactaagattcattctttaagaaagtaattaacaaaacgattggttaaaaaataattcaaatgtagaatcaaatattgatttttatttataaaagactggtttgccaggttggtaggacttctaagaatcgaaaagcattatataaaaaattgttgtgtcacgcaaaaacaaatagaatattatattatagtgctatatagtgaatgatatgatatcttacaatgagattttagagatcacacgtatttcttttctagagaaaccagtttcaccaaaatgggaacatattcttcacagaactgtcttttcaatttgcacaccatctaattggaaaattatgtgaataaatggaattagttcacaaaaggtaagagaagtggatgttgatttttatttaaataccataatacaaaaggttacatataaatatttaacatttttgttataaaaaacttgtataactttatgatataattaaaacattacacatgtatgattctaattataatggatgctagtattaacaatgactatatgtgacaaaaattacaggaca

SEQ ID NO: 32386 - DNA, 647 bp, Medicago truncatula
  Intron number 2 from transcript Medtr8g025330.1 (locus Med tr8g025330) derived from phytozome v7.0 (chr-ID MtChr8; po s 5045239 to 5045885)
gaatagaaaatcaaacacatctacatctactacttgtaagtgatcttcattacttttatttagttttccccaataacatgtatttgtctcatacacataaaaacacatacttcaaaatgaaggaagaatgacatagaatcaaaacagtttaagacagggagtaaacatgtgtttacatgtcttttttttgtttaaagggtgcttaaatgtttgttataataatattttactttaccactctcttctgattatttccacagttttaaattagaacaaaaagattaaagttctatttgaacttttttgaatttttctattgacataaacacttgtcagactgtttaagagaacttatagaaacaatttatgagatattcattaactgctttcagcttatttccgtaagctcccaaaaataacttatgaaaatagcttataatttatacgacaataatttgactttattttatcattcgcattacctatccataaatacttatatgataagcgtttatgataagctatttatccaaacatggcttaaatgaaatataaagtttataaacttactaacttatataacaattatttgtatctttggattgtggacagacgcaaaaccagagcctagagaagaatttagtgat

SEQ ID NO: 32387 - DNA, 694 bp, Medicago truncatula
  Intron number 1 from transcript Medtr7g110670.1 (locus Med tr7g110670) derived from phytozome v7.0 (chr-ID MtChr7; po s 25812878 to 25813571 reverse strand)
agatttggtatgttcaagttcaacattcctaagctcttagcttatgcttttaatttccactgtttcctatttacctagatctttctaactaagaaaatgtcaagattactcttttcagatgtaagcaacattatgctaatttgttaaatttcagttttcatttatagttagtttcatattatagtcctgttattgaaatcaatttgtgataaataacattttggtctaatttgggtcccatctttgtataaagtttcattttttagtactcatattcatctctctactgttgttttagacaataatcaaaagggtcacaacactgttcaatttgaagttcctttgtcaaattcatggtggtagcttcctaatttgttgcaagattctgtgatattcatggtggcagtgtgtgttgtggcttattgagtttctgagctttggactaaggtaccaaacttgctcattgtcttctacttttgtttctatttggaagtttctttcaaccccttcaaatttgactttatagtttacctattattctaagaaaatgtgcgtgcttttgccttttgagctgttatctttgacaaaatcctctaacttaccttacctcttcacaggtttttggtgcaaatgtgagttgactattggactcattataacatatcttaatttgtctctctgagcttatatagat

SEQ ID NO: 32388 - DNA, 1033 bp, Medicago truncatula
  Intron number 3 from transcript Medtr7g130400.2 (locus Med tr7g130400) derived from phytozome v7.0 (chr-ID MtChr7; po s 30467887 to 30468919 reverse strand)
tggtaagcacgaaggaatctttaatttgttccatgaactatgtaaacataatatcaacttcgtatttgaattttttttactttttcttctattttgaaaaagaccaattagaatcaagttaatgaatcaaggtactatcttgatcaatcgaaaataatttagagataattatagttcaagaccacttagaagaaacagttttaaggactaaatggaaaggtgtattcaaagttaatccaaattcggccttagtctttgctgacacgcggcgatgattcatggaactcattttattcaatacatgttttttgtgttgtgattcaattatatagtttatgcatctgattttgaatattttttttcttttgtgatctgtgatttttcgacttctgaattttgttttttgttataaataatatgagatcacgatgatgactccataaaattcaagctcaacagaccgcagtgcagtgctttctctcttgagtgattgctttgcgtgtcgataaccccgctgaactgagtgatttctcttttatttttatttttcaactttttttattatttttgtttcaatttttggggaagaaaaggcgttgatgatgaggatacaaagctctctcttctgattttgaggtgaggacaattgcaggctggatcgaacccaaacaaatctagccaccgttgagtcaattctcttcccccttcaaacttttctatatatacagatactgctgtgaagacctaaaccaaacccaaacaagcctctccgccctctcttacaactcattctttgcatggtttgtttgtattttgattcaattatatagtttatgcttctaattttgattttttttttcttgtgatctgtgatttttttacttctgaatttcaatttttactttggtttcacattggtttttgtgcttcaaattgttttttgttcagtactttgttattcttggtgttaattttgttgtttttgaaatttcttacagcttccgtggtgggctctttgcttgctttcactgtc

SEQ ID NO: 32389 - DNA, 610 bp, Medicago truncatula
  Intron number 2 from transcript Medtr8g026950.1 (locus Med tr8g026950) derived from phytozome v7.0 (chr-ID MtChr8; po s 5960596 to 5961205)
aaaagcaggtgaatagttctgttgcatttgattctttccctctttttcttgatgtttcatactttatactatttcccgttttctagttcaataattttttattggttggtgaattctcttattcggtggatgtttcaatttgtgtttcatatttaaaaatatggtaatagtgtttttgcttgtaagcattgttgttctattgaaaattttctaaatttaacttttgtattcatgcatagtgaatgccaagaatatacgatttcactctagttttattgctgaaagtgaaacttcaaatactattgaatgagttgaagtatacaagctctaatagaatatatagactaattctatgcaatgctaaatcaagaactaaggaaactgtaaatacactaatgctgattattgcaattattatgctcttaataattacaaatgtgattctacctatatttacaacaattgttttccattgccagtagctatgtgttacttaaaatctatacttattgtgttttcttcaactattgtaatgttagaagggtgtgggattgaaatcagtattaatagacaaaaacatgttttcagtgttgtgtttacttagcttcag

SEQ ID NO: 32390 - DNA, 430 bp, Medicago truncatula
  Intron number 1 from transcript Medtr7g104980.1 (locus Med tr7g104980) derived from phytozome v7.0 (chr-ID MtChr7; po s 23944566 to 23944995)
actctctctgcctctgaatctgatcctcccaccatgtaagctttcaattccattctctttcttcacctgtttctccaacctctgaattttttgatctgcattattccccttttaattctgtcattgtgatgtcataggcttaatgggtaattttcctttatatgatatatgattgatgcaatccgtaagaatttgatacttatctgcttctataatggctagttacattgtgtgtgagtgtgcatgcaaataatgtgatttatcagtgtattttatgtggaaatgatgaaatttctacattcttaatttcctatcccccttttaattgtgattttgtttatttaattttagttcctaatgttcatatattttcttatctactatgtgatgagcaggtttgacaggagtattatcaaaagggaaaatcctt

SEQ ID NO: 32391 - DNA, 619 bp, Medicago truncatula
  Intron number 1 from transcript Medtr8g040010.1 (locus Med tr8g040010) derived from phytozome v7.0 (chr-ID MtChr8; po s 8495103 to 8495721 reverse strand)
tgaatatagagataaaagatataacactacactttgtaagtcaaattctttactatattggcttataaaaaaaaagtttttgaaaattcttgaaagttttgaaaatccaaacattcggtttgattattcatacataaagttttgttttcaaaaggtccggttgaatattaatatcagatattttgaattctaaaaccgaaagtttgatctttcaaaatatccggtattaatatttaaatcggacattttataaacaaaacttacaaaattggatatttttaaaacttttgatatatatatatttttttaactttagtgctcgctccgtccaagtttaactaactcatttgtaaaaaaatattgtcccaagaatcttgactcatttcacttttcaatacaacattaatttttttttttcaattataactctaattaatattactttcacaactttcaattcaatatattcaactttacatttatgataaagaagaatacaccaatacttgaaaaaggcactcaaaactaattttctctctctttcctttatacacttttcttaatctctgtgaaatggaaaattggctcagttaaacttaaactgggacagagggagtat

SEQ ID NO: 32392 - DNA, 974 bp, Medicago truncatula
  Intron number 4 from transcript Medtr7g143690.1 (locus Med tr7g143690) derived from phytozome v7.0 (chr-ID MtChr7; po s 34547279 to 34548252 reverse strand)
ttgtgttgttggctgttggaacaaccacaagtcaggtactacatttttacagccttacaaatttaattgtttggcttttaggctattttataagaagatatctaagcattgtgctttagtttattgactatgcatcgtaagctgaaaaattcaatgtctgtacatgatcgtgtagttctgatacaatatgtcggaatatattacattatgtaagtatcacattcgatagtatcattttcgtacagcatagatgatttctggaaggcacctttcctgtacttcttctacagtttactttcttcctcctaatgatattggtctttcctataactgaaactatgttggcgaggtgatattaagtcttactatacttaaccgtgtcgaaaagtttttaaattaattatttattctggagtgataattgtaacttactaagatcattttagcttcaaatatgagaatttgagaagtacattattgcattaaggtgtttttaaagaatgtcaaccgaatattggcttcctgccttcctctgagaacgctgttgtcttagaaaggttatactagtttaaataagcataaaattgaaacagagtgccaaagcgtctcaaatgcaacaaagctgctgatatctttgcatgttagtagttgaaacttccttgaaataatcatgtgaactggacgtgagagatgctatgaacttgcatgttaagttacatgggatttaagctcccaaatacaacaaattaagaatagatgccctaaatggccacatcacaattacacgaattcaatcttcttgcactgacttaattggttcaaaattttccctttatcgttttatacaaagcttttgttttttgggtcagtatattgggaaaatcatccctatggttcaatatgttattgagatggaatctataatggttattgttttaggtcaagggctgtggagaggcttcctgtgactccat

SEQ ID NO: 32393 - DNA, 517 bp, Medicago truncatula
  Intron number 2 from transcript Medtr7g103990.1 (locus Med tr7g103990) derived from phytozome v7.0 (chr-ID MtChr7; po s 23473495 to 23474011 reverse strand)
acttctactgagttgtcccatttgcgtagagtcaggtacttcttctttcaactaattgcattgaaacacaaaaatatttccttttttcaatgcccctttatcagtttaaggtgaattatatatatgttctctttttgttgctttgtaggtatgtatgctagaaaaattattagggtcgtgtatttttccttgtttttatcatagttaggtaatggactaatgggggagttgtttttcatttccttagtaatttcataatactttaggatttggccagttggagatgtattgattctggtttgattgacttatttgagtttatttgttgatacaaatacttgtgcgactgtttggtaaaacttatggaaatagcttatgacatgtccaacttatttccatatgctcttgaaggtagcttatggaatgagtttatagtttatacgaaagcagtttgacattatattgattgatagtattgttgcgatttgtttttgtagagaagcctctgtagctttga

SEQ ID NO: 32394 - DNA, 827 bp, Medicago truncatula
  Intron number 1 from transcript Medtr8g073770.1 (locus Med tr8g073770) derived from phytozome v7.0 (chr-ID MtChr8; po s 14506555 to 14507381)
tttgtacgtctcctccacttcaaaatcatttattttatattttacattttgttggctcataattttgaatcttttttcattgagttttatcgtataattttgaatttgaagcttaatatgacctttaccctgctagagcatcagtgaacacgagccaatgacaaagcataattctgttttcattattgttttatttgcgtagaacataattgacagctatcatatgagatgtgataaggtttatttcatttattattttctttatgccttcctttcatttatggtatttctttttttttttttttttaattatggcaggatgagtaaacagtcgtggtggaggtacaccaaggaataagaagcatatgaatggggaaaagggtttttgtgctcacttataacaggtgaatgagttatttttataacttcttttttatttgtgattgctaagagttgttgaaatacattataagcttcaatttagttcatcagctatcacaattttgttcctctacgattttcttcacgggacatatgaatggggaagtcaggttttcatgaactccaacattgatttgtttatttcctaaattttgtttttttaagtgattctttatctcatattattcccattctatcttattataatgacatagaatgattgtgggaacaaatgtttttgtttacacacatgttccttttttgagttcatttttattgtgctatttttttgccatttgcccatttattgatgatctggtcttggtgtggcattgaagattgattatgcagcaaaagcttggtcaagttttgtggatttataaagt

SEQ ID NO: 32395 - DNA, 481 bp, Medicago truncatula
  Intron number 2 from transcript Medtr8g073770.1 (locus Med tr8g073770) derived from phytozome v7.0 (chr-ID MtChr8; po s 14507392 to 14507872)
gaagtttgtcttacaagttactactggttgtgagaaaatagagctaatgataatgaagttctggtcttggtactgtattgacgttttaccctttttttgtaattttttttttcagaaattatattgattaattttttagttgaatattgtttgattataatgtgaacaaagttgaccttcttctttttatgctgttattttgttaacatcttgtgatatgatcattgataataatttttatatagcatgaagctaaaaaatcctttgttttttttcctgaacatttagtatttcttactttatgatcgaacattttggttagatttgattcatgtaatgatttcatttagtgagataagactttgttgttgttgtagtatactcttggaaccatagccaaatttaaaataatttgacataggaagtataaactattttagttgtagttttcaaacaaaattttccccgtgcgtggcactgg

SEQ ID NO: 32396 - DNA, 540 bp, Medicago truncatula
  Intron number 1 from transcript Medtr8g025310.1 (locus Med tr8g025310) derived from phytozome v7.0 (chr-ID MtChr8; po s 5035202 to 5035741)
ttgttccttgttcagaagaacaaagttttcaacacgttggtttttgtttttttatatttttttattgatgagcaaaattttgttcctcttttcttttccctttttcttttttgttataataagagtactaaactagtaaacttctctttttttttttttgttagaataagagtactaaacttcttatcgtcgtaaatggatgtccacctaccattgtatttatctcttaaatgctaccgtattatttattccctccgttttttaatataaacaaattttacattttagattcattcaaattcttctaaatcacacatatttgtacttattttaagtacttaactcttaagtcatgttgtacttctctataaatagatatcacatgtaacattattgtataacacaagagaacaatataatcatttctcttctctttaatcttgtttttgttgttcttattataatagtttcataataaaaacaatataatcattgtttttcttgtttccttcagcaagctgacaccgcttgtgttggagg

SEQ ID NO: 32397 - DNA, 534 bp, Medicago truncatula
  Intron number 1 from transcript Medtr8g021190.3 (locus Med tr8g021190) derived from phytozome v7.0 (chr-ID MtChr8; po s 3850029 to 3850562)
attcattcaaacctagcacccaattccgtttcaaggtataatctactttctattcttcgattattttattattattagctactatcgtttaatcgatcttttcttttgatccgtcaaatttaaattcaattagggttttgttcttttctttcatctgattgaaatccttctgaattgaaccgtttacttgattttactgtttattgtatgatttaatcctttgtttttcaaagacagtctttagattgtgattaggggttcatataaatttttagatttggatttttgtattgtatgattcaaaaaatacgtcctttaattagattagtacatggatattttttacccgatttattgattgtcagggagaatttgatgagcaagtttttttgatgtctgttgtaaattgaattgattataattgctgatctgctgcttccagttttcataacccatattcttttaaccttgttgtacacacaatgaaaaattggtgattgattcatttgtttttctttgttttggattatacag

SEQ ID NO: 32398 - DNA, 865 bp, Medicago truncatula
  Intron number 3 from transcript Medtr8g137700.2 (locus Med tr8g137700) derived from phytozome v7.0 (chr-ID MtChr8; po s 33043664 to 33044528 reverse strand)
gagtggtgagtatttgtttgggagtagtacatttgttcgctatgtttggttgttggaatatttgttatataacttgtacattgctcgttttggacatagaagaatcgcagattcatgtaagatggtgtttgttatataggttactttttaactatgttgtgtttaagtggattggttttgccatccaaaaaggattaggggcactgcttgttggtcgcttgcctgccattcctccatgatttttttttttcctttccaaattcaattaaggattgaatagtgctgtacatttgactttgtgtgacctattaaagtgacctatctagcattccatgaatcttgtttttttatgcaagagatgctctacaagtaaaagaaaagtaatttccctttatataataggattgatatcgtatttatagtcgtgtcattagtcgacttttgtgtaggaaatactcgcacttaagtatagtcatatgtcaaatgggaatggaatgcttgttttcttgccatttgaggggcgttaggacttaggatatgcaacttagataacacttatagtattagagcctatgcatatgttgtttctacaatggaatagaaaatgaggataaactctgcataagctgaaatcagttttattcttacgaaaatgagttcataagttgtttcataaactatttttttaagctttttcatgtgcttgaacaagtttcagttaactcttttgaacccctcttaatagtatttatcacaaccactgaagattcatactttgttttgatggaagaagattatctctcactacttggctgatttaaatttcttgacagtaaggactgctctagttgcattgattgcattc

SEQ ID NO: 32399 - DNA, 379 bp, Medicago truncatula
  Intron number 1 from transcript Medtr7g103750.1 (locus Med tr7g103750) derived from phytozome v7.0 (chr-ID MtChr7; po s 23359284 to 23359662 reverse strand)
gaacttgatagcagaacatcttgaaggaagatcaggtgattcatcctcaccttatttttaagaaaatatcataagtttatgtttggatagattctagagtaagtgcatgtttggattcatgaagagtttagtataatcatgttatgtcacaaagtgatattaacaaaagttgtatttttttaccttcaacaaaatcaacataacatatcaatgtgattttaaagtatttttttgaagtagtatttctaaagtttaatacttttttaatatttataaattggggtgtgaaaaaaatcaaaccttgcatgtattttaatatatatatttttcaattttaattgcaggaaaaagttgtagattaaggtggttcaatcagcta

SEQ ID NO: 32400 - DNA, 993 bp, Medicago truncatula
  Intron number 1 from transcript Medtr7g104450.1 (locus Med tr7g104450) derived from phytozome v7.0 (chr-ID MtChr7; po s 23681719 to 23682711 reverse strand)
gtattctcgtgagtacttcattttctcatcatttttcaacttttttctttgaccctttttttaataatataataataaccacgttgaacttgcttgtcttgtcttgtgttacctgaaaactatgtaattatgttcatgtttctccttgtctctcaaaatctatcaaaaacaaattcagacactagacacaacaaaataccgacagtcattgaaaaaatgacacttcatatatatcagaagatgacgcgtgcctgacactgaaacacgcttaatatgagaagtgtctgtgattcattgctcaaaacttgttagttttaaggaaggtgttctgttttttcttttttggtatagatactagtacttctctgtttctacaaataaaagttcaaaaaaagtgttaccctttttcactttagtttttagagtggtgattctagagattagttatatggggttttgatgactttgtaggagaaagctttatttcaatgattatgattatggtgtactatattattaaaggttgcagcttttgcactttttctattaaaacatttaaaatgttgtcactttgttggtttgtgaacactttccattgtatatttttgtttaagggcacttgttaaggatttaaaattgaaaacaattgaaatctttcatgtagaaaaagttgtctttggatgtttcaatgtgttgcatacacaaattccaagataaattttccattttaaaagaatcatggagatattgttaaatcatccatacacctattttgaaagaactatgaacagaaaaatatctgtcatttaacagttttgagaagaaatgattacaatttcccctcatactctatgcagcacttacacatattgaagacgtgtgtggttttcgacactgacgcgacattcgaagcaatattgtgtccagtgtcgatgtttcatagaacatactgacatagtttaattgtttgtaaaatgaaaattgtagttggga

SEQ ID NO: 32401 - DNA, 968 bp, Medicago truncatula
  Intron number 3 from transcript Medtr7g139920.1 (locus Med tr7g139920) derived from phytozome v7.0 (chr-ID MtChr7; po s 33592539 to 33593506 reverse strand)
atttccttggagaggcgagttgcactttatcagaggtcagtataatatattatccactacagtatttcttttgtttgtatttttctattatcctaaactatccattccattcacatttactaggtgacaaccatttcccacccatgtttcaatccgatcccatagaattaagccattattttttattttcttctttcttttcaagaaacctttaattaatgctagaaatttcgttggtgatggactattgacctcaaatatattagtcaacttttgggtggcccacattctgcaataagacattttctttagttcttcatgaattaacttattttaatattaaaaatcttttaattcaaaatttgatgagagaattttatggaaatttcgttccatggttttgaaaattattttaaaataaatgtttgattaatgaaatttcttagaattatctgtttcaagaaattagaaattgatagttattttgttatagtaaatgttttatttttgagaataatttctttagtttgtaacaaacatgagaatccatatttctaactttcacattttttagaaaatgtaacatacaaactcttgcggaaatataaaaaaaaaatacccaaatataatctcatatgtacagtcttcaaagtttctcattattgaaacttctatggtagtatattaaataaatatttctatgttaaaatgactaatgaatcagtctctttagtgtgatcaccattaatttcattcagtaataaaattatgcatacatataacgttacaaatacacatttcaatgaaataaacacacatgtagctggtcagcataattatagttgcttgctaactctgttgcatccagaattaagattatagactttgtgtgacattggtgtctctattgtttttgtgtgatgtggttaacagatagtgaccaaaccaagccggagcttaactgtaaa

SEQ ID NO: 32402 - DNA, 389 bp, Medicago truncatula
  Intron number 1 from transcript Medtr8g026840.1 (locus Med tr8g026840) derived from phytozome v7.0 (chr-ID MtChr8; po s 5927392 to 5927780 reverse strand)
tcagagcctaaacctgcgaactcattggcaaacatgtttccttcaccctcttacaatagataatagaaaagatcacatagttaatcaatatcttttttttgtaagtcaaaaaacaaacatcaacatgtttctttttaacgtcagccctagctttctagcgaaagaaattccaatttctttttaaattttctttctctttcattcatcaagaggggtggttttaggtcattttttaacttagaatcaccatctgcatctttcttttcccctttctttcgatctaaataagtgatttccacatatatccaggttttcttttgtgttttttttttttttatgatttcgtcgtctaagtgcggtgttgtgttgttcgtcgtcttgtgcggcgt

SEQ ID NO: 32403 - DNA, 838 bp, Medicago truncatula
  Intron number 2 from transcript Medtr8g133690.1 (locus Med tr8g133690) derived from phytozome v7.0 (chr-ID MtChr8; po s 31968708 to 31969545)
ttcagtagctactgcatttgctggtcatcaggaaggtaatgcttctgtataattcacctttttttaggtttacttatttcggagtatgggtatcgattcgagaacgaaaagatctactttctgaattctgaattaaatcttatcatgaatcgtaacatacatgaccgatacaaatggggtggttgggtagctcaactagtttgagctaagggataatgaattggaggtcctagtttcatattgggacggagagaaaaacaaacataacaacttattactaacatttgtcgttaaaccgatacaaatatattattttttaagtaaaaacaagcggcatataaaaattaaagaaacatgtttggatatacaaaattgaaagaaagaaaaaaaaaaaaaaaagtggctgactacactaagtttaggtagtggttcatttgagtaaaccggtactcatcatggtgaatcgggtaatgcatcgggagacaagacgagattcgtgttcaaaagagataagagattcatattgattagttttagttttgtatggaattgagatatgattcacttgtatcataggatgttgatgaccatgtttcagagtattactcatgtcatttcatttaatactatcctgaaatttaggattcaaattagcaaacaattggctttataagcaaagacttgtattatctttctatattcaccatggtttaagaacagcaatatggagtttttgttttatctgctcggtaatgtgctggcttcttatcaattgtatcctgctgttgtcattgcttaattagctgtgcaagatagagaccacaaatttttaagaaga

SEQ ID NO: 32404 - DNA, 417 bp, Medicago truncatula
  Intron number 1 from transcript Medtr7g108370.1 (locus Med tr7g108370) derived from phytozome v7.0 (chr-ID MtChr7; po s 25525104 to 25525520)
tgtgtgtagtcatttaaggtcttttgtgttcctgtttctttaaaactctttgatttggagcattttgatctaatggttgtgatgagatcttgaggtttaaatctggacctctggattcatccaacggtccagattaaaccctgctgagtttttttttatttcttttttttaactgttttttttttctttttttctttttaaaatactgtttttacaccttttttgacatttttgtgtttagaaaaattcctaaaaattcctatatatttcttgatgtattttgtttttatttttttttcttttctttttctttttgattgtttctttttctttttcatgattaaaattgataaaaatatatgtgctttttttttgtgttaagaaataaagtgtaaaatattcctataattgtgttat

SEQ ID NO: 32405 - DNA, 888 bp, Medicago truncatula
  Intron number 4 from transcript Medtr8g134240.1 (locus Med tr8g134240) derived from phytozome v7.0 (chr-ID MtChr8; po s 32244546 to 32245433)
tctaggacagacctacctgaattggacaagaagaagtatgttttcattttatgtttctctttttgcattttttttaaattagttctaaactagattatcaactctctctttttttttttttggtgattttctaattattcagaatattcaacatcatcattgtaatttataatgtttttatttaggtgaatgaaatttctggtttttgtgtcatacttttaaaagtctacctattaaatttgtcaattttgtatgtgttgtgatggaaactcgtatcaggtggtttgagctggtagagagaattcttgtagattatgtagtaatgagagttgataagatggagggtagttaaatcactagacgtggaggaagaccgagaaaaactttaagggaaactattaagaagagtgttgagattaatgaaatggataaagatatgatgcatgatagaatgttaccgcgttgctcaattcatgtggtcgaccacacctagtgtgataaggctttgttgttgttgatgtatgtatatgttgaaatctatccatttgtattttccacgctttagatgtcttacgcctgagcataaggatggtgttgaccgtagaaagtcctaatcaactagagcttataaagcttgggaaatcttctccttaaaagctgattttgaatttgtatggttgagtctgaagctaaattctaaggatatattatagaattatttttggtgatagcaatataggattgtctctcttatgttttctgatcttttttcatttattgtaattataagattgagcaaaaatgcatcattgaataccaattttgatttgaagggcctaatctcatatattttgttttctctcttttagatacttggttcctcgagac

SEQ ID NO: 32406 - DNA, 681 bp, Medicago truncatula
  Intron number 2 from transcript Medtr7g133410.1 (locus Med tr7g133410) derived from phytozome v7.0 (chr-ID MtChr7; po s 31193888 to 31194568 reverse strand)
gaaatctattacaaaagtgattaagagtatcaaaggtaagaatttacacactttttaaatagtaggtatttgtggtcaccattttgatcctatctaaaaagagatgttgaaaatgtttaaccgtgtaagagttcatttgttttaaagattatttggagataaaaccactttttttaagaaatcattttttatgttttaaattatatcgtgtgagcattttttttgaggaaaaaaaaaatcatttttagtagaagatggagatatacaacaatgacgtctgtttttttggaaagtttctaaaaaaaattgtctctagatcaatttacatcgaaattacatttattttgatctaaacaaagcctaaattaatctctaaatcaattaatcaatttatatcgaaataagattattttgatctaaaaaaccctaaatagatgttttttttttatgaaagactaaatagatgtcggtttgtgggtatgtaatcaaaccctaatgaaataaactgataaatcttgagaaaaatcaattaaagcgattaaattgagttattagttgtatacttgtagccaaaaaaatgtctaacattttatggtctgtaattggtctatgcaaatcgatttattgatttgttaatattttacttacattttaatcatattattggaattggctttgtag

SEQ ID NO: 32407 - DNA, 699 bp, Medicago truncatula
  Intron number 1 from transcript Medtr8g093340.1 (locus Med tr8g093340) derived from phytozome v7.0 (chr-ID MtChr8; po s 20469612 to 20470310 reverse strand)
gatcccttcctcactctagttgggatattaacaaggtcagaagttagtttttttctattctatttctgtcaagattgtctgtgcttgaaatattaatcttagattgcaaaatgtgatactatttcttaaggatgtcaagttaatcacaacatggagtgtttttagtgcagcattttaatttttcaggcattacattgacaatatataataaaccttgataatgtgttctttgttttataattaccttgataatatttgtgagttattattatgaagatgagtatatgaccagttggttgttaaattttgggggattcggcttaattaagaaaatcaaaggaaggttgatatggcattggcaatacaatccatgcatgtatatatgtaatactaatcattgatgaaaaattactcgctatacggtccaaacattaaaatgagttgctcactttagaggagtcggatccaattttggttctagtgacgctggataattttgttggtgatgttttcaatgatgtcagtctagacaaatttctgtgtgaaatgcatctgttatgaggatctaaatggttatatttgtttagttatcagttaccacgagtctttgcctttgtattttggttaggataagaaatttagaagtgtgcattggattgtgcagttttgtgttgcaacggaatttgtaaggtgtcgaaa

SEQ ID NO: 32408 - DNA, 434 bp, Medicago truncatula
  Intron number 5 from transcript Medtr7g126990.1 (locus Med tr7g126990) derived from phytozome v7.0 (chr-ID MtChr7; po s 29677527 to 29677960 reverse strand)
tgtgtacagggaggcaacttcacaggctgcaacaagtattcttctactcctatatgcattcactcataatcccaacaccatacaaataatataagtataacttaattctttcaataaataaaaaataaagtataatttgtttatacatataaattggttttcagttcacttcaaaataattgaaagtaagaaaatgacaagacattgaatgattggatgtcggttatcataccaacaagactctaagccgtaagagtgttcactaaaaagtgatgctgattgaaactatatatatttaaatgtcattattagcagactaacccaaagtagagagatattgcactgcatagtgcatacaaatgcaaggttgatttgatttaaacttgttttcttgtgcagcaaggtgataggagcaaaatacttcaacctcgacc

SEQ ID NO: 32409 - DNA, 813 bp, Medicago truncatula
  Intron number 2 from transcript Medtr7g133400.1 (locus Med tr7g133400) derived from phytozome v7.0 (chr-ID MtChr7; po s 31190070 to 31190882 reverse strand)
gaagtccattatagaagtgattaagagtatcaaaggtaacaatttacacattcattagtgaccaatctatatagtatgtaattgtgtcaccagtttgatccttgattggtatatttcttaaaaaacatgttggaaagtttgactccttaagagtgcatttgtttatgattgtttggagataataaacccccctttttttttagaaactattttttatgttttaaataatattttcaaaacctttttgaaaaatcattttgttaaaaaagtatgttgaaaataaaatgttattttgatttttttgagaaaaaataatttttaatagaagatggagaaatacaataatgacttccgttttcttaaaagtttgggtaaaataatctctaaatcaatttatattaaaaatacattaatttttatcttaacaaaccctaaatagatgtcggttagtgggaatgtaaaacatatgttaaaaatattattagatcttttttaaaaaaaaaagttatattagatgtacactttttttcaaggaatattagatgtgtacttgtgccggaaaaaatcaagcattgatctgtgcaaatgttgaagagaaaaaacaataaaattttgttattttttgtaattgatattacattttattttctataattagtctctacaaatctagtgattaatctttacttacacttaatcattattggaattggatttgaagatgtatcattcgaatttctggggcaattgatccaaataagctcttgactgaaataacaaaagctggaaaacatgctagactcattgttgcag

SEQ ID NO: 32410 - DNA, 598 bp, Medicago truncatula
  Intron number 2 from transcript Medtr8g147730.1 (locus Med tr8g147730) derived from phytozome v7.0 (chr-ID MtChr8; po s 36439656 to 36440253 reverse strand)
acttcttggaagtattgacattagttctgttggaggtaaatttattaattactccttcaattgcttctgcttaacgtcagattaatgattcagtttcaatatctgtttgtccattttatggctacaaaatgaatactcctatcatgaattttagaccacaggtgaggaagatttttactagtcactcaagattgtgtctagtataacctacgaagcaccgacacaatataagtataacctatgaagcattgacacatacaccagacccgacctgaccctgacgatgacaggtcaggtgataatttgataaaatgaattaaacgaaagtaatcacgtgtgtaggtcttgtattagtgtcatgtcgaacacttgacacaatttgattaccattgctagatagagtataactcataaccttactaattgtcaaatattatgtaaaacaaaacaaacaacactcatttcaaattgtacgtttttcttgcctcgtactagctaataaagatatctttgccaattttttttacctaactttcaatattttttgttatgaattataaaagaaactctggagccagaagtgaagttcctgagcctt

SEQ ID NO: 32411 - DNA, 586 bp, Medicago truncatula
  Intron number 1 from transcript Medtr7g134960.1 (locus Med tr7g134960) derived from phytozome v7.0 (chr-ID MtChr7; po s 31997135 to 31997720)
agaatcagatcaaagagcatttggtacctttcttgaaataattttgttttcatgaaccagattagcctaaatgattctcagaatatgaacaaaaatgccatattatgtcaccctctatctctaatatgtggagatagtttattagttgatcaatcaaaatgattaatcagaagtttggcttggtggctctgtgacctagcagcaccatgagctccttgagtagcctagtggcgagagtcccacacattaagtgtgaagaagtggagaattgcggatttgaacccgcgccccaacacatcaaactgtttttgggtttgaccatacaaatataactactaaaaataatgttcatacataatgtggcctgtgtagcgccggaacaaaactgaaagatcccactaatcaaggcctgaaactttcatcacttatccctgtgctaattgttttgtttgtctctgcatgctgcaactttatttctttctaaagggatttgagcatataaatttagcttttttcttggtttctaagaaaagttatatcctggttgacaggttgttaataccctgccttctcattcaaattccgt

SEQ ID NO: 32412 - DNA, 933 bp, Medicago truncatula
  Intron number 1 from transcript Medtr8g130000.1 (locus Med tr8g130000) derived from phytozome v7.0 (chr-ID MtChr8; po s 30893673 to 30894605 reverse strand)
cgatcgtgtcttctatagaggctggcaagctgttggtcagttttattcttcttaaagtttctattcattaattactttcattggtttagaagattaaattattcattttatcaataaagacgatagtttataatatgaatatgaggcctggattggataaacagcttaattaagtgtttatagcataaaaccttatcataagctatatctataacaaaacaaaaaagtcaaattactttcatataagttgttttcataagctatcatgaagaacatatggaactaagctaaaaataacagatataggcatgttataatctctctcaaacagtctcacaagtgaaacaacaaacttatgtccatatgtttcttgtctgtggggatacctatggaggaaagaaagatgatagctgatactgatatatgaatttaaggcctggattggataaactacttaatcaagctcttataatgataatgtgagttcttatcatataagttatgcgtaagctatttctgtaacaaaagataaaataaagtcaaattactttcatataagttatatgttgttttcgtaagctatcttgaagagcttatggaaataagctaaaataacatatggacatgtcataagctctccctaacagtctcacaagcggttatgcaagtagataaggtcatataaaccaattgaaacaggctatgaatgtatatgacatgggtgcatatggtaattcattacttaacttttgattcattatacttaatctgtatccagtggtttgtgtcaagtccattgctaagtactattctgcttttattcatactaaattctgatgtcatcgctatgatagatctgattaactaaactaaatttgtcttatgagaattttcttgacggtcaaaagttctcaatttcgtttatcaggatcg

SEQ ID NO: 32413 - DNA, 848 bp, Medicago truncatula
  Intron number 1 from transcript Medtr8g109480.1 (locus Med tr8g109480) derived from phytozome v7.0 (chr-ID MtChr8; po s 24558025 to 24558872)
taagtacaagtgctccaaattaaatttcaactagggtacgcctcttcaatctctcactctttgcatccacctctacaattttcgccgctacggtacttttaacgatttttcattgttgatcgtagtaatattatccttgttctcaccattgtcatatttattttgtatcaaccatcactgttactattatatatttgcatgctctgttttgtgatgctagtttagacttcaacgtaaaagttactatttttgtataggggttttgccaaatattaggtttttttttgccgtggttttgttaattatctgatttatttgtttctttactagcttatgtgagaatttgtggattgagctggaatttagttttcggggatttttctggtaataaaaaggttaggttgaatttgatattaatttggattaacttttaatcttaaataaaacaaattgaatcttgtatgttgtgtttttttttttccttcttgctttcttcattcgagtgctatgtttgtttctttctagtttttggagggacagaagctttgtactgctgacacatccaatcaaacgcgtgtccggtgtccaacactggcacattacattcaattaaatcattttatccatttttcatcggtgtcaccgcatcgatgtatatgtatcgtctagtgtctgtgtcagcaggatggtttgttgtttgaggattgtagtttcagtttcatgtttgatgatatgttttttcaccatgcatcgagtttatctttttcacatcgcatctatgcggatatacagcttatttgttgtccttatttctttcaaggttatcgatctattactattattcaaag

SEQ ID NO: 32414 - DNA, 467 bp, Medicago truncatula
  Intron number 2 from transcript Medtr8g129430.1 (locus Med tr8g129430) derived from phytozome v7.0 (chr-ID MtChr8; po s 30572509 to 30572975)
aggacatcttcaaacaccaggtatcctgaagatgtcatatcattgaacttctcatcttcacaaatgttaaattacatgaaaagtaaaaccatagtagtactagttgctacttggtaggcttatatatgtttctattttctaaaaaattcacaattttgaaagtttactatctgcatattttttattttttctctgttttgcttttttaggaattaaatacaaggacgaaaaacatttattttttgtaatttgttttaaaatagaaactaaaatcggacaaaatttacgcaggactaaacttgaaaagtcgtaattttatagtgactaaaacattctaattattaaaactcctattgatttcgaaaggacattatgatctacattaatttgaatatttactagttagcaaccatatgattttggaatttgcaggtaagagaacttcacagagtatacagtgtgcaaaa

SEQ ID NO: 32415 - DNA, 672 bp, Medicago truncatula; identical to SEQ ID NO: 32350
  Intron number 1 from transcript Medtr8g148820.1 (locus Med tr8g148820) derived from phytozome v7.0 (chr-ID MtChr8; po s 36838563 to 36839234)

SEQ ID NO: 32416 - DNA, 688 bp, Medicago truncatula
  Intron number 1 from transcript Medtr8g147530.1 (locus Med tr8g147530) derived from phytozome v7.0 (chr-ID MtChr8; po s 36348719 to 36349406)
tactctcacgtctctttcatcctaacatagtgcaggtaattaattaactatttttatctcagaaaggtttaattaattaattcctgtgtccacttcttgtcataatactcttttttggtttattttcttgtgttggtttagatttcacaggaaatcacaaggttccttattttgaagaaatgatattttgacatcaaatacgacatcttttggtttttatgtatgtgtattttttaaattcacgtaagttgtaagagataaaaagtaacaaagagataaagataaacatatacgatgtctttattattttagatattgcaactcttattttattattttaaaagactcacaaccacttaccactttagtgggggaaaatttaataccaacttgatgtcaaatttctttacttttgtgtcatgtttttacggatgcaacatgtttggcagtattatgttacatcactaacttatgtctatatttgatcatattcatgaatctaattttccttagactttagagttaagtaggtaatttcaacacaagatactacacatgcatgataaattacgagcgagttaacatatcaatgagttatttttttgtgtttgacagttgagattatttactttaatttactccatttaagggacttatttgtgatttttaatttacagtttattgcagc

SEQ ID NO: 32417 - DNA, 458 bp, Medicago truncatula
  Intron number 2 from transcript Medtr7g133590.1 (locus Med tr7g133590) derived from phytozome v7.0 (chr-ID MtChr7; po s 31281398 to 31281855 reverse strand)
aattgcagagacgtccaaatcccagagatcacgtaaattagaaaagcattatgttctatttttaagtcaacatttcataatttacctcttcaccgtttactaatatccccgataaataaaggaactaatcttctccattactacggttttcggagcatagacatgatgatgtgatattatatgagtttgatatgtcctctatacaccccaaaactatgacaatggaaaggaaaaatacagaggaccccttcctaataaagaaatatataaaaacaattatattctttctggctgtatacacatatatatttttctttgatgatcaaagagatcagagtatgtaatgtttttttttcttcgatggtcaaatatattagagtatgtaactttgacttactaagtggcattatatgatactaacagctgtatttttgctttccaagattaatacgtggggt

SEQ ID NO: 32418 - DNA, 556 bp, Medicago truncatula
  Intron number 2 from transcript Medtr7g094480.1 (locus Med tr7g094480) derived from phytozome v7.0 (chr-ID MtChr7; po s 21449573 to 21450128 reverse strand)
agaaaagtagtcattccagcaaggtatataataggtcatgggtttcgtaccttgtttgtctccttttgtttttctaaaacacttttttcaatacaaactatcttattgattgaaaaatttgctaatttttttttttattgaaatttaaatgaatctcattaaatttatgtggaacctacacgacgcgatgactcacttgaatttaaattacattgtcatgcacttcaattgactcacttttttgatttagcttaatttaaaatcaaatttgtttattcataatcaaaaagtggaagaagactatttggccttgagctcaatttttaattaagatctaggtgtatatatcctcttaaaaaatgcatattgaataaagacttgtgtttctaagataactcaaacaacgagattttgtttatgagataaatagatagaaagatagacagaaatacacaagccgaaatatttgtgttttattctatccaattggttaaactttgttttttattcctttttaacaggaacctgataagaaagagagaagaggacgaggagg

SEQ ID NO: 32419 - DNA, 657 bp, Medicago truncatula
  Intron number 1 from transcript Medtr8g102790.1 (locus Med tr8g102790) derived from phytozome v7.0 (chr-ID MtChr8; po s 22742253 to 22742909 reverse strand)
catcgatcgttcttctctgcaaccacctaagcaaggtaactaactaactttccatctcttaaactgtaactatacatccatatcgagattttcaaccttttcatttcgtatttttcacgctgattcgaatcttaatatgttttttgtttttataattaatatatcacgctcatccattttattgattaaaatttctgaaatcatcataagctcatatttacaccgttgaattattctttcagctcaggtttgattaattttgttcagcaattgaatgtgtgattaatgctataactgttttcattttttttctttctaataagttctaattattctttttattgtattgtttttgaagagttatgtattgtatccttgtgtattattgataattaccgtggtgttgaacagcagctatagcgtcattatagtttttagcttagcagaatttgaacaaattatttttgttctgagagactatagctaagttgcgttgaaatttgaacaaactgctattttctgcgatatgtgtttgacaacgctggataatgatgtcaatattgaatggtaaatgtgtaaattaaagtaacattgtgcaatgagtcgtgatgttttcctgcagggcatagttaggttagtatcttgagtacatacttg

SEQ ID NO: 32420 - DNA, 901 bp, Medicago truncatula
  Intron number 1 from transcript Medtr7g134920.1 (locus Med tr7g134920) derived from phytozome v7.0 (chr-ID MtChr7; po s 31981796 to 31982696 reverse strand)
cacacctaaaacaacttctcaacctattaattaaggtataatttctatcaataaatctcagtatcatatcatacatacttgattatttttttatttttttatctttttaacataattttcttgtaatttttactatattttacctaacctatactttggttctactcagttgacttatttctttcagatttccactggatttcaaataacatgattttcatcttgattaatctgttcatgtgattcacatatgggtattagggatctgtatgattttttttaatttatttatgggttcaaagagagttgaattaacttgtgtagtggataaggaaattaatcaattttaaacaaccatgcctataagttataacctttgtgatgatgaagatctttgtaataccatctactttctgcttcctttatagtattgtttggataaacaacttgatcaaacggttatagcacaaacacttatcatataagtgcttattatataacaaaagataaaattaagtcaaactgttttcatataaactataagttgttttcgtaggctatcacttatggaaacaaactgaaaactaaaggagcaatatcttagtctctatatttattggtggaacttgtggaaagtagactacaaaggaattatgtgggttgggtagctcaactggtttaagctaagctaaggaattaaaagagttgaggagtcaaaggttcaggaaaaatactaacatttgctgttaaaaaaaaaaaaaaaaaaaaaaaaagactgcaaggacttagtgtcgttgattaacttgccatttcctttcatgttccatgcttagctgttttatgtgtaagattataaatttttgcagctgaacttacttgggattttattaacttgtcaggc

SEQ ID NO: 32421 - DNA, 602 bp, Medicago truncatula
  Intron number 1 from transcript Medtr8g115630.1 (locus Med tr8g115630) derived from phytozome v7.0 (chr-ID MtChr8; po s 26005364 to 26005965)
ttcaagaaaaagggactaagtaagtttactcaatgctgtaatgttgtattaattaatatattatttgcagttaaattaatttgagttaacatgcactccatccatctgttatgatttagattgactttaaaatcatttgaagacacaattctttctgctttcctgttttatagaaatgcaacctcttgattgaatgttaatatgcacataagttggttatgtttatcttggtattgcggccatactttggaaaggttatgcttatcttggtattgtttccatactttagaaattcagctcatttaattgctccatccattccaatgataagttgttttgacagattaagaaatgcaattaatgttctatagaaaaatgaaagtatatagggaagagaaatttgaaatattgaaagaagagagaatattaaaaagtgaagggtataatagaaaatgacttataatttgggacgggaggagcaattaaatgatgtcttctattttgtttttggttattatgcctcatctttttcttttttcaagtttcagccatatgaaattatctcaccctttcgttttttattttttgaaaacatttaacag

SEQ ID NO: 32422 - DNA, 832 bp, Medicago truncatula
  Intron number 1 from transcript Medtr8g011610.1 (locus Med tr8g011610) derived from phytozome v7.0 (chr-ID MtChr8; po s 1581070 to 1581901 reverse strand)
agtgacaatcattgcttgaaactgactccaggtaacgacgtccaatctaacaatatcaatatttatcagttgagccagactttatgaactactccaccgtctctttagttactcgttttggtcttcaaatgtgtattttgttagtcacttaggtctgtttttggtttgacttatttgaatttatctactagcataatatttgtgagatttttttgggagtacttgtgaaacctgcttatgacatggtcacatgttgttatcaatttgttgtaagttctccaaagatagcttgtgaaaccagctaatagcttatacgaaaaatatttaacgttattttatcttttgctataactgtttagttcatacataaggacttatcatgttaaacacttaagctataaaatgcaaaaaagttgtttatccagacttgacctatattctcaagctcatcttccaaaaaacaagaatatcatttatatgtgactattgattgaattattttttttaacatgtcacatgtgtgtttagaagagcttattctgaaacaaaaagaaaagttttaataaccaacgtttctaaacaagtttatgaatatttatatttggaaaataatctatttctagatatcaactaagctacattatagttggatacaatgctggctgatttgtttaatttttactataaaagagaataagaaagtcttttgaaccattcctaataatgaactgagtttgtggtcatgtgtgtgattatggttaaaagttgagtatgtgagtcgtttcagtttccagcagacactggttagtgctaggtagcagtgtcaagcaat

SEQ ID NO: 32423 - DNA, 902 bp, Medicago truncatula
  Intron number 1 from transcript Medtr8g009260.1 (locus Med tr8g009260) derived from phytozome v7.0 (chr-ID MtChr8; po s 1280454 to 1281355 reverse strand)
ggaagatttggagatcaattggaggtagaggcgtatttgacacgtttgattgtatagtggtagaatgatgggtggtttttgactaacaaagtgttggaaagtttgaagttgtcacaattcaaacggttaggccacattataggaagtaaatctgccaacaagaattaaggaaataaatctgtatagattaaaacataaataaaggaaatagcctgtcctaataaaggaaacatttattcaacacagcctttcatttcaaaggcagtaaatttgatgccagtttggtgattttctgcataggtattgaaattggaaacataagatatggaattttttttttgaataagctaaattagcccacccaaattggcaccggggagaattgaccctgagaccttgaggaggagcacactcccaggtcccaagccaataccactaggccaacccaagtgggccataagatatgggaattaaaacattactaagtgagtgaccaggaaatgttttcaggttatttatcattcatcttgtcaatagcagattttgatgtatatataaagtatatatgtttgtaaataatgtttttatattcctcagtatctaatagaaaacacttctttagaagctgaaatccatacataagttgtgccagtcttctgcttattttacatgatgctagaaagtacacatgaaatttcaggcaacttccattttcttcattctgatattttgcctaggtttcttttaagtaacaggccgaagattgctgtgtgcttttgctacaagttttatagtcacttactcttccaatcgtggatatgtttttcatttcctaataactttcagtctgatttagtaatatatgtactttgattgtttgaatatagggaacagcattttcc

SEQ ID NO: 32424 - DNA, 1012 bp, Medicago truncatula
  Intron number 1 from transcript Medtr8g015210.1 (locus Med tr8g015210) derived from phytozome v7.0 (chr-ID MtChr8; po s 2618249 to 2619260)
gtttggatcataagagtcccattgtaaaacagaaggtataatcaaaattccgttttttttttgttctttttctggtttctgatttttacttcatgaaatttgattgatgtagatcttattcttatctgggttgttcaaagtttgatttttttgtgaaattattagtagtattgggtaatattgaattagatgatagcatgcataggtggaatgaaagagggttatgcagtggatttgaatttttggaatcaactttaagaggaatgtattatactttattttttttggtgggaaagtgttcggtcaagaggtaagtaaagtccgacaaaaattgtaccaatcaggaatgaactcgggttatctcaaatgactttttctttggtggaactcattaacaagtcgagggcaatcagttggttcgaatgtattatactattgttgttgttcatgattgtgaaattgcatgcttttgtttcctttttgattctttaactttctttagtgaaagaggttcataaggttgtaaggtgatagttttctttattaatttgcggctttgtctaatgtgcacaagtaaattagtctcgcaccatgcagaagtttgttttctacaattggatcgataagtcgcattatatcacatttgatccgagggtggaaaaaagcttgtgctgcaagacttgtctcacttgtggaccatagaattggcctcaatttgatgatatcttgaaatgaaatgaaattattctatgagaacacccatttgaagttcgaattaaattgttattcaatttgcgtagttcattccaatggttgttcctctaaccagtaaccatacttatatttgttatcaagcagtaatgtttggaggcgttgatatgaattatgaataaagggtcttaatggtttcagtgtccgaaattgtattagagattcatatattgtttgtctaaacttgttttgctctttttttgttgaaaatattgtttgcaggctttaagattgataaaat

SEQ ID NO: 32425 - DNA, 789 bp, Medicago truncatula
  Intron number 3 from transcript Medtr8g129150.1 (locus Med tr8g129150) derived from phytozome v7.0 (chr-ID MtChr8; po s 30393210 to 30393998)
cagaagggaaggacaaagtaggaaaggaagacaaggtactatgttagttaaagttgtgaaacattatttatatctagggactagggctttaaaatttgaataagtgaaattaatcaatgaaaacataacatatagtagtataaataaatttgaataaggtttgtttatgtctaacgtgcgctatggatgatgatgatacacgggcaaagtgggtccacgagatctagtgtttgtgatgggaagggtccagtgaatgtgaccactgaccggaataaatgggagttaaagaatgtgtcttagatattcaaatctcaaattcaaaacccttcttaatcaagggttcagattaattcatttcagctgcatttagatcattgttagttttgttatagtgtgatccagtgcattagtcacactgcatgtgtttcgttttatttttcaatattattttactattactattattatcaaaattggtttgaagattctgaccgggcttttttttcttttgtacctggcgaatgattaatgattcgttggatgtgatcttttgcttcagtttatttgggtgagtacttttattttactttgaaaagctcgtaatagttttgttttgtaatctttgaccagatcatcattttgtttttggcatattcctgcttcatgtacattttaatgatcatgaatttgaatgtttgtttatgtagtagattcagattctactcagtgttaattaatcatttagctcataaaatgaaatttttgttttttgttataatttaggtggct

SEQ ID NO: 32426 - DNA, 751 bp, Medicago truncatula
  Intron number 1 from transcript Medtr7g096650.1 (locus Med tr7g096650) derived from phytozome v7.0 (chr-ID MtChr7; po s 21661319 to 21662069 reverse strand)
gccttgctgctgttgctgctaattgcaggtgagaaatgataaattttgtgttgttagtgttactaattatgactattttgatgttaagtatgtttaagaatttgtttttggttttattgactttgtaatctatccgtacaattttgatttgatagttttatttttatgatagctgtacggttcaaagtagtatattgcagttaaattctgattaatgttgtttttatcttcttgtactatcagaatttctattttttgatggatatttgtttgcttgtgatttctgtgacgcccagttagagaatacaagtacaattcgttcagcaaaatgggttgggatgactttgaacttaacttttaccctatgtctagttttgtgggcatttgtagtgttctccatttagaatgaaatgaaaaaagtactatttttaagacctaatacatgtactacttttttgcttatattacatttcagagggagtatctttgatgttttgtgataattcttcaatttattattattatgctgtgaatgatttatgacttgcggttttggttgtaaaaatgtgttcctcaggattatcttgtttgtatgtgatatatgtggggtcaggtataactgtgttgagaaatgttttgttttgctgattgagagtttcatgtagcatgttaagattgtgttcttgacttcccatatggcttctgcttttgttcaaatgtaggtctcttagggagctagacctgcaagaga

SEQ ID NO: 32427 - DNA, 618 bp, Medicago truncatula
  Intron number 1 from transcript Medtr8g084140.1 (locus Med tr8g084140) derived from phytozome v7.0 (chr-ID MtChr8; po s 17294159 to 17294776 reverse strand)
gtagaggcagaaagcataatatccctaggtattattaatcaaaattttcattctaatcttactttcttatatagtcttggttttatatataaaagtttgtgataaatagtatagaatatagatttacttttgcttatattgtttcaaaatattcttatatgaattgttgttaatgaaaaacattttggttcaatcacatttgaatttgcatctagctttagtttaaagtgtcaatagtagagtgataagttaaccattttttatcattccaaaaattctttctaacttttctctggatctctttgatatcctttaggtctttactgattttaacctttatcttgtcctagatattgcattttcatgcttatggcaaattctttctatttataactacttgtttctgttatatagaatatgtaatgtgattgacttaacttgctatagttattttatgctaaaagcatttatagaattaagctatgtcctttcatatttatcttgtaaaactttagtaaaacttgatgtgttgaaaacattagcttaagttactttgcattgtaatcatcttcttttcacatgaataggaatttggaagatccttcagaaccttcaaga

SEQ ID NO: 32428 - DNA, 683 bp, Medicago truncatula
  Intron number 1 from transcript Medtr8g134210.1 (locus Med tr8g134210) derived from phytozome v7.0 (chr-ID MtChr8; po s 32232033 to 32232715 reverse strand)
ttgctgtgaaaaaaaaatctttaacttcattttttttccgtctaaattttcatatgcacataaattattttaatttttttaaatcatgtctgtatttttttcaaaaaatttgagtaacgataagtttatctaaataattagtaaaattttgttgaatcattattgaacaaaatattatatgttatgatttgatttgatcaattatatggtatagttgatatagcattttccttaaaaaaaaaaaagaagttgatatagtatttttaaaaaagtgcaaagtaaataagtttgacagcaattattatttaaaaaaaaaaaaaaaaagtttgacagcaattattgatattctttaaaaaaaagaaagtttgacagcaattttccttaaattaataaaaaatatgagtagctgaaaaagtgattaccctttgagcgtggaatccacctttactagaattgaattgaattcaccaacttatttccaaatgtattgacggttgagattgattgagtcataatcaaaaccgtccatttcactgactcgacgcacataccaacggatgaacctaaccaagattctcaccacgttcacgcgtctttcactgccaacttcttctttactgtttgttgaatttttcctataaattggagactcatttctcacgtttacactcgcacacctccaa

SEQ ID NO: 32429 - DNA, 1027 bp, Medicago truncatula
  Intron number 3 from transcript Medtr8g122510.1 (locus Med tr8g122510) derived from phytozome v7.0 (chr-ID MtChr8; po s 28716830 to 28717856)
tcttggatttaagactcccagagaagccattgacggtaccatttcgatttctttatgtatttcatcagatgtgtgtgtactctccattgcattctgaatcttctgttgtctagttttactggatctaggttttctctattgttagtattattattattattattattatgaatgaattataaactgcattttgaatttgatttagtggtggtttgtttgtgaagcatactaacgttagacatatgtctaataagagaacgattatttcggtccttaaatttgtcaaatgttgttgtctctgtaagtcttaatgtatcaaaattacaaaacatccttgaatatgttttacattgggagtccatccatgaatgtgtcttttgtttgtttgtttgtttgtttggatacactcacggaacatagggaccgcctgaaacattttaggatcaagatgatgtttactcagttatttagtctgcgaaagctgaacctgcaatgaggtgttactatacttaaaaatttagtgtatattatttagttgcgattatatgatacaatgaagtgtatattgttttatattaattgtttgttaatgtaagcctttgaaattcatatctgtgatttgtgacacaagtgtatgaacaatttttaccacgttatccaatacaacatgagagtttaggtctacatatgcagaaatgtaaaagcattgatatttttttcattcgagcattattggtacatagttgcaaattgtaacctagcaaacaaaataataataatctgaaatatatttactttttagaatccatcttttgaatagagagaccaatagctctcgatatccctagtcaaaacacttttcgccattgtgcatgtcatgactcatgacattatcttcttgatgtgcttttaccattccaaaaccaaatagcttggttctttctttctgcttctaatcgaaacacttttatgtttttttttttttaaaacaggaacctacattgacaagaagtgccctttcactggc

SEQ ID NO: 32430 - DNA, 682 bp, Medicago truncatula
  Intron number 2 from transcript Medtr8g021880.1 (locus Med tr8g021880) derived from phytozome v7.0 (chr-ID MtChr8; po s 4195905 to 4196586)
ttcttcccttccgtggattttgtgctagaaaaggggtaagaattaataaatttccaaagtttgagtaatctctattaaattcctacatttacatctgaattagaaattatatttgatgaataggataaatttcccaaaaaaatatgtcatgtttattatgtttatatataggcttaattactcttttgatccttaacttattttttggtttcgttttggtcccttaactattaaaagtttcgttttggtctcttaacttactttttggtttcgttttggtcccttaactattaaaagtttcgttttggtcctttaacttactttttggtttcgttttggtccttaactcttccttcgtcaaccactttagtcctttatgttaggatgaatgtattagagttaagggaccaaaacgaaaccaaaaaataagttaagggaccaaaacgaaaccaaaaaataagttaaggtaccaaaacgaaacttctaatacttaagggaccaaaagaaaacccaaaaataagttatgggaccgaaacgaaacttttaatagttaaggaaccaaaacgaaatcaaaaaataagttaagggaccaaaagagtaattaaaccttatatatattatatacaagttgataattatgaatgttgatcattttagattgaggcaaaggaattggtcttgc

SEQ ID NO: 32431 - DNA, 623 bp, Medicago truncatula
  Intron number 4 from transcript Medtr8g144620.1 (locus Med tr8g144620) derived from phytozome v7.0 (chr-ID MtChr8; po s 34989361 to 34989983 reverse strand)
aatcgaaaaaggtcacacatacatgcacctcataatgcttagtattgcactgccaaatgcttctttttgtgtactttatatttaagtaaataacattgtttccagctatacaaattgatatgcgtattttttactcaatttgatttggagcttacattgtgagttagtttacttttagctttgaaatttcttctgttactaaaatccatgaactgggaataggaatgtttaggaagaaaatttgaaacatgtcaattagtttttgagttcgaagatgttttcgttgatcaagggtcttagatggtcttagataagagtgttaactaaactgatatttcctctttctgtttttttactgagtttcagacaactatatatggccacattatttaatttattatattggtcaaattcaacttgacaaataccttctagattacaatttttgtattcagccaagtttcctataagtttttaatttcttggtttacagtttcttttcctttcataagtaatccaagttcattgacctgatcagcattcattttgactattgagaataatcttagctgacattgtttctctctaatgcagactcattgtcattttacaagacaaagcat

SEQ ID NO: 32432 - DNA, 362 bp, Medicago truncatula
  Intron number 3 from transcript Medtr8g144620.1 (locus Med tr8g144620) derived from phytozome v7.0 (chr-ID MtChr8; po s 34990048 to 34990409 reverse strand)
caagtcttcttgctatagtcggtgctggtgatcaggtatactcgttcatgtttggattcacttattccacacaacttatcaaaacagcttatcacatcttcataacctcttttcaccttattttcattatcaaaacaacttataccttatacaaaaacaattttacattattttaatattttcttaagcttattcaaaaaatcatgataaacacatatatatgctataagctgcaaattaagttgtttatccaaacagagtctttatttgatttagaggtttctcttctctctctgatttggttttgtattgttgtaacttatgcagccatctttatcccctcgccgactctgtttgttcaa

SEQ ID NO: 32433 - DNA, 920 bp, Medicago truncatula
  Intron number 2 from transcript Medtr8g039770.1 (locus Med tr8g039770) derived from phytozome v7.0 (chr-ID MtChr8; po s 8391106 to 8392025 reverse strand)
ttttaagcagtgttcgcaagcttttggagtgtcctgtatgcctgaatcgcatgtacccccaatccatcaggttgtttatcaattattgatgatgattttattgttgtattttgggttcttgagaaggcatttttctgtaccattgaaataatggacttttcttcaaaaagcatttccaatttgataacttaattgggatgaaaaaagttcataattatgcttgcaacacactctctaattgattgaaatttcaatggatccatcccattaaattttttaggagcctatataaattagtgggatccatttaaatttcaatcaaatcaattagagagtgtgtgtgtgtgttgagaaaagtgtgatgctagaactcgtcaaaagttcaattgaccattagattggagaaaatgaaaaaatgaattctcattttcgtagcaagttaaattaaacaattgtcggtgaggcatgtcataagcacaaacttagggtcagtttattccatgtttcctgttttccttttcacatctaatattttccgcaccattttcttttacaagtttgaaaacagatatagtattgtcagaaatcaaaaaatgtcaaaacattgttacgttgtttctaaaaatgcattattcctagcttgcctttcagtattttctctctaacacagttgttcactatacattttaaaaagcgacagctgaaattaaaaagtaaacaaacccttggtatcacgattttaatttcatcattccttatttagtatcccatgtcttgcctagcttatctaggatgagaatattggtgatttccttttgattcaacttgaatatcctctaaaaatagaagaaactttatttggaaatttagttaacttctttacctttgctgtcattgcagtgttcaaattgtcacactat

SEQ ID NO: 32434 - DNA, 245 bp, Medicago truncatula
  Intron number 2 from transcript Medtr8g093170.1 (locus Med tr8g093170) derived from phytozome v7.0 (chr-ID MtChr8; po s 20377745 to 20377989)
attcaagatcttaatctcacaatttcacaggtattatggatttttcttcaaaacttgttataactataaaagtatattttaagtgaagaacaacaccaaaaaaatagttttaaaaaaataacctaagttttgtctctttcatattttttttcttctaactaagtttgttttatatcacattattagtaacgttttgaattatcccaacagttttcattgtttggttcattagccaacattggtgc

SEQ ID NO: 32435 - DNA, 774 bp, Medicago truncatula
  Intron number 3 from transcript Medtr8g093170.1 (locus Med tr8g093170) derived from phytozome v7.0 (chr-ID MtChr8; po s 20378010 to 20378783)
gtggtcaaatagcaggatactttgggcgtaagggggtatattataccatgatatgatctaacatattcacatttttttgttaattttgtttagaacttccttttgaatttttttttactcatttgaaaaaaatgctaacaaggtttattttaacttcaaatttcttattattatattaggattaaatgcatttttagttttttttttttttcattcatttgttcgtgattttagtctcctcatttctaaataaaaaaaatatatatgctccaattttcaaaatgtttcttcactattgaatttaggttaactaaagaagtaccctttcttttcaaaaaatggaagtgttttagtttcttttttttgaagaaaaaatggaagtgttttagttgtatcatgtatttcatccgtatatattctcaacgtaaatagtttttacactatcgattaattataacctccagatcataaaaatcaattgtctttaaacataactatttttaaaatcacatataaacaattgtgatttgttgatagtgtaaaacttatacataatgatatattaaaattaaacatacttatttactctgggattttatttatttacaaacaaatggaatcaaattcttcttaaaataaatcaaaattttcttttagtctcctaaaactttaggcattattatttatcttggaaattttttgattttgaaatgtatctttgtggaatgttaaattgcagtcactaatagtcgcagcagtcccaaatatatttgg

SEQ ID NO: 32436 - DNA, 967 bp, Medicago truncatula
  Intron number 2 from transcript Medtr7g116880.1 (locus Med tr7g116880) derived from phytozome v7.0 (chr-ID MtChr7; po s 27149816 to 27150782)
cttacggtatggatatgccttttctggctgttatgttagcatactctttgggaaaagtgaagttatttcgtttttattattattggagttttgttaataaaaaaatcaagagttcaatgtcaaggttatgtacagagcttgtaagtaatatgattaactaatgaaggagtcgaggacttaagattcaagtggtttattattaactagcgaatagctcatttaggctttgtagttcatgtaagcttgtaagtaatacaattgcatatcaatgttgagaactaatgaattttcaccaatattcatatatggaaataagaaaattttaatcgctcatggtaacaatagtgttgtcaattgcggataaagcagtagcggtttgttaaaattccactacgctatagtggtacaatgccgctatagctgctatttagcaacactgggtaagaacttttattttttcatgcattggaggtggcgtttaaggttataagaattcgtcttacatgtttctaggacttggagaaaagatgtgaaaggctacttccatttgtttttgtttcaattggctttgaaatttttctaggcctaaatttgtagtttgatttgtatcttgaccgtattgatataataaataggtttattaggtgtataaatacgttcatatatttaaagttttttccgttttattggtttaccagtgcaacaagatatcatgactttggtttgtaatttggtgatcacatattctaagccacttctgtgatttctggatgtcttctattttaccgagttgactgattcaggcctaaacatacacgtctatctccatatgtcttatttttaatattatcttgttattaattattcacaagcatattgctgttcaaccaagttaagggtttgctgttaatcatttatctcacgtttaacagctgcgttgtctgctgaagaagatcgattgtggaat

SEQ ID NO: 32437 - DNA, 570 bp, Medicago truncatula
  Intron number 2 from transcript Medtr8g089450.1 (locus Med tr8g089450) derived from phytozome v7.0 (chr-ID MtChr8; po s 19232846 to 19233415)
caaacatagttttgttgctggtgaaggtatataatcatatattaattcatataattcatgtgttcaatttcaagtttctatttaacaggttcaacatgtttaggttacatttattcatggtgtgtacaatttttcatgaataaattgattttatatttaacttgattggtttacaattgagtttgaagtgtattgattgatgtttggtattttcgctcaaaagctactttttatcttcacatagaaaaatttgttcaaaagtttgttttcctgagaggacaaaaggtaccttttttttctttctttttctcttcacttttcagtgaaaataaagtttgaaagcataatcaattttgtaattgtaaccaaacatccattattgtattgttcatctttaattttgtgacttttaagaatcctttgcttgttgttttatgagaatcaacaagttaaatctttagctgctttgattgtatgtttgttgtaaaataatgaaagtgttgaataagtggtgattaaggactaattgtttcctcttattttcaggcttggcaggtcttgtatctactt

SEQ ID NO: 32438 - DNA, 952 bp, Medicago truncatula
  Intron number 4 from transcript Medtr8g142190.1 (locus Med tr8g142190) derived from phytozome v7.0 (chr-ID MtChr8; po s 34564989 to 34565940 reverse strand)
cgggacaggtaccttgacatgcttctcgagtcttaactaatttttatagaatgaaatataaatgggtcgtactaacaaataaacgagcattgcataagaatgattgcattatatgataaaatatattttatagtttaactagagattttggttcaaactcggttatgggatggatgcagtaaggttaaatctctaatgtctgagttcgaatctagctttaagaatgcatcagtatcaaatatattgagatagagttttgtcactcattgtttggtggcggagcaatgctaggtgatccacaacccatcccacgataaaaaattactttgtgtctcaccctcttttccctcatgatacgcgttgaaaatcacactttcaagacactcggaaggcgtagaaaactattttcaatttttaaagtatgtagtttaatgttttgatgaacaacttttacaacataaattggtggttgtatgttatagtttattttggtggtccactcaaactttttttctaactccgccaccgtccattttggttttatccagctcgattgattaatttattcggaaggcgtagaaaactattttcaatttttaaagtatgtagtttaaagttttgatgaacaacttttacaacagaaatttgtggttgtatgttatattttattttggtggttcactcaaactttttttctaactccgccgctgtccattgtggttttatccagctcaagtgattagtttatgtgattgcacgctgaagatacacaattcacgcaataacaaaaaagtatatttaagacatttgtaatttttttaccgaattaataatttttttattcaatgataaaacgtctgttgtttttattaaaaaataaaataaaatatccctgttcgatttaactttttgtgtttctaatgagtatcgtactatccttagatatcatctt

SEQ ID NO: 32439 - DNA, 661 bp, Medicago truncatula
  Intron number 3 from transcript Medtr8g142190.1 (locus Med tr8g142190) derived from phytozome v7.0 (chr-ID MtChr8; po s 34565964 to 34566624 reverse strand)
ccttggacggtggcgtttaaccaaaggtttggacggttagtgaggtgtttaatgattttttggacggttagactgtggaaaacattttatttgattgtacttgtacttatgaccgatgactgattaaggctataaaaatgtttggatcttcaacaatttccttcattcttcacttcacctcctttcttacattttcttcaaaaaaaaattagttttttaggtagttttttattttaggtgtgtctgtgatgtcatggttattgttgatcgttcatatacctctgcaattgcattgtaaggagttttaagaactttcaaatatgctttataattagggacaaagagagatagaagagagacacaagatgaaggattttttttctcgtgaattttacaaatcctaaattacccgaccaatacaagggctaataaacaataaaaatagaatcatcgtctcctctatcttttgttcagcatggattatagtccattcacgtgtgttttatttttttttaatcaaaccattcacttgtgtttaattaaatctctggatgtactccaaaatttttttttggctgtaccaaagcattgaagaatgacgacaattaatgctacgtcgtggatcctagattccagtgtcactactcagccgacagtgaag

SEQ ID NO: 32440 - DNA, 630 bp, Medicago truncatula
  Intron number 1 from transcript Medtr8g128830.1 (locus Med tr8g128830) derived from phytozome v7.0 (chr-ID MtChr8; po s 30252867 to 30253496)
gtaaggttaaaaaatatattctacttgcgagtatgtgatgccacgaggacagacctatagtgtggttctaatttttttctcatgattaatgcttagtttggttcttgataatgtgatgtgatgccagtgatgctgaaattgacatatgattaattcttatgtgcctatgtgtgggagaagtaagtgacacaggtgttgcgtttagttaaatttttacgtgacaaattaataaagtcaaaaaaataactcggttggatgtggaaacataatgataaaagtgtttgtgtgctgttcttttcgatgcttcactgacatgtttgatcatctgccatgtggatggagagaagtacagtaccttcctctagtaggtaaattttggagcttactaaaatccttggagttctaacatttccacacagccatttttaaatttggttttatccttaaatgtttctaaacccattcatggaactcggtccaaagagaaaaaagttgttagatttaatatccaatccataaatggatagaagatggatttggtatggattttggaaaacctctccagcccctacctgcatttaatgaatgatgacgtttatgttgttctttcttttttgtggcagcacttgc

SEQ ID NO: 32441 - DNA, 755 bp, Medicago truncatula
  Intron number 2 from transcript Medtr8g128830.1 (locus Med tr8g128830) derived from phytozome v7.0 (chr-ID MtChr8; po s 30253653 to 30254407)
gtttgatacctcttgctggctttcttaatcattcagtatgtaaattttcatttttctattgatattgttgtctgtaatttttttcttcttcctccatcattggttttgaatatctaggtaaaagtgttttagaatagtaatttatcactttcaataaggaagcaaaagatgatggaatttcaaaataaaatggctgttaattaccttttcaagaatagcacattcttctaggactgggctcccattatttgtttttctgcatatttagaatttagatcattaatgcaagtagatggcacccatgattggtgagatttaagtaccatttgttaatttctgtactggtgggagctgttctgtgatattaagcgattatgttttacaattgtttacttgcttgcgaattgcctggattataaaatttagggaaatgttaacaagtgcccccggggcacttgttaagggaatataaaaggaaatattctcttggaaattgtgtattctactttttaaaagttgaaaaagtgtttttttaaatgcaaaattttacttttatttccacttttagtttgttaactagtgccccgggggcaccggttaacaagaccctaaaatttaaagacaatttctgtggtttataatattgttgcctgataatttgcactgtaacctagcaatgtttgagacctcaatatattatttttcttaattcacttttggtttgtgacaacagctgtgcccacatattacacact

SEQ ID NO: 32442 - DNA, 689 bp, Medicago truncatula
  Intron number 2 from transcript Medtr8g018520.1 (locus Med tr8g018520) derived from phytozome v7.0 (chr-ID MtChr8; po s 3366607 to 3367295 reverse strand)
gttagaagtaagtattatatttatgaataatgatgtgtattgattaattaattaattaaatatgaaaattaggctagaaaatctcaaaaaaaaaaaatttgggaagagaaaatcccaaacaatatagggtagggtttggataattatttcaatttttgaagtgaagttcctttcataacgctgaagatatttttgttgctaatatagttggagtcttaattaccagccacctggtaatcgtacaataatttgtttgaataaagtttactattcaagtacttttatagactatattgtagattcttctttaaaataatcttcaagattatatcttagaaacagtgatccatttataaaattttgagatgctttcatttgaagagaattattggaggtagagaagagtatatgaatgtaaatatgcagacatagacaaagaattgatgcatcaatgtagatgagtgatgtggttgctattcctactacatacttaccaatattgtctatttcctatttactctctaaatctatctattttctctctacagaattcataaatgacaatagtattttcttccttttgtcatcaacaaaaatttaaaagaaaatatacacttgagaaaaaaaatgctaattatctgtcttgatttccagctattcaatccttcagaatccttttcggacattgt

SEQ ID NO: 32443 - DNA, 854 bp, Medicago truncatula
  Intron number 1 from transcript Medtr8g088440.1 (locus Med tr8g088440) derived from phytozome v7.0 (chr-ID MtChr8; po s 18737366 to 18738219 reverse strand)
tggcttctttctggtctaatttttattattatttatttatttgtaccagcagcaaacatttatttacacatacttttattttaattatgtattcctccttaacattcaagcatcaatttagaatttcataaatcaaacaaaattagaaaaacaaattgaaaataactactccctctcactcaaaatattcttattaaggatctttaaggaaatgattaattgtattgatttcaattataaaattattattatttactaaaatatcattattaattgtagttagtgaagtaattaagttggatgaaacataaaaaagcaactttttatatatgaaaattatcaattgtttttatttttttgaatcattaactagtgccctaaaggcacttgttagcaaggccaataaagatataatagtgaaaaataacaaatgatagctgcatggtattctaaagtgacaattattctgaaacatgaaaaaaatagtaaagaaacgattattttaagacggagtaataaagtttttaaaatcaactattatattttaattgacattatttttgtacaataatttaatagatcttgctaaccagtgcccctcaaagcattgcttaaggattctacaaatagaaattttatcttcgaaatataagatgttacttttgatcaaacagtgattacacaactttctttaagaacatttgcttgttttggatgcttaaccaatgtccttagaacactggttaacattctcctaatttaatacatcgtctctctttctatcgcatcactaatataccgtatcatgcactattttttcactcaactgttttccgctattcaggtgataaacc

SEQ ID NO: 32444 - DNA, 643 bp, Medicago truncatula
  Intron number 2 from transcript Medtr8g112680.1 (locus Med tr8g112680) derived from phytozome v7.0 (chr-ID MtChr8; po s 25418810 to 25419452 reverse strand)
ctcgaaagcttccttatttttttggtaaaatctattgtcttgtatttgcttttaagtaaattactgcttttttttttgttggattatttgtactagattgggactttctttgctatttaatagattttctttttgtagtcctctaatattatttggttcgcaagaacttctttttgttctttatatatcagtatcgataaacatggtaaactccaaggtagtcagtctctggatgttagactaaagttgtatgatttaatcgtgattgattttttcttttgtacattattaattcatgtgaagataaaagtgtagcatgaatattctctatagaagaggcaggagaaaggaaaaaggggaaaaagtctaaacttatagttgcatgcttagaagaactgctacctttagtaatttctctttgttttgtaatgatttgtttgtttttattggattctaaatcataactaaaacatagttttggtcttatctttgttttgtaccccatttcgtcttatattttttctttgattaccagtttcagtattcacaagaataccggttaggaaataatgtgaaatgtgttgcattatctgccctactcaatttttttaatttgctgtttttccaggcaagacagatccat

SEQ ID NO: 32445 - DNA, 958 bp, Medicago truncatula
  Intron number 1 from transcript Medtr8g021440.1 (locus Med tr8g021440) derived from phytozome v7.0 (chr-ID MtChr8; po s 3980281 to 3981238 reverse strand)
tctaaccttttgcattgggttttttgggtttaaatgttagtttttttttttttggatgaaattgtgaaattttaagttttagagttgatttgcatgtttgatatttttattgttaatgataaattaagttataaattgttttttagaagttgattagagtaggtttgattgaaatatggtacgttagagttaggttagagttaggaattgttagaaattatgttgaactctaggtgtttgataaaatgtctcaatcaaaatagggttaaatgtgtttttagtgcttacattttgcttccctttgaagaatagtccttacatttcattaaatgtttttaaaatcctcacattttatttccgttatcaaaattagtccctattgttaattctctaacggaatgctgatgtggcagttaatgggtcccaattattttagggataattatgtttttcgtccctacattttgcgtgactttgaagaatagtccttacatttcattaaatgtttttaaaatcctcacattttatctccgttatcaaaattagtccttgttgttgattctctaatagaatgttgatgtggtagttactgggtcccaattattttaaggttaattatgtttttggtccctacattttgcgtgactttgaagaatagtccttattattttagggattttaaaaacatttattgaaatgtaaaaactaattttcaaagtcacgcaaaatgtacagacaaaaaacatatttaaccttaaaataattgggacccactaactgccacatcagcattccgttggagaattaacagcaaggactaattttgataacagagagaaaatgtgaggattttaaaaacatttaatgaaatgtaggaactattcttcaaaggggcgcaaaatgtaaggactaaagacatatttaacacatgaaaatatgtttgtttttagcattttta

SEQ ID NO: 32446 - DNA, 935 bp, Medicago truncatula
  Intron number 1 from transcript Medtr8g092870.1 (locus Med tr8g092870) derived from phytozome v7.0 (chr-ID MtChr8; po s 20157512 to 20158446 reverse strand)
gagaatttgattagagaggggtttatacaggtattatagatcaatgcatagctaactttatatgcatttaacaatgtagttttagttactgagtaaaccaccatttttccatgactttgtatgacgctctcaaataggtctctaggattatgaatattttacaaaggtcattgactctgtcaaatttgaggcatattagttcttctgagattatgttaggaactaaattgatagtgaggggttaaacatagagaccaagttgatagtaagttgttaaaatataagaactaatttatagtaagtagttaaatatagggaccatcttgacagtttaatagagtaagagacctttttgtattatctataatctttgagacctatttgagagcactctacgaagtcagggattagtttggtggttcactctttagttagcttgttttgttttatttggtttaaaattaaagcattcaaagtttgtatctggtttggaagattagcataagaagttgattgtcttttctgaatttagaaactcacttcttagaaactttttacatatttaagttgcatggtcaaaacctattatattatacatacatggatatgcttgcttgaacggcttgcttattatgatattaaattatagagattgcaagttccttttttactctcatggttgccaacatttattcagtttattttagatttgtgtgtttacatattctgttttggaaaagcagacacttaactaaacttttattgaactgtatggtacacaacaagatgaaatgtaatgattttggtggagtcgcttgtattctgtttgtttcgcttcagattcttctttatgtattccttcctctatttgtattttttatacacatatctttctcttagggtgttttggacatcacaacaacagagatagcaga

SEQ ID NO: 32447 - DNA, 527 bp, Medicago truncatula
  Intron number 4 from transcript Medtr8g101990.1 (locus Med tr8g101990) derived from phytozome v7.0 (chr-ID MtChr8; po s 22247174 to 22247700)
agggcttgttgaagaggaaatacaagctcaaagtggtaagtactactccctcccctgctgtcaatgcatgagaatacttccggaattcataaatgaaacaatttagttttttttaagttcttcaaaaacaatataagatccaaacaattgttagtagaatccttcggggatacatcattgtcgagttattcatgaacttatagagaataaaattgagtttttaacttcttgaagaactatacaaccgatctatacaattgagtttttaacttttgaattcttccaaaattcataagaataaatcaagactatagcaataatatgtatctataagactatgattacaatttatggatttttaacaccatagccaatgatcatgaatacaaaattaaaatttacctacatatttaagataagaaaaatcgatctctccgagttcattaatactttagcccaataactagattttttttttcttcatatttttagaagtgtaaacatcacacaatttctaaaaatacacg

SEQ ID NO: 32448 - DNA, 776 bp, Medicago truncatula
  Intron number 1 from transcript Medtr7g140440.2 (locus Med tr7g140440) derived from phytozome v7.0 (chr-ID MtChr7; po s 33823326 to 33824101)
gcatcatccacccttgttttcatcccgacggcaaggtacctaccctacctacttcactttcattcaattattgttttgttttttcggttgaagaaattcaatatctatagctaaagaagcaaggaaattgtagcaatgaatttctgaattttcttttcaattaaccattgttttgcttatttcatttacttgttaaggtcttcatgtgtagtgaattgatgctccgtgcttaaatttatgtttgtggaattgtttgttcaaaacctgttgatgcgtttagatgaattgtgaacttttagtgtaactagtgcttattgaagatatgtcaaaaattgattttgaatattaattttaaataaaagcgagtttaatttaattttgaataaaagtaggtcaatgtgaagtgatttatgttcgttacttttacattaaagcgagttgaatcataaatccgagtgtgtaaattacgtttggagtttaaagctacaaatcctagctgtaagttagaattaattttgtagacaagatcaattctactggataactttcaaacatgtcacaatcaattttacgtcttcaagatcaattttaacaatgatcgcgtgagtagagtggaatctcatgaaatgtaaagcagactattattctatggcaattttggatcagaaatttattgattgtgtctgaaatggtgtaatcatgtaatgtgaagttaaatttttgttctgcacgctgcttgttgattaattttttaatgcagccagcacctgctacct

SEQ ID NO: 32449 - DNA, 378 bp, Medicago truncatula
  Intron number 1 from transcript Medtr7g138430.2 (locus Med tr7g138430) derived from phytozome v7.0 (chr-ID MtChr7; po s 32840350 to 32840727)
attattatatctctagatttcaggttcttccttttctgtattatcttaaaatatcaagatttactgtgtatagcctatatgttaatactatagttgagactacaatatcacccttgaactatatctatgagtcatactcaatggttcgtaagttgttttgagtaacttaatagagcctaaatcaaaatcggaacatttatggttgctcagttaattctaaaacccagcatgactcaatcaagaatgaattattgttcattctaaggagtaatattaaacatgttagggtctacctgtcatattgcaggtataaataaagaaattataagttgttttcagaaattgtttttttatccgttatcacaggaaccgggcaaa

SEQ ID NO: 32450 - DNA, 848 bp, Medicago truncatula
  Intron number 1 from transcript Medtr7g117830.1 (locus Med tr7g117830) derived from phytozome v7.0 (chr-ID MtChr7; po s 27603692 to 27604539)
cttcctcaaactatactacctactatagtatgcaaatcataacttgttatcttcacatgttaatgtcttctactatggacatgacctgagaaaatcctaaaatgaaaaaagaaattactactatgagcaagtgattatttatagtgttatacaagctgtttcttagctgcattacattagcaatgttggctaaatttgtttttctttctttgtacacatcagaagaaaaaatatcagccccccaatcactttcagcagtgtatgtatgtatattcgataattgttaattatgtcaaaagatttttaaatacttagtacatatatgcacattcacatgtcttcttgtactcttagtacgtactattgtattgaagtactaattagtaattagtactcagtactgtcttgatatccaatcaatgtcaatacttgagtggtaaccatcctaaataaacaattttttgggcacacataaaaaaatactacattatttaattattttaaaaatacacatcgatcatttaattcttttttccaaaccttccaattactcttgttacatgttagttagtgtaatcaattgtactcttaaaatttagattgtgtcttggactcattagtcgttctcaatttcaaatattttgtgtgtttgacatcagtaacaacatcaagtatatcaaaaatagtacattagctggtgttttctttccattttaatttagttgttacgtattactcactttccttattttaatttttatcataatttatcacttgggacttgattgctggatagggcttgatgttcagtattttgatttctctttgaatttgtggatgtttcagat

SEQ ID NO: 32451 - DNA, 646 bp, Medicago truncatula
  Intron number 1 from transcript Medtr8g076950.1 (locus Med tr8g076950) derived from phytozome v7.0 (chr-ID MtChr8; po s 15229721 to 15230366 reverse strand)
tgtttggttgaggtaagtaagatcaatgatctcatgaattgacatttttgaagtatcttatggataggatacttgatctttattttgaagagtattgttgtgagttgaaactgggaactgatctagtttatagaactctcttgccatttttggttcaacattatctcccattacttacactctcttagcctcatttaaggaagagtatgtgattattcaacacaagtaaagctgaaaattaatggtacatgtatttaaaattggaatggttagggaacacatattttgaggctttcatgtaagtcttagctcttgtgacattcgtataatctttgtctttgaatttcattgctctttattctatgtcacaaataattgtagtaaaccacacaattgaaagctgcaacaaatagctaaagaggctgtgttacttaacaaacaagtgtgtctcaaaatcataacttctccaacaaagattttatggtaatccactaatcaacttttaagtagaatgacttttatttttttagatggcattctgacaaagagtaatggtttctttggttaattctgcataattgttatagtagcattttatatgtggttgtcattgttgcaggcttgggtgtatcagcgcttccaaggt

SEQ ID NO: 32452 - DNA, 933 bp, Medicago truncatula
  Intron number 1 from transcript Medtr8g122300.1 (locus Med tr8g122300) derived from phytozome v7.0 (chr-ID MtChr8; po s 28573804 to 28574736 reverse strand)
acacacttctagttccctcccttccctatcctttggtaacaattttcttcttctttgggtttattctgttctgttgtttatataggtattttgttttttttcctattataatcttgatctgaggttttgatgagctgagtgaagtggacagagacaaaaaaaaaaaaacaaatgagtttatgttgtgaataaccatagtatatatcaaacttgtctgaattgatgattcccttttttttttttttttttttaatattccctgacccataattttgatttcttgccattattatatttattcatttaataatttaaataaaataataattaaactgtttatgcttcatttcttgttcattctttatcaggaaataagatttttgatgacatatataaacagagatatgatttttgtactgccaaatttagatagcttttgtcataacttttctaagtggttaatgtcattcaaataagccaaataggcggttaattatgtttagtagatggtgaatggatatatcaaatgtcgaaacttgttaacaatcaacgtggcttcaagaaccacaaattctgacgtgtttaactatggttttaggtgttcaactacatgtagatttgagcaccagaaaattaagtccgtggctaatgaagttacgttgttgccgttggcagttaatgagtttcgacatctggttgacccattgaccatctactaaacgtaattaaccgcatatttgagatgtgttaaccaattgtcactaaaattgtctaagtttggttgttcatatgatactattgtatataaatatatgaagtacatgcacctaaataagaaattagtttcttttgtgcatattttaaattttttgttgttgagaacttggtgtccggtttaaggaccgactaatataattttatcatattgcagct

SEQ ID NO: 32453 - DNA, 778 bp, Medicago truncatula
  Intron number 3 from transcript Medtr8g090320.1 (locus Med tr8g090320) derived from phytozome v7.0 (chr-ID MtChr8; po s 19680081 to 19680858)
actatattggtgtaagttgctattcttctggatttagtaacttgttcaactgttattcaataactcatgtatttggtcaatattatagacgagatacatcatttattcaatgaatctaaagtcattttttgcttataacaatgaccagagggttcagttctttagtggcttatgctggatcatttgtctgcattgaacactcagtaccaattagagaaactaagcaaaaatcagaaactaaagagtatcagataacaagaaatgcaataaagtggacacaatttgatcacaaaattcgaccaattgtgcatacgtctcaaacggcagatcagttgcagtcatttttattaatcatgattggggttacatgattataacttgtgtttagatagtaaataccacagtctcgtttacaagtttacctctgaattgtatccactggtcagaaattacgaggcatacacaacgataagtaggtgtttatcattcaatttttatgtataataagatgtttctataattggagaggaaataaggagaaactctgcaaaagcttcttgagcttatgaaaataaggcgaaaatagttactggacatatcataaaccatttttactaactcattcaaacacttacataagtacttatataagataagtcaaataagctcttataaatgttgccttgtggatgttaagatcatatgatggaaacataaatgtttgtgccttgatttacttataggtactggcaaagaagttcggagcagctgtggtttc

SEQ ID NO: 32454 - DNA, 966 bp, Medicago truncatula
  Intron number 2 from transcript Medtr8g078650.1 (locus Med tr8g078650) derived from phytozome v7.0 (chr-ID MtChr8; po s 16106780 to 16107745 reverse strand)
ggacaaaaacacattaaagggtctccacatccaaggttttttattcataaaaaactctaacattatcataattttcttttttctaatattaacacaatggttttaattagtgaccacatgcattttgatcattccaattgaaaagagttttagttaaatgtgacaaatatggtcttgatagcggttgcgttttcttttcaatttcgaaagaataaaaaattgttactctcttcttttcaatgagagacacatttgcaaaatatatatattttttttgcaaagtaaatgtcacttttaattttctatgtaacgagattagtttttactttaatatatattttaagactttgcatatgtatcatttttttgcttttaacctcttcgattttttgtttttgtttttgactatcataaatattccccctttgttctttaatgcttgatatttttttagtccatgcaattttgttttatattaaaactggttcctttaatattaattttaacccttatataatgggttaaaatcaaatatttcaacatgaataaattttgcagggaccaaacaaaacaacaaacactgaaataaaaatgtggtatatttgaaaaagctaaacaaattagaaagactaaatttttaaaaattatatatttttagggaaaaaaacatatttaaatctcacttatttttcagaattgtaaaatttaatgaatattaagtgcatcattcacatgtctatatctttcactttagaattgtaaaactcctattttcccttacatttacaacattttttattatgtattatttcacgtatcgtgggacggagtcggattttaaatatttttttgaaagcatcgcctatttatatatgtgtctatatgattttagatattaaaatgttacgatttagtgatgtttgatataaaaataatcaatcaatgactttgcaggagctacttcaa

SEQ ID NO: 32455 - DNA, 356 bp, Medicago truncatula
  Intron number 1 from transcript Medtr8g128420.1 (locus Med tr8g128420) derived from phytozome v7.0 (chr-ID MtChr8; po s 29978691 to 29979046 reverse strand)
gtctgatttttgcgtatgttttcatgcttaaagatgttttgtaacaatttttatatttactgtattgatgcaacaagtcctttggttaataatccagattcatataatggagtgtttgctgctccatccttttgctttattttcagttgttgaatcaaacatttgattcttcagtttttgcttttcaatgtaatgaagtatcagtcttgctaaattctcttcataattttaatctaagcatccagattttattctctttccaatttggactttctttttttacggcatctgtctcttattttcttaatcttgattttacaatttttcagaatctccattgttgcagttttactacg

SEQ ID NO: 32456 - DNA, 959 bp, Medicago truncatula
  Intron number 2 from transcript Medtr8g116310.1 (locus Med tr8g116310) derived from phytozome v7.0 (chr-ID MtChr8; po s 26324664 to 26325622)
ttagtaccactgctccatccctcggtacgtaaactatgcttttcttttattaggtatagggagacaccaaccatttatctctcgtcatttatatgaacattttcaattgtatttttatttgttgtcacgccaacattaatattttgcttatatttgaattaatcacatcaaaagaaatcaatcaatatagtattgaaaaagttgacagcacgactctccattaaaggaaaggaacttgagtttgattcctagagtcacctatttaagagatagtctacttgcgaaaaaagagttagccaatattaacttagtattagatgatccgtttggaccttaggagatgattgattgactgagatctgttgtgaagagcggttgagctttagttcgtttgatgcgagtccttctcccctgatcttggtgtacctacatgttctccgacgcccaaatcaataaggagttcaagaaagtatgtgactatatcatgggtaagaaatatcatacttgacccaagggttgagcaaggatatatatatatatatatatatagtggataattatgattttaactcatagtcctttatctatatagctgtccttaagggaatgtgagtgacaatcagagtggtctgctgcataagattcagaataggaggtgaggaactctcgatttagaccataatccaataggatttagggcatgtccatcgtattgtgtcacttgctattggggctcgggtcggaaccgatcccaatcgaattgaatcttgggtcaccccaaaacattagtcttataaaggatccaaaagtctaagctccaaacaaatttcatctttcttgaaagcatgtaaatcactttaaaactgatcatgatttcaacagagtcaaagttggaaatagttgttgtattcaattaatagttttaatgaatttatgtttgttatgtgatattgtagttg

SEQ ID NO: 32457 - DNA, 1053 bp, Medicago truncatula
  Intron number 1 from transcript Medtr8g133130.1 (locus Med tr8g133130) derived from phytozome v7.0 (chr-ID MtChr8; po s 31602864 to 31603916)
gtgccagcttgtaacagtcgaggtagctatctctatctagtcatggatgaatacgttctcttatttatctaacattcgtcaagttgggatttcttgtttggaaattctttgactaggtaaagaccatattatttgatttacagcttctgaaaattagacttgactggaagatagaccagcaaaccagctggaggttagggtatacaaccagttaagtcaacagaacctgtcaggttaagaagaaactgaaaattctatgcgttttagtgacctgataatttggcaccacacatttcagtacaagaaatgtttaatattggtgattttgagctcatgatcatcagcttgcatgggatagggaagtgcctccaaaagtggcaaacttgcttgtcactaggattaacttgctacatatttttataacgactgtagcataaactgttttgttcgtatatttaaacccttctgtagagataagagatataattacatcatatgtggaatctgaaacaactaatgtatgatgcaatgtgtgaattattcccatcccacccctcaattaatactaaaaagttccctttaatcggtcctcacacattctgctgcatcatacaatcttaattttagggtaaattatccccagctcacccctcaattgatactaaaaccagaatgtgtgaatcaaccccctttaatcaactttaattttagggtacaaacatcctcacttgattcaaaagattgtttccgcaagtgtttgtatgatagaattggtagttcacttcagaattataattcaattccaataatatcttgaatggaattgattattgttgactgtatttttttattttttttccttttactttttgatatgtatacatatgcatacaaaattagatcataagtacaacaggttcaagttggcatagagcacaagttaaaaccccaaccctaaattcactaatcaggggatatcctcgtctagagcctacttttggttaatgtagccttgcaggtcacctcagaagacacagttcatcctatccttca

SEQ ID NO: 32458 - DNA, 242 bp, Medicago truncatula
  Intron number 1 from transcript Medtr8g133990.1 (locus Med tr8g133990) derived from phytozome v7.0 (chr-ID MtChr8; po s 32135083 to 32135324)
actaagtaaattgttaagttatatattaaaaattacataagtttatttttcaaaattttaaaaatttcttttgttcaataaatacttaatatttatgaaatccttagtccattttgttgttactttttaaaaatgatttgattggaagaatatgatagatataaattaattccaattgataattgatgaaaacgtaatattttgtagagaaaaagaaaaaaaacagcaactacgttgtcgtc

SEQ ID NO: 32459 - DNA, 510 bp, Medicago truncatula
  Intron number 2 from transcript Medtr8g097130.1 (locus Med tr8g097130) derived from phytozome v7.0 (chr-ID MtChr8; po s 21514834 to 21515343 reverse strand)
ctagagcacgctcaactcttcattcaatcaaagtaacttctcttccttcttcttctgcttcttcaagactagtttttcatttttttcaaaaatgaactttttttatgatttttttaatatttctatgttgttggaaagtggaatttaagatcttaatgaaattaaattgaattatatattttaaattttgaaaaactatgttttggaataattgaaaaagaaaaaggttgatttcaaagaataaagaaaagagctactttaatagctacaagcatggaatttttcttcaaattttgaaattatgttttgtaattatgaagcctcatggttaactgacaaaagggtgtgtcatgcacttttgatccaaatctaaaatcttgttctttaacttctctcaagaaaagaataatttagattattttctttatattcttctactttaagctttttttattctttgtaaacaaaatcaaagttttgtttattgttgaatgtggaaagcaggagaag

SEQ ID NO: 32460 - DNA, 503 bp, Medicago truncatula
  Intron number 1 from transcript Medtr8g138190.1 (locus Med tr8g138190) derived from phytozome v7.0 (chr-ID MtChr8; po s 33245230 to 33245732)
tacaagtcacatataaaataccttacttttacctaggcttcatatataatactcttgcattacaatccatctgtaactatcttctaagatgttcttaattattattacatatcatcctttataccttttccataaatctaaagtttattatattttaaagtcacctatggcttataagacccgtgcagggcacgggtcacttatctagtaagtaataagtttatcacctaatatgtgattggagtattagaaggacaaacttcttagatatcatgtccttgaacctatgattcttttttcttgtttttttatggaaatttgaacctttaggattgcctcaaagagtcctaactaaaatgtgatttcaagtgttcatttgataaaagattaattacagttaacttaaagcttcttcattcttgagtgtgggattcacattgttatttggattgatatagttttttgctctttgatatgtattcttttaatgttgcagctacttc

SEQ ID NO: 32461 - DNA, 758 bp, Medicago truncatula
  Intron number 3 from transcript Medtr7g134050.1 (locus Med tr7g134050) derived from phytozome v7.0 (chr-ID MtChr7; po s 31543006 to 31543763 reverse strand)
aaagattcaaacatagtgagtattcaattcaaccaccatttacaatttcggaggatagcttgtttctctaaataactcaatttgataatgtataacagtgttgtcaaatgtcggctatagcatagcggattttcaacaaactactattgtttagtaatacaaaatttagtagtaccagtgttgaccaatagcggctatagtggtgttgttgcatagcaaaattagcttaaaatagtgtttggaatttggattggcttatttgagtttatccactagcataagttttttgagactgtttgggagaacttattctttctgcttaacttatgacaatttttattagtttttttcaacttattttcatcagttctccaatatagcttaaaaaacaacttacagcatatacaaaaacaatttaaggttattttattttttgctatgaaaataacttatgcaagcttattaagataaatgtttgtgctataagctgcatatgagctgtttatccaaacagacccttatcatctgcaatctgccattgacaacattgatgccaattttcaactgttaattctctcctgattatttagtgttgtaccttttgagatgggcatagtttaagctaactgctttaattatgttcagattttacccacttacttttttctcttctctacatggtttccttttgctgtaatcttggttgaattttggctggtctttaattatcacaggacctcccaaagctttagacgagg

SEQ ID NO: 32462 - DNA, 970 bp, Medicago truncatula
  Intron number 3 from transcript Medtr7g107830.1 (locus Med tr7g107830) derived from phytozome v7.0 (chr-ID MtChr7; po s 25285115 to 25286084)
agaacaagagaattagaggagcaacaagctaaaaggtatttgttttttctttcttcaattcaaaagttttgtcattcctttctttgttcagcaggtgactgttttttacattggtaaccgtgccttttgttataatgattggaataaactactatagtgtggattatttatttttgggtggcactctttaagcataccaaatttaacaactattcttttaaaaagtcaactattacaatttccaatgcacttaatacacaactttttataaagaacttactaattaaagtgcttaaagagtgcccgggggcactcgttaacatttccctttatttttttcttttgtaatttgaatgaataatgttcagtagtttaagtatacttcattgctagcgtgcttttgcaaatttaaagttcgacatgcattctggatttggtttggttttactatccaaattccaaagacagtgtcttgttttgttttagtacatatcattggcagaggtttgtgtttcgattgtctgataataaccgtgttagtgtcacatatggatgacaatgactcttacattttttaatcttgtgataaatttctgatcttatcacaatattctaatgtattttaagatataaccttggtcattaaaaataatcttatggaagtgagctttgtgagcagtggtaggtaagttttctagttgcaaaaaaatgtctcacattggtgggagccaagtattgtgaattgctctcctttatatgaaataaattgggatataaaatccattcttggaattttgttttacagcttaagatatcggacgtgacaggtttttatattcattcataccgagacacaggattttaatatcatgtgctaaattttctcacctccccataataccgcaaactatttcgataggttgattaataccttatttggactttgaattttgttttgtaccagccgtat

SEQ ID NO: 32463 - DNA, 381 bp, Medicago truncatula
  Intron number 1 from transcript Medtr8g090460.1 (locus Med tr8g090460) derived from phytozome v7.0 (chr-ID MtChr8; po s 19758125 to 19758505 reverse strand)
ttctcatctcactcaaaggtgaaaacaatgccattttgactgagcaggaaatcaagtctaatattttgatatatatcttaaactcttcttttcatctccttttagctagctggtcatttattatttattttctaaaatgtgagaatttgtagaaaaaaaaaatgtaaatctgtttcaaatgagttttttttttttttattttttttttttttataattgaatatcaatataactcgttataatatgcaaaaaacaatcccttatttctaatggactaaataaattattaaaaatttaatattgtattattgtcttgaaaatgatattaatggggataaattttacaggaattgacacttgcagccgttgataatccatcga

SEQ ID NO: 32464 - DNA, 1002 bp, Medicago truncatula
  Intron number 3 from transcript Medtr8g089590.1 (locus Med tr8g089590) derived from phytozome v7.0 (chr-ID MtChr8; po s 19296603 to 19297604 reverse strand)
aagggtgctgttggaggaagtaagaagagaaagaggtaaaatacaatcttcatttaaattgtttttaagagaaagaaatgccatggagtgtgctaatgacactatcctctgaattttcatcagctctaatagttaaattttgtagttggacttatgctggctttataatttaattaacaattcttaaatttttacatttctactccaattttgatgctttgctatatgatgtagctccgttgagtacacaagacagtgtaatgtagacatatctgtaatttgttcagttgagcaccatgttttcttacttttgtttgtctgaatagagtaatataaggtgtgtgtccatgttgttttgttacaagacaatggaagaatggaacgaaatttaagtttcctcgtctttgtggtgccaaaaattctgattatcctagtccttcatatactatttactggtagtagtatacagaaatgcttcggaggaaacaatcaggattgcgtttaatataaagaaaattttctattgtggtaactgaagtaccagaggtttcctttaagcatgtaagaatggatttggctcttctaagagtatatggtgtgtaatttcaataatgtttgtcttttttataaagaggtcctctctcttatccgcctcattggttggaccattcagttgacatacatataccgtgaaacaaacacatgctatgatgctcttgttctaagagaacattggcattcgtttttttctttagaagttttagatttcattccgactaataatagttttgcatatgtaaatcattgattcattttcgatcgttgatattacttacggagttacttattatggtatgaattatagatgcctgcattgttatggtgttggttcctctgtgaatttagttcacgggtaaaactgatgatgagttatagttactgattaaaattgaaattaaccatttttgttatgttttgaaaagtctagcggcaaaactcagc

SEQ ID NO: 32465 - DNA, 747 bp, Medicago truncatula
  Intron number 1 from transcript Medtr8g148370.1 (locus Med tr8g148370) derived from phytozome v7.0 (chr-ID MtChr8; po s 36697533 to 36698279)
agaaatcttgcgaaaaaagtaaggtatagaagttaatttccacttctatgagaagttattggttaaatacttgtattattacaagattctcttgctatttctttttccataagtgtttgtggagaagtttgctcaaagtgactcaaagtttttccataagtgtttgtggcgaagaagtttattcaaagtgactcaaagcaatatgttttacgtagaggaatttcaaaagaggaaacaaatgcataccttaaattgcgtgtagaacaccatatatatgccacttaattgataaatacatcattgatggagaaacctgcatcataattcattcctcttttgtcattctcattgaaaacttgtggcctattagctggattttgtctttgtttttcatatctagctaaaatttggtattcatgaggcgacacataaattgatttgtgtcacgctcaatagcacactcgtctgttcatgatcaacttacttgccagttgtttgcttaaggtttctgtccttttttctttactgacattgttttttttttttttttttgaagaagctttactggcattgttatatataggataggatttggtggaatctatctgctcatatatcagattacatcctcttggcttatcttgacctgtttctaattttataatctcacaagaaatcaaaaggcttatcacgatgaaggctttgattctagttgggggggtttggaactaggttgaggccattgac

SEQ ID NO: 32466 - DNA, 741 bp, Medicago truncatula
  Intron number 1 from transcript Medtr8g078180.1 (locus Med tr8g078180) derived from phytozome v7.0 (chr-ID MtChr8; po s 15756488 to 15757228 reverse strand)
tccgtgaaattaagcccaaaaacaggagaatcgtaaatcaaaactctttcatcaattttctattacatgttttgttttcatttagctcacactctcattgttggttcattatttgtgaattgactttgataaactagtgttaattttttgggaaatgcaatgattttgtgtattgtttgtgtttttgaattctgggtctcattcaaaatttgttttttttacacggttttgtttttatttagttcagtccttcgttgtgtgttcattatttgtgacttgacttgaagaattagtgtgaattttataattttttttggaagtgtaatgtttttgggttttaattgtgtttttgaattctgggtctgattcaaaattgagtttttcttttagctcagactctcattgtgtattcattatttctgagttgacctgaaatattagtgttaatttttttacaattttttttttttttgtaaaaaaatttggaatgcaatgattttaggtattatttgtgtttatgaattctgggtctgattcaaattttaatttttttcccagttttatttttatttagctcagacactcattgtgtgttcattatttctgagttaacttggaaaactagtcttaattttttagaaataaaattgggaatgcaatgatttggattttatttgtgattttgaattgtgggtctgattcaaaatttgataatttttttgaagggtgctggaggtcctg

SEQ ID NO: 32467 - DNA, 683 bp, Medicago truncatula
  Intron number 2 from transcript Medtr7g104120.2 (locus Med tr7g104120) derived from phytozome v7.0 (chr-ID MtChr7; po s 23530786 to 23531468 reverse strand)
agttttaaggaaggtgttctgttttttcttttttggtatagatactagtacttctctgtttctacaaataaaagttcaaaaaaagtgttaccctttttcactttagtttttagagtggtgattctagagattagttatatggggttttgatgactttgtaggagaaagctttatttcaatgattatgattatggtgtactatattattaaaggttgcagcttttgcactttttctattaaaacatttaaaatgttgtcactttgttggtttgtgaacactttccattgtatatttttgtttaagggcacttgttaaggatttaaaattgaaaacaattgaaatctttcatgtagaaaaagttgtctttggatgtttcaatgtgttgcatacacaaattccaagataaattttccattttaaaagaatcatggagatattgttaaatcatccatacacctattttgaaagaactatgaacagaaaaatatctgtcatttaacagttttgagaagaaatgattacaatttcccctcatactctatgcagcacttacacatattgaagacgtgtgtggttttcgacactgacgcgacattcgaagcaatattgtgtccagtgtcgatgtttcatagaacatactgacatagtttaattgtttgtaaaatgaaaattgtagttggga

SEQ ID NO: 32468 - DNA, 1001 bp, Medicago truncatula
  Intron number 2 from transcript Medtr7g108170.1 (locus Med tr7g108170) derived from phytozome v7.0 (chr-ID MtChr7; po s 25415310 to 25416310)
agagcagaatcaccagaggtaggcattttttttgtttgtttttttggggttttttgtttaatttttagagtgaagatccaatttcgtctccaacaattttctcgcgactcaatttagttctcgacaaaaagtaataccaaactattaaattagggaccaattagtttccatgttataatgtgtattagaataatttggttatcgagtaaagcgcgtaatttgtacctgacttcgtaaggcgctttcaaataggtaccggacatgaatatttcaaaaacgtccctttatcaaattttacttatgttaatccttcaaagaatattctagagattaatttgatagtaagtggataaacttatgatcagattgatagtaagttgttaaaatataggacttaattgatagtgagtggttgaatatatgaaccaacttgccactttaatagagtcaaggacctttttgaaatactcattatttcagggacctatctgagagtgtcctataaagtcgggaactaattcagtggtttactctttgggtattattttttgtaagggactaaattgggttgtgagaaaattttcagggactaaattgggttttcacttatgaagcacggatacggacgcggacaccggacacgacacagacactaacactaacacgccgacacaactaataatttgaaaaaatcacataattcaatgtaattgtaagtgtctgtgtcgtcggacacgaggacacgcctaatccgaggagtgtccgtgcttcataggtcttcactttaatttttaattctcttttaggcttttagattagagtttcaccgaattgggttttttatttatttttattgtgagtgattgtttctattgggttttaattctctgtttcttttgatggttggtgattgttttctttaagaggtttgacttatataagtatgctaagtgtcttcgggatgcttctatgtgtaggtgtggcaattggaagtcatagta

SEQ ID NO: 32469 - DNA, 764 bp, Medicago truncatula
  Intron number 1 from transcript Medtr8g087180.1 (locus Med tr8g087180) derived from phytozome v7.0 (chr-ID MtChr8; po s 18066653 to 18067416)
aaacggcaacaccagaatcgcaagcaggaagagaagtaagtaattgatttgtgtaaaaaagataagattcagattccttcttctcctgttgttgtattcttgtattccttcttctcctgttcaaatttctgaattttcaagtctgtaactgagtccgtaccgtcgattttcctgtgatttttgttctcgacgtgaaaaggtccaaaaacggtcacggtggctgctgataccgttttgtaacggcctcaatcccggcaccggtccgttttttgaaaccttgctattaagtatgcttacccctttagtcatacgtattttgctactttttgagtatttatgtctcttgttgggatttatgttggcttgtttaatttgcaatagcacctatattaacacattttgcccttcttatttcatgtctgtatggtgtttgatataagttctgaaatatgattcacttgtataagaggtagatagtggatatcaatagagttaatcgttagattgtctatccttaacttgtatgcctgtattggttatctttatctttattgcttcaagtcatgctgtctaagttcatacattcccccccttttaattctgctaaaagacacttctttgtgcaacgtaaaggcaactatatttgaatcataagaacttgtatctcactttgttattgaagttatattggtcaaagccagaaatactttttcttatacttttatttcttctggatcttagcactctaacagggtttaggacca

SEQ ID NO: 32470 - DNA, 548 bp, Medicago truncatula
  Intron number 1 from transcript Medtr8g119170.1 (locus Med tr8g119170) derived from phytozome v7.0 (chr-ID MtChr8; po s 26940964 to 26941511 reverse strand)
aaaatcaagaatttctagtagtgcaagaagaaccggtagataggatttgacgcatttgaagttaagcaccgtaagctattcttataggcatatgggagaagaaatttcaacatctccataaaatgcatcactatggttggacgccaacaatatattagtatataatgcttttctttttgtcctgttttgtgtaggctctcccctcagctataaaatgttgataatgatatatggaggaactcctgctttctaatatatacttctaatcgtaaacaccacgtacttcatattattaacaacatatatggtaattatctggtgagtgtaggaaaaaccatttttgtgaaatgacgcctaacttgaaaaaaccacttttgtgaaatgacacttaacttgagagtttgagaagagatatgaatgtacataagttaacactctccgactactaccttcgatttttattaattataattaatttgattttacaatataacatctaccattggtgtggaggttcatctactagactttcattcaaattgtggaaa

SEQ ID NO: 32471 - DNA, 814 bp, Medicago truncatula
  Intron number 1 from transcript Medtr7g132690.1 (locus Med tr7g132690) derived from phytozome v7.0 (chr-ID MtChr7; po s 30815750 to 30816563 reverse strand)
gttgttcagcatgtaaatgtggtgcattgcttcctttacaaattattggtgattcctgactttgaattaatgcggtcaatttgtttttagaaaattgctagtagtataataatttttattttgcatatgaaaattagttgtgccaagttgattatgaatgaagtaagctaagtaaattattagccaacactaatgtaagaagttcaagtctttctggataaatcggcattgtcttagttgcaatgcaagaacctgtttgtaatgttttcacgctctgaaatttggaatttaagaggatgagatgtcattgcagtttttaggttcggaatgtatgctttatttcacactaacagaaaccctgacgtctatttattttttcttttgtaatttgttgtatctgcacaatatcagttttactttaattaatttgtttgattcagttttataatatctatatcatctacaatttatctaaatttcagtaccaaattaaccatcaataattttaaaatttgaagaattgtgtcgttgagagtaagtttctaccggaaaatattcaactagaagttagttttggagttccgtataattatgatgtatatttaagtttaaaagaaaatctaagagtgaagttgcccagataaaaaaccaaccaaaagtagctgttatcttggcagtcaagtttagaacatctttacaatataatggtatagatgcactcagcatctaagttaacaatttggcacacatattacttactattgcatgtattcataatgcctagttttttactttaacaggtttcaatccgcaa

SEQ ID NO: 32472 - DNA, 472 bp, Medicago truncatula
  Intron number 1 from transcript Medtr7g133240.1 (locus Med tr7g133240) derived from phytozome v7.0 (chr-ID MtChr7; po s 31123932 to 31124403)
actgttgaccaaactaataatcaactcaacaaacagtgagtttcattttcttcttctatttttatcttctaggtgcttaaagatttttttatggaagggcaaagatgggattttttttgggtgaaacaaaaaaaagttttggaatttgattatgagcttagtttttcacctacctaattttgtttaaaaagttttagttttgatttcatgaattatgaatgtcttcattatttgtggttctattctattaatatttacaatatttctttgagtgatccaaaccttgtagcatacatataaaattaaatttgtttgatatttgaaaaatgtttttttgacaaaatttgatagttggaaaataatgaattaagtattctagtaagattttaatttctatggtttgtgggatctaatgtagtttctattattgggttaaggttgaaggctaagaagacaaatcagaagaaaccaa

SEQ ID NO: 32473 - DNA, 392 bp, Medicago truncatula
  Intron number 1 from transcript Medtr8g088150.1 (locus Med tr8g088150) derived from phytozome v7.0 (chr-ID MtChr8; po s 18609754 to 18610145)
attattgttcacaacaggtgtaatccagaaaacatgttccttctcaattcttcccccttctttcgattccagatctgagtgccaaggaagcaaaaaaaaacttcaatgaagaaaaagaaaaagataaaggatgtttaaaagaaacggaaaattcaaatcttctccatcttattccaaatctaaattcgtctatgtgaacaagaacacaagccaataacaaatctataagaaacaaacttataactatgcttcccaaaaaaacgtttgactatgtttccaattcctattacaaacccaaaaccccaatactaatattacaatacaattccaattccaattacatttcctcaaattcaaccacttacttgtttgatggttatgttttctcgagg

SEQ ID NO: 32474 - DNA, 688 bp, Medicago truncatula
  Intron number 2 from transcript Medtr7g092260.2 (locus Med tr7g092260) derived from phytozome v7.0 (chr-ID MtChr7; po s 20246065 to 20246752)
cttcttgcctggtatatatgattaccctaatatttttactatttactccgttatttttttaaatgtcgttttggataatgaatttgttcttatatcggcttttttgagtttatctatataagtagttgtcacttgtgataccgattcggagagcttatgagttttgacatgttaagttgttttcagtttatttccatataagctcttcaggatagctaacgaaaacatcttattatatttttaacattattttcaaaagctctccaggatagcttatgaaaatagcttataacttgtatcaacatagtttggcttttgtttttattttttatgacaaaattagcttataagataatagataagaacttatgatacaagggcttgattgttttgtttatcgaagtatattgtttacaaagttcaaaaggcaacactaactaattttgtcaagaataccgtgaactatttattgcagagagaaataggacgaatgagattaattctatcaaaagtataaagatcaagatttattagttttcttagttcgtgtcaataaccttaaaacaacaactaaaaaagaatgtacaaagtatatactgcccaaatacacactcatctatactggttagtctgacagatgaaattttgatatgtataaataaacatttacatttgctcattttaggtc

SEQ ID NO: 32475 - DNA, 466 bp, Medicago truncatula
  Intron number 1 from transcript Medtr8g128550.1 (locus Med tr8g128550) derived from phytozome v7.0 (chr-ID MtChr8; po s 30047290 to 30047755)
gtcaaaccttttgttgtcagttgtcatttttaataatactcgttggagaaacccttctttatcttttttgttgaagcacatgtgaatttttcttcttaatggttgtgattccattttgattatcgttgtataatgcacctatgaagattctttctgatatttcaaaattcatctgaagattgtaatagctatttgaatggcatagcatggtcaactaaggaattctgcatttggctagctttagtttattttgggtttatctgctttactcaagttgcttttttctaaggataatcttgatatttgattgtgtacatcactctttttcttcactaattttattccttttaatttgaattttcattctaaatggttgtaacttattaattttcttagtttacttactgtgactgatgcatgtgtgtttgcagtgtaattgttgaagctctcaaggtggacagtttgc

SEQ ID NO: 32476 - DNA, 604 bp, Medicago truncatula
  Intron number 2 from transcript Medtr8g128550.1 (locus Med tr8g128550) derived from phytozome v7.0 (chr-ID MtChr8; po s 30047762 to 30048365)
tttgctcatctttagaacctattcttcgtagagttgtaagacacttgtcttctccctgacttatgctatttgttttcttttttgattcagtaatattttggtttgggggtgggggattgaagatgtacatttttatgaaattatttacctttttactccaactaaaaagtcatttttccacagaatgccccttcttaaacgccatgtcatattgtggtcttctgtgcaatttgattttgttgtacttttttacttgagtgtgtacctgcttcttgtttttataaagtcctattgttttaataaattaatcaaaatcacaacaattttgcttgttaaattagacctattgttcacagcatgacaggatattgcatatacattttgctttcagtgctccatttagttcttttatttccagtcttggtgtgacatcattcatttgataatttgtgtggaaaatgcatttgatctgattcatagaagaaataagactaacatgatttgttttgttaaatttgtaagtttctgcatttgatgctcaaataaatgaatggtactgattgaaacaggtgagtgaagaagtggagcgtgctttggcgaagtt

SEQ ID NO: 32477 - DNA, 951 bp, Medicago truncatula
  Intron number 1 from transcript Medtr7g104200.1 (locus Med tr7g104200) derived from phytozome v7.0 (chr-ID MtChr7; po s 23565813 to 23566763 reverse strand)
tttccaaggttaggagtgtggacatgtgttcctttttttacttgttatgctgaggtagtagcgttgaaaaatagaagctgttttttcaggaccacttttaatagtagtgttgagttttgatattttcatgcatcattagtttgttatgcatgaacgtttatactataacagataaatgctgttttgcttttcacatttgcttgtttttaaaaaccaagaacacggaaaaaccaaaagtgattcatcacagtttgtgagttttgcatttttggtttttgggagagattttgaaaaagtaaaaacagaagtgaggaggaagaagggaggttagaaccatatatagaacgagtctgaactctaaaatctgaaaaatggtgttttgttttgatttaatccaaaagaggttactttgtcaatttttttttttggagggtgcgagaaaaggtgttgagaaaaacaccaatactacgaagtaagttttttttttttttttttaaattaatagtagttaggggtgtataaaaaaccaggtcaaatccggtcttcaacctgttccggcttgaacacaaggggttgtgtttgacaaactattttagagtattcccacactctttaaattcatgctaggaattggatgttttatgtgtaccatgttgtgatgttataaatagcaagtttgtgcgcgtaagttaatatctgattatgatacatgttgatccgtcgcaaagttgtttattagagtgtacaaaagatgagcaagacatggtttaatgtgatttgtcaactaacatcaatttgatagtcaaatccctaaagagtctaagtcgccacatcacatgaaagtacatatatgtagtcgtaatagaccctttccttaaatggtcgaagagtagcgtcatgagtcagtgatagtgagttgtttccaattcaccactgcatttccatttcacc

SEQ ID NO: 32478 - DNA, 770 bp, Medicago truncatula
  Intron number 1 from transcript Medtr7g110940.1 (locus Med tr7g110940) derived from phytozome v7.0 (chr-ID MtChr7; po s 25929962 to 25930731)
tcttcgcttccggcctcatcgttaatttctttcaggtctgtttctttggattcatcgacatgggtttttcttaactaaccaaacatactttgtttctatcaacatgcaaatcttgccttctgttacttatactcttcaatttgttacttctccaactatgttatttgctactatgtcaaaacccactacccaactgattcaaatctgaaatcacccaagtgggttctcaattagatcttttactcagttaagcacttgtttgaattgacttatttgaacttacctgatgatatacatgtttcttagactgtttgggagagcttatataataatatagtgtatgtctggttccacttttggaacacccaatattgattcagaggtttaaaattcattttcacatgttttcgagtagaattgattctaatttgaagttgaaaattggagcttttgattctagagttgttttttgtaccaagatttattgttaaattcatttttacattattgtatctaagcgtaaatcattttaccttcaacttacttttagtttgctttgattatatctaatcttttgttataatagtagctagtatataagcacttatgtgataagctgtttatctaatgatatcagtacttgtgctataaatgcttaattaatttgtttatcaaaatatggcttaattggttgttcttttgtgtgttttaagtgcttgaattgctttaacaagataaattgacctcttttttatcttgtcttaggcaat

SEQ ID NO: 32479 - DNA, 402 bp, Medicago truncatula
  Intron number 1 from transcript Medtr7g133540.2 (locus Med tr7g133540) derived from phytozome v7.0 (chr-ID MtChr7; po s 31259279 to 31259680 reverse strand)
ccaatccaatccaatccattccattccattcctctgtaagtctcttctccaattctctttttgattttttctccttcatttttcgacttttttactctataataattaatttgtctataacttgtggaaaatctgacccacttggtttttctctgagatcactctgttactctacttttcagccatttgggttggtgtttaagaccttaaagcaaacatttttaattttttcttgagttctcagatttcagaaactgtgaagttttaaacttttttcttttgtttctttctagagttttgacttgagttgaagaaatttaatgaattttaaattttgacgttttttttaatatttttttttctgcagggttgaacttgaagagttgattttggtgttggagg

SEQ ID NO: 32480 - DNA, 769 bp, Medicago truncatula
  Intron number 2 from transcript Medtr8g101710.2 (locus Med tr8g101710) derived from phytozome v7.0 (chr-ID MtChr8; po s 22130980 to 22131748 reverse strand)
cagcagaacaaagaagttgggtttcttgaagggtatgtctcctttccttttttttttgctctgcatgtgttattgttgaaaaatgtgtttccttttatgatttatttattttgtttttattcgaagattctgaatttttagtcagagtaggtggacttcaacaattccgatctgggaatgttacaaaaaaaaaaaaaaaaaaaaaaattgctgagttgctgaaatcattgattgatgtggaaaataaggcatcttttagatattataatattttgcatgttaaatcaacctgatttttgttgaatttggaagtaggagtcaatggatgtgatggttggaattgatttttaattatggacatgtttaatggtcataataataaacaatgaaatcttaaaattcttaggatatgttttgcaatttgatcaaatatgaattttgttgaattaggaaataattgttggaattaatttattaattaatcacatcatgttttctcttaattcaaatataagcatgctatattaagcatataaacaggaaatcctaatgatttttggatatatgacaaattgatttaggaatacacatatacattgtttaatcatgataaccttaagatctgccacatgtgtgtatttgtttgcttctatgatttgatctttatctattaatctttgttgatgttctaatattgatgtgtttgtagaagagaataattgaaatttgtgttttgtattgcagtttggctgcactctgctgttgttgc

SEQ ID NO: 32481 - DNA, 674 bp, Medicago truncatula
  Intron number 3 from transcript Medtr8g086420.2 (locus Med tr8g086420) derived from phytozome v7.0 (chr-ID MtChr8; po s 17676488 to 17677161 reverse strand)
agaattaagatttctcttgacacaacaaggtgaacttccttaagagaatctctcttcaacatctcaaacctctctcccacttttgtgctttcatgcaatgtagttaaggctatttcaattacaactttaaccaagtttacaaagttcaaaattacatgtgacataccaaaaactatgttcctgttgtttgttgccatgctttaaaattgtttattttttttattgcggacaatggtttttttgggatgtatgctattgtgatttcactcttgatttcaaagataagaagtgaacttgatttcattcaaatgttaaattgttgtaacagtttcttttgacagattggtgtgtcttttttattaatgcttcattagctatcacttgtgacagatttgtaacttttgcttgctctctttgcaacttgctttacaatatagtgtggatagcacttatagtcttcatctgagttaccaatatccaaagatatttttacttgctatgtgtattgcaagttctgatatgaggctattgaattaatggtaaagcaacgtgatagtttgttttggttcctatggattattactaaatttcttctaattgtagcataaataatgcaaattactttgttttttcttgcagtctcggactgttgtggcagagaatttacctgacga

SEQ ID NO: 32482 - DNA, 732 bp, Medicago truncatula; identical to SEQ ID NO: 28238
  Intron number 2 from transcript Medtr8g034690.1 (locus Med tr8g034690) derived from phytozome v7.0 (chr-ID MtChr8; po s 7556371 to 7557102)

SEQ ID NO: 32483 - DNA, 502 bp, Medicago truncatula
  Intron number 2 from transcript Medtr7g107090.1 (locus Med tr7g107090) derived from phytozome v7.0 (chr-ID MtChr7; po s 24978163 to 24978664)
tggagagcagaatattgaatagcttcatcgtgagttttgtttagttgtagtttatgcaataagcttcattcaattgattttatgcccatttggtaacctaaacctgtaagccctgattatatcttgctcatttgaatatatgctcatttgatgattgaatgacagatgcagaaacaggggaagtgtgatttcttaccgagggataatcatatttactctttaaatctataaagtaagtcaaatgcgaaattaaaacattaaattatgtttaaagtatttgttgttattctctttcttttgttacggcgatttctacttgaaggctacaatatcaaatacctatttttaagtgatgacagtaaggcattttcttcatttcattaatgatctgaggtctggtctgcacttttctttattgcagtgttttaaattacagtgatacatatcctaacattaatatgctttcaattctcggaaactttgatgcagcagcagcatcgta

SEQ ID NO: 32484 - DNA, 884 bp, Medicago truncatula; identical to SEQ ID NO: 29612
  Intron number 2 from transcript Medtr8g071160.1 (locus Med tr8g071160) derived from phytozome v7.0 (chr-ID MtChr8; po s 14029908 to 14030791)

SEQ ID NO: 32485 - DNA, 833 bp, Medicago truncatula
  Intron number 1 from transcript Medtr8g109990.1 (locus Med tr8g109990) derived from phytozome v7.0 (chr-ID MtChr8; po s 24819480 to 24820312 reverse strand)
ttaatcaccccattaggaggaaaaaccaaaaccaggttatttatttctctttcttctcttgtatatttttgagatgttatgtttgttactgatgctactgatgaatccctttagatatggcattgttgaaatttaaggtttaagcttgaatttaccttttgccctaaataccctttgtttgtggggtggacattttgatcttgctgaatgtagtattttttattggaaaaactggtaataactgttgcatctttgttggtttgtacctaatgttgaactgtgatttttggagaaattgatatccttgcaatctttgaagcacatacacagacatgagtcacgcgacactgacactgacacgtcaacacccataataatttgaaaaaatggcataattgaatgtaatcacatgtgatagtgttagtgtcatgtcggtgtcagacactaacacatgtcggacatcggacacgacttctattagaagtgttggtgctacaaagcttgcaaatcacaatgcctttaaaatgtctgttttttgtctgtgccattgtttgattagttagttcttccgactttagttatactcctagtgagatcttctactatatggcgtaaggactttgctagggttataaaaatggaagagaaagttttactttagaagggacagtaggtgttttcattcattatagaacatagcaaacaggttctattggcttttatgactgggcacatattatttgatgttgatatcttaaaacattcttccttgttttggtgttttgactacaaatgcaggctgttagggagaaggtgcgagaaagagaagaacc

SEQ ID NO: 32486 - DNA, 541 bp, Medicago truncatula
  Intron number 1 from transcript Medtr8g120410.1 (locus Med tr8g120410) derived from phytozome v7.0 (chr-ID MtChr8; po s 27514382 to 27514922 reverse strand)
ggttcttgggtttcagagattcgtcacccacttttgtaagtttcttttctttccattccaatctaatctagttacatatatttttcattagtcacatcaacgtacacattcatctatacagtgcatgtttttttgtttaactaatatcagtttgtccaaatcaagaaaattatggttaattttgtcaaattcaaaatgatgtgcacatatataatatagtccttcaatggaccctctatggtgtgctttcatggtgtggcggcatgatagctatttgtatatgtcattatattaagagagatccattaatctaacggcttgttgcaaggtaaaacctaaccctagaggatccaagtgaaaagaatggaaattgatccctagcacttagggatagaattatagacaaatatatagtttttcttggtaattttgttggtcttttttttttttactagtgttgttttgtatgtaatttattaagtttgtaattatttgatttgaaataggaagagaagggtgtggctaggaacatttgaaacag

SEQ ID NO: 32487 - DNA, 948 bp, Medicago truncatula
  Intron number 2 from transcript Medtr8g144870.1 (locus Med tr8g144870) derived from phytozome v7.0 (chr-ID MtChr8; po s 35087164 to 35088111 reverse strand)
caatctctgaggttagttttctcttattttcagtgtttattatgtgctctttaatgcttggttaggaagcatctaatgttaatgtatcaacttgaccttgatgtggcatccggttttgtaacttcgttacttgtttcgtgaatttaatattcaaattttggtttgtagcttatatgttgtgttagtgcctacaaatattgaaccatctctgcaaagtttttgatccgttccatgacaaatatgaagcttttacagttgagactttcattttctagtttttaggactgatggttatcaatgcagcagagaagtaataaaatatgaatgtcatttgattccagatgtcactttctgtaatctgtacccatattgattacattcaattcacacttatacttctctgttttattcttcttttgaaccatttctgcaaagtttttgatccgttcaattacgaatacaaagcttttacagctgagactttcattttctagtttttaggactgatagtttcacaatacagcagagaagtaataaaatatgaatgtcatttgattctggatgtcactttctgtaatctgtactcatattgattacataattcaattcgctcttgtaattctctgtttttattctttatttgaaccatttctgcaaagtttttgatccgttcaattacgaatacaaagcttttacagctgagactttcattttctagtttttaggactgatagtttcacaatacagcagagaagtaataaaatatgaatgtcatttgattctggatgtcactttctgtaatctgtactcatattgattacataattcaattcgctcttgtaattctctgtttttattctttattttgtcttttggatactgtcactatatcaaatgttatcagcacaacttataaattacatttctttggggatttttgcagcaaag

SEQ ID NO: 32488 - DNA, 516 bp, Medicago truncatula
  Intron number 1 from transcript Medtr7g106840.1 (locus Med tr7g106840) derived from phytozome v7.0 (chr-ID MtChr7; po s 24823105 to 24823620 reverse strand)
gttccattttcccatctgttgtttcttctttctgggtacatattgcttaaacctcttcaatttccattaaattctcataaaaatcactttttttatttttaaccttttttcttagaagttttttagtgttcagctttgtttttacaaggtgggccttttatttttattttcaatttttatttattttttttctttctgttttggtctttttgatatttagtttcagttttgtactttgtttctaggcagttgtacggaatttctagttttttctctgtttttccgacacctattttgttgccaatgttttttcttattttgttaccaatgttatttaaggatgttttgtcttaaatcctgtttcatgaacttgtagttagtttataattaatcaacttttgtcttaataaattccttttttttaatttgaatttgaattttctcatgtgggtttgactaaagttgtgttctgtgtttcaaggcctagttgtggatttaaggtttgtggaagaaaga

SEQ ID NO: 32489 - DNA, 733 bp, Medicago truncatula
  Intron number 3 from transcript Medtr8g129750.1 (locus Med tr8g129750) derived from phytozome v7.0 (chr-ID MtChr8; po s 30776726 to 30777458)
tttctcgttgtgtttgttggaggaggcaaagataggtattaaattaatactcttctggggcaaatttgttgctaatacatgttatttaagtagagattgatatctgatgttgtttagcaatactttgactacaataacaagaaaagtatattgttcttataaagtcttggagtattaacatcatatcaataacctatggcggatactgcgtgtgaggatgttgtccttgaggaatatgaatgaatattttaaggttgccaaaaattttagttttttttctttcttttcaaatgattttagcttataaaactgtaatggatattgacatactgttattttaaaattggtatccccataggaaggtagcttgcattttgattgagtttgactgcaacattgtaatccaagaaacttccctatttttttgtaataagatattagttcccatcattttgttaaatcagttcacgtggaaataaagaaagggttatgaaaataaattagcaaccaaagtcagcaagtgatgtgtcatatgtatcatatgatttatgtattttcattattattttgaatttgctcaagcgtattttatcatggatggtgtggcaacaatatcgatccaacagcttcctttctgtgagatgaatgccatagttatatctttttgtaatttttgttcttttacttcatggtttatctgtgtttgtggtgcagcgctcattttttgggttca

SEQ ID NO: 32490 - DNA, 434 bp, Medicago truncatula
  Intron number 2 from transcript Medtr8g087610.1 (locus Med tr8g087610) derived from phytozome v7.0 (chr-ID MtChr8; po s 18253198 to 18253631 reverse strand)
ggctttgcttgaagctttggagaaagtcaaagctggtaagattttagtcaagggattattagttgtgtagaattatgtaataccaacactttagattaaagacgagtttggtgtctaacgcgtgttagtgttggccaccgacacgtgttagtgttggccaccagcacatgtagttacattcaatttattgcatttttctaattattatcattgtcgatacgtgtcagtgtgagtgttgtgtccagtgtcggtgctcataattcaaagcagtttgacactttgacactttgactcatgttgagttaatttttttgttatgtcattgttttcttttcagattcatgtggaatactaatgatgacgataattataattatttctctgatgtttctttaatcaatgttaaatttgtttttatttttgttgcagaattg

SEQ ID NO: 32491 - DNA, 899 bp, Medicago truncatula
  Intron number 2 from transcript Medtr7g102810.2 (locus Med tr7g102810) derived from phytozome v7.0 (chr-ID MtChr7; po s 22923830 to 22924728 reverse strand)
atcccagagcgcttgaaattgcgttattgttatcggtaatttctcttttcttttcaaaagtttttagtggagctgtggtaacttattcattgtcaagtttgatttttggagtcggtttgggtaaaattttgaatgaaaacttgtagggaaatgaagtagaagtgatcctactatgattatgagtcttctagtaaccagtagttttttgcttaagttaaatttagtttctggatcgtagataaaaaaaattattttctgcatgtcaacggttttagaagctctattatccaacttcttcacaaccaaaacttataagagcattgtttgttaagaattgaatacttatctcaattgagtagctctcataaaacagaaggtaatctaagccaggttttggtcattatgaaaatgtctacgttgacaaagggtacaaattttcatttggtttataatttatgtttgttgtacatgttaaaaaactattccattttcaattttgtgaaggataattggacacttaagtgaatccttttgacttgttatgattttaagattggatttgagttgatcattttgaaaatcagaaagtaagaacttttgaaggaaactaagattgtcttagatgacattttacagtttattttgtttagattgcgattacaaatagttttttttgtattttaatttattatgctttatgctaatattcatctggtagaacaaatttcttgctcttaaaattatgacttcttttcacagtagaacaaaaactattttaccctatctatgttcttttggatatgtttcattagtattatcaagtcaattgctcgttggtctgaagctttattgtctatatatcagggagcaacaatagtagatcagattgtgagtataag

SEQ ID NO: 32492 - DNA, 747 bp, Medicago truncatula
  Intron number 1 from transcript Medtr8g026720.1 (locus Med tr8g026720) derived from phytozome v7.0 (chr-ID MtChr8; po s 5858283 to 5859029)
cctcattcaagagttcttaattagaactcttcgtggtgaagacttttgaatttcatgagataaatgaatgttcatctataagtgtgatttcaatcaataataatattagtgtattgtgcaaataaatcaactttatacatcttcacttctttagaaactaaattaattttatatagtttggtgaatgcagtttatttagatagtaaaatgatactattgggatctggaaaatgctaccaatatttgatatatattgggatcggaatatctttcataagtcttttttcgtagtagaaaaaggccgattcatgttccaattctgccaactaaactttgagagaatgatcaaaggtggtagaattggaacatatatttgtcttgttctagtagggtaattgtaactcttttccctcatatctccaatttgaagccaacctatcttctataaatatctgtcgatgaaacaatttgattgaaatcacgacgcaaaaaagaaaaagactaatgaaattcacgatgttgtgagatttacatagcagcacccatattaatagcctctcaaacaatcgaaatcccatcaaatcagctcaaaatcacaacaaatcatgtggaataaagacacaatcagccaacaatggaatgttgcatattccagcataataaatgtttgatatgtgttattttataaataaatgtttgttgtatgttcatattttgttctgttagtgaggaaatctggaagatagc

SEQ ID NO: 32493 - DNA, 496 bp, Medicago truncatula
  Intron number 4 from transcript Medtr8g147830.1 (locus Med tr8g147830) derived from phytozome v7.0 (chr-ID MtChr8; po s 36477242 to 36477737)
tacacatcaaaggtcttctcagctcaaaatctcccagtttaagcactttttcttatcttttttatttattattgcttactatttattttgaaattcctaaatagctggtgggaactctagttgctggagtggtgaacctttcagttgctttgtggttgttggatggcattcatgacatttgcatggatgatagataagataaagcttaccatgacagtccttcgacttgtcccaaatacagagtggcatttgatgcatcttttatatgcagtttgatttgaccaaggcggctataatttggacccggtggattgtatcgaaaccttgtatggttattctttattggggctgtgttaccagttcttgtttaggcattcagcaaaatatatgctgacaagaaatgcttttctctgataaacataccagttatatcttatggttttgctggaatgccacctgcaactcctactaatattgcaggccgctattgagagga

SEQ ID NO: 32494 - DNA, 673 bp, Medicago truncatula
  Intron number 1 from transcript Medtr8g034530.1 (locus Med tr8g034530) derived from phytozome v7.0 (chr-ID MtChr8; po s 7488542 to 7489214 reverse strand)
tggtgacaatcaaagagcttaatctatttctacaggttttttaatgtgagcttatagtaatggttagttgtcccaatgatttacagtttctttacttgtatgtatatagttgtctctccgattctcaaggaaacccgttcaaagttgcatcattcgctgatccgaatcattcgtcgattctgaaatcacgctttccattctgaatctctcgcaaactcctctcaatctgacaaatctgtggtatgtagttcctctatctatttttcttcatttcaagtcaatttttctgcaaaagtgtttttatatttttcttcatttcatgtagttcaaaatttgcttgtaacggtgctattttgtttttatattgagatgattacgattttgttttgagtatttttgttgattcgatgacctgagagtgttgattttgtgtttagtcattttcctgtggttaggataatcgaataggaatcattggattaggtttttttaaataaaatttgagttactaatttgttcgtaacgatgctattttatttatgtgttgagatgtttacgaatttgtttcgagtgatttttttttatttgatgttgtgaaattgctgattttggttttgaatggtttgttgcaattgcagcttgtgaggagcaacagtaagtggtttacgccgtc

SEQ ID NO: 32495 - DNA, 413 bp, Medicago truncatula
  Intron number 2 from transcript Medtr8g137940.1 (locus Med tr8g137940) derived from phytozome v7.0 (chr-ID MtChr8; po s 33128831 to 33129243 reverse strand)
aatttgcctaaaagtaattatctgttgctattaatagtatcctgatgtttgtgaagaagaaatgcagcatttttattcttccctgccattcattttctcgtagactgtttgtcatctaatcgtatttgtttttgtctttttattctgtatttcttaatttccataatgcagcttacctgctgataatagaaagtagtccgttagaattttgaaccagagcattttgtgattcgtagcttgttttggacagtattatagattttttattagttatttttcatctaagtaataggttttttctataaacagttagatgatgtcaaatctccactgtcagtgtcatcttattattactactaattttttgtgtataaacaggtggtactattgtattgtttgaccgcaagaagctt

SEQ ID NO: 32496 - DNA, 1057 bp, Medicago truncatula
  Intron number 6 from transcript Medtr8g124980.1 (locus Med tr8g124980) derived from phytozome v7.0 (chr-ID MtChr8; po s 29047979 to 29049035)
ccctaattccgcttttcccagatctttgaaaagtaacttttttctttttggtacaaacatgttcagatatatgaacctatgattttatgtttttgttgttgttgatgaggcggtggtatatgatattgttctgtcctgtaatgtttttattaaaaaaccagatttacagtttattcttctaaatgcattacaggtcagtagattaatttatttttcttcaaattttgggtcactgaattagccttttaatgatttaaaaatatcaccataattttgattttaagaaaaacaagagtggtgataagttgaatgtttgaagaactactttaatagcataattttttaaatacgggcttggaacaaacttttatgacttaggttttagccaactttaatttgcaaattgcaaaaacaattctctctgcatactattaataattatgtttgacaaaaatgtgtttttaaataaccccaagttaactaaataagggttcaatccaattttgctgggtaagcataagtcgaggggtctttgacctcaatctactcacacaatactacgttgtgggttatagttttaaggtgctattgtactctatcttaatctaaacaaacacttagttgtatgccatacctctatttatttttacttttgtatcctcagaacaatcccaattctcatcagattgttcaagtttttaggatattttcttttcttagggttaggaataccatttacattcgaacaaaacaacttttaatatcatatgatatgatactgttagtgattatgactgttattagtaccagagaatggtaatttagttaaagaagagcactcacactgtctatgcaatcgtgatgccattgtttattgaattttatagtatttttacttgtaatcgtttaacatttttttgttgaaagatttacacctttctctaatatataaggagtaggtggacttagatttggcactgattgcaatttgaggctcactcttttactctaatgttttgcagacagaagggaaaaatctctggcgctgcttactcag

SEQ ID NO: 32497 - DNA, 726 bp, Medicago truncatula
  Intron number 2 from transcript Medtr7g107400.2 (locus Med tr7g107400) derived from phytozome v7.0 (chr-ID MtChr7; po s 25100029 to 25100754)
gcttatagtcaaccttggggtaaatctcgtctcaggtaaatttaattcctttcatttattgcattattaatcaattcaaagatttttgttttaatatcaaatcaatcaactgattattgtagattacttgttttatttatttaatttttcatttcttagtagttagttattatgtcaattataattatattattatcaatggctttctttggattgaaaatttctggagttagattatgctatttcagtggtttggtagaaatataattaatttcttagcagtctttcacaatttttgagtgggtctattcagtccctgacaaaaattatgcccaaattagtccctgacattttcaaaccggagacaaattagtctctaactcattgtattaaagggactaatttgtcccagaaataaaaatgcaagggactaatttaggtttacttttggtcatggactgaactagcctgcaagaaaattgtgagcgaccgatttggttattcactctagattttttttatgggtctgacttgttcggttgagtggttaatttcttcaatatagaatgaaatgtttctcctccttttttctgtctctgcataaacttcaaatcattaaacaagcatttcaccatggatagctattgcgagcagcgacgccttgttacttcactactgtcttcatttgtatagttaagactgtttcttatcttctactttgcagat

SEQ ID NO: 32498 - DNA, 848 bp, Medicago truncatula
  Intron number 1 from transcript Medtr8g105660.1 (locus Med tr8g105660) derived from phytozome v7.0 (chr-ID MtChr8; po s 23386641 to 23387488 reverse strand)
ttcttcattggtttttcttacttcatgttctactgaatcacatacatttgaagcaatgtagatagagctgtcaatttaagtgaccttaacaatttgatctccaactccagtatcatgggggcttaaaatattcgaagtgaatgaacccattttttataagccccaaaatagtagatgctagaagttggtagtaatggaatccgtccatgttttgaattggcgagttaaacactaggtcttcttaaccgtttgtgaaggtgtaaggtgcgacatatttccagcggagagtcaaagaggattatatttgtgaagtttggccttagttcacctttgactagtcatattttttattttgttctcatctttgtcttttataccttattggtagataaaaggttgatcgactctcatagtcgtagttaattttttttttcctgtttggagctcgccccttttactttgatataaaaaaatataaaaactattttgaagggcttaaatcattctagtttttttcctttcaaaatagatatcaaacataaataaaatatttgaatgttttaacaaataagtataattttcttgcaatttttgttttttcatctacataggatatatatatatattttacattcatttagcttatctaacatatacaatagattatttagttactcataatgttattttttttaaattgaaactatttatttagaagtgtcaatgaatttttttttaaattatagatttttttaattacttatttagtttttaataatttaaatattacaaaataatttgcaaaaaaaaaaaatgttatcgtttcataagggttttatcattcataa

SEQ ID NO: 32499 - DNA, 440 bp, Medicago truncatula
  Intron number 1 from transcript Medtr7g106670.1 (locus Med tr7g106670) derived from phytozome v7.0 (chr-ID MtChr7; po s 24755140 to 24755579 reverse strand)
ctggtcaattctggtttcctgctcaagtttataaggtaagatcaatcaaattttaatacctattatttaattttgctaaggtatataggagtcatgatatacatattgcattaacattatacgtttaacaatttgtaaggggatataaggttggtttggtctggtggatgacatggatgattcaagaatagaaatgctaagaaaatcgaccgtttgattctcacttttttttgtggtgaccagggttcgaacttcaaattttgtatatatcatgtattatctctaccaactgagttacgctcgcgaggacgtttgatttccacttttaacgtgatgctaacaattactaacaatactattaacttcggatgtctagaagaaaaaaacatttgacaataatttttatgcataacgttgtttgcagaaagcattaagttgtt

SEQ ID NO: 32500 - DNA, 930 bp, Medicago truncatula
  Intron number 1 from transcript Medtr7g092860.1 (locus Med tr7g092860) derived from phytozome v7.0 (chr-ID MtChr7; po s 20543660 to 20544589 reverse strand)
tcttgatcgtggaaacgcttaccattcatcttctggtatttcaatttttttccttcaattttctcgtgatttttcgattttttctctccttcaacgtttattcctttcgacttttcaaaattgcttttattcctctcgtgattttgtcgattatatatatatatatatatatataattaaattgataaagttttgattggatatagttgagatctatattgagctcaatttactatagaaaatgatgttttaatcttagagctaaaagctgtttattatgcttaatggagtaattgagtactttattatgtgattaggttatcgtgtagatctagcattcatgaaatgcttaatggagtatataagtactttatatgatgatgatgttgatcttagtacaaaaataatggaaaaattgtaaataaagcaagctagtggtgaaactagtggcaagcattatgattgaaataaagcaagccactatattctgtggtcatatttggttatcgtgtctgaaaagaataaatgattagtgagttgaaccactaacacaaacacaaacacggacacgacattgacacacagacatgttcgacaccggtaacaatttgagaaaatgaattaattgaaataatcacgtgtcggtgccgtatctgacaaggacacgtgttggacaccggacacaccttccatcagaagtgtcggtgttatttagtaactgagaaggaaatagagagttaacaatgagtcttagctcattgtggttcatgtaaacgagtgctttaagaaactgaactgaacaaaatgtattatgtgacgaaggtggttaattagtaatagtaatagaacacatgatttttctcgatcaacttactataaacttgtgcaattttattttgttacagctgagtttgtgacaggatcaacggc

SEQ ID NO: 32501 - DNA, 609 bp, Medicago truncatula
  Intron number 5 from transcript Medtr7g130010.1 (locus Med tr7g130010) derived from phytozome v7.0 (chr-ID MtChr7; po s 30266751 to 30267359)
ccaagcaactctctgagctagaggaaaaactgaaggttctttttttttcatttccttgttttgggaattgggattgtaagttacagtattttttttttttttttttacttgtgttttaccataatttatgaagactaagtatggtgtgtgatcattcgtaaaaactttcttttgatatgctttgtcgtcaagaatatgctaatttcacccaaaagtttgcatgttgtttgcatagtaactatagatcaaaatcaatcaagtatacctcaaccccaaatgtgaaataccagctgaaatgtcaaaaacatgcagaggaatttcgatactctttcaatgttctcgtcatgtgtcctctcttttcaccggccatcacgagcttttgttccgccttttttttctttctaaaaccgtgtcaggaatctcctatcttttgtctttcttttgattctaccttcctctgtctttagctatctcgagttttcaatcacctatctcccattctctattttttattttttattttacttttccatttctctcggattttagaaacttactattttacatcttacacattttaggttttactgcttcccagtgatcctctgg

SEQ ID NO: 32502 - DNA, 1037 bp, Medicago truncatula
  Intron number 1 from transcript Medtr7g133350.1 (locus Med tr7g133350) derived from phytozome v7.0 (chr-ID MtChr7; po s 31172266 to 31173302)
ttataccaactagcagaaagacgggcacgacgtatgtccgctctttccagtgccctaacgcatgtgattattttattatgtttgtttttataattttgattcaattttaaaaaattaatggaaattattgatatattgatttataaacaaaatattggcatggcatataaaaaaattatttatgaactcaacatattttagtttgcctgcatataaaataaagataaaataatgatattttattgttattttaatagtaattagtaacatcataacataaatgtatacatgacatgttatgtaaaagaaacattgttttaaacagtaaaaaaaattcataaggtactatgtgtaagttttcttcttaaattaaatttattgttatatatttgttacatgtgttatttatatttaaaattaaaatttaaaattaaaggtattttttgaaagaaaagttcaatcctaaagtgtgctgaaagggatagttttctttatatatagtatagattattgttatatatttgttacatgtcttatttgtatttaaagttaaaatttaaaattaatggtatttttggaagaaaaaaaaagtccaacccaaagtgtgctgaaagtggtagttttctttatatatagtatagattatacccttaaacaactttttctgtgataaaaattgttgttgatgtcattaaaaaaataatttaggttataacttttttgttatatattgttggtgtcaattgaaatatataatcatggttggtttggtttgttataacttgacatcaacaaccatttatatttttagttttaatcaaaataaaatttcatataaaaaaacatcgttcataattttcaaatgttagcatcataaaaagatgagtgtccgtcttttcgctagttaatataaaaactatttgcacgttcatccaaaaaaaaattaacaaatagttaatcgtaataaagcggcagttttctcagaaacttttttcgcaacaggcttccgaccaaagacggtctccttcggcggcaaa

SEQ ID NO: 32503 - DNA, 959 bp, Medicago truncatula
  Intron number 1 from transcript Medtr8g127850.1 (locus Med tr8g127850) derived from phytozome v7.0 (chr-ID MtChr8; po s 29674802 to 29675760)
gtggttcgatcaggatccagcagaccgtgattgatgtttttgggtgttaatgattttatgtcatgttgattttgtatttttccccttttaggagctacttgtttttttgtgctttgtatttttctcaaggttgaacctgtatttgttctttttggtgacttcttattttctaagtgtagtttgtgttatgtcctatttctttgttttttcatctcaaaacttatttgatctccagaggcaccagatccgagcaaaaatgtgaacaacatccaatgtaacagtttgcatacaaattttcttaataacttgtctcaagatgcgctaaaaaatcaacacgacaaattatctcgttgtcgtagataatagaatgaaaattacaatcattagcccctcaacaattcaacacaagataatttatagagaaatctcgtagataatcaatgcgtgtatccatgtcctctataaaacaaatggaattctaaggactaagaggtttccgaagttaaccctgaatgttgtctttcaaaataaagagtatataggttcaaaagaaggcgagccataatgaataatgctatggtcactcactcaaacactctccaacaaacactttttatgtgtatggtgccacgttttcacttatttatctacttaccttgtttaccggcatttaaagaatgaaatgtttttattacttttttatttttattttttattattggcatctcaaaagccaagccatctctgcaaacggaccgccactgccatatacaagtctcaatatttaatcctgcatggagaaaagcttacacaactacctatgttcaaatcttcaattattaattgtataaatcaaagcattcaatcgattttctattgaaatattagctgacattcaaacattgcataaaaaaaaacactgaatcactcaaaattttctgggttgcagttgcgggagg

SEQ ID NO: 32504 - DNA, 634 bp, Medicago truncatula
  Intron number 3 from transcript Medtr7g139220.1 (locus Med tr7g139220) derived from phytozome v7.0 (chr-ID MtChr7; po s 33247525 to 33248158 reverse strand)
tagttttggataaacctgctggcacttcagtacgtaatcaatcctactctatgaactcagaaaaagttattaatccccgtataggattcgtatagaattgttattaaattttgtattgtagacaacagtgctaactcctgtaatttttgtacccaatcacaatttctacatcgagtgaaaattgttatctgaagggctattgccgtgtgtccaacatcattgtttctgtttttacagagtaggtgagatttataatgtgtattccgaatcccaataccaggttcctccatcttttgataggcgttgaggtcaagtccttatcaagcaataatggttttgtagaacactgttaagtaaagatatatcaatctcaaaaatgattgtttgtaggcttgatgctcagtaggtggagaatttttttgagcagcatctatgaagtatgcttactagttttgaatgagacacagcgttaaatttgtaatctgaagtaatttaatattctgcatgacttgtgatgaagtttattgatatgtctacattattaattagtttattgcctaaattttccgtgcaatgtattcttttctatatttggttaggtaggggaaactactggcaacattgaagaaagctg

SEQ ID NO: 32505 - DNA, 595 bp, Medicago truncatula
  Intron number 1 from transcript Medtr7g106190.4 (locus Med tr7g106190) derived from phytozome v7.0 (chr-ID MtChr7; po s 24494305 to 24494899 reverse strand)
gtatacattaaaaaaagctgttacaatctacataggtagatagatattattatgattatgtttttgtttttgttacactgaatctgcagtttcttcttgttagatttttcaggtgtcttattttttccttaaatttcgcttcttttttttttttttagatgtttttttgtaccttaaaaaacaaaacaaaaaggttatttcttctttttgaggtttttggtttttattcacaccagaaaaatgtgaaacaatacaatattttttacataacacacaacgtagtaatttgttatcatatatgcgtgttatgttgttttcttgtttctggtttatgttgtttcttgttaccgaatctgttccaaaaccatatcatcatcatatccaattttcttaccgaacattgatccaatcaaattttcctaaatgggatacccaagaatatcaaatttaaattaaagttaataaatttacaaacttccaagaatttgattcttgattatcattctttcagactaaaatattcacccttttgatcattctttcgtcattgttttattcagggttcaagatcaatacctgaagaagaatcaaaccg

SEQ ID NO: 32506 - DNA, 396 bp, Medicago truncatula
  Intron number 2 from transcript Medtr7g111810.1 (locus Med tr7g111810) derived from phytozome v7.0 (chr-ID MtChr7; po s 26352129 to 26352524)
tggcattaccgctttggtataattcagagaacgtaagtataatttttttaaatgttttttctttatgtttaattattttctttatatgtgtgtttgtttaattattatatcaacttttatatgtgtttttttcttaattcttttcttttatgtttaattattttctttatttctagttttattgttttctttatgtttaattatgatttaaattgtttttgttatgtgtttttttttaattttacatgtgttatgtcttaaattgaaaatatgtgcggcaatttaaatttgtgatttttatttttgcatttgttaagttttattttgattacttaaatgtttacattgtttaaactatgtttatttttctattatttcagtttcgtaagaagcgtt

SEQ ID NO: 32507 - DNA, 927 bp, Medicago truncatula
  Intron number 1 from transcript Medtr8g086560.1 (locus Med tr8g086560) derived from phytozome v7.0 (chr-ID MtChr8; po s 17769604 to 17770530 reverse strand)
aaggttagcgttattaagttcaatttttgttcgtgttttgtttcttataatatgaatttgaacacaaaaataatttaaacataaatttcattaacatataagttttcatacgattgactataacatagtgcggtacaaatgtttgtttctttaaccatttagttaaagattttattgaggtttatgaatacaaacgttgggatggatatctcttaagaagatctcaatcatctcacatgattagtctttgtaaaggtcgacttaagaccataaaactattattataccaatttgtttttcctgaacgtcattttttcacttatttaatgattaatattttcatatccatgttgcagaagaagtcaccagtaaagaaaaaagcaagaatggcctatattgcctagtgatattgcaccatttagtacaccatcaatgaataggatcttgcatagtgatgttgcacagaatgaagtggatcttcctctaaaagataaagtttatgttgatgaaggttagctttattaaatctatcaatttttgttagtgttttgttttctataatatgaatttgaacataaaaataatgtaaacatatttaaattttgttaactgataagttttcatacgattaactataatatggtgtggcacaaatgtttggttctttaaccatttagttaaagattttattgaggtttatgcttatacaaatacaaatgtaaggatggatcaatctattaaatatatgtcaatcatctaagatgattaatcttttgtaaatgtcaacttaagctcaaagttgataaaactattatttttaccaatttattttctccgaatgtgatttctcacttatttaatgattaatatttttgtatccatgatgctgaagaaaaagaaatcactagtaagaaaagaagcaagaat

SEQ ID NO: 32508 - DNA, 482 bp, Medicago truncatula
  Intron number 1 from transcript Medtr8g150960.1 (locus Med tr8g150960) derived from phytozome v7.0 (chr-ID MtChr8; po s 37118365 to 37118846)
ggttccttgacttttcagccaggtaacgtcaagacatttcggaggttcatattaaatttttcattaccaagtgaatcattaataaatgacttttaacactaagacaatttgatttttaaaattaaaaaatatcaatcacattaatgagataattacaatgacaaaattgacagacttatctaaattcttaatcatgatgattattttaaagttttgctgttttttgttttgttttatttaaagttttgttgatttaaaagaccaaactgttaaattgtttttgattcactatcaattttgtactcttggagctaggcttgcacttggcaatgtctattattatttgaaagataaacaagcatcatgcatcaatagtgcaatgtttgggtgtacctatttttcttgcggggatccaccgtcttctttgaaagagtgccacatatgttgatgttgtgtacttgaagtttttgaagggccttgat

SEQ ID NO: 32509 - DNA, 868 bp, Medicago truncatula
  Intron number 1 from transcript Medtr8g148340.1 (locus Med tr8g148340) derived from phytozome v7.0 (chr-ID MtChr8; po s 36684050 to 36684917 reverse strand)
caatccagtttctaactcaaatacacaagcaacaggtatgtttgttttcaccagacacttcttaaattattcttagtcttcttaggttgctattacatgtctctgctacttttttcaagtttccataaaaagaaagaaagaatcatgtaacttgtgaaactgaactttttatatctcttttattattttttcctttttttttattttacctattcaatattagaaattcttcttctatgatgatgtttccttaccatgattgtttttttttttttttttttttaaagaataatgatgtaaatctatgagatatgagaaattattttggatcctcaattggaattcagattttgcatagaaataattttcaatataccgatactagttcgagaaaataaaagtgtgattaaatgtaatcaaatcagacactgagtgatctcatctttttaactgtgtatctcttttgttgttatatggatcaatttgattttgatttagaatcttgtgtgtcacaatttagcttgaacttagttttcttcaacatatcattcattattgtttagatttttcgctgtcaagctgttttcattgatgtctttgctttttgtttaatcattgttgaagtttccttaacagttttattttgttatgcaggttctgtttcttaaatacatttctcaactgtagttggtgatcatttttgcatctagctgattgccaaaatggtgattcctcataaatcttctgcataactagggactaactagtcaaccagttctctgttgggaataaccttttttctttacgataagattgactacttgctattccaatttccttttccggctgagtaaataattatttcaag

SEQ ID NO: 32510 - DNA, 598 bp, Medicago truncatula
  Intron number 1 from transcript Medtr7g089980.1 (locus Med tr7g089980) derived from phytozome v7.0 (chr-ID MtChr7; po s 19953612 to 19954209 reverse strand)
actttctgaagtcatcttcgaagagcgttttgaaggtaatttatttattctatgctcttttgttgctgaaattttgactccaacggttaaataagtgaaaagttagttaaatttggttagttgttaattagttagttagttagtttaatagatgaaagtaataagttatttgtttgattatttttttctactagtatgtaagccaagtgtgtttaaatttctattcttttttacttgagtttaatttttttttctattactttaagaatttaactggtttaaaatttttttcgaattttcttcaaaaaaaaattcgattatttcattaattgaatgcttgtgtaaaacttttttactaacaaaatgtttctagttgattatgattataagaatggtgttttttttataaatattttagtgaaatcatagtattagtaactaataatgattaaaagacaaataggactaagcaagttagcgtatcaaactatgaggtgatgtgtggtggtcttcaattctgcttatataattatttgttattttttattatgatttttttcattgatcatatgatattaatgtgtttgattttgaaaag

SEQ ID NO: 32511 - DNA, 706 bp, Medicago truncatula
  Intron number 4 from transcript Medtr8g109050.1 (locus Med tr8g109050) derived from phytozome v7.0 (chr-ID MtChr8; po s 24361479 to 24362184 reverse strand)
tttctaaaggtgagttccttgtgtgagaaggattattttccaaaacacgtctcgctttgtgaatttacagtttgatttattatacatgttcagttgttcatgtctatctagtgggaaaatactttcttattgatgttcattcctttgtcacaacttctattagaactattgttctgtacaatgatagctttagatatgaaaagtaaaatcacttctattaagtacctagactgtgactgttcgaagcaaagtaccttaaataggttttcagaattttattaagcacttctgactagacatgtaactcaggatcttcatacttccttgacaatgcatctgcccccgttcgaagcccccgactgtatagatgatatcaaactcataccctagcaatttaactaacctattatgttggctctgactgtgtggttattctctgttctagcaagtatcttaaactcttcttgttaatgtacacttgaaatttcctttcaagtagacaatgcctctatatctgtcgttgttaatttaactttaggcctatatattttgagtcagtcctgatatctgtttttattatattatcggcaaatgttaatatattagttatgtgtattttctcttacacgatgtctgaactctaattctttaagctctttcatttattaacttgatattaatggaatatacataggtgatagcagcc

SEQ ID NO: 32512 - DNA, 810 bp, Medicago truncatula
  Intron number 3 from transcript Medtr8g116460.1 (locus Med tr8g116460) derived from phytozome v7.0 (chr-ID MtChr8; po s 26385496 to 26386305 reverse strand)
ttattggtatgtgttgattccaatgatgtatatcaacttcaatttccatttctacgtaaaaagttagcttttcacttatgcagttatcagagtttttaggtttaatgccatgtataaatagttctaatgtcagtagataaattcaatccaattattatccaaacataccctatgtgaataatgctaatggaggtgatcttgctcaaaagtttagcaacatcttgagccaattgattctcgtgcttaaccttagatgggatgtagatatagaatttcattcctagaaatactccctttgttaagtatgtgaagattaccgattgaggaaagttaaataactatcaagtgcactatgtgtatgctcaatgacaaaattaatagacattctgtttggtggacatgtttggatgatcttatttgagcttatctactggcataaacacttatgagactgtttaagagggtttatggaaacaatttatgatatgtctataaccttgttttagcttgactccatacgatttccaggatattttgtgaagtcagcttatagcttatacaaaaacattttcacttttttgttttgttactgaaatagcttatacacaagcaccaatatgataagaggtagttaagttgtttatcgaaacagggtctcttaccattggaatacatatgtagttttgtgaaagctctttattcaactgaaatatgtatattcccttgtgtatgcaaaaaaaataaaattctttctgttttgcgttttctccattttttttttgttgtgtaggtggtcagactgcttgggat

SEQ ID NO: 32513 - DNA, 657 bp, Medicago truncatula
  Intron number 2 from transcript Medtr8g116460.1 (locus Med tr8g116460) derived from phytozome v7.0 (chr-ID MtChr8; po s 26386367 to 26387023 reverse strand)
cattcttcgcacttccaccactcatcttgttcgaggtgtcattttcaaaccccccttttaaatgttaaaaagtattttgtttttcaaattgtagcattttatcaatttagtccctcatattcacaatatttcataatgatccccaaaattgtataaaatagcaatgtcatggttatatttgaaactatatgaatacttttaggcaattttagtaatatgagggactaaatatacagtcttacaattttggatcaaaatgttaattaggttcgtttcttcattggaatttacagggaccatactgatattagttagtaatgtcgaggttgtatttgaaactaaatgaatatggtcagatatgcctttttggaattttaggcttgttttgcaatattgtttataatagggactaaattgataccgttttataattttgacaaccaagtgaatactgtcatatatgtctttttgcaattttagggattgttttgcaatattgataatatgaaggactaagttgatacagtacttcaattttgaggatcaaattgggtatttgctcttaaaaagttacgttttttcttcaattttttcacacatacccatgatttgatttgaacagatatagaagtttctgagagtgaagctttggagatt

SEQ ID NO: 32514 - DNA, 769 bp, Medicago truncatula
  Intron number 1 from transcript Medtr8g122010.1 (locus Med tr8g122010) derived from phytozome v7.0 (chr-ID MtChr8; po s 28424666 to 28425434 reverse strand)
gttgctaattttaacttcattgggcggagctttgggtattaagcttgccttagatttattgattctttaggttaagttggagcttaactttaattaagatcatcgtgaatttggttcatcgaggctctttctccaatgtttttatctttatgaagttttgtctcttcttaaactctttgaccggctgtaaccaaaaaaaactctttcgccggtgaacattggttattcatatatttagagaaacaaatcaatgcacatatttacgagtgatttaatattattaacatttattttaaatccccctaaaaaaaaacacttattttaaattatgttttttctcttcacctatagagaatattcttcactgtttacgtgattgtccgcactctaaagagctttgactccgcttgaatatggggcgttataatattttttttctctgaatttgatgtcaaggtttggcttcatgagatgacaaagggtacttcctctattttgtttgctacaggagtatggtatgcttggtgttggagaaacaacactattttttaggatcaacattggcgtattcaggatgtagtgcgaaagacttttttgttagatgatgaatgcatttcttactatcccaatcttggtttggacccacactcatcgtgtcttttagctcattggatcccccctctagaaggtacacttaaactcaatattgatggcagctttctagaagattttggttgtttaggtgttggcggtgttgttcgtagcgaca

SEQ ID NO: 32515 - DNA, 771 bp, Medicago truncatula
  Intron number 1 from transcript Medtr7g106190.3 (locus Med tr7g106190) derived from phytozome v7.0 (chr-ID MtChr7; po s 24494305 to 24495075 reverse strand)
ttttgtttcgatcaaagtcaaaacacaaccaaaaggtatcatcacaattcataaaacccttttttctctctctaaaagtacttcttcttgttggaagagaaacaaaagtaccaagtttttcatacgcacgcggtattggactattcatataccataccatcatagtgcaacattacgtatacattaaaaaaagctgttacaatctacataggtagatagatattattatgattatgtttttgtttttgttacactgaatctgcagtttcttcttgttagatttttcaggtgtcttattttttccttaaatttcgcttcttttttttttttttagatgtttttttgtaccttaaaaaacaaaacaaaaaggttatttcttctttttgaggtttttggtttttattcacaccagaaaaatgtgaaacaatacaatattttttacataacacacaacgtagtaatttgttatcatatatgcgtgttatgttgttttcttgtttctggtttatgttgtttcttgttaccgaatctgttccaaaaccatatcatcatcatatccaattttcttaccgaacattgatccaatcaaattttcctaaatgggatacccaagaatatcaaatttaaattaaagttaataaatttacaaacttccaagaatttgattcttgattatcattctttcagactaaaatattcacccttttgatcattctttcgtcattgttttattcagggttcaagatcaatacctgaagaagaatcaaaccg

SEQ ID NO: 32516 - DNA, 1056 bp, Medicago truncatula
  Intron number 1 from transcript Medtr7g124080.1 (locus Med tr7g124080) derived from phytozome v7.0 (chr-ID MtChr7; po s 29061104 to 29062159)
tgatttctcttttttcaatcgtattcctcctattggtatgctatcattcttctgaatttcttataattcaatttcattgtttgtttagttgcttaatcctgaatatgacttcttcaattgtagttgattatttgtagttagttattcaaaaaacaaccaattccaattgtttagatccccttttctccttccttagcatttgagatgatggtgaatactttttatttcgttgtttctgtaaacgtaggcaagagcttccgaaccatgttaaatctttgtatatgctcctactttctttatgatttgttactttattttctatcaaagatcccaaggcaattcagcgtgtgtgagtttttgccaacagatcatacttgcaaagtataccaatacttggcttgatgacagttttagggcactttgttagcatgcttaattgtttggtgaatattcacaatgaaattatatgtagcatataggcctttggtaagaagagtatatcagaatcagatgaagagtagtcaaatcactagaggcagaggaggacgacccaaaaaaactataagagaaactattaataaagatctagtgattaatgagttggatagaaaattagaaatatggtatatgatgatagaccattatggcgtcggttgatccatgcagccaaccccggttagtgggataaggcttggttgttgttgtttgattgatttcaatgctccaggggcttctgtttttcttatttgtccgggaggaaaagtgtagaattggatatttttgtcataaacaaataatgaactctctataacacctatccatcataagtgaagtttgattgaattttatagaaagatatgactgatctttcatctggccaattctttcaaacagaatcctcacctggctcatcttccggtgaagtgagattgtccaatgtcacagcaaacagttcgctggagaggagaatgacggttaaacaattttctaatgatgccctggttcgatgcaacaactaccaagatggtagaccagtctgttcatctgagtcttttg

SEQ ID NO: 32517 - DNA, 973 bp, Medicago truncatula
  Intron number 2 from transcript Medtr8g015890.2 (locus Med tr8g015890) derived from phytozome v7.0 (chr-ID MtChr8; po s 2921113 to 2922085)
aagtaccttaggaaattcagaaacagaattgacaagtgagtttcataaatttcattttacatatgggttgtttgttccttggacaccaataatttgagtagatcatgttatctgttgatcttagttgttgaatagagatcagacgactcatatttaagtaactatatggggtttgcatcaaaatcatttcactaagattattcacttttgaaaaacacaattgaaaagacttttgatattaacttgcaccaaacaatgataaataagctttttagcctcaatctattataaagtctacaaaattcatccctttagatgcccttgctttctcctataattccagtttggaacatttttagtttgttgaaatttctcaacaaaaattagtattttattacattaccttacaatctaaggttgtagccttgtaggtatctatgtgcaaaaattgatttgaaattatgcaagattttttggttttcaataattttatcctcccattattatatccatttgactctgccatttgaagacaaaacatgtttgcaaatagcaatagaggggggggaccatacataacatgggccatcacttgtcccacacatcctacgtatggatatttattacatatattacatcaattaaattagcagatttttttttcttctattattacaaattagcagaattttataggctatacttttctattccttcgataatcaaaggttaaattttagacttagcttcgccaaacataatagatagtgaactttccttaacaaaggggcatggagtatgtattaatgctattaaatgactcaatgttgaaagtaatgttacttacaaaagtgtctaaacatttttctttaaaaacgtgacaatactgttcaaaatatattcactaataattattattatccaatttaattttgcagggttggaataagacttccaacagtagaagtgaggt

SEQ ID NO: 32518 - DNA, 843 bp, Medicago truncatula
  Intron number 1 from transcript Medtr8g137540.1 (locus Med tr8g137540) derived from phytozome v7.0 (chr-ID MtChr8; po s 32974503 to 32975345 reverse strand)
cctagtgtctaatgtgttagtgttgtatatgttttccctgtcaatgcttcatagctcacaacatgagaacaaagtttgaagaatccatcaaatttgtaaaccatcaataaatttaggtcaattatggaagttccatttttaggctatgtggttgaggccacaaattctcttaagatgaaatgatgcatggaatgaccaagtgttacatttgtctcattttatcaaaatagaatggaaaaaaggtgaaaaaagaaaaagaaaatcgtcctttttgaaggctgacacggatggattactttgaattggacattaattttacatctcttacattttctctttttgctcctgttacattaccatcatcatagatctataacttttctgtcttttctttatggcttcatatctcacttttccacccatgtcgatgatgtgaaaaatatcctttttgccggtgaaaatacagtactgacaaatttttattgcacttctaggtttaacatgttcaggttcagggtttctagagtatggcatttatcaaactaccctaagaaaaaacaattttttggtatacccaagtatcctctactggaaattgtagagactaatgatcccttgagtcgacaaagactacaatgagcggccaaactctccttcaaaagttataacttaaaccatggtaacatgacgcaaccttatagaagaacttgaattgtaggagcaaagaacattcacattcatggaagtgataaatgaaaaagtatcgttcacgaaaatattagctcaacctaagcatattgatctcaaggagtacacatccgtaatagacatatcaaaattatc

SEQ ID NO: 32519 - DNA, 973 bp, Medicago truncatula
  Intron number 1 from transcript Medtr8g133390.2 (locus Med tr8g133390) derived from phytozome v7.0 (chr-ID MtChr8; po s 31776408 to 31777380 reverse strand)
tggacgagggtatgtatgtatggaattgaatactttatgatttatgtgaatgatgaagaccttgtgtggaatcttgactgtattttcttgtttcaatatattttataatagcttatcatcgtgctcgcatggtagtgattaatctaatattgttgctctgataggaggaatcaatctttatattaatggagttcaacgttagattctcactagatatgtcatgttctttgtgtatgttttttaatatgcaaggatatttgcttccttttgtttttatgttaatttgtttcattttttagtataaaaactaagaatttctcgaagtctcttctttaggtgtaagaaactgcatggtccaaatcttcatgcatacgttcatatatatttgccgaaatcttagctggtcaatgtgtgaggtggagtattcttttcagcatgcaactaggataagagtcaatttgcaattccttttgttaaatatgaagttctgaagataccagaaattcttgttaatgtgtagtgactggatgtttttaaaataaaataaaggaaagaagattgttttgagtgactgatacattgaccccttgttttttttttcttttccctctgatgatagctggctgcaatattcttgcctggctcagatcatgctggaaattgtcaattctattatgttttttgtgttgtttgacttttatgttattctttacaagtgtgaataaacttgtctctttattttattaaataattgtgaattgtcaactccaggtgtgcatgaatctttgataatcctctgttttcagtgcgatgtctcaccttgaatcagttattttttcttgattttcactctactgttcaaactgtagttgatttttaagattatccacatatattctctgatgtgtgatgtgtatttttttcaattttttgaacagtattaggaaacttcgtatcggctctcaacaagtac

SEQ ID NO: 32520 - DNA, 705 bp, Medicago truncatula
  Intron number 2 from transcript Medtr8g005700.1 (locus Med tr8g005700) derived from phytozome v7.0 (chr-ID MtChr8; po s 400952 to 401656 reverse strand)
gtcttggctcatatgtatcattatttgcatgagtcgaccatatcgagaacgtgacccttctaatggtaatgatacaattgagtttgtttattatatttctgattttattaaattataattgtgtttgttcgtctattaaatttctgattttaataaattaaattttgtttgtttgtctattaaacttctgaatttaataaagcataattgtgtttgttcgtctattaaacttttgattttaataaattatgattgtgtttgttcgtctattaaatttaaattattttgactatgcgagttttgggtgacttgaggtagcatgtgtttggaattgtctcaacacacactaaacctgattgttatggctttaagccagtcgggcaatgacatcctgaatcgggtcagttccaaacacacatttagttgtttactttattatttttatgatcaactttgtatcttattgcaaattcgcaacttaaatttgtgatgtacattatgatattatatattaaatttatttatcagaatgctgtggaccttgaatatgaattgtacatgtagtggtgtactctgtaacgtgttgacaagaaaaaataatgcgaatttccatttcttacataaaccttaattttttttttatctactttcataaacccttaaaaaaaaggtaatccggtgcactaaagctctcgcatacgcagg

SEQ ID NO: 32521 - DNA, 220 bp, Medicago truncatula
  Intron number 5 from transcript Medtr7g134050.2 (locus Med tr7g134050) derived from phytozome v7.0 (chr-ID MtChr7; po s 31542437 to 31542656 reverse strand)
aacaactacgtagctttcaagttaagtcataacaagtactatatgataacaactcttctcttttatatacaaatatacaaattcatcccttgtactttttctttcagaataattatggatttggcgagattatcatatcacgtgtccattatttgcccaatgatttttgtttgattgtttctatatttcttttgcatgttgatctcaggcagcaatagca

SEQ ID NO: 32522 - DNA, 809 bp, Medicago truncatula
  Intron number 1 from transcript Medtr8g006230.1 (locus Med tr8g006230) derived from phytozome v7.0 (chr-ID MtChr8; po s 614316 to 615124 reverse strand)
cgttgggtcaataaacttcgacctaacctcaaaaagtatgtaatatccttacttcactttcatctctcttctcattaaagtattttttattttttttacttctactcgcaatctatgaagcataaacatatacaccgaagcattgatatgtctgacacttgatattgacactgaaaattatttgagaaaataagataattgaatgaaatcatgcatcgcagtacacacacattcgacttgaaatgtttttggttcattgcttggaaagtagaattttgcttcggtgttgttttatgaaaatttacaaccatggggttgcttctttcttttatgttccaagtctttagtttttgtatgtttaaatatgaaatttctttcatgggttgtctcatctttttcgagcctttactacaagtgattagtgaagtttcttcttttgatatatagtattatgtatccaattctccatcgattgttcataattttaatacacttgcataatacacggtgtagcactaacattgtttagtgtcccaaaatattattagtgtcaacatgtctgtctgaatatcatgttcaatgtttatgttgggtgctgcttattcgtactttttgtgatgatacaaacatagagtaaattggtttatgttgttttaagtgcatgtttggttacttaagtttacatcattgaaattaattatttgatgcgttttttattgattggttaatttatttatttatttgatttttgtgtttgtggtctctctctaaaagtgggtgcaagtttacaatagaggaagagaggattg

SEQ ID NO: 32523 - DNA, 589 bp, Medicago truncatula
  Intron number 1 from transcript Medtr8g132670.1 (locus Med tr8g132670) derived from phytozome v7.0 (chr-ID MtChr8; po s 31397368 to 31397956 reverse strand)
tgaagtttcctctctttctttttcgtcccaaacaggtaaatttcttccctaacatcttagatccattcttaattcacgcatgtttgtttttattataaactaaacctagttgtttttgtcctccgtggttttatccagtaatcgcagtatttagatcatggtgattggtgaggtttgttactttcatacataattaaatggcgaatggtacataatagaattaggaaagagttatttttaattgaaagtgttgattttgattggtttctaaagctgcatgttagagctaaaggaatttttattgcaaggaagaaaaagagggcaatgaactaaacaatttcttttttaataaaaaacttaagattagatgaattgggtctggaggactcaccagagtcagggtagaccttaagactcagagagcaccgacggaggtgaaatgaacattactttactaggaataatagcgatttgttcaaattccgctatgttaccgtgctgtagcgccactatttgacaacgctgtttcaaaagatgagacttgagagttagcccttctttttatttataatttatgtttatatgcagg

SEQ ID NO: 32524 - DNA, 455 bp, Medicago truncatula
  Intron number 1 from transcript Medtr7g134140.1 (locus Med tr7g134140) derived from phytozome v7.0 (chr-ID MtChr7; po s 31582188 to 31582642)
ttttttatatttggtcagtacaatattaaatgattgatcgagttggatgcttccttagccagacctatcaaagatattcaaaaacattttattcgacccaaaatctcttcatcttgtatgcaggtaccagatgaagaggttagtttggctgatttgtgatcttgtgtttgttttattagttgtattgcaatgtactttagtgaatgttgtattattgtgttgttttatgttgtatttgggtttgagtttaattaacgtaagttcttgttgttgtagtaaaatttgatttaattaattgaaatttatgaaatgttggcattaaagtactttatttaaacaaagtataaggatttatttgtctttttgagaaaactcaaaagaatggatagaacatgttttgtatattattcctaatgagctctgcaggttttcacatcgaacccttcatatataag

SEQ ID NO: 32525 - DNA, 994 bp, Medicago truncatula
  Intron number 1 from transcript Medtr7g107990.2 (locus Med tr7g107990) derived from phytozome v7.0 (chr-ID MtChr7; po s 25334541 to 25335534 reverse strand)
tgaagtgttacagcggcggcgctctcttctccaaggtagttcgtagttccttaactggatttttacaaatcattcttcgttatttatcaatcaataacctataaccccctctttctctttatctacatcagtttgtttgctaattggttcattagttcccaaatttcttcgattgaagttgtaatttttaatatgaagttcatacgtcaaattttcattgttttatttaaagataggaactttttgtcttctagtgtttgattcatagtttcgcttttgcctcatacgatatctatccaattctgattttcaattgatgctgtaaattttaaattttaactggattaattaagtaaactgtcctataaatatcaatttacagggatagtttgtttattttctttcttacaactcaatgtagccatgcaaagaaaaagggattcaattgtatctgcaagggctactagccaaagatacaatgaagcaaactgtaaagttgaagaggcagaaagtgatgacctttacccttattttgataatcttccatcccacctcaccgcccacattttgcttcaacttcccataaaatctcttctcatttgtagatgtgtgtgcataatctgaaaaacaatgatttcagaaccgcaatttgctaaattgcactttgagctatcaccaactagtctcatggttcggacccgtcgcttagatcatgtgtcaagaaccctgcaccttcttgagtgtgagcctgaaaagtttgagtttggaaggaacaatcttgtgaagcttgaccccatatttaagcttcctcttcgttatgggaaattatttaaggagaaaatgcacaagatcaagaataaatccaagcgcctatttcgtgctcctaaattacttttggagaaaaaaaacgacatgaacaatattagggatcgacaaagcctttatatttcttgtgacataggtaatagtaaatttaatattgtcaattcttgca

SEQ ID NO: 32526 - DNA, 846 bp, Medicago truncatula
  Intron number 1 from transcript Medtr8g093270.1 (locus Med tr8g093270) derived from phytozome v7.0 (chr-ID MtChr8; po s 20439300 to 20440145)
cttatcccaagtatttttattttttttttatctatttttatctcttaattttgatgctatttttgtgaattttaatttttatattaaactaagatattagagattaatttataattatatgcacctagagtgtaaaacttttttacacatgcattcaattaaaacatcacaggaatgtatttgctgtgatactttaggaactaacataaaaatgtagcatcaagtaagtaatttgattggaagcatgtgtaaaaaagttttgcactgtcggtgtatacaaattaatgttactagtttgaattaaatgattaatgtgattagcctttgaaggactaaataaaattgaaggtttactcagacaatgcaatagaatagatttagattatgatctaatagctccaattagataatcataaaattgaagtattgtttgttttgtcttgtaaaaaatgtatggatttcatgtaatttgcttggaaatatgtcggtgttatatcttcagttagtttctggaggtgcatttacttatgtgctttctgtatggtttttaacttaaaaaaatacatttttgtggttattacaatccttgagaaaattatagatttcaggaaatcatgggggattaagttaagaaaatacgattaagcaaagaaaaagttaagaatgtacgaaaagaacctatataattgcacctaagttttctccttagtttattagtcttttcgatgaattcagcttgacgtacttatcttaaagcatcattgattgaatgccacgatttgtctgtgtttttcgcccatgtgttcctctcattattcttaactcttttgttttcatcattcagat

SEQ ID NO: 32527 - DNA, 821 bp, Medicago truncatula
  Intron number 1 from transcript Medtr8g147910.1 (locus Med tr8g147910) derived from phytozome v7.0 (chr-ID MtChr8; po s 36505673 to 36506493)
aacgctacaacgttcacagaagattggccttgaccgtaagttttaatattagtttgatatatctctaagttacattattattattatcattatattattatgaacatgaacaacatgatggttctcccatatttttatttattgatatgaaatcgtttggtcggatttgattttgatgttttccaaacttttaatcaagtattcaatatattcattttttaagctctctattattggatacgaagaattatcgaaggttgaacaagctaactttttttagactaaaaactactatcaggcaagaaaacacaattttcttacaactcaatttaatccaacaaaaataatacctcgaattatctttgacatttttgtaaaagaacaacgtagcgaatagacttattgatcacttgttttgtacatattagagactaatttaagtattattttttgtccagaccaatccttgaaaattacatatgaatgagaatgaccaaattgagtttttggtctcctttttttatccattgatcttggatgggtatacatgattatatatttttgaatgattagaatgacagagtttatttatgagtttaatagtggtgggttgatcgattgtgtgtacaaaactgttttggaccgtgaacccaccacggttaaattctttttttattttgtgaggtggaaaaaacgagtcatttaaatttgattattgtgaactgaaaatgatatatatttccgaccaaggtttataattggttgtgaatgatatgatgtttgaaggtgacatcagtgttttgtggggaaccgttgaatcc

SEQ ID NO: 32528 - DNA, 489 bp, Medicago truncatula
  Intron number 6 from transcript Medtr8g112930.3 (locus Med tr8g112930) derived from phytozome v7.0 (chr-ID MtChr8; po s 25515300 to 25515788 reverse strand)
caggtatttttttgaagactgagatgtacccacaaaattgtttgttatgtgaattaaacttatatgttcagtttttaagaatgtcttgtaaaaaaaagtgtttcagaatgcatacccttttcctcacggttcgtcatgcatgtataatgtattgaaaactatgcgaggatgcttttaatatacaagctcttattattaagtatttgatcgtaaatctatttttattaattacaaaaattatttaggcattccctttggtttgttttgcttctttggggtccaatagacattcatgctatgatatggatcatattatcttcattatatcagctcaaccttgtttgacttatgttttaactagataatgtatgaagtataacttttgtctcaaatgattaatttgtggtttggaatatgccaaataactcctttattcgcaaattgccatattttcttatactgttttctgtcttgtgatcagctgcaaga

SEQ ID NO: 32529 - DNA, 825 bp, Medicago truncatula
  Intron number 2 from transcript Medtr8g112930.3 (locus Med tr8g112930) derived from phytozome v7.0 (chr-ID MtChr8; po s 25516746 to 25517570 reverse strand)
ttaaatatacactttgtagcttcactaaaactgaggtaataatacgccgggacgcatgagtttaagagttttctgattttccaaacacacactttgtattactggttaagtgctataagatatgttcagtattgtatcatttagattgttcgataatcttttatgctgtgaattttgtgatttgagaaaaaatttctgataatgcttttgatttacaaatttatttacttgatgaaactgtggccttttgtttctttcaaatcagttatgttgcaaatgttttctgctggtaacacaatatgttaggtatgtttgattgtcgagtccaattgttttacgattgtccctcttagctagtgttttctttacatcaaattctgccatgaagaatattgtttttgataatctttttcagtatttcaactctccaactctatttttgttgcatcgtgcatttccttcattgattggcttctagtttaacagacttaatgcgtaaatgtacaaagttaaacaagaaaatctatagcagaggtttctgagatttttattggcatgaaaaatttgatttctctcttgttgaggactatgccgtgatatgtttcgatatatttgtactgtttgttttaccattgctatgtgttcgagagttggaggttactaggattgcatgaagtcttctgtctaatgtctatatgtggctgctttagaagtgtttattcggaatgatttgaaattcttgcatgatacaattctcatcctcataatttgtattctgtattgatgatgtgctgatatattttcaagcattgcagtgaaaagaaa

SEQ ID NO: 32530 - DNA, 557 bp, Medicago truncatula
  Intron number 1 from transcript Medtr8g112930.3 (locus Med tr8g112930) derived from phytozome v7.0 (chr-ID MtChr8; po s 25517580 to 25518136 reverse strand)
tttgcagagagacagccaaaccaaacaacgaacgtgtaagtacttcttcattcttcccttaaaacaacgtatgttttctttttttcttctttgcaaatgaatcttctgattttccacgaaatgcaatagctgtttgtcaatttgccttattttattttattttattttaaatattttcttatgcttagactttgtatatattacattttccactgtccggctgatgaattaatcaaagagaatctgtagcttctaattttatccataactttataattgtataaattatgtcaatggaatataagattaaaataattaatagtggcgattaatatcaagaatacaatgtctttttctacttttagcagcattggtgaattacttagcttataatttaagctaactgtggaagaactcttccaagtcagctttactttgaggtgacaattctcatgattttccctgtattttcttgtatcattcaaataataataataattgcttttgtgaatcaatatatagccggtttgttttcacgataatactaacttcaacgc

SEQ ID NO: 32531 - DNA, 286 bp, Medicago truncatula
  Intron number 1 from transcript Medtr8g129630.2 (locus Med tr8g129630) derived from phytozome v7.0 (chr-ID MtChr8; po s 30698288 to 30698573 reverse strand)
gtagtatgttctctctctgtttctcattttgtttttctttcttttctgtttaagaggcgcgtggatcaaataccgtactttatgcttcttttgggtcaattaatgaactgctccatataccgtagtacttgtttaatgttccttttcattttcattttcattttcatttttgggtacactcaattttcataaactttataacaacctgtagaaactaatttaagttgggtgttaactatgtattactaaaggcaaccgaagggaagaagcagcccaaaattgttct

SEQ ID NO: 32532 - DNA, 935 bp, Medicago truncatula
  Intron number 1 from transcript Medtr7g092810.2 (locus Med tr7g092810) derived from phytozome v7.0 (chr-ID MtChr7; po s 20525644 to 20526578)
tcacaagtagcattttttctttctcctcaataaaggttcgttttttttcaactgggttctcttctttcagctcaatttgaaaattttttgtttctggattttgctattgttttgagattattaagcttactttttgtgctgtacttgctttgaattctctgtttatgttaaattggtgatatttacatggtttaattttaaaattgagctagtttaaattatggattttaatatcaaaatgtttgagaagtttaaattatcattattattgccctgtttggataaactgtttaattaagtgcttatgtataaactatttcaaccacaaaagataaaataaagtcaaaatattttcatataagctataagctgttttgataagctgagagcatactatgagtctgttttcgttgacttaattgagcttatctactgtcataagcaattgtgagactgtttggatgagcttataaaaacagcttatagcttatacgaaaataatacaactttattctatcttttgttataaaaataaaaatagcttacacataagcgcttatgctataagatgcaaattaagttgtttatccaaacaggtgctatggacatgtcataagttgtttttataaactttctcaaacagtctcataattactattgctcgtggatagacttaaataagtcaatttaaccaggctctatgttttcaagtgattgtctgacttactgttacgtggcacgatcctaagtgcttattagttattacagttgttgacttggactttttgtaagccaggtcttcagattgtggcttccttagtttatcgttctgtatatgctgcacaaatcttcagacagagagataactttatttctgcttaaattatggtgtatggaccatgatgactgtttcagccgaatcatcccttaagaag

SEQ ID NO: 32533 - DNA, 1042 bp, Medicago truncatula
  Intron number 3 from transcript Medtr8g106060.1 (locus Med tr8g106060) derived from phytozome v7.0 (chr-ID MtChr8; po s 23570398 to 23571439)
cacataatagaacttggtttgtaaaaagaaggtttacttctttcttatatttttttagtaataagtgtgcacaaattatatttgattcaaatttcacaaacaatttggtatgaactggatttatacaaggctgtaaataaagactttttctataataagtgtccacatcttgagctttttggtttgctttttttaggtacagactttttcttgcatatgtaaattttactaacaactggaagtgaaaggcttggtagggctgttaaaaaaaataaagaaaaaaagaaaggcttagtagatgacagttcaaaagaaataaagttaataatctgacattggtttgttggtctcaaggaaaagcaactagatgtataggtatttgtaattttttattaggattgataagtcttttagcgtatagtaaaaaaaataaacagtaagtggttgcagcttcggtcggtttacgggttctgacggttcaattcttttcaccggattcgtccgtttttatccgggaaaaccgagttgtaactatttgttgacccgttgacagaaaccggcccgcccgtttgccttggtatttacggggtgctcggttttcgggcgggtctggaaatcttgtccagccttactattttgagtttaaactgctccatcgtacgtaataaaaaggttcaaatctcaaaactgcctgctgtgtctttatctatgtactttgactttatcttaagtgactggcataatttctttggttttctaattacaattacaaaacaaaatgccaggatcacaaaaatatggtatcaaacagaataaataaagggaaaaagaataaatcgggggttttctaatctcaaaattgctttggttttaatgatttaattggttttctaattttttccccctgttttgagtttaatctgctcattaaacagtttaaatatcatcaagtctcgccgtctttatatttgactttactcaccataatatcttttggcggtacacagatactggaattttgagcgatttcatcggcatctta

SEQ ID NO: 32534 - DNA, 844 bp, Medicago truncatula
  Intron number 1 from transcript Medtr8g121350.1 (locus Med tr8g121350) derived from phytozome v7.0 (chr-ID MtChr8; po s 28092013 to 28092856)
attttagtgaagaatcgtacaaataatacgtaagtaaatgtagaaaattatatccttggtatgcaaaatagtatgcagccaccaactcattttgaaatgatttgtcaaaaaaaactcattttgaaatgatttaaaactatcatattaatactaagtgaatttttggatgtgttgtgtatgtcacaattactccaatataatatactaagataaatcttgaaggaataatggaaaaatatatttgatatgaatctccaactatcatttcataggttaaccttagttttataaaaacactgaccggtctcaacaccacttaagatttttttttattgttacaccaagaccacttaagttggtaacaaatagaacactaaaattatttcaaaaagaaataaaaaaaatacagcactataagtttgtcatagcactattcattcatttccatatgttaagtcgtgttttatgttaggttttatgttaggtcggatttagttgaatttggtcaaacccaaaacctaaatctattttgatctggatgaggtagaataaccacatattgcacaattggattggtttatagacccactaattttcgagttggattgtattaaatagtggattgtctatattaattgttttaatgttaaatgatcaaaaaatgagtcttcattttttttaatattaactttttattttcttgataaaattgtgtaacatattttaactatttcttttttcacttttatagacaatcttatggtttttatggtcttaatttgacatatattgcgtgatatggctaagtcttgtattaaagttagagattggttgaagttgttca

SEQ ID NO: 32535 - DNA, 827 bp, Medicago truncatula
  Intron number 2 from transcript Medtr7g096520.1 (locus Med tr7g096520) derived from phytozome v7.0 (chr-ID MtChr7; po s 21574430 to 21575256 reverse strand)
acacgcacaaatcgagaagtccaaattttttttgacattttttttcttaagaatttctctttgatttggggataatttggttcaagttaattattctgaaggtgttctacaatgagcatcttaatttgcatgtaggtttggtatcttctatttctaattgaaaaggatacagataaccatttctcgatttgtgcgtgtcatccttgcgcagggggccatttccagcacaactagtagactttgacattcctaaagataaaagaatcatagaaaccaaactgttttgctttagcagactaggattgcaggctatacacatataacacacttaattcctatgaactccacttgttttgaggtgggtatgtttcaattatttttatctgcacttgctgcattaaagtttggctttgttggtttgaagatcaaacccaatattatgccttgttatgaatatttccttataattccaagtgattctttggttggtttaggttattattcattttgttgtttggtgtttctgctgcacagattgtcttcttgaatagtggaaccataccatcaggttcacctactttccattctttgctgaaagtattgggtttcttggcgtctggttttgtccaactagaagaattttatttccaggattatattttatttgagatttggcacctgatatgatgtcatttatgctgcgtggcttaaatcctcgagttcttggacgctgaacttggaatacttgtgctgtgaaaaggatagtggagttagcgattagttgcatttcagggaaaagggtcaactttttgttgattctattggat

SEQ ID NO: 32536 - DNA, 144 bp, Medicago truncatula
  Intron number 2 from transcript Medtr8g112350.1 (locus Med tr8g112350) derived from phytozome v7.0 (chr-ID MtChr8; po s 25199432 to 25199575)
ttaagaccgctacaggtttgtttctacttgaagttgttcataataatgggtgtattagtattttcttttctcagatctcattactgacttgtgtttttgatatttgcagtaaccgcatatttagtcgtctttggaaccgggcta

SEQ ID NO: 32537 - DNA, 934 bp, Medicago truncatula
  Intron number 2 from transcript Medtr8g128910.1 (locus Med tr8g128910) derived from phytozome v7.0 (chr-ID MtChr8; po s 30286893 to 30287826)
cgttatctgcggaaattgaaccactgcccacccaagtaattttcttagcttgctatcgtcggtaatgaggtgacagttatactgtctctgtgtatggtcatcaatgagagtgattgttttgcgctttccttttagaattgttcttgacacctcgtttgggaaatgctaaacaggaaaataattgcactattagtctaatgcatatttacatggataagatatatgcgaatatagttatatataatttataaaataaaggtagcataactgattttaagctaaagaaaatgtagcatgacttctaatttgtcttcctattatcttcctataaagtctagataaatgaatgcatgtacattatatgtaccccgttgaccaattaacattgttgagacaaatggaaattaagcatcacttccgcatgtgcatatatagccagcaccatttgacattgatgtcttcgaacatttggtgcaactctcataatacaatccaaactggttaggattgaatttagttgttttccaaatagtgatacagtatgtttcctaacacaaattatgcacatgaaataaagaataatgcaatatgtatttttaatttgtgcgtaaaaaaaactcaaaacatgtttatgcataaaaaaagtagacattgactaagtttataaattcagcaattggcctaatctgagatagtttggaaaaatcgttgtacgaagtacgttgagaagaaatcgaactctgacttaagttctaactgaagctttgactctgagtttgagaagtgttaaggtcacgacaacaattcaagaaacatggtcaaaaaacaatcaaatcggattgtgaaataataagttactctaacactgtattgtaaaatcataatgcaaacttactaagtcttaaacttctcaacaaccggatgatgtaggtta

SEQ ID NO: 32538 - DNA, 830 bp, Medicago truncatula
  Intron number 3 from transcript Medtr7g104740.1 (locus Med tr7g104740) derived from phytozome v7.0 (chr-ID MtChr7; po s 23846345 to 23847174 reverse strand)
agtaggcaaatcttcaatatatttacttccaatggatattctgggtgagcttttgctttaaataatgttgattttatattactaggtttataacatggtagaagaatgtctttacataaaaatgattgacattgccggtggacgtggtgggcaaataatagtaagttttaccttcaattatgtgatttatgtgtgttgaaaatcgcccattacttggctcattgtttgtttagttggtaatagtatcacaagttggataagcgctattgacaatatgtatagtaggtattgtttagattagtaatttttttagtagatacacttgaaagttttattcatattaatatttaatgattgaattttttttttaaggaatatgtaatgattgcttggtaagttacaaattacaggctctaattatattatatagacaatcaaacatgagtccttataaattataaccaagaaaaagaaaattatatttgccatgataatcccttaaaaaatatttgtcttgttaattatacattataattttgatatgtacaaaacacaaggttgactccaataattaacacctataagtgaatcttctttcaataagagagtttgttttcgttggtaagacattttcctcaggctgctctaatgcacttcaatgtgtgagttacgctaagttgtgaattatgacagtcattgaatagggaccaaatataattcctaatgcagcattatttgtttttaaatgactttctttttttccctatatttgtttttaaatgactttctttttttttttccctatatttaggtgaaggaagatctcaaaa

SEQ ID NO: 32539 - DNA, 338 bp, Medicago truncatula
  Intron number 2 from transcript Medtr8g086480.1 (locus Med tr8g086480) derived from phytozome v7.0 (chr-ID MtChr8; po s 17723728 to 17724065)
atgttttctggcaccaaatagatgaaataattaagaccatgttgtaagattgaccatattgactcagaatataatttatagttaagtatttattaggatctcaattttatttgactctccataactttcttagcatatataggtactatgcatctttttgttttagctaatttttgttgtttttaatatgcatatctgacaatatagtttttcttcctctctattaaaagttctaccatagatgccatttttctagttcatacataacagaaggatctactttattttgttttgttttgtttttgttcatataaataaacttgttacatttgtgcaga

SEQ ID NO: 32540 - DNA, 215 bp, Medicago truncatula
  Intron number 1 from transcript Medtr8g145340.1 (locus Med tr8g145340) derived from phytozome v7.0 (chr-ID MtChr8; po s 35306397 to 35306611 reverse strand)
gcctcactcaccccaccaacatcgaagcccctaaggttagttttcttcttcaattttgatgcccttgtttctatttttgatttatccactttaatgatgtataaagtcgttaatttgttaattttatcgttgtgggttttttattttatgtgtttactgatagtgccttttatgtgtttgtgaaaattcctgaaagatctctttttctgctacgg

SEQ ID NO: 32541 - DNA, 866 bp, Medicago truncatula
  Intron number 2 from transcript Medtr8g090570.1 (locus Med tr8g090570) derived from phytozome v7.0 (chr-ID MtChr8; po s 19804302 to 19805167 reverse strand)
ggtttcaactacaaagtcagcgataatctccaaaggtatataatgcttcacatttttttattttatttttctattaaaatcagtgtgaaattgatgttttactttgttttttattcgaatttttgaaattggtgaaatgggttttttgctaatgggtctgggaatattttccccttttcaagttttgttttttagattaggttttttgatttttttggttcgagtttgttaatttgaagaaaaaaaattgacatcaaattggacaaattagatggttaatacaattcaaatatgtgcttgcttatgtttagtggatgattatgaatataacaaggtgtcatgactcattaactgtctatcaaacacatttaaccatgaagcacaaacaccgacacgtcgccgataataatttgagaaaatgatatatataccacatgtgttggtgtgagacactgaccgatcacaccttcgatcagtagtgtcggtgctgaagaccatctaaccacaatttttaatgttgctgaccacaattttcaagtgtatatttgaacacaattttgatgattgatggatatctgtatatttgaacacttggatgttatggttaacaacattcaaaatcatcgcggttaattttgttatattggtttgagttccatcactttgttgtattcattaaccatccactggacatgattaactgcatatttgaattgtgttactgttaaccatccaaattgatatctaaatttgatgttaaatgtcaactttgtgtgtcaaaatgtcattttccttgcggttattgacgatttgttattttggttctcaaaggtgggttattgaagtgattggagctcctgggacac

SEQ ID NO: 32542 - DNA, 797 bp, Medicago truncatula
  Intron number 1 from transcript Medtr8g044020.4 (locus Med tr8g044020) derived from phytozome v7.0 (chr-ID MtChr8; po s 9679331 to 9680127)
gctagctttgttttcatcatcatctgcaagaaaaagtatgtttttcttcttcttttctctgtttttttcttatatattgttattttttgagtgtttttatggatgttcatgttttgtagctttgatgtgaaatatatgtggtgtgtttaagtattttgataaagttttaatttttttctggtttttttgtttttgatgcttggttttgaagattttaaagcttaactgaagtgggttttgattatttttgtaagggttgaaaagggttaagagtagtggttccattagttttaattttactcttttgtatgaagtttcctatgattggttcaaagagtttttccaaatcttcagctttttgaagttggcttttatgtagatgaaatgcttttatggtctagtttcttcaagttcatgctaagaacttgaatctattggttctttatgtacaattcaattctagtaagtttgttactttgttgaacttaatcagtgttgttaaatagcgtctatatatcccacaatagtttgatgaacaaactactattttctgcgatctgcgttgacaacacggttttaaagggatactgtaagaaaccatgttcaattaagttttcattaattgaggatctagaaggagaaagagattggtgatagatccaacatagtttatagaaggatcataggatagttgtgttttagtctatgagttagcaaactctacatattttcaattataaattccattttctatatgctgatcttgttatgtttctaacatttacagactattcacc

SEQ ID NO: 32543 - DNA, 910 bp, Medicago truncatula
  Intron number 2 from transcript Medtr8g044020.4 (locus Med tr8g044020) derived from phytozome v7.0 (chr-ID MtChr8; po s 9680543 to 9681452)
cctgtatgataataatcatcatgtagcttctgaaaatgctttaacctagcatgagtatgctttgcattttagcaaagtccagtggaaattgaatgctctattctgtttttgcattccaaatttcaccatatttatctttatcattggagccaaaacaaaatggttccgcacaactctataagcatgaacctgttatagtagggtaagggctactattttctttgaggtttacatatgtttttggtccctctaaatataccactttttggtattagtcccattaaaaaagaattttattttgttccgtgcaaatatactacttttttacttctggttcttgctgttttggttaagcagtttaggccctgtaaaaaaaattagttcgatccttgcaaatatactactttttacatttggtctttgttgttttggtttagtctctgtaaaatttgatcatgttgaaactagtccctgtaataagtatgtaatattcattttagtccttatgtatcctgtattggagggactaaaatcaaatagtgtacatattgcacggactaattcaaaggtgaacaaagacaacaaggatctaaagtaaaaggtgcagtatatttgcaaggattcaaaacaatattttttttttacagggattttaaagcaaaaagtggtagatttgttggcactgaaaacatatttaaacatgtatttaatgatgattgtggtatgaaaatgatcttatattttaaatattgcatacaaaaatatacttaacagagacattcaattctcactggctaccataggcatgaaattaattcaatttatatgatatgactgcgttatcttacagtcttcatatgttttacataatgcagggattcgatactagaagattttccctgtgctgaaa

SEQ ID NO: 32544 - DNA, 1042 bp, Medicago truncatula
  Intron number 2 from transcript Medtr8g096500.1 (locus Med tr8g096500) derived from phytozome v7.0 (chr-ID MtChr8; po s 21204103 to 21205144 reverse strand)
ttggttggtgggtaaattacccaccattttcaaaggtaatctagaaaaaaccttaaaataaatatggtatttccttcagcctaatttaggctattagactatagtttttttttttttttttttaacacgattagacgacctaactgtaatctaaacctaatccatggtggagtaatcagccggttcgttttagattctccatctcataatgtaaatatgtgaattagtgttgggaaaatgtccaatatcatataataggaagaaatatgtaaagatttgacaatataaataaaagtcttgtgtgttagtattttttacaccaataattagtaggttttgttatagtttatattatctccactattcaatatttcaatatttgtaattatctattctcgtgtcctgttataacacataaatgtttgtttttttgctttgtttttgacacttgagtaattattacatgttaaacggtatgatttctttttaagcatatcttgttcttatttggatctcttcttcgtgtcatagattttttatacgttatccctatatgaattgagggtaatttacttgtatcaaagaaaaatcatattttcttcatttttcttcttataatcggttatcattttcatcttaaaaacattaaaaaaaattatctccttcatttaacatgtgatttacatctttttcgttctaaaatctaatcgtgtttatcatcagatgtaaattactctcaattaatcaaggaaaaatgtaggctcgtcgatatatttttctttactatcaattactattttcatctcaaaaacatcaaaattcttaatttccttcattcaacatgtaacctccatttatttcgtttcaaaatcgaatcttatttattataaggataacttaggcctcacccgtttaatataatttgaaatgatatcaagagaaagcctcttgattaatatataacattagttaagtaagctagcccattgggaataaaataaggttaggagtacgtctcttactaccccactaatcctcaatc

SEQ ID NO: 32545 - DNA, 735 bp, Medicago truncatula
  Intron number 3 from transcript Medtr7g092270.1 (locus Med tr7g092270) derived from phytozome v7.0 (chr-ID MtChr7; po s 20259175 to 20259909 reverse strand)
tgagattgtgggtacctcttttctttttcattcaccatttttaccaatctagtaacttaatgttcttttatgcttccatagtttgagaaaatattgaatttcatgtgagaaagctagttcttttatgccttggagttggaccattctgagtctgagcctctaccatcattttagagttctttaagctgtatgaaaatattggatatatgttatatgtcatttgaaacaaaattatagaatatagatacaagagattagcatagcagtttgtttttgttctgttatatttttatacataagaccttgattcgtgtctttatctatgtgcatctttcttaccatttactgggaatcctatatgtacatggaatctatttgatcaggttgcagtgtgaaaccaaggttgtcagttaaactagtttaatttaagttaaagaacgataatgtatgcaattgctgttgctcggactttctagcctttgttttcttctttttttaaccttgggatttatttgagtttgtaattattgctgtttttctattgttttttacctctagtaaatttgtacatgggtgcttgtgaatatggtaggtccttttaggattcaacatttcttccattttggttgacttcttttattgatttacttaagtttgattcttggccatttcatcttttgttcttataccgatgtttcaggactagattggtagctgttgccactcagaaatttg

SEQ ID NO: 32546 - DNA, 533 bp, Medicago truncatula
  Intron number 1 from transcript Medtr8g120510.1 (locus Med tr8g120510) derived from phytozome v7.0 (chr-ID MtChr8; po s 27575958 to 27576490)
cctggccgtgtcaatcagagtggtaactttacttcatctctttttctttctatttcaattgtattgttgtttgattcttcaattcttagttttcaaatttgttgttttaattcatcataggattatagcatatcgtttcataacatagcagagtgttttttttcttttctttctctatatcattattatatggatgttatgtatatcttgtggcatgcttaggagaatcactcttatcttatagcttgttgttgcaataaggatccttagtaagaataacaaagaaaatattggatctagtactagttgtgatttctttaagaacaagaagttaattttatttgtttgaaaaagaaccctttttattgaacatgcatgtgctagattgcaagtgatagatattatgttgtgtgtgatgtacaagatagatagtgaattttgtttctagggtatcttattgtaatgataagttgtaattggaacaatcatgtgtgtgtgactgatttagattgtgtgagtgactttttcaggta

SEQ ID NO: 32547 - DNA, 787 bp, Medicago truncatula
  Intron number 1 from transcript Medtr8g113240.1 (locus Med tr8g113240) derived from phytozome v7.0 (chr-ID MtChr8; po s 25681761 to 25682547)
ctgcctcagcattaccgtgacaacaatactgtgttgtatgtttcacgtaaccgcatttatgtcatggactaattaaactgatggtgttataaattagatgtggaattagaagaaattaaaagaaatatgataacaaataattaagaccaagaagaacttatcgaatttggttgccgacaaagctccatcaaaatcttcacaaatcaaattagaagaaacttgcaaaacaacacgctgttaagtaacctgaggcgtgacatagtcactgtccttcagattctatccgcctcataagcgcatatcctcctaggatacaacagttcttccccgatatgaatcataaccagagatgacagaacaactcgaatatatacacaggagattcaccaaaaaaacctaaacttgattttataagaaaaaggaaattaattttcgtgtagatgtgagttctctataacaagtatgtatggttttttctactgtgaaaaaatgaaggacgtgagttttttttattgtgagaagacttggtggttccatataattaggaagtaattaacacatggtcaaagcaaaaaataatggtaatcattgggagagaaaaactacgagtataaataaggctaattagcactgatgccaacccacatttacaactttgactaagtatatcaacatgtggttaaaataatagtttagtaaaataaaacatatttttaattaacttttgaaataaaataaaactctaaaattagtcatcccccaggataagtttcatcctagtcgttca

SEQ ID NO: 32548 - DNA, 642 bp, Medicago truncatula
  Intron number 1 from transcript Medtr8g151360.1 (locus Med tr8g151360) derived from phytozome v7.0 (chr-ID MtChr8; po s 37291906 to 37292547 reverse strand)
ttttcgacatttagttttctgtaggtaattctaaggagaccattttaaaatacattatggatctctacctacggtttgactgtcactaaaacttatcattttttttttctttctatattttctattctactataaactctagagatgaataattaataaaattaccactaaaattaatttaatcaatataataaaatattataattaatatcattgaaatttgaaatcgattactataatcaatttttagaataaattgtagaagtgacttaaatagaatagttctccctaactatgaactattataccattcactcaaatcaatacttaatactcacataaatacttacataaatcaaaatctatatatatactccattgctcatttaatttatggtaacaatcacttcatacataaaaaaaacttacaatcactttatacataaaaaaaacttacaatcacttctacaacggggtataataaattagattttaacttctaatttgtggatcttcaataatagagggtgcaccaaagctattaccaacatcaacaaaagttggaagtacaccagttatcaagccatgtcaaaaagctagtaaaataatcttataagcccgtgagaaagaattgttaccaac

SEQ ID NO: 32549 - DNA, 546 bp, Medicago truncatula
  Intron number 4 from transcript Medtr7g116840.1 (locus Med tr7g116840) derived from phytozome v7.0 (chr-ID MtChr7; po s 27130347 to 27130892 reverse strand)
tgattacacgattccactttcagtgattcttcctggtaattgactgaccatgccttcaaaagaagttttttccttttcacggtttttagccttcggtgtaatattgacatgtcaaattttgcgtatgttaaatccacaataataagtattgtatattgcttgttcaaattttggctcaactttgaattaattatagtggcgatgaacctgattgattttttgccctttaaattccggcatttcatggcatcccaccatgtgattccttggcttatgttatatgcaattctccacttgcatattgcactacttctgcatttccagaaagctcatcttaagacagtttctgttttctgttgcatcagaaatggtctttttttgtgatctaccaaaaaaatgttacctttgtgccatttatctttcttctacatattctactgcggtctctgcatacatatatgtattaatgattgtttgatcagttttcttttgatttattttccttcaaaagaaccatcaagtgttccagactcttcaacgaagaat

SEQ ID NO: 32550 - DNA, 483 bp, Medicago truncatula
  Intron number 1 from transcript Medtr8g044830.1 (locus Med tr8g044830) derived from phytozome v7.0 (chr-ID MtChr8; po s 10136580 to 10137062)
aaagctaggtggtgaatcaacaagtaaataaaattggcaatggatataaaattgaaaaggctggacggcgctcatgctagttaagattaattttgtttataccttcataataaaaatagaataaatataatatgcttaattatggtttcggttcccctcgttccactcattgtaccaacgtcctttcctttgggttcagagtttgatatatcataaaaaataacatgactttgaagtcaaaatttaattgtatggtcctgcatactcgagatcattagagtaggcaattgttctttcatacattgttatcataaaaatcttagagactttgttctaaaattcaatttggttcaacacgtcttaccgaccatcttcttccactctttcttcactttcaccatgtcaataccaatcattccctagcctttccttgcgtgtgatgaaccagttcaaccgatctcaaccaaaacctaaccataagca

SEQ ID NO: 32551 - DNA, 291 bp, Medicago truncatula
  Intron number 3 from transcript Medtr8g116150.1 (locus Med tr8g116150) derived from phytozome v7.0 (chr-ID MtChr8; po s 26262245 to 26262535 reverse strand)
ctgaggtaattttcatttcgaatacaacatacgatttcatctctactctctagtattatttgtaggtaattggattctctgctgttaggtgaagatcgttgaactactcatattttgagttacattttaaagaaaattttgtgaagtcaaaatataaggcgtaaaatcttaatcaacagccgagatcccttgaatgcgttacactgtgcttttagatagattttgtctaataatttggcaatatgtttattaaagatttttgttcttatctgcatgcttttttggttagat

SEQ ID NO: 32552 - DNA, 875 bp, Medicago truncatula
  Intron number 2 from transcript Medtr8g128760.2 (locus Med tr8g128760) derived from phytozome v7.0 (chr-ID MtChr8; po s 30207373 to 30208247)
agtttagcctgtcgattccaagttccactggattggtaattattaccccacttttcaactattatcattaattatattttttctttgcagtagagtgttcaaatcctttttgcttgaatatgccatagttccaatcacacagtcgcacaaatctgtgcttgtgtgtctctcagtgtgtgcaatattaacatgattcttcttttcatatataatgataaaatttaattacgtccgttgtctatttttctctctttaaactatcgagtaaaaaaaaataaaaaatgaagtatgaatttattttatacaatacatcattgattgattcagctaagtttactcattgaaatgtgaatatttgacactgttattattgttataatcaaatatcattggttgtggcatcaaataaactttgagatactatatagaattatctttatttacaaagaatcattgtttcttctatttagggtaatatatcaattatcatatatgttaaacattggaagtctctgtttattgtaaatttctaaatagtgcattatgtatgctgaccgtcaaatactgcaccaatgtggagagaacggatattgctttttcctcccctgataaagtcgattttataaattttgcaacttttatatatttatctttcatttcgttggtggtttatatattctcatggggatgggtgctaaagaggatgcatatttgtggcaatgggcaacttgtgttaatgttatatttttcaaatgtattgtaagacagggagcctttagtctgttattctaactgatgtagtaatgtgcctgatttcaacttcaattttccatttcgcagggccttacagctacagggttgaagagggataaatt

SEQ ID NO: 32553 - DNA, 860 bp, Medicago truncatula
  Intron number 1 from transcript Medtr8g125360.1 (locus Med tr8g125360) derived from phytozome v7.0 (chr-ID MtChr8; po s 29221022 to 29221881)
aaggttctaaacccaacgcccttctcttgaaggtacattatttgtttatgtgttagggcatgtttggattccacttattttcagcttattggtataaaaatttgtgagatttgtttgaattgatttatttcaatttatcttatctacataatcatttataagactgattgtgagttatgataacaacttattgttgaagttgtattggagttccaaattgcccaggttttcaggctttggatgcgtaaatgtgtatgggcacccctcttcgtttgagctaacttttgggatgatatctaagtccatgtttaacatggtatcaaatctaggttaagaattgcaatgtgggaattggattaaagactcacgtccttgagggtgggtattgaagttgtattggagtcccacattgctctggcctaggttgtttgatgtataaatgtgtttgggcaccctcatcctttgagctaacttttgggatgagatctaagcccatttaccacttatgacatgtctatgaactgttttcagattattttcctaagctctacatagcatatatgaaaacaacttatagtttatatgaaaacatataatgactttattttatcttttcttatagaaatagcctatacatacacacttatctgataagcggccatgctataagttgtttatccaaattgggtctatgtgtgttactcttctagttttacaccttatttcaatttaagtgatttttgggtttcgaggatgataatttctatttttcctttcattctgttattgatttatcgtatttgccattgttacctagagctaatttccctttatgttttgttattcttctcagctgagat

SEQ ID NO: 32554 - DNA, 662 bp, Medicago truncatula
  Intron number 1 from transcript Medtr8g089480.1 (locus Med tr8g089480) derived from phytozome v7.0 (chr-ID MtChr8; po s 19241567 to 19242228 reverse strand)
aacaagaggttttttcttttctttcattacatttctgattcttcaaatccgcttcagattaatttattagattacggtcttgaaatctcgatttgaatcgtaaagtcttacgattatgcgattatgcttgccctcaacgattaagactacgcatataatcccatttttgtggaattgggagaactcctaatttatatcctaagatcttacgattttgcaactatacttgcccttagtaattaagagtacacataattctgcctgagatttagggattatgcttgcatccatttcaaaaagcaatcttcttctccctcgtccatcttttgtttcatttccaaatggctacaaaatctcatgctaatgaatttaaatttacgcaagtgtgatttgaggttttctttgtcttatgcaattttatatgcatagatatgaatttttatgcatatgtttgatttttatatacttcgtataatcttacgattagtgttacgattgcacgatttacaattttacttcccctttccgattttgcatgaaatctcgattttgactacattttcaataagttcagtgttattgatattctccaaaccatcaatgtaaaagacctgaattttgtttcagctaaattataaaaaggaagctgctgccgacacgtt

SEQ ID NO: 32555 - DNA, 1022 bp, Medicago truncatula
  Intron number 2 from transcript Medtr7g118190.1 (locus Med tr7g118190) derived from phytozome v7.0 (chr-ID MtChr7; po s 27764666 to 27765687 reverse strand)
ggagaagaaacaccgatttccaccgcgttttcaaggtatagtcgcttcttctcgatttttgattctgatgcttacctttctctcacgtaccagatcgttcctcaatttccgttttcagttatcgctatcgctttgttctacatgtcaaattcactatgccgactcttattcttacagatgcgacactttttttacttgatatggtttatgagttttcagatcggggattttcgtttctactgtgtgttttttatatattaattccttaatttttcagataattgggatcgtaatgaaattgatgattttgattattcttcttaacgatctgttctgattttgagttgtaaaggatttaagatttgattaggaaaaagaacttttgtatatatgattgtgagaaaataaatgttacaattggtaagccaggttaaaaattgtggacaaatggatatgcaactgtaaatgcaatcctgatttggtcgcagagattttaaaatcctttaatacattgtgagcctgattggattgacgtgtttgagtaatttgctatttgctgcataagcacttgtgaaactgtttggtagaatttatgaaaatagcttatgagatcaagatgtttataagctgttttcatcttactttcagaaactctctaaggtagttcatagaaacaacttatagattatggaaaaacaatttaactttattttgtcttttgttataaaaacagcttatacataagcgctaatcatgataagtacttatgtgtaagctgaaaattaagttgtttattcaaacagggcctatattactatcacaattgcgatcaggaactacaattttagattatgattagaggtttagctagttggtttctttaacctttttgttgctcatctgaatttgtggtcttgatggtatggttaaaaaaaattagattgattttcatgatataaatccattttgtgatttcacaaaccaggttactcacgaatgttttatttactgtgatgttacag

SEQ ID NO: 32556 - DNA, 842 bp, Medicago truncatula
  Intron number 1 from transcript Medtr8g145970.1 (locus Med tr8g145970) derived from phytozome v7.0 (chr-ID MtChr8; po s 35561215 to 35562056)
aggaggtgcgttgtttcagaaaaaggaagaagcgcgttgttttttttttttacaaaattacgcttttaatctcttaaattaatttttaaataacatttagttagattaggcgtccggtctaataatttcaacattttaccggttgcagaccatgttaattaagcaaatgtttttttataaatcttttaatttcggtgtttgattttatttctgccatgtgtcattcatccataaaatgttttgtttattaaaacttttttgtaaggaacaactatgatacgagaagatgaatatttttttctaaaactggttttaatcaaacaaatatttttttttaaaacacatcaatagatgttgcttgatttgaggatcgggacaggtattttgttttagagtaataccaaaaatccctaaagatggaggataattagatcctaaaaccacaagaagatttagaaaaattatcataagaaaaatatttagaaatacttaaagatgaatgagttggaccagactatggtatgtgatactttaattcatgtatgtaaccgaccatgattaatgagatgtgatttataatagaatattataacgtaattgatttggtacacttactttattattatgttggttcttaacgatacaatatattgtaccgtagtaagagaaatggcagtgagcgttgggatgcttgcatcttattttcaaaatgtttagtttgccaaaaatacctttggtctatgtgaaatgaaatgactactatggttggtaagtattcttatttgaaccttttttttttttttatagggctttacccaaaaagggagcccttccagaaattc

SEQ ID NO: 32557 - DNA, 299 bp, Medicago truncatula
  Intron number 1 from transcript Medtr8g084010.1 (locus Med tr8g084010) derived from phytozome v7.0 (chr-ID MtChr8; po s 17212172 to 17212470)
taaccacatttttcaaaactagcagcaatttcaatgtaatacttcaaaatttaaaattctgaatcacattagttattttagacagtttaaagactaactacatgtttttacttctcgtcttgaaccaacaaaacgaagatcaaaacaaggacttgaaaaagaacacccaagaattctataatggtatgataataatacaaataatcttggcttatcctcgagctaaacacatgaaatagtcggtagagttgaaactcgtcatgaaacatacgaaactgtagagactgattgagtttgcg

SEQ ID NO: 32558 - DNA, 481 bp, Medicago truncatula
  Intron number 5 from transcript Medtr8g043530.1 (locus Med tr8g043530) derived from phytozome v7.0 (chr-ID MtChr8; po s 9437230 to 9437710)
gccttcttaagagtaagatattctgggtaagtttgtgtatgcaccgaagccacacatatatacaagcctctacttcttttttccctttgttttcttctccctaatcttttgatgttttatctgaaggtatggccgtgtaaagattttggatcgttaaggaataaatgatttgaagctttcgatcgtattacaaattacattttaaagggaaaacaatgcctagtgaacctcgtttgaccattttctttgtgatttggaactcacctactaaaacataggcatttcaatcgccttatatttaaatcgttacattcttctgttacttgtataaacagtttaccttttactaattcagtattcatttgttgctcttaaaatattgaatagtagacatgatagtggatgatccctaatatgtatctagatatcatttctctatttattgtttgttttgaaacagtcagacacagcatattattga

SEQ ID NO: 32559 - DNA, 783 bp, Medicago truncatula
  Intron number 4 from transcript Medtr8g109210.1 (locus Med tr8g109210) derived from phytozome v7.0 (chr-ID MtChr8; po s 24425854 to 24426636 reverse strand)
tggcaaagacattattatcggaaatttagacaccggtaataatagatgaatgaagttaatttgtttgtctagtatatcaaaccctatcaattatcaattgcacttaatgcattagacgatcatgattttgatttcatgaccaaattaaacaacatgaatcaacacataaattatgaattttaggcagccaactttaacttgatttttttggtctataattatagttattttaatatttttcatatactttaatttaaaagattagtttttatacacaaatgctgtaaaaaaaaattgcatatgcaaccattcaaattattctaaaagaatatgtgtagagatattctaggaactaatatataaacgtgaaatcctctaaaaaaaatataaacatgacatcatagagttatttgacttgagatatgacgtaaaaaaaaaactttacattgatgtatacaaattaaactataccgttttggttaattatttaaaaaaaatatatttcataattaacctctacaaatatcttcagttttttttttttaaattttacaaatatgattgaatgcttaatatctttgtttttttttttctattattaacctctaaaaatatcttgagttgaaatctaaaattatcttcggttgaaatatgattgattgcttaattatatagtatatttgttttcttaatttttaaaaccaatgtttagtaaccctctttttattgatgttttgacttttaacaggtgtttggccagaatccaagagttttagtgacgaa

SEQ ID NO: 32560 - DNA, 596 bp, Medicago truncatula
  Intron number 2 from transcript Medtr7g104420.1 (locus Med tr7g104420) derived from phytozome v7.0 (chr-ID MtChr7; po s 23664399 to 23664994)
ggcacagtggttaggtatgtctatgattgatttcgtttgccataaatttattcttgacagtattaataataattgagtagtaaattgtttcactttttttactaattgctgtgcatatcaattttgaatatgaatcacagctcgaatctcaattcattttgagaatgaaacacaacttgccctaaattttgtacagccagccacatttttttctctcattttgatgtatgaactaatcatgaattattttgaaattcgtatatgtatcttacgattcttgacaagatttgattcacgaattcacgatttgataaccatgtttgcactgtttggagtttgttgtttttgtaaatacgtgaaattactatcaaagagattgcttatatttttattcatttcttaaatcctcatttatgtagcttgggaaaaaactgggtcttatgtatatatctctattttcttcattgttgactggtgtacaaataagaagaaaatgcaaatggcatgattttagtggtgattatctgatctgtaatcaatcattttgtattgcctttgcagcaaacattgttctagggtctggatctcttcttggt

SEQ ID NO: 32561 - DNA, 1050 bp, Medicago truncatula
  Intron number 1 from transcript Medtr7g111320.1 (locus Med tr7g111320) derived from phytozome v7.0 (chr-ID MtChr7; po s 26123894 to 26124943 reverse strand)
aagaatttagttaagcgcctagtgtacctaagtttttttcttatttcaattcatttccacgctttagagtattaacttctttactattatttttatttttgacaaagcttcatatagcattaactagtaaaaaaaattcagtttataattaatgtccaaaacaaaaacttgatcttataattaaattagcatgttgttcgttaaagagaaaaacaagtaacttttttttttttggattcaactaaaaaatgtaatgttttgaactaaaaagacacaagtgaaaattgactttaaaaacattgttgtgtttatttggcttttttccatgcttataattgtttatttaaaacataaaggcgggtgtaaattagcaagggagaaactacattttgttctggtggtattatgagacttgtgagaacgtatctacgatagataaagagtggaagattatttccgataggtttcctagcagcattttcaaatgttttgggggtctaaatagcaaattctgtggttaaaagcaaacacatgagcccagtttaaattaaatctcgggaaaaacaaaacaaacaaaaaaacttcacaataattttgacgactataaataaatctaaagctaaataagaaatcattccttcaaaaaaaaaaaaaaaaaaaaaaatcctaaatcgctccttaaaaaaataagaagaaagaaatcgtgaatagcagtattttcatccaagccatcgtgaatcgcaggtacttattgtttccttctgtgtagatttcagcgtaagttctgaggtaggtagggtgttcgtttgtgcagcacaattatcttttctaggttatactttgaatgtcgtgagtttattcaagtttttttgttttttgttttacctgtttaacgatagttaattatctgtgtatctgctgtagcatcgtgataaaatttaataaaatcaaatatagttctgaaccagttatttgggtgttgcttttagtaactgtgtttcgttattgcatgcagtagcagtagcaattaagaggtgtaaaaagcttcag

SEQ ID NO: 32562 - DNA, 1033 bp, Medicago truncatula
  Intron number 1 from transcript Medtr8g115440.2 (locus Med tr8g115440) derived from phytozome v7.0 (chr-ID MtChr8; po s 25924013 to 25925045)
aacttgattcttccataagatcgtcattagttagggtaaggtgcattccaactacaactaattgtcttacctctgaaatggggtaattcaaacttgccaaacgaccatgactcaagcattttgcccaacgttcatgtttttcctttgaaaagattaaattcttgttatgctggtttagatgaaggtattaagtgtcaaggaatgaacatcatttcattggcacttgaataccaccatctaaagcaagtctaacaaaatttattcttttcaaaggaaaaacatgaatgcggggcgaaatgcttgagtcctgttgtttggcaagtttgactttacctcattcgaaggtaagacaattgttgtagttggaatgcacatcccaactgcaacaattgtcttactctggatggagcaattcaaacttgttaatcggcatgactccatcattcgataagcgtcttgaacgctggtattcaagtgtcaaggaatgcacctcattcttttgacacttgaataccagcgttcaagatgctgatcgaatactagagtcctgctgcttagcaagtttgaatttgccccattcagtggtaagataattgttgcagttggaaggtacattccataatgtaatgtaatgtgataacatttatagttgaatatgcataatacattttgttttgaatgaaacaataattatcttatttattcacctttcgaatttatttattcattacacaattttaattagttgaattcacattagatttaattagtttttattcgaatacgcaattatttgaaacacgactttgatcgaaattattacaaatgcgattttaattgaaattattcaaaacacgaatttattcaaaataccaatatgtcaagcaaaatgtaccataaaaaaaacataaaaatagatccaaaccaattagatattacaacccattacattcaatcatcttcgtcatcacacaagtcaattgagttgtcctcgacagtctctagggcacctgcttttggctgaggacccaaa

SEQ ID NO: 32563 - DNA, 540 bp, Medicago truncatula
  Intron number 1 from transcript Medtr8g077650.1 (locus Med tr8g077650) derived from phytozome v7.0 (chr-ID MtChr8; po s 15523955 to 15524494 reverse strand)
tgtcttctattgaggtttgtaaatattattactcaatgccctctttattttttattgaagtatttggctccatatatatatatatatagtcaaaagctagctgcgtgacctacacaaattcaaattggtggacctatatatcttttcttacatttgctaattacaaggctaaaaaaagaactttgatgggaaaaagagtaccactaagcatttattaatgatgaactagtacttgaatgcatttgactcaaagacattacaatgaagaaagctggtaaagtctgtgtaaaatgtaattcatgttatgtttagagggaggaatagaaaagttagatatactataggtggcttgatagtttttgttgatgagaaagcatattagtctttgagaggataattggtttaggtcaaccatcggtttattaataaagtataaggagagtagaaatttaggttattagttttctctagtatggataatgtttatcacatgcaataagttttttcgtttatttaacttaattttgttttactaaggaa

SEQ ID NO: 32564 - DNA, 467 bp, Medicago truncatula
  Intron number 1 from transcript Medtr7g099790.1 (locus Med tr7g099790) derived from phytozome v7.0 (chr-ID MtChr7; po s 22343827 to 22344293)
tgttgtccaggtacaaatatattcttgtcaatttatcatccttagtaaaggtttccttaagtaaaggtttttgagattttgataaacacattttgatcgtataaaatctgtatttgtccatagtttttcacaataataaggatcatgacattgcgacacctttgacatattttattttagattgaattacaattttaattgtttttttaaggaattgtttacatgctttttttaaggatggaattgtttaaatttacgatggtgtgattttagtctctcaatttttcttcttttgaagggagtctctcaaattcttattgcgcaaattgaaatttgcaagtactacaattgtcagaatttaaccttgcatccattaatcgtttttttaatcatcgattaatcattttttggcattaaccttttggttctcagaaaaaggggtctaataattcgaagttcggccgtga

SEQ ID NO: 32565 - DNA, 909 bp, Medicago truncatula
  Intron number 2 from transcript Medtr8g132610.1 (locus Med tr8g132610) derived from phytozome v7.0 (chr-ID MtChr8; po s 31369441 to 31370349)
gcatcattacattggagaacctattactgtaattcctcttcttcttctttttcaattcctattgtttattctattacaagattaattatatttggacacccatttttgtcttaagtttgacccaattggttgatcacattaaagaacgtatttagttagtttagttaagtagattgttaattcagtcatggttttaaattgcagtagctgatgcatgcgattgtggttgctgcaacgtgcattgctactattgcgtagtgaaatagttttaaattttcacaagttatataaactaacaccaccgtgccactacactatagtttgctttgtaaatactgattgggaggtgcttgaaatacacatttgagagactgataagttttatgtaagatttttcattagatctgaagcatattgggatttggggttctgaaatttaattttggttacaagatttgagcaaacatggctgaaatcatctaatacagttcctgatgcggctctagatgtaatctgcagtggcggtgcgatgccattgcagaggctaccacaatttctggttaattctattcatagttaaaattgtggttgattcaactttatgattaaacacaatttcacaatttttccaggtaatctaaattaactatggaatatgttaaccagtgccccaaccacttcctacaaaaatactaaaaagtgtaattgtcaactttaaaacttttttttttgggtcttccttaaccggtgcccctggttagcatgcatgacccgttaactatatacttaattgaattaaccacaacttcgcatgtgactaactaggtgttggaaaattgggtagtcattcaacaatttagttagtacaataatacttggtatttgttttattgtaggtggtggaactaa

SEQ ID NO: 32566 - DNA, 937 bp, Medicago truncatula
  Intron number 3 from transcript Medtr8g018880.1 (locus Med tr8g018880) derived from phytozome v7.0 (chr-ID MtChr8; po s 3522602 to 3523538 reverse strand)
ctggaaagtatgtttcaactttcaaatttccgtgtgtaatatgtactgcaattatgctaggttatgaattaggatgaacattttcttccttttattttgatttcaatccaagtttgtgatttcttgatgttttaggtttgcccaaaattagagtttcttttctttttatggactcataaaaactctaatggaatgttgacaaattaatagatagcaattgtggtcttcctgcaatattttgcttgtgtaattcatattatatgctgaagaaacttgaagttgattcatttagaagtgaaggattttttttcaccgtttcttattgcagtttatgcattagaaaaacttccagcaacttaatcgagtgaatgtgttttttttttgtttttcttatttctcttgaagatattatatagatggatttaagactaggttacctggtcaggatatgatatatcatagaaacctagagtagcgaataattcatagcagaaaaagagagaaaaccagggaaagtgagttctctctgttcttgtatttcaggaaatgaaagttagatacacattacaatgagattggtgtttatgcaaagagtgatctcaaaatcagttagtttactgcacagttggttagcagttaggactgtgtgctgaaacagcaccagtccgcttacaaaataaagctcgcttagtctatcttgactataactctataatatatagcgcgttagaaaatagacatgtacacagtatggatatattgaagtttttcaaactgagaaatttaattcaaggccagtttcgaggaaaacacaaatatgattttccctcacgtgtttgcttcatttgggtgtttgcttcatttgggtgctgactgctgataacaaattttcattgttgcagatttttctatcacagtgctctccagtggttcccca

SEQ ID NO: 32567 - DNA, 381 bp, Medicago truncatula
  Intron number 2 from transcript Medtr8g109640.1 (locus Med tr8g109640) derived from phytozome v7.0 (chr-ID MtChr8; po s 24648275 to 24648655 reverse strand)
tctctgaggtaggccacatcaatggtatttgatgtaattctttgtaatgaattgcaagtgagatttaaaaccttttgagagaatatttaaatttgaatttcttaactttaaatatcatgacttttctaaagataatgtttttcaataaaaagtgtagagcaaaataaaagcatgcaagggtttaagacttgttaatggaaaaaaattgaagttaatgatgaattgagaaacataatgctttctagtctagaagaaaaatgtaatttagttcacagagaaagttatagccataaaagtttaaataaatactgatatgcgaattttaattaacaatttcatacaacagctactcaaccattgcttggatagcttcaattcaca

SEQ ID NO: 32568 - DNA, 822 bp, Medicago truncatula
  Intron number 2 from transcript Medtr8g147390.1 (locus Med tr8g147390) derived from phytozome v7.0 (chr-ID MtChr8; po s 36280692 to 36281513)
cattgtttgctctaaaagtacttagctatgaagtgtaagatgtttttgttttcggatctatttccatgagaattttttttttaaataaaaaattatcatagaatcgtatatttaaaactatccgcatatacaacgcttttgtcctttgaatgtgcatcaaacatattacaatatggatgcttacacatattatgttccgttggtttaaactcataataattgcaatgataatccataaattatgagggttcagatcctctccttttccttgtggggagatgaaggtatcatgtttggagacaaaactacatgttctagtgtacttggattcatcatttctagtgcaagggttttaaaatcatgtcttactctctttgaatgttacaatgtcttgttgctaaagaaaatgggaggatccaagttttctccgttccatctttgatctttcttgtagagagtaaaaatagattaattacttatatacattctttgggctattagtctagttctatcattaattttggttgacaatgtcatgcaagctgtatgtaaatcaatgtaactattttaaccaatttgactataataagttagttgaatttgatggggagagcactgatagaaacactttaggttctgtttctaagaggaggacggaagagtgatagaaagatgaatggaggaagattttctattttaaccaagctttcccctccatacacctctctttttctgttgtcgcaaactggccattaaagttgaactccttgagctgtactttttcatatttagttctgagaagttctcattttattgcagata

SEQ ID NO: 32569 - DNA, 957 bp, Medicago truncatula
  Intron number 1 from transcript Medtr8g026280.1 (locus Med tr8g026280) derived from phytozome v7.0 (chr-ID MtChr8; po s 5586195 to 5587151)
atcaatttgcctataaattggtgagtgtttgctttcacattcatttacctaccatgacttgctaatttgggtgttgcccaaaaagtagtgatgctcgacatgatattcctatttaaaagtttttgatctttttaaacaaccaaatgttctagtcgaacctttcttacgtgtaacttcgtcttcaattcgtgcagtaagttctcctacatcacttaaaaagacttattttatacacttcaatcatgtaaatatattagccaaatctcctttaaagaacaatttgttttggcctttcactttctatgtcacttatgtttcacactaggaacataccatttagagcgaaaaagtctttcataatcacaaacgcagcatctcctcagggttggaccttggtttgtgcaaggagctcaatagaactgggtctccccaatgtatcgacctcaaaaaaaaattaggcctattagaattgggtcctcttgcttttggtgttaggtggatgttttttttaagagggtttgaggttcctcatgtatacggtaatgattttcacctttaggtgtaccgcatatatactgcaccttgtatttatcttttaaaaaatttaaatataacattattattttaagaaaaaaatacatttttattttattataggcctcttttcatttacagagcctattgcctgaaaaccgtttccgggtcgatgaactaatgaccttacctgccccatgcgcaaaaagttgaactattctttttataataggttggataagtgaattataacaatttttggggagattgatttgctaaggacgttttccatgaaatattttcttatcgttactttttttggttttgtctatttgtgtaaacttgtaataatataaatttctctcacaattatgggggttattcaatatctacttttagaggtacaacattgttgttgagtct

SEQ ID NO: 32570 - DNA, 505 bp, Medicago truncatula
  Intron number 1 from transcript Medtr8g031740.1 (locus Med tr8g031740) derived from phytozome v7.0 (chr-ID MtChr8; po s 6826533 to 6827037)
cgaaggtaaagtgcactcggtcaataattagtttaacaaaagaacatagaaaaatgggtaaaatgttgctaatgagtaatatattgatgactgattttagttctttatgtagtccatgatgtgcagcattagttgttgttagggtgataggccttttaatagatttactcgaatttccaatcaccggaagcaaacaaattaccgtggtgtgatatggagagaagaacaccctatcgttgtcccaaaactctaactaactaggcacaaattatgatagattacttttaggctttaaataactgagcacaaattggttttcttttcaagaaacttgactacatgtagaagattgctggtatcaactttgaattacttgatctgggatgaataatctcgatgtcctcagccagcacataatttttcaataaaaaattagaccaatctcaaatgttttcatctttgtgtgttagatacgagaagctgacatctctcgactctcttttgc

SEQ ID NO: 32571 - DNA, 803 bp, Medicago truncatula
  Intron number 1 from transcript Medtr7g140930.1 (locus Med tr7g140930) derived from phytozome v7.0 (chr-ID MtChr7; po s 34026805 to 34027607)
aactcaaaggtttcttatctattatcttcttctcctcatcatacattattatatttatacaaaatttcttctatgtaaatatctaatatcgatccgtgattttgattttaatatttatttagtttcattgcaatgatttttttataattttcttcgctaattggctaataatcatcctagaacgtgttgatcaaatttggactcaaacattgtgtagataatttgaattggtggacttggatttgactttcgtacgaataaatattactccacttgttaatttgtagcttattgcctaagtgcttatcatgataagggcttatatataagcaatttttataacataagataaaataagttgaattgttttataagttataagctgttttcatataagctgtaagctgttttcataaactctcttggacaacttgtgaaaataagctaaaaggagcttatgaactagttataagctgttttcataagttcctaaagagtctcataaattatgtaagctctaaagcaattcaaacaggcccatagtaacttaagatgtttagggctgaattgacagaatgtcatttactttagggaataaattgacggatttcatatactttatggactttattatatttatatagtttggggactaaattagtgagagagtgataatttagagactaaatggatggtttattcaataattatttcttcatgttttggaaagaagaggaatctaatactgcttatattggatttgtattgatctacagataatccaattgtaatatcaatcttgg

SEQ ID NO: 32572 - DNA, 303 bp, Medicago truncatula
  Intron number 1 from transcript Medtr8g021050.1 (locus Med tr8g021050) derived from phytozome v7.0 (chr-ID MtChr8; po s 3770947 to 3771249 reverse strand)
ataaagtaagtttgataaaatggctagaaggattatgagttgaacaaatatcattttgaattgcaatagagagatcaaattcaaaaggaaaagtaagaggaaacaaatttgactacaaatgaaaactgggagtgttcttcttattatctatatatctattttttttactaatagtccttatctagttaaatatatggtgaatgagaaatatcgaaaaaaggggtaaatgagagtgctattgatcatatacctcccaaacaaatcctgatcattatttcattatatttaccttcttggataggg

SEQ ID NO: 32573 - DNA, 504 bp, Medicago truncatula
  Intron number 1 from transcript Medtr8g008570.1 (locus Med tr8g008570) derived from phytozome v7.0 (chr-ID MtChr8; po s 977122 to 977625)
tctttgtgttcttcaatatacttgtaagaatttcaatattttcactctgaaatttcaacccttttagttattttttcttctgaggcttattcatgtgatttaccatattctaactcatttcgtaagtgtttttgtatttttttttttttaaaaattctcatgtgcttttctctgttaatcctttatgtagtattttcttgtttacaactttctatcttggttgcataaatttgcaaacttttttgcattttggatcttagatgcataagaggtattcatgagttggttttttttgttttctcctttttagtaggaaattgtatgatgatcagtgttttaaaaaccagaccgaacggttgaaccgagaatcaatttattcttgaaaatcattgaaccatttgagccatgactttgaatgttccgttccattttttatgatttattcgcgataatcattgtttctatgatttgtttaaatggttgcaggttgatttgttacagtac

SEQ ID NO: 32574 - DNA, 481 bp, Medicago truncatula
  Intron number 2 from transcript Medtr8g008570.1 (locus Med tr8g008570) derived from phytozome v7.0 (chr-ID MtChr8; po s 978013 to 978493)
cattgcaggtatgagattcatgaaatttcttaggaatagtttgtcatagaatgctacaaacaaacatatgattattgcattttcttgttgactgttagtgtaaagttacttacacagttacactgagttaataaaattaagttttatcttagctatttcgacgaaataacagtcgctattcttctatgaagcactggcacatacttgtaaacaccggtaaaaatttgagaaaatagaagtgattgattgaaaatgcatgtttcagtgtcatttcaatgtctgacactgacacacctttcatatgatgtgttggtgctgcaaacatattcttgcttgtcttagtctagtactaaaattccgttcatgtttgcaagattcttcatttatctgagtttgaatttcacagatagagatttgcttcaccacatttgttcctttgtttaaaatgcttgtgtatctgtgtgatgtagggtcataagca

SEQ ID NO: 32575 - DNA, 1000 bp, Medicago truncatula
  Intron number 3 from transcript Medtr8g052720.1 (locus Med tr8g052720) derived from phytozome v7.0 (chr-ID MtChr8; po s 11677121 to 11678120)
ttggtgttgaatactcaaagtcgcttgacactcctacgatacgtcaacattttttctgtccaacgcttttaggagatatcttgaataataaaggaatgcatctgtcatgcaaagagctttgagaaatatgtattttctctaatgactgatagaaaaagaggtagaagattaaaactacaaaggatgtattttctcttaatttgattaaaagttatcttttcccttaacagatctgaccataggcacccgtacatgaatgattttttattcaagcaaatgcttatgtgacttattagacttgtctttctttcatagttttgtcctttttaataagtattgttatgaagaattctaatgaccatttgactatgatttttttcaagacctgctattcatgctttatcaagtctataattagttagtcacgtagaactgtgaatattttgcgtcaaaaaatattgttgatagaaggaaactttttatttaagtagacctatgaatagtttacaacattagttaccttaagagattgatttaattttggtaatgaagtatagaaagttggagggaactttttatttaaaaataagtttaactcttcacattttccatatattgtttattataaatactaagccatatatctgattattgtagaatgctaaggagctagccatggtttgcgagttatagcatatcaatggttgagccacgtgtttcattaagtggttttcgttaagtgaaaaatacagtccatttgtcaactatattgtatgctttcaatgtagttcatcttatttcatgtcaacattaatgcaatattgcatgacaaccacgtatttctatagtacataagggtaaataccgatattttttacgagtctctgtgtgagtgtgggtatgtacacattgcaggactctgctaactatggcttatttatattgatcggtgattgtgtgcttagaaaattttgggtgttaacttaagtatagcagaaaa

SEQ ID NO: 32576 - DNA, 704 bp, Medicago truncatula
  Intron number 1 from transcript Medtr8g068140.1 (locus Med tr8g068140) derived from phytozome v7.0 (chr-ID MtChr8; po s 12989729 to 12990432)
ctctctctctctctcaatcgatctttcacaaataggtaaatctctttctctctcattctcagatttgtatcaattcatcggattcgttcgatcttcgttgtatgcatgtgcgttaacgatgtataatttgtctggatcaacattgtgtgagaaaattgttgatctgttgcgtgtaattagggttttgaattcgtgtatgttcggatttatgttttgtttgtgcttgtgtttcggatttatgttttgtttgtgcttgtgtttcggatttatgttttgaatgtattcatacggatctagctggatcgaggtggatttttggttttacgatgattttgtcgtgttaacctagtttatttgtttgtattattatttaatgcatgtaccaaaatattgaattatttgattaatatatggataattgaattcgtaagttctttgaattcatgaatcttaactgagtaatttgctttgtaatgtaatgtaatgtcgttgaattggatattgtctttgtttttgttttcctgtgtgtttgtttcaatgctcaaaatcattatatctgcatgtttcttggttatttctcttgcaacatgcaaaacatcatgtcttatttatatgttgaaattcaattcaattcaattcatatctatttgatttgattttgatgccgaggtgttcttagttataattgcggtgtaaattttgtg

SEQ ID NO: 32577 - DNA, 1028 bp, Medicago truncatula
  Intron number 1 from transcript Medtr8g021760.1 (locus Med tr8g021760) derived from phytozome v7.0 (chr-ID MtChr8; po s 4148095 to 4149122 reverse strand)
ctttgtgcaccggcgaccactccccgtgtaacaccccaatttttaatattagtttattagtattattattagatgatattaatattaatattatcaatagtattgatttgtttgatattattaatttaattattagaattttttgagagaataagaaagtagagtgcgaacggaggtggattagtaaaattaggtagaaaagaggtgtaattagtaagatgagaagtgttttaatgatttaagcagaggggagtgtaaatagcaagacagtctagttagctgatagtaatctaaaaatattagtaacaaacttagctgattattataaatagacgagaacattagaaaattagagttacaacaaacagaaaattatatcaaagaaaaactagggttgtggagagaaaaagcaagatgacacacaaagaagaacctggagagagattttactatagaaattcatcaaattctccgaactagaggtaaaagggagtctctattcaccataaggatcaccataaggattgtatgaacatgtgggtagtgaatggtttagtttctattgattttttttttacgatcttttaataaattcatgttaaattcgtgttataatttgttgatatgattttgggtatgttcttattttattcatgatgtgctaaattcatgattcaattgtagttacgttgtgttccttccagctgtttgtgtgtctgtcttattaagattgttgtgaacccttgttttaatttcggggcttttggcttttgtttttatcgaatccaaaattacatattttaaaatttgtgcttgctgtttccgaattatgatgttttgcatcccattatacttttgttatatttaattttgagtgaatgccaatttgtgagaattggtttgtgtggactattaaactttcattcagtgatcgaaataatttattttctttgttacacatgatttaccatttaagttagaatttcatctcttcatgaaaaatggtatcagagcagacctctttcagt

SEQ ID NO: 32578 - DNA, 625 bp, Medicago truncatula
  Intron number 1 from transcript Medtr7g103810.1 (locus Med tr7g103810) derived from phytozome v7.0 (chr-ID MtChr7; po s 23385527 to 23386151 reverse strand)
cttattaggggtgggtatggttcggggttaattgttctatgactaatgtttgagacattctctttaacactcattctcttattagatgaaattagtgtatgtcccaccactttaagtggaatccatttccaatatgtgagtctcatcttaatttgaaccaataatgaagtaagtatttgaaagtgttgaaaagagagttttgctagcactactcattagcattgctttcagtatcttatgattatgtcaaaatcacttatgttttgagagagaggtcaaccttgtgcggatagtgtagcctggtcggggttttcttcggatgttcctcgtggaatttttaatttgattcctgcttttatctctaactcccttttgtgggatgtttgttgtgtaaccttcccttttggcggatagtttaactataacacaattagtaaatggcttccagaccgagacccaactcacctaaacttttatttttcaataaaaaaatatagaaaattggcaaacagggataaaagaatgttgatttgctaaatatgtatgtggttataatttatgggattaattactaaattatgcgaatgattttattcttctagctggatacctcaaactcatacca

SEQ ID NO: 32579 - DNA, 479 bp, Medicago truncatula
  Intron number 1 from transcript Medtr7g143540.1 (locus Med tr7g143540) derived from phytozome v7.0 (chr-ID MtChr7; po s 34465832 to 34466310 reverse strand)
ggagacttgtgattgatttcattggtaatcaacaatctacatcattttttacattaatcaatgcttcccttaactcttccttactaactattgtaaaatgtgcattatgtttgttgtgaacaagatttttcttttgaataattgttactatgttagtattttctcattacgatccgtatagctggaaatatttgtatagttatggaatattcagtatcttatatcattcataaatatgcatgacatgacatttttgtctccaccattaatttcaacttactatttttatggtccaagaaaataaatattaactctatcaactgctatctctgtatatcttggtatgtgatgtcattcaccatgattagagacataatttaatggttgagagctatatatcatttattaaacaatcaaacatttatatttatttgattctggcagctcaagctattggaattccatttttgagtccatat

SEQ ID NO: 32580 - DNA, 951 bp, Medicago truncatula; identical to SEQ ID NO: 32477
  Intron number 1 from transcript Medtr7g104550.1 (locus Med tr7g104550) derived from phytozome v7.0 (chr-ID MtChr7; po s 23760557 to 23761507)

SEQ ID NO: 32581 - DNA, 563 bp, Medicago truncatula
  Intron number 1 from transcript Medtr7g093550.1 (locus Med tr7g093550) derived from phytozome v7.0 (chr-ID MtChr7; po s 21024245 to 21024807 reverse strand)
tcttgaccccaccaataaattgctcattttcattggttagtgggtaaattatccaccattcttcaaaggtaatctagaaaaaaccaaaatagaaaagcaaaacccattttacctctttccctttttaagttcccaaaacacttttcaaaaattatattttaaaaataggtaatcaaacaagtttttaattttttaatttttaaaaactagaaaagtgtttttaaaaagtgtttcaaaaaggcccataatctcttcaaggtgcattgctaactctgttctctccatcaaaattaacatgagtgtctattgctcaacattgtttttactccaaaaaaaaaatcgaaaaatgttcttcatcaaagcgtgcactatagcatcatgattcatgcaaacaaacttgaaggcaatttctcttcatttctactgcaaaaatacaaagcaataagaaaagaaatgactatttctcttccagataatgcatgagcgtgattattataagttctatctaatttaatttttgaattgtaggttcaaaacggaaccgggggcttgtaataggtaag

SEQ ID NO: 32582 - DNA, 779 bp, Medicago truncatula
  Intron number 1 from transcript Medtr7g093430.1 (locus Med tr7g093430) derived from phytozome v7.0 (chr-ID MtChr7; po s 20963904 to 20964682)
tgttaagcctagaccaaccaggtttcaaacttctggtttgtgttctgtttcttttctgatataaatgtcgactttgatttgtttcgtttgttagttatatggttgattcgtcgtttagttcatgccctgttgactttttctcatggctagatttattaatgttttttttcttcttgtattgagtttatgaattatcgattttatagtaaaatgttgttacattacatttacagatacgtccaattatatttaatgtcttaggcaatgtttgtacagcaatgtatggtgaaatataattgaacattgtgtcaaattgattaacataatgtttgtgtctccttgtaaaagtaaatgtgcattcatttttgtgtctgttagggttgttgacatcggtgtctgttaagattatgtactctttaagaagagaagtatcgttaacactgtcccaacattcacttgcaataattctttcttttatttagtgactttgcgtaggtcaaatcgtgtggatttcattccctatttagttggacctattttcaaaacggtggaatccacgtgaattttatggtactattgagcgagtgttaataagggcattagagtgtgttgttaaaacttttcctctaaaaacaatctactagtgtaaatgtttaagtcaattttatttatcttttacaactgcctcttttttaatatacattgatgatgttaatttcatatgtatgttacacatgtgtttgtttccctgaaatgatactgaaaacattgcattgcag

SEQ ID NO: 32583 - DNA, 743 bp, Medicago truncatula
  Intron number 2 from transcript Medtr8g102560.1 (locus Med tr8g102560) derived from phytozome v7.0 (chr-ID MtChr8; po s 22569573 to 22570315 reverse strand)
ttgctcttgcaacactcattcctgacctaaagaaggtaagaagtaaatgttagtagataactctagatctagtttcaaaacaagtcacctcgttgattgttgcacacatgctaatacacatatttaacttatatctttaactatgtattagcaaaacttcctgaaattaactctcttttttgaaaatatttgtcgaaacttataaaacttatatgctacaatttgtttttatataatagtaaaagaatatgatcaaagtatcttattgttatatgctaccatttgttgaataataacaacgactcgtactttagattgaagacataccagttgtcgaatatatgttaatgtagttaaatttgatcactttaattttcttaaattatgcaaaaaaaaaaattgtcgtgtcacttttttgtaatgtgatatacaaatgtatggtataagataaatgttaattcatcaaaacctatgaaacatacattcctcggattaagtgtgtttcggtgtcggacacgtgtcgtgtccaacaccgacataacacttgtaattacactgaattatgtgatttttcaaattattagttgtatcggcgtgtcagtgtcagtgtcgtgtccgtgttcgtatttgtgattcatagatcaaaacattactagctgcttggttagtctcactaattactaatcacgtgtaaaatatgttaattagaaggacaaggcttcagtattagcagatacaattaa

SEQ ID NO: 32584 - DNA, 952 bp, Medicago truncatula
  Intron number 1 from transcript Medtr7g093340.1 (locus Med tr7g093340) derived from phytozome v7.0 (chr-ID MtChr7; po s 20902525 to 20903476 reverse strand)
cttttgttggtgtctacaccgttgtcatcctcttggtaccaccctctctctctctctaaacccatttttcttaattgttgagaatttagtttatatgttactttaattgttgattttataattgatgggtgtattttatgctgttataatgctttactttatttttatttcatttataacttcatgatagtagaaaatagcttatgaatttggactgtcaaaattgatgttgctatgttatttttttggtttgctgtgaattttgattgctcatttgcaattagaatcaaggaccgagattctatgcagtcattgactgcacgcattcgtgcagtcagtgattgcatggctgtttggtcaagatcagacggtccagatcttaaacttggtaattttagtttttgaagaaaattaaaatttgtttgagattggaccgtctcgtcttgatcagatagtcatgcagtcaatcttgatcagatagtcatgcagtcaataattgcgtgaatgtgtgcagtcatgagagtgccacgcgattgaatagcttagagttagaggtttatgaattaattttcattattgtatgaattaaatctcagattagttgtgactggatcaaagtttggtagatagatcaattgggtgacctaatcagaataaatactaaatactacctggatgtgtgaactcaacaactgggttgacttcacatttgacaattgaatttttcaaaacaaggtccttagtctttattatattatatattatacgtttatatgctacattgaatttggattgttgttaaaacagtgaggttgcagatatttatctagacttaataaccttagatatttatgtcatgtaggttttttgtttttgggtacaatgtcatgtttctcagtggctgtaacaactgatcttgttatgctaatactttgttgtggtcattacagct

SEQ ID NO: 32585 - DNA, 985 bp, Medicago truncatula
  Intron number 1 from transcript Medtr8g032070.1 (locus Med tr8g032070) derived from phytozome v7.0 (chr-ID MtChr8; po s 7061575 to 7062559)
ggctgtgttcaagtttgtttcttgcatttgaggatgttttgattgttgcttagttagttcagagggtaatttgagctgctaggtgatttgagttgatgagagaatttttttgcaattaaaaggatatttaattgttcattatgattaagttttaactttggatcagtagtgatttgattgaattttgcaactttgctgggattattagctttctgttgttatttattacttcgatatatttattaggagtttacgattcatgatttggcgaaatgacctgtggcaagtttatactcttctggttagattcttagaatagttggcacttcatttagatatgttttccattttgattggaattcatttgtgatttgattaaattttgcacttttgctgggattttagctttatgttggtatttaattaacttcatatatttattgggagtttacgatacttgatttggcgaaatgacttgtggctagttgatacttttctggttacattgttagcatagttagcacttcatttagatgtgttttccatttcatctgtaaaaaacttttaatgaaaactttcctggtgtttctgagttgagagagaaacatgttgcaattaaaagggtcttaaattgttcattattattgatttttcagctgtggctttttgaattagttatggatcaggagtgatttgattgaattttgcaacttgctgttgtaatttattacttgatagattttttgggattttacaattattgatttggcgaaatgactggtggcggttttatactcttctggttagattagttgacaattcatgtagatacattttccattttaattagaattcatctgtaaaaaacttttaatgaaaagtttctggtttaaatggttgagctttacctcaatttttaaaatctcatttgctaattaatgacactgtgttattgtcatcttatcgagtcagcctgtcagggaag

SEQ ID NO: 32586 - DNA, 964 bp, Medicago truncatula
  Intron number 1 from transcript Medtr8g138030.1 (locus Med tr8g138030) derived from phytozome v7.0 (chr-ID MtChr8; po s 33191002 to 33191965 reverse strand)
tccaatctattatttttgaagtacgtttttgccttctaattctggttttttattactttgctccttaagtccatcttctaccttcctagtgacagtgttatgcatataggtacttgttttttttaaattaatttcattcttagcactgttaacaggttgtgaacatgttatcaagcattacaaacaacagtttttcttatctacatttgtagtagacattcattttgacctgccatgtgttttagtatatggcccttgtcttgttatgaacgcatttcatccatctaagtgcagattttttttgctctcagttagttagtcaatagctgctgattatagaaaattgatcttgacattttaaaactatgattttgacactatgaaataaattttgatgtttgtaagctgttttttttcctttataccgtgcagtaagttctttagcttatataaatattcttgggaaatgaatacccacaatttcttgggcactatatacccaagatatgaggatgaggatattttgttcctgggtggtatccacagttttcaattttcgcgaatgatattatttactctatatatagatggtctgatttaatttaccgaaatgtgagtttctgcaatctgcaaactagttttgtaatctacaatctccaactgttgctctttcgacatattttacaagaatcatccaacaattactgtttctaccaattttacaagaatcaatagtttgaattttttatatgagaactatattatcttataaccaactgttggtgttttttttaggggatcagttgttaggttttagtgttgcttttgtgtgcgttctgcatgctattttgtaaatttcactagtattacacattcgtccaagtttttatataattaagtgtttcatcaacttgtattcataaagcaaggataccaagcctcacaaaagttgattcatattcat

SEQ ID NO: 32587 - DNA, 837 bp, Medicago truncatula
  Intron number 1 from transcript Medtr8g071190.1 (locus Med tr8g071190) derived from phytozome v7.0 (chr-ID MtChr8; po s 14058175 to 14059011)
tttatgtatgtaggttaatattattttcatgaaaatagatatatgagaagaatcctatggttttgcgtatggacaaatttttatattcattagaatatacaaaaacaaaatggaatatcttgttctattgtatctcattgttttcatatgttaaacaaaaccgaaatgcatcactcttttaccttatgactatcaattctgtttttagtatgatctatcaaatatataacgtaggtttgatttagtccacgctcattccatgtttctagaattggtccctggcactatttttggtgactagaaaaacagaactacaggttaacacttgtgacatgaactttttaaataatgtggcatcatttttttgtttagttatcctctaggcacaactgcaaagattaatccattcgagaatctggagagcatttaagggttgcctctcccaaatggtgaattttcatatgcattgggtcatagactttttaaaaagtacacatgctacatttccatccgtccaaccagtgaaaaacaagtgacaggcaagtcctagaaacacataataagtgggcgaccaaacgtgggagaatgtaatatattgctattgctatgttatattcttttctaatttcttgacaatgcatcaatgcctttatgcttaattacctttaacctgcatatactctttggttttcttctcttccctggtcctctgagattcttttgtttcattctttttattcaagacagctagggaaaatacctattgttattctaatttgcgctggttcaatatgtgttgcaggcttggcaagacagtaataacttcccaggattatt

SEQ ID NO: 32588 - DNA, 746 bp, Medicago truncatula
  Intron number 1 from transcript Medtr7g143480.1 (locus Med tr7g143480) derived from phytozome v7.0 (chr-ID MtChr7; po s 34440852 to 34441597)
agcatcctccctctcaccaggtacttttcttgttttgtatccattttcaatttttttattttttcatgtataatttgcttatgtactagtttaatcaagatatgctacactttgttcaatcacatgtatattacatggcaatgacatttttggtaaaattattcatgtactaaatttcttcttatctttttgtatactgttttgttttcagatgcctataattggaaatttctgtttcagctttaaaagttggtgactttagtttggcttgtagtttgtatatatcaattaagagggtgatgtagaattgtatgaataacattatactttcatggtttacattaggaattatcattatgaagttgatctgctctttgattttttattagaggaattttaatttaaatattttcttcttatttttttatgaaccttttctaatcaactattacctaatgttgatgccaaagaatgaaataacattgaattatgataatgagctctttacgaagagaggtgacatagtatccatatccaatgtccataaaattgtgttcttcctttattgataactgaaagactttcaattcaaacactaattcctagagtcaggattatgtttgaagcattttgtatactaatgtttgatgacatttttatatatatatttcgaatttcaattgctggttcttactttgttccgcaatacagccagcatctgctagagactcgagaagacgtgttca

SEQ ID NO: 32589 - DNA, 889 bp, Medicago truncatula
  Intron number 1 from transcript Medtr7g105810.2 (locus Med tr7g105810) derived from phytozome v7.0 (chr-ID MtChr7; po s 24332972 to 24333860)
ggtggaggttaaatttgaagatgaaaaacaaggaaaaattcaggttgtggcttcacctttgatacgcctaaccaacaaaccaaatgcaacaattgaggacatcgggagcccagaaaagcttatcgcttctcttggtccatttgtcaccggaaacactttagatccggatgagctcctcgaggcttcagttgaaaagattgatgatcagacggtatgtttgctctctatagcctatgttatctaaaaaatttatgattttattttgttttaagttgttagaaaatgagaaaatgggaaagaacaggtttacctatcatagtcacaaaatcaattatataaacttgagtgtcatcatcctcctaccataagttatgctgagggaattagaatgtttagttctagcatttcacttaaatgtgcaatgtagaagagattcaaacacacacatatacactagttgctggttgaatatggttagcatggaaattgttagaatagcaaatccaattctaaaataagaagataaataaacacacaagagcacaacggttaatcacgaaattcggtcaattatgtctatgtctccaacaacagattgattgttgtagttttctattatgcaatgaattagaatttcagggtacaaaacttagttcaaatataactgtctcaaatcctcctaatttacaaatttacccctgaactgtacgtcaggggttcgtccactatgttcgagtgtctgtccacttattagcgaatatgaatcatactcaacaggctctcatcatttttttgggtccaaactgctgcttgaaatgtaaatgttatctgttgttggcaactattagtgactaacatggctgaaaatggtgtctgcagtactacaaat

SEQ ID NO: 32590 - DNA, 973 bp, Medicago truncatula
  Intron number 1 from transcript Medtr7g140400.1 (locus Med tr7g140400) derived from phytozome v7.0 (chr-ID MtChr7; po s 33799341 to 33800313)
aacaaatcattgatcatcctattctgctcatacaggtccaatcatgttaattcttcatccttaatgttttgcaggcctcgccacacttttgacttaatcaccatttttgtccttaaagttgtgactcagacagtattacataccttgctttaaaattttaattttttgttgatttcagatattatattgttattgcctacagttttggagcctaggttaattgttcaaccaatgtttttatccaaaaaatagtagatggaaggcatgacaattgaatccactcgaaccaattttgacagaaaattaattatgggtagagacagattcaaatcttctccgttaatgatcaaagaaaattatatacaaaaattattaatatactatgtttcataactaattttgtctctcaactaacaggcgagaagacaagttggctaacaaaaacttagttgaaggaccaaaacataagaaatatttgttatgagatcaaaatggaactaggatattaattaaaggactaaacatataattagcctttatgttatcatatacatatttaaattttaatctcttaatgaaaaaatcattgatttgaaatacaaatgattaacactaaatgcatgtgagacctgcatgatttagtgagactcatttgagtttcaactagttgagtatgagttgataagagtttgttgctaatgctcatcatttaatgattatatgatttttatcatatggagccagaaaacattaatctcagactaaacaatatacttgcctatctttctatgttcatagaagaaaacatataaattaaaaattacaattaaacaaccacatgaactttctacatgttaatacaacatcacatataccaaactgattggattaggacatggatttatctctattatttagtattacatttaaaatgacagatcacacgtctcaagtgcggtggtttcattgtggg

SEQ ID NO: 32591 - DNA, 727 bp, Medicago truncatula
  Intron number 1 from transcript Medtr8g102210.1 (locus Med tr8g102210) derived from phytozome v7.0 (chr-ID MtChr8; po s 22388032 to 22388758)
gttgcttcatataaccgttttgctcaatttgccacgtaagtaatgtttaaccaattctcctctttatttgaatctttcaattctgttgtttacatggttgaatcccagtggatcgtggcagtaagatcattcttcagcatactagtgtagatctatgtagatatatgtcaataactttgaacatgtcatgcttccgcatttttgtttttgtttttgttcacatcacttttaatgttcttttcttgatctgaataatttggttccgaaaactaatatgatttgcttcatgttctcatatgatttgaaatttgtatatatgaattcataataatcttataacaaattaaggtgttttattgtttattaatgagtaagttgcaggtattgttttattgtaaacctcacattatagtaatatctcaagttcatctgataaagatattagttaattaatttttcatccataagtaatatgtagatcaacatatattcatatgttgaatttgtagcttttcatttagttagttatttgtgacttagtttaattttatagcactgtcagtgtaaaagcatcaatatatcagaactggtcatgtatatgactttagaattgtttatgataaaaggcgaactttttctaataatcggacgattatgattgattgacagtgtaaaatttatcatatgtgcaggcatttgtttgagaaagaagcagagtttgagggtg

SEQ ID NO: 32592 - DNA, 1005 bp, Medicago truncatula
  Intron number 2 from transcript Medtr7g105750.1 (locus Med tr7g105750) derived from phytozome v7.0 (chr-ID MtChr7; po s 24309187 to 24310191)
actttgctattgcgacggtttttcctgccaagaaggttagtctctcctcacctactgtttattaccaactttttgttttgttattttattcattacgttgacagtgtaaaaagtgttacattgtgtaaatgttttaggaagtaatataatgaagtgacataactgtgaaatatgattgggcgacactatcaatgtatattcattaaactcttattcatttcgtattgtggaagggaatttagaaggggaaaaaagaatgatagatacattattagtaatactattgttgttgtagtagtagtagtagtagtaagtagtaacattagtagcgaggacacgtcaataatcagattttatttcaccacaatagaacaagcaggaaccgacctactgatagtataagcaataggcaggaaatggaaaaatagatataagatgattttgcttatgtagataccttagttgggagtcccaattaattggaaagtcacatttttcactcacaatagaataatgagaaataatggagtagcacgagtaccgtacgtgtattcggtacggacaagtacacagtactagtactttacttttgtacaagtatccatgcttcagaggttggttgggactttggaacatttttttctttcattaatcacattatgttctttgatcaaaactggaagtagcgtgatatactgttcacattgtagactaaacttgctgaagaacaaaacacaaaagaaaactacctcatacaccctcaacaaaggatactttctcaaactcccttaccttctggttctaatttggtctcactttagaaaactacaatgaaagcttgtaattggcataagattaacaaacagctcatcgaagctgatgctattttgctcatttgaaatatgactgattgatactagatagttttttttttaattatgtataaaattttatctatctttatcaaaatcctatattttatgacatttatttaggtattgaaga

SEQ ID NO: 32593 - DNA, 796 bp, Medicago truncatula
  Intron number 1 from transcript Medtr8g119560.1 (locus Med tr8g119560) derived from phytozome v7.0 (chr-ID MtChr8; po s 27148883 to 27149678)
cagcctgggaagcgcttttcattatcatcctctaagtaagttcatttttttttttttttttactcaaaccttatacattttcattcttcatatacaagagattaatattatatacgtttggataaatagtttaattaaaggcttaaattataatcacttattaaatagtaaaagataaaataaagtcaaagtttttccttcatataatctataaactgtttttgatatactatatatatatatatcagagagtgtaggaaaataaaataaaaacaatttatgtcttgtcataaggactctcaaatagtttcctatgttgttttcaaatgagtgtttgtgaatggaaaatatagatatcctgggacttttgtctcttgtatggttcacaaggccctacttgattctaacatggttaatttctcttgatagacataatttatgtagtagtgcttaatcttttgacctatttaacaccataataggtacaaagcttttttttttcttttcaatttttttgatgttcttgcattaattctttgagctgtaatttgaactcataatttatgaaaaaacataattataaaaggccttttataattatgtttttttttttttttatggttgtaaactagtaataactaataattaggtttgtaattagctttgaatgaaaatggctttttataattatggttgcaaactataattagtaataattagtttgattattaatataataaaataataattataattataattatgtgaagatattaaccaattaagaacaggtttt

SEQ ID NO: 32594 - DNA, 812 bp, Medicago truncatula
  Intron number 3 from transcript Medtr8g074350.2 (locus Med tr8g074350) derived from phytozome v7.0 (chr-ID MtChr8; po s 14766475 to 14767286 reverse strand)
acccacaggttcgtattctattgtttataagctcagtttcatattagattttatattaggcctaattcatcctacaaaactggtatgtaaagtgagagatgctattcattataaaatctttacaggtattatatatctttttaatgtgtgttttaagttttttcctcagtcaaaaggattctatttttcattgctatatcccctgactcttataatataaaggacttcacccaatgacctatttagaacctatcaatcatacctacttattatttctttatgattaaagaagaatggtttttgtctattgaaatgtaaaaatggaatttttgattaagcgactttcataggttaccagtttagcgaagatcacaagagatcctttgaaattaataaaaaaggacattggtgatgtaaggatttccgattcctctgtgtctgcataatgtgacaagatgaatatattgttaaagttgcaatttagctatttcattaagagaattcgtcattttctgttaagataatttggggacctaaatgacaactacactttcaaactgaagttccatgtcttgggtgccttttattgatgatatatttagttgagaaatcatgtgattaaggataagcataacttcactttttttttttagatggtttgacctttttttttgaaaaatttacaagtctaaaataaatattacgtttttgttgtggtagagaaacaaatcagttgatagcgtatgcactgttaatatttgatatctgtgttttcaggtggagttgattgatccggcacttaagggaactct

SEQ ID NO: 32595 - DNA, 867 bp, Medicago truncatula
  Intron number 1 from transcript Medtr8g101730.1 (locus Med tr8g101730) derived from phytozome v7.0 (chr-ID MtChr8; po s 22140637 to 22141503 reverse strand)
gggaaaagaagagtttctttcatagttgaagcaaggtatttcttatgctggagagtttaatcaaatttgcaaggatagtggaatagttaggcataaacaaattagaggaactcctcgggaaaattgtcttgatcactagaggatggacagaaaaatcatggagagatttatatgtttgatgtcaaatgctaataactctactcttttttgggatgaaacagtgtaataattttttcttatttcatgaatagattcacttacactaaatttggtatgaagacactagaagagatgtggttggtcatgctccaaaccttaaaaatatgagagtttttggttgtgtcccctatatgcacatataaaacggacaatcttaaatcaagggttgaaattgtatgtttttgaggtatcattaaggtgtaaaagagtacaaatatggtgcatggagaaaggggagacttaggtattgatcaacaaagatgtggtgttcaaagaatcggaaatgttctactctaaagaaacgtcaagttagcatcaaccgtgattggattgtgaagagagagttcaatttaaggtggagtcattgcatggttcaacaaatttagatgctaaagttaaagataaagattaaaatgatgacactacaccactattttttttaatggaaaatgttgcaattaggttttagattagtttttctagttcattcaggtttaaactaaggacctccacctccttatcccttagctcaaacactacactggaaaattgactatagtagaagaaataagtagtggtaagtggagaaatagatggagatgagcctgtaaattaagatggatttgtgaatgccagcaaatctcgaga

SEQ ID NO: 32596 - DNA, 919 bp, Medicago truncatula
  Intron number 2 from transcript Medtr8g065520.1 (locus Med tr8g065520) derived from phytozome v7.0 (chr-ID MtChr8; po s 12355904 to 12356822 reverse strand)
ctctttggtccttgctctgtgggaggtaatttattcctaaaatcgagaggccagttttagggtacaaatattagaccatgactggtgcaatgcaataggtttttgttgttctgttataaatatttaacctcataattacagtatattttgatatattcatgaatggttcattttcattttagatctcatcttttagtcccaaaaaccaaaatgacaattacaacgtatgtcgatttattagtggataccactcagtagctattttacttcgtgcttgttattttcaatgtgctttagtgtgtaagttttcctcttattcttacaagaacgtgattttattttgtattttttaattttaggcagtaacattttttgcaacatccacaacgactgtgacttaactaagcatattgaaaagctcatccagtgtgacaataagaatgataggtaaacatctatgccctcaacaatagaaaccacactcctcaacaaaccttcaatttcaagatccatagaacaattcaaaatccattttaataacatcgatatccaaaccatcaagttcccttgtgtagagggtggtttaccttatggctgtgaaaatgttaatgcaatccctacagtttccctggttcctacattctttactgctactacattgctttaacaaccctttgaagaactactgcttcaacaaaaaccacattgcattgttgctgatatgttctttccacgggcaactgattctgcagcaaaagttggtattcctacgattgtattccatgctactgggaatatcaatatgacaaggttgcagctgccaaatatattcaccaaaattgatgcaccaaaattgatgcaataacccaaaacatcgtgaaattatatgcagaaatcagggaatcagaggtgaggagtt

SEQ ID NO: 32597 - DNA, 1055 bp, Medicago truncatula
  Intron number 1 from transcript Medtr8g147180.1 (locus Med tr8g147180) derived from phytozome v7.0 (chr-ID MtChr8; po s 36175961 to 36177015)
tgctctggtcccatatcaaggcacataacatccaagtatattaattaaataatatttatgaatttttgtttacatggtaatatataattgatacaaattgattcttacgttatatgccttattgtttattggttgttggaaagcatgaggaatatttgtgcaaaattaactaatcatattagttttttctttttgtgagatagtttcttgcactgaagagcattttcatttcatacgagattacgtccttctaccaacctatgatcgttgtcttctccaacacatattttactacaattgttgcactgattctccttctaattttcatgcctattataaaatgttacggttttgattcttttgtatatatttctttattttcatgcctatttatataatactaatatatcaataacatcaatataaatttgatactacaaaattgatcattcttactttacacattttattgtttcttatttgttgaaaagcatggggattatcaatgcaaaattaaccaatcaaactctatgttggttatagccccttggcaccttaggaacaggtggctaaactgccttacagtacaaagatttacactaacagtgtatttgaattaaatttgtaaatcaatttttgaaaagtaaggtttttggatgttatttttatattggtctcggttagaagtttaagctttttgaatttgtgatcttatggttaggtgagctgacatatgggactaattgtatttgtttttaaaattagcatattttaattattagttttattcaattttaaggagggagaaaaaaaaaatctctctagtactttttttcccgtctcataatggagaattgaataagagggaagataagctattaaaatttcaattacgttgacaatactatcctcaactatattctaaaattcaagattatctatgatatagtgttaaaggttaggttttcacgttttcttggtaatttatttccttttgatgctacttgtatcttcttgcagagttgttcctcacaattattcctccgtattgaagg

SEQ ID NO: 32598 - DNA, 724 bp, Medicago truncatula
  Intron number 2 from transcript Medtr7g108220.1 (locus Med tr7g108220) derived from phytozome v7.0 (chr-ID MtChr7; po s 25454319 to 25455042)
ttttggctccagagtacaaggtcgtctggtacatgaatttttgttctctgtttttatattattcttaactatgatatacaccttttaaaatcaatgtaaaaaacatctagtccaagggagaaagattctggtcatatttggcattaattaactctacttttggctagcagtacaaatcttttaggctcattatgttaaaatgatgatgttttcggtgtttgatttatcttgaactaaagatggatttcatttctaatttgaagcttatgttagttcactggttgtattattttatggtattataaaattagtaaagggtcagagtgaaaaccttatctacttgaatatgtaaaatgtaagtgtcaatcattgtacatcttagtggcaaaatcataagtggtggtaaataatgcagtacaagtggcaaaatcataagtttattcctttacgcgccgttggttacaacaaacatttttcgttggtcttcatttcattttttgcttggtttatatcccaaattgttgggatcagtgaaaaagtatgaacattttgttcttatttttttgtgcgtctgatcctctttgactgaataattcagtatttcaattcaaagatctgttattgaggtttgaatgtggtgaatactgtatttgtgttcttgactgttcttacgctcccgaaggtgacaggcaaaagattggagccatattaatattgtgacagt

SEQ ID NO: 32599 - DNA, 408 bp, Medicago truncatula
  Intron number 3 from transcript Medtr7g140020.1 (locus Med tr7g140020) derived from phytozome v7.0 (chr-ID MtChr7; po s 33625375 to 33625782 reverse strand)
aatcctctaacaaatactgcactctacggtgtaagttacaaagcaaaataatccttttataatattgtgtttggaatgtttgcatttgtttcctaattgttcctatcaacatgaaaattcacgcttgatttgaaataaatatattgttgcttttttaatttggcttctataatatattgatttttgtttttgttgaacttttgagttttttgaagaagaaaatatgattttctttagttaatttggagtgtgtcagattcagcatctcaacctcactgttgttgaaccaattaaacttacgttttattgttctttccatgttcattatttatagttttgtatccggttgccatgagattgagttttaattattttcatacaatgatctatttgcagatactacattgg

SEQ ID NO: 32600 - DNA, 677 bp, Medicago truncatula
  Intron number 1 from transcript Medtr8g024260.1 (locus Med tr8g024260) derived from phytozome v7.0 (chr-ID MtChr8; po s 4538968 to 4539644)
tcaaatactccattgagatacttcactttatcaaggtacagttttttcaattctgttttctgggtttgtttgtttgtttgattcatgattcaattttatataattttgatttcagaattgacccatgttttatttttatttttttggggtgataaaaaggtgcaatttttattaatgggtttgtcttatttttattgaaagttaagattttttttatggtattgattgacttggcttttgggattccaactattgttgttttgtgtttttttgtgtttcactgttttgttttctgcttcattcaatcttgatttcattgggaacagtaaaaggaaaaaaaaaaaaaaaaaaggttctttcttgttgaaaaggatcttactttaagtcagggagagaaaaattatgcaaaccctttgtacctttttttggttgcttggtagatagaagaaagaatagggtaaaatcatgtgtgttgattttgtttcccaaaaatcctgtttcaactttttgattttctgctataatctgatagatcaagcatcttattcagttagtttcttctttatatatttgtcttgttttctttttgttattgatcatgtttttattgttctgttgttaattttatatatttttttgtaggattatttgttgagtaaattcaaagtgtaattgag

SEQ ID NO: 32601 - DNA, 837 bp, Medicago truncatula
  Intron number 1 from transcript Medtr7g107670.1 (locus Med tr7g107670) derived from phytozome v7.0 (chr-ID MtChr7; po s 25213572 to 25214408 reverse strand)
ctaaatacctccaccgtggtaactcttcgcatctctctcttctctgtatttgctgttatatatattttgcctttttctctcttttatgtgatggaaatgcaaatcctcattcttcaattatgaatctccaaaccctacctagaaaagttgcagatccttcatctgagttttaactaactcagtttcagtagtaattgccctagttctattcaaatttccactttttctttttcccgtttatttaattaggttttaattacaaattcactctataatttaattaccaactgattataggtttatttaattagaatttgaaattgacgatcagactacgtcataatggtatatcaaaagaaggttatttggatttcgatggaattgaaaaatttgacaactttttatgagagtgtatttaattagccaatagaatagcttattctgtgaaataacactttgtatgtattctcaaatgtcaaggtttgaatcctggttgggagaaatatccatattttagtgtccgaaaaatatgggaaccaaaaagaaaaaaagaaaaaaaaacgaaaagaaaaaatgctacataatgatttaaaaataattaagatcaagttcaatcagaaaaatctagatatgtataataattgaaactgtacgaaactacagacaaattgtttatatgtttttatttctatggaatgatgacttgtggctctgcataggatgatcagaattctgtcattatattttccatatagatattcttatttatgctttatccgagattctgagaatttatgatcgagtgaattcgtgctttttatccagtgcagggacttc

SEQ ID NO: 32602 - DNA, 853 bp, Medicago truncatula
  Intron number 2 from transcript Medtr8g145150.1 (locus Med tr8g145150) derived from phytozome v7.0 (chr-ID MtChr8; po s 35224894 to 35225746 reverse strand)
tactcactgaatttggccaggtctgcatattttaatttcttttttattttttataatatatctttttcctagttgaaatagcttcatttcccccaatttaagcacaggtaaaagccctgcatttttttttttttttttttttgggaatgttcacttggcacagccgacgtctcagatgctatagaaaaaaaccattatgctcatcatggttttcgtaattgatgatgataacaaatgaaatcgttttctatagaaaaaaggaattgcatatcccggttctgcacctaaggaataaaactaactgcaactctatattctaacctattaaccattattccaacttgcccagtgaagcgacatcaaacaatcccgctaaatttaaaattcaaacattcttatcctatatttagtacaattaacatgaataagatttcactcataattcctactgagaccagtaagtagtgactattcacattctgtgcaaaaagttattttcccgcagctctgatgagtccgaaattgaggatgctagtcgtattcttaattttagaaatgttaccagatcagcttgctcttctttgaaacatctatctctggtcatcatggagaatatctctgaacatgttaaagtttcatgcaactttgtgtgctttagccctgatcggcggttctacttgcgtgtttcttttttgtatgttgtctacctaagtaatatccacaatcttttttgtataccctgatcatgcaactttgcttttccctcagcttaaatgcaattgcagagcaatgttctaggatatccatcagaatcaatatttttatcttataacagttatcctttatcagggca

SEQ ID NO: 32603 - DNA, 657 bp, Medicago truncatula; identical to SEQ ID NO: 27901
  Intron number 2 from transcript Medtr8g022080.1 (locus Med tr8g022080) derived from phytozome v7.0 (chr-ID MtChr8; po s 4321744 to 4322400 reverse strand)

SEQ ID NO: 32604 - DNA, 628 bp, Medicago truncatula
  Intron number 3 from transcript Medtr8g146950.2 (locus Med tr8g146950) derived from phytozome v7.0 (chr-ID MtChr8; po s 36046068 to 36046695 reverse strand)
tgaacaatcccattttgttgttgaattaacatatagtatgttactcactcactcactttacttgcccttatttctcttcattagttttaggattaattatgtttttactttttttagtccctataaaattatgatggtttaagcttagttcctatgcaattttttttttttttttttttttttaattttgcttatcctttttaaaaatgattgtgtttagtcacttactaattttattttatttttaatttttgtttatccttttttaaagatgagtgtttttttcttttggtttcaaagaatctagtgacgaaacagtttcacactaagtgcagagaagtggagaattgcggattagaatttgcttcccaacatatcaaacatccctccagcctgaaccgtacttatgggacaaaaatgagtgtttttagtcaagaaaataggactaaaattgaacaaaatttatgtaagactaaacttgaaaatttgtcttattttattttgttaacttagttatgcggaattaggtactattgatgttattactatttttttcttatcacatggatttattttctttgaattcttataaactgtttaattacgtgatcttattaattgttagatt

SEQ ID NO: 32605 - DNA, 973 bp, Medicago truncatula
  Intron number 2 from transcript Medtr8g034470.1 (locus Med tr8g034470) derived from phytozome v7.0 (chr-ID MtChr8; po s 7465427 to 7466399)
aacccagacaagtactcataaatctagtttagattttatgtttagggttaattcattgagtcatagtaatgatattcaagtatagaattatcttttacatgattaataattcactttatttcattttttgaatttagattgtgcagcgctgatcttgttttacttttttatttggcttgtacatgtcatggccactaatttaatgttgaaaaatctaatcaccttcacatttgaattcaaaatcatataattgaccattgaaccatttatggttcaagtcaaatatgtttaaggatgtgacaattatgattgatagacagtgtgcaaatgttttagtcacaatatatatgaattaaatactttgttttttggttttatcttctattttaaggctaaaggctgattatgttcaaatattaattaccatagcagggtgcaaatgctgatgaggatttagctgacacaaagaaagaattcaaggaaatatgagaacatgattatcgattggatgaacaaattggaatatactgccatacatgcgactttgtgaaaactgagatacgatacatttatgaacccattgtaagtcaagtaaaaactttcatgcatgtttgaactggcattgagtttgataagatcacagtgcgccagtgcgattttccaaaagttacacattgaaacttcaagaaaatcactatgcaactgtgattaagagaagcaacatcgacatgcagaggatccaaattcctcctaaagtcatgctaaaatagctcacatgtgtcaaagttctaacgacatagagatcaaaaattaaattcaatcacattggaatttgtaggtgtgtcagaatttttggcttagatttattgttgtaatgaatattcactttcacttgtgttttttgctaaaattaaattcaatcgcattggaatttgtaggtgtgtcagaatttttggggaggaaaattgtcgtt

SEQ ID NO: 32606 - DNA, 843 bp, Medicago truncatula; identical to SEQ ID NO: 32518
  Intron number 1 from transcript Medtr8g137120.1 (locus Med tr8g137120) derived from phytozome v7.0 (chr-ID MtChr8; po s 32825234 to 32826076)

SEQ ID NO: 32607 - DNA, 745 bp, Medicago truncatula
  Intron number 1 from transcript Medtr8g146460.1 (locus Med tr8g146460) derived from phytozome v7.0 (chr-ID MtChr8; po s 35803875 to 35804619)
ttgctgtgcttagtatttgtggctgtggcttgtcggtgagctttattttctcgttattcaatgctagttcaagttcaagttttgatgtgcattttattgttgctttggttggtgcagtttcttatgatatgattttatgcaatctgtgtgtttttaattttattagcatgtagtttacgaacgaccacaatagattttacctttgcaactcatgtgtataattttgtaaatctgatggttgttgattgatacggcatgtacagagaagactatggattctgtagtaagaagagtagataagatgcatggtagtcaaatcactagaggcataggaagagttagaaaaactataagagaaactgttatgttaagaatgatctagagattaatgagctagatagaaatatgttatatgatagaacattatggcgtcatttgattaatgtagatgcttggttgttgttgttgtttgatggctgttgattgatatgcataatttccaaaatttaaggaattagtcagtcttgttttgtttattctctggtttattgctaagtaacatgaaatatttgtggtttattcttatgtttgcttgcctgttatctcctccttggtgcttttgaagtgcattgaattttataatttatgcgcggatgtcaaatacgattgagttggaccagggatgttttaaacactatatttgtgtacaggtatttccagtagagcttacacaattgccgcacat

SEQ ID NO: 32608 - DNA, 647 bp, Medicago truncatula
  Intron number 1 from transcript Medtr7g100380.1 (locus Med tr7g100380) derived from phytozome v7.0 (chr-ID MtChr7; po s 22624160 to 22624806 reverse strand)
ggtgaagagcaaggggtcgcgttttctcatcaaaggttggttttttatctttcatctgcttgcatgtttagattgttggtatattttgctcttttgtggtgtttgtttttgtttttttttcctctgcttcttctattggcctgtttgattgattaattttttgatcaattgtgaggattgttgttttcttcattccctttttggttaattgaggttgcatgttttcaggaggttgttctttttatttttagggtttgattttgatattttggtttgtgtttggttgatttcggtttctgatttttgtgttatgtttgttgttgcatgtttttgttttgagcctgtggtttgtctttgttgtatcagtttttaggatgtttattggtttcctttgtggttttgatgttatatctatgtttctgggtttttggttgatacttcaaattgtttaatgctcataagattttactggtacttgattttttggttgaattacgtatttttttaaaaatttgctccaaaagagagatgttcaaattacggaacattgtctgatcaactatccagacataaattatttttcaatgaaaatatttttttttttttttttagggaaaataatttattcttgaaaaggaactcgattc

SEQ ID NO: 32609 - DNA, 1038 bp, Medicago truncatula
  Intron number 1 from transcript Medtr8g040350.1 (locus Med tr8g040350) derived from phytozome v7.0 (chr-ID MtChr8; po s 8635125 to 8636162)
ccccctctctctctctccccttgttttcgtctaaggtacgctattcactctctctctctctctagttcttattcgtaactgtattatttatttgattttttcattttcatttttattttaattttaaatgatgcgttattatttgtgttattcaaattcgatgatttttactgacaatcccggttttttcgcatgactttttgagtgtgtgtgtgtgtgtgtgtgtatccaactattcgatgtttcatcagatttttgagattggatcatattcacaatttcattttaataaatattgccaatttaatttttagcttttttatttggagccaattttattcgattttctttgatagttcatttttctggtgatttgagttggtaagaaacatattaatttgcagcttatatcataagtaatttataataagctataagctgttttattaagctatcttgaagagcttgtttaaataagctggaaacaacttatgttgaacatttcataagttgtcttcataacttctcctatacagtctcacaagtacatatgctagtgaataaaataagctaatccaaacaggcccctaagtagttattgttatttcttaaatttatttgccttacactttattccatactcttttattactattgtgttcacttttctggttgaaaaattattgtaattgtttttagagtgaagacccaatttggtcctactcaattttctcacgtcccaatttagtcatcgtcaaaaagtactaccaaaggagtccctgacattttttatatcgtgaacaaatcagttataatgaatcagtgactaatttgtgtttcgtattaaaatgtctgagactaatttgagttttattttgtcaaggattaaattggaccgtgataaaattgtgaggaatcaaattaggtctttacttttgtttttaattatgttttggctgtcacattatagatagattattgcaattgatgatatgactttttcatctgtttcaggaagagagtggtgctcactggtga

SEQ ID NO: 32610 - DNA, 929 bp, Medicago truncatula
  Intron number 1 from transcript Medtr8g102640.1 (locus Med tr8g102640) derived from phytozome v7.0 (chr-ID MtChr8; po s 22616332 to 22617260)
acctacgcttctcttctccgccttccttctctcccgtaattaccttttctttctcttttacaattctatcgttttcttttgagtcgttttgattttctatgattcgtgttttgcatgtgtcatccaattcatttctgctttttgtgattcatcaattcaatcctctttctttatattttcatttgaaattcatagttgttatcttatcaatcaaattgtgaatgtattatatcttatcatgtgtcaattgtttgttctttttaatttgaaattaaggaagatatgttgtctccgtttgttaggttttatgggaaggtttaataggtcttagtcttaccctacttgagactaaattttaaatgttagcccatgaaataaccggacatgacactgacattgatagtaatagtaatttaagaaaaacacataattgaaagttggcacatttgtgtgtgttgtgtctgacacagagttttagagtttactctctaggtacttcaccagttggatttgagaatatgtgccttgtttatgttcttactgaaagatgtagagagatagaaagatattttgccaatttatagatgttgtctcatgattcagaattgtttactttgttgttgttgttgttttgagttgtgtactatgaagcacggacacccctcggattaggcgtgtcccggtgtcggacacgtgttgtgtccgacaccaacacttgtaattacaccgaagtatgtgattttttcaaattattagctgtgtcggcgtgtcagtgtcgtgtccggtgtccgtatccgtgcttcataagttgtgtatgtttttccttggttatcctctatttgtattttaatttttaaagatcacaatttatgtgtatttggttttttgtattaggaataaagatttgattcaacaaagacgcgtttcat

SEQ ID NO: 32611 - DNA, 490 bp, Medicago truncatula
  Intron number 1 from transcript Medtr7g103210.1 (locus Med tr7g103210) derived from phytozome v7.0 (chr-ID MtChr7; po s 23076367 to 23076856)
gtgtgaggtatagaagtttttgttttcttccctttatttatttctagttaattttttgtcttctttcctttcatttttccaaaaaataaattggtttatttgtggaagattcattgtgagttgtttggtgatcttggaagcaagtgaaaaatatctgctactaaaagtctaaaacaatcaaatttacttggctttggttgaagcagaaagaaaaacactttagtataaacactacttaactcatattaatagcactcactgatttatcatccaatctgttggggaagttcttcagttttcatggtattttgttatgattgaacttttcttgtactttttgttggtttcctgtgaaataatgaatttcatagtgttgagttataatgcttgaattcagttgattcttgcgaaaaaattatgtttgtttaaggtaacataacttcttgtaattgcagggtttctgcttgtgtttcaaggcttcaattttgag

SEQ ID NO: 32612 - DNA, 1006 bp, Medicago truncatula
  Intron number 2 from transcript Medtr8g128640.1 (locus Med tr8g128640) derived from phytozome v7.0 (chr-ID MtChr8; po s 30138388 to 30139393 reverse strand)
tgttttggttcttttgggaccacgctgctattttggtttttttttttttttccttctgtctacaggcttttgtttttggagttttcattgtattaggtgatgacaacagctcctggtgtttttgtggtgtgccttttggtttggttgtgttatgccagacttgtttttggcctctttatgtatttttcaattggtaccggtccaattctctacctattatttctaagctatctgaggaagtaaatttcttaaatggatgtgggttagaaagaaaaaaaaaatacatttttattttattttaaatcaatgtcttgaagatacacaaagtctaatataattctttagatttgtaaaatgataatttagtcacttaaatcaaacgtatatgatcacatttatcccttttcaaatttagcattatagtatgtttattttgatgtatgaagaagggaccaaatacaatacttaactttcataggttttgatgaatattcattttcaaaggttatatatattttttttgacataattttgtattttttttttaaattaaatagtcatgtacttttaggtcattttatatatataacaactaattttatcaaacacactatttttaataagcaagtttttcagctatcagctagcttatgacttctttttaccaaacagagctttaatttgtaaatgtaaatacaaagatgtttatagttaaaatgtatttgtttaacttacaatttattttgtgacaatataaataattttacaacataactaacttagtttttagtgagataaacttcaacttctctctaaacttttttctctttcgttcattgaggagcgttggttttaggtcatttttgacctagaaacacccctctacattttttttgtcttttatttcaatttaaataagtggtttcacacatatcaagttttttgttttttttgtgatttcgtcgtctaagtacgacgttgtgttgttcgtcgtcttgtgcggtat

SEQ ID NO: 32613 - DNA, 370 bp, Medicago truncatula
  Intron number 1 from transcript Medtr8g128640.1 (locus Med tr8g128640) derived from phytozome v7.0 (chr-ID MtChr8; po s 30139479 to 30139848 reverse strand)
aaagagactcgtaacaatatagccaagttaatatggaaatgatagtaataggcatgtttttaatattattatgtcatatgtatttaaaggatctgttttttttttcttctaagttatttggcaagtttgatttatggtgtttggttgtaatacattttattaattaaaattaaaattgagccttgaatcttgttcaataattcgtttgatccatgatgttgattttaatgttgtgtacatgaattaaggttttgtgtgtctctcttcgttggatttcctcgtgctctttctgctactgtaacagaagagaatgtatctgttgctctatgattctgatacaatatttactagagttataaaagccttcaaa

SEQ ID NO: 32614 - DNA, 267 bp, Medicago truncatula
  Intron number 1 from transcript Medtr7g090130.1 (locus Med tr7g090130) derived from phytozome v7.0 (chr-ID MtChr7; po s 20033251 to 20033517 reverse strand)
tctttggtgttgggaggtaattttgattttttttcttgatttttgttttgaattttgatgatatttcttctaactatagtttatttgttgtttgatttaaccgggttatcttaaatctgtgtaaatcaatgttttttggatgttgataataattgggtctgtgttgaagttgaatgtgtattggttacactgtttgcttgctgctgatggatttgctatgttgtcattgtagactagggaggttaaattgttgccgaaatctgttcg

SEQ ID NO: 32615 - DNA, 644 bp, Medicago truncatula
  Intron number 1 from transcript Medtr7g148440.1 (locus Med tr7g148440) derived from phytozome v7.0 (chr-ID MtChr7; po s 35178123 to 35178766)
aacattgtgttgaaagataaaaggtattattttctaatttgccagcataagatgataggattttgtataagtttgataatgacctgaaagatgtctttccttatgcagtgagaatatagttgatgtaacactatggtaaaaatatttcgaagctttatcatttaccatctatttaccttgagttctttgcttccattttgtagtcaatgacaacccaaatttatgtaacaattggtcaggttcgaggctgctcatcaacctacattatccggttgttgagaagtttaagacttagtaagtttgcattattatttcacaatctgatttgattgttttttgaccatgtttcttgaattgttgtcgtgaccttaacacttctcaaactcagagtcaaagcatcagtcagaacttaagtcagagttcggcttcttctcaatgtacttcgtacaacgattttttcaatctgtctcaggttaggccaattgttgaatttataaacttagtcaaggtctgctttttttatgcataaacatgctttgaatttttttacgcacaaattaaaaatacatattgcattattttttatttcatgtgcataatttgtgttaggatacatattgcatcactatttggaaagcaactaa

SEQ ID NO: 32616 - DNA, 515 bp, Medicago truncatula
  Intron number 1 from transcript Medtr8g016260.1 (locus Med tr8g016260) derived from phytozome v7.0 (chr-ID MtChr8; po s 3122088 to 3122602 reverse strand)
ctcactttcaagatattaagcatactcgttacacataatacttaggatgttattattttgtctgacaacagtaatgttaattacactaagtgtggctacaagtggatcttaaataacaaaggggatgccactatcactcataatgccaatcttcaatcttgatcttggatttggaagcttcacctctcaaaaaaagattaagttcatcttctcgctcgcttgacacaacttggccccagttgtaacatgtaatattgtgaatgttaacttagactagcttaaaaacataaaggtctaagcttgcaagcatgcccattttaatttggacaaaacaaaatgagaacaacaaaaaaattaaaatgtggtaagaatggattgatgagaacacactgttgactacgtccgcatcctcattgcatatattttcaataaataagtgttgatccagttaattgttggaggatgcgtgtagatggaggggtgttgtatgtggtatagagttttggaggcaagat

SEQ ID NO: 32617 - DNA, 751 bp, Medicago truncatula
  Intron number 3 from transcript Medtr8g121690.1 (locus Med tr8g121690) derived from phytozome v7.0 (chr-ID MtChr8; po s 28280705 to 28281455 reverse strand)
ctggaatttttactgtacgaactctctgtgttaaggtatgcaatatacaacgctcctttgaatgttgaggtttttccttcgtagggtgacatagataacgagctcgttagtatgatggaaatattacacatgacattgatttattatgacattccatgtgatactatgattctcgtgatcatattcccaaagttctttttgtagttcttaatccacataagcaaattataatatacgatgctaaaattgtttggtgttgtgtggagatcaatagttacatgaagacttgtttagtagttttagtttgaagatgggattaccaaaatttggttggtttatgccacactgtcaagtgccaattacattgtttaggtcttttttgagtttacctgatatgagtctcacattagggaatctcaatcaatacataagtgcattgcatccacaaatttaatgattcaatcccttatatcaatgtagccttgcctactgtctacttttctccgatatcccatcttttctttccttaacgcatagagcacatgctttagtacctttttaccaacaacaaaattcagcctcataatctatcatcggcactgttgttgcttaactagtactctactttcctttattagatatagtctgacaggaagtgttgttttttttcttctgaaaaagtgatctactttcatgttgcttgcttctatctacagattattggaagtattacagcagtgtcaggctctct

SEQ ID NO: 32618 - DNA, 225 bp, Medicago truncatula
  Intron number 1 from transcript Medtr8g043910.1 (locus Med tr8g043910) derived from phytozome v7.0 (chr-ID MtChr8; po s 9624838 to 9625062)
gagaacaacgcaagttgcttatataattgccataggtaattgcactctaacccctctctcttctttctctctctaattcttaggtcactttctctctctacaatttttcagttttttctttttttttaaaaaaaatttcgtttttgatttttgattatgattattgattatgattatgatgaattggattatgtagggaggattttaattatactggaggatctc

SEQ ID NO: 32619 - DNA, 881 bp, Medicago truncatula
  Intron number 1 from transcript Medtr7g105150.1 (locus Med tr7g105150) derived from phytozome v7.0 (chr-ID MtChr7; po s 24038276 to 24039156 reverse strand)
caaggaggctttatcaagtttggaggggtggcaatgttagttcttttttgctctttctctttttgttttaattgttagttcttaattatgatgtaaaaattggtttttgtaaatggcgttgattgtttgtgtttgatatgaatgccatctcactttgaagttgaacttttttgcctttgttttgattattatgttgtattgaaagttttgtttttgtttttttcttcttccttttgtgttaataataatatgttatgttttagcatgaatgttgttgcttacttgctttcattgcataattgttgtctgtccaatgtttgtttgcaatgataagtatatgtttgattttgcggcacgttcaacaaaaccacacttagtttaggagctttgatgaatcaaagtggaaatagtctatgacgcaagtttgaagactctaacgcgaaaccaaacatatactatgtttgttcttgtagtaaattacaaacatatactatgtttgttcttgtagtaaattacaaacgctgactaatgcttgctattgcaaatattttgtaattaaacttttgtggatgttgtttcctttcccttacgtccattctcgtgcatatttaagttcaaaatccatgatgttttgatataccagtgccacttaaattggaacacttttcttatggtcaattttttatttcaatgaataaatttttgtcatggctgtggacttttaggttttatatgcttaccatttgaatgtttttgttttacgttgttgtattggattggagataagtgactttctgcatgttattctttattaattccttgtttttttttgttcccttcattcagaaatttctctgtggtgggagactggtttttggtcc

SEQ ID NO: 32620 - DNA, 508 bp, Medicago truncatula
  Intron number 1 from transcript Medtr7g134670.1 (locus Med tr7g134670) derived from phytozome v7.0 (chr-ID MtChr7; po s 31851713 to 31852220 reverse strand)
tcttcaagacctctgtgttgcagaccttgcttctggtacgtaccattacattaataataataatctcatgaaatattactttttttttcatatagagcatataactttcatgctaattattacttatataagcaagattaattataaggatcgataagctggaaataattagttcccttttcattttcacttttccccttaatcattatatgcaatcctttttataaaatttattttttttcaatcatgtaatttggcctaccaacacctttgatatggctttttattgactttaatatatgtttaatcattcagaacaataatcccttaactttgattgaaattgatttaagtactttttgcaaatacaagaaatcattgcatattattgatagcatgattggcaacatgtatttcttattggttgagtttttttcttgtcttgcaactcttattgttgaaatattgcgatgatgatggtaattaaatttaacagcgattctagtga

SEQ ID NO: 32621 - DNA, 1065 bp, Medicago truncatula
  Intron number 1 from transcript Medtr8g088470.1 (locus Med tr8g088470) derived from phytozome v7.0 (chr-ID MtChr8; po s 18745976 to 18747040 reverse strand)
ttgaatcctgtgtgtgactttttgtgtggaatgtatatcttctgtttgatctaacggtcactgtgcttcctgcatttttacactatcttttgtgcttttttttggacccttggatctttgatccagtggctgtgatgtgatcttgggagttagatctggacctctggattcatctagcggaccagattaaatcctgctgagcctctttttttaattgctttttaattgtgttttaaataccttttttacactttcttggtgttttatgcttctaaaaaaatttctaaaaatatttccctatcattttgatttttcctctaagttttagaatttatttgcttatttttgcatttattttctttactttgttcttttaattcttgctcattaaattccatatatgttcttgatgcattttttcatattgtgatattttggcatgtgaaataatgtgtgaaaatatctctaggaatatgatataatgctttgcttgtgtgtgctcttatgatcctcacattgtagcttaaattcaaacctttcaaaaaatggctataatgagggaattataggtcatatgcatgtatgagtgttatacctaaattctaggtgtatttttaccactttatctcatttcattactttttttctctctcttgctattctattcaattttgtttacctttctactatttttatgctttatgatactaaccatctcatctcacatttcattcatcctatagttttggcatcattttttctattcatttctatatcaattgggtttgtaataatcttagatagattagttccttttaaaattcttcacaaagaccataacatgtatctaggacaatgtaaaggactatggacattataagggatgtacaccaacacaagcaccgacacgcacacacgttgcatgattaccgcttagatgtatgcttaggttttacaacgcttagaaaaaaaaatcattttccaaaaatatgaataacctcacttgaaaactttttttctaaaataggagtcaaaactcctcatttcccttttgttttcttaaga

SEQ ID NO: 32622 - DNA, 635 bp, Medicago truncatula
  Intron number 3 from transcript Medtr7g133260.1 (locus Med tr7g133260) derived from phytozome v7.0 (chr-ID MtChr7; po s 31128800 to 31129434 reverse strand)
tggtccaaaatatagagcagcagctaagttctcaggttagtgcctaacaggtaatatagtgattgatccttcggggaagttttggttggggttgtgacttcagtaaattttgttattgaatatttggaccgacttaggtgaagttataatatcctcaaatctccaaattccaaatcatatttcttgagtacatgtttgttgtcggtcataatatcttcaaatctccaaatcatatttcttattatatttggaatttctgaaatttagcctttgtaaatgtttatactttgacaattttgaatacttcttggcttttcgggtgccatcctctcctgtttgaactttgaagtagttaaacttaaaatgtgaactctttccttccttccttttatattaacatgataataacaggttgttataattgaggggcagtattggagttactgttgtaagtaattgtaaattgctgagcatgtcatgctcttagttttatgttggaccttttctttgtatctaccactacttacaaacgtttaaatggatcattcaatgtgacaaaatactggttaggaataatttctcatttattgttcttcccagctacctactcagactgaacgttgcaatacagttgt

SEQ ID NO: 32623 - DNA, 633 bp, Medicago truncatula
  Intron number 1 from transcript Medtr8g005620.1 (locus Med tr8g005620) derived from phytozome v7.0 (chr-ID MtChr8; po s 365359 to 365991 reverse strand)
tcaactttgactctgttcttcaacaactctctcaggtaatcatttcgattcttttcagtatatgggtttgtgttcaaatttaacaatttgcgattgttctgtttttgatcggggaaatttattcattttttatgtcggattttattggggaaatttaaaaatgcgattttaggttaaattcgtttctgggtcggtgttaaaatgcgattttttaggttaatttgttttttgggttatgctgtttttccggtggtgattgttaaatctggtgtaaggattttaattttaattttttggtttgttgtagttaaatatactgtgtgaaattgatgtaacatgtgggttttttggatttaagtttactctgtggtgattttacaacaatgtatttataccattttatgccaagttatttgctcttgcaacaccgacacttctgattaaaggcgtgcctgctatctgttacgtgtcagtgtctgtcttgtgaccggtgcattttgtttttctttcctctttctggatgttctatatgctattctatactctgcatttttgtttatctctagtttaaatttaatctgactgggctggttatcgacattgttgacagttcaccgagtttggaacagttgg

SEQ ID NO: 32624 - DNA, 545 bp, Medicago truncatula
  Intron number 1 from transcript Medtr8g139370.1 (locus Med tr8g139370) derived from phytozome v7.0 (chr-ID MtChr8; po s 34003495 to 34004039)
aggtaattttttctttgtttttttttttttttattattcctaaatcactaaatgttcaatggttcctggtacatatcattgcctcccttcatgatttgaattcgccgcgagacctatttgcttaaataatttgtaagtacctctaatattgttagttaagtcttgaaatctgccctaattctaatgaaccttcgaaacacaactcacctaaacttttcaaaacctcttaaaaataatcaccgtcatcacatagacctgttggatttggtgttagcaaaacatattcaaaataggttaataacatcttaagttttgataagattttcagaattttgtaaattttattttgtggccatatatcatcattatttatgttgtatgatcagttgttaaaggatgttttggtagagttacatgagtttttaaaatcgcaaggaaaaaaacaatctcactaatatgtactagcttatcatgttaatgacaagaagacttttaagttattttttgttgttttcagattattgatcagaagtgctggaacgaca

SEQ ID NO: 32625 - DNA, 501 bp, Medicago truncatula
  Intron number 2 from transcript Medtr8g139370.1 (locus Med tr8g139370) derived from phytozome v7.0 (chr-ID MtChr8; po s 34004045 to 34004545)
caagtaaccgataatcaattctggccgtctacaaggtaatttgaaaaataaattggaaaattaaggatgattaatatattctaccaaaaaaaaaaaaggatgactaatctataaatttattatgtttttgataatggtttcggcatacaaaataataattttttttcttttcaaatgtgtcccacaacacgcaaaatatataatttatttcttgtactttaatggtggcatttactcatttaggatgggtgagggaaagagttttctactatgagagagtttttttttaccataagattaaagaggtgcacagattttaaaatggtctgtccacaccatatattttcctccatcatcttcaacctttgaaaatacaaatctgcaattcacccaccaacccatatccatttaaaatcaatcttttttgttaagatgattttggtctaacacattgaatgaattttagagataccaataatttctaccattggattaaatctg

SEQ ID NO: 32626 - DNA, 557 bp, Medicago truncatula
  Intron number 2 from transcript Medtr8g139700.1 (locus Med tr8g139700) derived from phytozome v7.0 (chr-ID MtChr8; po s 34152583 to 34153139)
tgtaataccccctattatgtatttcgttgtaacattcttggttggcgatatgatatttcagcaaacaatacattttgtgactttgataattgttctttacgtagtttaattattaaagttccattccaaaatattatgtttcactaagtatgaaaatatttcaagctcataagacctcggcgatctagtatggtttaatacttctaacctgctaaccctatccattcaaaggaaattatcaacatattatcaacaaacaagcttttcgctataaaaccaacacttgttattacttattccaacaacacacactctcgtcgctctctctctctctctctctctctctctctctctctctctctctctctctcttctattcattacgttctttgatcgaattaactcatcaaacaaacgagcttactggtttattgtttgcaaatcactggaattttatggtttaatttgtggtttattttaaatttgattgtgatatttcttatgctaattcacattcaacaggtacctggtgccagattctctaacccaatttcagt

SEQ ID NO: 32627 - DNA, 681 bp, Medicago truncatula
  Intron number 3 from transcript Medtr8g139700.1 (locus Med tr8g139700) derived from phytozome v7.0 (chr-ID MtChr8; po s 34153216 to 34153896)
tgttgtaagttcctctaaactcttttactatattttattttattttaggattaattatgttttttctgtctgcaaatatacaagtttttgtttttgttttttaatttgatccataatgttttgttttgttttattccatgtatgtatgcataacatttgatttttgtagactaaagttattaaattaatattacgtacatattataaggatcaatttcaatgtgaacaaatttaagctgaactagaataaaacaacaatgaacaaaagcaaaaaagttctgtatggattgtttgggatcacttaaatgaaagatatattattcacttgtagtaaactctatacttatttttatagtataattataaaattactaaattgttgctagttcagaagaggataatggatttggtgtggtatcacacattttgatttgtttcactcgttgtcttgattcagttaactgctcaatgaagagattttaattttttctaataaaaattgatttattgattccacagtatatttgttgttggaattatcaatggttgcttgtacttctaatacttaatttaattctgtgtggtatttatttggactatatttgcattatttgttgtgatataaacgatgtgaatttaatatgaggccaaagcagaaactgtaaagaaggtgtgtgacat

SEQ ID NO: 32628 - DNA, 692 bp, Medicago truncatula
  Intron number 1 from transcript Medtr7g121330.1 (locus Med tr7g121330) derived from phytozome v7.0 (chr-ID MtChr7; po s 28544694 to 28545385 reverse strand)
aggtatttcaaaatacctctcttttgttgctgctcttttttttgttcctgctacacttctccttctcgttgataggtttgctttcttcttctgtttacaatttcatattttaaacgggtttatgagattcttgtttactgtacaacggtattagtaccaaattaccgttcctgctagctacttttgtggtgtgtgccaataccacaattgaaatttatggtttcttctgaaatttatggacataaaatgcagctacaaatgcagttgggggcctcgatttatttagtacccaagagcttttcttgttttgttaggattaggaatgttggaatgggaattttgtattagagatatatgttagatactagtttgtagtagtatatatacttgtaataatcccattagtgggataacttcatcatttgtaatattcacttttatcatcaatacaaacattatttgagttttctctcattccttccttgtatatgatgtttactaacattttggtaacttaatcatgtgattattgaacggtgttttaactttatagactgtacttttatggtgttttttcattttaagcatatattctgttgttgtctctggctgttgggcccaattgctcattcctgtttgctgctgactcatttgtagtgaatcaaacttggggccaaccctcctactccaag

SEQ ID NO: 32629 - DNA, 546 bp, Medicago truncatula
  Intron number 2 from transcript Medtr8g037200.1 (locus Med tr8g037200) derived from phytozome v7.0 (chr-ID MtChr8; po s 8006811 to 8007356 reverse strand)
gaagctattgaatccaggttcaaataatttgtcaggtgaaattcctcattctctttacaacctatgaaatattcaaattttagatcttggggggaacaagttattcggtagtcttccatcaaatacggatcttgattttccaaatcttgaataattcttggtcggagagaaccaaataacgggaacttttccgtcttcaatctccaacctcactgaattgcaaatatttgaaatatcatggaatgcttttaatggtccaatatctcttactttaggccgattaaataaacttgagaggattcatatttcccgtaataattttggaaatggataagctcacgatttggattttctttcctcgctaaacaattgtacttaattgtcaatgcttgttttttatcaaaatagatttgctggtgagttgtcgcatcttataggaaacttttctgttcatctcagtatgcttgatatggggcataatcaaatatatggagtgataccaaaagaataggtcaactaatcggtttaacttccttaaagattgga

SEQ ID NO: 32630 - DNA, 910 bp, Medicago truncatula
  Intron number 1 from transcript Medtr8g099180.1 (locus Med tr8g099180) derived from phytozome v7.0 (chr-ID MtChr8; po s 21743293 to 21744202 reverse strand)
aggtaaatcttgtttttgtcttttctttgtcgtttctatatttaacatagtacaatgtggttcagatctgttacatacatacacttgttttcactttgtgtttttttctaaccaaaatctaagaacaaacggtaacttgaactcaaaaatctaagtttaaggtattccacgcgccaccattgacggtgggtttggtaggacacaccttattaggtctgaatttttttttttttgtttaccataaaaagaagagttattggtaaagataaataaatatttaatatataatttattactggtattatatgagctgtcatttttgttttctattgtatattttttccatccagatccaaagatgaataaaataaataaggttataaagataaagtgtgtactatctggcttttctttagaaaatatattcatagttttggattcacgtaaagcgaagaaaaagtaattcctttatttaaaaaaaaaagtaattccgaaatagacatacactattcaaaatagatatattgttcatataatggcattactttattatgctaattaattaatagttactgagctgggttacatacttttatgctgtatttacatgatattattttagatagcttttatttatgtttagaaatttgattgtattgagaattctacatgatatccaatataaatataaatttttattttctcaaaaatataattttttgctcaagaatatgaaatgatgttagttttctggcgttgatagttgtaagaatagtaatttttaattagttatgtcgtatgattataaaacaatgtgggtttaatgttaattggaccaaacaaatcttgaaatttctttgttccattttttgcagagtggagcagaaaccatcaggagcttgaaggtgct

SEQ ID NO: 32631 - DNA, 588 bp, Medicago truncatula
  Intron number 1 from transcript Medtr8g096740.1 (locus Med tr8g096740) derived from phytozome v7.0 (chr-ID MtChr8; po s 21307172 to 21307759)
aagaagttagtaagtcataaatcctttttgccttatctcatgcatgtttggattagcagtgtgttagacagaatcatgaaaacttgaaagaaaaaattacgctgccaccataattttgccaaattcaatttgattctaaacatgaacttatacatgaattatatatatcattgccttagatggtactcaataatatatggatgtttttttagtaaagaatggatggaaataaggacataagaattttttcatataaatatttcttatgtgtagagcagcttaaagcggtattcatgctcgctgattgtagatagtttgtccttagagaatattatgtttaggagcagttcattattttccaaattacatcataggaaaacattgtaggcatcttctatcctctgcaaatgttgatttaacatattaaagaagcatttttctttgaattagattaattaactttcttttctgtcaagtgttcatttagttgagcatattaaatgtaaaagacattaactttttttgtcttacaatctgtctttggttttactaggtaaattcaaggaaaacattatatttgtcaccttc

SEQ ID NO: 32632 - DNA, 565 bp, Medicago truncatula
  Intron number 1 from transcript Medtr8g088700.1 (locus Med tr8g088700) derived from phytozome v7.0 (chr-ID MtChr8; po s 18862044 to 18862608)
tttagtacgaaatagagtttcatttcttaatatgcttgctcattaggataaatcagattccaatattgtaaatgtgaatattagtgatcatgtagtccgaattttttaggatttgctcttttacaaatctatacttgtttgaatgagcatcaacatgattcagatttatattatatatcttcacaaatattctatattttcttgttcattttatttttgtttttatattgtgatcttttgtatttttttataccatattttgaatttctttgactgtaaatacatagaactaattaatgctctttgaatacgagtcttgaaaatgcatgaaaactatgcagtattttttttcttaattaaaactttgtactcactgtaacagcaattgcgtgcgaggaaaaaaattaaagctcttttctcaagctattatttctccagaaattagttaagaggagtatatagctttggctcaatattaccagctactatattttagtttaaaatacaattaaattcaattaataaactcttagataaaaaaaattaactcaattgtgtagatact

SEQ ID NO: 32633 - DNA, 913 bp, Medicago truncatula
  Intron number 3 from transcript Medtr7g146190.1 (locus Med tr7g146190) derived from phytozome v7.0 (chr-ID MtChr7; po s 34921811 to 34922723)
cgcaaaaattcttttcaaaggtcgattggtaccctctctcacctcccaatttatgctcaaactttttcttatttctattgggaaaaaactcaagtcccacatcggatataagactcttgatgggagtatagaggaggcaatcctcaccttacaagccagcagagcagtattttcaatttaattcatgctttattttcgccgactgttggtttattggtcacgaatcagttaggtgtactatttgattcactttactctatataattcctgttcaaaggcatcaagtagttctggggtctcaaattaaaaatctaaataagctctaacaatctgaccaactttcttggtgaaactcaaatacaacgacactcgaaatcacagtttcttcaatattaaaatattatgttgaaaaatggtcagtagttgctatgttggtttgtcagcctggttttaaacgatcattgatgaatcaagaagcatcaaacaattgattgaaaaaattaaatgaatttgttgggggttgaaatcccgttcattgagtaataagaaatggagagattgataatagagatgatgatagatagcctttaaatgaaaattaaaataaaaatggcatctttgtgattatcagtgaaaacatatcgactaaaaatgaaaaaacaaaccaatcatacccttataccgatattgttttcgtacttgtactccaaaagcatcaaatagttataacatggaaaagcctttttttaatcacatagtaggtgatggagaatgagtgatgctcctgtacacgtggtaagccgccatgttttgagtcttattatcctaagaagattatattatttattactaacaaacacgatatcttgtagtgtctagtggagagcccacccaagttgcattactacttgtt

SEQ ID NO: 32634 - DNA, 668 bp, Medicago truncatula
  Intron number 1 from transcript Medtr8g127640.1 (locus Med tr8g127640) derived from phytozome v7.0 (chr-ID MtChr8; po s 29589030 to 29589697)
gaaggttaaaacatgtggttaacgggttaaatatagtaaaaagacacctgaacacatgcatggaactagtcaatcttgctgaccaagtcattatctacattctggattgttttgaattatataatctgaaacactcccggaatataaaaaaatttattatgataaatcactaaataacaaaatatcattgtaactaaatttgaaaattcaaagtttttttttaaaaaaaaaagttcaactatatttaaaattgaatcatatacaatacaatattcaaattaaatcatctaacaaatccaacattcaaaacatacaaaatgaatgaattcataaactttctttaaacttgaaaatgtattctcctaaacttgtgaaaaactgatatattaagctggtggaggctaggatgagggagccaataggtccctcatgtcatgagggagcaaagatgcttttttttttaccttaggattaaataaatggattagatcttcttcacatcagcaagagaacacttacagctctccacactcaatcaaacatatcaaccctcttgtctctaagtacaatttctctttcctctctaaccccacctttcctctcttctctttttttttttttttttgttgacagaaagctctattctcttcacaacccaacccagtggc

SEQ ID NO: 32635 - DNA, 679 bp, Medicago truncatula
  Intron number 1 from transcript Medtr7g110710.1 (locus Med tr7g110710) derived from phytozome v7.0 (chr-ID MtChr7; po s 25833221 to 25833899)
ctatagtacttgttttgtcacttcaattttcagtggtaagtaagattcactttcaacttggtttcaactttgcttcttccgtgtttttttcatctccgtaaaacatgctacaacttggttattaacgtgatccttaaaccaaccatgttacaaattattgttttgctttgcttagaatgttgtccttgtttttagggttctttaaatctactttttttttcttcttctattaattgttaattattttgaagattgagtttacttgattcctggatttgctgtttgattttaatttaaaggtttgattttttattttttatttttttaataatactgtttcctttattattgttgtttttggtagttgttttgagatcagaaattgtaccatgtagttgttttgttgtgtttttttaacttgttttgttgtcagaggaagttgatgttttttccatgttctgtaaagtggtgatttttatctttcatttatgagttgaaactaaaaaaaatatctatttttcatacctttttcttctctagtcaatttgattcttagttgtgtgaagtgtgtcaaaatcttcatgttgtgtttttttatttaatgtaattttgcatgtgtgtctctgaaggattgtctttaatgggtttgttgtggtttattatttctcagctaaatctc

SEQ ID NO: 32636 - DNA, 815 bp, Medicago truncatula
  Intron number 3 from transcript Medtr8g029300.1 (locus Med tr8g029300) derived from phytozome v7.0 (chr-ID MtChr8; po s 6356872 to 6357686 reverse strand)
cgtttctggtactgttctttatgtttgtgtatttggtttcactgtcattgaatgttagtctttcaattaggctcttcaacatcaattagaaaggaaaaaaaaaaatgttagtctttcaattctattacgatatattcaagttgaggatttcattcatcatttatgtttccatatgactgaattgagttactggcccttgtagcaggtttttgcaaaaacctgtacattgtatttcatattggcctctggtgaccgctactgaatggatcatttgcatatttaaatcatatggttcatttgatttattttctaatattgttcaaaatctatagtttgtgaactgacgtgagtttaggaattgagtttatagaacatgatgaaagtatattgtagagccccgtttatgctagaacacacaaaaatgttgcatattgcatatttacgaggttatgaaacttttgaattcaattagtctttttttctttcattgccccaatatacaaatgatccatattttatggctacatttctaatcttgcaatgcgtgtcgtagtagactcacagtgaccgtaaccgcaatttaaaaccatagtttacacatcaatacctttacatctactagtcatgtttttcacccatggaagcaatgcgcaggggcctgcaatagatgttatgagtcaagctttaagattagcatattgttgcaaaatctgtactggttgttgtgtctgttttattgttcccatataatgatataattatctgtcttcatgctactagagaattcggagcaaaaattgtgcccgcaataagaa

SEQ ID NO: 32637 - DNA, 468 bp, Medicago truncatula
  Intron number 1 from transcript Medtr8g029300.1 (locus Med tr8g029300) derived from phytozome v7.0 (chr-ID MtChr8; po s 6358049 to 6358516 reverse strand)
catcgatcctaaggaccctcgcatccttgaattcggttaatgtttcagtttttggtaggtagggtttttgcttttaacggtgatttgggtggagttagaactttgaatctggtaggtcattttctcaaaaagactgtgacaaggaatatcacacgaagagaaagccaagacagtcccaaccacatatatacagccacaagaacattaatcagaagagtgaagaccaaaaccagctggacaacaatgttgatgaacgagttacttgtactcactctcattttcgatatgatctattattaatctttgcagttcaaggaaaaaaagaatgttcctgaataaatgatcgcatatatcctaaccaaatatccctcaacaatgaatacatgacacatatacttataccagagactgaacgatgaatacagtttttttcttttttgaattgaatctctcttccagtggaatcga

SEQ ID NO: 32638 - DNA, 534 bp, Medicago truncatula
  Intron number 1 from transcript Medtr7g092720.1 (locus Med tr7g092720) derived from phytozome v7.0 (chr-ID MtChr7; po s 20477668 to 20478201)
cagcacagcccacgggggtcggcggcggagctctggtgttgaccggccatgccccgacgttgaccaccacctatattaaattaataatatttaaatattaaaaaataaattttttctgtcagtttatttaataaattaattttataattatttaaataaaaaaagattaatattatttgaaattatgcattggatttttattttttaaagaggtgatccaatgaatttttaaaataaggtggatggattagatggatatagatctcatgaatcatattgctacccataattatttgtatgtaaacaattttttttatatatttcttccttatataattttaaaaatttcagataacaataaatatgagcagaatcaaacaaacagggagtttattgttaattttcaccaaccaaagttttaacgacaaagtggagatactgttggttcattccccacctgataatttgttatgatttgcttccggaacatcttatgcaatatatacatgacttttgtgcaggtaataagacgta

SEQ ID NO: 32639 - DNA, 828 bp, Medicago truncatula
  Intron number 1 from transcript Medtr7g110820.1 (locus Med tr7g110820) derived from phytozome v7.0 (chr-ID MtChr7; po s 25872709 to 25873536)
gtctaaaagtgtaagattgattatgtagctttaaatatggctatttagtatccatgatttttttctctcaatgttgaatctgattaagaaatattcaaatagttgattggtataagtaaaaaagataaacatatttgtttggctaagaaaaattgtagactactaagatatcatagctgtgaatgcaaataaattattttgccaattctaaattagtatgttaccggagtccttgaatattgtcaagaaccatataatcctgaaagtttgtcttctttcgtgcacacataagacttctttttctctaatctgtacacttacgtggaagcgctttgcactccaggcatggacaatgacataaactagccaacttaactcttcgatagaagttactctgatccattttaataatcaagtttagccaaagcttaagctgtgggtatagaataggccctaaatgctttattttgtatctaacaaaactcaatagttgatgagttaaggtttgacactcattttggtttgaagccgttcactactttttgatatatctatctatttccccatcaatgggaacatggcttgaccatgtacatttgcatcttgtctatgttttgttggttctatgcaatgaaatgatgtaaatgattgctgtacacatgggtgttattttctatcttgctctttatagattttctgatatgttcataattgttccaataaatgttcctttagatacaggtgatttagattaccaagaacattctaatttgttatttctgatgagtaacaggttcaagactggaacaacttaattggaccactgat

SEQ ID NO: 32640 - DNA, 414 bp, Medicago truncatula; identical to SEQ ID NO: 32267
  Intron number 2 from transcript Medtr8g112210.1 (locus Med tr8g112210) derived from phytozome v7.0 (chr-ID MtChr8; po s 25122649 to 25123062 reverse strand)

SEQ ID NO: 32641 - DNA, 214 bp, Medicago truncatula
  Intron number 2 from transcript Medtr8g012720.1 (locus Med tr8g012720) derived from phytozome v7.0 (chr-ID MtChr8; po s 2222018 to 2222231 reverse strand)
gggagaaaaagtgattttgactgtgcgtccacaatgtaagttgtctacaaaacactttagaaaatgatttgttttttgactttttaaaaagtgttttatctgaaaaaactgtttataaaacaagttttatctgttttgatttttttaattttgaatataaatcattacttttagagaagacaatataactagtaatcttgatattgtgttatag

SEQ ID NO: 32642 - DNA, 449 bp, Medicago truncatula
  Intron number 2 from transcript Medtr7g108590.1 (locus Med tr7g108590) derived from phytozome v7.0 (chr-ID MtChr7; po s 25612012 to 25612460 reverse strand)
gtttaagcatcagataccaggtacttttgagttagcacattagttttatgttaaattccacattatggttggaaaggcgtgtctaaatgtacacgtgtgtaatattgaattgaatataaagtagactagttggacattctaacttatttgttaggttttatgggaaacaaacaaaacagttgtgaaaatctcttcttggttcttctctccttttcatcggctacagatgtaaagccttcctcaatctacacactttgttcacctttgggaccaaatcactcttagagttggcctttatgttcagtaatgtcaaacatatctttagttggtcgatgttcttccatgggcagaacatacatatgtatgtgcatacggcgtataatgtatctggacattattttgctgtgcagataataattcatttgattctttgccgcagttaccttgtg

SEQ ID NO: 32643 - DNA, 497 bp, Medicago truncatula
  Intron number 1 from transcript Medtr8g089520.1 (locus Med tr8g089520) derived from phytozome v7.0 (chr-ID MtChr8; po s 19271316 to 19271812 reverse strand)
attacagtgtctttgttgttcgcctagcaatcgtcagttaattttttccttctatgatgattaaaattttgaattttattagtgttagctgcagttaaaacttacaatatgttttatgtgtttagagatgttcattcatatttattaatacttgaaaacagccacggttattgaaggattagtgttgagtatgactcatattcgctgataagtgggcagacacttgagaatcaacatgtaaactggactgcagtatttagacaatgttttgatcaacttgttcaatacaaaactaaagcaaacactttgttgtcggagatgtagggacaataggatgaattccgtgatcaatcattgtgtttttgtgcgtttatcttcttacattagtacgggatttgctgttctttctaacaattagagtagaccctttgttgttaagataaataaataaccaatttcgttggattaatcggccatcattttggtctatgtaggtt

SEQ ID NO: 32644 - DNA, 300 bp, Medicago truncatula
  Intron number 1 from transcript Medtr8g133070.1 (locus Med tr8g133070) derived from phytozome v7.0 (chr-ID MtChr8; po s 31567910 to 31568209 reverse strand)
tagcatttgtggtaactatacgtttgatttcaatatgcttgtataatgtagtactagcttatgtaacattatatattttctactttggtgcatgtagtgatgttctctagtagaaaaaatcacacactcttttgtcatcccaattttgttctaaagttttcataattgagttataacaaaagtgtttttttgaaaaatgtatgacattctctttctctaaaaacaattgaagagtagtgattggatttcagaagattattatatatttatttgtatgtatatgtgcagaactcgtctcct

SEQ ID NO: 32645 - DNA, 584 bp, Medicago truncatula
  Intron number 1 from transcript Medtr8g005600.1 (locus Med tr8g005600) derived from phytozome v7.0 (chr-ID MtChr8; po s 337508 to 338091)
aagcttccctacatttgttcttgttgatcggggaggttagttaccctttcaatgttaaatatttgggatttatttagagtttgttttgtttctaaaataattaagttggtaaacttgtacttagttactttgtcagcaagttatcatgtatgtgtgtgatttttgttatggatattttgaatattttcttttgaagaaatactaacaacacattcacacactttatgtcttaccactatgggaattggttcactaaataggagactggtttcatatgattgagtgaattcacataaatttcatctgaacaaagagagtgttggaaagacggtgtttggtaacatgtttgtaaaacttgtattccaatttttttttttgttctatttactttggtaatggttacgtaatgatgaatgtgatgcaacaagtcaaatcttggtagcttttgttcattgtgtggtgatttttcacacaatgatgatatatatcgtctactgtatgctagaaacatcaaaatagaaaggctcaagtgtttaaaacatcgtttttgcaatgttggtagattgttatttcactttaaaggc

SEQ ID NO: 32646 - DNA, 585 bp, Medicago truncatula
  Intron number 1 from transcript Medtr7g110630.3 (locus Med tr7g110630) derived from phytozome v7.0 (chr-ID MtChr7; po s 25795700 to 25796284)
gaacagaacacctcgttcttgcttcgtttcctaaggtaacttcaacctcttcaagatttcatcttttttcacattgcgatctgggttttgttttcgttgatctaatctcttcttatttcataaccccatctgaaaattttcattttttaatgttttttttctctgttttttgaattttaaatgttggtctagtttggctggttgaaaattctacattgtttatgttttgttttttattataattttttaataatatgtgaatcatgatggatcagaatgattcatataatggataaaaatccaagcttgatgatttctttgataaattttgtgttgctcctgttttcctggaagttgatgaaatctgggtttgtctctatttgaatctcatgttgaatattttgtatattgttttttatattattttttatgccactgcttgtaatgtgtgttagtttcagttggagattttgttttcttatgaatatattgctagatcccttaataattgttatggtattcatatatttttttatgcttttttgttcagggtttaatcgaggaatatagacacatatttctcta

SEQ ID NO: 32647 - DNA, 753 bp, Medicago truncatula
  Intron number 1 from transcript Medtr8g047430.1 (locus Med tr8g047430) derived from phytozome v7.0 (chr-ID MtChr8; po s 10633815 to 10634567 reverse strand)
tgtacatttcttcctcgcacgtcgttcctatgctagtctcttttatagtctattcaatgcgcattccttgcttgtagccaccaccaactagttctctatatttctccagttcttcaaaaatctcactcaattttttttcatcaagttttgctttatttctctgtcttacttatatgttagatgctctttaaaagtctcttaaatgttagatctggagttttttccagttgaatctcttttcaatttcctaataaatcaatagtccataaatactattgttgtcctttagagagtttttgtgcacattttgttcatttatagttatttttccactaatggtttctttagtgtggccaaggctaatagtaaaatgaatttttttgtcttctcttttttagttgtccaaacatccatttctttatgcattttttgtttttgtaaaatgatataatggattaacatgtttctttcataattaatcaccaactttctttttgaatagaattagacaatcaagcttgagacatacccatttgtaagttttaaggaaaagaaaccctaagccgaagacaaagagtaaatagatttattctctactctcatttatttcgtctattcccttaaatattggttttatagtttcaattgttcatttgttttgttttatagagattgttggtgttgacttgagaccttggagtgtactaattgactaattttattttgcttgtagattaacaacctagctagtat

SEQ ID NO: 32648 - DNA, 1015 bp, Medicago truncatula
  Intron number 5 from transcript Medtr8g070540.1 (locus Med tr8g070540) derived from phytozome v7.0 (chr-ID MtChr8; po s 13478586 to 13479600 reverse strand)
acataaaaggcttttattggaggaaaagaagaagagtgagactcaatcttttttgtggttgttgaaaatatctgctaaataatatcatagtacagaggttgatcaaagattttctgttagacttggaaatagtacttacaagatcttagtttattggcatggtgatcacgggatgttatctgatatctttcataataattgaagtttattatcattatgatcacaagtttttttatttttatgtttgaatgatttcggatgagttaggcctaaagcccaacttctgatggtatcaaagctcattttatatatttaggtcacctgttatcaaggcatctgtggatgagcaatttaaattctatgctctaaatgtctaatcttgggcgtgaaggagtgtgatgaaaatcccacattgactagttatgtggcccaaatagtaattatgaattggcgggcaacccttatcccaaagctggattttggggttgagttagttcaaaagaccaaattcaaacgtcataagttatcaacttaaaaaacgtgcttatatcagtaatatctaccaactcagtaaagaacacctgatttttcttttcaacgggatattcatggttcttcagaattactaagtgatttacttatccatcccaaaaagcaaataatgaaagttattatctttcaggcgtttcttgacttgcatgagaatctaacctaagtatagttttttagtttgttgctttgagtctgaaattgttttagttacttctcttatttttggttaagttcttaatagagtagtaaggcaaggtgctctccattatgatgactacctagttgatctttatcataggaacttctgcaggaatctttattctaggtcagaatttgatcatgttcaattgtgttatgatttgtgaatgtaggttcagtgttcttctctgtgttcttccttgtccttaaatttattccatttatatcattttttactgaggatttggttgtcaacatttggcag

SEQ ID NO: 32649 - DNA, 823 bp, Medicago truncatula
  Intron number 1 from transcript Medtr7g103610.1 (locus Med tr7g103610) derived from phytozome v7.0 (chr-ID MtChr7; po s 23292713 to 23293535 reverse strand)
ccctcattgtgctccacactgtggacctcaggtcctattaggctaacttaatgagcacgtttaagaggaagtcaaaacattgttaaaattaggccaacatattatacagaaggacaactacatgaaaaaacctgtttgtttgctttgataactcatagagagattaaaggagtggtttgttagcatagaaccagtcaaaagaaataaggaatataaatatttgaagaacttttgaaatataagcaatatttacaacaaactcatcttcaatgaaagtgttttagatctatattcatcatccattatcagttagaccatcaagtcacaatcatcaccctcacctcgcatatcctccacaaaagctttgacttatttcattttccttgttacttacttacttactctctttcatcacgaaaattacagcaaggaaaaggagaaaattgaaggtactcttcttacaaataagtagtacacagccagagaaaataggagggagagagagacttgtattcaccaaattcttgcctaactaatccaaagcacaactctcccttatatgctaatcaggtgctgtattttttgttagcccatctaatctccacaatagttggatcacaagccacctgttcattttctctaacagaatttgatactgtcggcagttggaatattctcattcataacaaaatgcttattgtaacttgtacaaaaagttataggcttaaaaaatcagagcttcgatcctctcttggttttatttttatatcttgttaattgaatccatatacaacgcgcattttcattcatctttagagttgtg

SEQ ID NO: 32650 - DNA, 686 bp, Medicago truncatula
  Intron number 2 from transcript Medtr7g145890.1 (locus Med tr7g145890) derived from phytozome v7.0 (chr-ID MtChr7; po s 34798525 to 34799210)
gggcacgaacctacaagtattttcttctcttcttggtatctatctatctatctcttcatcttacattcttatactataattaactcaaaattcacttcttacttcctttttttctttctttgacaaacaaaagtatatttattcattcattcaaatttttaaaatttacatcaatcaacaacaatacaaatcttaaagcagctaaatcaaaatatgatgaattcgcaacactcaggtttatagcaaaaaacaacaaaaatgcctacagatgtgacaaaataaaagtgtgtggactacccatgcctttggatctgtaacattgaataccccaaattcattcttgaatttgtaaaggacaccaaatgaataaaatccgtcaatctgaaccaaacgattcaaaaattcttaattccttaagccattgcttctgtgaatttaaccagggaacatttgtttgttgttcgcaagtgcctatcactgaaattttagctagagatttgttgatttttgcattattttaatacaactgctatattagtatacattgatgatatatccttaactaaggggtgctgttagaagatattgaagtacttgctacttctggtatgctattcctaactttcttttttttgcccccactatttgtagctgtatacattcctcgagacaacgctggtttgctt

SEQ ID NO: 32651 - DNA, 528 bp, Medicago truncatula
  Intron number 1 from transcript Medtr8g088710.1 (locus Med tr8g088710) derived from phytozome v7.0 (chr-ID MtChr8; po s 18863675 to 18864202 reverse strand)
tttagtggtcttcattctgctgacaaggccaacaagtagtgctataattcatccagctattacttgtttttaactagcctcttaattttctcattaataaattaatatgtaactgtgtggtggtgaatgtgatttatatatgtcattattattatcactatgaataaactaagtttgcttttgttatccttgtggtgggactcttgttgaattttttcctttaagacactaaagtttgcatctacactactctttgctgctggcttccctaccaaaccaatcagataatcaatacaaaatagcatatggtagtacagttaatgtaataatagagaagagaaagagatttaaggatttgtggagaacaataaatttacatgggtcaaagttaagacttataagacggttattttgttaggaatttaagtttatagttcatattgttttcgaataattttgtgctgatagctaggatgtaaaatatctataaaagggcaatccggtgcactagagctcccgcatacgcag

SEQ ID NO: 32652 - DNA, 394 bp, Medicago truncatula
  Intron number 2 from transcript Medtr7g117270.1 (locus Med tr7g117270) derived from phytozome v7.0 (chr-ID MtChr7; po s 27364791 to 27365184)
ctaaatttgatactatctttgagttcgatactcaggtaaataaaatgtttgttttactgatttatgttagattttcaaagattatatgtaagttgttgtgagatttgttagatttgaccaggttaaattggatggttgttttaggaagtgggtaatgataataaaactcttcattgtcttcaactattttctggttttctaacgagcatgagtaacaagtttgtctgctgtgttctctcataaacaattctcaacttggaacaaaatcttcctttcgcaacattctatttaaacaagcttttgtcttgtactaactgtgttagaccgttgttttgatctgctaattttgacaataaactcttatctgtagggccaaatttctagggaatccttg

SEQ ID NO: 32653 - DNA, 444 bp, Medicago truncatula
  Intron number 2 from transcript Medtr8g112760.1 (locus Med tr8g112760) derived from phytozome v7.0 (chr-ID MtChr8; po s 25458976 to 25459419)
atctggtgcaaggcctgctgaagttttgaacttgggtaggcaccacataccattgttatttttcttcttaataggtgttcttctaaattttgcagaattttgaatggtcataatgaatgaagatttagaagggttaacatcgttagaaagttactctgtttatttttctttgattctgtctgcaatgtgctaaattttaagtttattaaaagacattgtttttttttttttttttttaaagtataaaatgacattgtaatatggtggaaaaggaaaagttcttcccataatatcatttattcttttattcatcaaaatctgaattctactgagtgttattgtaaatttctgtataatgtagtttaaaagaaatgaactttaatcaaacttggtgtaattgtgtgacgaccatcactctgaatgttttgtcttctctttcagtac

SEQ ID NO: 32654 - DNA, 697 bp, Medicago truncatula
  Intron number 1 from transcript Medtr8g112600.1 (locus Med tr8g112600) derived from phytozome v7.0 (chr-ID MtChr8; po s 25378973 to 25379669)
taggagatactacagttggtaatgtactactccctcattaaaggaatgtaggccattgtctttttcatatttcttaactaatcgaaatacccgtgctatagcacgggtaacgcggcgcaagcgccgtgcaagtacttttttaataattgttagattgttaagtggacatagaaatttgtagattagccaattttatgtaaatagtttggtagatatgataagaagttaagttttgcagagtaaccaaagtattaggcaagaacaatacaataactttgccggttgttaagttttttatgtgtatgtatgcatatgcatttgtttaaattggatcccggtatcaattatacacgctttggacaattttgacagtataaattttatatagagttttatttttattttttatatagtattttttcataaacttttggttcattttattagcaaatatcataattaatcatcaaaactgagttatcaaaacaaatcaaagtattaggttaggacaatacgataactttggcaatcgttaagtttcttatgtatatctatacattagattagtggtcaaattgggtcccgtgtaacaattatacactctttggataattttggtagtgtaaattttatatgaagttttaaaaaaaaaaattatatagtattttcataaactcttcggctttgtttggcatat

SEQ ID NO: 32655 - DNA, 838 bp, Medicago truncatula
  Intron number 1 from transcript Medtr7g106650.1 (locus Med tr7g106650) derived from phytozome v7.0 (chr-ID MtChr7; po s 24742169 to 24743006 reverse strand)
caagagtttggtaagttaggcaaagtaaacaggtgaactaattaatgtgacaaatcacattgtcacacaccagcctgttcaataattcttttattaaatccttcaaaacacatcattcattttcagataacagtccctttcttttcttctttacacaaccacaccatgaaggtacacgtaagagaagttatggtaaagtagaccttaattcacacaccaatgtttttttctcattaaattaaaattgttttcctaagcctttccaatttttttatgagtgttttaatgcatttgttctattattgacattgttgcgtatctttacccacgtggattatttatctttatccacgtggattatgtttccttgcatctcctagcaagatttgagcttcttactcataaaaaaacacgttactattaaataaataaaggaaaggatgatgatacggttctattttttttttttggatgatatggttctcgttaaagggtggactagtgttcccgtgagtttagatcagtcgataacaatgcataatatatgtaagatatgtgattcgaactcctgacaaaaaaaaaaaaaaagatggactagtattcaccaaattgatttgcaatccatctatcaaaaaatattagtaactaatgcgtataaagatactaacctatttggattgacctaatgatgttggtttgaaattttggagcatgttctcctcaaaatcttaaatttgattcttctcgattataattttggtgagttagtttgacttcctcttaatgccccacaagactatctttttttttttggttacaaaaattttagggtgagggg

SEQ ID NO: 32656 - DNA, 385 bp, Medicago truncatula
  Intron number 1 from transcript Medtr7g138060.1 (locus Med tr7g138060) derived from phytozome v7.0 (chr-ID MtChr7; po s 32688639 to 32689023)
tttcgatcctttgtcccttctctactctctctcaggtaccgattcctctttctttataagattctcttcttaatttcaatttcaatttcaattttgattcccctttttcgattgattgatgggtctttgctggttgaatttatgacccaattaattacggaatccttctaattatttgattgattgattgattgatgttattatatgccaattgctgaatcagatctttgattagtgattagtgattataagagaatattggatggaagactaaggatgatgaaatatttgattttgttttgaaaagttttgattttcttgtttgtttttgaatgggtttctgataaatttaggttttgggtgttgtttgtgtgtgtgagaacag

SEQ ID NO: 32657 - DNA, 832 bp, Medicago truncatula
  Intron number 3 from transcript Medtr7g118310.1 (locus Med tr7g118310) derived from phytozome v7.0 (chr-ID MtChr7; po s 27892697 to 27893528 reverse strand)
ctggacttcgacagcggttaatttctctaatcaaggtctgcattgtgacatagatgagtttttatttttgtccaaagctgattgcttatacaccatataaattctattcccccctcccccctctttaagtctttttgggtgccatctgcatgttttcttcatcccacacttaattcaaacaaaactattgggcaaaacccaagccccacattggatagacaggactcttaataagagtttataaagaagagacactcctcaccttacgagccggttttgtaaggatgagttaggcccgatttcaacatggtattagagcctatcgatcgggccacccaccatttatatactcacaccaagcccaatagtgctggatgtgagggggtatacggggaaaaacccaagtcccacattggatatcggttttgtaaggatgatttaggcccgatttcaacaaaaacacaccaaaaattcatgtaattagaagtttggtctgcacaaaaagacgtgcagcagcacatgttgtatttaaataaaacctaagaaaattaacttaattgttggtacctaattaaataaatattctgcacccacacttttttattattacttacattaaaatgaaacaagtaagaatgggaagcatttcatgcacccatccctcctttattcttgaaacttaattccaactcttgaagattggttcacatcaatttattatttagtggaaggacttatctttattgcatcttgtaactaacttatttttttctgagaaattgcttttctggatgtaggaactcaatagagaagagccttctggtgtgggagg

SEQ ID NO: 32658 - DNA, 558 bp, Medicago truncatula
  Intron number 2 from transcript Medtr8g121710.1 (locus Med tr8g121710) derived from phytozome v7.0 (chr-ID MtChr8; po s 28300485 to 28301042 reverse strand)
cacctcaacaagtaagttattacatagaaataactgttctcgaatatattaataatgaatctttgattcatcaggatcctatgcttcatcactctaattttatattctaaatctaaatttattatcgctatttattattcagttccttttttaaaagaaccacacatggctagaatattcgccacctcatcaaataactctgtttttaaaccatgaaataagcaagtcttcttcattttagattagaagtctgtttggattgactatttgagtttattgatcaacataagcacttgcgagactgtttgagagtaattatgaaaacagcttatatgtttataagcggttttcagcttattttcataagctcttcaagatagcttatgaaaacagcttatacaaaaacattttaactttattttatcttttgttatagaaataattatattttaactagagacagcttacttgaccgagatttcatcacatcagtgttatgaacttatcatctgctgcgttgattatttccattgtaggtgcatatcacacaaggtgatt

SEQ ID NO: 32659 - DNA, 290 bp, Medicago truncatula
  Intron number 1 from transcript Medtr8g144610.1 (locus Med tr8g144610) derived from phytozome v7.0 (chr-ID MtChr8; po s 34978837 to 34979126)
tcaccaagctccgccacatcatcatcgcctgcaatgtactctttctctctctgatttcgatttcaatttcaatttcatttcactttgcttggatttttttagttatgattagtttttttccttttcttttctagaaatgaatagtaattgataaattctactggttattgatactgaaaatatggatgcatgtgaatacaattaatttactgttgttcaaattaagctattgctttttgattctgattacctgatttattattgaacaggttatttatttaataattagg

SEQ ID NO: 32660 - DNA, 786 bp, Medicago truncatula
  Intron number 2 from transcript Medtr8g144610.1 (locus Med tr8g144610) derived from phytozome v7.0 (chr-ID MtChr8; po s 34979280 to 34980065)
actactggtggagtttgcgggtacgactctgtcttgtcttgtcttctggtttttgtaaagatctccataagcacttatggaaaatgagattttaatagatatcacaataactgagttgtttaaatgatagcttcttatacaagttaaaagtattttattaatctcatttttttccgtaaattcacccgtttaactcatccctttagacctataagcttatacggactttttcatgggtctccataaacttattttaacagggaaactcctgttagttagaagctaatccaaattgtgccttttgcaatcattgtatgtgtacaaaatgtgcatcatgatttagaaaattatgatgtattcgtgcctatggttttttgacttaatcttttgtagtttttctttcggggaatttttgtaaataacatggtactcggtgttgaatgtttttgaagctcttaaatttgtatgacctgtactatattttactgaaactaaaatgaaaataaataaaattagcaatttctgtcatcatgcataaatggttgacagatataactgttgaacaaaagtgttgtgtatatattgtaggctgtagcctatggaatttggtcccgggatgaatctaaaacttgttcatagtgagataatcctataggtctagggaactcttatttgaaaccaaattatatagataaaaatgaagttcagatatattgaatgttttgctatcttctgattgtatgataattcttcacttattgttggtcatattttgcagctatttac

SEQ ID NO: 32661 - DNA, 621 bp, Medicago truncatula
  Intron number 1 from transcript Medtr8g145180.2 (locus Med tr8g145180) derived from phytozome v7.0 (chr-ID MtChr8; po s 35238170 to 35238790 reverse strand)
aagatttgaacaaggtaacccttttacctgatttattcaaagattgaatttttatgatatgtgttgtcacagatctggctttttcttccatgtctttgattgaaaatttagggtttgctgaagcaaacgaaaattgggatcttatgtttttatgctctgtttttgtgaaaattaagggtttgttggagaaaacaataaaggggatcttgtgttttgctgttgttgtttgataattgtttcaattaaacctccgatctgatgaaactgtgtattcttatgttcatctttgttgaatttctgtatctgataaatcaacatatttcatacttttctgttgaattcctgagtactatgttgcaatagccatgaaataacagtcacatagcagtgttttttttttgtcagattattgtttacaattgttatcaagttttggagccttcactttgcttagctttgaagtttttatcggatatcatgtttaccatggagtttttaaacctattaagttctgaatttaacaattaaatactaatcaagtgttaattaactgctttgagttggttgtagaagatttcaggataataatatttatattatgttcttcaggaaacagaagcc

SEQ ID NO: 32662 - DNA, 881 bp, Medicago truncatula
  Intron number 1 from transcript Medtr8g008870.2 (locus Med tr8g008870) derived from phytozome v7.0 (chr-ID MtChr8; po s 1104814 to 1105694)
ctcatcttcttctcaatcgcgtcttctgtttcaaggtactgttcactcagctttgattttgagcttataatgattttgttttgtcttgagctgtataaggattttgttcactggtttcataaaaggtgaaactttcaactgaagatttgattttttgagtgaaatacaaacatgggttaaactgttttttagggaaatgaagcttgtttgttttgtaatcgaaatttctagtcgttaaagttctacaaacaaacagtgacattaaagcttgactatggggacgattgttatttgagcttagatttttctctttgcatggaattaattattagtccatatttttcagtggatgaaccgttccaatccataaaatatcactttgactaatcaactttactttttagcaaaatttctatattaatcttcttcgctacagcccggggatatgtgtcaatgtccatttaaatttaaatattttgttttttcaatggaggagagtcaggttaaaagaggtagaggaagacctaggaaaactattagagaaaccattagaaatgatttagaggtcaatgagttatattcaaatatggtttatgatagaacactatgacgccatttgatcctgtagccaacccccacttagtgggataaggcttggttgttgttgttgtattttgctttttcaaattagtcgtggtgtcaatataaagattgtatcaaggattcgtgcttcatagctcttcatcaattcgatgtaaagtgtagttcaatagtcatttgaatccaattacttattctattgtcacatagaatataaattcaagtttcttctgctcacttttctagttacaatatctagcttcagaaccactacaaacaaa

SEQ ID NO: 32663 - DNA, 578 bp, Medicago truncatula
  Intron number 2 from transcript Medtr8g050210.1 (locus Med tr8g050210) derived from phytozome v7.0 (chr-ID MtChr8; po s 11260970 to 11261547 reverse strand)
atcctgagaaggcacagtccagagtaagcaacatcatttattgatagttcatacaatgttttaaaaatcagaaccagttgaaccggagatgtttttccagttgatttgattttggttggatcacggtctagttgaactagattgaatcattgaatagcggttgattcaattaaactggtttttattttctacattgttttattttttttaatttatttatttgtcatccgcttcaaccacggctgaaccaattgaaccatgacctagaagcctcaccggtttgatctccggtctgctttttaaaacatctgtttcatgacttgagtcttatacatcaagtagtggaatctatcttcatatgagggagtctgctttttaaaacatctgtttcgtgactttagtcttatacatcaagtagtggaatccatcttcatatgagggagttttctttcgtttccattgttttaagggtggtgtttgttacctttcacgttgttgaaaatttgagagtagcagcttcaaattactttccatctatgataccaagattaaatcaattgagcttgattaatttgcag

SEQ ID NO: 32664 - DNA, 478 bp, Medicago truncatula
  Intron number 2 from transcript Medtr8g015300.3 (locus Med tr8g015300) derived from phytozome v7.0 (chr-ID MtChr8; po s 2659019 to 2659496 reverse strand)
ctatccttcctcttctggtacgttccggaccttgtttgaagcctaaaatttggtattttgatgtttatacttggattatattgtatcttccattaagttcaaacaaggacttattagccttaccgaaaatgaaaagataatttagtagtataatattataaatctaagtgttctatttgcatgaattacgatagttattcacacgcaaggggcagtgggcacaaattattaacattagttttgatgtttatttgtagaattactgtatataatggagaatcaattacattttaaagtagtagttgtatgaggtctttgtcaaggtagcccgaaatgcataaatgttagtttgcaaatgactcttctggtgtgagtgaggttgaagaaggcttggcatacttgaatctcttttaacagcatatcctagtggtgtgaaattcgtatagttgtatttgtgacactattcttgcaggtattc

SEQ ID NO: 32665 - DNA, 662 bp, Medicago truncatula
  Intron number 1 from transcript Medtr8g015300.3 (locus Med tr8g015300) derived from phytozome v7.0 (chr-ID MtChr8; po s 2659522 to 2660183 reverse strand)
ggaccgcttatacttacaaaacccgccattttcaggttcctatcgatttcattcttcataattgtagcatgttagtttcaattttagatgataatgaataattgaatttcaaactgaatgtttctatgttgagaaatgaggactgttttttgttgctagttttggactctgttttgttattttagtttcaccccttttgttttattgacatgcaaccggaaaaaaaattaattttacgaagaacacataatattttagtaaaactaaaagaattcttttttattcctgtaaaaagaatagttaattttgttaaaaaaaatgtaaatttaactaaatggtatgtgatttctgtgactttaatatgttccgtagaacaaaaatgagttagcgtccgtttggattgagttatttgaatctatctattgacatagcatgtgagactgtttgagagagtttatgaaaactgcttatgacatgtgtataagctattttctataaactttctaggataacttacgaaaatagtttatagcttatatgaaaatagttcgactttacgaaaattgttgttgttgtaacttgtaactgtttatttatttattttttgatattgttttgctagagcagtggaataatttgcagtgggcacttacttcgattcc

SEQ ID NO: 32666 - DNA, 903 bp, Medicago truncatula
  Intron number 4 from transcript Medtr8g092780.2 (locus Med tr8g092780) derived from phytozome v7.0 (chr-ID MtChr8; po s 20093561 to 20094463 reverse strand)
tggagagtagatcgcaaacggtaatatatgttaccattcttctaagcatttatttataacatgctatggttccattcatcatccttttaggcttgtaatttgagtagtctttgtgtaatctgatgaagaactttctcggttttgcattttttgaccctatgagtatattccacttcaagctcgtaggcacatcacttgccctggggagcaacagtgtaaatattgaaatgattgctacatatatttgttgaacaattcattcatatgctaaatggacaactcacaagttgcaaatatgtactactgaatagcttaatttttgttacttctatttaggtttctgcttttggttatttgagggagattttttagtagatttgcaaagagataaggatacttttgagcttatttatttctgtttcttgtgcctcgcttctaccccctatttaaaaagaagattttaagaagattattggttatttttttgtctttcaatgttcgctacaaggttaatgccccgaagtactctcctgagttgttttgttatttgtctttcaatgttcgctacaaagttaatgccccaaagtactgagttgttttgcaactacttgaatatatagcaacttttagaaacttatattaggttaagttgcagaaattgtggacatacatatatgtcaagtgtatgtggcagaaacttatattaggttaagttgcagaaattgtggacatacatatatgtcaagtgtatgtggcagaaacttatattaggttaagttgcagaaattgtggacatacatatatgtcaacttttttgtagtttttctatgaaggtgtgtccatattcatttgatgtaatacattcttcacttcatcagctgatgcccaaacctatatagggat

SEQ ID NO: 32667 - DNA, 1042 bp, Medicago truncatula
  Intron number 3 from transcript Medtr8g118700.1 (locus Med tr8g118700) derived from phytozome v7.0 (chr-ID MtChr8; po s 26727697 to 26728738 reverse strand)
ctttattgaaggctggtgttttgtatgtcttcttcaattactgtttagttatataatgtctgtgtatataagttttctttatatgtttgttgtagggggtgaatctgtagcttatataagataagtaggttcaataagtagttacttgtttagagcttgttaactgttagaatagaagaaaatatctcatcatatctttgatattatattagtatgtcaagttatttcctaaatcggtttataatcgtagagtatcttatattatctcttaggattagatttatattattattatttgttctcgatttaggactgagtttatgtatcactataaatagagactagtatttactatttagtcttttgtataaagtcaacatcaagcatatttcactataataatatttcttattatttctctcttatatttatctaaaatcccacaacttctagtatggtgtcatagtctatccttgatccattgggctacctgtcaggacactcgggtcatgcatgaaaatgtgttcatatagatgagatgaatacctagccactgtcccactattggtttttggtgtgggccgtttcggtctgcaatccaagatagctaactatgttaataaatggacttttcaaagacgctcaggcaccgagcgttaggccctagtttactcagtctagtaaaggctctacacctcagtctaatatgcgtaggaagattaatctacctaataattgcacttgaccctcttccaccttgaaaccaagatatgacccttttcctgttagcattgtttcatttactcctctcagcattgttacatttactcctctatgcatcttggttaatcctttccattatgaagtagtgacgtttgaagttgttggttagctaataagctttggcttctgtatgtttacagtaattattcgtggtgcataaagaaaattttctatcctatgtggttatgccaaaatattttttgtacttatatatttaatatggtcttcaataggtaccttttgccattgctgcttcagt

SEQ ID NO: 32668 - DNA, 845 bp, Medicago truncatula
  Intron number 2 from transcript Medtr8g138260.1 (locus Med tr8g138260) derived from phytozome v7.0 (chr-ID MtChr8; po s 33276340 to 33277184)
ctgttcttggtaacaggtagggttcttctgccctctctgttgctttttcaaaacatgaaatcaaatgttatgattattcattaattcctcatttcaaattaatctacatactaagctgaacgtgaaatttccaatttactagctgtttaattggtaattgttgatagtatattagcagtagataattaagattataccttctacatgtattataagacttaattcaatgtgtaaacaagcatgaaccttttcaaattatatgtgtgtaagattaagtttgtaaaccttgttaacattctaaaaccatttatatataaatgctaaattttttaatgaatcctttgttgccgacaatgtcttctcacaaaaaggagcaagacaaaataaaatactagtattcttatttatacatagacatgtgatttctgtccaaaaaaaataaaattagacattgtgatattgattaattttagtttatctagtgacataaggatttgtgaaactgtttgagagatctaatggaaatagcttatgacatgtttatagactgttttcaactatttttacatgcttttccaagataacttatgaaaataatttgactttttttttttgttgtagaactaactttttgaaagaaagagttatagaactatcttgtacacaaatacttgtatgataaatagacacttataatttaattaagttgtttaactaaaaaatttatcataaaaaaaaaattcacaatacattgaaatttaatttggttttatttactttaactacttagaaattgttgttatggtgtaggtggtctgtaatagctggacatttaccaggacgta

SEQ ID NO: 32669 - DNA, 825 bp, Medicago truncatula
  Intron number 2 from transcript Medtr7g140230.1 (locus Med tr7g140230) derived from phytozome v7.0 (chr-ID MtChr7; po s 33732406 to 33733230 reverse strand)
ccaaacaaagtgcttcaaattcatcgctgatcacggttagtttctatcctttttcttccactgttccatcctttccttcttctacttgatttcctttctttcgattttttcactgctttcgattcttcacaaaaattattgcatctcgttataacttcgttttacctcagaaccgttgcaaatcgcataatcttatgatcaaaccagttaatttgcgtgaagaattatgttttctggattattttttttagggaaattttttggtgtattcaatagcttcatcgagctaagtttgctatgtattgtaggtttatgttccatgattgattaagtaactttgaattttggcttggttttcattgagttatcttcgtgaattttatatgatagtgttgaaatgctgagttagttgatcacgaacttgagaagaccaaagttaatctcatatcataccagaaaatttgataatatttaatgtatatggttatgccttgcacatttatgtataactgtgcccttcagagagttctattgaaccgtgtactttgttggtgcctggtttcgaaccaagtaccacaaggttgaagagtaatctttcaaccaaacggtctattggaatccggctattgaactgtgcacttactttcttttaagtagttggtcttatttcgtaaattacatcgcctgaagttttattttccaaatgatttttttatacagttgaaaatgttctgaagtggaattccttatttgggattattttctttaatttattcgtgggaatattatttatctatgtaatttatgacttttatagtttccgca

SEQ ID NO: 32670 - DNA, 945 bp, Medicago truncatula
  Intron number 1 from transcript Medtr8g106520.1 (locus Med tr8g106520) derived from phytozome v7.0 (chr-ID MtChr8; po s 23900251 to 23901195)
gagaaggtgcaatttgcaagaagcgcttattttcggtttcgattttcttctttttttcagtactctgtttgtttaaagcgacgtcgttttgtgatgggtgtggcaaagcaacggcatggattgctttgaagtgaggatatcactcaccgtcaccgttactgttacgtggatgtcacttattaacatttttttataatgatgtcttttgttttgtataatttctttttatgtttaacttatactagaattttttttattatttgattatgacttttttttataacatatgattatgattactactatttataatgactaattgctcattagaaaacaatcacaatgattagcaagcatgttgttggtataacttgtgtataaacgaatacttggttgggaaaggagaatttatgtttaacttcaagagcaattagttgttgttgcacaagtgatcaatattcaaacacttttttatagtgaggacaaaagcataatttatataatatgttaataaaaagtattttcaaatttttataagatagtagtaaaataggataaaaaaatattaaaagcataatggaagtcttcattattgatgttcttacactgttttgataaaatggaaggaattcgcttatccatactttacatacataacgactaattagtggtatgaattgtttttaatttcactgggtgatgctaattaattaagctgctaaacatctggctgtgttggcttgccgtatttttaattccattttcgtgagtatagtatttgaaatatttgatcattgagggttgttatgctggcttgtgataaaggtattattcattcattcaccaaacaataaaataaaaagcattgtaccaaaaaataaaataaaaaaataaaaagcttatgataaagttggataggatagaacaaaatcgccgacatcaggt

SEQ ID NO: 32671 - DNA, 812 bp, Medicago truncatula
  Intron number 1 from transcript Medtr8g008970.1 (locus Med tr8g008970) derived from phytozome v7.0 (chr-ID MtChr8; po s 1135807 to 1136618)
atataacacctgtacctggagctctcctagttaatgttggtgatcttcttcaggcaagttttatgcattcttatgtgtatatttttccttaaactattagtaatgtactatatttacataccaaaaagatagatcatatatcgagaagtgtgtacctgagttttagaagtagagtatatttctttgccgtctaggttttcaactttggcttaccgtctagcgagtaacctttcaaataatcaaactgccgaagcaaagacctctcatcggacatagtagattgaccaaacccatcatagtctattaaaaatctaagataatgataaaaaaatgaatatgccacttattgagcaaccagaatgtgtcctgcagtaagcgaaacagacaccaaaattacaaaaataggacacaccatgcaaactaatttggctaataaaatttatcatgatgctattttggttctttgtaattaatcaagtttcttgcatttttaacttggtttcaagcatatagcatgccttatcttgcatcttatttgaggtgttatgctacgatttttgtgtcttcttctattgcttacttcactagtaattttttactagttgatcatatactggatctctcaaactttactagccatttttagtagaatatagtgatacattctctatatagagatagaacagttgattcgattaggtccgatcgtgattgaaccaatattaaaccatgacctaaaggtctcattgaatggataataggtgtaaacatatatctaattatttgattgtttgaattgtagcttataacaa

SEQ ID NO: 32672 - DNA, 912 bp, Medicago truncatula
  Intron number 2 from transcript Medtr7g124000.1 (locus Med tr7g124000) derived from phytozome v7.0 (chr-ID MtChr7; po s 29027938 to 29028849)
gttttgttgcaaagatcggaaaggtcttttacgtaattaatcttgggaaactccatttttgaatttcaaaacttatatgtgtttgttttccgattaaattgaattgtattataattgattttatttaatctagaccatcaaattgattttagtgaaattatagttgttgaaatgaattagaattgattttgaattctatcaaactaaaccctcttgggttggtcgggtgatgttggcttgggtctttggagtgtgctccaggttcgattctccccgggtgccagttttggtgtgttagtttagcttcttaaaaaaacaaaattctataaaactaaatttagtgaagatacatgaaaaattgattatgtctccagacttcaatttgaccaagagtgagaaaaagtagttttgtttctgtcttaacctatgattcatagaaaaatggtcacaagtaatccatagtttggctgagaccttagtaaaacctagccaaagattgtttcaatcatggatcaaactcacgtgctctagaaaaagtagattttgagttgttttgaacaatttataccattctatcaatcaaacgtagctttcaaagtgaaaacatttgtttcacttctaactcaattgcaacctaataaatttaaaaagatgaatttttttttcattatcaaattcgtcaagcatgtttttagttttgctctcacagtcttgcagattgagattagatttaggatttcatgatgatatgtttttcaaactttccaattctaaagcttcattgtgtttttttgtagattgctttaaattttgccatcctttatatatagaatattgagttttgttggttatgcttgtagtgtgttattgatgggttgaaaaactaactgaatgtctttacaattgaatcag

SEQ ID NO: 32673 - DNA, 930 bp, Medicago truncatula
  Intron number 3 from transcript Medtr7g133970.1 (locus Med tr7g133970) derived from phytozome v7.0 (chr-ID MtChr7; po s 31516391 to 31517320)
tgcaacttattaatcaattgaaggccaaacagaaggtaattttgaacagtgaaacggttatagcgccaccaagcacaaacacagacacgtcgacaccagtaatcatttgagtaaatgatttaattatacaaaaatgccgtgtaagtgtctcgtgaaatgacaacaaagcaatgctaagctatgtctttgtctttggtttatgatattcagctaatgatttggctacactgactatcttattttggtaaagggccaattatattttgttgaagaatcattgaataagtttgaattgaaagtacggtgtggcttaagtttagattggagttcaataaaatttatccttcatataaggggggagagagtgttctttgttttagatgcctacatacatctatgttttttacttcattcttgtgttcacctaagcatatatgtttaacaaacatatatttgaatatgtatatactctttgtttatgtatttccaagatttagttcatgacatgccacgacagtgttgtttgatttttgtagacaactccactttgtcgaaataggctgttgttatttcttccatggcattttttttttctgtctttaggtggtttacttcttatttacattacctatgtgatttatttaccatgtattttggagttctagaaataagattgaaggtgtacataatataggtttttactttagaagttaaatttcggcaattagggctgtctgtaaagcatagctcaactgacaatgccgaaattgttaggttggacaccttcacccaggttcgaacccgggaccttgcagttttgtgcgagtatcagtgccactttgtctacagacaaaaaaatagtaaaagaataatgctgtcgggtttcttgaatatcatgtgatacaggtttttaccatctgcaggaaattg

SEQ ID NO: 32674 - DNA, 850 bp, Medicago truncatula
  Intron number 2 from transcript Medtr7g103850.1 (locus Med tr7g103850) derived from phytozome v7.0 (chr-ID MtChr7; po s 23404566 to 23405415)
aagtcttttctatccaacggtgactccactgttagtcatactttttcatgctttgtattttcgccttgtttggataaacaacttaatttgaagattatagcgcttatgtataagctatttctattataaaatataaaattaagttgaattggttttgtatatgctataagctatcttggagagcatataaataagctcaaaacaacttatgaacatgtcataacataagttctcccaaatagtttcgcaagtgtttatgtaagtagataagctcaaaaaagtcaatcaaaatgtgccctttgtaacactgcattagtgttttttgggactgcaaaatgaactgtttttaaatatacgaacttgctgatttgaatatgtttatgatagaacattatggcgtaatttcatccatgtaattgagcccagttagtgggataagacttggttgtttacttgcttttgtaagctttctagcactatagcacagtacatcataagacaagaaactaggcggcactttgtcagaagcaagagccttatattgccatgcaaaattgtgcttttatgtcctttctctccatttccggtgtttttagcaccttagacattatgagtgtgttcaacgtttctaagactggaagcttcaagttctttagtttttcataaatcattatccttaggctttgtttgcgagtttggaggggaggggaagggaaggctttgaggggtggaaaatatgtgggaaaattgagaaatcttttaaattttttaaaagagtagttttttagagaataataaattaatgcatataaaaggcaacctggtgcactaaagctctcgcatacacagg

SEQ ID NO: 32675 - DNA, 904 bp, Medicago truncatula
  Intron number 1 from transcript Medtr7g104680.1 (locus Med tr7g104680) derived from phytozome v7.0 (chr-ID MtChr7; po s 23816823 to 23817726 reverse strand)
gtggtgagtgtggaaacaagtattggaatcatgggtactgaattggggatgatttcattttaccatgggtcttcaatgaaggaaactttgtcagctgtgttcttcaaacggggtataagggaccgcaaattgaagcaaaatttattctttaacaaaacattggaaccagcgtttttattttttatccttttataaaaatgctaacctgtgtacacaaaggaacctaaagtaaaaattctgccttgaaaattctcccaatgttcaaaaagtttaaaattaatgtttttcattaaatatttaccatttatgttagcatgaccctttcttttatttatttttaaccatctataatcaagaaaatcaaacagtgtacctcgagtttgaagaattacttttgggtttagagataaatatggagttgaaggacgatttttgggtttgtgaatattatttcaataattaaatattgcataaaatagtattatgaaataaacaaattagttctgacatagatattaaatgtatctacgtaagtgctgccacatcattattgacaaggtacatacacaactttgataatcaatatctttagttgtctttggtaaaaaaattattaaaattagatatgtttataaatattcattgagataagctgaacaaaatcttatatattaacattagtgtttatataatagttaaaaaatatacttaaaataagtcttgtgaataatacatattatcaacgttaaaaaagaaagaaagaatagtacacattatcaacttgtgacatgtatcttataagttaacagtttgacgttgtcaacataatctctatcgtaataaatatcttatttcaattgttttcaattttcagattaaaaatctatatcctgaacattcacat

SEQ ID NO: 32676 - DNA, 620 bp, Medicago truncatula
  Intron number 3 from transcript Medtr8g093600.1 (locus Med tr8g093600) derived from phytozome v7.0 (chr-ID MtChr8; po s 20630527 to 20631146)
tggtgtgtcctctgctttggagactcagaagctaggtagatatttatttatttatttatttgtgaaaacatgaaaaaaagtgcaatttttgttttcggggttgtttttttgttttgtttttttgtcatgtttgatgtggttaaaatttgatactaacaaattcaaaattttgtttttggtgttattgtttgtttatgtggtctttggtgtttagtattttttgtctggtaatgtattttgttgtgacttgtttttgtgagaaacaggatcaagtgatctgagatttggggcatgctaattaagtaatgaaaataaatcacttaaaaaggtgttttttgtaattgtttgatctaaattatgcattggttgtcaaggatctcaaaagctaaaaaagagaagatttgtttttaagagtggaaaaactattgttttcttcattactttacttctgaactttaatgtaacataaaagaaaggaaccaactttacttgtctatgtgttatgagtggttgcttttgtttaaaataatgatgttgttctgttcctgctttgcttttccttattctatgttttgatttttgcagatttgccagaaaatccaccacaaatcatagaggaa

SEQ ID NO: 32677 - DNA, 464 bp, Medicago truncatula
  Intron number 4 from transcript Medtr7g107130.1 (locus Med tr7g107130) derived from phytozome v7.0 (chr-ID MtChr7; po s 25002217 to 25002680)
ccatcattcttcaattgtcactgagcctgtcacttgtatgaactctttttctcttcatttttgcatgcttctgtttactttctagacgcaaaaacaaaaaatattttaaaaagtttatgtttattttaaattgttaacaaggaaatgaaagattcatgtactcaatatttgtaatatagaaaggtgaaaagcaaaataggaataatgcattttcaagaatttaatgaaacagtactttgatccttccaaaaatatttaaaatgctagatctgttttccaaacattaagataatataaaatattatattgttattattggttgagatgaaagaaaaaaaatcataggaagcaaggactttaattcatttttgtccattacataacaaaatttcatttggaagtaacgttcttttttttttttttggacagctgtggcacacccatttgccgagcatttgtcatat

SEQ ID NO: 32678 - DNA, 736 bp, Medicago truncatula
  Intron number 5 from transcript Medtr8g109660.1 (locus Med tr8g109660) derived from phytozome v7.0 (chr-ID MtChr8; po s 24654115 to 24654850 reverse strand)
ttaccgacaaggacaaagctgctgctcatttgaaggtttgtatttctttggctacactattttgttgctgattatttgtttactaaaatttgagctattattttcccaaatgttgcacataatagttgatattattactaaaatttgagcttattttcccaattgctgcacatatatgttgatattattactaaaatttgagttattattttcccaattgctgcacatgtatgttgatattattatgtggtgcatgttttgtttatatctattttcttaacatgctcatggttttctcgtttttttgcacactgccataccatttgcctcttttaaaacatgcatgtcatatcattattcagatcaatgtggcaatcagtgttcttaaatagcagctatagtggcgctatgttgctatggcgtagcggactttggacgcaccactattgttctgcgatacactgtttagtattaaatgttggtctcatagctgctataggggcactgtatcacaattgcgtagcggagttttaacaaaccgctattttcagctacttgcaatattacaatagtttctagcaggccacaacttgcaatgtattattaatatcttctatttactgactcttacggatgttctcattgattagttttgtataaagtgtagtgggaatctttatgtttttgtttgttttatctagggtggtgccaagaaggtcatcatttccgcccctag

SEQ ID NO: 32679 - DNA, 793 bp, Medicago truncatula
  Intron number 1 from transcript Medtr7g133090.1 (locus Med tr7g133090) derived from phytozome v7.0 (chr-ID MtChr7; po s 31028879 to 31029671 reverse strand)
cctttttttctaaactccctgatactgactccgaggtgtgtcaaacatatttgaacattgtatcttcctatgagttgttctccataagctatgtacagggtgacacaaagttcttaaagaatattgcatgctttgtagcttgcaaacaaattcataagatttgagatttgagagataatcttgttccttctgtagtcgttgaagcagcagacgcggaggaatttggtatgcctttcgttctttttttaatttattatttgcctttcattttttcaaattacttgaatataattctatttaccgtatgttacttctatgaatgacatcgacatcaaactatcttaccgggaatgaaccatatgatgagcaacaaccaatgtatgtaccatttgaattggtgaatcgtgtatcaaacaacaggaacacaatttactattactattaaatagtagatttttcttgaaactagatacaagcttgatccaaaaattggtacataacttggttgctcctcatcatatatggttcattccctgtaagatttcgtttgatatcgatgccattcataaacgtagtatacgcttaaatagaattttacattccattaattaaaaaattgaaaggtaataataataaaatgaatagaaggcatgaagttacctaattcctccacgtctgtttcttcaacgacgatagaaggaacaagattatatgtcaaagctccaatcttatgaagttgtttgcatgctacaaagtatgcaatattctttaagaactttgtgtcaccctgtac

SEQ ID NO: 32680 - DNA, 895 bp, Medicago truncatula
  Intron number 3 from transcript Medtr8g025850.1 (locus Med tr8g025850) derived from phytozome v7.0 (chr-ID MtChr8; po s 5390637 to 5391531 reverse strand)
acgaaaatgtaaggcacttgtttcacaccattcatgagttggggaccctcttttgcgttatgttttgtttcttcatttccttgaggggagagaagagaagcaaccttaatttaaccttttcactttcacattaacaattttagtttatgactctgtcttttcagttttgttatttatttttattttattttaatgaatattgaaactgaattagggatataaggttgatttgatcgttaggtggggagattgagaacgaaatttccctcatggtcatatttgtctccacgaaacaatgatatggtcaatgtcggtacgacgaaattaagaaaaaatataaatgagttaagttttgaggtatacatgtaaaatgacactaattatgtcactattatagaccttaagttaaagaagacaatgaacttctacctttgaataaaacttgtatgagtcttcattcaattattcataatgtcacaattttttttcatataattaatcatactatcaaatttgcatgatgatgtcacttttgtcatgtcatcaacagtattgtcatgtttctgatttttgcaccgtccaattatttttcttctcctctttcacgtgaaaaaaagagatatcttcttcaagattagtaggaaaacattttccacaacaaatgtcttttcccaaaggaggaaaaaaaaatgtttttcacaaaagcatgcattttcttctaaattaagtcaatttatgtgtcacatagcacatgtggcatgttgtgtatatgttttcaataagaggcaataattcatggaattgaatcttgtttcaatcaaatagagaggagtattctcgaaccaataattttgatgtgctataatctaagaaaatgaattttgttttgcagggt

SEQ ID NO: 32681 - DNA, 316 bp, Medicago truncatula
  Intron number 1 from transcript Medtr8g025850.1 (locus Med tr8g025850) derived from phytozome v7.0 (chr-ID MtChr8; po s 5391843 to 5392158 reverse strand)
cttataagaaacttgcactggttagaaatgcttatactttctataatctttttctttctacaccgtctctgtttctattctaaccacccttttttttctaaattttattcacatgggtcatctcaaaattagatatatttttttcatggttgaaagaaccctcaatttgtttttttttgtaccatgaaagttatattttgagtcctatatgtgttgggaaattgtgaaagcaagatattttggacatgaattattgttgttatgatgaaagatggaattgtttagaaaagaaaataatttgattaaatggacagaa

SEQ ID NO: 32682 - DNA, 395 bp, Medicago truncatula
  Intron number 2 from transcript Medtr8g148220.1 (locus Med tr8g148220) derived from phytozome v7.0 (chr-ID MtChr8; po s 36629863 to 36630257 reverse strand)
gaagcattgaccacatcaattctcggtaaatttctatcttccctatttttcttttttctaattagcttttatgcataatattatcattctttacagatttcaggaggtaaaattatttgttccttttgcaagtttacatgtcaaactgttaaaattttgtgagttgttatcccaatatcaatcttagttgttaaactacttgattttgaggggtgagtactttagtagggttagaatcaatagtagggataaaatgcattgaaggtgtttgataaatgtccatgagaaaaatatttgcttttgtttgttatactattctctcgtgaaaagatgatattattaacatatactattttctcattaatttcatcaagtttacattgtagagacaccaa

SEQ ID NO: 32683 - DNA, 558 bp, Medicago truncatula
  Intron number 2 from transcript Medtr7g143030.1 (locus Med tr7g143030) derived from phytozome v7.0 (chr-ID MtChr7; po s 34228274 to 34228831 reverse strand)
tagatcaccctcttttaaagaatcacaaaatccaggtatatgtttttatcacacatatggttattctacttttctttttaaacttgatctacattttattttcattttgtactagcgtttcctggcattccttaatattataaatttgtcccctctaaaatgagtagttagtattaatcaaaaaagattttatatttaatttataattttgctatgcatgtctaatttttttttttttttttttttctgttggttttcggactccttcgtaatgagttgaagcagtccttatactgattcatataacatgatattattttccaaaataatgtcactaacttgttttcaacagataagataatattggttatttcactttttgatgaattatatactatgaaatatatatttaaataccaaagcaaaacgttttctattgatttgtatttatttattggtttgaaagggaagagtgttgaatccaattaacttgactcctagggttgattagtttttgttttaatactaaaaatgtattaacagaaaagaccaacgacg

SEQ ID NO: 32684 - DNA, 323 bp, Medicago truncatula
  Intron number 2 from transcript Medtr8g146540.1 (locus Med tr8g146540) derived from phytozome v7.0 (chr-ID MtChr8; po s 35841606 to 35841928)
accaagagaaatatataacaagtataatgaaacatgtgaagactgtgtcacatcaaaagtcctaactctctcatttgtttcgctaatcatatcatattcatcaaatgctagtgattaattgtcaggatagccatttgtttatgaatcgtgtacaacaagtaaagaaaattcaaagctactgtgtctgtgtgtccaacatactaaactgtagttgttttcttagtcacatgtagtcatgtatcaatggtataggtactacattgacatgattcattatatgtttttcttattaataggtcttccatctctgcaagaaaagcaag

SEQ ID NO: 32685 - DNA, 441 bp, Medicago truncatula
  Intron number 1 from transcript Medtr7g092480.1 (locus Med tr7g092480) derived from phytozome v7.0 (chr-ID MtChr7; po s 20368536 to 20368976 reverse strand)
aaagtatatttttcttgttcctaaaatatataagaattttccttaaaaaaaataaaataagaatttgttccactaatccctaacatcaaagactaacactacaaattagacaccaagtagaagaatgattgatacttagaaatattgagtgtttattcttatcttcatttcttatttttgtttagtttattggctaagtgaataaataaggtgtcaggggttcgaacattctccttacatattttacaaatgttcacgagaactttttatctctattttgttttttagttgttttgtggatcaatctctttatttgtcaacccactttatttgtttttttttttttttatcaaactttatttgttatttgtgacatgtgattgtcgtgattacaaaataattgtaggtcgtcgattggacaataaagatttggcccaaatt

SEQ ID NO: 32686 - DNA, 670 bp, Medicago truncatula
  Intron number 1 from transcript Medtr8g086500.1 (locus Med tr8g086500) derived from phytozome v7.0 (chr-ID MtChr8; po s 17739015 to 17739684)
aggaacaggttgttccttaattttcataatgttactgttttttcaactttttcttatcttgttatttcttcattatgcttataatttgattggattttttttaagtgtaatgtgattataccaacctgttaaggatttagatgttactttatggttttgtcactgtttgattaattatattttgaagaatcatcttttctaattttcatgcagtttctgtttccaaagagtattttagcaagttataactaaaaagtagttaaatacaccttgatgtacatgttgctaaaatactcctaaaagataagtaggtgtaagttagcagctccaataggaatttgctagaataaactcacttattttttttagatggattatgttagcaattgataactaaaaagagttggtaattaatatttgattagtttagtgtaaataattttgctttgtgtctacctgaatagtaaattctatgcttggataaccatgcatcacattattctgatccttgaggtgtcaacccagcggtaaaagtttgaacttgtaacttcaaaagagacggagttcaaatccccttagagatagtagtaataaccattattgccatttggatatgaatgtcttgtattaattgtaactcattctgtggtttgtgatcagaataaagtaa

SEQ ID NO: 32687 - DNA, 777 bp, Medicago truncatula
  Intron number 1 from transcript Medtr8g105410.1 (locus Med tr8g105410) derived from phytozome v7.0 (chr-ID MtChr8; po s 23280031 to 23280807)
tctcgcctcgttgccagtgatccggttttttttcttcctcaactcttcaatttcgtccttctcttagcttcttgtgtcttcatatttttaacaataacaattcttattcattcattttacggatcctagagcttctgatttattttattacatttttatttttatttgtgaaagtatttaatttaattcatatacactgtgtcggtattaagatcattttaatcataattcataactacttctaaattcacatttgattcatcgttacacttataaccgacagtgtatcaaaattgaataaacaacttatttgtagcttatagcgcaaacacttatcatgattgtagaatcttacataatctatttccatagcaattgtttttgcgtatgctataagttgttttcataagctttctggaagaacttatgaaaataagatgataaaagcttatgaaaagtgttataagctgtatttgtaagttctcacaaaacttaagccattagatacactcaaataagttaatccaaacaggcccttagaatgaaattggcattgctctgctgctgtgatgtgttaatgatagtaaaattgattgaaacaggcacttatcatactaaaactgattgatgtgttaatgtttactgtataacttgttcctagcttcatgtacttgctcttttgtgcgagtttgtaatacagtggtgattttttaattttaataagtgtctgaaatttttgattgtcatgtgtaggcatttagaaaggatcatagaccc

SEQ ID NO: 32688 - DNA, 946 bp, Medicago truncatula
  Intron number 3 from transcript Medtr8g026500.1 (locus Med tr8g026500) derived from phytozome v7.0 (chr-ID MtChr8; po s 5698987 to 5699932 reverse strand)
acataataagaagcgcttccgagtcttctgcacaggttttttttttctctctttctaaatgactgaatgcatgtttgcacattaggatacattccataatgagtggttcacattttataccctgttttgaatcttttgataatggcttacaagtcatggcttgatccaattgaaaccgtctttttcttacttcttctaaaactatggttgaggctcaatatcatgttcagataccagtcaatgtgattgtttaaaacaagtttgtggatggagttcagtttgcttgaaatccaaatatgcagtgaatgtgatgaaattcactgtttgttaggaacgactaatgagttaagtgaggataaaacaactatactagtaactagactcatttaggcttttttcaagagttagaagggaaaggaagtagaggtctacgggggaggatgggagagaaatcgctcatctaatttgggagaatgtttttggaggggaatgaaagacttatgaccaatattttatgtttacggtgtattataagaaggatagtatttgatcatgttttaacctttatgtcacttcaatttccttaacatctcatggtctcccctctacggggaaaattatgagttttagatacaaacgactaaacactaaccccaatttatagggatacaagactcctaaacctaaataaataaggaaatcaggaaggaaaaaaatgatcaaaactaagtaatatagatagatactaatcttagtaaatattctaagataagaaacacatcctacaagataaactttagatactctaacatacttattaagatattataagatattttcatatattaacatattttcactgctaccaatttgcgattcaaacttcttaactgttttatccaacattgcagaggggagaccagaccgaacaggtttaaggctgtcc

SEQ ID NO: 32689 - DNA, 649 bp, Medicago truncatula
  Intron number 2 from transcript Medtr7g138020.1 (locus Med tr7g138020) derived from phytozome v7.0 (chr-ID MtChr7; po s 32655511 to 32656159 reverse strand)
ccggggatccatcaacggcgttttccgtctttgcggtattactttattctttggtttgtttgttccttgagttactttgttttagtgtttagtttaatgtgtgaagagagaaatatttgagttttaagaaattgaatgtagcgtgttagttgagagttgagtctgagttggaagttgtttctgcatagtggagatacatttgtctttcttcggttttagcatctgtttagatttgcttatttaccggcataaacacttgtgagactgtttgaggcattttatggaaacagcttgcgacatgtccataagctgttttcagcttaatacgacaaactctccaagatagattatgaaaacagctcttagtttatatgaaatagttcgactttaatttatcttttgttatggaaatagcttatacataaacacttataatataggccctaaatgctataagcacgttatcaagttgtttatccaaacaggacttagtagatgtcaaacaaggattgaagcatattatttttcttttcttcacatttataagtagcaagtggggcatcaattaattcctgcaatggttatgatgttgataaggaattcttaattggcagatttttgacgggcacaacggtatatcagctgctat

SEQ ID NO: 32690 - DNA, 710 bp, Medicago truncatula
  Intron number 1 from transcript Medtr8g138700.1 (locus Med tr8g138700) derived from phytozome v7.0 (chr-ID MtChr8; po s 33609462 to 33610171)
aaggagagagaaagggaggtggaagtgtaattcagtgttgagagtgcatgatattagggtgctcttattttgatctaagggtaaaaataatacttttccatgatggggaattctttccctcacccaccctaaatgccaccaaaactataacaacatgaaaaatgtttttattgacttttaccattgggaaaagataggtagaccaatcttttggatacaccctttcataccactgctgatgtggcataggaattttagtagtttcacacacttatttttctgctgcactaatctctgcccttagattaatctattggctatgatataagattaaattaaaaacataaaacatggaaaaaccatgttcaactctttcacttttctttgttctttcttctcctcgttttgcagagttttaaattgtgttgggttgatttaacaagctttaccatcaataatcaatatcaatatcaaactcaaaatttgcatatgttgcataataatctcaatagttaacaaaatgaaaccccaattccaaaagaattccaccactatctatgagagcgctcaactactgtaaatggattggaacaacaaaaatttgagatatattgcaataattttaattttgatggatatagtaataaagtagtgattttgggatgttgatctcagatctcagttgggttctgtcggtgagcataaaagaa

SEQ ID NO: 32691 - DNA, 830 bp, Medicago truncatula
  Intron number 1 from transcript Medtr8g120710.1 (locus Med tr8g120710) derived from phytozome v7.0 (chr-ID MtChr8; po s 27701302 to 27702131 reverse strand)
acaaggtgtcattagttcatccaccaaagaaacaggtaatgtgcattatttgatatgaaattcatttttcatgttaattccttaaattgaatgattttgttcaccataatacatataaatttgtgggtctaattgagcttaattcatgagggtttctaatgaaattaaaaaggtctcataaagtgcaaatattggtttgttcaattgaatttttcctagatattgtacaagtttagtatcatctcatttactattaattatattatattatatgacatgtttgctacactttgatgacaacaactctggatgctaagtttaaaactttcttgaacaataatcccatccatgatgcggtccaacccccttcacgcctgacactctttggacttgatgtgtggataggtaggtggcccttgaatcaacaagctctgatacaatgttagaaactggttgggcctaacacaactccaaaaagtctgcttgtgagatgaggggtgtctcctatttataaactcttatcaaaaatcttatctatttgatgtggtacttgggtttttcccgataattttgattgcaaggtgactaatttttatttaccataaggaattgaatacatccttatatatcaaaataaagttgtttactcgctgcatcttaaaggcactagtagtttgctcaagttccttcatgaaaaaactcaaaacaccagttttttttgctgagttctcaagttcagcagggactaatttttttcttcccttttttgtactaacgaatgaaaaataattgcagggtatcttcaagacttggtgtacaaattgagtgaa

SEQ ID NO: 32692 - DNA, 788 bp, Medicago truncatula
  Intron number 1 from transcript Medtr8g138560.1 (locus Med tr8g138560) derived from phytozome v7.0 (chr-ID MtChr8; po s 33545474 to 33546261 reverse strand)
ggttagttacagtggacacgttcacattcatgcaattttacatgctttgaataccattcgtgatttggataagactttcaaatgagattagaaaggtatggaagaagaatggtgatggaggaagcagagggtgaatgagttcctttgaagaagaagcagagaaggaaaggggaaaatgggggaaccgaaagattttccccatttcttcagttttattgtttttttaattaaataaaatataattgttttattttaaaatcgaaaatattttttctattttttaaaaaatgtttattaaattagttaattgaaataaatgccacatggatgccaagtggacaaagtagcacagttagctaatgccatgtatgcaaaaatgcaccaaatcatcagtaaagtggggtcagagactatatgcatgcagtcaatgcaaaatgtttgacattgttttttctatagtcagagtgaaattcaccggagtatacttatatgcatgcatttttattacagcatgaaatcctcatggctcttagcacatgtttctcctaaaacccttggatatcatgcaaagtgatatccaaaattaactatccatcttttgtgaatgccattgtattaagaagctactctgcttcaagtatggttacacttatttttgtactaatttttaagcaaagaatcaccttgacctttttacataatgtttgaatgagaaaaaacattgatttgtgttctgaaatatatattgtctaggggtttatcactgatcaagaaacagctctgcaaga

SEQ ID NO: 32693 - DNA, 765 bp, Medicago truncatula
  Intron number 3 from transcript Medtr7g138500.1 (locus Med tr7g138500) derived from phytozome v7.0 (chr-ID MtChr7; po s 32877353 to 32878117)
ttaaacaagtaagtgtgtgtttgattgaatttattttacttaaaaattagctttaggtaaagataatttatgtttggataagttctcgggaaagtgagttgaacaaaaaatttgagtgtgaaatcaagttaatggtactcaaaaacctcctaacctaccaaaatcaatcctactcggaaacctgcaaacatgctaaaatcaattttaaatctttaaatccaaacatgcactaagttacttttatcgatctatatcagccttagtttatcagccaaaataccaagtcaatttctcaaaaaactgttttaggacacaaaaatgtggttaaattattagttttagttttgaatataccaaccatagttccacttaacttttctttcttgaggaatgggttaaaattaaatatacaagagccttattatattcactgccttttttttccttcaatttatatttagtgaaataaaggcggagcaaatcaaaggttatatataatgacttgttatatgcttcttcttggatttgtatgtggagagtattataaggaccaattttctgcttgttgaaattttctttgaaaacattgaaattagaagaaatatttagttggaggttagggcataaagcaaaacaggaaaatttggtattgcagccaaatatgacttgtgttgctgtatttgtgctaagctgtatcgttggcatgttttcttatgacaatttgataaatgtttcaggtctgtacagaggtgagacctgcactgg

SEQ ID NO: 32694 - DNA, 350 bp, Medicago truncatula
  Intron number 3 from transcript Medtr7g116980.1 (locus Med tr7g116980) derived from phytozome v7.0 (chr-ID MtChr7; po s 27202317 to 27202666)
aaaggtattctagattttcaacgtaaatattaaaaatggttgactagcttatcatttcattggatttgtatgataacatgttcttctaatcacccttcattcacatgtaaataatatatcgaccattccgcatcgtgcaatcctttaagaacaataacatatagagcaacaatgttgaatttgatattaggaagaaaagaactaagtagtagtaaagcagcatgttttttgttatttgccaccaccttagataagtcaaagttatgtttagtgagatttttattgttgtttaattattctggaattttgtatctgaagtttcaatgttgtttagggaattcatccccgaa

SEQ ID NO: 32695 - DNA, 695 bp, Medicago truncatula
  Intron number 3 from transcript Medtr8g101640.1 (locus Med tr8g101640) derived from phytozome v7.0 (chr-ID MtChr8; po s 22101935 to 22102629 reverse strand)
ttgcaatctcctaattcaaaagaacaagtatcaaggttcaagaactttcagttaaatacatctgccattattatctagtaaaaagaaattatctccatgattgtggtgcttggtttgtgattttgatcttgaataacatctaaagattgcagagtgtaaatgttacaccccttatgagtaataaggtctagtattgcataaatttgtgtgctagtttaccaaattttcacaaatgaatcgataaatagcctaatttgaatctgaattttttgttattttctatgtgagttatcttgtgatccttcattttatagtacctttgtgaggtatctggcgattcttcattttttgtagtacctcatagcagttttgctgtaagcatgttgaagatataaggggacaaaaggtttattaattgttacctataaagagtaagggaaggaaaaaaaaaagaaagaatagaaagatcatagaccttgttaactgtgcaatggttcattgcgtttgaatgaagttatatgactcatacttttatttatttacttatttttaattatatctggagattctctgtctacgtgcactccttgtatgcttgtgataagaaaataccacaatttaatacatgctaagctgcatcttaatcttgacatatgtcactttatgtcttaatgatggcaggttgggagataata

SEQ ID NO: 32696 - DNA, 810 bp, Medicago truncatula; identical to SEQ ID NO: 32512
  Intron number 5 from transcript Medtr8g116050.1 (locus Med tr8g116050) derived from phytozome v7.0 (chr-ID MtChr8; po s 26211494 to 26212303 reverse strand)

SEQ ID NO: 32697 - DNA, 657 bp, Medicago truncatula; identical to SEQ ID NO: 32513
  Intron number 4 from transcript Medtr8g116050.1 (locus Med tr8g116050) derived from phytozome v7.0 (chr-ID MtChr8; po s 26212365 to 26213021 reverse strand)

SEQ ID NO: 32698 - DNA, 687 bp, Medicago truncatula
  Intron number 1 from transcript Medtr8g139640.2 (locus Med tr8g139640) derived from phytozome v7.0 (chr-ID MtChr8; po s 34128704 to 34129390)
cgaccagccaagtttagatactcaccagcctttgtgtaagttttgcatgataacaactattaagtttgctaagtctgctaagttttatgtttgttatatatgtgtctgcttattttagttatttgcaatattctttggtttcttagtagttcctactatggaagatagtcatgttagaaatatacacctctctcggttgaaattcaaactttaattcgacacgtatatatcaacgccaagaaattatgtaaaaaaaatggatttggatactaagcttaacaacttttccatttatgttacagttttgtttcttcattttttcttgtataaattgtttcataatttatgacacataactaaggatattgtacgggtaagaaattatacttgccaatagtgagaattattctctttgtctcattatgtgtgttatttagaatatttttatgtttcaaattatttgtaattttgcaataccaatacaccatttattattattattattatttcaatgtaagaagccaattctccatttgatttctacgtacagctttgctttctccaccatattttaagaccttgttctcattgatattaattgtttttatcaacttgcaattaatttgacatttataatgttcaataatcacagatattttgtggctgcattctctgttgctgggcttt

SEQ ID NO: 32699 - DNA, 719 bp, Medicago truncatula
  Intron number 1 from transcript Medtr7g135760.1 (locus Med tr7g135760) derived from phytozome v7.0 (chr-ID MtChr7; po s 32373908 to 32374626)
ccatatcccgtctcttcatcggctctcaattggaggtaaggtaatcctctctctatcttttgaagataactaatttcactgtaatgaatgcaattgtgaatattattagtcaatacgatactgacacgttgacactggtagagatttaagtatattacataattgaatgtaatcatatgtgtctgtgttgaacaccgagcacacttttgattagaagtgtcagtgctacaaatgtgaattgataacaagagaaagctattgtgaagaagtacagataactaatattttttgcaattgacaacactgatagctacgttgtatagcacgctgtagcggaattgtgtagcacgctgtagcggaattgtgtagcggtagtagagctcggcacggctctgttgcggctctgaactgctgttgcgtccgctgttagggtttctgggcgaaatttcctaaatctctttttttataagcgttgtcgattagaacccttttaaggatattgttgtgtttttcattttattgtgttcttgctcacaaacaatcgttatgttctgcttcctgcttttagttcactggtttagcattttaggtggtcggtggtacgggacactatctgtgattaacaacatagatataattcatggcttttatttgaatgttatttcgattcgattatttgacgagctttgctgactttggtatattgatttgtttgtcac

SEQ ID NO: 32700 - DNA, 468 bp, Medicago truncatula
  Intron number 2 from transcript Medtr8g089280.1 (locus Med tr8g089280) derived from phytozome v7.0 (chr-ID MtChr8; po s 19149476 to 19149943)
gaaaggtttgtactctgcactgtctttttgctggttaagattcatactcaattatagtaaccctttatcagtatatttctgttagtatatgtttggatttccggtgaatcactcattatcacttctcaatgcatgtgtgttgtgatttagttgaagcttcaaagtgtaactatcgtgatttcgaactgtgattctgtcaaattctctgttaatcccaacacgcacttagtaccgtgtttccttggtagtagtgaagaacttatataaaacttcattttcatcttaattacttgttagatattttgatggtcagtcttggttaagtggattttctttccttttttctatggtttctctgtgagtcctaaatagaactgatgtgggtactaataggtttgtttttaatggcacttttctcaccctctctgtctcaaaaaaatcttttgcaggtaattgatcttaatatct

SEQ ID NO: 32701 - DNA, 811 bp, Medicago truncatula
  Intron number 3 from transcript Medtr8g109520.1 (locus Med tr8g109520) derived from phytozome v7.0 (chr-ID MtChr8; po s 24580364 to 24581174)
aagatcatatcggtgcattgccttgggtaatgcttcctactccaaagaaatatattcttttatcaaactagttttctcagatttactcccttagttttatttgagtatttgtcatgtgatgcaatgcccgttgtttgatgtattctgccataagaaactgagacgtacttaaacaagcacacttagtttgataaatgaacctacttggtgtctttgctgctatgttaattttaagttggtgcaatgggcttcaagaaagatatacaactatgatcaaagattttaaggtctctaatagtgtcttttcgattatagcatgtgtaacgactagaagtcatggatatatttacgggctagttgtaatgaactcttttacaatatcatatatctaaggtaatggttgtgtgaactcccttctgctacatgtgcctgctgtcctttcttggtaaggtatgatatttttaaaatgtttcgcttactaagctgaagctgcagtctttctgtcttacacccaaaaagtgtggggtaagccttgtaagaccaagagaaactcaaaacaaccatacatataaatcttttgtgaatcacattgcttcagtccttagtatttttatttatctcagaatttaatcagtttataatatcaggaaaaagtagttttctcttcatgtatgttttcaaatactctgtttcttctattgcattcaatctaattgattattattcttttattaaagttatatgttttgctatctacttatatacgctttgcagttgctataatttttacttggttcatcaggtcatccca

SEQ ID NO: 32702 - DNA, 669 bp, Medicago truncatula
  Intron number 1 from transcript Medtr8g086310.1 (locus Med tr8g086310) derived from phytozome v7.0 (chr-ID MtChr8; po s 17617381 to 17618049 reverse strand)
aggaacaggttgttccttaattttcataatgttactgttttttcaactttttcttatcttgttatttcttcattatgcttataatttgattggatttttttaagtgtaatgtgattataccaacctgttaaggatttagatgttactttatggttttgtcactgtttgattaattatattttgaagaatcatcttttctaattttcatgcagtttctgtttccaaagagtattttagcaagttataactaaaaagtagttaaatacaccttgatgtacatgttgctaaaatactcctaaaagataagtaggtgtaagttagcagctccaataggaatttgctagaataaactcacttattttttttagatggattatgttagcaattgataactaaaaagagttggtaattaatatttgattagtttagtgtaaataattttgctttgtgtctacctgaatagtaaattctatgcttggataaccatgcatcacattattctgatccttgaggtgtcaacccagcggtaaaagtttgaacttgtaacttcaaaagagacggagttcaaatccccttagagatagtagtaataaccattattgccatttggatatgaatgtcttgtattaattgtaactcattctgtggtttgtgatcagaataaagtaa

SEQ ID NO: 32703 - DNA, 836 bp, Medicago truncatula
  Intron number 2 from transcript Medtr8g125500.1 (locus Med tr8g125500) derived from phytozome v7.0 (chr-ID MtChr8; po s 29284278 to 29285113)
ctttgactcacttctttcttgatcatctgtttgaggtaatattcattgatacaataacatttcgatgctgtttatgtaaccgtttgtgtttgtttctacaaactactagctagctgattgatttattatcctaattagtgaaacctgcttaaaatagtaacatgtatgtctaaagcggtttcaagtatttatggagattgcctcatctggtcttggactttctaaaattaaaatcaattttgatactatacatgttttgtttatttatgtccaattttgacaagtaggggatgtttgattgttcccacatttattattttcttgaattccatgtcatgatgatattaaccttgaaatttttacatttgtttcgttaacatttgttaaccttcttaaatctgtacataatttgttatctagtgtttttaactactctatcgagaggtaaacaataacagaaactgttagatgcatagctgaatcttaaccaactcttgtacaccaatactattctactaggtttcaactttggtttgtctcttattcttgtctcataaggttgatatgtttttcggttcatttccttatttttcctttagtaatctaaattttgaagttctgtgtccgtagactttacaagtagagtgctattggctattattttaatagaaacaaagaaagaaactacaaaatgaagctaaattcctactagttgcaagccaatctaacagtgtcgaagacaaatgttcttgccgttttgttataactctttctaaaaattgtcacttaaactcttaattgattcaagcttataaccctcaaaatcttgtaggaga

SEQ ID NO: 32704 - DNA, 787 bp, Medicago truncatula
  Intron number 1 from transcript Medtr7g138660.1 (locus Med tr7g138660) derived from phytozome v7.0 (chr-ID MtChr7; po s 32964405 to 32965191 reverse strand)
tcttcttgatcttcgtgctcccatccgcatttgcggttagtacttttatctcctttgttttctctctcttttttcaaattttagagatgtatgttttttcttatcaatctattgaatctcataaattattcatcatcccttcttttgttaacaaaacaaactatttttcaaaaatatattctttcgttcataagatgtggaaagattaattagaagttattaaaaatgaaaactaatgtttttacaattaagaatactggccatttaaggaagacaataacaactttgataaatgttttgttaatttaatgaaatattaaaatatatcatgaaaaccaagttttatctctttcgaacatcaaatcagattacatgtgttggctgtcaagttgagatcataaaatttgttgagaattgtggttaaatatggctgatgtagatcatgcaatcacaatgttgatgacattgctaccataatcaaggttgtggacgattttttaaaacctaaatcaaacatatagcaagaaaacgaaataaaaatttactaaaagttggttcctatagttgcactattcaattattcccttcatctatcatgaattaaaatttgacgtatttgcattcttttcctcatctgcaatattttaaaagaaaacaatattatataattgcatgtcatttaatagaaactggatgatgtaatttgcattttaaagtttatcaatgacattgtcacacctattttgttgttcttgatgtcatggtccttttgctgcaggtgatattc

SEQ ID NO: 32705 - DNA, 987 bp, Medicago truncatula
  Intron number 1 from transcript Medtr8g008680.1 (locus Med tr8g008680) derived from phytozome v7.0 (chr-ID MtChr8; po s 1037641 to 1038627 reverse strand)
ggtgcgcagcacatactgaagattaagacaaattagagtaaactgagaaataaaatgtcaaataaacatgctacaagatgttcttaatagtgcacactatcatgatgatctcattccatattagaaaatcacatatagtaagcacactcttggtgccaagaattctaatatacatctagtcctttttggttataacttttctactgtatcgatactattgcttttaatggagctccatttcaagtatctccccagcaggacttcttcaatcaggataaggatgagataaattaatatttataaacctgcttttaatgggtgcattttgtaagaagaaaataaataaataaagcttagctgcatatatgcaaccatctttccattgtttgtaaattcttagatgcttcggctttaaaaaccagtcttatctgctatcggtgtcaattgtatgaaaatatcatcacacttttgcgaaaattgttcataactaaaccatagtcttttccactatccctgtttattgtatggaaatcatcatacttttctttatgttgttagtaatgtaaaaatatcagaaaacatgaaaacagtgatttgttatatgcaatggaaacaagatgaacagacagacaaatacataagttatcaaataaagttaagaataatatcaaaccaacctgataatattcttatcgtcctcaatcatctttgattcctgctcaagcttccgagcaatgtaatcctttatcacagaaaatgtgaggcaaggattgtttgacagagtttgaaggagaatgatgggggaaaaaagattatccctctcaatgcaattcaaaacttcttttacttctttggagcaatcttatcaaagcacaccaaaatatagatccccgcctttaacagaatcaccatcttttgcaacatgcaatcaatccctcgtgatcatttgaagtgtttgtgcttgagcacagagtggtagcaaatcat

SEQ ID NO: 32706 - DNA, 843 bp, Medicago truncatula
  Intron number 3 from transcript Medtr8g139190.1 (locus Med tr8g139190) derived from phytozome v7.0 (chr-ID MtChr8; po s 33894659 to 33895501)
aagttattcataacttggcccctggctatcatcaggttagtttatagtgttgccttggtacttgataatgattgtgtagtagtctcatattcttttttagaatattatatgtgtatttgtgtgtggatttaatagttttttaccttaaaaggtgttttggtggcaaagtgtttctctggcagacaactagcgacggcaatgagctctgtgttgatgatattagctagtgtataaactcaagacttgtttaatctctgaacgtctggttgtcgaactggactgcctgactgcatgcaatcatgcagtcaggggatccgtgaccgcctgatgtctgatctgattgagatcggatggtcccgatcttaagcttggtagttttagtttttgaaggaaatcaaaatctgctttagatctggactttcgatctcgatcagacgatcatggatctcttgacctacgatttcgtgtagtcagtgacaacaagaaatccgggttccttgttatcatggaagctacagggaaatgaatgattaccgatgttatttacagggatagggttcacgatctattcagaattttaccttttttaagattttgttctgagatgttttcttttcataataaatgttaatcaagaattaatatgttttgttttcataatgaatgttaatcgagaagtaatatactgtttatgtttgatattgaagtgttcatttatgattcacactagtggatttaaaagattcagggcaatatttattattaaaaatgtttgaactttattcgtagttgcctatatacttattatattgttttctaaaatgcagtacaagttttttgttg

SEQ ID NO: 32707 - DNA, 598 bp, Medicago truncatula
  Intron number 1 from transcript Medtr8g079010.1 (locus Med tr8g079010) derived from phytozome v7.0 (chr-ID MtChr8; po s 16313170 to 16313767)
ctcgagattctttcttggactttcagctctaacttgtattagaattaaattatgggaaatgtttacctgtgtttttggggaacttttgacagctttgaatgttaattcttttattgaaatatgtgtaatcaatacattgaaaattgaaatatttaaaaattttatgaaaaatttcttattttggaatcatttaagagtgtttcggaagcaattgttaacaagacccttggattaaataagaaaagtactttttgcatcatttttgtatctttctggtctacgttatacgaacactttgattttagtccgtccaaatgtatagtctgtttttagattatgtatgcaaattgaggattaggttgttgatagttttacaatttagggatagtccactattgctgaagatcataatcaacaaaatataggtcaagaaagtgacaatcaaaaaaatttagggatggtttttttccccctactacaatgagcatcatattcaagagatcataaaaaattggaaaaacaatgatattggtaaattcttgtcagaaaaaatctattccaatccaatctattcgtaattctcttgcaggaagaaaac

SEQ ID NO: 32708 - DNA, 729 bp, Medicago truncatula
  Intron number 10 from transcript Medtr8g026780.2 (locus Me dtr8g026780) derived from phytozome v7.0 (chr-ID MtChr8; p os 5884139 to 5884867 reverse strand)
cctgcacaaggtggacgttacttgaagagttgaaactagtataaaattgatgatattgatgttttctgtaatgtatatcttgcttggacaagcttagttgtttttacatttgaatatttaaaattttatgatttcattgatgcatattttgacatagcagtgttttgaaatctgggttggtctttgaaccaagaaagggaaagatcttatattttgatttttcaaaaaaagaaggaaagattaaaaattggagaacaaactggttttttgtgcatacatatctacaaatgtatgacaccacgcaaaaaaaaaaacaaatacaaaatataatttatgtttgaatcagtagaatctaggagaaaaacaacaatatatctatagctccagttcactgatttcttagcttctagttttagatgattgaaaataatagataacatactggctcctgatcttccttgcccgctaagttttaaagcagtgctatatagattatcaagagtacagatctgaatgttgtttagggactaagattaatcttatgcaacataggtaacttgggggtgatttcatttcatatcagacgatgcattaaagtgatatcaacatagttttttctgcttaaatttatatctttaatctttattgtttatattcttagttcttaacaactatattcggttttccttgtcagggttgtggcttatctttctcgggtgctggagtctg

SEQ ID NO: 32709 - DNA, 898 bp, Medicago truncatula
  Intron number 5 from transcript Medtr8g026780.2 (locus Med tr8g026780) derived from phytozome v7.0 (chr-ID MtChr8; po s 5885850 to 5886747 reverse strand)
caatcttttttcctcacaggtaatttcttctacaattggaaattggaatttgaaaaggcaattttttttctttctgaagaatcctctgcatcatagttgttgcttgtaacttcaatatggacttctaccaagttggttttgttcagttggattaaagtctgactacctgaatctgaatgtaagaaacaagatatgtgaagtttactttcatgagctaagcttcagcatgttttgatttttctttcatcctatgctggctctttcaatttagtttagctagtggacaaattaatttgtattaaagaggaatgctagcaacacacattttaacacacacttttcaacacactatttgattggttaaaactctcatgggccccaccaaatcatgtgggacccatattaatttgttgggacccatgtgaattttaaacaatcaaagagtgtgttgaaaagtgtgttaaacagtgtgttgctagcatttctcttgtattaaattcatttaatgtcaaataaaatatttatccaagtttggttcccgtgagcttagctcaattggtagggacattgcataatatatgcagcggccggggttcgtaccccgaattccccacttattcaccttaagaggtgaatttctagccactaggctacttgaccaaaaataattaattttttttatctaagtttgtgtattatagtactatccaaaaagattccaccagtcttcgatattcctacgcgtctcgggcacttgccaacttttcggtggttaagaattaagatgctaatattccttttctgaatttcataaattaatccttggtgagtgcaactataatttaaaacttgttattttacagccttctacactggcaaccctcgtaaaagcagtgtt

SEQ ID NO: 32710 - DNA, 622 bp, Medicago truncatula
  Intron number 3 from transcript Medtr8g026780.2 (locus Med tr8g026780) derived from phytozome v7.0 (chr-ID MtChr8; po s 5887030 to 5887651 reverse strand)
ttgagggtaatgaattgaatttgattgtgcctgatttttactgactcgtctctaaaaggaataatggttttgtacatacatacaattggtactagaaggaattatttatctgcccattagacgtattttacgagagtactcgagtatatgcagaaaaggttttgtttttgcaatgatacatgattttgtttttattttatttcttaacagtggtcttctacctgcattataattttatgtaatgagttatagtgcaattgttgtcggatccttgttcttcagttaccgatgattgtaaaaactgatattcatttttaatcataatttcatacctaacttgcttgctctggcagtattttttttttttgatgaagtatttttaatggtaaacgtggaggtttaataattatatagttcaatggcaaatattatatttaattttcgaatcccaaaagctctattcacgcctcattgcaatttttaacttgcttgcttctgacttttttagttttatatcctctgaccatcttataaatatgcactgatatttgacatgcttcattcttgtattactctttgcggatcaggcctgacagagtccctgttttcaagtcacaaggat

SEQ ID NO: 32711 - DNA, 629 bp, Medicago truncatula
  Intron number 2 from transcript Medtr8g101690.1 (locus Med tr8g101690) derived from phytozome v7.0 (chr-ID MtChr8; po s 22117771 to 22118399)
tcctcaagagaagaagaacaaagcaaaatttacaggttcgtttttctttttcaaaatttctaggaaattagggtttatagcttatttcgttttgagctttatttttcgtatcaatatgaattgttcttaggttgagtttctattttcttcttcaatttatgaaattagggtttatgaatttggtttcattgttcgttttctgattcaattccagctattgttcaattatatctgctattgacaattcacgttgaacatagctataatcaaattatttctgctattgttagatttttcttctctagtttatgctattgttcaattatttctggcctaggtttcgataatttgcttgtaattgcatacattcataattgattaaggagaaaaatatgatgatttgtttcgttgatcttgtgttgttttggtttcttatatccatgttataggaaagagaactacaattaaaattatgatagggtaattcatattattgctaggttaatttgctcattgtgattgtcaattattgaagattaggttaagccaagattttaggggaaaaattttgtgttttgtttttctgtttactcataatctaaaagctgttgttgattgtgcttatgtag

SEQ ID NO: 32712 - DNA, 1000 bp, Medicago truncatula
  Intron number 1 from transcript Medtr7g127030.1 (locus Med tr7g127030) derived from phytozome v7.0 (chr-ID MtChr7; po s 29705818 to 29706817 reverse strand)
aagggaattcacagcaaaggccgtttaaaattgtggttaattgcattcacagcagcagcagttcgttgtcttcatcaatttcgctttaagtcatttaaaaaaattcaagatggaaaattcaaaactgacgttttatattggataattatgtactttaatttatttatgtgttttcttcgtgagattgtcaagacatcgtcaattgggactggaaagaaatcgtatacaacattgtgttgaaagataaaatgtattattttctaatttgttagcatcagatgataaaattttgtataagtttgataatgatctgaaagatgtatttccttatgcagtagaaatatggttgatgtaacactatgagaaaaatacttcgtagctttaccatttaccttgagtcctttgcttccatttcgtagtcaattgcaacccaaatatatgcaacaattggtcaggtttgaggcttctcatcaacttacatcatccggtttcttctcaacgtacttcgtacaacgatttttccaatctgtcttaagttaggtcaattgctgaatttataaacttagtcaagatctgtttttttttttttatgcacaaacatgctttgagtttttttacgcacaaattaaaaatacatattgcattattctttatttcatgtgcataaaatgttaattgtccaacaatgtgcataaaatggtgctagctatagatgcacatgcgagagtgatgcttaatttccatttgtttcaacaatgttaattggcaaacggggtacatataatccacatgcatgcatttatccaaactttataggaagataaattagaagtcatggtacagtttctttagcttaaaatcagttatgctaccttcattttataaattatatgtaactatattcgcatacatcttatccatgttaatatgcattagactaatattgcagttatttccctgtttagcatttcccaaaggaggtgtcaagaacaattctgaa

SEQ ID NO: 32713 - DNA, 794 bp, Medicago truncatula
  Intron number 1 from transcript Medtr8g145370.1 (locus Med tr8g145370) derived from phytozome v7.0 (chr-ID MtChr8; po s 35322121 to 35322914 reverse strand)
caagaagaggtgtgcttggatcactcctaatactggtttgttccactcccaatttcttgatttcttaagaagacatttggtagtgaatttaaagcatcatgggccggggcataattatacgtgtttaatgataaattgattttttttccatgtatatgtgtgccttttgttgtatagttcatagttcggttcggttcatgatacttttggatgctgaattgctttcacatatatggcggttgtagttaaatttcattcatctggtttcattggatgtgtttgctgcatttgatctgatattgacatattgtgaattgtatgactaatttaatttaaagatagttttttgttcttgaaaattgagatttactttaaattcataactccatttggacatcatcatattattttccatataaattaatgtgaataagaatgaagtctggtatgttaattttagatatttgtttgcttgtgcttcaaatattcattcgtgcaatgggtttgtagccaaaatggggtaaaacatgcaatggacatgtacctcttattatgggttatagttgttttttatcattggagagaaaattgggagttgcaagagaagtacatgccgcaaacttgatatagatcaatgcttatgccactacatatgaatgagaactagccgtacctttactggaaatttctctacaatacagttttcgagttttattaagttctgaactactttggcttttttacaaaattttgtttccctgactaagtttacttgttgatattagagccatatt

SEQ ID NO: 32714 - DNA, 928 bp, Medicago truncatula
  Intron number 2 from transcript Medtr8g079130.1 (locus Med tr8g079130) derived from phytozome v7.0 (chr-ID MtChr8; po s 16389309 to 16390236)
aaagtgttgagtaagaagaacaaacatgttatcttatattggtggtttggaatgattgtgcaattctgtttcttgttatgtgtttgtgctgagaagacatcattgaggttcttcttcatcttctcctttattattctaactttggttatttagcattaaaactttttttatttaagtttatatatgtgagtgtcagaaaacataaacaaaaccaaaggagaaaggataacattttatgtttgtcaatgtgttgttgtttttattcttttcatgaaaagttttttattttcttaatataacaaaaaataatagaatgagagagagggtcaaaaagaagagtcacggggtttgtttgttttttgtgcttcacatgagaactttagaataacatgtcttttgattgatgtatgtgactctagcaaaaattaacgtccactgattcacatttttaagattaaaacatagcatccattatctcaaggtctcaggttcaattttctctgataccaattttaatgagcaagtttatacaaagatttgctttgattttaaatggagcctctgtaaataggcggtggaatcgatcctttcagattaatcaattcttaaatcagataccgagtttaaaaaattaaaacatagcctccaaattgaaattgtttagtaggccctaaacacattacaaaagcatgctagcttaccataatttccaatccaaacttgcctttaatttctgttggtgaactcaaattagctgagattcattcatcattctactctaaatattgccctgttgcaaaagcagaggatatgcattccataaaaaaatgataatgatagcatttttatttatttataaagtttttcttactatgcataaatttcatctacagaggaggaatcaatagcctaaaatcaaaatcaatag

SEQ ID NO: 32715 - DNA, 847 bp, Medicago truncatula
  Intron number 1 from transcript Medtr7g139550.1 (locus Med tr7g139550) derived from phytozome v7.0 (chr-ID MtChr7; po s 33412652 to 33413498)
gtaacttgattatctctttctacatgcctttcctcatcaccaccctatatatctctctttaaagatgctttgttcctaaaaatagtctatagtatctactatctatatatcaaaatattagaaatttcagaactttgttatttttctgttatggttattttattaggcagcagctgttcatgaaaacatttgagacttgttatccaattgttatgttcatgattattctatttgccaacatctatgcttcttagtcatgacatatctgttttttcaacattttaaggtgatctctatgcatatttggtataagctgtcacctattgacaatctccgtgcaagctttcatggaaacaaatatgaaagtgttaatgttcatttatagtagtaacaacagcaatattttgaacttatatttttaattctatgatggtaaataaacttttgctactattaatcttacaagcttttattttgttatatgaaatctgagtacattaacaaagtagtttgtttttattaggtaaatgtatgggtgttttttgtttttaatgacaaatgttagtatgttaattgttattttagttttttcttcttgtgaggactttaaccttgaccctccatctcattgttatgacagctatttgatacatgatacattgaaagatgatgagtttttttacaaaagatatgcacacaatgttggattttgcagcagtgtttttccatttgatatagtaaatagtgccaaattaatgtttttatttttattttttttattttttaatagtatattatgttttcaaatatctcaatagacacaattagttgtagcaggtggacaaac

SEQ ID NO: 32716 - DNA, 719 bp, Medicago truncatula
  Intron number 1 from transcript Medtr8g044390.1 (locus Med tr8g044390) derived from phytozome v7.0 (chr-ID MtChr8; po s 9934854 to 9935572 reverse strand)
ctcaaggtcgccttgaagagttcatccgtgcaagggtagtattgccattttttcattgtttgttcatcttaaattttcacaacttaaagccttcgagaatattgttattgttagatttgattgcttattgttattgtcagacttgattggtaaattgaaatttaggaataaatgccaaaataaaactttgcatagatgaaccttttccaaacatgatttagaatgaaattgatttaattaaaattttgttttaagtgattcattaaatattttcttcattttatagttttattaatgactattttataattgctctggggaaaattgggaaatgttagcaagtgctcttagggcacttgttaagaaacttaaaagagaaattttttcttggaattgatatattcaacatcttaaaacttaaaaaatgaactttttctgcatcaaatttataatttatttctattttttagttcttaactaatgcggtaaggacacctgttagcataacctattaaaattttactttgaaaggtgtgattatgatataaaacttgatgttattttttctatctaaggtaaaagctactttctgctttatagttaggttattcaattttgtaaattatttgtctacaaattaatttcacactaactatctatcaacgagtttaacgagttcatgcaatatgtgcttttatcagacattatcagcacccgat

SEQ ID NO: 32717 - DNA, 359 bp, Medicago truncatula
  Intron number 1 from transcript Medtr8g137050.1 (locus Med tr8g137050) derived from phytozome v7.0 (chr-ID MtChr8; po s 32772678 to 32773036 reverse strand)
aagaaacagtgagttgattaaaatatcatttttattttattaattaaaaattgtaattgactaaaaagagaaaaaagaaacagcagttccaaatgaagacgaggaagttgaagatgatgtatgttttttgtgtgtgtctgtgtattcaattactttgagcgggctttccgggttattcactgttgtcagtgtcatttccatgtgttcttgccgttttgtttacttttgtttaatgtatgctagtttgacaataagaaaagtaatagaaaaaaacattaaaatattgatttgatttactgaataaagctgaaactggtgttataggttgaagccaaagaagaagaacaagaacaagaagc

SEQ ID NO: 32718 - DNA, 263 bp, Medicago truncatula
  Intron number 1 from transcript Medtr8g115450.1 (locus Med tr8g115450) derived from phytozome v7.0 (chr-ID MtChr8; po s 25940941 to 25941203)
cttacacgtccccaaacaggtaaccaaatatttcactcatcaactattatctagctagattcaaagactatcttcttgttttcaatttgtttccctttttttttttttttaatacatttttatatttttctttttcatatatacctcacgaaatttcttatttttctttttatatagaatcattattttcttatttagtaaaaacaaaaaatgaaagtgagaaatgattcttttattttggatcaggaacaagacggtctgtg

SEQ ID NO: 32719 - DNA, 809 bp, Medicago truncatula
  Intron number 3 from transcript Medtr7g127420.1 (locus Med tr7g127420) derived from phytozome v7.0 (chr-ID MtChr7; po s 29869756 to 29870564)
ctataagggaccagtacgagattagagaaattgaggtatctaatactaaaattattcaatttttaggctttttttttgttcaattttatgatatagataatatatagaatttattagttctatctttttttttttttttatcttttttgcacgcaaggatagtgtgatttcttcatgttcttacttgggcatgcgcctttaaggctgtaacatctatgggtgttttccttcatgagttttttcttagttaagaatcaaatgtttattataacccccaggggttggttaccccggtggtgaagagcgaagactcgagaccaaggagtgtgctcatgtcttaggtttgaatcttccaagtgccaacaactcctgtgttgggtcagttcacatagagctttcaattggggcccgattgtaaacggtgggattggtcccccagattaatggatcattttgccgcataccaagtttctggaagaaaaaaaaaagaatcaaatgtttattttaaattttaattgaaaaactttcatcagtttggagctaattcaaattggaaaaagtttaattaacttggagcatgtttcctgcaaatagaaaagggagattagagaggagatcgtgttcttattgaagttatttagggtcttttggcacatttggatgtggaaagaccctcaaagttgtgttgctgtttgtaatcgagaaaatttattcctatattttgtaataataccagttagtttctagcaatctcatccagcttgttgacttgattgtctttgcagccttactttgtagccgagactaca

SEQ ID NO: 32720 - DNA, 792 bp, Medicago truncatula
  Intron number 1 from transcript Medtr7g104500.1 (locus Med tr7g104500) derived from phytozome v7.0 (chr-ID MtChr7; po s 23716231 to 23717022 reverse strand)
gcacctccgaaactcttctcttgtgtgtgaaaaaggtgaatcatcttcatctaggttttctacttcaatcatttcaatttcatttcacttttctgggttttcttcattttgtcttcaactctgttcaattacaccaagctggatctttttttcttcttcacaattgttgttgaatttgatgttttgatcatacccttgatttttcttgatgtgtatcgtgttttatgaatgatacttttccaatctgatgggtaattttcttgcggggtgtgatttctttcgtgttagattaagaatattgacatgtttttccccattagggttttatccccttgatcgaaactcaaaaaagatgttttctttttcttcatttgttttaaaaattgacactttatggtatgctattgtgtgtacatgaagggttttttttttttgttaaaaatgagattaattcatgttaagaagctctatgtgagttgattttcttatatttattcttttggtttcgtgatttgtttcatagggtgcttttgatgcaaattgggtatacaaattttcgaacttttgttatatggttgtggaagtgtctgcatactggcttatgtctaattgagttttgttccttgtacttcagattttagtttagtttgttgtctgaatcccatgattgtgtaatgataatttgataaaatgatattaggtgtactaatttcttgtggaggaattttgactttattgcattctttgttttgtgcagcaaatttgtgaactctgaattagttcggaagctcc

SEQ ID NO: 32721 - DNA, 938 bp, Medicago truncatula
  Intron number 6 from transcript Medtr7g093170.2 (locus Med tr7g093170) derived from phytozome v7.0 (chr-ID MtChr7; po s 20754688 to 20755625)
gcttcttccatcaaggataggtactcatttttttttatataatttaaatgtagatgagcagataaatatgcttggccttctaagcaagtttgaacaaaaataagtttacatctcagaaaaggattacgctaagctcattccgacattctttagcttagagtcatttttaatttggagaaaacttaggtacaattccttaggtgctttttgtatggttcttaactaaattcaccatgatttcctcaaatccataattttctcaaagtttgttatatgtccaaaaaatatgtatttttagttaagaaccatacgaaaagcacctaaggaattgtacctaagttttctccttttaattttatgccttttgaggactttgtatcccatccgttcaaatctagactatacgtaatatgaatgacttagagccatacagagatgcctaagtgaggcaaaaaaatcaaggtgaacacaatggtacccatgtagtttggctgggccaatcaatcaatgccatgtcatgtcttcatgtttattttaaaataaattcaaatgctaaaccaattttacctagtgggtaccgatacccaaccaactccatggtacctacaatttaccaaaaatcatagtcacatggccaccaaccgaggaaatcattttggtaaccaaaattccaaaatcctgttgcccattcattcttgatctgctgcacagcgtgcaacctgcagggtaatcatcaccttgaaaggcctgccattttattttaatcactttaattaaaagacttggttttagacttagatatacatttggccagtcctgatgttctcaatgaaaagttttactttaaaaggactcgtgttattgctaacttcttttcgttgctggcattggttccctctaagatcaaattctgatgataattttttcttgaatgtaga

SEQ ID NO: 32722 - DNA, 804 bp, Medicago truncatula
  Intron number 2 from transcript Medtr8g109290.1 (locus Med tr8g109290) derived from phytozome v7.0 (chr-ID MtChr8; po s 24473991 to 24474794)
agaccacaccgccaggtcttatttactatctttcaagtatttttgacatgtttttgcgacttataaagcctatatagttgctttggtgctcatatattaccctgccctcaagcagcgactttggggaagaaacaaaaaaaaaaaaaaaaaaacgttttttcctttttatcattgtgggaagtttacctaaagtttcattcttgtcaccagagttagaagaatgatttttttccggctcataaggaacaaaatatttgaccaaattcaaatcatgttaatatgaatgttacttacagaagcatgactaattgactgttgactgcaattttttcaaggaaataatttacacattggcactttgatacattgcattgaagtttagttagtatttatgttgctacaacgtttcacactattttagtggtcttaatctggattagtgcagggtgattcagtattctttaaactgtaaaatttgtgtttcaaaacatgttttgtcaaagctatcaagcattctaaatctttatctccttagctcccctaacttgaagggttgaaagattcattttttaaatggatcatgttattgaatattttgtttgtgttttgtagatattgtggaattggttttttaacactacaaactccttccacccacttggtcataatgccatgacatatatttttctgaactattgtttcatcccataaattcttgctataagtagataattgttgtgaagtgattttgactcccttatttatccagaagggcaacatattaagactaatcaacagaacata

SEQ ID NO: 32723 - DNA, 881 bp, Medicago truncatula
  Intron number 2 from transcript Medtr8g015920.1 (locus Med tr8g015920) derived from phytozome v7.0 (chr-ID MtChr8; po s 2952433 to 2953313 reverse strand)
ttcaggttttgcaatctctatctactttgctcaaggtattttcattccttttcaatcctacttcattcataataattttcttgctttaaccactctcttctgtgaattggggtttagggtttacaacaacttaggttttctttttatagatatttatagaaattgagcgtgtttttattgaatgtaaatcctcaatcataataatttgtagtttataagcgcttgtgtataggcttacataaactatttctatagcaaaataaaataaagttaaattgttttttatactatgttgtaagctgctttcacaagtttattcaaacaatctcccaaaacttatgttagtagatatgctcaattgcaagtcaatccaatcggatattaaatcaaattatagttaaattaaatttgtcttttatcggttttaagaatttgttatttcttatagttgtgctctctgttggaacttaaaggaagttgccaacaacagtcgattgtctctccttaatagtcataatcccacaatcacaacttaaatgggtaaactcaaacacctccttttcatttcatcaatctattttgcgtttttttatttatttatttattttggattgggaaagttaaagttattgctcaatgttgtaatgttgaattactatattttttgcaagatacaatttgtttttcctttcatgttatgaaaatgcatgctcttgattgagtgtaagatgcatataagtttgtcatgtttatcttgctattgttgccaaacttggttaattgagccatttcattctctattatttttcaatgttgtttttgtctgtcttttttttttttggtaaggttttgtctgtcttctattttggtcgtcgcagcga

SEQ ID NO: 32724 - DNA, 549 bp, Medicago truncatula
  Intron number 3 from transcript Medtr8g138800.1 (locus Med tr8g138800) derived from phytozome v7.0 (chr-ID MtChr8; po s 33652765 to 33653313)
aagacaggagaaaattaaattccaggtacagaattttgcgactgataaaatgtcttcaattattattttttttttgttaggataggtgattattaaaatttgttttcttctgccacaaagcactatagttgttctctgttttactagttaaacttaagcttctcagtaagtatacgaaaaatgtgagtgattcgtcctaacatccactatatttaagctatatgaccgatatatataacggtgactcacatactcaatcaatctcttaaaattttgggtgaagatgtgatgtcccggttttttgatggtcctgatcattagtctgttgtagctttcagactcccgcaatgtactttatgttaattacaccgttttcagactccccgacatattttatgtatgttcattatgtagttttttcaaaactctcgtttgaatatatgattactgcactgcttatccgaaaatttatgattctgccactaatctcattcatctcttgttatttgtgcaggttgcactcagcagggcatttgctagatatttgtc

SEQ ID NO: 32725 - DNA, 662 bp, Medicago truncatula
  Intron number 2 from transcript Medtr8g090070.1 (locus Med tr8g090070) derived from phytozome v7.0 (chr-ID MtChr8; po s 19549460 to 19550121 reverse strand)
aggaggtcatgttactagttattatattaattgagaaacttctacagattaaaacagaatcgaaagtagatttgttattattagttattatattattattatgtgaaagaagctaagatttttcttgagaaggaatatatgtgagtgagtaatgctaaggtttagtgattttatttttcagtttgtcaataaaatattacatgtaaaagcattttgttcgatacaatttaagcgccactctgcaagtgttgaatataactaacatcttatgcttacattacgtaaaatatagaaaccaaagacggcttgttgtcatgtctcaagttgctttctgattggatactcttcttcacaacttcatattgtttgattcttcttttttatttttaattgaaaagacaaattaatcattaaaattgtaagtatggtcaaatagtcatttacttggaaattagtttatggcgtggaccgtgtgtattacatcaaatatagtccttaactataaaatagagaatttgttaaaaaagaaaccataaaatagagactatgcatttaaaaaaggagattgtcaagggtggagatgaagaaggagattgtttacgtgggaggaagatcaattgaggggtgtagtttgttgttggataatatttttttacagaaaa

SEQ ID NO: 32726 - DNA, 905 bp, Medicago truncatula
  Intron number 1 from transcript Medtr7g143240.1 (locus Med tr7g143240) derived from phytozome v7.0 (chr-ID MtChr7; po s 34349594 to 34350498)
atcgaccctgttattttgtccaccggacaggtacttctttttcttattggttatggttattgctctgtattttattatcttctccacaagttgtcatttttttttttttttttaatttatataacagtaataaccataactcaaacataggtttttctaatccttttgattcaattaaggtggatcatttgaatatttaatttttgttttctgtttactcttttgttttgaggaagcctgaattgtatgatgttagaagaagaaaaaaaaaaaaagtgtttttgtattaggagatgaataatgtatttttggataaacaacttatatacagattatagcacaaacgcttaataggaggataataagcgcttatgtataagcttgcataagctatttttataacaaaagataaaataactagattgtttttcaatatgctataagttgtttttctaattaatattggataacttatgaaaaaatcttataaaaattgttacaagctgttttcatacattctcccaaacagtctcacataacttatgccaatagataaactctataagccaatccaaacaggccctaagtatggtttcttattaatgttattattaattacgattagagtttaattttgatgcactgtcaatgtaaaatgttttacactgtcaatgtaaaatgttttacactgtcaacacattataatcaatcatgtgtatgactttagaagttgttatgataaaagtcagatgcttctaatgacttgacaattatgattgatttatggtgtttatgaattaaattataataattattatatgttgtgtatttgagtgtgaggcttatgtttggggcttcataattcattgatgtgttctgatttattgttttgctgttgtagactt

SEQ ID NO: 32727 - DNA, 705 bp, Medicago truncatula
  Intron number 1 from transcript Medtr8g116420.2 (locus Med tr8g116420) derived from phytozome v7.0 (chr-ID MtChr8; po s 26371964 to 26372668 reverse strand)
ccgtcattcactgttctccgcctctcttctcattggtcagtcacagctactccttcaatttcagttttttcttccttcttcaagttcaataattgagtggatttcactgttagtgtgttttcatagctattccatcaagtttcaatacggaatttaaaattctacattcatctattcaatcaagtttaattaacaagtgcttatagcttaatcaaggccctgtttggataaacaccttaatttgcagctatttctactacacaagataaacaaagtcaattgtttttgtataaagctatagcttatttctataagctacagcctatagaaataagctgaaaacaacctatgaacatgtcataagttatgccaatcagtctcacgtcaccagataagctcaaactagccaatccaaacaggccctaagtcattattggcattaggaaatacatttatcatataattcacctctattacaaaagataaaaaaaatcaatatgtttacgatcatataagtgttcatgttataataataaacgtgaaagtgtcaaattgggttatacagttgcactgttttttttttttcaagggtttagttagtgtttaagaacctgaagtgtgtgtctttcaggcatgttctttgttgcgttcacatgatatcagaatgaagaaatttatttggtacatacactatattttatctga

SEQ ID NO: 32728 - DNA, 657 bp, Medicago truncatula
  Intron number 2 from transcript Medtr8g137450.1 (locus Med tr8g137450) derived from phytozome v7.0 (chr-ID MtChr8; po s 32941537 to 32942193 reverse strand)
gtgggggcaagcttgccatttataggtgacatgaaatatataaagacgtacttattgatcgatcgattcataaatgcattctcactcataatttttaatgctaggtacagtttttacttatataaactctaaataaaaagaagttaaccttttttggtgatacataaaaaaaagaaattaattaatggtcgatctatatatatgatatatccttgatctagaccagttatgttcattaatattcttaccaacttggactgaagaaacaggcttgttaattttttttcttcggaaccaattatatcaaaataactggaaaatgattttcaaaataaaacaaaaaatcatttaatgttttaaatttgaaaagttttagggactgatttttttcttcctgattgatgttcattattgtaatttgtaactcaaactgttcataattttcatttaaattgttaatgattggagtcaagcttctccaatgttactagtacttacacttcgcaaaactttgacatcttcacaaatagtaaaatattttttcacattgagtattttttttttcactcacttttctttttatttcgctattcctttacactcatctaacagttttcactaggtgcgcgggaatagtgtatttgaaaaagactaagg

SEQ ID NO: 32729 - DNA, 724 bp, Medicago truncatula
  Intron number 1 from transcript Medtr8g145080.1 (locus Med tr8g145080) derived from phytozome v7.0 (chr-ID MtChr8; po s 35200852 to 35201575)
tgctctgatcgctctctcgctcttgttgcccaaaggttcaaactttcttccaaatttcaaattacaaattatcgggtctgcaattttcttaattaataggttttcactttgaaattgggttccctttcatagcattacaactgtatgctttgtcttggaggaggtaaaattgaatcaatagaggtagaattgattttgatatgtttgaatgtattcaaacataagggcccgtttgttaaagattaaaaaaaagagattttttctttgtatttctaaaaatgagttattatgaatgagttcattcaaaggaattctttttcgatcgcgaatatagggcctgtttagatagtcagcttatttgcagcttatatcacaagcgcttatgtataagcttgcataagctacttttgtagcagcagataaaataacactaaattgtttatatatgttataagttgtttttataatctatattggagaacttatgaaaataacttgaaaaaagcttatgaaaattgtcataagctgttttcctaagttctcccaagcagtctcacaaaacttatgccagtagataagctcaaataagccaatccaaacaggcataatactgaaacatttagcatgtaagtagtgatgtacatcatctgatgcttcacgttgctttgttttgttttttcgactttgggttggtttgaacttaaataattcaactgcatttcag

SEQ ID NO: 32730 - DNA, 355 bp, Medicago truncatula
  Intron number 1 from transcript Medtr8g087890.1 (locus Med tr8g087890) derived from phytozome v7.0 (chr-ID MtChr8; po s 18438368 to 18438722 reverse strand)
ctgctaaatattggcatcagctaatcaaactttaggtatattaatctttttgagtaaagtcatattcttattcacatgctgttaattgttataataatgagaagcactttactgctttattctttccctggttggttttgagtatgatatgtgttttgcatctgtgttctctgttcatgttattatcttccaaatatagagagaaaaataaggttactgtaaaaataggccatgaaaaaattagtgttttttttttatgtttaagtttctgtgcaatatatgtatcctttctgagatgaatggttaatttctttacttatttgtttagcagggtgattgttaagaaattgcaacc

SEQ ID NO: 32731 - DNA, 412 bp, Medicago truncatula
  Intron number 1 from transcript Medtr8g105860.1 (locus Med tr8g105860) derived from phytozome v7.0 (chr-ID MtChr8; po s 23487576 to 23487987 reverse strand)
ctcttttatacttggagaacttgacactcccttcggtaggtttactaacactattttctcttcaattcaatctccatatatatgttttaacttttaatccaaaaacaaatatcaatatctatcatcccttgccatttaattttttgttatttgctgtgctgaatgaatgattgttaatacaaaactcaatatgaaaacttttgtttcctgtttttttcttcccatcttttctagcttgcgaagctaaatattttcagaaatcatgcaaacaaacaattgttgtaattcttacgatgatccgttattgttattaatatcataaattatatcattgtagttgtgttaagttcaatgcttattttgtaatgttttgtaagcagtttcaagttgtggtgatagaagcaactactgg

SEQ ID NO: 32732 - DNA, 851 bp, Medicago truncatula
  Intron number 1 from transcript Medtr7g096810.1 (locus Med tr7g096810) derived from phytozome v7.0 (chr-ID MtChr7; po s 21747128 to 21747978 reverse strand)
caggtctaatatcgttcttctttttcttggatctggattttattcgttagatttattgtgatttatgtttgattttaaggtgtttatttgatttgcgatggtttagatctgagaaatgcttttaggtttttgtgaatgttgttgaatttttgtggattttgatttgattgtgatactgttgttttggtttagtagatctgtgaacgtgttgattctggttgtatgttaagttgaaggatcgtttgattggtgcttcgtagaattttgattttattagtacgaatctttgaaatgctttgagttttttactattgaattttgcagttctctttgatcatgtactttgatttttgttcatctagccgcgttttagtctgttgatattttgagtaggattgttttgtgatgaatattcatatttggtacatttacttcgctgatgacttcgtagtttgtttgtgattagtagttatgaaacacaggcaccggtcacgacagtcattgacacatcaacaccggtagtaattaaaaatgataaaattgtatgtaatcacatctatcgttttcatgttagataacagttttgatgacgctacaatgctattgcataacaaaatttcaactaattgttattgttctgcaaatgctattcattacaaatattgtgatatagcacctagtcatagattgctgaatttgtgatgagtagtcatgatgtgttaaactggttgtgttgttggtgttaggattggaattgtttagttggttgtagctatgtattgtgttgtgattgtgttatttgattgttgatttcagattgaccctgccaagtacaagagcatctcatcagg

SEQ ID NO: 32733 - DNA, 496 bp, Medicago truncatula
  Intron number 3 from transcript Medtr8g116190.1 (locus Med tr8g116190) derived from phytozome v7.0 (chr-ID MtChr8; po s 26279696 to 26280191 reverse strand)
tgtaagttttctttcaaccaatatagattttcaccaaattttagtgcaatagcgttttatgctcataagtcacgactctaatcttatattttaaatgttggttaatgaaggggactgtgtttttccttggtattgttatcatttttctttgaaatcgagaaaattagtttggacttattatttcctaattcattctctatatagtttttcaaggtttgtgtgcatgctatatatggccaaaaaaaattagtctcccttgttatacaaacaaattcataaaaaagggatctcccttgttccctcgatggctcttgtttgagttgtgagtgtttgtagacctgatttcattgccaagctaaatgaaattaaaaaatcgggagatgaaagtgatattaacaaatagaatttgttgaagatgtcctaaagaatttgttgccatgtttaatactttcaaattttcagtaagcatatgctttctttcgacaggacatatcag

SEQ ID NO: 32734 - DNA, 371 bp, Medicago truncatula
  Intron number 1 from transcript Medtr8g116190.1 (locus Med tr8g116190) derived from phytozome v7.0 (chr-ID MtChr8; po s 26281159 to 26281529 reverse strand)
cttatcaacactttccagattctctctctctctctgtaagcattttctaatcaaatcgtcatttgcattttccactttcttctttattattttcttcaaatttccacaaatttgttaacttttttattctagatttaagatttcgtaatgcccattatttagttacttcgaaattggtgtttttatgttgaaatataatgaatcatgattgattttgtatctgggtctttgattttttttttagttggcattattgggtttaatcctttgtaatttttgaaccttaaagttctcatttttagacttgtttttgtttgtggttctgtgttttagtagtgcttattagaagttggaatataaattgttgctgg

SEQ ID NO: 32735 - DNA, 601 bp, Medicago truncatula
  Intron number 1 from transcript Medtr8g044060.1 (locus Med tr8g044060) derived from phytozome v7.0 (chr-ID MtChr8; po s 9704650 to 9705250)
taaaagaaatccagaggatcttgaaattgactacggtactgtgctatcttgttttctgtcaaaatccttcaacataaagtatgtggtctgatattaaaatcagtttcctttcatgatacatgctcaataattttgaagaaaacattcagtttagatttcttattttcaataataattacaaagacacttttttttttatttcctgtttttaaaatgttgtattggaatcagcaaaaatgatttagactctggttagagaaaatgctttctatttgtaattatttttgttttcaccatgtttcctgttttcaaatatttttataggaaagaatgaaaataaattattttctttcacttgttctatatacaaatcttcaaaaaataagatgcagtgtgaaaccaaggtagcatatttggttattaaaagggaaaataggaaataaaaacttttctcttgttaaacagactttgaatctgatatttttacgatttaattattagtgaaaacatgaaattaaaagaaagttttctggaactgaattgcaattgtatttatttcttttaactttttcagaggactggttgaagttgcaagaagctg

SEQ ID NO: 32736 - DNA, 338 bp, Medicago truncatula; identical to SEQ ID NO: 32539
  Intron number 2 from transcript Medtr8g086330.1 (locus Med tr8g086330) derived from phytozome v7.0 (chr-ID MtChr8; po s 17632997 to 17633334 reverse strand)

SEQ ID NO: 32737 - DNA, 618 bp, Medicago truncatula
  Intron number 1 from transcript Medtr8g089340.1 (locus Med tr8g089340) derived from phytozome v7.0 (chr-ID MtChr8; po s 19178827 to 19179444 reverse strand)
ctcgtgctactcgagtcagggtatctatttttgcttctatttgcttagttatcttgttaagctatcaactgacccttggtttcaaatgatgtatgctaatgtagtattgtgatttactattaaacgttgttgcgactcaataactaaacatacgaaattgtaaattgtatcgatactagttcctcgacgtttacttgctattggtcattcgtgcaaggttgttgtcgactttaaaatgtttgttgcttacattagttatatttgctagtttacagttgattcaacacttattgctatgtataattgtaaaaaaaaaacacatattgctatgcaagattccttgttttggtgaacatatgtgactgtgtgtgtaacttataaaaaaaatacgacacaaaattcatatttcacacatgacactcaaaatatcaagaccggctctatatgatggtgttgtacatgttgcagaacttttttttttctggattagttagaattttcaaatttgcaaatgtcttcaaagactttgatatacttttgattgagttttcttggtaataataatagcttgcttctctggaatattcaggagagacttgaagttattgaaaaggatca

SEQ ID NO: 32738 - DNA, 459 bp, Medicago truncatula
  Intron number 1 from transcript Medtr7g140530.1 (locus Med tr7g140530) derived from phytozome v7.0 (chr-ID MtChr7; po s 33866353 to 33866811)
tctgctgtagtggttgagtaaatcacactaggcactagcaataatgattttattcttgtgtggcaaaaatgttgtatgctggaagtagagaagatgaaaatcgataatctaaaggagggagataacaaatcaaaacttatgatgtcatgttgaaagtaaagaataggagattaggagttataaagtttgtttgatggttagtgtgggagagtaaaagaatgaagtgattgggggagagatagttaaaattttcaatgcaatgattaaatatcgattggaagaaagaattacctagagttgactaccttaaaattctaaggaaagaatttgcaccaatggaagaaaaaaaatacttaaaatagaatgaagtaattgtaatggtagatcgtttcggcgtctccgttttcgtacggttctactaaagccaccctaacccgtttttgaacaaattgaccggga

SEQ ID NO: 32739 - DNA, 760 bp, Medicago truncatula
  Intron number 1 from transcript Medtr8g128730.1 (locus Med tr8g128730) derived from phytozome v7.0 (chr-ID MtChr8; po s 30188851 to 30189610 reverse strand)
ttggttatttttctcttgccttcttgttgtctatagttcctctctcctattcttctctttattgtgacaatctatgaagcatgaactccaacactgaaacagacgcatcaacactgctattgtaaaaaaatagacacatacaccattgtatacatattaatttattataactaaatcaaatattaatattatatataaaagatcaaaatatatatacatgtgcatctaaaatgagcaatctatttctttaaaaagttctaaaacaagattggataatatttgacatttttttttatccatctacaaacaaaaaagattaaaatgttgttaaagtccttatatatatcttttgccactcaatttgatctattaaaatagcaacaaaagagatatttcataatgtgtttgtaattttgataaattagtattatagtgataacaaatgataagtttatggatcaaaatgattatttactatattttttagaaatccacatgtaagaaaagttaaaagagatataatgtgcctccactattcaaaatttatgcgtctgtgtgtagggaattaagatcatgttaatttaaaaataggagaacaaaatgcaattaagtctatatttttttgtttagaaaaatgatgaaaagaaacttaagtatacatttttttaaggtgacaactagggtacccatgaaagaatggtgggtaatttaccccaaccaatacacattagccacataagcacatttttaagtggtatcc

SEQ ID NO: 32740 - DNA, 871 bp, Medicago truncatula
  Intron number 1 from transcript Medtr8g115670.1 (locus Med tr8g115670) derived from phytozome v7.0 (chr-ID MtChr8; po s 26021093 to 26021963 reverse strand)
gagatattgaagtgtactttctgggtgaggttgttattccttaatggctgtgtttctgttttctgattttactaaataatttcccccaaatagtaatctttcccttttgccattaaaactttgatagagatattcttacttgttggtacggtttttttcattttatattcttacttgtttgtacagttttttcatttagtttaataaatattatggtagaggattctgaccttttaaacaggtggtcagagatttatccctgacttttgtgtagagtgaaaatctaacatagattagtcattgttacacggcgatgaatactccgatacttatgtatattatcatggttataaaaaattattattatggtgttcattgatgcaaaacgaaagggttgatttttatgtattcttgagtggtgtactggtgttttatagcatagttaaaaaatttagtagtgttttatggtatcataaattaaggtgataaacttttttattctgaaatagctatttgatgtgactgggactgttcactcttatgtaaacttgtgttggtcttgtttaagatacttaaaatggttgtgggggtgcagttccctttatattctgatgccccaaatactagttttcatctgttatgcaacaaaacggaaaaatgtctacgtttcattttggaaattctactgttttcattattaaggagtggagctttttgtagaaacttagggatctcattactcctaacatgtcatttttttcttccatatatggtttaaaaggtctctatttgtttgtttgttttaactaataaggtatctctgcattggaatataggtttccaaattgtaggcaacaaagtacagtgtaaa

SEQ ID NO: 32741 - DNA, 338 bp, Medicago truncatula
  Intron number 2 from transcript Medtr8g134150.2 (locus Med tr8g134150) derived from phytozome v7.0 (chr-ID MtChr8; po s 32195268 to 32195605 reverse strand)
caaaccaatcctaacggcggtaaatctcctttacctttctttacaattttctatttaagatttatacaagtcatagtcataatcttaatcacagattaagtttgcatagttttcatctgtaatcttgcaagtttatctactagacaattttcaactttgtttttgtatatacatattacatgtttcttatcattttttctatgtcattctctagtgatctgattcaattgttcaaattgagatgttccaaaaattgccagtctttgtagttgtattagcactataattgtatttcgttttgattcaactttcatacaatgcagggaacaccagttatc

SEQ ID NO: 32742 - DNA, 405 bp, Medicago truncatula
  Intron number 1 from transcript Medtr8g134150.2 (locus Med tr8g134150) derived from phytozome v7.0 (chr-ID MtChr8; po s 32195706 to 32196110 reverse strand)
ctccatacacaaactctgcaatttctaacaaacaggtatgtgtgtctttgtcatctttccaaacacagaaacttcttttgttgttgccttttttgttttctttttcttttcaccaatcaacgcgttggaaactttatcaaaagaatattaacgcgtatatgattatttataattattattctttggttgtttaagttctctcaatcactcacataaattccaaactctatctgctaaactttgctttctacacaattcttatttccagtggttagttttacttatacttctttgtttcttcatttacttttcttttcttatcgttaacatgttatgtgcctagtcctattgatatttctatatataaaagtttttttttttttatttgatttaatttaacatttc

SEQ ID NO: 32743 - DNA, 631 bp, Medicago truncatula
  Intron number 1 from transcript Medtr7g117840.1 (locus Med tr7g117840) derived from phytozome v7.0 (chr-ID MtChr7; po s 27605450 to 27606080 reverse strand)
ctggtagaactgaggaagcaaagttatttggcttaattgataactgttctttgcagaaatttgattatttaaatttacctttctttcttaaaaattaatttagggattttgattctggaattattgataactattggttgatattgcgtggttctttttcgttgatccttttgattatttttgtctatgatccttcttttttgcattcttctttctgattcaagcaaaaccattttttcaggttcttgtaaattatttcattgacttctggctatatccgtgaattactggccctgtgtaatcatgcatatgaaatcctgatttggatttgattgctgttatgatgatttgtttgaacacatatatttagagaattttatacatctgtaatgagttgatcaaattctgtttagcgatatttgagagagtagatcagtttccactatgtaggacttcctgcacttcgctcttgtttgttcacatgtgactcaaccaacctttgaatgtgatgcattacttcaccagcatgccttatttctgtctgcaattaaaccctgaaatgcgatgcacttaattgcgtatgtgcagaattgcagtcagtcctggtcgatttcctaaaaccagtaaatat

SEQ ID NO: 32744 - DNA, 705 bp, Medicago truncatula
  Intron number 1 from transcript Medtr8g112780.1 (locus Med tr8g112780) derived from phytozome v7.0 (chr-ID MtChr8; po s 25468549 to 25469253 reverse strand)
tggattgaaggtttctctgagtacaagactagaaggaacgttttaactattaagcaaatgaaaaggaaatggaacagaatagcagaagactaatagagagttcaaactaatatcaatacaaattactccatctagtcttctcttgaatataaagggaaaaaacattagtatatggtggttttaaaaataagaaattttttattctttttttctgtcaaaaacaaaacttaaccgagttagaaatcatgtttttttctttgtttatttagaaacagaaaagctcttaaaaattattatgaaattatgggctaatatttggaaaaattgtcccacttcttcacgttcctactatgggctcaacaaatgaagttaaaaacatattaattattatgactttttgaaaagaaaacaaaaatattttgacaaaatattaattgcttttttacaaaacaaaattattcattttcatcactacaaaacttgatgaagttaaaaacaaaggaaggagatttatatgttaagcgtaaatatagagaatgaattgtttaattgcatatgaatgcaagtgtatgagctgcatacatcagttcatgactaatttatgttaatactaactaactaaccaaccatatgctctattataagagttagaaatatttgaatgcaacaggtgaccttgctaattagctattgtctatcaatagt

SEQ ID NO: 32745 - DNA, 846 bp, Medicago truncatula
  Intron number 1 from transcript Medtr8g146920.1 (locus Med tr8g146920) derived from phytozome v7.0 (chr-ID MtChr8; po s 36025133 to 36025978)
gttgtgtggcactttcatagaaggccaaaggtatttgtcatccaattaacattgttggcatcagcttatcaacttttatcaatgcatggatttgcatttacgcccgttttcatactttaatttttatatattctaatacgcaattgcaattacaattactgttttatcacccatacttagtgagcaagaaataaaggtatttgcttatcaaattcagattaaacattgcattgatatgagtgcaattgttgactcaaatccttttaagttatgtctcagatgggaggggagattttattaaagatggttcgttagattctttaaaaaatattattcattgacaaagttgatcgatacttcacatcaataacaaagttaaaaacaataaaactaaatgacggctatatactttgaagatacaataaagacatgattataacatttataatcaaatatcacatttatatgatattactttatacaagggggaatgactttatgcgaatggggtagcattggctacccgaaaagaaaaagaaaaaacttgaaaaaatagtatagttttgtacgtatagctaccccattaatatattatttgactacttcaaacaattttgttggttcaaagagggataatgttaataaaatattgataatctatttagtttagtgtcaattatagataaatttgacttcttaaaattttatatagctcaactttaataaataattattgttagattttagtttcttcgttgttatttcattaaatataagtaaaaattattgtaaatttattttacttattgattaagtttaataaataaatttttaaaatatagttat

SEQ ID NO: 32746 - DNA, 422 bp, Medicago truncatula
  Intron number 1 from transcript Medtr8g127730.1 (locus Med tr8g127730) derived from phytozome v7.0 (chr-ID MtChr8; po s 29651738 to 29652159 reverse strand)
agtatctgtcattgtgtaaaatcaccatcaattaggtaattcttttttatttccttttgactttttttaagactaggagattgttttttactacctttgtcttacgataattgtcaattgacatgtaacaaaattgtctcaaaataattaatgttttcaatttttataagatatcaattatgttttaacttttctcttctgtgagccgtcacacaaaccctagtttctttttcttgaaatgattaaatttttgaccctaaatcactcctctaactcgtttttctatttcccttttattgaaataagtgatttcacatctatttcattttttattttgtgatttcgtcgtcttcgtacgacgttgtttgtttttcctgtttctctcaggtatttgatcgcttcagattgccagatcagcttcg

SEQ ID NO: 32747 - DNA, 463 bp, Medicago truncatula
  Intron number 2 from transcript Medtr8g116360.1 (locus Med tr8g116360) derived from phytozome v7.0 (chr-ID MtChr8; po s 26343896 to 26344358)
ttcactattgtttgtccattagtatctccagacaagttttttatgcctcttcatataatatgcatagtttagctttttgctactttgatatttgtctatgtacttggtttggatacgaaacacaagatgatacttgactattagaaagatgtaaacaactatagaagtattttatttatataggcagaatatggattcttttttgcagtcattttttgttgcggcatttatattggtttaaatacaagttttatttttctgttaccaagcattcccggtcttgaaatattggtttaaggagaattttctacatggtaatgaagtcttcctctacagacgaggttacaaattctgatgcaactaattttttaaataaaggaacacatctttttctctgtaattgctttaatattgatatatgatgtggtctttaataatggagtccatgctgcagaatttcatt

SEQ ID NO: 32748 - DNA, 661 bp, Medicago truncatula
  Intron number 1 from transcript Medtr8g015510.1 (locus Med tr8g015510) derived from phytozome v7.0 (chr-ID MtChr8; po s 2768933 to 2769593)
tttctaagtgggatttttttcatctcaaacaaacggtatggagattttgtatttgattttgagctttggattatagaattgatttttacagttgaatatattgttcaactaattttagtcataattaattcatttaaatttaattttagccaaccaaatagacactaggggttaatgaaacttcgttgaagatcgaatcgattgggagtagagagtttgaagccagattttacctacattccgttgaactctggattactagaaccaaccctttacccttggaaaccagagatttatgacaaaaacacaagttaaactattgttttaatttattatttatgatgatgatgttgaaagagtgcatttaatgatatggactatttagaaaagagttactcttgaggtaaatttggtatagtatgttagttcagttttttgttgctatgaagaaaaagttaatattattgctggtaacaaacagtgtaaatgagagctggtataatgggtgcaccattataccagtcagtgcatgaggtccatcattggaacagggccatattgcaggtccccttcattttttgtttagttattgttgctgccatttagttttttcaggacttaactatatttattatgtgtttatagacagtgctagagtcag

SEQ ID NO: 32749 - DNA, 726 bp, Medicago truncatula
  Intron number 1 from transcript Medtr8g008960.1 (locus Med tr8g008960) derived from phytozome v7.0 (chr-ID MtChr8; po s 1132005 to 1132730)
caggtatgtttatgtacatctgtaaaatttatttgctccttgatattttgttattatcatttgtagcactgaaatttcagattggatgcgcgttgagtgtattacacatgtttgtgtctgttaaataatatgtaatgggccttttgttataattcggctaagggtagtttagtttatttattattcgaattagagtaatatttgcattatgaactttttgctcattctaataaaactctagtcgcctttgttctcttctccagtactctatgttacattcatttatacaattttttcaaacttttactagcgctgacatgttactatcaaaatcgtctccaacatgttattaacaaaatcgtctctaacgttggtgtttcataggacttaagttacggtactcaaatttagccacttttgtttttgtctaatcgaagtaacaaggactgaaattcgcagcaaggtcattctaactcttacaatactccgctgcctatttaagtcatactcaagcttagcctttttctaatatctctaatcttgtcatatattagtcgatgaaatagcttttatatatccttttcttatttgctagagatgcatctcttttacaggaaaggtctgtttataagatgcaaattacatataatagtataaaatggaatttaatctacaatttttctctctaattggctaattaaatttgcagagatatactgctacgat

SEQ ID NO: 32750 - DNA, 1010 bp, Medicago truncatula
  Intron number 2 from transcript Medtr7g105310.1 (locus Med tr7g105310) derived from phytozome v7.0 (chr-ID MtChr7; po s 24108962 to 24109971)
caatacgagaaacggtattgtcattttctgatttagatctggattttgttttgtgatgtgaattgaatgatttggttgaattagggaaatttatgtgatgatttgtgaatattttagatgtactaagattaggttaaatttaagagtgtgataatcataatctgttaaaaaaagtggctttatttgtattttgactttttaatgtgacacagccctaacaagacttggtgtgatgccgatgataattttcattgtatattggtggtggaagtaaagggattgggtcgttagttaggttgcaaagtgcatggttgcaaccacaatataaaggttttggaagcctctgcaaccaagttgcaattttaattgcggctgtatctgcaattttacacaatattaagaatcgctacgtaactgagagtaacctctgttcttaaatcttggaaaagtgtatcagggtgtagtgtcttgtagactggcaaagcttgtatgtttgattcatattaagagtaaaagagaactagacatagggctgaaaaatagtacattttggttcatttaaggtggaatggaagagagagtagaacaagctttctagactgttccttattttgtcttgttttctgcgaaatggctttttttttttttttttttaaaaggttttctgcgaaatgctatgtaaatctcaacaactgtgtggagtatatatgcattggagtttgaggactagggagacagtcattttaattgatcataacatattttctatgttttgctgatgctcatagaccaataacttgttgaaatttaaaccctctgaaattctatgtttcttccttttggttgtttacatacctgattacattacatcataacaatttccaataaactataaaattgtatactttttagttatgtttacaaatcacggtgttgaaactttaaaaacaaaatatgctttctttttctttttaggttcggtccatacttttgccagcctgtaattgctg

SEQ ID NO: 32751 - DNA, 986 bp, Medicago truncatula
  Intron number 3 from transcript Medtr8g112930.1 (locus Med tr8g112930) derived from phytozome v7.0 (chr-ID MtChr8; po s 25516746 to 25517731 reverse strand)
gtggaagaactcttccaagtcagctttactttgaggtgacaattctcatgattttccctgtattttcttgtatcattcaaataataataataattgcttttgtgaatcaatatatagccggtttgttttcacgataatactaacttcaacgcacgtccttcttaaatatacactttgtagcttcactaaaactgaggtaataatacgccgggacgcatgagtttaagagttttctgattttccaaacacacactttgtattactggttaagtgctataagatatgttcagtattgtatcatttagattgttcgataatcttttatgctgtgaattttgtgatttgagaaaaaatttctgataatgcttttgatttacaaatttatttacttgatgaaactgtggccttttgtttctttcaaatcagttatgttgcaaatgttttctgctggtaacacaatatgttaggtatgtttgattgtcgagtccaattgttttacgattgtccctcttagctagtgttttctttacatcaaattctgccatgaagaatattgtttttgataatctttttcagtatttcaactctccaactctatttttgttgcatcgtgcatttccttcattgattggcttctagtttaacagacttaatgcgtaaatgtacaaagttaaacaagaaaatctatagcagaggtttctgagatttttattggcatgaaaaatttgatttctctcttgttgaggactatgccgtgatatgtttcgatatatttgtactgtttgttttaccattgctatgtgttcgagagttggaggttactaggattgcatgaagtcttctgtctaatgtctatatgtggctgctttagaagtgtttattcggaatgatttgaaattcttgcatgatacaattctcatcctcataatttgtattctgtattgatgatgtgctgatatattttcaagcattgcagtgaaaagaaa

SEQ ID NO: 32752 - DNA, 447 bp, Medicago truncatula
  Intron number 2 from transcript Medtr8g112930.1 (locus Med tr8g112930) derived from phytozome v7.0 (chr-ID MtChr8; po s 25517690 to 25518136 reverse strand)
tttgcagagagacagccaaaccaaacaacgaacgtgtaagtacttcttcattcttcccttaaaacaacgtatgttttctttttttcttctttgcaaatgaatcttctgattttccacgaaatgcaatagctgtttgtcaatttgccttattttattttattttattttaaatattttcttatgcttagactttgtatatattacattttccactgtccggctgatgaattaatcaaagagaatctgtagcttctaattttatccataactttataattgtataaattatgtcaatggaatataagattaaaataattaatagtggcgattaatatcaagaatacaatgtctttttctacttttagcagcattggtgaattacttagcttataatttaagctaactgtggaagaactcttccaagtcagctttactttgaggtgacaa

SEQ ID NO: 32753 - DNA, 713 bp, Medicago truncatula
  Intron number 3 from transcript Medtr7g090010.1 (locus Med tr7g090010) derived from phytozome v7.0 (chr-ID MtChr7; po s 19964099 to 19964811)
ggttttttggattactggtgccagtcgtggaattggtataactataactatactcttttatttaattcatttcacacttatatttccataggattatttatatttcataatttaattcaaattctcccagaatgaaatcactttgttggagactagtaaaagaacctgattttgaatgacgtctgacaacttggtccttctgttaacttgtaaggagtagtttcacaataagtgatacaattcaaaaactcatttcctcgtaagtgatataatttagggactaatttgaaagtaaattagatccaagttatcaaaaggaccaacctgctcgacttaattcaaatttttgagtcttctctgtcttttcgcaaatttcagaggcaaaattggtgattattcaatttgattaacccttaggctccctactttattattctggtaatggtcatcttcccacaagtgttttcgatcaaattaatcatgccatgccatttaattccagtttcggaatctactgtttatttcattttatttgattttagggctttttttatccttaaactatcctctaccaatgatttctttgcaaagccagaatcttttcattatttgtagttttttcgtgtgacttatttcttttgttgttttatttaccctcatcaatgaatgtatatgaaggggaaattctagctcaacaacttgcaagtttaggg

SEQ ID NO: 32754 - DNA, 972 bp, Medicago truncatula
  Intron number 2 from transcript Medtr8g015120.2 (locus Med tr8g015120) derived from phytozome v7.0 (chr-ID MtChr8; po s 2579519 to 2580490 reverse strand)
aggggaaggttaggagaggcggtctcaaggcgtcggtatggtggagggagttgggtaatattggggagggtgttgttattgtatgaggggaggagagctggtttattcaatgtgtggggcatagtgcatgggatggtgaaagtacatcgttttgaagcgatccatagtttgagggcggtgtttacgatcaaggtttagccgtctatttgagctatgccttgatagtaacatcgtagtagcccagatgcataggtgtgaatgggcaggggtggagatggagaccatgctttacgattttatggagcttatttgtttagaaaacaaattcgtacgtgtttcgaagtagtttggatgttttgtatcttgattccttagaaagagcgcaattcaagacttttcatcaatctttaaaacaacatcaagatcaaatcaaactacattcatggcggtggttaaaggataatatagtactttttcccgtagatttttatgtttgatggacaaatccattactttgttttggattgtcccctttgtaatctctgcttagttttcttttgcatgtttgtgtaagcataattttggttaatatgaacaactccatttttgacctcttcaaataaaaaaataaacaaataaataaatttgtggtgtccaaaataaattgtttattgtaattatcattgaaataaaattgattgaaatttcttataaattacttaaatgcaatgttgcaagttgaatgaacacacacaaaataataattaaaccaaccaaaattagtccttccttccattggagtatgaatttagtttgccagctgtcaattacttcaatctatctatcaattactagttgaataatctgaggtgtcatttctattttatacaataaaaaaatggaaaaataataaataataattttattgtgtctctagagccttcgattctgattccaaatccctcacacctc

SEQ ID NO: 32755 - DNA, 401 bp, Medicago truncatula
  Intron number 2 from transcript Medtr8g110010.1 (locus Med tr8g110010) derived from phytozome v7.0 (chr-ID MtChr8; po s 24827350 to 24827750)
ccccaatcatataccaacaactcaaaaactataaggtaaaatagtttttattttaataaagattataatattaagggttaatatctccaattttatttttagaccgtaattaacaaagacatttctgaattagttaattagtttggtctaccaaattacaaatagaagatacattgagaattgtatttgtaattttatgggtctcttgtgacaacactcgcatttatatgtttagatcaatttatttgaatttgcacttgtggtgaggtatgagaaacttagtttttttcaacttatttctattaacttattttttttacaagcttaaatacttgtattattagtgcttaagtcataaacgtagttgtttatccaaccaggaactttttagggaattgaag

SEQ ID NO: 32756 - DNA, 281 bp, Medicago truncatula
  Intron number 1 from transcript Medtr8g132760.1 (locus Med tr8g132760) derived from phytozome v7.0 (chr-ID MtChr8; po s 31444946 to 31445226)
cgaaggctttaaccttcacactcctgaaacaagtaaaaaaaataatattattattttcaattcagttcctaaaattttgggatttagaatgttgaatcaaactaagtctcaaatagtcttttcattaaatgaacttggtcaaaaacagagtataatgtcatttcagatattttcccttatttttcttcattcggttacaacaactgggttatttatttaagttttctttttcttttcaatctacagggtcatcacctggttcatcttctcactctggaata

SEQ ID NO: 32757 - DNA, 551 bp, Medicago truncatula
  Intron number 1 from transcript Medtr8g129700.1 (locus Med tr8g129700) derived from phytozome v7.0 (chr-ID MtChr8; po s 30750163 to 30750713)
ttaaaggtagctactttattgatttttaaatattttaatttgtttttaaaaagttcatgcactgatggggtcgggtctaatagaaggattagacttttacaacctgataaatcaatatttgaatattgattgagagtgatatttatatttagtgtctgacatgcctcaaataatattattgatttattgttcttaatttttatattactatgtcaatacacttaaaatgcatcaatttgaaaattcgctttagagctacaaatacattgggtcggtcctgctctaaagaataaagaaaattgtggcttgagtgtaattctcaattagtgatttcttcttacaagtctcctcatattgtttctcatatttatagagaaggtaatcatcgtgcatataagcttgtttatcatgcttttagcttacataatttctctcagtggagtattgttcttgtctttattatggatggcttctttcataatagaaatgatcttgcattttatcattttaaataagtatttggttgttgtattcggaacaacggtggagaa

SEQ ID NO: 32758 - DNA, 595 bp, Medicago truncatula
  Intron number 2 from transcript Medtr7g110880.1 (locus Med tr7g110880) derived from phytozome v7.0 (chr-ID MtChr7; po s 25895861 to 25896455 reverse strand)
ttcaggttacctcattttcaattcttctttcttgttttcataattggaagaaggtgttttgcttttgcgtgtgtgtaatttgatggtcccatagtggaggcaagctgtaggacaaagagggatggaattcaaaaaaatgaaaataacaataaaattggaagttgaattttatatttcatgtaatttgatgattacaatttatgaagcaaaaggagctagatttatagttgatttagggcctgtttggattcatttatttgagcttagctactggcataagttttctaagactgtttgggagaacttattaaaacagcttgacattgttcataagctattttcagtttattttcataatttctccaagatagcttatgaaaatagtttataagcactttaactttattttattttttgctacagaagcacttatcatgataagtgctagtgttataagttgcaaataagttgtttattcaaacagagccttgttcatgttttcctatgcatttaagttttaagttgagctttaattcataaggtattcttacattgtgcctccctttgttgtttattctgaaaatagacggggctt

SEQ ID NO: 32759 - DNA, 374 bp, Medicago truncatula
  Intron number 1 from transcript Medtr7g120840.1 (locus Med tr7g120840) derived from phytozome v7.0 (chr-ID MtChr7; po s 28319444 to 28319817)
attaatttgactggtggggtagtgttgaaaatcaataaatttgattagttgtgctatttaaattatgagataagtttttaataatagggtttggttgctatagatagaaattatgaactttccttccaaaacatacagtatactatttttgttctgaatttatgccagtgaatgaaaatctaactaaattttttatctatacagaaggtctattttcattgggaagtagaaacagttgattggtaatcaaggcataatttataaatttaagaccaatttcttcaaattcattagttcaaaacaaaatgagttccacacactcaggtcaggaaactgatgaatatcacagttgtgctgtgcaagttctccaaggg

SEQ ID NO: 32760 - DNA, 659 bp, Medicago truncatula
  Intron number 2 from transcript Medtr7g104890.1 (locus Med tr7g104890) derived from phytozome v7.0 (chr-ID MtChr7; po s 23924081 to 23924739 reverse strand)
ttgggaagtaaggctgggaatcttctctgcttttttatctcatttttgtagtcattcaatccatatacttgccctgaacatttggaagtaagggttttttgtttgtctaatatttcagggttcattttaaattggcttaattgcacttttgaacccctatctttttaaaagttgcggttatggacccctaactaatttaaatacaaaacagtcccctatgttttgattctttgacagttttggacccccaaggcaaaataaaaaataaaaaaaattgacacgtggcacctcacttagggtgccacgtcagcgttgaccgagtcaacaatggactgggggtccaaaactgccaaagaatcaaaacatagggggctgttttgtatttaaattagttaggggttcataaccgcaacttttggaaagataggggtccaaaagtgcaattaagccttttaaattctatcaagtctcaaccttttccttttttctggtgtgtattcgaactagtcctttacatattctaagacagactaatgattttagtgactacgaaagaattgatatttcatgcatatcttttacacttgcagttctttctttcaaacttttaagaagtaatttctgtcactactatatttatgaattttttttatagagaa

SEQ ID NO: 32761 - DNA, 751 bp, Medicago truncatula
  Intron number 1 from transcript Medtr8g044500.1 (locus Med tr8g044500) derived from phytozome v7.0 (chr-ID MtChr8; po s 9995026 to 9995776)
tctgcatgtatgtttctcaaatctgctctctttctctcacatccacacactgaattaatggcgtttaggtcaaaaattgacctaagagtgaagactgttgttgccatattgccaattgtcaaattagttgtctcaaacaagaaaaaagttttgcattgttgttactcatcaaaatgagtgtgctagtgtgtttttgacctcaagccaatgaggttaggtctagtagaaactagaaagtaccagtctcataacatggtgaatcacaattgttggaagatacttcgtatctagtatccaccaaaaaaatattagtagccaccaccatcttaatttgtagaataggcaagaactttaactttttgcaaaactgttaagaattgtgtgttgtctgagtatgttatgagatataattttttttaaaaaacatttttgaaaattagttttatcaacaaaaacttatgctaacgtaaaaagaaaaaactaatatttactagttaacctttgactttctttgagttatgcttgaataacatacacatatcatttgtacttttcatatttattaggtattgacactcatatttatgtttatcctgaaagagatgaaactcttatctactatatagtgtatcaaaaagtaaatgttaatagtaccctctttattcacgaaatgttggcactgaggattttggtacatggtgatatgtgtgatgcagggattaccaacaaggtggcaaaaactctcacctca

SEQ ID NO: 32762 - DNA, 358 bp, Medicago truncatula
  Intron number 1 from transcript Medtr7g092740.1 (locus Med tr7g092740) derived from phytozome v7.0 (chr-ID MtChr7; po s 20481211 to 20481568)
agattcctctccgaggagctgtgaaaaaatgaccacaatgtaaaagagcacaatgaagaaaagcaaagtaaaaaatgtatgaaaaagaaacgaagacaatagtaatatcttttagaaatgataaaactcataccagtttcataaatttcagcataaaagcttgtaaaatgacatgctaagaactgataaaagaaaactagaaatggatgtgtataacgtaccgaaacatttttctcattcgaactcatcttatcgtcttcaaactttccctgcggaatttgaacagccatcgaatcaaagcttaaaagatgaaacagaagtagtggttctggaacttcaaggataacaaaagtttaaa

SEQ ID NO: 32763 - DNA, 939 bp, Medicago truncatula
  Intron number 1 from transcript Medtr8g012050.1 (locus Med tr8g012050) derived from phytozome v7.0 (chr-ID MtChr8; po s 1787217 to 1788155)
tgcagagcattcttgttctgatccgtacgtgaggcgtaagcgatatacacatttattattttcatatcatatcacttgaatacatttgattcattgtattagtgaagactcttagaaatggtggttgggcctaacacaaccccacaaaacagcttgtgaggtgaggattgccccccacttataaacacattgtcaggccacctatcccatgtgagactcttaacacacccactcacgaccagcactattgggcttggttcgtggacataaatggtgggtgtcccgatagcgaaaacctgatagcaggtggtccaatggattttggagaggctctgatatcatcttataaatggtggttgagcctaacacaaccccacaaaactggcttgtgaggtgaggattgccccccacttataaatacattgccaggccatcacctatccgatgtgggactcttaacaaagactacaatgtagttagtcatgaattagactgttttgggttttagtaagaaatttactgagatgtaattttatccgaatagtaaggaagaagaagaagaaaggaaatcaaagtttttaatttaaagttttgctaagtcgtgtttttgaatttcatccctctgtaagtttttgtttttggattagtccctataaccttgccatggacatctggaataacacataagcctcacttgccacgtcacacatcgccatgtcagctgtcgtcagacacaaaagcgtttgtgtaacagatgctgacggcagggaccgaaagcaaaatgtttataacttacagggtctgttttagaacaaaaaaagatacagggacgaaaaccaaaaacacgcgaacttacagggacgatttacatatttaagcctattttaaattgatttaaatcattccatttattgaatttctagggacccacatcacaca

SEQ ID NO: 32764 - DNA, 782 bp, Medicago truncatula
  Intron number 1 from transcript Medtr7g103050.4 (locus Med tr7g103050) derived from phytozome v7.0 (chr-ID MtChr7; po s 23003961 to 23004742 reverse strand)
gagaacactagtctcctctacactaacaccgcaaggttcgtatgagactctcttctttctccctcttttacttccttcccttttccgtgtccccattttccttccccccgtaatcaccataataatcataatcataataaataattgacacttaattacttcaattcaacttaattttctactctagatccaccgctaaacctaacaagaacactcttagttctagatctgtttcataacgtgtagatccattagatctgaatctgaaaacatggtagttcatcaaatcgttattccaaattcataattttcgataatttacacttagatccaacaattttgaacataatcatgctaatcagaactcacttagtttaatcactaatccatactccaatcgactccaattcaattagttttactagtaaatcttgtttaatcatcaaatcactgttctaaaaccttcattttcgttaaattcacactctattttcaagatcgagtacattttaacgaacctagttgcttatccgtaatcctctatttcactacaattagtattttaagagttaactagcttgaaatgtgcatcttgtaataattttaacataagaatattatcagttttatcagtgggatttgtttgcgatccactagattagtcggtccttaggtctgataccgagttttcaacaaaaaaataaaaatgatatcagtattatgattttgttgttattgttgttggaattttgatttgatttgatttgatttatacagaaaaa

SEQ ID NO: 32765 - DNA, 662 bp, Medicago truncatula
  Intron number 3 from transcript Medtr7g093350.1 (locus Med tr7g093350) derived from phytozome v7.0 (chr-ID MtChr7; po s 20908656 to 20909317 reverse strand)
tcaggtgaagaacttgcgcttggtgagggacattggtaaataaatttctttggtctatcttaattttttaacagtctattatttcagattttgtcagttatttccccccttactattatacatcttcaaacagtgtgtttttgctaaacatttaatggttgaacttgcggatcgatacaattgagtgcttgcatgattctctgaacttgattgtgtttttgaaaaataacatttcattgaagaatatgttctcttcttcatctcttatctttaagccattttgagaactatgaaatatgtacttctcctaggaattatttattgtttctatcgtataatttgttttccctgctagagaaataatatgttgcctgtaaatgtgtacatgtagtatgagaattaaatggttcatccatgaactgaaaaaggatccttattgacatcttctttgcaagtgtttattttccaactgatatatcactcctgctatcaatacaacatactgtatacctatgtttttgtgttaaacatctgccaagtgctaatggcttggaaattttgcgtgtttgttattatgaatgatatgtgtttttatgaagctatgggattcaattttttatgtttgatttatttatttgtagtgactggagcttctcgtggtt

SEQ ID NO: 32766 - DNA, 1026 bp, Medicago truncatula
  Intron number 1 from transcript Medtr7g100150.1 (locus Med tr7g100150) derived from phytozome v7.0 (chr-ID MtChr7; po s 22511783 to 22512808 reverse strand)
aagaaaaacctgtaattgttgtcacagaaacagtgtgtaagtgtaattattattattatgagattctggtttatgtcctttaatattctgcaaaatgccctcatctcaggcatcttctgcgtagattcagggaattgttcacatgcatgatgcatcatcaacttgactaatcagtgtctgctcacaatctaattaactttaatcatatattccaatctttatatttagtactcaccttttatacattatccaatctaatctaattaactttcatgatcaatagaggaatacaaatacaatattttaaaaattgattcacactaccaaagaagaggggattagactcacacaaatgacaaaataaagtttgaatcccaactaatatccacatttagtgccgacaatgcacgaataagattacctctagtaaaaggaacctacggaaaaaaattgattcacacttcaatttacgtgatttcaattcatagtttatgcttctctcaaaaaaaataaaaaattcatagtttatgctttatactgctcgaatcggaatgaaactacaattgaataatagctcaaaactgaatcacaataggtgatgttcatggttcaataggttgaactctctaaatcggataatttttaaactagatgtctattactaacaaatgtcggactagttactaaacttgcacacgataagaatatgagctcaaattccaatgtctatgcgagaatttcattgattgatttgtaaaatgtaagtgcattatttgagctttgagattctttgacctcaatgatattgaaatccaattcacctaatttttcccctaattaacatatatgtaattagtatataactcacaatcttattacaaactattgtttttccttgttaataagctggtatatacaaacaaatacaaattgttaatttgttataagcatatataatactttcaataccataccatatgttggatgtgatgtgatagaggggctggactcaactagactctcata

SEQ ID NO: 32767 - DNA, 994 bp, Medicago truncatula
  Intron number 2 from transcript Medtr8g047750.1 (locus Med tr8g047750) derived from phytozome v7.0 (chr-ID MtChr8; po s 10820069 to 10821062)
ctgaggaaacgaaaggtttgattcttctttgaaattataagtttaattgatttgactgagtatgtttttataatgatcctaattcctttcattccccagattgagtagtttgtacatttgtggattataatttcagcataagataggagacagtctcagtttcaattactatacaaatctctgcatttttttggattaatgaaactctgcatattatgttctctagttgagacctgagcatgtgtcatttgcatttgttaaatttgaattaaagaggaatcggtccattgatcagaagcaagtcttgtaacgtagaataaacattgttaaatcattacaccatcagcattgccgtcttgatgttatttatttggatgtatctctcttatggcctctgctctatcttttacatagtcattaagaattgttcaggaaaataaatcacatgagacacatttaattttgtgattgacaaacacaaatgaacatgttagttctgatgcaacttttggattattctgctctgaatataccacaatgaatctcactaaggggatttaaatttttccattcatacaaaaaccttaccgtgtgacatgtttcccacttagagcacagagttgcacctttgaaataaaaattactgctttcattaattgagtttcatatcaggaactatatgccttgaatttccactgcttcgttaagtcagttttttttatattgggtgatttggaatttgatttatcggctcaacagtctttgctctttttcattcaattagcagtgcttgtggaagatcttggatcgtacaaccatacatgctataataaaaactatatctatatgcacattgtatccatggtcatttttacctgttaaaatcatgggaacaaaattgctcttttatacatgctaacttactcctttgccttgtatatactatcagattatattattaatttttgtcctcaacatgcaggagctagagaat

SEQ ID NO: 32768 - DNA, 925 bp, Medicago truncatula
  Intron number 1 from transcript Medtr8g129640.1 (locus Med tr8g129640) derived from phytozome v7.0 (chr-ID MtChr8; po s 30709845 to 30710769 reverse strand)
ctggagggacgagagtaggaagaagttagtttagatgatccgtgataatgtgctatgttttacttaatcgcgtgttttatgttgttttaattgcgtgttagttatgtgttgttgaattaagttgttgcattatgttttattttacatcaaatatgttcatttatttgataaaataaccaaagatatgattttcggattacgaaatctggatttgcctagggcgtatgtgtgttccggaaaatgaaatccggaatacctcagcataggattcttttgtatggaccacattgcaccaggagtttatgtggtccacaacatccaaggacctatataaatacatcctctccggttttcagcttcaacaccatcaaaacacacaaacacaacaaagaataccatgcaaatttttgtcattaagctgaggatattcctcacgttgtcgcaaatagatgagttagctctctgtttgacggcgttatgaagatcttctgcatgctgtcaaaaatacaaacaagcacaccaaagagaccatgcaaaattttgtcattgtgtcgaggatctttctcatgctgttttaaatatatagatctctatataacaacatgatgaagattctcagcatgctgtcaaaaatatatagatagtccttgatgcctccttgatacatagataactcaaaaatatcaagaggttgctatgagttagatcgtgctgcctgccagatgaatatgtcatttggcaaggcagcaggatctaactcaaagaaatcctcttgaaaacaccttcccaaaagattcatcatttttgttattatggttttttttaactgtttatttgtcttatgttgcttcaatttatgttatgtacttttgttctattttttttccaaggcatttgcaacgaaaacgatccaaacaaaagggtc

SEQ ID NO: 32769 - DNA, 844 bp, Medicago truncatula
  Intron number 2 from transcript Medtr8g101610.1 (locus Med tr8g101610) derived from phytozome v7.0 (chr-ID MtChr8; po s 22090886 to 22091729 reverse strand)
ctacttaccttcataataacaaaggacctgctcgggtaagtcactttcattaactgaacaatgaatgatttgttgttttaactgtattaagtaagtttttgtcgaaattgacttatttgaacttatctgttgacataagtactagtcagcctactcgagagaactcatggaaatagccatgacatgtctataagctttttaatcttacttatttttataagctcttcaggatagtttatgaaaattccttataacttacattttaccttttgttacagaaataggttatacataagctcttatgataaatggttatagcgcaagtgcttaattaagttgtttattcaatcagggctaagtatccattcctaccagttggctgtaggagtctaatagctttttcccatattaaatgttcttttcatccaagtcaaagtttctcattgttgaatcttttactaagcaataatatgttttctatataagaaaaaatccactagaatatagatgcacaattttatttgttatctgcattgaacccttctgtgccccaagctagctatgatctagacatgtttaattcatctttttactattcctgatgagatgccttagttatgcttctaatccattccaatcgagcaattcctatgtcttggcagagaaattgtacttgtttcatatgactaatgtggttcttgaaatgagaacataaattagcaaatgtaagagtcatttcaggttgtatcaaatgcaaatactgttttggccaaaactctagtatatatcttacaatgtctccccattaggtggacattataggagttggttgctattcttctaa

SEQ ID NO: 32770 - DNA, 423 bp, Medicago truncatula
  Intron number 1 from transcript Medtr8g029450.1 (locus Med tr8g029450) derived from phytozome v7.0 (chr-ID MtChr8; po s 6505998 to 6506420)
gctattatttctctttaagtctttctcaggtatgtgttgacttttgagtcttcccttgtttggtttctctgaatatgtcaatagggtcttccaacttgcacctattttcttctctgaatatttcaatatgaatatgtcaatagggtcttttctttttatgtctcattttcattgattaacattggtttttgatatagtaacttcatgcttctattgtgtttcatttcatatattgttgcaatgttttgtacaaagttttggagacattaaatgtccacaaacttatgatagtaatctattatcagttctattgtagaaaagaaattggtaaatgaatctgataaactccttctgtttttgttttctttatatattattatcagatttagaccttgtttggataaacagcttatttaagttcta

SEQ ID NO: 32771 - DNA, 637 bp, Medicago truncatula
  Intron number 2 from transcript Medtr7g134220.1 (locus Med tr7g134220) derived from phytozome v7.0 (chr-ID MtChr7; po s 31633889 to 31634525 reverse strand)
tactggtaagtgttacttgagcatgctcttttgattttgtacaacttatttcttacaattacatacaattcgtgctggttaaacttagtttcatacccaaaatcactcttttgctttgtagggtatgttttgtagaagtttatctgaaattttctaaatgagaatcaactatttgatgttatgttcaaaatgtaaattgataagaatttaattagcatactctgatgttagtgtatatttattttacacatgcatcaaatgatttgttgccatgtcaattaatgaatatgaaaataaatgagatgtcacattcattaattgacgtagcaacacatcattggatgcatgtgtaataattgtacattgataaagtatattaattaaattgtcatcggatgctggtgtaaaatagttatacactgataaggaacctccactaaactcttcaaaaaaactgtaagaataacatggtggatgataatatattattttgatcgcacttaatttatttttggaaacatttataactttcttaatttagaaaaaaaaaagtcattccctccaaaatgctgcattcaaacatgcccttttcgtgttttgttttttgcctttacattttatcattttccagtctcta

SEQ ID NO: 32772 - DNA, 1026 bp, Medicago truncatula
  Intron number 3 from transcript Medtr8g087350.1 (locus Med tr8g087350) derived from phytozome v7.0 (chr-ID MtChr8; po s 18141486 to 18142511)
gggtttctgttcattttcaggagattgttgatttggtaccttttcttatttactctgctttgttggtgctatttagatttttattgttatctttgttgaagatgagatataaattgggcaagcaataaattctttaaatttgacttccaatatttttttttttttttgtgaagaacgaaaagattgtagatatttttttttgttttcaatttcatttgatatattatcactatagtctgcgttgttatgatatagtggtttggctgtgaggatattttatgtgtgtgcctgggttcgatccagggtctccacatttcccctctcctgtgtatgtttatttgagtatgtgttagccactaggccaatagcaaacaaaaatataaatatattttgactattaattctaaaaatggcatcgcttctcttcactttatttcatgatttttagaatttacaaaaggttaaataagaaaggaagtataaccagaatgtaaaactaaagaaggaacaaagctgaaaagaatttgggcttttgggtataactcaaccccatgaggaatgaggactgtccaaactttataagcactacttaagccatatctctaggtgatgtgagtttaaacccaccccctaacgctatgtaagccagtacaatgaaggtcatggaggctgcaatgaaagcagccctgttccgaaattacggtggctagaggtgtgtcgcaattaaggtggaatttccagcagacatttagtagtaaaacttatcaatggaaaatcaagggggaaaatgataagcgcccttagtttacacaccggccccttactcttggctttttaattattttttgtttgcttattttcctttggtttgttctgtcacgagcttgtttttaagtagacctttataccacactgccagtggtaagaagagttttcagatttacagtttgatgaccctttagtgtttttcatctttgatctttcatatttaaaaattagaattgaattttgtatggctgcaggaag

SEQ ID NO: 32773 - DNA, 810 bp, Medicago truncatula
  Intron number 1 from transcript Medtr8g065500.1 (locus Med tr8g065500) derived from phytozome v7.0 (chr-ID MtChr8; po s 12345587 to 12346396)
gatttgagagagaatttgaaagaggttagggtttcacatgacttcgacagcatttataactaagttgtcaataaaccccaagtcataaagcccaatcaaataagccccaccaagctcactatatcacagaaaaattgctctttagactcgctagtttgctctcaaacacccgatattacctttttacctccaatggtagttaactcacatgttacatatttcaggcagctttcttcctcctacactattcattcaccaactttgttagattttttttctatctccctatctataataaaaaaagttttttattttttattttatttttttatgccaaatcattgaagaatgatagttagaagatttatatacatttgacgtcaagaaaccgacattgcatcttttaaaccatttacattattgcttttttcttccatatttttgttggttctaaaaagaactcgtagaagtagttaactaccatatagctcccaacaacaattaagtaactacaataggtgcccaatatttggccttttgcattttttctttcattttgttgcatttaacgattgaattaaattttgatacttattttttttttacaattatttgttgtttattgatagttatggttgaaaatgcggttgataattcagttgagtcaaaaccaactaatgtcgagtcttccgtcgaattgagaccgtctatggttgaagcttccattgatgtgaaaccatatattcttaaaactttcgttaatgtgaaaccttatcttgttggttttgcagattttaaacctcttcacta

SEQ ID NO: 32774 - DNA, 883 bp, Medicago truncatula
  Intron number 6 from transcript Medtr8g134460.1 (locus Med tr8g134460) derived from phytozome v7.0 (chr-ID MtChr8; po s 32350915 to 32351797)
ctcattcaaaagaggtagcttgcttcgctatacccacactcaatgcttgtagcctttttgggcagaaattattgcttctgtttactcgaccgtctagattaaagatttaatgagcatttgaattttgttttctttaaagtagaagtagttatattaactcattaagtgctgaccatccttccctctcccattctgtatgacatagttccttttgtattgttttgctcctaattccaaagcaatttgattatttagatagtgctgttctcaagtcacatgacttgtgcaaacacacatctgtgggaattcctagccatgaagatgcgatttttaaatttgttgttacttgtgtacaagagtttttaattgaagttgattgttgttgagatccttgttacttctcccacagtaatccacacctcagatgtccgcagttgagtgttctggacgtgaaggggtgtgttgagatccctattagtccacacttcaaatgtccagttgtgagtgtgagagtgttagtcacatatcaaatagagatgtgacttgggttgtgtttgtaaggctttgatactcctctccttataagccgattttgttgggttgagttatacaccaagtcgaaattctaagaattgcaataagataaatgtatactttccaaggtgcttcattgtgtcaggaactcccaagactaggataaatgttttgctgtttctgtatccatattttcgttgttttttcatctgaaaattgaactttcaaaatctgtcacttcaaggactatactatgtaaatggtttgatttgaaagttttaacttccttttgaacttgctttgcaattatgtaggctcttcaaatatcaaatttagagtcttctgattc

SEQ ID NO: 32775 - DNA, 1022 bp, Medicago truncatula
  Intron number 1 from transcript Medtr8g025020.1 (locus Med tr8g025020) derived from phytozome v7.0 (chr-ID MtChr8; po s 4851142 to 4852163 reverse strand)
tacgggattgatcttctgactggtctgaaacaattttgatggtgtagctacgagtagtaatgctagaatttgaagtcattttcttgaaaattttgctttttatgtaaattttgttgataattctcaaatgggaataccatttcgagaaagtgaaacatatattataacataatgttacaatgtcagagaatcaaataagtcgatggtcataacatattaatcacacaataatatatcttgtaaaaaaatacccctcattattcatgtattatacatgattatatcaaatgagaagaagacaatgtacaataagagaggaaacatggatgagatcttgaacattagggaggggagaggaacaccataaagggaaatttgaaattactatatgccatcaatcctactaggggaaaatcccaacagagttacagaaggatataaagtttgttaagttatgtcatattgatataaagtatgaactaagttgatgatgcatttttaaatattgaaagatcaatttcataatatgtgttgctcggaaaggattgtctcctatgttttttcctcgttttctcctgtgaactaatctcagccattcattccttttaaattgagctcatctaaaccctttattcattcatttttctttttacaagttcattcattcatttcctttcgttgttttctcacgaaaatccctcatgaattacaatgatttcttttcttaacccttctctattttccatcttccttcaaacccattaggaataataccatcaaattccaatcactgttcttggaaagaaatcatttgaacaattttgatggtattattcctaatgatatatgaaatttgaatactaattttcaatattttcttaattttggtttaacaaattttactggtggtgttcctcatagatttggaaagttgaaggaatctcaatattttttgtttgaatggtattgtttctgatgagatttgtaaattgtataatttgagtatctagatttgttcttca

SEQ ID NO: 32776 - DNA, 677 bp, Medicago truncatula
  Intron number 4 from transcript Medtr8g109340.1 (locus Med tr8g109340) derived from phytozome v7.0 (chr-ID MtChr8; po s 24499259 to 24499935 reverse strand)
agctccaccaaagagcttctgatagataccgacaggtaggtacctttctgataggttcaaagtaggtgtggtgttagtatcagttgttatcgaatttgttgccatgtttaaatcttatcaattatgcaagtaaatagataatctgtcatcgcaagagccattggtagatagtattttctcataccctttaattgtatacctgtccatgtaaatgtatctatctaagcatatatacctgatttgatttgtacctgtctactttgaagaagagatgacataggcacatagatttctgattcagcctagctggctgttttaaaaggatttatatcttttcattttcctccttcgtttttaccctcgtgtaaagagatatacagataagccacaagagaacttttgtttttgtgtgtaggattttacaaaattatttttttgtcactcctgtgcctatctctctctcaacacgagggagaaaatgagggagtaaaaggagaggatccaaatctgttttaaagctagacactctttcttcatcatgaatcatgattatcatcgaaaccaagtagctagctgttttaaaaaatatgattggtggtgtggtatacatgtaaaatgaaaatataggcaagtgcttatcattagtgataatactactactcacctttggcaggtca

SEQ ID NO: 32777 - DNA, 1042 bp, Medicago truncatula; identical to SEQ ID NO: 32544
  Intron number 1 from transcript Medtr8g096550.1 (locus Med tr8g096550) derived from phytozome v7.0 (chr-ID MtChr8; po s 21221199 to 21222240)

SEQ ID NO: 32778 - DNA, 812 bp, Medicago truncatula
  Intron number 2 from transcript Medtr8g134500.1 (locus Med tr8g134500) derived from phytozome v7.0 (chr-ID MtChr8; po s 32369452 to 32370263)
ctctgcggaggcgttgagaataagtgtttggaaaggtttgttttctgttattttctcttaatttattctcaattttcttgaattcctatgctgaaattttgcattctgaggttaaattagtagttatggataacctgaggtgttgttgtgagtagaaagaagagtaatctatgctccatttggttggaacttaactttagagtctttagaatatgaagcacagacacacgcgaacattggacacgacattgtcgacactaccgatttaatttgaaaaaatgacataattcaatttaatcagatgtgttagtaacacaccgacacatgtcggacaccaaacacgcctttgatcagaagtgtcgctttagagttttagatagattttttgtgggatgggcttattttcctaagatatttttttagctttgaggtcattgatttcaaggttttttttttttttttttttgtatattcaaatggaattgttttttgctctttgaggtgatttatgaactatggagatttatcatatgctatggtaaatgtagtttcatgtgcacgcgcctttacattttaatattatgtgtttttatatggaaccatattaaatattgcgccagcgaatacctttttattgaatgaattcatctcaaaatacaatgttggctgaagctttttgtcatgaatgcttgtaaaattacacatttctccgaaatggtttatactctattgaggcacttgttcattggtattccatctaaagtctcaactctgcaggtgacgtcgtcctcaaagatttgaaactaaagtca

SEQ ID NO: 32779 - DNA, 1027 bp, Medicago truncatula; identical to SEQ ID NO: 27785
  Intron number 3 from transcript Medtr8g084220.1 (locus Med tr8g084220) derived from phytozome v7.0 (chr-ID MtChr8; po s 17355852 to 17356878)

SEQ ID NO: 32780 - DNA, 149 bp, Medicago truncatula
  Intron number 1 from transcript Medtr7g097190.1 (locus Med tr7g097190) derived from phytozome v7.0 (chr-ID MtChr7; po s 21928101 to 21928249 reverse strand)
gcctcatctttcttttctggtgctaaatctttcctctttttacctttttattatctgggtaatttttcaattcaccgttaatcactttgatttattaacatttgtgttttcttctttctttgtttttttcaggcttttcataagggtaa

SEQ ID NO: 32781 - DNA, 411 bp, Medicago truncatula
  Intron number 1 from transcript Medtr7g103630.1 (locus Med tr7g103630) derived from phytozome v7.0 (chr-ID MtChr7; po s 23297800 to 23298210 reverse strand)
actgttttgtcagagtaagaactatctagctaaatatgttctaagtgttagtttgataaaaaaaaaatccatttgaagttttaacagttatatgaaagttagatgaaaaaagttggttaacatattgaggtaaaaaagcttattataatttattaattttttaaaaaacaatgatagcttcgctcctctcttgcatctgcaataaggggttgaccgttgttatccatcaactaaaagatcaatactcaacggccaaccactgactgcagagacgagacaagagaagaccaattattttgattttatttttctatagtataattattgaaaagtttattaagttagctctaggcggccattctcaactacatcgattcataacatacattttcatccatgtgcagggttgtg

SEQ ID NO: 32782 - DNA, 1010 bp, Medicago truncatula
  Intron number 2 from transcript Medtr8g147000.1 (locus Med tr8g147000) derived from phytozome v7.0 (chr-ID MtChr8; po s 36069578 to 36070587)
tataattacctcactgaaccattcctcatttcttggtacgtactgtactactactactactacaatttcttggaactatttgctattatcaacatgtttgaaaaaatgccagatttactacggaatctatgtttaaaagtttctctcttttttgttttttctaccaaacaaatctatatttattttttattttttattattactttagaccacatgacttcattctttcttttacaggtgcaatttttttcttcttatttagaatataaaggtgtgtatgagataaagaacaaacataacataaatttgacatattggatttagttcattgggtggttagtgcggtaataattaaacaaaatctaataaaagggggatcttgcaataaatagaagtatgtacccttgcttttctgtgttgtctttttgggctttttgtccaattgctttttactttaattagatgttgttagcttcatttttaaacggagatgcatggtccattctcagttatacattgattaatatttctactatgatgggttgggatcataaacaatgttctctacttgattaacttgcaattattcattgactgtaccaatccattactatgcagtgctataaaattgccagctaacagactgtatgtgttttaattgcaactgcagtaaaatttattgctgtggttgagtatactatacactccacaaatcacataccgtatgagctggagaaagttaattttttttttttaattatcacaacatggattgatgtaatgtttttaacatcaagagttttaatttcctaatttcaatgcttttttatgtaatttgattttatatgtatcatttgatcatgtcccttttgtaacaaagtgccaaagagaagtttgttaatgctttagatttacaatccttaagtgaatggtctagtttattcatttagcataagtaaattgttttagtttgttggaattttatggtttcaaacatatcttctgcagga

SEQ ID NO: 32783 - DNA, 849 bp, Medicago truncatula
  Intron number 2 from transcript Medtr8g092930.1 (locus Med tr8g092930) derived from phytozome v7.0 (chr-ID MtChr8; po s 20189620 to 20190468 reverse strand)
ccctcaccaggtgcaatttatcaactttaactacaatgtacctatgaagcgcagacaccgacgatgataatttatgaaaatcaattaatttagacgtcacgcgctgacacatgtcgagacacaagacacactttcaatcagaaacgttgtgctacaatgtacatacttttttaatgaacaaatgatctgtacaagttcaattgatatttttttcttcttaaataacatagatactctcttagcatcaacacttctgattgaaggcttgtgcaatgttcgacaggtttctatgtccgacacactgacacatgtgattacattcaattatgtcattttcttaaattactaccggtgtcaatgtcgtgtctggtatttgtgtcactgattcatagtatagatataatataatttagccggtagtaatttaagacaatgacataattgaatgtattgtaatcacatatagtatagatataattttcctgcgattgtagattattagttattgatgatagttatgttgaaagcagtgcatttattcaaaattgcaaagtaaggaaaacaaaaaggtcagacattactttaaattttaagtgaattagatagaatgaaatagcagattagagtcattacacataaagagaacgaaaatcaagtcatggaatattttgtaagtggcagggcagtaaagaaataatgcaaaagtaatataaggttaaacatgaatgtgtatttgaaaaatagcaggtttatttattcagtttggaactttggattattttattattgatataggaactttggattttgattgtattggtctgctgttaatttgtattccagaaaaca

SEQ ID NO: 32784 - DNA, 560 bp, Medicago truncatula
  Intron number 1 from transcript Medtr8g139030.1 (locus Med tr8g139030) derived from phytozome v7.0 (chr-ID MtChr8; po s 33812705 to 33813264)
ttttctcgcaaggtttttactaggtttaaagtgcgtgggttctcatcatcttcttcttctcccctcccgaggtatcagtatggtggcaccttgacagctgtcccgtgccttctgggtttagcttttccaaggtagcaccttcaattttaattcttcaaatgtcgacaaagaggctcttatttcaaacaacattactctaccctcctttaccgacgaatacactgctactcgcatgcacaaaatatataccggttcgttccttccttttccactctattattctgttcttgtcaaaattcatcatgtctagtacatacatacatacatatatatatatatatatatatatatatatatatatatatattaggacttagtaatcaaatgtttctttcacttttcaaataataatgacgccataggagatcttcgtgcagagttgacaaactgtgatatgcctttggtgaaataaaaagttttccaactttctaatatctatatcatatgtacaactccagtatttaggaggaggtaattttgggtgcgtttggtcccatcaa

SEQ ID NO: 32785 - DNA, 1062 bp, Medicago truncatula
  Intron number 3 from transcript Medtr7g106150.2 (locus Med tr7g106150) derived from phytozome v7.0 (chr-ID MtChr7; po s 24472658 to 24473719)
ctgcttcagaacacttaaattgactactcctagctgtgagtattgtttgaattttaagtgatctagatctattatttttttttcatcactaagctagattagtaacatgttaattgttcattgatttgtttgatttgaagagtgattagttagatcagtgttcgtggttagttatggtgattcttgactttgaaaatgggtttacgtgtgtttgattcagtcaaattagtcaaatggttttttaatatgcatttgtttagtcaaattagttttctatttcgggatttgaattagtattgaatgaaattgagatatactccctccggtcattattataagcaaaagttcactttttagattcattcaataaatgatgtatgtaatatatatatatatatatatatatatatatatatatatatatatatatatatatatatagaccacatagattatttattgaatgaacctaaaatgtcaacttttgcttataatagtgatcggaaggagtactttgttgagaaattgatttgactgattctagttgtttaaggaattttactgcaaatactatgatttccattttaatgttattatgtttttcaagattaatttgacaatttagatgtactctgtttactgatctggttagtgggcatttaattatagttatcatgctattactgatctcttttaattaaagttatatttacactttgggatctaatttctaaatgcctattgcaattgttcatcacttgatacgaatacgaatgcatcatgtgactaaggtgctttgatgttaattattcatttatttaaatcatttttatggttcattatggcgattgttaactaataatggaaattgttttctcattgagcacttttcagtcaaattgctttcctaaattaaatcaactagtaatttttaatgtttgaatgaatttgattgttcacaaattgggtaacttagtcctgtagttgatgctgtttgctattactgaaaatgtgtgactgtttgctgcagttggtgacttgaaccacttgatctcagcaacc

SEQ ID NO: 32786 - DNA, 706 bp, Medicago truncatula
  Intron number 1 from transcript Medtr8g106620.1 (locus Med tr8g106620) derived from phytozome v7.0 (chr-ID MtChr8; po s 23957074 to 23957779 reverse strand)
atcttcactactcgcaattcactttccaaagtaatgacatcttgctaaaatttcccttaattctatgtttggagctgaaataatgttctgtttttcattcatggactgattattttggttctcattttcaaacacacaatattcattgtgtaaactatataatcatgatttaaagaatcgaaacataacattgaggtgaaaataaaataaaaaatataatcacgatttcaagttatattcaaagttgcatgttatttcattctaatcttgaacacaactgccaaaacaaacagtactagaactacaaaaggataatggttcacggttacaagtggtcaggttaagcagagtgagcaattttgagatgctaaagagcaactatttggttagaatgtggtggtcaggttaagcttaatgggtctagattcaaccacagtattttggcccaaaatgtaggcatgtgtacatctttatttacctttagagagaccaattgttaaacaaaaaatatttcatgcagaactgattacactgtgattggtatgcattaatgttcccgatgcatacttaatagcgaaatactgataaactaaatattatagttcttctttttgaagaatctataaatatatttaagccaagaagactacacttattttgagttggtgcaggcttgaaacgagacgagaagttagtgggcttggag

SEQ ID NO: 32787 - DNA, 539 bp, Medicago truncatula
  Intron number 1 from transcript Medtr7g105830.1 (locus Med tr7g105830) derived from phytozome v7.0 (chr-ID MtChr7; po s 24347236 to 24347774 reverse strand)
agaagcagcagttgggcgcgagcaaaggtttcaaggtgggtgtttctagccattcgcttcgctagctctttagcgggtttcttatctcttgttattttggttttatctttgtgtttcttttcctgtaaccgctttgaattttcttgagggttttggtttcatcccccctcactctttgtttttctttcttttaatatatgattagagttctgcagtatgagatccctttgtaccccttcttttgcttaaaaaaaaattctttaaagtaaacttatacctagaatacatatttttgaataaaattttgcagaaaaattcataatattataaaaatctcccctaaaaaaattagaattttttaacaaaacgtgaatttaatgagtttttatatttttgacggttaaaaattcatatttagtttatgttttgttaaaaaaaaaatggatttttttttacgatattctacacatttcattaaaaatagaaaaattaacttaaaaataggaatcaaaagtagtgattgaaaattttatagagac

SEQ ID NO: 32788 - DNA, 360 bp, Medicago truncatula
  Intron number 2 from transcript Medtr8g145600.1 (locus Med tr8g145600) derived from phytozome v7.0 (chr-ID MtChr8; po s 35429808 to 35430167)
aacatattagaagtctgaaaaagcaatctgttcaggttagtattcctccttcctgaaaatttatgttgtgttttcaattatcttgatctgtttaggccttgccccttcttcatcaagtaatatgaattgagttttaagatagttttctttgactacgatattgtatcaagagaacattgtttgtcgatttaatcccatctgaaagaaagaagtgtctccatgggatatcaaatcaatatactactttatgtgatgacgatgatgtacatatcctaataaatattgggaggtggtcctttggagatgctaattttataaaaaattatgtttttgtttcaggtaaaacttattcagaagaca

SEQ ID NO: 32789 - DNA, 487 bp, Medicago truncatula
  Intron number 1 from transcript Medtr8g089190.1 (locus Med tr8g089190) derived from phytozome v7.0 (chr-ID MtChr8; po s 19109231 to 19109717)
gatttcctcaaaccaatcaggtgtaccaaacacaggtttgattctttctctctagttataactaaatgcatgttttgattgacagtgaatttgacagaaatactatggtattactggaatttcgtcaaactcgacatgacagaaaacatgtaccaaatatatttttagtcatggttggatctcctaggctactatgaattgttagattgcgaaagataatttttttatctctctaaacctaacgtttcttacggccgttgcaccataaagcagatgtcccaagacgattattagtcaccatgatgccacattccttttatctttagtctctataaaaaatttattcgtttataaaaacttagtcttccatttatggtattttacatgattaaaagtgaataaactttttatagagactaaagttgaatattgtgattttataacaatgtatttaactctcttgttgattcctttagtgaacttgctt

SEQ ID NO: 32790 - DNA, 935 bp, Medicago truncatula
  Intron number 1 from transcript Medtr8g109850.1 (locus Med tr8g109850) derived from phytozome v7.0 (chr-ID MtChr8; po s 24732125 to 24733059 reverse strand)
tctaaaagaaaccgtaaacggtatacttatttacatcctccatcaactttcctttatttccattcatttaaacaaatttcgtattaatagtttagttgttcttgttcatgttaggatttgaaagatatgcacgtcagtgcaaactaattttacactgccattcaataaaaacttattattttgtttcatcgcctcactttgatgttatgacattaaaaaatagagttctctctttcagtatcagtgtaaaactgtaatgttattatttgtgattggatttgtctgtagtaatcctgatccaataattaataattattgttttgaattttttttttatcgtacttgtattttgtggtcaagaacaaacacgaaaaataatttaagtgtagcagagatgatcatgttgggttggatgtgtggtaagattagacaggataggattagaaatgacaacattagagagttgaggtagcgcctatagtagaaatgatggtggaaactaaggaggttagatcacatgaagagtagtcaaattactagaggcagaagaagacttacaaaaactatgaaagaaactattgagaaagatctagagtttaataagttggatagagatatgatggattattatggttttgtttgatccatatagccaacaccacttagtgggataatgtttggtttgtgttgttgttgcacttgtattttgtgccctttttgtgtgatgtgattcaagttttcttttaatgtactcttggtatctatctagagtgtaaatggggattagttttaaatctacacagctttttctttgctatgaaactgatatttgtgttaaaaggaaactattgtgtatttattggcaagcactgtccattattaatttgctctcatggatatcaggaggccgtatattcctcctgcacgggataaat

SEQ ID NO: 32791 - DNA, 782 bp, Medicago truncatula
  Intron number 1 from transcript Medtr8g101540.1 (locus Med tr8g101540) derived from phytozome v7.0 (chr-ID MtChr8; po s 22042988 to 22043769)
gtcttgctcggataataacagtacttcgttttctggtacttttttttcaatttcagattctttttcttttcgtaggattgaaaagctttcgagatctggaatctcgaatcttcaatgtctttttgtgaaatgctttttttgctctgtatttgtattcgtattttgtatttgtactatatatgtttagagtcatcaagtaatttcaatttcaattcattttaaacgagcttcattatacaatcgtattaggtgaattgtctcattcaagaatctagaacattattattattattatttttttatgattttaatcaaattaaattaaaataaatgtcatttgttcccactggttacatgcaatgatattataataataattattaggaaagaaagatggagtagtaagagattcctattgaaccatataaaataaaatatgtacagctatgtgggtcacacattcacaattcagtaacgtgtagctacagaaactttgtaatttatactgtggcaattggccaaataatcaacttaagatggatgcatctgtttgcagattgaaaaaacagattctcaattagttctcaggagttaataagtgctaccgttttgattattgatttctcaggtaagagtcatgaatcataatcacaagtaataggatgagtgatgattagtgttgtatagttgtttctgtttatcgtttatcttttcctacgttttcgtcctcatctattaagataagatttgagtgtttctgagtcatttggtttcagctgtca

SEQ ID NO: 32792 - DNA, 890 bp, Medicago truncatula
  Intron number 1 from transcript Medtr8g109980.1 (locus Med tr8g109980) derived from phytozome v7.0 (chr-ID MtChr8; po s 24814759 to 24815648)
gcttcggtattattcttcacttttttcctatcatcctcattttctatctttttggtattaacacgttgaataattcatgttatatgtttgttaatggatcgttagttgattcatgttttatcctttgcattgcatcattggaaattttatggtgatcatcataatgataaatatggaatggaataatgtttttaagaaacgtttctgtctattttttttcattttatggattgcacattgttgattgattgataaatgtaaatgagttagggagacaaggaaatgaataggttcaatttggtattcgaatgacactttttttttaaatgctgcaattgaaaattctctcgtatgtataaactttttgacccggctgtttcaaatggacatgaaaccaatgttcatgtttctttacttgtgagggaatgtttcttttttttgcaattagtacaagattctattgatggggttgaataatcaaatattgtggaaaaatattctctatttaaaaaataagataatgcataataaggtcattcatcaatttttattgattgtacagcatgatataagctctatttgaattggtttatgaataaattatttaggccatatctatggggttataagcatttgatagaatgtttgaaagaggtacaaagatagttaaattgtttttataaactatctttgagagttattgaaacaaattgaaaacaactttttttaataaagaaatagattataaataagttgtagcatgataaacttttaattaagctgttttatgaaacatacatgacattaagatgatcatcctgcactaactgttgaacatttggttgataaatacagcaggataaaggtcgaccattgcctaaatttggtga

SEQ ID NO: 32793 - DNA, 941 bp, Medicago truncatula
  Intron number 2 from transcript Medtr8g137660.1 (locus Med tr8g137660) derived from phytozome v7.0 (chr-ID MtChr8; po s 33026110 to 33027050)
tacttccaggtacattgaaatcaaagcattttcttgttttagtttattgtatggtaaaaaaacatggatgttcaaagcattttcgcatattaagtagaataagcatgttgagtgttcatttaatattgtcaactgtgtggaggaggttcaaaacatgccacattcccatggaaaatgttgattgtagcacttatatgacctaccgttgaggcacaattctatcaattgtttttaattaacatctgtttttgatattttaccccatttttggtgcactagaaagtgatttggtttaggagaaataagtaaaaaatacctcactctaaattagattttaaaaaattagttgttatgattgaggccatcgtgttactaatcccagttgctaggataacgattggctgttgtctcggttactatgctagattgccgacaatggtctttagcttagtatacatcaggtttatgccagtttctttagtaattagtatgttttttacattgtctaaaaattatttgcttgttgacatttttactaatttaagcatgatgacctacatgaagacttaagcctataaatttactcatactttttataaattaggtcataccttaaataaaattatgtcataaacaaattaggcttatcctttaaaaagcttgactttatctacaagtttttaccccttataaacttttaagttggctaatagaccaaactagaccttcaaaaagatcaggttagaccaaaagaaaagccagtgatattagccttaaaacttgaacttttttgacagaacatttttccaagcaaagctttgatttgcttaacctattcccacccctagtctttgttacagatgaactatttattatgcttctgtagctgtcaatgcgattattgtaaactgcttcttttttcttcaggcacaaacatccac

SEQ ID NO: 32794 - DNA, 525 bp, Medicago truncatula
  Intron number 1 from transcript Medtr7g106520.1 (locus Med tr7g106520) derived from phytozome v7.0 (chr-ID MtChr7; po s 24685040 to 24685564 reverse strand)
aagggaaaattttaaggtttgcttcaattccacttttattctattgcaattactacatacaaaagtttgattatggatatcttgttctatttactaccttcttagtactccatcggtttctctcttttgattttctatgtattttctgagtttgtgcattgttgttgattttaaaaggtgttgaatttgtcgttggttatagatgtggccaaaccttattcaaaaatttatagatgtggccaaaccttattcaaaaatttatagatggaggactttatgtcatcgaaagttgtttctggaactaaaaggtgcttgcagctttaattagtagttataagaaaagaaaacaagtgtgtatgttaagctgaattgctaattgttgaaagcacttatatgctataagcacttaaatagaaatagcttatttttccgcggtcttcatttctaattgagggctttaacttcttaacagtggttaacctctttggattcacttcattccagggattaggttccaaacagaca

SEQ ID NO: 32795 - DNA, 863 bp, Medicago truncatula
  Intron number 1 from transcript Medtr8g136630.1 (locus Med tr8g136630) derived from phytozome v7.0 (chr-ID MtChr8; po s 32618189 to 32619051 reverse strand)
aagaggtaaccgacttatatatatttgtttttatataaaccctaatttgttgaaattgttaatctgaattctagaatctagattgtttgttaatttcattcataggtttagctttcctttaaattcgttttaatttttcaattttgagtctattctgagttagggtaagggttttgtttcggctttttcatttactctgttcatgataatgaacagataattgttaagatcttgcaactgtctctgttgatttttactatattcgatctatttttcgcatatgttcagaacttgcaactctctgtgtttttttagattttgtttttattattcaattttgaatctagtattcttagtagttttttttagttttattttatttactctgttcatgagtagttgttaagacgtgagagctagcaattttcccagtctttagtagaatttcttgatttagaattatgcagtatgttaggcagtactgataaaaaatgacagacaacattatagatcttaatttcatctgaatttttttaactactaattgcataatacttaagtgtatgatatcattatgaattgttcagctcttcagtcttaaacctttataattccttcatttatattttgatatgaactcaataatatgtgacataaattacatctattatgtttcaaatctgctaccggtgtaattcaattttgctgcaagtcttttttgcatttgagttactcacatctattgtctcacacaactgttgtgttgccacttgccaatctctgctacctgtataattcaattttacttatgaggattaaatgatgtaggaggatttgggaacagactaccttgtgcgcccttt

SEQ ID NO: 32796 - DNA, 715 bp, Medicago truncatula
  Intron number 1 from transcript Medtr8g024330.1 (locus Med tr8g024330) derived from phytozome v7.0 (chr-ID MtChr8; po s 4557089 to 4557803 reverse strand)
aatatattgattgatgtaatttataaacttgcattaacaattttcataggtttagtgacatataatgtgttttacttttgcgttgactttttcgcagttttagtcaacttaactgtgttttgcttgtgcgtttacgtgcccatacaagttctattgatgatcttgaagatggtttattcttaaaaataagaaaattatgtttaatgtatgttattgtagaatttgatttaattaatgacaattttttctcttcaattttcagttgtttcacatgtaattttcgtgtccttgttgtgcattcctgattgaataatttcataaccaccaattaagtttcttgttcttgacaaaattaatgcaaagacttagtccaccattctcatcaccaactaattgaatgtttttataatccaagagagtggtaaacattatggtcagaaatataagaaaaaaaaattaaacttaaacagttacacttaacgtcattttatattttgtcccattacatacaataggtgtgaataattcacacaaataataaagtaaattattgtggatgctatcttttttttttttttttttttattaaggatgagatatttttatttattgttgttgttttttgaacaatatttattgttgttgttgttgactgacatttttgtccaattaagtgttgtggagcgtttattttctcaaatttaaatatttgagc

SEQ ID NO: 32797 - DNA, 294 bp, Medicago truncatula
  Intron number 1 from transcript Medtr8g008760.1 (locus Med tr8g008760) derived from phytozome v7.0 (chr-ID MtChr8; po s 1070641 to 1070934 reverse strand)
tgaaaaagttaccaaaaaaaacatattctgaaaaggtcgaagaatgtacttacttccctttcaccattatgacaaattgctaattgccatgtgctagcatatattaatattaatattgaatatatttacgtatctttatctctttttgcttttcttttctattaatcattgtatgccttttccttgtttctttatatatataactttaaaattcaagtatatatataattcaaatatatattttctcatttacatgtagaccgataaggcctacatacttgaagaagctatcaa

SEQ ID NO: 32798 - DNA, 1000 bp, Medicago truncatula; identical to SEQ ID NO: 32575
  Intron number 3 from transcript Medtr8g052900.1 (locus Med tr8g052900) derived from phytozome v7.0 (chr-ID MtChr8; po s 11750305 to 11751304)

SEQ ID NO: 32799 - DNA, 327 bp, Medicago truncatula
  Intron number 1 from transcript Medtr8g132550.1 (locus Med tr8g132550) derived from phytozome v7.0 (chr-ID MtChr8; po s 31343569 to 31343895 reverse strand)
taatctattgaggcaatacctcaaggagaagaagggtagtttcgaaggctttaaccttcacactcctgaaacaaataggtaaaaaaaataatattattattttcaattcagttcctaaaattttgggatttagaatgttgaatcaaactaagtctcaaatagtcttttcattaaatgaacttggtcaaaaacagagtataatgtcatttcagatattttcccttatttttcttcattcggttacaacaactgggttatttatttaagttttctttttcttttcaatctacagggtcatcacctggttcatcttctcactctggaata

SEQ ID NO: 32800 - DNA, 772 bp, Medicago truncatula
  Intron number 2 from transcript Medtr7g102530.2 (locus Med tr7g102530) derived from phytozome v7.0 (chr-ID MtChr7; po s 22795765 to 22796536 reverse strand)
acaaggtcagtaaatgtttttttgtttacatatgtgaattttctattcataactaatctctacttagaatctgaacaactaagatctttatctcaacttctagtatattttatctatggataagactcgaatcgaaaaacttaaagaaatatttgaatcttattcaattaataccggtgtaataatgttagtatttttctaatcacttttaaattaaaaatattgtttgagcatcttggtatatatatgagaactttaattggtctttcaactaaagaaattaaatttttgattgaatctttaaacttttcaatatttcataactagatccatgaagtaaacagctttgaatcagatcctggacatttaaatatttgtaattatggtcttgaatttagaaactcaattataagtccttaactcagttaatagagacaatgcataaaataaaatatataaggtttggggttcaaacccaggccaccacaagtataaagattattaaaaacaattttagtttagagatttaaaaagtataggatagtgatggaagagaaattcctgtcatttgataggcaataatgtcagaaaaggtggtgtttgtttaggatcaagtgtgcaaatttttagtattattcttgaatagtcaaaatggattaggttcaaaatttaattaattatgatgcctgaatattgaataattgatgtgcaccttaattgtgattgtgattgcggagtgttaagcaggtggtacaacatacaacaaaattga

SEQ ID NO: 32801 - DNA, 729 bp, Medicago truncatula
  Intron number 1 from transcript Medtr8g050430.1 (locus Med tr8g050430) derived from phytozome v7.0 (chr-ID MtChr8; po s 11371223 to 11371951)
tagcagaacgcaaccttgaagttcaggttatttcatctcatatttaccgcgtggtaactgttgtgcggataaactagctaatatgggttactcagtgcagggttcagtttgcctttcttctcttcctactcagttgaacgttgatttctttcggaatagatgtggtttacccaactatagatttccatagtctgtttttgggtgttttttgctattgttttttttctttcctgctttctgttttttcttttgagggttttgccctattgccccctcctttgtaattattttccccctttttttttttaataaaatctttaccgtttggcggtataggatgaaggtttctcgtggtgcctacctagttaggatgtcgatgttgcctcttaatgcctgtcctctctctttgtttatcataaaaaaaaatattgtgaattaatatgaagttattttcatttgttttttcatttttcatgatctaattcagtgatgtagatatgttttagataataataattttttaattaatgatttttttaaaatattttttttcttggtatttgtaatttaaaattactaatttgttaataatttagcataaataattcgttaatgcatcaattggattgcaaaacgacagcatgtcaattatgagcatggcctttgaattcactatatatattgcaagtacgtcgttcgtactcagacactcattgcagcatataacaa

SEQ ID NO: 32802 - DNA, 1017 bp, Medicago truncatula
  Intron number 4 from transcript Medtr8g139320.2 (locus Med tr8g139320) derived from phytozome v7.0 (chr-ID MtChr8; po s 33980914 to 33981930)
ctactggtgcagaaaaggtctgtcacaatcaccatgtgtttgcttcttcttttttctttctatgaaacagttatatatatatatatatatatatatatatatatatatatatatatataactgatttttttattattaaaagtatgataaatctttgattatgcaccacaaagttcacatgcgtaaccaacccctcagtttttgaaaaaaaaaatgatcacctagactcttggggtctgtttgggatggtgattttggagggctttagagggctaggcctttattttaatatatatttgatactaaaaaaattgaaaaaatatcacaatatatgatcatataataattcaatcacacttcatttttagaaatattttatagcttgcttaatttagaaaagaaaaacaagtccaactctcccctccaaaatcccactcacaaagagactcttacattcatgcgagctttatgggctgctatgttacatcccaaatagtcaataaccatccccattccatgtttttagtttggtaattcctcaacaacaacaacaacaaccaagccatatcccactaagtggggtcagcagtttggtaattcctcaatctgtattaaatccttctatacctttaaagatcagagactcaatctatttcactagacatgtttggcatgtactctatttatactttaactggagttttgtgtgtcatgcaatggattttccctgagacaatctaatttgttcagagcaatgatttcaacatactccttcaaggatgcttatttttcctatcaagataaaatatttcctgttaaatgggtgatataagttcatactgttcatctaattgaaaatataacttcaagatttccacctcgttcttctcaaaatttactacaactttgtttgttatgtataatttcttttattgaattgttaattggcttcttttcctttgccttcgagcgctattctcgacagagtccttacgtactttaatttgtttcttacag

SEQ ID NO: 32803 - DNA, 608 bp, Medicago truncatula
  Intron number 1 from transcript Medtr8g120220.1 (locus Med tr8g120220) derived from phytozome v7.0 (chr-ID MtChr8; po s 27438884 to 27439491)
tagtgcttctgattatcccttgcttacacaaggtttgtaacctctttcttcttttcttgttatctacttttttagcccttaaagtttgtgttttggtgaaagaaacaatgcaatttttttgtttttttgttttctgtttgtgttttggttgtagttttgtagtgatgtttttgttttggaatgcatttttattttttaaaaattgtcatttctctattttgttgttgctaattttgttcctatataaatatagaaactttctgaaaagttaaatgattgtgatctggttctaaatctgcgttcaattagataaaacttattgtaactcactagtttatgcacatgtatattggatgcatactaatattgttacaaggttaactcttgtgtgaaaattttgatggtttgctttcaaaattgatttggattgaaactgggttatgcgtggctttcggggcagcaaattatcagcatatgtatctcgattctaatatcatcctaacactctagatgtattgttttgataatcatgtactaactctttcattttactacatctcttttgtgcaacagatctattacatacactgtcatctattccgagacac

SEQ ID NO: 32804 - DNA, 282 bp, Medicago truncatula
  Intron number 1 from transcript Medtr7g093400.1 (locus Med tr7g093400) derived from phytozome v7.0 (chr-ID MtChr7; po s 20953672 to 20953953 reverse strand)
gcaccagacacaatgtaattcttattagcattcacttttttagttctgtttggttctgcgctgataaatattgattttgaatgaattgattctggttaaaaatcaattttaaaatcaaaagcttcaatctatagcttcaagttagaagtgactctggaggtaaaatcaattttggttgatttgaagtgtttgaatcaatgttcttctgtttgtagtgattctaatcatatctctttgtatttgttaggttggatttgaaataattgatagtctttctcaatc

SEQ ID NO: 32805 - DNA, 1030 bp, Medicago truncatula
  Intron number 1 from transcript Medtr8g147070.1 (locus Med tr8g147070) derived from phytozome v7.0 (chr-ID MtChr8; po s 36108257 to 36109286 reverse strand)
tacttggtatcggcatagctgttactataggagaggtatctttcattatagactttagttttcttttttgtcttgttttttcccattgataaaaaaaattccctgactaaaagtttttattttactgttttaaagacgaaaacaaatatcaaatattatatatacacttcgtcccatgaaataatatttgattttacatataagtaaaaagttgcatgtatttgatttaaagatgtattattttgcttggataaaatatccgattaatacattttattccttttgtttttctcatatatggctagtctcattcttgagaagggattctcttcatttaaaatcttttcaatttcttatatttaaagagataaagatataaaaaaaaaatccaaaatacaaattaattaatgaatgtgagacaatttagtgataagatccctcatttatttttttgtgtataccctccattgatttttataatcggagagatcctcactcctcattggtgttgcaataaaattagatattgtgcaacaaagtccatctcacatagaaaggtcatgtcactcgcttattttaattgattgtaaatttctgttgactggattttaatcaatcaattaattaattaattagaatgttttgtttatttgtaatctatgcctttcacgtgacgtgcaagtattagatttcgctcaacttaccaaatctaattttttttttatacttggactaggactggaatgaaattaaaactattaattaaccaaattagtaaaaggaaaaataacatttgcaaatcgattgacttctcttaaaatatgatttatatataattatatgacattgtcttatcttactagacaagaaatgactttttataaaagaagcttattttcagcatcagtcttttatcgatcttgaacacttcatgtgtctattttattcaccgatacatttgtctatgtataagttcttttgttattttcactaatattttttatttgaaaaggttaaatatattgataac

SEQ ID NO: 32806 - DNA, 452 bp, Medicago truncatula
  Intron number 1 from transcript Medtr7g134570.1 (locus Med tr7g134570) derived from phytozome v7.0 (chr-ID MtChr7; po s 31805467 to 31805918)
gttccggtcagtcacttctcttcttatttgttatctcctactaggttttttttcattggtgtatgttaattggactgattagttttttttttttttttttttattagcttagataattaaatattaacctaaccctaaatgtgtcactgttgaaatgtcaaattacattcattgtttttcacttagttgaaggggcttttgaatttagatcacaagtcaattatcttaatatagaaagttgtaaattgtggactgaattacccatgttttgcctatttggttctgtaccaacattctcttattaggtcatattttttcttcttcatttttataccatagtgctcttgaaaatctaatgagattatcactattttctttaatgtgacacttcttttcatgatgcaattcaaagttcaaacaggcactaaactttaattttctctgacaggttt

SEQ ID NO: 32807 - DNA, 876 bp, Medicago truncatula
  Intron number 2 from transcript Medtr7g134570.1 (locus Med tr7g134570) derived from phytozome v7.0 (chr-ID MtChr7; po s 31805954 to 31806829)
cggctttcaatctactttaattcaatccgtgaagtgtaagttatctgtgttactactgtatttatcagtttgcttttgttgttgctgatatttagactgaacacctcttccgtatatttttttcctccctgtttcatggttcaacttgttggttatgattaaggtgcttaaatgattaccagtgatatatcatacattgctattgtcattttttaaaaagcacaacatcatgaatgattgaaggttctagcctaggtgtatcgttctgttgcgaaaacccttcaagtgtatatgatgaagcctctagtatggtagcatgctgtagatagagtccatgttcgtaggataaaaattgcatctagtccttcaagttcattggttattctttgaagtatatctaaaaaattgtcattgggttttgtttatttttccaatgataggactagctatttgctgctacagctgcagcagctcttacccatgcggtcacaagagtgggaaggcgattccccccttcatttactatttaacattattttattcttttgtattttcttttgctagaggtagaggaagacctagaaaaactataagagaaaccattaagaaagatctagagattaatgagttggatcaaaatatgatttatgatagaacactatggtgtaatttgatccatgtagctgaactcacttagtgggataaggcttggttgttgtggtatcttcttttgcttttcagctaactttaattccgtaatctaagttcatcctgccaattgttgtttgtcctggacttgaaattataattaattgagatatattgattagctaagtgcaatttgttgaccattttctcttctcaactgtttcagct

SEQ ID NO: 32808 - DNA, 716 bp, Medicago truncatula
  Intron number 1 from transcript Medtr8g090550.1 (locus Med tr8g090550) derived from phytozome v7.0 (chr-ID MtChr8; po s 19784624 to 19785339 reverse strand)
acgattttgtcctcaagagcgccgttgaggtataactactctcattacttttcagtaatttcattttttttaagatacaattgaaaccctaaactcaattatgctcagcggcggatgcatgtagagtgttgttgccccaactgaagaaaaaatcattttaaatattttgtttttgcctcaattaatcaagttgtgtagtaaatgtatgaagtatagtaaattgtattaattttaatcatttatttttctagtttttattatcaatcatatagtaacaataaggcatatacagtgatacaaaatatatttgaaaagaaacagtttttaaattgtgtataaatttattttgaacatattttagtgtactatggagattttgttcataaaattgtgtatttttgtaaaaaaatacacatttttcttttatgaacatattttcgtgtagtttagttgttttgttcatataattgtgtattttttttttgtaaaaaaaaaacatttttcttttatagacatattttcatgtagtttggtttttttttttctttcataaaattgtgtatgttgttaaagatcaatatttttcttttatgaacacattttagagtttagactattatttttaccctcagtttgaaatgtttctagatctgccactgatgatgcttaattgttgtgtagggtggagcttctctggaatcgttggccaagggtgt

SEQ ID NO: 32809 - DNA, 212 bp, Medicago truncatula
  Intron number 2 from transcript Medtr8g127670.1 (locus Med tr8g127670) derived from phytozome v7.0 (chr-ID MtChr8; po s 29597461 to 29597672)
atcttaaggtaaagaagtacacatggaaataatttgagaaaacaaaagtggttgaattgaatgtaatcacacgtgtcaatgtcgcacaattatttgacattgtcacgcacaaacatatcttcaaccgcaagtattagacacacagacacatcttagatgctcaaagacatttcaagaataacaatttatttttatgttctgttttttcagtc

SEQ ID NO: 32810 - DNA, 607 bp, Medicago truncatula
  Intron number 1 from transcript Medtr8g039880.1 (locus Med tr8g039880) derived from phytozome v7.0 (chr-ID MtChr8; po s 8462319 to 8462925)
tactttggaaggcagtcaaaggtcagattcaattgttcaaagttccatcttacaagtccatgataaattctcaacgtttaatttaatagtataatcaattaagtataaaaacgataatcacttaagtttgtagaaatgttttatcttttttagttttatcatgtttttgagtttaattccgaatgaatatacaaattttttcatatcttcccaagtttctacaaacttaagtgattattcaaagttccccttgaataccgttaatttgatagtgatactttgagtttcaaattggtaattaagagttacttttcccacttttgaaattgctaaaacacttaccgagcggtagcggtagttaactaccgatggatggttcaatcactttttaagtcggctgaaatcgacttgaaaagtgattatactgctgtaaaatgtgcccaaccgcagttaactgccgctgtataccatttataagatagggaaaacaaaccctaatagcttcctattttcttaaaaatctgtaataaaaatcatcttataaaccattgaatattaatgaaaataattgagaataattttaatgtgtttgtagggtggggaactg

SEQ ID NO: 32811 - DNA, 843 bp, Medicago truncatula; identical to SEQ ID NO: 32314
  Intron number 2 from transcript Medtr7g132570.1 (locus Med tr7g132570) derived from phytozome v7.0 (chr-ID MtChr7; po s 30713783 to 30714625)

SEQ ID NO: 32812 - DNA, 677 bp, Medicago truncatula
  Intron number 3 from transcript Medtr7g132570.1 (locus Med tr7g132570) derived from phytozome v7.0 (chr-ID MtChr7; po s 30714826 to 30715502)
gaacaaccattttttgtttaaggtctcgttattcgacaaattcagatgaaaattcttttttatatatttttgaaatatatgctttgtttgtatcaaatcatcttttgtgttgtcttgctacagttgggatttgtctttagatttgcattcatttttgcatttgctaaaatagaaaaacatcatggtaatagaataactttaagataatcttacctgaacatgtacccaatgtttgacgcccattataaatctgcattataaatctgtttgatggtttttaaactctcttcattatgacccctaaatgtgattaatatatttctaggtttagccatattctttgttatgtcactgagtaaatttttctcttgatgagataatcgaccaaaataattcaatttgagtctgaatttcgggtttagttattggacaaaatttacagagctctacatttttttttttttttttttggtcaagcctagcggctggagaaattcaccttaaaggtgaaatagtgggggtgtccggggttcgaaccccggcccctgcatacataatgcattatcccttacctagtgagctaagctcacagggactctacattattatttatactttagtgttatttctcatattggtaattgatctgggtaatttaatcgtgacagctttttact

SEQ ID NO: 32813 - DNA, 962 bp, Medicago truncatula
  Intron number 1 from transcript Medtr8g151170.1 (locus Med tr8g151170) derived from phytozome v7.0 (chr-ID MtChr8; po s 37211100 to 37212061 reverse strand)
gaaaggtatatatatatactctttattaaatggctagtagattttcattgatttttacttttgtggttgatgaataatattttagttgtataaattggtattttagtagataagagtctggtttatttgttcacatgtttgtatgaaaagttgagctgtcacttatctccatgtgggggttgggatttcctagggtccaaataattgacttggatcctctacaccttcattatggtgattcagctttagggaccgttggatttagagagaaaaacttttgactgcagtaactttcagctttttttactgcagtgaatttgagtcctctacaatagattggattcaagtatttgaatttgaagtagcatttttgataagttgttatatgacttagatctattgttatgctgagggatatggttttgtgatgccatgtgtccaaaatttgaacagcaaatagaattattgaagaggatttttcttttgttcaacataatggaaatgtgtccaatactaaattttggttggtataagttgccttatgattgagttattatgaagataaacatttgaacttggtagcagcttaaatgttttaaggaattgaatagtatttttttttactgtttttcttttggaatgtaatgcatttgaactgttactatgatactgatgccaaacacttatatatcacactttattcttctgctagtgcataatttttcatttatattttggacatgattacaatcaatagatatgtataagctcagatagcataacatgacatgtaatagtagcaaaaaacaaagtaaaggtacaccgaaaaagttttaagcaagaggtaagggtggttcatatcggcaattgtttcattcgtagaaggatgaagtacggcttaatggcttaaattttttatgcttgcagggattgtacaactaccaaaatttgaaggatttact

SEQ ID NO: 32814 - DNA, 698 bp, Medicago truncatula
  Intron number 1 from transcript Medtr8g145310.1 (locus Med tr8g145310) derived from phytozome v7.0 (chr-ID MtChr8; po s 35296788 to 35297485 reverse strand)
tcaactactggacgtttccttcttggaagatcaaggtagtttcttgatagatatatttccagtttatatatgttagtgtcaggaggagtccaagttcatatttcctgcagtgtcatgattaccagtatcttacgatacatgagagtcgaatatcgattcaatactgaactgaatccaattgataagaatctctagtgtgtatctatctagacataaatctcattttttatttttttaaataacgtaaatctcatcttgaatcacgattttgtgataaatcctgattcactatgatgaatcctgattcattctaataaacactacctaaacttagtatagccaactactattttgacaacttagtaaaaccaaccacttttcttttgtcatttgatatttgacttaaatcttgatttattttgatattcatatatgaaccatcagtttataattgtgttatttcacttgttttttacttctaaatgacatttttatggacaatatatcttatgattcataataagatttgattagcgattcagaagaaaaaaaatcttctaattcatgattcgaatctagattcgacaaccatgcttagtacacataccattgttattcatttaagtgggattctatgaaacatactagaaaaaagtggtttttaacttgtgtgtttactctgtttgagtgcagagagc

SEQ ID NO: 32815 - DNA, 693 bp, Medicago truncatula
  Intron number 3 from transcript Medtr7g140160.1 (locus Med tr7g140160) derived from phytozome v7.0 (chr-ID MtChr7; po s 33690214 to 33690906)
aaactgtgtacgagcattgtgttgaaagataaaaggtattattttctaatttttcagcatcagatgatagaattttgtataagtttaataatgacttgaaagatgtctttccttatggagtgggaatatagttgatgtaacactatgggaaaaatactctgtagctttatcatttaccatctatttaccttgagttctttgcttccattttgtagtcaatggcaacccaaatatataaaacaattggtcaggttcgagactgctcatcaacctacaccatccggttgttgagaagtttaagacttagtaaatttgcattatgatttcacaatacagtgttagagtaacttattatttcacaatctgatttgattgttttttgaccatgtttcttgaattgttgtgaccttaacacttctcaagctcatagtcaaagcttcagtcagaacttaagttagagttcggcttcttctcaacgtacttcgtacaacgattttttcaatctgtctcaggttaggccaatttctgaatttataaacttagtcattgtctacttttttaatgcacaaacatgctttgagtttttttacacacaaattaaaaatacatattgcattattctttatttcatgtgcataatttgtgccaggatacatagtgcatcactatttggtaaacaactaaattcaatcc

SEQ ID NO: 32816 - DNA, 801 bp, Medicago truncatula
  Intron number 6 from transcript Medtr8g136890.2 (locus Med tr8g136890) derived from phytozome v7.0 (chr-ID MtChr8; po s 32712962 to 32713762 reverse strand)
gatcaggttcggcacatctttcagtacagaaattttatattaattttaatttgaatgtctccaaaattccatgttgtatagttttttcttctaaaccaccgttccatggaagcattacagcttcctgataattggcactgattggttaatgatgttcgtaactaaaactcaaattatagcatcttatttgacctatgtgtctgttaaaaatattctactatctcttatttggtttcatttacatttctataaaatatgaattttgaaaaacaagctctgcaacactatgtgttccagatgggctgttgtctgggttggaagtgactcagatagttttactaatttacagagtttcaatctatgtcggtgacctcaagtttaaagtgatagtcagttcactgcagaagtcttttgatttagggagcggtttgaaaaaaaatagcatttgatatgccctacggtgattttccaccttattttcataagttgcttggtatacctcataaaaacagcttatacagaacttatttaaagtttcccatcactccctctttgttgctactgaataagtgcttaattgaactatataccccaacgcccccttataccatcagtgcattgtgcattacactactttttataccaggtcgtattttatgaaaatactcttgttacatggtataaagaactttattcagtatgcataaatgctatcttttgctgttcttcttgggaccttctgacattttacctggttttacattttttccttctttttttactcgacaggcaatctctgtt

SEQ ID NO: 32817 - DNA, 638 bp, Medicago truncatula
  Intron number 5 from transcript Medtr8g136890.2 (locus Med tr8g136890) derived from phytozome v7.0 (chr-ID MtChr8; po s 32713806 to 32714443 reverse strand)
tgaacttcccaaaggtctgctttctgggctgtatatgatattttctgcttttaagagcaaatttagacagctcttgccgaagcatggatacattattttatttttttgccaaatgcatggatacattatttgtatatatatctagttatattttaatttttttcttataagttattgagaattccaataagcaacattactgtagttttttgtagttctggtatcagaagaaaacaatatttagattgttttagatgtaagataatttagcagtatatgaaaaatttgatatcattccacaactgacatgatagcgtacaactggaatttcatgtgttcgccctttgaagatctgacctggtccctatttcaaactacttgtaacagttgaaatggatattttgtaaatctttatgcctccatgatttatttatttatttattattatgatttttagttttatcctatttacttgaacaagctaaagttctatattgtggtaggataactgttgtttttagaaatcagatatcactacgaagtttttattgaaagcttgtctttgaaactatctcttttattttgtttctaacacagattatcgtacattgttgacagaaagaactcgcacaagttac

SEQ ID NO: 32818 - DNA, 706 bp, Medicago truncatula
  Intron number 1 from transcript Medtr8g008790.1 (locus Med tr8g008790) derived from phytozome v7.0 (chr-ID MtChr8; po s 1081034 to 1081739)
cattgtttgctatatttctttaatctctcttgaaggtacaaacactaaaaatttatgactcgaataatttttcttatcaacactgttatgaacataatttgattaatgatgtacatgatctttattagtatgtatggagtatagaatagattgaaatccctttaaagatacatagattaagtgaatgaaagatatggagccttttggtcaacaaaaaatctatttgtagggtcacttgtcttaagctgtcaaattcagattataatagtccctaagccgtagctcaagtgagattgaacagaaggagtttgagaagatttattgtacaagttactgtatgggctagtctcatgaatcttattttatatttaattatcttaaaagtgttaattctgctttaagatcataaaaaagtaagctaattaggcaaaacaacaaggatttgaattacataatagtcacatcaaaatagaggtaaaaagggaagaaacaatgttggccttccctttcaagaatcaaatcaaatttgatgaaatcccaaatgtatcaattagcaacgaaacagaaagatatacacttaggatttgattttcaaacaatcccttctttgtaaattacaaagattaagtttgtaattttgactactctcattctgctattattgctatagatttgtaatttgactatattatcaagttattaggag

SEQ ID NO: 32819 - DNA, 665 bp, Medicago truncatula
  Intron number 1 from transcript fpc265_20.1 (locus fpc265_ 20) derived from phytozome v7.0 (chr-ID fpc265; pos 88423 to 89087)
caagaagaggttgattttcttactactttctatataaatctagtttaatgatttgcttctatgactatttattttgcattaaataatgtctgtctcagaaactatactttacagtaacttgtaagtaaaaggccaaatgcctttatgctgttgtgtgcactgcaaaaagtagcaagttttaatttctgacaaggttaagttgcaaagataaataaattggttatgtatcactctctagagagcatgaggaaacaaattatatctttgcatattgttgagacaattgtataaaaatctatcttgagttgagacatttgtgtaaacatctatcttgaaatgcgtacaactctctcttgatgtatctagaacttccccgtagagcccgaaatggtctaacagattcataagaatatatcatgttatcagcatcactttaataggcatgctactactcttatttgttttgaaactaggtgtgatgaattggtcatgttaagtcaaagtaattttattggtttgaacctaattttatttgattcttgtgattatgctaatgatagttatcatttttttcgttaattgtcttcaaagattggttttgacactgttttgccgggatatgtgtaataggttaacaagcgatacaagcagtaccatcaacaaat

SEQ ID NO: 32820 - DNA, 697 bp, Medicago truncatula
  Intron number 1 from transcript Medtr8g090610.1 (locus Med tr8g090610) derived from phytozome v7.0 (chr-ID MtChr8; po s 19826840 to 19827536 reverse strand)
gcatacttttgtaagaagaaaatcggtatataagctacaaacacaacataatcattagttcacttcatgctttgttaatgtttcttcatttggtgtttatattttgatggcggagtttatggtatgtaatggacgacataatagtattatttatcattaagatccccgatttatatcattagaagttcaccatttttaagacacagtctttaaaagtgttttagattcttcaactgattagtctttacctttgggggattggtagtttgcttgattgcgctaagagattaaaaagttaaggagttaaaagttcagtgtttgaaattaataagaagaaaatattagcataaaaattaacatactaacatttgtcattaaaaaaaaaaaagtttttatcgttgatcatgttaaataccataagaaactcaaaaaaggttaaacccgcattttaattattgaatgttccctaaaaaaaagttattgaatgtatgaggtgttgtcacaatagtccaaaactattttagattttcataaatatatctaaatgtgtcttttgttaattaatttagtcggcaaatctttctttaattgacttggtcttcaaatatgtgtttgattagtttgatctaaaaaattacgaataaaatacacacatactcaaaacaattatattattttttagttgagcaataagcga

SEQ ID NO: 32821 - DNA, 332 bp, Medicago truncatula
  Intron number 2 from transcript Medtr7g145960.1 (locus Med tr7g145960) derived from phytozome v7.0 (chr-ID MtChr7; po s 34824936 to 34825267)
tcaggtatgtggcctttttacttgatttttctgaagtttgttttacatctgggttggaattatttattgaatttgatgatgggtttcttctattattctgaagtgtctgtttgattatctgtgggaatttttttatgtgggtcagaattatttgttgaattgaataatggatttcttctgttttggtgattggtgattttttttttgttatgaaaaattcagttgttttggtgtttttatgaaaattttagttgattgatgattttgatttttgaatttttttgttgaaaacttcagttgattgaccctgctgataggacagtagatagaga

SEQ ID NO: 32822 - DNA, 899 bp, Medicago truncatula
  Intron number 3 from transcript Medtr7g145960.1 (locus Med tr7g145960) derived from phytozome v7.0 (chr-ID MtChr7; po s 34825339 to 34826237)
ttactggaactggcctcatcaaggtatgcagtatgcacctgatggtaaattgtgaaatgaagttgtcgtaataggtgcttttgtatatacaaaaacagtttcacagaaattgcgaaaaatcttaattttatcaaaatacataccttgatgattacattggtcgttaagttgtcataataggtgttaaaaatagcttatattgtgaaaaaaaaacttaaattgtgtatgctataagctattttgatgacattggctaggataggtccttaaatctaaattgtgaaaaatcttaattttatctaaatagcttatagaaatggtgtttttgtatatgctataagctatttttataagttatattgtagaacttatgaaaataaaccgaaaaaagattgtgaaaattttcataagcttttttccacaagttctcccaaacagtctcacaaaacatatgtcagcagataagctacaataagtcaatccaaactagccctaaataaatcaagggtgtatatatgcttagtgtttgaagttatgtgttgtttctttattttaattaacaattcatctctaaatttcactgtttcagaacaaagtattgcagtgggctgcataatggcgacgcggtgagatggctttgcaagacggcgaacaagcggcaagacagaataacgatttgggttctgaccattagaagggttgttataaattggttcagcagcgttgcaaggaagagagacaaaaacgtgcaaggaagtgaatcgccctcaatctttctctccatctttttcattgaatttgaaatctttgaatcaaatatttcttgcaatctgatgctcaatcagtcattgaactcgaatctctgaaacaggattcgctagccgccgtaacttccggtg

SEQ ID NO: 32823 - DNA, 754 bp, Medicago truncatula
  Intron number 4 from transcript Medtr8g092970.1 (locus Med tr8g092970) derived from phytozome v7.0 (chr-ID MtChr8; po s 20201120 to 20201873 reverse strand)
gtcttgcaggtaaactatgataatatatttgtagtgcgaataggtcagatcaccaaaaagttacaatctccttcaaaaaaaaaaaatgatttgcttatatttggttttgtttatttatgacatattttagaaaattgttgtttacactacaaacaatgctaagaaaaatcatgaaatgataaatttaacgccaatttttattgacagttaactactgtcggttaaaatctatcggcagttaactaccgatgatgctattttagtatttttcgtggtatttcctataatcctttgatgtgagaacaacatttttctatatttcatgggagaatatgtcagatcactaaaagagttatgacctgtctatatttgcgcccgtttatataagattatgattaaaagaaattacttttcatcttataattattttgtagatattagtaatttagagaaaaaaattggacattattgaaaagtatactattttgtgtttgtccaaaactattaaaagaggcttgtatttctcctttctattaaaaatatttttcttcaaaagctaattcaaataacatatcatgttcaacattttttcacaaacagatttttaaaatagcttacttaaaagcagaattaaaatatcaaaaatattttttttatagaatattaaatagacgcccccctaattaagtccaagttagacctaacttattgattaaataaacaaggttaaaaaagtttattgaagtaaatttga

SEQ ID NO: 32824 - DNA, 320 bp, Medicago truncatula
  Intron number 2 from transcript Medtr8g016300.1 (locus Med tr8g016300) derived from phytozome v7.0 (chr-ID MtChr8; po s 3135901 to 3136220)
ttgatccagagtaagtgtaatataaaatgtcaatttagttatgtagattaaccagtttttaatatttttgtagcatttgcattgcataaatatccatttcaagcaatggattacataactttgaaacaagtggtaaagttacatgatagtgtgcaaaaacatatattgctatgttcatttaattttcatgttgttttccccatatgtataataatgaaaagaaaagacgaccgacatacataagtttaaggatgacttatgcattttattcgtttgttttgttaatagatatcagagaacaggaaacacaaataaaaaaa

SEQ ID NO: 32825 - DNA, 337 bp, Medicago truncatula
  Intron number 4 from transcript Medtr7g134700.1 (locus Med tr7g134700) derived from phytozome v7.0 (chr-ID MtChr7; po s 31872127 to 31872463)
gtgaagatcaggtactattagatgtaaaaactaattacactagtgtaactgactaacaaactggtgtaactaacttttacatttaatatgtaaaatttgatattttgggttcttcaaatgttacttgtttatacagtagacctgtatcgttttttgcataattaaaagttagcttttgaaactcaaaattttatagcagaaacttgtcagagtaaggtataaaagagaaaaaataacaccgttgttgagatacacgacttgaacttacttgacattcattcatgtgatgaaatgagtatttactactttatttgcatatgttgtctggtaagatagg

SEQ ID NO: 32826 - DNA, 689 bp, Medicago truncatula
  Intron number 3 from transcript Medtr8g129800.1 (locus Med tr8g129800) derived from phytozome v7.0 (chr-ID MtChr8; po s 30799580 to 30800268)
gcaatacagataaccctaagtggacacgggtatgtctgggcctcactacgttcttcagttactttccgaaagctaattccgtacatataaaagcactgttttataacagaacattatttccaaactgtgttctattttcaaggacttaaacatggcaacttggataatgtttaatctttgtttgatcgtgtcaggttgctagtatgaattttcaagtgctactcaatgtgggacttgggaactccataatacccaagtccaccaaacatcccagacttctcaatgagagatctgggcacaccataatacccaagtatgggaaaaaccaaaccacttaaacacttaaccaagtatcccatactactcgatgtggggcttaggcaccctataatactcaagtccctatcatagtaatcgtattaacttaacatccaatatttctgttgggtttgtagtctgtctactttctatcttttcttgcataatgtcatttgattttatttaattgaaaaaaaatcaatgaaccttttttgcaactatttgcatctatttactgttagaaatgcattgctggagtagtctataaggaaactaagaatattttctcaattgttctgcgttttatgctcttaataatttgttctccgatactaggggaacagtattcttgcagattctggttcagagca

SEQ ID NO: 32827 - DNA, 686 bp, Medicago truncatula
  Intron number 1 from transcript Medtr7g092570.1 (locus Med tr7g092570) derived from phytozome v7.0 (chr-ID MtChr7; po s 20415193 to 20415878)
gattttgtctctttgagcttataacaaagaaaaaggtttttctttcttgctttttcttcatttttcaatccacccattatctacaataccttttcatcatctacagagatattattagagcacaagcaaaccctttaatccacttttttcttcttctttttctttcatgttgatttgatgaatccacagatttagtgctgtcacgtgtttctaactttcaacataattctttttttcaattggtgtatcattcaacttaacttcccattcaattcaacacctctttgtgcaagatcactttcatttattattagttttgttgacattttttaattttatatgagttttggttttaattttccaatgtcaaaattgtgaaaatttccatgagctgaccaaaacaatgtcgtgaggaaaaagtttggtttgacctatcctttgaaaatctagaagttctctcttgaacttttccttaatttggaagatgcactttgtcatagtttatgttgctatttaaatagtaataaatgtaagaatttggctatagaagctaattttattcatcccttgcaaaattgtaattggtggcttgatttgtttgaaaacctttttttttactcagtagtaatttattcatgctattgtattttgcagtggattcatctttgaggtgagtgttgtagttg

SEQ ID NO: 32828 - DNA, 863 bp, Medicago truncatula
  Intron number 2 from transcript Medtr8g031960.1 (locus Med tr8g031960) derived from phytozome v7.0 (chr-ID MtChr8; po s 6987108 to 6987970)
gccgttattaaacccgaggtatgatatctttctgtataagtgaatatatgtttttttttttttaaaaaaaaaaactatctagccaaaattgttaaattttgtttaaggtgtactttttggtggtaatgttaacttattcctttgtcttttacttataaacaatttattctgctttatatgatttgtttcaagtaatatttgatgcattattggatgtacaaataatttcaaaaggtttaccattccgtgtaccagaatgcatttatggctgtttaaaggttcagtgttataagtttgtattctattttttatgttttatgtgtatttgttgacagttgaaacttgtaattattagacatgactttgtgaatacaggttgttgctgtattttgtatttaaggaatcaatttagcactgaaatgactctggtctagttttcaccttaatctatttaaggatggtgattatagggaggaatcatctttttaaaatttacagttatccatgcatgatctgtaaaataacaaggagttttaatgctgaacccttctcgcgcgtgcacacacaggcacacattccaactttgtaaacattagatatgcaaagtcatcttgccttagggctcatacaagtcacggcattatattctcttcgaatccttgagtttgcttggtagtctctttaaaaatttatgtattctattttctctatgactgttgtaaatggttgtgcagttgtcttgtctggattcaaagtgtccattttactacttttaaacttacctatcattgaattgttactttgctttgttttttttgggtaaaaaaactgacactatattggtatttgtttgtattatctag

SEQ ID NO: 32829 - DNA, 470 bp, Medicago truncatula
  Intron number 1 from transcript Medtr7g099370.1 (locus Med tr7g099370) derived from phytozome v7.0 (chr-ID MtChr7; po s 22140360 to 22140829)
ctctatagatatagtctgtgagttttcttttgcacccttaaactagttttttttcttctagtatatagttattttgatgcttaaatgtgtgaagcacggttacaataatagtccttgaatgtatgaagattacaaaaacatacctaaatatgtcttatgttaatcattttgattctcaaatgtatcttttgttagttaatttagtagtcaaatgtgtctttcgttggtcaatttagttcataaagatgctttaacaaaagagatacatggggatgtgtttgtaattttgatacatttgaggcctatagtgacagtgcggtacacatttagggaccaaacttactttttacttcttttatatttgttgaactttagagtatgatgaaataggagtttgaattgcttcattgaaatatgaaatggctttgttaattgttttgtggattttggggtgtgcttttacagtccaa

SEQ ID NO: 32830 - DNA, 818 bp, Medicago truncatula
  Intron number 2 from transcript Medtr8g133980.1 (locus Med tr8g133980) derived from phytozome v7.0 (chr-ID MtChr8; po s 32133653 to 32134470 reverse strand)
tctttgggtttcgaattcattttctgttatacttttttcactattatttgctacctaatcacaatatcagagggacactcatttcttttaaaacaaaattaaaataattgtagccttataatacttgaaatcctttcactgcttattaggtttttatattgctcataaataaacggtggatgaccctatcgataggctctaataccatattaaatttttatattcggtgtaactcaccttacaaaaccaacttgtaaagtgagtggtgtcacgctttataaactcttatcaaatgttctatcttttctatgtgggtttttcccgatactgcttgcatattgcgtatcttcaattttctgtttctttcaacaatctcaaaccattgtaatcatggggttttgattcttctcattctatagacctaattactttgagaaaaatgtttttttaaatgttttttgctttcactcttattccaaccttaagtttccaacacccttttttttggggcattgtctgttttgagtcttatgtaagttcgcacgagtttgtccttacttaaaaataccaaatcctagttggataaagctcaaagtctcaaactattgaattaagttttcagcttgatctaatagtgtaccataaaaaaataccaaatccctgcattgactcttgatccatatagaaaggtgtagttttccagcatttaatgaataaaaactaagttaaatagttgaattctttctttttctccattattttgacccgtgactgtgttttcaggctggcaatatcaggagtccccccctactgtacaa

SEQ ID NO: 32831 - DNA, 432 bp, Medicago truncatula
  Intron number 1 from transcript Medtr7g105400.1 (locus Med tr7g105400) derived from phytozome v7.0 (chr-ID MtChr7; po s 24145602 to 24146033)
gtcattcttgtcgtaaacaaaaaatattgctttgactttgtccatacatttagttagggtgtgtttggaagagtaccttataagatttaagcatttttataataattatttaggagaaattgtacaatttgtttttttggtagattgatgaaatgaaaatagccattagaaactcacacacagtaatggaggagccggggttcgaaccctggaataagcatagtcagctcataatagcttaacctactctatctatagaagatcataccccttgtcctcactcaccaccaaaatggggcgttggagaggaaacatagacaagtttttgaacctgtttatgtatgagtgattgatgtttagggtgttatatgagataaatgatggttttccaatgtctttatttatttcagcattgcgaagaagaccgagcct

SEQ ID NO: 32832 - DNA, 446 bp, Medicago truncatula
  Intron number 1 from transcript Medtr7g094350.1 (locus Med tr7g094350) derived from phytozome v7.0 (chr-ID MtChr7; po s 21376636 to 21377081)
ggaaggttataaaatgttgatgaaatctttctacttatatattttggtttatgtctcacatgtttttgttatcaattttttttcactttccacttatttaaaatttttgaaaataatttaaaatatattgttacttttcaagaattagaaatttaaaataacgataaaattataacaacgattttttttcttcttttagtattgcatccaaaacttttccaaatatggtccatattagatgctattgaagtagaagataagttcgtctaccctaaatttggcttcttctttatatgtatgagacaagatttagatgaggaaattgtgtacgtcactccatctttctccttgattttattgcttatgaattgtatgttcttattgttcaatcctcatcgagcataatatttttcagcttgacttgtacggaaaacggtggagtttga

SEQ ID NO: 32833 - DNA, 426 bp, Medicago truncatula
  Intron number 2 from transcript Medtr8g099200.1 (locus Med tr8g099200) derived from phytozome v7.0 (chr-ID MtChr8; po s 21764500 to 21764925 reverse strand)
ctgctcatcaacctacattatccgattgttgagaagtttaagacttaataagtttgcattatgatttcacaatacagtgttaaagtaaattattatttcacaatctaatttgattttttttttaccatgtttcttgaattgttgtcgtgaccttaacacttctcaaacttagagtcaaagcatcagtcagaacttaagtcagagttcggcttcttctcaatgtacttcgtacaacgattttttcaatctgtctcaagttaggccaattgttgaatttataaacttagtcaaggtctgctttttttatgtacaaacatgctttgaattttttacgcacaaattaaaaatacatattgcattattctttatttcatgtgcatatttgtgttaggatacatattgcatcaccatttggaaagcaactaa

SEQ ID NO: 32834 - DNA, 870 bp, Medicago truncatula
  Intron number 1 from transcript Medtr7g148390.1 (locus Med tr7g148390) derived from phytozome v7.0 (chr-ID MtChr7; po s 35149352 to 35150221 reverse strand)
gtcgcaaccaacgaaagtgagtagtgtttcatatcattttcaaatttctaatttaacttagagttaaattaaagtttttggtcttataaatatagtaaatttttttttagtcttcataaaaaagtgtcatgttttgtccttataaaatttttcaacgcataaacttttgaatgattttttacatacttatttattacatcatacaaagtatctccacaaaaaattagttcaatatttgattttttgttcaaaaattttagtactttgatcttgaaattttggtgttttgaaaaattaatatttaattcattacatgttaaaaaaatataaggatcaaaacatgtcacttttttttataaggactaaaaacaaaattcattcatcattttataagtttcttataaaattttccataatataaattttttgtccttgtaaaattaaaatttgattaattatacttaaacttttaaacgtttgaattattcttgacatatttatttagaacataataatacaaagttcctctgaaaaaaattatttcaaaatttgaattttaggtcaaaatttgatgtttagaaaaattaatatttaatttattacttgttaaaaaaatacagggatcaaaacatatcacttcttatacgaggactaaaaacaaagttcgtttaacatttttgaagtttcttataatgttcttaagttgactttgttatactttgaagtgttggtcttttgattaatctaaatccatattaacttcttcaaacaacaacatgtatgtaaaaataccctttaatttatatataatattccatcaccgattttaacatttatttggttcttattaggcatccctgaggttcttcc

SEQ ID NO: 32835 - DNA, 842 bp, Medicago truncatula
  Intron number 2 from transcript Medtr8g083960.1 (locus Med tr8g083960) derived from phytozome v7.0 (chr-ID MtChr8; po s 17177576 to 17178417)
ggtggggttcttcttcagattggactcaagtcgaggttattcacttctttcactttatcttccttctagcttatcaaaacaccttatagcttataccttattttatcttgttaaataaatagcttatacataaccacctacaataagcgcttcattaatttgtttagctaactagttagtacttattcaatatgtgtctatcatatgatattctatatcataacctatttcaatttcgatgtggatgtcttagctatttgaattatcaacatttattttcaaaataaattttcatgtttttttctcgagttatcttgtacaacttattattaaacctaagagatataatcatcaaatgtgcgataattctcacttttatttctgaatcatgatagacataaatacaacaccaaaatttgtataaatatgcagtttctgtagtagcctaggatttctatgctgctatttgttttgattggcacctcttgagtctcgtgacataaaatggcattatatattctgtagtttctttattctaaaacaccaaatgcagcaatatgtattatctccctagaagtatttaaaaagtgaaattttttataatttatagtctctgaaaaagttattcttgaaagtgcgataatagcaacggacccttttggatacactcttcagcacattcattatgatcaatccctttttaaaaagtgaatatagtaacctcctacattgaacactttttgtaaaatgtattgccgcctttaaaaatcagactaatcacaacgagtgtgctactagttttcatattcacaaaaacttggtacatgcttatttcagggatc

SEQ ID NO: 32836 - DNA, 1034 bp, Medicago truncatula
  Intron number 1 from transcript Medtr8g081700.1 (locus Med tr8g081700) derived from phytozome v7.0 (chr-ID MtChr8; po s 16810346 to 16811379 reverse strand)
ccatatttggcaccttcagctaaataaccgattacgtaagtaaactaaattgtgcaaaaattatttacgtgaagagtttttttttttacacactactaataatcaaattttgtgtgaataaccttcagttatttctttgcgtaagacaagactatttttcttacgtgaataacattcagctatttttttattttatttttcctaaataaacactttttatactttttcatttaagttatttttttaattctaataacttataataaaatcagttttatacttattcattgaaattattttttttaattctaattacttataataaaatcaattttataattattcatttaaattatttttttaattctatttacttataataacatcagtttaatacttactacaccaataaatttaaaattttaataaataacatatttttaattaaactttaaaaaaaatacggttttaaataataaaaacattttttgtagaaaaaaaattcgattatggctttttcttttttttaacatatatatcaaataaaaagaagctaatagatctaataaaaaaaactaatagatctaataaaaaaacagatattcaacatacattttaagaaaaaaaaaacatatattcaagagatgatctagataaaaacaaacatatattcaacatgcattaatacttcatcaaaaaataatatgcatatttattattaaatacaacaacatatataaaattatatgccaatataagaaaataaaatagaagcataaaaatgtaagtgtagtaatttaccaaagtaaaagaaattagtgttgttgaagaagagagtattttgtggagagtagttttttttttagggaaattatggagagtggttttttgaggtttatgttttatggtaagaagagaaattttttttgagtgttgtaagtaaaatgaaagggagcgatgcaattgtatagatgcaattgtacggatacaatttgccaggggttatccgagggtcttgcccctggcaaaccgca

SEQ ID NO: 32837 - DNA, 692 bp, Medicago truncatula
  Intron number 3 from transcript Medtr8g133590.1 (locus Med tr8g133590) derived from phytozome v7.0 (chr-ID MtChr8; po s 31914756 to 31915447)
ggttgtcacagtcaagaattggagggtgaaatagagtcataagtctcttcaatttcaattttaaattcaggttggagtaaatgtagttatttctattttatattcaataataccagtactacattattagcataccagtatagattatcacaagtggtagatatcaattaatgcagagatatcttattaattttgtttttactacaagcatcaagattctactgtgctaaattgacaattgcagtaatatattcaccatcactatgagtgcacattcgcatttatggtgaatttgatagaatcgcggtgtgcttctgtgaatttgacagaaactatactttgcagctctaataaaatcaatgtcactgtgatattctgtcattccgaacatgcaaatgtagtaatagaaagtgttgtattatgttagaaagtttttctttttgaaaaagtaaaagcattaaataatttgctgtgtaagttgcaccaatagtatagaaccggtttttttttattagggtgacaatttgtaaaacataaattctgagataaattcattattactatgaactgttgcaattgaagtgcatcattattgcatatatgaaagtcacattcaattcaagaatataaatctcttctacatgcaactttgtgcacaaacagtgttctagacaaagctgccattctactac

SEQ ID NO: 32838 - DNA, 475 bp, Medicago truncatula
  Intron number 1 from transcript Medtr8g122250.1 (locus Med tr8g122250) derived from phytozome v7.0 (chr-ID MtChr8; po s 28544795 to 28545269)
ccatttctgtttttctctcactccaccagaataaggtttccgattgattatacactattccctatatttttctgtggtgtttttcttcatcttattttagaagactgattaattaattaattaataatgaaaatatcttaacgtactttattatgaaagagatatatcttcagtctcactctctgtttacgcttcaaacaaaataaaaataaaaataaaaatagaaattcatgttcattagagtagcggtttaatcaagggatacttaaccgttcaaatatatatcttcgactactaaactaagttaatcatgatttctgtgtctgatcactgttttatggttttctatttgtttgattctagttatttgttaaccacagttaggttgatatatttgtttattttgcttaatttattgatttatttattccttggtgcagttcaatcctacggtctgaaatagaaacttggactt

SEQ ID NO: 32839 - DNA, 718 bp, Medicago truncatula
  Intron number 4 from transcript Medtr8g122250.1 (locus Med tr8g122250) derived from phytozome v7.0 (chr-ID MtChr8; po s 28546249 to 28546966)
gactcaaacacttaagtggtaggtggagtttttaaacagaataataacatgttggaaatttcgccttcattgcggtctgcccctagccgcctaattgtagcatttgggctgtcttcattgcggtcccctctagccgcctaattgtagcattggggttgccttcattgcaacctccaacaccttcactatgttgggtgtgaaaggggtggatttagtcccacattgcctagagatatggcatgtgtagtgtttacaaagtttgggccgccctcaccttacaagccggttttgtaacgttgagttaggcccaatatgaaaacttaagataacataataagatcatacaaactattcaaacgagatgggactttgtcctgagtttgacggtatttagtacctatcttgtattctacttgtataaaaactatgaatcatggattgttatttttgtctttcttttttacgtaaaataacaaaactattattggaaatttttgatgttttgcaaaagtaagtggagaaattcattcatgaatgttaatcctcattggatgttatacaatattggagttattttacataaatagatatgagatatcaagagttctatttgtttgttgtaacaaaaaaaaaaaagagttctattagttaacataatcaatcaattgaaatttgttgcataggtctgtcaaacttgacttcattgagtatcagaaag

SEQ ID NO: 32840 - DNA, 884 bp, Medicago truncatula; identical to SEQ ID NO: 29612
  Intron number 2 from transcript Medtr8g070900.1 (locus Med tr8g070900) derived from phytozome v7.0 (chr-ID MtChr8; po s 13896228 to 13897111)

SEQ ID NO: 32841 - DNA, 1044 bp, Medicago truncatula
  Intron number 1 from transcript Medtr8g106290.1 (locus Med tr8g106290) derived from phytozome v7.0 (chr-ID MtChr8; po s 23782274 to 23783317 reverse strand)
gatcttgcatccggttcagaattattaatactaaggttattcttcttctgttatagctagctagttaaaatattatttttatttggtgcttgatctactatattatatgggtttggccttagtttctcttctttactgtatatatcatgtatgaatgtttcttaatataaataccagaattgtggatgatttttcctcaaaaaaattaatttatataattcaactaccaaaactaaagacaactaaaggacaaagacatagccttagtcaacagctaactaattaaatgtcacttttctcaagtgtgtgcacaaaatctttgacacgactttgatctatgtttggttggtgtttgtttagcatcatgttttaacctttccaccagtttttttatttattttttttatagctaggtttgttattaacaaagtactgtttttgcaattgatgatatttttctcaaatcgattgaacaagtagcttctaagtcatgttatcctttccatatttaatatttttttttttttgaagaatatttaatatttttttgtttatgtgtaaatgtgatttactaggagtgctttatgatcaacttattttgtaggcatgaaaagctaaatgtttggtgctatacctgcagaccatcattcacttgatcataaccatccctccccataattacattgtaaaaagtgtgccccctctactgtgttttgaaacctagtttagttctactcctttaaggaaatatgaattaatgtttcataaggtaaagttatgggtatatatgtgaaaaaataacttcaaacattctctcttccttaatgtttgaaaataatcatctccttaaaaaaatgttggaaaataatcatgtgatttttttttttaaatgaaaaaataataatgtgattaattgcaaaagttcttaacacaattattgattaatgttctccttccttttcttttgttataagcaaatgttctcctttgttaatcactcttctttttttatgagtacaggttttaattcttctgaggtggaat

SEQ ID NO: 32842 - DNA, 976 bp, Medicago truncatula
  Intron number 3 from transcript Medtr8g097120.1 (locus Med tr8g097120) derived from phytozome v7.0 (chr-ID MtChr8; po s 21495177 to 21496152)
tatcagacattgcaaggaaggcatttctttacagtgtacgtctcttgttattgtagcgaagcttattctcacatgaaaatcatcctgtgctagtataaacctgaatgtcagataaaagaagaaatggaactcaaaccttactgcacttcattcaatttcctagaaaagcttttgggaagttgctagttatgtccttgagctattctagcattctagagtgcgtttccgtttaaaaaaatctgaatagagaaaataattttgtgacggaagaaaagtaaaacctagaaaattcgcaagaaaggggcctatttactttgagaagatgttctctatttcaatttctgttttacttttagccacaaaaatatcactttgttttttatttttaaattttttacaggaaaatatcatactttttattgtattcactgtttcgaatatacactttgaaaaggtgacatttttacagtaaaagcaaataccaagaaaaacattttctcaaactaaatagcttctgagagattgaatctctctgcatttctaacaaagaaacacctcccaatagtcatattgagccattcacagcagacaatctgagaaaataacattgtcccacatgtagtatagagatggcaaagtacctttgaaaatccaagctttcctttccagaaacagacaccagagaacagcaaagacagagctgtgcatagaattttagcttctttacaaacgccaaaacctctaattttttcaaggagaaaccaattcaagtcctttggacagacaaaattctcttcccttacaatttattccagagaagttgcagtagaacaaagctgaaaaaaatgattttcattttctatagtatatcagcacaaaacatataaatatagtaggatacagagcagtggagtgagaggtctttgcttttcaattgtttctgaatggtacttttgcatgaatcttgtagcatttt

SEQ ID NO: 32843 - DNA, 982 bp, Medicago truncatula
  Intron number 1 from transcript Medtr8g009070.1 (locus Med tr8g009070) derived from phytozome v7.0 (chr-ID MtChr8; po s 1175638 to 1176619 reverse strand)
ttaattcttttgattgattgtctctctccctcttggtttctcttatgtttgattgtctttctcctttttttattcttctgtttgattacatttttccttgttgattcttctgtttgattgcatttcttcctattgattctcctgattgattgtatttctccctttcgattattttgtatggttgcttctccttgctggttcttttgtttagtttggtttgattcagttcttttctttggatgatttctctctttgacaaattgatgatgatggttcttggtgctctctatgacgataactcacttcagtttatactctctattggttctgcaatcagttttagtctgagggatagtgatagaagtttatattatttaacacattttttatattttgtttgacaaactcacaatatttcttgttgatgcatcatgagtttgagtgtaggatattaaataataaaatattagtcataagctattgatgttcgatgaaaccctagccatctttattattcttatcgaaacctaaattgttgacaatcgagagttacggaccgagaggatcggatcgaaaatccagatagggacattttgtggatttttgtcggtaaaatggaccaacctaaagttgaccgtattttttatgagaaatattaacgagtgcctctggagtactctttataatctttagatgatattttttttccaaaaatttatgtaatcaatgtgttaaaaattgaaatatttgacttttgtatgtaaaatttcttcttttaaaattttaaagagtgcccccaacaattttttttttttttttttattataaagttggcgataggttataatcagcgtgtttggtgttcccgtgttggtgactttcctcgtaatgtaataccacgggttggagataccctaataatggagtatttgttttataattggaggacgacacagaagtactagtataaaagtacgaaatc

SEQ ID NO: 32844 - DNA, 883 bp, Medicago truncatula
  Intron number 1 from transcript Medtr7g137890.1 (locus Med tr7g137890) derived from phytozome v7.0 (chr-ID MtChr7; po s 32597058 to 32597940)
tggcttctacgtcaagccctctgtccattcttcaggttttcttcttttacttatcaacacatgcacactcttttaacatgcttaccaattcaatttctctacttcttcaacagcactatatattctccccgttttttcactttgattgtctagtagtgatttatcttacttttggctatatttatttgaataacgcataattgcaattatataacaggaatgtatgtatatgtgtattacatggagaatacagcctttttggataaacaactcaattaactgcttatagcataaccgcttttcatataagtgcttatgcatatgtttcttttttgtttttgaaatagacaatgttagcaccccaaaccacctaatgtctcacgttacttatgtaagttatttctataacaaaaaataaaataaagtcaaatataggctataagctgtttttataagctattctggagggcttatataaataagctgaaaacaatttatagacatggcataagttgtttccgtaaactctttcaaacactcaaaagtgtttatgttagtagataagttcaaataagccaatccaaacaaaccataattgactggcagattgttgaaactatggagtatggacaattaccatacatttatttgtgaaggaaattgtttattaaaatctttatgagatgaggtcatatggtgtgctccaaaagtttgagtagcataacaactgagcattaacatgaattcgcgcattgtgaaatgtcactgcatatgttattgttagattaatataaaagataagatattttctaatgttagaatattagttatattttcccgaattgcaggctggaattggaattttttagtagcaagtgaagcc

SEQ ID NO: 32845 - DNA, 548 bp, Medicago truncatula
  Intron number 1 from transcript Medtr7g106490.1 (locus Med tr7g106490) derived from phytozome v7.0 (chr-ID MtChr7; po s 24669799 to 24670346)
ttgctgttaaagtcattcctaaatctaaggtctaatttcatctttttttttgtttgcttcattatttcaatttttgttttgtttttaacactttttttaatatattttgtttcaaattgggttttgtgtatgatttgtgatctaggtgttctgtgaaatcatgtcgtggaagtgttagaagaagcaatttttagatttttggttcataatctatcacttacatggattgaggtttttggaagaaaacagttttttgaatttttgttggaatggttttttctgtgatttattttatgtctcttttaatagagttgttaactattacgggtttgttatcgttgatgaatccagctttacttggaaaaatcttgaaactgatagatatgtggttgtggtattttttgatagattacatgatgtaattattggatttgttttcatctcagtcttatgaaaatttattgtaatgatcaatgttcatctatggctgttcattattaaatacgctatgtgctctttgtttttatatatttgggcaatgttggcag

SEQ ID NO: 32846 - DNA, 742 bp, Medicago truncatula
  Intron number 1 from transcript Medtr8g086600.1 (locus Med tr8g086600) derived from phytozome v7.0 (chr-ID MtChr8; po s 17784374 to 17785115)
ctactaattgttgttgcaagttagtttttttaaaccaagtgtgatggtttcgttctgctttttctaaccctactacatgttatggtgagaatgtaaaggccttgattttgtatacagttgaagaagagtcactctaactagggatagcaaatgaatgagtaaaagataaatcatcaataaatttaacacgacgaatatttttttcttcttacagacaatgtcaatcaaatggatccaataagtatcaaaatctcctctcataaaacaagccaaatgacgaataaacttcaattgtttggtctacaattttttccaaataaagggtgtgagatgattttttttattttgatggaaaggtttgggatggattaagggtagggatttgaactcccttataaaatcacaataaattataaataggtcaataaagaactaagcatattactaacaaccacacatccctttagaatttaagtaatttttttaggcctaatgaacccctaattttttttgttggaacccgaattttttacttatttttcgagacctaagacgtttgccctgcctcagatacggccttgcaaacaagctaacccacaagtacaaccaacatctaaaacaagttcctactttcttccataatgacccatattttctccacaacattaatattcaataaaaaataatacgaaaaactactaggtatgcctttgaacaaggctataacacacccatactattt

SEQ ID NO: 32847 - DNA, 933 bp, Medicago truncatula
  Intron number 3 from transcript Medtr8g125420.1 (locus Med tr8g125420) derived from phytozome v7.0 (chr-ID MtChr8; po s 29251634 to 29252566 reverse strand)
ggcttgtaaggccttacatcccattaacttcgatgttcttgttggttatttcatcgttttctctattttatactgtttgcatgcattagtgtggtgtttcagtgttttgaagtgtttcttttaagggttcaaagacttttaccccctgccatatgggtgcatttttgtttgccccctagaataaaaaaaaaacttaggagattcccccttgtcattagaagactctcttagaagattatctggtttgaaccctaatggcatattactggacaaatatgatgatgtggcatgatgattgtgtaattaattttcttttttaatattttcgtttaatccatttaattgaagataagacatatttgaatgtacaataacctgcactctataaccaaggttcccggactctacctacaatgatcacaagttcatataaaatattgacatcattgatggtatcaatctgtatgccattagtttacctgtgttgacatagtattagatgataattttagcatgagcggagcatgatgaggccatttagtcatttgcctcaaaaagattaaaatttaaaatagcaaggaagggaagagacgtacacgtaaatgggagataaatggactatggtcaatctggcctatgattttaataaaaaataattttcatttatgaattctggaagttgagttttatatggttcgcatgatttctcttgcctgttcagcattcacgtggaaaagcatttgtggtcgttttgttttcatagatgactttgatttcatggtagtaagctcaactaaatttgttatgtattttttttgttgttgcatcaaacaaaccaagtcaaatgatgttttaatttctcaaaccccggtactaattcatctgtgcgttattcctccttcgcttctagggattttgggtggcagcagagat

SEQ ID NO: 32848 - DNA, 848 bp, Medicago truncatula
  Intron number 1 from transcript Medtr8g151240.1 (locus Med tr8g151240) derived from phytozome v7.0 (chr-ID MtChr8; po s 37244137 to 37244984 reverse strand)
caagtgagtagttatttatattttcatgaggaatattaatttttttttcttgaagttattgttgaggagcctttaatttagagtattgtttgttgcatacatatttgacatcaaatttttacatgaaatatatgtggctaagagtaatgttagggatactctcttttcagcactctctttaacacttgctcttttattagatgaaactagtgtatgtcccacgattttaagggaacccatttccaatgtgtgagacccatcttgatttaaaccaataatgaagtgagtatttaggagagtgttgaaaggtgattgattaatgaatataacaaagtgtcataggttattaaccatccactcaacacgattaaccacaaatatgcatatattcaatgattcaggtgttcaaatatatatgatatttttttttgtcaagtagcataatgactggagctcacacattttaaatgtggagaagtggggtgtctgaggttcgaaccccggcccttgcatatattatgcattgtccctaccaactgagttaatctcacatggactcacggttaaggctttcaatccctacaaaggatttatttaaaaaaaaatccgtacaaaagatgtcccaaaaacatatttaagctttactttaaattatattttgtttgaatgtatcatcaactcaattaaggctatattacacatttcagtctcataatgaagaaaaattaaccaaaaagtatagatatagattaaagtaaactaaccttatatcatatcatcatataattatataatcttacaattcaaagcatgatgtataaacaatcttcttttgttaggacttacaa

SEQ ID NO: 32849 - DNA, 758 bp, Medicago truncatula
  Intron number 2 from transcript Medtr8g112890.1 (locus Med tr8g112890) derived from phytozome v7.0 (chr-ID MtChr8; po s 25502782 to 25503539)
caggcttctcttgtaaaggtattgtgaacatcaacttagcttatgtttggaactgtggtgatcggtgaaaactgttttagattgcaagaatgagatggctaccgcggatccaaacataggcttaatcctttacttttatttttctacatatggttgaaactattttttttttcttttttagccaaatgttattctgttggaagtatggataacaaatgaatgagcaaactgatattttgctcattgatttcttactgaatgattcaatgatttagtcctcaaatttttcaaactttctcccatcattcctttttctatcttttagtcaagtttgaatcatttaaatactaaatcatatcaattatttaaatcaagggtggaattgaacgtaaattacaatgaagattactccataacaaaataccattcaatgacttcacatacatgcagagttttcagaaactatcaaaaaaatttcatcttttttcaatcttcatttcatatgattggcatctaaatttgcacttaggaaacaagtgagtatctcatagaatcatagtttatgtatgccatatccgtttagaaatatgtatagaaacagtttagccgtcaaaggtctccacaaacaaatgagagccatgttaatttattagaaccctgaatgaaatggcattacctgcagcatgtctgactgtagtgcttttgctgctgtatccattacagttcaagaaattctacctggattcagaactgttttc

SEQ ID NO: 32850 - DNA, 317 bp, Medicago truncatula
  Intron number 1 from transcript Medtr8g142480.1 (locus Med tr8g142480) derived from phytozome v7.0 (chr-ID MtChr8; po s 34760813 to 34761129)
aacacatagaggaaagttagacaagaaagcatcataaatgattccctgttacaggcaaacaactggtatatatttcttttttcaaaagttaagttttgaaactataattttctttataattacaccagtgcgaaaatttagattaccaatagaatttagagtatggaaatattgtctcatgttgtgtgtgtttatgtcttagcttgatttggatagtataattttgatttctgtaaaagcttatgtatcatgaagtacaactaatttctttaaaaattgtaggtctttgtattgctaacgtggttcaatctaggttt

SEQ ID NO: 32851 - DNA, 309 bp, Medicago truncatula
  Intron number 3 from transcript Medtr8g142480.1 (locus Med tr8g142480) derived from phytozome v7.0 (chr-ID MtChr8; po s 34761446 to 34761754)
ggtcttgactcacctaagttactttaacaactttggtaaaatcctatttttacaactttgggattgggcgttttaaaagtaatagaatagtggggtccaatttgaaagagaggcttaacgcactcaaagacaaacatgaatgtaaggtttcttcagttatccttttcccatccaagattaatgcgcaagaaagagctcatgtaatggagaacaaaaggttatatctaaacagctaatcaaaatttgttttttctctctctctttttgtctctaaataaacttgtattttttcttttatagtagttgttg

SEQ ID NO: 32852 - DNA, 982 bp, Medicago truncatula
  Intron number 2 from transcript Medtr8g071240.1 (locus Med tr8g071240) derived from phytozome v7.0 (chr-ID MtChr8; po s 14068036 to 14069017 reverse strand)
tgtaagtatttttcatttcttcttttctttgttaaatgaattagagcggtaaccttgacgcaacgggtaaagttgttgtcatgtgactgaaaggtcacgggttcaagtcctggaaacagcctcttgtataaaaaaaaaagggtaaggctgcgtacaatacaccaataatggtgggaccccttcccggaccctgcgtatgcgggagttttagtgcaccgggttgttctttttgttaaataaattagtacaaattatgatagttttattataaataatggtattatagtagggcttatatcatttattgttggcttaattgcacttttggacccctatctttccaaaagttgcggttatggccccctaactaatttaaatacaaaacagccccctatattttgattctttggcagttttggaccccgagtccattagtgaggtgccacgttggaaagataggggtccaaaagtgcaattaaacctttattgttcgatgtggaaaatgtattagtgtttctaatttccaatagcaaactaatactgaggcatttcaatttgttgaactacatataagaattgtatgtttcctcaaaaaataaaataaaataagaattgtatgttaacttatactgggatttttgtaacttgctagcttgtcggtttgaatggtgggaccctttcctggaccttacgtatgtgagagttttgtacaccggacggggctgccctgaatgttgaaatactcatcttatgctttgattagattattatgtataagtgtacatgacctgtacatgcttcaacatgtatgatatactgatattactattagaattagattgtattgattgaaattataaatacaaactagattatgcttttttattattaattgtagcttccaattcttctcatgtgcatgcttgtgtttctggtccatgacacagtgtgaacttcaccagtggagaagtggtggaaagaa

SEQ ID NO: 32853 - DNA, 458 bp, Medicago truncatula
  Intron number 2 from transcript Medtr8g026800.1 (locus Med tr8g026800) derived from phytozome v7.0 (chr-ID MtChr8; po s 5894985 to 5895442 reverse strand)
gcgttgaacgtgaattggttggctagtttgtgatagatgagattaacatcttggatcacatcacattagcgtgagtaatagttttataaattaacacttggttgactcaaatgataagcgatccaagtatcttaaataaacattgtatttaagattcaaactttttctatttatttaatgataaatgttattagatacttgttcgattaatttattcttcttcattacttatttcttagatcaaactagttgaactatctaaccatcaaatattatggtctaaggtgattcgaactctgtctcttgtgtccaaaaatatttggagaagaaaatccaatttacaaatatccacttttgttttttcgtaatttgtcttctgatatttttgttttgttttaaacaatccaaacatgtccctaaaaggtatgtggtgaaagattgaagtaaagtcgtgacat

SEQ ID NO: 32854 - DNA, 576 bp, Medicago truncatula
  Intron number 1 from transcript Medtr8g026800.1 (locus Med tr8g026800) derived from phytozome v7.0 (chr-ID MtChr8; po s 5895654 to 5896229 reverse strand)
ctattaacttgggtgttgtgagtttgtttgcagattcaccctttatgtttttagcgatgtttgtatctgatttaatctattgatttgaatgaatgaatatcgttttatttttgtcaaaaaaatagactacaggtcctaccactaagtagatctcaccatcgttaattatattttacttttttcaatattttatgtgtatttatctctctaaatggaaaaaatgaagaaaaacataaatggagaggatttaaattcaagaaaatgtagcaattgtatcttgaaacttgtgtaaagattttattttttttatttttttttacaaaccagggcttaaacccaacaagaaagcaaaactaagaaattagactaaccttcttaggcatgcaaaccccttcaatttaagttttacgagatttaattagataaatgatagaaacacaattaatataacgttaagtttaaattaaaaaatatataattttgaatattatatgaatcatacacaattgatctttattcattctcgtgtatttagatgaaggtggaaattctggtgttcaaaggtgaagattcaca

SEQ ID NO: 32855 - DNA, 1063 bp, Medicago truncatula
  Intron number 1 from transcript Medtr8g011650.1 (locus Med tr8g011650) derived from phytozome v7.0 (chr-ID MtChr8; po s 1608942 to 1610004)
attccatacagtgttgctacaagtctcgttaacaggtgacttcattttcaacacttttttttcagttaaattagttaaactaactatatatatatatatatatatatatatatatacacacatatatgctactaatttacactcatctaaaaatactaaggccttgtttacgactttagagaagaaggagagacgaaaagaagtttgaaaaaaatgaaagagtaaatcatcgacctaaacctacacctattagttttttttaccataaaccaatctttctttaaaacaactaatgggtatatatgtaattttcatttttttaaatcaaatatttaattcatcccaaacttgtttaataacaccggaaaagtaggaagcgtcgcttccttcatatatttgtttcaacgtcacacatcacgtaaatatgcttagtttttttttttttttttttttaaatatgagttttgttgcaatatatgagttctcatgttgtcctaatttcatttgagctcactttcagttttcaatcaagctactgcttgataatttttcttttgaaatatacatgttcgtaaaagaagttaatgtgctttcaaaggggaaggatctaggaatacattttaagtatggctaaacattttttattttttattttttaaattcatgtgtagctataaccatacatagacatgatgcagatctgcccgactttcaacaacaaaaaaaagttaatgtgctaaaaaatgttagaagaacaaaacactaacgtgagtaacacacaagatttataaaaatgtaattgtaacatgagagataaatttttaagaaaacaatattctgaacgatgaaagtgtgtgtaaataaccagcaaggtggatataaataattaagcgggtgtatgttactaagttactttttaggtagatgtaagttgctaatctactctaatgtttttaagtaggtgtaaattatatatatatagacacacacatcacagagcttgtttgctgaatattttctttacgtaggttggcttctgttgccttacgcgaatttggacgga

SEQ ID NO: 32856 - DNA, 515 bp, Medicago truncatula
  Intron number 1 from transcript Medtr7g103080.1 (locus Med tr7g103080) derived from phytozome v7.0 (chr-ID MtChr7; po s 23024586 to 23025100)
ctcatcaagttagttcttgatccattatttacatgatacttttaatctttactagctctgggtagcactttgatgatattggggtgccaatgtcatgtgacattggccaaccacaatgtcatcaaagcgctacccgctagctccctaatccttcttgtgtttgatctaataatactaatttaagagtttttgcttgaagccttttaatggctgacacacaaaattcgacaaaaaattgaatggttaacacaattaaaacatgtggtgttgttaatattacattaagtgaatggttatgaatataaaaagttgtcgcaactctgtttatcatccattgcacgtaattaactacaattttggcactattaaccataattgtagtttagctttattttttttttacttttggtttacttacaagacaaacctaaggttttcttccaacacttgatgaggatcttctttatcttttacaagaaggatccaattcttgaatttccttcagttttttggga

SEQ ID NO: 32857 - DNA, 872 bp, Medicago truncatula
  Intron number 1 from transcript Medtr7g111890.1 (locus Med tr7g111890) derived from phytozome v7.0 (chr-ID MtChr7; po s 26387780 to 26388651)
tgcgacctaattgtagattctcatcggggagagaggtttgaaaattgtatttggactctattcctattttgtttttaaaattaaatttattttcccctttcctttgttgtatcataattgatgcactccattcttatgttgaataggtcttaacattgtttttaaagaatgtaatttgaaaagttaaattgttaccatggcaatgagactaaaactatcatatcattattctttggttgtcttgcttttaatattgttcatcaattatgtagttttttttttgaaggatcaattatgtagtttttaacttgcatcaattatttgagtttcgagactattatatcattcttctttggttgtcttgcttggatgtgttaaacagttttgatttatgtattgaggaattgtagtttcttaaataaatgagggaaataagagtataaccaaactttatagaagagacataattataaaagagacacaatatagtttaaattaccaagcttgagagtgtgcacaaaacatgaaaccgaagcacatagtggtgtgataatcatggattaagttcaagtgttatgaaaatagtctcaaagtatacttaaattttgtagacactatttatattttcatttttgtaattaatacttattttatgggtgtatatttgtcatatctcactttatagttattttattttctttaatttgtgtaatatctatttaataaactttaatcaattatataaaagaaacatagccaatatatagttaaattagtgaaacaaaagatatataacagtaaaataaattatattatatattaatagatacagaaaagtacagtcaagtatataaatacgttagcgcagtaga

SEQ ID NO: 32858 - DNA, 1007 bp, Medicago truncatula
  Intron number 1 from transcript Medtr8g146530.1 (locus Med tr8g146530) derived from phytozome v7.0 (chr-ID MtChr8; po s 35836446 to 35837452)
gcatcgtctgtaggtctctacatccgccataaggattacaagcttgcgcaccaatcccttactcaacatgtataccatgtttaaatgccacagacagccttatattttcctttttttcattcatagtaattatttattttggaaattttttcattaataattttttcattcatagtaataatagtgattgcatcaattatgctgaaatttgcgttcacattaaatgtctgcacaattgtttcctagtttataaacaaacaattattgctcctatataattccttgtattccttcactttttttttttgttcattttgtttcttttctcttaatttaccaaaatgaaattcttgatgtgcatgtgtcatagatcgaacaaaggttgttttttgtattgatgggcttgtttgatcttcatcatgcaaattgttaatgcttctttttttttttttttttgcaaattgtctcctgatttattttgcattttcttaatggtttagggttattgtttaatgtttagggtttgttattattcctgttgtatcaatggttgtttttttagaggggggtttgttcttcatgatgaactgttgaatgcttctgtttcttttttggcatctgtaaatgttttatattccaatatttttatgatttagggtttagagtttgtgactgatgttttagatggaaataaattttattgctcagagaaacgtttccatgtagtagattttctcaccctgatgagttttgagtattgatggaatattttaagctcagatctaattgtttatatttatttttctatatctgtttttttcttcttcttctttttgctgctttcatgattggcatggttcgatcaataaatcatagcggggctgtaattttgcgcttttatcggttttcagtgcatgtgcaatttagtttgatatctatccctcatgcgttgtttgttttttatggttttttttttctttgtgttgtatgtgtttttttttttgtag

SEQ ID NO: 32859 - DNA, 620 bp, Medicago truncatula
  Intron number 1 from transcript Medtr8g036980.1 (locus Med tr8g036980) derived from phytozome v7.0 (chr-ID MtChr8; po s 7865545 to 7866164 reverse strand)
aggtcgggctacggtttgtttcctttcttgaaacaccttccatttcgtcatcacttattttattaagttgttttacgttgttgaattatgattacttaactttttcttgtgttatgcaccatgcaaaacccttaaaacctcaagcttaaatacaatttgggacgcttcatattatataatccgaactgtttctgacgatttttgaattttataatccgaaaatccgatataacagggcgtgtttcttggtctttttcggattataaaattcaaacactccatatacaccactcttgtgtcaagaattcagggaaaactagttcggattaaataatttgaattgtatgagcacaaagacgaagtttatttgtaacagagatggtcaacttaagaaccatactaactatcataacttcatccttgtgttttaggtcagtgttagatgtttccgccgtatcttcttaacattatacttcaatattattatgtaaatttagacaatacaaaatttcgaattctataatcaaaatgtaacaagaaggaaaaagtaatggtcataatttttgtcttgttcttctgatctagtactagtactgcaaaatctggatttctcgagagat

SEQ ID NO: 32860 - DNA, 520 bp, Medicago truncatula
  Intron number 1 from transcript Medtr7g138650.3 (locus Med tr7g138650) derived from phytozome v7.0 (chr-ID MtChr7; po s 32957329 to 32957848)
taacaccttcgccgcccgatctaactccggcaagggtacgccgctgtactctgccaccttaatttctcgtatataattttccatgatcgttaaacgaatcaccaataccacaactgttatcactaaaattgaactgaattactataatcatcatcattatcactattataactataatctacccgttaatattgattaaccttcaaattaaatatcgaattgtgttctaggttagatctgaagcgcaagacacagttattaagattgaagttcgaaattatcgaaatccattcatatatgatataatttaaatctatcttgattcttgaagttcttgcatgttttattttggtagaagaagttcctgcatgtgaaaaggtcaaagagattttttttttgaattcgtgaaaagctgaaagatgtttttctcagtttttgatttgtaagaaaattaaaataaatatgctaacagttaaggaaattgattgatcagaaacggaggcgggaagcgtgagatcgt

SEQ ID NO: 32861 - DNA, 661 bp, Medicago truncatula
  Intron number 2 from transcript Medtr8g084130.1 (locus Med tr8g084130) derived from phytozome v7.0 (chr-ID MtChr8; po s 17283184 to 17283844)
tcagatatcacattcaggtactaacaatgtttgttaacacgattattattactattatcataaacgccgtatagtcaatgttgttgaacacctgctacacttatcatgataagcgcttatttatgtttatgatatgaacttgtttccataaacaatttattttgaagcttatataacaaacacttataagctctttctataatagaagataaaattaagttagttatattgttttagtataaactgtaagttgttttcataagctatcttggagacaacagcttatgaacatgtcacgagtttgtttcccttagttctcctaaatgcatatactagtagataaactcaaacaagtcgattcaaacatatcataaatagtctatctcattaaatagcgatttgttcaaatcccattaagctccctttttgaaatgaaaacagcttatggacttgtcaaaaattgtttccataaactctaccaaacagtctcacaattgaaacatgcccaaaatgttgtcaaatagaggcgctatagaggaatttgaataaacccctattttatgcgatccacgattgacaaacactgagtaatgtagataatttgagtttgacacttttgggttgcatatttgatcaagctaaaaaataattgtaggtgtca

SEQ ID NO: 32862 - DNA, 413 bp, Medicago truncatula; identical to SEQ ID NO: 32495
  Intron number 2 from transcript Medtr8g138090.1 (locus Med tr8g138090) derived from phytozome v7.0 (chr-ID MtChr8; po s 33210622 to 33211034 reverse strand)

SEQ ID NO: 32863 - DNA, 612 bp, Medicago truncatula
  Intron number 1 from transcript Medtr8g119620.1 (locus Med tr8g119620) derived from phytozome v7.0 (chr-ID MtChr8; po s 27173054 to 27173665)
gaaaagtggagactggatttgccctaggttagttcacattatcttcatatagtttgagtactgatagaactttgtggtttgttatgcatgtacatgcattttatcacaatctcaatcctctaaaagtgtttttctcagctgcatttgattaaaaaaagagattgcattcaattgcaatttttatgtcagttgacataaaaggtgaacagtgtaatttagtacaagtaattcatatactcacaaaagctgcatttccatgcattgaaagtgcaatctccttttcttcctccgagagaaggataggattataatcggcccttgcaaagtaacatatagtgatgataagaacaaagagtgcagtaatttttgcaggacaaagccataaaatgattaagattaagattaagaataaggaccatattgataattacaaaacagacagtggttgttttttccaaaaataataatgatgatgataatacagacggtggtcaacataaacaagttcagttgatgataataacttgtatccaattcttccctaatttgaatatctttgttttatgtacttttttatgtgataaagcagaattggctgtggaatccataatt

SEQ ID NO: 32864 - DNA, 618 bp, Medicago truncatula
  Intron number 1 from transcript Medtr8g132820.1 (locus Med tr8g132820) derived from phytozome v7.0 (chr-ID MtChr8; po s 31464351 to 31464968)
aagtcattccactggtatggaattatctattatttcttttcttttcaaattacaaactgaggctgcaaaaaattgacccatttcacaaaagattgaatttttagtaaattcattcaataattggggttttccaagtaagattaggaggagaatcagtggaacattatttgggggttatttcacttttttttctttctttcaaagcttttgagtgaaattgaagtgttagaagatcaagatctatcaaatttctgcattttagttataatataatcaaaactatatgttgtcatgtttggacatgcagtttaattttaagcttataccgcatatgtttaattttaagctattttaataagaaaagataaaattaagtcaatacagttttggtacaagtcataagccgttttgacttttgataagctatcctggagagcttatagaaataagttgaaaacagctaatgaaacataagttctcccaagcagtctcgcaagtgcttctactagtagataagttcaaataagtcaatctaaactgctcattagtggctatgattaaaacatttcaaagcttagcaatataatgtccatatatttatgtattacagggggacag

SEQ ID NO: 32865 - DNA, 964 bp, Medicago truncatula
  Intron number 2 from transcript Medtr8g044020.2 (locus Med tr8g044020) derived from phytozome v7.0 (chr-ID MtChr8; po s 9680489 to 9681452)
acatattcttgtacacaagcgtaacttctgggattaatatgcttggttttaatgcctgtatgataataatcatcatgtagcttctgaaaatgctttaacctagcatgagtatgctttgcattttagcaaagtccagtggaaattgaatgctctattctgtttttgcattccaaatttcaccatatttatctttatcattggagccaaaacaaaatggttccgcacaactctataagcatgaacctgttatagtagggtaagggctactattttctttgaggtttacatatgtttttggtccctctaaatataccactttttggtattagtcccattaaaaaagaattttattttgttccgtgcaaatatactacttttttacttctggttcttgctgttttggttaagcagtttaggccctgtaaaaaaaattagttcgatccttgcaaatatactactttttacatttggtctttgttgttttggtttagtctctgtaaaatttgatcatgttgaaactagtccctgtaataagtatgtaatattcattttagtccttatgtatcctgtattggagggactaaaatcaaatagtgtacatattgcacggactaattcaaaggtgaacaaagacaacaaggatctaaagtaaaaggtgcagtatatttgcaaggattcaaaacaatattttttttttacagggattttaaagcaaaaagtggtagatttgttggcactgaaaacatatttaaacatgtatttaatgatgattgtggtatgaaaatgatcttatattttaaatattgcatacaaaaatatacttaacagagacattcaattctcactggctaccataggcatgaaattaattcaatttatatgatatgactgcgttatcttacagtcttcatatgttttacataatgcagggattcgatactagaagattttccctgtgctgaaa

SEQ ID NO: 32866 - DNA, 649 bp, Medicago truncatula
  Intron number 3 from transcript Medtr8g079250.1 (locus Med tr8g079250) derived from phytozome v7.0 (chr-ID MtChr8; po s 16466656 to 16467304)
ttggccatcaggttgaacttttaatctcttttatattttatcttgtaatttcaatagagatttttgtagggaaaattgaatcttcttgtagggaaaaattctcttgtaacaaaatttaagatttttgatattatgtattcacgtagtcactcgacttcagtcatccgatctttatatgatggtttgtatttaaactttgcaaaataggtctgaaatatgaagtcagaatattgaaagtttgatctgtaaacgtgtaatggaaggcaaactatttcctaatatacgatccgttacacattgttttaattgtggtccccaaccgcaacttttgccgcatctgatgtgttttttcacatttttcgcatttttacacatcgaccgtgtttcgtatccgcaacatcaatttaaaataaaactttccctcacctacttgctaacacatgtgactataaactttatcagcaatcctatccattaattcttttgtacacaagatttctcttacactacacatagccttacattcaaaaaagacagccttaaaatattgaccattataatcaaatgtttttgtcatgaataagagggactaaaatgaaatatccaaattgcaggcatatccccacaagattctcacaggtagaaggtc

SEQ ID NO: 32867 - DNA, 653 bp, Medicago truncatula
  Intron number 1 from transcript Medtr7g093930.1 (locus Med tr7g093930) derived from phytozome v7.0 (chr-ID MtChr7; po s 21151039 to 21151691)
tctattgccacacttatctattgatagttgaggaggtaatgtgatgtgactctaaatccattcccgtgatgtttttacacgtttcatttttttcttttcttttctgtctacatgaataatccgcatattggttgtatggagttttattactatatcaaaccatgtttctcataacccttaaccatgtatggtatggaggtatgtaaggagattatgatccaagtcattgaaatgatttaaaacctgaaattgataaaccttttgaatctattgaggctcttcactactagaaaatatacatttgacatcagggttttcacatcagtagttgtttttttcttgttctttggattaacttgcaagtagtagttagttaggtaaagctcttaattttagagggtgacttcaaaattcaaaaccttgacattatgtttgaattatgttaaactcattaatattactctctcaaaattacatttttttttttcattttgtttatctagcctcaactttgtttcatggaattttaactttaagttcactagaaattcagaagtaaggttttagttatttatttatgcatacccatcaatttagtctctattattctttagtgagctgtacaaaaacaacattcaaggaactattcctct

SEQ ID NO: 32868 - DNA, 795 bp, Medicago truncatula
  Intron number 1 from transcript Medtr8g087140.1 (locus Med tr8g087140) derived from phytozome v7.0 (chr-ID MtChr8; po s 18047251 to 18048045 reverse strand)
cttaattttgatacacttgctgtcactttcaacaagtatggatttttttctttttttttgttcattttactttgtttttagtagtattttctttgggttatgagttgttatttggtgaaaaatgaatgttaattttgatgcaattgatatgcagtgatttagggacttttggattttaggttgagggatttgttgattgattggatcccttgcaagggttgcagggccgttggttcaaattttaaaatttatgtctttgatccaacgtccagtaatgttgcaagggatcatagcatgtgaagaaaagagaaaatatgtttggattgatcgtgagtttggctaagtcacgaagactccatgattttgtgaagctccaaagtctaacttttgttaaaatcatgacgactcagcgtgatattgttagtcttactgccagtccaaacttagagaggggataacaagggccaatgtggagaggatctataattagttgttaatcctcttcgacaaacagttgttttgtcacgtaaaatcttagttcttagattaacctaaaggtttacagaatggttttagccgttggagttgttgcggatggagaggtcaataggatccaatttatggagggatgaggtcatatagaattcaatttcttgaactatgatcactttctgtttttaagaattactggggttgttcaattaaaatgggtatgtgttattgttgattcattcattaacaatttaatgggtttgtgcagatcaagcagatttgctagattgcagagccttcagc

SEQ ID NO: 32869 - DNA, 829 bp, Medicago truncatula
  Intron number 2 from transcript Medtr8g026270.1 (locus Med tr8g026270) derived from phytozome v7.0 (chr-ID MtChr8; po s 5584075 to 5584903 reverse strand)
gagcaggtgcacttgttgaaactttccaaggctcggtatgtctatttcattcacattataattagtcctttgtttaatgccacttttaactagtaagatgttttggagagatatatataaaatgactaagtatatagtgattaatttttcgtcaaaaaaatgtatatagcaattactcaattatactcatgatgtctttgccaaaaaaataaattatattcgtgtcaactttagtaggctatgcgcatagcatggttcccacgttaatgtcggtgaagcattaataatcttaactgaggaggaagcagtgctatattttattagattttttttttcttttcaaatagtttaattagaaattctatttttaagttaataagtgaagtgtctcaaatcaaaaccttatatatattatacaatattcattttcaactgtgttaaattcacggacacatactagtaaattaattagatatactacatacactatatttcccaacaccaacaacttgttacatccaacaacttgttacatctattatattattttcttttattttttcttcgtaggtgtttaccctatgagcaaacattttccttctttaattatgtccacaagtttattgaggtagttagtaaataagtacttaaaacaacaaaccaatagtatatgatgagtgagaagtcctatattagatgaaaatgtaaatgttaaacgatacatcactgagataactcatatatgttaacttaattgttaggcaaaatcatggatttgtatgtcgatttttcaggtaatacctttcaaaacacaagcaataaacttcaa

SEQ ID NO: 32870 - DNA, 638 bp, Medicago truncatula
  Intron number 1 from transcript Medtr8g026270.1 (locus Med tr8g026270) derived from phytozome v7.0 (chr-ID MtChr8; po s 5584956 to 5585593 reverse strand)
gccgtttgatatcagattttattggtaagatttatatcattatacttataatgaactaattattttgatattttctgtctcccatcacaaaagtaaaaatatctaatgtggtcatgaaaaaaaaagtaacaaagaaatacttgaccgttaagaagaaggaaaattatgtatgttgttagttaagggatattaaatgtgggtaattttttaagatattttagttcctagccattaggattattaaaatttagaccaggcaattgtgtccgagttttaggttatatttatcatttcgtctatggaaaaaaacatgaattaaaatttgcttaatattttcatttcttataaactaaaaagccatgtctaaagttccgtgaatttatctcaaatttgtagaaaaattatattatatatgcatgcgtctgagtttgaaactcaaccatctatttattcagtttaaaaagataagatgaatttataatttataatcactagactacataaacgaaaaaatctatgtccacgtagtttaatggaaatcaatttaattatttaaaagaagattctctactcatgtcttttgtcatacattttgttttctagctgaatacgtaaatattccactggttccaccattt

SEQ ID NO: 32871 - DNA, 684 bp, Medicago truncatula
  Intron number 1 from transcript Medtr8g025640.1 (locus Med tr8g025640) derived from phytozome v7.0 (chr-ID MtChr8; po s 5253242 to 5253925)
attctgctccaacaacaccaaccttcacctttcaggttagttgctttgttccttcaaaatgacactaaaaatcataactttcatcatatataagactttgaaactgtttttggttgaaccctttttctgtttttatacaattcatgattaaattttattattatgttagtttcttaagaaaagaaaaaaaaattatgattttttttagcatctagttcatcaaccatgggcatgtttggattgacttatttgagcttatataatgtcataaacacttgtgagactgtttggaaaagcttgtggaaacaacttatgaaatgtcgatgagctgttttcaacttattttcatgagctctccaagatagctcatgaaaacaacttatagttgatatgaaaacagctcacctttattttatcttttgttatagatgtaacttatacataagcgctcacgtgataagcgtttatactgtatgtgtgtaattaagttgcttatccaaataggtccaagtattttagtgtatcttctttaccggcacgccttatggaaactagttaagtttgtcaaattaatgaaaatgtctgatatggtgcaacttattataagacagtgatactcacatgaggttggacttgttgaatgaatcaggaaaattcacttgtttttctttaaaagtggacaag

SEQ ID NO: 32872 - DNA, 894 bp, Medicago truncatula
  Intron number 1 from transcript Medtr8g099310.1 (locus Med tr8g099310) derived from phytozome v7.0 (chr-ID MtChr8; po s 21814078 to 21814971 reverse strand)
ggggtagttcttcgcaaaccctaattttcttttgaaatatcgtttttgtttttagatttatgttatgcgttgatttgatttatgaattcgattaaattatgaattagtgcatgattttagcttcttggtactgttttgctgttttatttgtttttctttttgaatttgttgaattgcaagaatagtatatttagggacaagaaattaggatatttttattataattatatcattttgattggatctattgcactgcactttactgtctgtggtattcagtagcaccaacacttccgatcgaaggcgtgtctggtgtacgatatcagcagatttgattacattcaattaattcattttttttaattattatcggtgtgtcggtgtttgtgtttcatagatttggtatgatatgaatgaaccacaatggttattgaggatcgataattacagtgtgatttgaagctatgtagcaccgacccttttgatcgaatgtttctctgacacagacacttttgattacattcaactatgacattttcaaaaattattagtggtgtcgatgcatcaatgtagtgtctgtgtcagtgcttcgtatatttgaagtaaattgatggcatttgttccctggatttcaaagttaactaaatatgttgctatttgtttgaatgagcaaggttttcttgcattaggtctaatttttatgaggtcgatattgaagtgcgctaaatccagttgttctttttgacatatttcattttggttatattctttggtaatgttaggtctaattttatgaaacttatgccgaagtgtccttaacccccattgttttttacatcttttgttttgataatatatttattagtgtaatgtgtggctttttcagggatcaag

SEQ ID NO: 32873 - DNA, 610 bp, Medicago truncatula
  Intron number 1 from transcript Medtr8g121990.1 (locus Med tr8g121990) derived from phytozome v7.0 (chr-ID MtChr8; po s 28411602 to 28412211)
tcaaatcgtcttctgccactaaaaaaccttcatcggtatgatttattgattctgaagctttagaacctttttttttttttattgatttctgattcatcggtttaaaggataatgtatctaatatgtttaaaagaacatatctttatttgatttatttttcttgcttaattttgatctcatcggtgtagtaatattatctcacttgtcaaaaaaatgttttagactcagaatagtatttttcttaactaattatgaaacttagatttgatgtttaaaggatagtttatgcgttagctagaaatgtatgatattgtttaactgtgttatagacatttgttgcaaactcattctcaaacacttctcaacttaaagaacctgaatttaactttgtagtgagatgtttgcattcttatctatatatttataatgtattgttgatgtcagatgttgtttatggcatactgtgattatgtacatgaaagtgtgatcttaattttacttttgattcctatagttattttttctttgttggaccaaccaaatccctccatatttatgactgtgatcttatttagtctgtgaagggtcgttcaaggtttgtacaacctgg

SEQ ID NO: 32874 - DNA, 600 bp, Medicago truncatula
  Intron number 3 from transcript Medtr7g121450.1 (locus Med tr7g121450) derived from phytozome v7.0 (chr-ID MtChr7; po s 28598445 to 28599044)
aaggtagccaccatcttccttaaaagcctcatatattttatttaggagaggtgtgttactatggaccacttagacatacatgacactggtgataatttgagaaaatgaattaattgaatataatcacaggccatcggacacactttcaatcagatgtgtttttggtacagagtttgttagcttattataaaaaatcaatatttttgttctcttttagagtcttttttcgattagttggataaagcttagttgatgttgctgcaatcacttttagagtttttcaaccatttattagggaaatgagaatacgaaaataatataaatactgcttcaagtacgaatctgccttgattagtttctcttaaaagtaattctagatatatgtttttcttaaaagcgatttttattacggtaaacatacacacaatagtttagacttttcttgaaaatctaaaaaaaatcttctttttttaatctgttacgaacgaatcctcatttacttttttgtttgtttttccttgcaatatttgaggttggttttaatctatagttttgctgttttcaggtcttttggaggtttcttcttcagaaaagcctaag

SEQ ID NO: 32875 - DNA, 715 bp, Medicago truncatula
  Intron number 1 from transcript Medtr7g138780.1 (locus Med tr7g138780) derived from phytozome v7.0 (chr-ID MtChr7; po s 33010845 to 33011559 reverse strand)
actattatatctgcagattccaggttcgaattcatatatttttatataatatatacacgtcctgtccctgttatatacaccctttacttttgttcacttcaaatggatggaaaagaaaatagttaccttgataaataaataaaatgtggtaaatttaagtagtattttctagtaccaaactctttttccttacggctctttccccatttatttgaaatagatgatagactagattaaaattgttttacgaaataaatacatttgggattggtttaatcaaaatgttaaatttttaacttgattaagtaaatggagatcgatgtgttgcaattttcaaatttgtatatgtttatcaataatgatgatgatagagtacataattttagtcagtgaaaactgtaaaacaatgcttataacttgacatttgaaaccgaatagtaataagtaataaccgaagataatggtaccactgtattaatcgaaaataggcacacattaaacaagagtctgagaaggttaatagttttcacatatgttcccctgaaacaaaggttattgcatatgttaattatggtaatcagttgttgatctaatggattagaccattccattgatctaatctatcattgttaaatataaatgttagtagtaattatatcgaataattcaatcctgtgcaatccaactccaatctatataacaggaactagggaaa

SEQ ID NO: 32876 - DNA, 729 bp, Medicago truncatula
  Intron number 1 from transcript Medtr7g107640.1 (locus Med tr7g107640) derived from phytozome v7.0 (chr-ID MtChr7; po s 25200361 to 25201089)
gaacataattggcccatctctgtgtagctaggaagatttgtcaggtgtgtgcaaactcagttacaattcatgatcttaatgaaaaagcttatgatcattaagattagagctttttgaaagatatccttgaggaacttggctttcctatgcctttcattgatcttatctggcaatgcctatcctcctctagatatgaaagtcatatatggaatggagaagatctttgataacttctctccttcaagaggaattctccaaggtcatcttgtactatatatgggtgtgcaaaaatgtggttaaatgaactgtatacataaactgaatcaaattggaccacaaaaaaaaaaactaaagcatattaaatggtttatgaacttaaccacacaaacataaaacagttcagttaactaaacttaattaaataaccggttctaaactgtttcaccaaaaacatttatttgatgttaaaattaaataaataaaaaaaaaacataaataaaatagaaaatatcacgaaaagaaaatattttttttgaacaaatttgcttttgggatactctttctctcctccatcgattttccttcaatccaattcaaaatatctatttcaatttttgtaagcttcgttttctaccatgtatatttagaatcatataaacgtattaagttgaatctgtattttttgtttgcaaactaagagaactaggaaggctggcatcgttggcaaat

SEQ ID NO: 32877 - DNA, 969 bp, Medicago truncatula
  Intron number 1 from transcript Medtr7g103370.1 (locus Med tr7g103370) derived from phytozome v7.0 (chr-ID MtChr7; po s 23172535 to 23173503)
agcttaccaccttcttccatcacacgttctttgtagaaattgaatcactgcccacccaagtatttttcatagatttctctttcggtggcaatgaggcgacacttatattttctctgtgtctggtcatcaatgagagtgattgttttgcgctttccttttagaattgttcttgacacctcatttgggaaatgctaaatagggaaataaaaacaatattagtctattacatattaacatggataagacgtatgcgaatatagttacatataatttataaaataaaggtagcataactgattttaagctaaagaaaatgtatcatgaattctaatttatcttcatattattttcctaaaaaggctagataaatgcattcatgtgcattatatgaaccccgttgaccaattaacattgttgaaacaaatgaaaattaaacatcgctcccgcatgtgcatctatagctagcaccatttgacattgatgtcttcgattatttgatgcaactctcataatgccatccaaactagttaggattgaatttagttgcttttcaaatagtgatgcaatatgtatcctaacacatattatgcacatgaaataaagaataatgcaatatgtatttttaatttctgcgtaaaaaaactcatagcttgtttgtgcataaaaaaagcagaccttgactaagtttataaattcaacaattggcctaacctaagacagattggaaaaatcgttgatgctttgactaagtttataaattcaacaattggccgaactctgacttaagttcttactgatgctttgactctgagcttgagaagtgttaaggtcacgacaacaattcaagaaacatggtcaaaaacaatcaaatcagattgtgaaataataattactctaacactgtattgtgaaatcataatgcaaacttactaagtcttaaacttctcaacaaccggataatgtaggttg

SEQ ID NO: 32878 - DNA, 422 bp, Medicago truncatula
  Intron number 1 from transcript Medtr8g016350.1 (locus Med tr8g016350) derived from phytozome v7.0 (chr-ID MtChr8; po s 3148738 to 3149159)
tgccctgctggtacatttggttacgttgatccagagtaagtgtaaaataaaaagtcaatttagattaaccagattttaatatttttgtagcatttacatatcataaatatcgatttcaagcaattgatttcgtaactttgaaacaagtggtaagttacatgataaacatgttcatttaattttagtgtagtttttcttctctttctacatatactactatttcattttggtttataacgcgtataataatgaataaaaaaagtcgacatacatatgtttaagggtgacttatgcatcttatttgtttgttttcttaatagatatctgagaacatgaagcacaaataagaaaaatgatatctacagctttgggataattctatttgagttgatcactggtcgaaaagcactagtactaagagc

SEQ ID NO: 32879 - DNA, 541 bp, Medicago truncatula
  Intron number 2 from transcript Medtr8g047550.1 (locus Med tr8g047550) derived from phytozome v7.0 (chr-ID MtChr8; po s 10703861 to 10704401)
aacatgtatgctgttttcatttcaaaccttgatttgttgccttgatttatttctttagtaattattttttaatcaaatcttctaatcaaggatataaataaatattgaatcaggtctttgatatttcagagaatcatgataaaatgcatcagatgcaacataaattttagtcacaattgtggatcatgaactcttataatcaagaatttaagtcaatatttagtaatgatatttgcgttgcagagaatcatgactaaatgccattgatgtcaaacgtggtccaaattttgatcgcaaatgttttttaaaatcttgttttcaatgtcttttctaataagagtttaagaattagtatactataatttgagctttgtatattaggtgactaatgaatagttttaaatacatatatttaggtatgacaacagggatgatcaggggatttttctacacttacgaccctaactccctgtaagaaaaacccatattgttcactagttcttacatttttctgtacattgtgtagattgctgttgaatta

SEQ ID NO: 32880 - DNA, 835 bp, Medicago truncatula
  Intron number 1 from transcript Medtr8g112320.1 (locus Med tr8g112320) derived from phytozome v7.0 (chr-ID MtChr8; po s 25178008 to 25178842)
tctcttccagtgacaaatcctctccattgaaggtgagtataattatcctctctatcagttatttatttatttatttattttttaattggttttgtttcattaaattgtgtatatattgttgtcattttacttgattttttaaaagacaattgtcttttatttgattatgatacaaacttttgtaggtttgtgtaaaacttgttgaatctggtttgttaatgaacaaatattacatgtatatttaattgttggtgtgttgtgttacgaatccatggatcaaaagcaggaagataacaaacatggaaaagatagagagcacgttgatgctcaggtcacaagattgtatgttgaaaaacatattgaactaattgaaaagaatgtgaaaattgagaaatcggattcactgttgtcatgattttcacgcattcagtcgtgcatcaaattggtgaatgcgtggaaatgttaacaacagagaatcgtggtcctttgagaatgattaggccaacaaattttctggtttacatataagtaggagggaaacatgcatgtttggactggactggggtttccccacttgtaggattgagagacggggctttcactgtgggacaagcaaccttcaaagctgcttcaaacaatttggttgaacatgagaaaacatgttctgacaatcaacatgtttttataccatttgcgtttaacacttttggtttcctagcactagaggttgtgaatcttctgcaaagagttcaaagactcatgcataattcccttttttttttcttttcattttccatcagactagcaactggcagtggaaattcaaggacaattt

SEQ ID NO: 32881 - DNA, 662 bp, Medicago truncatula
  Intron number 1 from transcript Medtr8g130100.1 (locus Med tr8g130100) derived from phytozome v7.0 (chr-ID MtChr8; po s 30941211 to 30941872 reverse strand)
ggaagaagtctaaccaacaaggtatccgataattttttttcatatatatatatttatatactattataaggaagatgcttccatttattaggatattataatattgttgcgtttgatttgtcatggttctaactcatgatcacatgcatttcacacggagctaaactaatccaatcgactaaataacattgattttggtgggtcatggccaatttttaagataatgctcacatggttcagccttgtctgtttactactttactaaatttattttcatatttaaaaaaaaaaaaaaaaaccaaacaaacgtccatgaaaattttaaaataagagttcaattttaattcacttttaaggcaaatttttacgtacaatgtcaagaaaatacattcaattatatgtgtggttttatttacaatgtcaagaaaatttaatatcctaattaattaaccatcgaagtcatttcatatctactatactgttgtttaactgaaccggcaggtagataaggaaaaaacatacttggtaatattaaactaatattaatatcgcaaacttaaagacccgaaccagttagatacaagttcgttggcatatagttatcgacctaccataaaaaccaatatatgacacagttttatatagccttgatttggttggtc

SEQ ID NO: 32882 - DNA, 987 bp, Medicago truncatula
  Intron number 1 from transcript Medtr7g108530.1 (locus Med tr7g108530) derived from phytozome v7.0 (chr-ID MtChr7; po s 25586733 to 25587719)
gagagtgagaatcgcactatatatattgccccacgtctcaatgaataaaatcttcaaggatttcacgcaaaaacataatcttccaaaattgcgaaacacacctggtacaaaatgtcgaactaatatatctaggacatctggttcaacatcttgctagaacaacttgttttaacaaaatgcggccaacacaatataaaacccaacaactttattattttcttttccattcctctattgttttttttatttaggattatgttttatgagtccaaccttttttttctctttcttaaaactctgactttatacgcaaacaaaaataatacttatacttagctcatatttaaaatatcatttaaaataagttgttagtgaagtcatttgagtctacttcttagttgttatcacaactgtcttatgctctaaagttcaatggatactataatattaatatgtataattgagtttaaattaacttaccaccatctaatttgaatttaaatcaaattttaatgcatcctatatatatatatgtaagattttgtacttaaaacacagaacacttggaagagtatttgtgcaacatacaaatcttatactagtattatattatactttttagttttgataaaaagtattgtattttgaaaactaaagcaccgaaaattcatccgatggaaagagaagaacaataataattgtattccgtcatccaaatagacataacggttacaatacacctatcatcgcacaatgatgatgcacataagtctcaattttatgatactttcagacttgtcagaaggttcaacccaattgatggcatttggaggtggtcaacaaacaacatgaatttattttgtaattcctttaaaaatagaggttaacgtccactcatccttcttacgtaaattcttacgatcttcccaactttgatgatgaaaagcacaccagaaagctctacataagaaaaggagaagaagaaac

SEQ ID NO: 32883 - DNA, 379 bp, Medicago truncatula
  Intron number 3 from transcript Medtr7g112270.1 (locus Med tr7g112270) derived from phytozome v7.0 (chr-ID MtChr7; po s 26583605 to 26583983)
tatcctccaatttaccaggtgcactgcttgcaatttctttcttttcttcaagcgtctattcatgtttcgggaaaaccttttttcaaatgcgctattgcacacatgaaagttgtgaagttatcatagatatctattcaatttatttgttaagcaagttacatgatagctttttgagtttaatatagtaaagtgaatattttagagtcataccaagcaataataaacagataaaaacctttagtttataggtatttcactgtcactttctattgtgagtttagttccaattccaataatagttaccaatattgtaatatcctgctaaattttaaatttctaatatttctgttttgtatgcattgtgtgtttcagtgtccaa

SEQ ID NO: 32884 - DNA, 748 bp, Medicago truncatula
  Intron number 4 from transcript Medtr7g112270.1 (locus Med tr7g112270) derived from phytozome v7.0 (chr-ID MtChr7; po s 26584358 to 26585105)
ctcactgtaagtgactcaatggcctgtttgttgatttgattgactatatcttctagattagcatttttgcattatgcttattgtttaatttttaaaaatctcagacatatcttataacttataacatgtgacatttaattttacgttcacatatggcatacttgttttgttctattgacacacacaaaaaacttctgtggtattttttaacattctcccttttattagctacaagtggtgttggcagtttcttaattagtcatattttctgagaagcacctcactaattattgaatatggatcacatgacatacacttaggcatgtgctcttttgacttttgatgaataattttaagttttaactcatccaatttagttgcatggttgaatttgtttttcctttttctgtttgatcttcatctaaatattaccttagtctaaagctatggtatataggttctgctttggtcttcagtattgtgacctcatttttaacttctagtctaagatttacaaatgtaacaaatcagagtggggaaatgcaaagtagctacagcacgatggtttgaagacgagaaattgcattggaaagataacaaacgtgatacacaaaatcactatttctagggagcttatcacattgatgaaccaactaataaatatttaaagtaacttgaactaacttttattctaacataaaacccctcttgcatttcaaattctttggctttcaggttttcaattgct

SEQ ID NO: 32885 - DNA, 451 bp, Medicago truncatula
  Intron number 1 from transcript Medtr8g034740.1 (locus Med tr8g034740) derived from phytozome v7.0 (chr-ID MtChr8; po s 7585770 to 7586220)
ctattctctaggttggtgggccgtttggtctctaggtcagtaggattgggttttcgtttttgttttcgccgattatttatgttcgtcggttttctgtcatcggtgggttgttggttcgttgggtctccggcttcttggtgttgttgtttgcgttgtaggttggtggttggtggagttgccatgtttgtgtttggtttgctggtggtgtgttactatatgttcttcacgtgtggtatgttttttgctttttgttcgtgatcagagactgggtggttgaagactttgacctcttttgatgtgatttggcttcaaaaatcccaaagggtgtgattccgttaacccgaaagggtctggttattaacgtattggactcatccctggatctgagttcttacgcgtctgtttgaattccgttgtgtttggtgacatgactgctttgatgtttttaggt

SEQ ID NO: 32886 - DNA, 615 bp, Medicago truncatula
  Intron number 4 from transcript Medtr8g105900.1 (locus Med tr8g105900) derived from phytozome v7.0 (chr-ID MtChr8; po s 23500937 to 23501551 reverse strand)
caagtgagttttctgataatttatgtataactttagtttactgttactgttttgagtttttaaaatattttttatattcttgtcgcagataaaaaaaactaaaattcatagttatataatctaatggatgttattgtaaaacaaatttgcactgacaatttatgctcattaaactctgatttattagttgacgttatgatatggaaaattttggatttgatctgacctgtttagaatattcaaaccaaaagtttgtttgttaaaaaaaaacgttcaacccgaagagaaagtatttgatggagaaaatggttaaaatcttctataatattgtatgcatatgaagcttggagccgatattctcgattcttttagtaattttgctactcattgttacttcatcttgtttttgctcctttaattaattttcagttatttttagtttttgggaatgaaacatgcctattagttattagtttttcctgggataaagagtagtttcatatactggtacacagttgcttcctgtctaagaaagttttgataaaaacctgttattagttgacaagctgtatatgcttctaataattttcaatcatatttatggatacttaggtg

SEQ ID NO: 32887 - DNA, 823 bp, Medicago truncatula
  Intron number 2 from transcript Medtr7g138650.2 (locus Med tr7g138650) derived from phytozome v7.0 (chr-ID MtChr7; po s 32957946 to 32958768)
cgccggttctaccactccggtgtctccgttttccggtaaggtcgttattattcacttatttgtctttatacggtaaaacttaagtgcctcctgttccaaaaaccattaaattaaagtgaagtaaatgatgctcctaaatttcgggcatgctatattttgtctttttgtggaatgtcctaacttttatttttaaattttttaattcatattaataagttggttagtatctgtgtctcgtatcaacttacaagcgggaattagagtgtgagttttcaagtagtaataattgtttagctttgattgaggtttgaacctcgacctcggaagagtgtgggttttcaagtggcatgaaattctttaaaaagaaaggttaattagtagtaccactgtgtttggttggggaagttatgatattatggaatgtgaaaatgacgtgcactattttattaattgtgtggttatccacttacgtagcacattatacatcaagtcacaattatattgccaaattaaaggattaactcaacccaagtttcaattagacaactgggttaagttacttggttttcttttgggtaccaagttacttggttaattatttatcatttataataacaataatggaaggcttggtctagattgattcgtttatttgtttaattcaataacaaaaacagttgtatgattgtatcattgagctagctggaacttataaatgatgatgtttgttaatcgataaatgacaacaaaaacaaattgaactaaagcgatgcatgtttatttttcaggaactagagattcctttcggtttcgacgaaggtcg

SEQ ID NO: 32888 - DNA, 388 bp, Medicago truncatula
  Intron number 1 from transcript Medtr7g104110.1 (locus Med tr7g104110) derived from phytozome v7.0 (chr-ID MtChr7; po s 23521842 to 23522229 reverse strand)
tgggtggttgcaggtccagccatattctggtaggtttattctctttcacattattctagtggatctaaaataaaagaataaaaacaagtttttttttaggggaaaaaaactttagaaaaaagtcgaagattcggatctatgcttcttaattcttaatagaaaagaaatagtaccacttataataataaaaaaatatataaatagataatatacttgcatcttagcatatagttttggtttgagttttgaatttatgctattaatactattaaccgtgaaatgaaaacaatcatatggatatttaaatttcctttctatcttcctaaatatttatattgatgataaagtttttgaaattatttacattagtgttttagactataaacaa

SEQ ID NO: 32889 - DNA, 983 bp, Medicago truncatula
  Intron number 2 from transcript Medtr8g121380.1 (locus Med tr8g121380) derived from phytozome v7.0 (chr-ID MtChr8; po s 28108291 to 28109273)
aacttatagatcaattcgctcaggtattcttcaataaaatcacccgagctttcttcattttgaatataatgacattgtttcttgttgttgtgaacatgcttcattgtttttttgtttaaaaccaatataactttagaattgttttggaactctttgatgttaaatataatgtccaattttgttatgaagagtatcataactgcggaatgaaacctatatgcaacatggtttcaagggtcatcacctagattgtattgtattagtttactaagtagttgttgggttctataacaataatcaaaactattaactaatttactgtgagttaaaaactcattcaaaaaaattaacatttgcattgaaaatatatgaatgctcattctgactaagagactattcagagcatcacacattaaactttcaaaatagcctaaaataacaaaacaatactgctggtaaagtattccgagaaaagtttgtattttaaatattacaatcggaaggactatgaaattcattccttcattaccattctcataatgcctttgtgggccagctaggcccttgttccctctcaaaattccgaggctgtaataaaacagatacttgttagtaaattactgtttttagaaaaccactactcttgttaccatggatttataaagttgtcacagacagtatacgatcgagaggtaatacctcatccttgtgtactatctttatctgaaagaagattagggcttgtcagtgaaggttctaatcttgaaagtttgaaaggagactgtttggttgttttggtgaagctattttaaaaactggttaaacggaaacagcttgtttcagtaactcaattaactttttttttcttttagctgtaccagtttgattttattcaaaaccatttttcaaccggtcctacttgtttcctattattcgattattaacaaataaatttttgttgttcgattttgattaatgacagg

SEQ ID NO: 32890 - DNA, 607 bp, Medicago truncatula
  Intron number 1 from transcript Medtr7g111290.1 (locus Med tr7g111290) derived from phytozome v7.0 (chr-ID MtChr7; po s 26112918 to 26113524)
gagaacataaaagccttcatcttggtaagtgacaagtgactcagatttacattatatgcactctagatcgtattttgattttgtttttaaaatataattggcgaacttgaaacatgaaacttcttatcttgatctaacggccgtgatcattgattgacttaaatagtcgatatctagttacgtctacgaccaatattgcattttccttttatttacttatacaatgccaaacttgaaagaaaaaaaaaactagctacactgtaataattgttgcactaactctttaagtaaatacgataatagattctttttaaaacaatcatcgatcatacttaacttactgcgtccatattttagatcacaaatgctttttctctttggatcacttgactttctaatctaaattttttatatgcttaaagtaaatatcaataactcatgcttaaagtgttgtgcttgtcttctaatctaaacattttatgacaattataccataattgaaaggagggacttgcaatacaattttttaaacttgacaaaaaattgatgatataacctttatgatctggcaggacatatttattgctggaacagacacttcagccct

SEQ ID NO: 32891 - DNA, 1060 bp, Medicago truncatula
  Intron number 1 from transcript Medtr8g147760.1 (locus Med tr8g147760) derived from phytozome v7.0 (chr-ID MtChr8; po s 36448546 to 36449605)
ctcgaagcaattttgaaacaaacaaggttagaaaattgtgttttgatttggtgtttttctctcatttcaattcatgccattgttgtgtgttttgcatttggtttatgctttcaatttggtatgcatgttcctgcgttttccaatttctacatcgtgggttttgtgggtgcagaggcaagcgtgaactaatctcacgtagaacacgtgaactcagattagttgaacatcagttttaattttttgtgtgcatgggttctttgataaagcgtgaaccaactcagcttgatagtcaatttagattacatttcttttttgaaaggaaattctgattactcttcatttaaattgctattagtgagtagtgactgcttcttcgattaatcaaacttaactttttatgatgctattactgatgtatttggatgtgggtgatggtatcaacttattgttctactccagttaaaaaaaaaagactaattgttctacttttttgtatgcataccatctgtttgaaaatttgtctcaacaaagttgattgcctttttattaaaatttggatgacctgagtatgataagggtaaaatggttacaatttacctctgtccatttcttcattgagtattcatcgagttctatgtaaaatggttccttttgtattgttaatgatgtggattgaatgattcatttgatttattgcttctttatacacgaacattggttaacctaacagtgacgaagttatacatagtctgtgccagttcataaacattgcatacagctgtttattaaaaggataccttcgcttttataagtttaattcggattgttttctgtgtatgttctactcatgttatgtacattaggcattatatgtgaaaatcttttgattttgatgttagaaggttggatgtggaagtaatttcattttaatatgcacaatattctaatttacaatatactatttaataaatagtacgatgctttataaactctgattctaatatttattttatttgtgtgtttagtgggagactgttcttttgatctggagtggactcaa

SEQ ID NO: 32892 - DNA, 863 bp, Medicago truncatula
  Intron number 2 from transcript Medtr8g031710.1 (locus Med tr8g031710) derived from phytozome v7.0 (chr-ID MtChr8; po s 6813474 to 6814336)
aggttgttgttgttggtagagatgatgacgattcatcaattttctgatttttttttttctattttttttctttcttatatttaatttagtaaataattaggtggcaatttatttatttttttaatttcagcaattgcatacgtggcatgccactaagcgttgactttgtcaaaattgactaaaatgatcaaaattgcaaaggggctaaattttaggggaccaaaattgtcatttttatacatagggggctaaaattacaactttttgaaagttaagggggggaaaatgcactttagcccacaatgtattgtgtgatgtgtaactacttgaatataatatgtttgaaatactttgatgtcatgagatgaaaatttgagacggagaatagtttatgtatatgagattttgaataaacaaaattgagattatccaataatttagagtaatgacagtttcaacccgacttaatatgggactctttgaatgagtgtcctaggccaacgaggggaggaaccggtgttaaagatttaaaaagtgaaaatcatttttgtcataagtgtcttggattgaggagagggtctacgcgttcaaacttcacttggcttatcaataatgataagaccaccacgatttcccccgggttattagtaatgatatggtgatgtttatacttgatggatagactgtgttgatgtttgatgatttcttctaaatgtgattcgatttgatacaatatttgaacttgatttcttgcgtgttcttttcatttatttcatgttattacatattctcgaaactcaccccttcgttttttgtgtttgatggcttggccctgcggttgcgaaatcgtagttctataggtt

SEQ ID NO: 32893 - DNA, 735 bp, Medicago truncatula
  Intron number 1 from transcript Medtr8g086510.1 (locus Med tr8g086510) derived from phytozome v7.0 (chr-ID MtChr8; po s 17748888 to 17749622)
cagaagctagttcagaagcagtttctgattctaaggtttatgtgaattagagagagaattgagagagaagaaagttatgatgaaattgtaattgatctttattgattctacatataaaaatgtacaaaggaggtagcttatatacaatatctagctaggttgcttgaagtacaagcaatgtaacaaagtctagatcttatctactaacctctaacaaacttgtaacaaacttcataacaaattaaaacagaatgtgattaaccactgattgtgattatcactaaactaaacttgaattaaaacaaactaacaacttatgcattattgatttggactttgttatgaatatgttaactattatgttttcttccatgacatgatatgggcactacttagtactctagcatatatgttggttttagaattttgaccctctcctgtatatgtggactagacttatgccccaagttcttccaggtgtgtgttgttcaagaatcgtgacgatgttgaagacgtgacaaaacgatgatttggattggtgataggaagttgtgagactttacgtcacccttttgttcttagtacatgatcatccttggtttaagagttacaagattacctaagggttcttatttctagagttgtcttttatattttattttggagtcatggttgtacatgcacttattttaatatcaaatatttgttgcagtgattatatttataaaaggtggc

SEQ ID NO: 32894 - DNA, 480 bp, Medicago truncatula
  Intron number 1 from transcript Medtr8g112650.1 (locus Med tr8g112650) derived from phytozome v7.0 (chr-ID MtChr8; po s 25407513 to 25407992)
gtcactgataaacttactagatccatacaaggtgtgacaaagctctttttctcttgttcttaagctttaaatatgattctcactcttaattttttttttttatcactatcaattattttataatctaatatccttatctgccaatttcgtaactttttgttttatgtatctatctatggcatacgtactatcattcaaaacagctttgacactttttgaagctattttcgggttatttcataaggtaaaataacttgtatacaagcgcttatgctatgaacggtaaattaagctgtttatccaaacatggtgtaattctattattgtttattacacatatcttttaatcttcttattccgttcaactcattttactttctttaccatcaatcaaaagaaatggaagatttttacttgttaataaccagtgaatttctgtttacaggtccaatcttgcagtcattaagcataccgacaatt

SEQ ID NO: 32895 - DNA, 850 bp, Medicago truncatula
  Intron number 4 from transcript Medtr8g065720.1 (locus Med tr8g065720) derived from phytozome v7.0 (chr-ID MtChr8; po s 12445839 to 12446688 reverse strand)
ctcagtatgttctcttgatttgatatctatatatctgattagacataagaaatgtctattttatttattaatggtagttggtgctttaatgctcttggtcagtcaaacaaatatagactgcacatgatagaaacctcaattacaaacctaagatcataatggtgatggaaagtggtctagtttttctgttgttgaatttctgctaattgtttagcctttggcgtttgtcaacgtgtaatgggtggatcataggtaaactaattagcagaaatttgagttcaatacagtggaactggaaactacattttaagaagtataacccaattaaatctgtacaaaaaaagtaaatcagtccccatgctgcatttgaactcttaaattgtatcttgaatcataatacctcttcatttgtatttttccgttctctattatgctttaatactgaaagaactttttatgtctgcatgttgagcatatttttattagaactgaaaatatgtttattatatcatattatgtggtgagagtgtacatttatataggtaggagtcttctagttaacccctaattaataaggaagattaatcaatacaatcaatacaatgactagtggagttaaaactaaacagtcacaacttttcaatatctccactaagtacttgatcaattattctaacaattttaaggcctaaacgtttttagcagggtccttaatgaccttctaaaaaaaagtggttgtctcccgaaaaaactcgttaccaatcattcactcacttttcttgatttgtggaaactttttttcttgtggttttcaggttgcgttcggaaatcaatctcccgattttgagag

SEQ ID NO: 32896 - DNA, 329 bp, Medicago truncatula
  Intron number 1 from transcript Medtr8g133350.1 (locus Med tr8g133350) derived from phytozome v7.0 (chr-ID MtChr8; po s 31744994 to 31745322 reverse strand)
ttcagcaacaacaatcttccttgttttccgccaaggtaagagagtaaaacggcaagcaattaaagaatttacacgatcgggatgttttcgctatgaaaaattcgcactatatatataacactcctgtaaaaacaatcatcaaaaaaaacaagattatggatgagtcaaacactagtgtcattctcacaagatgatatgttttcttcatcaggttcaaccatgcatccaacattttttttattcaagtttggataataattcaataatgtgtcacacgttttcttttgatttttctttgctggtcggcaggctcttatcaagacaggacg

SEQ ID NO: 32897 - DNA, 1027 bp, Medicago truncatula
  Intron number 1 from transcript Medtr7g096580.1 (locus Med tr7g096580) derived from phytozome v7.0 (chr-ID MtChr7; po s 21636023 to 21637049)
tctgtcaccatcgatatctacaaccaaggaacctcgtatgctccgatctataaccatctattcttttttattttcaatttttcaatttcagatcccaattttctcatctgcatgcatgttttgattattcatttctgtatctgattttgcttgaattaggcttttgtggattttattcaattttgtacatgtgtttatgcttttgtttatgctgttggattctgatttgatgttggtatagacaagaaatctgtgatggatctcgatttttaatttagatttagaagtgttattgataattaggtaaaatggttatctttgatcatgtgggtatgacttacgaggatgaactgagaaaaatgtttaattttggttgctgatttttctggcttgcatgcattagtaagtgaaaggaaatgatttgatgctggagtttttgattgtttccgttttgatcattagaaaattaagggtagttctgatttcacatgcgagtgatttgatttgtgaactgctcacagagatggagagtgaagagtttgtgtgtgtgatttgttgatttatggtcataaacttgatgtggaaaattgagcatttcaaagattcaattggagtttaaagggcttaagttaatgctaactctgatttcacatgcgagtgattcgatttgtgaattgcatttgcattgcaagttacattgcttgttttgttgttttacttgttgtaagaaatggttagagggtagttcaaaaatgtaaaattgagtttagttattgacattgattatggtaggctagcagagaagggtgtaaatcgataatatatgactttgcatgctgttcttgtgttgaattgaataacaagctgtataatttatcgtctgacttgttaagtttttgcatttagtattgtatgttattcaaaaacaacttaattttttgtggtgtattttcatttggtaaccttctaagttttgcaattgatattcacttatcatttttcttgctctttttttaaaggacggcat

SEQ ID NO: 32898 - DNA, 1000 bp, Medicago truncatula
  Intron number 1 from transcript Medtr8g044350.1 (locus Med tr8g044350) derived from phytozome v7.0 (chr-ID MtChr8; po s 9898866 to 9899865)
acaccaactcgggagccaggtatttttgtgtaccctgcaatgttcttttttctcatgtgttatatgacttccatgtctgagatatcccccgcaagtgtcgaccccatgaatgctcaagcgactttcgtttttacttctctgatgtttggttttgttataattatgaagatcacacttaaaagttaaaactatgatgtaaaaggagttaaaaccttgtggattagagatagatcactaattagatctgcaactcaaaccagtactgctggccgaattcaaagactactgtatcaacgtcaatttctaaattttcattttgattgttttcatttgtttttgttcaattttaggaaattgtgagtcagtgtattaaatatttcaatcatttcttgtactattttattgaatttatgtctctattaaatatggttttgaagaaggttgattattcaagatgaaatgtgtgttttttcttctagctttgtgcttttcgtaagaaacaatgacgaattttcattaaaattaatgttgaaatttctaccatactccacctatattattgatgtcaatggattaacgtaacgacgaatgagtgttttagtcttgaaatttctaccatactccacctatgtttgtattttttaataaatagttgttaatagctactatttttaattacggcacatgttagacaaacccataaatttatgctcaattatctttgaattctattagtcttttaatgtttagcaactcatagagttattgttctagtaaaaaataaagtcaagaactaatttgaataacaagttaatttattcctgagcactaggttaggaggcatgtcacattctgttaggtgctgctgctaccaattcaatcaactttgattgaattgctttggtacgctgtactactttcttttaatttgttttaattaaagttcatgttgttgcttctgttaggttctgctgctatcaattcaatcaactttgattga

SEQ ID NO: 32899 - DNA, 609 bp, Medicago truncatula
  Intron number 1 from transcript Medtr8g088510.1 (locus Med tr8g088510) derived from phytozome v7.0 (chr-ID MtChr8; po s 18776240 to 18776848 reverse strand)
gtcaacttattattgcagacgcagacaaggtaactgcttttgatataaatgttagatttgaatatgttttttctgcaaatggaaatcaactaaattatttctttttatttaaggtaaaaagttaaggaaattactgtcctatgatttgtttcggtttttcttgaaaaaaaaataaactttgatttttttttttttttttgaagaatagattaaaatgaaacaaactcctcaaacaagtcatcgtgaactttcacaccacaaaaacaaaactcctcaaacaaacatattaaaataaaaaattaatttcaaatgttataaaatatttttacaaatgaatcaaattaaaacttttttttttttttttttgagaaagaatcctattaaaacatgttatataggtatttgtagatataaaatacctcatgtatgattagccaaaatatgattgtgtattgatcaaatttcctacgtttttgtagattcttttctttctctcgtgttaaaaatccttggattaaattgtgacaagttacattatcattcactcatctaattaattaataatatgatacagggactgctgagagtaacaagagaaaaggagattga

SEQ ID NO: 32900 - DNA, 820 bp, Medicago truncatula
  Intron number 1 from transcript Medtr8g145290.1 (locus Med tr8g145290) derived from phytozome v7.0 (chr-ID MtChr8; po s 35288427 to 35289246)
aggtccgttcctttcttctctctccaatttaattgctttaatttttatggaatttcagagtcaacctgtttcactcttcgccgccgtccaccgtcgctattcattctcctccctccggttacacttttttttttttttttgttatactgcaaaaacttgacttcacttatctgcatctcttcaactacaactacaatagatcctttttttttttttttttttttttttaaataattatgaaggaataagaaattttgatctattaatttaaatcattttatgattttttctataaaaattgcttcataaatttatcacttcagttttcatattgcaccaccaaacccagcatattttcgcttttagcaatatttttatttttggtgattttttggatcataagcctttaactgtgttagtgaatagtaacagcaatatggtttagatgattaatattggaaaatatttcatggacacttgagagagaaacaaatagagagtgtgttgtgatatatcgatgatgtgatgagaagataaagaaatgaggtgttgaatgtgtgtttggaaattacgggtgtacaaatatcattgcttgaagattacaattctaagagtttctagttttgggccatgtcattcttgaaatttttctttttcttgattttaattggaagttatttcagcctctctaccatgatgcctttagtaaacattcggaacctgaccatgaaaaatgcaatactataaatattattggtcattattttgaatattgttttgttcgtctgcaggttgtgcatctgcgacctactgttgaaag

SEQ ID NO: 32901 - DNA, 950 bp, Medicago truncatula
  Intron number 3 from transcript Medtr8g145290.1 (locus Med tr8g145290) derived from phytozome v7.0 (chr-ID MtChr8; po s 35290128 to 35291077)
tcgttgatttcctatctgtgttgccagtaccacaggttcaaaagacttctgtatcttgaatcaatctccttttgtaaatactgtatgattatttttctttggattttatgatctatctgtaccaacaatgttctctgttatctttcaattttgatttccataacataatattttcgctgcaatcctcttgcttcttttgtgtttgaatcaagggtttatttgtgggattcattttgatactcgtaggaagatttttttttggggggggggggttggttggtaggagggggttaagtaagagacgtcacccgagagaagaaagaataagtgcaataaaattggaggagaatataatatcatgcttcgcaatgccacagacaaataggcaaacactgtcaccaatacaccaatcttgttgcatatctgttttctttgatttgaaactattgaacttggggattttcttataattttttctaataaggattttgtttgtgcttttagaattgcttcttctcttatttttttcgttttaagtctcctatttttagctcaataaattttgttagctggactgtgtgctacaataattaagtatacattgatgctttttgggtggatagtatattatgaacccttatttcgggagagacgaggagtgttcaattgttaatgctatatagacttttgagaatgtacaaattatttatatgctttgtattctgttaatattttctactgcttagccgacattcactaacatgttcaaaaatacttctttctgactgctcaattaataaaatcgcagcagttatcgtatatgtctgacacatgtccttattgctactgcaattttaaggagtgtaagaaaactaaactcttgcttatgttttctatttatattcttgtaatcagattgttgtttggagatttcttcagaggtcaaaaag

SEQ ID NO: 32902 - DNA, 818 bp, Medicago truncatula
  Intron number 1 from transcript Medtr8g044600.1 (locus Med tr8g044600) derived from phytozome v7.0 (chr-ID MtChr8; po s 10056395 to 10057212)
aaatcaatcttcaatttctctgttcttcttcttaggttagtttctttgatccattctttttcttcatgcatcaattgatgttttttttttttttgagattttttttgtaattggatctgtttttgttttagtttgtgatctaaattttctgtgttttgaggtttattttgatgaattgatggtaaagttttgttttttaggattttattttggtgggttttgaaccgtttgttttgaaaatgttatccacttcatgattgatggttattttcttgtgggggtgtaaatatcaatatgtctgagtttcccctgatttcataattgttagggttttgaattgttggaaaatcttgtgttcaattttttttacctgatttattggatttgattaatgcttggcttgattttgaattttgtaattttgttcaaattggtgaattaggttacttagaaagatataatttctatgttattgttcaaatcttcaccaattatggctttataaaaaagtttaatatattttatttgttttgttggtgatgtttctttttctatgtaaaggattctgatcttaattatggctttcttgagattctttatagttttgacctatatgtggatccatatataaagtttgaatattgatcctttatcttttatcatttttatatttattacggatcagattcatgtgattttagttcttaaatgtgaatttccatatataattcagttatgtcaatattgtttttgaagattggttctaaattatttttgtcaattatatatgcaggaaaaaaaatatagcaacaaataga

SEQ ID NO: 32903 - DNA, 835 bp, Medicago truncatula
  Intron number 1 from transcript Medtr8g029220.1 (locus Med tr8g029220) derived from phytozome v7.0 (chr-ID MtChr8; po s 6319673 to 6320507 reverse strand)
gactatacatacactttcataggtttgatttcatttcatttctctctctaaaattatatatatttttgttaattttttgaacgatgaggttttgtttttttcctaaatataggtagatctgaatcatgggtttttgatttttggttgagtttaagatttatgtaatttgcagattggtgtaatgatgaaacattttgacatttttttcttctctcttcctcaaaaggttttcatcattacatccttttcgtgtttctttctctgattttgttatgatgatgtttttgttgtcaggtttggaacacctttttctttgttgttcatcattagatactagatcttctcacaattatgtttttttctttcggatctgtcggtttctgccatgttttttttttttcagatctagctaccctttgaactcacttccacattctcactcactttctctctctacatatttttctctctctttctttagggtttcatcccatgcattttgattccaaccttctttgaattgaataatgttactcagataaccagatctatatcaaattgtgataaaaaaattatagatctgagattgatgattaataataataaattagtataaagtttttcaagtatatatggtttatttgtttgtttgttctgcaaactcacatgtagtttttttatttatcaatacacatcttcttatatgctttacttgatagcttaaaccctaatttcatacacatacaaaaacaagatgcataatttttctcgtgtttaattaactttcaatcttgattaagcttctggagaagagataacaacaaggtgtttcttc

SEQ ID NO: 32904 - DNA, 507 bp, Medicago truncatula
  Intron number 3 from transcript Medtr7g106470.1 (locus Med tr7g106470) derived from phytozome v7.0 (chr-ID MtChr7; po s 24643024 to 24643530 reverse strand)
tacgatacttatacattgttgtggacctgtccaaggtattggttttattaatttataatttttgtgtttgtgtctaagtcatttgtcatagaccattgtattgattacttgaaaattggggttcaattagaggatgggtatgttggaacacttcacaaatcaatggcagttaaatttacttaattttcttccattgtcttatctatatttccttttgcaaatgttttttgaattttatccttttcctttagaagtacatctaacttgttcaataagctagcacttaatagctaatcatagtcacactgattttcatgaagagcagttcttatacctgtaattatatatgaaattgcttatgatcctacaattaccagtatcttattcaatatcagtattaacacttaataacatatatgtctttcgaatttcttgccttgtaacataattcagtttcttacgtcatgtgaaggcagcttcagagagggactttcgaccaagtagaat

SEQ ID NO: 32905 - DNA, 822 bp, Medicago truncatula
  Intron number 1 from transcript Medtr8g145880.1 (locus Med tr8g145880) derived from phytozome v7.0 (chr-ID MtChr8; po s 35540708 to 35541529 reverse strand)
gaagagtattttcattacttcattgtgttatttaaattttctttttgttcactatgtcctgataaccaacaccgcagtaagggtttagggtgtcctgataaccaacaccgcagtattttctttttccattaagcttaggtggcaatctagttaaataatgctccgattatccaatttgatgtttccaaaggtctcaagcacaccttttctttgatacattttgtaaagttatgaggaacatgaatacatttcgaaaaaattaaccttatgtcttcacatttttacttgagctttgttgttgcgtttatcatgactcatgcgcttcaaccttggaatgaattgccttagaagttgatttgctcctgaataatcttcaaaatagtctcaacaagaaacaattcaatttaatattttaattgtttatactcaaaacaacgagtggtctgtgattatcctctattatttgagtacttaatttttctttgaaattgaattgcacttttttttgtttatgatctggtattagcatagcagactgaaattgaacttgtattcctttatagatatggtatatactaatttccttgttaacaaataaggcactcacttgatatctcttatgaactgacttggtatatacctatttttgtaccattgatttgatgcaaagatacatatatagtaccactatacattctttttttgtttgttgagagaattatagctgttttaagatttttggggtcattcataaacatagttcatttttgctagttgtaacttgtgtgtgtttacatttgggtttgtgaaagcagggtcctg

SEQ ID NO: 32906 - DNA, 955 bp, Medicago truncatula
  Intron number 3 from transcript Medtr8g015260.1 (locus Med tr8g015260) derived from phytozome v7.0 (chr-ID MtChr8; po s 2636265 to 2637219 reverse strand)
catttgtgtgacctggtatgcttcttctctcaattctccatcaacaactgaagattaagatgtatattttatttatacttcaaataataagtaaagcccttgcaagttttcgtcttttaattatgagctaggtttttattaataggtgaatttcagcgttaaggtaagttatatgatatatttgttatatagcaaaaattgattaatgcagtgggtctgactaaacacccattttgatcttaaccttagcacctgtcgtcttattaatccttagattagagaaatattggtataagcaatcaccctattacattagttcttctatgtttctgtcaaattaatccttcatcagtgattgatttgaccaacaaaagatatatcaaggacaaggatcatttctttatttcattaatgtagggacaagggattgatataacatgtgttgtaactataatcttatatcttgcaattatttgtaaaaattgtatttggcccggtgattagacctgttagctgtattatagtccatttaaacaatttaatgattgtaatctcatgacttttgaaataatattcagcaaatcatttccaaatttacaaaatttgtcgagattagaaacaaaaatgggggtttactcatcaaagttaaaaattttgttctatttagattctctaaaaaggtaaaaccaaagtgaaccgaaaagaatagagtgtgtttgttctaatgttaacacatgttccaaagtatgctgaacaccagagctgcaatttgttgcttgtctgtaatgtgcattttcgagtgtttgatgccaaaacaaactggcagtagattgtttcattcttttcagttactcagatgctgtcagagtttatcatgtcagtcttcttgtaccttaatttctttattggcctcatttcaggacaagaaagagtatctcaactgcttaaagactgc

SEQ ID NO: 32907 - DNA, 321 bp, Medicago truncatula
  Intron number 2 from transcript Medtr8g015260.1 (locus Med tr8g015260) derived from phytozome v7.0 (chr-ID MtChr8; po s 2637259 to 2637579 reverse strand)
agttcaggtatttctttctctttcattttttcttcttctttaattcgataaatcactcccatgtcttatgcttaagtttctatgttttgaaaatcaaagaaaattatgatttgtttatactggattgaattaggtgcctgtgcagtagataagttcaaaacttcaaataagccaatccaaacagctcctcgttgttctctctagtactatactaatataagctatttctggcctctatttgctttgattctaaaattgtattttctgaaactgttgtgataattaggtggtgcatttggtggcaaccgagggctccgtccg

SEQ ID NO: 32908 - DNA, 1047 bp, Medicago truncatula
  Intron number 2 from transcript Medtr7g106790.1 (locus Med tr7g106790) derived from phytozome v7.0 (chr-ID MtChr7; po s 24794677 to 24795723)
tccggaggcggaagatttatttgaaagctttgcaggtaacttgattgagtttatgtttgtttctgttttgcacatttcaacattttaagttttatatgctaaattgctaattaataattctaatttttggtgcttgtttttgtggatgattggtatttcgtgtttgtttcttattataacttttgttaatatcatttttcgtgaactctcaattatatttgtagtaaactaatgttattgtttgatgtcatgctgtacttgtttaacatatgcatcctttgtgcttaaattgtatttttacttccatgtattccgcatatgttagaaaagcaaaagaggagaacgtatttaactaatagtttttgaggggttgtagttgtgtttatatataagaacaaactaatattagttaagtgcttcctagttttttttttcatctggaagtttgttgcaattaagcactgcctaatataacaatgaacaataaaccttacttgaacacaaggatggtggcaccatggcgttttatgggaatatgacgccttaaaattgtagatttttggctttctgccagggtccatcatccgcaatctcggtgacactggacacaagtcactattgacggtgttgctttgatactgtattgaaattatagcataggatggaaaagagccaacagagaatgtatatcactaataagagcctgagtagttctggtgttgtgtaacttgtgttgatgtgaaaaactaacatgataagtttcatgttcgcagaccacataaggcacttttatttatctcatgtgtgtaatacgtgtttgttcataatgttgctaacatgacccagtttgttggttggagtgatcttaaaaaccatattaattctggccacaattttacttgtggaccgcaattgaagatcactgctgttagctttttttttttccttccagctttactatatgatgttttctagtgaaatcttatctataattattttgttggttttgtagctctcagagtggctcgagtcaaagaagcatcttga

SEQ ID NO: 32909 - DNA, 830 bp, Medicago truncatula
  Intron number 1 from transcript Medtr7g130280.1 (locus Med tr7g130280) derived from phytozome v7.0 (chr-ID MtChr7; po s 30434720 to 30435549 reverse strand)
gttgagtttagagtgcatacatgtatgtttcctttggttttagttaaattgatatcaatctcagcttatgtttcatatgttgcaacaaggaggatcatgaacttctaattttgagagtcgacatcaaccattgttaaagatgttgacgattttttattagtctacggtagatcatctatcaatgtggtccacagtaaaatatacgataggatttagctcgagaccactttttaaagggttcttgtgcgtcgactcttgttgaatcatattgatcacgcggttttgatcgagagctcccggagtcaattatagtatatcccatatgatatgatatatgataaagggtccggaggttagaagattcacatacaacttagtatatcccatattatgcttcaactaacacgttaatttgacgcaagaacatgatagaggatatataataattgactgacgagtagttggttagctagttgggtacttaggtatcgatcactattcaataattcttcccattcatacagatttccagatgacagttatcacattaccaacactaccaatttttggataatttttctttgatttttgtgtattttattcttaaatgtttgtatttgggttaatgctactttgcacaagccagttaaattttgcacggcgaacaaaatgtttttcatcgttggatgataaaggttcaccaaaccaatcataaacccaccacaattgcagcaagtgtctcattgcgcgcaatacttgtaaagcaaaaaggttaaaacacagagcacatcataggtggctccttccggtctccagcagacaaccacaac

SEQ ID NO: 32910 - DNA, 971 bp, Medicago truncatula
  Intron number 4 from transcript Medtr8g009010.1 (locus Med tr8g009010) derived from phytozome v7.0 (chr-ID MtChr8; po s 1151258 to 1152228 reverse strand)
gggctagaggtgtttatttaggtggtttttggaggtatttatttaggtggttttttgtggggtatcgcttggtgcctctttctcttctctgtatattgctttaaactttttctagttatctattatatatattttgccattaaaataaaaaaaaaagtttctatcatctgcctttgatttcttggagctatttaaatctcatgttcttgttatatatattttttttaaatgattttttttttggaaaattactcaaaaatagtttgaaattatttcaaactcatctattatatgttaaaagatagattttgatattcactaacttaaatatttattgttagagattttaagatataaaattcacatattttttcaaaaggatatttctcaaaattgatttttatgagtagctgtttgaaatagcttcttattttagagtttttttttttttttttgttgaaattttttaattctaatataggtgttgtaaatagtttgttatgcttgttttcgtgaccacatcttggcttaaaatgcatcccatgctactttatttcagattgcacatattagtttgaactagaaacaaaaaggagaaataaaaaaaaatggatgtggaagggatttaaaaatgaaggtggaaactggaaagggaagttattgtgttttgaggctaacggtgttaagataatggagagaagtttattacattgaatattatttaagtagggtaggttagtgtcatgttaaataattgagggagtgtgagtgataatttaagaggttaatgcaatttgaccttaactttttttttaattctttgagtttcttcaattcaaacaactaacttgtgttattttagatctgactctttcttttatttcattatcattgtttttttattcttgttttgtgattaatgcatgtggagaacagcaatattaaagaagtggtcaaagatttggctgaaa

SEQ ID NO: 32911 - DNA, 862 bp, Medicago truncatula
  Intron number 5 from transcript Medtr8g077670.3 (locus Med tr8g077670) derived from phytozome v7.0 (chr-ID MtChr8; po s 15540679 to 15541540)
ttaaagaacatctccatatttcttataatcaataacacatttttattgcagtgtgcaataatatagctgtgtttggtgatacaaatctggagctgccttcgttcttgtccaatcgttctgctgttgaaatccacttagatgttgatccaaatacattgctaaagtcaactgatttcagcatagagtttcctttgcatgcacgatatcaagtaaggctgttataattcagtttatatcttaatgtcattgttagctaaccatgcccttcacatttgcttgactctgatgtttggcaaaggaagagagtatgtatttttttaaggtactatcaccaagaaagaatcaccattttaatccctaaagttgtaaggatttggtccataaaattaacaaaaaatttaatgacctatgaaattgaaaatcttcaggaacatttctgggtcaattacttttatccctaaatttgtcacaaacaggctaatatgattaaggatttttaattgtagaggccattttgaaattttgttactttcaatcaaagaccaaattgcacaacattcataattccggggaccaagttggcaattcaactcatcgccttatgtttaattgcttcatctaaagatcatgatataattctcacaacttgcatacttttatatccattagtactatatgttgtaattatatactagtactaatactagtattactaaagtttgtccttttgcacgaataaaaaaagttttcctgaacaaagtactatactagattactagtgttgctgtaggttgtcccttatcaggtaaattgcagtattgcctcatctcacattttccccctcttcttttgcagcctctga

SEQ ID NO: 32912 - DNA, 928 bp, Medicago truncatula
  Intron number 1 from transcript Medtr7g108080.1 (locus Med tr7g108080) derived from phytozome v7.0 (chr-ID MtChr7; po s 25360426 to 25361353 reverse strand)
tactctcttcctctttcctctatccttcgcgcaaggttcctcgcttttcactctcgtattttgaagcttaccatgatattttttttttttttaattttttatatttataatttaaacaattagaacatgaacttgaactgtgattatgcttcttctaatcgaacaaatttgtggatttgatttcatagttgattatcgaaatattatcattcaatcagtgtgtgatgtatgtgagttttggttctttatggggtttacattttttctcaaaaagtaatggcccttgatgtatgtagttatagattgaacaaatacatcaagctagacacttcacctgggttcgaaccggcacctcgcagatatctgtgtgtgtgtgtgagtttcaggtggcgattgccacttcgtctacagacaagaaagaaaagaaaaagaatagtggtcaattgtctattcgcttctatctcaccccaaatcatttgcttagccaatgaaactcctgagtcttgacaaatacaagtattaaaataacaaccaaatgtgctaaaaagttacatattttgtacatttccataatttaggctctctctaaaaaccaccattgaaggacaggacgcacttagcaaatgaaaagagttggattttattatagaaagagatagtatcaggtaatctaacagcaaatgaggaactaattttcgataagaaccacatgtaacactgataaggggaattactggcacctaagttttgcaatttgttgttattatatgcatttggtagctgttccacaataatcatttacttgtagttcattttcttttgtatttttgtttctgtctttcttttgtgctcaagtttccgtatctcttaatttaaatgatgattttttatttacttttatcttaaattatgactatttttgcacaga

SEQ ID NO: 32913 - DNA, 977 bp, Medicago truncatula
  Intron number 2 from transcript Medtr8g087850.1 (locus Med tr8g087850) derived from phytozome v7.0 (chr-ID MtChr8; po s 18392968 to 18393944)
ctaccgttccagtatcttctttgcttaaggtgcaggttggatgcattggagtgttcatcactttacaatcttctagcttgaacttcttcagaaactcctttgtatattttgtttgatgaacatatactccttctttactttggttgatttgaattccaagaaagaacttcaattctcccatcatactcatttcaaattcatcctgcattaacttagaaaattctttgcaaagagatgcattagtagaaccaaatattatatcatcaacatatatttgtacaatcaaaatgtctttcttaagagtccttctgaagagtgttgttgtcagttcaaattgtctctgcctcgcagtattttcaatcgcaattttacctatgtttttcttgcataaaacttttcaaaatgtctttacttgtcttgtaagtcattcaaaagtgtctctgaatcattacattgtttttacctcagtttatttcaaaatttgcaaaaaagtcatacagaagggtattttggtcatttcctgcagtgggacccattttcatccttgtgactgtctctgagtcttttcaaattcatttttaacatttcatctcaagtttgcatctgagtcagtgttagagtctgtttaagtcagtttaggtcatttttagccctaggggcattttggtcatttcacataaaattttggcatggggaggttactttgaagtacctcatttaggccattggttcgttttagtccgttttgtcaattttatttttgtttcgctttacgtttggtcaaattacgttttttattcaattttatttttagattgcattttggtccctcaattgaggtcccaaaaattgcatgttttgtccaaaagtttttaattgcattttagtccttactttcatttttcagtccagtccatatattttttctaaatttgcaaacaggtccttcaagttaaagttacagggcagcgcctttt

SEQ ID NO: 32914 - DNA, 834 bp, Medicago truncatula
  Intron number 3 from transcript Medtr8g087850.1 (locus Med tr8g087850) derived from phytozome v7.0 (chr-ID MtChr8; po s 18395149 to 18395982)
tcaatcgtacgtcccctgtgcatccggatcttgtggttattgggcttgggctttatccattgcttttacgtttttttgcttttttttgtgctattcacactgctttttttgctacttgcacccgttgcttgctcaccttttttataaaaatcctaaaaaaatcctggttgtttcttggtatatttttggcattgctatggtgtttcttgcataaaaaaaatgtgttaaaatggtatgaactaattccatgtgtttttacacttttggtatgcattttgctatgttttgttcttgacattttgatagtatgatatgaatgaatgatgcctaatatggtgatgaatatgcctctggaaatgtgcttattttttgttgtgtttggatatgattttatgaatttcttgttttacaagcaataagtgtttatttttaggaataaagtggtaaatttctttatgaatttggtgtgatattttgcttgcacatgtctccattaattgcatgtcatggcttgaaacaaaatttctttcaaaattgccatgatgtgataattatgggtcactagcatctttaggtatcatatcaaatgttttttttttaggtttttaccactttgttactttttctttgccattcttatgcatttccttttgattatttcctactattctatgcttcattttactaactatttcatctcatgtgtcatacatttcatagcattccactacttcctccactttctttagcttagcatttatttttgcaaattttagttcatttggtgatgtaatttgttatcattggtttgtagcttggcaaagaggccataga

SEQ ID NO: 32915 - DNA, 708 bp, Medicago truncatula
  Intron number 1 from transcript Medtr8g021000.1 (locus Med tr8g021000) derived from phytozome v7.0 (chr-ID MtChr8; po s 3735189 to 3735896 reverse strand)
gaggttttattttgaaaggagtatagagcaataagattttaacctatgaactcaagcatattacacaaaaacctctaagcactagaccaatcctaatgacttttatggagattatttgttttcttctgtatcttatattaagatttactagatgataaataattacctaagttgcttgacttaatgcatgtttggattgacaataagctagacgaaatcatgttgacaacgtgatttgttgaagctataaagtgtagcttttgtcaaaattatgttgacatcgtgactttgttaaattcaccatcaattcaaacatccacttagtgagttctttggttcattgcaaatttggattgttggtgagtttgacaaaattaccgtgccaccatgatttggttgaagctctaaagtgtagtttttgccaaactcaccgttaatccaatatgtactcaaatcctatacaaatcctgtgaaaagtagataaatcagtacaaattcacaacaggcctatctccgaaagagagaacatgtagacatattcattagaaaaaacttgataagtaattattggttttaggtatatatgggaactaattattgtacattctaaacatatatggtatggtgattgagtattttataaatgattgggttcaaattttaaactctaacccctgttgtatattctgtttcatttgaaagaaaaag

SEQ ID NO: 32916 - DNA, 442 bp, Medicago truncatula
  Intron number 1 from transcript Medtr7g103650.1 (locus Med tr7g103650) derived from phytozome v7.0 (chr-ID MtChr7; po s 23308211 to 23308652)
tgtcactattgctagcttttctactatattgcttggtcttctggattaatattaagtttaccacgacaagaattgatacactcatggaagtgtttggctcactttcaatagtttctttggtgttgatcgatgttcctcccaaacaattggacattatcaggatacattatcatatacacgatatggttcatttgttatagagaaaatatatttgtacaaccatttagtgataacttttgtcacaactttctctttcatattcacattatgtttttactttatttctctattgcattgatttttgtaccaatacctacttttcttttataaattcatggttgtcaaataagttgtcaatcaaacgattgttcaaataacacatctcttgttatatactactacttgtcatgaccaaacacagttttattggctacgtccacga

SEQ ID NO: 32917 - DNA, 786 bp, Medicago truncatula; identical to SEQ ID NO: 32660
  Intron number 2 from transcript Medtr8g144580.1 (locus Med tr8g144580) derived from phytozome v7.0 (chr-ID MtChr8; po s 34964090 to 34964875 reverse strand)

SEQ ID NO: 32918 - DNA, 290 bp, Medicago truncatula; identical to SEQ ID NO: 32659
  Intron number 1 from transcript Medtr8g144580.1 (locus Med tr8g144580) derived from phytozome v7.0 (chr-ID MtChr8; po s 34965029 to 34965318 reverse strand)

SEQ ID NO: 32919 - DNA, 571 bp, Medicago truncatula
  Intron number 1 from transcript Medtr7g093170.1 (locus Med tr7g093170) derived from phytozome v7.0 (chr-ID MtChr7; po s 20752241 to 20752811)
aatcctgaatagtatgttcctcactttctattacttctcgatttcccttcattcgtttatgatcttctgaaattttgttccttttacgtgtttttgatgttttctctcaaaagggttggtgttaatttggtttacgtaagttcatttcaatttttgttgttttctaaccctaaattgaatttattttttctgaaattctaaccctagactgctgtttactaattttatttaataaggattcaattgcgatcgttatgtttttgagttttcatgattgtttttatagttttagaattacctgaatctgatcttgttagtgatcccttgttgatttctaagatgtttgagtttgtaattcaatcaataagataaaattgaatgcttgtgttgcttttgtttatagatctttgaaaaaaaattaagactttacaattggcttttttgtttgatttcatgttgatatatgtggagatatggttaatttacaatctatttttgttgaagtgatagagctgatgtgttgtggttgttttcagtgattatctgtttaagcttcttttgattggagact

SEQ ID NO: 32920 - DNA, 695 bp, Medicago truncatula
  Intron number 1 from transcript Medtr8g106340.1 (locus Med tr8g106340) derived from phytozome v7.0 (chr-ID MtChr8; po s 23822350 to 23823044 reverse strand)
tccactccaggtatgtatttctttcactttactgttttcatcttgcatgtctttctctttgtttcaatctattaatataatctaaatgtgtttttgttaggttaggtagttaagtattagaaaatcattcaataaaagagaatgatggactctaacatattctaaactaatcataacgtatacctggaatatgctcctctcccaaatgctcgattacatagccaactgcgctgtcttcagtaatggatgcaatcaaacacagttaccaaatgaacacgttgttaaagcccctcaaatgctcaacaaacctaaacagtttcagagtttaaccattcatgaatcacaaaacaggatatgacacaagcatcgtaaaaggaaaattttacctaatttagtcctctaagtagttttgcttttatccttttgaaaatgattatgaggttgtgtgaatgaatcttctcatcacaagttcgaatgaagattttttgtatctctgtctcttccttctttggtcttaaatagataaaacactgtcaaagttcattgaaacataggttgatacaatacttttaaataaacttattacgtgaaaatcttaatctatttcatgcatcagcttttacatatgtgatgaccctttttaactttctttgtttgtagaggcgaagcgtgctgttccattgaaagattatcgc

SEQ ID NO: 32921 - DNA, 611 bp, Medicago truncatula
  Intron number 1 from transcript Medtr8g112720.1 (locus Med tr8g112720) derived from phytozome v7.0 (chr-ID MtChr8; po s 25429027 to 25429637)
ctctttcacttcaacttcaacatctcatcgcagttttttcctctctatctcttttccaaatcttttcgttaacgtcttcaaacatttctatgattttcactgattattctaatttctaaattattccatgtcttttcatccattttctcattttcaattcacaattcgttttacggtaacccactccatcggttatgtccctttttatgtttcatgctcaaatatttaaactaacttgggtttgattttgattgttttgtttgtaatgatttcatttcggcttttgggtgttctgggtttccgaaaagtgcgtgtaaaatgtttgatgaaagtcctcaaagggatattgttgcttggacagctttgattaatgggtttgttaaaaacgatgttcctggtgaggcacaagtgatttgtggatatgagattgaagggtgttgtgattgatggttttctatggttctgtttattgtgctcttgtggatatgtatttcaagtgtattcattgtgaagatgcatgcaaagtttttttattttgctattgaaaagtacttatctgcatgtatatgtttcatttgaatcattttcaatttgttatttattgttacagg

SEQ ID NO: 32922 - DNA, 952 bp, Medicago truncatula
  Intron number 2 from transcript Medtr8g112720.1 (locus Med tr8g112720) derived from phytozome v7.0 (chr-ID MtChr8; po s 25429750 to 25430701)
ggatcctcttgtcatcacatctgcatcatcactcagtaattctacctctccttcaattattgggcatattattatgtgatgtgatataatggatttgcattaaatttttttatggggtactttagtttgtaaatataaccagtaaaatacatgtttcttttgcttacatcttgttcgactttctattatctgacatcatgattcattggcatgtccatcttttcgggttttattattactagccgtttttgtggtatgatgtctaaaaaatgcatagagtgaattagtgtatcctttaggcttctatgcttctatcgatgctttaaaactttgacctcaacttcctttttccttgattcatgttgaatgaaattgtttaaattaatttgctgttagatgagcatgcttagcctggaaacttagacatggacattggacacaatactgacacaaacatgtagacaccaataatactttgagaaaatagaagtgattgaatttgaatgtaaccacatgtgtcactctcagacacaagaaacaccttcaatttgaagtgtaggctgtgttgctgttatatagatgctaatggcttgtggtactgaattttaatgtttgaagtttatgggggtgggtgggtgagaaaacatgtgtcgattgacagggtgttggcagaagttggataggagctactttttcttttccaaatacgatttcccattttccgcatgtgtggtgctactccggtcttgagcataagcaaaaaaataagtaaaacgaagttgatttatttggttaaaaatttgaactagatgcatctactttgtttgactctttttttgcttatattcaagatcataggaagtatttataatggccaaagatgccaatttttactgtctatttattgcaaacttcaggcaagtttccagtggaatcttcctctgtggatttg

SEQ ID NO: 32923 - DNA, 707 bp, Medicago truncatula
  Intron number 2 from transcript Medtr8g093400.1 (locus Med tr8g093400) derived from phytozome v7.0 (chr-ID MtChr8; po s 20508984 to 20509690 reverse strand)
cttccttaactcaggaagctaaggtaaattaagtttattttgcgaccgtgatgatttcactaaactcgttgttgatccaaacatgcgttaagtttgtggctatgtaattaccaaaatggcgtgatggggttgttagatgacccggggtcttgaatcataccaaaatataagcaaaaatgagtcaaaaaaaaattggaaatcgatgtatctgatccaatatttggtcccgatacatcaactttctttgactcatttttgcttatattttcttacaaagggagtatgtggtcaagagtttgatcttagattccgtgtatagaacataatgagttctgtgtaagagggtctggattcgatccatgctattgatatttgtctcactaaacaaattaatcactaatgtttggctgtttgcttatccaaaaacaaatagatctgagtatctcgggggattaatacccgactttcaggtaggcgatactcgggttcactgaaaaatttcagaatttttatgtataattattgaaaaaagttctaaataaaagtagctgttgattttgattgcattagatcttctcttcatggtatcatgtaacgataatagggaagtttttatgctttgtctatgtgaaagtagctgatgattttgattgtacctggatctgtcaacaggtggctgaattaagagctgctattgggcccttatc

SEQ ID NO: 32924 - DNA, 771 bp, Medicago truncatula
  Intron number 1 from transcript Medtr8g093400.1 (locus Med tr8g093400) derived from phytozome v7.0 (chr-ID MtChr8; po s 20509733 to 20510503 reverse strand)
tactactactacaaccccccatctcagccgctgtatcttattctctctctttgtcagtccctatatacaaacggtgaccgtttcgttcacaagtcacaaacaattcgcgtgtccttcaccttcttcatttcattagtctactaactaaactacattctttctttcatttaccaacttaatcaaattaaccataacattacaccataacactaacactataccgtaccctctcattttcattttcattttctccaggtttgttacctattatcgattcttgaattatacaattttttacttctcagatttataatcttcacgtgcgtttcaattctctgtttatgaattttcaccgattattattactgtattaatcaagacaaaatgttttagtattttcatttttagattatgattgttgttttttagcttgaagtcaacgctactgtgtttgaataaaattcctttacctgtttctgatttgagttcaaaagtagaaaaagacgaaataataaatcgatttcagaagagaacaataattcaggttgaaaatgttgactgctggaaaagttcacctaattttttggttgtttttggttaaattctgaatcggatgctataggttatagctatacacgtgattagtagtacagtgtaggtggattcattaattaattttgtttggaatgaaatcaatgaagaaaattaatcttgtttgaaattttttgctgcacaggttggttgggaagtacattttttttggaggcaaca

SEQ ID NO: 32925 - DNA, 356 bp, Medicago truncatula
  Intron number 1 from transcript Medtr8g101560.1 (locus Med tr8g101560) derived from phytozome v7.0 (chr-ID MtChr8; po s 22054253 to 22054608 reverse strand)
ctaaatccccaaagattaagcactaccaacttaaggtccaattctaaatttctcatttttatgttaattaagttgaaatttctaattaagatcctatttattcatttaatttttgcaaaaaaaaataattaggattttggtattttttgtgattaccaatgcccacaaaacaaaattcagtttttattaccaagttcatgtttttttgtttagtggaatttgaattacgtttgtaggtttttttcttcttttgcaaattattgttcatcattaatagttctgtattgtacttttttttttcttctggtttttggtttagatgatttatgtttattgacaggcactaaagcttttgg

SEQ ID NO: 32926 - DNA, 630 bp, Medicago truncatula
  Intron number 1 from transcript Medtr7g103800.1 (locus Med tr7g103800) derived from phytozome v7.0 (chr-ID MtChr7; po s 23382312 to 23382941)
cttgccgggattaaaacggttagctgctcaatttttcattttgcaatgatcaactatatttccttaacaaccgaaatggtctaagtagatgtgaagtttcattagcaaatactatcaaccaaaattcccagccacacgaacaaagtctcaaaagaagcaagacattatagcataatatgaagactattactttttccatccttttgtttggatcgttttcgttgcaaatgttttggaaaaaaaatagaacaaaggcacatatataacataaattgaagcaacataagacaaataaacaattaaaaaaaatcataataacagaaatgatgaatcttttgggaatgtgttttcaagaggatttctttgagttaaatcatgctgccttgccacatgacatattcatctggcaggcagcacgatctaactcatagcaacctcttgatatttttgagttatctatgtatcaaagaggcatcaaggagtatctatatatttttgatagcatgttgaggatcttcatcatgttgttatatagagatctatatatttaaaacaacatgagaaagatcctcagcacaatgacaaaaatttgcatgtctctttggtgtgcttgtttgtatttttgacagc

SEQ ID NO: 32927 - DNA, 534 bp, Medicago truncatula
  Intron number 2 from transcript Medtr7g134480.1 (locus Med tr7g134480) derived from phytozome v7.0 (chr-ID MtChr7; po s 31784544 to 31785077 reverse strand)
agagacactcttcctcaaggtattttttttctctctctgtcttcctgaatctttaatgcattttgttcttattttgttgagaaaaaagatatgtgccgtcagtgtatactaattttacaccgacgtcaactacaaatagattattcgatagttatctttaaaaaacatggcaaaatggttagttccaattggacaactgcgtaaaaataaaaatagtttatgctgtcggtgcataaccattataaacgaaacaagaagttgaatcatgtattgagaatcttaagcagtcttacacattctgttttatgtagtcttgaacagtttgttacacccatccctgcaatattgtatattgataaattgtcctgaattgaattgatggtacacatttgaataaatggacaaatgtaacaaaatattgatggttggtttacttgaaccacaaagtatgaagagaatgtatgtgggaatgtgaatctgatgtgttttgtttttacagatcttccacttcctccaacactggttgttcggaca

SEQ ID NO: 32928 - DNA, 744 bp, Medicago truncatula
  Intron number 2 from transcript Medtr8g034130.1 (locus Med tr8g034130) derived from phytozome v7.0 (chr-ID MtChr8; po s 7285961 to 7286704 reverse strand)
ggtttcaatttgaactagcttaaaacaaaagcaaaggcttccaaaacaaatgcagctcatcatgaacataaattcaatgaaaacgtgaatggaaactaaaacaagaatgcaaaagcgagctgataaatgatgacggaggacgaaatcgaaattgaaacgtaaggcaaggcaacgaatcagattggttcaagttgaaaccatacaagccattctcccccttttatcagagcttatgtgttcctacgtttcgtttcttctttgtttcttttcgatatcttttattttttaaaatttttatttctaattaaataataagtaatataaaatctattaaaaatcaattgttttattttatttattctaattctgaaaattttgtcttttagtgtgccacatggcgtgaaataactggtccacgtggcacacagttagttttaactttttttttttaacttcaagttaacagaaggactaatgacaaattttttacaaactgcagggactaaagccaaacaaaaaaaagtgcagggaccaaagctaaaaaatggtaaaagtgcagggactaatgacatatttaaaccaaaaagttattatctcctattaaatagggagtgttaaaaatattggcattcaatccataaaaaaatattggcattcaatacacagactctgataaattgtttatttgatgctgatttcttaacgacaatggcaacatatataatgctcacccagcttccgatc

SEQ ID NO: 32929 - DNA, 674 bp, Medicago truncatula
  Intron number 4 from transcript Medtr8g119690.1 (locus Med tr8g119690) derived from phytozome v7.0 (chr-ID MtChr8; po s 27193614 to 27194287)
ctgaaggaaaacaagaatatataaatcgtttgtaagttttcctgccaagacgacaatgagtatacttattattctctgccacttacagccttggtaataatatgactaatatatttgttaagcttttcagaatgctcattgccacttattttatgtgtcgcttttgtagaaaaaatatgttcctccttttaaagttcattgaaacattaatttttttttcaataacactctcaagtatttattatatatagacaaataggtgaaaagagataatactctctctgtctcaaaataccaatcgtttaaactttttgcacaatttttatgaaaataattaattgtgttgatttcaattaattagttagtgagtgagacgagtgacacgtttcctccgcactacctctaaacaccagatctgcttgtggagcctgtggttctgtgtgttgttttggctgccgttgccgggataacaatccttctattcatttcctcaatccatcacatcgcctcttcatcaatcatccgtttttctctgcgatggcttgttggatctgggttctttgtcacgggtttgagttctattatgggtctgttttcatgcttcagatgcggaggagctattttgggtcagtttaggttgctgatgtaagggtatggttcagattggtgacctt

SEQ ID NO: 32930 - DNA, 676 bp, Medicago truncatula
  Intron number 2 from transcript Medtr8g005260.1 (locus Med tr8g005260) derived from phytozome v7.0 (chr-ID MtChr8; po s 144658 to 145333 reverse strand)
aaacgctagaacaagcaaggggagatagaaaaattgtaatttttactgcttatttaatttgtagcacagcattattaaatgttatgtaaagacttgttgccattttgttgtgacatgttttacaatgcatgtgtatagtaaggatatgatgaatacatctgtatgtatttcatgttcttcaccacagagcctcccttattgtttaggaagaaacctatatgcaagtgacaaacttagtttctttgaagttttagtttactatgatgcttgttgatgattaacaatatgcttgctctgattccctgctattccatttgacaaactacatttcgtgttactggaaggccctaacgctctcaaactcggcatgtgtagatcctatgatttactcttgaattttgtcaaaggaaataacatgcatgatattctcaaggggcatagttttgatgtatgaacccatagattctgtctacaccatcatgactccccatttgaagttattctttctaaacaaatgcatatatatgaacacacttttgataaaatatataatttaattgcttctagtatatatcttatgtcacattctttttctttttatttgggtacaataattagctctaaagcttcatgttcaacaggtcattgcaaatttcagcgcaaggtggtgtagtcc

SEQ ID NO: 32931 - DNA, 423 bp, Medicago truncatula
  Intron number 1 from transcript Medtr8g093780.1 (locus Med tr8g093780) derived from phytozome v7.0 (chr-ID MtChr8; po s 20739933 to 20740355)
actgtttcatctctcaaatctctgctccaaaccacgtatccatcagcttccacctctctttgaaaattggtatactcctttgatttcaattcttcattaatattcaacaaaattgtggtataattctataaaattagttgctggtgtgtatttattaatttaatttctgggttttgtttattttaattttcatgctccacatagtagttaactacggcctgagttttttctttttttaatttttttatgttgtgttggtatacataatgatagttaactaccgttgaagacaaaaatgtcatttatttatgttattatgaagtttggtatgttagaaaagcaattttctatttgtaatcactaattaactatgaaagacaccgatattaattaacaatgaatttttttaggggcatttgtttc

SEQ ID NO: 32932 - DNA, 627 bp, Medicago truncatula
  Intron number 1 from transcript Medtr8g094020.2 (locus Med tr8g094020) derived from phytozome v7.0 (chr-ID MtChr8; po s 20852541 to 20853167 reverse strand)
gactaaagattcatctgattcctaatcttttcctggtaatgttttcttgtgacacaaaaagtttcttgtgacttttctttcttttgttatcttgtctaacaaattttcaatcatgggttgtttttgtttatgcttgctgtgttttcaatcaatatagatggtggggttggtgatagattttttttttctttttccttttttcatggcatgtgcaatttgaatttctttgaagcaattcaattaaagtttattaattatccagctatatttggttgttgctttgcataatggtaaaagaaaaaaaaagtagtttttattaattatcaagctatatttgtatattgctttgagtagttacctactctcaagtgtgtttgattggaattggatttggatttggaattcaggttttttttcttgctttctgaagagtaattctggtttttctttttgaattatacatctagagtaagctttctggtagcatttgtttgtggactcttgtaatttcttttatgaatgcaaaagagattaataattatcatgctaaatatgaaggttgattgaactttgaggacttgcttgaggtttttcggtatacttaactaatctctgcaagttcagttt

SEQ ID NO: 32933 - DNA, 895 bp, Medicago truncatula
  Intron number 1 from transcript Medtr8g115410.1 (locus Med tr8g115410) derived from phytozome v7.0 (chr-ID MtChr8; po s 25911493 to 25912387)
gaaactttggttaacgttttttctatacagcttttgttttatttatttatttagtgaattgcaaagttttattcatcttatttgtttcatgaatcatgatctttcttgttgcaaattttatttttttactatatttggataatcaacataattaagtgctaagtgcttaataatttcagaagctattatggagagtttatggaaataagctgaaaacagcttatgcgtatgtcatgaattgtttccacaagctttgtgaaacagtctcaaaagggtttatgttaatagataaactcaaataagtcaatttgaacatgcccataatctatttttattgttagtcatgagtatatggctttgaccttgtattatgcaaagtttgtgaatgatatccgggaaattgccatgcctatgaagttcaaagaatgtagacaccgacacaagtttctatgatttgtatggctgcatagttactgtaatgttgtagtatcaagtttattagttttgttttatgcttgttttcttgattagacaaacttacatgcatagaaaatttgatgtggaataaaaccattgagtgagagaagacaactgttaaaaataccgacaaattgtctgtctgtgtgggagcgcaagtgaacatattatatgctaagcaagtttcaaagtagaataaaatcataagtgatgcaagataaccattaaaagttccgacaaatcgtgcatatcatgtttgtcacctattgctgataattttatttaactcatttcatttgttggaaatgctttggcctatttatcatcttagtcaataatcaagaaataggaagggatgttatgcaaaccagagttctaatgtcatcattatttgaaacagaccctcgattgacggatt

SEQ ID NO: 32934 - DNA, 715 bp, Medicago truncatula
  Intron number 1 from transcript Medtr7g103100.1 (locus Med tr7g103100) derived from phytozome v7.0 (chr-ID MtChr7; po s 23027996 to 23028710 reverse strand)
ttgagaggtaattaaaattttgttttgctttatgacccttttatcagaattttacgtgattactatatataatttcgttactaacatgaatgtctatccgcttttttgtatcaaaattaataatacaagtttcaaaattttatctttgattgttaaaaaaatcaattatttgattggaaatgaatgaaaaatagttgcacacaatatggactactattctttgtacatggatgatcataagttatgacattcacattagtgattttgttttatctgtattttgagcttatgatgggaaagcaacttttgacgctatatggtgctcatataaaaatttaaatgattttttatccaagcataaacttagttgaattgctaaaactagttttattttcttgtgacttttgagctaaagatttggtatagactttgaccatgctaatttgggtgttgatgacttgttgagatctcatttttagcctacaaaaactcccaggtcttttgatcttgaattgacacaatgagagagagtaaaccacattactatcaattttaatccttgatatgatagaatcatagaaatacattccttaacaaattaactgaattttcatattattttaaacttcataataatttaatggctatccagttataatttgtttcaaaattttgctagtatattctaatttctttttcttctaatttcaggtga

SEQ ID NO: 32935 - DNA, 1030 bp, Medicago truncatula
  Intron number 2 from transcript Medtr8g025280.1 (locus Med tr8g025280) derived from phytozome v7.0 (chr-ID MtChr8; po s 5022577 to 5023606 reverse strand)
ctctttatttggttagtttttctttattttgaaaccctattttgctatgtttatgtttatgtttatgtttgtgttttgtcacttgcattatttttaccaacaatgctttgaagttggacttacaaaaaccataatgtttagtgtatgtttggttctgcgtaacaataattgattttgaattgtaggtaaagtgatctgtgtttgggtacattcatataaaagtgagttaattataagttcgtatgtaaaaatcaattttagaatcaaaagctagaaactttatcttaaagtagaaacaattccacgagacaaaatcaattctacttgaaagcaaccaaacatgtcaggattctacacctccagaattaattttggcccctccaaaagtggaaccaaacatatactaagccaacatatggtgtgcacataggacaaattttacacatgattggtttgtttcaatttgattagtttagataagaaccgatcgtatattcgaactgggtaacgaagcggtccaatctattatcatatatacagaactaatttgtaaaattcaaacttcaacttgtcaaatatcttaatctttgccacataaattttgtcatcctatggttgagtgtccttctgagcttttcacctcattattgtttctttaaatgctttgcaactcttacatttctcattaatattatgttataaactcattctgaaattgaagaagttaaagacttatgttatgtgttttgatattcatagatatcaaccagtaactgttgtgtgtgaatagaccattcttttaaaaatcagatagagagctagccatatatttaaatcagccaaaatggttttaaataggtggttagaatctgcttaagctggtaaatttatagtttctagaactgtaattatttctatagtttgtaatgttttcattcagaagataatttttaacctgatgaacaagttcaatgacaagttatacctatatgttatactagggtctagcacacgtagttgccgcgacacc

SEQ ID NO: 32936 - DNA, 416 bp, Medicago truncatula
  Intron number 2 from transcript Medtr8g102840.1 (locus Med tr8g102840) derived from phytozome v7.0 (chr-ID MtChr8; po s 22774300 to 22774715)
agctgttttcattgcagttgcagtttttataataggtatatatttgaaaaagaaaatgattctactaaagttaatgccttgaaaaattccctttgttttgataaattgctcaaatattacttatatatgtatagtgttatgatttgaacgtcacaattctaacaccgccgatgtgattgaaagaaagaaaacaaatacataaaactcgaaatcttatgtttatatagtatccgacaatatttgttgtcaatatattttctattgtttaatttgtcatcactcaaactgtaaccttcttttcactatcctgtagctagtctggaggcctcaattgtaatcaattcaaaaacatttatcgaaattatttgtggtgtcctgttaacttgttgtgtatgccaggatctacggccacttat

SEQ ID NO: 32937 - DNA, 502 bp, Medicago truncatula
  Intron number 1 from transcript Medtr8g012190.1 (locus Med tr8g012190) derived from phytozome v7.0 (chr-ID MtChr8; po s 1863960 to 1864461 reverse strand)
agtaattacaggtaaatatgtctataatgattttggttttctactaaaatcaatttgccatgcgtataattgttaaattaaaaaggaaagaaacccagagagacgtacgtgagcatggtttcatcttctcatttcaccaagatcttcacaaaattatgtgcttggctacatcaataatctaaaaacctcttcatattttttctaaacttcatttttatacaattcatcaacccaattacctcttaattctcttttccttgtttcaatttcatatttcacaaaatattaaacaaagtatggcgtacaagcaaaagggttgttgttgtttgagagatagagtaaagaaaaagggaaaatgttgaagatggagattagttcttatttttgactttttaatttaatgattttatgaagaaaattttaattcaatatttttaattttaatttaatgattttatgaagaaaaagaggttgaagatagtgactgatccagaatttttga

SEQ ID NO: 32938 - DNA, 472 bp, Medicago truncatula
  Intron number 3 from transcript Medtr7g100090.1 (locus Med tr7g100090) derived from phytozome v7.0 (chr-ID MtChr7; po s 22469314 to 22469785)
gatttggtaagtttgcactatttgaagttttttttacatatgttttctggcaatatatattattgacttaaatatcttttgtaaaatatattatttacttatgatcttctgtaatataggtcatttttaggtttgtcccatgtaatttttgttttgtttttgtctttgtaaaaaaaaattgtttcaaaataccccctaataagacattcaaaaaccaaattttttgaaattttttttctgaaaatggcctattagagagtattctgaaaagaaaaaaaattataaatatgaaaaccaattttttttacaggaaataaactagaaataacttatattacatgggataaaacacaattaaccctattctaatattcttaggcaacctaagttaatctcttttaaattaacaagaaaaaaacatctatttattgacgcaggcctagacccattgcaagatattaccgtggcaaat

SEQ ID NO: 32939 - DNA, 978 bp, Medicago truncatula
  Intron number 1 from transcript Medtr8g121090.1 (locus Med tr8g121090) derived from phytozome v7.0 (chr-ID MtChr8; po s 27934317 to 27935294 reverse strand)
actccacgtctactacttcggcttctgctactcaggtgtgttcttgcttaaaggaattaactatagccttcaatgctaaaacatatttgctattttactttacatttggtttgaaaattagtatcagtgaactttgattgttagttatgaatgtgtttaattgtgtatttttttattgagctcttatgtttatggtataaaatgtgtgtattgtttccctaaacttcggcgtagcagtcataccactgcctgctacaccgctacagccttttgggggtcaacctctaggcttcacggtccaccattgaatgcaaagataaggaggcgtcaatacatagttgacttgattgcacgtttggctcttccaatttggactatgtgcgaacttggtgctcaagtgtttgttgagtcaatcaagtcactgtgttttcaaaattaaacaaatcaattctaccatcaatctacaagttctacctccgttccttcaataatcatttttatacacaaaatataaaaagaaataattttaaagattaatcttagaatttgggttgaacctaactcaaccctacaaaaccaacttgcaaagggagggatatccacttataaacactattcagatcatatcactatctaatgtcggactctcaacagaccaccttcgacaccctacctcccccttcccgtcttctatccctcaaccttttttgatgcatattagattgctgatccagatgatagaaagtatgcttcaggttcttcggtttatcttggccccaacttggtttcacggtgatctgtttaacaaattctagttggtagatctagcactgcaggtcaatacaggagattggtcaaatctgcatctgaagtgttgtggaatcagcctttgttgacagaactactaattccatttcaaactccattacaatattgtgataatcttagtgcagtctccctctcataatctagtttcgc

SEQ ID NO: 32940 - DNA, 662 bp, Medicago truncatula
  Intron number 2 from transcript Medtr8g047520.1 (locus Med tr8g047520) derived from phytozome v7.0 (chr-ID MtChr8; po s 10690031 to 10690692)
aagaggtcttctttttcattattttcattggaatattactttagtagttaatttgtctgtatctctgctaatcaatgatttggtatcacggtgagtttgtcaaaattgcggtgtggcactgtgatcttgtagaagctctaaagttttgcttttacaaaatcactgtggatgtcattatgattatttcaaactcactacggatccacaaatgtgacctcgatttcagtcatagactcatattgatataaaactattgaggtgctgtctctatagtccctaaacatatcaaaattgcaagcatgtccctagtgcctcttttgttagtaattttaggggactaagttgaccgaggaaaaacacattcaaggactaaattggctgcttaaaaacatatttgatgatcaaaatgactaacaaaaaataagtgtagatttttttttttttttttgcaatttcgattcattcaggaccaatatgacagcaagtcacacttatagagactgaaacagtgatttgcccttagtcgaatagaatttgtgctttgtattttctgctaaccagttacttgttgaacatacatgcatgtatgttgtgcctgcattgttggagtgttcttactttttatgtacatgtttgtgataataaaggtagccgaagaccta

SEQ ID NO: 32941 - DNA, 957 bp, Medicago truncatula
  Intron number 1 from transcript Medtr7g135600.1 (locus Med tr7g135600) derived from phytozome v7.0 (chr-ID MtChr7; po s 32307658 to 32308614 reverse strand)
tccgaggtaaattatatttctaataacacttgatttatgttatgtgttatttcggtctatcaataaattttataatttatttgtcatcggatttttattttggttataaattctatttctcatagacatccttaaatttaaatttggcattaaaatattatataaagtttaatataacatgaaaaaaactaatgcaaaaaaaatttggtatataacttttaaaggaagatttagtcctaaaaatgataaagataaaattttcagagttgtggtatctatgcacaagaaaacagacacgtattgacattatacaaaatttagtgtagacgtcagatctaaggaaagagaaaaagatataaaggttcaaattgtataactataccatattaatattgatcttgaattttgtacaaattacaaacatttctcaaggtttattaacaaaaccaatcaacaataatggaacaagatatagcaaaagtgatggatttaggtttcacatagttgagaaatttagtacttgacataaatgtctttactgaccatttaattaaaattagatgactcacgtatcaattgcagaattattgtcatacacaattaattatactatgatgagggattgttcttatactatagaaacacagcacatgcattatatgtcaaaatcaatgataaataatcatcatgatatataaatttggtttgatttgatggttggaatagggttctagctaaactagagatccttaaagacaaccaaataattttaaataattattcattcaatttgattttgtttacaacattttttttggaacaacatattttatttaagaaatgaaaacagtatactattattatttttttaagaaaaaaatgggtccttatctttctataatgattataaccatttttaatttttattggaattaattaccttcaacttcacaacag

SEQ ID NO: 32942 - DNA, 581 bp, Medicago truncatula
  Intron number 1 from transcript Medtr7g143600.1 (locus Med tr7g143600) derived from phytozome v7.0 (chr-ID MtChr7; po s 34497484 to 34498064)
cctccttgttccttcactgtattcaagtaatgcatggtaacgccataactattctatctatgttatatgatgaccctcttcatcacttgtttagttaataataatcttcattcatgttattccatttgtttagcatttcatcttcaaattttattggttttgtttagggaaagacttgttagttgtgtcatgttctccaatgaaaatgcggtaaaacttttatcaaaccatttttcaaaaggtgacaatctgcaagatcagactatccaaatttcaaccttaaaatgttaatatcaaacaaaaataaaaaactattttaagatttgaactattcaatcttgattgggtggtcccatttcaatgtgtaaactttcaagtagaaacaaaacataaaaaccaccaattcagacatacactacgttttacctataatgtagctttgaaatttgcttggtttattatcatttgtttttggatgaccttgtatatatatgtttacttgtatatttttcatcaaatgacttgctattctaacttaagttgttgatggatttgtttatgattgattacaggatcaaaat

SEQ ID NO: 32943 - DNA, 473 bp, Medicago truncatula
  Intron number 2 from transcript Medtr8g094080.1 (locus Med tr8g094080) derived from phytozome v7.0 (chr-ID MtChr8; po s 20886252 to 20886724)
ggtaggtttgattttattttttttgtaattgtaatttttcatgacctgtattatagtatttttattaatatttgtataatctttgacaattttaaataggtactgttttaaatatactctttttggagagtatgttgaagagttgaactctttcctatcgtccggtgaatgtcaaaatgctgttgtagccattatgttggcaaaagttaaattgtttcaaggtaataatttatgactagcaattgtgattatttgtttatacgaatatatatacttgattcatatacttttgaatcttaatgataggaaaaccagcattgcaaaatacatatatatatattttaatataacaaaggtatatatattttttttaacataacattttttttcttaagttataatattattgattgatactttttattatagctttcttagtgcaaatacaaattttcctgcatcgggattgatcc

SEQ ID NO: 32944 - DNA, 518 bp, Medicago truncatula
  Intron number 1 from transcript Medtr8g026780.1 (locus Med tr8g026780) derived from phytozome v7.0 (chr-ID MtChr8; po s 5890453 to 5890970 reverse strand)
ttcaagactctaagcatcggaggacactagctgaggtttctttctgaactattttgtttgtgttattatattggaatttccaagttttttttttctttctaaatgtaatgaaatagagaaggaaaaattaatgttacccttatgatgtttggaaactctgttttcccttgaaatacattggctaggtcttccttttgagttatgctttttggtattttttatttttacggatgagaatttttagtaacacactcttaacagtctcgttattcagttgcctcgtaatttgatcaccttttgaagagtgtggtgatattttttagaggatggactcatggacctataatagaaagtttgttgaaaagagttgttactagaattcctctttaaaagaatggatgggggttcttctataacatgttattgaaatagcgctgaataatcttttgggaattttgaattggaatgatgttttgaatatatgtctttgtttccttttcagctagagaaaggtgtag

SEQ ID NO: 32945 - DNA, 934 bp, Medicago truncatula
  Intron number 5 from transcript Medtr7g117600.3 (locus Med tr7g117600) derived from phytozome v7.0 (chr-ID MtChr7; po s 27500941 to 27501874)
gttttggaaggtaattttttttttttactgtttgattcttctaaaagttgttagtatgttttgcgattacttgatattgtaatttgattattttctgttcattgaaattttaacatgatatggattttttacattttagggtatgggaaggtgctggattatgtacacatatattggagggacacagcgacggtgtcacttctgtgagtgtcattaatccagaaggtataaagacaatttcctcctcatgctgcaaaatttgtttagttttctgattggcagttgtcatattttattagatgcataatctgtttctgttaaaatttaaaaatatcttaaggtagatttgtatctaactgtataagttacgatacggctggtttgtattctacatcaaattcgatatcatttcatgaaattagctatgcagttgatcacatatcacttttgccccccaaataatgtgaacattttcatagctaataatcaaagttcattttactaatatacaaaaccagtatagagaaaataagttttagaggagggttggatgctgcattacaacgaggacttattgctaggggttggaacttggttgatgtgatatagagtgcagctagagaatcaagaggattgcacaaagagaggaggcgactgcatagacagggccacatgaaagttgcacgaagagaatatgtgctgtagaattcaattcaatgactatgcttttatgtataaccaagatcaatgataaatactttatgattttagctggaaatgcttgttgcaaaatgaaaacatctgtgcatatttctgtcattcatgtatcatgtggcaaaatagttactcaatattttacttgaattgttctaagttatgaaaatttgtactgtaatcaggcgtggaaactgtgactttagctactgcttctaaa

SEQ ID NO: 32946 - DNA, 586 bp, Medicago truncatula
  Intron number 1 from transcript Medtr8g073620.1 (locus Med tr8g073620) derived from phytozome v7.0 (chr-ID MtChr8; po s 14413385 to 14413970)
ctcttcaatctagagaagaacttgcaattaggtattcgttctctaaatcaattattttattttattttgttttttacaattagcaattttaacatttttattgatggggttaggtagttcaactagtttgagtaattggaggatttaagttcaaacccggatgaaaagaacaaaactattcccattaaaaaaaatatttttgtataaatggttattttttttagatttggatcgttaaagagtcccatattggaaaaaatatggcctgaccttgagtttataagtggggcaatcctcaactcacaagccgattttttaggattgtgttaggccaatcacgatttctaagatggattaagtgactttgtggcggaaaagtcactgcgactctattgtattttatgaaagaaaaagatcaagagaaataatagattagataagagagaaaacaatataggagagaaatagacacatattcatcgtgactagttagcgaatccgaatcctatgttgttttttttaatgatgttgatgtgtgattattttaagtgatttttgttttggggttgtagacaagctgaagcag

SEQ ID NO: 32947 - DNA, 535 bp, Medicago truncatula
  Intron number 1 from transcript Medtr7g108180.1 (locus Med tr7g108180) derived from phytozome v7.0 (chr-ID MtChr7; po s 25431578 to 25432112)
attcatcaagcaagtaagaatttcttttccatttctttttacaggtattcttttcaaggattgaacaagtagatttgaatgtttgaaaatggtggttagttacatccaaattagtggttaatgaattaacgtcggcggttaatgattttgacacctattatattcattaatcatcgattgaacacgtttaaccatctatttgagttgtgttaaccacttaaaagttgttccgaaagttgtctaaatttgaatgctataccacttaccaaaaatcttggagttcttgaatcaacgtaacgaattcaatttacaaaaacctattgtgttcattttcatactgaagcacattacaaatcagttgttgaattgtgatagttctctggcaaaaacataatatttattatgtagtatgtgtttgattccaagaaatgaaattttttgtgcttagtagtccttatatttcaatgcaaaaatttagtcctttcatccctcattcttcactctttgcaatgcaaaatcgacagctggcgtgcct

SEQ ID NO: 32948 - DNA, 515 bp, Medicago truncatula
  Intron number 1 from transcript Medtr7g146050.1 (locus Med tr7g146050) derived from phytozome v7.0 (chr-ID MtChr7; po s 34851058 to 34851572)
tgcctttagggtgctagtgaagaaaacaaaaagtaagtttgcattgaattaaataattttttaacttttcaaaagtcaaaactaatacttttcaccatttcctaatacaacatttattaacaatgagagagaagaggcgtaacccattccgatgaacaataacccgacaagggtttgaacggcgccacctcacacggtggtccttctagtcacctattcttcggatctcttctgttttcgtttctcggtgtttgccagctttgtattcttcagttccgattgtatcacagtttttgggtgtgattgattgttccgattttagtactgttggcttggttttgggttcgatttggagcttgatttgatactgcaatctgttgttgtttgcgcaactattttgggggtttgactgctatttgcgcaattgttatgttctttgctatttgcgcaactgttctgttgtctgctatttttaaattgttgttttctgatttctaggttttgaagatcttgtt

SEQ ID NO: 32949 - DNA, 695 bp, Medicago truncatula
  Intron number 3 from transcript Medtr8g065790.1 (locus Med tr8g065790) derived from phytozome v7.0 (chr-ID MtChr8; po s 12500237 to 12500931 reverse strand)
agaagtatatcactactccgtacctgaagaaagcagtaagcaactataatattatttgtttcattattattactgggaacttctacggtacacttacaaattttagtatactgatactcttgtttcacaaaatttataaaataacgatcatttttatgaaataaaaagctatttgtcaatatttatattttagaaaacatcatttcataaagaaaaatatcatttcattatttataagaatcatattaaaaaatttaaattttgtcatcaaaaaaaatcaatattcattgttatgagcaataaaaattcgtaaaaattaaattttatttcgtcgaagctcttggtaaataaaatttaattactatagttgtcaatgataaaaaataattatttttcttcaaaaaatcaactcatttattattaatttaacgacttggtgtaccgatacacataaatttacactactaggaaaagcaaaattagggatggtaatttgtgatggaaaacataaaattcctcacaaattttttggtcgcaaaatttaataacaaaattagagagggatttcatgttttccttcactaaatttccctcactaatttttatttttttagtagtgttattggatgtaccgtgaaaattgcccttcattgtttaggcatgtgacattactgtgcttaatagtggacagatct

SEQ ID NO: 32950 - DNA, 459 bp, Medicago truncatula
  Intron number 1 from transcript Medtr8g134330.1 (locus Med tr8g134330) derived from phytozome v7.0 (chr-ID MtChr8; po s 32283801 to 32284259)
tggtaagctacttggtttcttctttggattctgaatcatttggtgctagttaatatgaacagggttgtatagcacactagtttgagattatgtaattctgttttggttatttcaaaactattttataaaatagattatcaatttttattttttaaagaaataatatgaatcatacagcactaactggtttcagagtgaaatgttagtatattagatgctaaaactaaacttagatgcattttgttttctttcaaaattgttggtgacaatgttactatcttttttagttgaaaacagtaggaatactaagttctattagttgttagattaatatcttcttctttatctactctttcaacatccttaactctgagattgaaccaattgagctaccaaaccctggtcataactgttagtttctgtattctattttgtatctcagctgctggaactggaagc

SEQ ID NO: 32951 - DNA, 323 bp, Medicago truncatula
  Intron number 2 from transcript Medtr7g104670.1 (locus Med tr7g104670) derived from phytozome v7.0 (chr-ID MtChr7; po s 23808736 to 23809058)
tgggggattgtgggcagaacttgtggataatagaggtatatattgattgtcacttattaaaaaaaatcttcagtaattaactcaccaacactaattttggtgaccgaattagagatatgtttcttacatttcctttgtaaattagtttatctcactaattttgtgccactttttatgtatgagatattacctgctttgagtctttttctcctttactcaaaaagtctcttagatgggttgaggtctaaccaaggacaaattcgtgatttaattatttttattattctaaattaatgtttcaggttttgaagcagggggttcca

SEQ ID NO: 32952 - DNA, 823 bp, Medicago truncatula
  Intron number 1 from transcript Medtr8g138880.1 (locus Med tr8g138880) derived from phytozome v7.0 (chr-ID MtChr8; po s 33752532 to 33753354)
cacttttaggtaaattcaattctttgtttttcattgattttgttgttatttatcttgttatgcatgcttagtttgagttgtcatgcatgtatagaaatttaaagtttagtatgcattgaaggattagcattgcaagatgggtgatactgctaagagaacatgtggatatatcaagttttgattacttaattatttgctcaagacgttgtattgttctgctaagagagacttacgtaatgtattacatacactatatgccttgaaattgatattcgtcgaaatgattgattcttttgacggcttctattggctttattttttgttctctaaattgagatttctcctttctaagtttttagccatttcattgtcttatctttgtacatattctgacttgtaaaatctgtttcccctttattttgaatctgcactagctcttcgatttgaatgtgacatatcattaccagatttctatgttctatctaatgttctgaaagaaaaattgttttcttttcctagcagcacacccctgcatatattacttatatttacatttgaggattatgggatatctattccagcttttctcatgctgggagtttcatttgcaccaattttttgaccatgtgctgttttgttggtgcaatttattattttaaagtcatggtttttcttccattcaatttttattttgttttgtttgttgagattgcctctgtgtgtctttactttggctttacattaaccgatatattatcacctgtcctttccttatgggccctagactttgagcctttgatggattttattgtttactctagga

SEQ ID NO: 32953 - DNA, 969 bp, Medicago truncatula
  Intron number 1 from transcript Medtr8g136710.1 (locus Med tr8g136710) derived from phytozome v7.0 (chr-ID MtChr8; po s 32650330 to 32651298 reverse strand)
aggaggagaacgaggaagaggaacaggtagataactaatatttgtaaatctggtttctggattttttttttctcactcttgttcgttaatttttcttgatttgttcgattcttctttgaatttggttatgatttctaattttgaaaatatgttcgaagttagggtttatttgtttgattttaattttctgatttagaaaagctgatttaagttagggtatcattgccaaaacatgtgaatcttgattttttttcctatggatctgtcatcaatcgagaccagttgtttgtgaattgtgatataggagagttctagattctgttcatatgtattttttttcttctggaatttcatatgtttgatttgtgtaatttgtttatgtttatgtttatagatttcaatttagttattttttgctaatatatagatttcaatttttgtgagaggttagagcgagtttataaatatgtaatcgatttttattgttatttgatatttctggcaatagaatttcttttgactcaaatttagaatttgacttttccatgtctatgaagaaaaattattcagtgtcaattcactttacctattttgtaattttaagtaaatcctattacaatcagtccacttttaactcaaattacttttacaaaatcagttattatcaagtacacacacactatttgtttgatcttttataattccttttttaaaattttgttttgcacattggttggttcttatttcctctatgatgctaacagttgctaatattgggatagtttggattacttgattttggaagtttagttatgctataagattatccaacacatatctgaatcaattttgttgcttaactattatatcatcaagttactgtaaattatatttcaatttttctgtatgtccttcttacacaaactttttttaggaggatttgggaacagagtaccttgtccgtcctct

SEQ ID NO: 32954 - DNA, 922 bp, Medicago truncatula
  Intron number 1 from transcript Medtr7g092320.1 (locus Med tr7g092320) derived from phytozome v7.0 (chr-ID MtChr7; po s 20290959 to 20291880)
ccacagcaacataggagccgttcacaaacaaggtttaatattaatattcttttctgcctaaataaactctcatatttacatatcctgtactactttttggttcaattttttgctactcttatttgatacgttacctctccaacaagtaatcactattatgttttttaagattgatttgcttggcttgtttgtttatgtatataacaaatttctgatgttagcttgatattcataagtctgaagcttttctttacgtccataagtatgaagctaatgatacttaattatatatttttcttctaatcgtttctaattagaatatttgatcccgagtagcagtggcagatccataccttaccctaggagttcaaacttttgagttcttggacgttttggactagaggtggaaaaataaaacttaggagttcaaaatacgaaatatgtaaaggtgtttttttaagttttagggagtttagttgaatgtatcatcaatgtatcctcatggcttatgccatttgaatcctctatgagacaaattctcgagtcaaaagtgggatatacaatacaagtacttattaatgagtccgtcgatttcaagggtcacttaccgattcacgcatcaagcccaaagagtgtcgttgggcgtgacgactgattcacgcaccaaagcccaaagagtgttgggcgtgacggggtgtattaggaaaaactcatgtcccacatcggatagataagactcttgataataatttatatagaggagacgatcctcacctaatgaattggtttttaaggatgagttaggcatccaatttcattacttatttcctatttcctatgaacaatgtcattagttgcagtttcatgtgctactggttgaaatgttcgttttttctgttgtcaaccttaggacccaatctga

SEQ ID NO: 32955 - DNA, 812 bp, Medicago truncatula
  Intron number 1 from transcript Medtr7g143080.1 (locus Med tr7g143080) derived from phytozome v7.0 (chr-ID MtChr7; po s 34266636 to 34267447 reverse strand)
ccatcattctaggacccgaagctaccaccaaaagtgtaagtattatttttgtttgtttatacgtattatttatttgtcgaaggaacgagatttgttgatgtattgatgttcttattatctattcttgtttttttcctccattgtttttgaccaataagaagagagaaaaacaaaattgtcactaaagatgtcatcaaatagatgtacaaatatcatcactcattaattaactattatcaaatgaacataggtaagggtttaactttaagagaatcttttgtcaaaaaaaaaagctttaagagaatctttttgttgcactagttttttttgttacactttggtgatacctttttttagacgatatgtaatacactactctcttttttaatacagttatcttatcactttttatgaaaaaaatagtgatcttttaaatattatataaattacaatgtactttaaatagtgtgtactttttccaatatgtgactatcattgattttgtattcaataatcatttttaattttcagattatctctcatttatttttcgagttaaatatctattttcatttctaaaaatttaacatatacttactttgatctattataatagtctgattttcttttttaattcatgtactaacatcaattgtgtattttagactctcatccaaaatttaaaaaaatatatatattcttataatttttaagagctacaaagaaaaaaaattgaaattcaaagatgtattatgataattcaattccttatcattgagctttttcattttcattttttcaggagaacaata

SEQ ID NO: 32956 - DNA, 848 bp, Medicago truncatula
  Intron number 1 from transcript Medtr8g144700.1 (locus Med tr8g144700) derived from phytozome v7.0 (chr-ID MtChr8; po s 35035245 to 35036092)
cagggttagtaacgcttcttgttaattttgttttatttcagtttataataacaattttgattcttcatgctctgaagccccgatactccaaaaatggtgaagtatcgtatctgataccgatacgccccggtacgggtatgggaaaagtatcgggcaattaatatttattttttttgaaaaacaatgaccgatacgtgtcggatacgtcccgatacgcgtatcggacaattaatatttattttttgaaggaaaaaaatgaccgatacgtgtcggatacgactaacttgtactccgacacaacttacttatactccgacacctatcaagtctggcagcgctatcaaaatcatattgtctcttctaacctaaaaaaataggttttctcgtcaccacatagcaatagctattctctcttctaaccattaccactgattgaattctactctgtttctcttctctctaatgttatgtttcttctgctgtttgttttcgatataaattagtgttaactattaagtagtcaacattagacaaagatgttctttttttatagtgttctctttggatggtactaatgatgtttagctatattctatctaatttgtgcagaaaaaacatgtaattgtcacttgttttgatcattttcattaatgtgaatgtttgtttatcatcatttttagttatgtttatacattgtgcacttatactattaattttaaattttccggtatcgccgtatcggtatcgtaccgtatcgtatcagtatcgtgtcaggtatcggtgcttcataatgatgccaatggtttaattcaggtatagcggagactggtcaaggattggagtgataa

SEQ ID NO: 32957 - DNA, 458 bp, Medicago truncatula
  Intron number 1 from transcript Medtr8g096440.1 (locus Med tr8g096440) derived from phytozome v7.0 (chr-ID MtChr8; po s 21179403 to 21179860)
gtggtctgttatgtgaatttaatcttgctggtctgtttttgtaacttttgttgaggaaggaaatgtgaatggatggtgatgttactgtgaagaagaacagttagagagagaaagaggaaactacgctgaaaggaggaggaagaagagagaaaattacaaaattgcactttcaattaaagttgaaatgacataattacccatagtgtctgtattgtgtttaaaaaaatgtgttcagttattatttctgaaaaaaaaaatcaactttttatagaaaaagaagagttacgaacttcacttttttttattcttaatgagcagtacaacgtgatacataattacatatcgtttttttatttttgattcattcacccaacattgtttgttattcatattaatttaaagggctatttttgtcattttaagagaaacttgagctcttcttacctttccttccaatc

SEQ ID NO: 32958 - DNA, 887 bp, Medicago truncatula
  Intron number 1 from transcript Medtr7g111440.1 (locus Med tr7g111440) derived from phytozome v7.0 (chr-ID MtChr7; po s 26184573 to 26185459 reverse strand)
ttaatcatctccattgctacttctttttcttcaaggtacttcttaacattttagttttttgtaacataaaaatctctcctttatttatgtcttcttctcacttttcattttcatgatttgggttgtgattagaatttcctagtttctactttcattttgatttaagtacattttttttaggtattaattctggaattttttttttttaaatgagaaaaattatatatttgttagtattaagagtgtgtaagtgttttgattaagcgatgaaggaaaaaaattattggggtgtgtttggtagctagaaaaagttgaatcaagttcaagtgaagtactaaaaagtaaatcaaagtttaaggtactattagaatgcagaaagcatgaaacttgtaaacgacattctgtcggcaacaaccctcaaacattctttttctagtttcagactattgttctgtcacttttatgaatgtttttatattttttaatttttattttattttttgttcttaagagagtgaaaatcggatctgaaagtttcaagtaaaaaaaagctacttagattaattaattaattaaggttaattaatctccacattctcgataatatgagagatctatgtgtacatccactagatatgcattaattgcctcttttgagttactaccttatcttcttagtttgtgtattttaaagtttttttgcgaatattaaggtaactcgatttgctatactgtaacggctatttgactgtgtttcctcttttttaggccccttggaacggttcatttttaattcaaaaacacattttcaagctccaaccaccagtgaagaaaaaaaaaattcaatatttgagattgttgcttctgtgattctttgaaacaacaag

SEQ ID NO: 32959 - DNA, 470 bp, Medicago truncatula
  Intron number 1 from transcript Medtr8g045000.1 (locus Med tr8g045000) derived from phytozome v7.0 (chr-ID MtChr8; po s 10221233 to 10221702)
ttgctgcagttgttgtttgctagttgttgttattagtatgtcttttatttatttttgatgtgatgttgtattttgatcatgtggattaaaggttcaatgatgatgctagtatgtgggaaaatgattattgcatttctagatcttttttatgtttgaaatactaggattgaaaccttgtattaatcttcatgattttatctaatgaaatgatgtttatgtttgttttaaaatctcaatttgcatatgagtattgaatgcataaattgagggggagttatttaataaaattgtcaaactcaaaaacaaacaaatattcttgtgatactctcaaataacatataaatgtttgtcatcatcaaaaaacgggagattgttgagacaaaatctttatttgatgtttcaaagattacaaacatgttatctttatttaatcttatcatctactaatttgtttggcgaggatttatttc

SEQ ID NO: 32960 - DNA, 398 bp, Medicago truncatula
  Intron number 1 from transcript Medtr7g104350.1 (locus Med tr7g104350) derived from phytozome v7.0 (chr-ID MtChr7; po s 23619893 to 23620290)
aaaagattttatctccagaagagcagcagatcaaggtactagacagtaattttgccctattttatgaacctgaagtgttaaatttgatgtttattgtatgttctaaccctgcattttctatgatgttcttccatccaaaagtttgcatgtggtagaattagttgttaggaaatgaatacatttctcttaaattccccaacctgccaaaagtcaggttcgatgaaattaggacaattagttatcttcctaattggatgagcaagaaaactactctacagctaggaggttgttttagggtagagatgccattttctggtggtattttgaagtaacaaactgtttggttttctttgttcttttcagatcgcagaagtcggaaggataattggtccaattgc

SEQ ID NO: 32961 - DNA, 474 bp, Medicago truncatula
  Intron number 2 from transcript Medtr7g104350.1 (locus Med tr7g104350) derived from phytozome v7.0 (chr-ID MtChr7; po s 23620432 to 23620905)
ggtgtgaatccaatattactttttatctgttttataaaaaataaaaataaaaaacaaaagaatatatatgagagttcgatttggaaaaatatgaagtacagaaatttctgaatatactagtcctctaagttcgttttggtatggtttgatgagtaaaaaacttgggaacttagataaatatagcttaatcccaatgaagaacaattaaaacaaagctgttagctttagtttacaaatgtactcgatgtaactaggacagatctatcactttacaatgttaattttgattgaaaacaagtaaatttggtcacttcaacactgttaacactctctgtccgattttattctgtttatcagatttcaggataacattcctgaccataatcgggtggttttaaataatgatgagttacttactgttaactaggtaagtgcaactaaaggaccattatctatttgctttatacaatcagg

SEQ ID NO: 32962 - DNA, 460 bp, Medicago truncatula
  Intron number 1 from transcript Medtr8g125210.1 (locus Med tr8g125210) derived from phytozome v7.0 (chr-ID MtChr8; po s 29124947 to 29125406)
aagaaaaaacgcctcggagaaaaagttcgcaatatgtatgtaaattctatcaccatatttcaattcgttgatcctatttctacaccaatttttagctcctttagatgaatcaatagtttggatcggttaagttatgaattatcaaaaacaaggcttaaatttaaggtttataaagcattgattattgacaaattattatgcaacttcaatccgtgaattttgtttcatttttaaatctccatacattgaaaaatcaacatagaaattttgttgaagaagggtgtaagaatttccataacctttgtattaggctaagtactaactcaacctgctgaaaatataagcaaatcttggtcaaagaaagttgttccaaattttgagtaatattttgttcttatttgaaattaaataaatacttatcactcttgtttttctgttactgttgtttgtaggtttcacc

SEQ ID NO: 32963 - DNA, 973 bp, Medicago truncatula
  Intron number 1 from transcript Medtr7g121120.1 (locus Med tr7g121120) derived from phytozome v7.0 (chr-ID MtChr7; po s 28436449 to 28437421 reverse strand)
gttttctttttcctttccgtaccgcgtttgtttcatataagggttttgtagttgtagattctagtttgttcatgtgtttactagagtttctaaattactacgtgcttctcattttgtctgtgtgtgtgtgtgtgtatgttttaagatttccttgtcaatgggatctctgagctgatttttactcattgcattgttaaacttagttttttcaattgtttcatttttgttaatttgttgcttatacgtgtatagaaatagttgattgccaaaataagtatatacaacagtatcataattttgacaattgatgataactgtcataattttggcccaatggaataagtttttatcttttggcatgatcattgtctaaatttggttctgtaaattttggtagtaagcttcttattttagtgtcatttatgagctgatttttgacatgttctgcgcccttttagtgtatgtgtgtgtaactttaggttggagatcatgtgagggggaagcgtgtggcatgttttttgaaattgtaatagacgggaaaagggtaaagtcagggattagaaaagtaattgggattggaaaagagggagaagagaataaatttgagaatattggattccaacttgtgaaaatttcttcttcagaaaacatgaaaattaggcaaccatatggattagggattagaagagaagaggggaacagggaaggttgggaatcagaagaaggaaaatttttctgcaaacccttactctctatgtgaaagtgaaatacagtttgagggtgggagagacagtgagaatgggcgaggagtggtacacataggatattttgtgtatgtggcagaaataagattatgtgtcaagtagacaatttgagggtctaaattataagggtttcctaccgcgtaagctatttataagggttttgtagttgtagattctagtttgttcttgtgtttactagagattctagt

SEQ ID NO: 32964 - DNA, 642 bp, Medicago truncatula
  Intron number 1 from transcript Medtr7g133390.1 (locus Med tr7g133390) derived from phytozome v7.0 (chr-ID MtChr7; po s 31186420 to 31187061)
ggaggtacactctacaagacactatgctattttcgtagtctgttatttctacacgtcatcaatcatttatttctgttattgtttctttacacgtggaatttgtgagtcggttagtttcttacacgtggacacttgagatccatacatatgacgtgtcacttgtatttctagttctagataaaaataccaaaacttaattttacctaataaaaataataactttgactaagtgaggaatttcgaagggactaataacttgtgttctaagtaggtaaattattttggacttagatctatggtgatgttgttgaccatggcatgggttgatactacaatttttctaattaaaaaaaaaaagatataataatttttcttctcaaaactgacttgcgttggtttgatgcattgctgacttgggaccttacggtgtgtatctggtttgattcttaaacccaccaattgtttgatttttttggcttcttaagagaaaatggaatcaagttagtgtatcatttataatgagttaaaattaaccaagagactaatgattcataaaataaatctgtgcaccataaaactaggaaggaaagtgtacttatttgagctatatttattatgttacagtttgtggaatacagcaag

SEQ ID NO: 32965 - DNA, 756 bp, Medicago truncatula
  Intron number 2 from transcript Medtr8g089160.1 (locus Med tr8g089160) derived from phytozome v7.0 (chr-ID MtChr8; po s 19088536 to 19089291 reverse strand)
cttcatttgcgatcatctttttcagcatttaaaacgtagtaattcgttcgaaatttaatgtttttttttttttttttgtgaatttatgtttttgttgtgtgttagtttaatgggttgatgttgattgttttgaagtgtgtatggatttgattaattcactttaaagggggttaagtaactgtagatgacaaaatataaactgttgacgtgatgttgcttacttgtagggatttgactcctctagactgagttgataactacaaagcactgacacacacctgacatgtcgacgtcgctagtaatttaagaaaatgacataattgaatgaaatcacatgtgtcggtgtcgtgtacaaccttttgttggacactgggcacgtcttcgatcataagtgtcggtgctacataagtagagtgaaatgaaaaagaaagaaaaaatcattgtagcatatgtaatatcaatcattgatttatcatcgatgataaatattgtttcactttacactctgaagtaagttgctcagtttagatgagttagatcctagttgtagttacttgaaaaatcattgttatagtttgttgaaatatactaccttgattttcttatcacatgtttaaagtgaaataatcattttagaggagttggttacattcatgtccaatggttgattctcatttcatgttgctttcgaacattatttctttgatgtgttttttttttggttttatttaaggatttgcgacggagcataagtct

SEQ ID NO: 32966 - DNA, 657 bp, Medicago truncatula
  Intron number 2 from transcript Medtr8g128820.1 (locus Med tr8g128820) derived from phytozome v7.0 (chr-ID MtChr8; po s 30245237 to 30245893)
caatcgcgacttcttctagaacctaccgtgttgtggtactttcttcttcttcttcttcaattctattctcatttcgtcttcgtttttgtttgctcagaaaaacaatccgagaaaatgctcaatcattttattgtatgtttcgaatttctaacgagtaacgctgttcacaacgatcttggatattcaatttgtacattgcttcgcgcatttatgaatttgatttgaagatgatattcaattcttcgtgattgtgttaattacgtattagaatgccattccctagggtttgtacatgatataattatataaattaccagaaatgcatcttcatttttttattaaatttcattttctattgcattcattttttattgtattgttagcatcttcatttttttaatgaatttaaaaaatatttacggaataacttatattactgattttggaattatttgattaagatacggtttacctcatacgttgatattactgattttgtattatagctggtaatgataaatcagtgattaagtattgatgtgaaaatcctgcttatgttctgattttgaattattatggttgtatatgcttatactattgacttatgattattgtcttacttaaaattgttgaatgcatttgcagccatggatagtg

SEQ ID NO: 32967 - DNA, 685 bp, Medicago truncatula
  Intron number 1 from transcript Medtr8g074020.1 (locus Med tr8g074020) derived from phytozome v7.0 (chr-ID MtChr8; po s 14631553 to 14632237)
ctaatattgctctcaatacaccctctctcgttcaggtcattttttctctcgacttttttttaccattcctgttatatttctgtttttatttatttatttattttgttttaattttaatcaaccctgtatgttctaaatttgattttttgaagtgattaattagctttagttaaggttgaattgatcaggagaacccatcttgaactttgttggaacaaacttttttttattggtcagtatgctagcgacaaacaccacttgaaactgacaactacaatgtcttggttcaaacccggataaaggtgtccagcctagcaatatcaacattcccagttgagctaggcattacggacttcttagtcggactttacttagcaacaaagttatagttttattttccttattgtattaatttgtttatgatgtcaataaaataaaaataaaataaatccaaccatagtttagagttgtgacttgtgtcaagaacgaaattgggtaagtttagattataatttggaatagaacccgaaaagtgataaatgattttctaatttttgttttcattcttctattcggggtgctgactgccgaggcttattatgatttgcgtattattgatgattaccgtttcttgttctgtgtgtgtacaggcttcttctataccatctgtgttgtcagggaagga

SEQ ID NO: 32968 - DNA, 868 bp, Medicago truncatula
  Intron number 1 from transcript Medtr8g021030.1 (locus Med tr8g021030) derived from phytozome v7.0 (chr-ID MtChr8; po s 3760277 to 3761144 reverse strand)
ggacactcatactcacaagtaagtaaccagttttagatgaattttttaagatattcaattcaaccaccatgtgttaattcctaagcataatatctctcgtgtttttgatgaatttaatctacttattattttttaagtaatagtgtcaaaataaaaagcttttctcttcatatagttatgagaaaattatttgttaaaaagtggagtatattttttttttaatcaaaaaaagaagaggaagtgaattatatatatcatcatcatcatgttcttaatgtctactaatatatgaaggcaaaaggagcgactttattcttgaatactagtacataaatgaaagtagttcaagaataacaaaaaggataatcaaataaaagggaagaaaataaacaaattaaagaggtgatttcagaccaaaaattgactataaatcaaccatggatgcattagttctttttttcatatggaaaattttaacaagtgtcaccgatcactctttagtagacatggtaacaaaatccgccccgccccgaatttaacgggaaaagccgatttaattgggtacggatgtgggggaaatctggatttttagtacggggtcgtgggctcgggatgcttatacccgccccgcacccgttttttaaaatttactttattaaattttataatcttataattttcataagaaccaacctattttaatattttattactctttaaaaacatgtttattataattattttgctcttttgaaaaaaaattattagatctttaattattaatataattattgttttttgttgctatgaacaaaatgaaaaaatatgtattgttttaaatattttataaaaaatagagttttcgcgg

SEQ ID NO: 32969 - DNA, 281 bp, Medicago truncatula
  Intron number 2 from transcript Medtr7g107250.1 (locus Med tr7g107250) derived from phytozome v7.0 (chr-ID MtChr7; po s 25038254 to 25038534 reverse strand)
ctggaagagtggctcgttttaagtagctagaagaatgatagtagcttaaagttgtattttgatgttagtggtttgaacataaaatcactttttgatgttatttacattattgggatgttattataatttactttaaaaaattgtttttttctttctatttttatccggggggccaatttataagattaaaacggggccaacgaattgtttaaaacggccctggtaacatgtgtgttgacttcttagctaagcttggaacaaggtctacgaataatctattg

SEQ ID NO: 32970 - DNA, 425 bp, Medicago truncatula
  Intron number 1 from transcript Medtr7g107250.1 (locus Med tr7g107250) derived from phytozome v7.0 (chr-ID MtChr7; po s 25038791 to 25039215 reverse strand)
ccacttctctccttctttccaccgccaccagaaaggtaaaaactaaaaccctttttattttttattgaattttctttgttaaattcatgaaatttgaatgttatttcgtattatgtttaccatctttgtttggaaattgaaattgaaaaacactaaagagcatagatttgaaccaatttcaacctattgaaaaagagtacactttgaacatgggttatcaaagccaacatatttgtttttaatcatataaactaatgggttcaatttttttaataacactagtacttgcctcaaaaggaagaatgaattaatggttgaattttttaatgccacttgaatttcttattatcacttaaacatgtttttgattgtttaatgttgaaattccaggttttttttttagaacaaaaagctatagaacttgg

SEQ ID NO: 32971 - DNA, 867 bp, Medicago truncatula
  Intron number 1 from transcript Medtr8g139860.1 (locus Med tr8g139860) derived from phytozome v7.0 (chr-ID MtChr8; po s 34230912 to 34231778)
ttcttaagctcaacacttcacaatttcaattggaggtatatatatcatgaaacaaacctgcaaatcttgttaagctacagtactcactcaccatcctttctttttctcttttcattagttaattagtttaatgttaattatctactcctaatctcgattacttctttgaccggtaaactttaatttgactcattttatttttttaaaaataaacaatatccatattttcttcatagctatcaatattaaaatatgttttgtcaaaaatcacttatattaaacaaacatgtcaataaacataaatgaatttgatctataatataaaccaacaaatcaatttttattgatccattttcgattttatagaaaggaccatggaaaagatccaaatattaatatgaaaggaagataacacagtccgttttttttagaataaactatttatttagtctttgaactatcttcatatctccaatctagtctcttaattgtgtaaatatgataaaaataattaacttatatgacaaaattttatttatactttaaggattacattgataaatttttattaataggaaaagtgaaaaacccgttcgaaataatgtattcgatttatatatagtatacaatataaaagatataatataaaataataacatttttatatatgcaaatttatttaggggtataattgaaagtaaaaaatcatcccaaaaccatatatagtgtagatataactaattaatttgcatattttttgaagcaaaagaaaaatagtacgatttccccggaaaaaatttctacttaagttgatttggtccttaatctgcaggcagtgaccatcagtgcaaatagctggactagtgc

SEQ ID NO: 32972 - DNA, 904 bp, Medicago truncatula
  Intron number 3 from transcript Medtr8g105380.1 (locus Med tr8g105380) derived from phytozome v7.0 (chr-ID MtChr8; po s 23265239 to 23266142)
gccctgtattaggattcactaattcagactacataggagaattggatttgaaacaaaggaaatagtaaaaataaacataaaagaacacaatttcaggattagatactcgtgtgccgtattttcttgcaccctgattttgtaagggttgagtctaactcgacacaaattttaaattggtacgaaagtgaagggttgaattaagttcaaaccaaattctaagactcacctaggttataaatctcatggcttaacctttccttacaattttggagtgaatcttctcccccaaggtagagtaaaagtattatccaattagtttgtttaactagtcgactaaaataataagagtctaacatgtgtctaagcacacacaaaaaatatacacggagctcaactttgagagcgttaagagaataatatacggaaaatgctatttctctaaaaaaatagcatcaaaaattattcaagacacacagttgataagttttaattgcatgatttatttgttcatttcatatgttatttttctaaagatatagcattgctcataatatactagcaagtagcaatacttttttttttagagaagcaagtagcaatacttgtatggtcacaaatacaaatgttttgaatttagtcacactcataaaaccatgaaaagtaaagataaaataattgacttttattagtattgttgatatttcctcttctacttttatttattagcgagtgtgcataaatccaaaacattttttttctgtggcctgggtatagaagtgttgctcttgatagttttatctttatctttattgaaagttacttataaataaatcttatttacatgaaaatattttgtcaaatgttttatgcaggttcccttctatacgtagtggggactacttga

SEQ ID NO: 32973 - DNA, 385 bp, Medicago truncatula
  Intron number 2 from transcript Medtr7g134720.1 (locus Med tr7g134720) derived from phytozome v7.0 (chr-ID MtChr7; po s 31895771 to 31896155)
aaatcaaatttgtatgtttttggtggttttttcacccataattgtattgattatgtatatgtatgctagtggagaatatttgagattttataattgattatagtgatttgttgctcttgcaacatctactttttctctttaaatttggtcaaatatatgtgatttctccttctttttttccttttttttttttatcttcctttctattttgctttgtttctttggtgtatggggcttgtttccgagggtttcataaattaatttacactttgctgttaattttgtttttacccttattgcattaattttctcttttaatagaggacacattagattttggattgattacatcaacttgttgcttttgcagccactactgcaaaat

SEQ ID NO: 32974 - DNA, 556 bp, Medicago truncatula
  Intron number 2 from transcript Medtr8g044710.1 (locus Med tr8g044710) derived from phytozome v7.0 (chr-ID MtChr8; po s 10090879 to 10091434 reverse strand)
aagtacctataagtagtgtttcccctagatagttgattcttttttaaaaacaaaatcataaatattttactgtgaacaagcctgaattgtacaaatcaatgcaaaagattatggaagaaaattgatgacaaattttgtttcttcaaattgaaaattaataatggaaaaagtatattatctctccaccaaccatcattggataatgcactttctgagatttatactaaggttggattctgataggactagaagatagatgcaattatgttatttactcattcagttatttcctccctgatgtaatagctatataatgttgtatttgtgagccaatagcttatgatgaatgataagaatatttcttctctctcaaattttctttttctttttttgagtttacacttactcgaagaatacagtttctgtcttatgttctgagcagcaaggtgtaacagattccacttcgtttttcatagtgctttctgaacttttactataatatttcattttgtataatttagagaaaaagctggattctgaactttgaagctaaagt

SEQ ID NO: 32975 - DNA, 380 bp, Medicago truncatula
  Intron number 1 from transcript Medtr7g094310.1 (locus Med tr7g094310) derived from phytozome v7.0 (chr-ID MtChr7; po s 21350215 to 21350594 reverse strand)
gaaaagagagaggggaagaggttactttcaccatctcagaaaatttcagaacacttgaagtccaattcatatttttctaatgattttgatttctgaaaagtagataagaattcaattatatagttttttctcttcttcaaattggaatataatatttaacctttatcttaattcacttcactcgcaagcatgggtatgatgaaaataaataaatagtttctttttatttggaagaaaataagttcattttgtgctacagatgctttagtggagcttgcaacaaaataccaaaatttcatgaaaaaaattccactattgtatggccaaccattgcattatcttacatacatgctttgtaagcaataatgggatcaatcaag

SEQ ID NO: 32976 - DNA, 512 bp, Medicago truncatula
  Intron number 4 from transcript Medtr7g105380.1 (locus Med tr7g105380) derived from phytozome v7.0 (chr-ID MtChr7; po s 24137939 to 24138450 reverse strand)
aagattcaggtacttaatttgttatgatggtgattagtgatagttacatatatttgtgattagttttggaaaatgcaaaatttttctgaattgcttttgcataaaaccaacgaggatttttaaagagcagttatagtggtgctttactgttagagtgtagcacaatttgaacacgtcgttattgttcttcgacatgctatttagtgcaaagtgttgtcaactagcggcactatagcatagcagaaactgaacaaactactattttctatcattggcgatttacagcattggatccaacaaaagcatgtgtggtttatgccaattgctgtaaatgtttcaaaaccatcctcaccatgtatgtttatcagtctgattgtttttttaatctctttgtgcatgttcggtgcggattttttccgtgccaaataacaatgctcttttgttattgttattgttagttatggatagtgtttgctttgattttagcacttatagtttcacactttaaatag

SEQ ID NO: 32977 - DNA, 630 bp, Medicago truncatula
  Intron number 2 from transcript Medtr8g125150.1 (locus Med tr8g125150) derived from phytozome v7.0 (chr-ID MtChr8; po s 29102212 to 29102841 reverse strand)
tcttccgggagtagttttggccattgctcgaccaggtgaagtgaatttcatttatagtaatgtaatcgctttcttaaccaaagtgttattgttagatggagtcatttttgatgtgtgatttaggccctgtttatatagcataagcgcttatcatataaacatttggataaacagcttatttgcagcttttagtacaagcacttatcatgatacttgcttatgtataagctgtttctatagcagaagataaaataaagttaaattgctttcgtatagcctgtaatttgttttcataaaccatgttggagaacttatgaaaataagctgaaaattgcttgtgaataatgtcataagttatcttcataagttttcgcaagcgatcacacaaaagttatgttagtagataaattcaaataagccagtccaaatagaataaagtcaatctgttttcatataagctataaaatgttttcataagctatttgttagcttatgaaaataagctgaaaacaaattatgtacatgttacaagctattttataatctcttttaaaaaatctcttaagtgcttatgtttgttgataagatcgataaactaatcaaaactggcccttaatgctatagattggg

SEQ ID NO: 32978 - DNA, 378 bp, Medicago truncatula
  Intron number 1 from transcript Medtr8g133190.1 (locus Med tr8g133190) derived from phytozome v7.0 (chr-ID MtChr8; po s 31634999 to 31635376)
acgccaccgagccttccccttcttctctctcacttgtaagttctttttctctttcatttcactgagtaaatatcttcataaaaatcaatttctttttttagaaattttcttctgaaattcaaaacggaaagaaaatatcaagaaaatttaataaacaaaaagattttaggaagcgtagatttgaaaatttctgtttttagagcttctagcttaatattaggttcattcgctcttttcaatgtagctatattattctttatttaaaatgtttcctagtttgtatcaatgattttatatttcgaaagaaagtgttcaaatttactagtattgattaattaatgatgtgttattgatctgcagaaatttagggtgagcagg

SEQ ID NO: 32979 - DNA, 726 bp, Medicago truncatula
  Intron number 2 from transcript Medtr8g116510.1 (locus Med tr8g116510) derived from phytozome v7.0 (chr-ID MtChr8; po s 26420418 to 26421143 reverse strand)
gtttgctaaacctaaggttattcctcactctccatcttttgtttgttatactttgttcctgcatttctgtgtggttcaaaaagcagcttaattaagcacttattgcgtaatcgctttgcatataactgtttgtgtataaattatttgaattacaaaagatgaaatcaagttgtaacttgtaagctgttttcataagctatcatagagatagagggtttatggaaataagctgataacaacttgtgggcatgtaataagttgttccaaattccataagctctcccaaacattctcacgattgcttatgacagtagataaccttgaataatccaattcaaacaggaggggtagatattttatttgatgagaagagtgaaaaggtgggggtataaccctttttttttgtttggttcacgaagagtgatgggattttaatggagagggttctgttgtagcaaaaaattatccttctttgactatatttggtggaaattaacattttttatgtcactttaatcataccatatcatctccttcattaaagaaaactcttactactttattctttttgtggacttggatcggcagtatagctattaagagtttgcatacaaaaacctcgttgtgttaccctccttcattctgtttccctcaaatttgaaggtttattttttactttttatatttacagaaagtaagcgctgtcaattgtgctagaagaggttg

SEQ ID NO: 32980 - DNA, 686 bp, Medicago truncatula
  Intron number 2 from transcript Medtr8g025050.1 (locus Med tr8g025050) derived from phytozome v7.0 (chr-ID MtChr8; po s 4857769 to 4858454 reverse strand)
tgtttggggctggagttgcggatttagttgaaggggtgaggaattttttcggtgttaataattgagtgtgatttaagattaagatgatggatggtatttgatccattgatttgcatgttttttttttgtcgacatttgaatcagtctttgcaattgagtttgttactgaattttatgctttagatctagtgttaattacttgatgtcttccaccaaatgttcggtgtacatctcttgttagcttcccatcattgagtgatttttggaattgttgttgtcgtgtctctacattgactattgcgctgttttcttcttgatgtttgtagttattattgtattgaagtaatgacaattcaaatccattaggtttatgcaataagctttgttcacttagctttttatgatagatttgatgctttaatatgttgtgtgtttgtcaagtgctgtcattttatttttattcaatttttgtattgctagtgatttggcttttttgtatggatgtataattattaaactgattaatttgtattgtagttgccatttttgtaggaacgtaatgtatattacaaattaatgtattgacttatttttttgaactttttatagtttgttgcttcaagaatctaactgattggtatgctatttcaggtttctaaactgagtcacttaagcaagctggctcg

SEQ ID NO: 32981 - DNA, 766 bp, Medicago truncatula
  Intron number 3 from transcript Medtr8g103000.1 (locus Med tr8g103000) derived from phytozome v7.0 (chr-ID MtChr8; po s 22849548 to 22850313 reverse strand)
atactttatccaaacatctctttcactgtaatgctctatatccctcttattcaactacttttgcactcattaaagctaaatttatttctataatatttggaccagcatttgtctctcattaatgtcattcgttttggtggtagctgtattcttttctttaaaggcaatgtggcatgtctctggctctatatggataaacaacttaattaagtgcttatatcataaccacttaatatataagtgcttatttataagctgtttctataacaaaagataaaatagtcaaactttttcttatgtaagctataagctgttttggaaagcttatataccggtataaagtcaaatcaaaacatgcctttaaattttgccatatttatgtttctgttgctggaggcatgaagaatattaggtagtaatacacactttctgagaaaaatggtacctttagctgttggcaagtttaagctatacaagtcaaggttttaaggctacattttgttgaagcgaaaatggacattttgaaaatgagaaagtgcaaattggtaatgtgtttgaagtctgaacacaataaaattttgatttattgtcagcttcctcctgcagtcaacaactccttgtactactactagattgacttaataagtaaccaatagccaagtagcatttattttctttgtcaatggtagttttgatgatacatttatgtaagcttataattgatgaattctgatctgtcatttgtaggggacaaacaaccattacc

SEQ ID NO: 32982 - DNA, 919 bp, Medicago truncatula
  Intron number 3 from transcript Medtr7g124460.1 (locus Med tr7g124460) derived from phytozome v7.0 (chr-ID MtChr7; po s 29226646 to 29227564 reverse strand)
taaggtaaagaagatattttaataatattattttcaatttcattatttttaattttaatctctatgatgctcttacaatattgtccaatgtccatatcattatcaacatgcacatcattcacaactcaattatactcatcatatgggtataacacccaccacccatacatcatcacctacatttgaaagcccatctccatcattcaacatcataattatattcccaccgcttttaattattcatcatgccttcataattactacatttagcattcacatttcgattaattactcaaattcatgtttttaatcttataatattatgacttttataaacatggggttaatggaaatgcacctacattttgtgttttctttttctttctttctttagcttcctaatcgacacattgagtcattcaacaatccaataaattttttatattatcatccaatcaaatcttatagtttctgatctaagtattagttaaattattttgaaaaatgacattatgatgtggataatatgtaatatttgattggatgaaagcgtaaaaatgatttacaaagtccgtctattaatccgtttaatttatattgtcaacaaatcataactattcatatacgtgactttagaagtagttatgattatctctaaaaaaaaaaaaaaaaaaaaaagtagttatgattaaagttacacaatttttacataattatcattgaccgttttaaaagctgaagcttttacaccaacgtggtatataaattaaattcactcacacacatagatatatagtattgtgctgcattgacaggggaacatggcatgtcatatacaaataattggatgatgcagtttattaattatttatttaatttgacgttgaataatttaattagcttgaaagaataaagaaaa

SEQ ID NO: 32983 - DNA, 709 bp, Medicago truncatula
  Intron number 1 from transcript Medtr7g124420.1 (locus Med tr7g124420) derived from phytozome v7.0 (chr-ID MtChr7; po s 29203831 to 29204539 reverse strand)
gatttttccaggtaggaaattggtaaacaactgtcacaaataatgtttaaactataatgtctgaggtgtcaatgaaaatgatagcatattatattatatctctcattgtcttttctattaacaggactttgatgtcttcaactgaaattcaactttttcttaccctaacaagaatcaaatactatatcccttgtggatttggattgtgtgttgtcgcaatttcatacatcggcattagtccgaacaagatttaatgatccaaattttaatatagattttgattccaaaggtcgttattgtagcaatgagattgtgactgcacacaaacctaaatccatcacttgtctttatgttgtccaatgtggatcttggttcttagaaaaatttcattttgaggcaaagatgagaaataaaataatacaaattcgtatttaattatgtgactaataattcaattttttttttctttctaatttattagtctaacaataaattgaatagatgggacataatttattttttttaaaataaaaaaatatagcatatgatgcctaatgcatgttgagctattttatctttaatctacgtgagattttgtttttgcaataagctatacaaaaaaaaaaaaacatattttcaatatgatctaaattggatgttattgtcttgggacttggattgatgcagctagtaaatcacaacatatcag

SEQ ID NO: 32984 - DNA, 834 bp, Medicago truncatula
  Intron number 5 from transcript Medtr7g116700.2 (locus Med tr7g116700) derived from phytozome v7.0 (chr-ID MtChr7; po s 27067988 to 27068821 reverse strand)
caggacagctagatatagaccagagtcatctgaaggtacataagatatggattgtattatgcatgccttttgtatggacaaatttttgcatatcagttaggacttaggatgaggtgaccactggttattaaataacttattaaagtatgaactatgacctgtaaagtttactggagaattgattttattaagcagatggctcttgtcaaatttcctgttatttggaaacttacttcgttccatatcaagaaacttggaatttatgtcaagtatgcttttcgaacataagaacctatttaaaaaagtatttgaatggtgcaagtgcgtgaagtcttaaattgttgtctatggctcttagccctttgtatacaatattttggttatctgttttcttatgacattgtttcctttctttgtcccttcaccatcctcatgtaagaggaaaccatttaagatgcaagtttccatggaatttttcgtacattctgcataattatttgtgacgttgctaaatgtaaatcatctctttatatgaaatccgaagaggatgaaagagttttggattttcaaatgattagttaagtattaactataatttccttcattgtaatttttttattagatttgcatattggagatgttatgagacctaactgtgaactctattattgacctgattttctgcatttgatgttctaagtagcgtgtctttattatcttcctagaaatatagagtaatgccctttctttgtgtaatcacacgatgtacaatttgttgaatactgttggcacttggcaggagctggagagaaaaaattaagccccattgaagat

SEQ ID NO: 32985 - DNA, 915 bp, Medicago truncatula
  Intron number 1 from transcript Medtr7g116700.2 (locus Med tr7g116700) derived from phytozome v7.0 (chr-ID MtChr7; po s 27070189 to 27071103 reverse strand)
aattctcattttcccgtgaaattctcctttttcaggtaactattcgattattcacctcataatcgatttcttcatgtgtttcctcttttttgttaatgattcttgtcgatttcattcgctatttgttttttttttggtagggacctacctaattcagtaaattgatttgttcatgttaatttttttctctgctatttgatgtttaatttatttatattttgcatgttgttaggtatatcatgttaagatttgatcatggagtgtgaattgctttttcatgatttttttttttcaatttttgtgtgtttattcatttttttgaatgaattattaactaaggaaaagtatttgtatttgaccattttttttttaatttttgttttcatgaaaaaatgatggtttttgcttcctgcagtatgaacttgcatttgatgcttgtatacaaaccttttgaactgtttattttttatttttttttatcatgaatagtatatatttaaagtgaagcttgatgtttaatctttttcatatctctgattgtgcttacctcttgatttgaaaataaagggattgttatgtatttctggacaaaaattgcaataaagggcattgtatatttacagcaacaacaacttagccttatcctactaagtggggtcggctaaacattgtatatttcgagatttgtgtgaccaacagctataacgttgtaaagtttttatatgacgttaacattttcattctatcaagtttagccttgttttcaagcttgtcattttattcatatagtttttactttcgtgacgggattttatgaccttcagaagcaacattctcacaagtgagcttctttcttttggttaatttttgacactaaactaaacggtcatttttctttcacaagtttgtagattg

SEQ ID NO: 32986 - DNA, 701 bp, Medicago truncatula
  Intron number 2 from transcript Medtr7g110810.1 (locus Med tr7g110810) derived from phytozome v7.0 (chr-ID MtChr7; po s 25863439 to 25864139)
acgaccttatttttttggtgcaaagactcctttctgtaagttagacactgaatatttttctctctctaaatcattatgttttagacaagatgtcatacacgtatattcatgttatgaaaatatggtatccaattaggatagttttatcaaacaagtgaaaatagaaagtgatgacattatataacacagttcatgagcaagacttagaaggtcagtgactcaattatggagcattttctgtcaaattgactttggaactaaagcctgttcgtattttaggttcatcatttatgtgtatccctgttatttcatacttaatatcagacagattcacatactgaataaatggaatgaaaaagaagctacaaagtcctttttctacattcttcctcagagagtcagagtagctactgatataaaattaccttggtttttgtgatgggcgtttatctgtttccacaaagatattatcgatattgaaattgaaactgaattttaaacaccataggtgccagaagctgattcaatcgttttcatcaaaatttataacacgaatgtacatatgaaattagaatgtaaataacatgtttgatggttcacggaggaacatttttccttctgttaaattttcaccaaatttattcaattatttaacttgtatgacagtggagcaaaaagagtcgttttttacacgccaaagg

SEQ ID NO: 32987 - DNA, 207 bp, Medicago truncatula
  Intron number 1 from transcript Medtr8g087080.1 (locus Med tr8g087080) derived from phytozome v7.0 (chr-ID MtChr8; po s 18021619 to 18021825 reverse strand)
ggaagtaaaagcgattccaaccttctttcttttctactctctctctaccactcaacttggttactctttttttaggggtttaagttcctcattaattacttttattatcgtattatatatatattgagtatatttcaaaagaaaaagtttgttacacaccctaatcaaaaaaaatgttttttttttacaaaattttaaggtgagggg

SEQ ID NO: 32988 - DNA, 382 bp, Medicago truncatula
  Intron number 1 from transcript fpc265_22.1 (locus fpc265_ 22) derived from phytozome v7.0 (chr-ID fpc265; pos 102323 to 102704)
tatcggtctctctttacacaaccaaagaaaggtactttggtgttttgtataatgtcattcttttttgccaactttcttcttgttcactcaggcacgagttttgttacttatccaaatccaaatgtaatacaaagcgatgttaatttgatggttaacgttaagtgcattgtcatgttagaagaaagtagttaaatgaagctagcgcaggggtttctcctaatcgctggttgggttgtttttatttacatatcaatttattagaagtggacattttttttcgagtaaggcatgctaattattgttggctattatttaaattatccactttttgattgcttgattttcagattgccttgggaattctgataataatagcaagtca

SEQ ID NO: 32989 - DNA, 541 bp, Medicago truncatula
  Intron number 1 from transcript Medtr7g107690.1 (locus Med tr7g107690) derived from phytozome v7.0 (chr-ID MtChr7; po s 25225217 to 25225757)
acgcgttcgtcattctcgctaaccaaatttctctggtaattcctttttctctttcaattactcatttcttgaaattcgaataatttttcttgatcgattatcagaaactgatcaatttcatgtttctgaaattttgtaatcaccgatttccattttttgaatattttattacttgaatttaaccgatcttgactccaaacgagtcaaaagagaattgattttgaatttttatttcagatctttctttttaatttattatttgtgatctaattttgttcttccaattgtaaaaataatcataattcatgaatcatcatgattttatttctcctatatagttttgtgtttttatattttattttaaaatttattgcatatttatgaaattaattgaattagaagcagatcatgtatatgttaattatatagcagttagtttatacttaatgattatgattgaaattttgagttgtattaacattgttaattgttgattaatggtgtagattaaggaaaaagtgataagagtgaaggtgattca

SEQ ID NO: 32990 - DNA, 828 bp, Medicago truncatula
  Intron number 1 from transcript Medtr8g012990.1 (locus Med tr8g012990) derived from phytozome v7.0 (chr-ID MtChr8; po s 2320943 to 2321770)
tttttggtaagtgagttccaactcaaactcaacttggtttatatttgaaactcaaaatttgtttcaaaagaacggtatcttcctttacaatcatgtttcttttttatcttaacttttctgttctcggtgtaagggttcatataaataaaaattgatggatgattattttagttagtattcgaacttttgttcctacgagcgattcatcataattggagttcattaactaattgaggccaattacttgatattttttgtcaagatttttatttgagatatgattgaacatgcatatcaagttagcttctggactctggtgaattttacttttgaagagcatggcagaaaaccagggatacatatactttgatgtaaattaaattatttacataattttatgactatttataagttaagttcaattaaatttagtgtttgatatatgagaaattcaagttattattaataatgtgctcatatgacagacttgtaaataattttcttaaccatctgactctcaaggaaatagaccttgataatctagctagagtccaaccagaaggtaaatatgaattctgctaaaaattgttcaattatcattcgatgtaagatactctcaaacaattggtctataaatgaagtttattaacgatttgagttaacatttaattgactagcatgtaatttggtagcatcgattcatataatagatcattaatataattggtgtcgctcattttcctatatatgtgatctaataaagatagtatttaatttatgaacaaaaaaacagctggaaaaacttgtatttctaagcagaggattgaa

SEQ ID NO: 32991 - DNA, 660 bp, Medicago truncatula
  Intron number 2 from transcript Medtr7g143640.1 (locus Med tr7g143640) derived from phytozome v7.0 (chr-ID MtChr7; po s 34518556 to 34519215 reverse strand)
ggtgtgtaacaagaaaatgttttatctttttggactcaagataagataagcatgtcattttcttttaatcataggtaatttttgtctatacttttgtctttcatgttccatccttgtgcctacggttgttttgaagatccaatataggtacgtgatatgtgtttttataagaagtaagtaggaggttattattgataaatgtcacaggagatgtttttgtggtgggtatgggacggttgttcttgaattcatatttcataactagagttcatcttgttttctaaacaacatttgatatttgagcaacttctattccctgtaattttgaagtgtgctatttgcttattattttttccttataatttttagtgcaagaattacctcatagaggattagtaaaaaagaaaattgaatggaaaaagataatggacatttagcaatttattttgtttcgatcaatgtaggatatgtcattattgtttataaaagaataacatgtatcaatgcagctactttaatagtctttttcatgactcttcagtatcaatattgaattttatctgatagtgttcatgcattagttcatttcactgatacaacaaagcattttggttggatttcatttgcagatatttttcgcttatagtaagccaattatag

SEQ ID NO: 32992 - DNA, 993 bp, Medicago truncatula; identical to SEQ ID NO: 32400
  Intron number 1 from transcript Medtr7g104120.1 (locus Med tr7g104120) derived from phytozome v7.0 (chr-ID MtChr7; po s 23530786 to 23531778 reverse strand)

SEQ ID NO: 32993 - DNA, 433 bp, Medicago truncatula
  Intron number 1 from transcript Medtr7g112120.1 (locus Med tr7g112120) derived from phytozome v7.0 (chr-ID MtChr7; po s 26492594 to 26493026)
tttcaatccactatcacctaaacattaaggtctctttcttcccttcaatcactcttctattttatttttattttttcttcataaattcacaatcaccaaaccctaatcggtgaccattaacctaattcctcttcatttcaacttcaattctagtaattcatcgctgattatatggtcaactttcatcactggatctgggattcttcatattttctattcatttagggttttcattttcccccaattttatcgattttcatttttgattgttcaattctgtcagcaaacatggttttgttggttaaatctttgtctttcaaacttggttttctttgatttgtaataaagtttcgatttttagttttttattacattttatttttgtgtgtaatttttagttctttgtaatttgtaataaaaaggaagcttgaag

SEQ ID NO: 32994 - DNA, 877 bp, Medicago truncatula
  Intron number 1 from transcript Medtr8g025760.1 (locus Med tr8g025760) derived from phytozome v7.0 (chr-ID MtChr8; po s 5323117 to 5323993)
aacaccagagtcgcaaatcgcaagcaggaacagaagtaagtaattggtttgtgtaaaaaagataagattcagattccttcttctcctgttcttgtattcttgtgcttttttttaatatgagattcgtttccttttctcctgttcaaatttctgaattttcctgtgatttttgttctcgacctgaaaaggtccaaaaacggtcacggtggctgctgataccgttttgtaacggccgcaatcccggtaccggtccgttttttgaaacccttgatcacatgtgtcagtgtcatgtcgatgttagacattggatacaccttcgatcagaagtgttggtgctatagaactgaatgtatgaggcattgtcattatcgaaattgcaaacacaccctctagtgtctctctagttggtcattttggtcctcaaatttgtttttcttttgtaaatttagtccataaaactacaaacaaaagagacagttggggatgaatttgtaattttaatacattcagggactatgacgacagtgcctcatatattcacacatgcagggatcaaaatgattttgtaaaataacaacccttgattttctactttacacttaactcactttagaggagccaaattcatggtatggaggctgtttgatggtagtgtatatgaggaattttgtcattaaaattgagtatgtttttacttcatctgttaataacttgaatgaaaaaaagtaaaggaaaataatttggtttttgccttttatattttgtctgggttttaactctctggtcagctttgatttttgattgtattttggattggtaatgtagtctgtgttttggtttagttgcaaaattcaagattctgaaagggagattgtgt

SEQ ID NO: 32995 - DNA, 600 bp, Medicago truncatula
  Intron number 1 from transcript Medtr8g081560.1 (locus Med tr8g081560) derived from phytozome v7.0 (chr-ID MtChr8; po s 16741422 to 16742021 reverse strand)
aggtttgtttactttttcttttcaacttaactaacttactttcaatctatgaagcagggacaaagacacctgacatgtcacggacactgacatgccgccacgaataataatttgagaaaatgacataattcagtggaatcataggtgtcttgtctttttattcttttttttttcttttcaagtcaattaacttactttcaattgaatttagtgtatcttgtgatagtgatacaatgtgtttgttaaagttggttttgaagttgtttgtagtttgttgttagtcccagctcaggttttcgggttgttaagtgtataaatatgtttgagtaccctcattctccgaggtagcttttgagatgagatccaaacctattcaacagtgtttttatcttaaaaaatatcggggaggggaaaattgttatgaaattaaagtggccttaatgatcgttttacaactgttcctaagtagatttgtttatcagagaatttgaactccgttttttaagttacattgacaaactcttaccaccgatctagcacctaatatatgttgtttttgtgatagaactccgattggtaaagatattccaggtcattata

SEQ ID NO: 32996 - DNA, 451 bp, Medicago truncatula
  Intron number 1 from transcript Medtr8g025840.2 (locus Med tr8g025840) derived from phytozome v7.0 (chr-ID MtChr8; po s 5380546 to 5380996 reverse strand)
ttctgctgctacaacacctcgtacccctaatacacgtacgtaattttattcttgtctcttttttttgcatgttttatgtttttcgtttgtactaggtttgttttatgttttttgcatgtgttcttgtttgtttttcattttagttcttggcaatgttttatgttttatgtttttcgtttgtactaggtttgtttttaagacaaggaaaaagacaaagaaaacctctaaaaccttgaatgtctttgacaacaaaaaaaaaaactttgatattttgactctagaccgtgaaaacagaccccaaatttagttattttattttttgttacaaattattttgttactctcttaatcttatcaaagttagatgaattcatgtaattttctagactcaatatgagttattttttattttgcagcggacacgccaggcggttattttaagaaattcacg

SEQ ID NO: 32997 - DNA, 910 bp, Medicago truncatula
  Intron number 3 from transcript Medtr8g146250.1 (locus Med tr8g146250) derived from phytozome v7.0 (chr-ID MtChr8; po s 35709965 to 35710874)
gagttacatcaatactgttgcttgtagttttctaggtttgtgtttttatccctataacttatacagtacttgttattatttgtctttatatgctcctctgctttttttattttgaggaatggtggttgtgtttcaaatacttgagttgttatgacgtattgactgtttttacattttataaatagtaattcacacacatgcacaccataggaagacacacacgaattacaggcttagatggtttgaatatgtagagagaagacttttagattctgtagtgaggagagtagatcaaaaggatgatagttagatcactagaggcagatgaagacctaaaaaaaactataagagaaatcattaagggtgtgtttggattgagggtttaggaggggaagggagggggagggtttacttttcttttttaaattacgaactatataacatgtttttctaaaataaattaagtgtgattgaagtatttatatgatcgtttatcatattaatatgataactttttaaaatacatttcatagtgtccgtaatttaaaaatgaaaaataaaccctcccctcccttcccctcctaaaccctccatccaaacacaccctaagaagaatttaaagattaacgtgttggaccaagatatggtttatgatagaacattataacataatttgatccatgtagcctaccccacttggtgggacagggcttggttgttattgttgttggtctgctctcggtaacttgtcatacaaactttcattctatacagtatattttgtggatgtgtttatcgtatctgacttaattatgttaattttcatgtccacactctcataaggtttgctgcagtgcagggtgcttaagctaattttagtttcttttattttgactgataaatatagagt

SEQ ID NO: 32998 - DNA, 813 bp, Medicago truncatula
  Intron number 1 from transcript Medtr8g037380.1 (locus Med tr8g037380) derived from phytozome v7.0 (chr-ID MtChr8; po s 8091098 to 8091910 reverse strand)
aaggtttgtcgcttttacgatgcttttgctaaaataagtttttttctttaattaatcatgagcgttgtcatgctcacattaatcagtttcttttgattcatagcttgggaatttctactccgcgcttggttcatttcattttaggcgtaggtcctctagattaccaaacaaaataaaatataagaatgtttgtgaagatgaaacttcataggaggattctacaatccattttctttcagttttttcagtaatacaagtttttttcctctttaaattcaatttcttgttcttaacaaaccattaaaattggttctgctctgttggttctttgatgtgtcttttaacacagattacaattttttaacctagaacccattttcatttcagagttcagatcatatgatgtaatcggtgtttagttaatcataggtaacataaattatcaactggtgtattttcctctgaggcaattgaatatgatgtatatataatatacattttataagtattatttttcctccccaagtatcacaatccagtaactttttgatattcccatcaataaacaatacgtaagagtaactaaaatggtatctttctcatctaaatttttctctgagaccaaattattattgttgatacatactttttgaccaaaatattattgaaatattctaaaaactcacaattttgacttaatgtcactttttataataaccataatactaactttttataatcacaattgcttgatattcatattcccattgcttataaggctattaaagcctccccaagctcaaaacacagcac

SEQ ID NO: 32999 - DNA, 947 bp, Medicago truncatula
  Intron number 1 from transcript Medtr8g021390.1 (locus Med tr8g021390) derived from phytozome v7.0 (chr-ID MtChr8; po s 3959084 to 3960030 reverse strand)
ggctctcaggttgattagtgctactagtgctggtaattactttttttttttttttcttcttataattacttaatctctcacactactgtctacaaacataatgctcactaaatggatgtatactcataactcattgttataaaatctctttttcttttttcaatacaaaaataccgatatacttcaatttgcaagtatacagtaaaaattttcatattttaaattcacaattgatttctatacgtcaaatctaaccatgtggttcaaagatagattttactatttttctttactaaactttgataaaatattacacatgttcttcattttttataattattataatttctataaataattttttaagagtatttgttaatttttccttataaaatttattgtttactaaaattagtatggtctatccttggactttttttagagatagataaactttagtgttatattatttagatcttctgtgtaaaaaatttatagaaatttagaattattttatatgttattatttttaggcaaatggcgcgcatacggatctgcaacaccctaagtagattagaaaaaaaacaaaagttttttctatatgttattgagacgtatacgaaatttaatattaatgttgtttaataaaaatatagttaatcttcacatacctccattatttatcaattaatttaaatttacttaaaattttacagacataactaatatgatactataatctttaagttcaatggtgatttttttccagctaaaaagatattgaacgctgcaaaaaagtattagattttgaattgctataatatttcttttgagaattatcataactgattttatttttttttatataaatctgtactgaaattgaaaaacaaacttgtgacatatttgtagaaagtggaaaaggtaaagtgggaaagagatcgttt

SEQ ID NO: 33000 - DNA, 689 bp, Medicago truncatula
  Intron number 2 from transcript Medtr8g021820.1 (locus Med tr8g021820) derived from phytozome v7.0 (chr-ID MtChr8; po s 4166023 to 4166711)
ttcagcccagaaatcctggtacttttttttaattgttatttttcaatatctattgctacttaattccaatgcaattttcattttttttgagtttgttggttataaaaaaaaaattgaagtttttagagagagagagagttggggtagctggtatagtagaaaagagggtggaaacttggcttaggtggtttgggcatgtagagggaagttccggagattttgtagcaagtcgagtagatcagctggagggcagggaaatcactagaggcaaaggaagacagtaaatcctgtggtaagacgagtagatgagatggtgggtagaggaagacctagaaaaactattaagaaagatttaaaggttaatgaattggattgagatgagatgttcgatagaatattatcgcgttgtttgatccatgtagctgaccctacttagtgggaaaaggcttgttgttgtaatttgctataggtacattgatagtgatcaaattaagaatttgtgtttttaacttctaaacaatctatctgtgcgagcaatagtataacattagaggtgatgtgggagaaaatcaccttttggtgaatggtaatattgtgcaggaacctaatgatattatgctattgttgctactttgtgttctttattttttattttgatgtatttatagttgtagttggttattgtttag

SEQ ID NO: 33001 - DNA, 440 bp, Medicago truncatula
  Intron number 2 from transcript Medtr7g133460.1 (locus Med tr7g133460) derived from phytozome v7.0 (chr-ID MtChr7; po s 31214215 to 31214654)
ctaagaaggtttgctcatacttcaccttcattatgctttttttaatgtgttcttgattttatttgtgaataaataattaaaaaaacatgcttattggtagtgatgaagattattagaaatgtatcattcaactaaaatctgaaggaaaatgaaactctgtttctattcataaagtgacacttagtgtgtattaaaatttgatttgttcacatgagaatacactagattatacaggactttgtaggaagatataaatctgatctgattaccattgaaaatttaggttttcccattaaaacactttcattaataattcattcaatgaaataaaattaaataaataagcatagcacagttattttattattaggctactctattgtcttgctaatagtaaagtaatattttctcttttgctgtgctatttcctcagcttggcg

SEQ ID NO: 33002 - DNA, 446 bp, Medicago truncatula
  Intron number 3 from transcript Medtr8g147520.1 (locus Med tr8g147520) derived from phytozome v7.0 (chr-ID MtChr8; po s 36343808 to 36344253)
aacaaaggaaggatttgattgacaaaactgtccaggtgtgaaatcatcttctcttgtgaatgtgatcttgtcctgtccaatttcaatacaagacttgtgttgattttatctttgcattcagttccctgttattattaatagcagcaacactaatgaccattttacaactatcctatatgggatttgatcccctctcgaggttgccgagtccagttctaaccagctggacagtatgtatgtatgtatgttattggaatcttaacacccatcaatcatattttgtacaagtctaaatagaattggcggaggatatgttttgttattatgattttggctttggttttttcagtgtagtttaataatctttcatattatagtctgtctttctcgcaatttgaatggagttataacatgtgtttgatttttttttggcctgttacagaagt

SEQ ID NO: 33003 - DNA, 332 bp, Medicago truncatula
  Intron number 1 from transcript Medtr8g016110.1 (locus Med tr8g016110) derived from phytozome v7.0 (chr-ID MtChr8; po s 3054604 to 3054935 reverse strand)
gagtcactgatttcatatatttttcttgaaacgtgatcgttgtttttcttttttatttgattctgcattcttattctgataaattctgaaagtgttcttaacttctgtaagcatcttggattaattgttctctgctaaattttaatcctgttttgacacactactttgggcagtcttcttgaactatagtgttctttattctacatttttaaaacaagtgaatggtgcactatttggtccattgattttttgttggtagtccttggtttgtacactatcgttttcttttcccctgtcaaatttaatttattttactgtttaatgttgtttag

SEQ ID NO: 33004 - DNA, 856 bp, Medicago truncatula
  Intron number 2 from transcript Medtr7g134620.1 (locus Med tr7g134620) derived from phytozome v7.0 (chr-ID MtChr7; po s 31833202 to 31834057)
atcagcttgttcaggcaattgctacactcatcttggtaactcattatacatgtgttaatctctattctccagtaataatagttgttcacacttcacatttgtagttaatagagtttatagttgaaaatcttattctgttttgtagttaagttaaaagcacttttagttataagcattatgtgttgcttgataacttttatgcacactatgttttgggtgtactctgttaaagctaaacggatttattaacatactgttaagaattcagttatagtcatttcccacactatgtaatagtttgattcatctgcctccaagtcccaacaataaacttttaccaaaattcagtataacccatctttattggatcttcattgcatcattgcattctaaagccattcacaataagataaatgacatttctatccattggtaattcatttttgtcttgttttggcatgtccatttaattgtgctcataaaataaagttctctacaaaattaaaataaaattgttataagctataactgcatttggaacaatgttaactagaatattcaagtgtcacaaaatattcaagtgttctaacactactaacttgccttttttgtatctcctatccttggatttttgaaaacttttttccatcttctgtttgtgataatctataattctatatttttgcaaattgtgaagtgagctgcttgctttttattcaatattaaatttaattaggtgctgttttgctatttcataatatgtgtcttgtagagtatttttgctaaatattggaaaaacctttttaacaagtttgagaaattgattactttctatgtcttcaggtgacagctagaa

SEQ ID NO: 33005 - DNA, 566 bp, Medicago truncatula
  Intron number 1 from transcript Medtr8g089720.1 (locus Med tr8g089720) derived from phytozome v7.0 (chr-ID MtChr8; po s 19344310 to 19344875)
gctattggaaccgcgtgagaaaaagaaaaagttaaataattgcaataaaaaatagtgcaattgtatttatacacttttacttttcacacatttattcaacatctcatttttgtttttttatatctcttatcacatcaccattttttatatcttttcttctatcacatcactaatttattaaatctattattttttatttctttaggtagattagatatcgggtgtccaaaaataattttcttaaataatattacttggtactatttgaggggggaagtatagcatagaccactactatatgaggaggaaaagtaaaatatatgaggagaagagtgtcactcttttttctcgtttgaataattaattagcccttctaaacgtactaacttttgattttaatctttctagctataatagtttttcatccatgcaaatagtttttgccccattaacttctctctaatggtgttgatgtagcagtgacatgtgtgcatttcaagtaatgtggcactgccacatgtattttagtggtgttgaagtaggttttttgaattttttttaaagtg

SEQ ID NO: 33006 - DNA, 936 bp, Medicago truncatula
  Intron number 1 from transcript Medtr8g115920.1 (locus Med tr8g115920) derived from phytozome v7.0 (chr-ID MtChr8; po s 26158214 to 26159149 reverse strand)
agactttcacaatatattattcggtttgttctctttcattttgatttagatttacaattccattgtttttttttttgttgagagattgatgattccattgttagttatactatttcaattcgatttcggttgatgatttcattgacggttaaaatatatttcaacacattgaattgagattgatgattccattgttagttatactattctaatttcattgacgcttcatttttgctgctaagtgatatgccacatgctactactgtgtgcagtactaggtgcttagtttgtgttttctaccatacctttttgcgatacatgagggaaagagtgcgggaggggattgtgtgcaacgtgtgacgaaaaataggatacatacaaatgacaattggaaagtgacgttgactccaaatatgcattttccattatggcacaaagaagccgagacagttacgcgaccgatttcagtcatgttcactattgtttgtccattagtatctccagacaagttttttatgcctcttcatataatatgcatagtttagctttttgctactttgatatttgtctatgtacttggtttggatacgaaacacaagatgatacttgactattagaaagatgtaaacaactatagaagtattttatttatataggcagaatatggattcttttttgcagtcattttttgttgcggcatttatattggtttaaatacaagttttatttttctgttaccaagcattcccggtcttgaaatattggtttaaggagaattttctacatggtaatgaagtcttcctctacagacgaggttacaaattctgatgcaactaattttttaaataaaggaacacatctttttctctgtaattgctttaatattgatatatgatgtggtctttaataatggagtccatgctgcagaatttcatt

SEQ ID NO: 33007 - DNA, 994 bp, Medicago truncatula
  Intron number 1 from transcript Medtr7g120700.1 (locus Med tr7g120700) derived from phytozome v7.0 (chr-ID MtChr7; po s 28239051 to 28240044 reverse strand)
agatagtgttgctcctcagattaaagctaccccaggtattgttatttttcttttatttgtttatggttttgatttgtgttaccctattgtaaataattgagctttcacgtgatgaatatgtttttaaatgtgtcttgtacaaatttatctattgctttatttgggtttattgaaaaaagtcaaaaagattaaattttttagctgaaatttgatgtggttaatggctccaatctttttagtgattgaccaaaaatggaatttgatgcgatttatgtatgaaattgtacaaaactagcagcaagaggaacatgtacatttgccatatacagatcataaaaatgttatgattacaaagtattaggcttgtgttctgcccacatatatgtagctttacccttttataaccttgaatggttaattgaattattgttgagaggacacttaagtcaccaaagtcacaaaatctcaaagttagacaattgttatacttatacattaaatctgtgacattactcagtgatataatataagaatggagaataggcaatccataatttgcatataagaatgaaagaggtaacaagctgaatatattggagacttttcttggcttaaatcatcatgttgtgtcttcttaatgttgtgtcctcttaaatcacctgtaacactcttgaaaaaatttcttgtcctttctattagaccctttaaattttcatttatgtactgtagatgatgattttgaaaaggttcataatgtttgtaaaatcagtttgtgattcatattatactaataatctttagttatttgtttttggagcttcaaaggagaaacatatatggtagtatttcagtggttcctaaagattgcaatatcatgtgttggtcttagaagtcaaagataaccatgctttagtgtgcttctcccccgttaaatcattgttcgtctcacttgtgtgcaggaaagttgaagaggaattcttcaacaaattccaaa

SEQ ID NO: 33008 - DNA, 880 bp, Medicago truncatula
  Intron number 3 from transcript Medtr8g112510.1 (locus Med tr8g112510) derived from phytozome v7.0 (chr-ID MtChr8; po s 25275774 to 25276653)
tgttcaacaagctgaaaattgataaggtatccgtatcttctcatgatcacgatttacgatacgttgaacttatggaaataagctaaaaaacattttataaatatgtcataagctgttttcattaactatctatcatggaaagcttatggaaataagctaaaaaacatcttatgaatatgtcataacctgttttcataagttctctcaaaagggtcccaagtgcttatgccaaaagataagttcaaataagccaatcgaaacaggctcttaatagcatatcaaatgcttgtatttcttctgtattgtgatataactgtaatcaggggactgattgtgtacagtttttattttgattttattttcttgtatctcatctcattagttaggacaaattctgcttgcctataaaatacaactatgcttcctcttttttcaacttggtatctgattgctctgatttgaggacatgtgaattatgggccagccatgcttccattgtgaataatgtgtttctcaaggcctagaaattctattgatggataatttgacggcatttcattataattccgatcaactgttttttattgatgcttccttgtttcacaacccattcttgcagccccaatatttatcatcaaccctgcatcactgacatactctaatattggggaattatctctttaggcaggtcggctaaggctacaataggaatttagagaaggaaattttttatgtgtaatatgatttttatgctcagtcccatttttattggttggataagttttatgctgaaatgtgagcttttatatagtggctcttggcttaacatgactatcatttgacagcatattgaagttagcaggcttgttaaaggcagacc

SEQ ID NO: 33009 - DNA, 890 bp, Medicago truncatula
  Intron number 2 from transcript Medtr7g138210.2 (locus Med tr7g138210) derived from phytozome v7.0 (chr-ID MtChr7; po s 32740187 to 32741076)
gtgagcagacccggtgttccaaggtaaccgatatctctgtggctcttgtagattgcgcttacctttgcaaaataaagtattccactctgtccttggaacacaaccttcgcttatatgtggaatttatttgattggacaatgctaaaatagttcaacggttatatttggaatttatttgagcacttcagtcttaattttcatctcacattctgttattggaaatgccttactttggagtgtatttttatggttattagatcattgcacattgttgaagccttcctatgctccatcaatcgtcttttactgttaaatgggtgtagcattgtcctgaagtaattggtggctacttatagtgagaatacatagttgtcagattaatttatgagggtcagtagaaccactatagttttccttgttgatgtatatgattaaagggcataattatgcacagtttaaactgataagacatcaacttaaggtgtttaagattctactaaccatgcactgataatatgggttggaatttatcagataccatatgtttgttatacaatgagtacgtttgaaatttggaatcagatattcatcactctcaaaacttattcagatgtggttgttgaaattttcttcttccaaagttcatttgtccttgtgcatggttgtatggtgaatgtgtagctaagtatgtcgccaagttatgtatcatgttgttagattgagagatttttttctttatcatgtttctagtaattatcctgatgttcctcatatgattatgaaccgatttgtttgtggacattgatgattgagtatattggaaccatttaattagctttacataggaaatcattgattgttttttaattcttatgatatttttttgcagg

SEQ ID NO: 33010 - DNA, 561 bp, Medicago truncatula
  Intron number 2 from transcript Medtr8g119160.1 (locus Med tr8g119160) derived from phytozome v7.0 (chr-ID MtChr8; po s 26939475 to 26940035 reverse strand)
tgttttcgagacaacttatccaagctcactcaaaggtttttccctctattccaactgcagctgaatgtgaagctaccactatacaacaagccctccaaatttctcttgtttggttgtgtgactgaggactggctaatagtttttaatttaattcctttctgatttgtttttgtgtgctaccatgggatcagtgaatagtttgtcgcaaaagacatgttatggttaaagttatatgcgaatttgataaatagtttgatgggttagtgtatgtttgagttctgcaaaatcacggtaaatctctgaagtgtacagtttttgctaaaattgttgtggcacaccgtgattttgctgagctcattggcaatctaaacatggatatgcacttggattatttaagtgagtttttctgtaactttttttctatcaacaaaaactattattttgtttgtgacgtactatgtttttgggtccgaatacatgctacacttcacttacaccaatatttgatcttctgtctgaaacaatgttttttttttcctgcttaggttctgaaatgtcagt

SEQ ID NO: 33011 - DNA, 822 bp, Medicago truncatula
  Intron number 1 from transcript Medtr8g119470.3 (locus Med tr8g119470) derived from phytozome v7.0 (chr-ID MtChr8; po s 27087808 to 27088629 reverse strand)
aaaaacgaaaacatcgtcttctccatcggaataaggtcactcatttttcttcatgcttctcattttcactttctcttaattattattcaattatcatcatcatcatcatcatcatcattttaatcattattttttaattaatcaatgagctttttattttcaacttcagcatcataattcattgctctgtgtttcattgatgatgataattgttaaaacaggttaataattctattatcaggttctgttatttattatattttagtatttatgaggtttttttcccttattaaacaatgaaaaaaaaaaaaaaaaaagaatgaaccttcaaactttggaaaataactgaattaaagcaaagtggatcggattctgcattgaaatttgatgaaatctgtttaatcacatttcactgattggtttgtttgttatgtttgattttgaattttagtgttttttttattcatcgcttattttgaacaaaagttttgtttggttttctgttatttttttgtttctgcataatcaaaattttcaactttattattgtattaaaaaaaagttttttttttctttctttttctggtcttacaagtcaagatctaaagcaattcaaagtaaaagttttggaatgatgtttttctatttattgattgctatgattgttaattcaattagttctatatgttgattgtgattagaggttaaattttaatcattttccttttttaaatttctaaattctaagtagttggtgactattattgttgaaattttaatcaactagttctatatcttgttttgattttgttttgaaatttt

SEQ ID NO: 33012 - DNA, 798 bp, Medicago truncatula
  Intron number 1 from transcript Medtr8g026610.1 (locus Med tr8g026610) derived from phytozome v7.0 (chr-ID MtChr8; po s 5762154 to 5762951)
gaccgcctgatcgggatccaacggttttcgatgtaatgatagtgtaaagtcagcaattcactcttttgcaagcagcttgaactgtttataggtggcagatttatgtgtaatgcacatgggatgggatagcatgttgtcctaaagtatgtagaatccaaggccatatacagtgtacattatacaagttttatagtacatgagattcttctggtatgaacttttgactacaatagaatgcattgccgggcatattgctggcttatttcctcgagccaccctcaatttatggataccatttattaattattattttcttgaccagtcaatactatagtccatttctgattttttatcaacatgcttccctaatttcaaaaataaaaatatccttgaaaaccaataaatatagtcatgtttatttattttttcacatagtgatttgttaaaaaatataaaaatatactccactattattagttaaagaaaattgtttatgtattggacagctagataatagatcgtaatctagggaatcaatctactattttatttaaaccataagaataatgataataatgttaataaaaacaaaatccaagttgaaaactactaggcatattcttttcaaaccttaagaatactataaaatgtttcaaagtccacaaaatcattgaaaaccacaaatgtgttaaaaaaatatatattacacattaccaagcaaatttttaatgttgaaagttgaaaatctttgaaactaactaagcatgctttattaatttataggtgaaaatccaaaag

SEQ ID NO: 33013 - DNA, 779 bp, Medicago truncatula
  Intron number 1 from transcript Medtr8g077900.1 (locus Med tr8g077900) derived from phytozome v7.0 (chr-ID MtChr8; po s 15653519 to 15654297 reverse strand)
aatctatctattctctctctctctctctattagaggtaataattcaataatttagacttgtaacttttcatattgccttatttgaacttatctactgatataagtgttgtgtgactatttaaaagaacttttgaaaacatcttatgacaattttcattagcttttttcgtattaagtgcttgtgctataaaccagataagctgactatccaaataatcttatcactaggttatatagtttaaaaatgtcaaggactagtttgatattatttttattgggactaaattagaccgaaagaaaattgttagagatcaaattgagtttcatttttcttgatgtatacaataggcaacttaacacactttgtaactctttaatcaatatttttaaaattttttttgattaaatgattgaatcgagtaatatgttaaaatatgagattaaattgcaattttcattaatcgattgattagattgataaagagttgactcatattccacaattgataaaaagttcaacttccgctaatatcattgagacattgttgatagacaacaaataccttgagatctatatatctcgggacattgtgtccttttcctttctctgtaacattcctcattctcattgctttatatatacagttttttctttttcgctgaaactctgtattaatatcaaaatcaatgttgaagaaaaatatttctccaatgactttgaaccgaaaaatatttgttgccagctaacttgttgtttcctgcagattagaaggccaaac

SEQ ID NO: 33014 - DNA, 341 bp, Medicago truncatula
  Intron number 1 from transcript Medtr8g147640.1 (locus Med tr8g147640) derived from phytozome v7.0 (chr-ID MtChr8; po s 36399783 to 36400123 reverse strand)
ctggtaagaatttttgctactctactatttacttttgcttaattcattcaaatgtgaggttttgcatttgcttaattgttttttgctcaaatttgaattagtattgatttggtaagattgatttaatgtgcatatgtatttgatctaatttaaaacataaattaagattaggttaaattttatttaatgtgtatataagaaaaaaaactatactaaaattgcttatgctagttattattgaagttattttgattcaagtcatgggatttgtcttgatgttcttttcgggtacttttttgtgtacagggctttgcaaatctaagtgggaaagaaatagaaaa

SEQ ID NO: 33015 - DNA, 810 bp, Medicago truncatula
  Intron number 1 from transcript Medtr8g092640.1 (locus Med tr8g092640) derived from phytozome v7.0 (chr-ID MtChr8; po s 20043533 to 20044342 reverse strand)
ggaagtataacttctacccactcaagtgtattcattacccttttctctattcaattttctcttgctttttgcatggtaatgtgttgataattatttagacagataatgaaaactgatgaatgaatgcgaattatttttcgctttttgcttcatgtcatcttgagatatggtgttctttaagagtatgcacgtttgtatgatgaaggttgaactttgaagccgtcaaaagctatgaagcatgagtacaaacactactaatgtccaaaatacaggacaccggcatgataaacacacacacacacacacacacacacaattatcatcacatggatagtttgtggaaaattacatttcaagaatcactgtccaaaacatttataatttaggaacatttagtcttagcagtgtaattaacaatatacaaagagaaattctataaagcccattcagaaatggatggtgttaaatttactagtaagtgaattatctgcctgtcattcaatgtgattcattgggtggatttcacatatatttatatttgataacatggaatttgtggatgaaaatttaattaataaaaatctataccttatgatgatttttcgcagtagtgttttagttttgttatttgtcaattgtcaagctttctatagtgtatgttattatatcttctgacaccattattagtttttaaatcttgatggctactgactgtattaagtattgacaaaatcatgtatgttactgtcttcctgttgtttttagaggtcttcctttattttgatttttgtgcgcttcagcaggtctctc

SEQ ID NO: 33016 - DNA, 647 bp, Medicago truncatula
  Intron number 1 from transcript Medtr8g011980.1 (locus Med tr8g011980) derived from phytozome v7.0 (chr-ID MtChr8; po s 1763680 to 1764326 reverse strand)
gttcatctgttgccacgcttcaggttcgtgttttctttactttgcttatgttaaattgttgttttcgtataagttataagttgttttcaaaatatattctggagagcttatagaaataagctagaaactagttatgaacatgtcttaactctttttcataagctctaccaaacagtcttgcaaatgtttatgatagaagacaaactctcaaataagtcaatctagataggtccataagttattttgacaagcttatggaaataagctgaaaattgtttattaccatgtcatgggttgctttcataatctttgccaaacattcttaaaaaattagtatcttggccatcaagtaattttatattttagtttttgtaaatttgaatatttataagatgaagagatatattagattagacatatcatatatcagattagaaaaacctgtaatgattattaactttgttaaattatcatttgttttcttaaaatgactagaatttataaatgatgtgatatattgcaaccatgaatttaaatgtgtgatatgatatttcttgaagaaattttttagtttatgattattttttttaaatgtaatatgatattttgtaggttgtggtggattcttcaataactacacctagcct

SEQ ID NO: 33017 - DNA, 908 bp, Medicago truncatula; identical to SEQ ID NO: 32309
  Intron number 2 from transcript Medtr8g077290.1 (locus Med tr8g077290) derived from phytozome v7.0 (chr-ID MtChr8; po s 15385346 to 15386253)

SEQ ID NO: 33018 - DNA, 836 bp, Medicago truncatula
  Intron number 1 from transcript Medtr8g087980.1 (locus Med tr8g087980) derived from phytozome v7.0 (chr-ID MtChr8; po s 18523317 to 18524152 reverse strand)
tgtaacgatttaaaaaaaaaaaaaaaaacgttttttattgtttaaaaaatcaaaatattaaaatttaataattaaaataattttgaaaaacattatctttttttgtgttgaggttaataataatattatctttttttgttgaggtaaataataatattatctaactatattcagtttttaatgacaaaagtaattggggattaatgacaatgtcacatagagatataaattatatgcaggggatattgcatattatatgtaggggtcagggttcgaaccctggacaccccacttctccacaattaaattgtgtgagctctagccattaggctacttgataaaaaaaaaaaaaacttttccaaccacattttcatatcagacagatcaaataattgatagtttaactctgtgatgtgatgaaagcaaaatttaaagttactgcatacacgagtgtcaaatcttctctcacaacttattaatcaaacatatgatatgacgaaataatgtgtatgacatagctaacctgcttcagatgttcaataaactcatattattacaaatcaataataatcaggcacaacacaatgaattgcaagatattaatctagaaatgagtattgatcagtacttcaatatgtactaattagtactttcaatagaactataaagtggattgttcattttcgagaagtttggatatgtaagtttcatactacataccacaaaggttgagaaattttttaattcctttcttctcatgttgcttgcaagtgttatatatgataatcttcacaattgaagaatttaatgtttaattttgattcctaatttggcag

SEQ ID NO: 33019 - DNA, 940 bp, Medicago truncatula
  Intron number 1 from transcript Medtr8g096320.1 (locus Med tr8g096320) derived from phytozome v7.0 (chr-ID MtChr8; po s 21142866 to 21143805 reverse strand)
aaggtaaagctccaaattatttttggtgatctggtttttatttcttgtgaaatttgtgtccaccacctgtttgatataatgcttatgtgaactttcaaccataacttgggtttcaagtaatgttttaaatattccattttgaatttacactactcgttgtatcagagttcaatatattgaattagcttttttgggttttttgaaattggtggcaagttttgatttttattctgttttcatgttaaagagttgaaaaggactaatttggtataatgcttatgtgaattttacaatataacttggattttcaagcaatgttttaataaccacattttgaatattaatatattgaattagcctttttgggtttgttaaaattggtgtgaagtttagcttaacaaaggtccggggtttggaccaatgtagcattgttaaaactcttaggtagagttttccgcctatttgggccccacatggctacagtgattagtctccgtagtttggctcagaggatacggggtttacagcaaaaaaaaaattggtgtgaattttgatttcgattttgtgtccatgttgaagatgcttaatttgttataattcttttttgaatttcagaacacaacattgtttttcaagcaatgtttaaaacctcattcggagtattcaaatatattgaattaacctttctgaatttttcaaaattgtgtgaagttttgatttttattgtgttcatgttgaagaggcctaatttggtatgatgcttctgtgaatttcacaacacaacattgtttttcaagtaatgttgtaaaaaccccatttcgactattaaaatatgttgaattagtattttttggtttttcaaatttggtgtgaagttttgatttttatgtatgttcatgttaaagagttgaagaggcgtgttgcgagacttcgagaaggc

SEQ ID NO: 33020 - DNA, 722 bp, Medicago truncatula
  Intron number 2 from transcript Medtr8g025560.1 (locus Med tr8g025560) derived from phytozome v7.0 (chr-ID MtChr8; po s 5216680 to 5217401 reverse strand)
gggcagaagatcatctccctacattacccaatactgtaagtttcatggcgtacatattgtaatattacggtttgtctaacatgtgcaatattgcacatgttaaaacaactaaaagtagcaactttttattgaaaacaataatatttgttaaaagattataaactgcagaagtttcaatgcaaacttattaatttgaacttcttcttaacatatgcaaactttgcacgtgatagaaaaatccttaatattatatgtgtattgagcatttacatctgaagtcagttgaatgcaaatgtttgagctgtcacttacctttttccatggggtcctgttaagcgattcaaatattaatttgctatctgtatttatcataacttttcttctttaccatacggctttgacacccttttaaggaatcccttgccattttatctcattggtaccattttttacaaaaactttggccataatatttactttcacttgctgctaaaaggcatataatttattcccacgcatgatttcttaatgtctcggtattaattgtcgaccatgaaatcactatctaaagttaatgaactatcaaagctactgtagcacacatatttgaatttcttgtctttcaatacaatagaaaggagtttttgcaattttactgcactgatttatgaaaccatttgtgggcagcattttgcggatttgcttgcagaccagttcagttc

SEQ ID NO: 33021 - DNA, 842 bp, Medicago truncatula
  Intron number 1 from transcript Medtr8g136650.1 (locus Med tr8g136650) derived from phytozome v7.0 (chr-ID MtChr8; po s 32633069 to 32633910)
gagttgggccttcccaaagtatgtgcctcgaaaaaaaattatagtcctgtggtactaccacactaaattttttttcttattctctttctctctgataccatccacgcattccatcaccatcactccatcggtctttcttttcttcttccccgatttcacaacataattcgtgcccgtgataattccaatctactgtcctagatgtcttaaaaagcagaaacagttgaccatatttttaaagagtagtgcaaattggtttggaatcaattttaactctatcatgtaaccaatttatttttattttttttaactctatcagagtaaaattttattaatttgttttggccatatgattgatcaaatggaagcagatcagttaactatttctaatagcaatcatagacatcatttggatagccagaaacaaaagttttttaggataaagatacccttatccaagaatccataaataaggctctggataatgctgtaaattactcagaagcttaggaaaatgaaaatcaaattaacagaaactaggagagaaaatagaggaaaaattagggatttttgttattgttagcattctgcaaattctaggagagaagtcaatagggctgcgctcaccttttagctcagtccgctagttagaatttagatatatggtgattgctctataggccccttagaatgatcaacctctgagataagtgatcgggaggtgcactccgatccaataaataacggttgggtggtaaatagttttccattatgagaagaaattgcttgtttcctcccttttcccatttaaaaagatgaaaatactttagccaaacaaaaaa

SEQ ID NO: 33022 - DNA, 943 bp, Medicago truncatula; identical to SEQ ID NO: 32287
  Intron number 4 from transcript Medtr8g005590.1 (locus Med tr8g005590) derived from phytozome v7.0 (chr-ID MtChr8; po s 333161 to 334103)

SEQ ID NO: 33023 - DNA, 1021 bp, Medicago truncatula
  Intron number 1 from transcript Medtr7g094170.1 (locus Med tr7g094170) derived from phytozome v7.0 (chr-ID MtChr7; po s 21275438 to 21276458)
ttctccgtcaaagaattgttttcttgggttctcaggttattaatcttcctttttcagatgttttatgagtacccttttgtctctttttgtcggaaatttacaaacttttcatctgggtttagtctaatagcatgcccacaaaactatgaagcacccacacagacaccggataaagacaccagataggacactgacacagtaatttgagaaaatgaaataattgaatgtaatctcatgtgttggtgtaattgggtccttcactagtggaccgtgggattggtccccagattaatcggtctttgagccggataccgagttttcagaaaaagaatgggtcagtgaccaaaactgacatgtgtcagataccagacatgctttcgatcggaatagttgtgctacagcagagcaaaaacatcatgaagaatggacaaataggggaaatggttaaaaaaggagaattaatatgataatattgttgaattgctgaagatgtgtttgatgttgttgttgattttgggatatttttatggttgtttgataatgtggtttcattttgaagaggtggtaaaaactgaaagaacaaagagggataatgaaatgcaactaaaagagattgcatctagagaaattctaatatagaccaccttcataagtggtccatcttagactaatacttaaaacatgtttataactccaacaacaacaaacgttgtctctagataatagatgttaaatggttctcctcatttttacgattgaaatagtgacttaatttataccatttgattaaaacaacggatatgtagctcatattgaaccgacatcaatcaagtcactgtcttagccgtgaatatgacaagagttgtgattttttatttttgaacagtaacgtcgattgtcattggaatttctgataatttgaagtattggtccacggcggacaacctatgaaggtggtccaccttagaactcacctggtatctgattgtgtgtttgtgaatttctttgtttgagcaggtgg

SEQ ID NO: 33024 - DNA, 457 bp, Medicago truncatula
  Intron number 2 from transcript Medtr8g011720.1 (locus Med tr8g011720) derived from phytozome v7.0 (chr-ID MtChr8; po s 1638914 to 1639370)
agacaataggagcagtggttacataggagagaaaggtacatcacattcttatttaaatgtttcttaaaatgttgtgtgcttttgacttaagaaggaaatgtgctgttgtgctaatatgactactttcaatgaaaattagttgaatgttttcattggtattggtattttaatatctgagttgtaagaatatgcttttaatatgtttgaatgaattcaatgtcaatttttttttttttttttttttttttttttttttttttttgtaaagaggacattttcataattgaaatgtgtttctttagttgtactccttgtgcaaaatttatgaaataatgctggactatggatatccattatagtagccaaattgaagaagataatggaaatctctgacataatctcttctatgttttgaattacaggaattggtttcaagagtgtgtttcttgttactgct

SEQ ID NO: 33025 - DNA, 717 bp, Medicago truncatula
  Intron number 2 from transcript Medtr8g112990.1 (locus Med tr8g112990) derived from phytozome v7.0 (chr-ID MtChr8; po s 25534348 to 25535064 reverse strand)
ggaactgttatttatattattgttgtttcttttccatgcatcgaattttggaacttgttgatgtggagccttattgtcttttgaataatgttgttgaattaagctaaggcctttaatgccgtagactgttgttggattagaaaattattccgctgctatgttttcatttttattaagtggtttaattaaatagtttcatatgttatttaagaattttgatattgcaatgtagcatatccgtttctggtgaattactctgatgattatttattatttatttacttttgggtaacggggtgttacagctgagggggttctgtcatggtgaaaatgagacaaggagaatgagtgttgttgtgttgcatatgtttggatttggaaatgggagaagagaagaagataacgtgtatctgttcaaccatctcaatccttcttttttttttttaattttagttccgctgctattttaggttgtgttcttccatccattttctttttcaatgaaggaagaaatcaatgaattgttgtgtttcaattctagattttttttggtagttggattcaattaattttagattttagtgaaggattcaatcaaatttttttttttttagtgggtttgtttgtttaaattttgctgggtttatatgaacataatttttatgatgatgaagttcaagaggaaaaacaaggaaggagaaaaataaaaggaaaaaa

SEQ ID NO: 33026 - DNA, 504 bp, Medicago truncatula
  Intron number 1 from transcript Medtr8g018850.1 (locus Med tr8g018850) derived from phytozome v7.0 (chr-ID MtChr8; po s 3511097 to 3511600 reverse strand)
tgagtacgtactccaagaaagacacatttttattggttggttgtgtttattctagcacttttcctcccatttcttttgatacaattttatatcaattcttaaatatttctctaaatttaaacacccttaaatgttatacatttattcaacattctatcttttttctatctcactcttcttatcacatcgtgaaagtatcacatttatcatgccaatctctctattttctttttccctctcaaagtgttatatggtttttggatgtagataatcttttttcattttatgtcaactatttaatttgttggcattgtaatttttttcttagacaagttgtatctacacttcttttgaggtatactgtttgtttagaatgactataatttaatgaatgtgcaagatgtaatttaattaatctataagaattttattttgaaaatataaatcaaagtaataaatacaaaattttatagcaattgtttcagaatagttttcaaaactctt

SEQ ID NO: 33027 - DNA, 206 bp, Medicago truncatula
  Intron number 2 from transcript Medtr7g106110.1 (locus Med tr7g106110) derived from phytozome v7.0 (chr-ID MtChr7; po s 24438308 to 24438513 reverse strand)
cacaagcagcagcagttgctgaaaacaataaggttagtgatgatgattattttctgagattggttttttgtttgatttgaaattgaagaaactatttgcttcatctttcttttctttgattatttaatttaatatttcactgtgatgattgttttctgagattggttttctgtttgatttgaaattgaagaaacaagcttgtgtca

SEQ ID NO: 33028 - DNA, 359 bp, Medicago truncatula
  Intron number 1 from transcript Medtr7g106110.1 (locus Med tr7g106110) derived from phytozome v7.0 (chr-ID MtChr7; po s 24438682 to 24439040 reverse strand)
aagacccattgttcaacaacatcaacaacccagaggtttgtgttttcttcaatcattgattctttatggttttatttatcctgggttcaatgtttttgttctaagattcaaactttgagtaaaatagtttctgggttggtttctttttcatctatctattcactgattgaaagatcttgtaaatctgagattttgcaagaagcccagatgataaatcttaaaaagtttcgattttttagggttttgcatcaaatctagtaaaagggtcttgttcttttttggattttgtgtttggatcgaaatcttgaaccctttttcttaatgttttttgtttgtttgttcttgcaatgttataggcg

SEQ ID NO: 33029 - DNA, 643 bp, Medicago truncatula
  Intron number 2 from transcript Medtr8g016480.1 (locus Med tr8g016480) derived from phytozome v7.0 (chr-ID MtChr8; po s 3193835 to 3194477 reverse strand)
aaaaggctgctacgttgaatgtaagttgtaattacaatatgttcatttgatgttatttaagcccttcttagtaaaaaatagtgaatagctgataagttagattatagtggatgagcttatagcagatagctaatagcggataagctaattggttaaatttgtagaattttgtaaatttggcggttgaattctgttataagtatgaaataacataaataagatatatttatttaaaattcagtgtttttcaattaaggctacaagggtaaaattgagataaaaacaatgataaggtataagctatttgaattaagctcgtgagaaaatgacagttatcaaatgagtcttttttactcaaatgaacttataaggcatatgttatgagttcaaatacttggtttgccaaactgacccttatagaaaatatcaaggtgttttaatttttttgaaaatttgtgtagttaatccattcaataagaacttttcatttgacagttagattgttaaatttaatgtttaccattagttatcagatggagtaactcaagatagcttatttgaatgtttctcatttgaacttgtatctgttttgaatgaaaatgttttgttatgaacttgtttttggtttcttcctattggcagc

SEQ ID NO: 33030 - DNA, 629 bp, Medicago truncatula
  Intron number 2 from transcript Medtr8g125570.1 (locus Med tr8g125570) derived from phytozome v7.0 (chr-ID MtChr8; po s 29314756 to 29315384)
gatcaggcaagtcagtttttttgtttattgataatataatccaattcagtattcactttcttaactaactgattcttctacattaatgtacttaggcttgttaaataagcaacttaattatgtgtttatgcataagttatttttataacatagtataaaatgaaaaatgatacatgaacacccttttattcctgcacctcattgtacaccccatgtattagggatattttggtaagttcatctcacaaccacactttatcttctatttgtgcgggatccaatatgccacgtgtcagaattttgtatgggtataaagggtgtattgccaaatagggtggtacatgtatcatcactcgtataaaataaatcaaatttttttctgttcatatgttatgcggaaaatcttatggaaacgctattataaatcaatttttagattcaataaggttgaaaacggcttgtatacatatcataaatcattaaattatttcgtaagttctcacaggtgtctattttagtaaataaactcaaataagtctatccaaaaagatctttccgtgttattttttttaacatgacattttatttttgtagacaggttttggcatatcttttgatatcatcagcat

SEQ ID NO: 33031 - DNA, 673 bp, Medicago truncatula
  Intron number 1 from transcript Medtr8g088990.1 (locus Med tr8g088990) derived from phytozome v7.0 (chr-ID MtChr8; po s 19026809 to 19027481)
gcaagttttccatctccaatctcaacgccattcttttcttccgagcttcgctcgaactctaactaacttttctctatgtttcattttgcaggctgattcacctcctccaaggtaaatcctaaaactctctttgattcaaatcatgttaattgtttcaattatcaatttcttatcactctgtgactcgtttcctgtttaatttaattgaaagctgtttttttcgacgcttttagggttataatttgtatatgtgcaattttatgcttcaatttcaataaaaatctttaatccctagttgtttagtatcaaatttacgttcttcaacatttatgttcaatttaaccaagtgattgtgctcaagtggttaattagcttcaccaaaggatgaattatttgggagaacccgaatttgattcctaggtagaacaattcttggtgatgttgtaaaaaaaatagtaatgtatgttcaatttgataattttgcttaacatttgtgataattttgcttgaagtatattgtgctgtttgatggaaagtagtctctttaagtatgatatttattgtttatgaatttacgcttatacgtttaatttgaattcaactcacacagaagctatttttcgttctgggcatgattgtatttcaggaattcaaggtctccttcaccttcacc

SEQ ID NO: 33032 - DNA, 777 bp, Medicago truncatula
  Intron number 1 from transcript Medtr8g121510.1 (locus Med tr8g121510) derived from phytozome v7.0 (chr-ID MtChr8; po s 28199047 to 28199823 reverse strand)
gcaattttgaaggttaaatgcatgaccttcaaactaccgttgtttcttacaaatagcctaatcttagccggcttttctgttagtgtttggttgaagggaaatagaaggggggaggagtgaaaataaggacgcgaagatcccttttataaaagggcttaatatttatgacttgcttgggctaaactatcctcactagtttgttcctagaaactttgacatgttccttcacattttctttccacttttctcaaagcttcttcactccagttcattcatttatggtttttctgctacgtaaaagatttggacaatattttttgaaaacacagtcactggtataagaaattaatgtgactagactggtgcaataccagattttaagcaagtccatctcatttctcgttctacatagatgcagccaaggacaccacttgatcctcctctttctttttgcatcagcaaattcaatgatttattttgatttgccttcatttaggcaattatagtaaaaaaaattgccccgcttccccgcactttaacccaaacagaggatttgatattatttcccctcgcctgctcttccttccattacccttcattaaaacccctcccgttagagtacttttattgagtatgttactgtattttggctttaatcttttgacaatttaactttcatcaattttcactttcagctttctcttgtcaactaagcactctttttttttactgaaatcactacatttgattttctttcagcatttttaccatattttg

SEQ ID NO: 33033 - DNA, 728 bp, Medicago truncatula
  Intron number 2 from transcript Medtr7g118420.1 (locus Med tr7g118420) derived from phytozome v7.0 (chr-ID MtChr7; po s 27946608 to 27947335)
aaaaccaggtatgcgtccactcttttcttttattttcatcagatctccataccttaccttcaattttagctaattgaccctgtcgttgtttattatttattcaaccctagttttagggtatgcttggatcattgaaggtagcaattagattgagagcttaattcaaaattgaacaaaaactaggtttacaatttgactcaactgaatatcaaacataaacacttgtgagaatatggaaacagcttataacatgttcataagttgcttcaagattatttccataagttctccatgatagattatgaaatcagctaatagttatagcttattcgaaaacagagttattttattttatcttttgttttagaaatagcttaagcattagtactcatatgataaatttttgttgtaagcacttaattaacttgtttatctaaataagatatagatgtcttggaaggttattatttgaaatttttatcatagacgggagaaaatagttggtttcctttcacaccccgccaaattggggaaaagaaagtagttagtgaagtaaataaaatattgtcaactaaataaaataaaaaacttagggtcattccactttctttcgttcctgtatgtcaatacaacatggcctaaggtattcggtcaatgattaatatgtggctgatacatttttgtcatggacagtgttcatttgttgagcatcgcaactacaaaattgt

SEQ ID NO: 33034 - DNA, 629 bp, Medicago truncatula
  Intron number 3 from transcript Medtr8g034790.1 (locus Med tr8g034790) derived from phytozome v7.0 (chr-ID MtChr8; po s 7608896 to 7609524)
gcctgggcacgtgcccgggctcagtcccgaatctcgtaggagaccataggtgtcactgcagtcgaaacttacctataattattatattatccacaaaatatcatgtgatatatggtgttgcagcggataggcgcgctccttaactcctctaggatgtgggttcgatccttgtagccatcatttttattttcttttgtattaaaaaaaattttattcaaaaaaagtggtcctgattggacttgaaccgctgttttccatgttagtttcaacaaagcaaaccactacaccaattcacaattttgttattcttgtaaaactgtttaatatatattctaaaaatattcgaacctgtaacaccatggtataatgctctcacccaaaccactttgctgtagtttataagtagtcaaagctttacgttgttaatatatatagtttctttgcaaatttcgccacaccaatatcaactctctagatccgcccctgccttgtgtgggctctaaatgcttcccttgtgtgagaattccatggatttaaatgcttacttttctataccctactacgtcattacctttttttaatagctaattttaagtttccttgctgatgttcttttaagaaacttggtt

SEQ ID NO: 33035 - DNA, 572 bp, Medicago truncatula
  Intron number 1 from transcript Medtr8g105530.1 (locus Med tr8g105530) derived from phytozome v7.0 (chr-ID MtChr8; po s 23330410 to 23330981)
aaggttggttctgattgttttttaattcaacttattttgaactagtgattttcgggcgattatatgagtgagtgtgtgagtttcaggtttcaatttggtgcttaattttaaattttaaaaataaaccatttggataatacttagctttcatgtagccgaccccacacagtaggaaaaggcttggttatcgttgccgttgataatcttttaactttgagtcgttgataatccttaactttgacgaggggcttccaggataaactttacagtattatcctgtacctctcaaaagtacaaatttttaccaattttatttgaacattaactgagacaggttggatttgaatgtcacttttcacagcctcagataaaactgaataatgtaaaaaaaaaaaactaacaattaaaaggtctatagtaagatgtagttgagctgcaatctagttttagcaattaaaagtgctctactttgctgcggggtttttcttcagttgttcatatattaggcttcgtaaatagcacattttcagtttttacagttgatctgtctcttggaatttcagaatatcttg

SEQ ID NO: 33036 - DNA, 290 bp, Medicago truncatula
  Intron number 1 from transcript Medtr7g132880.1 (locus Med tr7g132880) derived from phytozome v7.0 (chr-ID MtChr7; po s 30899435 to 30899724)
tcttaccccaaattgcagttaattgttgttcgctggtatgcggtagttaactaccgtttcagatccaaaaatgtatatacaaagaagaagaaaaaaccaatcatacgacatttaagtaccttcgaaaaaaacaataatacgacatttaagtactttcgaagcctcaattttttttttgtcgctttgattcaacattttaagagtctatcctcttccactatatacactctattgatcacacgttattaattttagtaacaatattcaatatatcaagcagtggcagatct

SEQ ID NO: 33037 - DNA, 388 bp, Medicago truncatula; identical to SEQ ID NO: 32888
  Intron number 1 from transcript Medtr7g104440.1 (locus Med tr7g104440) derived from phytozome v7.0 (chr-ID MtChr7; po s 23672773 to 23673160 reverse strand)

SEQ ID NO: 33038 - DNA, 556 bp, Medicago truncatula
  Intron number 2 from transcript Medtr7g135180.1 (locus Med tr7g135180) derived from phytozome v7.0 (chr-ID MtChr7; po s 32103656 to 32104211)
gccaaaaaagttgattatattaaaagtctctgcaggtctgttcttcacttcttctaacttttatttaattaaaagaaaggacatagctttgatttgtttgttgctaagttgtgtttcataattaagttagttcaatgccccaacactatttcagcttcaaccttaatctttgctttacccattttaaacaaaaacaccaagtgtttgattgaatagcacactatctttgaatagcacactaagtatttgatttaatgtcctaagcacttccgccccaacaattttatcttttgtagagaggtagaaacactttgttagtaactttccatcatcttataagaggtacaatttgtcattccacctcttgacatcttcaaataaattaataggaaacttgatcaacctataattccctataattccaacattttggactcttaaaccctctcctcgtcctccttctgctaggaatattgctttttgttgtttctaattttctgttttgtatattgaggccactcatagaattttttgtgttgtgccaacgccagcaaag

SEQ ID NO: 33039 - DNA, 704 bp, Medicago truncatula
  Intron number 1 from transcript Medtr8g009320.1 (locus Med tr8g009320) derived from phytozome v7.0 (chr-ID MtChr8; po s 1317548 to 1318251)
ctgattgggtatgctattgctgatattttttattcggtaaactaaacttatctgtggtttagcctaaatttgtttgccacctattgttttaagaatgccttttatttgtttttcattataaaactttcaattccttttatttggtaaactaagcttcacatttggagcggctaatttcatttgtttctacttgtgctgtgatattttttattcggtaacctaaacttatccgtggtttagcctaaatttgtttgccacctattgttttaagaatgccttttatttgtttttcattataaaactttcaattccttttatttggtaaactaagcttcgcatttggagcggctaatttcatttatttctacttgtgttgtgatatttttattcttttccctgttttgtttgatttgatctcatccttagttatattccattttccccctttttgaatctaaatctctttcctattttacctattctatgaaagaataattctggttattggttaaactgtaccgtgctatatttcaaattcttttatggacttgtgcgtttctctaatttctggttgcagtttcgaccattgttcaacatgaccttttataaccagttggcagtagcttctacttactgcttgctgtgcatttttttttactattgatgtaaaagataataattaatttctttacaggttagagcaa

SEQ ID NO: 33040 - DNA, 370 bp, Medicago truncatula
  Intron number 2 from transcript Medtr7g097140.1 (locus Med tr7g097140) derived from phytozome v7.0 (chr-ID MtChr7; po s 21910180 to 21910549 reverse strand)
ggacttttaacaagcactatcttcatttggttcaggtaaaggtttctttctttttctgttctttatgattttcatatagggtttgtttggattagtttatttgagcttatcttttggtatacgttttgtgagaacatatgaaaacagtttaaagcttataaattatttcattttaaatatctcaaatagcttataaattatacataaggttttctcatgataagccattgtgctataagctgtgaattagttgtttattcaaccagggttttgtgtctctcttctgttcctttcgttattaattggttgcagtaatatatctttggaatgtacaggaggaggaggcgagggttgctaaagataacgctga

SEQ ID NO: 33041 - DNA, 776 bp, Medicago truncatula
  Intron number 1 from transcript Medtr8g109860.1 (locus Med tr8g109860) derived from phytozome v7.0 (chr-ID MtChr8; po s 24739248 to 24740023 reverse strand)
acttcgcaacctcttcctccttggttcttctgcaggtaacttctaacatcattcattggtttcttcatctcaaatctatatttccgtatttgtgatttaggttatcaaattgaaaaaaagaattgtctttttttcttgtcttttttattattattttcttcaatttttcccttaatttgttcaattttggtatgtattcagatggcaagagaggaatatagtctgggactctcatatgtggaccttctaattacaaaggaaaaaaatccagatgtttgaaatttttgatatttcacaattttttttgttgatatactttttctaatcaaaattctttgatgcttttccttttctatttttcattatgtatgaatcttattcaatactaattattatagttttgattattcatcatttttcctccttggcgtattgtgtttatgagttttcaagttttttctatgttgcattctatattagctaaccgtattgttgtttaatacctctttcatctgttttagtgattccctttgagttataatgttttgaaggaatgaaaataatatatgattgtttagggtttagaaatgcatttgtaaaatctcattggtcattttgctgctattgatttttattgtccattaagcattggttttaaaaggatgttatgtgttcacccttaatattaagatttgaccatttgatttcagaattttgttcccaacttttaatttcacaatggtatacattcttgcattttttgtttttagatttct

SEQ ID NO: 33042 - DNA, 617 bp, Medicago truncatula
  Intron number 1 from transcript Medtr8g090110.1 (locus Med tr8g090110) derived from phytozome v7.0 (chr-ID MtChr8; po s 19562174 to 19562790)
ccacctctcatcgtcttcttcttcacccttctcaggttctctctctctctctctctctctctacccctttgatttcattcttctatattctctttacttttcacttttcttctcttttaagacttcaattttaatctttccctcgtttttactttgattgctattgctaccccttcaacccttaatcttccagatcggtttaaacttcattttttcgggggaatttcacctcataattttctacccactaattgttttacttcatttatctctaaattgctttactttcttcctgggtttcttctcaacagccttgaactggtaaatgcaattactttgaactttgaattcccaaattctataataaagtatataagattaaattgttaggttaatttgttcttatgaattttgctttcattttagtttagtttaatattaaatatattattgattaatgattgttctttgatggggctttgctttggatttctagttcaaatgtggtttattagggtttttgaatttttaaaaattgaccttatatctttatattgatgcatatgatttaagattaagttgaatttgttattatcttatccaacgttatacaggaa

SEQ ID NO: 33043 - DNA, 876 bp, Medicago truncatula
  Intron number 1 from transcript Medtr8g074140.1 (locus Med tr8g074140) derived from phytozome v7.0 (chr-ID MtChr8; po s 14695473 to 14696348 reverse strand)
actggagtccagaaccagttcatatttgtgggtgtgtaagtatggttatcttctttccatgcatgatggctttacatatatgactacgacattcaagcatttcatcaaacacttggagtgctaaatatacattcttagttcattgtattatttcaagttttaaactaccacattgaacttcttagtctcaacaacattcagaatgcaaacatacaaacatttgatcatttactaaaaaaaaaaaaatcaactttacattaaccttaaacactaacatatcaccaatttaaaaaaaaaaaactaccatataaaattaacacgtgaatacaaatggattatgaacaagtgttagattcttgaaaagttgattgactttgaagaaatgaattggatggatattggtttgagagatattgaagggagttgatgtgtttttgtgtttgaaacaaaagtgggagttcatgttattgttatgaaataagatcagaatgcaacaacatttaacggtcactgggaaagagtaaatagtagttaactactatatttaatatataaatatacaattcaatctatataaaatgagctaaattaaccaagtaattgagttcaagtggttaatgagtttcatcaatgatgaattattttggataatctgactttgatttttgatagaacaatttttagtcatacttcatttacctctgaccaaactcaaaaataccagggtccctttttctttagaactagagggttaaaaaaaaaagaattttgtataaaaaaatgaaattattgtcataattcatagttaattagatatcattgtaacgaatatatacttatatcaatttatttgttaatctttacagcttatatcaa

SEQ ID NO: 33044 - DNA, 1050 bp, Medicago truncatula
  Intron number 1 from transcript Medtr7g137930.1 (locus Med tr7g137930) derived from phytozome v7.0 (chr-ID MtChr7; po s 32619231 to 32620280)
tgttcatccactctctcagattcaccttctctaaggtctcttacataattgcttatccattctttattttattttttttattttgaaaaaacatcaaaaataagataatggtatttttcctatttttatttggagtttgtcacaaacatgttttcttttttactttttttgttctttagatgtttatgttttgttctgacttcgatgaatttaagaggaattcaactgttttttcttctttcatcattatgttagtttgtgtagaattgaagtcaattatgtcacattttttttttttaaggataagaaaaatgatatttaacatatctgaattatatgatttttgattttctcaggctcttatatgcaataaacaataagtttctcttttagatgatactgaatcataggagaaaacaaagcagaaataaatcaatattttatattccaattcagaaacatatacaccgtttcattttgtgtggtggaatggaatcctcttatggaacttaatatatatactattaagaaagcttaaactgttaatttttttctctcaagttgatttaaacaattagtgctttattgcataacacagtagttcagtaatggccacgcttggctactgtttttttcaccagccttttctgatttctatatccatattcagtttgatccatttgcatatagtatattcaattttaatattcattcctctacacagtgaagtcctgaaattctcctcagttttaaatttttcatggtcacaatttaattttaagatttctaattattaaattctgagattctgagtcttgtgagtcagaaattgtcttcatgttaagtcacggcattctcaacttgcttaacatgtcataattatttcataagaaagacacgaataaaaattattaatatagttcctttctatgtgctattgaagaatttcttacctgctcctttttttcttctatataagtttgtactaaccttaatctattttcaatatgcacagattaagacaatataagaggagagtatatcacaaaa

SEQ ID NO: 33045 - DNA, 947 bp, Medicago truncatula; identical to SEQ ID NO: 27932
  Intron number 2 from transcript Medtr8g151270.1 (locus Med tr8g151270) derived from phytozome v7.0 (chr-ID MtChr8; po s 37265372 to 37266318)

SEQ ID NO: 33046 - DNA, 822 bp, Medicago truncatula
  Intron number 1 from transcript Medtr8g089460.1 (locus Med tr8g089460) derived from phytozome v7.0 (chr-ID MtChr8; po s 19234958 to 19235779)
aatttctatttgaaagtgatccaagttttttaagctcataaagttgtttgtcaatcatgtcataaaatacctcaatttgaaagtgatttaagtttaaaactcttactttatttttcggttttccttctaacatatatgaatgcatcatacatatttacaatgacaatattttgcttctcacaaaacaactatacttcattaagtaaatcatgtcaactatttttctcatgttttgcaatttttcctttgacacttcaattaatatcatgacattcaaaagatcttgagtttttctttgcaagcgaaaatatgtatttgatccttgcaaatatttgcaattttttttcttcgaaatatgcccttgcaaaatcatcacataaatggatccaataactattttaaaagagacaattttttgcaaggccacaattaatttttttttgcaaggatcaaaatccaaactgaccatatttacgaggaccaaacacatatttgaataattctttgcaatattgaaacaaatctttagtaattaccacttttatttcatttgtttgcaacacaactttttccgtttgagtggagaagaatctagttcgattatcccgttttacttcacttttttaaaaaggaaagaaaaaaacataaaaaatgtgtttaggacatagtttaaagaagtaaaaaatgtgacttctatataaaaaataataatgtaacttttatataaaaaataatataagtatttgaacaacttcaaataaaacatatatgaaatatttattttcaggtaaaggattttaataatattgcaaaaagtgagga

SEQ ID NO: 33047 - DNA, 631 bp, Medicago truncatula
  Intron number 1 from transcript Medtr7g093040.1 (locus Med tr7g093040) derived from phytozome v7.0 (chr-ID MtChr7; po s 20675513 to 20676143)
aaggcaagtggtatagtacctacggtgaccctaataattgtcgtatctgaaaatgagtgctctatttcttgaaatggtactatgatggctttgttatttatgaactataagaaaatgtatacccaaaatcatgcattgtgagtggttttgacaataaaaaaaagagagaaaatggtttaaagacaacttttactattaaaaagagaataagaaaaatgatagaagagatacaaaatattgattattttacattgattataaacttgcgtatatgatagttgaagttgaaaaatgaaattaaaattttattttatccttgtaagttatagttggcttgtttttttatctctggtgaggcctacgttaccccttcatgaattgggggtaattgatccctaatgacaagtctaatttgattacagaatgaagaagatgaacattagatgtttagaatgaagaagatgaaaattagatgttgaatgaaagaaatgaagaagattgatgtttttaagatgaaaatggtaattggttgtatgaaaaaaccaaaatgatgaagtctacattatcacttgatgaattgggggtaatttacctataataacaagtaggattcgattatgaaacgaaagag

SEQ ID NO: 33048 - DNA, 597 bp, Medicago truncatula
  Intron number 3 from transcript Medtr7g117140.1 (locus Med tr7g117140) derived from phytozome v7.0 (chr-ID MtChr7; po s 27287024 to 27287620 reverse strand)
ttttaagtttaattacttacttttctcaattatcatttgcttcttatcattttggtgattatgtctgccatgaactcactttataattatactattgagaattgcggtcaaatgtggctgatgaggcttcaatcacagtcacatagacatcaaaatcttgatgtgcttttgcattggcgtatgaatattttatctaggtttatccacgggcataaacacttgacaaagtatttgaaatgacttatgaaaacaacttatgtcatgcttatcaacttttatcaactaattttgataggctctttaggatagcttgtgaaaacaatgtaaagcttattgaataaaagattgaccatattttctgtctatagaaatagcttatacatcagctttgatatgatagacgttcaattgaattgtttttccaaacaagtcccaaatcatggtcagagacctttcttcaaaaccctgcctagcatgagattattaatccctctttaccacgaacacattattattattattattattattattattattattattattattattattttggagatgactgaaatgtgtttctgtttcttgttgtag

SEQ ID NO: 33049 - DNA, 1029 bp, Medicago truncatula
  Intron number 1 from transcript Medtr7g093220.1 (locus Med tr7g093220) derived from phytozome v7.0 (chr-ID MtChr7; po s 20770524 to 20771552 reverse strand)
gttgccttctaagccaacccctcctgctcaggctggttagttactgtttcgttttttggactctcatattagggttttgattatactaattcaattaatttgatgaatattttgatttgttgttgttttgtttacttttttttttaatttgttgatttattaataatatgtctatctttgatgtttttgtaggtcatttataataaatctggcttttctcaatttgaaagttgttatttgttttaattaacttttttttgatgatatatattttttaactaggttagaagttctgttgctgctgttgtgtattttgtgatgtcaattgttggtatctacaggtttagacaatagttggttaattattgtatgttgtctgtgtggttgataaaacattacagtgtctttgattcatgtagcctaccgcacttaatgggtaactagacaaggcttggttgttgttgttgtattgtatgttgtctgtgtgattgatggctagtggttcatttttgttcacaattgtaaataatatgttttagggcctgtttggataaacagctttttttttttgtagcttatagcacaagtgcttatcatttgtataagcttgcataagctatttttatagcaaaagataaaagtataagcttgcataagctatttttatagcaaaagatgaaataacgataaattggttttgtatatttcccataagttgtttttatataaagcttgtgatggattgctgttcaaaaaatttggatggctgtaatttgtagatgttttaatttaatgcgtaacacattcttccaatagtcaagtcagttgaaatgtgttttttcaagtgcaacatcatagcattgaaatattagtttgttctgtgcgtgtatatgtattttgttgtccattaagtttatataataaggttttttctatgctgtactggtttttgaatggtcactcgtgattcttcttcatgcatactaacattttttctgatgttttttttgatagtgagggagtccagaa

SEQ ID NO: 33050 - DNA, 619 bp, Medicago truncatula
  Intron number 3 from transcript Medtr7g140510.1 (locus Med tr7g140510) derived from phytozome v7.0 (chr-ID MtChr7; po s 33855756 to 33856374 reverse strand)
tttctaaggtgcttttctttattcgttttttaatttaaacaatattaacagattttaggatttcatcgtcttaaattagcaattgaatattcagatttttaaactaatttgcgaagacaagtttaaacatttttagccgttagatcaaaactgctcctggtgtagttagattctcaattctagtggatttgttttcgcatctccacgtcttgggatattttttgacccagtgtatttcaatttggataagctgcattgacaaatgttgcggaaatatgattgacagtgagatctgttatcctaatatggtgaaatatcagttaatttttttattttggagtagcattgatgaatcatgagagagacaataattttattacttattattacataggtaataagtgtcttttattacttactacttattacgtaagttacaaccccttcgaatcctataggtaggatatagaatattcagatttcatcatcttgttgaatattcagattttaggatttgagtatcttaaattagcaattgaatattcagattttttaagtagttattgattgctttgttgtgtgtggtataaagtctgagcttaaggagaagctggcaaca

SEQ ID NO: 33051 - DNA, 465 bp, Medicago truncatula
  Intron number 1 from transcript Medtr8g015630.1 (locus Med tr8g015630) derived from phytozome v7.0 (chr-ID MtChr8; po s 2821172 to 2821636)
ggtaacctaaataacattaatccttttcattttatcaacaattctatgtattttttttattctttattgtctttgtttatgattaggaaacggaaattgaaaataagtttgctgatcaatgatgtaattttgcattaatatgttttatgcagtcgaattaatttgggttaacatgcactttgttcatttgttattatttcaaatgattttcactttagaattaccatgcgaagatatatacaatttttttttgctttcatgttttatgcatgtaacttgtaacttggtattgttgccaaacttggaaaatcaagcctattttattctttgttgttttctcttgtcttatttttagttccatgtatgcatttgaatgttgaacttacccttcgtttttttattttatctgatcaacacaataaataaacagaacttattaagaagcgccgttcaaacaaaaaaaga

SEQ ID NO: 33052 - DNA, 469 bp, Medicago truncatula
  Intron number 3 from transcript Medtr8g127700.1 (locus Med tr8g127700) derived from phytozome v7.0 (chr-ID MtChr8; po s 29611759 to 29612227 reverse strand)
aagccagaggtatttttcaaacattctagatttctaagtctataagttgtacgtgtgtttatgttctgtccggataaatgacaaacgcttattgtataagtgcttatttataagccatttttataacaaaggatgaaataaaatcaactgttttcatataaactataagttgtttacataagttgtcatggagagcttatggaaataagctgaaatcaagtcatgaacacttcataaatcattttcataagctctcccaaatagtttcataagtgcttatagtagataagttcaaataattcaatccatacaggcccttaagcttgttttggatgatcaagttttgacttttgatatgaaaattgataactcttctatggtgactaatttgttcaatgcttcctccatcaaattgtataatgttttactgtcaggttagtggagctgatactacaagggcgtaccttag

SEQ ID NO: 33053 - DNA, 632 bp, Medicago truncatula
  Intron number 1 from transcript Medtr7g148340.1 (locus Med tr7g148340) derived from phytozome v7.0 (chr-ID MtChr7; po s 35134498 to 35135129 reverse strand)
gtcgcaaccaaccaaagtgagtaacgtttcatatcatttttagctttttaatttaacttagggttaaataagttttttatccttatatatatagttaattttgtttttagtcatcataagaaaagtgacatgttttggtcttaataaaaaaatttagaacataaaattttagtccttgtaaaattaaaatttgattaattatacttaaatttttaaacatttaaataattcttgacatatttatttagaacataataatacaaagttcctctgagaaatattagttcaaaatttgaattctaggtcaaaatttgatgtttagaaaaattaatatttagtttattatgtgttaaaaatatgtcaattttttttatgaggactaaaaataaagttcgttcaacatttttgaagtttcttataatgttcttaagttgaccttgttatcttttgatttaaccatttcttccaagcacacacctcgtgctggaagtgttgatcttttgattaatctaaattcgttttaacttcttcaaacaacaacatgcatgtaaaaatttatttagccctttaatttttatataatattacatcatatgtactaacatttattttattcttattaggcatccctg

SEQ ID NO: 33054 - DNA, 846 bp, Medicago truncatula
  Intron number 3 from transcript Medtr7g143660.1 (locus Med tr7g143660) derived from phytozome v7.0 (chr-ID MtChr7; po s 34529308 to 34530153)
tactctacaaagttacacgtcaggttagttcattgtgatcctcggagtaactattgaaatacatttcatatcaattgtaaactttcctgttgttgctgcttcagttcaaccgaaaaaatgtgtttacatagtgagttaactatcataactcataaggtttttcacccaaccaattgatcctgaaagctttccgtatttgaattatgaattgcagaagttcgtgctcataaatccttctaacttgatgtgcaaccagtacaaagataactgaataacagatttcttaatcgtaaactggggtctgtcagacaacctaatagaagagagaatctcctagaatagaatgtactggattaagtcgtgtttgacactttcaaactgtgatgcaaattgatagcattcgtccatctcagaaagtggggagggatcaggggttacccctaggggattatacactacgagagagtgaataacgatctaggtaagtttacaggaattcttgacaagaacaagaggtgactgagtgggtattgagatatggaaaggttttgatatctgaacttatttctggttatgaatatatttgggctaagattgacctgtttggaattttaaaacttgttttgggttttttgaaaatattaggcagttctgcttttttttagcaccctaaataaaagggaacatccggacatgtaggataggaattgttaaatcattcattgtttgagtgtactttcattcctggttgcttttttcacgtcaacataataattacttactataagagggttcacaggagtgaatttatgcaggaaggatttaccagattgtggagaggcacaa

SEQ ID NO: 33055 - DNA, 694 bp, Medicago truncatula
  Intron number 1 from transcript Medtr7g121100.1 (locus Med tr7g121100) derived from phytozome v7.0 (chr-ID MtChr7; po s 28434140 to 28434833 reverse strand)
aagtgaaggttcggtactccaatctaggataccggctggtctaatggacatgtaagtatatcataatattctgtgaatgttcattaaaccactgtacctgtttttgcattactcgtcaattgtaatgcaaaaacaatttaatgatacttgtctgcttgttttgatttattagacactttaaggtttttgttacattgctgtctcggtaaatcaaaaacctgtgatgttgtcattctcaaataagtctgtgatggaaaaaaattgtacacacactaaggatcaaagataggaatacacagaagatgctctagaaagtaaatagtgaaagaatcatgatttgtggttcagtcccttttgcatgatcatgaaacaagtcttgtgaattgtgggtcgtcctgcaaatccaagtattctactttgaatataatgggaataaccgtttctctcctttgtttcaaagaatctctgattgattaagaagattgctcttgcacattgtagccattctttatttgctctgcaattcatattactatttgtatacatggatgattgtgagtggtggttaattacatttacatgtcaattttcctttggaaattatattttttattgtttttacaatatctttttgctctcttatatgaccttatttaagtgctttttttttgttgctcttggggaaatgtttaga

SEQ ID NO: 33056 - DNA, 1010 bp, Medicago truncatula
  Intron number 4 from transcript Medtr7g105190.1 (locus Med tr7g105190) derived from phytozome v7.0 (chr-ID MtChr7; po s 24059270 to 24060279)
agctatttggggtttaccgtttgatgttggtaatcagcaactttatgcaacgagttatttgcgaaacagattctttagaagtcctctgtcttattcaagattcgaatcactctcgtatgcatgtatacccttctctgtttgagaagatttattagttaaaggagcatattgctaaaaaaaaaaaatctaacatgtgtttcgagagggcaaccattgcacaaatttctttgccaagcttggacgttcttcgaaattaggtgtgactttttagcaggctcccccgttagagttgaagtcaatgttaaggcttgatgcctcatgctgagcccagattttaggatttttttttcttttcttctttttcttttgtcattctaccaaaaaaaacatattacatcaaagtttaatttatatacataatcaatgtataaaagttttacacatgcatctaatgatgtgttgccatattattttataagttaaaatcatatattttatcatacctcattaattaatgcaaaaacacatcattggatgtatgtaaaacttgtgtacactgaaattgtatataaattaaactcgttgtatcaatatattattgtttttcatttttttaattttacttatcaatcgtcaaggtcgttcctctgttgtagttttttcaacttaaaaaaaaaaaaaagatataaagattagtttgtttaaaaaaagttacacgaatgagaaacttattttagagaaacgcggtaacttttgtgaatttggagatttggataatatataagtataataacaggtgagatatacattatagttagtttttctctctcttcatgagtagttgtctctatttaccctaattcatcctctcttttatcaagaaccttcatgagtactttgtgctacacatgtgggatcatggatcacatggaccaattatgtgaagtttatttttcctattgatgatgacaatgttgtccaacaatgggagtgcaattaagggcataggt

SEQ ID NO: 33057 - DNA, 1015 bp, Medicago truncatula
  Intron number 1 from transcript Medtr8g092820.1 (locus Med tr8g092820) derived from phytozome v7.0 (chr-ID MtChr8; po s 20126432 to 20127446 reverse strand)
caaacaactccttagttcaggtattttatacatacataactttgtaagagaaatgtttggatcacatatattaatatattgatgacacatcgtttcttggttgaggtaaataagaatttgacatgacaactacatattcatcaataaaagatagtagaattattcatgatgagttgacattaaccttgaaatgattaatttgtcttacattgtttatgtttatgttgttaaataatataagacaaataaattattttgatttagcatagataactttatctaccttttattgatggattaataagaattttcttttatgttacttggaaagagaaaggaagcatgacgttgagagagttgtgagatctgaatttttatcttccgactcccaatatgttccatacccaattttattattattttacaacataattgtttctaaattggtaaatgacacctcgtattcaatggaaaatatactctgtaaatgcaaccaaacggtggaatataattgcttctccaacttacaaagtttttatgtctaagctgatggagaaattcatttttaagtttttaagtgagttctatgaatacgtcacttatttataatattttaacaataatatttttaataagtattcaataactcaaacgtaacacctcaatttttttaatttttgttttggaaacatttacatatataattgacactttttttttaagtgataataatttgacaaaaacaaatattttcaagtgagatttttttttttgtccactaatttagtggttagaaattcatattttaaaattgaataagtgggaaaactctccccaaaagttttagcgttgttgcatgctcaaagctgaattcaaattcaactaaactaagttaatatgagatcaaagaagctcatagttgtaattagaaaaatgtacttgttttcttctaattttatgtgccgatttcatgtatacagcgaaaggtaatatatttgacaaaacctttgagaga

SEQ ID NO: 33058 - DNA, 772 bp, Medicago truncatula
  Intron number 3 from transcript Medtr8g112590.1 (locus Med tr8g112590) derived from phytozome v7.0 (chr-ID MtChr8; po s 25374171 to 25374942 reverse strand)
ctacaaaagcacaggctgctttcaggggttatctggtacgtaactaactgttttatagatattttccgatgaaattcttaagtgccttttagtctgcaaaattatgaatttttaactataaaccatggaaatatattttaaagtgcactttttgattgtggtggattgagaaatgaagtttagaagatttaatgttactacttactagagcacaatcttgaagcttagtgcagcattttagtcttagtgttacaataatccctacattttaatagttggcttgtctttatttctccttaatttcatcgattataaatttgtgctcttaatttgaaatcgattttgggactttgaaatatttatttgtccagagcagctgtcgagcaatgtagctactgccttcatgttctctaaatagagaagctttactatttctttcatgttataactaattctcaaaagcttcttgttggagatcaatacctcttggttctcactgatatgtcactctagatagaataacatacttcatcaataaatttgttgccatcttgaattctttgctgtgtatgtctctgattatctgtttactgacaaatatgtcgatgaaagaattggcaaatggaccagttttttaatttattggcattatctttttggaggattgattgtgtgagttctggtaagttgttatatttgatattttgccttaactaatgcaaatgtctctattgaaggcccggagagcatttagagccttaaaaggcataat

SEQ ID NO: 33059 - DNA, 696 bp, Medicago truncatula
  Intron number 2 from transcript Medtr7g090150.1 (locus Med tr7g090150) derived from phytozome v7.0 (chr-ID MtChr7; po s 20040014 to 20040709)
cgattctgttgagacttttatctttgattgtgacggtatgttatagtgcaatctatcattgaattggatagaaaaaaatagtgatgaatgatgattatgttttttctaggactatgagaaaagtgtatgtgtgtcagtaatcttattaatttttcttttatatgaaaatgttaataagttagtggttatgttattttccagagttggaatatggacatcatgcttaaaatggtttcagtgtcatcaactgagttatttgtttgatgatatgtatatcctgttatttttgctaggatctaaatcatttacatgtgagttcttttctatatatcattagtttaaggatcaaattatgtgtttttatggttaatgttgtttgaaattataaacattgatttgctttacactttgtgacaacttccagctggtgttacaaggggatcatgtcatatttgatagacaccatatgaacttgactgaactacacattttttctttcttttagttaaacgatgtctttgtcccccatgtattgatttcattttgttctctcttcgatggtatacttttgagttgttaacacttgatgctttctttttcttaatatgtgtatgccattgggttcttatcaatgggttgatattgatgtaacggtacttttcctttttccgttgatacttaatttgcaggagttat

SEQ ID NO: 33060 - DNA, 886 bp, Medicago truncatula
  Intron number 5 from transcript Medtr8g129160.1 (locus Med tr8g129160) derived from phytozome v7.0 (chr-ID MtChr8; po s 30407100 to 30407985)
acaggttgaggaggagtattgaggtgattattcaacttatttatgattcattccatcattacctattttatatttttgttggtttcactttctctcttcgtacacttcactactgttaatgaccattctaacagcataaaatataaataaccactcagatttctcttttattcacctcatctatgaacataataaatttctgggtttcagttgtcttgatgatactgatatttaagctgaatgatatgctaatgttgtttcgtaagacgaggtatatatacttcaggtttatgtccatattttggtatctgcccgtgtacttctatttgagtattacaataagttttagcttcattcggttttaagtgtctattatctagtctcaattcattttccctcaactattgagggaaatataacattttccttacattttgtttttatttttactacaaaaagtgaaggattttctcttgcaataaaaatattaacattccattaatagattggtcagttgcagaaagaaaacattgtgaaaatggctgcatttaaaaatcaaattgtgaattagacttcagaggagttagtagaaatatcttgaataatgaaatccacctgtgtagaagatttggccaaaattttggtgggcatgattaaaattttccctctatgtaatgatttacctgattaatggatgttgtatgtcgtggagtactaaatacaagtttgtttcatattcttgtttgtcgggcaatgtattgtgtatatttctaaatgccctctctttttatccctttgctgggtattaattccagcacattaaccttttgttcattaaactaaatgtatttaaattgcttatttccttcagaggtctttggtagag

SEQ ID NO: 33061 - DNA, 643 bp, Medicago truncatula
  Intron number 1 from transcript Medtr7g104750.1 (locus Med tr7g104750) derived from phytozome v7.0 (chr-ID MtChr7; po s 23848512 to 23849154)
gctgaagccagaatcgaacaggtgaccactaggttccagcaaccttaaaaaaaggaagaaaaaaaaaaaaaagcaaaaattggctgatgcaagattcaagcacgagaccactggttaccaaaaaccttacttagccactcgggtaaattcaacttttgcaaaatagcactttttatcatatatataaacgctatctattatttccttctaaagatagcgctttttatcatgtctataaacgctggctatttccttctaaagatagcgctcacaaacgctatctaatattgaattatagatagcgctttttcaatcaaacgccatttaagtaaatcgtacacgcttttttaaatttaacacttttttatggaaccatacaagcgctttaaaataaaatgctactagaaatttgtaccttatatagcgttttttttgaaaaagcgctagctaacacttccgtgtttcttttaatagcgcttttgtgatataagcgctattaaagtagcgttatttttcctctattttgtagtagtgtatgttttattttgacaaattggcaatgcaattattttattttaatttttttaggaaaattcttttaaatggactaacttcattaatcaatatatcttggcatagggtc

SEQ ID NO: 33062 - DNA, 615 bp, Medicago truncatula
  Intron number 2 from transcript Medtr7g111420.2 (locus Med tr7g111420) derived from phytozome v7.0 (chr-ID MtChr7; po s 26172220 to 26172834 reverse strand)
acaaactgacccatccagtgttcaagaccaaaaacgtgagtttttttttcctttcaaatcccaataatgttttgcttgaaattcaaaaagaaggagtcttttcctttcacttttggtttgttatagagaatctctttgtttcacaccaatagcatgttcagcagaatcatatctgcagcagagtactacctttgaccagatcctttctgcagaaaagcaaaacaaaccaaaagtgtggaaaaaatggaatagacgtttttatttttattttcagtttctatcctttttccaaaaaagggaaatttatcccttctctctccatatttttctatatatttacttgtatttttctattaatactattctcaaaatatatacaagagaagagaggtagaaatgcatcacactcactcttcttgtaattctcatcgtaatcattttgtcccttgaaaaatacaccctctttattcttctatcatttctctctcgattagtatatttatgttatgttatacttctacaataaaatgtatttttatgttatacatacataactatttaatgttgctgaatttggtaaatatttgcatctccacagagaattcaacatcagga

SEQ ID NO: 33063 - DNA, 494 bp, Medicago truncatula
  Intron number 1 from transcript Medtr8g136910.1 (locus Med tr8g136910) derived from phytozome v7.0 (chr-ID MtChr8; po s 32719585 to 32720078)
taaacggtaagagttatgaagctaagttaatcaataaatgttgattttttgttttgtttcgcgatatcaatatccaatgtcaaacttgattcaatataagcgtacgggaccaaaccacacacaattcttattttgaattaaataataatttttttatctcaaaattgattcatactacagtgcgagaatcccaaactaatgataaaaaaaggattcatactacattgcgaatcccaaactaatgataaaaaaatgaaggacaatttgatattttaatctttatattctcagaaaagttcttcttctaaattatctttgaaattcacgaaacaatcaccatctcgtttaagaaactcaattattacaaatctcctctcccttctctctaatttcctcaccgccaaacactcacccctctctcttttcatccaatttttaccgtcatcatgtagacatcaggtggtggtggtgcgacggtcggctttagccatccg

SEQ ID NO: 33064 - DNA, 635 bp, Medicago truncatula
  Intron number 1 from transcript Medtr7g135670.1 (locus Med tr7g135670) derived from phytozome v7.0 (chr-ID MtChr7; po s 32333226 to 32333860 reverse strand)
tcataggtaattatgtttctaattcaatcaacatgcctccatatcatcttgtttatttatatattgatccttaattcaattaataagagcatagggaccatactttataagaagattatgtcctaaagataaagatagagttttttcagctgtaaattaactgtgatatttagacaacaaaagatggaggatctaagaagagggagagataaacaaaaatacaatcaagactttatggttgtaaatgagtgcatctaattcagacttcttaaagatatttttgattcatttattaaaaaatcatgtatctcatgtcaaaataaatgctaaatactcattaggagatacatgatagagtttatggttgtaatgagtgcatcttattcagacttttaaagatattcagatacttgcatagagtcctaaactagaggtgtgagaaggcaactaaacattatataaattattaatattaatttttttgtttcgaaactattttatttgaaaaatgaaaacaaggtaattaatttgattagttatttttgaaaaatgtgtccatatatttttcataactctatatacaatgtttttttttttaatttaattggtattaattgcctttagcatcacaatag

SEQ ID NO: 33065 - DNA, 609 bp, Medicago truncatula
  Intron number 1 from transcript Medtr8g132910.1 (locus Med tr8g132910) derived from phytozome v7.0 (chr-ID MtChr8; po s 31527744 to 31528352 reverse strand)
gtggcaacaccaacgttagtggtggcattgttgaggtacaacctcttattctctcactatttttttgcatttctcaaacttgaatacttttaatattttcctatgatcctgttactacagtcaaataatcatatcccaaggccactaatctaaagcatttcagtgttttcattatgcatgggaggttggtagcatctcaatatttatgaagctttgtaatttggttgctttagcactgattttgtttgatgttgtattcatactttaacaagatattttcataaattgaatcaacaaaataatgttaatgatttttcaaattttatttggaagagaatgttgtatgatgattgttcgattttgtataatgatcagtttatacacgtcattgagtgagataatttgatatgaacattaaactctagttatagggagacaaaaatatgtttgttgttttaatccaatttccaacaaatattatgcttaaattagattgaataatacaaccatttaaatttgcatatatttaatataatataattaatgaatgaggctgatttggtactgcaatcagggtaataataaacaatcagtatatttcacatcggt

SEQ ID NO: 33066 - DNA, 1043 bp, Medicago truncatula
  Intron number 3 from transcript Medtr8g088930.1 (locus Med tr8g088930) derived from phytozome v7.0 (chr-ID MtChr8; po s 18992035 to 18993077 reverse strand)
tttgaaaagggcaagagtgctcttcgaagttggaggtatatttattcattgttgcatatcagtttgtactttaggttattcaagagatgtttatgaattatgctactaattagaaatgttagaaatgtaattgtttactagtttgttaatgagtaaatagacaaattagtccttgaaattttaagcatcgtgttttttcttgttagtaattgcagttatgaatggactgattacttacaagttagtccttgaaagacctaagcttcataatcataagcaaattagtctatggtgttgtggtattgacctatgaaacacggacacagacaaaacacaacattgataataatttgagaaaatgatataatataatgtaatcacacgtgtcggtgtcagaccatgacacatgttggacaccagacatggctttgatcagaagtgtcagtgctatagaggtattgacatgggatcaacgtggagaagtcacatattttgttaacgtgccatgtcattgtgtctaatggtgaaagttaatagatggactattttgactgaaactttacaatttcaatgatgtatttaccaattctcaaaaatcatgagctactttgacctacacttacagtttcgatgaccaatttacttgtttgttagtgcttagtactagttagttgctcttctactctctatttaagtgatcagtgatataatagtttgatgcaactacacattattttacccattcaattcaatcaaatacaaattacacttctcttccaatcctctcctatttctgatccatgcttcttaatacttcttttaaggacaatcctttgaggctatagtgcaaataaatgtgtaatcagaattgatttaatttcaagtgtatcttgattctatgctattaaaatttaagtttgattggtgtacccttatttctcacttagaaaacaaactcagtttagagagtttttatttttcttgtttaatgcgtgtgtattaagatagagttttatgggaaaattctttgcaggcattttgga

SEQ ID NO: 33067 - DNA, 307 bp, Medicago truncatula
  Intron number 4 from transcript Medtr7g100240.1 (locus Med tr7g100240) derived from phytozome v7.0 (chr-ID MtChr7; po s 22553279 to 22553585)
gacattggacaggaatcagcagtttttgtaaagtaatttttttctattgactttgataagcaattgaaatatattctctaacaccttcttgtccaattttttttgccatttgtttgttgtcgaaactttgctgccctttttgagtcttagtgctgactgaatgaatgtcttatagtatggtggacagatctatctagcactttacactttagttgaaatacacttctatacatgtgattatatcatctattttttcctacaaattattgccgtatctgtgttagtatcatgtacattatcctgcagt

SEQ ID NO: 33068 - DNA, 556 bp, Medicago truncatula
  Intron number 2 from transcript Medtr7g100070.1 (locus Med tr7g100070) derived from phytozome v7.0 (chr-ID MtChr7; po s 22466657 to 22467212)
gtgtaatctctcacctacaatatgtggatgatactatttgtataggcgtggcaactgtggactttggactttgaaagcaatgttgacaggttttgaattgacatcgggtttaaaggtgaatttttctaaaagttgtttgttgggaattaatgtttctggcgacttcatggagatggcgtgtaatttttttaattgcacggaggggacgttgcctttcaaatacatgggccttcaaattggagcaaatccgagaaggatgtcgacttctcaacaaacttattttttaaattatgcttgccattcataatcttaaaaacttacaaaattattttttcaatgcaatatttattttttaattccacttttagatctttatcttgtgccctggttaacctttttctttctttatatataatatatagaatagatgataccctcgtaaagtaattgcaacttatagaacctatttttatttttttttgatagaaagtagggaaaccaatttgaagagcactttcctaaccttgcaacatatatgtgtaggtgacaattaact

SEQ ID NO: 33069 - DNA, 846 bp, Medicago truncatula
  Intron number 3 from transcript Medtr7g107180.1 (locus Med tr7g107180) derived from phytozome v7.0 (chr-ID MtChr7; po s 25023920 to 25024765 reverse strand)
aaagatcttcaggtaacgaaatccaatcatttttctcattttttttcttctaacgagcttatagcttttctttactagcttatggagtttgtaggttattttatcaaattttgtttctgttttacccgttttaatttgattggaaaaataaatcaaatattaattcaaggttgtaaattctcaataagtggcatttttcgtcaagttgtattctgttcatgctgaaaagtgtccgtataattaaattgattattgaatatctcaacttttttgcaaatatattctttcaacaagtgtaatttgtgtgattgtgccatttaatattagacgagtctgtatttatgaagacagggagaatgtaattttgaacaagttaatattctcaggttctattctccttggtcaattttggtgggttagtttagcatgtcaaaaaaatactaatatattatgggaataatctatgcataaaacaattgtagcagccaaagtaatataaattgtcaatttcaggaaataaattatttctcaactcatttatgttgctgtaaaaaaaaaaaatggttgatggaaaattgcttcttacccacggcttaatatttggaaattaataaaactaaacaaagggttcttggtttctaaaagctaaatgagttaatgaatcagagggcgaaatgctctattcaactttaaactcttttttggaaaagtgtaaattgtgcgcatacttcacaagtttgtgcaagtagcctttctctttgcaatcttgtttccttttctttagttttacagatttagctcggttatatatttttgttgaaattagttgtttcataaaatgtagga

SEQ ID NO: 33070 - DNA, 989 bp, Medicago truncatula
  Intron number 1 from transcript Medtr8g138430.1 (locus Med tr8g138430) derived from phytozome v7.0 (chr-ID MtChr8; po s 33413418 to 33414406)
aaggtaagcacttagcaatcaaacataaatcagggtcgacccaacgcatattgaggtctaatatgcaaatggacatttttaaaactaagaatagtgttttagtaaaattactaaatttttgattaaattttaatttcagactttttattatacaaaattatatttactattaatattacttacacatgaataggaggcaagcgggcaacaagctgcgccgctagatctttttggatggcaaaatcaatcttcgtaaacacaacatttatggatctaggagacataacattgctatgcataaccctttggactatatgtagaaggtcaactgcctctgatgctagaaagccaaaagtgtcaaaagcaaattgtattaaaagcatgttgattgtcagaacacgctttctcatgtttgaccactttgcttgacgcagcttttagagctgtctgtcctaccgtaaaagcccccaccccttaacccacaagtggtgaaaccccagtcaagtccacacatgcatgttttcctccaacccatccgtacaccataacatccgcaggcctaagtgtcgatcttctatctagtgggtcagtcagaaagttcacaggcgcctccttcttcattgatactcctgctcgcctgaatatatcaaaaagtacatccttaacaaagtcatgtctgtatttaaagtcgggaagctccttacaatgaacggcatgcttcccaaaagtatccagacatttaatatttctttttcaattgatagtaaagtcaattgatttaatctttattgataaatattaattttgattttgaaaataatagagtatgtgtctttatcattaagtaaaatatacttttggattgctttggtggctttacctttgagtcgacatcaggtaaactaaagaagtttatttgaataacttcttatgtatttcttttatgatatgcaggcagccccttcaaatatctgaaacaaaagattgat

SEQ ID NO: 33071 - DNA, 525 bp, Medicago truncatula
  Intron number 1 from transcript Medtr8g037030.1 (locus Med tr8g037030) derived from phytozome v7.0 (chr-ID MtChr8; po s 7911479 to 7912003)
cccgcgagagttcgaatctctcaggcgacgtatttgtaattttttttttcattactttgaatgcttcatttgttttatttttagggaacgcttcattttcgaaaaacacaatattttatttcttcctatctttttaatcttttcgaatttttcttttctttatgaaattgaaaataccaatttattaacattgaaaactccaatttgtagtgatctaatgcccctttttgaaagtattcaacttttttttttttgaaggaaaagaaaagtattgaactacttcatttttattttcttcctcttcattctgcattttccctttcatcgtgtctctttttatgaattcctcccttcttaattaaaaacccttttactaaaaagtcatctcgttaactaagtccctatatgaattactataaacatttttttttagtacctattttattttagttaaatgggtaatattgatgtgcaatcaaatggtcaagagtctgaaacaccacaattttgcattcaaggtggctt

SEQ ID NO: 33072 - DNA, 498 bp, Medicago truncatula
  Intron number 1 from transcript Medtr8g138310.1 (locus Med tr8g138310) derived from phytozome v7.0 (chr-ID MtChr8; po s 33361005 to 33361502 reverse strand)
tttatagatctgggtttgcaaaaaataaaataaaataaattttgatatcgttaaaaccaaacaatgaaaaaaaatggtttttattctctttaatgcttatggaattgctttgacttaaaaaaaaaaaattgcttatgtgacattgatggagtgagaaagaaagtccattgaggtggtggaggcaggagggagatgtgttgtagaacgatgtcaaaattaagaaacgatgatttgttcattttaattctttctgggagatgtattgtagaaagtattgcttatgtgacattgatggaatgagaaagaatgtcttgtggtatttttcgcttggtggtattttttagcttctttgtgctttttaattctttctgggagatgtattgtagaaagtattgcttatctggttcgcttggtggtattttttagcttctttgtgctttttaattcttccggaagaagaaagaaaaaaaaaaaaaaaaaaaggaaatggcaggtttg

SEQ ID NO: 33073 - DNA, 935 bp, Medicago truncatula
  Intron number 1 from transcript Medtr8g102820.1 (locus Med tr8g102820) derived from phytozome v7.0 (chr-ID MtChr8; po s 22761636 to 22762570 reverse strand)
ttctgtgcagaaattgaaacactgtccacccaagtatttttcataactttctctttcggcggtaatgaggcgacacttatattttctctgtgtctggtcatcaatgagagtgattgttttgcgctttccttttagaattgttcttgacacctcgtttggaaaatgttaaacagggaaataacaacaatattagtctaatacatattaacatggataagacgtatgcaaatatagttacatataatttataaaataaaggtagcataactgattttaagctaaagaaaatgtatcatgacttctaatttatcttcctattatcttcctaaaaatgctagataaatgcattcatgtgcattatatgaaccctgttgaccaattaacattgttgaaacaaatggaaaaattaagcatcgctctcgcatgtgcatctatagctagcaccgtttgacattgatgtcttcgaacatttggtgcaactctcataatatcatccaaattggttaggattgaatttagttgttttccaaatagtgatgcaatatgtatcctaacacaaattatgcatatgaaataaagaataatgcaatatgtatttttaatttgtgcgtaaaaaaattcaaagcatgtttgtgcatacaaaaaagcagaccttcactaagtttataaattcaacaatttgcctaacctgagacaaattggaaaaattgtttacgaagtacattgagaagaagccgaactctgacttaagttctgacttatgctttgactctgagcttgagaagtgttaaggtcacgacaacaattcaagaaacatggtcaaaaaacaatcaaattagattgtgaaataataatttactctaacactgtattgtgaaatcataatgcaaacttactaagtcttaaacttctcaacaaccggataatgtaggttg

SEQ ID NO: 33074 - DNA, 524 bp, Medicago truncatula
  Intron number 1 from transcript Medtr7g134110.1 (locus Med tr7g134110) derived from phytozome v7.0 (chr-ID MtChr7; po s 31572895 to 31573418)
aggagaccttcaactgtaagtacttctctttcactttttgcatcaatgttgttgtcaatggagtaattaagtaagatctaaacctactttttattttattttagaatagtactagtttgatcatctacttgttaattttgatataatttcagttaattcacttaactgtttatgctgattctcaattaattttcacttggttagagaaaacaaaaaatgggttgtgactgttttttcagttttggttgttcattttttgataatgtaactgatctgagttgaattgtttttagctgtctagatcctacttcaatttcataattttcatcatggttttttagttactgtttgaagaagcatgagaaataaacttgtgctgttttagttcatggtttatttaatttgatagaatccaaagttgggaagttgctagtgcttgtggtttcactgatggtgtttttattttaattttttttttttaattttttttttatatatatatttttctgttttgcagcttgtgg

SEQ ID NO: 33075 - DNA, 859 bp, Medicago truncatula
  Intron number 1 from transcript Medtr7g092670.1 (locus Med tr7g092670) derived from phytozome v7.0 (chr-ID MtChr7; po s 20456966 to 20457824 reverse strand)
acatgtaagtttcttcattttgtgatgttgttaagactttgaagcactaacatgaacatatatatatcggccacctcactgacacgttgacaccgataataatttagaaaaaatatatgatttgattaaatgtaactgtttgtgttgtgtcgtatcaatgtcggacaccagatacgttgtttggtttagtcctttgttttgtttagtttagtccttgatctgtaaagaaattccgtgaaatattcctttaataagttgattgatttgggagagcatatttaagaaaattttgggggttttaaacatcttcatataaaatttctgtgttaaggacacctaatcagataaaagcaaaaaatgactcaatttattttgttagtgacatttttttcataaaatctctgggaaaccaaatgttacatgttagttaccttgtaaaattccttgattttaactttctagtttctacaataattatgtgacatttttatgtaaattgaaaacgaccatacatgttaaaagaatatagctttgcttgtgaataatactatgtccaggctggctttccattagatgtagacaacccacccatgtgatccttattacatgcaggcagcatgccagcaactaacttttaaccatagtcacgaattttctaaaaagtatatttatacataattctgaaattgaaaatagattcaattcatacacattgtcgtcggtgtaaagaattttaaagagttcaacactgtcaattaattataattgtaagattattaaaaacgttacaaattttactatatatcgataatattagaataagttctcatttttttttaaatcctcaggtactacaaca

SEQ ID NO: 33076 - DNA, 468 bp, Medicago truncatula
  Intron number 1 from transcript Medtr7g108350.1 (locus Med tr7g108350) derived from phytozome v7.0 (chr-ID MtChr7; po s 25509763 to 25510230 reverse strand)
aagtgaagttgaagacatcgaccttgaaggtaaacatattattttttactatcaaataaatgttattttttaggggtaaataagtgttggttgtgttagataatatgcttttatgaactacttattttatctatcataagggtactttaatccttttaattgtttttatagtgtaacatctttatgctataattgtttttatagatttgttcattttattagttgttgctagtaatgtttgttagtttaaagcttcatgtagcactacagcttctttgcaactttaaccctttcttttaactgtaatttttgtcaatacaatgagatcacaaaattccaacagtaacattgtgtgaatattcaaaatgatgttgtttcatataaataaataagtatatattgggtatgagtaagtaaaggagaacttattttgagagtgacattttctttatttactagacaatgtag

SEQ ID NO: 33077 - DNA, 929 bp, Medicago truncatula
  Intron number 1 from transcript Medtr7g124060.1 (locus Med tr7g124060) derived from phytozome v7.0 (chr-ID MtChr7; po s 29045720 to 29046648)
tgatttctcttttttcaatcgtattcctcctattggtatgctatcattcttctgaatttcttataattcaatttcattgtttgtttagttgcttaatcctgaatatgacttcttcaattgtagttgattatttgtagttagttattcaaaaaacaaccaattccaattgtttagatccccttttctccttccttagcatttgagatgatggtgaatactttttatttcgttgtttctgtaaacgtaggcaagagcttccgaaccatgttaaatctttgtatatgctcctactttctttatgatttgttactttattttctatcaaagatcccaaggcaattcagcgtgtgtgagtttttgccaacagatcatacttgcaaagtataccaatacttggcttgatgacagttttagggcactttgttagcatgcttaattgtttggtgaatattcacaatgaaattatatgtagcatataggcctttggtaagaagagtatatcagaatcagatgaagagtagtcaaatcactagaggcagaggaggacgacccaaaaaaactataagagaaactattaataaagatctagtgattaatgagttggatagaaaattagaaatatggtatatgatgatagaccattatggcgtcggttgatccatgcagccaaccccggttagtgggataaggcttggttgttgttgtttgattgatttcaatgctccaggggcttctgtttttcttatttgtccgggaggaaaagtgtagaattggatatttttgtcataaacaaataatgaactctctataacacctatccatcataagtgaagtttgattgaattttatagaaagatatgactgatctttcatctggccaattctttcaaacagaatcctcacctggctcatcttccggtgaagtgaga

SEQ ID NO: 33078 - DNA, 446 bp, Medicago truncatula
  Intron number 1 from transcript Medtr8g118620.1 (locus Med tr8g118620) derived from phytozome v7.0 (chr-ID MtChr8; po s 26673089 to 26673534 reverse strand)
acaaaaaatagggggcacagagcgaaaaggagaaagtaagttttactcaatgctgtaatggtatattgatatgttctttgcagttaaattaatttgggttaacatgtacttcgtccaactgttatgatttacattttgactttaaaactatgcgaagatacaattatttttgctttcctgtttttatgaaaatgcaagttctaattgattgagtggacatgtgtttatcttgccattgttgccaggcttgggaaattcagcccatttcattctattttttcctatgcatgtcttctatttttctgtggctgttgtgcgttgtcttttttcttctccttttctctttaacagtttcagccatattaaaataacctcacccttcatttcttaattgatcaaaacattaaacagaatttggtaagaagcttcgtggaaattaccagcag

SEQ ID NO: 33079 - DNA, 975 bp, Medicago truncatula
  Intron number 1 from transcript Medtr8g044530.1 (locus Med tr8g044530) derived from phytozome v7.0 (chr-ID MtChr8; po s 10016880 to 10017854)
tggctaaaatctcgtttgttggttccataaaaacggtactaaaaaattatcatttacgacttcacattttgctgtttcagtttaaatcatttacgacttcacattttgctgcttactttgttttgcttttctaattggcaagtaaatgtctttttctttttttttcacacttactagtaaatgtcaagtagactaattaaatgctgaaaaatatgatcacctagttttaattgaaaatacgtaattgaatagcgtggctttgtttcgattgaaaatgcctaacctgtaacactagatattgataagttgcattaaattttccagatcttgtgtcctccttattcacaaatgagtaacggtatttttgaaactatgtccaatgatcaaaaaattaatgcaaacttacttcattttgttttgggataaacatgatatttttggattcaatgtgttttctctgtctataattaactaattgcattggatgagaacacttcttggtatgatgtttttattttgctttgacattttttatgggatatggctgtgttaattgtttatctttgatgttctactcttggttaaactttactatattcagattttaagaaactaaataactttgttgaatttttatccaccatggcttgttgtttttttcttctcatttttcctttttgtatgatatattatcattctttcaaatagtaagtgtaattatttatcaaaatagaaaactattctcttgtagaatcaacaactgaaattattggcagcaacatttctattttatatctttgacaagtttatgaacataagtattcatgtatctttttttctttgaatgcttctcactttaatgtgttgtatttatctgtcgtattagatactcggttttttgtttttcatctcttgtagcttattgtcgtatagttttttcaatcttatgtttctttctattttcagatgtttaga

SEQ ID NO: 33080 - DNA, 534 bp, Medicago truncatula
  Intron number 3 from transcript Medtr7g138420.1 (locus Med tr7g138420) derived from phytozome v7.0 (chr-ID MtChr7; po s 32835966 to 32836499)
atcgccataagcggcacaagcacagcctaaaagaggtaggtcactttttttcgtacattgcctaccacactggcttgtttaaattgtttgtattcttcgtgttgttcaaagttctaacgtgactgaaatatctaccctatgtgggatacttgatttcatctacatcattgttttgttcgtaaatttgagctaattgctcgaagtttttctgcatgcacattcatacataaaaagattcatcaacttatgatatacacctctataaatgtaccgcgtcttgaaaatattggtctaataaaaataaaaactaattttgctgcgagtttgcacccgctccccatcttcatgtatgttactgtgtttggtagattccagtcttagatgcttatgatacttccttctctattttattatgtcttggctctttgaaattggagctggttctgtggcatgtcttggcgcttgattgacttgcttggatgttgtttcttggtcgggtttttcctggaaatgggagttttatatagaagccga

SEQ ID NO: 33081 - DNA, 886 bp, Medicago truncatula
  Intron number 1 from transcript Medtr8g138980.1 (locus Med tr8g138980) derived from phytozome v7.0 (chr-ID MtChr8; po s 33793582 to 33794467)
gagaggtaaatattgtgagatatttttatagcaaacaagggcaccgtgagatgtatgaaagaacgagatgtatcttttggctgggcaactctgaaaaaggggtgtagggttccaattcaattttttaatataccctgcaacaaaattcatctttctagttcagtgattttagtatcaatgcaattcacttttccttttcatattttggttcctatcactatccttagactttattcatgataggacattatgatctggtttgacttgtatagccgtgtcgtccatcgtggaacaaaaggctttattttttgtatataagtaaggctttctttatattggtaggcacatattattacaaatttaaagtattgagaaaagcagatatgtcaaagtaccttcaggaaccacacctagtaaattgagctgtattgttcatgaagaagttaagactattgattgttaatttgtgtttgagtaattgtcaagatccttagactattgctgtaacaaaattgaatgccccttatcacaagtcacagctctagtcccataattacctatctatcttatcatgtaattgcttgtaccccccccccccccctttcattaataaaagcattgagattctccttgttcagtgctaattagctagttgtaaagccaaaccctctaggattgatctattgatgacggatttgggtacaccaaaacaatttagtgagatattgtgtttttctcttctttatttcatcaaagttaacaaagttgtttaaaatgtaattggtttccaattcattactattagattttctcaaattatgtcaactgttactttcttgttgtatatccagttatcaattggaatttcacctattacaatagttac

SEQ ID NO: 33082 - DNA, 528 bp, Medicago truncatula
  Intron number 1 from transcript Medtr8g119040.1 (locus Med tr8g119040) derived from phytozome v7.0 (chr-ID MtChr8; po s 26890819 to 26891346)
ctgggatctctgttgggtttagtcttcaaggtacaattttgtgaactgggttttgtttcatatcaacattaacctcttcccatgatttcaatttttcattacttatttcatgcttcttctttgtttcacttgtatctatctacaatctttttccagaatgaatgcactgtggatttatacacaaagatttgttaaataatgaaactaaaaagctttgtttttagttcattctatgtgtatgtgttcttttcagtttattttcaattccacttgattttcatgttgagtactgctcattgcatgcaaatttagcatttttattgattattaattttaatgtacattagttgaaattgttactgaaaatggatcttttggagggaatttgctataattttaacaagaatgaattatgcattaaagatatatttttgtgattaaatacccttttgttgtcactcataatttttccattaaaggaaaatatgtaatcaaagtagattgatttaacttttgaacaggacaaaa

SEQ ID NO: 33083 - DNA, 873 bp, Medicago truncatula
  Intron number 1 from transcript Medtr8g122310.1 (locus Med tr8g122310) derived from phytozome v7.0 (chr-ID MtChr8; po s 28583398 to 28584270 reverse strand)
actttttcctggtattgttggcaacaagttccctcgttggcttaataatacaataaaaattgaataaatacgcaattatccttttgaaattgtaagtttcgtcaattacccttctgaaattaacaaaatttcaattacacctctgaaattgcacaacgttaatcaatttaccccctccgtcaaatttttctattagtcaacatgacgttttgcaaatacctcctgaagttttgcacttgtgtgcaaaatacctcatgaatttgaaaatttatattttttttcttcttatttttaaaagtgaatgcattatcactgaattgtgcagcatatgaactaagttttgatggtagaacaaattgacagtatttgataaaccctacgataatgttcaaaactcaagaatatttacaaaacaaatataaaaacatttctttgttccaacattagatgttgccttttctttttcaagttgtccttcatcccattagagatcaaaaggttggtggctatcatgtttttttattctcttaaaaaaacataatgaaatatacataatataatattattactattcctttcaatcctaacggggggaagaagaccatgattccttcaagatcttttataaagtgagagaagtaacaagtttatgtattttttcttgaaggtggagaagtgtcttggtgtagagtgtgcagtgctcacaatataagagaagtggaaatttttggtgtggttaaaattagcaagcaaagccatatattttgacatcttggtaattcttggttatgtcaatcatatgtcatttatgtgcttcattatgtatgtgtcatgcattagttttccatctgacaggtgtgactgtattttgct

SEQ ID NO: 33084 - DNA, 225 bp, Medicago truncatula; identical to SEQ ID NO: 32618
  Intron number 1 from transcript Medtr8g043920.1 (locus Med tr8g043920) derived from phytozome v7.0 (chr-ID MtChr8; po s 9624838 to 9625062)

SEQ ID NO: 33085 - DNA, 969 bp, Medicago truncatula
  Intron number 2 from transcript Medtr8g121700.1 (locus Med tr8g121700) derived from phytozome v7.0 (chr-ID MtChr8; po s 28288993 to 28289961)
gtttactcttggtactgttgcaccacaatttacaggtttgttcatttcattccacattttatagagattgatactttaaataaatgtggatggattctgctgtctctatatcaaatgctttcttcaaatgttaatctcatattaattcattgtttctagcttttatagtatctcttaacatagtcaaccggagtttgaacaaatcgttatcgttctgcaatactctatttagtacaaactgttgtcaaatagtggctatagcgttgtaaaatagtggaatttaagcaaaccaccaatgtcagcgatccactaataatgacaacattgactctgtttggtaaagctagcttataacagatgacttataagccaggttgtagctgatagcggataagctaactgattgattttgtagtgtttggtaaaattagcggttgaagttgcttctaaatacgaaatgacctaaaatattgtgcatttaattaatatttatttctttcaattaagattgcaggggttaaatggagataaatagtgataagctataagctacttgaattagcttatcgaaaaccgctataagtttgtctaaaaatgacacttaccaaacatgtttttttttaatcatacgagcttataagctatataagctataaactataaactcaattttatctcttaccaaacaaacacattgtgtaatcgaattgaagtttgataggatgataattatatagttatttgttgattcctaacttttggctttaattaagcgaacttgtgcaaaacattagctcaagtggttagtattgtgtaagggaggttttttgtcatatttgataaggttaatgtattttgagatgtagcttgtgccaccaggttgtctgttactcatcttactattttaagattgctgtctgaagcttctaatttgttgatgttcttctgtaggggtgtctataattgaag

SEQ ID NO: 33086 - DNA, 390 bp, Medicago truncatula
  Intron number 3 from transcript Medtr8g097060.1 (locus Med tr8g097060) derived from phytozome v7.0 (chr-ID MtChr8; po s 21461016 to 21461405 reverse strand)
gaagagcacaagttatttattctaccattttatatacataagcctatgtaagattttctttgaaactttgtttttgaatattttttcctcactttttaccatcgtttatagaagattttctaattaactttgacatctgtgtagtggacattgggtgttatttgtcattaatcccatatcggaaatcatatattatatggatccattactcaatgactatatgaattacccaaaaatgaagagtatgtttgacacgtaagtatatatatatatatttatggtcagttgttgtatatgaaaactatatatatggtcagttgtatgtaatcaaagtttacatttatattttgtagagttctaaaggtatttcgcgctgcaaggaacgctcaa

SEQ ID NO: 33087 - DNA, 615 bp, Medicago truncatula
  Intron number 1 from transcript Medtr7g108560.1 (locus Med tr7g108560) derived from phytozome v7.0 (chr-ID MtChr7; po s 25600957 to 25601571)
ctgtggcaaaaccaccctactcacctctttggctggtctctttctctattatatttcaatttaaatgtttatgtttgtcataagaaaatatttagaatcaaaagtaaaatattttatgtcctagaaggtgtagttcagtaggtatgagttggaaaattgaagcacgaaattagacttaagtgattaacgaacaacaattaaggataaattgtttgtgagaacatgagttcgaatcttgcctgaaacaatccttagtctgattttacttacctcttcactcaactctgaattatcagaacgtccttttgatgaaaaccgaaaggttaagaaaacttaacaaaaaaaagtatgtaggagtttctaagtcatatcccctcttttaataacttaacaaatagtatttgcatatatttttttaaaaaaaaaaacaaaattggcatgccaagattaatatagaaaaaagtaaagacaaagacaagaaataaaacagttttttttttttttttaaaaaaaaaaagtatctattaacttagtctcaccttttgcatattttatataatagtgaccaagatgccataaatattctactaattttttcagaaacacttgcagcaa

SEQ ID NO: 33088 - DNA, 660 bp, Medicago truncatula
  Intron number 3 from transcript Medtr7g124360.1 (locus Med tr7g124360) derived from phytozome v7.0 (chr-ID MtChr7; po s 29171015 to 29171674)
tcaaggtcgaataggataagtttttttttttttttttttttgttagggtttttttaaggcttttcttttttcgtttgttatttgcattagttgatggatctttgatggtgagtggtgttgatgtgttaagttttgacacttaaacttttcatcgtaataattacttgaaaagcaatgaactggtctgttcatgaactttcattttgattgaagctaatatgatatttgattcccttttgaagaacgtgacatgtacatgatgctattgcaattatggtcatagtttttgtgaatttccaaaatataaatttggaaaattgctttttgttaggttaaaaagatgtaacttcgtctgctttacacgatgtttcaaaagatgttgtttggggtttgctggttttattcttgcgtgacatttatttgcatcagattgacataaactagtggggcaaatcgaatccaatgcttgtctgttcacataagttttggaatttatttgtgcaaccatcatcatgtgtcattttattcttgtttaagtatttgcagtgatcccccaacacatgttatgaattttacttatggattttatttttcagtcagttttgttccaaatatatttgtaacggatagtaaaattgacactctgaattttaggtttaa

SEQ ID NO: 33089 - DNA, 837 bp, Medicago truncatula
  Intron number 1 from transcript Medtr7g107230.1 (locus Med tr7g107230) derived from phytozome v7.0 (chr-ID MtChr7; po s 25033225 to 25034061)
ccaccgtgtatgtattacgaatggtgttggaacccaagggagtgtattttgcgcttggtttgagttgcgtaaattctgatcttctgttggggcatggggtttttttggttggtgcagacattctgctgggtttagtctggtgttctgttacttttggggcggctatcaggtcttaacagcacctgctgtttttttcctgtgctgttgaagctgcgcagctgctatgctgtaacagcattgcctgctgtttcggcccggttgtggtttagggcgtttaggtagccttttggattatctgtttttgtttttgggtcagttaggtgactagttgtaactatggttttgtaattcgggacggttttaccagattacaggctcataacttgctattttcataaccttaggatccttggaggagttgttgcttttgtggttgtatagggtgtgggtgttccgtctatatgcggcacctattgtttctttgtgccgtccatactttgcgtcttacggggatggcgttaataaatttgccatttaaaaaaactaaaaatggccaaaagtgataaatttgagatgatataataggctggtttaaatatgtctcaatgttgatggctgtgagtttcatgtgttttttaggaagaagatatatttaatcaagaatttagattatagggactaaattgtatttttttttcaattattaaaatgaactaaattgaagtaagacagagggagttaacagaaagaaaagttgacctgtgaccaaaactattccctccgtgatttataaatattgcagtgcaacgtagtgattggagaaatcaaagagttata

SEQ ID NO: 33090 - DNA, 797 bp, Medicago truncatula
  Intron number 1 from transcript Medtr8g047820.1 (locus Med tr8g047820) derived from phytozome v7.0 (chr-ID MtChr8; po s 10860007 to 10860803)
caaagcttcaattctcgctccaaactcatcttctggtacctttcctatgctatcttcttcatttcatttttctatttcttccattttccactccttcgtgaagctggttttataccttgttttctatatgcacaccatgtgtttgtttatttgtctaacttggttacacgctgtactttatctttttgtgtggttgcaattttatgagttatatgctgattaactgattatcattaaagttgatgataattggttttgtaatttatttattttatcataatctctgaagctctgacacgacattgatacgtagacactgacaataatttaagaaaatgtaagtgattgaatgtaatgtaatgataataagtatcaattcaaaacgtgtcagacacagaacacgtcttccatttgaagtgtcagtggtacatgaattatgtaatatagattggttagtaccttgtttatcttaggatgtagaaacttgaaactgagtcgtcattttgcattttatattatgaaatttgtttagtggttgttcgtttatttgtgttgtgcccattaataatgatgtttaaacccacttgggttggcctagtggtattggcttgggacctgggagtgtgctcctcctcgaggtctcaggttcgattctccttagtgccaatttaggtgggctattttagcttcttcaaaaaaaaattaataatgatgtttagagaatgaattttgatgttattatggttgttggctaacctgcagaagggggaacagcgaaaattatactgtccgattgc

SEQ ID NO: 33091 - DNA, 957 bp, Medicago truncatula
  Intron number 1 from transcript Medtr7g110890.1 (locus Med tr7g110890) derived from phytozome v7.0 (chr-ID MtChr7; po s 25904835 to 25905791 reverse strand)
acaagtttgtcatttctcatctaatggaaaacttcttcaaaacttgacttcttaaaatagcattatttttttttgggagcatctattaactactactattcatttattaatacgataatttttaaattttacaaatcttacggcctcccaaaatatttacatgtaattagcagttttaacatatttcaattgctgtttttcccatgcaaaatattactattcaattcaatatcagtatctttgatatgcaatagccaacaatcaaaattccaatgcatcatctctttgtttcttcataggatttcaaacttcaggttgtctaagggacaactaactaatttactgcgccacttttaaaaagctttcattataaattgtaactttcattgtaaatttgtaatgcactttaagaaaaaatacacctttgttcgtatttgaagggttatattaactgataatttatcgaaaaaataacttattagagacatcaaatgaaaatgctgcatagattgtcttgttgatcttcaatgtagagtacatattatttttcactttttttaatctctcatgtctcacaatgtgcttctataagtaaaaactccatagctaattttctccgatccttatatcatttgtgtttctcaaattcagttttggcatcttggataagctcaaacaattgtagaatgaccctcctacatgttgaatttcttgatcattttctctttatttttttaagacttttttatgtgttgtataaaataaatacttttatctttaccttgatatttatggcatatatattcattgtagtaatctccttttttttttttggattcggtgttggtcaacatttatctcctaggagaacatatgcttctttttttcttttataatagaacatatgccattgattgtgagaataatttctcatgttttttttttttttacttagac

SEQ ID NO: 33092 - DNA, 160 bp, Medicago truncatula
  Intron number 2 from transcript Medtr8g136990.1 (locus Med tr8g136990) derived from phytozome v7.0 (chr-ID MtChr8; po s 32751495 to 32751654)
gaacagaattgttctcctaaacaaattgctgacaagtactatcaatttcttttctcttttatcttttgtttttttgattcaatggttttacactcatcttgcttactcctaaagcagaatttcaataatcgtcttttctcggtttttttgtgtagatacc

SEQ ID NO: 33093 - DNA, 1034 bp, Medicago truncatula
  Intron number 1 from transcript Medtr7g102830.1 (locus Med tr7g102830) derived from phytozome v7.0 (chr-ID MtChr7; po s 22929430 to 22930463 reverse strand)
tgcaaacaaagtctttcgtgtaggggacacactcagtaagctcattatattcttagtctttcatctctaattttgtcgttaaattctttgaaaaattaaaactcatgatcaatttcatttttattttactttcattggttactcaacttttttttatagatttatgagaaaataatatatatgtaagttatgcatattactttcgtctctatggatataatttatttcatggagagacctatcaataaaggtgtggaggtaaaattctaccttaaaatgggggcaatagtttcatcctaaatttgtatcaatacaaaaatgtggggacaaatgtccctattgggatttttaatttattctaagtaacatgtatttcagtgtgtttggttggacgttataattcaaaatcttgcctcccaaggctgagaaaacatgaaaataacgagtcaagatcatctccatttcaaattctcttcatttccttcatttagagagataagataaaaaaatcttgaaaaaaatagaaagtaaataatgatggtgggatccatttaattaaattattcaatatctcttttttttgtctatctttctaaattatatatactccatttattttaacaaatggagaggatattaactcgaaaataacaaagcttagatttgtagagtttgctaaaacgtaagttggtgggtatcgcaccatgtaaacaaacacatgctttatttgactcaaagtagaccgaagagattaaagtcaatagaagttggatgtaatgaccaatgaccacctttgtttgttattttatctttctcatgagcccactctttttaaagagaagaattgcaattaaataaacaaaaccttcttaaaaattgatactaattttacttgcacaaaaactttaatgtgaatcataaacataatttaactttttaaatgtaagcttattttgcccccaacataaaatttatgggtccatccttaactaatttgtgataaaaatgttgaatttaacttgcagcattcaact

SEQ ID NO: 33094 - DNA, 675 bp, Medicago truncatula
  Intron number 1 from transcript Medtr8g094020.1 (locus Med tr8g094020) derived from phytozome v7.0 (chr-ID MtChr8; po s 20852493 to 20853167 reverse strand)
gactaaagattcatctgattcctaatcttttcctggtaatgttttcttgtgacacaaaaagtttcttgtgacttttctttcttttgttatcttgtctaacaaattttcaatcatgggttgtttttgtttatgcttgctgtgttttcaatcaatatagatggtggggttggtgatagattttttttttctttttccttttttcatggcatgtgcaatttgaatttctttgaagcaattcaattaaagtttattaattatccagctatatttggttgttgctttgcataatggtaaaagaaaaaaaaagtagtttttattaattatcaagctatatttgtatattgctttgagtagttacctactctcaagtgtgtttgattggaattggatttggatttggaattcaggttttttttcttgctttctgaagagtaattctggtttttctttttgaattatacatctagagtaagctttctggtagcatttgtttgtggactcttgtaatttcttttatgaatgcaaaagagattaataattatcatgctaaatatgaaggttgattgaactttgaggacttgcttgaggtttttcggtatacttaactaatctctgcaagttcagtttatgtgaattgtaggtgaattttgagacgaggtttgccgacctacagaa

SEQ ID NO: 33095 - DNA, 631 bp, Medicago truncatula
  Intron number 2 from transcript Medtr8g034250.1 (locus Med tr8g034250) derived from phytozome v7.0 (chr-ID MtChr8; po s 7344347 to 7344977 reverse strand)
aaaaagtaagttgtgtaatgctccacacaaatttattcgcatcacagagtgagtttacttttcatttaacctgcatcaaaattaacacaactaagagcatccacaataagaatgtttcatctatttaataacaaattaaatagatatcctcattgtgtagcaataattttttatgattatagagaagattgtcttttttttttggttacaagagaagattgtctatgaagcaacaatttttgtttaaaaataaataaatttaatcgaaataaaatgatatatagttagtgaatagcgtgacctgtctattaaagacaatgaggttctttcagaaaaacaaaaaacaatgaggtattgagttgaaggaatgtgatgtttatttggtattgacatcaaaaaattataaaataacttaggtgtatatctaagtaaaactcactttcaaatagatgaactttattgtgaatgctctaattattttcttaaaaatcacgacaaatgaaataatacatttataattttacagagggagtaatttaatttatgtctattgatcaactaattaatatagattaattctcctatccaatgtgcagcattcctttagagacagtgttctttgtggatagcg

SEQ ID NO: 33096 - DNA, 538 bp, Medicago truncatula
  Intron number 2 from transcript Medtr8g034480.1 (locus Med tr8g034480) derived from phytozome v7.0 (chr-ID MtChr8; po s 7470517 to 7471054)
aagttaattctcaaaagaagggcttcttacaaacggtacttcaaaatgttctttacatattatatttatgtttagggttaaatgacattcaaatttctcctacttattaggtaatagctataaaaaatcttagggcaaggatttggagagagactgaaaagaaaaactaaaatgtcggataaaatgaaaatagtgacttgttgagttgaaatgataaacaatccttaatattgtgcatatatctatttgaaattagaatgttacttgttttactctattatctgtattctgttgctttgatactgctgctgcttgtgagtttggcctgagattctagtatatagtatacaactatacattttttagtgtcgactgcaaaaatagtattttctgacgtgaattaaaaatagtttttgttctttataatattttaggatgcaatgttttttcttcatttactgttatacatttactggtttcaaatagagatcatactcatgggttgagttttatattttaggtgaaacagtacaggatt

SEQ ID NO: 33097 - DNA, 395 bp, Medicago truncatula
  Intron number 3 from transcript Medtr8g144660.1 (locus Med tr8g144660) derived from phytozome v7.0 (chr-ID MtChr8; po s 35003905 to 35004299 reverse strand)
tcatcaattgctaatttaacaaatcttaaacaagtgttagtcacatcttcctctcatttgtcctttcccaatttccccctttttttttattaatatttcttacaatgtttcttcttgtcgttttctttattcttgtttttttgcaatgtgtttggtcttcattttttttgtttgtaactgttgttttggtatgaaactggttagggactatttttgagtctctatcaactctgagaatgtttgtttacttcagcaaattgctactatgaaacaaagaacctttggaacatatttttttttgtttttttatgtgaaattgtttgaatattttctgatttgggtttgttggttggaatgtaggttactgcagaataacaacatctcaggcaaaatac

SEQ ID NO: 33098 - DNA, 211 bp, Medicago truncatula
  Intron number 1 from transcript Medtr8g146170.1 (locus Med tr8g146170) derived from phytozome v7.0 (chr-ID MtChr8; po s 35687980 to 35688190 reverse strand)
aggtttcttttcttaatcccttatatacaattttgcatgcttttattaatacaacagtttttgtctgttaattaataattagccatggttactaataattcatatgataatagagacttggtagctttatggtgttgttttgaattcattttgaagtataaacaaaagatctttctaagtatttcttggatctttgtgttattttgcagct

SEQ ID NO: 33099 - DNA, 694 bp, Medicago truncatula
  Intron number 3 from transcript Medtr8g074740.1 (locus Med tr8g074740) derived from phytozome v7.0 (chr-ID MtChr8; po s 14933471 to 14934164 reverse strand)
acccacaggttcattccatgctgttgtgtataaatcgttgaatttggtgtgcttgttattaggttttatatccggattatctcattcttagactctgatattatattaagtttaatgttgagtctaattcatccttacaaaaccagcttgtaaggtgaggaatgtcactctttataaaaatatttcgggtattatctcctttcaatgtgtgacttgagtttttctgtgtcaaaaagtagtttgttttttaatgcaatcatacatgtctttttttatttctttatgatgaaagaaaaaagtttttttcttttttgaactgtaaaattttggttaagtgattttcataggttaccagtttagcggagatcacgagagatcctttcatacacaaaaacacatgaagttgcttcaaattaataactaaggacattggtgatgtatgactttccagttcatgtgtctgcataatgtaccaagatgaatatacatttttttggatgaaaacgagatgaatatattgttaaaattaaaatggagttatttctttgcgagaattcatccttttctgtcgggaaaatttgcagagcttactgacaactaacactttcaaattgaagttctggtaaatgcactgttcacttttgatttctgtatttcaggctgagttgattgatccggcactgaagggaactct

SEQ ID NO: 33100 - DNA, 549 bp, Medicago truncatula
  Intron number 1 from transcript Medtr8g129300.1 (locus Med tr8g129300) derived from phytozome v7.0 (chr-ID MtChr8; po s 30499926 to 30500474)
tcgaaccgccggttctattcggttttccggtctgttcaccatttttggacagagctattttaagaccagattggaccggatgcaggttcggtttttggtccaaccgattaaatcggaaggtccggtctagttttaattacttgataatacatacttatgtcttatactgccaaaaaaaattgtttaaaaaaagagactaaattttctagtatagataacccttagatatttttctgtaaaaaaataaaaagataatcccttagtcaaaacgtagaccccaagttagcgaccttttccctcaaaaaaaaataattagtgacctttgttttttgtattgtattatattatatattattattccctcaaaaaaaaataattagcgacctttggcattataagttcataactatgaattggaaaatcagtggtttagattttaatatcttcatagttttcttaatatatgttcttgtattttaacacaatcttaacatcggtacttatatctctaaagtgtatcccccttcattttaggagccaaatccatct

SEQ ID NO: 33101 - DNA, 916 bp, Medicago truncatula
  Intron number 1 from transcript Medtr7g134920.2 (locus Med tr7g134920) derived from phytozome v7.0 (chr-ID MtChr7; po s 31981781 to 31982696 reverse strand)
cacacctaaaacaacttctcaacctattaattaaggtataatttctatcaataaatctcagtatcatatcatacatacttgattatttttttatttttttatctttttaacataattttcttgtaatttttactatattttacctaacctatactttggttctactcagttgacttatttctttcagatttccactggatttcaaataacatgattttcatcttgattaatctgttcatgtgattcacatatgggtattagggatctgtatgattttttttaatttatttatgggttcaaagagagttgaattaacttgtgtagtggataaggaaattaatcaattttaaacaaccatgcctataagttataacctttgtgatgatgaagatctttgtaataccatctactttctgcttcctttatagtattgtttggataaacaacttgatcaaacggttatagcacaaacacttatcatataagtgcttattatataacaaaagataaaattaagtcaaactgttttcatataaactataagttgttttcgtaggctatcacttatggaaacaaactgaaaactaaaggagcaatatcttagtctctatatttattggtggaacttgtggaaagtagactacaaaggaattatgtgggttgggtagctcaactggtttaagctaagctaaggaattaaaagagttgaggagtcaaaggttcaggaaaaatactaacatttgctgttaaaaaaaaaaaaaaaaaaaaaaaaagactgcaaggacttagtgtcgttgattaacttgccatttcctttcatgttccatgcttagctgttttatgtgtaagattataaatttttgcagctgaacttacttgggattttattaacttgtcaggcaaattttccgtcaac

SEQ ID NO: 33102 - DNA, 587 bp, Medicago truncatula
  Intron number 1 from transcript Medtr8g021980.1 (locus Med tr8g021980) derived from phytozome v7.0 (chr-ID MtChr8; po s 4262548 to 4263134 reverse strand)
tccttcttccacaaattttggttttggtcttcattgtaggtaacttcctcttcctttgatcaattgaaaatcatgattggattatttttgtgttatttgttcaatcagtgttttgcatgtcgaatattttaattttccagaaattttgtgggttttggtttgaaatttgcttgcatgttttcagaaaagggtttttttgattttaattgaggttttgattccttggttttgtgttgttgtttattgattctgttttgtaaaaaatttgagagaaatttccagaaaattatgttttcagaatttttttacaaaatatatgttatttagaaaagggttttaaaaatttgagtgaaaagaaatacttggtttgttgtgagagataaatttgtgttgttgttcttagaataaaaaagaagcaatttactcatctttaattacaatttggatcggtttttatgagttgaagaaattttaagctatgtgtggctgatttgatagtttacttatttgaattgtttggattattattcattttatttaattttttgttgaaatttgttgattgttgtaggctcggtgtgatcaaa

SEQ ID NO: 33103 - DNA, 917 bp, Medicago truncatula
  Intron number 1 from transcript Medtr7g130000.1 (locus Med tr7g130000) derived from phytozome v7.0 (chr-ID MtChr7; po s 30263432 to 30264348 reverse strand)
ccactgagtattataattttcttactattttttttctttttttgaaggattcttactacttctagatgtttttatttatttacacatattcctagaagttattcagaaacatgcaagtgtctaagtctgtctcatatctataatactacttcaaggtttcatgaaattcaacaatacttgaatgagatgacacgagtcttacctcccttctgatcctattatggttgatgaactaatttcctatgaaataccaacacaaacacggacattgataacaatttaagaaaataaacgtagtcaaatataactaaacgtgttaatgtcgcgtcgttgttggtggacaccttgagattggaaaattaagatgtaaaatttgaccctgatgtagtcctttaccaaacaatgacatgatgctcgatggtgaatggtttagacctcatctgttagctatatggtgaacaattgatgtattttatccatcaattattatcatactattgttttagcctttggcctaaatgaatttggaaatgcaaagctcaccgacaatggacattttttttggcttcacatagaacatgacaactgtgaaatcaacttgaccatgctagcgtgaaactccaattatttgcattaatgggttccactatattgaaatagccattcctaaaatattattttgatacagaaatcaaaacttaagtaaccattttgaggctattcttattcatttgccattaaaaaaaaagaagaaaagatttagcaccattttattgctaatagagtagtctctttcaatgtctctgaaaatttcaatttttggtaataataatgtatgccttgccatgctttgaaattttcatgtctacgtgtatatagtgattcagaaagagtctttttttgcaggccaatatctg

SEQ ID NO: 33104 - DNA, 481 bp, Medicago truncatula
  Intron number 1 from transcript Medtr8g103060.1 (locus Med tr8g103060) derived from phytozome v7.0 (chr-ID MtChr8; po s 22869880 to 22870360)
gaaccgccgacagttaacccccgctggtgccagcggtagtttctgttctctatattctgttatcttccctcccatctcatctctgttcttccatttcctcatttatccaccaaggattttgcttttgtttttccttttgttgtttttttagcttaattttcatatgttgaattgaattggcttggtctgtaagctgaatttctcactcttattttttatgaaatgggtttatgaaaagtttttttttttgccacccttttgatggatctttcataaattcaataactttttttttttttgcaatataaaaaaatggtgattcattagtagcagattagatcttttcggtatgatggttctccataattgatatgtgagatttgatcacaatctgtaaataatcatgttacgatttgtattattagttgatagaatttgaaaatgaagaacagaaaagcaagtatatccaaacacattgaat

SEQ ID NO: 33105 - DNA, 884 bp, Medicago truncatula
  Intron number 1 from transcript Medtr8g088460.1 (locus Med tr8g088460) derived from phytozome v7.0 (chr-ID MtChr8; po s 18742754 to 18743637)
ggtaccctagttgtcaccttaaaagaaagatctatattatgcacaaatgaaatctttatattactagctgggtttaaacttatagttttatgagctatgaaatctctaatatctacaccaatcttgatcttgattgacatcaaaacaagaacttcgcgctgccatttggctctcaaattcaagccttcaaggttgtctatatttagaaggaaaaaaaaaaatagtgttcaacttctctcaccaaatttagaagtacacattcaaaaggcataaatatcctttaaataagaaagtagatttttttttttgtcaagatataaaacaagtttaaaccgactaaatatattttttattaattttttttaattaaatctatttatataatggaagaaaataagctgtttttattttttattttttataagtaaaccaatatttcaagtcttgaatcacttattcaaattgtctaatatgagtcaaaatactcatccctcccgtcaaaaaaaatgtaacacactaacacttttttattttgtttttggctgtcggggtttgaaccctagaccttgcatatattatgcattgttcctaccaactgacttaagcttacgtggacacacactaacatggtaaactaacatggtaaaaattattttgacaagaggtgacaatttaagggagcaattcaatatttgtaaatttgaaatgccaaattgtcatacacttggaaattagaatttcaattcccctctcaatttttatttatttattttttataaaagaaagtggtttaaaataaatttttgaacaatgaacaattaaaacaaattttgttaaaactggtttcgtttttcttttatttttcaggacgttgttccaggatc

SEQ ID NO: 33106 - DNA, 424 bp, Medicago truncatula
  Intron number 1 from transcript Medtr7g110760.1 (locus Med tr7g110760) derived from phytozome v7.0 (chr-ID MtChr7; po s 25848507 to 25848930)
gatattgttattgtaatgtatggatattatatttgggtaaaaagaagaaaatgaatgtgatgaacttttgttgttaaattttagttagttataaaaaaaaataacaaagaatattattatttttttaaaatcttatctatggatatttatatatgttcgtgaatacctcgaaatctttgaattacccacttaacgtatatcataattatccaactggacataaggaacgtaatgttatctatgttcatggatatccatttacatccttagttatgccacgatagatatcaacgctagttgccttgcctctattaactgcctaggtttcttttaattaatttgtgttgccggttgtttttatttactttaaattttaccgatgtatacagatagcaaaattaaaggtcttggatcaatttcaaaa

SEQ ID NO: 33107 - DNA, 289 bp, Medicago truncatula
  Intron number 1 from transcript Medtr8g020910.1 (locus Med tr8g020910) derived from phytozome v7.0 (chr-ID MtChr8; po s 3696524 to 3696812 reverse strand)
tacttaaacataaaaaggtaaaaggcgctgatatcttttcaatggttttattataattaattttctatcgtttactttgtttttggggaagatgtttttttttttgccttctctcttttaccaagggggctgatattgttgaaaggcatacaatttgatttgtctcaaaaatcaaatttatatgtcaaagctgagacgcatttgaaatgatggttgatctaagatttcttcgattatatgtccccttggacaagaagagattgactaccttgaaccattctgatcaagg

SEQ ID NO: 33108 - DNA, 720 bp, Medicago truncatula
  Intron number 1 from transcript Medtr7g103050.1 (locus Med tr7g103050) derived from phytozome v7.0 (chr-ID MtChr7; po s 23004023 to 23004742 reverse strand)
gagaacactagtctcctctacactaacaccgcaaggttcgtatgagactctcttctttctccctcttttacttccttcccttttccgtgtccccattttccttccccccgtaatcaccataataatcataatcataataaataattgacacttaattacttcaattcaacttaattttctactctagatccaccgctaaacctaacaagaacactcttagttctagatctgtttcataacgtgtagatccattagatctgaatctgaaaacatggtagttcatcaaatcgttattccaaattcataattttcgataatttacacttagatccaacaattttgaacataatcatgctaatcagaactcacttagtttaatcactaatccatactccaatcgactccaattcaattagttttactagtaaatcttgtttaatcatcaaatcactgttctaaaaccttcattttcgttaaattcacactctattttcaagatcgagtacattttaacgaacctagttgcttatccgtaatcctctatttcactacaattagtattttaagagttaactagcttgaaatgtgcatcttgtaataattttaacataagaatattatcagttttatcagtgggatttgtttgcgatccactagattagtcggtccttaggtctgataccgagttttcaacaaaaaaataaaaatgatatcagtatt

SEQ ID NO: 33109 - DNA, 503 bp, Medicago truncatula
  Intron number 1 from transcript Medtr8g012420.1 (locus Med tr8g012420) derived from phytozome v7.0 (chr-ID MtChr8; po s 1973090 to 1973592 reverse strand)
gcaaatatatctggttgggatatcaacaaatccaggtaaatcaactattattaccattttgatttatttatttgagtttatggaccaacataaacaattatgacatattatgaaaacaacttatgacatgttggttaaagctcttcatgatggcttatgaaaaattgaaaacaacttatagattatacaaaatcaattcgactttattttatcttgtgttatagaaattgtacacaatgtgtattcataagcgcgctgaaaaataaattgtttagatcaaaatgaacattgagagtaagttggtaactatctatgcagaatctatcagctaacataattacttactaaatttacatatctgtagtatcaacgctttctagtttcctgattccttttcttttattccagaatggagtatattttttttccagttaattataatctttcaaataattcatttatatttgctccgtgtgttttattgaagcaacgaaggtgaacta

SEQ ID NO: 33110 - DNA, 1027 bp, Medicago truncatula
  Intron number 1 from transcript Medtr7g126610.1 (locus Med tr7g126610) derived from phytozome v7.0 (chr-ID MtChr7; po s 29452470 to 29453496)
cgattgctggtgctgtttgtggtaacattcttgaggtgaattatgccgagaaattgttttgttttgtctgtatcatttatgttgattaaattgaattgtattgtaattgattttgaatttggaatgagaaagtgtattttgatttgattttctgatgtgattatattatatgcttgtgttattgataaattgggttagtgttgttttcgggtagaggttttatcatggaaaaatggtgaatgttagttagaaaagaaggcgtttgtgattcatccattttatagttgttggtatgatgttggcgtgggaccttggattgtgctcctcctcctcaaggtctctggtttgattctccccggtgccaacttgggtaggctagtttagttttttcaaaaagaacaaatgtctaggttttatgcggtccatgcacacgagaaaaaagaaaaacatatctaggttttctgtgtctttattatgaaaagggaaaaaaaggactttgacgatgaattaatattagataggtcagtgttaattatgatgcaatgtaatgattctgttaggtaccaggtttgggtactggtccggtatcctaatggtgtccatatgcaatttacaagtggcattattgaaacgtggtgctctatcattctcctggtcttttgtagaatttgtacgcaatagggactacgaatctttggaaatgtgtgcgtgggtgttcgtgtgtatgatgtggggaaataactgtcagtttactttctcaaatagggctgatgtcaacttttggtgaaatttgatgccaagttataacatagggatatgctattattgatttaaattgttttccttaatccttgtttacatttgttggggttttccttaatccttgtttacatttgttggggcaattttacttttagcccattgcttgtttgtcgattttttataagaaagggcgcgcttaattgaattatgttatgttaacgactttccaggttccaagtgaccaaaagctgccatcgctttatct

SEQ ID NO: 33111 - DNA, 648 bp, Medicago truncatula
  Intron number 1 from transcript Medtr7g097180.1 (locus Med tr7g097180) derived from phytozome v7.0 (chr-ID MtChr7; po s 21923517 to 21924164)
acagaaggaaattatactacggctgaatatcgaaggtttgttaaaacgtaatttaaagagcacatgatcaaaatacataagtactactaacattcatcaccatttcagttttaccagacataaaaaattaattttaacaaaattaattcgaaaatcacaatcttgagatagtcttcaagaatgcaaattgagtggtcaacttgaccacatttttaatagaactgaaagaaagcagtaaaagttcatttaaatttcaatatcaaaattcaacctccaagtatattaaaaaaaaaaaaaaaaacgattccagcacaagaaaaacaaattcaatacaatatagctctggcctgcttgatttaaaccaaaaacaaaaggtgatttgaagaatcatgaatcactaattttgtcccttaaagtatttaagtcagtcgtactttttacctggttttcatattgtaattgtgttgggctaaatctctaattatgataataggttataatgatagatacaggaacagtaaagttatgtgcattgtatagcatcagaaaacaaaacatgcaatctatagcaaattgaaggcattttagaaaatcacaatcttcaccatttcagtttcaaattcaacaacagataagtgtaaaaataga

SEQ ID NO: 33112 - DNA, 748 bp, Medicago truncatula
  Intron number 1 from transcript Medtr8g037210.1 (locus Med tr8g037210) derived from phytozome v7.0 (chr-ID MtChr8; po s 8007881 to 8008628 reverse strand)
aggctaggggtatgccatgtaaattgtgaaagtatgatttttttaaggaagaaagtcaaccattgaaaatatttttaaggaagaaagtcaaccattgacaaaaagagtgactatttggagacgaagggtacggtgtgcgagtgaaggaagtcgcgtaccgtgcatgagttgatttttaccttagattcatctaactcataagaagttatcctacacccttcactcactataataaccaaaagcttaacatcactgggaaaaaatcataccagaattggtccaacctatgtaactccattattttacagatcttgagaagggttcaggttacggtggaaaaagtcacaacaatatttacaattcacacaccatatctccatcatcaccatgaaaatagaaaagcttagcatcacataatacaaactaatgtaactccagcatttacgaatcatgagaaatagagaaacttggaaatgaatagttttgaaccaaatcataaaagaaaaactaaaaaaataatttatttattttttgaattttctttgtacaccagaatcaaagatcgatttgtagtttttcaaaataaaaattcatagaattttgtttaaaggataaatattaacatcactccaagtccactctaactcccagatgttggtgtatagcatacaattagcatctaaggctttttcttcgagtttagataccgataagctagctttgcttgctttgtaggaaaagcttacaa

SEQ ID NO: 33113 - DNA, 192 bp, Medicago truncatula
  Intron number 1 from transcript Medtr7g118300.1 (locus Med tr7g118300) derived from phytozome v7.0 (chr-ID MtChr7; po s 27867764 to 27867955 reverse strand)
gagctgctcaaaatttacaaagcactctcaacactgttagtttttttttttcttttcgcgtttggtttatgaggaatgaaatttaactcttaagtttatcattagtaaatttgattgtgatggtttttgagttattcattttttttttttctttcaggaggagaacttgggtacaacttcactaggaatttt

SEQ ID NO: 33114 - DNA, 881 bp, Medicago truncatula
  Intron number 1 from transcript Medtr7g102540.1 (locus Med tr7g102540) derived from phytozome v7.0 (chr-ID MtChr7; po s 22801966 to 22802846)
cctaggtacacttttttatatgatcaatgttgttttttgtcttgtttacattaattttgttgtggattgtgtttgtgtacttaatatgaaattggtttgacattttttattgtcttctgctgtaagaaagctcaatttgttgactttgaatataagaaagcttaatttagttgatttttcaagttaattgtcttgtttagttagatgcaatcctaaaattttatatatttcctaatagttccttctgggtttttatttttatttttggtgttttcatttctggggtcttttgaaagcttttggcttgaatgaaaaacatcaaatttgatcatgttcttatcatttcttacacactacgtttcctccatttttattgtcatgtactcatggttgttgagtgatatattaacatgaaaaaatagttcataaatagttgacatatatggttgatcttaaattagtataaggatcccatttttaatttggatatataaaaggtatatcaattgcttagtgaactttcatttagatagctatatgttatgtagaccaagggattcaattctccaatgttattgcttgtaatgagtggttagcactcttctgagaccaatagagaattgccaaaatggaaaactaggaacatctcttcgatttggattcacttcttgcttatctatattctaattctatttttgaagcaagtatgattaaacttattaactcaaatggttgattaatgattaggcacaaataatgctgatttctatgttgcttttcttgatgtttggactttttaactcatggttgattaagcacagaaatgttgttaatctatatctacttgcattgcagtgataccacacctggcgtagcacacg

SEQ ID NO: 33115 - DNA, 375 bp, Medicago truncatula
  Intron number 1 from transcript Medtr7g126910.1 (locus Med tr7g126910) derived from phytozome v7.0 (chr-ID MtChr7; po s 29628561 to 29628935)
agaatgtgtttttttttttttaatagcaaatcttgactattgatcaaatatgacgttgcatctttttcggtctacgggcaagggatttagttgaaccctcatcctatgttattttcatgaatcaatttttcatcaaaagtattgcttatattaagcaggaacctttgtttcatgaaagaaaaatggtaatagtcatatttgtcctgaaaatttatcgaaattctaaaatagtttatgattgtgcactctattaatcaaaataatcttctgcgttaaaatgatttgttaataacatcgtattagtctttcaatatacttgttgtcatttcaatctctatagagaattgagaattctaacttgtttcaatcctagga

SEQ ID NO: 33116 - DNA, 880 bp, Medicago truncatula
  Intron number 5 from transcript Medtr8g139890.1 (locus Med tr8g139890) derived from phytozome v7.0 (chr-ID MtChr8; po s 34254638 to 34255517 reverse strand)
ggacaggatttcagcctggacctttcttcctaaaggtacttcatactcttgagtcttgttaatgttcatgctatttttattgggtaaaaccaagtcacatattaaagatgaaatgaaatgtagattcacatagtcattatgttcggttgttcgttgcaatgagaatacgagagctatattcaataaacaagtgaaacctaggaaaaaaaggtaaaattatgttgccagtttaattaagtaaattaaaataagctaccccatactcacttgataagtgatgcattgtttcaggatcaacagggtaattcattcatttatgattaaatagttagttggtttaaatatgcatatggtccctacaaatattaggtgttttagtattattggttttagtccttgccaatatctattttttgtttttgatccttgttgttttgttttagtccttgtaaaacttattcacattggatttggtccttttaatatgcatattaattgattttagctcctcaaaataaggattaaacttattttaatatgaatagattttacgcggactgaaacaaaacagtaaggatcaaaacaaaatattctatatttgcaaggagtgaaaccaaaaacgacaattttaaagggaccaaaacccaaacacttgatatttgcagggaccatttgaatatttaagcctagtttctttatacaaattatccttatgcttcatattgtataaattgcaaaggcagtgtttgaagaaaagaatgaacttctacttgaatgatctgttaaaatgtgataactttcctacctatctaactatctataatgaagcaattaggcactaatcactctccttgtactatttgtggttaaatttcagaaa

SEQ ID NO: 33117 - DNA, 361 bp, Medicago truncatula
  Intron number 2 from transcript Medtr8g099340.1 (locus Med tr8g099340) derived from phytozome v7.0 (chr-ID MtChr8; po s 21826160 to 21826520)
ttcaaattggcgaagcttcctattcgttacacaaggtagtcaacaaactcaaatatcaaacttactaactaaatggagagtaatgaattctagtacttggttctgttttttcaatcaattctttgctttttttatgatacaacattatgatgtcgtttgatctatttagttgactccgcatattggttgttcatgcaattcttagtattttcttttttctttttttatcaagaatagtaataggaaaatataagtgatatatgtatagacatagtactttaagctgtttattgaattatttttcataactctaacgtaatttgcagtttccattaatttcaaaaagtggatacataaggaa

SEQ ID NO: 33118 - DNA, 747 bp, Medicago truncatula
  Intron number 2 from transcript Medtr8g139020.1 (locus Med tr8g139020) derived from phytozome v7.0 (chr-ID MtChr8; po s 33811244 to 33811990 reverse strand)
ttataaagttgtcacaaaaagtacaggatcgagaggtaatacctcatccttctgtactatctttatctgaaagaagattagggcttgtgagtgaagtcttgaaagtttgaaaggagactgtttggttgttttggtgaagctattttaaaaactggttaaacggaaacacagcttgtttcagtaacttgattaactttttttttctttttttctttttctttttcttttagctgtaccagtttggtttggtttgattcaaaaccatttttcaaccagtcctacttgtttcctattattcaattattaacaatcaatttttattgttcaattttggttaatgactgagtatggatgagtcaaaaactttggctgatatgaaaagagtatggatttctaagaagttttcaacatttatgaagcttctccttctaaaaacttggccttctttatgcaatctctgtatgctcattgtataggtaaatgtttacctaggatatgcacttctgattttagctatttttatatctataaatagtaaatgcaaacttgagttctgaatattttctgggtaatttagatgttgaattgctttattttatgctgaaaagcacaaacaaattaaaaatcacaatgtattagttaatattcagctgtattcgataattatgtcatattgcaaaggttttacttttagcctttaccttttatttcaatatagaaactcctttatattcctatgcaggttac

SEQ ID NO: 33119 - DNA, 554 bp, Medicago truncatula
  Intron number 1 from transcript Medtr8g139020.1 (locus Med tr8g139020) derived from phytozome v7.0 (chr-ID MtChr8; po s 33811930 to 33812483 reverse strand)
cagcggccagccagaagtgctcacgcggtgatggcgtcacactgccttctcttgtcactgttttttactcaattctctctgctaactggtaatttcaccttcttcttcttcttcggttgcacattaactgtttgattcaatgaatgaacacgttcttcttgcttttcaaggtttatctatgtactttgttttgacctttttcacaatttgctgctatgaatatggttcacaaattacggttcttcaccatgaatatggataatttcaaacaaggacattgataaccttatagctcaattcactcaggtattcttcattgtttttagtttaaaaccaatatagctttagaattgtttcatgttaaatttatcatcggaaggactatgaaattcatcacttgattgttccctctcaaattccgaggctgtagtaaaatagctacttgttagtaaattactgtttttagaaagccactacttttgttaccatggatttataaagttgtcacaaaaagtacaggatcgagaggtaatacctcatccttctgtactatc

SEQ ID NO: 33120 - DNA, 904 bp, Medicago truncatula
  Intron number 2 from transcript Medtr8g138450.1 (locus Med tr8g138450) derived from phytozome v7.0 (chr-ID MtChr8; po s 33426684 to 33427587 reverse strand)
attgtcatcctgggtaagtaagacataagactgccttatgattctcaacttaactttttttattttagtattttagtcgatattgactcttagggttttgctaacaagtgtcctatgtgtgcaaattttaagaaacctactatatgaatattgtcttgaaaaaatacgagaatataataagcttagcagagatgaggatgttgtgttgaatgtttagtaagactagacatgataggattagaaatgacaacattagatagagagtctgggtcacacctatagtagaaaagatggtggaaaataggcttaggtggtttggtcatgtaatgatgtaaagagaaatctgtagattaggatagtcaattcactagaggcagaggaagacctagaaaaactataagagaaactattaagaaagacttggagataaatgagatggatccaactatggttcatgatagagcattatggcgtaattttatccttctagttgaccccacttagttggataaggtttggttgttgttgtaaggaattgaatgcatcacttgcaagacaatatttctgtttttttatttcttaacacgcgccttcacggtatttgttagcaaaacccttatttatcgcaacccaactaactatttcactaactactattaataagggcagattagcaattgaaacacattttatcataagaattagtacactcaatgattttgttaagaagtgtgcataaaaacaaaattaatatgagatggagggagtaaattattgtgattaatgggtttaattcccttgttagatgaatagttaacatttagttcccttgtctcacctctttctgttattcttactattcaattcggatgcagaggtgtcagagccatttcgtctttggcaa

SEQ ID NO: 33121 - DNA, 575 bp, Medicago truncatula
  Intron number 1 from transcript Medtr8g145420.1 (locus Med tr8g145420) derived from phytozome v7.0 (chr-ID MtChr8; po s 35350530 to 35351104 reverse strand)
acggttacatcgtcattgagtccaggccttgcaaggttttctccttttccctttcctctttttctaggccttgcagcttccaggttgaaaatagttaacttaacttgcagcttatacaacgtaagcattatgtataaactttttctataacaaaagataaaacaaagttaattagtctcttcattctttctacaactacttaagagagcttatgaaaataagctgaaaacaaataactatgtcattaactattttcacaagttcttccaaacaatatcgcaaatgcttatgtctataaataaactcaaataagtcaatccaaacataccctaagttttgaaacaatttataaagatggacaatagggtaattggaattttagttttgctgtaatatttctttgttattatgattttcattttcaatcgtgttaactttgtcaatggaaaagaacttcagttattgttccttcatcccacatttgtgatgtaagtcagctctgccttcatttatgtttttaatattatttttctggtgcatttctcaattatcattgctctttttgcaggttcctc

SEQ ID NO: 33122 - DNA, 937 bp, Medicago truncatula
  Intron number 1 from transcript Medtr8g148800.1 (locus Med tr8g148800) derived from phytozome v7.0 (chr-ID MtChr8; po s 36832536 to 36833472)
cgttatctgcagaaattgaaccactgcccacccaagtaattttcatagcttgctctatcggcggtaatgaggtgacagttataatgtctctgtgtctggtcatcaatgagagtgattattttgcgctttcctttcagaattgttcttgacacctcgtttgggaaatgctaaacaggaaaataactgcaatattagtctaatgcatatttacatgtataagatgtatgcaaatatagttacatataatttataaaataaaggtagcataactgattttaagctaaagaaaatgtagcatgacttataatttatcttgatatcatcttcctataaagtctagataaatgcatgcatgaacattatatgtaccccgttgaccaatcaacattgttgaaataaatgaaaattaagcatcacttccgcatgtgcatatacaactagaacaatttgacattaatgtcttcgaacatttggtgcaactctcataatacaatccaaactggttaggattgaatttagttgtttttcaaatagtgatgcagtatgtttcctaacacaaattatgcgcatgaaataaagaataatgcaatatgtatttttaatttgtgcctaaaaaaactcaaagcatgtttgtgcataaaaaaaaagtaaacattgactaagtttataaattcagcaattggcctaacctgagacagtttggaaaaatcgttgtacgaagtacgttgagaagaagtcgaactctgacttaagttctaactgaagctttgactctgagcttgagaagtgttaaggtcacgacaacaattcaagaaacatggtaaaaaaacaatcaaatcggattgtgaaattataagttactctaacactgtactgtgaaatcataatgcaaacttactaagtcttaaacttctcaacaaccggatgatgtaggttg

SEQ ID NO: 33123 - DNA, 892 bp, Medicago truncatula
  Intron number 4 from transcript Medtr8g105940.1 (locus Med tr8g105940) derived from phytozome v7.0 (chr-ID MtChr8; po s 23521156 to 23522047)
gaaagaagtgatatcccaagtattgacaagaagaagtaagattttgttaacatttttcatgtaatctggaaatgtcacattaactgtttctaatcatatgtatgtctcttcagaaggaaagaaaagtgttatagcagatttgatattgtttgtattatattatataataacataatgaacatatactttataagtgagattgatggccagaacaagaggaaggagacaaatcatggtttcttgagcaatatttctgaatttagatttttatctctttttgtaatggtttaatcattacaaatttacaacttagagtttgttgatttagaagcttagcagatgaacttttcccataatcgacaatggattagagttgtgtatcatgaaagccatgctcataaagcttcacataaattaaaattgttttcatccgttgctttataattagcgtacaacatgctttttatttttttaaaggaaagatatttcaaactgtgcacggcgttcctgtttagatttttaagaatttttcgtgcaatttctattgtgtatactttttctgtttatgaggtcctgaactttgaattagataaacagaatttaaattggtgtctatttctataagaattttatttatgtgtgtgtgtgtggtttttgtatagcttgacaatcatggatttgtatttgcttcggttagataactatagattttatggtggactagggattatttcttgtaaaattttcattgtgaagttatttctgccagctggtgtataaattttcaaggtgtataattggcatttatcattcgtatgtcatctgtcatagctatcaaactgattgaattattgtaggtaccttgtccctgctgatctcacagttggacagt

SEQ ID NO: 33124 - DNA, 933 bp, Medicago truncatula
  Intron number 2 from transcript Medtr8g115610.1 (locus Med tr8g115610) derived from phytozome v7.0 (chr-ID MtChr8; po s 26001762 to 26002694)
tgctaataaggttagtaccactgctccatccctcggtacgtaaactatgcttttcttttattaggtatagggagacaccaaccatttatctctcgtcacttatatgaacattttcaattgtatttttatttgttgtcacgccaacattaatatttagcttatatttgaattaatcacatcaaaagaaatcaatcaatatagtgttgaaaaagttgaaaggaacctgagtttgattcctagagtcacctatttaagagatagtctacttgtgaaaaaagagttagccaatattaacttagtattagttgatccgtttggaccttaggagatgattgattgattgagatctgttgtgaagagcggttgagctttagttcttttgatgcgtgtccttctcccctggtctcggtgtacctacatgttctccgaagcccaaatcaataaggagttcaagaaagtatgtggctatatcatgggtaagaaatatcatacctgacccaaggattgagcaagggtatatatagtggatacgtatgattttaactcatagtcctttatctatatagctgtccttaaggggatgtgagtgacaatcagagtggtctgctgcataagattcagaataggaggtgaggaactctcgatttagaccataatccaataggatttagggcatgtccatcgtatcgtgtcacttgctattggggctcaggtcggaactgatcccaatcgaattgaatcttgggtcaccccaaaacattagtcttataaaggatccaaaagtctaagctccaaacaaatttcatctttcttgaaagcatgtaaatcactttaaaactgatcatgatttcaacagagtcaaagttggaaatagttgttgtattcaattaatagttttaatgaatttatgtttgttatgtgatattgtagttg

SEQ ID NO: 33125 - DNA, 650 bp, Medicago truncatula
  Intron number 1 from transcript Medtr8g133970.1 (locus Med tr8g133970) derived from phytozome v7.0 (chr-ID MtChr8; po s 32122297 to 32122946)
ttaagcttgaacagcttgaggcttttggtaaatttttaaactctcattattttactacactttcaaacttttaactattgcttgtgttcatgtatgtttactttgctttgtatcatgatgaacatgtcttattttttgtttagcttattggaataggatattgaaccgttattttgggtttgtatggcttgaattgataatagagtttaatggagatacactgactgactgtgtaaaattgttttacaacgacattcaatgagaagtaatgatatttccatgtaggctgattttgtaaccatgattgaaagataatggtaaaatgccgcattctgattggacgtcagtgtaaacctcgtttgcaatgattgtgtatatttattatgtattttgtcgttttcaaatatttgtatagaaaattgtgaataccatatgaagttttcatgtttttttaatattttttactaataattatggaatcgttaccttccttattttgtaattattttttaaaagtcggaaatgttttctcaaactaaacagacctcaatcttctcaccataacatcgtgcgctactacattgaatatggttttcataaatttatgccaacaagtaaaatattggtctcttaccttgtaggaattggcg

SEQ ID NO: 33126 - DNA, 190 bp, Medicago truncatula
  Intron number 1 from transcript Medtr8g134150.1 (locus Med tr8g134150) derived from phytozome v7.0 (chr-ID MtChr8; po s 32195881 to 32196070 reverse strand)
tgtgtctttgtcatctttccaaacacagaaacttcttttgttgttgccttttttgttttctttttcttttcaccaatcaacgcgttggaaactttatcaaaagaatattaacgcgtatatgattatttataattattattctttggttgtttaagttctctcaatcactcacataaattccaaactctat

SEQ ID NO: 33127 - DNA, 678 bp, Medicago truncatula
  Intron number 1 from transcript Medtr7g138810.1 (locus Med tr7g138810) derived from phytozome v7.0 (chr-ID MtChr7; po s 33032100 to 33032777 reverse strand)
aaaaaaggaaaggtttaaatgcatttttggcactttaattttaaaaaacttgagattttgacccatagttttatatgtgtttgacttgtatttttaaaataatatttctttttatgagttctttaaacaatgtccttaggacacttcttatcaagactcatattaaaaaaataatttataatttgtgacaattttttttaaagtgagttataatctatggaagatgggatagtaagtgactcaaatgaatgtctagcttaacagaaaccactcttaatcttttttctcaatatactgttaagggtgataacttcattttcctttaacaaaatgtgggtattgttgttactgatgctgaggttacactaaagtctaaactaatcaagggtatgagtgagaaaaaaatattgcttgagacagagagaaaaagtgcaaatgtgattaatttttttatacgaagggagtatttgaggtcaataaatgcatatattttgtttataattgaaaaccggattaattaatgacagaatttgaaaaaataattaattaataatgcattcacttattttgaaatttacagatgggaaacagttcttcttgtttataacagttcataatccaatattcccaattcatgtgacaggaaccagggaaagcagaagccgaatttggcaaagg

SEQ ID NO: 33128 - DNA, 353 bp, Medicago truncatula
  Intron number 3 from transcript Medtr8g016330.1 (locus Med tr8g016330) derived from phytozome v7.0 (chr-ID MtChr8; po s 3146058 to 3146410)
cgccctggtggtacatttggttacgttgatccagagtaagtgtgatatataaattctatttagattagccagattttaatatttttgtagcattttcttgtgacaaatatccatttcaagcaatgggttacttaactttgaaacaagtggtaaagttacatgatagacagtgtgcaaaaacgattgctatgttcatttttttccccctacatatagtactattccgttctggtttataacatgtataataatgaaaagaaaggacgacatacataggtttaaggataacttatacgtcttatttgtttgttttcttaatagatatcagagaacaggaaacacaaataaaaaaa

SEQ ID NO: 33129 - DNA, 600 bp, Medicago truncatula
  Intron number 1 from transcript Medtr8g040090.1 (locus Med tr8g040090) derived from phytozome v7.0 (chr-ID MtChr8; po s 8531206 to 8531805)
gtagcagtggtaccgagggtggagtagaagatttggtcactttggtgcagagatgataaccgtttggtgacagaaaatccggagttttgccggcggaggtggcgctggaggttgaaaaattattttgttttgtggctttggtgatggttgtggtggcagatacaatggagacggtgtcggaagttgagcgaagtcattttgttcgttaacagacccctaatatggtggattttgagttgggtttaggaactcctttcactggacatggttttgttttctggaaaaggaatgaacactccttctggtggttcttctcgatattcatgaacaagtctcttttgaaaattctctctcaatgttttaaatgaatcagagagcttttgtaaggatgctttgagagcaagagaggcttgagtttcctgtatattctctggatttggaattgtttcaataggttatgaataagagtattgaggttaggtgttgcagttgttgtggtttgtgtatgtgtacgtgtatgggttagagtattggtttggttgtggaggttgttgttggaatttaatgttggggtatggatttggtgatgaaataggtgaa

SEQ ID NO: 33130 - DNA, 633 bp, Medicago truncatula
  Intron number 1 from transcript Medtr8g088190.1 (locus Med tr8g088190) derived from phytozome v7.0 (chr-ID MtChr8; po s 18629868 to 18630500 reverse strand)
tcattctttaaaaggcaaagcttctgctgataaaggttagctttattatatcaataaattattgttagggttttgtttcttatactgtgaattttttttgaaaaagaaataatgtaaaaagaaattctatatacaactatgtttgcatgatattgactataaaatggtgtgagccaaatgttaggtccgttaaccatttagttagggatttgattatggctcatgcagatagaaaagcatacgttataatagatcactctaaagtagaaaaccattaatacaaccttggctcatgtaaataaaccctctagtaatattatacaacttttattaaaaagaaaaattcagcttatagatgagattgtcttacacttcaacttgaaatgtaaaaggtgtaaattaattaatagtgtagtttaagagttgagagatagatagattaggagatgtgatgtaatatatttggtggtaaaagagaactgaaaattattagaagaataattttgtttttaatattattttttcatttatagaatgagatttttatgcacagatactaaatttgatatatgtatgttgttaactagttgcatttcttgtatttactttttataatatttgaaacagaagtag

SEQ ID NO: 33131 - DNA, 443 bp, Medicago truncatula
  Intron number 2 from transcript Medtr7g097030.1 (locus Med tr7g097030) derived from phytozome v7.0 (chr-ID MtChr7; po s 21871833 to 21872275 reverse strand)
tggagatagtaagttaacttgttttttgataactactgtatgttttgctctattgaccatatttattggattgaagtgttactacttgtgtgcatagaggtaaaatatgtaactgaaaaagttgatttttttgggattaataatgtagtgatgttccaagattcaatttgctttccatgcctctttccctgaggagaagtgttgattgtaatgtaaagtaatcatagatagcttagaccgattgatttgtcccaaaattcagggatctgtatactctttcttttctatgtatatttgtacaattcttcataaataatacaataaacattcaaattcaatccaagtgtatgtttctcaagtacttactgttttgcgttcttttgtgctactggtaaccatatgtccattttacatgtaaacccactgcaggccttttttcagcg

SEQ ID NO: 33132 - DNA, 820 bp, Medicago truncatula
  Intron number 1 from transcript Medtr8g120090.1 (locus Med tr8g120090) derived from phytozome v7.0 (chr-ID MtChr8; po s 27378484 to 27379303)
cgacagtgggtggctattagagctattagaaacctgtaatagtgcaaaagcagacttaaaggtatcctttctatttgccctgatggtatgatgtccatgttaatttatgtccgtggctagtttccttggacaggattttgcatagttttcacatttatgataactagttctataatgctgcaatttggcatgagaaatttagaattgaacaaacagtgtgaaagctaacctttcagattagtttacttggcaatttatgtgtttagttgtttggatgatttatgtgtgtataagcttcccattgcataggagaaatgtaacttttcatgtttgaagcaatataaaaacacaaggaatcttcaccttcagattcataggaaaaaagttcaatactgggttttatccttgactttattttactaggaatcctcaccttatcatgtcactttggtttctgctctacctgtcaggattttctactaaattatgttgcaaatatgtttgtatggatgatgtgctttggtttaagcttctgagtttcttagatacacattgtatgtacttaatagtcttaaatgtatgtacttatctttcttagatgttgaaatgcaattaactatatgaactgcaattctgaacaaaatgtgcaaattgctctttctagttaatcatgactgacaaggtttgtgaattttctatgtgaatgtatgtgtgttcattgtgtgtacaagaaaattcacatacaaggcaatgaggcgtgtcttttgtttaggatactgctactagagttattgccgagggtctgtgaccggatcagaca

SEQ ID NO: 33133 - DNA, 528 bp, Medicago truncatula
  Intron number 1 from transcript Medtr8g087640.1 (locus Med tr8g087640) derived from phytozome v7.0 (chr-ID MtChr8; po s 18268284 to 18268811)
aaattaaaaagaaaagaatacattgatttttacatgtatgtatccattacaggaattacagattaaagttgtttcttttttttttttttttttttttttttttgtaaattaagccaaaatagaaagaaatggaaaattggtgcttgctttctctaatgggtatgattcaggagggggtttcgattgtggttatggagtgtgattattttgacatttaatctttggggatttaagagatttgaagtggattttcgcttggaagagaatgatacggaaaaaaggcttctgatatacatgggggacatggttttgatgagaaagaaaacagtgtagagagatgtatgtataaaaataatatgggttttaatttctctgggcaaatctatgaatatgaggaacaaagaagatggagatatattgagaatttgtgttgtttgaaacaagtgatgtttttgagtggaataattgattattgattgacattgattttttaattattaatttttgctgggttttcatgttgaaggt

SEQ ID NO: 33134 - DNA, 963 bp, Medicago truncatula
  Intron number 1 from transcript Medtr8g073780.1 (locus Med tr8g073780) derived from phytozome v7.0 (chr-ID MtChr8; po s 14508496 to 14509458 reverse strand)
gtactcacctcaaattgggttcaactcaatttgaggtgagtactgttgattttgatgtttacactttcaatttcattcatgtgaagccagatcttgttacttatacaattctgattcatactgcaattttgattcatactgcctctctcatgaccttatcaccaaagtcctttcccttattgatgtgaaatctcttatgcaaatgaggttcgtatgcaagtcttggaaatctatcatttctgatcctgcattcatcaaaatttatattacgtttctggattgatattcatcgccggttgtggcctgttatcggtcacggtaaactatttcacaagatcaaaatttcctgaaacagacacttcaatttattcctatgctttttgtgccctatttgctatgacggtggggtttcaatgcctatcatttctagggtacatttgaaaaaaaaatgaacaacaagagaagcgatttaccggttatgctgagaagagaaatgagtttctgaggaattaggagttctggtattgttactatagagaacttcaataacattgaagaaaggtgaattggaattgagaaaatcagaaaaattagttacaacagtacaagtacttgtatatatacaagttatggaactgaagtagaaacagaaaatcataactaactctaactgtcagtaactaccttagttagttctaactaactgtagttaagtattaaccactagttagaactatgctaagaactaagtgtctaatagttaccgttgagggtgtaggtttcgttagattatgttgttgtgttttgtttgccgggtagtttcatgtgaactttttggttgtagggactctttggaaaataagagtcaccaactttttggttgtagtgactctttggaaaataagagtcaccaactttttggttgcagaaggagagaagagttaagtgcgcaccaattcctat

SEQ ID NO: 33135 - DNA, 302 bp, Medicago truncatula
  Intron number 2 from transcript Medtr8g087090.1 (locus Med tr8g087090) derived from phytozome v7.0 (chr-ID MtChr8; po s 18022321 to 18022622)
caggacgagtattacggcaaattggtatatgttagaatattgtaattggtatttgaattatgtgttttgtagcatcagtttatatatactgtgtgtttaacctacactagctggagagagttaaacttcactactgtaactaactaaatgcaaagaatatttaaactagaaaattaatctatttttacactgtttattcaattttattttatttttcttgaggaaatctgggattgatgttctgttggttatttatcatgtcggcagataatattacaatctattggagaagttgtagatct

SEQ ID NO: 33136 - DNA, 765 bp, Medicago truncatula
  Intron number 1 from transcript Medtr8g011730.1 (locus Med tr8g011730) derived from phytozome v7.0 (chr-ID MtChr8; po s 1645449 to 1646213)
tgttcagatttatagtggctcagaagttgatcctagtaagtacattttacacactaacactgtcaatgtttttttgattgaaaaatttaatttagtttatccttttcaattgtaaattttttctttagctcacaaattcaaatcatttttttaatctaaattgtaagacttggatttggtccaaaaatttataaagtgataaattaatctatgaaattgaagaatgtcaatcaatgtagtcatctgtcaacaattcaattaattcagaaaaaatctgaattacataatagaaatgaactaaagttctaaaccaatttctataagcataatccaaatgagctgctctaaacaaatcgccctgactgctacaattttaatgaccaaaataatgattcgctgatataacactaaatttcatggttgggcccttacgtttattttaagtttcaagttggtcccttacatttaagacgtggctaacaaagacgtacacatggataactttgagggtaccatatggacgttttaggcggaatgaactcaaaatttgacatcagtgacataagggatcaacttgaaactttttaaagatgggggaccaacttgaaacctaaaataaacttaagggaccaaacatgcaattaaacatataatatacgattttacttatgatttgtttgaacaagatgaacaacttactttgttttcaactttgtattgcaatgaaaagatactggtaaagggtggttgagtgagaaagcatat

SEQ ID NO: 33137 - DNA, 734 bp, Medicago truncatula
  Intron number 2 from transcript Medtr7g104410.1 (locus Med tr7g104410) derived from phytozome v7.0 (chr-ID MtChr7; po s 23651974 to 23652707)
gttgaaactcaacaattcacaacaaagcattgaatgtatccagcactaatccttctttttaagttgtttccgttttcaatgacaattaccattttagttatttctgcattatcaagatgccaatagatcattcatgcgagtaaaattttctatggcatgattcattcataattcaattgtttgctaatatatgaagattttatatagtgtatctttgtccttccttcacattccctatggcgggatacagatatttttttagctactgttttttgctcttgctctgcaaatcgctgtctgtttctactttataggagcgcggtcgaaatcccccggcattcaggctattggtccaatattgtagttggcttgtttgtcatcccccccccccccccccctgttgaaagtagcattttgcatcagaatcatgtggttattgttttggtacatttctgtaccagagtcaccaataagatagttacattttataatgttggcaaaggaaagcggcattatacttgattttctgcatggttaaataatttttaaggagtaacatcgttttgcatattgatttgatttctgctttgaaataataagtattacattgacatctcactttatattgttcttccgtccctcgttgtggttatttagtagtgaaattggtttatatgtatttcttaagtactcatttagcattgtcccgttggtgcattcctcaccagaagaga

SEQ ID NO: 33138 - DNA, 608 bp, Medicago truncatula
  Intron number 1 from transcript Medtr7g133660.1 (locus Med tr7g133660) derived from phytozome v7.0 (chr-ID MtChr7; po s 31311316 to 31311923 reverse strand)
tcggtttgattttcattcttcaaataatattaactattactaacagaattagtattgacattttattttattttttgtcaaatagacctaactttaaaaattgtagtatctagagaattcaattcatccctttaaacacacaaagggcccacaaacttcataacaatatttgagagacaggaagtttaatgaaatatatagattaatttgtatgcacattgtaaactgtttccatatatggatccaatcaaatcactctataatgtcactttttaggttagtttctaaaatatatatactaccatctatttaacatgatttgattggatgcacgtgtaaaaaagttttacaccgttagagtgattgcttaactaaattttaaaaatttcttccaaaaaatctaaatttagaagatgaattaattgttttcttcttgataatgtacaatcacattatagtactagaaataatataaaaattttaatggtatttttagtttttttattagtataactattgtgtcataagacatgtatttatgatttttgaactataggtgtgtgattcagctgcacaactctgaacaaaaggagaagtagttttggaag

SEQ ID NO: 33139 - DNA, 939 bp, Medicago truncatula
  Intron number 1 from transcript Medtr7g099920.1 (locus Med tr7g099920) derived from phytozome v7.0 (chr-ID MtChr7; po s 22406908 to 22407846)
gctcttcgtttccctgctcaggtactatacactcttacgttcttttcaacattttcatttttttgtgaggttaaaaattcaatttttttgggggtttcttcatttttcgttttaattttaattttttatccatgtttgaactttttttgttgtggaaattttgaatgggtgtttgaaatttgatgggcatggtgtgtttgacttgattttataactaattttgccatgtgtttatattaatttaagattagtgtttattttaaaaaccctagcttgcgaagtgataaaaatgtgttttgaattatataaaaatgtgttttttgcgaaggaattagactttttttttttttttttttgctacaaaagaagacattggtgaattaggccaactgaaattaatgaatttgatctctaaaattgaaaattctcttttacgattactctgaatcagtcagtttagtcctgaaattgttgcaaattgcaatgataatgatatatattggagaatttttttcaatttagaaacattttaggattttgaattgatgagactaaattgattattttctctagttaattttggaatttaagctaaatttaacttgaagaattcagtttcactttgttcaatcagtgttgtcaaatagcaactatagctacgtgatgtaatattgcacagtgggatttgaacaagctacttttgttcagtgatatgctatttagtacaaagtattgtcaaatagtggctattgcggcgctataactctgtagcatagtggaatttgaacaagccacaattttccgctatctgcagttgacaacacttgttcaaactcaattggatccagatcaattttttaaaataaacaacgtatatcagatgcttaccctaaaacatgcataatcgttgtgtaggcactcggtgctgcgggtggtgca

SEQ ID NO: 33140 - DNA, 544 bp, Medicago truncatula
  Intron number 1 from transcript Medtr8g015170.1 (locus Med tr8g015170) derived from phytozome v7.0 (chr-ID MtChr8; po s 2598981 to 2599524 reverse strand)
tgtttttgctggtgttggttcagccatagcctgttagttttctcttctttacaagagaattgaacctaagatcacaatgtcttaaccctcccaccccattactactagaattatagtgaagttttcaccattaaagttgaatttttgatgaaaattagagaaaagattagagacgtcaaaattggagatttatttaattttttttgtgagtaattcgacaaaaatttagagacataaaaagacaagatacatctttattttcgtctaattgttaaagacaccaattttggcgagcaatattattttttccgtttctaatattagccagtattttaacttcattttctaagttggaaagggcattttacaaccgtttatttcttgaggtttcatgttcaaactcttactatcgagcgcctcatggactgtcatttcaattctagcagtaaataacacaaaaacaatgaaaataagtgtttaattttcattttgattaacaaagattattgttctttgacttaatttgcaggtaagttgacatcag

SEQ ID NO: 33141 - DNA, 723 bp, Medicago truncatula
  Intron number 1 from transcript Medtr8g026360.1 (locus Med tr8g026360) derived from phytozome v7.0 (chr-ID MtChr8; po s 5625291 to 5626013 reverse strand)
ccttgttgtcattgttgttacggttgctgtaagtggtaatgagttaccacattaaactttgtactttgatcttacaatactaggttcttactcatgagttaccacatcaagtgaagaagaaaatatataatcaaacataaataaacattaaagaattgcaaacctcacatgttttctctaattaaaatatccataatttgatcatttcactttaattgtttctctctatgcttttttagacaaaaattttagttccttccttccttccttccttggacattgtcatggggctagaaatgggccactttttcttcatccttacatgtagtatatacatttgcatctctctctccacccccacccccacccccaaatggcccctatccttttaaatgcaaacagtgatataaaatcaaaattctcctttcactatatatgcaaagtgagttgaacttggattttcctctgtccaaagtttttcaaattaatgtgggagggaggatggaggaggtagaaaataaagagaagtttgtttttagtttatgtccgaaccatgacaacttgttcctaattaaggtcatcaagattttgggggagggtagaaaataaagagaaagattttgggggaggatagaaaatatagagaatcttgttttattttaggtccccacaccatgacaacttgtagtgaagaccatcaagatttgggacacaagaaaaaca

SEQ ID NO: 33142 - DNA, 800 bp, Medicago truncatula
  Intron number 1 from transcript Medtr7g117740.1 (locus Med tr7g117740) derived from phytozome v7.0 (chr-ID MtChr7; po s 27559864 to 27560663)
gtattcatcatttctcattcatttgggtttttttcttctgctattgctttagtcaatttcaagtcttccattattcccttttgttcaaattaattattgtttttttgataaaggggttgttgttttcattctgttgatgcaaatggagttgttgctgctgttgttgttgacctgtgtttatcaactaatctgctataatagaatagaaattagaaaacatattagtggttatgttttttatgaatgtgccccctttattattttgagctgacagtgtagtaatccaattctgtagtagtagtagtgattttgatcttaattaggttttggaagaaaaagaaaagccgatgtctcggaaggtttatagtttatgtattttttttttggtacatttatagtttatattgattttcagttattttacctggaatcttgtgaatttttttgattgcgaatgctgtttctggaaatcggaccatgttggattggcattgttggttataacttcgtaaatttgtcgccattattttatccattcaattaagttttttcgttgacttaaggataaaaagcaaacatggcgccattacgttgctgatgcatttaagttctttcgttgacttaactgttaaaagctgtttttttttttatttgtatttaaatttggtctaaatttgaaaaatataaagaatttgacctttccgtttacaaccacgtgtttttgagtttcaccgcagttgtgtgattatggatatgcttcgtattgtaggctgctgttgcgaatcccattgttgggaccc

SEQ ID NO: 33143 - DNA, 400 bp, Medicago truncatula
  Intron number 1 from transcript Medtr8g128900.1 (locus Med tr8g128900) derived from phytozome v7.0 (chr-ID MtChr8; po s 30279842 to 30280241 reverse strand)
tctagttgtagttcttcaccaagttaccgctccttgtacgtatataaccttcctttaattatattattaatttaatttgtgtacaatatatgtataaaacatttttatacatctatccaatcaaattttactatttgtgaaaatattttaagaactctcgtattacactgcacaaaattaatctcttacattataccgtcaaaaacatactacagtggtaatcaaattaaagtctaacttggacacgtgaaatcggctatatggatcaaaccataccataaaatttagatatgcatttatgtatggatagacagtatacttatgtgtctcttttgattatttatcatcaatttttcttctggaagtgggatacaaaattagtgttgacaatagattagca

SEQ ID NO: 33144 - DNA, 701 bp, Medicago truncatula
  Intron number 1 from transcript Medtr7g132980.1 (locus Med tr7g132980) derived from phytozome v7.0 (chr-ID MtChr7; po s 30957830 to 30958530)
ctcttccaccgccgatacttactacgattacgaaggtttgttcattatgaatttctttaccgttagttaactgtttattgcataattaatgcgttgatcggattttctttatatagtattttccatttcgcggttgatttctgcactggttcactctatcatctttcatcgccattgcaaataatattcttacttagttaatcgttatccatgtaactaaaaagtcaacaattggtaaactgttaactttaagtttattgatgattgatgaacttattttgaaatagtaaaaaaaaattaattactgctgatggagtatttgattaattggatgatttttcacctccgtttttacttacagtgtagagttttgcattagcaacgtttaaaagttcctgaaaagtctgtacttgaagtgaagggcttatgaaaataagctgaaaacaggttatggacatgtcataagttattttcataaggtctatcaaacagtctgacaactgcttatgctaataaataagctcaaataaggttatccaaacagtccgttagtcttttgtgctcaaggcaaggcttgtagtttttagatttagtatcttcgagcttctggttaaagtagaactaaactaatagctactttaatgtttggattatattactatttctaattgctgatggttgttttaattgattgatgttag

SEQ ID NO: 33145 - DNA, 384 bp, Medicago truncatula
  Intron number 1 from transcript Medtr8g112820.1 (locus Med tr8g112820) derived from phytozome v7.0 (chr-ID MtChr8; po s 25478923 to 25479306)
ctaaaccagaattttccactgcctttcctactgaggtatgttaatgctagttttcattgtttgtttgatgctgtttttgttagctatgctaatgtagagagaagacctgtggattctgtagtaaggagagtagttaaatcattagaggctgaggaagacctagaaaaaatataaaagaaactattaagaaagatctaaatattattaatgagttagatagaaatacggtatataatagagcattatggtgtcgtttgatccatgtagccgaccctacttagtgggataagacttggttgttgttgttgttgttgtttttgtttgtttgttatgattgtttactttttgttttatgttaggaaccatcgaaacagtacttgggag

SEQ ID NO: 33146 - DNA, 734 bp, Medicago truncatula
  Intron number 1 from transcript Medtr8g034640.1 (locus Med tr8g034640) derived from phytozome v7.0 (chr-ID MtChr8; po s 7535023 to 7535756)
ggagaacatagagaaaggtaagtactatgtactatgtttctttcctcttttgtatccgttgaccccacacctttcctgatcaggaaaatcttccttgttattactcaaagttgatatatatttgtttttttttatgattttatttactctgaatattacttatatctgatttgttttgttcattgttggattgatatattttgtggaataagccatcaatttactactaaactataacttcaactccaatctagtttcaaactatatatatatataattaaaaagttgataaattatataaaatccatcaatttaattcatgttattaagatattagagactaaattaacagattttcatatactttaggattgagttgatggaatgtcaaatactatagagactaaattgatggtttcttgtatttggtgtgacttcttcaagtttatgtatattcatggtgttgaggttgatggatatggtgaggccaaaccaaaggatcaatgttaataagaagatatttttttgaaacaaccaatattaataattaattgttagattaatattttcctacttcgctcgagtttgaatctgggacctccaattcctgtaactcttagctcaaaccagttgagttacctgaccctcgcaataagaagatgttgacatatccaaccatgtttttgagtcttattgatattctaatccttgtgtgttcttcctctttctcaggt

SEQ ID NO: 33147 - DNA, 759 bp, Medicago truncatula
  Intron number 2 from transcript Medtr8g034640.1 (locus Med tr8g034640) derived from phytozome v7.0 (chr-ID MtChr8; po s 7535967 to 7536725)
ttatcaaatctcaatttggcaaacttgatattctggtaagggttaaaatttaataattaatgctctacttgtcctattttgtacttgttttaaaaaaccaagatacaattaagcatgttatttttacaaacatgatattttgtacttgtttctctatttgtattcttacagacaccgaaaacatacattagatgaatgttatttttactaaatgaaatgctgaaacattaaaatggcaaaaaattagggaatagagattgaaatgctgaaatcaagatactattcctaatcggctggcgtgccctatttgggccattttcctcccgttttccggactccctctcctcgtgtgtggaggtttattccccctatccattggagtttgactcgtgttactcaccacctcctcaccttcgacggtccagataaaaagtagtcagtttgatatgaacaggagattaattttgacattactgagaatttttttagtcgaaacgagtatacaacggtagttaactgtggattctcacattttgttgtcatggaccgtggacagaagaccttgctaacctagtttctctttgtttagtgattctcatatcttgtcaggctttactaattgttttttccgttgaggggttggagattatccaaacacttttgtttcgatcagtttataatccttatggaattttcattgaatgaatttgttttttgtatataattcgtctaacaaagattgtattttgtaggttaaca

SEQ ID NO: 33148 - DNA, 973 bp, Medicago truncatula
  Intron number 1 from transcript Medtr7g138840.1 (locus Med tr7g138840) derived from phytozome v7.0 (chr-ID MtChr7; po s 33040570 to 33041542 reverse strand)
tagatttcaggttcttctatttctttattaccacttttctacccttgcctctgtagcccccctaatttactttaagcaatccctaacgagtttggcaaatgtcaagatttactaattataaaatattagagatcactttttattttttattttttattttttattttatatatatagatgtaggagagagtaatacttaataacttaattcggggattacacttatcagtttagtttgagtggttttttatgtgggttattgacatgatactgatgtaggattagtggattactaaacgcctgtttggatagatttatttgagaggatttatggtttgtgagattgtttaatagaatttaggaggttgttttgagatgcttattttcataagctcttcgaatagtatgtgaaaataacttaaaacttatacaagaacagtttaactttagtttatcttctactataagcacttgatcaagattttttttgaagatgtcaaactagcagaccgaaattggcatgcgaaaatcgaactctcaccttgaaaggaacacatgccggttccaagacaacaccaccaaaccaacccaagtggatttaatacttgattaacatgtttatttaagtagagtctaaatcaaaagaggaaaccttatggttgatcagttaattctaaaagcaagcatgactcaacttaatatagaatgacatgttgtgcattttgtcagagagtaatattgattattgaatacgttagggtgaagttctcttattttggatctgcatcaactttagaattgtatgacatcataatggtcatgaatgtagaagttaatgaatcgtctcgtgaagctccaatataatgttttgaaacaaagttctttgtttgtctaaaatgaagtggaaagttgctgtaatgatagatctgaataacataattgcgtttggtccgtatcacaggaaccaggcaaa

SEQ ID NO: 33149 - DNA, 413 bp, Medicago truncatula
  Intron number 1 from transcript Medtr8g115660.1 (locus Med tr8g115660) derived from phytozome v7.0 (chr-ID MtChr8; po s 26012037 to 26012449)
acaaaaagtagggggcacagtgcgaagaggagaaagtaagttttactcaatgctgtaatggtgtattgatatgttctttgcagttaaattaatttaggttaacatgtacttcgtccatctgttatgatttaaattttgactttaaactatgtgaagatacaattatttttgctttcctgtttttatgaagatgcaagttcttgtttgagtgttaatatgcacataagtgggttatgtttattttgctatggttgccatacttgtgaaatttagcccatttcattctattattttctatgttgtctcctatgttgtttttggctgctatgcatcttttttttatattttaatttctgccgtattaatataatctcaccctttcgtttcttatttgatcaaaacatttaacagaa

SEQ ID NO: 33150 - DNA, 429 bp, Medicago truncatula
  Intron number 1 from transcript Medtr8g129730.1 (locus Med tr8g129730) derived from phytozome v7.0 (chr-ID MtChr8; po s 30765292 to 30765720)
ctccagttggtactcctgatcgaattgtgagttttctttcttttcattatcatcctttctgggtttcatttgttttgcttaatttcacttcaaattcatcttcaaacacaatatttcacttgcccaactcttcggtttcattttgttcttttactttcgtttaatgcttgttttgtaatttcattttagtcaattttttatttatcttaaaaactaaaatttaattaaagaatctttgcttgttggtgtagtggagtctctataggatttatatgacttgatgacactactaaattctgttgaattttgtaatatatagtttgcaactttcatcattcaatgtttgcactttgattagatgatggtatttcatccaattacattttgattttaggtgcttatatctggaaaagaggatttggaggcacc

SEQ ID NO: 33151 - DNA, 542 bp, Medicago truncatula
  Intron number 3 from transcript Medtr8g093530.1 (locus Med tr8g093530) derived from phytozome v7.0 (chr-ID MtChr8; po s 20569037 to 20569578 reverse strand)
gttaccattttgcttatcattctattcattggtaataatcattatctgtttagcataactgttcttgggaaagtgcttttgtgtttgtgttttttgggaagaaaacacatagttttcaaatagattcatatatattttggcatgatgttttcctttatcttgaaagaaatttcttgaaaagtaaactttcttctttgcagcaaacatattgcattatatagttattgtattttgttgaattcggatcgcctgagcaatacaacgcattcacacagtcagcacatcagtgagcgatgaatttagatcggacagtctagattccaagttcagtactttagatattagaaaaacatcaaaatatacattaaaatctagacaacagtttgatgtcggtccaacggccacctatacgctgattgcgtgaatgcatgagattgctaaccgcatgtaatccaaattcaattttttcaagaactaatatccagttgatgcaacacatggtgataggtacatccactaaagctttagtcaaaggcatagat

SEQ ID NO: 33152 - DNA, 500 bp, Medicago truncatula
  Intron number 1 from transcript Medtr7g135820.1 (locus Med tr7g135820) derived from phytozome v7.0 (chr-ID MtChr7; po s 32405116 to 32405615)
gtttaacttattatctttgttgcagggagttggtacatagatccgcttccgtgttgacgaacgatccaatcaccacattgaagacctttgattagttttatgattaaatagatgttgatccagtaattgtgttgatttaattttttatattacccgagactgtggggctcaaaaaggtgtttagcttgctgtcttttttgcagggagttcatcatacatttacccgcttccatgttaatgaacagttgaatctccacattgaagacccttgattagttttaggattaaatagatgttgacctacacatttgtgtagatttactaaattaggtttatgtcccattttttttatgtattttttcttttcttttttttagaatatttatgaacacaaatgatagagtctagttgagataccttattttccctacaatatcattctgctcttagaaagaaacaaaaaagcttagtagcagtatattggaattggtattacagga

SEQ ID NO: 33153 - DNA, 994 bp, Medicago truncatula
  Intron number 1 from transcript Medtr8g134200.1 (locus Med tr8g134200) derived from phytozome v7.0 (chr-ID MtChr8; po s 32226377 to 32227370)
aacttgattccaccataagatcgtcattagttagggtaaggtgcactccaactacaacaattgtcgtacctctgaaatggggtaattcaaacttgccaagcggccatgactcaagcatttcgcccagcattcatgtttttcctttaaaaagattaaattcttgttatgctggtttagatgaaggtattaagtgccaaagaatgaacctcattttgttggaacttgaatatcatcatctaaagcaagcctaaaaaaaagttattcttttcaaaggaaaaatatgaatgcggggtgaaatgcttgagtcctgttgttttgcaagtttgaatttaccccattcaaaggtaagacaattgttgtaattagagtgcacattccaactacaacaattgtcttactctggatggggcaattcaaacttgttaattggcaagactccaacattcgataagcctcttgaataccatcattcaagatgctgatcagatgtttgagtcatgttgtttagcaagtttgaatttgccccatccagagtaagacaattgttgtagttggaaggtacattctggaatgtaatgtaatacaatgtaatgtgataacatatatagttgaatatgtgtagtacattttgttttgaatggaacaataattatcttatttattcacttttcaaatttatttattcattacgcaattttaattagttgaattcacattagatttaattagtttttattcgaatacgcaattattcgaaacacgactttaatcaaaattattccaaatgcgattttcattgaaattattcaaaacgagaatttattcaaagtaccaatatgtcaagcaaaatgtaccataaaaaaaacataaaaaaaaagatccaaaacaattagatattacaacccattacattcaatcatcttcctcatcacacaagtcaattgggttgtccttgacagtccctggggcacctgcttttggctgaggaccaaaa

SEQ ID NO: 33154 - DNA, 682 bp, Medicago truncatula
  Intron number 1 from transcript Medtr8g086330.4 (locus Med tr8g086330) derived from phytozome v7.0 (chr-ID MtChr8; po s 17632997 to 17633678 reverse strand)
attattctttccttcttccattcaagtttcaactagtgagtttcatattcaccttcttttctacataataatgtctgtttttgccacttttcatttcatgtggttggatgtttatgatttttgggtcctaaaatgcagaaaaaagttgctagttttgctctgtagtgaactttttattttttattttttttatttttatctaggaagtgttaaaaagtgacaaatgattttttgtattttatatatctaagttttagggattttctcttgtgttgctatgaatcaatatttaaatatggaaatgctatgtttcagtttctggactagagtagaagctatgtatgatgttttctggcaccaaatagatgaaataattaagaccatgttgtaagattgaccatattgactcagaatataatttatagttaagtatttattaggatctcaattttatttgactctccataactttcttagcatatataggtactatgcatctttttgttttagctaatttttgttgtttttaatatgcatatctgacaatatagtttttcttcctctctattaaaagttctaccatagatgccatttttctagttcatacataacagaaggatctactttattttgttttgttttgtttttgttcatataaataaacttgttacatttgtgcaga

SEQ ID NO: 33155 - DNA, 261 bp, Medicago truncatula
  Intron number 1 from transcript Medtr8g086730.1 (locus Med tr8g086730) derived from phytozome v7.0 (chr-ID MtChr8; po s 17862787 to 17863047 reverse strand)
gaccctagtcttttctttgccaacaaaatcaaaaggttcaaattcactcttttttgtttcttttcttttttcttcaaagagcctagcagcgaaactcgcgcataattagtatgatgagaaatagggaattacgggttcaaccctgcatatcaaatgtccctgcaactatttatcatctgagttgtacttacagactagattagctcattaagtgatatatatactaattattattgttgattttgtttttgaattataggt

SEQ ID NO: 33156 - DNA, 368 bp, Medicago truncatula
  Intron number 1 from transcript Medtr7g117450.1 (locus Med tr7g117450) derived from phytozome v7.0 (chr-ID MtChr7; po s 27429434 to 27429801 reverse strand)
aggagattcttgtagttggtgaaaagggtcaggtaattttttcaacttcattctgttactgtttttgaaaattagttttttttttttttttttattgttttagaagattcaagtttttatttttataaaaaaattgtttgtaggaagtaaaagggttgaatttatgtatttggaagtaaaagtgttgctaattaagtaaattttgtgtatttggaagaaaatgtagtctgagaggatcctttaaatcaaatgtgatcttaatagtttttgatgattcaaattatttgatttttaattaatgaatttgcataactttttggaagtgtgtttgagggtgtaatacttattgaaagagtgaattactgagt

SEQ ID NO: 33157 - DNA, 707 bp, Medicago truncatula; identical to SEQ ID NO: 32923
  Intron number 2 from transcript Medtr8g093390.1 (locus Med tr8g093390) derived from phytozome v7.0 (chr-ID MtChr8; po s 20508984 to 20509690 reverse strand)

SEQ ID NO: 33158 - DNA, 551 bp, Medicago truncatula
  Intron number 1 from transcript Medtr8g093390.1 (locus Med tr8g093390) derived from phytozome v7.0 (chr-ID MtChr8; po s 20509733 to 20510283 reverse strand)
ccgtaccctctcattttcattttcattttctccaggtttgttacctattatcgattcttgaattatacaattttttacttctcagatttataatcttcacgtgcgtttcaattctctgtttatgaattttcaccgattattattactgtattaatcaagacaaaatgttttagtattttcatttttagattatgattgttgttttttagcttgaagtcaacgctactgtgtttgaataaaattcctttacctgtttctgatttgagttcaaaagtagaaaaagacgaaataataaatcgatttcagaagagaacaataattcaggttgaaaatgttgactgctggaaaagttcacctaattttttggttgtttttggttaaattctgaatcggatgctataggttatagctatacacgtgattagtagtacagtgtaggtggattcattaattaattttgtttggaatgaaatcaatgaagaaaattaatcttgtttgaaattttttgctgcacaggttggttgggaagtacattttttttggaggcaaca

SEQ ID NO: 33159 - DNA, 772 bp, Medicago truncatula
  Intron number 2 from transcript Medtr8g073350.1 (locus Med tr8g073350) derived from phytozome v7.0 (chr-ID MtChr8; po s 14295110 to 14295881)
ccgtcgttcattcaaactcaataatcaaaccaaaggtatgtttctgtcttatttgctttatatatatatatatatatatatatattagtgattccaaattgtattaccattagggaaagagaagcaagggtaaaatgtcatgaaatttaataatggcctaatcactagttcatacaatatttgcaccattatcttaattttatcaaactcaatcaaaaagtgtttgtccaaattcattgctctaaaaactagagctcattgattcaaaacaaaattgaccgattacttgatttataatattgttgatcaaatatttgtatgtaaattaggcttgaaattcaaaaacaagaagaagaaaatgtgtataagtaatcatgtttgatgtcataagcacttttggacctaccatcttaatgttaaattgtttataaacactttttaacgaagttggctgaaaagatggatgacagtgtaaatattctatgacttaaagaccaattggtaacaatttctttttaaaggactaatctgttataaacatataacttaaaggaccgcataaggtatttagccttaaatattccttcatttagtgttcggtcaaagaagggaaaatattttaattagatgttttgtttggttaatagaaggaaggggaagttgaagagaaatgtcaatcatgttgtttggttcagaagacaaggagagatatttttgaattaatttattacggtatgatgtgtttttttattgcttggaaagaaagggtatt

SEQ ID NO: 33160 - DNA, 174 bp, Medicago truncatula
  Intron number 1 from transcript Medtr8g089370.1 (locus Med tr8g089370) derived from phytozome v7.0 (chr-ID MtChr8; po s 19188445 to 19188618)
cattttcaatctccaatctccaatttttaattcatgtgagttttctcctttttcttcatgctttttgaacttttagtttaatagttaattaatttccgtttttgattattcttgtttattatgaatcttgttcttgttttttttagggtgaattgaaattgctgattcaattcg

SEQ ID NO: 33161 - DNA, 812 bp, Medicago truncatula; identical to SEQ ID NO: 32253
  Intron number 2 from transcript Medtr7g135390.1 (locus Med tr7g135390) derived from phytozome v7.0 (chr-ID MtChr7; po s 32188682 to 32189493 reverse strand)

SEQ ID NO: 33162 - DNA, 1015 bp, Medicago truncatula
  Intron number 1 from transcript Medtr7g127320.1 (locus Med tr7g127320) derived from phytozome v7.0 (chr-ID MtChr7; po s 29832455 to 29833469 reverse strand)
aaccactgtcgctcgctccactatatctgtttaaggtcagtttccgccccttgctatcatctctcttttccctttttaattgaaatcgtgtttaagcttctcttcttcattttgcttattatgattatgattaattgttcatactgaaattgccgattgaagttgattatgctgaaatttcaaaacctaatgagagccagctagaaaaacaaaaaagaatggctcaattttggtcacaatactgaaattgaaactgattttagcttttataaatatcattaggttttggctattgaaattgattttatattatttgaaattgaaattgaaattgaattaggatgaagaataattgaatcatgatatattgttttgtttgttgattttatattttataattagtaataatatattgttttgttgtataattgaactaggatgaataattttttactagttatgcctagagatagagcttgtagtagggagagtaacaaagtctgactttgaaaactggaaaaattacttttatcactttaatactgttaattcttataattttatattgattatgtgatttaaggtgattttatgaatttagctgtttggttttacaaattacattgcggcagttggcttaataaataaatatcttgagttaggaaactcatttttgagtcagactagttggatttgaaagctatcatatagttgtatgatactggaaaattttgtgaatttatacttcttgcacacttttttcgtgatattgtgaatggagtgttctgttttataaatttactctgcattatttcctgacctacatacaaagctcgttttcgaatgggaccaattgcatttgaaagatgagatctagaattctagttattaaatttagtattattattttacaaaaaaattgtgcctcagtgatatgtgtccaggttctcccctgacagtgggtaatcgcaattttgtaggtttggaggatctttgtgtatttgtttaaaacacg

SEQ ID NO: 33163 - DNA, 878 bp, Medicago truncatula; identical to SEQ ID NO: 32270
  Intron number 1 from transcript Medtr8g137300.1 (locus Med tr8g137300) derived from phytozome v7.0 (chr-ID MtChr8; po s 32883690 to 32884567)

SEQ ID NO: 33164 - DNA, 352 bp, Medicago truncatula
  Intron number 3 from transcript Medtr7g124510.1 (locus Med tr7g124510) derived from phytozome v7.0 (chr-ID MtChr7; po s 29244662 to 29245013)
ccaaaaagtgcagaagggatacacaattttaggaggttagaagctggaaaaattattttagcagaataaaatctacataagagtttgatgaaattagctctttctctcatttgattatgatacaggctcttatgtttttccccgcttaagagcaacatggtgctatacagttccgttggtccaccgcagggggatctagggaaggatcagacccatttgtgggcctatagaatagtggatatgtcttctgtgtagtaaataacattgctaatttttagtattgatttttatcgactaagttgttcgttcatttgcagatcttgttctcaaagataagatttttgtatacgat

SEQ ID NO: 33165 - DNA, 651 bp, Medicago truncatula
  Intron number 2 from transcript Medtr8g081360.1 (locus Med tr8g081360) derived from phytozome v7.0 (chr-ID MtChr8; po s 16663467 to 16664117 reverse strand)
cagctctcgaatctgttgatcataaacgaaggaaggtgcttaatttttttaacttttaaatgtacatggatgtcgttgttatatatgaatttaccccatatatctaagagtttctgcagaatgttctctttatagttattggggtgatatgaggtgatataaaagacagcactaatctctttattcttctgaaaaacttgatccttattaaatgtggaaacaaacttgtgaaattagatcaatatggacattaggcaccaatcctaagggattatataatcttatcaaccatcgtaagatataatcatgatattatgctattttgcttctagggctatagagatttcttgcgtttgattgtttacagttttaatctaggttaatggagttagccttggatgaaaatcctatatttgttaaccttggattaaatatgaatgggtattttcattaaattggtatgtgctcaaaggttattaattcctccctactagctactagtctactactgctttgttaatggtatatatccgattttaaaatcatttacaaaatggtactagctagtgcactattattttcttaaatgattttcttatcatcattggttaatatcaagttcttcattcttacaatcagattctgcaacaa

SEQ ID NO: 33166 - DNA, 897 bp, Medicago truncatula
  Intron number 3 from transcript Medtr7g096740.1 (locus Med tr7g096740) derived from phytozome v7.0 (chr-ID MtChr7; po s 21726417 to 21727313)
tggtttctgcaaaaggtaattaccatgtgtcaggaagtttgaaactattggcaatgggtcagagatactgatttttcccttcttttcttttaattgattctgacactgcgtgtataaaagatgaaattcatatgtgccctttttctctataaaatggtgcttgctgtgttcatttcatctcagtcaataatttccacgcagcgctgtgagggacgaaatctgattgttaatttgtgtaattttcgtttgctataaaagttcacaaggtatgcccattctttatcatgttttgtgtttatttttcattgttgcatcttcttcaaatcatgcatttttgtttatttcacatcaactatatatagtttagttattgatgtttctgttatgtatatggattatgtgtgcatttgaaagctaattgactcatatctttgaatttgcgttgctgtttttcagtttcatatatgcacacaatgtgtttgataaaatgctgcagtgagttctcatcaacattaagatcaccatgtttgatattggtattttttttattcatgaatatttcaataaatttgcttatttgtttttaatttgttttgtcataaacccaatccatatcctgcatacaaagattgttaaatttctaagcaaatttaacaccctgttaaatttatctttctttcttttgctctccagcatatttatttgcaaagacaggaagagaaaaattgtgacaaagagtacaacttttatcatgtatatgtggatttagcagattatattggatagtaagataggtgaggtttgttgtttttacaggaagttgaagcaaagtcaaaatttgttttacttttttctttcacttttgccttccacatttaatgaatcatttgcaggtat

SEQ ID NO: 33167 - DNA, 457 bp, Medicago truncatula; identical to SEQ ID NO: 31850
  Intron number 3 from transcript Medtr8g087900.1 (locus Med tr8g087900) derived from phytozome v7.0 (chr-ID MtChr8; po s 18442422 to 18442878 reverse strand)

SEQ ID NO: 33168 - DNA, 926 bp, Medicago truncatula
  Intron number 1 from transcript Medtr8g130010.1 (locus Med tr8g130010) derived from phytozome v7.0 (chr-ID MtChr8; po s 30898001 to 30898926)
gtggtcggacccgttgcattgcttgggtattggctgacctttgttttgttttattttgtttgacagattttaatgttggacaagtcttcttagtacaccttgtgctgagaaggcacttttggttttgttaatatacccatattatgcaaagagaggattttgaaattaaggcgttgtcctcctttaaaaaaataaaaattaaggcactaccgagacacaacttgaccttttttttttttttttgggtgaaatgcaacttaacattaatccttattatgaaagtaacttaaaaaattaattccttagataaacacatgatcttaaaagtatactatataatttcaagaagagtcgttaaactttgtttggagtgggacgatcacttttgataagaccgcaaaaatatatgtgtaccgcgtgtaaacagtgaattttaaattgctattcgttttatttttttgtcaagttgaataactcagcaaatgatattattatatacgtagagaataaaagaatatatcaagttggatttgattcatattatcacgaaatatccaaacatcttgaccctatagcagcataagctgcccgtgatttaaaggtagccgggaatgatgattatagcaagaggattttttaagtcaacctaatcaagataactatatctttgtataacttttgtttggacagaacatatcttgtgttatatatatgtttcccgaataaaataataaaacaataattttaaaaaataaaaagtgggttatttttaatttttaaaccacgacaaaaatcataattatttcttcacgaaaaaaagtgtgtaacattgtcgattaaattatttagaaaaacatatagtaatatgtttgttgggaatgaaattattgttagtgttgacttaatcaaaatattaagcggtgaac

SEQ ID NO: 33169 - DNA, 323 bp, Medicago truncatula; identical to SEQ ID NO: 32951
  Intron number 2 from transcript Medtr7g104510.1 (locus Med tr7g104510) derived from phytozome v7.0 (chr-ID MtChr7; po s 23728589 to 23728911 reverse strand)

SEQ ID NO: 33170 - DNA, 929 bp, Medicago truncatula
  Intron number 2 from transcript Medtr8g132710.2 (locus Med tr8g132710) derived from phytozome v7.0 (chr-ID MtChr8; po s 31423864 to 31424792 reverse strand)
gatctttgtctaggaaggaagcagcattggttgaggttcagttccttctttatttacatgcaatgcatgtcatcatttttattggaaaaaccaagtcccacatagattaaagatatgatctcactagagaataaagagagacacccctcaacttacaagccggtgccggttttgtaagtatttacttggttgaatatgaaatcctaataattatcaccatcatgtttagtatgacttgagtagattagtagtagaattgtaaaatcttgtttaattggtggtgagttgcgaaaatttcgaaccgttcatcttgggtgatggttgagtttgttttcttaaacattcatgtgtagtcattgattttatttcaatgataggatttgactcaaatttgcatgagatagctagaatttagaagaggactattgtagctcatgttatgttgggtcaggtagaaaatggtatcagtcgtttcgcaatattccatattgtaatgtactagtactactaatgaatattttatcttgtaattcatgttatgggctgcagtaggcaacacccagcctctctaatctaactgaggaaaaaatattccgagaaaaagaataaatgttaatatgagagaaaatttctcatagtttttcttttttgtctttttaatatgaaacatgcgactcagactatttttcaagagttgtcaatgatgtttgtcagttattttgggttgcttttttcagttatgagtttccaatgcatgaatttcatttcagttgtttttattatcaagtatgacctgtgtagtggtgcttatcagaagaatgtatgaccagtgtagtggattgtgaaaaatgctctctatcacttgttcttgcttgttttgtgaaaagatcattttgttcatcataaaacttcttttttttcagttttac

SEQ ID NO: 33171 - DNA, 903 bp, Medicago truncatula
  Intron number 3 from transcript Medtr7g106920.1 (locus Med tr7g106920) derived from phytozome v7.0 (chr-ID MtChr7; po s 24859030 to 24859932 reverse strand)
tgaaaattgtggggaaaaaggctacaagtacacaggtatatatcagtgctgctgatcttgttaattttatgtttttccaagttcaattattttaattatgaaaattttaaaagtagtaaattctattcaccagtttgattattaatttcagaagagggtcctttagagggtaataaaaataacggttttttaggcaataaaaataataacagtttccttcaaaaaaaaaaaattaataactgttgaatacaataacatagctataataacagtttctctgtgacaatccacattttttctcttttttgtggggtacttgctgtcacattctttcgccttattaagtagttgcaacttgcaagaggaaaacagatttggattttatgaaatcacacaatcatggattatgatgattacacagctcatattttgatatgcattcattttaaaatcaatttggtaaagttaaaatagagtctacaaaacatcttttgaatgtataactacttttttagttgttttgcttaaccacagagaattgcggtctgagaaaaatcatttaaacacacttatgtattctttattttcttttttgtttaaaactaatttcaatgcctagttttcaatgtttgagactctaatataaggatttggtttcacggaaattacgtggtcgactcttagatcaagattggacggctcatgtttcaactttatattttggacaaagttgggtgtgaaccattcgattttgatcgatagtgtagatttcatgaattggtcaaaggcgtctatgattgtttcgagtgtagggaatacaaatccatattttactcctgaggtttcctgacttttataatgtcatcatctgctgcaggttgttctcagtgtggtaattgctgc

SEQ ID NO: 33172 - DNA, 832 bp, Medicago truncatula
  Intron number 1 from transcript Medtr8g102220.1 (locus Med tr8g102220) derived from phytozome v7.0 (chr-ID MtChr8; po s 22392391 to 22393222)
cattgggctgcaaacctgagtggtagtattgttaggttggtttccattgagcttgtaacaatcattttgataacacatctcagaaaattaatttgtcgtttttttttacctcccaatctactatgccttgctccatctaaatgcagttttgctagagatgtcaacgtgctatgtctcatacagacagtaatgcggactcaggatggtaaaatgaggaagacaaaaggagttctaataaaaagagtccagagtataaattcgaaaaaagaacatggccaacaatttgcaaacatttgcatatggaaagcatagcaaacatttgctcaccagtgaattagatagaaaagaatggttttttctaacatgcgcagaagtgtgtcatgttttgcaccgtgcaccatcatttccactagatcaactaggcaccatcgccatcgtttactctttgttccaacccagaatccaacaaggtgtaattcttttgatattcgcagctaactccatgcagtcttgtgtttgcatcctctcaaaaataaattcacgactccaaactaagtatggtgttgccatgtcaaagcttttccacaaaaatcaaagactggccttgataaatgttgttgccatgtcaaaaagcgtgaggcgtatttgattgaaataatttgtagggttttgaactacgaggttctgaacatcgttttgcaactgggtgtagctgaaattgggtaccattcaaatacagttttaatgataagatatgccagaaggatgaaaattggtctctttaatttgttttgtaggtgggttgaactagctagcagaggagaaagagggg

SEQ ID NO: 33173 - DNA, 819 bp, Medicago truncatula
  Intron number 1 from transcript Medtr7g120750.1 (locus Med tr7g120750) derived from phytozome v7.0 (chr-ID MtChr7; po s 28263275 to 28264093 reverse strand)
gaggttctctcacgtaatttctctatttgttcaatttcttgttccattctatttgtttttagtagcaatcaattatagttctagaatgtgttattcagtaaaaagaacatatggaagattaattagctgataatagataacggataagttagttcatattatcggttaaacatgtatattgaattcaaagtgtttggtacaattagtggctgaacggactaataaatataaatgacatattttcaattttgataatgagggtaaaaagtagaaagaaaatgatatactataagttcaaatgctgcacttatgtttggttctgcggtgacaagaattgattttgagtgaattgattctgtaaaattgattttgactaaaagtgagttgaaggtaaagtgatttatttttggatacattcatgtaaaagtgagttaaactttaaatttgtgtgtaaaagtcaattctagaatcaaaagctacaaaacttaacttcaagtagagtcaattctgaaggcaaaatcaattatcttcgaaagcaaccaaccatgttagaatcaattctacaaccccatattcaattatgacacctctagaagtggaaccaaacataccaacatggtgagagaagacaaatttactttaatcattacacgatagaagctatacacctatttggttggccttgccatacatacaaagctataatgtttatgaacggattagtttctttgcgattgactttttttgatgtgataaattaaaatacttggatttcttccttcaggtttccagttatcaattgcaaaacttgttcagcca

SEQ ID NO: 33174 - DNA, 899 bp, Medicago truncatula
  Intron number 2 from transcript Medtr7g096540.1 (locus Med tr7g096540) derived from phytozome v7.0 (chr-ID MtChr7; po s 21581708 to 21582606 reverse strand)
ttgaaattgggggtgtctcctttactgttaaaccagtatcagcctatattatttccctgtttatttttattttttatgatcctaaatgtatagtttgattttatttaagatataaacaattttattctataatttttatgcatagtttcatttcagatctttcatgctacagcctacatacattagtaatattaaaatgttggtaagaagtttgctgattcctggggcaatatgaacagctgtttggattgggagtcaagttttacattaaaatcatttcatgtttaatctactgattgatgatttcagctactaaacatagatgaaaattctcactaaaattatcgaattagagactaaatgtaaataaaaattgtcatagttgaaatatattttgttgagatttgagccatatttaatccttacactcatatcataactttgttgtgataaaaacacttctattcagtcaatggcaggacttgaatgttcctggaaatcgattgttaatcataacgctggaacccttgtttatagtctctgttgatttggttaataggacggttgccaagtaatgagccattattcttcttatggtattacttctgttgggcaattatacttcgtatttagctattcatggtagttagttaggaatttcattttatatccaatgcttggtcttggttaagattactgtataattagttactccaattttgatttattattggcactatttggtggtagtcggtcgtatcttggtcattgtatcaagcctgtattagttaaagagctaatatatttatagaattacggtgttggatcaccatgtgccccatctcatggatttgaatttttgtttactgaaatgaaatggttaacttgtgcagactcag

SEQ ID NO: 33175 - DNA, 369 bp, Medicago truncatula
  Intron number 2 from transcript Medtr8g016370.1 (locus Med tr8g016370) derived from phytozome v7.0 (chr-ID MtChr8; po s 3153713 to 3154081)
ttgcaatacttgtgagttcctaatcccatttgattaaataaaaagaagactagggtatgtttggatgagggattttggaattgagggaagaccatatttttcttttctaaattaaaaaaattataaaacgtttaaaaaataaatcaaatgtgtttcaaatgttatatagtcatcaatcatgttataacttcaactaaatgcaaaacactttcatgagaggagaataaatctcatttggttaaatgatgaaaccaaatccaatcaatttggaaattattctctctttattggcaattcaaaattgtaacactgtatttaaattgttttctttcagggatttatcaaacaatagcttgaacggtcctttac

SEQ ID NO: 33176 - DNA, 255 bp, Medicago truncatula
  Intron number 4 from transcript Medtr8g016370.1 (locus Med tr8g016370) derived from phytozome v7.0 (chr-ID MtChr8; po s 3154255 to 3154509)
cttgagagatcaaaaacaggttcattatcactgaggtatacctcatactcaaagtcaaagctatattaattcacattatattcaagcaaaagatagacttgtaataaaggtttttttttcttcctgtaatcttaataataatataattgagtttttttcctcctaacacgaatatggtttttcaccaatgatatgataactgatatcttagcacctttattttctttcagtgtggaagacaatcctgatctttgt

SEQ ID NO: 33177 - DNA, 473 bp, Medicago truncatula
  Intron number 1 from transcript Medtr7g089960.1 (locus Med tr7g089960) derived from phytozome v7.0 (chr-ID MtChr7; po s 19941519 to 19941991)
ctgctcgtctcaaaacttggagtcacggcgctcaggttcgtcaatttctttttaattgttgatatttttcaaagctagtataataattcgttgattggttcttctctgttgaatcgattttgaattaacaacttaatttgcagttatgcataagctaaagctatttctataacaagataagaaataaaataaagttgagttttttcgtagaagctataagttgttttcatgagctattttgttgagctttatgaaaataaggtgaaaacagcttatgaacatgccataagtttttttcttaagttttcccaaagagtctctcagataattgtgtcagtagataagttctaaataagtcaatccaaataggaatttattgcgctgagtatgagtggattgatgaaattatatgttgttgtactgaggcaattttgatatgtgacagacactgacgaagctgcggttttcacgag

SEQ ID NO: 33178 - DNA, 511 bp, Medicago truncatula
  Intron number 3 from transcript Medtr7g089960.1 (locus Med tr7g089960) derived from phytozome v7.0 (chr-ID MtChr7; po s 19942191 to 19942701)
ccggcagggattatattgtttcgtcagtgaaagctgtaagtgtttagatagaatcaagttcttcttcattggtagcatgcatcaaaatgttaaagcttctttttttcactccaattcactattcatgtatggttttatatttgaatttatgcttggggaagtgtgaataagcttttagttcccaggtctgtttgttccttttccggaaatacttccaatgatgtaagatatatgttggtactgccagatgatagttattagtgtgtgatattgttctagtaatgctggatattgtttgttctgcactcatcacatgatgttggaagataataatccatttgctgtctcttattttttcatggttatctttaagtagcttgaatccttatgacggtgttactgtttttggttactattttgatacttgcagctcttttttcggtgttgtggttactgtttaaactgccctctccaattagaactgacagtttacgtctttttgaatccagag

SEQ ID NO: 33179 - DNA, 980 bp, Medicago truncatula
  Intron number 3 from transcript Medtr8g073880.1 (locus Med tr8g073880) derived from phytozome v7.0 (chr-ID MtChr8; po s 14572127 to 14573106 reverse strand)
taattatagttttaggcatcatcgacgacattagtgtattttagatgagggagaacggtggatgaatgatcaaagtaaattatttagatgaaagagaattattggctaagaatgattgtcatgcaaatgcaatccgggaataacagttatcattagttaacaaaaaagaaatgattgagaaataaaaacaaaataaaatctcatgaaatctcttttttgaaagtttattatttttttttgaagggtatctttttaataattatttttgtttcaaatatttttacctaaataaaatagaaacaaatctatttaattttttttttttagtataaacaaaacaaataaaacatatgactgtattagatccaaaacaaaaacataatgtttaacatatgaatgtatgccaataatagagttcaactaaaagaatcgatccaactactctttcaaatgtagatgccatgactacaagtatgatcattcttcaatctgtttctctattcattcatatgttgcatacattaattaattaatttgttttgcctatgtttttttaacctctactaaaattcggtctgcagtctccatcttgtgagattttattgactatgatttcctggattaattaaattggcaaaaggtttgtttcttctacttagcatctttgcttctaaaaatccctttattcaaggaaatggatcccctcctgcactattcttgtccctttgattaatccaatgaaagaaataaaacggtaaaaataaaggcaaaacatgttaagagagagaaacatgtgagttttgttttcttcttcatcgtcctgctgctcagaacctatctgctctcccctcttctttttcatctctaacatttcttatctttatattcttttttctaaggagctacaacaattttgtcataataaataaaaggattataactttttatgatttgttctctttacagtttcaaaagcagtc

SEQ ID NO: 33180 - DNA, 680 bp, Medicago truncatula
  Intron number 1 from transcript Medtr7g094160.1 (locus Med tr7g094160) derived from phytozome v7.0 (chr-ID MtChr7; po s 21273606 to 21274285 reverse strand)
tcttgcttgtcgatttcatactgcccattttggaggtaccccacttgctttttcttatttgtattttattaaatttgcaatattttgattttgatgcatcaataattaaatattataatgctggtctgactgtagttaataatgaatcatcaagactgacattggcacgtagatagtgatattaatttgagaaaatggaagttattgaatgtcaagtgtcggcatttaacatcgatacaattcaaacaccgaacacgccttcagttcgaagtgtcggtgtttcattggtaattagttacaaaggaaatgatgaaagtcaagtcaagtgtggtatactaagatattgttagacagggattggatgagtgtagttttatctgttcttatgagaagctgaccaggatctacccatcaattgaataggtaacttttgacaagaaaatatctatgcagcacacgtgttccgtgtcaattttcttaaattattatcagttttggtgtcgtgtttaatgtttgtgtttcttagagaaatatttccttttaaagctttcagtatcttaatcacttatttgtcggtgttaagctctagtgatgcagacatagttaacttatcaagcttcatttgttaagttgagtaatggtgagcaggtgatacaaggaaggacaatacaaggttcaca

SEQ ID NO: 33181 - DNA, 771 bp, Medicago truncatula
  Intron number 3 from transcript Medtr8g053360.1 (locus Med tr8g053360) derived from phytozome v7.0 (chr-ID MtChr8; po s 11990255 to 11991025)
ctcaaagattgcgggagtgcaggagatcgtagaaggtatcaaagtaacatcttagagttgatttcttgctaaaaaaaaggggaccatgtttctataatgatttcaaaccctcttctttgtttaaatacttaagttagaggttggttttttttgggtcatgtaacccttatacttttcccaacttgtaggttaagtactctttctacttctctcctttctaatagatatggttgttaaaaaacaaaacaaaaatcatagctttcataagaacacctgctttaggcttttacgtactctttgtaataatttaatttcattacttcaatttaaaaaataaaataaaaaataaataaactttacttaattaggtcccttgtgaacaaggacgttattatctatacgtttcttatccttcaattattattgtattaaagtaaactggtcgtttcttttttcttttaaaaaaagtatagtagagaaaggttgtctagtttgtgcaacatttagtagtggaaaaataaagataaagttgatttgacattaacattgtgaaccagaagaaattctgtaaagggtctaaaatcagttgtatcaaatttccaaccaaagttgttttaaacaatattcatcaaacatgataagctttgaaatcaagaaacaagttgtattgatatacttatggttgtggtggattacttctactaacatttgtgttaatgcaacaaatgatagtttgaagccaggtgatacattgaattccaaatccaagct

SEQ ID NO: 33182 - DNA, 650 bp, Medicago truncatula
  Intron number 1 from transcript Medtr7g127600.1 (locus Med tr7g127600) derived from phytozome v7.0 (chr-ID MtChr7; po s 29958955 to 29959604 reverse strand)
gcttctatttcgacttcgatttcacttccaatcaggtacttccgttttcctctcttaagctctatatattgctcaaatcattctacgatgtcacttgattttcttatataaatttcacaaactaaatagaacaatcatgctatgttagtagtcaatgagattatttatgctgttgttgtacatagcttttttttttttgatgataaacatgatttttattttttttatattttaattttattttgtaatgtttaagttcatgtttggattacggtttgtacctcacaaacctcatcttgtggtgttaaactgagtttcttccacattgatggtgcgtttgttttaccttaacaaaaaaaattgtttttgcacagactgtaatctagagattttctttagaggtttaaaaaaaatctgaagcaatttctgtttgtttactacaacaaaaaaaaaaaaatctcttttaaaaaaaaagatttttaactagttcatgtcttacctctttgtttttgaaaaaaaaaaagattttgggaaagaataatcccaatagtttttattttagagtcaaaaatgattttttaaaaattccttaacaaacacttcaaaataatttgtgtctcattaatttctctatattatgatgcagcata

SEQ ID NO: 33183 - DNA, 551 bp, Medicago truncatula
  Intron number 3 from transcript Medtr7g103550.1 (locus Med tr7g103550) derived from phytozome v7.0 (chr-ID MtChr7; po s 23274706 to 23275256)
aattagttgagctggatttaagggaatcattatttgtaagttccatgtgtaaaagttgtctaatcaaatcaaaaggtcgaacacctcttgttctaaactaaaattccaaccttgaaatctgcacagtttgatctcgatccaaccaacatttacttggtaaatgcagaattttgtggtggcagttttttattttttattttttttgtggtggctcgtttgcctgctattttttgagaccttaggtttttctttccataaatttattattatgatttatatattgtgattatgattatgtttcctttcaagctttcgaattttaaagataaagaatgatcatgttagcagtaagatatagcattaaccttcacagtagtttagttatacactttatgaatttggttcttcattcagtgttatatccagattttgtaatgttctagttcttgttatgaggtgtttttttatatttggattaccaaagctctatacacttttgggatcttatatttagagtatgtttttggttacaggttgaagagttgaataca

SEQ ID NO: 33184 - DNA, 906 bp, Medicago truncatula
  Intron number 1 from transcript Medtr7g133310.1 (locus Med tr7g133310) derived from phytozome v7.0 (chr-ID MtChr7; po s 31154464 to 31155369)
atcaagcaagggaaacaacggttgaggtcagtgattttccccttactttttgcatttattattattagtcttttatggttgttaatgattggatattaattttaattagtcttatagaagtagttagaagtttggcgtgattagttgttggtagttagttaattagttacatcacatgaagtgaccaacttcttcgtactatcaatttcaaaatcaatcgttacttggcctgtttggataaataacttatttgcagtttatagcacaagcaattattatgataaacgtgtgcctatatgcttgcataaactatttttatagcaaaagataaaataaagttaaattgtatttgcatatacttactataaatgtttttataaggctatactggagaacttataagaataagttgtataaagcttatgaaaattgtcgtaaagctcaaataagccaatccaaataggctttaagtgtatatttggtttcacttctaaaagggccaaaattgattctagaggtgtagaattgattttgacatgtttggttactctctagtataattgattttgacatgtttggttgctctcgaatagaattgattttgccttcagaattgattctacttgaagctaaaaattggaggctttgattatagaattgatcttagcactcaaatttattattcaactcacttttacataaatatatcaaaacatcaatcggtttaccttcaactcactcacaatcaatttatgtcaatgcaaaaccaataacatacactgattctaattaatattcaatttatctaatatgcatagaaatgaaatgaaaatgatgaatgttagttgatgtttgggtgtgggttttttaggcggtgaataatcatctagagatattgagaccggc

SEQ ID NO: 33185 - DNA, 587 bp, Medicago truncatula
  Intron number 3 from transcript Medtr8g147230.1 (locus Med tr8g147230) derived from phytozome v7.0 (chr-ID MtChr8; po s 36202183 to 36202769 reverse strand)
tccagcgtggatcggaaaggtttagagaactttcattcattgcaattacagttttgttgctgcttcttgatgctgtttagtaaattatcttcaattcctatgtgcctacatataacaaagttgaggcttgaggtctagtattcagctagaagtaacctttatcatgtcttagttactttttcttgtcatcggtatccttatcaacacatcataatgcaacatcacttctccattcaacccacttgggttggcctggtggtattggcttgggacctgggagtctgctcctgctcgaggtctcaggttcgattctccgcggtgccaatttgggtgggctaatttagcttattaaaaaaagcatcacttctccattccaatacaattatcaaaatttgtttacttttttgtataatctcatttgttgtagttgtacagttgcttttatggtgcattcatgtatttatttgattatacaaattatttcaagtgttgttttttttaaatggttgtgaaatcttgcaccgtttttttttacaattttatttttacactctacctcaggttttggtcacacatagtagttgctt

SEQ ID NO: 33186 - DNA, 1028 bp, Medicago truncatula
  Intron number 1 from transcript Medtr8g146780.1 (locus Med tr8g146780) derived from phytozome v7.0 (chr-ID MtChr8; po s 35974246 to 35975273 reverse strand)
aatcaggtatttttctttggtcaagatttttcaattgtaaaatataatttaatttaattttgaactatataaactattcaataaaacaatagacaaaatgattttgaaacttttagcaatcttttaaaatatttgattactaaaaaaatggtagaagaggggcaaaacgagaacttaacatgaagtcctcgaacacgtactgttgtttaactgaagaactgaatcatgtggattaatgttgtgatgatcgcactttgaaaattaacgtcatttaattgtttatatgcgctacattagtttaggctgtgaaattaaatcactatgttgcacacgatattggctgataataatgtatagtctcactctcaagctataaaaaacacacacctctggggattaatcgtgtcctcgtgttcgacacatggtgtaagatactcattcaacacttgtccaacaactaatacaaatagtgggatttttttattcttttcttcgatgcgccatagacactccttggacacatctcagaaacatcaacggagaataaagatgatggttaatgaggaggttaaagacatcaatttgattgcaatatttttagcttttcgatagaagatggatgattgaggctgaaagactaccgtatcttattttagatgatttttgtaatgaaacaaattgctcaattttgatggacatatacattttgattctcaatttagaacttttataattaatattaatattttccttaattataataaataaatatatatgtatcggtgtcaatgtgctatgctctttttgcatcttcagtgtcaacgtgcatgtgtcctgtcagttgtccatgtatgtcagtgtcacttttagaatgaatatgcctgagtcaataaaattaaaatcagtactgatatatatccatatgcatctgattgcaggacaactttccttttaatatcaatcaaaaagtctgaatctttgaatggttggcagggtttgtgggttctcctggttttagtctgccaatt

SEQ ID NO: 33187 - DNA, 741 bp, Medicago truncatula
  Intron number 1 from transcript Medtr8g044510.1 (locus Med tr8g044510) derived from phytozome v7.0 (chr-ID MtChr8; po s 10003381 to 10004121)
tctgcatgtatgtttctcaaatctgctctctttctctcacatccacacactgaattattggcgtttaggtcaaaaattgacctaagagtgaagactgttgttgccatattgccaattgtcaaattagttgtctcaaacacgaaaaaagttttgcattgttgttactcatcaaaatgagtgtgctagtgtgtttttgacctcaagccaatgaggttaggtctagtagaaactagaaagtaccagtctcataacatggtgaatcacaattgttggaagatacttcgtatctagtatccaccaaaaaaatattagtagccaccaccatcttaatttgtagaataggcaagaactttaactttttgcaaaactgttaagaattgtgtgttgtctgagtatgttatgagatataagtttttttaaaaaacatttttgaaaattagttttatcaacaaaaacttatgctaacgtaaaaagaaaaaactaatatttactagttaacctttgactttctttgaggtatgcttgaataacatacacatatcatttgtacttttcatatttattaggtattgacactcatatttattaggtattgacactcttatctactatatagagtatcaaaaagtaaatgttaatagtaccctctttattcacgaaatgtttgcactgaggattttggtacatggtgatatgtgtgatgcagggattaccaacaaggtggcaaaaactctcacctca

SEQ ID NO: 33188 - DNA, 755 bp, Medicago truncatula
  Intron number 1 from transcript Medtr8g136750.1 (locus Med tr8g136750) derived from phytozome v7.0 (chr-ID MtChr8; po s 32663746 to 32664500)
tgttgacttgtacaaatcaattgaggtatttaatgctaggaatggcataagatctttgaaaagaaggcgagttttagcatggggcaattgtgaaattgctccatcttaaatcaattttgttttatttgctgttacatgtacaccctgtattttatattctaatttatagtcctactcaattataatttgactcaaattaatttacttgtaaatacattattttttaatctcccgtttaaaaatctaataggtccagctcattctcaataatttttttaatatgaaaatattttttttttaatttgaacacatagacatgtttaaatctgggctaaaaaaaatatggcgtaaatatatatttactatattatttataaagaaataaatttagtttgtatctaactttgtaatattaatcccatccacaaaactttttaatattaattagggataaatatattcttggtgcttataaatataactaaatttgtttttagttcttataaaaatgacatatttttgtcccttcaaaatattttaatccccattaaattaaaattaaaattgatatattataaatgaatatgactataaattgaaatataaaaatacaggatgtacaattaatagtaaataaaacaattgatttaagatggggcaatttgacaattgctccatgctaaaactcgcctgaaaagaaacccacaacccaaaaagagcagaatattttgcaaatcaggctatagataaagcta

SEQ ID NO: 33189 - DNA, 922 bp, Medicago truncatula
  Intron number 2 from transcript Medtr8g011550.1 (locus Med tr8g011550) derived from phytozome v7.0 (chr-ID MtChr8; po s 1554569 to 1555490 reverse strand)
gaactcattcaagtacacattctttaatttttcatatttttatttcttatagtgtaatcatgcatgaatatgaatgataatgttgtgaaaatttgtttttttggtgtaggttttgagttacacaatattaagaccattcttattctgatttttattttttaattgtttcgattttcttttttttttttgttgaaggaattgtttcgattattttgttttgatacgatgcacgattctgatgagaatacttatacatgtaaatgagtgatgttctatatttagttacatcctacgaagcacagacacatacacgggacacaacatggacaccgtcgacgttgataataatttgaaaaaaatgacataatttaatgtgacacactttcgatcagaagtattggtgccagagaggttatatcattatcattatccctatttagaattatgcaatcatgtttctaaacgagggatgttatatttgaaaataaataaactaatatcttgttatgctgtaaaaatacaatattttgtgtatgttcgattttgcagtgacaaaaattgattttgaatgttgatttggtaaaaaattgattttttgtcaaaagtgagttatgtttggatacatatatgtaaaagtgagttgatcaatatatttgagtgtaaaaatcatgtttgaagtcaaaaacgacaatccctaacttcaagttagaatcaattatggagtcaaaatagattatacacctcaaaaattgacaatgtgactgggaaagagaaaaataatataacaagtcaaaatatattgcaactgtttatatatatttggtgctggccacaattttgttgtcaatataacatttctatttttgaattatagtgcttaaaattcttttccataatttttgttgttgtcaattcttacaga

SEQ ID NO: 33190 - DNA, 663 bp, Medicago truncatula
  Intron number 1 from transcript Medtr8g011550.1 (locus Med tr8g011550) derived from phytozome v7.0 (chr-ID MtChr8; po s 1555660 to 1556322 reverse strand)
ttaataaacatatatattttggagtcttctgtttagtgagttttaaaactcctttttgatgatattttcggacttaagaattttcttttaatctcttagttttgatttttatttttataaaagttaccaaatttagtcacttgtaattggttagcaaatcaatttagccattgataaaaaataataacaacaaattagtctattaagtaagaacaaattactccatgaacttgaggtttgggttaatggtgtaagtttggaacttaaaattgtgtttctcttttgatttgaggtttaaatatcatgtagatgtctacaatttttgtgttgggtcatgaattcatatatagtttcgctctagtttcaatgagtctctcctaatgaccaatgagattgatcatttagattaatcgattttttggacgaatattttaaaaaaaatattagttcgtgacttttttttttttttttacacatagttcgtgacattttaaaacatgagacaatttcctttgaaaaaaaaaaaaatgagacaagttagattttatggcctaatattatattttgttcgtaaataaagtaaaatttagggtttagcctttattttttaacttttcttctccaaaaggagtcttcgtttacagttttcactgtcagtatttg

SEQ ID NO: 33191 - DNA, 820 bp, Medicago truncatula
  Intron number 1 from transcript Medtr7g138080.1 (locus Med tr7g138080) derived from phytozome v7.0 (chr-ID MtChr7; po s 32698430 to 32699249 reverse strand)
gggtatgtatgcaatcactaaattcctggttttttttttgttggttatctagatatatattgttaaattagggcttgcttggttgcccttcaaattaaaactgctcgttagttagtttgtcactttgtcctcggcgtctggtgtagacccttgattgagagctttgtagcactgaggcttctgacttaaggcatgtctagtgttggacatgtggttgtttccgacaccgacacatgtgattatattcaattaatttattttctcaacttattatcagtgtcatgtccaatgtaggtgtatgtgttagtgtttaacagtttatgtatctccaagaggacttctgagtgatgtagtttgtttaacattttattaattttaaaactatgtgtttttctttttagttgggactatttgttatgtagggaacttatcttattttcgattatgttatgctagattagaatacgttatctgatcaggatgtttggctatttaaggtttataacttgactgttggttaaacatcttttagacttttgcgtagttaattattcgtatttaaatttctgtagagagggtctaaaactaagtcacagaagttttctaggtttatttgttgatagaatcagagtacctaccctaaaaggagtactcttggttactgttctacatcagcaaaattataaatgtttttattcttttcccgctttattaggagagccagtttgaatcccccccggtattcaatactagagaaagttgaattctacctaatctttgatatccttctgttcaggtttgtcccgtttgttcatcgagg

SEQ ID NO: 33192 - DNA, 721 bp, Medicago truncatula
  Intron number 1 from transcript Medtr8g129650.1 (locus Med tr8g129650) derived from phytozome v7.0 (chr-ID MtChr8; po s 30721461 to 30722181)
gatcttcgtcgtgccactgctaattctcgaagaaggtaagccaattcacttggtaaacatgccttatagtgtctttgttttgatccaattatagaagaagtaaattatttccattttttcttacatgttttaatccaattcatggtatttggataattgtattccttagactcagtgcaaagttcagagctttattgatgggttttttagcttaaaatatcccaagttccttgctattattgttgataagcataacatatacaattatacatgtaattgtttttgtttgcatatgattggtccagattatgacttatgattttcaactctcaacaagcacaatacatggaaatactttttttttttgttgacaatgagaatgttgatctctatgcatcatgttaaagtcaatactacttttttatttgattttctgtcagatcattatcattgtatatcaaggtgtagttgttttgtttcatcggcagaaatgaatagaaatttgtttttccatttgggttgagctttgtttgtttcaattatatagatttgggcatttggcgttaatttattcgtcatgtgaagtgttgccatcttgagagataatagttaatagaacttggtctttcttgatgtctgtcacatatgatccaattgcattttatttttggatattcttgcttatttgacatgtaatgtaatgtttctaatcctgtcaggt

SEQ ID NO: 33193 - DNA, 1021 bp, Medicago truncatula
  Intron number 1 from transcript Medtr8g027030.1 (locus Med tr8g027030) derived from phytozome v7.0 (chr-ID MtChr8; po s 6005761 to 6006781)
gctttcaacgcaggcctctaatcgagcaagctgatgtcataaaaaactccgcttatatgaaattgacaaaacacagtataacaaatttcactccaagactaaacacatcagtttgcaacatatgtaaagcaaaaatttatgtagagtcagtatacatagcagccataatactataattaaagacgacgaagggagtataatttaaaatggtgtttaggattttgacaaacttttggtgggaggaatacatctatacaaactattggacatgaaaagaaaaaagataagataatgttgagtgattaatgttgaaagtaaatgactgttcttcaaaatttacttaatgttgttgtttgttttttgggtgtttaaatttcttgtttttcttaatatttaatttgtgttgatgaaatttttgggtacgttagatgtacaatcatttataggcaaatgttaacatatgtcgagaaactaattataaaaatgttatctttgaagcagtgtattcaattttttaaaagtttgaaaattgcatgttctaaacttggggttaaacaattttatgcttgaagttgtcgatcacattagtcccttaaattgaatgatccaaaaacactaattgtgattgagtatattttattttagaaatttttaaatttctttaaaacccaattgtctaacacgtaatattagagacttttccgacatgcatcaaactcccatatcttattattaatttggtgtattaagtacaaactctctacatcttgtggttttgcactctttgcttaatatgcaattgatgagcaagaatcacgtctataactttgtactttatcagataatccaattctcaacatgtatgaaactatcatttctctctttcccaagggtgttcagagtagttataacattacttttatgtgctagaattcattgtttacttgctaatatgttattttctttttaaatggtgtatcaattaggtattgagtccatccgaacaacttgagaatcttgt

SEQ ID NO: 33194 - DNA, 797 bp, Medicago truncatula
  Intron number 1 from transcript Medtr8g118650.1 (locus Med tr8g118650) derived from phytozome v7.0 (chr-ID MtChr8; po s 26684881 to 26685677)
agaagccgattcgacgcgtaattataccttttccttcatcattcctttttattttcgcaatatgtagagtactacaacacacgattttcaagcaatcgcgttaattatgtgtttatcaaattggaaatggcgctacttgtgcttcattttgtttgtttacgtataagttgatttgcttctttaaagtgaaaagttttactcatggaagaggtaaaaagtgatttcaagatttaaatttgattttggtatctctaaaattagaattgatttttataatttgtaacttttgccaatgaaagtgatctttacactcaactcaattaatattttaattaaaattaattttacaaaaataaatttaatcataatcatttttaactcagaataaaagagagtatgataaaataaaccgtaattttgacaaattcattagaatctaatttaacgtcttactcatgctatttcgtatccaaacatgtgattagatgtttctttttccgattctcattttcatttttcacaccagctttggctgtataagatatgtaggtatctcacatcagaaacaaaatttagatagttaattatttttttaaaagttaaattagtctatctaaattagcaccgttgaaaattgaacctgaaacttcaaaggaatacactctcagattttaaatcaataccattaaactaatttaaagtgggattagatagttaattaatgtcactgaatgtgttttacttgatgcatgatctccacagagtacatttggcatttccaaagattgaagttcgat

SEQ ID NO: 33195 - DNA, 1031 bp, Medicago truncatula
  Intron number 1 from transcript Medtr8g044650.1 (locus Med tr8g044650) derived from phytozome v7.0 (chr-ID MtChr8; po s 10075677 to 10076707 reverse strand)
cctcttgatcctcagaaattgcctacagtttgcaggtatatatttcccatgtactctttacttttccagtgtctttttttacaaatatttgttctttattatttgtagtttttaaagtttgaaactccggtcctttttataggaaaaagtttggtcaacgaaagttgatggatctgaattgaatcagatacatcaacttttgttgacccaactttctcttataaacaggaccgggtggagttttctagagtagaataagtatagcagcatgcctgctgttagttacacagaccttcttgttatggtcggcaggtctctgcctgcttaatgtatactaactgtggttcaacctatactggttatcaatatcttacgatacacgtaacttgtattcgaaacaaaactgagttattgatatgaattgttgtgcatatctatttatgacatgaatctcgatgcatttcaatgaatctcaattcattatatgattagcagcttgcccttatctttgtgtagataatcactattttttgtcaacttcgtgtttcttgccactttcttttgtcatcttgatttataacttaagtcgttaattattttgaagtttcaatttgatataagtgcttattcttttatgcaaaccccttgtttttactttaaaatgtcatatttcattggtcatgtatacattaatagattcaattcacgtttcggaaaatagatcttccagattcacaatttgaatatcgacttgataatgacaaccatggttgtcaagtacaccattagaatatattacaacatgaaattaggagtacctttgtttcagagctatttatatgatgatgttaaatctgttttatgttctctgttcatatacataagcacttttgtcttactttctgtctagtaaaacctattttgctttacatctacctgtataaattgctacacaataatagatttgaactaagcctgatattatttaacgtggtttacatgcagagacataacaacgacgtactctgagt

SEQ ID NO: 33196 - DNA, 965 bp, Medicago truncatula
  Intron number 2 from transcript Medtr7g118350.1 (locus Med tr7g118350) derived from phytozome v7.0 (chr-ID MtChr7; po s 27910777 to 27911741 reverse strand)
tggttatacctggctgcaaatttgaagcccaattggtaactgcaagtgcacgctatatatgttcgtgtattattctgctgttaaaaacataaaaatgcagtgtttgattttgatggatttatcatgattccatagtattaaactataactttagcattctgacattgtaaagtaaatatttcatttccttagttttgcactttattgaacaataagatagatacaatgattactgatgcaattgtggactctagattgataagtactgtaaaaaaagaaaagaagttgtaactaagtagtggtttgtgaaacattcagcatttctgagttattttgatagcatatgattagttgattttaaataagattatagggcacttatttagtacaaaatatgaccctaatcaacattttgattgaatttttgttgaatcttagacacacctgtcagcagtgactacatggaggcttggactaataatactatttttttctaatgaagagtttagtgaactctaagcatctcacacatatatatagtaattaattatgttccgggattcataaatcacattttgatttcggcttagagtgagtttttgtttttacagttcatatgctttttcaattatttgagagtagtccttaaagattttattcatctaaagaaattatccttatattccatgaaggattggccctgtagtttaacttgttaagatattagacctagagaaaacataacctaaatcaatgacaacaataaagtaccctcaaaaactctccatttgatggttgactatcatttatgggcgcttatacttgttcacagttctgccttttttaacaccatttgggttttactttatatgaatgtgtatatggctgaataatatatgcatgcttgaccattgagcgactgttatgcaggtatacgttggttccggcttctgtttatcttgggt

SEQ ID NO: 33197 - DNA, 497 bp, Medicago truncatula
  Intron number 1 from transcript Medtr8g005450.1 (locus Med tr8g005450) derived from phytozome v7.0 (chr-ID MtChr8; po s 274647 to 275143 reverse strand)
aagacattcgcacaatctcgacttttgtggccattgtaattgcattggtcatcatgtgagctctatcaaagagagtaaaatttacacaagctcgggaggaacatcaaggtaataacaaagtaaaacctagataggtgtatagaaaaacatttgtttttcaaattagagataatagaaaagaactaaaaaatgatcctgaatcagtgaacctagatgccttaaacacaaaacgaatggaactagttgaagtggtttatgatactattatagtaatgctcatcaagacaacatggcacaatcaagtgaaacaagaaatgtggaacaaaacatggagttaattccggaggcaatgatggaaatgaataattaaatcaaatggctcgaaaattgtagatgcaactcaactagaaaatgaagatggggtacatgaagattaggaagttgaacaagagatacagtgacccaatgataatattcatgatgttttccatagagac

SEQ ID NO: 33198 - DNA, 492 bp, Medicago truncatula
  Intron number 1 from transcript Medtr7g111680.1 (locus Med tr7g111680) derived from phytozome v7.0 (chr-ID MtChr7; po s 26307814 to 26308305 reverse strand)
atcaacatccaaccaagcatcaaacatcattgttaatttagattatttttttgttacccaatcaaggtgctgcccatcttgttaatttggatttaagactaattattattgtttatggcttacggtttacttttttgttggttggaatttaaacatttaatccaagttttgtttgtgcagttggatttaaactaagtattttattatggttttcttgttggtttaatgaagagaagttatatttgtgcaaacattttatgataatttttgggacaatcttccctctcatacattcattatgttcttattttctctcactattgttttggttttcgcgtcaatacatatatatttctttctatattcttgtttatcccattaattgtacaaaaattgattattatcaaaaagaagttatgttttgtttgtttattaacgaaaatccattttattttagatccaattggtagtcgtgcgacgaggcgcggcctc

SEQ ID NO: 33199 - DNA, 629 bp, Medicago truncatula
  Intron number 1 from transcript Medtr7g124350.1 (locus Med tr7g124350) derived from phytozome v7.0 (chr-ID MtChr7; po s 29168725 to 29169353)
acacaacaagatacgataagttaatctttaactaatcctgaaacttatcatattatgtctatgtatttattttttttttggttacttatgtctatttatttataattcttatcatatgagttgggttggaaaccagcaagataatatatgaaaataaaatttgtgatttaccactgtaaacaaataatttaaattataaaaaattgaaatctaataaaatatagataaaattaataaacaaagaaaaaaaattgatatgaatttaaaaaatatgaatttcaatttcaatatttttaacaaattatgatttttaacatatctttatttagtttatctagcatatataattaatctagcaaaaatataacattgaaattgtttatttattggtgttggtccataaattttgactaacaggggcgacattttatgtttatttgaaaattatcatatacatgctaataatatctcacatatgttgttatacatttcattctttcaaaaaaaatatttattcttcacaaacaaaatcaaaactaccttttggctaggctatatttatcttattgtggaactagatttggcagctaccggttattgataatcatacagatttttgttggttggtg

SEQ ID NO: 33200 - DNA, 374 bp, Medicago truncatula
  Intron number 2 from transcript Medtr8g137330.1 (locus Med tr8g137330) derived from phytozome v7.0 (chr-ID MtChr8; po s 32896517 to 32896890 reverse strand)
acggaggtaaaccatttctctttcatttcgtttagttttgattaattattcatgcttagttactactaactactatttagggtttaggttgaattattgtttgtgattaaattttatcaaattgtttgtaaatgctatgtttttttttttttggtaacttcactctttgttagtgacgttttttctgattgttcttgagaatgaacatggattaggatatatcacaattcgccctggttaacagttatatgcttattttaagcgagttagggagaaatacttagatttattgttggttgagttcttggcttataatgacttatgaagtataaggtgttggttgttgatatgtgaactttgtattgcagatacgg

SEQ ID NO: 33201 - DNA, 691 bp, Medicago truncatula
  Intron number 3 from transcript Medtr8g052910.1 (locus Med tr8g052910) derived from phytozome v7.0 (chr-ID MtChr8; po s 11755007 to 11755697 reverse strand)
ggtatgaatcttgctgatctcagtctagaataattgattaatttattttgcgcagttaatatgctttggtataaaattgatgatttatatgacacatttctttattgttattgttactgtgttatgagcttgataacttttgatgtattatagcttggtctagagtattgaagtacctgtttggactagtcttattttgagcttatgcaaaacattttatgcaaataaattagtttttatgtttatttgtaagttctcatttatgtttatttataagttctcattaacaaaaattgtatctttataaactgtttttccataaactacattacaaacttatgaataatacataaaagtttatttatttgcataagttgttttgcataagctaaaaataagcataatcaaacgggacctaataatggaatcacatgattttatttgaagacaaaacaggatgtagatttgtttgtttgactccgtttcaatagattgtcgatgtaaaccagtatttgcaatgtttagcaatgtttttcatgtctggcttgtttaaaatgaaaatttgaactgaagttgtgcaattaaagaatttgtatgatattctgtattcttctgtaaaagttctgactcatttgatttggctgtggcatgattgtatttttttaatattttttttctttttttcttttag

SEQ ID NO: 33202 - DNA, 337 bp, Medicago truncatula
  Intron number 1 from transcript Medtr8g052910.1 (locus Med tr8g052910) derived from phytozome v7.0 (chr-ID MtChr8; po s 11756016 to 11756352 reverse strand)
ggaacttttggctgctctgttaatctcacaatgttcgtactcttcttcttcttcttcttctcaattttcattttgattcattttttcaatctcatttcgtaatggttttacacattcacaatttgtttataattgaaattaccactgaattttatgttaagcagcttcgatgatttttagttgaatttgatgtttagatctcttaatataagctctgcttgaataaacaacttaattaatcgttttagataagtagatccaaacaagtccttattttgtttgatatatttgtgaattaacaggctagaggattgaagaagcatttgaagaggctcaa

SEQ ID NO: 33203 - DNA, 950 bp, Medicago truncatula
  Intron number 1 from transcript Medtr8g081340.1 (locus Med tr8g081340) derived from phytozome v7.0 (chr-ID MtChr8; po s 16654206 to 16655155 reverse strand)
aaagcaaattagtccctggtatttttttcttttctatgattttcaaataaataaaataatatggtttcacttcattaaattttttatattagaacatagacatagatggaccctaaacattaacattgatacgtcgacactgataatatgtgaacacgtcgagtttattgaatgtaactatatatgtgggtgttgtgttagtatcaaacaacgaacggtgaacacttcttcaatccaaagctatgaagcacagaaaataggtgtgtcctagtgtccgacaccgacacatataattacattgagctatctgattttctaaaaaaaaattagtagtgtcggcgtcttgctttatagatccaaagtgttggtgtgttggtgctaggtgctagtagtttttacgtggattttgtcatttatacatcacccttttttattaagccatggcccacaaaatgacataccagacaagggtgcctacatatgtgctaatgtttattcaaaaatgtccttcaatgagagtatctaaaagtaccatcttcctaataaggaagtaccctttaaatcccctcatcaaatatggaaactctaaaaagggatataagtataattttccaaacaaatagaagggacatgtaaaccaaaccttaggagaagtaagttctttttttctaaattttatgttagaggttcttcaagtcattttattggtgaagaaattaatccctaatgttaatttttttttatcaaattattccctataattttttagcattatttcaattattaaggaattaacatgagtcatgctatatgtttcataaattaattaatttaactctttactcttaaacctattacttgatacaaagatatatgtttattgtgttggtgttttcttccctaatttgattttggtttcctctgaaatgaagatctcctctggctggaaa

SEQ ID NO: 33204 - DNA, 580 bp, Medicago truncatula
  Intron number 4 from transcript Medtr7g120900.1 (locus Med tr7g120900) derived from phytozome v7.0 (chr-ID MtChr7; po s 28345587 to 28346166)
cagctggaaaggttggtgtggttcctcgcaacaaggtaacttacattaatgagagtgactagaatatttttgttgctctcacatatgattgtggctagaatatttttgttttttttaaaaggccaaaactagatttttttttgttgctctcacatgtacggtacgcacatatcctttttattgcgacaacgtgattattttcttaccaagtgacattggttacattgatcaaattgtaacgtaatgccttatgatcctactgttaagtgttaaccctgtctcatctcaagattacttgaagaaaaatgccagatgtgccaccccaatgggctgattcagctgggggtaggctattccccctttcaaaacttgggatgtaattccacctttggaactttgacctgaatgtatatcaatgtccacaaagtaaccccatcccagaagtgcaatatcaattctaggataggtgccatgttgtcctctctaagagaagactgaaattgtgtaactgtatcctaattgccttccattttgataaactataaaaatgatgtgtgcaataactttcgattgattttag

SEQ ID NO: 33205 - DNA, 868 bp, Medicago truncatula
  Intron number 1 from transcript Medtr8g029270.1 (locus Med tr8g029270) derived from phytozome v7.0 (chr-ID MtChr8; po s 6343442 to 6344309)
ggtaacacttggtttgttacatgtattcctcttgatattggcttgttccatatattcctcatgaattatgacacttggttcattgcatgtgtaacactaagcttgttgcatgcattactcatgacacttgggatgcattttatgtgactaagcatacaaatggcagagtctttttgttaaaggacaaagaagggcggggtttttattttgagatgctatggttttggaaccaatgaacaaaacagtgtaaaattgtaggatttgcttaaggttttactcggatttcatggcttaactttcttccttatataattaagattaagataaagatgtagccaaatggaaaatttgctcactatttagatccaatttttttaaaaacttttcaattttaaggtaccgttggataggatatatagggtgcgtttgttttatcttttataaaaataattttatgttaagaaactctagagattttagggtgcgtttgttttattttttataaaaagattttatgttaaaaaaatcttgagattttagaaaaaaaaaattaaagttatatttgtttgtttacaggtgaattctacgtgatcctgatagtcattatcacacagaatccaagttatttctcttctcccttactctctttcaaccgtttgaaagattcattgatgtatgctgataaccgacaaaaatgtaggttattaccttcaattttacctctaaatcaagtttcttttgagtgattgcataacatatttctccttattttgtgtttttaattgttttactatgctgatctcctctgcaatttattgcatggtttttgaacatttgacttgctccgagtatgtttggttatgtagga

SEQ ID NO: 33206 - DNA, 987 bp, Medicago truncatula
  Intron number 1 from transcript Medtr8g138430.3 (locus Med tr8g138430) derived from phytozome v7.0 (chr-ID MtChr8; po s 33413418 to 33414404)
aaggtaagcacttagcaatcaaacataaatcagggtcgacccaacgcatattgaggtctaatatgcaaatggacatttttaaaactaagaatagtgttttagtaaaattactaaatttttgattaaattttaatttcagactttttattatacaaaattatatttactattaatattacttacacatgaataggaggcaagcgggcaacaagctgcgccgctagatctttttggatggcaaaatcaatcttcgtaaacacaacatttatggatctaggagacataacattgctatgcataaccctttggactatatgtagaaggtcaactgcctctgatgctagaaagccaaaagtgtcaaaagcaaattgtattaaaagcatgttgattgtcagaacacgctttctcatgtttgaccactttgcttgacgcagcttttagagctgtctgtcctaccgtaaaagcccccaccccttaacccacaagtggtgaaaccccagtcaagtccacacatgcatgttttcctccaacccatccgtacaccataacatccgcaggcctaagtgtcgatcttctatctagtgggtcagtcagaaagttcacaggcgcctccttcttcattgatactcctgctcgcctgaatatatcaaaaagtacatccttaacaaagtcatgtctgtatttaaagtcgggaagctccttacaatgaacggcatgcttcccaaaagtatccagacatttaatatttctttttcaattgatagtaaagtcaattgatttaatctttattgataaatattaattttgattttgaaaataatagagtatgtgtctttatcattaagtaaaatatacttttggattgctttggtggctttacctttgagtcgacatcaggtaaactaaagaagtttatttgaataacttcttatgtatttcttttatgatatgcaggcagccccttcaaatatctgaaacaaaagattg

SEQ ID NO: 33207 - DNA, 957 bp, Medicago truncatula
  Intron number 2 from transcript Medtr8g068170.1 (locus Med tr8g068170) derived from phytozome v7.0 (chr-ID MtChr8; po s 13005024 to 13005980 reverse strand)
ctggtcttgcatatacttaccacttacaggtatctgaaatgatcttccagcttgttgtattctgtatgttattttaaagctaaatgtggatttttatgtatgtttggaaatgtaccgactgtttccttttatctaaaaggctgttggcatttgggtaaatagacgactattggcatgggaatgactactcttgacttttactgatttttgtaatttctgagcgaatgggataaccatttcctatatttgactataaaatctgatattttttgtttttccaaatgaagctcacattatgtggcggtgttttgtttcaaatatttcatagtgtgtggttttaattactagaattattaatgcattgaccaatagaagtcatttttttaatggattttccaagcattaataattctagtaactaacaccatgcactattcttgacataatcatgaaaataagttagacacagatagagaatagcacgtgcgaaaaggaatacattatgctactcaatattaaacgacctatgtctaaagtaaccacatgtcctttcttggcaaacaccagcttttagatacacatcatatacattctgcatatctattcttgcttgaaatttttttgggcaacttcacaattgttgtagtatcttcatttgtgggtaaatttattcaacattataataatacctagcaatttgaaattggattttaatttatatttgttgacagtgtaaattaatttaacagatgtttattcatatttcacggttttatcagtgtaaatatattctatgaattgatgttatgatgtggaaattatttgaaatataatatgatgtatgtttaaaacatgttacaatatcagaacacaattattaaactattaagtctctagttataatgattaattttggactgaggctgatgttttgttgttgtatgtaattcatgcagg

SEQ ID NO: 33208 - DNA, 943 bp, Medicago truncatula
  Intron number 1 from transcript Medtr8g044560.1 (locus Med tr8g044560) derived from phytozome v7.0 (chr-ID MtChr8; po s 10037348 to 10038290)
tctccataaaaaaggtactcaataatctacttcagattttaaattcatgtttaggttgaatcatttgattctagtcgtgacattcaaaattttcatatttattaggtattgacactcatcccataatgagctgcaaccaatcaagcctgcctgcaaccacatggtatgtttctcaaatctgctctctttttctcacatccacacactgaattgacctaagaatgaagactgttattgccaattttaatttgacttggaagttgcttacgcgaatttggtgtcggtgcgggtttatcagaggtggcagatgggacgattattaattacttttataatggcagtttcaaagaaatagtattttggagacattattttaaatgatattgttgattttcgatttggatttactatatcatcaattacattttgtgtttatttaaataaaaatttgaaacttaatgatatcaacttgtttcatttggtcattgtaaatgttttaagcacaaattagttgtctcaaacaaaaaaaaagttttacattgttgttactcatcaaaatgagtgtgctagtgtgttttcgacctcaagccaatgaggttaggtctcataaaatggtgaatcacaattgttggaagatacttcgtatctagtatccaccaaaaaaatattagtagccaccaccatctaaatttgtaaaataggcaagaactttaactttttccaaaactgttaagaattgtgtgttgtatgagtatgttatgagatataagtttttataaaaaatatttttgaaaattagttttatcaacaaaaacttatgctaacgtaaaaagaaaaaactaatatttactagttaacctttgactttctttgaggtatgcttgaataacatacacatatcatttgtacttttcatagttattaggtattgacactcatattt

SEQ ID NO: 33209 - DNA, 432 bp, Medicago truncatula
  Intron number 1 from transcript Medtr8g125450.1 (locus Med tr8g125450) derived from phytozome v7.0 (chr-ID MtChr8; po s 29266231 to 29266662 reverse strand)
ggagtaagcgtgtgagaaacatctcaaacttattaattaagttacagtctatttttcctttcaatgttttaaaaatcgaactgaaggtcaaaccatgaacattgtctatgatatgttcagttacttaaatgtaggattgtttaattttggttcaagcgatttaaaccagttgaaccatgatccaaaagtctgaccggtttgatgtcaagttcaatttttaaaacattagttttttcacttaacaattgatcaatatttctgattctataatttttgttctaattggttggtggattgggtgaattttaatcaatttcagaagaagatcttgttggcccttctagctgaagttgtattccttgtcttagtggtatttattgtcatgtattttgttaccaaccttaaagagagaaggttcattgttggagttat

SEQ ID NO: 33210 - DNA, 724 bp, Medicago truncatula
  Intron number 2 from transcript Medtr7g139040.1 (locus Med tr7g139040) derived from phytozome v7.0 (chr-ID MtChr7; po s 33152491 to 33153214)
ctacttcttcacgaagcccaacccaaccaaaccaggtaggttgcttctctttttcttgcacaatcatctcccatttattattattattaattattattatgtatacttggtcttgatgtttgtttatcatcctcgaaggttagcaatcaacaacccttctgttatgctttgcttgtgataataacatatttcgtgtgcttaattcttttcactgtttggtctgtaatctttgtgttgttcatcaatgtctttgttttttttttttttttgttatatcctatggtttccaccattgattttactcttcactttttagttgcttttatcatgtattaatctgctacacttttgattctgggtttgattttcttgtttgttactattcaaaattcttgaggtggggtttttcatgtttatcgttttttcgtaaccatttacaaaacaatgtaacaattccatacggagagtttcatacttatagttttcaaatctaaattcttttgttaacttgtatgatgctttcaaaaaccagtggctttggtacatatgaatggttggttggttggtgagtaacactatattacttttatgccttgttataattgatacttaaagtatgctcttgatgatgtaatctaatctacatttcctttataacatttcttcttaagccgcgattttagtctttaattatctggttttgttttcctatatttcttggcag

SEQ ID NO: 33211 - DNA, 534 bp, Medicago truncatula
  Intron number 1 from transcript Medtr7g124190.1 (locus Med tr7g124190) derived from phytozome v7.0 (chr-ID MtChr7; po s 29119948 to 29120481)
aataatttgtgttatattttaattcaattaatttcttaaaattagtttattaatttccataatgttaaggaggttcctctaaaaagaaatgactattttgctataataaaccagtataggggctagctactctggtatttaaggaggtgcgtaataaattacttctcagatatcatcctaaaagccattggtgttcaaaaaacgatggaacaatatacatatatatcgtcgtcaaccttactaaatttgaatctgctaaaaacaaaattaaaattaaaatgaaaaccttacttgtcatgtattaagatttattccttaaaataatgtattaaacttggtttggcctgcacaaacttgtgttgtcttcttcataaaacacaaggccaatgtgatatattgtggtgaggagggagtatcatcttcataaaacaaagtgatagtatacagttgaaacacacttcaattctactctaacacccaaaaatacatacactgctccttaattttccatcatcgttttgcaagcaaacctta

SEQ ID NO: 33212 - DNA, 695 bp, Medicago truncatula
  Intron number 5 from transcript Medtr8g070810.1 (locus Med tr8g070810) derived from phytozome v7.0 (chr-ID MtChr8; po s 13820994 to 13821688 reverse strand)
gaagcggtaagtttctttttcctttgtaatgattgtaatgtaagagtgaattttttgtgcattatagaaatgctggtaagatgcatgggatagttggatcatcttatcacttatgtctcttcaaatttaaccatatcaattcagcgatccatcttaatgcactctttattggaaccctttaggtttataacacaagtgtaacagaatttttgttagaatgttcaatgtatctgattgttttctttttcctaggtagacactggttgtgtataaatcatgtcttgtgcaattgtcacatgttgtgcaattatttgttcccgtatcacggtggaattgtatgctgagatctaatgagatacgatacaagtttaaaaactatacattatgaaaaaatgtgaaatttagttcaacttctaaatgaattctacataatttatggtctattgttgctcaactcatgagataaatgaggtgttgcttttttactaatactatttattaggagtataatatatcctggactatatttccttttttatttgctgaaactgtttcttgctggtactctgaataaaagggttgatgtttagcaataatactatcatcgtttggggttgatttttccttttgataatggattttctccaaatcacttcataggaagtggaggagaaaaagaagcagaaggaagaaga

SEQ ID NO: 33213 - DNA, 373 bp, Medicago truncatula
  Intron number 1 from transcript Medtr8g134130.1 (locus Med tr8g134130) derived from phytozome v7.0 (chr-ID MtChr8; po s 32187194 to 32187566)
tatatccaaagagatacgttaatgaaaactgtatattcaaaaatatacgttaagaaaaattgtatattcaaggcataagatgcgctaaagtttcaaaacaaatacccaagattaaaggcaggtccggctttgagggagtgcaaggttctctaccaggccggacctctaaatgttacgggcctcaaacaaaaaattaagtctaatatccactccccatttaaataaaagaaatatatgttacttttttttctctcttcagcacacgtttgagtttttgtcaatttagaaagcaatttcattgaaagaatcacaactaaatttcacctccttcacttatttttttattttgttacaaattttttagggtgagggg

SEQ ID NO: 33214 - DNA, 737 bp, Medicago truncatula
  Intron number 3 from transcript Medtr8g009290.1 (locus Med tr8g009290) derived from phytozome v7.0 (chr-ID MtChr8; po s 1303133 to 1303869 reverse strand)
cctaaataaaaatcctacagttgtgtttgtgttaggtgagcattaacgaatctccatagtcatcttacctttgaatgaactgttaaaatcctaatacatttgactatttatgtttaacatgtatactttctttgttcttccaatttatttacaacaagcagtttgtcagcaaaacatgaatctgcagttaattgttttgagtttatctcctcgacaagatattcgactgatataatacaactaaataaatcacttatatttaataggcaattatgtgtaaatcggtgattgaagatagaatgagattaagctccacatagctagttccataagctctcatgggaagctttttgttataagattaaacagcttgtgggtatctcatgagctatttttgttagcctttcaacacaaaacacacacaattgctaaggccttaagatatacattcataaaccgttaataagctcttccaaatgcatccatagttgaaatgtataataatttttaccaatcaccagctattactaacttaagttatatcattattgtttacgtaatttttttagtgttctttttccctttgtaagtgaatgtatttatccatttgtctgtctctattgtgtttattgttgaagttgtttgtggattacttttttttctttccaatcttaagttgattattgatctaataatgataacggtacaggtggcccgggcagtggaaagggtactca

SEQ ID NO: 33215 - DNA, 973 bp, Medicago truncatula
  Intron number 1 from transcript Medtr7g117300.1 (locus Med tr7g117300) derived from phytozome v7.0 (chr-ID MtChr7; po s 27370350 to 27371322 reverse strand)
tttggtcatttagggtcaaggacaagttgcagtttgtactcaacattaattaggtaatagctataaacttgtttatttctttctgcatttaactagtactttgtttatgcgtttctggctttggttttggctatttacccctgttcatgtgttgtattagcatgagaaggaacctaggaatttgattttccatatgttgcagttttttgaaaatttacttctctgtatcaatgtattgaattttcatatagttcagaaaatatcaatgtttgtttcaaaacaccaaacctttttaaggatctttccttttgtgtggtttgatttgattgctaatacaaaatcagttcagaatctttacctagtaacacaagctctagactctggacaaaatattttaattaggcgatgaatgtgatttccctttatgcctaatattggtcttttttatcaagttcagtaatgtatgattttatttttaaaaggagatgaatttatgtgtacggaatcttcttatcggtatgtgtcaagttctgttggtcatgattcatgaagtcgcttgaaccatcctgtctattgagtgtgctataattattctctatacgttgtgtaaatttatatctatttttatttatttatgcagacataacatctcaaacgtgtcaactttcatgaaaacctgaaatagttgcaagaaaatcaccagtttcatatgcaggagtgccactagctgaaacttcaatagcagtagaaggaagaagtgcaaaatgttttatattatgttgcttttaacaatttgactatgacaccttaggtgactctacattattttccttgatcatgttggtcctttttaatctttaagttttgatgttcaactgttaacttcaatttttcaatcttgaatttggtatttttgatgctttattgagctgattcgatttgattggaggtgtctgcttgtgagttaagctag

SEQ ID NO: 33216 - DNA, 818 bp, Medicago truncatula
  Intron number 2 from transcript Medtr7g138650.1 (locus Med tr7g138650) derived from phytozome v7.0 (chr-ID MtChr7; po s 32957951 to 32958768)
gttctaccactccggtgtctccgttttccggtaaggtcgttattattcacttatttgtctttatacggtaaaacttaagtgcctcctgttccaaaaaccattaaattaaagtgaagtaaatgatgctcctaaatttcgggcatgctatattttgtctttttgtggaatgtcctaacttttatttttaaattttttaattcatattaataagttggttagtatctgtgtctcgtatcaacttacaagcgggaattagagtgtgagttttcaagtagtaataattgtttagctttgattgaggtttgaacctcgacctcggaagagtgtgggttttcaagtggcatgaaattctttaaaaagaaaggttaattagtagtaccactgtgtttggttggggaagttatgatattatggaatgtgaaaatgacgtgcactattttattaattgtgtggttatccacttacgtagcacattatacatcaagtcacaattatattgccaaattaaaggattaactcaacccaagtttcaattagacaactgggttaagttacttggttttcttttgggtaccaagttacttggttaattatttatcatttataataacaataatggaaggcttggtctagattgattcgtttatttgtttaattcaataacaaaaacagttgtatgattgtatcattgagctagctggaacttataaatgatgatgtttgttaatcgataaatgacaacaaaaacaaattgaactaaagcgatgcatgtttatttttcaggaactagagattcctttcggtttcgacgaaggtcg

SEQ ID NO: 33217 - DNA, 435 bp, Medicago truncatula
  Intron number 1 from transcript Medtr7g143390.1 (locus Med tr7g143390) derived from phytozome v7.0 (chr-ID MtChr7; po s 34402483 to 34402917 reverse strand)
gtgggagtgctcaatacaatcagaaaaaatgattaatccatttttgtaaccgacagacttcttcactaagtcgaattaaccatgagcacattaagcagtgatcttattaatgtagttaaatcataagctttgataaaaaaattctaatagatacgttttttgatatattttcgtttagacgaaccctaaaatagtccctcggtaatattttttttgccgcggttgcagtcacatataaaccctataacactccctcctctaagcaaaaaaaagaaatactgcaacctttttctttctcttattttccttgaggttagggtcagggattcagcgcggaaagtttctcctttttttatttcgtatcgattttataaaactttttttccaaaatctatttcaggaaaggaataatctggaactcaaagttgtcaatta

SEQ ID NO: 33218 - DNA, 1040 bp, Medicago truncatula
  Intron number 2 from transcript Medtr8g050380.1 (locus Med tr8g050380) derived from phytozome v7.0 (chr-ID MtChr8; po s 11330727 to 11331766)
gttggctcttgcgggaatcgttgcatctcattctggttagtattatgaatatttctggtccccattattatttacaatatttatatttttttaataatttttagactatttatatgtgtgtatttataattgagcttcatattaattttttttttctctatgattcttctcattatttttacaaaactacaaggtgatgaacgtcgctccatatatatttttgatgtggaattgaattttaaaaaaatatatagaaaacgtttttttgaaataaaatcagccatatgtatctcaattaattaatcacaatttgcttatgtttaatttaaataactaatcaaatatctgataattatattttgtcaaacccatgtaattatcatttgtattttatttttctgaaaaattagatatattaatccacaagacccaaatccaaaatggtttggccgataaaaatcacaaagttatgttttttttttttattttttttatttttatcaatcatcagaaaattatatttttccaaatcaatgtaattatcatttgttgtacatatatgtttttctcaattgttaatattacacacagtttttattgtactaaaaatacattaaaatttgttaccgtgtaagaaaaagttgaaaccgtgtgtaacaaattatatataaaaagaaaacattaatttgaaaatgttatttttttctattttacacctataataaaaacaatgtcttttctttcttactaacatgaggaagatacacaagtccagggttcaaacctcggcaaaaaaaaaaaaaaaaaacattgaggaagatgcacatgggattcaaaatgctcttataaaaattcgatgagaaatttcgatttgacctaagagtaaacattttcttacggattgttaaaaaattaagtcaaattttttatttgtctattcaacacatcaaaacttaaaaaaaaaactacgttttctacctatggtgcatttattatttttaatggtgcagacattgaaggcaaactactctttttggaaa

SEQ ID NO: 33219 - DNA, 751 bp, Medicago truncatula
  Intron number 1 from transcript Medtr7g146200.1 (locus Med tr7g146200) derived from phytozome v7.0 (chr-ID MtChr7; po s 34926707 to 34927457)
attgttttatctagttatcggcaaagaaaaagaaaaagaaaaaaataaattattgaaaaaacagttcctcagaaaaagtaaaaagtgaatgtctttttattttattttttataaaaaaaaaattaggtttagtttatcaaacttgcttttgtgttcgattcctatcaaagttccggtcatgtttgtgtacaactcaacgttggtagcttctgcaaatcatgatatttggccatatgattgaccttacttgttccatataactgtattttgattttctggcttggatgacctgaggccaatgactccctacatcattagtgtctataatgagccaataaaaatgtatctcttttccattaaactatagtcaatttcaagctcacaaaatccttatgagtaatgcttgactacacctatatgtgatttcttttcgtaatttgatggtagaaaatcctcttgaaaacaattgatggtagaaaatttgtacattttcttaaatgtcttggaaaatattactttgacttaaaaccatgtatggagtatacttcacagtttattctgctatatagttggaatcattggaatgttagtgttagagctattacatatctatatagcattttgaccagcaatgcttaactgccccaattagtgattttcaaataaatttgtaaaacctcacccactgagtatactcttaaaacttttactttcagttggagaaggaagcacttgtaaaaggtgctgcatt

SEQ ID NO: 33220 - DNA, 805 bp, Medicago truncatula
  Intron number 1 from transcript Medtr8g115300.1 (locus Med tr8g115300) derived from phytozome v7.0 (chr-ID MtChr8; po s 25857188 to 25857992)
tgctaataagctcaaagactcttctcatcttgctggttcgattccactcgattcatttcttaatcactttcttttcttatttcatcttattgtatgttaaagcttgatctatgtgttttgtttgtgttttttactcgatctatgatgcaattgaaattaaaataagttttgattccccgatctggtaatgttgaattttcatttgtgttgtcttgcattgcatgctcttgttgttgcgttttatggtgaagtgattttgtgattgaattcagtaaaactcgtgtttgttgcattggtgttgctaattgacaatggaggttctgtatttttcattgatttatcgagtttgagctgaaatttgatgattggtaatgaagtaagttcaatgttgatgtggtaattaagaggtttgtgtaaattgtttttgtctttttaaatgaatatagattgaagtgtgattcagtggatccgtgtgcgttttttataagtttgattttgaatgaaattggttttatatagtaatttcgttataattgagtttgaattcaagtgatttatgtttgaatgcttttgactgtgaaattaattttgatgtgaaaactttagtgtgaaattttcagtttaccagcaaagctcctcttttttatcacttttagttaaaccatggtttggaaagaaaatacattagttttatcccatcaactgaatcacatttaaaaaaaaaacaaaattcaattttgatggtttgcactgtgaaatcaaacacgcagattaatagatcagctgtactgtctcttatatgcag

SEQ ID NO: 33221 - DNA, 1050 bp, Medicago truncatula; identical to SEQ ID NO: 33044
  Intron number 1 from transcript Medtr7g138290.1 (locus Med tr7g138290) derived from phytozome v7.0 (chr-ID MtChr7; po s 32775831 to 32776880 reverse strand)

SEQ ID NO: 33222 - DNA, 943 bp, Medicago truncatula
  Intron number 2 from transcript Medtr8g020930.1 (locus Med tr8g020930) derived from phytozome v7.0 (chr-ID MtChr8; po s 3703517 to 3704459)
cgcggacagaaggtaagcagcaaatattgagaaatactcatcatgatatgaagtctattaattttgtattgtgtgctattgtagtggccagtggcacatatatcaatctaacatgattcttgatgtaacagatatgtagctttgtttgtaggttattattatattatgcagtttggtttgatctttaaaatccttttacttattgatgttcatgccaatagttctatttactttcacttcttcgtcaaattctttaccttgagctaaatgataaaatgttggatcttcatgactactttatatcttggacaaaatagattttgtgtttatctcactcaaatctgttggtgtcctgcatatatgtaaacagttgagttatattttgaaacattctcatgagcctgcatccctatttgctgcatcacaatttaataaatagactcaatcattatttactacagcttgcattcctttttgacaccccctttaattttgatggcttaatcaaacatattttcaagtgtattagttgaaagaaaattgttacagaaaattcctttaattgaatgtatcaaaaaatttcatccaagtcagcactctaccggtatttcattctgtgccctttgtgatttatatttattaactgattgaaaagttcacaaggcatttgccagtagtggtagcagtatctattctactgaattttaacatgtgaatggaacatgaactttcccaagacccctggcatatttgctcttttatttgtttcccatttgggaaatcaaaatgcaataaaaaaacactcttcaataccattggtatctgttgttttattgtagaaaaacttctgtgagaactcatgtttatcgtttcttttaagactgatgtaatgttaattatcatcgcagctgagataacactgcttgagaacaatatcgttgtt

SEQ ID NO: 33223 - DNA, 729 bp, Medicago truncatula
  Intron number 1 from transcript Medtr8g029550.1 (locus Med tr8g029550) derived from phytozome v7.0 (chr-ID MtChr8; po s 6551621 to 6552349 reverse strand)
ttggagcaagcgtgaaagtagcaaaagtagccaaagtaaatattgaaagaaaaccaacgtgagttaagttacgctgcatgacttaactcacgcataggcattttcaacaaaggctgcaggacgcgaacgaaaagtgcagggggatgagcagaattctaacatatttatttgggattgaaacaagatttagtctgggcaccatattgagcaatcgaaagtgatgagcctgatcttcacaaatctaataagtgatgccgaatacaattataaaatactttataaaataatgtttattgaatcatgtccttattttgaaaaacactttcgaaataatttatttttttcttaatttttaaaattaaaaaaagatcatgaatcctttaatacaaagttctaagttgttttaaaaagaaaataaatacacccgttcaatttaaaatcggaattattttttttaggaaaaaaatcggaatgttacaacttgtaaaatatttatttcttactattccattttattgtctacctttctctctttcatgactgttatctttcaagttttgtatcatatcaccatcaattattagaccaactttcatttgtgttttggctggttcacttggtaaattaattagtctaacagaatcttcttcatactatgtattgaaattaattactaggttccgtcgtttatttgatttaatgtctaataaactgtgtacagtagctgat

SEQ ID NO: 33224 - DNA, 660 bp, Medicago truncatula
  Intron number 1 from transcript Medtr8g106770.1 (locus Med tr8g106770) derived from phytozome v7.0 (chr-ID MtChr8; po s 24052523 to 24053182 reverse strand)
agtacaacgaagaaatttggaaaataaaggtaatctcatcacattctttatgcttctctgttttattttgatttctttttcttttttgctgtcgtgttttgaaaatttctaagttttatttatcacgttttaaaaccatggaaagaatttaaccattcggaaatgcgttctttttatgtttctcttgtttttttgtttttttttttgttgtttgaacatttctaagttttattttatcacatttctttttattttattttttaaaaccatggaatgaatctgaccatgcaaaaatgtgttctttttatgtttatctgttttctttttcttttttgttttttgttttttgttttgaacatttctaagttttattatcatatttctctttattttatgtttttaaaccacggagtgaatatgtctgatccttctttttttgcatatgcataaatgtgttctaaaagtgaacatagactgtgatgaatctaaaaataaaattaagatttttttttatgaatattgaaggtaatcacacttaatattctgatttatttaattactgttattattatctatacaacaaggatagatgattttgagagtaaacattgattatgggtgttgattaatgattgacaagagtatataaaacaaggatag

SEQ ID NO: 33225 - DNA, 1021 bp, Medicago truncatula
  Intron number 1 from transcript Medtr8g133510.2 (locus Med tr8g133510) derived from phytozome v7.0 (chr-ID MtChr8; po s 31827275 to 31828295)
caagagtccgtgaaacatttctctgctgctaactggtaattctctcataactcatatcatatatgtatttttggttttaatcctatactttagtaatctagagttcggcttaaagttaagtaaaattatgtgtcttgctaaatatttctatttataccttatgtttgttttcctttccatatttgattgtgttttttgtccattattatcatgaaagcctcaagggggattttaattattaagcataggaatcatagaaaaaattgaaaggaatgaacttgtaagcacaacaagtttcttggatttaaatgttttcttctaggctatgagaatgttttagtttggtgtttggaattttgtttattatgaacttgagatggaaattattagttcaaagaagtggtctagtttaatttacatactaaatcagatctgagaccaagacagctgttgctagcagatatgaatcataaatattctccaactaaacataataattatgtacccataatctttatctagtgaaaaaagaactatatatagatacttcggtggtctactagaaagataacaaccaatttgtattcaattctcaattcttgttaaaggattgttgggtttgacttgaataatttagatcttgaaatttattttggtctctcaaccaacatgacaacaagaacttacttttttatacaggcaaaatgaaaacataagcaagttagtgattatgttagtttttagggtttaaatcctagacctcttacttaacgcactttcggtttcgcttaactcactttcagtttaagaatccactttttttattggcaaaatatttgtaagttagtgattatgttagtttcctgggttcaaatcctagacctcctactttaagcacttttgatttctcttaactcaccattcgaactacatacctcagactcaaactaatcgatttggattgtgtgctatgtgactatatgcagtcaaccacatccagactgtccgatcacgacaagat

SEQ ID NO: 33226 - DNA, 710 bp, Medicago truncatula
  Intron number 1 from transcript Medtr7g121800.1 (locus Med tr7g121800) derived from phytozome v7.0 (chr-ID MtChr7; po s 28785768 to 28786477 reverse strand)
gggttggtgtaatcactggacgagatcttgctcaggtatcatgtcattcactttagggttgataaattacaccgatcatgtagtaagattgttatgtttgaaaagctcttgaactctgaactgctttaacccctgtccccgaataaaacctatctgttttattttcatcaatttttcgagttatattatactatttaatgtagcaacttgctattgagaagaagtcgtcacgtatcaggaagaaatgaaccttaaaaattatttgttgttcatattgatcttctgtctgtgcattttgttaatctaattgagttttgacagactaaatttggaagtttatatgaaactggaaattgcattgttactttgatatttttttcttttctttttccatcttaaaagtatatcctgttcctccccatgtttctttctcatgctcccagtgtttttttttcttaccccgctaacactagttcaattgtggcggttgtgaattgtgagccagattgagtggttttctcttcaatttgcttatttaattgttattgagcctattgcgggtttttgtcttttctctatttcttcttcaatctcatgtagaaaatatgatgtttacatgagcaagctcagatagaatttgataaatgcacttggtttgtatgctttgtttatatactaatttctcattttttaactaaagatttgcagtg

SEQ ID NO: 33227 - DNA, 405 bp, Medicago truncatula
  Intron number 1 from transcript Medtr8g142360.1 (locus Med tr8g142360) derived from phytozome v7.0 (chr-ID MtChr8; po s 34701936 to 34702340 reverse strand)
agataatacaagctgctaaacaggtacttctgaatttactaatcttcgtataaaaatacaagttgtttcattggtttaagagaacatggaatttatatacaatgctagttttgtgtttgagttacacaatttgttgaatttcgcccgtggtggttcacgccattatttagcaatactcttgatttaagcttaatctttatctgcaattttcgattttctgtgatatagtttactgctgcttctagtgttcctaaccctttgaattcccctagtccaagcaataatgaaaatggtattcaattaaatatcactcaagttgttaatattttctttgttttttaggagtgatattctcaacgatgaattgtgttattaatcttttctttttatttcttgtaggtgaag

SEQ ID NO: 33228 - DNA, 323 bp, Medicago truncatula
  Intron number 2 from transcript Medtr7g104520.1 (locus Med tr7g104520) derived from phytozome v7.0 (chr-ID MtChr7; po s 23735090 to 23735412 reverse strand)
tgggggattgtgggcagaacttgtggataatagaggtatatattgattgtcacttattaaaaaaaatcttcagtaattaactcaccaacactaattttggtgaccgaattagagatatgtttcttacatttcctttgtaaattagtttatctcactaattttgtgccactttttatgtatgagatattacctgctttgagtctttttctcctttaytyaaaaagtctcttagatgggttgaggtctaaccaaggacaaattcgtgatttaattatttttattattctaaattaatgtttcaggttttgaagyagggggttcca

SEQ ID NO: 33229 - DNA, 965 bp, Medicago truncatula
  Intron number 2 from transcript Medtr7g143020.1 (locus Med tr7g143020) derived from phytozome v7.0 (chr-ID MtChr7; po s 34219063 to 34220027 reverse strand)
ttcccggcacatatctgctaggagtttaaagatttgtgatatttttattttcatttttgtgatttttttatttcatttacaaaaaaataatgtcacattgttaaatgtttatatttttatcagaaaacaagaaatggaaatagactgtagtaacggaaactatgtaggcctatatttcttctagcaacattgaatcccattcactaaaatagatagtgatcctatttattgtaataaattctcttaaaccaatgtttatgttagtggacaagttcagataaatcaatctaaataaacaaaccatgatgtagaccgccctttaatgacttgcgtttcattttgttattttaattaattttgaataatttttttagggatttcaaacccaatttgctattgggttgagaatgtgtatatttgattattgttgttaaatttaatttgattatttagcacttgtatgtgggaggtgttctttgtctttcgcgcttagttggtttaagctttttagtttttttttttttttacagataaataaaaaaatcaataaaacctaaacagatcaaacacatggctttctagatagaagaagaagacgaaaaaaaaaaaaagagggtaatgggattatgagaataaacatagaactaaagcaaaccatatatgctgccaaagatgattggaattatgggttcaaatagattttaagcaatacctaaaaaataaatacttacactaacagggatatatcatatatgatgtcaatcactattatgaaccaaatcggaaattgaacttacactatagttacctcatcattcgtaaccgggcaaacaaaaatatatcaatacttttctggagttaagtcaacctgaaaagcaaataggttttaaaatattaaaatacttataaaacaaacgaaaatgaaagatgatatgccctatgaaaacaaattggttgcagattga

SEQ ID NO: 33230 - DNA, 438 bp, Medicago truncatula
  Intron number 1 from transcript Medtr8g043200.1 (locus Med tr8g043200) derived from phytozome v7.0 (chr-ID MtChr8; po s 9251117 to 9251554)
cttccgcagttattgcgcaggttattacaatttttgatagtactcatatctatagaaatgtatatagaaagaagaagttgaatttaattaagtgctcgtttgaattgtcttatattttagcttattagcttatgaaaaatagtttatgtaaataaataaataaatgttaatttataagttttcactaactaaaattgtatttcatgagctgttttttcataaactagcttgacaagcttatgaattgtacttaaaagcttatttagttgcataaactgttttgtgtagattcaaaaataattcaatccaaacaggccctacgccttaagtaatacaatgagatagtcggttagaacaactaactctaactgatgtgtaactaacttttatatctttgattcaggtcgccggttgcgaggaaagtgttgaggcgtttaa

SEQ ID NO: 33231 - DNA, 617 bp, Medicago truncatula
  Intron number 1 from transcript Medtr8g105260.1 (locus Med tr8g105260) derived from phytozome v7.0 (chr-ID MtChr8; po s 23205932 to 23206548 reverse strand)
aggtatggtttcatatgtttgagatttgccatgaatttgtgtgattttgattgatattgatattgctttttggtcttttttttattaagtggatgcatgatttgtgacatgttggtctttttttgattggatttttttgtttgttttagtgaatgcaccattgaatttatgtgtggtattatctgcatatagagggaagattgcttgcatatgtaggtttttaatgctatattttattataccattgattgaatatgtgtgctgcaatttaaccctcttccattttgtggatttattgatcaaatatgtggtcaccagaatactatgcaaaaaaggtgctttgagtttggttcagtttgttgctatcatctatttgttatccatgtccatacatggtttgttttctgtgccaacgatgttatcattaatgaagaaagggttttgtgctggtattggatacaaatgttcttttagtgttctatggtgtcttgttcatgcatgtttttatttcattatttttgaaattgtcttctactgtatgggaattagggctctcgtgaatctgatcctcttaattttcagttcatattgttaggtgctgttccatttcctatcga

SEQ ID NO: 33232 - DNA, 263 bp, Medicago truncatula
  Intron number 1 from transcript Medtr8g116180.1 (locus Med tr8g116180) derived from phytozome v7.0 (chr-ID MtChr8; po s 26267225 to 26267487)
attttggtgcgtgtactaattgtttttaattctccacatccttcttcctcctttctgtcataacccttattcccaattctaaccaaaattaataatcaattatataactgcagatacttcagtctctaaatctgtttgtgcccacctggtaatccttttattccaatatatatatgcatgtttttcaattttagaaaataaactttgatttttatattgtgattgttgtgtttttcgttttgcaggaagctggtattcgaaac

SEQ ID NO: 33233 - DNA, 493 bp, Medicago truncatula
  Intron number 1 from transcript Medtr7g107950.1 (locus Med tr7g107950) derived from phytozome v7.0 (chr-ID MtChr7; po s 25328730 to 25329222 reverse strand)
tcgtcacagaaaaagtcacatgtcatttttaagtgtaccttttaatttgtatatttcattttgatccaaaggctattatttcttcctctcatctctcacagaaacacaattgagaagaaattattattaataaaacaaagaaaatataatttaatgtcatcagagtttttgatacaataattaatgcattttttatttatattttaattattaacttcttaattcattaaccaaactactcaactccttattttttagtaaaatacctcaaaataaaatttgtgtaaaaaaaaagtacattaaatattttactgtgtcaaatttatccggtctattagattcattcacctattttggtcagacaagtataacattgtcatatatatggtatgcacgtacgtaccctcatgttttgtaccaataataattcatctgttgttctaaataaaattaattttgcgaggttatagaaatgtcagttgaagcatttgca

SEQ ID NO: 33234 - DNA, 573 bp, Medicago truncatula
  Intron number 1 from transcript Medtr8g078090.1 (locus Med tr8g078090) derived from phytozome v7.0 (chr-ID MtChr8; po s 15722769 to 15723341)
ttcaaagggtttgttttcttttatattatcacactttttattgtacttcatttattgttgttagcatttttcacaaatctctattgtgttatttcccttaatagcaaagatggagagatagattcttttctaggtaatgttgagcatgacaaagatgaagtactacaataaaatagtatttaacactttatgattatcaatgaggtgtggatccaaaacatgcacaaatatgctaaggataatgttcttatcaagtaaagaagcaaactaagattaaattttatacaacaaataaacaaggttttaaatcatagtcgtgctcacatctagggttgcattatgatctttgattgtcgcagttgaaattatgttagcgtagatttttttttttactaaagcaattttttttttttttataactatcaatttgtattaaataagtgaaactttttaaaacaaacatgcatgctttaaaaacatgttctaaatagaactattagttcaattaattaacatgaatttttttgttttgttatagggtgaccaagcctcaatagtaggtggtgccataga

SEQ ID NO: 33235 - DNA, 489 bp, Medicago truncatula
  Intron number 1 from transcript Medtr7g139780.1 (locus Med tr7g139780) derived from phytozome v7.0 (chr-ID MtChr7; po s 33529878 to 33530366)
atcagaaagattattgtatgtatgcttacttgcgttttaacatcttccttacgtgatttctacgatcaattacccaaatggtcatgcttgttgcgtgcttaatcatgtttcacttttgcatgcgtttctgtctaaacaaatgttgtggacgtgttttctttgtaagaggatgtcgtaatcttatgtggtcccatttcattctgggaccaaacaaatcagttcagttagggttttccataggttctcaccaccggaggtaatactggttaactccggaaggatttgaactttgatttgccacgttgtgagattctagccccgctacctagacccacttgtcaatttgaccaagccttgaattttgccttgtatcaaaagtgttttgaggaaattcagtgatagtattaataaatttataataattgaaaatttgatcagattatgtgttatgcagggaccctaaaacaagccctgcttgcagactaaaga

SEQ ID NO: 33236 - DNA, 561 bp, Medicago truncatula
  Intron number 1 from transcript Medtr8g026130.1 (locus Med tr8g026130) derived from phytozome v7.0 (chr-ID MtChr8; po s 5501855 to 5502415)
ttgtgtacctacacctttcagaagtacgtagttgttactagggtaaaaaaagagtcttctactagagtcaagcttgtttgatttgttttcagtgacattatggtgagtattttcattctctttgttcttattcttgtggagtcaagatttttttttttttggtgcacaaagataaaacaaaagaaatagaaaaaagagagctacactctcaaataaaaagtttcagctgcatcactccgaagaaaattcaaaagatctgtcggaggagactcataaaaagaaactcaaaatttgatgatacaccaaacttagacaaaaaatccgcacattaatttccttcccaaagagtgtgattcattgtaacatttccttactccaatagctcttttatatcttgtcagttggaatacattcagaagagcaatgggaacaatgatattgactatggaccaaaaaaatattatgattcttattgtccgtgaatatatagatgaatgggtgatgttttatgttgattatacattctatatgttcagccttttgaagagcattacactaagg

SEQ ID NO: 33237 - DNA, 762 bp, Medicago truncatula
  Intron number 1 from transcript Medtr7g127310.1 (locus Med tr7g127310) derived from phytozome v7.0 (chr-ID MtChr7; po s 29826450 to 29827211)
ctgctcctctaagtatacacaacaggtgttagaacttttttctttccatttctgtaattctgtttatttgacaaaccatatattcatcgtcgatggctttttattcgttaaatttatatatactactttccttttttatctcttgagaatttgattttttgtggttgttgaagaggcgtgaccaaatctttgagacaaatatttttgggaataaaaatatgtcaatgagattcatatttactttcaccagatactttcagcactcatttgatacctctttaatcaattccccaaatgtgatggtaattgtgaatgtgaatatttacatatgatgaatgaacaaaaagtgggaaaattcccaaatgatctcccacatttcctacctttgagcattcacatctataattatgtaaataactttcagcctcttaacaaacaattcacatatattgtttgttatttagtaaatataactcgaatcatgctctcgccaacaatttaattaaaataacattttaaaaagaaaaagtcctatattgagatgatataacctagatacatatgtttgcaaaagattgcccaaatttcaaattaaattgattagttgtctatcaaatgctccagtatattacaacttacatgtcaaaatgtcaaggaacaattagcatttttacgttgagcacatctaactttatgatgctcatttcttatttatgttagtcctctatgtgcagtatatactgggccttttcaaacggctaa

SEQ ID NO: 33238 - DNA, 156 bp, Medicago truncatula
  Intron number 1 from transcript Medtr8g011750.1 (locus Med tr8g011750) derived from phytozome v7.0 (chr-ID MtChr8; po s 1656313 to 1656468 reverse strand)
ctgggtatgtagatttaaaaattccaaatttttgtaatttttattcatgttttcttataataaattttgggttttttttttaattctttgtttttttgacttatttgaagaaacgcattatgttatgttttgattaattgacccttgaatgaaggt

SEQ ID NO: 33239 - DNA, 383 bp, Medicago truncatula
  Intron number 1 from transcript Medtr7g121520.1 (locus Med tr7g121520) derived from phytozome v7.0 (chr-ID MtChr7; po s 28619924 to 28620306 reverse strand)
gtgagtactttagtaatattaaattatgtatgtccaactgtcacatactaatactctataatctctattatctactatatattatattatttacattaaattcacacgtgttttttctatcaaaaaaattcaaaagtgtttttaagtgtgtagtgtgtatatatatacttacattaaattatgtatgtccaactatctctcacacacacacacacatatatatatatatatatatatatatatatatatatatatatatatatatatatatatatgtgtgaagagaataccttgatatttagggaatgtagtatgcatgtgattcctctaagacctttttatgcatgcaattttgtagcacaaatttctctccttttggagac

SEQ ID NO: 33240 - DNA, 718 bp, Medicago truncatula
  Intron number 3 from transcript Medtr7g130050.1 (locus Med tr7g130050) derived from phytozome v7.0 (chr-ID MtChr7; po s 30299591 to 30300308)
ttccttgggaactgaaagagagtggagtagttttgttattttcctttataattatgagacatgaaatacatttctaaccacttatgcttcaaaaaactattgatattttgggaattatgtgtgttgacgaaatcgaggaacttaattaatttgaaatttaatgcgcaactttgaggtcaataatcaaaacatcggattttgctccatccgtcgttgcttttggggatgctctttgtctccatattatcacttttcttaataactgactttgttagttatgaaatttaatgcgaactttgagattgatgatcgaaacatcgagcgttgttctgttgctttaggggatgctcttttggttccattttattacttgtctgaatctcagactctggtttttatgaaatttaacacatttttgagatcgataatcgaaacatcgggtgttgttccatcgttgctttaggggatgctctttgtttgcatattattactcgtctgaatttccgactttgttaattatgaaatttaattccaactttgagatcgataatcgaaacttcaagcattgttccgccgttgctttaggggatgctcttcgtttgcatactattgtctgaatctctgactttgttaattagatttagttttttcttttgcaatcagtcattcttttttcttttctctcaatgatttctgattttttttttcctactcaagg

SEQ ID NO: 33241 - DNA, 584 bp, Medicago truncatula
  Intron number 3 from transcript Medtr8g005550.1 (locus Med tr8g005550) derived from phytozome v7.0 (chr-ID MtChr8; po s 311261 to 311844)
gagaaagggctgtatgtggactattttagttgttatccttcattgttaacattttccaatggtattcattctatagttgtttgttgatgaatgtaaattagttttgtagaacttaatggttatcaaaagcatgtgtaatatcagtattatatttttaaaaagttaatcaacttttagaagattttaaagttaatcagtagtattatattactttttattttggtattactggcagtctaaaaagcttcatgaatcagtgagtatccagatatctttataatgttaagatatttatctttatttattatttgttgtatgttcttctgtgaatccaatcctagcaagtacatcgggaatcaaagttaaatagagaaggagaggtcggagagagtaattgtggccaaatattaaaaggtgggcatgggcgacgtgattgtgatccaatgcttgcttgagagaatggttactatgataaccaaatgtacaatagttcagtcaaaagaaagaattgcttatagaaaggataaaataagagtgtaatttccacagtctctgtcaagtaagtatacagaaaaccctgcgaa

SEQ ID NO: 33242 - DNA, 883 bp, Medicago truncatula; identical to SEQ ID NO: 32844
  Intron number 1 from transcript Medtr7g138330.1 (locus Med tr7g138330) derived from phytozome v7.0 (chr-ID MtChr7; po s 32797938 to 32798820 reverse strand)

SEQ ID NO: 33243 - DNA, 835 bp, Medicago truncatula
  Intron number 2 from transcript Medtr8g039720.1 (locus Med tr8g039720) derived from phytozome v7.0 (chr-ID MtChr8; po s 8364999 to 8365833 reverse strand)
tatcaattccagagaacattcctccccttaaagtggtaagttcgattgtttttcagtttctgttgatttttaaatcgtgttaagagatccaaaagagaaatcaaaacggcacactttttgcatagttttaattatgtgaccaagtctttatattttttatttcttttagcaagtctttatatttttctgtttctcccttcttttttattttcaatgctcctttcttttggatttggattcccttcattcatgcaatcggtgatctgaagtgtaagattaagatcggacaactcacgttccgactttggattgtagacccgatctttatccgattcttaaaaattgggttgggtctaactcaaccttacaaaacatcacatctggagcatgatccgagtgaccaaacatgtagttgatagagtttgataccatcttagaatttgggtagggtctaatacgacctttacaaaaccggctcgtaaggtaagggaagtcttccacttataaactctttttcagttcaaaactcatccaatgtgagattttaacacttatgtccaaatatcggattacagtgtcaaacgtgtgattccttgactgcagagaacctcaattcctttctttcctctttattcctttatgtgtagctcgtattatagaaggggaaaaaatagatagatgtttcttcttactaattttgctcttgtacttatgccgatgccgttgtacttttgctagatgtcaatttatctcttgttgaaattgtttgatacattttaaatggcgatcatgtttgattagatttattgtgttttcttacatatgcagcttgtat

SEQ ID NO: 33244 - DNA, 899 bp, Medicago truncatula
  Intron number 1 from transcript Medtr7g138390.2 (locus Med tr7g138390) derived from phytozome v7.0 (chr-ID MtChr7; po s 32823053 to 32823951)
tttcctatctcaaggtttgttactcatttcatttgtactcactatccttgtaaagttattttacacattgtcatatccatttaaagatgtggcaagacatgattgaattctgcttaaactctaatggatatatttgcaaacataattgtctaaaaaaaatgtcacctttagtttttgtttccagtgtaattttgtttatttagtaagattagtgttgtcctttcttcatttataatttcttgttcatttgtgtgacatgacgtaatatgacaacttttgtgggatttggctcctctaaagcaagtcactaagtgagtagtgtgtgtgaaccattgattaataaactggaaactcaccattccagttaggataattggcctgtggtgaggttttgaatcattagtcttgaagcttggaaaattaagcgtatgtttggtttcattgtgtgaattatcaaaatttatttgtttttttctctattattaaacatgatttcagaaaacacacatgtttggttactattaggcaaaaaattgccttcaaaccccggtttgactagaagtgatgaaaagtagtttttgcatttcggacaaaaaaacatttgcccaagtacactgtaatactatcatttgaatgacattctcttgttatttcatgcttaaggtaatcgtaaagaaatatatgtgttaataatgcttatggcgatttactgttctaatcgcttgccaacaggagcctatttcaatgacaatacacttttctgttttacattatcaccttgctcggtaataaacatgcttgattaagtttgagttattgttttttcaaataatattttaaattattgacatcttacatcattaggttaccaacgaatctttacgatcaatagcttcttt

SEQ ID NO: 33245 - DNA, 833 bp, Medicago truncatula
  Intron number 1 from transcript Medtr8g074600.1 (locus Med tr8g074600) derived from phytozome v7.0 (chr-ID MtChr8; po s 14868329 to 14869161)
ggaggtggtggtggttgttgagggtgaggtagtggctgacgcagtcttaagtatttttacaaaactacctttatttaaggttgaaaattgaaatatcaaaattgttacggtgaaaatacaatgtcgcgtattgtgtttttttttgttcgattatcattactaattttagtatgtatttcaaattgccgttaggaaagtaaggtaagagaattttgaatatgaatttttacctacttatgatgaactacaaattgctttggagaatcttcataaggagaaaacaagggcagacaaattaatggccactcgataaaggaccattagaaaattgggaaatgaaattttcattttgaaaaacataactaaatccctaaagtcgaaatgtgttgttatagaaagaaaaaaagaaatccatctttgaaaaataaatcatcaaaattctcaatggtcaatttaaaattttgttgcgaatataagatgaaacacaagtatctgctattgttcccttcaaaaaaaaaagtatctgctattgtaataaataataaattgaaagtagagcatcatttccataaagattgatgtatctaagttccaaacatttctaaatgtttaaattagttaggatcctaaataacaaataacaaatataaacattgagttgatcgttaaaattaaaatttaaatcatgtatgcaagaaataatgagagaaagtttgtctatgcaaatatttggatcgtctaactatctggattttccaagacaattattgattatcatttgactactaccttttataggttcacagtggttccctagtgacttaaaagatatc

SEQ ID NO: 33246 - DNA, 957 bp, Medicago truncatula; identical to SEQ ID NO: 33207
  Intron number 2 from transcript Medtr8g068490.1 (locus Med tr8g068490) derived from phytozome v7.0 (chr-ID MtChr8; po s 13147941 to 13148897 reverse strand)

SEQ ID NO: 33247 - DNA, 841 bp, Medicago truncatula
  Intron number 1 from transcript Medtr7g103140.1 (locus Med tr7g103140) derived from phytozome v7.0 (chr-ID MtChr7; po s 23049882 to 23050722)
gattttttttgttggtacgatgaagaagttgagtttgtggctgtgtatttggttctggtggagaagagtaatagttagggttttgaaaattaccaaaatgacccttaaaacggttttaaatgaagggaaatctagtattttacacagggttgctaaaagcgcccgctttgacccgcttttgcccgcaattgcgcctgcttcatccgctttctccaaacgctccgcgttgaagcactgtgtcgcgctttgttgtttttggccgctccgcgccgcattcggccgctattgacaacagaggtaggaagctgattaaggataattttaaaaataaatttgtatccttataaatgtttgatatcctctacagaagtagacatcgttttaagttgcacacattaattgtattaagctattcatttcatttgaaaggtgtacatattatattctgcaaatcttaagatttagcctttcaagcgtattggcatgttcataaatgttatttaatgtttcttgatgtttttctcattgtagatgatttattgaaattaatatagggagatgctcatcttatatcacatatatgattgctccatttttcttgtttgaatttgtgtttctcttgctgtgatcataatctcagttggttaatcttttttctctcccgctgattgtgggtttttcaatataaaaagttgtgatcttgttttgtactgtggcattttaactttttattgtcctctgtatgttggttgcttttgatgtgtctagtcattattgacattttcatcttgacaccaaatatttaggtggatttggaacataatcaatatcggtcttttca

SEQ ID NO: 33248 - DNA, 1069 bp, Medicago truncatula
  Intron number 1 from transcript Medtr8g093370.1 (locus Med tr8g093370) derived from phytozome v7.0 (chr-ID MtChr8; po s 20491670 to 20492738 reverse strand)
gaggcagaagcgtgtttgtatcttcagacgcgacggtaatttcatctcattcaatgctattttcattcttttagtctaatttgattagtattagtttttgaagttaatatgatttcaattcatttatatctatgcattatgtagtaattgtagttgatgtgttttgttatatgaagcaccaacactgacgcggacaccaaatacgacactgacactaatgataacttgaaaaaatgacataattgaatgtaattacataatacatatgttgatgtcacatgtgttggacactgaacacgagttctattagaacttagaattagaagtgtcagtgctaagtatgttttgatagataaagatggtagtattaatattatataaaaacttgaaaagtttaatgaagattcactcatcatatagcaacatgaccgctttgtaactgtgtttatatttaaaataactgcaaaatattgaattcttgttggacataagtgtaaaactagtttataccaattgtgcaagatcatcatcatcattactgattgtgatggcgccaatggcatggggatgccagcgtaggccaacctagaggattactgcataggtctaaatgccaatcaattttaaccaaacaaaaataatcaactaaaccacgagccctaagtactagtctgagcagtctcagcgtaagaagatctcctggagagaggtttgttcaccaagcatgattttcagtttagttgctttgatgggaataaaaacccacttctttggagaagataagaattcattcccttaatccttgatcattaaatttgtaaatgtagtaaagtgatgttatttatttaccgacggtgctaattttcaacttgattggtatagaagcttagaaaacaggacaaggaaaagaacataaatatagttggaagtgtctaatgtaaatacatgtcggacagatgagcaaaacaaaattactgttttgatgtgattgtgtttccttaattatgatgacctgttgctggtgtttttgctaggtggtagaggatttgttgaggtgaaagactttggt

SEQ ID NO: 33249 - DNA, 1014 bp, Medicago truncatula
  Intron number 2 from transcript Medtr8g146100.1 (locus Med tr8g146100) derived from phytozome v7.0 (chr-ID MtChr8; po s 35658664 to 35659677 reverse strand)
ggtaaggatcttttagttctagatggaaattgattctcacatgttaaaaacggcatagtcattgcagtacgtcaatcagaccaagtcatcaaacaactcacagtgtcagttgatttcccaatccaatttaccatattaaatatttatccaattgagtgaatgtgtggtatattgacgtgaggtaatacatgttaagagtgcttcattggataaaatattacctaaaattcgattttgtaaggattaaattacaaacagatacaatattctctagagtgatttgttttttaagaaaagtggttttttgtccttaaaaaagctacaacaaatgacctcaatcggccggtttgttatggattacaatagaactgatttggaagccaaatcaaacacactcatagtttgtggtgaatcttagccaaatcaaactgatttgaattgcttttaaattcaacataatgagtatgactacaagtcagagaatgaggtagggatgttctagttctagatggaaatggattctctcaggatcttttgcgttgcttcaatgccaagtctatttagagggttttaagtgcactcggtgcggtttaaggttagtatttcaggcacttagtatttttcaatgttaaatgttaaagaacaatgttgtattgcacttcaaaaaaaattaaataatgaatttcttgatttcccttgggggagtttttagttcattaaatcttttatgttacacttagatagattacattgctttcatatggttgatataacagctgctttgttttactagctgagaaacgggtttggattctcctgctgtctataatggttattcaaatattttggttgaattgtgtatgtataacctaagtatgtatgtccacatatttacaaatgtcgtagcgtcaactaagcaaggaagaaaccgatgagtcttgaaatattctagtaagctaatatttggtgggggaacttgtagatatttctgagcaacaactgatttggcctgac

SEQ ID NO: 33250 - DNA, 604 bp, Medicago truncatula
  Intron number 1 from transcript Medtr8g047920.1 (locus Med tr8g047920) derived from phytozome v7.0 (chr-ID MtChr8; po s 10933615 to 10934218 reverse strand)
agctgcttatatttactatcgcaaaaaccccaaaggtgtagttgttattatttgattgttcatagattttgttaacttatatgatcattttcaaagtcatcatttccaatattttgtttcaataattttaaattgtcattatataatctaagagcgcttgtaagatgagatggtaaatatctcttccaacaatgtttttaaaatcgaattacacatcgaatcatcaagatcacgtatcatgggtcaattgttttataccgtttgaaccagggcaaaactgtaattgaatagctcaaataattgaacggtgaacaatgtcaattctatattcaattggttaaaccgtttggttcaacttgatttttaaaatattactttcaacttagttagtgggctcgagctcgatgttcaacttacgaagaaaactttttctaatatgtagtctattcagcttgagaaattagtcctagagattgactgtggaggtatttgtttcatacaaaaataaaatgccattatgtaagtcatctttgaatacaaagtgaccatctaaaaaacaaaattttcaggtagcttggaccccaaaaatttcaaagaatttaaa

SEQ ID NO: 33251 - DNA, 894 bp, Medicago truncatula
  Intron number 1 from transcript Medtr8g044770.1 (locus Med tr8g044770) derived from phytozome v7.0 (chr-ID MtChr8; po s 10112088 to 10112981 reverse strand)
gaatacaggatcttcttctcctgtgccaaatccaggtaatatttcatatttgacttggtaatttggattcctttcaaggtttagattgtagaaaactatgaataaatagtgatctggacgggatcagaagtgacggttggggtatgtacgatgcgatggagtagtgtgattctttgctggaatgcggtggatcttcattggaggactgttgttctttgctagagtgaggtggtgtacctgcgaagacacttcaacgctcaagtcaaaggtttcaaggtgctttgaggtttttctcgaaataagaatgtgtacctgttttttccgtgagggtactctactatagattgttgagcatgtcatgtaagaaaaactggttgtgcccctctcagcgcaaaggccaaacgattgttcgatcgttttgatggcccatcttggctctgagcgccttattgtctgaagtctgaaccacaactctttgccaacgtaggtggtctgtaatggacttgcctcccttgttgggcctttcattccggggctgaatcatctgactccaggatcgggcattgaccgagtccggaaatacagttgaagttgttaggggtagaggaaatatgaaagaaagaagatgattcctattctttaacacacatttggttattttatccggattattgtctgaattattttattttggaataattacttaactttaagtcttcgcttctttttattcttgctaaaccaatgcatttgaaatatttgaactttcctgtatattcatttgaaggagcaagtatacacatttgctctataaattaggaaaatagatgtatcgttttaatcaatgtcattgttgcagccaagaacgaaggagcaagtaagagcaaaaccttg

SEQ ID NO: 33252 - DNA, 915 bp, Medicago truncatula; identical to SEQ ID NO: 32985
  Intron number 1 from transcript Medtr7g116700.1 (locus Med tr7g116700) derived from phytozome v7.0 (chr-ID MtChr7; po s 27070189 to 27071103 reverse strand)

SEQ ID NO: 33253 - DNA, 287 bp, Medicago truncatula
  Intron number 1 from transcript Medtr8g073730.1 (locus Med tr8g073730) derived from phytozome v7.0 (chr-ID MtChr8; po s 14495545 to 14495831)
tgttgtcagtggtgtgggtgtgtggatgtgattatgcgatttaaaatctatatttctataataatcatcattcatgatactaataaaaaaacaactataaaaaacctatcatttgcggtgtgtgttaatcagtgagaaattggtcataaaaaggaaaattgagttacttgcttagttgcaatgaaaccaatcaaaaaattgctcttttttgtttcggttcttgtgttcttcaattatgtcttcatgatactttttgtttctttgaaatcaaggaggattgccttaga

SEQ ID NO: 33254 - DNA, 281 bp, Medicago truncatula
  Intron number 2 from transcript Medtr8g078820.1 (locus Med tr8g078820) derived from phytozome v7.0 (chr-ID MtChr8; po s 16199945 to 16200225 reverse strand)
aagagaaggaagttcaggtttgcaagcacatagtacaattggtaaaactctgcccaatttgttttcttctttgatttttgttgttgtgtgtttcatactttaatctcttaccaggttcataattgattgcatagtatctgagattatttcaatgtgacttttgatattttttatagtgaaattggaattttcttacatgtttagtatgtacttgcatatatttattaaaaggttactatttcattcattcatgtaaattatgcaggttattcaaacaaggc

SEQ ID NO: 33255 - DNA, 923 bp, Medicago truncatula
  Intron number 1 from transcript Medtr7g140840.1 (locus Med tr7g140840) derived from phytozome v7.0 (chr-ID MtChr7; po s 33982874 to 33983796)
atcacccattgaccccatccaggtaagtatgttgtaatgttgctgatacctctttatttataaccttctgttctattacatgcgtacaaattcaccgatgtgggattaatattgctacttcacacgtatgaaatgaaacagcatcctttgaactctcctttatttagagccacatggaaggtgattggctttatgtttcttctcaaatcacaagttctatgtgagatcaaatcatctttagtcagagtagatgtttataggaacaattgaacagacaaaaaactccatgatcaatgtcaaaacttggtataaaagatgtgcaaatttgaaaggcaatgtgtcaatactgcttccgtgctttggctgatctagtcatcttttgttttcctcttacactttctcaagacttcttttacatcatccatcaaatattacacaatgataactatgtaaatgaactaaataacgatcaaataatggttaacagattcaacagagagcacttttttcagttggtgagcaacaaataatagaagacactactccaccaccaagaggcatgcataaaagctatttaattcctatgagttggtaccatctcccttatatatgtttatctttgattttaatatacctgacttgttcaataacatgttttccatttgttgagtactagtgaatcattgcttgtggattcatatcaaattattcatacggtgtgtttgtgagctcgtatttaacttcaaaatttcattatgatttatgctggaacttaaataacagcacacaacatcctctttaattgattaaagacatttcttgcagttgtagatcactccagcatcattcttttgaattctaggtaattttgaactccaatgttttccaagtgttgctgtaattgttgttatttcctagattta

SEQ ID NO: 33256 - DNA, 494 bp, Medicago truncatula
  Intron number 2 from transcript Medtr8g024600.1 (locus Med tr8g024600) derived from phytozome v7.0 (chr-ID MtChr8; po s 4647472 to 4647965)
tggtgccaaaaaacaggttagtcgacattctttcatatgaatcaaataccatatatatgattttgaaattcttgaaaatttaattcatggttctctgaataatctcgtatgaataaaccctcttttgtacatatttttacacacatgcacacaatcgaacggaagagcatacaattccacgtcatctgagtgttgtgaggcgtgtttctccccaatgaaataacaatcatacacttatgctgaactgtaaatctcttgtaaatgtcaagtttgcgaatcaaacataatattctagaaccttaggaaaactatgcatacagtcagttggttatgttattgttatattcgtagttttatttgtttagtttatagctaatatccagtactcattcttgcactattcatgcttttcaactttctatttcatatattaatgtggtgtttttcttttcatattagggagcgcgttggggctgctggattgtataatttgc

SEQ ID NO: 33257 - DNA, 500 bp, Medicago truncatula
  Intron number 2 from transcript Medtr8g138820.1 (locus Med tr8g138820) derived from phytozome v7.0 (chr-ID MtChr8; po s 33663523 to 33664022 reverse strand)
gaggaaagtaaagaaagttcttcagagcattggtactgagcttataaatcaaactaacttaagttttcaactattcagttctttttcatttcatgcatggaaagattacaagtcttaaatcttcttactttgctaaacccaaaatcactgtcatttccatttacccttttcttaccactaaaacactgtatggtttggtggctggtgctctaataagtacaatgtagcactcgacaccttagattgaagacgtgtatggtgtccaacacgtgttagtgtctcacatccgacacaacacatacatgtgattaaattgaaatactacttattttttaaatgcggtcagtgacagtgtttgtgttgtgtcttgtattcgtgtttctgtatttgattcttattaattaaccatttttgtgttgttacggtgacaaaattttggggtgtttcataacatttgcaatgcaggagtttttacaacaacaatcgatccacaacagaat

SEQ ID NO: 33258 - DNA, 835 bp, Medicago truncatula
  Intron number 1 from transcript Medtr7g143250.1 (locus Med tr7g143250) derived from phytozome v7.0 (chr-ID MtChr7; po s 34351738 to 34352572)
aattgctaaagcaaagtgttctacttttaactttatttaagtttctactttctactatatactttattccttttgaaaaagctctattctttactttttttgttactttgttatttgccttgctgctcgtgattgatgtttatgacacctaaatttgtaactattcatagtttgtttgttgcctagccaaccaatttgaagtggtgccaaattgtgtatttgtatttttgtaactggcgctattgcatgtggaattcgttgttggtaaatcggtatcatcaagcagataagggacatctaattatagtgtgagactgggaattgtgtagggtctccctttcctttgttttctttcccctttgatgagtgtcggcaccttatttattgttcctgtttacccaactttcactgtttaaattgattattatagttatggttatgattattttttttaacaaccccccgtttaggggacaactctaataatttgaagttttgtcagatgataactaaaatctgatcaatgttttaaccagagtttatattcagataatctcgatcgatttaaatttcactaaaatccattaatcacttgatgtcaaccctttagtagtaatcacattctctcaactttcaaactctaaatatattagtattggtattgctttcattttgacttgggcacttatgttgtcatttgtttttaatatatgtatactttcaccgacagattagaatgttcagagttgctcagtcatgcataacaatattcaaattcatgatgtgctggctgactcttcatgctatgatgtgtttcattgcatgcagatcagaa

SEQ ID NO: 33259 - DNA, 556 bp, Medicago truncatula
  Intron number 1 from transcript Medtr8g053370.1 (locus Med tr8g053370) derived from phytozome v7.0 (chr-ID MtChr8; po s 12101716 to 12102271 reverse strand)
acctgagagtgtgctcctcctcaaggtctcaggttcgattctccctagtgtcaattaaggtgggctaatttaacttttaaaaaaaaaatctcattatttctagcacttctatgtctggctataattccaatatggctgctacatcttctattttagaatttgttcttctcaataatttctcagtcaagctgaaattgggaaatgctccaagaattaaggaagttttatggaagcctcccatttttagttggatcaaatgcaatattaatggagcatccattggaaatcctggtccctattcctctctggaggtcttattagagattgtaacgccgatttcttgggagctttctcttataaccctgagtgctgagcttcagggtgctataatatataaattcaaatggctgctcaaaaaggtcggaaccatctttggttagaaacagactcaatgttagtcattctagcttttatgtctagaaccattatgtcttgcaatttaagaaacagatgggaaaattgtttgtttcttatatctatagagaggggaatcatt

SEQ ID NO: 33260 - DNA, 745 bp, Medicago truncatula
  Intron number 2 from transcript Medtr8g026580.1 (locus Med tr8g026580) derived from phytozome v7.0 (chr-ID MtChr8; po s 5746711 to 5747455)
aagttacgcctaacaaaggttgcatcgttagtggggtttatcacatgttgtagatgttgtaatttttagaatattatttatatttcaaaagttatattgtcataccgatcatgtgctactatgttgccatttcttaaataattcatttgagcaattatctgctaagtcattgcaaataactattattaaagcacgtttaaattgcttactaagtcaaggctgttaccatttcttcacaacgttaactttgagctattattatgcctttattctagcatgactaagcaggtacttgctgatatattaaaacttcttttcatgtgtgaaaacatataagttaagcactgctcttctcaagttttttgatcagtagcaacaaaaagttaaaaccaacacctcacaactttgttttcttctcttccaaatttacttcctgagctaaacatatgcctgataaaattatcattcttgctgttctgtaaccaccataacttggagaaggacctgttgaatcctggggaatttgcgcacattgaggcggataaattccaaggacagtcttcgtgacgcctcaggttaatactaacgtgattttacatgtttactttctagtttgttttgcagaatctggttcggtgttatttgaagttgcggtgaccgcggtttattcgaagttgcggttgctgcgttattacttaaagttgcgatgttgcggttgttgtttacacatcaggtacaacagtag

SEQ ID NO: 33261 - DNA, 723 bp, Medicago truncatula
  Intron number 1 from transcript Medtr7g140120.1 (locus Med tr7g140120) derived from phytozome v7.0 (chr-ID MtChr7; po s 33672053 to 33672775 reverse strand)
actctcgtcaacaagctctctcttttctcgattccgtaatctcttctctaacgctttttcttcttttccctttcctttcctcattttcagggtttatcaatttccccattcatctgatcatatatcaaattttgtattcaattcatttttctgttcataaattacttcaacctttttttcacaagaaaccctaatcacagttaaacacatatttaatccttgttttcaccaactatgttactgtcagggattgttcaatataataataataataataaaggagagttttaagactagtttttatttttaacattaatgatgatgatgacctaattgagtttactcgacagctttgttcacaacattcttatagtatttgcttttatattatattattttaactgcatttagttattgtagtagtagtagtagtagtctactagtatatgatgaatgaacattacggcgttggcgttgtttgattcatgtagccgaccccacttagtgggataaagcttgattgatgtgtccttgcgagcttagctcagttggtagtagggacaatgcataatatatgcaaggtccagggttcgaaccccggacaccaccagaaaagaaagcttgattgctgttgttgtagtctactagtattgctaatttacggtgatgattggttaacatttgaatatcttctaaagacttatgtatttcaaatctctacag

SEQ ID NO: 33262 - DNA, 496 bp, Medicago truncatula
  Intron number 1 from transcript Medtr3g114250.1 (locus Med tr3g114250) derived from phytozome v7.0 (chr-ID MtChr3; po s 28854983 to 28855478 reverse strand)
accgttcttgcgcaaattgcagcctcagttgtaaggtttgtttttcagtagttgtgtatgcttattttggttatggctagtttgtaactttctaatggcctcactagtatttagtgcaattttggataaacaacttaattaagtgcttataacataaatatttatggtataatagcttatcctatagcaaaagataagattaaggcaaactgttttcattggcatcttgacgagtttatggaaataaagtgaaaataacttataaacatgtcataaactgtgttcgtaaactcttatgttggtagataaacttaaataagccaatccaaatagacccttattttgttgtcactgtagctcatgaatttggcaatttagcagtgaatttgattaagtatatatgtggagtttatttcgggggggacgaggggtgaggtgttaaaagcaattctaattattgtgaagattctaagaataccatgtatgcagcttgata

SEQ ID NO: 33263 - DNA, 946 bp, Medicago truncatula
  Intron number 1 from transcript Medtr6g093620.1 (locus Med tr6g093620) derived from phytozome v7.0 (chr-ID MtChr6; po s 20235808 to 20236753)
attgctcttgatcttaaaattgaatccttggaatcgtcgctaacctcatgaaaacatgtgataaaattataaaatcaattctcacaaaacccgctaagggaaaagatattctcgaccacataataagtacctaattatcgatgaaagcagttgaaagaggctcgtctttgacaaaaattctgtaccatgctcaacctctgctagctgcatccatttcagtagaagttagaatgcgtatatatgcatacaatataaattgggcaagtgcaaaacaattgataattgctaataattcataaattctgtccggtctataagtgtgtgatagacacttaaagtcaatgtagaagttcataataggcaagtaaaagagggaagctgactaatctaagtgatcggtgcatggccgaactttgggaatagaccaatcaggaaaagatgaattctgctggtagggtcaccagtcagatcggccatggagaagattgacgggcagtggcggacaacggtctaacaaatgctaccttagtggtttgcacttctgagggcttggtaaaggtgcctacaagccatgcagtgatagtgactagagtttaaacgcggatgcagaacccacttggatcagaagctttaatatcaacatgaaaacatataagagacagatttgactcattcatgttcattgtcttgcaagaaccacaaatatatagatcctagtcaggctaccctagttaaaaaaataaggaaacaaatcaaaaagtaaagtacaaaatcaaaatcctaattgcattgcaataattgcaatcacaaactaactaaattaaagatcatatctaatcgtatcatatacagacacgacaacagacaaaaatagagagagagagagagagaatggtaacctcatagagcagctcgaaaacacttaaagttacaagggtatcatctg

SEQ ID NO: 33264 - DNA, 566 bp, Medicago truncatula
  Intron number 1 from transcript Medtr3g142610.1 (locus Med tr3g142610) derived from phytozome v7.0 (chr-ID MtChr3; po s 36593984 to 36594549 reverse strand)
atgtattctgtttagcatgaaactggtaagtgttttcatgtgtttctgcttcattttatttttctattttttgtctctttcttttagtttagttagaaaacaatataattcagtgtgttgattgtttttgaatttgagaggttttagatcatgataatagacaatctccatagcaccgacactattcatcgaaagcatgtccgatatccaatgtcaatatccaacacctcgacacaacattgacacatgtggttatagttaattatgttgttttctcaaattatagccgtcgtggatgtgtgagtatcgtgtccagtatccgtgtttgtggccgtgcttcatagtagacaacaaatgaggcttttatgtgttgattgcatgcaatatgtggttggtattcaggttaaataactattgaaactgatcccttcattccatatctttggtagctaaaggtttttagaaacatgataagaaatgttgtatatttgtactgcaatacctttaaatttataattaattttacaaattctcatgtttgactgaagaggtagagtcgtgtatta

SEQ ID NO: 33265 - DNA, 373 bp, Medicago truncatula
  Intron number 1 from transcript Medtr2g103870.1 (locus Med tr2g103870) derived from phytozome v7.0 (chr-ID MtChr2; po s 24342908 to 24343280 reverse strand)
tacgtggtccctaaaaacctaaaaattgtgattacttctcttctctttattttattttgagaaataaaataaaaacctaaaataaatctcttcatttattttgagaaataaagataatcataactcaaacttatatggatgatagttcacaaatttactcaatgtagacatatttgttgtcttttgaccgaaatgtgaacatttttataaacttctatagttttaacattttcaatttttttcggtaaaaaaaatgttcatcttttttgttttgttttttctgctgtctttatttagtttcattttgtttgacacgaaagggaacattaatgcaaatttgcaaagtcaaacgatattgtgtgtggttgggtaa

SEQ ID NO: 33266 - DNA, 540 bp, Medicago truncatula
  Intron number 1 from transcript Medtr5g083850.1 (locus Med tr5g083850) derived from phytozome v7.0 (chr-ID MtChr5; po s 31872054 to 31872593 reverse strand)
gtgagatgtgaataacatattgaaaaaagttcagattagttattggttaaagaattggttcgaataactaattcagtttcgttcaaataaactgaaaaaatggttcagtttgataaacacacatttttggtttttttttttttttttggtgaacacagttttggttataaaccaaattttgcccatccctaataaatagggttcgtttgtttgggatttttttccaaaaaaaaatatattttttatttttgtactgtttgtttcagatttaaaaaaaaaatcatttttagtctcaaaacgaaaattccacttaatttaacaaagaattatttttttcttcaaaaaaaaaaaagaaattttttaaattggtccaccactccacctaacttaaaaattgtttttaataaattaaaaactatttaaacaaaatgcactaatttgtccaaaaaaaaaaacacacactaaactctatcttccatctcataagtcataacgcccttctcagccgtcgccgccaccgccaccgccaccgccacgtcg

SEQ ID NO: 33267 - DNA, 596 bp, Medicago truncatula
  Intron number 3 from transcript Medtr3g097930.1 (locus Med tr3g097930) derived from phytozome v7.0 (chr-ID MtChr3; po s 23579498 to 23580093 reverse strand)
ataccgttttttaccttgatctgccatcaaatgtttgcctctctttctgcattcactgattcttagatttatttctttgaattctaaaggagaataaaaggagaaaataaccatggtagttatacgtttatgatgaaaatgtagactaggtggattatatcagtaaaatttagagtattgttttcatgataactatatcttgtccaaagaatcatttggctgattgaaaagaagttcaagagtttattggaattgctgtatatgcatcaacatgttcggacgaaatattattgaatgacaggcattaacaatactctgcgttttaaattctttatcttaattgattccttagattaaaagtggaaccatttgtactaggttttgagcttggagaattcatgtgatggcttacatatgcatataatgcaggagaattaactcatctaaacttcaatttttgctttcttaggatcattgtagaaacttgaacattctcatcaaatgcattttatcgaagttcattgattagaaggctaatttttgcagtgttctcattgattttttttaaattttttttccagattggttcctttttg

SEQ ID NO: 33268 - DNA, 672 bp, Medicago truncatula
  Intron number 3 from transcript Medtr4g134310.1 (locus Med tr4g134310) derived from phytozome v7.0 (chr-ID MtChr4; po s 32376707 to 32377378 reverse strand)
ctgaatttgaaggtgagaaatattatagtatggtatggtccaatattatataatctatttaaagtacatattgcattcttacaatgaagtgttattttcatgattaaaaggacgctccattggattggtgatagagtttgtttatgcaatagtgaaaaataatttatgttttcacttaatagcttaacttttggcatagtttgttcacgaaatggtatcacatgcttcaattaagtgatgtagagtgtccattcttcaagggatgttgttccaggggtttagttagagatataatataaaaaccgttcatgagttttccatctaaaacatcctaacttttgaattgatgatacacgacaaagttcatctaatatgagatttgagatttgcgtggatagcttaaaaaaaaaagacaatttaatcataattatattgtacaattgagaaaagtatgtacctatgcttggtttcatatatgtagcttgtttgatttgtcttcattcatacatattatgtgtgttatgaagttattttgacgtgtcttcctcctccgtcgcattgtttcatcaaattataaaatgttaatgcttgaggttatcaaagtggtcctattgtcctgtaatcttccaacatccatttgaattgaatgataggcgagaaaatttctcaagg

SEQ ID NO: 33269 - DNA, 917 bp, Medicago truncatula
  Intron number 2 from transcript Medtr4g039070.1 (locus Med tr4g039070) derived from phytozome v7.0 (chr-ID MtChr4; po s 9390463 to 9391379 reverse strand)
gaggcccctgcagtttctctccagttcattttcaggtaatttttataaaaaaaaaagttcatttccttattaaattatattcctttgaacaattttattttcttgtatctaggataaattgttacctttccgaaaataaaaactttcattttggatttacacatttgtttgtttaatataagagtttaataaagatgcactatagttccccttaaagatatatcaacatttcaagtttaatatctcaaatattattattttttgtggtgggaacttctgaaaaaaacgatgcactattgttttacactaacatatgaaaaaactaactttttttttttttattttttttttatttttatggaaagaatatgaaaaaacaaacatattggtacattacaccgaaagtaatataataggtaaggttaggatcaacccaacaaattcataggcttattgcaaaatttgaagtgagacgttttaaaaactaacaacaacaattaaaggacttttaactctaactagttttcacaatattaaatatattcacattgatgattacattttatactgaatttatttgtagcaaatttagtgtgtaaatttttataccatgagggaaaaaattagtacttctaattaaataaataacaaagtttagaggcttcaaacggctgctatagtgtaagccaccctagtgtggttcattgattatatgtgtaataatacaaaacaagatcaatcttttttgtttctttgcctttcaatgttcctaaaaaatacgttcgcaaagatctttttttttgttgaaactcattaaccatttaaacttgatcactttgttgaaattgggtctttactctttattcattcgattaatcaaagctcgaaggaaacattgttgcgccaagtagcagtga

SEQ ID NO: 33270 - DNA, 445 bp, Medicago truncatula
  Intron number 1 from transcript Medtr4g039070.1 (locus Med tr4g039070) derived from phytozome v7.0 (chr-ID MtChr4; po s 9391464 to 9391908 reverse strand)
attctcaggtaaattacattcagaataatatctctgattagtttcatttttgtttagatttaaggaatttacttttggttgaaaaattcacattcattttatattaagtatatcaaaaatttcttctgttttttatttttaaaaactcggtatccggtccaagaattgactaatccgagagatcaattttaccgcccacttgcgggggtcccgtttaaagccagagcaagctatgtatggacttagcccattgaaattggcaccagagggaatcaaacctgagacctttgaaggagcaaactccaagatcccaatagaccaaccccaaatgagtttcaaaattttcttctgttatatttatgtttttactttttattattgtcgtatttaattaaatttgtgggttttttattttcaattacaaaggtttttctgaaagtttgga

SEQ ID NO: 33271 - DNA, 587 bp, Medicago truncatula
  Intron number 1 from transcript Medtr4g092790.1 (locus Med tr4g092790) derived from phytozome v7.0 (chr-ID MtChr4; po s 19485091 to 19485677)
tcaagtttcagcttttcaactcctcctctccaaggtgtaatgtaatatacattttacatttttgtttgaactcatttaagtcttggttatattttgaacttgttgtgtctcgggtcttcttgttcttggtttttgttttgacttcttaatcaaacaaaacaacgatttttgagtgatccaaagcaagatatattcctttgaaacagaaaaataaagatcaagagtaaaatcatttatacctttccgaagaagaaaatacatcccaaacctaaaaaatgtcttgactcttgagaacccaagagtgaaagaagcaaattttcaaggttgctagagtttgacaaaatgtaaaatatataattttatagtttcatacaaattctcctattttcaagatctactttgtgtttatattgcaatttacattttttatccatgtactttgatacaaggggtagtttggatgaatttgggtgttggttaattaataatttattcatttcaatgtctgagatggtgttgtgttctattttaatgagttttttcttggttaagtttctgttcgcgccttcaaaaagtttatctcattc

SEQ ID NO: 33272 - DNA, 531 bp, Medicago truncatula
  Intron number 2 from transcript Medtr4g092790.1 (locus Med tr4g092790) derived from phytozome v7.0 (chr-ID MtChr4; po s 19485730 to 19486260)
caatcatcaaagaaggcttcaacatcaacagcctggtaataatttattcgtacttttgtttatatgtttctcccacatgatcatcatctcatgcattctacaacttgtttgccttgttaataataagaaatactttgcattctacaatttggtcagtaaactagttgtattaatttacatgacgttcttcttagaacacattcaatatcccttagctcaacagccgagttatctactatacatagacatacacacattcatgaagtttgcagatccatgactgtccgatcaaaatggggtggtccagatccgagctccgtaatttttgttgttaaagaaaatcaaattctgttttgactatttgatctcaattggaaggttatcccctggctttgtgaatgctcgcagggatccggcttcatatacataacatgtttatttttttaacattacttcttgccaagctactatgtttttttttggtcataatctgcagaaggtaccaccggagattgttacggatttgggtga

SEQ ID NO: 33273 - DNA, 980 bp, Medicago truncatula
  Intron number 1 from transcript Medtr3g156320.1 (locus Med tr3g156320) derived from phytozome v7.0 (chr-ID MtChr3; po s 40972844 to 40973823 reverse strand)
caactgcaaccaaactcaaacaccaggttctatacaccatcacatcactcaattttattagaatatcaaaatggttaattacttgaattatttaaatcaccaataaggaattcttggacattttaattgaaggtccatccatcaataagattctcctatcctatgttttttttttgaaacagggtacaaactacaagtgcagattgtcatcaatttgcagagtgtgtcatgtgcttgcttgtatttgtgtcttttgctttcttcaccgtctaattgaataaaggaagtgaagaaaaaaaaattctgcttttaatttttacttttgtctgtgcactatatataagtaaattcatttgtgctttcaatatagtgtgacaagagaaatgctagcaacacacattattgaaaagtatatgttagaacgtgtgttgataacatttctcatttctcagtttaacaatatgatgcgacatgagtgatagatatactcaaatgggtgttgctatatatctcccaataaaatatatagcgaatgattcacgaatgtaaattgccttgataacaaaaaaaaagagctccccacttgccaacatggtgctagcaaaaataaagggagtattgttttcaacgtattgtgaaacttcgtgaacccacttctcgctatataaagcattttcctactcaaattctcgaatgatagatatactcaaattattaatcatttggtcagaaaaattaattattgacccgtaggtatgtaaaaagtaaaaacatcagattacggtataagattagtatcggctgagttagcttaatttacacacaccaaaatcattttgggcatcttagagattaattaggattatctgacggtctaatttcctcatgatcacttgtttatggtttaaaatttacacttccacacatgattaataatttattgttgttcgtctccatgtcttctaatatatagattcaca

SEQ ID NO: 33274 - DNA, 864 bp, Medicago truncatula
  Intron number 1 from transcript Medtr2g052110.1 (locus Med tr2g052110) derived from phytozome v7.0 (chr-ID MtChr2; po s 13992628 to 13993491 reverse strand)
ttacgtttggttttattgataattatttataatatatgatccaaatattgtggctatcatccatcatcttcaaaagttattatcgaatcatgtcatgtgtgaaactccttttattttataaattaatatcaaatatcaataacaaactttatcaaattctattactgttttgtgtcaaaaaggttaataatcaaatcaaatcaaatcaaaaatgtacgtaccagaatagttttaatgctttgtattttaattctaagatattggttatgttatttgctatactttgacttacccaattcaattcaattttgtttgtggactctgccaaaaagtctcttcgtgattttttattttaatttattcaattcttattattttattttttcaatcttataaattgggtttttagtttggtgaatgatacatatcgatttcgtatcttagggttctctttctagcgtttttcttagcaaaacttcgatttggggcttttatttttcttctaatttctttgctaaagttttgatttttcttcgttttgaccaaatgggtcactgattctcggtttagtttcttctgggtcgttgatttttcttcattcgcatagtttttgctttttcctaattcctggggttcttaaagggaaaaaagctaaaactttgatttttggtttctttctgggttgatttgtaatattgggaagttgttttggtgttgattttggtaatagtagagttttttgaggcattgagggtgaaacagtagaggttttgcagttgtgagaagtggtgttactgtttttcatgcatatatgatgttccattttcagggtgtgtcaagacattgtagtcttcttgctgttct

SEQ ID NO: 33275 - DNA, 511 bp, Medicago truncatula
  Intron number 2 from transcript Medtr7g006080.1 (locus Med tr7g006080) derived from phytozome v7.0 (chr-ID MtChr7; po s 840923 to 841433)
gctgtggaggctgaaaccattgctatcattcattggtactgcttaaatgtcatttattagatatcttactcccaacccaactcgttcttggttggttcagcatgaaaatatggatggatattctatttgatacttctcttctcaattactccctctcatgttacatttttcttgaaaatatgcaataattcatttatgatttaaatatgtttttagtttttacaaatatgacaatatgaatattatgtaaaatatgtttttagtttctacaaagttttgttgggtagaatattatgacaatatctttcaagaaaaattaatcttttttaacaaaacatgaattaaatatgaatttctataataaaattttagaggattaaaacgaaaagttggtatatttatagggagaaaaaatatatttaaccctaaattagtatacttgaataaacaaaaaatatcaaaacttttatttatagggtcttgctaacaagtgccctcaccaccctcagga

SEQ ID NO: 33276 - DNA, 392 bp, Medicago truncatula
  Intron number 1 from transcript Medtr5g088590.1 (locus Med tr5g088590) derived from phytozome v7.0 (chr-ID MtChr5; po s 34351437 to 34351828 reverse strand)
taggtggtggctcaaagtgtctagggctctgatacgtgggatgggattttgttgcttaatttctttcttatgtatcaatttttgaaatattgttgttgtagccctatggatgatttggtttcttttgatgaggcgtttatgccaagaacaattattggagtttatttaagttgaaaaatattccgctgcaagtttaatgatggttttgtgaagaatgtttaattaaatagatttttatatattctatttaataaattttgatgatgtagtgtgacatgcccgtttgggttttactctgattgttgaaatattattatttaattgattttgggaaacggggtgttacaaccaccaaaggagctcctaagaaagataagcaaagccgatcgaca

SEQ ID NO: 33277 - DNA, 991 bp, Medicago truncatula; identical to SEQ ID NO: 29433
  Intron number 1 from transcript Medtr1g111280.1 (locus Med tr1g111280) derived from phytozome v7.0 (chr-ID MtChr1; po s 23618303 to 23619293 reverse strand)

SEQ ID NO: 33278 - DNA, 688 bp, Medicago truncatula
  Intron number 1 from transcript Medtr3g067310.1 (locus Med tr3g067310) derived from phytozome v7.0 (chr-ID MtChr3; po s 15407231 to 15407918)
ggtaaattttcttcttccacttttatttgtttctttctcatctattttgctatagaagaaactataacattagcaggtctacttgaagctctttagcaggtcgagtaagtgagtgacaaaatatgcttactcaaattgtgtatgacatgatcatactgtgtcctgactgattcctattggttgttcccgtcttttttcaggtaaattcagtctataggtgatgttataaatcatgtacgctttgtgcagatgtaaccaagtgacactagacgcactgatgatgttcttttgctgctaatctgttcgatgacttgaaagacataatgttaattggtaagttcaagtttgattgacatattttaagttgaagccttttcctatttaattatggctgataatataaatgttcttgcctcacaaattgtttattttatttatttatttggaaacaggtaattgaaaagctaagtggccatatatatgctgatggctttattcagaggctatatatataactccaatgttaatgcattatgttatgattcattatgaaaggccgatgtttagcattattatgtgttgttttttagttaatgtattttaggaaggtaccttaattaacaattgtgtatccaataccgtggccgagtgagtgtacttttgtcgaactcaaaataacttagttgtg

SEQ ID NO: 33279 - DNA, 594 bp, Medicago truncatula
  Intron number 2 from transcript Medtr3g067310.1 (locus Med tr3g067310) derived from phytozome v7.0 (chr-ID MtChr3; po s 15408088 to 15408681)
tagtttataaggagatatttgaaaatgtgtgattcaatattttgtatgcccttaaatactttttatgtttatttattttatttttgtgtaatgaataatatcaaaacttttttagcttctccatttttaatgtcccgggcgttagcacgggtaaaagttctagttatgtttcatttatgttgtacatattcaatgagaaagaaaatgatgactaagacctttcaattgttttcttgacatcattgactaagacctttcttgaattgcacagacactaaaaatgtttgacaaactaggatacatacaacaaaagaagaaatgaagaaaataatggcagcattcattcacgtgacttgatagccttaattaaatttcatgatgtaaggcctatggatatgggccatggcctcttctgctgcccatgtgcctttcaattgggggggtgagactataagcatgatgagctgggtgggttaacagataatttagttaatacaatgatgagcttttagttaatacaatgtgatcctactagttgagctaattgttattggcagagtcaacaatttttatacatggtacatggtgcagggc

SEQ ID NO: 33280 - DNA, 1007 bp, Medicago truncatula
  Intron number 1 from transcript Medtr3g157400.1 (locus Med tr3g157400) derived from phytozome v7.0 (chr-ID MtChr3; po s 41496166 to 41497172)
ataaaacttcacacagcaaatttttcattaacacggtaagatattattgattaatatgatacattgatgttatgcaggagaattgtttagtaatagtttgtaagacataggtccactcacaatgccgagattgttggacttaaggttaccttggtttgaatctggaatctctcctttgtgggtgtatgtgaattttcatgtatagtttgataattaagcaaattaaaagtagttgtctcaccttttctttttttttctagaaaaggaaaatagactttaatggtcagtatcaggtaattaagtaaatcctattactttaccttataggaacagtttgatgattttccctagtttaaaattgaatttcagtattccatttggattatactccatttcacatcttcaatagagatctaatacctgatgatagtttctaatttttctagcattgatgttgaatagtacctaatagaaacatgttgatttcttatataagctaatatctagattgcaatgttgtaaaattaagaacaactaaaaacagtttctgattttttctagcattgatgttgagcgtcatgtcaataatatgtaagtagagtttcttctatactaggacatgttcataagacaaatagtggtaaactgtgggaccctttaaggtacattagaacgcaaatattatttttgtattggagtaaacataggtgaatgttcttaaatcacatgtgaaaacttggggcccagtaaaagtaacttaataacatcaaacattgttctctaatctacttgctccggagatactctaatgagtccacactcagctattgtcatcttcattttacattaacttttactgttgatggattttatacatacaagttacttgaacagagttactggtttgtccgtttgggcatatttactctgtttggcttgctgccaagtttcatttggtgtttgttgagccttttccgaaccttactagttaataattttgttgcaga

SEQ ID NO: 33281 - DNA, 412 bp, Medicago truncatula
  Intron number 3 from transcript Medtr5g081350.2 (locus Med tr5g081350) derived from phytozome v7.0 (chr-ID MtChr5; po s 30543042 to 30543453 reverse strand)
aaccttggaatcctagtaagcccttacctgaaggctttgtaccttggcttgagcatgatcatgataagtgtattgcagaacaattgggaatcgaccttgatgctccgataccagcggagtgtaagctgacctcacttgttcttcagtatttgatgtatatgttatataatattaattaatgtatgctgtgaatatcaacctctgatatcttcttctgaagttcactgtgtgtatattatattggcattcaaataccatctttttgggaagtaaatgatttctagtattcaaagttgatacgtatctgaatattcataatcactcttctctcttgctgctttatattttgatatatatgtttctcacttttctttactacactgtgttgctaaaactcctattatctttgcag

SEQ ID NO: 33282 - DNA, 685 bp, Medicago truncatula
  Intron number 1 from transcript Medtr3g106720.1 (locus Med tr3g106720) derived from phytozome v7.0 (chr-ID MtChr3; po s 26953393 to 26954077)
ttgacccacatcacaaatcctcaaatcctttatctgtaagtcttaaaaatgcattttttttcttcattattctggttctttactatttttctcctttgtaatccaacatgtttccatgaaatgttagatcctaatttagtttcttttatctgtttattttctcatgtaaacttgatcataagaatttttggtaggttttgttgatgaagaatccacctcaatgcttatatttaattcttgtttgcttaatctttaatctggaaactttgacatcaaattatatgctacttgtttgatttgtctccgtaaaacccctttgttagaatttctcagttcttgtttttttccctattcttttagattttaaggatttggttctctagtttaggctattgggggtgaatttttttaattctgattattagttattaattaaattttcccttttattttcaatgagatttttaaagttcctatctctttatccaaatttagggtatattgcaaattgttattttactctctcctatgtagagattttgaccactagtagttcaatcaattcaatctttttgattgattagtctacacaatactttatttattttgttacaattttattaaagcatacccttttgatgtgtttgcaggtaaactattaacaagatcaaaatagtttccattg

SEQ ID NO: 33283 - DNA, 917 bp, Medicago truncatula
  Intron number 1 from transcript Medtr4g135230.1 (locus Med tr4g135230) derived from phytozome v7.0 (chr-ID MtChr4; po s 32784476 to 32785392)
ttttcacaagagttcctcggcaccttactaccgaggttttcctcggtaccttactaccaaagtttttcacggcagttaactgccgaggattttcatgacagggttctacgtaactgacgtagaaacccataacataaccaaaaaatcaatcgaataaaatgcacaatacctgttttttacgttaaaagtgtgttgatacctcctatgcttgatgcttgaatgattttggatcaagaattgataaaaaaatattggatttttggaattgaatggaggtgaaaatgaagttgatgatgaaaatagtatgtagggggagcaggtggctgtttcatctgatgaaacatttcctctacagttaactaccgaggatttcttcgacaattaactgcagtcggatttcaaattcctcggcagttaactgccgagggggcaaaattgtattttactagtgtgacacaaccttatcaaatatgggaacaacaattctcttacaaaaggagcacatttcatacccaaaaaaatttgacatgtcaaaatgtttaaaatataatataattgacgaaagagattaaagcgataatttgattaagttgaaatgttagttttgtcaaaaaattatagaaaaatatcataattccgtcaaactcaccgttaatttaagtaggatagaaaatcataattccgtcaaactcaccgtaaatgataaaaattgtaaaatctatgcacaaaaaagaaacgttaacctataaagattaaagaatctatataaacaggtattataagttataacacaagaaaaagaatacaaagctgaaagcgaaaggctgtagttttggaatgtgtgtttattgattgatcattcaacattttccacgtgcatctctgtttaacttgcatataaatatgagtaggggtat

SEQ ID NO: 33284 - DNA, 689 bp, Medicago truncatula
  Intron number 1 from transcript Medtr5g065690.1 (locus Med tr5g065690) derived from phytozome v7.0 (chr-ID MtChr5; po s 23001878 to 23002566)
tgcagtgtttcggcgagagaggggaaggaaaaagggtaggaaaatagaatcacgtgcaattactttttccatgagcttttgaatctgcaccgtacgattatatccaatggttaatatcaattcctctcatcctctcattataagagtgctatgaaacaccttttgaattcaagaaattgtgatgcaagaaaataggattgattaagcttgtgtttatattaaaggtgcgatttgacaaaactatgataattatgattctcaaattcgcgagtatatttgtaggctcgtacgagttgacgagtttaaaaagcaaaaacgagtggaattgaagataaaataatttttgtggtagactcagataaacttatgtagattcgttcagacaccacacaaagagtcgtaattctatgacaaatttacgagtctatgagttctattgaaaaaaaaaattaaaggaaaaaaaaaaacctcaaactaaataaatttgaaaaaccgtttccactttcaatttagaaacaaaactctcaccctcaccaaagatagaagaattaaggtcacattcgcattcaacaatgaaattttcttcctccatcatcgatcaaattctcttgttgtgtatcaaaattatgtggaagctaatgttgttaataatgatgtgcaaagtggtggcggaggtaatgttgaataag

SEQ ID NO: 33285 - DNA, 677 bp, Medicago truncatula
  Intron number 1 from transcript Medtr4g135340.1 (locus Med tr4g135340) derived from phytozome v7.0 (chr-ID MtChr4; po s 32860765 to 32861441)
gtgccggcgtcctttacattgtttgtatgcgggctaattgtttttattttgcttcttcttttgaatgtttgttggtttgttaaaaaaaaaaaatcaatcaatagcattggtattgtggtttggaatactttagtcatttaacataattaattgtatttctctctttttactctctattcaaccaaatgaaaggaaataaagagatcacacttctttcaattttttgacatatttatttaattttttttttaacattcattgtgtcctacacgactcgagatattagtatccgcggttgtgcgtagatattcaattcacacttaaaaacaaaaataaaatttcacaataaaatttcacggcgggatatatttctatgttttcctcatctatcccttctctcaaatatctccctagaatgccaatgtgactcaagtgatatactattaatataatctcttaagcatgtgataaagaattcaatctcaaatcgatgtatgtaacataaaagatctattgagatgcaacatcttggttttctttctttgattgctttatctttttacatggttaatttgattgatttttgtgaattttttctttgatttatttatgtgctttcttaaatgggtatttgcatacctgttgtttatatgagaagttggcaacaataagacttt

SEQ ID NO: 33286 - DNA, 638 bp, Medicago truncatula
  Intron number 1 from transcript Medtr1g043210.1 (locus Med tr1g043210) derived from phytozome v7.0 (chr-ID MtChr1; po s 10146510 to 10147147)
tttcagcacaaccttcagattcatcataattcaaggtttatacaacacccttttgtttattttaatcaaatttatgtttttttagttttgttttactgtttttgattttcttttgacttggatttggttggttttttgaatgtggtttgattgctattattgggttaggtgaaaaacatgtggggtaagaaagaaacatgttttttttttttttttttttttttttgctttttatgtgattatatacattttttgttgttgaaaagattgtgtttttattgtttttgttgatgcccagaagagctagtttgatagacactgtgaattattgtaagaaaaaacatgttttttctgtcaaaaaagaataaaaaccatgttttttttcttctttttatttgtttatacatttttgttgtttaaaaggttgtatttttattagtttcattgatgttcagtagagttattttgatgtacactgtgaattattgagtttctatgtggtggttttgttggtttttagtgttttcattgcattgttttagtttgtgtgatttgagagaaatcgagtagtttgtatgatgcttaaattttgctgattagttgtcaattgtttttcgtgttggacagcagtaacaatc

SEQ ID NO: 33287 - DNA, 447 bp, Medicago truncatula
  Intron number 3 from transcript Medtr1g116790.1 (locus Med tr1g116790) derived from phytozome v7.0 (chr-ID MtChr1; po s 24762582 to 24763028)
gaaagagtggaagattttgaaaaagcatttgccaggtgagtttggtattctttatactaaatagcttgtaatattttcgatgtcatatcacatatcacgattagtattcaatttacttttttgaggttatggacttcaccatatgggttgtatccaatcattgttaatttttttaaacaaacttcgttcattactattgacatggtaggtctagttcccgtcttatcgaaacggttttggcatgttttctttataatacttcctttttgaaagatttccaaatttttcctcgttagtgtccactcacatatttgttatgaaattgggatcaagaacttttaattaccatagtgtgaaacatgattatggtatatttctcaatcttatcttctttttttttttttgactttttttaatgctcatcagatacaatatttgtgagagtct

SEQ ID NO: 33288 - DNA, 842 bp, Medicago truncatula
  Intron number 1 from transcript CU571152_3.1 (locus CU5711 52_3) derived from phytozome v7.0 (chr-ID CU571152; pos 47 48 to 5589 reverse strand)
tgggaattacagtttcaaacaacatcaccgtcgtggtgagggtgtagattgaaccggcgacggtgttgtgttgtgttctgttgtgggggtaaaggttgcgccggaggaagtggtgagaagggggttcgcccgagggaggagcttacatggggtgggtcgcatctctgttaaaatgagagatgtagaggtttgcaaaaagagaaatgttatttgtacaaccatttttgtacaacttttgtacaactttctctctcatactcacattatcttcttattctctctccattgtttttaaccaataagaagagagaacaacaaggttgtaccaaaaattgtacctaaatatagttgttcaaatatcattactcttgcaaaaattaggggaagaaataagacaaacataggacagagaagagcaatttgttttttttcttttaaattttactatttaactttactgatgtgtaaagacctgattggatgtgtctaaaattgaagtgttgggtatgtgataaggaagactttttctctatacactcaaaaaactgaatttacgaacagttgtatatcatatttaatttattctaatttttgtaaaagaattcatataaaaaattcatatttaaaactttttttttttatttgtaaaagaacatttatttaaaattcatagtatccatcacgtgaataaagctatttgccaattgtttttgggctatctctcggtggtcaaaaggttttgatttggtgcaaattcatcgtttaaaacttttgttacttccagctttcgttcctttgatttggcaggaagagttttccttccaatcggccttttcagcagc

SEQ ID NO: 33289 - DNA, 479 bp, Medicago truncatula
  Intron number 1 from transcript Medtr7g046990.1 (locus Med tr7g046990) derived from phytozome v7.0 (chr-ID MtChr7; po s 11729277 to 11729755 reverse strand)
gagcagggaatcaaagtgtgtaaatggatttgaggatgaccaggttgcagggaacctttgtgcagtgaacattgtgcaaggcatttctattttttgtttgtttgtgagttgttttttttttcttctagaattgaatgcttcagtgttttacacaaatttaaaaatccttttagcattatggtggttgttttgcctggtaaaaccggtgctcattgtttttccatgccatgtgactcaaacccatcttaatattgccaagtgttggtaattcatgagtaacttgtggaacatttcctgtcatatggaatctttttactacatgcgttatcttgcaaggtaacataagtttgttggaaaagttttgatttattttgcaaggtaacattaacttatcagcatattttaaacattatttttcatggagaatttcttatctgctgccagatcatcaaagaattttctgcacttctttcacagtc

SEQ ID NO: 33290 - DNA, 711 bp, Medicago truncatula
  Intron number 2 from transcript Medtr5g080220.1 (locus Med tr5g080220) derived from phytozome v7.0 (chr-ID MtChr5; po s 29994682 to 29995392)
aggtaacttctggccagtaaattaattcaaacaagtaatatatgagagtaaagtttattgatttctgacataacttggttataactaaaattatcaagatgttgcttctaaatttttttcaattttattaaaagaaataaactacttatctttaaaggcctttaacaaaattccttttttttttggtttgctttagttgtcaattgttcacttgcgtttaaatcaattaatgactaaagatctgaatatattgaaaacaaatcatttcgggagctgattctaaagtgttgcattaaagaaaatcaacaccaattgatgttataatacaaaatgagtttacttatatcatttattgaatggcaacaccatttacgacccatttttgtagaataaaaatcagaaaataaacgcatattgacaaataccagaatttacgactacttgctcttattcaaatgctctatttctaacattggtttatcttgaatgatcttgttggtgttgacatccagcaattgtagaagacccaatcaaaatattcattttgattacctttttaagactgatataatgttacttttagtttttggtattcattttgttatgaatgattctgataacgttaacaccatgttgacctttctctgtgtacatgattttaatatcatccaaatcctgtacacccaggtagcaaaattggcatttgaagat

SEQ ID NO: 33291 - DNA, 827 bp, Medicago truncatula
  Intron number 1 from transcript Medtr5g092020.1 (locus Med tr5g092020) derived from phytozome v7.0 (chr-ID MtChr5; po s 36067730 to 36068556)
ctcatcttgatcacattgtaagtttaacttcccaacttttcgtaactaccaataatgatttaaattaatagaggctatagcagtgctattggattgtagcgtagaggaacttgacaaaactattttttttcttaacttttagattaaataagagtgaaaaacttaagacattgaagctaattttgacttagatgaataaaggaaggaaatgcagcttatatgtagtacattttattgaaatatgtgtagatgttagaggttttgaagaaattaaggtgtagaagctaacttcaacttatgcaagaaattttgtagtgaaaaaatatcatttattggataattcttttaacacttagtttcagaagtgtttctagagaagtttatcccaactgtctctatgttgattattgatgaaaattcgcgtggaaaggcctatagtagatccacaatgtatgaatcctgctacaaagagaactctacagatgcagatttctctatttttattgattgaaaagtcaaattcataatagattcttatcgatcttggtaaagaaagtaactatttctactagaacaaaggcctatttatagttctaaaaagatttgacattgataggttatcatatcatgtacaactcaggtaatctagtgctggcctttcttttcggttttcaaattcttaatccctgtgtattgttgtaaatgttgtttgacatcctagtactttttttcgtgagttttagcattctatatttctttgtatgactgatgagtgtaaatttaatataagcttgtgatgattttgaatgatttagggagggctgcca

SEQ ID NO: 33292 - DNA, 499 bp, Medicago truncatula
  Intron number 4 from transcript Medtr2g113800.1 (locus Med tr2g113800) derived from phytozome v7.0 (chr-ID MtChr2; po s 26750864 to 26751362)
tctcagcttcacaggtatgttagaagatttttgtgttatcctctcattaatcaaggacacattaataaaaacatgaaaattcaactattataaaagtggattgcttaaaaattcaactataggaacaaaatatggatgagttgtttaagcatgatgtggcataatgcaaatgtatttcttaaaagtttgctattggtgatgctcttagtaaatttaaaattatcgattttggaaatgctcagtagtaataatctatagtatgtgatgacgattgtttctcttctgctgtatgatagtagtaatgtatatgcatgtggttatgttttctgtctgtttgctacatgcatcatgcatgtctatctcaaaagtcacaaccagggaatactttttcacattgttgtcctaaattctttttctgaaattgcagagattctgccctttaatggaatttgattattatgcaggttttgcagggccattcaccatttagacaattggt

SEQ ID NO: 33293 - DNA, 1011 bp, Medicago truncatula
  Intron number 2 from transcript Medtr7g037610.1 (locus Med tr7g037610) derived from phytozome v7.0 (chr-ID MtChr7; po s 8992137 to 8993147)
aaaaagttcatgagaaagcttacacgtgaggcatattaaattttttgtttgactgaaagaattacctattttagtttttgaatggggtgtttttgtcaatttttgaactttaggtaagttatacacatatattacctatatatagggtttaagttattttgttgtctatattatgtttgcaccctttaaaaaaagaaattgttcaaaataaatcgcataaaatttttcctatcactctaaactatgttaataaaatctatgtatatgaatcttctaaaaaaaaatatgcgtgaaaggaattttttaagagatatcagtactatatatacttgaagatcgatcttgggtaatttttttgttgtattatatgtcaacaatataaatggttaaaatagcagtgttgtttgctttaatctatatataaaattgaaaataaatagtggtaaaataataactaagacgtatatattgaatacatttttttcttggtctagtatatattgaatacattttatcaagtactattgaatatctaactattagaatagcttctccttaaaaaaaactattagtgtagcttctggttaacaatgccaagttttattagatgcaagtttttaggagtgcaagttttattagatgcaatttgtagcaacatacctaatagattcattcatatatgggccaatttaatgatggggagagggaaattcgaattcaaatatagaaggtagaaagtcaccaaggctagtgggtgaatgtcattaattacacttgttaaagcttcttaaggaagctaggtttagttgttaaggagggaattaaagagtgtaattagggttaactaatattactctgcatgatcatattagcaaaatgcttgatagaaaagactgaacccaataagataaatattttgaaatagtcttggtatatgtagcatagtgattgttttaattatgcttgaaaattgcaggacttaacacttggaataggcaaccaagatcctat

SEQ ID NO: 33294 - DNA, 665 bp, Medicago truncatula
  Intron number 1 from transcript Medtr4g122230.1 (locus Med tr4g122230) derived from phytozome v7.0 (chr-ID MtChr4; po s 28876717 to 28877381)
ctcgtcagtgtgggattgattttaaacttaaccaggtatttattaaaaaaaaaatcagtatcattgtaattatttaaaaactttgcttgtgatcagttgatcaaaactaacctatattattattcgtgtaagattttggatttcctatgtgttttgctatatatatgatctgtgatttgcttgtgccagtgatagcaaaatcaaacctcttcagaatttatttcgttatctcgtatcaacactagcatgcaatggcagaaatttagattactttggttgaaagagggagatgctaacactaagttcttccatagcattatgtcctctaagcggtgagcaaactccattttttctttatctgctaatggcactattgttgagggcgttgaaggaatccgaggactggttttcaatcacttctcatctcattttaaatttgtggctgttgaaagacctagcattgagaatctcaattttaatatgcttagtttaggccaatgtggtgagctaaccaaacttttttcagttgacgaagttaaacaagctgtttgggattgtgacagttttaaaagtcctggaccagatggtttatatggggtttgttaaggatttttggccggagctccatgatgatattatgcacttctaatctgattttcatagga

SEQ ID NO: 33295 - DNA, 1012 bp, Medicago truncatula
  Intron number 2 from transcript Medtr6g077030.1 (locus Med tr6g077030) derived from phytozome v7.0 (chr-ID MtChr6; po s 15057156 to 15058167)
aaatctggtgagaatgtttctgattatttctccagagtcatgaaggtgtatggtgaacaattgttagatactacaattgtggagaaaatacttcgatacttaacaaagaaataatcagaaacaagaagtacttgtaaattcaggaggccatttcttgggtaatgtattttgaatgtctatgcgcttgaaaatatatatattgaagtggaatgaaaaagcaaatataaggaaattgatgttgctaacttttcttgttgaatgattgttgattgattgcatgattatgttaaatgatgatacaacaattttaattaatctttagctttgatatcattaaaagtttgattggttgcactatctaattatgtaaattaatatttggattttagatgtttcaagggtaaagatgctaaaatttgtaacatgcttactttcatgtgcatatctgattaaagtgtggtgggtgggttctatgaaatgatgacagggtaaaatcgagatactttgggttaatagatctgccaaaatagaaacctgaacaatgtgtatcagatctcataaaaccttttggattcaagcttaacgagttatttattagtaaaaagaaaaagaaaaagcttaaccacgacttcattcttatgttgacttcaagtcaacctttccttttccaacacaacaaaaataatggttctgcaatgagtttcacaaaagaaaaagttgaacaataattgatcatttaagcaagaagtgacggtggaaggaaagaggaggaagaggtggtaaaataattgtgtgactggtccacacggatgtagtaaaatgtgaaggaagtttcgctactaatgttaaaaatggacactcataaataactcttacttcaaactcattttatcacggtttatattgtacagatcctgatagtaacacaacactccaaaccaaactactcatggcaatgcaattaccttcttctacttcctctgcctctcttctgtctctaaagatttcacct

SEQ ID NO: 33296 - DNA, 641 bp, Medicago truncatula
  Intron number 1 from transcript Medtr5g014110.1 (locus Med tr5g014110) derived from phytozome v7.0 (chr-ID MtChr5; po s 4456572 to 4457212)
ccgcccacaaccgttgctctcctctcctctttcaggtcagttttgaaattattatactgaaattgaatcagatattgaaattgaaattgaattaagacagtgatagcagagcagcactgaaattgaaattgattttaacttttagtgttgcctcactgtcactgatattggaagcaaaccactgtttcataagaatcatcaatgcattcaaaaagtgataacacatcattatatgataatgtgaaaccatatcaaccacagtaaaatcagaagaaaaaaacaatttcaattgagttaatcaatcatcgaagcttctgttttattgccacctaaaagggggaaaaaaaagtaaatgtaaaccattgtgatttgtttcgtttgacttgatttattgttgattgaaaactgaaggatttgacatatcaagttggattatgttgggaaattgtgttacatttttctgttgcaaattctttttcaaacaaagcgtttttatggatttttttttttttgaggaataggataatcatggaaactgaaaatgtggctactgcgagttggtgcagctcctctgatgtgtgattaaccttttattctattctgcagtactctatatttgtctgtggtctaattttcgagag

SEQ ID NO: 33297 - DNA, 466 bp, Medicago truncatula
  Intron number 2 from transcript Medtr5g045390.1 (locus Med tr5g045390) derived from phytozome v7.0 (chr-ID MtChr5; po s 18980812 to 18981277)
atcggcacagtattgcaaagaaaaccaacgttgatgtaagtttctcaatttattactgtaaaatacagacactcctcggactagaggtgttccggtgtcggacaccaacacagacacgacacctatgattacattgaattatgttattttctcaaattattatccatgtcggtgtatcggtgtctgatgtccatgtccgtgtccgtgcttcatagtataaaattaacatgcaaaaatatatcttatcttaagtgttagacaaatgtagagtttaaagtacatgtgttgtcattgtcattttatgacaattttatatttttccttcagaaatacagaattttaattttaggacccaattttatttttttggattttaactaccagaatggtaatctttgccaaaaattcgtagttagaagaaaaaatttccatagactaatttgatttctctaacatatgacagaat

SEQ ID NO: 33298 - DNA, 995 bp, Medicago truncatula
  Intron number 1 from transcript Medtr4g114080.1 (locus Med tr4g114080) derived from phytozome v7.0 (chr-ID MtChr4; po s 26012871 to 26013865)
tcgatcgtgaaacactcgtggtcggtcttgatttcgacaatcaatgattttgtgttccaagacggaatcaatcgatcaccgattcatgatcattcataatgatccatcagaaggatagctttaatattcagttgcggttatttgttttatcattcgtgatttccctcaaaaaagaaataaaaaatgataacatatattaaaaagttgaatttgacgatatttctagaagtcaaattcattcatattcgactttttgttttttttttagtacattcatattcgactttgtactaagaaaaatatttttttattaagggaaatgttaacttgtgtgttaagggtgcaagttaaagttccaaagatagaaattatgcattgtaaattgtgtcaattagtcttgtggctaaaattcacatttttcaagattaataagtggggtgtccggagttcgaaccacgactccggcatataaaaatgtacgtccctgtcaactgagctatgatcacgggaacgtaaattgtatcaatttatttatcacaagattgaaatttaatgtttctcaataaatatttactctttataaaaaccttaacatgtgacctaatgacacaagttagcatgatacttttattaaatagactaacaatgtcctttttcaatatagacaattaaattatatgcatgaatttcttacatactccacttcatttcatacagaaataattgaagcatgttcaaaattatagaagaatcctgaccatttgatcagcatagaacatgcaccataattcactactggtccatggccagtgtgaatattttaaggtaaaatatgttctaccgtggtgtgtactatgcattgggtaaaagtgtgacactgcctaatgcctattcatacattaataattgggtgggaaataggacttgtttgattgattattcctagaagtccccaactgtttttgacttaaatgcaccattttttctctaacagg

SEQ ID NO: 33299 - DNA, 960 bp, Medicago truncatula
  Intron number 1 from transcript Medtr3g094130.1 (locus Med tr3g094130) derived from phytozome v7.0 (chr-ID MtChr3; po s 22496083 to 22497042)
aactgaagatacacgcaagtgtgaaagataaccatgcatgctaaaataaccctgaattaaggttgccattttgttttgttttaagaaccttgatatactatagattgaacccctattttaagtgtcttgtggtggcaattttcattgcttccagaccagtttaagtatttaatgcaaaattatttgcaaataaatgttgagataaaatttagaaaattgtttttctcacattaagtttttcttaaaaacacatagaaatgttgtttttgcctccattgatagttaactatggttcgattttttaccgttcaacttcaacatatacaacttaaaaaatatcttaattgaagcattataaatacaagacttgttttttttttaatcgagaatacaagacttgttactacgataaattttaattggacgaaagaaggtaacagtactgcctggatcatttacagcatctccaatgggaagttcttagtccttacttaacggtgatcactccttgttaaggatcctccattaaagaaataaaaaatgagtcctcattaatgaatgggcaactatacaaggaccatatatcttgagctattaacgggtctcacgtttaaaagaagtaataaaaatgagttttcattaatgaatgagcaactatatctcctatctccacttaacgatcattaagaggaaaaaaaaaaagagtaatcgtttaaaagaagtaataaaatatgtattatttggttccatttacaaaagaaaatatattttaataattaataattgttttaaatattattttatctatttgtcatcagtttaaataaaatgtaattcatgcaaattatttattaacgaagaaatgtatctttttttttaagaatgtaaagttatctatttgtaatctgttctgaagtcagtttaggattcggttggtgttccgaatcgaggtggctctaa

SEQ ID NO: 33300 - DNA, 1052 bp, Medicago truncatula
  Intron number 1 from transcript Medtr4g079520.1 (locus Med tr4g079520) derived from phytozome v7.0 (chr-ID MtChr4; po s 16008617 to 16009668 reverse strand)
gtttgtttatcctgttgacaagagaccacaatcttgttgtgttgggccataaccattttcgtcgtcttctccatattggcaacaatttaactatccatgtaagcatataaaccccacttcatttctgcatagacaaaagttcaactttacaagtaagcataaccccactccattaaattcaattctccacaaatgaaacacatactcaatattattgcatgatcatagaattttggcttttgataataaataaaaaataaaaataatagaacaagaattttggcttcctagcattatgcattttggcttttagtgtagtttcagttatgaatttcaatttatatattttttgaattaaatcactctctttatcttgtctcactttcaattcactcaatctaaagtaaattttaatacatgaaattagtttaaaattaaaaataataatttagttcaaataaatatcaattttgacattttggtatacttatggtttttctcacatgaatggcaccatccccgttacacaaatttttttatcaatagaaaaaaaaaagacaaacaaactaatcaacttattgcctaaaatctcggagtactcggcaaaaagagtgagaactatttgcggtggagaaattcatataatcaacaggtcaatatgtataaccgtaaacttaactaaccaatttgcacagttattgcattccctcaaaatataggcaaagctccgttgcacaaattgataatagagttcggtcaaatttacatatacaaacgtttttattgaaaagataaatttatgccgagcattcccaaactctcactattcactatcaaactggctccaactctaattgacttagcttgttattattgtagctaatacaagttcaggaagttagttactttataatgtttagtttagggagttagttaactatgcaatacaatctcatctttcttggtagttggtcgtcttccttcttaactaaaaaggttgtttttttacttgactaaaaaaataatttttgagtaaatcatcaaattggttc

SEQ ID NO: 33301 - DNA, 898 bp, Medicago truncatula
  Intron number 2 from transcript Medtr3g110570.1 (locus Med tr3g110570) derived from phytozome v7.0 (chr-ID MtChr3; po s 27876209 to 27877106)
ttggtgtgattcaaagaggaagatttaacagtaaggtggttcacttctctttgtctaggattttaatatagttacattatggacacactgatatccaaatatcacaacatccaagtgttgtgccactaaattttgtcagctatgccatttagtttttggttgaagacagtttcattgtgttttttaagaagcttagtattgttgtataggaattcggtaggaacctgattattcaactctctattgacgttcttcaattgggaaatgtatttatgttgtagtatatgggatgatgtcgttattacccacaacggtcatcagggaatatgtcatttgaagaaacatctgatcaaccattttcttcagataatatttcatttcccttcataaaggatagatacatcctttcagatacaactatcaaatgtacaaaatgacaccctttatccttattttggctatttttatttcttctaactaatcccaacttctttagttacaatttatgatgcttatagaggaaaacattcatgttatgcttatacattattgttgaaatatatattgtttcctttattgttattctattttaatggttgtttatttttcattatgtcactccttaaattaaggagttgattagctgtattctctcctataaaaggagctccattctcattgaaatgatatactctcaagatagagtaatttctacaattatatcttcattgctacagaatattgagtcctgcaaaaggatgtttcttatttgcaagtgatgccttcatcgctctttttcttcttttttttttatctgatcttgttttataatattatgactgtcttctccttatttttctcagttattttataaatcttcaatttcgagtctggagga

SEQ ID NO: 33302 - DNA, 402 bp, Medicago truncatula
  Intron number 2 from transcript CU179634_17.1 (locus CU179 634_17) derived from phytozome v7.0 (chr-ID CU179634; pos 69413 to 69814 reverse strand)
ctcagataattactgagcatcctgcaattaggtattgcatcagacgattgctctataattgtgcagttcactcacaaactagatcagcattgtgatcactgatcaggagatgttttctaacaaaattctatgttgaggtttatggatctacctctgttttcttgataacattccttttgttttgtctgtgattgaaatccttttctatttatatcctcaaaatcttaacacaggggaaataatagaaaatattggtttatgcattagaagctaattcacatataggttacaataaaatgagtgttatccctaatctctttattaggactgaaaactgtgctcactgattatcctcttcttttcttagggttggggtgctattttgtggtagacaatctcctg

SEQ ID NO: 33303 - DNA, 606 bp, Medicago truncatula
  Intron number 1 from transcript Medtr3g114450.1 (locus Med tr3g114450) derived from phytozome v7.0 (chr-ID MtChr3; po s 28971429 to 28972034)
gacattggttctgagagttgtgcatccgtgcttgatttgttcatgactttgaaaataagaaactttcatttttcacggagtctgttacgatggatcgaatgttttttctttcataccattttggtttttgtattttttttttttttattaaaatatgatgtatgaatctttgctttgtagagagaccaaattagtgcttttatacgaataaaattaatctacaagttttaggatcaactttaagagggaattgtgtatacaactttctcttttgatgtattcataaggtataatagagtttatgtattttttatctttatgaattcaccgcaaagaccggtggaaatatgcaaggatgaggacgagagtcaaaatcttcttgtggtggaaaatgaggagagaaatattttgatagattaggacggggagcaaggataactcccagtctagccccgtcaaacaacccaactttaatttattattcgaaacaaaatattttatagtactgttgataattgaatacatttataattttttgatatatactattttagcagcgcttctcttctcccgatttttaggagattattaagaaaactgaatcgg

SEQ ID NO: 33304 - DNA, 773 bp, Medicago truncatula; identical to SEQ ID NO: 31160
  Intron number 2 from transcript Medtr4g145080.1 (locus Med tr4g145080) derived from phytozome v7.0 (chr-ID MtChr4; po s 36708131 to 36708903 reverse strand)

SEQ ID NO: 33305 - DNA, 554 bp, Medicago truncatula; identical to SEQ ID NO: 31662
  Intron number 1 from transcript Medtr7g049810.1 (locus Med tr7g049810) derived from phytozome v7.0 (chr-ID MtChr7; po s 12260138 to 12260691)

SEQ ID NO: 33306 - DNA, 785 bp, Medicago truncatula
  Intron number 1 from transcript Medtr5g079920.1 (locus Med tr5g079920) derived from phytozome v7.0 (chr-ID MtChr5; po s 29855725 to 29856509)
tcacctcttccaggtaaatcattttcttcttcttttttttttttaataattttattttttagaatcagaatgaattaatgtttttaagttttttttctttcactatattcatattataattactgtgtggtgtgtaaaaaaaagaaagaagctagtatgtgttaacaaatgtttctgacaaaccattttttataatatacgtcattttggtcactattataaaattataatactgagttagcagaaacaatgcatttttatatgcagaaaatgtaaggattattcttcaatgcattgtttttagtcccagttatttattaaaatgtaatgattattcttcaaagtcacacaaaatttagggatcaaaaacatatttaactctaaaataattgggacccactaactatcacatcagcattccgttggagaattaacagctgagcctaattttgataacggagacaaaatgtgaggattttaaaaacattaatgaaatgtagggactattcttcgaaggagcgtaaaatgtaaggactaaaaccatatttaaccctaatatttactagatccaatagcttttcaaataatctaattttttttttcttcttataataataaccgaattgtgtaacattcttataaacacatttattttttgaaggatataaacacatttatttaaaagtataattcaaagtataaaaaagtcggtccaaaattcctataactttatatgttgttaactgatgataataataataataatattcattgaatttgaagga

SEQ ID NO: 33307 - DNA, 946 bp, Medicago truncatula
  Intron number 2 from transcript Medtr5g096030.1 (locus Med tr5g096030) derived from phytozome v7.0 (chr-ID MtChr5; po s 38112818 to 38113763 reverse strand)
agagaagatcaattcttgttgactggtggatagacgtgcatcaacattcaatctcatgccagaaactttctatctgactcttaatattgttgatcgattcttgacttcttgttcgcaaaagttgttcctagagaggaatttcagcttgttggcataaataatgctcaactgaattctttagatatcacatatttttatttggttcttaattcctctgagtttgcattatcttaaaaatcatcattttatattcaagcatctttctatctatctatatttttcagattatgtctcttttttgtttaattttcttcttttttagcaaggagtgaaatatgttggttgttcttcgaccaattattttttggttttgactaaattttattgatttgttctattttttttccagttatgtagattcatacaaaaatagaagcacaagactacaaggattaattgaagttcaacactataaatagtattctttttaggggcaccacaaatattttagagttgtatattttataaaactaatttaggttgtaagtcacctacatggaatacctaacacataaccaacttcaactaattaacataactgtcaagcagttacttgctacgcaggtaatctatttgacagttgtatactgtaatattaggtaacaactgaaaattttctatccaatgtgatttgaataatgtgaaagtagatctctatattagaccactataggctagcaatggacttccacttgagtgcaactttgtctttcgtgtctgtgatagagctaattacaattgacatataggcgataatgagttaggtttctcttgtattctgttacacagttagcacatttttattacagttatatatttattctgttgtatacttgtaacacactcatatttatttattcaattcatgagatagttgaatatcctt

SEQ ID NO: 33308 - DNA, 943 bp, Medicago truncatula
  Intron number 1 from transcript Medtr3g122500.1 (locus Med tr3g122500) derived from phytozome v7.0 (chr-ID MtChr3; po s 30479218 to 30480160 reverse strand)
gccctgatatcgctgttcttgctgaaaagggtcaggtaaaaatacaactatgttttttcactacaaaacctttcattttatacttttatgtttcattgattatggattttatttggattcaaggttatgaacaaaatcaaaactaggtttcagttatttgggattggactgtcttgttcttgataactttcaaatatgtgtttaatcactgtaaagtttacatttttttcaagttttttttttttcgttttttaatggaaatggttttagttatttgtatacattcttagccctgcaaatttaaaaaatgcatgtttttagcttttgtttttgctctagcttaaaacaattttcaagataataatgcaatgtgactgcttccattggtattaatatctatgttggattcaaatgggttttcaaaaacacacaaatatgttggcaccgataataatttgaaaaatgaaagaaatgaatgtaactttttagtggctgtttgtttctggggtggaaacccgtgtaaaaaaatataagctaggaaatgcagcttattaaaatcacagtgaaatgtgtattggaagagattttggtcttggacaagctaaatcaatcattagcttaagtgtatgtttacttctgctttgacaagaattaattatgagtgaattgattctggttaaaagtgggttgcaggtaaagtgatttgtgtttagatgcatactgtaaaagtgagttggattataaatttgtgtgttttaatcaattctagactcagaatctaaaaatagtagtttcaagtaaaatagtgatttgtgttaagaattgattacacttttttatcataattgtaattgctacggactatagtgttaatcttcattttgagttatgctgattgaatattttttgaacaatatataggtggcttgtagagattatccac

SEQ ID NO: 33309 - DNA, 762 bp, Medicago truncatula
  Intron number 1 from transcript Medtr1g031350.1 (locus Med tr1g031350) derived from phytozome v7.0 (chr-ID MtChr1; po s 7586436 to 7587197 reverse strand)
tatagttagtaaaaatatctatacttgattcactcgagtttttcgttttgtctatgatgatcaaatcttattcatcagtcaaacgtttcagtgtcttccttcactgtttagatttaaatcactcgttaggcataggcatggcatcatagagaggatcactgtcttggtgtaggttagtccacgaaattctgattgcaaatttttaattgtttaacattgagatttggtacctgctgccttgaggtttaattggtgacataagagacttttaattttgcattcttaatatcgcaaatagaatatatattatcataatcaaattaaaaaataataataaggggtaaaagtgggacttggaggactgttactatcattggcatctccctgttcctgtttcaaacccaattgcagaaggaggaggtggtgaataatctcttgctgatttttcgttgcatataaaaaacagaaggaaaaaagttatatattcaaaaataaaagaaaatgtcacacataaccgtaattcatagctaccaaaattgtaagggtataaatattatattttcttctttattctcatttctctcacttatgatttcttcaattcaaattacacacgattttatatatttgtttttattattcttttattttcttcttgttttttatcatacattttttatctgtttgaatgaagtatatataaattaccaacatttattgatacgagtgcaactaaccgaacccaaatcccttaatcaaagt

SEQ ID NO: 33310 - DNA, 379 bp, Medicago truncatula
  Intron number 1 from transcript Medtr2g126660.1 (locus Med tr2g126660) derived from phytozome v7.0 (chr-ID MtChr2; po s 30731977 to 30732355)
attttgagtactgtagggacattcttttgagtgtgtttgatcaaattatatagaagatatgttaaaacacaagagtttaattgtaatggaaatcaaattcggtcttactatgggaaacaaccaaaaacgtaatggaaatgatatgtgagagtttctatcgctaaagataaacaactaagactagttgaaaaactatttaatggatgaggaaaattacaatggagataatcaccaccaatttgaaccgagtcaaacttttattgcctataagtgattgatataaatgaggatgctaatacatcttaaaatttgtaatcataataatttaattatgctctatgcagctaagaaaaggaaaagtagagttgcgaactcagaa

SEQ ID NO: 33311 - DNA, 639 bp, Medicago truncatula
  Intron number 1 from transcript Medtr2g049590.1 (locus Med tr2g049590) derived from phytozome v7.0 (chr-ID MtChr2; po s 13594210 to 13594848 reverse strand)
tttgcaattggaagctattcaagctgtgctttcaggtccaattcgcatttttctttatatgttcaattgaattttctatcaaaattgaaatttggtatttttcttcatatttagtagtaattagtagtaaatgaggtattagaaaatgtagttaaatcataaatgtgttttttctttgcattaggaaaatagaagtgggttaattactatggttctgtttggataaagtagcatccacacttctaatcgaaggtgtgtgtagtgtctgtgtctaacacggacacatgtgatgtgattactttcagtcatgtcattttgttaaattactacgggtgtcgatgtcatgtatgtgcttcatagcttatagcacaaacaaaagataaagtagtatagttgttttcataagctatttcggagggattctgtaaataagctgaaaataacttacgaatatgtcataagctattttcataagctctctcaaactcacgagtgtttatgtctgtagataagctcaaataagtcaattcaaacataacgtaattgcttgaatgatggtgattaaagttggaattttcgttaattttgggttaactttgctctttttctgtggttacaggaagagattgtttttgtctt

SEQ ID NO: 33312 - DNA, 517 bp, Medicago truncatula
  Intron number 1 from transcript Medtr5g040780.1 (locus Med tr5g040780) derived from phytozome v7.0 (chr-ID MtChr5; po s 17438447 to 17438963)
tttctgtattcttcccgaccttatcacggtaagtcttctttgattcaaaacccttttgctggcttggtgtgttatcgacaattgtactgattttcgacaattgttgtatttatgttctaaaaccccccaaaaacaacaatatgtatacatcacatatgtaaaaaccgcaaaatctctattatttcgttctaaaaaaactcatacttagatttttatttttgttaggttttggtttttctcttgttcattaaatcttaaatttattgtgactttgaggagattcttgaagaaatttcaggtattgggtatttttttatagtatgctttgtttttcttggtttaaaatttgcttgctgtgttagatatgatgagggatatatacatgtatggttatttcttgtagagttacataatgatccaatttatttcatccaatttgtgttgtttcagttgatttactgttttagtttcataacttttgggggttttgattttacagagtgagatagctaagcag

SEQ ID NO: 33313 - DNA, 475 bp, Medicago truncatula
  Intron number 2 from transcript Medtr5g040780.1 (locus Med tr5g040780) derived from phytozome v7.0 (chr-ID MtChr5; po s 17439000 to 17439474)
ttgttcaagtactcttgtaggtactacttgaaaaaattttacttacttgttttatggtgaaacaaatagactactagaaaagaaaagaggtcttagatctcttaacaatagacaaatcaatagaaacttgtgtaaattgcatgataactattttttgtataagttgcgtgataactattttttgattcatttattttatttttgttgggattttatgctgaaaatttgagaatgttatgtttttcattgttagatgttgatttgggagaatgttagatttggtgcttttgattttaatgaaaaattgggattaagaatagtgaaaacaattatgtacaacttagtgatgattctagtgttagatctatggctatatttgatatccacatacaaatcttgatcttcttcgtctcttcttcctttatggtctcttcttcctctctcgcctcttttgaagttgccgaaaaacgtattt

SEQ ID NO: 33314 - DNA, 890 bp, Medicago truncatula
  Intron number 1 from transcript Medtr5g087790.1 (locus Med tr5g087790) derived from phytozome v7.0 (chr-ID MtChr5; po s 33963046 to 33963935)
caaatcaagtactgcgtgttttgtcttatctaatagtatttatcttttcttttttttacttaagatagtatttatcttatcactacaatgctttagaatttgtatcctgataaatacacaatcttcaatctcatgtggtagctggtgagaacttaatggctaacttggggaattaccctatggtataaaatgtgtctttttgctctggtaaaaatgtgtcacacattgttacaacctagcattacatatcaatgttgctacaactacaaccttcaactactcataaatctttgataattggtgtaaattatcccaatttctgccctttggaggatactgttttctgagaactttttttttttttttgaaggaactgttttctgagaactgcctagtagtctttatttagttccccaattttgtacttttccttttttattttttaataaatttcgttgcctttgataaacaaaaagatatgtttcgaatttaacttttatctttaaattaattttatgtaagatagtaaactctatacaaactaaaatgagcttaaaatatgggtgcttttactagaaaatatttttatacgagtattacttttctcaccctatagaattctcgcgcgtcctatttttttttttttcaaaaacgcccttgaggtttccgaatttcataatctgaaatgatgttttcctttgttatagggtaaaaaatggagttacggattttgtaatccgaaaacttcaaaaataggacgcgttacatgatgttttcggattgcataatccgaaaaccccctaaacaccctttttttttcatggtgctgatgcaatctggattacgtaattcagacagtgccagcaccaattcttatgtaaagagagggt

SEQ ID NO: 33315 - DNA, 743 bp, Medicago truncatula
  Intron number 1 from transcript Medtr3g143320.1 (locus Med tr3g143320) derived from phytozome v7.0 (chr-ID MtChr3; po s 36939092 to 36939834 reverse strand)
tcgtcactcccattccttccctcgcattcgcccctgtatgtctcatttcttcttcaaaatcctttctttttttatcttttagcttctttaatttctactgttagtagaaatattgtattgtttaattctggaagttggttaggataattcatacacattagatagatagaattgatgtattgaattttggtaatttaggatttggctgaatttagagtgaagtgaggacattaagagttgattattcaacgcagtgatgattttttatgcatgtagtagaacaagcattgatttcataatcaattgttgatatgattgtgatttattgcttccgataatttttagtttctaactataaatcacattgatttgaggaggctgcatagcttcattatattatgtctttggatgggaaggggatgagtattggtggttgcagttgaattgttgaatctattcacatattagtgaagtgcaatgaatttcttcaatatttttagaaccacgttcccttttccattcgaattaatctcaaaggagcagttttagtcttttccacacccaaggtgtaactgcactagaatcattgtttttactctttcctcgtatatttgtatcgtttgtcatgtacctaatggaaaactttgttttttactctgttttccctcctttctcgtgtatttgtaacgtttgtcttgtactaaatggaaaacctcattgatttgttggatatctttgtgcag

SEQ ID NO: 33316 - DNA, 856 bp, Medicago truncatula
  Intron number 2 from transcript Medtr3g137730.1 (locus Med tr3g137730) derived from phytozome v7.0 (chr-ID MtChr3; po s 34986358 to 34987213)
acaaggtcagtttcaatgatttatgcttacttgccacaacttcgattttaaaaagctatgttggtgattctttgcggtcttgtataaattggcatcattgaggcatttccctttgtagtatagcttgtataaggtctatctggattgacttatttgagcttttccgttggcataagcacatgtcagactatttgtgagaccttatgaaaacaacatatgatatcacacgtccataagctgttttcaagcttatttccataagctattatagtttatgaaaacatcttatcagttatacgaaaaccttttgacattattttatcttttgttattgaaataattttatatgtaggtaagcgcttatgcatcttcggctgattactaggcctctgtttcaataacttcttttaactatggtttgattaggttaagcttttcacttgttaaaaatattaatattaattgtaacacagttgaagaaacacaacttttcaaaatgcaagttttggaatttagctgctttacactgagtggaagtgagaaaaaggttttaggggagtcctcgatgggtataagttaatgatgtatctgaattctatcttgtagaaatgaacttaatccttttcactatctatgtcattccctgtctattgaccattcagttcgttatcctataactcgttcttttaatcgtattttggagtttggaccttaagaatttttgtgagttttgactatatccttttattgcaagtacaaagtacccactactttttaattgctattacaggatcttagtctgcaattttcaaattatgtagataattgctagatcgaaggagttaggagaagatcc

SEQ ID NO: 33317 - DNA, 393 bp, Medicago truncatula
  Intron number 1 from transcript AC145220_6.1 (locus AC1452 20_6) derived from phytozome v7.0 (chr-ID AC145220; pos 16 877 to 17269)
ggcaacaacttggagggtaagatattttcactaacaacattattgtttttatatagtattcgtgatactccacaaaagacaaatttgttgtatgttattttttacaaattgtttttttttttatactttttagctttttattttttctttaaatttaatttctttttttttatttttctaaaaatgtcaaatatatgatagctctgcaagcaaaaaaaaaaaaaaggaaaaaagtggtcggatagtttatcgtccctttgtgttcccaaaacattagccacatacaagatgaaggatcattattcgagcaataaccatgaataccatcttaataacattaattcttatccattttcaggtacgattcccgaggagattggctatcttgataaa

SEQ ID NO: 33318 - DNA, 500 bp, Medicago truncatula
  Intron number 3 from transcript Medtr1g125000.1 (locus Med tr1g125000) derived from phytozome v7.0 (chr-ID MtChr1; po s 27436346 to 27436845 reverse strand)
tacacccccttgctacttctggtcaccaaggacaggttcccatactcttctctcactcttgctttactaaagtatgcactcattaatgtttagcatttctgcattgattatgttgtcaattgtcatgcactttctagagattagtagtttgtttggccctttagggttatgtttatataggtttatatgaaagtgagttgaataataaaattgagtgtaaaaatcacatttagagagaaaataaatctcatatattgtgctaagcatcattatgtgatttattgatttacaatcaaagattatatgaataatagtttgatgagtagtgagctaattggacattgaatgagttttaagaaggatttctagggtttaaaaactaacataactagttaatctctcatatttgactttccaaaaaaaaataaaaatattgatgagtagtgagattgatgaattactgattgggagttgatttctattgtggttgactgcaggtg

SEQ ID NO: 33319 - DNA, 566 bp, Medicago truncatula
  Intron number 3 from transcript Medtr5g067530.1 (locus Med tr5g067530) derived from phytozome v7.0 (chr-ID MtChr5; po s 23961160 to 23961725 reverse strand)
cagcagggctgtgagatgttattcgtgacagaattcagcgattctcaagcataacagtgagttgttagacatgcaagaaaaataaaaagggtagtgttttaggttatgatgttgttacggagcatatggtgtataacataaatgtgtaaatgtggaaccatcaacagatgacggcccagcagatttgctctctcgcaaatttaaggttggatgaatgtttcgttcaagatttaatgtaactaacaaaatcaaattattgaaaaagttaacgaatacttgtgggtatcaaatattcaactgattttactcctggttcctttttagggtttttagtatggtgggtggctctaaaggcgttgatctagacatcttctctactaagactctgagcaatttattatctgctttgtaacctgtaggaattttgttgggttttttgtttccttgtgaatttttttgaatctggattgcatgtagtcaaaactaaaattagattttatcaaattgattaaaactatattggatcttgaaattcggacaatcttaatcggaaatccgtaggtttc

SEQ ID NO: 33320 - DNA, 232 bp, Medicago truncatula
  Intron number 2 from transcript Medtr5g033160.1 (locus Med tr5g033160) derived from phytozome v7.0 (chr-ID MtChr5; po s 13511400 to 13511631 reverse strand)
aatttttgaatcagcttaaaaaacggtaaattgtttcttcattggcactgtctcagttcaatgaattgtgtattaggaacattttgtgacttttgaggttttagaactgattcgttttttcttttttttgggtgattttctatgtgtttgtgaatgttgtttttattaatgtatttatttattgatttggatgctagtaaaattgaaggttctcaggccacagcaaaacagg

SEQ ID NO: 33321 - DNA, 366 bp, Medicago truncatula
  Intron number 1 from transcript Medtr2g082890.1 (locus Med tr2g082890) derived from phytozome v7.0 (chr-ID MtChr2; po s 18918267 to 18918632 reverse strand)
cttgcagcttcatcaccaacaacttccgtaaaatccttttatgagattattttgcttaagtaaacgcatcacaagccaattcttgatattcttcataggctgtggtgttatcttccaattatctagtaatttcttctacttgaatctacgaattaacttggaaagtttaacattttgatccctttttatgatttaacttcgactgaaaaattggttgcaaaatttgaaagtccggatagtttattgtcatagaagacccttaaagctaactattattattattattattattattattatttttgactttttgtatgttttttatactcaggcccaaactctgcaagtggattttagaaagatcta

SEQ ID NO: 33322 - DNA, 941 bp, Medicago truncatula
  Intron number 1 from transcript Medtr1g020520.1 (locus Med tr1g020520) derived from phytozome v7.0 (chr-ID MtChr1; po s 4494539 to 4495479)
tgttgggaatcgtttgctcagtgctactgttgaatgtaatgtgtattttctctctactttttaatcttatgtctaagattataatttataatcatggaaataaacaaaaatgaaagttttcttatgattatttgttttgctttaatgaattgattataaaaattcatttcaaaatcaaattaaacatagggtgtgtttatgaacgaattatttaggcaatgttttgactttggatgaactacttaatgtttaattaagcaacttatagtataagtgtttatcatataagtgctttatgtataagttatgtctagaacagaagataaaataaagtcaaactgttttccttacgatataagctgttttaataagctattatggagaggatatagaaataagttgaaaataactcaaatgataagttgcttataagataagttgtttgaatatgttataagttgtttccacaagttaaataaactcaaatgagtcaattcaaataggcccttagatttatcctaccataccgacacttgttttttctttctttcttgagagctgataaaaacaaatgtctctcagctttttttgtagcttatgaaagcaatttacacttcatatggaaacaatttaactggagttagtctttgattgtatgaattggtttatacataagggtttatatgataagcatttatttaataagttcttataattaaattgtttattcaaggaatgcatgaatttgagaatagtgtaacgaaatggtatagtatcagatatgattaacgttaggacattacgaagttgattaatctattttctaacgatgagacgttaatgatatgaaaattgttgttatttttattcaacggtgttataaaatttgaggatgggttgcataatcagtgatcattcttactcttctcttgatattgcag

SEQ ID NO: 33323 - DNA, 122 bp, Medicago truncatula
  Intron number 2 from transcript Medtr5g084510.1 (locus Med tr5g084510) derived from phytozome v7.0 (chr-ID MtChr5; po s 32170882 to 32171003)
caggtatgtttgtttatttcactttcattatgtaattgtttcattctaattattatttttttcttccctttttttgagtttgtatagaagtttttttttttttttttttatataaaattgcc

SEQ ID NO: 33324 - DNA, 1031 bp, Medicago truncatula
  Intron number 1 from transcript Medtr2g093080.1 (locus Med tr2g093080) derived from phytozome v7.0 (chr-ID MtChr2; po s 21533347 to 21534377 reverse strand)
caactataaaattagatattaagaaattctggtaaagcttgtatttaacttgaaatagtagattgttgaagattttacctgatagcattttaataatttaaatcattaaataaaaaagcttctcattagtcttgtaatcaactgtgagataaaactcaatattaagctgagttgttgtttgtcagtatgttaggatttacaggctctggtgttacttatcttgaattgggaacatagtactgtattaaaaaggttgtgaatgaatcaattatctgttcaatgtgattgcttttttgtgtatataactgatgcttatcataatctgttttgtttcttataatgaactgagcaactgatttaaatttgtcttgttatagattttttttttcttactgtttaggtccaggggaattgatgaagtcttctgacattgtccttgtactagattgaacatatgctttgaaaaattcataatatgtgtgttgatatgctgattctttggtttctttgtgatgaaattctgtattttcgtattttggttttctctaaattattgccaagaaattgaaaaatgtttcatttgcttagtttaggattagttgatctgtaatatggtttgattttgttgctatggtgaatgatttgaaatgtatttttcactgctatatgtacttgtaattttagtgtgtgaaaatggagataacttgatcctttaatttgttgttcagaattttatcagttgtaggatgcaagtacaatgattgtggctgttgtttctgatttttgacaactgaattcttcttctgaatggtttttagctctttaaatgtatatttgaaagccttagcatctgtaacaatatcttgaactccttgcttttgcccctaatcagaatttttaaaatgatgtatatttgatcctaacatagtaaaaaactaaaagagaaactatataattgcatacttgatctctgttaataatccattcaaattatagttattgcatcttagaggaagtattgaaaagtggtt

SEQ ID NO: 33325 - DNA, 964 bp, Medicago truncatula
  Intron number 1 from transcript Medtr2g042340.1 (locus Med tr2g042340) derived from phytozome v7.0 (chr-ID MtChr2; po s 11853436 to 11854399 reverse strand)
tctctctcgcggcactctctttggaaatacacaatgtatgttgatttttgattctgtttatttatatgttacgttgaaatgtcgataaattttttgtactgtttcacgttttctctaatttcttaatgttgttcttgttattgtactgtatcaatgtctgatttctttatgatttatctctctgaacattgaacatgtattaataggtttattcttattcttattcatttaccaatttttaaattatttgtttaaattttattagtgtctctttcataattaatagctttttcattgtcgtatttgattttaaattttaagtagcatcactgtccttttcactctcctttatgtattttcagttaggattatttaatttaataatttaattgataactcgatagtttaatttttcgtactataaatcatgtttggttagatacttgattcatggaagaaaattacggcgttgtttaattcatgtagtcgtaagattatacgtttttgttgttgaatgtattcaataaagcactgacagacacgtacaccaacacttcgaccgataataattagagaaaatgacataactcaatgtaatcacatatagtagtgtcgtgtcaaacacgatacgtatccgacacgggacatgactaatccgaggagtatctttgcttcatagaatgtatcaaacatgtttgtaaaagcattttgaattattgtggttagtattaatgctactttcttcctctttttccgatggctttaaattgccattgcgttacgcttcaaacttattgcgttaaatacggataaatgcagtcgatgtggccgcaatttaagtggttgtttgctaatgtatagacctttcgtgttttgatttcagattttgtttaggcttttgagtccatcgaagatttcttgtcggctattgctcttgatttcttgtgatttgtatctgtagtat

SEQ ID NO: 33326 - DNA, 846 bp, Medicago truncatula
  Intron number 3 from transcript Medtr3g076330.1 (locus Med tr3g076330) derived from phytozome v7.0 (chr-ID MtChr3; po s 17638542 to 17639387)
aagcaagtaagttcaagaaggacctcatgttgtttaaagtggattttgaaaaggcgtacgattcggtcaattggggttaccttgatgaggttttgcagtgcatgtcatttcctgtgctgtggaggaaatggatcagagaatgtgttagtaccgctacagcttctgtattagtaaatggcagtcctacagatgaattcccgcttaagagtggtctccgacagggggatcctctgtccccttttatgttccttctagcagctgagggtttgaatattttgatgaaagctatggtagacaatcacttgttcacagggtattcggttgggacagttaatccggttgaagtctctcatttacaatttgctgacgatactatgttgttaggtaagaaaagttgggcaaatgttcggactctccgtgctactcttgtcatttttgagaccatgtcgggattgaaggtgaattttaataaaagtttgttagtgggtgttaatatttctgagtcatggttgactgaggcggcttcagtgttgtaaagtgggcaagattcctttcatgtaccttggtcttcctataggggtaatccgcgtcgtctgtcgttttgggaccctgttgtgaacagaattaaatctagactgtcaggttggaatagccggtttctatcgttcggtggtcgcttggtccttttgaaagcagttccgacttctttgcctgtctatgctctttccttctttaaagctccatcagttataatctcttccattgaatctttgttgaataattttattttatattttttttttggggggaggggggggggggggggggggggagtgaggaccgtcg

SEQ ID NO: 33327 - DNA, 428 bp, Medicago truncatula
  Intron number 2 from transcript Medtr1g031110.1 (locus Med tr1g031110) derived from phytozome v7.0 (chr-ID MtChr1; po s 7475709 to 7476136 reverse strand)
cagaggaagctaagaaactagtccacaaagcaattgtactcatcgttcttggaggcaacgattttgtcaacaattattatttggtcccattttcagcaagatctcgccaattttctcttccagattacgtgacctatctcatatctgagtacaaaaaagttctaaaggtaattattatatgttcattactcgtaatggtcaagaatttgagattcacattggaaaaatacaactcccatgttggcaaaacattagtcaaataaaacatggagtataaagcttagataacactcttcttagcgatgaaactcaaacacattcgtgtagtaaagttaagaattgcaaattcgaagtcgcataacatcataataaattaaattactatttgattcttccgatgatgtttaattaatgggtgcagaaacttt

SEQ ID NO: 33328 - DNA, 695 bp, Medicago truncatula
  Intron number 1 from transcript Medtr1g037170.1 (locus Med tr1g037170) derived from phytozome v7.0 (chr-ID MtChr1; po s 8692011 to 8692705)
aacaggtatgaaagattatctgtgttctttggatgtctcataagtattagtcacgagatttgaatttgaatttcatttatttcatgtatggaaaacacgaggttcactcacttactgccaagttacttaagttactattgttttctccaatctgatgatattataataatactgtgtaaatatgttctacataagcatccttttgaatatagttactgggttttctcaataaacactgctactgaattcaccttcctgcgtacaatgtaccagattcatgcaaaagagagtattgcgataataatataataggcaacacattgcataccatataccacataccacatttttcttagctatgcttgtgtgaatcttgtaatataaataaaatttctgtaagatgagtgtctgaaaagactgaaacagttggtcttgaatcggtaagttctattgataaagtcaagttccgcggttagttatctttcctagacttgttcaggaagaagtttttacttaaggagtgttgaaagtattttttttatcattagaaatcaaattcggcaatccggggtttacagtactcgcacacctcgtgccctaaacacttgtgttagaccagcttttttctttcatttctgattagtatttttgtgtcattgaaacttgaaagcaggaagtatcaaaggaatcttcca

SEQ ID NO: 33329 - DNA, 918 bp, Medicago truncatula
  Intron number 1 from transcript Medtr5g046020.1 (locus Med tr5g046020) derived from phytozome v7.0 (chr-ID MtChr5; po s 19333175 to 19334092)
atttgaaggtgcaaaacattctcatatcctattttggatttggatgaccttttaaccatgtaaccagatattttgctcacccctatctataagtcacctgcaaatgtgttattgttatatgagcatcataaatatagacaatgtactccctccgatcacatttataagtaaaaaaaattactttttaggtttatcaaataccttatgtatatagatcttatatattcaatgaagctaaatagtagttttttgtttataagtgtgaccgaaatgattattattttaaattttttttttgaagaacttaaatgcaaaatatattaaaaaccaaaccagttaagtacaagatggatgtgctaactgaaaccatatacaatgtcatagtaatgcctaacaggaaactgtatacaatgtaatgtcatagtaacattctactataacatatatgaatttaccactaaacatatgtaatgtaaatatgtcttcaacatcataatatataatttgtgcttttatgtaaacttgccttttttgatgttatgcttattctaatccaaatttttatatcgccttatttgctatattctctatagtttattccttgtatattacctgaatgtcagattttgcattttatatcattaatttatagacataaggtggatatttgcacaaataataaaaagggttcatcaaatcaatgttacatatatttttgttactcttttctctctgtgacttggataattcgagtgtaagaatcctaataataatatgcgacccttattttctatgaaaaacttctatatatataagtaaaataactgaaaaatcaacggttataaactattcatcttcgacagactttacttattttcatgtgtcttgaacctttgatcttgtcccttcagagagaat

SEQ ID NO: 33330 - DNA, 713 bp, Medicago truncatula; identical to SEQ ID NO: 28380
  Intron number 1 from transcript Medtr1g087200.1 (locus Med tr1g087200) derived from phytozome v7.0 (chr-ID MtChr1; po s 17489820 to 17490532)

SEQ ID NO: 33331 - DNA, 308 bp, Medicago truncatula
  Intron number 1 from transcript Medtr7g062100.1 (locus Med tr7g062100) derived from phytozome v7.0 (chr-ID MtChr7; po s 12637131 to 12637438)
cgtctaacatcgcaacttctgcctctagacctagagtttgttttcgttttcattccccgacttttgatctcttcttttctttaattccctttcattttagtttttcatttatatggtaacaatttttcaaaattaaactcaaacgattgcacattattttgtttatgattagatcgagaagggtggtaaccaaaaaatttattcttccggttgttggtgtaaatcgtgtattttattgttttttcgttatgtattagtgatattttatttcagggacaggaacaacagggagaggcgacgattgaaga

SEQ ID NO: 33332 - DNA, 706 bp, Medicago truncatula
  Intron number 2 from transcript Medtr7g062100.1 (locus Med tr7g062100) derived from phytozome v7.0 (chr-ID MtChr7; po s 12637500 to 12638205)
gaaacagttcaagtgagttcaattgggtagccgattatttaaaatgatctagttttgtgctatgatgtttgttagagatttttttcgatgtaaatcgagggaaatcaagttgatctactggtgacatttatatacttagtgctaagttaacttgtttctttcgaattattgttcgagttcctctttatgttttggaagacaattgaaaaattctaaagctgagaacgatttgtcaaaattaaattatgttacaagttggttattagggtttcatgacgaactcttccattttcttgtttttaacattagtggtatgtttgttatagatttttttcgacgtaaatcgagggaaatcaagttgatctaccggtgacatttatatacttagtgctaagttaacttgtttctttcgaattattgttcgagttcctctttatgttttggaagacaattgaaaaattctaaagctgagaacgatttgtcaaaattaaattatgttacaagttggttattagggtttcatgaagaactcttccattttcttgtttttaacattagtggtattttggcggagggacgttattatttcttgttcaaatttatttcctctagttctatatgcaatatggataagggttctttttattaatcttgtttagctttgatttaatcttgaatatattttctcagaagaaacttcagataa

SEQ ID NO: 33333 - DNA, 946 bp, Medicago truncatula
  Intron number 1 from transcript Medtr1g025590.1 (locus Med tr1g025590) derived from phytozome v7.0 (chr-ID MtChr1; po s 6378008 to 6378953 reverse strand)
tcctccatttgcagaaaacactacttcctctccaggtatttaccatattaaacttatgaaaagatcatagaaagttttacttacagcattgaccgtttctttaagttttaaaataattttgatgtaaattagttagagtattttgtttaaagatttttaagaaaaatatgtgattttgtgtttgtttaaaattatatacaaaaatttctcgtgagcttaactcaaatggtatgaacaatgcattgtcatatacaatggtcggagttcgaacctcgacaccccatttatacaaaaattcatcgtgaatttttaaccgatagactacttgtacttgataaaaaaaattatatacaataaaagtctatgttatgtttataatggttttcttctaaaagctaatggaaataccttttcattatcaacacaattatttatttgaaacataataattttttaaaaagttacacacaaacataactaaaacataaaaaataattttttgataatcttaaacaaacaaacattatatttgtttgtaaaaaaaaaaagcattatatttgttaaaaagatttcaaaatcaagtttatggtggtctcccaaaaaaaaaattatggtggtctttctccgtgttttacaaaaactcttaaaactcttttctctgcctaaatcatctttctctcatttttttaatggatgatattttaatgtttcctcatgtcacatgatcaatttccgtgcttgactatccttgatacattaaattttctcttagtgagtatagttatttattttgaacaacgaatattaaaaaaaaatgaaaaaaacaattaattttgttaggttttttgaggaaataaattttgttagttgttaattgtttttgttaaaggaaagtttctttgcttgtgcaggaaaaagcaacaacagtactaccataggtatcgct

SEQ ID NO: 33334 - DNA, 813 bp, Medicago truncatula
  Intron number 4 from transcript Medtr2g017960.1 (locus Med tr2g017960) derived from phytozome v7.0 (chr-ID MtChr2; po s 4613770 to 4614582 reverse strand)
agagtctggaagaggttacttcaagagttgaaaaggtttgtgtctatgctatcattttcttcatatatgaactgatattttgttctacacattttggttataatggttactaatactaggtatggtattggtatataaatataatgaagggaattaaaaatccttatgcatgttacagaaataaacgatttttaaacagtttgtacccgaagcaatgaaatatatattttactgtatctttaatagttaccactaagctctctattttcctttcaaaaaaaaaaaaaaaaaaaaaaactaagctctctatttaatatagtcattgaatttcgttcatggcacaataactgtacaatgaggatctatggaaagtgtttttagattgagagagcaattgcaagtattctagtcaaaaacgatttctccgaaatacttgatcattctaaagtattcttgtttaggctccaagactaatttcgtttacaaatttaaatattgtttcactttttcatcgggggatttatgtcacatattgttagatctgttttttgagtagctgtcattgagcttaaagagtgtaagataaggaaaaatagtggtgtataaattaattatgatgtactggtgtaaagagagatttgtagcgtatcaaattgaagaacatttatctatatagcaagaatgtctgtttagaagtatatataatccgttttgatctagtgtataattgtagctcacaaagatttcagctgatataagtgtccaagatgaatttgtttgctttatatgcaagttaacattttttccattcag

SEQ ID NO: 33335 - DNA, 746 bp, Medicago truncatula
  Intron number 2 from transcript Medtr3g016790.2 (locus Med tr3g016790) derived from phytozome v7.0 (chr-ID MtChr3; po s 3355184 to 3355929)
tggttgtagcttaatgttggagaagagaagaagagttatttatgataaaatgaaaccttagaaaagaactttgagtttgacaactagctagagcaagagccataggagagatcatggtttagtattcggagctgtctgtgccttactgccagtttattttctgctgttttcagttttttactggttttttggtgctactggtgtagcagatcagcgctgcttgcagctgtttttctgtctttggtggttgcttttcaatgatgcttggctagttcaggagtgaggtaggggtatgcttgctctatgctagtatatacttcggcctcattgtttgatgccattgttggttttgggttttctcggggaattggtgttacgtatttaggcggcacctctttgtattttttcccgatttttcctcaagtttttttaatagcagccaccccaaacttttttgtctggctccgccactgactcacaggtaagttttgttatttgttgagtatatttgatatatcatcgtgtgtgttgacaattgtgtaatcatatttgacgtgtttagttgatgtgatttcctgttcctatttcatataatagtcacttgaagcacgtgaattcgttcaactgattttttttatgcaatcgtagttaaaccgattgaaccacaaactagaggcctcactggtttgatctccggttcagttttttaaactttggcataatgaagtgtgcgttcttgcaggaag

SEQ ID NO: 33336 - DNA, 726 bp, Medicago truncatula
  Intron number 1 from transcript Medtr2g074170.1 (locus Med tr2g074170) derived from phytozome v7.0 (chr-ID MtChr2; po s 16941429 to 16942154)
tgggagctttctccactatcgggtcttatagtagagtaggctctgatctatgaattttgtttgatagctctagatctttgttggattattttacactttgagattttgtccacgtgtcggacttggagatttttatgcttatgcatttttgagatcatgtgacatgtatgtttgatgtatatgattttgtatccgctgcgactgataagattttatatgcatgcatgttggttttcgatctttggattttcgattcgtgaaagtagcgtctatttcttgaatattttattattcacatgttttgttgctttaatagaaataggacgttacaataaacacctaaagaaaaagacacacaataatgtacataattatctcctaagtggtccctatctgactcagatatgataaggtaccactgtaattattttacaacataataactagaagataattatgatattgcagatagggaccacttaggagataattatgtacattattgtgtatctttttctttaggtgtttatctttattagctgtcgagaaagggacatgtgaacaatttgtgagccctttttcactataaataagagcctcgtttctcatttgtaatcagtgaatattgaagttcaatactactaagtatttcgttcctataaaaactttttttttttttttatagaagtagatcttgagacaagactctggaggagctagatcctt

SEQ ID NO: 33337 - DNA, 820 bp, Medicago truncatula
  Intron number 1 from transcript AC235567_5.1 (locus AC2355 67_5) derived from phytozome v7.0 (chr-ID AC235567; pos 26 436 to 27255)
attttcgttatattagaggtttgtgatcaaattctcattcacccttttgtttgtatgttccaaattttctgtttttggtgttcataaagctttttcatagagtgaattttaatgggtcaaaattgaattttgatattcattagctgaatttttgtttttgttttttttaattgtgaaatttagttatttttattttgttgatcacttgttttaaaattgttattggtttgaagagtttcatttgaattaaaccctcttgaagaaaaactatatgaagaattgcagtagtttacttgtgttgatcttcacttccgccgcgtgttggtgtctaacactgacacatgtgataacattcaaatattttactgtcagattattacgggtgtcaacgtgttagtgttagtgtcttgcttgatttctgtgtctgcgtcagtccttcataggtaatgacttgacatgaagaagatgatacaatcttatgatagtgggaagttattagtgctctaattttattgcgactgttctgtttgtaattttggtaattgatttctgaacttttcttctgtctcatttcatgcttaattctttccttgccagtacttgattattcaaatgtactttgtttcttatatgtcacaaaaaatatatttaaacaaactattggtactttttatggtgttctgtttatgtctaattatgatgaatgaaatccttatacgagcaaaaaatggaaaataatcggctgtttctgattggtgatcttatgaatgatcttaccgtgtctcttgatgttttgtcatgtaccagttgatataccacc

SEQ ID NO: 33338 - DNA, 517 bp, Medicago truncatula
  Intron number 1 from transcript Medtr5g065440.1 (locus Med tr5g065440) derived from phytozome v7.0 (chr-ID MtChr5; po s 22882607 to 22883123)
ttcttggttcaatcagttcaaccgattcgaaattcgtttatataaataaataattttataaataaataacacatatagtgctaatttttataaataattcattttaagttgttactaataaagcataaatgcatacaaaattacacaaaagtccatgacaaatacattaaataagtccataacaaagacaagtcttcttaatacaaagctagcatccagaagggtattcccgtgcccatctgtttgatttttctattgcgctaacgtatatatcttccctgtattttttcgtataaaataaattaatatattgtttgtcattaacaaatataataactaaaaacctgatgaatgaagatttattggtgcctttatcctccctttattgtttgggtattgcgataacataagtactcttctttgtataattaaatttccacatgattatgtatatggatcacatcaagcagtaaccaactcataactccacaggttcggcctttgagacaagaggaag

SEQ ID NO: 33339 - DNA, 1002 bp, Medicago truncatula
  Intron number 2 from transcript Medtr3g006040.1 (locus Med tr3g006040) derived from phytozome v7.0 (chr-ID MtChr3; po s 607240 to 608241)
acagccaatttactccaaattatcccttcaactcagtcctataacttgtaaggtcttatgaagttggaataatgggcttcacaaaccaagaggattgcaaaaaagtctatatatgtgtggtaatggtttagttatagccttataggataataggactgacgtagtgatatcgcccatttagcatttaaccaagtgatgcactctccaaggccacatgattgtgagtatttgttaactcctaccaaaaaaggcatgttttacattcacattgaaggatgaagaacttgattgattgcttagaaattcatgatagaaaattgaaatgtgtgttgatttgatgatttaatataatttatagaattgtgaaatatgcaaattacttgaaaattagaaagatatctttttgtctcggtaagttattgtgcttttgatgcaaatgtgtaggttaattggaatccctatcacaacagtatttggaagttgtacttcaatcacctaatccattttcattagaatgatggctagttatgtgctatgaatatcgttaaaattatgatttctgctagtcatttctattcattttaggacaagttatgtttctgcaataggtttttagaaacaccgtgattgatccagaaggatgtcctcaacattgatgtacatagcttctttcaacagatgtctcattcgtgctggtaaatcctactacctgctaaaactatagaccattttttgaaccctatgatagttagagtaagagttccaagaatctgaaattctgccataaaataagtaatgttctgagcaaagattattttagctaaagttcgaactcagtatacttctaaacgatttgtcttaactaaaactcaattatagactataaatgttcaatcattttttcatggttattatatattgccataaatgaatctaaatatttttgctattgtgtggtgggatgcagcaatactcaatagagctaacaaaggagcgaattga

SEQ ID NO: 33340 - DNA, 924 bp, Medicago truncatula
  Intron number 4 from transcript AC146711_4.1 (locus AC1467 11_4) derived from phytozome v7.0 (chr-ID AC146711; pos 33 409 to 34332)
agttttattcggtatggagacactgcttggtgttgttgaatggatctattgctttaatcttacattatatagagacatctatacttcacattttaattttgggtgagctcggtataaaggattcatggaccaaactcttcgtagttgaattttttccttgccttgcgtatccaattggagcgggtaaaaaaggccgaatattgttcagaaaaaagacggtgaattagcctggtttgatttaagtaacaagatgattgaggagattggaattacaaaacaaagagttcttgttataaaacaatattccataaagaaagcattcttccaattggaggaataaatagttgaaatgttttgtttcttcttgttttcactcatgagttatgccttcatgttatcgactataacaaattaagaaaccatttaatagtatgagctatatatgctttatgattttagtttgaaagtttactctttttttattctgtttctgtttcaattgtatgaacgctcttttgccaattttaggtaggaatggcttatatttgagaagcttgattgtctaattaaatagcaataaatctttgtttaaatttggatttaacagttatcaatactccatcaatgacattggttcaatttctgatgtttagtgtcaattgatattgctaatcagatttctttttattgctgttgaatcattttatatccctatatggatgagaaaaatatgtgatttgatgggacatcttaaggcatactcagagtaatatggttggtataggctgctcaaagaggatggctcacctgataaaaatgctattaaaatgtttgcgttaaaatgttagaaaataatttgtgatttcgattgcatttaagcatttatctataacttatagtcatcttagaatttcagcaacgatc

SEQ ID NO: 33341 - DNA, 621 bp, Medicago truncatula
  Intron number 2 from transcript Medtr1g125200.2 (locus Med tr1g125200) derived from phytozome v7.0 (chr-ID MtChr1; po s 27544178 to 27544798 reverse strand)
agaaccttatttatcattgaagtttggtgtttgaggtttgttatcttaccctctactctaaggtcttcttatgttcttattatacgttcttttgaatgtttctcataagggtgtgtgaggtatttcatttgattcctgttctcctaagggaagaggaaaagataaactgaaaatagagatgatagattcttttctataaagttattacaagatagaacctttgataagttgtttaattttgatttgattgttcctatgagaagttagattgactattgagaaggtttgatttcagattttaaaccagcttaaaattgtttctgacaaaagtatggtattattttaaactgctttagcttttaggtccatgtggggctttgtttgatgagaatctatttgttttgctttttttacactttgtgcttttctctatatgtgttcattctcttttatttcttgatcattaagtattgaagatggaatttaaattaaagttttgtttatctatttgcagctgttcactgttataagttgtgacttgtaactagagtggaatatatattccttgagtgtcttttgtgacaaattaagttctgaagctgtcagtgtattggaaaaaaa

SEQ ID NO: 33342 - DNA, 352 bp, Medicago truncatula
  Intron number 4 from transcript Medtr4g036620.1 (locus Med tr4g036620) derived from phytozome v7.0 (chr-ID MtChr4; po s 8984658 to 8985009 reverse strand)
tcagcaagcaaaattcaacctcttatctctcgtgggttattaggatccacaaagtttgagtcttttgattgtttacattgcaaacttggcaaacagttggctttatcctttaatcgtattgtttctatttcaaatagtccttttgatttgatccattcagacatttgggggccttctcctgtttcttcaataaatggctttcgttattttgtattgtttattgacgatttttctcgttttacatggatatattttctgaaaaatcgctctgaattaccacaaatttatatttcttttgctcgtatggttaaaacacaattttcttgtgctattaagattctacgcacagaca

SEQ ID NO: 33343 - DNA, 377 bp, Medicago truncatula
  Intron number 3 from transcript Medtr4g036620.1 (locus Med tr4g036620) derived from phytozome v7.0 (chr-ID MtChr4; po s 8985128 to 8985504 reverse strand)
agtgacattgaagctttaatcaaacaggttatatcttccaacacctctactgccatgtctgctactcacggtaattctcgttggttttttgattctgcgtgttgtaatcatatgacgactgatattaaatcattgccttctgcgacacttgtttcttctttgccaccaatccacacagctagtggcaatacaatgaacatcactcataccggtcatgtatccacctcaaatctcaccctgcctgacacatattacattcctaacttgacacttaatcttatttttgttggtcaattgtgtgaacaaggactgaatgtttatttttcaacatctggtgttcaggtacaggatccacagacgaagcagatcattgggat

SEQ ID NO: 33344 - DNA, 765 bp, Medicago truncatula
  Intron number 1 from transcript Medtr5g101010.1 (locus Med tr5g101010) derived from phytozome v7.0 (chr-ID MtChr5; po s 40404916 to 40405680 reverse strand)
tcgccaccttgttcttccttcctttggtgttcaaggtactacacattcatctaaattacactatcaaatattcaagggcaatttcatttttattgaaaatgttagatatagttggatattaatcagaattagtttgggggttgcttaatttaattaaactggttttgagctaagggttagtgttcaaataattaaacctgacataaattttgcgagactgtttgagagaacttattgaaacaacttatagcttatacaatttaactttattttatcttatgctataaaaatagcctatatataagcacttttcataacaggcgcttatgctataagctgcaaataagttacttttttttcaaacagggccttaggctgtatcataagtgctcatcatataagcacttatctataagctgtttctatagaaaaaattaattaaacttgaactcttttcatattagttgtaagttgttttcataatctatccttgagaccttatagaaataagttaaaaaaaacttacaaacatgtcatgcaaattccataatctcttccaaatagcctcacaaatgtttatgccaggagataaattcaaataaacgaccgttagaatatagtaattggtttacaattttctttatagaaattagaaacctctaagccttaacaattcaagatctttgaaaattgttttgaattacattttgtttatttccatggtttgcagggcaggcaaatctgctgaagtcatcaattttagtt

SEQ ID NO: 33345 - DNA, 546 bp, Medicago truncatula
  Intron number 1 from transcript Medtr3g097450.1 (locus Med tr3g097450) derived from phytozome v7.0 (chr-ID MtChr3; po s 23308070 to 23308615)
aaccctcaacaacttgaacctccttctgcattgccgtgagttaccttcttttttcaaatattttgtgtattcatgaagtgatatagatatttcatgtcttgagcttttggttgatgttgctctgtatgaagtttgatatagatatgattttttttcaacattttagtatattgatgaagttgaaagaaacttgcaagttttgagcttttgtttgatgatgtcatgtatgaagtttcatgtttgttgatgattttttttcttcaactttttagtattttgatgaagtgataggtatttggaaaaaagaaataaactttcaagtcttgagctataggttgatgttgtcatgtatgaagtttgatatacatatgattttttttttctttcaacattttagtatatcgatggtgagacgcaaggggcattcccttacacctaaaaataattatcttcttaaccaacatcgactgataggtgattgtgatttaggagatgatatcccctagacaagggaaggttgggcgaagtctaggacagctgagcaag

SEQ ID NO: 33346 - DNA, 757 bp, Medicago truncatula; identical to SEQ ID NO: 28888
  Intron number 2 from transcript Medtr1g120760.1 (locus Med tr1g120760) derived from phytozome v7.0 (chr-ID MtChr1; po s 26098926 to 26099682)

SEQ ID NO: 33347 - DNA, 787 bp, Medicago truncatula
  Intron number 1 from transcript Medtr5g027730.1 (locus Med tr5g027730) derived from phytozome v7.0 (chr-ID MtChr5; po s 11348710 to 11349496)
agtttgttacaaattattcctatcaagaggtaaaagacaactgtcattgacagattatttaaaaaaaaaaaaaaaaaaagattgattaaaggataaacactttttttgacaaaattaaaggatataccctaactttatacaaaaacaagatatacgaaaaaaacataaaagattgattaaaggataaaccctaactttataaaaaaaaacaagatatacgaaaaaacatagaagattgtttaaaggatacggtaacaaattgctgatgtaagccttataaaagtaactgcatattcctcttaataaaaaaaataaaaaaatatagatacaatcctcgtataagagttgtgactttatcaataatccggcaggcaaaaacaagtgtcttcttaggtaccagattacacgtagtaagtttctaaattatttgattattttttaataatactttgtattctttctattgaaaattctctcaaatttttttctattttcaatctccaccgcgaatatacaaaaaattcaatatttttaattcccgttctctctcatgtctgatggttgagatttcaacaattttgaatgtagtgtatctaacaatcgatgcataattgctgcttttttccaatcttccttctccttttctgtgggtttacctgttactcgtcctttttgctttgatatatggtctcgagtactctttgttctcttttgattttagtgtctatcatggttttaatttatggttgcagttgtggtcgccaattgtggtcaatcagttgtggtc

SEQ ID NO: 33348 - DNA, 701 bp, Medicago truncatula
  Intron number 1 from transcript Medtr6g009310.1 (locus Med tr6g009310) derived from phytozome v7.0 (chr-ID MtChr6; po s 1514503 to 1515203)
tcctccaacggcctcctggtgaggtatcatatatcatagagatggttattcttacacacgcctatataagggtgacttagcaccctcaatgtatgattcacttttctcaccttccatcacattttccatattgacttgagcattgaagtgctaacgtgcgaagacatgttgccactgttgctttcatcagttcctcatcgaacatatcatcttctaatcatgtgtaattaattcttgatatataattatattacctcgaaaacgcaatttgtggatttgaagttggacataaagcttgtagcttatagtagaatagagtttgaattaaaaaatgagaagggtgtagtccaaacctcttcataatgattattagtaacactttgctttataataattcttttcttatccaatttgtttatattaaaaacatgacgttttaaccctagggcataaaccataaaaaactattaaaatatgagcaaggagcaagaatatgttaaccttgaggcaagcatgttacacacgcagacacacagtttccacaagcaagcacaagatgaacacatagttagaaagagagtatgtgggagtataaataaacatgattttttgcctaaccacccaatgagcagacacaatatagcatttgtgcaaatgatttctgtttatgtgtacttttttagggttggtgcttcagtgag

SEQ ID NO: 33349 - DNA, 314 bp, Medicago truncatula
  Intron number 1 from transcript Medtr6g015260.1 (locus Med tr6g015260) derived from phytozome v7.0 (chr-ID MtChr6; po s 3771685 to 3771998 reverse strand)
atatatcaacttataattttgttatgtcacgtgtttttactttaaaatgttttagttttcttggtaatgtatcttacgatttataataagattcgattcacaattcaaaaaattcatcttcttgattcacgatttgaatctcaatttgataatcgtgatttcaagtgaagaactttacttaagtcaagcataaaccaataatttttcaaatataaaattataaatagagcaatattaaaaaattattgattgcattaggtatttgtaccatgttcttcatttcaaattattaaatttgaacaggtactggagtc

SEQ ID NO: 33350 - DNA, 680 bp, Medicago truncatula
  Intron number 1 from transcript Medtr1g120730.1 (locus Med tr1g120730) derived from phytozome v7.0 (chr-ID MtChr1; po s 26068242 to 26068921)
aaactgtttacgaacatagtgttgaaagataaaaggtattattttctaatttgtcagcataagatgataggattttgtataagtttgataatgacttgaaagatgtctttccttatgcagtgagaatatagttgatgtaacactatgggaaaaatattccgtagctttatcatttaccatctatttaccttgagttctttgcttccattttgtagtcaatgacaacccaaatatatgtaacaattggttcgaggctgctcatcaacctacattatccggttgttgagaagtttaagacttagtaagtttgcattatgatttcacaatacagtgttagagtaaattattatttcacaatttgatttgattgtttttgactatgtttcttgaattgttgtcgtgaccttaacacttctcaagctcagagtcaaagcatcagtctgaacttaagtcagagttcggcttcttctcaatgtattcgtacaacgatttttccaatctgtctcaggttaggccaattgttgaatttataaacttagtcaaggtctgctttttttatgcacaagcatgctttgtatttttttacacacaaattaaaaatatatattgcattattctttatttcacgtgcataatttgtgttaggatacatattgcatcactatttggaaagcaactaa

SEQ ID NO: 33351 - DNA, 866 bp, Medicago truncatula
  Intron number 2 from transcript Medtr1g116960.1 (locus Med tr1g116960) derived from phytozome v7.0 (chr-ID MtChr1; po s 24897706 to 24898571 reverse strand)
tttgtttttggtggccgttctggtggtcagaggtctagttactgtttcagttttttttattttttttatttctcactatcttatcattacatgttttgtagatcacttagaatacattgagaaagagttaatcttgattatacttagaccctatttgggtaaacaactaaactataaatgtacatataagtgcttatgtattagctatttctataacaaaagctaaatggcatgtttggattgtcttaattgagcctatctactggcataagcatttgtgagactgtttgggagagattatgaaaacagtttatgatatgctcaaaagttgtttttggctcacttccataagctcacaaagatagcttttgaaaatagcttatactttatatgaaaatttagtatgactttattttatcttgtgttctataaataaattatacataagcacttatatgataagtgcttaatcaagttgtttatccaaacagggccaaaacgatctcaaactactttcatataagctattagctgttttcataagctatactagagagcctggtggaaataagctgaaaactacttacgggttgacatgtcataagctatttccttaggtctcccatacagtatcacaaattcaaacatacactatatcataaatgaattgttaatattagatttaagtaaaataatttttgctttcatagtttttatggtgaagattaatgcatctcaactcacatgctcttgctattttatgtgtgtgttgtgtgtgtgtgtgtgtgtgtgtgtgtgtttggttctcctaataatgtctgaattttacaggttgggggacttttgggttttggatactggtaaga

SEQ ID NO: 33352 - DNA, 932 bp, Medicago truncatula
  Intron number 1 from transcript Medtr7g070960.1 (locus Med tr7g070960) derived from phytozome v7.0 (chr-ID MtChr7; po s 14503324 to 14504255)
cgttatctgcagaaattgaaccactgcccacccaagtaaatttcatagcttactctatcggcggtaatgagatgacagttatactgtctctgtgtctggtcatcaatgagagtgattgttttgcgttttcctttcagaattgttcttgacacctcgtttgggaaatgctaaacaggaaaataactgcaatattagtctaatgcatatttacatggataagatgtatgcgaatatagttacatataatttataaaataaaggtagcatgactgattttaagctaaagaaaatgtaacatgacttctaatttatcatcctattatcttcatataaagtctagataaatgcatgcatgtacattatatgcaccccgttgaccaattaacattgttgaaacaaatggaaattaagcatcacttccgcatgtgcatatatagctagcaccatttgacattgatgtcttcgaacatttggtgcaactctcataatacaatccaaactggttatgattgaatttagttgttttccaaatagtgatgcaatatgttttctaacacaaattatgcacatgaaataaagaataatgcaatatgtatttttaatttgtgcgtaaaaaaactcaaagcatgtttgtgcataaaaaagcagacattgactaagtttataaattcagcaattggcctaacatgtgacagtttggaaaaatcgttgtacgaagtacgttgagaagaagtcgaactctgacttaagttctaactgaagtttgactctgagcttgagaagtgttaaagtcacgacaacaattcaagaaacatggtcaaaaatcaatcaaatcggattgtgaaataataagttactctaacactgtattgtgaaatcataatgcaaacttactaagtcttaaacttctcacaaccggatgatgtaggttg

SEQ ID NO: 33353 - DNA, 447 bp, Medicago truncatula
  Intron number 4 from transcript Medtr4g098500.1 (locus Med tr4g098500) derived from phytozome v7.0 (chr-ID MtChr4; po s 21213268 to 21213714 reverse strand)
cgtcttcgggaggtgcaacaataaacgaccaccaggttcatatttgtacccttaattaggcttaggccatgattggataaacattttaattcatcgcttatagcataagtgactatcttataagtgcttgtgtataagttatttccacaacaaaagataaaataaagtcaaaaaatttcatataaactatatgttgtttttataaattatcttcaagagcttatggaaatctcttaaattgttttcattagttttattctatcaagcatgctcacaagtgcttatgctagcaaataagttcaaataaaccaattcaaacatgctccaaatattagtctcatagagaagttatatcattagtgactcagtagataaagaaagtatcgtaaagttttgtttccattcgtgacaggtagtcttatattagatccaaggtcaagtttaaca

SEQ ID NO: 33354 - DNA, 848 bp, Medicago truncatula; identical to SEQ ID NO: 32848
  Intron number 1 from transcript AC233070_15.1 (locus AC233 070_15) derived from phytozome v7.0 (chr-ID AC233070; pos 65218 to 66065 reverse strand)

SEQ ID NO: 33355 - DNA, 563 bp, Medicago truncatula
  Intron number 2 from transcript Medtr2g071390.1 (locus Med tr2g071390) derived from phytozome v7.0 (chr-ID MtChr2; po s 16390767 to 16391329 reverse strand)
acaagaccaaaaaatttcacaataaaaatttcaatgtatgtatatttttaaaattctcaacttttcaatgttttcttcaatttctacacccccctcttctttcttatcattcaaaacctcttcaacctttgtaaagttgtcaacttttcaatgtcttgctgaatttgaatactttcaaccaagttatataattgctgaatttcttgtgtattttttgttacttgtctaatttccagattcttgttttttattttttcttatttatatgaattttgaaattttatagaatagaaagtgaggttttaacttgttttatgaaaaccacttcactttttcaatgtgatctattccaatacattcaagaaaagtaattcttgcttaatttgatggtgtagtttttgatggaagtaattaaatgtgatctatttgaatattaaaattgatattgcagaaattaatatggtctattgtttgaatattttcttatttcatgaagctttatctttttaatgttacatcttatacatttttacaatgacaggaagcatatagacagaaactgg

SEQ ID NO: 33356 - DNA, 324 bp, Medicago truncatula
  Intron number 1 from transcript Medtr4g018270.1 (locus Med tr4g018270) derived from phytozome v7.0 (chr-ID MtChr4; po s 3435211 to 3435534)
aggtttttagtttctttcaaattaattttcattttatcaaactaaaaaagcattgatcaaatacttttttcgactttatccttgtcttttcatatcctccccaagtagaataagagtaatatagtcgaatacatttacatttacttgtcattgaggatatttaatgattctctcaatcttcacacgaaacaactttgaaattgtaactaataattgcagcattttgaggcattggtggaagaacactttcgacaatgctcaaaacatatactcgttgcttgtaaggcatatcttgaaggagcaagcctattggaggtgaaaaaa

SEQ ID NO: 33357 - DNA, 1047 bp, Medicago truncatula
  Intron number 1 from transcript Medtr3g130620.1 (locus Med tr3g130620) derived from phytozome v7.0 (chr-ID MtChr3; po s 33196888 to 33197934 reverse strand)
aactgcttgttcaaggacatattccactctggctggtgagtgtttttttctttctttccgtaacactcatagtttttatcaaataatgccattttatatttttattgccgaaaaaatacattattaatttcaacatgaaaactatacgttaaaaagaaaaagaacatcgtttattttgttctgaaatctaacatttcttaaaagaaagaggacggtaatcattgaactctaaaccactactccattataaagatttatagtatcatataacgaataaattattgtcaaagtttaagttttaaataaagatacaggataattttatattgtatctatcgctgtagcttgtaacctctacttgaagtaaatgctaccaccattattagtagagttctacttgatggttttatcgaagcaacaaaatttaaaacatagtcaaagtggaaaggaacagaaatattcttgttacaagaactacaaagcctccatatattattaaaaatataaaaaaaaactgctgatcctacacgtaatattggtttgtccagtaacgtgtcagcaaatgggaacccaccagagtatattaccggaatcaagaatttaataacaaattaattaagttaaataatcgattatatactatattttttttttttggtgaagattatatactatataatattaagggattgtacccaaaaaataaaataatattaagggatctatgtgcatccattgattcgtacatgatacacaaatgtcatcatgtcgttagctataaaataaacggtacagcaagaaaaatcaattatatatgaataaaataccaccaatttttttgaatttggtaatacatatatatgagataatttatagtaaggacttacatggtacacatatgcataaataactaataacttccttttcttgaggagaaataattattatcaacttgtgacataaaaaggttattattggaaaaattgataaatacaaagctaaggaagagttgataattttacatgcagaaaggaacgtacataagga

SEQ ID NO: 33358 - DNA, 864 bp, Medicago truncatula
  Intron number 1 from transcript Medtr5g026460.1 (locus Med tr5g026460) derived from phytozome v7.0 (chr-ID MtChr5; po s 10688051 to 10688914 reverse strand)
gttacaagttcaaaacaacacaaaaccaacttcaccccaacttcatcccaacttcaattgctcggatttgagccaaatttcttcaagtaattaacaagtaagttattttcttcctatttacatgcaatgtaggttgtttagggtgttagttttcataattttagcaaaactttagtgtttaggttaggtttttgaaattgcaaattatgttagaatttgatgttataatgtagagtttttgctggcattgttgtttagagtaggtttaggtacaatgtagttcaatttgacgttgaattaacactaattgtgcaagtattttgaaatgcacataaggtgtttgatgaaatgcctaagtgataaaatcttgctttttttgtgtaatatttttgcaaatatattcaattttataatgtatatgttataatgattataagtttgcatttttgtttttttttttttggcaagtttgattagtttggacataatgatataataatcgtatatttgtgtaatgcatatatgttatgatgtttataagtttgtttttttggcattttttggcaagtttgaggaatgacgtaatgtggtatgttacataaagtttgatgaatgtgttatattaaattttatgaatgcctaagtttaatttatcatatatgcttaagtttaatttgtgataatgtaagggttagaacattactccataattttggcataatgataaccataatgtgataatatagttagattagatttgatgaatgcataagttagattaggataatgtagttagattaggtttgatgaatgcataagttagatgtccctcaggtgcctacgcaattgctgaccactgtgttg

SEQ ID NO: 33359 - DNA, 573 bp, Medicago truncatula
  Intron number 1 from transcript Medtr4g107690.1 (locus Med tr4g107690) derived from phytozome v7.0 (chr-ID MtChr4; po s 23579270 to 23579842)
ggttggaactattctcaaactcacattcactccaggtcattcatattcatatattatttatgtattattttttacagttagcctaacacaaccatacataaaaacctataatacttatatagatctttctaagatagatgacacttattctatgtaaaagacttttaaagtagagtctttgtctccacgacttgtaactagaagttgagaattgaagttacgtcttctaatgtgatctgtagttcaaattcgttcaaactatttacataaatgtttatagatgagtgtttccaagcataaatgagagaaaatgatgattgagaaagggtgggcacgattaggttgacaccactctaattagattgacactctttcaaatcaacaaccgcatcccaaagaaaatatattaataataaaaggaaacaaataactaaatacaaatctaaaggtattttgtgttaacataacccctcctataaaaaaaaaacagaattaagtgttaaactaacattgattgttttgattggagtttgaacaggtacacctggcccagccagttacaaagagaaattc

SEQ ID NO: 33360 - DNA, 760 bp, Medicago truncatula
  Intron number 2 from transcript Medtr2g008130.1 (locus Med tr2g008130) derived from phytozome v7.0 (chr-ID MtChr2; po s 1416660 to 1417419 reverse strand)
cggtttatttgggtaagtgacacatttattttttataacatatgcttggtccttaattatcgtttgcatgaagattttcttatggttatgttttgattcaattaacaagtttgaagagaaacaaatgtcaagtacgaatgtagtagtggtgaaaattccgaattgtcctagccacgtactataaagcatgtgtgactctttcttgaccattgatttgtatttctagtcactatatttacgtccacttttcaagacttcaacaaacaagcatatactccaactattttaagtggacatagtcgatgtttcaaactcagtataattaaaaaactaaatataatattgggaattatatacttatattttttggtggtggccgaggttccagatcttgtatatattatgcattgtccctatcaattgagttaagctcacgagaacgagaattatatacttattatattatatgtaaatttgcgcatgctaaagatgtttaaaaaaataagttacattgcaacttgtaaatttaataataatatgtatatttttaataaataattattgtttaacacgtacaatcttgcaaatgatatgatgctgatgtttgtttatttgatgctgattctaactattttactttttccaattactattgttgtgtcaacctccatttatatatttcatagtttacatatgtatgttttatttttatatttttcatgtaggggatcattagctcaaaacttttacttacaagccc

SEQ ID NO: 33361 - DNA, 642 bp, Medicago truncatula; identical to SEQ ID NO: 32548
  Intron number 1 from transcript AC233070_27.1 (locus AC233 070_27) derived from phytozome v7.0 (chr-ID AC233070; pos 112987 to 113628 reverse strand)

SEQ ID NO: 33362 - DNA, 463 bp, Medicago truncatula
  Intron number 1 from transcript Medtr4g159020.1 (locus Med tr4g159020) derived from phytozome v7.0 (chr-ID MtChr4; po s 40052123 to 40052585 reverse strand)
ccgacacttcctcctcttcctgcaaccaaattggggtcagtcttaggcttaaagttttcatttttaatttttttcatgtcatggtttgaaattcttgaattcaaatttatttatttattctcattttaaatttaagttattagcaatgttttttgtttgtaattagcaaaaaatatatactttgtattgaattgttgtgtaatcaactctgtgattgagaaattaggtaatttaatctcttgttattgacaattaagtatattttgattattttttaaattgagattcttgttaatagggtaaaagcgaagtataagttattggttcaaattagatgatggccttttttggagatttttcttcttcataaaatgctaacagtaatattcctttttttgtattgcttaattagtgtttatttgattcaggaaaccagaatctccaaaatcaaaatcaagaccca

SEQ ID NO: 33363 - DNA, 719 bp, Medicago truncatula
  Intron number 1 from transcript Medtr1g102790.1 (locus Med tr1g102790) derived from phytozome v7.0 (chr-ID MtChr1; po s 21186879 to 21187597)
aaaaagcaagtataaatatactaatatagtttgttacacttttgaaatgataaaggaaaaaaaaacaaaaaaaatatatattcatattgtgtttgttacatctgttttaatatcaaaatttattcttatctatttgttacatgtgttatttgtattgaaaattgagggtatttttgaaaagaaaaattcatcccaaaagtgttgaaaggggtaattttctttatatatagtataggtaagaaatataaaaatattgatattatttcctaaaaaaattatattgaaaattataatactagcaataaaaatttcaaaaaggttacaaaagaatttctccttataaatatattaatattttttagttctcataaaaatattatatatttatatctctttaaaaaatttcaggatgaagtttttttttttttttttgtcacaaggctaattaaacaaagaaatcaggaaaaagaaaagaaacaaatagaggcaaacaattccctaagtaatattaacttttatttggggaattctatggtcacatggctcaggcaaggcgtgtttagcacaaataatcattattctctgctgctctttggtggatttggtgcgctcgaaactctctttgtttagagaatgagataatttctattgtctctttgaaggtgaaaatctacaatttggcagcccttcttcattctgttttctctccggctttatcc

SEQ ID NO: 33364 - DNA, 802 bp, Medicago truncatula; identical to SEQ ID NO: 29865
  Intron number 1 from transcript Medtr2g006460.1 (locus Med tr2g006460) derived from phytozome v7.0 (chr-ID MtChr2; po s 656954 to 657755)

SEQ ID NO: 33365 - DNA, 855 bp, Medicago truncatula
  Intron number 1 from transcript Medtr1g146850.1 (locus Med tr1g146850) derived from phytozome v7.0 (chr-ID MtChr1; po s 32607436 to 32608290)
tccgttccatcccaacaagaaaccaattctcactggtcagtactcttttctttcttggataatcatattcgattcttgattccagttttgttcattgcgctaaataaatttaaggaatttctcatatttgtgtgagattgacccagattgcatttgtgtttgtattaagcctatctagaatcattaatctcgatcttttgtctttcattctctgctattgattgtatcgctttttggataataagtaattctttgtaatgaaactgtgtaaaacttaattgctctgatttttctgtgtgtccaacagtctcctgcttgttagctcatgttttgtcaatttgatgttttcaattcgacaggtgtgggtgctgccaatggaagatgcagatatgtcaatgtctttgtccattgaactttcaagaatgaatcagcaaagggaacttggaaaagatctaaccgcaacattacttcactatgttccaatttttttctttgaacttaggcactgatttcagttgcatagttacttgtataaagtcactgtacatgaaaagccatgtgttgtaggcttctttgtaaattttgaaagactacttaggtcatacagttgcagccatgaggattgctttgttgtatattgttgatttttcaataaaaagttcaatttcctgtctacattgtgtttgaatgactacactttttgcctgattattattcagttttcatgttattgctttaaaaatttcaatttgatgttattgcttgcttgtgaactatagtattattccatcttaaacctattttcataagctgaaagtcttgttattgctttcaggtgcagtgtattgtggaaat

SEQ ID NO: 33366 - DNA, 511 bp, Medicago truncatula
  Intron number 1 from transcript Medtr6g010680.1 (locus Med tr6g010680) derived from phytozome v7.0 (chr-ID MtChr6; po s 2165934 to 2166444)
gaaccgaggcatctttaaacgacttggtctgctacgtagattctatcttatctgatttcaaacactgttattctgaacccctaccattttctcataatgaacttgttaagttaatcttaatcgattccgcttttataattcaacttttttggagaaaatattatggtggggctctctttcaaccttggttaaaaagtcttatattatatgatgtactgttacttgaaaatcagcttccctttttcgttattgaaaaaatttacagtcgttcatgttccatatacaaaagtgttccttcttttcttgaactcactatccattactttaaaaaattgaataaatcaaaattgtcttttgataatggtgatattagtataaggcacttcactgatctgattaggatatttcatttgcaacatcctattgaaagtcggccgagtagagtcaagatcgaaaaacggataatacatatacagactgcaactcagttggtagaagctggagttaggtt

SEQ ID NO: 33367 - DNA, 1025 bp, Medicago truncatula
  Intron number 1 from transcript Medtr3g124270.1 (locus Med tr3g124270) derived from phytozome v7.0 (chr-ID MtChr3; po s 31445591 to 31446615 reverse strand)
gtttcaggattggtcgagtggaaatcattggtgtggtcttgcactatgatgacctacctgttatgatttgttttagtgtccacttttatgatctccaaaataaatcttcggtgggtgtgatttctttgatcaaacatgataaaatggtatgcatgaaagaaaacatgattttgtcttaaattttaatgattataaattagtatatagtatctttgatttgttgtagttcgttttgaattgggtggttttgtttcgtgaagtagtgtctgtctttttttatttgagttacctttaacatatcttgatggcatgatttagttggttgatgaagtttttgtgtattttatctatttgacatttttttaaaatagagtctcgtctgtttgttaattactttaatcatatatttatgtgtggcttggcctgagggtctcccctgtgggtctgtgttgtttacacttttgttgaattcgtcaatggtatatgatgtgttatatgtatacgaatttatgacaattttaaactaatgatgcacaattattaaattaaaatcatttttgctaaaatgaattacgaatgtaatttattataacgtttggaggttaaaaaatagcatttcgagtctttgaaaataacatcagggacagttattgttgttaatgtcatcctcgagttgatggttttaatgcaatccttgtgtcatgtattgttttttcacaagcaatgaaattttggtatgattaagcaaccacttgttacaccgttaataatagatcaaatatatgtagatgcataaattctataaaaatatcactgttttcaatgcactctcttgttttttttactcacttttgctgtaataaggtgtgattcatgtatgtggtgaacaaactataaagattattgattcatttcaacaaactttcacctttttttctttctatgttttacgggtttactgattcccttttttatttctttaattttgagagtcttgctgctatctcgcaagtcttgttagacat

SEQ ID NO: 33368 - DNA, 489 bp, Medicago truncatula
  Intron number 2 from transcript Medtr1g076830.1 (locus Med tr1g076830) derived from phytozome v7.0 (chr-ID MtChr1; po s 15463073 to 15463561)
gctatgtgagtttatttttcatcatttgtttgatgattatttagatgttttgtttttagaatttcagtttttgttagttgtttgaaattgagtatggtaattgttgtgtgtgtatgagtaattaaattaagttcaaatgttattgggtatgaatgtgactgcagtaccataatagtacacaatttgctcacacaaacatgttttaatttaatttaatcaatggtttaattatgtattgatgaatttaaatagttacaagtaattaggcataccccttgtataggtattttatcaaaatgtggataaggtgataactatggtagtaccttatccacatctacccattgtaactcctatatctgagtttgcatgatgtgaaaagtgaatatgttttgctattgtttgttattctttgctgtgttatgaatggttttggccgttttgtttataacatctaaggaaacattttttgaaatttacaggtggtgg

SEQ ID NO: 33369 - DNA, 908 bp, Medicago truncatula
  Intron number 1 from transcript Medtr3g068120.1 (locus Med tr3g068120) derived from phytozome v7.0 (chr-ID MtChr3; po s 15797597 to 15798504)
attcaataggttaggtccacttacttttttttagaatctttctcattttttgattggataatagaaaataggataggaatatcttataattaaaggaaatatcacagtctatatatatatatatatatatatatatatatatatatatataaaagaatactctttcactttctaactagaatgagtttactctattcgaattcattcgaatgataacaataatttaatagaataaaaactcgattttttaatgaaattcaactattccttagttttttttttacaaagagaaacttcttacaaatatcaagaatatctctattcttccttcaattcggaatactactgttgtcattttttgacaaaaaagccccttatcggatttgaaccgatgacttacaccttaccatgacgttactctaccactgagttaaaggggctccatttgagtcaattcccgaataaggaaccatccaatatggatatgagtttagtacatctatttgttactgcatatactcaaattttatatacattatagaatagatctattttttttacatagcaactttttaacgaacaataaattgaatttacctagtaagtatagttaaaaaaaatgattttttgatattggatttgataaatatcaatggaatggattttttcaaaacatattcgaattgaaaccatcttcataacactgaatgaaagtgaaagaaatgaggtgttaatgtcgcgcctgttccagaaaatcaatcattccctgaaaggattctctctttcttttgttttctttcacattattttttttatagttttatagattggtgattggaatgaacaatttcgaaatctatatgatattttaagggattctgaaagatccttctgatcgaatcatatca

SEQ ID NO: 33370 - DNA, 696 bp, Medicago truncatula
  Intron number 1 from transcript Medtr5g103520.1 (locus Med tr5g103520) derived from phytozome v7.0 (chr-ID MtChr5; po s 41478101 to 41478796)
tcaagaagctggcattcagttcccatgtatgtttaccttgggtaataaatcatgagaggattataagattctgtcaaacatctcgttgtgtaactagaaggataactcattaaactagaagggtaacaataccgatggagataaaagtcaaatgactttggtgaacttatgagttttaatctgcatatgattgtttggaacttctagccaacctgttatgtgggggtcatagaccactttatattgcaaaattcttgtgttattgatcactcattgcctgacttatactttaatcaacgcgtatgttttggttctattgcagcaactgataggtaaagtttagtgttggttgtgcttttgattctatttttaagtttggtagactgcttgtgagtatttgaatgacttagcattttagtccttgaagctgttagggttggtcaatttagtccgtcaatatatatttttcctataattatgcggggcttgtactggtttcttattcctgtatacctttgaacacttcttgcattccttcattatttaatattcttcttttgctgataattatatatcctaaaacctgatccacaaaagcatatgttcaaaatttgttctaatcttaaatcaatttcattggtatgctaacacctagattgtagaacaacaattactgctgaagatttgttagctact

SEQ ID NO: 33371 - DNA, 754 bp, Medicago truncatula
  Intron number 1 from transcript Medtr3g127610.1 (locus Med tr3g127610) derived from phytozome v7.0 (chr-ID MtChr3; po s 32399229 to 32399982)
ggagagcttttggagattgaagtaagtattggagcaataatttgtctacatttaggttagtcttcacatagaagggagagaagcacatgaaactatgagaaaagactaaaattgaggggctgctataaagtgcatcctagtgttgttggctcgatgatattttcacggccatcatttgttccaccttgctatcattccattgacatagagaaagaactcttcttgagtcatgcatgtatgtcttctactctgctgaagtttgaattctaaaatgtaaaatgttttgttttttataatagtttcccttgttgattgctggtagatatgtttcatgttgaattttagatttattacattgtaagaagagatttattttagaactgacatggtacttttcagggtagtacactgtacacctatgatcttcatatttccagattcacggatgctttcgtttttgttttattttagatttaatttagagtattcctttgaaactatatttgatgatgatatcgttatgttacacatggaatttattttttgcttggaattaaatccaagcctaatacagacaagaggttcctatacatacatgttttcttttcatcatagttctcaatttgaaaataaataatagcttatgagaacaaatattgttaatttcaagaaaaaaaaattaagcaaaatctaccagaagaattgtagatttccggttctttcaggttcaacgatatagcataacctggtgtgc

SEQ ID NO: 33372 - DNA, 438 bp, Medicago truncatula
  Intron number 2 from transcript Medtr5g018850.1 (locus Med tr5g018850) derived from phytozome v7.0 (chr-ID MtChr5; po s 6959122 to 6959559)
aggtgctttctcttcaatccaactaaatagacatatgattatatgtgacaaactgatacaaatttatgtttctttgttatattaaatcttctatcatgtgatataaattaactatttaagaataaaaacatgattagttttcaaagttgtctactgactagcaacctgtttggctaaacagcttaattatatgcttatagcataaatgcttatcatataagctatttctacagtaaaagacaataaagtaaaaaaaaaatcataaagtactgtaaattgttttgataggctctcacaagtgcgtataccagtagataagctcaaattagccagttcaaacagtccatagttagtatactattgcatactagttattactcactggtttcgcttctatgcacagatagtgaaaggttgtaagggttcaccattggcgct

SEQ ID NO: 33373 - DNA, 673 bp, Medicago truncatula
  Intron number 1 from transcript Medtr3g102480.1 (locus Med tr3g102480) derived from phytozome v7.0 (chr-ID MtChr3; po s 24980030 to 24980702)
ttggtgaaggaagaagaaggaaggtaggtaccatcacaaaaacacgcgtggcctttgttttccattaaacaaagctttttctaaaccttttaatctcagtctttggttctattttagccacatgtcacacatcaaagaagcaaaaaggagtaaatggaaactctctaaatggagcaaagatggactcttaaccattgtccttagggcactggttagcaaaacccataaactaatagtatgctataaataactttgagatcaaattaaccaattttaaagtatgagatgagatgaaattgaaagagcaacccttaaaaaaaattgaaagagtaaattaagggaacaaaattagtcactttagtccctgaatagaaaagaaaccatctttttagtcacaagatacatataaattgcaaaatagtccttaaatgtagactttgttgtcatttagttcgtaaatacagaatccgttggtcaatttaatttagtccctgaatgtaagtaccttagtccatgaaatagaccaacagagtctatattcaaggagaactgttttgcaatttctctaggttattaaagtgattactgttttccccatttttttaagccaaaaaagaattagtgcttgttgtgagtaggtcttatacagtcggactcagacaggtgaagaaag

SEQ ID NO: 33374 - DNA, 813 bp, Medicago truncatula
  Intron number 1 from transcript Medtr1g013780.1 (locus Med tr1g013780) derived from phytozome v7.0 (chr-ID MtChr1; po s 2664653 to 2665465)
tttgtgtgaatacaatacaaccttaagtgtatagggtgagttctttgctctctattttgtttgtcttcttttggtagttgaaaagaacattgactaattaaccaattcaattccactattttcaactgttccactcattacttaatctcaaagtaattaacttttatacatgcctttttgattagtaatgattctacaattttattctcttaattaacttgcttaccaagtaaaatataaaacatccaatcaaattttgctactctcttaactattctgtgtattttaaggttatttctatgtactttgcactgtttttcttaaatcatgtttaggaatctttgcttgtacttgctttgttattaagcaagcataattgttttgtcattctttaattggattcttttgaaattggtataatatgacacaacacatggaatttgcttcggttataggattttcaatttcatgagatatatgtattctaggtgttgcttgttagcactttttgatagattctctataaagaaactttgcagttcaatttttctgttttgctgttattactttcgcattcttgtcattatctccatggaaaaattcaagcataaatgcaaagaaattttctctgtgagagtgaaacttgttttatgtcaattctatttgcattaaatttattgttacaaataatagtagttgaatgcatagtttttttcgtgattgtaacatgattgtatgattcttagtcacactttttgttgaacatgttttttgatagagcataggttgtcttagaagccgcgaaaaacctca

SEQ ID NO: 33375 - DNA, 801 bp, Medicago truncatula; identical to SEQ ID NO: 31581
  Intron number 1 from transcript Medtr5g065530.1 (locus Med tr5g065530) derived from phytozome v7.0 (chr-ID MtChr5; po s 22931811 to 22932611)

SEQ ID NO: 33376 - DNA, 270 bp, Medicago truncatula
  Intron number 1 from transcript Medtr3g147170.1 (locus Med tr3g147170) derived from phytozome v7.0 (chr-ID MtChr3; po s 38014831 to 38015100 reverse strand)
cttccgccctcgacgtcgtcgaactcgtcgtatgttttcccattcccatgtctcttccgtaataaacctaacctaatttatatcatttataatcatgggataatgttacatgcatgcctatgcacataaatgaatcaaatccataatgacaataatataattttttaatccggtattttcgaatctatcgtttgtttttctgtttttgttgattttagggttatttttgtgataggtgagaaagttagaaacagacccacttttcaattc

SEQ ID NO: 33377 - DNA, 845 bp, Medicago truncatula
  Intron number 3 from transcript Medtr5g065830.1 (locus Med tr5g065830) derived from phytozome v7.0 (chr-ID MtChr5; po s 23061796 to 23062640 reverse strand)
attgcagctattcattaatcgtggtttgaaccatttgggtatgatttctctaaaaaaatcttctgcttattgatgaatttgatttagttgtggccttttatgagagtgatgcactatctcaacatacatagctaattcaccatgatatttaaatatattgcttgatgaactatgttatgatgagtcttgcatttgcatttgtacaaaatctcttatactttctttcaagaagaaaaaatcgaaaaactcttatatacttgattatgcactagccattgtctttgtcttattcaaagctctttttaagctaaagctaaacgtatactcccttacagtttgaatgtatatgaggatttaatatatttctatgtttttactccttacagtttgaatgtatttgataatatagtgggtattaaaatgatttctaactcaagctgcaacgcaaaagagatgcatgccaattaagtatatggctttgtttttttgaacagtttttaaattgatttttatcattaagctcctaaaaactaatactatttaatctctcttaagtagtacttatagttagttgcggtttaagattcattgttgaccgagactagcttagatgcttcccaatcaaacactataagatggtaacaaaagaagttatagaattcattgttaggtggaagattgataaaatttattgatgccaaagaagttatgctccttcattctcataaagtggttctgaaatttgatgaacacttggttgttttatctcttcttgagcaagtggctatttttttgtttatgtttgcatatgattagtattgtataatttatactttattttgcag

SEQ ID NO: 33378 - DNA, 785 bp, Medicago truncatula
  Intron number 1 from transcript Medtr3g123960.1 (locus Med tr3g123960) derived from phytozome v7.0 (chr-ID MtChr3; po s 31296400 to 31297184 reverse strand)
gacttccttcttcttcatctccatcaaattcgaccgtaatatctctattaccattctttttcatgtttacatgctcttaatctctttgtgattttttgtttctttttctatgtatgtggtatgaatattttgtgaatttaggcctaaatttataaatgaattcgtgtaagtctaacaattcaatgaatttcactactgggtatcattacttcaatccaatttcacaattggttctctccttgttaaacatatcattttgtgattgtgtttttgactcttctcaaatcaataattataataaatacataagatgtgactgtgattcataattttagcgtgttaaaggttctgatttgatttctgaacacaatagtgttattttgttgtttaagtgtaatacagaggaagaattacatgctcaaaaacaattatccatgcttcttggattatcagaatgagtatattttctatgtgtagacagtgatcttaacttacttaatttgaatggttgcatcatttgcattgttgaaataccatttaaccatatttggtttccaaatatcaaaccaaatacactctttcttgtattataatagtatttagtcatgccttaaagcttggtagtttatgaaattaaatgttgtaacttttgttgtcaaacataatataatagttatttatcccaattgttaagcaattgtttctgtcttttgtttatcctttgactctgttgtttgtttaaatgtgcaggtgatttatagtctatcttcctctcacactcaacc

SEQ ID NO: 33379 - DNA, 785 bp, Medicago truncatula; identical to SEQ ID NO: 29382
  Intron number 2 from transcript Medtr2g021750.1 (locus Med tr2g021750) derived from phytozome v7.0 (chr-ID MtChr2; po s 5595363 to 5596147)

SEQ ID NO: 33380 - DNA, 837 bp, Medicago truncatula
  Intron number 1 from transcript AC148178_8.1 (locus AC1481 78_8) derived from phytozome v7.0 (chr-ID AC148178; pos 67 770 to 68606 reverse strand)
gctttgtattttggaggtatgtttcagtttttctatttatagaggtttcattatttttatgttcgaatgtaaatttaacatctttgctttgttcaatttcgttgggtgtattttttatgagttttaatattagtttgttagtaatgattgtgagcctaggttttgttcttcttttgttttatttgttaatgtgtcattgattgaattgaaccttgtttattgtggcgatggattttggggagaactaacactccggcttgtttgtattacaaatggatttggagcccaagagattgtttgttacggtaaggcgcagcgggaggtctgtgattgtgccgctgttctggttttcggtcacatgctttttccggatatttgacctggtgcactaccagttatttgctgctgtatccgggttacagtttaggtggtccttggctctgttagcattttctggtacttgtgttttgtataaatgtcccgcatattatggcattattttttttttttgaggaggtacttttgtttttgtttctttcttcgtgagcttgtcgttaataatattagcccgattaaaaaaaaaaccttgtttaatattattatttaaattcacttgacgcaaattagtgaaattatacgttactgtgtttttttcttaaaaggttctttgaaaaaacgaaatgatgtatggatcagtgacatatatgtttgaaacttagcatacaatatggatgattcagtttttttaaggaaaattgtttccaagattacagagaaattgttaacagttgtcttcatacagatcaagaagggaggttcagaggttgtagacatacc

SEQ ID NO: 33381 - DNA, 673 bp, Medicago truncatula
  Intron number 1 from transcript Medtr3g151600.1 (locus Med tr3g151600) derived from phytozome v7.0 (chr-ID MtChr3; po s 40241941 to 40242613 reverse strand)
cataggtattactcaattcaaattcattttcttaatgtttgttgcaccggtatcaaaactatattttaatttatttatttcatcttatctaattatctaaactcttaatgaaaagttagaacaaaaattgcacttttaatttcaagtaacaattttgtcttttatctttttttcatttcaacttgtctttttggtcgaattttcaagcttcaaatcttatatttatatgcaaccatagatgaaataccatagttgaagattgaaaagccataagaaaataaaaacatgaatttgaagcttgaaaatctatagtttcaaaaatttagttaaaggacataatagtttgttggtttttatgtcttctgctatgttcagtgcataaaaacaaaaacaaaaaagctaaaaattctcattctaccatttcttgtgtctaaatttcaactctcatgtgcctgactacacatccagacctttctgctatttcatgcaaaaattacttggggtttagtacttaactatttaactctgaaatgaatccatatagttgggggaactatgagacttgcctgtccctctctccatcagcactagttatatataagggcttatactattatttaaacaaggtctatgtaagcattctgtgaggatgtttttggattttgatgtaggc

SEQ ID NO: 33382 - DNA, 177 bp, Medicago truncatula
  Intron number 1 from transcript Medtr4g018080.1 (locus Med tr4g018080) derived from phytozome v7.0 (chr-ID MtChr4; po s 3308738 to 3308914 reverse strand)
attggaaaacatcacaaccccttctcacgtttcaggtataaacatattcttcatcttcttcttcttcttcgtttcagtgatttttttgtgaatattattgttgttgttttcaacaatcttgtttgatttgttgatgttttaggtgcaaattcaaggcgtaattcattccaatcttgt

SEQ ID NO: 33383 - DNA, 589 bp, Medicago truncatula
  Intron number 1 from transcript Medtr4g096290.1 (locus Med tr4g096290) derived from phytozome v7.0 (chr-ID MtChr4; po s 20222741 to 20223329 reverse strand)
cacctcggtcttcatcttctagtttaatctgctttgtaagttttaaatttctttcttgatttttgatttttgtttctaaaataatttttgaaaaattgaattcaatcgcgcaaagatcttttttcttgaaacttcatcttacggtatcatggagtcataaccaccatctttgatagcaatttaaaaaattcaagaaaattttcttgcactttccattattttcctgcattttccttttattgatttttatcgtctttcttcaaattttgtttatattcccttagagctatgcttgatcaatattgtttgagtctttaaaatatcaattctcactgttttgattgaaactcggattgaagtttgaaatccaaaattgttgccaaaaccttcttgatagtgttcatcatgatcttcatcaattcctctctacatacttattcttttgttatccctgaatttggtgattgcaatagtttgtataaatgattttcactcatgagtcatatttgtgacatcgaatgctgagttctatactttagttagctgcattatgatagtttatgcagtttcctgaactatttgctatagc

SEQ ID NO: 33384 - DNA, 360 bp, Medicago truncatula
  Intron number 1 from transcript Medtr5g017430.1 (locus Med tr5g017430) derived from phytozome v7.0 (chr-ID MtChr5; po s 6241826 to 6242185 reverse strand)
ttgctggtgacttcttggctttggccgaatcagttgttcgttgaactggtattcatttgattattatctatttaatcaaaggaatgtcattttattaacaacttttacttattcaacccgtacaaatatataaacctaaaaaaaaaacatacaaaaatatagtttgagaggtaatttattattttgtaatctattactttttctttacgtacgtataattttgacctttgagaattatttgaagaatacgaggaaaaaaatgtgttcccatgataggtggatgaatttgatgagtatgtatgaaaaatattaacgttaatggtgatagtgtgtgtccaattcgtaagataaggttgagag

SEQ ID NO: 33385 - DNA, 704 bp, Medicago truncatula
  Intron number 2 from transcript Medtr3g064540.1 (locus Med tr3g064540) derived from phytozome v7.0 (chr-ID MtChr3; po s 14750152 to 14750855 reverse strand)
gaaaagcacctttccggaagtgtcatatctcatatgtgagtatttttcagaaaattcttgcgtgtgcatgtaacctttatgcagagtcgagtatagtagttttcgactcttcggcaaaaaattgttagagaatcttaatataataaagtaaattatcaatccccgtatgttatttttgtaatttaataaatgctaaatcattcatcgatgttttaaaatcaaatagctttagctggtatttagtaaaaaaagaatcatgaaacaacgtcgagactgtaaacttcggacatacaatttgctaattttacatcaacatatcgtaactaataagcatgtagtattcaaaatggagttgcttgaaataattattgactcaaactgtttttccgattagatgtcaaacatattattgatactaaatagataagacacatagttacagataactatattaaattggcaatcctaaattatcaagtgcaatataagaatactaagtgaaaattttaaggcctggtctttcaagtgtaattattataattatgattgaacattttttgggatcaaattttatggccaaacatggccctgcttttagcctttgtttatgatatgtggatcaaatgttttttccaccgttgactaactgagatgcaaatttttatgtccgagaagactaaagtttatgcatatattttcagtgt

SEQ ID NO: 33386 - DNA, 685 bp, Medicago truncatula
  Intron number 2 from transcript Medtr1g087150.1 (locus Med tr1g087150) derived from phytozome v7.0 (chr-ID MtChr1; po s 17467207 to 17467891)
atagaaagagcatagctggtgcattttcttcttctttttttattatgttttatctactagatttgacatatgcgggggatcaggtagctcagctggtttgaactaagggataagaagttggagttcttgggttcaaacccggacaaaggagtaaatattaatctaatctaactattaacatttgtcattcaaaaaataataatttgacatatgcttaattgagtaaataaccaatttggtctttgaaattataggactctattagcttagtctctcacattatcaataattcaaaatgatcgttatattgacaaatgtcagtaaggttcatcccctcgttaatatttacaacagctataatgacaatgacattaagttggtaatatcaggaatgaatttaaaattaagtggatagtataagagatatgtttgataacaatctatgcataggaacaaactttattaacattttgcaatttcaggatacatttggaattgttagtaatgtggaggactaagtcgatacaaacctatatatacggatttaattattcagcaatcagaaacatgctattgatttgtgaataccatcatccagttgatgttaagaaatttagatggagtgttgtagagctgatagcaatgtgcttgcttaatgtaggtggcagtggtggggtaggtggtg

SEQ ID NO: 33387 - DNA, 630 bp, Medicago truncatula
  Intron number 2 from transcript Medtr5g005550.1 (locus Med tr5g005550) derived from phytozome v7.0 (chr-ID MtChr5; po s 239282 to 239911 reverse strand)
ttcatattcaaggtatgcaagcatgaaaaagacatcgtcttttttgttttctttcttctttcttccatcttgtttgggcctggaaggatttaaatccttctgatttgttctcttctctaacagggaaaataagacatagcagtcgactttgttctgtttagtttatttttctcccagctcatatgttattgtaactcaaacttttaaagaaccagcggcacactcgaaattttgggaggacatgaggttgagccttctttggaagaaacttgaaatagaaattagaaactgttgttccacatcgattatagaaacttgggttatgttcaccttacaagtcgactttttgtggttgagatttgtaaggttgcaacatagctttaatttaggaaagtagcaagcaaatagggattaatctaaattatgcaaatgcttttgtacatcaaagatgatgtgtagaaataatattaaaatcaatattgttagtttgatttccttatcctgatccaattttcaaaactaatgaacaattaagtgttcttttttattattgaatctatcgatttataatccatatattatggattgtcactgctaatatgattgaaattttgtttgtgaggtcagtca

SEQ ID NO: 33388 - DNA, 633 bp, Medicago truncatula
  Intron number 2 from transcript Medtr6g102060.1 (locus Med tr6g102060) derived from phytozome v7.0 (chr-ID MtChr6; po s 22563115 to 22563747)
caaacttgctaatcttcctcctctcattggcctttgtaagtcattcttattattacattacattcattcttaattacttcggttttttttcttcttcgcgcaattgcagagattatcacttcaatttttcatttcactcttttaaacctaaagtattttgcttttcacgtcgttttaactttaatgacgtgaaaaaaaatacataatatttttttttgtattatttgatgtctcggcaacctctcaaggagtcgagatatactgctgtcaatcggtattatattgcggtaagagagggtgaagagacatcatagatatttttttctttctccttttaccccttttaatggtggtggtgtaaagaggaaattggatttccggtggttatagcggggacttgaccgtccgatcccattgttaaagtttataattacaatctcaatctagtgaacatgtaaaaacaaaaaaaagaacaaaaattctagtactgcatttaagttttgcccatattcaaatcctatgttctttttttttttttttttttttctctatttacaaattaacaagtgattttgatttgatttttggtgaattaaaatatatcagattcaagctttgtgccaccattagtgt

SEQ ID NO: 33389 - DNA, 891 bp, Medicago truncatula
  Intron number 1 from transcript Medtr4g134810.1 (locus Med tr4g134810) derived from phytozome v7.0 (chr-ID MtChr4; po s 32582805 to 32583695 reverse strand)
gctgccgtggttggtaaataatcttacttgaacttgtttctaagtgccaatgtttgccaacatatatagtctgtccctttggttttttatatttcattcatttttagtacatatgtatactattgggatctatgaattatttgtgtcctatgttttagtttttggaatagtggctatcacgatgctacaatggttttggggttcagttatccgatttaacgacatagtatcccatgcatctctcactttctatttactagctaattggtgggatttacctaatcggctctcctctaaatgcttgtgttgttagcaaactagattcatgtagatcacaagtattgtgatatgtattaagtaactcctatctctttgtattttgctttttcctttggatataatcttgatagcaataaactgaaataattcatctcaggtcatgtttgtttctgattatttgctatttaaaaaacgcttttaatccaaaattgcttgaactctttgattgaaagttttttcacagaaaaacatactagttcaaataaataccattttctgttgggctgaatgagttgaactatccatgccaggcctatttcaaactgaagttttcaactgaattagaaatcaatcttaacttcatgactcaattttacttaatttatcctccgtagcttgtggagctcaatgatccaatcttttattgagtcttcatacctttttctatatgttttgtttcatttttactattgaaatttgtctcttaactttgtctgatgctcttttcttcattttatttgcactccaaggtttttcctttattgaacactaattcgctactgagtttcttgtccaggtacaatttttgtagccacttttcctgcagctgtt

SEQ ID NO: 33390 - DNA, 628 bp, Medicago truncatula
  Intron number 1 from transcript Medtr3g140470.1 (locus Med tr3g140470) derived from phytozome v7.0 (chr-ID MtChr3; po s 36351767 to 36352394)
tgtgttggataagaaatattttgttaacttaacttgtaagaaattctttttttgaggggttgtaagaaactctttgtaattctttttttatttacctcaaatggattatttgtataactgtcaaaaacataacgataatgtggtaacatttacgagttacgtaagagttttgcaaaccgcataatcatatgatactagtggcattggttctgcatttgggtggttttaatttgatttcgtgtgtactaagaaaatttgaatttatagtaatcttgccaatttaccaaatgcatccgaaattaatacacctaactctagtgaaacttgttatccaagcttcatagaaataactaagtatggtagtgttaaattaaggtttaatagcattcttcctcaatttgtgaaccttaggccttaggcttccattccaattcaagcattgcttatcttttctgcaatacaaagcaatatgggaaataaactaatacacgaaggaaccaatttcatttttatttttttcccttttttattgagattacttaaaagggtcttaattataatgtatgaaattgatttgatcatgttttggatagtttatcctgacaaaagacaacttttgggacgaaaa

SEQ ID NO: 33391 - DNA, 896 bp, Medicago truncatula
  Intron number 1 from transcript Medtr4g125780.1 (locus Med tr4g125780) derived from phytozome v7.0 (chr-ID MtChr4; po s 29732536 to 29733431 reverse strand)
tgcaaaaatgtatgttgatttgcaatgaagaaattgtactcttttaggcgtggagttggtaattgctttatgattttattattaaataacaaagagaaaaggtactataaagtaggaagtggaaattaagcatgttatatagtgaaaattgttccagtgctgaccttttggtttgttaattttagcatgttatgtaggatcaacattggcccattaatttcactgtcaaaataacttagatttggaccagtggttttggggtaaattcttctctcatcttattaacaagagaatgattaagttgaaatgtaagatcagaaatcgacaatctaccaaaccaagccatatgtcttgtcctcttttgtttggtataaccatatgttttgaagttggatttagtgtattccatttggattttaactaatagaagaatatttattggaaaaagtgagttagataatatgctactagcatgaccgaagttgacaagcaactcgcattttcaaaattaagttttgaatctgattagctcatcttcaaatataagttatccgatcaatattgcatagtctagatcatacatccaattatttacatttagagatgagaaaattatattcaaaatcctattttaaaatatagattgttcgtttgagatatgagaattcaaatcgtggatatatatcctcaattaagtagaaaaaagaatttcaacatagttttgttttagcacattttgtggatatatagtcatgtaaattgacctaaaagcttttgttagttagagtgaaatttttcattgtttcaaagatttgaatatttctcagtgaacaaagattattaatatatggattatttcatttgaaacaggttcaagtgtattaggaaactcatct

SEQ ID NO: 33392 - DNA, 491 bp, Medicago truncatula
  Intron number 2 from transcript Medtr2g104890.1 (locus Med tr2g104890) derived from phytozome v7.0 (chr-ID MtChr2; po s 24865069 to 24865559)
aaggctgcaaatcaattgttcaggtagcttacatttatttatctcttttggtattttgtttttatgtatgaataacaaatatgactttacatttgtcagttttaataagccttctataggagaatttgtttttgatatatgtaaatgttatatattagccactttgctttaataaagaatacccagtttcgcaaacctgagtgtcacgatctatctcctacaacttatgtaggatggagatagaataggtgagagttttattagatgaaataaccaaacgagcttatacattattgaagaaggcaaagtcttctcatatagattctgatgtcacttttttatgctgttcaactttaacttttcttatggactctctttcaatgacaatgaaagttttttcatggtattttaattttttgattattcaatatacatttaatattattttattgatcattctcatagaattttaattgcagaccgcaacgtag

SEQ ID NO: 33393 - DNA, 514 bp, Medicago truncatula
  Intron number 1 from transcript Medtr5g075310.1 (locus Med tr5g075310) derived from phytozome v7.0 (chr-ID MtChr5; po s 27411389 to 27411902 reverse strand)
gccaattgttactttttaaaaaaatatttttaaagtgtttcattttttttttttggttataaattttataaaatagaatatttaaaaaaaacataaaaagatacgatttttcttttgatacaattttttcttgttaaaatttcaaaaaatgcttaaaataaaaagctattttgagtaatttctcaaaaatcattctttaaagatatcttttaaaaaatatgtgatttttatcatcttaaaatatccaacgatgattagctaagttactgaataaaatcactattttaaattataatagaagagttctaaataacttctactatattttagtattttctcattaaaaacatttttacaaatataaagtaaacataaactttttaatatataacaaacgagtccataataacactcataccaactttacatgcaaacataatatatatatatatatatatatatagacacacatatactaggtgaggagtagagggtcttgtcggcggagggatat

SEQ ID NO: 33394 - DNA, 503 bp, Medicago truncatula
  Intron number 2 from transcript Medtr4g158540.2 (locus Med tr4g158540) derived from phytozome v7.0 (chr-ID MtChr4; po s 39835514 to 39836016 reverse strand)
ggttgatagcagttcctcacgtgccttttgtgccggtatgtatgattgagtcatattagagagaaatgccattagtttatgattcttttaatgcaatattgaagcatgtttctagctcaaatacattaaaaattagtctcttttgcagatgttctacttatttggttttgagtggtaggtaaggttttgagagtcaccattaatggtcaatgcaggtatggatattaaaggggttgttgctgaaatacagaaggacaaaagcacacctttagtgcaaaaggtcttgatatatattatttgttaatacatgtttatccagttgcattttttacatgcttcattggatatatatagtttgattctttgtcgcttttgccatcatcatcatccttctttgctatgcaatttttcttatagtttctgttttgtcaagtaattttgtttatctattctcgatgaccgcttacttggtaaccgagatcttagtttatctgcaggcggtg

SEQ ID NO: 33395 - DNA, 1036 bp, Medicago truncatula
  Intron number 1 from transcript Medtr5g095460.1 (locus Med tr5g095460) derived from phytozome v7.0 (chr-ID MtChr5; po s 37837078 to 37838113 reverse strand)
agatttctctctctcccttccatcaacactctaaagtacgtatctttcacactcctactcttttctacacttcaatttcattcttttctctaattgggtcttcaattttctttctaaactcattcatccaaaataatcaacttttcatgattttcattaccttcaatatcatacatacctttatgcttattcatcattctgaaattgcagcatttttacatgaaacccaattttaatttttcctgggatcatgattagggtgataattagaactcaaacccactattaatttggtctcaaattgctacctttttcatttctgctataatactaatgttcacattatggaaaaggtgaaatttttaatcctaaccctgttattatgactatcttcatggatttggtttgtttaatggattcatcttgtgtaatctttttactcgtgttattagaatctttggaattaaatagttgattcatgttattttggctaattatgtgtggtaagactatacgagataggtttagaaatgacattagagactagagaggaagttggggtagcagctatagtagaaaagacagtggaaaataggcttaggtggtttgggtatgttgaatgttgattatgtagtaaggagggtagaccagatggagggcaatcgaatcactagagttagatgaagacttagaagaactataagagaaactattaagaagatatagagattaatttggatcgaagtatggtttatgatagaacattatgacgtaatttaatttgatctacgtagtcgacgctatttagtgggataagggttggttgttgtttgtttcttgaattcttttttgtgttaaattacttttgttattagattatttggaattaaataattgattaatgttattttgggtttacctttttgtcccccttttcaatttttatgaattcattcctggttaagatttatatgattttgatttctagttcaattgtgcagttactgcagatcaaaactttttttccttgatagat

SEQ ID NO: 33396 - DNA, 569 bp, Medicago truncatula
  Intron number 2 from transcript AC233679_8.1 (locus AC2336 79_8) derived from phytozome v7.0 (chr-ID AC233679; pos 44 765 to 45333 reverse strand)
acatcctgccgatttcgtctataaagttataggtatgtttcttttattattacttattgcactcacacggtcaccatacatgacactgacacattgacactagtaaaaatttgagaaaatgaattaactgaacgtaatcacatatccaatgtggtgtcggtgacacgcctttaatcagggatgtcggtgttacatagatgatctggaactgattttgacaatgatgcggttttattctttttgattttggtctttcggagctgttggttttgtggctatcaaagtaatgcaagtgaattcactatataatggactaaacaaatggatagggtgtgtttggaaatacatatcttcatcaataatgttacaatattagtcaaaatataaggttgaggttacctatttttattagtaagatgatttggatgttaacttttgttaccttattgaggttctcagtttccatgtttatggattatttgagttgtattgcatttaatgtaaggtttatttaaagaaataatgttaaaatagggcaaaaggaaggaagtggtggtagggtgggtttt

SEQ ID NO: 33397 - DNA, 663 bp, Medicago truncatula
  Intron number 2 from transcript Medtr3g122850.2 (locus Med tr3g122850) derived from phytozome v7.0 (chr-ID MtChr3; po s 30659146 to 30659808)
taagagaatcagaaattgaagatctgttctacaaggtttgagctgcgtacttttcctgttttccatgttatggtgccttcagttcatgtcttcatgatattagttcatgatattttgtgttttgttcaatttgtttggctactgaatttttctatatcttcctattgtctggaacctacctttacaccattaggagttttgaactgaaaatttcttttactcaaacctgcatttctacttctctatttattttttgtttaattactggaaatcaattacaattatgttaaccgattagtaaaattcattaaacatatattcaattcagatgataacagttaacgagaaaaggtttgggtagttgtttgttgttttaactgacaagcagatagtttgcattattcaattcttatgacttatgaaggataaagaatcatatattcttaactacttacagccatgtattttttctgttgacctccttttcctttgaatggactatagtttgcttagctttgttaacttggatttggattttacccttagttatatctgttgcttgattcttatcttatacgtagcttcaagggtcaatgtttgaggttgattgttatgtactaacatagtcatgttacaatggttttccattattcccttaacagt

SEQ ID NO: 33398 - DNA, 871 bp, Medicago truncatula
  Intron number 1 from transcript Medtr3g104320.1 (locus Med tr3g104320) derived from phytozome v7.0 (chr-ID MtChr3; po s 25889934 to 25890804 reverse strand)
tactaaacctttgaaggttgttattgctggtgcaggtaacatatacccatctttttttttttttttttttttttttgtatcaaaattgtaactttgctgcgaaatttgttgtttttgttctattgggtgctttttaaatagtacttgtagttgactaattgacttgacttgagctttgttttctaatggtggtggaaattatgaagcacatataccggatatgacactgacaggttgacaacggtagtaatttgaaaaaataacataattgagtataatcatacatgtggtgttcgtgtcggtgttggacacaaacacaaggtatgcgtttgatcagaagtgtctgtgctacaggtggaaagtgagaatgggataggattgttatttatataatgagcttcttgcttgctgtttttggcagatgtgttctttatgcatgaaaggagtttggagttcttttcttatgtataagctgttttcataagcagagtgtttatggaaataagctgaaaatagcttatgaacatgttataagttgttttcattagctatgcccaacaatcacacaattgcgtatgctagtagataaatttgataaactcaaataatccaacaatgagtgaaggctttatcacattgtgtgagatcctgtgccaataaagaaaaaaaaaattatggaatagactgtagcattttcagttttttataaagtttcaaatgaaaggtaccatattattgtgttggatatttaagcaaaaattgattataatatttgtgtacgagttttggcctctttctttttcttttggattgatttgttcttcaaattatcccaggactggctggtttgtcaactgcaaaatatttggca

SEQ ID NO: 33399 - DNA, 699 bp, Medicago truncatula; identical to SEQ ID NO: 32070
  Intron number 2 from transcript Medtr4g026100.1 (locus Med tr4g026100) derived from phytozome v7.0 (chr-ID MtChr4; po s 6336036 to 6336734 reverse strand)

SEQ ID NO: 33400 - DNA, 978 bp, Medicago truncatula
  Intron number 1 from transcript Medtr2g021190.1 (locus Med tr2g021190) derived from phytozome v7.0 (chr-ID MtChr2; po s 5357608 to 5358585 reverse strand)
ttctggattgtgtgtggaagcttggtgttaaagaggtcttggagacatgcatatttcaattttttgtatgacatgagagataaacttctttatctgatgccatagtatatttatattttgcatgtgtgaagtattgtttacaagttatatagtaggttattcgagtttaacttgttgattaataaaaaactttgctatcagatgtttttaaataaatttactataaggatccttttgtaaagttcttagggtaaaatttttgtacacccccattttctctattacccaggtacaatattttttctgctagaatacccctatcagaaagtatacttttggacggtaacacttgataaacacataatcattggacatacaaaatatgcttgaaatttcatcaatatacaaatttatagagtaacaaattcgcaatcagatatatagggagaaatgataatacaagatgcttacaacaaacagcatacattcaaattctaacaattaaatcaagattatgcatgtcaaaagattggtggcaatcaataaaaaaaaaaatcaacgtattagattttataacactaattgaatttcaatgaggtcggagtaccctgaagcacaaacaggaagtcctgcatcaagactattatatcagcactagtatcatgcctaaaatattttctattattttgttcatttagaatacagtttaagatatttcttgacaatgaaacatgaagtataaaccaactaaagtgtcgaaagaactagttgaattgtaactgctgatttcctttttaaatatatcttttgcatcaatgtttcacctcccaatatttggaacaaatctaaacggaagcgtcaaagaaagaccacctaggaaaatcaattacttcatttgctagattttttagaagaaccttttgagttcatacacattctgaactttttttcaacactaacatatctcttttcttctag

SEQ ID NO: 33401 - DNA, 291 bp, Medicago truncatula; identical to SEQ ID NO: 31625
  Intron number 2 from transcript Medtr4g161190.1 (locus Med tr4g161190) derived from phytozome v7.0 (chr-ID MtChr4; po s 41121522 to 41121812)

SEQ ID NO: 33402 - DNA, 792 bp, Medicago truncatula
  Intron number 1 from transcript Medtr3g062100.1 (locus Med tr3g062100) derived from phytozome v7.0 (chr-ID MtChr3; po s 14236863 to 14237654)
ccctaatctcgctgttgagaagcttctctctcaaggtttttcgattcttgagaatttttcgctatcgtttttttttgttcggttacgtttctaacgttttgattttgttgcatggaagaaaattagtgaagatgatgaaatcggtttttgatttttgtgtgtttgtgtggttttgatgttttgttacggttttcaggagtgaaaaaaaagtgatttttgagtttattttataggttttgatgatacatttgtttatcttgtttatttgtttttttaattattgatgatacatttgtttatgtttgtttaattgtttctttaattatgaattacggacaacggatatagacacggacacgtcgatgctgatacatttgtttatgtttgattaattgttttttaattatgaagcatggacaccggatacagacactgacactgacacgtcgattagttttttttttttttttgaaacagtgacatacttaagtgtaatcactgttgtgtcggtgttggacatcgagacaaaccttcgatcagaagtgttgatgatacacctttaagttgtttgtgatttatgaatcagtttgatgatttttataagttttgcaaatgatcattagcggttggttggatgccgacatagctgggatgttagttgtatatacaaatgatgggtagtcttttataaaaaatatattttttaatgcaaattgtgtgtgaatttaattgtaagtgtgcaatgttttaattgtagatacgtttcgtgaggtgagaagcaaacgtgaaaaa

SEQ ID NO: 33403 - DNA, 801 bp, Medicago truncatula
  Intron number 1 from transcript Medtr4g021770.1 (locus Med tr4g021770) derived from phytozome v7.0 (chr-ID MtChr4; po s 4248519 to 4249319 reverse strand)
gtctacactggtcatttttccattttcgccctttggttttgtacgaacacaggtatgtatcactattatttgttttattgttttcttaatgtattgctgaattgcatgatggtcatttctccactacatgaggaactaatgctatgggaactcggttccctaaagcttggttattttgcttcactgttttttgctttctgttctgttccttgtcttcatgattatcttttgtaacaaaaaaaatgttggctacttacttagccaatataaactgtctaatgctcccttagttaagtagtaactagtaaacgtcgttaacaaatttccagtaacaatattttgggttcaaattgctgccatagcaacatcaagtcatgatttggatagatattgctgataaccattgcatatccacactcaaaaatgaaagaagcaacgtcaaactcaattgattgtgagttaatacggccatcttgatctattggtggagatgggctgtgcagagacaggatggggtctacgaatatttgatgtcctcgatgattttgttatatgtcttctatagacgtctgttttatttagatgaatctaggatattgtgataggatcaacaactcaatagattttgtcaggtttctggttgttgtttaaatctatatcgatgttggaattttggtttgatttatattctgatccctctcaaactttttggcacatgcttagatgtttgaaaatgcacctgtgtgatttactctcccattgcatttttacctaatattgcttgtttttctgttcagggca

SEQ ID NO: 33404 - DNA, 702 bp, Medicago truncatula
  Intron number 1 from transcript Medtr3g069000.1 (locus Med tr3g069000) derived from phytozome v7.0 (chr-ID MtChr3; po s 16411162 to 16411863)
tggttggtgggtaaattacccaccattcttcaaaggtaatttagaaaaaaccatattataaatgaacttcatgacaaattgttcgggaaactcgaactcaaatcttacatgaaacaatctttagacattctttatttactttcggaccaaactcataattattattaagaaaatttccaataaaacttggaggtatgcaataaaaaaaaaaagacatatatattatatgcctcaaaataatttatacatattattggaaagaaggataaaattccgccaatagtcttctatttaactttttgtgtgtcgacatactcgttgttttttatattaagttattcattaaattattaaacttcaaacaacatcattttcatctatttctattacaaaaagtcttatatggcaataatctgaaaatatatgacagggagagtaataaaagagctcaagattaaagctccacgttgaggatactcaacaatctcctttgaaatagattcaataataatctgattataacctttatccaaagccaacttaactccatggaatattgaaagaatctctatcgtgataatggtacaatccctcctagggtttgtttctaattaggagtttctgatgataatagaatttacaagtttgagacttgtttgtgaggtagagaacatccctcctagggttcttggttggttgaac

SEQ ID NO: 33405 - DNA, 977 bp, Medicago truncatula
  Intron number 1 from transcript Medtr5g010420.1 (locus Med tr5g010420) derived from phytozome v7.0 (chr-ID MtChr5; po s 2566546 to 2567522)
tacaagggtgtatgggaataaagggtgtctatgtatcattactcttctgtttattcttcttttagggcatttctagtcaaatgcttctgaatgctgctcttcacccaacacttttcgatcgcgccctgcagcgttgcctaaattacctctgcgcaagttaagtcacgcagtgtgtcttaacttgcgcacgttgtattttgtgcgccacttaagtagcgcagcgtgagttaactcacgcagcagttacttaagtcgtttatcagcaaaacagagacaaagttcctcatttttccaacttctccaaacacgaaattttcccctccaagtgcgattttcaccattcttgtaccattcaaagccaatttctcccacaatatcaagtaagtgatgattaccctacttcagtgcatttaacttgtagaaattttagtttttttttgaagaaatataacatttttaggtttttaaaatttttgcttgcatgttagttttgatgattgttagtgatgaattaacttaggaattgttgtttagaagttgtttagagtacaatgtggtagtttagggtttacaaattgttagattacctagttgtttgaaaattgcacactatgtgtctggtaaaatgtctctatggtaattattttgtttttttggattgtgaattatcaaattagttagcatatggtttgttaattttgattataatatgtttgactccaatgtggtagtttacggattgaaatgacattgttgaaattttagtattgttgttgaattgttgaaaatgacacaatgtgcgtgtgaaaatgtatcattaaatttgtgttatgttaaatgttgtgcaaatatgcctcaaaggaatacgtctcagagaccgcctgagccacctcaggataggagtgacagacttagggcagggaggcctgcccctactggtagtgcacggagggagaaacaagcattacgtcctccta

SEQ ID NO: 33406 - DNA, 939 bp, Medicago truncatula
  Intron number 3 from transcript Medtr1g093410.2 (locus Med tr1g093410) derived from phytozome v7.0 (chr-ID MtChr1; po s 18979937 to 18980875)
atagctttgtggtatggttctcactgaaaatttatttcaaacttgctcatttaaacttctgtaaacctgttctttccttttattattcaagacaattaattgagaagcacatttgaatgattgcaacaggttttgacatgtaatgctgttgcatacataaaaattgaatttccactgtcatagatgtactgtccttttctttgcatataattcataatattcatgcattgctgttattgcttttatatagctatcttccaaagtgtcgtttctcatatcaatttattatatatgtgaagtttgaccaaagatggatctaagtgtgtcaatctagtctttaaagatttaattttactagcagaacttgcagaattaagatagatgggaaagagaaattattcggaagggactctgagataagttgttgagtgggtgaaatattgataagcttcattagtttcgatacggtcatccaccatgttcgtccatgacatgctttttgttacagatgtatgtatagtgagggatgggaggttacggtgcatgacatatgcttgatgcctggactgactgcaacggcaagtcggcaagttttggggtagcagaagtttggcctagttgcaaggtgcaacattcttcttttgagttgtgataaaattttacagttagctttataaaaaacttgcaattagatcaatgaattctcagcttgataaagagactgtaatgcatcatatcaatagctgtgaaaactgtctgtatttttcatatgtaatgtgtttatcctttgcttagtcattggatttttgggaaattgttgtctattttgacctcatttaccttgaatggcccataaggattgtatatttgttgctcattattttctgtcccaatatttatgcagttctcgaaagcagctgggcaaatcaaggaagctat

SEQ ID NO: 33407 - DNA, 661 bp, Medicago truncatula
  Intron number 2 from transcript Medtr4g033410.1 (locus Med tr4g033410) derived from phytozome v7.0 (chr-ID MtChr4; po s 8247139 to 8247799 reverse strand)
gaatttactttgtatttattgtgttttttttcttgtgcgtttgttgtaattttcattaataaaaagattcaattaatttaagaattatttttctggttgtgtttgatttcgagagatgtactttctgagtttgaaaatgaagaaattggaaatgatttttcacatttatgagttttaaaatggaggtgaaaagattaattttctgggttgatgaatttctaaaatttttgctgagattgtttgtgaaaatgatgattttgttgttgattgttgttgatgaatttctggatttgttgttgttgttattgatgaatttctagatttaaggattgttgttgttgatgaagatgaagaagaacaaaaaaaattggtgttggtggttcaccattacatataatggtcctgcaatctaatggctgaaatcatatctgagatattagacattaaaaaaaaatgctaaattacatttttggtcccttaactatttaggtagtatcactttggtcccttgattaaaattcgatttattttggtcccttaatttctttccgttatatattttggttatttccttttaattcaaaaacgttaggttttcttcatcttgaatttcttgacttgtcaagaaaccgtttcattgatcgaattcctcatctaggtc

SEQ ID NO: 33408 - DNA, 962 bp, Medicago truncatula
  Intron number 1 from transcript Medtr4g033410.1 (locus Med tr4g033410) derived from phytozome v7.0 (chr-ID MtChr4; po s 8247813 to 8248774 reverse strand)
gtgtatactgaagaacaacttccaagagaggtattaaatcatgtctactatttgtaaaacccaactgtctttctcacaaaagtaagatcattttgggccttcaagagagtccacacagttgaatgctagataaaaataagactattactttttccaacctacttatttctcacgtgttctatttttttcaaaaatacccttggttcaaattatataattcgaactagattgccagaaatttttgaattatataatctgaaataattcgaagtagattgccagaaatttttgaattatataatctgaaactgtcttttaccagaattttaatttgacattggtttaaaatcataaaataaatgcaaatataaataataataataataaaaggacaaaatgagaaaaaaaggctaaattacataaatggtccctcaacttatttgttgttttagatttggtcccttaactctaaaattttctttttcaatcattcaaatatgttatgtcagtcagtttgatccatgttagttaactttaatcccaaatgtcttaggtggaccaaccttgtaggtggtggtccaccatataacttattaattttttaatttcaaccttttgatttttttctttcaaaaaaggaacggctagatcatttaggtatattgtatgttaaaatgaatcatcaacacataattttttctcattttcttcctcttccaccctcctttctttgaattttggagccaagaaattcgaattcaaattaaatttgaatttcgaatttgtgtttttattgttgttgctggaattcactattcccttcattatggaattcactattcccttcattatggaattcactttgtgttgttgttgttgtgttaataatgttgttctagaaatcactttgtattgattgtatttcaggtaaaagaaagggaaagggaaatcgaaggaggtga

SEQ ID NO: 33409 - DNA, 658 bp, Medicago truncatula
  Intron number 1 from transcript Medtr2g052450.1 (locus Med tr2g052450) derived from phytozome v7.0 (chr-ID MtChr2; po s 14239306 to 14239963 reverse strand)
ggtcacgatctccgatctcttttttccatctaccaaactctgatagctctctctccattatgaacacagattgccgccgaaaaatttatttgtcgcactgatccacgcacatctcgccgactccgcaaatgccgccgcaacaacaaatgaccttcgtaattgtcaccggtaactcactttctcccaccgattcatgtttcatgttcatattgattgtgtgaattttgctaattttgaatttgacattagggtttgaattatagtttttcattgattttgtgtaaattatcattgattatcaattacagtatagccaaaatggtttgattatcaattttgtgtaaattttgctaattttgaatttgacattagggtgtgaattttgtgtaaattatagttgattttgatatgtgattgtgtgaattacaactttttcttcattgttagaatagttttttttttctttttttcattgttagtttctgtaatcgttactttctctgtgtttcagtctcaattcaataccttgcaatcatgctacttctttgtttatgttcttctacttgaattatggatgaatttctgaacgtttttttattttaattcttaccttttaatgttctgaactttttgttttttttttaatttgtaggttcta

SEQ ID NO: 33410 - DNA, 367 bp, Medicago truncatula; identical to SEQ ID NO: 32056
  Intron number 3 from transcript Medtr4g087240.1 (locus Med tr4g087240) derived from phytozome v7.0 (chr-ID MtChr4; po s 18321994 to 18322360 reverse strand)

SEQ ID NO: 33411 - DNA, 851 bp, Medicago truncatula; identical to SEQ ID NO: 30151
  Intron number 2 from transcript Medtr6g017790.1 (locus Med tr6g017790) derived from phytozome v7.0 (chr-ID MtChr6; po s 4291238 to 4292088)

SEQ ID NO: 33412 - DNA, 612 bp, Medicago truncatula
  Intron number 2 from transcript Medtr6g059100.1 (locus Med tr6g059100) derived from phytozome v7.0 (chr-ID MtChr6; po s 10514005 to 10514616)
gagaagaatcagagaggaggaagaagtaatttggggatttaaatccctaaattgaagaaacagtgtttggaacggaactagagaaagagaagtgaagaagttttgaagacctccattaccagtttcaatcctcttttgatttaatttcaaccataaactccaccaccaatttcactcaattcatcacatataaagaaagaaatattatagaaaattgagacaaaaattaacaataaatacaaaatatggtaaggaaaatcatgtgggtttggttatgacattaaagcttatatttttttaatgggtttgtattgcgtggctctgaaaaagggatgaagttggttggaattggagtaatgataagaactcatcctgcagagggtgatgaagatgtggttgtgatgcattttgttagttaaattaacgacagggactaaacacggtaatggagataaaatatagggattttaaaaatatttattgaaatgtagggactattctttaaaaaggtgcaaaatgtatggactaataacatatttaaccctttattttaactaccagatcttaataatgcatcaacttttcaaggaactcatgataatgaataagaat

SEQ ID NO: 33413 - DNA, 647 bp, Medicago truncatula; identical to SEQ ID NO: 28285
  Intron number 1 from transcript Medtr1g096720.1 (locus Med tr1g096720) derived from phytozome v7.0 (chr-ID MtChr1; po s 19842436 to 19843082 reverse strand)

SEQ ID NO: 33414 - DNA, 506 bp, Medicago truncatula
  Intron number 2 from transcript Medtr2g025550.1 (locus Med tr2g025550) derived from phytozome v7.0 (chr-ID MtChr2; po s 6798127 to 6798632 reverse strand)
gtgctaattgaacgtattatctacacttgtaagtaacatcacttttctttaatattctttctattaaacaaggttttcactcattgtttgatatgattattatatttggcctcacatgattttattttataatgtgaggaatatatgcagcaagcatggatacaagaaacagccaaggcccaaaataaagcatatctaaaatagttcaatttatttttttattaaagtgtgaagatttcattagtataaagtgaactcaagtcattttcaataaggatcattaaacatgtttgaatttaatcctatctaacttaaaagtcatataaagaatgatttgtaattggtcgacaatgtgaaaagttttatatcaaaggtgcataaaaaattcaagattaagctcgtccagtaattcacattaacaagtgagataattctcatgccttaacattttcctagtaagtgatgataacaggtgtttgtgtcgtcaatgtcaggttcaatagttg

SEQ ID NO: 33415 - DNA, 829 bp, Medicago truncatula
  Intron number 1 from transcript Medtr5g036360.1 (locus Med tr5g036360) derived from phytozome v7.0 (chr-ID MtChr5; po s 15141802 to 15142630)
ccactagttcttctccaacacattatacaggtatgttaatgcataactttgtcttctttaaactaatcatgtgtctcatattatgtcttttttttaaaagtaattcacacttgaaaatgattaggtgttttttttagaggaaaaatgattaggtgttgaattgaacactaaaatggtgtgtatagtcttaaaaaatccatgttagttagagtagttgaaagtagtggttgaatagttaagtgtactatattcaattaaatgaggtaatcattggaaacaaattagtaaatatttttttggtattttaaaatgacaaataattttaagatgagaattaaacaaacacttacagtgagaaaggtaatattttttaacaaatcaccacaattaaggcctttggtctcataccacctcatgatatccggtataaggtagttgctctttaagccctccgtcttgctatgaagccctccagatttatcgaaagatatatgtttcgatggtgtactttttaactccttttatctattggaatgtatgtttcgatggtgtatttttcttgttttaagcaacacatggaacctaaagagcaaccatttacaaaattgtcacggttttgatgttttgggccggttaatgggcctcggccctcggctcttcacacttttaatgagtgcgtcttataaggactgtacctttaaaacctctgatatacaatcatgggtgtattgtaaactaagccccttgattagatttatttaaactattttgaatattagaatttagatttatacatgtaattaacacattgttattctattgacagtaa

SEQ ID NO: 33416 - DNA, 1010 bp, Medicago truncatula
  Intron number 3 from transcript Medtr2g088480.1 (locus Med tr2g088480) derived from phytozome v7.0 (chr-ID MtChr2; po s 20023288 to 20024297)
ttgatcgtatgctttgtttcattcagaatttcttgttgcattcatgtttcgcttaaattcatattactgtcatgatctgtcaatttttttttcttttttcaaatatttggtagaaaaatatataatgtgagttttttttttttttttttttctttttataatttagcgtaaatatgtaatatgactgttgattatggtattgttacataaacagattgattttggtgtttgtttgtaaagaaaataatagtgtcataatttatgaagttgttgtattttattttaatgtttggtaatgaaaagatgtttataatatttggttgaaatatgttgttagtctctatagaatcagacctgttcaatttcaagtttagtgtctgtttggataggacttatttgagtctatccactgacataatatttttgagagtttttgggataatttatggaaacaacttatgaaattgttcataagctcaaataagctgatccaaataggccctagtttatgaaaccaatttacctttattttagttttttgctatatgaataaggctaggttgttgttgttgctataggaatagcttatacataagtgattgtaatgataggtgcttgtgctataagctgcaagtaagctttttatccaaacaggttccttaataaattgtatccactgttagtccatttctgtaaactttttatgaaaataggtgcttttagttcctccaaataacccctacgaagaggaaaataaggactgaaagtggatgcaatttatttagggactattagtctaaaacatatttattcataccattttttcaattaagatttttgttttccaaatgttaaagatgttgtattgtttacatacagttgtttagcttttttatctgagtgaattgtaatatttttgtcatgttatgaactattttccttgtgagaataacaattattgttttgaaattgcaggaaaatcaactttgacagattcccttgttgctgcc

SEQ ID NO: 33417 - DNA, 555 bp, Medicago truncatula
  Intron number 1 from transcript Medtr2g037560.1 (locus Med tr2g037560) derived from phytozome v7.0 (chr-ID MtChr2; po s 10315978 to 10316532)
cttgttgggtcccacctctccttcaaccacaggtaacaaacaaacaaacaaacaaaaaactacctttttgtttctatttcatcgtacccataatcatttttctgatttcttaatgttgtttatgtttcattagtttaagggttggttcatttcatgttataatagaaatttcattcatttttgtttatgtatttatactattgtaaaatgtactatcttagtgtaacaatcatgtttgattcctccttagggcatgttttgattgacttattttttaatatatgaaaaaacagcttatgcaaaaagcttttatgtttattcataagttctcagtaaccaaaattgtatcttcataagctgttttttcgtaaatttctctgacaagcttatgaataatacattaaaacttatttatttgcataatctgttttgcgtcagcttaaaaataagccaatacaaacaagcccttatcatcattaaactgatgaagccatttgaaaaaaaaaagctcattttacaggataaaccaccacaagagataaagaaagagcctaa

SEQ ID NO: 33418 - DNA, 641 bp, Medicago truncatula
  Intron number 4 from transcript Medtr1g025810.1 (locus Med tr1g025810) derived from phytozome v7.0 (chr-ID MtChr1; po s 6461377 to 6462017 reverse strand)
gggtacaggtatgagttacaggataacattgtgcatctcaattcccacttattcgtgctggtcttgttgaactacttgtcgactgatgatcttatgaatcatcaaggatattttggtaggaaggggctgatgtgatgtacactggactagaatgtagctttaaaaaaactggactagaatgtagtctagatacactgttcattctttttatcctcttcaaataccttgtactaaacactagccaagtatagagtgctgcaacaaaaaaaattaacggttgttatttatatgtgtgtgcgcgtgtgttggtatagacttttgagttgccaagtcagaaagtgtggggttgttattattgttgttgtagagtcttgatcatgatgagatgaatatataaataaccatggggtactatgaactaagttccgcaaccaaagaagggatagcttttgtatcatgtacatcgcattcaatgctcataaacaaagagagaaaacatttgcccatcaattttctgtttatgttcagttgatggagaaattattctattatttcagcttggtgttagattagaatatcaacaacatatgtaatgcagactcaattgtggatatctaatctaattatttacataataggat

SEQ ID NO: 33419 - DNA, 684 bp, Medicago truncatula
  Intron number 1 from transcript Medtr4g009100.1 (locus Med tr4g009100) derived from phytozome v7.0 (chr-ID MtChr4; po s 1378623 to 1379306)
attgcttcattcaggtccatttttctttgtttctatttataatgatgcattttcttgtgtattattatttcataacaatgaagaaaaaaatagggttttattgtgtattttaataattgttattattatttggtcatttctgattctgggtctattatcttattccaggtttttgttcttatctttaatcaataatttcttggacaaatttgtggttgttttgattgaaattagatttttgaattttttgattcaacaacctttttacttttatatctcagtttgactgaagtcatgttgttaagttgattttgttttagatttaggtaatgtttggataaacagtttgattaagcacatttactttaagcgattttgtttatgtatacgttatttcaataaaattattttcaatatatgctatactatattagagaacttaaagaaataagctgaaaacaacttatggacgtattataaactgtttccataagttttttcatatactctcagagttgcttatccattagataaactcaaataaatcaatccaaatagatacttaatgtttggtgtgtatttctgatgtttaccttttctctatggtatagttgagtcagcacaattagacctcatttatgttttgaaactaaactattgattttaattgggtttgcatcaggg

SEQ ID NO: 33420 - DNA, 683 bp, Medicago truncatula
  Intron number 1 from transcript Medtr4g143070.1 (locus Med tr4g143070) derived from phytozome v7.0 (chr-ID MtChr4; po s 35763772 to 35764454 reverse strand)
ctgggtaagaaccctaatttattttttattttttttttgtaatgaacttattttctcgcaaatctaaacatgcattaaaaatggaaaaggtgagtttggtgattaaattcgccaatgtggcagatctgaatcctttagggcaacgacattgtgcaacaattatggatacctttagatctgaagaacaaaaacttctttcactaaatccaatggtaatctccagtgttacaaattcattaaatctccgcaacttactaatgcattgaatttaaataatttttatgatgtcttccgacaattaaatcttttagttttaaaatatattttcttaccaaggggcgatcaggatttgtaattctcaactcattttcctttttattaaaagtgtaggtttaaatcagattgagtctactctaaaaaaagagatagactcattaattcccccatatatataatttttaatcggagaagaaaaatattttattaaattgaaactaatttctactttacaattatttttacgagatttgaactccacccattgaagttattaaggtagtttactcatgtatatatcaaataagtgaattataaattttgattttaacgtttgatattttgattttgacctattgtttctttccaattgcaataggtgggtgttacaaaagtattgcgaggcc

SEQ ID NO: 33421 - DNA, 451 bp, Medicago truncatula; identical to SEQ ID NO: 32885
  Intron number 1 from transcript Medtr3g073430.1 (locus Med tr3g073430) derived from phytozome v7.0 (chr-ID MtChr3; po s 16983006 to 16983456)

SEQ ID NO: 33422 - DNA, 821 bp, Medicago truncatula
  Intron number 1 from transcript Medtr4g135000.1 (locus Med tr4g135000) derived from phytozome v7.0 (chr-ID MtChr4; po s 32660766 to 32661586 reverse strand)
aagttagtgtttcttctgctcacgtgtacgtccttcatttgctccatttcaaatttttattgtccatcttgccatcttggtaatagtaggtatgctaacataagaccattcacgggccttctcctagtgcattaagcttatggggtaaacggtccttgatatcatgctcaaatatatttaatctcctttgggcaccataaatcttttggatacatcttgttatttgctattgacgaagagtcttgatgtaaaggttggagttgttgcaatgagattagatagtcacaggttcaagttgtgaaaccagtctcttacaaatggcaggactatctataatagacttacaacgggcgcaactcttccctaggcccactatggctagagatttgtagcactaggttgccctttttatcttgaaatggtgacatcaaactaaaagctctaactattgatcttttctcaaaataaccatataagtgtgcgtgatattgtcaagagattcccagtttcctgataatgttaatttattctctcaaaagataccatatttgcattgtattctaaaagaatcaaaacatgccacaaaacatggtaacatacagttttttatatattatttagaaattttgttttttcttttcctctgtaccgtggtttattttttatgcacttttccttttcttatttcttttgatttcagaaaacctgagttattgttgcattcttcatctttattttcttcataattattgattgtaatttcttttgacagataattgacatcaggcagcactgcctttacaaaacattacgagccgaaa

SEQ ID NO: 33423 - DNA, 890 bp, Medicago truncatula
  Intron number 1 from transcript Medtr5g104170.1 (locus Med tr5g104170) derived from phytozome v7.0 (chr-ID MtChr5; po s 41761074 to 41761963 reverse strand)
agaagcaaggtgcggttgcacaagtttttggtaggtttgatagttattttggagggcgtttatactttggttttgggagatgactttgtggttttggtgtttagtttttattggtttcgggggccctcaatggagggtgttttttgtaaaagtttttatttgatgtatgagtgtttgttttagtgttccgcatacatatggtacatttttcctttgtatgttgctatttaagtctcctagcctagccttcctcgtgctagctaggattctttgcgttttgaattaatttcattttagcttcttcaaaaaaaatattatatatattatttatgatgtaatacattttttttcttcattttttaacaataaaagtacatgagatatgacaatgaatattcattaacacaaatagacatccactacatgctctattggatacaaatatattcaagctaaatgaatatttagcggattttgaaatatctctgtgtatatgcagatactaacatccatcacattatttattaacaatatttattaacaaatgcaattatgttaaaaagcaattattagttgtattgtgtaggatttcttcatcatcatttgacaactctaaaaagcattaacacataaaaacataaaaaatattaatacattgcattttcaatttgactatgaaatttcttatcaacaataaacaagaatttgaatattatgtaagagtttctttcatgtggagaagttttatattaaaatatgacatattattaattttactcatttactaacatgtatgaaaaccgacaggtaagaataccatgaactccatctttgtatccattaattgattgataaccaaaatatctacttattttacattactcagtttc

SEQ ID NO: 33424 - DNA, 914 bp, Medicago truncatula
  Intron number 1 from transcript Medtr5g074490.1 (locus Med tr5g074490) derived from phytozome v7.0 (chr-ID MtChr5; po s 26895470 to 26896383)
agctgctggatcagcttagaactaaatgtgtgtcatctcactctgctatgctgaaaaagcttttggatgatatgcatgaagcagctaaggagaaagagctgaattttgtgcctctgctggacatcactcctttctatccagaagaagagtacatcactagggctgctagaattcaggctggatttaaacgaagaatgagggaaaaggatgagctacttcagaagaaggatgatcagatcaagtatctcttagaacagttgtataagcaagcccaaccttagttgcacacccaactctagcttgttttttacttttgttcttcgtagctgtgtccttgtatcttaatcttctttatatatattatcattgtttctggatcttgtgctttttcaccttcaatatgttttacaagctttaactctgatgatatttactgtttaatgctgcttgctctgatactctttcttttgtttctattctttttgttgatgacaaaagggggagtaaatgtatagtatttgttaaggcactgagccctactataaccacttctaaatttcttttaaatacttctgatttgattttataagtattttattgaaatttaattaataagaatagaacttagggggagcttacaaacctcaccttaaagatctattagactcagggggagcttacaaacctctgtcccagtagtcaacttattaattagatcaacaacaattgaacattttaaatactattgtttgtcatcatcaaaaagggggagattgttggaacaaaatgtgtttcacaatgaaccttattaagttttgatgataacaaggtattaaaaattgtcaattggttattactaataattgttcaagtgtacaggaccaaaggctactcaagttatttcaataggtctt

SEQ ID NO: 33425 - DNA, 581 bp, Medicago truncatula
  Intron number 4 from transcript Medtr5g046190.1 (locus Med tr5g046190) derived from phytozome v7.0 (chr-ID MtChr5; po s 19397151 to 19397731 reverse strand)
ggtggcttatttaaaaggtacttctataatgacagcaaaatcattttagcatctaccttgactaataatgatttattatcaccaatagtgccaagatcaaactggattcatcctcaaataatttgtgtcattttcttgttgtcctattttcttatttctttcatttccttgtgttttgtttatttgtaaaatttgagttttttttagatctctgctggttcattttctgtttacactcaattatttgattgttttctgtagattgattttatatttgggtaattgtaatttatgcagtttctatagattgattttagcattggcagttataactgtgtgtgttagttagcttttgttgtaagttaaaccccactgagtgaaggtcagactattcgcaaacgttggtttctaagtgtgtgatattaaatcatgatagcgatttttgatgaagaacataaaatctgattggtaggcatgttttctttttcagatcggaaatcttatttccttcaaattttctgatgcattaaaatatgatagcaatttttctgtttctaaatgtatgatatctttttcaggtt

SEQ ID NO: 33426 - DNA, 502 bp, Medicago truncatula; identical to SEQ ID NO: 32483
  Intron number 2 from transcript Medtr5g097490.1 (locus Med tr5g097490) derived from phytozome v7.0 (chr-ID MtChr5; po s 38840205 to 38840706)

SEQ ID NO: 33427 - DNA, 718 bp, Medicago truncatula
  Intron number 6 from transcript Medtr4g136760.1 (locus Med tr4g136760) derived from phytozome v7.0 (chr-ID MtChr4; po s 33498357 to 33499074 reverse strand)
aaaagcttgccgtcaaggtaagatttaataagtatacctttttcctatacatttgttaggcgtgttcttttctcatttttcttagacggtcgataatgttattgttaccatatttgaaagccagtgatgctagatcacaatgatttctaattctctgtcgtgttttatagagtcatttctgtccagagcaactgtatgttgtagttacacacattttgagtataacttttttgattaatctttcctattactaggaagatcctgattttgttttgatatgcttactattcctatgtttaaatcacaaacgtaaacaaaaaggaagtttttgatgtaatatgtattcacttcaattttttttatacacgaattgaattttgtagcatgttattgaaggtttgcatcctggacttacttcccaattccttcagatgtcccaaattaactacttgagctacgccttggggactgtatatgtattcaattgattaattaattgcttaagtaaataataaataagattaatgaaatcttgcataacttggccactgttccctgtcttatttcctgggaagcattcaatggtttcattgttttgtgacttttgtctgaaaattaatgcatctagaaagaagctgttgtatttttgtcttgcttagtcggattgttctcttcacttgtaggttgagaagcttggaaaagattcactaattaactg

SEQ ID NO: 33428 - DNA, 725 bp, Medicago truncatula
  Intron number 1 from transcript Medtr5g072940.1 (locus Med tr5g072940) derived from phytozome v7.0 (chr-ID MtChr5; po s 26048841 to 26049565)
gctccaaaccaatatgtaagtacgtgtaaaatagataattaaaacttctcacttctcagccaattactttcagccctgttgactctgttagacagagttttaacttttagccatatcataagttaaatattctaaaacctaagttgtttgatgaaaataacggaatgatatatgttttaacattggtgtgaatccaaataccaacaatacctaataagctgctttggatctaataagttctgtaattgtaaagattatggtttgtggaatttaaaaaaatcaaagagatccaagagattaaattgattgatgatttcttttatgtaattgttcgcgattagtgcaggcattatttttctcacgaagtaaagtggtccgaatccaaaatgttagtccaacatataacgaacagacagacacacaattcttggaaagaagtttcaagaagatttttgcagatgttagggtcaaatcttatctgaaccattatcatcaagaaatcttaaaattctctggagaaaaccgcatatgcctcgttcgatggggattgaggaaccttattcaagaatggagaaaactgattttatagagaaaaatcactttaagattgtgcttgaagatggagatatgaagcccttgtgtttctaggatgaggaaactgttgagggtatgaggaaatccttgcattaggcagtgattgttaagttgctagggaaaactattgg

SEQ ID NO: 33429 - DNA, 991 bp, Medicago truncatula
  Intron number 3 from transcript Medtr5g074810.1 (locus Med tr5g074810) derived from phytozome v7.0 (chr-ID MtChr5; po s 27084750 to 27085740 reverse strand)
attcttgtaagtaacttgaactcatatcaattcatttaatagattcggttacattcatttttctctttgttcttgatctcataacaagacgtgttttaaatagaagattgtgtactttgaattacggtgaaagaacatatttataaaactacggatgtgatcgttagtgggctaaaattttatggattttatcaaattaatttaaaatcagtatgatgctaaagttacaacaataaacactggtaatggaattatgcctacattgtattcttccaaatgaattatacatcagataagttatgcggaacctccacaataaaatggtatagttgagaggaaatatcaacatattttaaatgtaaaaacaccttttaatttttcaatcaattttacccatatacttttggtccaatgttgtatctcatgttacttatattataaaaatggagtcccaagctctctccacaataataatatcacaggattggtcttcaagagttgcacatgaaaatacattgacttacttaaataaagaaagtcttaataccatagttttaaaactcggttcgatcatcgactgaataagggtgttgaatcactgagttaatggtcgcgtggggttaaattttcataaatgttttgtatcgtacattgatttattattgtggagagagcttggtactccatttttatgatataagtaacatgggatactttgtatattaggtcagagagattataaacaaaggaagccctaatattattagggtttcctttgtttaggaaagtcaatgtattttcatgtgcaactcttgaagataaattttgtgagatactccatacgttttaaaatgagtgtcgctttagtaaaaaaaaattgtttcaaaatgaatgtcactttacatttccaatataactttaagagagaatagtcaaaaacccccctgaatttgcaggtttcttcaattacccccctgcagttcacaaaacg

SEQ ID NO: 33430 - DNA, 559 bp, Medicago truncatula
  Intron number 2 from transcript Medtr6g069700.1 (locus Med tr6g069700) derived from phytozome v7.0 (chr-ID MtChr6; po s 12938551 to 12939109)
tgctagagctgctgttcctagtggtgcttcaacaggtaaatgattggtgaaaatttgatttgattttgtgtttgtgtgtgatttgaggaatgttttgatttggtacatttttgtagtaatttattgtttgtgttgtgaaatagaaaggaatgttgaagttgatgtgatgttttgtggtttctaattttaactaaactgtctgtgacatgtgtgtactatgtagtaaattattgtttatgtttttgcatgaggcatgtgacttgcgtgtgctatgaagcacggacactttagattatttagatttagataattgaatgcctggcagacaaaagtgtctgattcaaccctgacacatgtgattacatttaataattttcatttttttcaaattattgttagcatctatgtgtcagtttctatcttgcttcataagcttttgtgtttcaaaaggtaaattatcggtgtttgtttgagatattgaagagaaaattgaatttgattttgtgcttgtgtgttgatttaaggaatatttggatcaggtacgttttttgtggtacat

SEQ ID NO: 33431 - DNA, 608 bp, Medicago truncatula
  Intron number 3 from transcript Medtr6g069700.1 (locus Med tr6g069700) derived from phytozome v7.0 (chr-ID MtChr6; po s 12939055 to 12939662)
tgcttgtgtgttgatttaaggaatatttggatcaggtacgttttttgtggtacattattgatcgtgttgtgaggaaatagaaatgaatgttgaacttgaagagatgttttgtggtttttaactaacatgcgtgatgcatgtgagttgtgtactatgtagcactcaatctttagattattgaatgtgcgtcggacatgtgtccgatgtaacattgacttatgtgtaatgcattttttggaatattttgatttgctacacttttgtgtgtgttttggtaagtaaattattgtttgtgttgtgaaaaaatagaaatgaatgttgaactggaattgatgttttgttgtttctaattaaatatgcatgatgcatatgacgtgtgttctatgtagtactgacatttcaaattgattgcacgtttgacaagtgtccgatgcaaaactgatatatgtggttacgtttaaccattaaccactgtcatcttctcaaattattatcagtctctgtgtccgagcttcatagcttttgtattttattgattgtaaagtttcatctgcttatagtaatatgttatgactcataactcgttttacattttgttaaaggtgttt

SEQ ID NO: 33432 - DNA, 711 bp, Medicago truncatula
  Intron number 1 from transcript Medtr5g086320.1 (locus Med tr5g086320) derived from phytozome v7.0 (chr-ID MtChr5; po s 33096769 to 33097479)
ttcctggtcaagtatggctttaacaatggtacttctttttatcccctcaaaaaaaaaaaaaaaatggtacttctttttcatgtgcccaagttatagtttacatatcacactattttattcttcaatttcttgcacgttgccctgttcttgtttgtaaatattgtttaggagtgccttgtatggaatttctctctcaacttcgtggactgattgttaatctctaatttagtataactgcttgttaatttatcttgtgcccttcaaagtcaggatttcatcatgtgaactggattaactgaattggtattggcaatatgatgtaggattccatttgtaagccttagtacttagtagtgtatgaagttaaagttatcaagttgagaggtcaaggaaatagtgtctaaatgtttgagaactacatggtaaataattttacaaaacataatattaaaaacaagggtaaagagttcctgtgagcattgctcagttggcagaaacatgcattattatatataggagttggggttcgaatcccggacatcccacttattcaccttaaaaaaggtaaattccagccactggaaatacgtctaggtgctcacgagcagaaattgactctcggtagcattgattgaactaatcaaagactgaatttttaagagaaattcagatacagaattcttctaggtttcaagcacggtgcttcacaaa

SEQ ID NO: 33433 - DNA, 673 bp, Medicago truncatula
  Intron number 1 from transcript Medtr3g136560.1 (locus Med tr3g136560) derived from phytozome v7.0 (chr-ID MtChr3; po s 34503435 to 34504107 reverse strand)
ttcaggctcaatcaaactggcaatcgtcgacaaaggtcagcagcatcaatcttcttcgaactttatatgattttagttttttcaattcgtgtattctctttcagtaatcgtgtttactctttgaatcattctatctgcatttgtgaattttaattttgttatctccctctcttcatcatccgttaaatttcgattcattttcatattcttaatgtagcgattttgaatttctaattatcattgctgttgtgcttgttattatagcataagctttaatatgatatcttgataaactatgcttaagagtgtaattgtttttgtgtgttcttttgatctgtgttgccatcgccatcgtgttttttgctctattggaccgaatcgaagacttgttccgtgtccgatgtggataccacacagacacatgtgattacactcaattatttcagttttctctaatttctatcggtgtcggtgttagtgtcatgatcagcgtctgttccttgtgttggtgcttcatcatacttcataggttttcgttaatactcattttttgacaagatatgattgtttttaatagctgacaatgtcattgaaagttttcttttaactgttaataattgtaagttttgtgtttgccatgtcacaggtttgagtttgaattgaagtagtaacc

SEQ ID NO: 33434 - DNA, 566 bp, Medicago truncatula
  Intron number 1 from transcript Medtr2g091240.1 (locus Med tr2g091240) derived from phytozome v7.0 (chr-ID MtChr2; po s 20538006 to 20538571)
gcggcgttataggcaccgcggtgtgtatcagtttagtttagttaattatttattagtatgagcaaaaagtttagctttttgataagttttgaatatttctcatcatcatgtttctcaagataatcatatcttgctgtctcgttgagttacataaattcagaataaatcctactaggatgtgtgagccattatagtaaaatacaaattgaaacatgaaaacatcacaaatagtcagcaagagaaagattttgttaaattaatatttcacactgcagctgattggtctgttgatgtaccaccttttctatataatttgaattatatccttttcagcagttaaatagttaaatgagatacactaagtcccgtgagcataactcagttggtaggacaatgcattattatatgcaggggttcgaaccccggaaaccccacttattcaccttataagatgaattctagccactagactaccttaccaaaaaaaataaaaatgagatacactaaaatttcttcaaaactataacctgtgaagaaaccatcacccatcaagccagcctgtaaag

SEQ ID NO: 33435 - DNA, 903 bp, Medicago truncatula
  Intron number 2 from transcript Medtr3g133430.1 (locus Med tr3g133430) derived from phytozome v7.0 (chr-ID MtChr3; po s 33816814 to 33817716 reverse strand)
acaatccttttggaggtgaggctgcattaaaagaggtgagttatattgtgcttcagatgcaatgcttttactgttagaaaagtagaaattagtcatttccaatatattatttgtgttttggtagtttagttttgctttgtttttggctggagacattgaattgtttttcattattttatgttatttacatgttgataacccgacacgagaataaaataagcatagcggagatgatgatgtttcgttggatgtgtggtaggactagacgagataggatgattagaaatgataacattagagagagagttggggtagcgcgtatagtagaaaagatggtggaaactagacttaggtggtggtttgggcatgtagagtgaagacatgtagattctttagtaaggagagtagatcagatgggggatagtcatatcaccagaggtagaggaagacctagaagagaaactataaaaaagatctcaaaataaatgagttaaaccaaaatatgatttatgagagaacattgcggcttactttgatccatgtagtcgaccccacttagtgggatacggcttggttgttgttgttgtttcttcagtcttccttatgtcttaccttgtggttctacttaccaactggcctttgttaattttagaagatttcagtccttcaacctgttctctccaaaatggcagttgaatctgaatcattaaactataatattcaggaatgtattggcttgtgagttgtaatagtactgtagattatgtttccattcagttagaggcaattttgattggttgtttcctgtctttatgagtccccgcttccatctatactgtacatttgactttggtatatctgttgaaagggtgggacatcaaaacccaacgatttatcctcgaa

SEQ ID NO: 33436 - DNA, 437 bp, Medicago truncatula
  Intron number 1 from transcript Medtr3g133430.1 (locus Med tr3g133430) derived from phytozome v7.0 (chr-ID MtChr3; po s 33817729 to 33818165 reverse strand)
ttcttcttcttcttcttatcaagattctgttgctggtaattcttcttataattctatttatttatgcaatttctactttcaaattcagtgctagggtttattctaacgtttaattcacaaattctttttatcttgaccacgtggactctagtatagtgtactcaaattctgtaactttacttgtagtttaccttagttcgatttattttgagtatgtgttagattaattcagtttgtttattttttattattttttacacttatgttgccatatgcttaattggatttcaaagagacaaattgcataaaattaatgtattgtgaattttaaatataagttaaatatacatgtcttttggtatttgataagagtcatgctatacactcctgaaaaacctgtttgctgttcaattttgcagcggaagttggtgaacttg

SEQ ID NO: 33437 - DNA, 625 bp, Medicago truncatula; identical to SEQ ID NO: 32082
  Intron number 1 from transcript Medtr6g077570.1 (locus Med tr6g077570) derived from phytozome v7.0 (chr-ID MtChr6; po s 15421109 to 15421733 reverse strand)

SEQ ID NO: 33438 - DNA, 745 bp, Medicago truncatula
  Intron number 2 from transcript Medtr3g096970.1 (locus Med tr3g096970) derived from phytozome v7.0 (chr-ID MtChr3; po s 23031433 to 23032177 reverse strand)
aagcaacccaaaaattgggcattaggtacttggtattcttcatttttttaataagtagttggatgcatttgaccttggaccgtgttcatgtgtggaactagttaagaagtagctagcaagtcttatttcattcaaggaaatgaaatggtgaatgacaaatttatcttttgtttggaatagctttgatttgtttttccttcactactacaaaattgggaaaatatagcgccctataaataacactaaagcgctataaatctaaacatggagactatagctagcacttttttgaaaaagcgctatctctgcttctaagtctatatagcgatttgttttgaaagcgtcagtataggttcaataaaaaaaataattattttaaaaaaaaacaggaataatcgtatatggcgcttttgaaggaaagcgctataaataaatcaaccttaaatagcgcttaataagcgctagtgtatgcttgagaaagatagcgcttataggttaaaaaaagcgctatttaataaagtaagcataacactttgatctgcaaatcccttgttcgattccctgtgttgatatttcgttgtggattttttatttttttttataaaaacgctttgaactaaccggtcccctgttcgatccctgcataacacatatttctattttttttttcaatttttatgaaaaatcgattgttgtatcaaaacacacattttttttaaggttttttctagattacctttgaaga

SEQ ID NO: 33439 - DNA, 702 bp, Medicago truncatula
  Intron number 1 from transcript Medtr3g096970.1 (locus Med tr3g096970) derived from phytozome v7.0 (chr-ID MtChr3; po s 23032195 to 23032896 reverse strand)
aagtatctatttatcttttatttctatgctacttttaatcttttagacaccatgcacgtattttaaaaaaatgtattagatatcaatatttttatatgttcatgcactactaaactctcccgcaggaaattcctgaggattttgctgccattttctttactctaacgaaatttcctgcagataacttaagttatctgccattagcctggcccattttttacagctctagtactaatgaagaacaaaattgagtgacccgtcatttcacttggtatagttttattaaaggtcaagatacccatcatactgctatcacattattttttttaatgtgaagtgaacaaaaataatatagtttagaccaaacctttaggattagtataatatagtttagaccaaacctttaggataagtactgagactaatccaagggaattcaccctgttcttgtaccaagctgaattgcagtccgcagtctgcacatgactcaattcaggggtcagcatccagtatatcttttgatctgagtacatctttgaaaataaacatatatagtgtcttcataatgcaaaaatgtggtgagtttgatacagtcttgataattgaaggtagcacctcaattcaagtaatcagctgaagccttctttttgatttcatctaaatgtaggttacttattgccaacttatcagctgcaaatttct

SEQ ID NO: 33440 - DNA, 501 bp, Medicago truncatula
  Intron number 1 from transcript Medtr6g033490.1 (locus Med tr6g033490) derived from phytozome v7.0 (chr-ID MtChr6; po s 7407894 to 7408394 reverse strand)
gtgcgcatttgctgctccatcagctatcttcccctttcttgcaattttcattctggtgcatctattcgagcaacaatgtatattctaaccctatagtatacgagaactagttattttttctttttttaagggtattgttgaccaaagttccttctaaactctgcttgttgtcagttgattgaagaatcaaagatgcatttatatttacttcatataaaccgagcgcgcttcttttaatcatctagaatcagaggcacgtttataatttaatataaaaagaaacttatcaactttctcaaaaccttggggcaatccatttttcatttttcagattttaggagggattcagaatcgcagtagcaagttgtgtaattagattgaaattgttttctgattcttctaacctttgtcctaaaaactaccgtggtatgtaaacttctaatttggttaaacttttattttgcaggactcactaattaaaccgattaccaggatcttgat

SEQ ID NO: 33441 - DNA, 424 bp, Medicago truncatula
  Intron number 2 from transcript Medtr3g156410.1 (locus Med tr3g156410) derived from phytozome v7.0 (chr-ID MtChr3; po s 40999814 to 41000237 reverse strand)
cgcagaaactcaggtttctcttcagcagcagataggtaaaattactattccataaacagcttctgtttggttttaattgtttgcttaaagtggaaaaaatatatattaaaagtggacagtgaatcaattaatgaataaaaaatatatgaactaaactaaggaagaacgcattcttaattatacaatacgagaatgcaattatagccaaaaatctagtttttaacgagtatgtatgctaatgggatagaagaatagtaaaaaaaaaaggttaagtataataaagaagcacaaatctgtttctacttcacataaaaatcttcaaacaaattaatctctaaacaattttatctaacaatcaaatttactttaaccaaaaatatgtgtgtgaagtagatgataattatgatataaatttcagattgca

SEQ ID NO: 33442 - DNA, 773 bp, Medicago truncatula
  Intron number 1 from transcript Medtr5g103690.1 (locus Med tr5g103690) derived from phytozome v7.0 (chr-ID MtChr5; po s 41530606 to 41531378)
gaatcattccacatttttttcctactttcttcaaggtgagcgttccaacatttcccactcttttttgtgcatataagatgtttgtaaaatgttctgtgtggattttcattttagaaaaaacagtgcatctacaaatttgtgctattctcatgttttgatcatgggcccattagtatataaactgtttatgtgttaaatttgtgatagatcaaccccttaattagatctcaaatacctcgagtggattaggattactctctgtagttgcgtttggaggtacctttggttcactaaaaaaatttggtgattttttggaatgtatggtttctggataattgtgaatgagataagaacctaactatgatgttagcattttagattcataagaataccatgtatgaaccatgggatatagtatcttagctaaggtattaaaggcaataaggtatcatttaaattcatgttcatgcttaatgtgtcagaagtagaaggttttgagtcctttattaaatactcaagcacaaagagttctgacagttatatatgcctaagtgccaacaaaggggctaagtgcaaaatatgcaggcccaagtgacaattatgtaggtctaagcaatgttgtgaaaatcgagattctacctagaatcgggaggggtttcaaagtcttattgtgtgaaaaatgaaaccggtggaaaaaaatcgtctctttttaggtttttatgttcaagttttgttcaccattaagaaactcattcctgtttgttctatctcac

SEQ ID NO: 33443 - DNA, 372 bp, Medicago truncatula
  Intron number 1 from transcript Medtr4g144400.1 (locus Med tr4g144400) derived from phytozome v7.0 (chr-ID MtChr4; po s 36342300 to 36342671)
gttctgcacaagagaaaggtaaagttcagagattgaagcaatttttggcttcttgatttaatgactttatctttgagttgttttctgatcaaattctattttcctaccatcgttgcttttctcttttgttggaattgtgcatctcttcttgtcgtgtatctaattaaaacatgttttctcctatgacttagatagaacaactgcctggtaagttttttttttttttttttttttattcataacctggtaaaatcttctgcaacacagagctttcatgccaacataatattttagaaattaaaatttaaacccattgatgaaaacttgtaatttagttttatctaaaaatgctgttttcaaattctccagaac

SEQ ID NO: 33444 - DNA, 699 bp, Medicago truncatula
  Intron number 1 from transcript Medtr3g109480.1 (locus Med tr3g109480) derived from phytozome v7.0 (chr-ID MtChr3; po s 27427533 to 27428231)
tttctgttgcatccgtaccttttccactcttgtttgtatatagaacccaaattgttctctcttattttttaggaaatgtttgtattcggttatgtttgatttaaagatttagttatgcatttaatgttaaattttacacttaacaaattcatattgcgatgaattctgaataaattagttataaactgcctatttctgttttgaactctattatcgggtatgggtatccgcggaaacgggtatcagcaaatctgtgtctgtatctataaaacaatgggtagtcaaatacttatttaatatacacgtggatatccgtttagctaccatccccgtgcccgtgacgaattttattgatcggtacccgtgtgcactgcttttttttttttttttttgccatccctggtccaaagaaaagttgcgcgcatatcaaatgttgagggattaatctcagttgagcacaaatatacttagtttacacattttaacaacataacaaagtacataatacttttactttttttaaacaaaaaaaacaatgaaaaaacacaaagtaaaacatttgatgcataatacttttacttgtagtttaagttccaaagcaaaatactcacatttttagcacttgtaaatcctctttagaagtgtcttctgaatgatacattgctgaaaattgatgaaacaatacaggaggtcgtgttg

SEQ ID NO: 33445 - DNA, 430 bp, Medicago truncatula
  Intron number 1 from transcript Medtr4g165420.1 (locus Med tr4g165420) derived from phytozome v7.0 (chr-ID MtChr4; po s 41645860 to 41646289)
tgataaggttaatgacaaaacaatattttattggcttgttatttcgtttctctagtttcatttctaacttattcactatgtattggtttgagctggcattctaagacatgtggttttcaaccaactaaactttgaaatttggtacgatcatttttatttagccttttctgatatgcatttttttatccttttcttggcaggtttattttagatgaatcgtttctctttataccgacattaatttaggagacttctcttttaatgatactggccgacacatgaaggtatggtttttacctctgaaattttatttatgtcgacttttttgttcttccatttcggttctgtttgtgataggtttcagctgtgcttttcttttttttttttttttttttattttaatggagaattaggtaagtttggagtaata

SEQ ID NO: 33446 - DNA, 533 bp, Medicago truncatula
  Intron number 3 from transcript Medtr3g160020.1 (locus Med tr3g160020) derived from phytozome v7.0 (chr-ID MtChr3; po s 42031132 to 42031664 reverse strand)
aagagttggcaggttggaattttatattattgacatactcttcagatcagaatcaccttaatgattcatctcacctatcaatgggttttgtcagaaatttaataatttgtatactgctcgttaatcagggtagttaaatcaccgatgaaatcaaacgaaatgtaattgagttagttatacagtaatgtaatgacattgttgactaggctgttagtaactggctgcataacaagacccgaagcaattacaatagatttaactatgccttcattgttgttttggtaccactataaggtagtttatatttttctttgttatatggttaccatgtttgttgcctcttatatagcatatacgaataattgtcttgaccagtttgacaatgatacttttttgtatattattagtatataatggcaacgattgataatctctgatgaccataatagcaatattttgtgccgtttgataatttattgtgctatttgaatttgaatctcctattgcagaacccagcaagacaaggctaaagg

SEQ ID NO: 33447 - DNA, 634 bp, Medicago truncatula
  Intron number 1 from transcript Medtr5g007460.1 (locus Med tr5g007460) derived from phytozome v7.0 (chr-ID MtChr5; po s 1130403 to 1131036)
gcttcaaaatccaggtttgtcaagtttcatactttactgtgttttttgctttaagatctgatttgggtttcataacattttattttttttaatcttttttctatctgggttattattgtgagattttgattaattggtttgatctgtttggttgagaaattgtgtaaatttcctaactttatgtttaatttttcctttatctgtttaaatttttgtgtttttttgtttttttttgtttttatcttctttgtatgctcaaaatttgaactttaaagttgggttttagttaattttcattattgttttattgttacatcttgattcttgatttttgatgggttttttatttttttattttttatcactatctgtgattctggccctaatgctcatttatttagcatatgttgaatttggcttgacaatgtaaatatagacattgaatttggtttcaaaagttagttaccttaggtttagatccattatctgatttcataaaggtgtgatattttgtgtttttgtaatttatagtgtcttgtcttttttctgtttcatttaatgcattgtggatatgggtatttacattgtgaacttgatagatctggtttatctgaaacactccccaacaaagcat

SEQ ID NO: 33448 - DNA, 671 bp, Medicago truncatula
  Intron number 2 from transcript Medtr5g007460.1 (locus Med tr5g007460) derived from phytozome v7.0 (chr-ID MtChr5; po s 1131253 to 1131923)
agaggaaatcaccgagacctaccacaccagctgatgtaagtagtaaatacacattgtgttccttctttctccaagatcgagtatgtttggcttgattagacagttggactgtttttttcttttccaaatttgtttttggaataggcatttgaactttccaattgtctcatgaaaagtgtaataaaaataattaaacacctgtaaatgtgtgaccttgttttaggctgttagtgttgggatgttaatatttgacaatttttcttggattatcattagcctcttatttgttattctgagatgtccaatatgtcggtagtgaactgtcatgtatgtcttgttcattaagcgtgctaattgatacatgaaaaaataactgctgcagtcatgctttttgttggttatctgtactctgatatgtgtttaatattgtgaaaagggggaatgaattgtcagtgtaaagtagttttacattgatgtccaacaagaatcaaacattttgcagttatttttacactgcggttacaaagtagacttatgtggcaatatcatgaattttcattggatattgctgtgaaactattttgaagcagcagtgcatctccattaaacacgtttaatattttctgtatatttcagaagcataccccaagagctgttgcaaagagttcaga

SEQ ID NO: 33449 - DNA, 837 bp, Medicago truncatula
  Intron number 1 from transcript Medtr5g104050.1 (locus Med tr5g104050) derived from phytozome v7.0 (chr-ID MtChr5; po s 41718241 to 41719077 reverse strand)
cttccgatgtaagcttcttcctcttcgctctttttttttttgtttattagggttcgatctagtttaggttctattttattatgatgattttgatgatttcttttgttatcgtttttattggattattttttcaattttagggtttatgttaattgattacatacttttagggttttagttggtggcgttgtttagcatctttgtgatttttccgttgttgttgtttgaacacagtgatgatttgttagtcatgtttaggtttcattaatcacaatttaaaatcaaatttaaatcaatgttctattcggttaattaacgttttcttgattttgaaccgaatatgtttttcattgttgattcatattagagtcatacatgaaatacctaaatttaaattgaattttaattagtccggcttgtattgatatcaatactgattatgtgatctattttttgctgtttaacgttttcacttaaatcatatactatgaaggttattgatataatcggcactttaatttttgaaggaaagttgaattggtcctttaattatatgaatgaaagttgtatgtgacaaataatctatgttaatcacatatatgcgatgttattgttacaatcaactctttcctttttgaatggaagttgtttgtgactagaactccatgtttttggaagtataattgttactattactttggatctttgggttgggttttatgaatgtttgatgtgatagatgattttgttgttgtgggtatgaatgctgttctgattcttgtgatggaatgttgtgatgtaggctttggataagattcggttcgagggcttgaccga

SEQ ID NO: 33450 - DNA, 630 bp, Medicago truncatula
  Intron number 1 from transcript Medtr4g144300.1 (locus Med tr4g144300) derived from phytozome v7.0 (chr-ID MtChr4; po s 36302689 to 36303318)
gtgtcggaggagagtctattagaatcaattctgatgttctcaccttacaactggtttgctcctattttccttaaatataatcatgttcatatcttatttcttttcaaagtgggacttgagatttcccaatagtaataatcttttgttcaaaataaatcaggaatagactatctaattgctgtctagtgcactagttctgcaatgttgcacttgccaagtaaatgtgtacatggatactcccaaataggaggtctcaagttcgaacttgtgaaaatcaaattcacgtggagaagaagtgaacatagctgacgggactactctgaacgagaaaacttatggatatccggtatccaaaaacaaaaaatagaaataagaaatgatacaaggaaattagaaaagaaggtttttacataaatacttgcatagcaagaaatagaaaaaataattcattagattgtacgaaaagtagtagcgttgtcaacaaaaaataatgggaaaatctcattttttatgattttgactgaacaactatatcgtaagaaaaatggtttgtaccgaaacagaacccacaattaccacggttaagtataactaaacttgtaagaccatgtttttattgcactattacag

SEQ ID NO: 33451 - DNA, 555 bp, Medicago truncatula
  Intron number 1 from transcript Medtr6g036240.1 (locus Med tr6g036240) derived from phytozome v7.0 (chr-ID MtChr6; po s 7953455 to 7954009)
ggtgtcaacaatttcaaccaaggtatcaatcttattattaatgtctttttttttttaaaaaaaacttcatatcttaaaaataaagatttgtgttagtaagaataattcactataaatttgtgtggtcatttaacttttcacgtcatttgagtttgtttgtatatgagttttcaaatatcaattgtacaatatatgtgaatacatgagtgaagaacaatagatttaaacaccaaaagttcatattaaaataaaaccatagatttaaattttgaaagttcttagcaaattgatcaaaacacgaaaatgacatgaaaaattaaaggtaaagaatgaaactgctatatgaaagtagattaaagatcattgaggctctctaatagatttgtttttattgttattattattattattattattattattattattattattattattattattattattattatgactttaagttaatatttgttttttctcaaaaaaataaaatttaatatttgtttcacatgtcaaatgcagagaggtaccagagaaataacagtgttg

SEQ ID NO: 33452 - DNA, 582 bp, Medicago truncatula
  Intron number 2 from transcript Medtr5g047440.1 (locus Med tr5g047440) derived from phytozome v7.0 (chr-ID MtChr5; po s 20019096 to 20019677 reverse strand)
tatatacgtaggcatttgtattttgtcgttttatgctattaacatggatgttgtgagtctgttcacagattcatcctttttgtttttagcgaatttgcattatatcgatgtacttatcgatttgaatgaatgaatatcatttatttttgtcaaaaaaaaaaaaaaaaaattatatttgtacaactatattttgacaacttttgcaataactctctctcatactcacatgtgtttttattctctcttcttctttttcgctctattattttatccaataagaagaaagaaaaaatggttgtcccaaaagttgtttgcaattgatggtacaaataattcagtggcggatcttgagttaatttgttgggggtgccaaacttttatggaatatatattaaatggtatcaaatattaagtgtttaataatcagcttagtggtatacaatcttagaaagtatctaatgattggggttcgaatcgaatccccacatatgcgttttttttaacacaatatttaaaattagaagataaaatgtaaaaaacaaggcaggaaaaggcccccgccggtcactgaaaagatccgac

SEQ ID NO: 33453 - DNA, 522 bp, Medicago truncatula
  Intron number 1 from transcript Medtr1g129530.1 (locus Med tr1g129530) derived from phytozome v7.0 (chr-ID MtChr1; po s 28960779 to 28961300 reverse strand)
atctctttctctcttcttcctctcacgccaggcaagtctctccctctcttccacaaaaagattcgtcttttttatttttttggatctggggttgctcagtttcggttgaattttgattggtttgttctctttttcagtttttttctttggtttatgacttctagatattgttttttgtgtctgtgttcgttttttgagtttgttaatgatcatacacatgttcctattgaagtatctggttggtatttttgtcttgctgtctcaactattaaaaaagctttttttttttttttttttttttttttagcttttgcttttaatttctttaaagggcttgttagaactgttcttagtttgttttgtgaggtttaaagttggtgaagctcaaatcttcattgattgcaacttttgaccttttattgagatgctataaggagctactatgcagtgattgaataatgttactttgattgtaattgtttttcagatcagctgatttagagggggaggggagtgttttgg

SEQ ID NO: 33454 - DNA, 813 bp, Medicago truncatula
  Intron number 2 from transcript Medtr3g130610.1 (locus Med tr3g130610) derived from phytozome v7.0 (chr-ID MtChr3; po s 33187998 to 33188810)
tgggcagacgttcctgcaaaatcgccggtcgaaaggtaccgtacctcccttactatcttccttttcctgttttttctataatgcatatcacctgtttgatcaaaatcctgtgttgtaacatcacacactccaccaccacgtatatatagatatatttgaacggtagagttcaacaattcggtgcacctgacaatatgttcatgtgctcgcactcctaaatgtgcaccactgatcgacgatattaagggtttgggacgagaatgactccatttatgaatatagagacacatagagaaggttggtgggacacatgagacccaacaatatcctccttgtctatctcttttaaaaacgaagcactctatttattttgagaaatgaaggtgatcttgacccatattatattagaccttgtttaacttgtttgaataaacagtttaattaaacgtttataatataagcatttatcatataattgctaatgtataagctatttctataacaaaatattaaataaagtcaaactgttttcatttaagttatcttggaaaccttaaacggaaataagctgaaaacaattgatagacatgtcataagttgttcacttaaggtctcctaatcagtctcacaattcacaaatgctgatgctattagataagctcaaataaatcatttctaacagctctaagttgatttgcattttgattagtgcaagtttttcatttttatggttcctacttctgtgaagatgaagacgttatttgaagtcttcttccaagttttcttatttgccacaactgcaggaagccaaca

SEQ ID NO: 33455 - DNA, 720 bp, Medicago truncatula
  Intron number 1 from transcript AC233671_5.1 (locus AC2336 71_5) derived from phytozome v7.0 (chr-ID AC233671; pos 17 026 to 17745)
agaaagggtttactaaaagtaattagtattctttggtcctacaaaagagagtgttctatggtttggtccggccttgtgtaacatgttttgttctgaacgtgttttgcaattccaaaaatatagtatgttgaatagagagatagtaataagtcccacatcgacggcttatatagcattgagagggaatcttagctataaatgagcattggactgcatgctttcaaaatacaaccggttgcaaatgcaatgcattaaatcaatgcaactggagtgaaatcaaatatttgaagttgttagcttttcataaattaaaagttgttttagtgggtaataatttcaaatttttgatcttgttccagttgtcttgaggaatttgtctgtttgtttcttgcaacattgattctctctcggtgttgttgctaatataattttaacgcatatacattgcaatttcagtgtgtactttctacttttcacttaggggtaaatttttaaacaaatttaatttttgcacacctgaatcaaggatccaacatttatataattcaactaactaaaagaattttgcaaaacatcaatctaaataattttgttataaaatgtgaagaaggcaatgaagcatacttataatgatctgattgtaaccttagatatccctttcttcaaatttgctgaccttgagtagaaactctaacaataattacacgtgtctgaggtgtt

SEQ ID NO: 33456 - DNA, 402 bp, Medicago truncatula
  Intron number 1 from transcript Medtr5g022960.1 (locus Med tr5g022960) derived from phytozome v7.0 (chr-ID MtChr5; po s 8973898 to 8974299 reverse strand)
aggctgcggcaagactccgtgcgcgcaatctcacggtaagtgccatatagtttgcatcctctgcagcagctatcaagaattcaaattatatgtatatatataattcaagtatatggtacatatgtgtgtatgtgtatatattatggttgatcctcgtaagaaaataataatttgttttgtttttcctttttgatgatagacatatcaaggagtccagatcattcttgtagttcaatccaagcaaaattgtttataaattgcttaattaacatatattcttcatgtggttgattaattttttttgaacatgaatttctaaatttgttcaagcatgttatgatcatgattaatttctatttgattataggagcaagagtacctgaggtttgaattgagcttaaa

SEQ ID NO: 33457 - DNA, 927 bp, Medicago truncatula
  Intron number 2 from transcript Medtr7g005760.1 (locus Med tr7g005760) derived from phytozome v7.0 (chr-ID MtChr7; po s 579087 to 580013)
agggcaatactaccccttttcctgagagggtatgtgtcctatgagtttgttcaatttttcatggcatgcaaatgctttagatcatgtttttttttgtttggtttttatgagctagccgtgaaattaacacactaaatgcagagaagtagggataaatggtgggttaaacccgcaatccagcatatcaattgctcctacaacatgtagtcaagagagtttggatcatgttttaattagaatgaatttattatttatggtatcttgattttgatcggataaatgttggtatagatttattgatatctatggagaagttcagaaagttagctcatggaaaaaaattcaatttcatcttatacaaagaaacaatgttttaaaaaatttatttatgttgcaaagattgtttctgcaaccaatttgattgataaacacctaattatgtttggttaagtttataaaaatatgcaatgagtaggtggtgcaatcgtacaagcactaatgcatcggatcgcattagaatttcatagtaaagagatggcctgaacaagtgttcataagtgggggcaatctcacctcacaaccggtgtggggttgttttaggggcgaaactagaactaggatgggcgacctcttgggttgcacctcatcccaacacttttggaacccaaaaaatatgcagtgaattatgtcttactaataagctcaaaaggagcttagtttaagaagatatttgtatatgcgatggttaattaagcttttatgaattaagctgtttgattaaatttgactacaatgtctctcttcatgaattgtttttattattgaatgatgtaaccatggttaatatatatgtgcttattcatttcaatattgttttcctttccttcaatttgttttgacccaaaggttcaagtaggaggttcgcct

SEQ ID NO: 33458 - DNA, 650 bp, Medicago truncatula
  Intron number 2 from transcript Medtr5g096440.1 (locus Med tr5g096440) derived from phytozome v7.0 (chr-ID MtChr5; po s 38317737 to 38318386 reverse strand)
actatttttgaatcttcaaaagagactctcagcaggttaaaaaacttggattgaacaatttaatttatgtagtatcgtaaatcgtctatgtgtttatttggttccacatttagaggatgataatttgattctagagatgaagaattgattttaacgtatatgaatgttcccgattagaattgattctagcttgaatctagaatttggagtttttacctttacaattgatttttaacctcaaatttattgttcaacctagctacctcaatgtatatctaaatataaatataattgattttaaatagaaattaaaaaagtttgtttggttatgtggtgtccactcttttgtattttgtttctacgataaaagcctatatacggtgtccacttttttgtatttcgcttctgtcgcaagttgttgtgtttcttacacaggcttgtcacttaataatttttgccgtttcaaaaaaataaaataatttgtcaccgcataaccaacacacacatcattgtttgaattgagttgttctgtcaatatgtagggtgtggttttggaagatatgatttgttcagtttaacttcctaaggctttcttgttttgtgttgtgtgtccaggtgaagatttgagcgatcttgctgtggactattcg

SEQ ID NO: 33459 - DNA, 848 bp, Medicago truncatula
  Intron number 2 from transcript Medtr1g099220.1 (locus Med tr1g099220) derived from phytozome v7.0 (chr-ID MtChr1; po s 20212041 to 20212888 reverse strand)
agggtaagcaaggagagcgtgcattcagaatagaggtgagtgagatattattaatatatcactttttgttattggtatgcaatgatttaacatctcttgtttgttacctgctctctctcaatatctccctttcttgttaactcactgtttgtacagagaacaatgtttttgtcttttatcaaagctgaaacttctatatgttgccaaagaaaatagaaaacaaatgacaagtcgttactaacaaatttattttaaagagaaatgatatttgtacaactatttcctaataacttttgaaacaacattctctctcatactcgcattatatttttaccttctatctattgctttgttttttgtgccaacacatacttttctttgtaaaaatatggttgtcaaccaaattaatgttcaaataacattgttctcagatggacttacgcaacttatcatatgacagccttaatgtacactcttgctcttatcttaatttatggcatcccgtgtgactagagcaatgtatttgttagggtgtactatgaattagattttaatatatctacagtaacattaaatgaaaatcataataattttattcctataactttgaaatactgacagtaatatagtattttctattaactcttgcacagaattctctggcgttttgcaatcaaaattgggaccatgagaattgaaatgcaaattattttatcttcacattacattagtccttcctagttgccaactcatactgtgatctttattaaaatctagcacatgggtgtgaagactaaatgacatttatggcaggtcgatctcctaagccaattgcggtctccttattt

SEQ ID NO: 33460 - DNA, 819 bp, Medicago truncatula
  Intron number 1 from transcript Medtr5g087560.1 (locus Med tr5g087560) derived from phytozome v7.0 (chr-ID MtChr5; po s 33824376 to 33825194 reverse strand)
gagaggttggcttgaatgtcactgcccgtcgtgaagcagctagatctttactgacaattccaaaagcttcaactaatttggagttattgatatgttaatgaacctttgaaagtgttgtgtttgtttgaaacaaggttttattttattttttccattacatttgcttaattgctaagactttggttttttggttggagtttacttctgtaaggcttttatttggaattgattttagtgttttatcaattaaactaacgacccttcaatttgatttttactaagatttatttatgcattcgtatttatatttttatataagaaaaattatagtgaaatggcaacattgcattggtttgcgtgtaacaagcttgaatcgcttaagaaaagtcttaagttcaaaccatgcggttggaaaaaatgtggtttggagagtagcaccctaaaggtggccgcttcacaccaacaacttggttactaagatcagtttgtatcattagatcttgaaaattggtcttctcccaaaaaaaaataaaaaataagactgatacaaaaataaagatactaaatttaaagtaagccactaaaaaaataaaatcaaaatactatactatataaaactagggcttaagacataagtaggaagatagctatcaaaaagttggttatgttttgagacggtggaataagtaggcgctatgttggtatctgagaagaggtggttcctaatttgtcgtaaaaggttgttattttgatctttgggtcattatgtgacgatatttctcctgatgtgttgcacaaggttggaccgtgtgccgcacc

SEQ ID NO: 33461 - DNA, 358 bp, Medicago truncatula
  Intron number 1 from transcript Medtr5g049100.1 (locus Med tr5g049100) derived from phytozome v7.0 (chr-ID MtChr5; po s 20907619 to 20907976 reverse strand)
ccaagtctggcaaatcttttaccaagtaataaagtgtaagtaaagtatcgtatgcctagggattttcgttccaactacgcaattagtgttacttactcagggaaaataaacaataaaatataataaaagataggggtttgcaatttagtttgtttgcagcagagcaagagtttatgagttaacctatttttgattgcagaatgttagcgacggttatggttattaaaatctcctatattaatttattggattatttaattaatggtcaaacattattcagattttacatcttctgtctaagtgatgactatgtgaggttttattaccttacagttgttgagttgcacctacaaatcac

SEQ ID NO: 33462 - DNA, 794 bp, Medicago truncatula
  Intron number 1 from transcript Medtr3g080020.1 (locus Med tr3g080020) derived from phytozome v7.0 (chr-ID MtChr3; po s 18718315 to 18719108)
gactttgaagttacccaatagagtaagaattcaaggtaataaaaagtttctaaactttcatgttacatttctcgataataaaatgttgtgcacgttggatgaattgatgaaagaaacagtttagatttcatatgatggatgagagtcattcctgtttgatgcatgtttaactgtaaatagttattttgtttttttaaacgtgcgagtgtttaagtttaaataatcattttggttcttaaacgtgtgagacaaggtcattttagtccaattaacaattcgatagaccaaactgattaataaaaaccatattcaaggatcaaattaactaatgaaaaatatattcaatgattaatctgactaacgagagacacatttgagaacgtttttgtaattttggttagttcaacgactagtgtcagacacaatcaatgaccaaaatgattgttaactcgtgtgtttaaattgtggctgtagttatggtgcaaactttgatattgcatcaaaacacgggcaaatgtggtcaattcggctgcaattaatgtggtaccatatcgttgcaacctatatacttgcggtcatacttgctgctcgatttagaactttgttctccacatcacaagtagaaagttaggagtatttgatcattacatgcctcttttttcaaatagaagtgcagatacttggtttgttattttaaaaaaaataattaaaccttgtgaattttacattgaatcaagctgtgaagaaatacatgtgttagcgcataaatagagacacattagttttgaaatcag

SEQ ID NO: 33463 - DNA, 425 bp, Medicago truncatula
  Intron number 1 from transcript Medtr1g105940.1 (locus Med tr1g105940) derived from phytozome v7.0 (chr-ID MtChr1; po s 21962127 to 21962551 reverse strand)
caaactgccacttttggtaagtatttataaatatgttgagtgtcataacttgtaatcaatttaatttttgattgttcatttaacctctcaaatataggaagacaaacattcataattaattgaattaaaacaacgtagaaactagtttccataatatgtcaaaaaagaagacaaaacaaatcaaacaatctcatatgcagcagttgtacatgtgtaacgtctataacattgttcaattcaaatgctacattgagcaacttgctcaattaagattatgtgacttggctgatatgttttcctttatatatgtatgtatctatgcgtttttgttttgttttgaggaaatgcatctatgtgtttgttatgcaaatatcttcaattaattaaaccatataacttgaattgattatgtatgtattcagcaa

SEQ ID NO: 33464 - DNA, 705 bp, Medicago truncatula
  Intron number 1 from transcript Medtr2g085800.1 (locus Med tr2g085800) derived from phytozome v7.0 (chr-ID MtChr2; po s 19499364 to 19500068)
acataaaagctggagttctgttccaaaatttgcaggtatacatttctttcttctatacttgtgaattattattgtgcttgttttaaagtgtgtttgaagacttttataagtataagtatgtgtgtgttgaaaccatgatttgtctcgggacaactacttttaatgcggttgatcttctcacatctttactcgtaaaggtaagagttagacgtattggtggttaaaatcgtgttacgttttgtttaattttgattaccacacttgaagattgaatcctttgatgtgtttaaatgcagtttcctaagtttttcttctattgctgcgtttgcagtgatttttttgtgtaacatactttgactctttgtttctccaggactccttttcaaaaaaaaaaaatgtggttgatattgtagttgcagaaacctcaaaatgctttatattgcggccataattacagttgtgcatcacaattgtgtgttgcgtatgtgtcggccgagatgtcatgatttttattgtttatgcaaacagcttgtggttatgactgaggctgcatttgactgtaattctttgaaatatcaagaatcatatgcaattgtgatttcaaacctcaaattaatttataggcatttttcttttagttttcttagtgtgtatagcaaacaaaatatgatgctagtgtggtttgctatatacaggcctgcaaag

SEQ ID NO: 33465 - DNA, 400 bp, Medicago truncatula
  Intron number 2 from transcript Medtr2g085800.1 (locus Med tr2g085800) derived from phytozome v7.0 (chr-ID MtChr2; po s 19500154 to 19500553)
atcataattgacatacatagaattcttggaaacaggtaaagtgtaataataaaactgaacaaccaatttgatttcccaaaatttgggtgggacccgattcagtcttagacaaaaattatttctaaaattagtccttgatatttttctatagggaacaaattcttctattaattcattaaaatagagcgactaatttgtgtttgtatgaaaatatcaaggaccaatttaggtattatttttgtcatagactttgggtcacagagaaaattatgagagatcaaataaaatattatcctaataatagttacaagtacaaaaagatgagagaggaaaatatttgtaatagtataatatgagtgcttgtaaattcatgaatgcatgcattatttgtctgctgcag

SEQ ID NO: 33466 - DNA, 995 bp, Medicago truncatula
  Intron number 1 from transcript Medtr5g015330.1 (locus Med tr5g015330) derived from phytozome v7.0 (chr-ID MtChr5; po s 5092852 to 5093846)
gctcatcggtcttgtaatcttgttcatattaattggtaagttaatttaacgtataaaataattgaataatcttgcagaaaattttccatatgatggcttattgcatggtagcgaaagtcctcttacggcatttgacatgcatgcatgcctcctcacgtaaagaatttgtagtgtttcacttaatttcacccacactagtaactattgtttattttattttattttattttatttttcttatgttcttcaaattgatacatacttccgttccccctagacgtagtactttaatttagaaaaataaaagttagtcaagtcatgtgtagattgattagttaggagccaacgcagtatcaaattcaacatgccgttgcctttgaagaatatgtatgtgcacgagtgtaactaatatatacatatatagttttttttttttttgaaagaagatatatatatacatttatagttagtttgttagcaaaccaaggactaattaaccacccaaatcaaacttaagagaacttaattaattaaacgtggacataacaataaagaatagagcagagcagtgatgcaaattagttctatatttgcacttagttttttaatggcttgcgctggccacagtctgattttgacttggtccatgttaggaagagggaaagaaacatataccagctcaaacaattgtatattctaattggtttgtttctttcaacagatcatgttattgttttgcatttatgtatatggaccagcttaaaatcctttttagtttactaaaagaatataatacactgatatcgcttaaaatccttcgtttgaatgttaaggttggatgatatgagcctaagaggggcttaagagggccaaacttcatgggttagtgacttaatctcattggagaagtgtttttccctttttttttaagtattgtttaaaagatttttctgtcgttaactttaaatttgaattggatttagtgcgagtagagt

SEQ ID NO: 33467 - DNA, 639 bp, Medicago truncatula
  Intron number 2 from transcript Medtr2g122010.1 (locus Med tr2g122010) derived from phytozome v7.0 (chr-ID MtChr2; po s 29082441 to 29083079 reverse strand)
cctttacaagataatccttcttattctgttgttaagtaagtgatcaattttattcaaatgcatttgtaagtatattttatgtggtaaacatttgtatcaatatttgagtgataattttggctttgtttggataaacaacttactttacaggttatagcacatgcaggagcttataggattagcacttatgaattagctatttatataacagaagataaaataaagtcaaactgtttttgtataaatctataagttgttttcataagctaatcctggtgagctcatgaaaaataagctaatagtggattataaacatgtcataagttgtctcaaacagtgtcacaagcatttattgttggaacaataatgttctaacatgtacgtcactagataagctcaaagacgtcaatctaaaccggccctcagtagaaagacatgtgcataagctgttttcaatcaatttcatagcctaatttagaaagaaacacttaactataacgtatagaataagggcgtaattgaaaagtttgattctttcttgtgttttttttttttttttttttttttttgtgtttgtttaccataacaatttttattcagtgcttaagttggttaatttatgtttctacagacagtatt

SEQ ID NO: 33468 - DNA, 444 bp, Medicago truncatula
  Intron number 2 from transcript Medtr5g079450.1 (locus Med tr5g079450) derived from phytozome v7.0 (chr-ID MtChr5; po s 29582161 to 29582604)
ctacattattcggttgttgagaagtttaaaacttagtaagtttgcattatgatttcacaatacagtgttagagtaaattattatttcacaatctgatttaattgttttttttaccatgtttcttgaattgttgtcgtgaccttaacacttctcaagcttagagtcaaagcatcaatcagaacttaagtcagagttcggcttcttctcaatgtacttcgtacaaagattttttcaatctgtctcaagttaggccaattgttgaatttataaacttagtcaaggtcttctttttttatgcacaaacatgctttgaattttttacgcacaaattaaaaatacatattgcattattctttatttcatgtgcatatttgtgttaggatacatattgcatgactatttggaaagcagctaaattcaatcttaaccagtttggataatatt

SEQ ID NO: 33469 - DNA, 285 bp, Medicago truncatula
  Intron number 2 from transcript Medtr2g014700.1 (locus Med tr2g014700) derived from phytozome v7.0 (chr-ID MtChr2; po s 3840230 to 3840514)
actgctttctggttctccaaatccacctttgagaggtgattttcaataattttgcttttttgttttaatcttttggtttcttaatgattcttcttacgttttttttatttcaatcaaatttgaagaaccattggatcaattatatgattgacttatttaagttgttttatgaatttactacttattatgcaaaaaaaaaagtgtttttgggttaaactaattgtgtagctgattttttttttttggatagatttgtgcggtttgttagcacacctgcagttctgg

SEQ ID NO: 33470 - DNA, 869 bp, Medicago truncatula
  Intron number 1 from transcript Medtr5g045130.1 (locus Med tr5g045130) derived from phytozome v7.0 (chr-ID MtChr5; po s 18826468 to 18827336 reverse strand)
gataaggttctaggaggggtggctctactacccaataattttataactttatgtacaattggaaatttctgatttttatttctgtttgaatattttgttgtaacctttgaatatttatgctacttttttactatatgtttagtttgtattgtttcatatgttttcattaaatattttgcttgaaatttgtgttggatgcatgtttaaatcaatatggagtctttaaatttccaaaaaaaaaaaaagatcttaactaattaacacatgtcctatatatgtcaatttggatgggccagtttaagttggaagaaaaaaaaaactgggttctatatatgtgttaacacctttcaaattatacaacttgaactgtatattctaaatttggattatataatttaaaatgtgacaacttatgtactataattcgtatttgaatggtctataggggggttgacacatttcgagttatatatgtcaaactattatttttaatgtttttggattttatttttcgaattgtatattaacaataatttgttaaactagagcaatattatgtgtttttctaaaatttttggggattcagattatataacctggaaacttttaatgaggagttcaaatttataatataaatttgataagggcaccaaaccgttttcattgaaggttgcctaaatttgacagatgcatcaacctgttttcaagtaataagtagtaggtaatcgacaaatcaagacatcacatgagggatcaaagatatgaaaattgaagatcaatggttcttataaggttttttaaaacaatacaaagtgaagaaaattcatttcaagtttccagatgcaagaacgatcgaaaacgggacgaaa

SEQ ID NO: 33471 - DNA, 1007 bp, Medicago truncatula
  Intron number 1 from transcript Medtr1g024320.1 (locus Med tr1g024320) derived from phytozome v7.0 (chr-ID MtChr1; po s 5729837 to 5730843)
gaggtacttttcttccttcttaaatgtttcttagatattttgttagtcaactcctttgtgtttttacaccacatgaattgtttttttttttttttttgcaattttcttgaagagagaaaaaaagtttatacatgcttaatattaaggataaggataaagatttagggggttgatcatgcattagaggtagagggaggtgaccataaaattagttagctctcatttatttaatgtttatcctaattgctattattgctagtgaagggcttagttaagtttgtccttttgtaataaaatagaataaaggtagatattttgggagcaataaagatgtatattgttatcatcattttgatctgaagtgaagagaagatatttatttttattattatatatcaaagtgcatgctttttttcctttcttttcttgtttttctatcaaagtgcatgcattattttttttagtagatttaaagtacatgcatttattcatgctttggtgagtttagtttgatcttaacaaaaaaatatcttttcttagaagaaatgaagaatattccatttggcttttatttgctaacattcaaacctggcttatgtttaactgtttattaatgataattaacattacatttagtatcctctcaaaaaaacattacatttagtatgattttttcaaaaaaaaaaaaaaactcaattttttataacagaaaataactaaaattttgatttatttaaatatatgatgatttttataattaatgaatttaagatattatgtacaaataaatatctagcataggaatttagcaaatacattttaatcttatctttgcaagtagttgggataccatatgtatgaatagtatgtaaattttgggatacaaatttcaattgattcatacggattaaactgataaataaatgcaaaaatgatcttattgggatctagccagctaatagttaattttttatttttttttgaaaattatcagggcattagagaaa

SEQ ID NO: 33472 - DNA, 881 bp, Medicago truncatula
  Intron number 1 from transcript Medtr3g006310.1 (locus Med tr3g006310) derived from phytozome v7.0 (chr-ID MtChr3; po s 736163 to 737043 reverse strand)
gggttattcgtattggaaacttctcttttgtccaggttcatttcatttcatttctctgtttcttctatattaatattgcttatttttgaatatatatgatttcaatgtgattttgaggttcaatttccacttacccggaagttatttttcaattgattgattattgagttagttgttactacctttggtaggaattagttagtagttgactatgatgcacggacactcctagaatcctcagattaggcgtgtcctgttgtcaggcacgttatgattccattgaattatgtgattttcggtgtcattgtccgtgtcgtgtccatgtttgtatccgtgcttaatagttagttgctaataagtagttagattagatggttaatattcgataagctctatatgtagagtatcatttattcatttcaatgttttaaaagcccaactaaatcagccggtgcaaccgattgaattgagaactgaccagttcatgtttgtcggttggtttgatcccgggtacattgtagtttggttgaacctgtgaagcacggacgctcttttggttgaactgaggttgaattgcagttggttcaattggttttcattttttacattttctttttactttttaaatattattttatatttgtcatccagttcaagcatggttgaatcaattttaccatgatacataggtctcacaggttcaattaccggcttgttttcacaaattgattcatttccgtgttcattttgcaaccaattcaatatgttttataatatgaagcctaatgagtatcaatacactctctatatctgttgtgaatatgatttgaaccatgacaccctctgatttctatcaaactctgtataggaggtggcaggtg

SEQ ID NO: 33473 - DNA, 654 bp, Medicago truncatula
  Intron number 1 from transcript Medtr4g081530.1 (locus Med tr4g081530) derived from phytozome v7.0 (chr-ID MtChr4; po s 17043738 to 17044391 reverse strand)
tgaagccacttgcaagtgtaagttcacatttatactcttctatatttttagtataatattcaatttagattctccgcgttcatgcaatcacgcaattgctaatatgaactatttgactaagttcggacgactcatgctcaaactttatattttggatgcgacttacttgagtcgtccgatcttaatctgacggcttagatgactgtatcaaaagcataacttccttactatagtcaattcaaatgagaggaacaccggtcacaaccccaaatataattcatttaggcacactcacacaacttaaaaaaggtacaatataaaacaatttaataatgtgtatttttcacttaattaaataaaatgtattgttatgtgtgttcctaaattggttttatttaagcttgtgatcatataagtatttatctgagaatgattggaggtaataatttagactttactatatattgacaacgtaaaatttactaaatctcaccatgaagatgaccggttgtagggacaatgcattattatatgttgaggctatctataataatcatcacaaactcaattgcatatacatatagagcaagaaatgagtactgaattcacgttgagttttgtttatttcttttgcagttagaagagcaaactgtg

SEQ ID NO: 33474 - DNA, 571 bp, Medicago truncatula
  Intron number 1 from transcript Medtr2g025350.1 (locus Med tr2g025350) derived from phytozome v7.0 (chr-ID MtChr2; po s 6696399 to 6696969)
acaagccttctggatctagaacaagatccaagcaggtttgttttctttcttgttttacttttttttatgtttttttttattaatatttgactgttgctttttggttggtgagaaaagtatgaacatataatattgatttttgaatttgagtttgacttggaaggaaataattgatgagtttttgttttttaatatatttgatttgatttgattagaaaatctatatattttagcttgaatagttgaatgaaattgaatgaatttatcaaggatgttcaatttaatatgttgaattcttcatttatttatatgattaagataaataatgaagtcaacacttttattattactactttaattattgtgattttaagtagatattttttttttaggattttggcaggtagatattttgcttatgaagttctgttcattttaaagatcaattatgaggttttacacttcaattattttgctaaaattagtttcatgatgaatgaaaattgaaaaccatgacatacatattttaatagtaactaacatgattaaatatatgtatattttcaggcag

SEQ ID NO: 33475 - DNA, 727 bp, Medicago truncatula; identical to SEQ ID NO: 31608
  Intron number 1 from transcript Medtr6g017540.1 (locus Med tr6g017540) derived from phytozome v7.0 (chr-ID MtChr6; po s 4144140 to 4144866)

SEQ ID NO: 33476 - DNA, 789 bp, Medicago truncatula
  Intron number 1 from transcript Medtr2g056770.1 (locus Med tr2g056770) derived from phytozome v7.0 (chr-ID MtChr2; po s 15654277 to 15655065)
cgttacgctcaatgtaatttctaattcacccattttttcgcacacaatacacctttttcacctagtgacttgagtgttggagtgcgaatgtgcttgcatgcaccattctccttagtgacggaaactgctttcctccacaccggagcaccgtgcaccaacacaactgctataatgcttataagaagcagacattatccttcacggatttgacaattatactccatttttcatggagtataagaataaaaattataggcaaagaatcagtcaaaagagtatattctagttattttatcaacataacaaagcaaagttattaacattacgaaataaatttgatatgagaggagttaataatgaatataaactcgctagtgtactgtcctatatgctaaaaatccaccagaggaagagcacgagtttgttgaaaatgttcttgatttagagataccatcattagtgttattaccaacaaattcagaagtaatatgaaggccgtgtcaaattcacttcgatattcctctccaaatatatacttattcaataatggatgtaattaatatctcaagattactaatgcatatgttctttctatttacaggagttgataaatgaacaatcaattgatcaacatcatatttctttctttcaaacattgattcctttgttttctatttttaatcttcctataaatgaatccgggcttttccaaacttatatatattttcaatattaagatttccagtagaactatattcatttgtttatttctatatgtgtaggaacaag

SEQ ID NO: 33477 - DNA, 503 bp, Medicago truncatula
  Intron number 1 from transcript Medtr3g068970.1 (locus Med tr3g068970) derived from phytozome v7.0 (chr-ID MtChr3; po s 16397016 to 16397518 reverse strand)
gctgctttggtatgtatgcatttttcttcttcatttttttgtctttcctttagtcctaacctaaactaaaatgttgttataatgcatacaagctataaaactttaattaaatattagacaattgagatttcaattttttatttattagagtcatgatgtaatcgatctttaaaaatttatttaggatgatggcagttaagaaatattcatcatactaaacttagggacccaagattgcatgcagtcacaattggacaaaacaagactatctatttaagattatacgaatcacattgtaaattcaataatttgatctaaacaatccaatttctatcaataatcattcatacaatcaacttttgtttctacaaaatccaaaaatgtgcatcttgatcacatttgtcacatagactaatgcatctttattaatgaaactaatttgattattaaacaatcaaatattaattgttgtgtattgtggcagttacctggaagaacagaca

SEQ ID NO: 33478 - DNA, 1001 bp, Medicago truncatula
  Intron number 2 from transcript Medtr3g140040.1 (locus Med tr3g140040) derived from phytozome v7.0 (chr-ID MtChr3; po s 36177861 to 36178861)
gagggaccagaggaggaagaagttagtttagatgatctgtgatagtatgttatgttttacttaatcgcgtgttttatgttgttttaattgagtgttggttatgtgttgttgaattaaggtgttgcattatgttttgaataatatatatatatatatatatatatatatatatatatatatatatatattatttaaactttcattatgttttaatttacgtcaaatatgttcatttattcgataaaataaccaaagatatgattttcggattacgaaatccggatttgcctagggcgtatgtgtgttccagaaaacgaaatccagaatacctcagcataggattcttttgtatggaccacattgcaccaagagtttatgtggtccacgacatccaaggacctctataaatacattctctccggttttcagcttcaacaccattaaaacacacaaacacaacaaagaaaaccatgcaaatttttgtcattaagttgaggatcttcctcatgttgtcgcaaatatatgagttagctctctatttgacggcgtgatgaagatcttctgcatgctgtcaaaaatacaaacaagcacaccaaagagaccattcaaatttttgtcattatgctgaggatctttctcatgttgttttaaatatatagttctctatataacagcatgatgaagatcatcagcatgctgtcaaaaatatatagatactctttgatgcctccttgatacacagataactcaaaaatatcaagaggttgttataagttagatcttgctgtctgccagatgaatatgtcatttggcaagacaacaagatctaactcaaagaaatcctcttgaaaacactttcccaaaagattcatcatttatgttattatggttttttttaattgtttatttgtctcatgttgcttcaatttatgttatgtacctttgttctattttttttcttccaaggcatttgcaacgaaaacgatccaaacaaaagggtc

SEQ ID NO: 33479 - DNA, 989 bp, Medicago truncatula
  Intron number 1 from transcript Medtr1g107750.1 (locus Med tr1g107750) derived from phytozome v7.0 (chr-ID MtChr1; po s 22817811 to 22818799 reverse strand)
atactcaccggatatttagttccccaattttgcaggtatgtttaaaataaagttcaaaattttgtggtgggggttctagtgaacatgcctacaaaataggggaaccagatttgacccgtgattttatgctaactcgaaacaaaattgtgatttttcacatgttggttgaaaaattaaaataaattgaggcgtattagtaatgttataaaactttacaaatcatttttatgtgtttttgaagaattctcttaaaaaaaaaatcagctcattatttttttgttttgatttttgacactttaaaaattcataattaccacgtccatggttggaaagttctaattatgtttgcaaaaaattataaaaaagaaatttaacttctagatcatttttcttgactttatgactacatgaaaaaaccatattttttatctacttcagctctttaattaaagttaacaaaaaaaattctcacgttataaaaagatcaacatgacaagattctctaccacggcagtatgagcgagttgttgaaggaccaaaataggaggaattttacggtggtagaatctatgttaaataaaaagcaaaaaagaaacttaacaaagagaaaaatgatgtcattctacaaacgttcatcgaatttctatgagtattggactaagtgatatttgtgtaattaacgtttctcttatggttcagtctgtttctcttatgtttccgaaagacattttggaagtgagaagagtaattttcaaaataaacgaaacaaatctgacagaatgaggcccaagagtttgttgacaaaaaaggcccatgagtaatttgacccaaaacaggctcagagaaagtcaaatttacttgcccaatacgcacaaaaaaaaaaaaaaaaactggtgcaaaacctagggttagtgagagataggagatatatatagcctccttccaccgccaggttatcaaaccagagagagtttgagggagagagagag

SEQ ID NO: 33480 - DNA, 708 bp, Medicago truncatula
  Intron number 3 from transcript Medtr3g142570.1 (locus Med tr3g142570) derived from phytozome v7.0 (chr-ID MtChr3; po s 36566155 to 36566862 reverse strand)
gaggtatagggtaagtcacatgttatcgcatatagcgttttgcgcctgatctgtttgcctctttttcttttacttttttggtgctttgaatgtagtatataatcattgcatttattgtgtgatcacacttactttcttcttttttgcgtttgttcctctttatctttggtggatatatcaattttaatacaaaaaaaagtgattttttttctttaggaaacaagtatttagtttttatgtccatttcccccttgcgcaagtttactagttagcaagttgttgcagaaagtttcctcaccaaaatagtaatcatatgtgtgttttgatattcaagaaaaaaaggaatttgtatattaaatttgtatgggaattgaaccttgatcaattcattcttattaaaatctcaaattttttctttgatgtctctggttcattgaatagtggcccgcaacaatttgaaaatattgtttgtgactggtttaacatctcaacagtcatgagaacttaactaagaacttgtttgtgactgcacaagttgaattaacatctacctgtcaacttttttagaagcttcgccatctaatctatgctatctacaatttataaggttattttttatctgtaagtttggatccaaatacatattttatttgagaaactccttgaagctaatctaatttgagcctaataattttgctaggagcaaag

SEQ ID NO: 33481 - DNA, 951 bp, Medicago truncatula
  Intron number 1 from transcript Medtr1g112070.1 (locus Med tr1g112070) derived from phytozome v7.0 (chr-ID MtChr1; po s 24024960 to 24025910 reverse strand)
gctcaggtgagaatatttgttcagaattcttgtcaatttctcatagtaagtaaataattaagatttgtaattcaaattttctatatctttttatttgaaaatgctgaccatcaagattatatatttaaaggataaaagttccaagatgaaggcttgagcctggaccaaaaaatagttaagttacagtctcttgatttgaattctgttgttaagacttgagagtttcaggaacataattttatgccttccaacttcgaagaacaccatctgccagatttatgaacatagtaaaagaatatgtggtgtttgtacatcaattgattgattgattcagtattaggtaggtacatcacgacttttgtgtttttcgactgatgtttatcttagttactagtggggttagcctagtcggtcagtctgccgtctgccttgtcttggtccctggttatgtgagagctttgcacacgattctggattgcctttgttataaaattctgattctgacactctcttaagcataagctttacaagttttaaccttgttacaattagcaacccacaaatgttagataaacaatacaaccaatcacaaccaaagaacttgggaaactaaaatcctttaaaaggttgtaggcgtgcagtgactcgtgtatttagtttctagagaatctttgaaaatctcacacctgctctcatgctggagaggtggaaataaaatattaggattgtggtttcatcagttagatgcaaaagtagccatgagatgcaaatagtttaccagagatcaaaggatgtaatttccaatgcactgtaactttggagacgaatccatgttttaattgactgctcacctttatatttgtctttggaaaagtacagatttatatttttttattatttacaattggcagtacaggttatagcaagcccggctgatcttgtcaaggtgag

SEQ ID NO: 33482 - DNA, 924 bp, Medicago truncatula
  Intron number 1 from transcript Medtr7g043490.1 (locus Med tr7g043490) derived from phytozome v7.0 (chr-ID MtChr7; po s 10769403 to 10770326)
ggaagaaccaaatcagctttcgctaaccgttagttgtgtgtttcaaattagatcacctcctctctatttcatatcattgtagttgagaggactgttatcaaagctttatcaagtatttctaatacgttttatgaaatttgtttttatttacacataatttctaacaagtgatataagagcatgtcttcatgtttgatttattgggttattaaaattataatttctaatttatgtggttaattggattttagggttcttcccaatttccgtatgaaccctatttttataaaatttgatattctaattttgtttgggattttttttttggaaaactaattttgtttgggtttggttgctataaattaagagttgtgttatatgtcgcgaatgcactgaaaccatgcacaatgtgtttttaattaataaacaattcaacacatactaactatacaagtttaagagattgtttttgttttaatttagattaataattatttgaatgtgtgagttgttttcttaaggatataaatgtatattgtgacgttgtcattataattttggaatagggttaatggtgatttatccctgtaatataggtcattttttgttttcctccctgtaaaataattttttttttggaatacctcctaataggtcataaaaaaacgactttatttttttgcaaaattttttcattttttttttaacctattaggggggttttccaaaaaaaaaaaaattttccgggaggaaaaacaaaaattgcccttttttacggggggtaaagcccctttaccccttcaaaatttttaaaatttaaaacttctccattttttttttttttggcagctttaattaaaaactttaaattttttttcccccaccccaggtaggagcccaaaggcgcgggccgggcggggcgag

SEQ ID NO: 33483 - DNA, 960 bp, Medicago truncatula
  Intron number 1 from transcript Medtr5g065220.1 (locus Med tr5g065220) derived from phytozome v7.0 (chr-ID MtChr5; po s 22766130 to 22767089 reverse strand)
gaagaaaagcatctcgaagactgttctgtttccaagttagtttcatttcatttcttctctctttaatatatatttctcatcattcataaaacaaaccaatcttactttattcaccgattcacataaatatactcttaatattcctttattcagtaacgattatgaaattgaatatttggttataaatccttgccttgtgattttcataaacaattgtgttatatacccagtttgctgggtaggtgttatgatttgattttctgatctggcgagtttcttagaggagaaacgtagatataggcagtagtaaatatcttctgtttcaatcaataatacaatatttctatttcatctggatttgggttagtgtggttgaatattagtcatggattggcggatatctgtcaagaatttttgggaaactgctatgcccaatttgtgatggattgcgccgtcatgggaccatacttggatacaacggttccatatgttggcctgcatgtctggtttttggctttcctctatccgccatcggcaatattgatttgggttagtgttgtcaaatatcggcaatggtgaatatctgtaaagaatttttggaaaaccgatatgcccaacttgtgatggacaacaacaatggtttgggttgtgcgttggagtgacgttggtgtctcttctaaatggttatttttggtgtagtcggtatgtctgcaatggttatgttttgcgttagtcgggatgtctgcagctgcagaaggaatatccttagtatgtgttagtgggttaagcttgactatattgttggatactctccattcttcttggcggtttagtttattttattcgtttcttttattacattttacgtttgtttttctgttatgttgcaaatgctatattcgattgtgaattttgtttgtaatgttactaaacatggaaaatttgcagtgcattgggcac

SEQ ID NO: 33484 - DNA, 502 bp, Medicago truncatula
  Intron number 1 from transcript Medtr6g099150.1 (locus Med tr6g099150) derived from phytozome v7.0 (chr-ID MtChr6; po s 21751142 to 21751643)
gtggggagtatctctggttgggatctacgtgataagtaagtaatttataattttttatttattttaggcttaattgcacttttggcctacaatggtcgacacgtggcacctcacttaagagatgtgggtgccacgtcagcgaagactaagtcaaaagtggccttgggggccaaaactgtcaaagatccaatacataggaggctgttttgtattttaattagttagggagccaaaatcaaaacttttgaaaagatagggggccaaaagtgcaattaagcctttatttttttggtagaaaatataaagtgaagagatggtgtgcgagtccaagagagaaaatcaaagagtgcttactttttttgcctattgaacaaatatttggagttctaactaatatatatatattttttttttggtttttggtacgtgatgatataatattattgaaaaattttttgaacttacaggccgcaagctggagagattaaaaagattgttcaaa

SEQ ID NO: 33485 - DNA, 842 bp, Medicago truncatula
  Intron number 2 from transcript Medtr2g132310.1 (locus Med tr2g132310) derived from phytozome v7.0 (chr-ID MtChr2; po s 31937711 to 31938552)
tccgtttcaggttttaggaatttttcatctttacggtaacatcgtttatttcgttttcgttttcgttttcgttttcgtttctttttcatgaatcttcgtttctttttcactcactgatgaatcttcgtttctttttcactcactgatgaatcttcgttccgtttcaggttttagctcgaacatcttctcggtaattcgtcatcgctatttcttctcattttaatattcgaattttcgtttttgttcgtatgatttttttaattatagaattcattttttttgtctgcacttgatatactgtatgaatattttggtttctatttctgatattgtttcactttgccgattatttgtttcaatcgatttttcacaaattttatttttctcaagtgttcttgtttattgagttttcaaagaatttgattttttaccaggttaattgattaataacaactttattcatcttaattttttagtcttttaaattaggtcattatttgattatttttttcactcataaccttttgtttaagattgttgatatttagtacttgatatgattaatttttcaccatgatctttgagtataatctatgtgtaggactgtcactatttgagaacttttagtctcttaaatttggtcatcatttgattattttcttcactcataaccttttgtttaagattgttgatatctagtacttgattgtttagattttgatgcgtttcaatctttgagatgatctatgataaattttcattttgattccgattcgtctagttttttttcgatctgacctaatctatacatgaaatttgtatatgaacatttaagaacggca

SEQ ID NO: 33486 - DNA, 627 bp, Medicago truncatula
  Intron number 1 from transcript Medtr4g092300.1 (locus Med tr4g092300) derived from phytozome v7.0 (chr-ID MtChr4; po s 19186718 to 19187344)
ctacaatacaaccgacgcttcaattcttcaatacggtaattgtttctgaattattcgtgtagtttccgatcctgtttaattgtatcgggtttaaatgaaattggatttttttttaaaattttattttgggtgtgatagtgttcttgaaattaaaaacccattttgcaaaattgaaaatttgatcactttctaatttttttttttttttttatcaataagtaaaagtcaagtagtttgttttatttttatttttggtgaatgtggtttcgattgaaattattatttttattttgcagcttgtgatcttgttattgaaatttgaatgatgatcttctgttgtcaatgtgatagttgtatagaaatcaagcaccgacacatacacatatatataattcaaaaaatttaagtggttgaatgtaactacttgtgtcatgtcggtgtcagacaccaacacgtgttaggtatcacacactttcaatcataagtgtcagtgcaacttaggattgcacacactacagagtgatacttcatttattggctctatctatgtaacctttttgtgaacatgctgttttgaataagatgtaaagacttgatttttatggttgatctttcatttgcagggtg

SEQ ID NO: 33487 - DNA, 753 bp, Medicago truncatula
  Intron number 1 from transcript Medtr5g099900.1 (locus Med tr5g099900) derived from phytozome v7.0 (chr-ID MtChr5; po s 39983182 to 39983934 reverse strand)
ctagataattgtaagaagtgtgcatgtaacattgtttttcgatgtactgtactacaaccatttataatccatttgttataacctgatattaagactttcgtatccaacaaattaatttatatcaaagttaaaacactttggtcccacccacccaatcaaccgttaaaacattaaatatcacagtagaagaaaatggattgtttgctcttgtatcattgaatatgattttgcattcctactcatgatttatcagtccaaccaagacttaataaaatgtattcagagattttacatgcatacagtgattttacatggagagtcttaacacaaactttctataaacaaacttctcactattcattttccctctctttcctaaacatcacaagattctccctcctgccaagatcccattcatcataatcttgcagcatctgttgaagtggcaatggagtttctccgccaaagcttgcatcattatgcacataaccacactttgatattaaaatatctcaataactattttgcatagaaatcatataaataccacaaggataaaagtacaagtgaatattaacatattatttgttctaaccattcgctcaaaattggtaaaagttgtcattcagttcttacattgagttagtggtaagatttatgaattaattttacaactatattcagatcctgcatttttattttgcaaatttgattgcagcactaagttggaagaaaagaacaacagatactaac

SEQ ID NO: 33488 - DNA, 835 bp, Medicago truncatula
  Intron number 2 from transcript Medtr4g087090.1 (locus Med tr4g087090) derived from phytozome v7.0 (chr-ID MtChr4; po s 18245196 to 18246030)
aaggtctatatctctctctgtttgttacattttttgtgtttcatgtttttattttggtacgaagtagaaaacgccggaaaatttgagggactgaagttcagaagaaaaaaaatgagggtgatgaaaaggcaattgaaaatcgtaggattcggaaaagtcttggtgtttcaatgttgttttttggtatatagtcatgattgatctattatttgagaaatattgaatgtgaagagtagccttgaaatttaatattattctttggcagcttattatttcatgtgatgtccatttttcctttgtaagcatttgttctaaatcgcaattttattgctaacctattagatacggaatgatatatgaagttcaaatactttttgaattaggcatctctcattgtcgtatatgtatcgtgtcagactatatgacacgacaacgacatatggttgtattgaattatataaattttttaaaattattatacaacacccaaacgaatggttcaagtaagttttactttacagtatacttgtttcttacctttactgttagctgatggactatacatgttgcctatgtgtatcattataaacttttctattctattttgcatgaccgtcctgggctgcaaagcaagttcctacttgtttgtatttactgaattttaaaggatctgagttggtgttctgttgccgaatttcgatgttcagttttggcgtatcagtactagcctggtcagtttctgttgctgcaagagctgctaagatgctgcagaatttgggtgttatgttttggtgcatcagctttggtccttagcctcgttccagccctgtgtcct

SEQ ID NO: 33489 - DNA, 548 bp, Medicago truncatula
  Intron number 1 from transcript Medtr2g095600.1 (locus Med tr2g095600) derived from phytozome v7.0 (chr-ID MtChr2; po s 21869359 to 21869906)
acacaccattggtagttttctttcttttctttttatctatcttttttatttcaaatatgatatttgaacacctcttaattttatacatctattcaacacctcattttctcccgatctctttcttcctatcacatctatcccattattctatccatctctttatctttcaattcgtataatgagttttggaggtatatttattatttccctttgacttttccttttgttgttttttgcgtacatgcatgcttttttattctacttgtcataatctttgtttttatgaaactaatttttataataatcttaatctcatttaataattcaataaattatattgcatatgagacatgtaaagtaagatactcatcaatttgcagaagagtagtaatagacaaaataatataaacattaatctaattcaatttcttaaactttgatataagctttaatcgaattgaatttgttgtcttgaaataatgaatttttctggttttggtgggtgttagtctaacttaatcttctttgtacattatgatttatgacag

SEQ ID NO: 33490 - DNA, 796 bp, Medicago truncatula
  Intron number 2 from transcript CU651566_5.1 (locus CU6515 66_5) derived from phytozome v7.0 (chr-ID CU651566; pos 26 511 to 27306)
ggaggaggactaggagtcatagtccacaagagtaggtttttttagtgttttcgtcacatttgaatatatttagatgtttttatgacactttgacggatatggatgtaatatatttacatttgtgtgtttgcattattttatgacattttggttaatttatggtttatttagtatttaaattttgaatgaatgtatgaatggatgagtacatggatgaaaatgatggaatggaagtatgaatgaatgaagaaatttagttaaaaatgtcaaaacagttgttctggtagtgggcaaagacccagcgtgacttaactcacgctagattataacctgcttgagttaagtcatgtttattacgcgtcaacgtgacttaagtcatgctggggatatttttgcaagtttgtatgaaaaagtagggggtctagggttcgacccccaacctctacatattaaacgtaaagaaatggagaattcaggttcgaactccaacgactacatatcattgtccttgcaactaccaactgagttgtgcttacagaacttgataaagtctaaactgaaaaattgtatcttatgcttacgaataaaactctgtaaattttatgttacaactccaaaattggcaaattcgaaggtgtaaaaatttgaaaaattgcgtacgaattggcaccaatatggaggtgtaaaataattctaaattttctcgatgttgcgtaagatattggacttcttataacaatatgagaatataatgggagaagaaattttcttgtatttcacagctatctaacacttg

SEQ ID NO: 33491 - DNA, 634 bp, Medicago truncatula
  Intron number 4 from transcript Medtr5g037430.1 (locus Med tr5g037430) derived from phytozome v7.0 (chr-ID MtChr5; po s 15730463 to 15731096 reverse strand)
atctagagggtcaacttgcttggtacacttggaaggtagtcctagatatcttagtactcattctgtttcttacactcgctatgcatgggtgatcctgcccaattagcatgagagcttttcgtggatctaccaacaattactaataatattaaggttgattatttaaaaagaggtatgaaaatattgtcaacgtaaacaataattaagataaacacacttttgggctgagcgacgataagaaaggaatggtcgactttgatataaatcatatgaaactgtgttgagtttgccaaattagcaacaaatcaatatatgcagtcttttataaactcatctcttcctttcaagtaacctcagtattgatggaatttgcacccatcccctcaataaaatagaatttgcacccacccaaaccattgctttgataatgttttctttattctgccttcatttgactgcatccttttttcctatgcaaacaattttataaggataacattatgaaaacaatggtgataacattcagtattgaggggacccatatttgtatccttcatttaacgttatagatactgattttttttctttttcaaatgcagtcttttataacacaggatcctcgtgatcgagactt

SEQ ID NO: 33492 - DNA, 1035 bp, Medicago truncatula; identical to SEQ ID NO: 30812
  Intron number 1 from transcript Medtr6g099570.1 (locus Med tr6g099570) derived from phytozome v7.0 (chr-ID MtChr6; po s 22055547 to 22056581)

SEQ ID NO: 33493 - DNA, 849 bp, Medicago truncatula
  Intron number 1 from transcript Medtr7g025470.1 (locus Med tr7g025470) derived from phytozome v7.0 (chr-ID MtChr7; po s 6244416 to 6245264 reverse strand)
cgaaaaggaagtaatttttcattgaaaaacaccaataatttattaaaatgttatatatttaatataaaatatacaagttataagacaaacttaccattttaaattttttaacatgtgcaaatttgcacatgatagaaaaaactcttcttatttttaatataatttgcattattgtttcttcaaaattttagccccacatatactaaatgtttggatccgcccctgcatacgtaaaaatacaatataaaagatcatggatcaataaatatagctcataaattaacattttcactttttttttttaaatagcaaacaacaacatctcatcgattattcatataataaggatgttaacaagtatgttaatgaatgagttttgcttactcaactcacatgatggaatctacacatcatctctactgttggagaatattcgaagtgggacttcagctttctcctatgtttaagtttgtgcttgacaaacttcataccataagttggtgctgccaacactacaacaaacctttccttttgacacaaacttttctctcctttgttcatcgatccattgcacaaaacttcaacggatgtttcatccttgctattgggtatgtcatctgaagcaacaacctcaaactacattgttttacaagagcattacaacattggtatccattattggctaatactcctaatgtgaatgtgcctttcggtgtgcctttgaatatatatattggcgatgcatggaagttatcaagtcttgtttgggaaggtccccatattgtgcaaacaaaaattgctttaatttggatctagcttgtaattaccaacaccatgggaaaggtcccc

SEQ ID NO: 33494 - DNA, 642 bp, Medicago truncatula
  Intron number 2 from transcript Medtr5g101740.3 (locus Med tr5g101740) derived from phytozome v7.0 (chr-ID MtChr5; po s 40729028 to 40729669 reverse strand)
tgatccttatcttagagaatagattgaaaacaaaggtaacaatttttgttaatcattttgagtaaaatatggatcgctcttgtgcgtttatgatttgtttgcaataatgaaactacaatattaggaaatagagtgccccagcataaaaaatagtgaataagataaaccataaacctggaagtataatatatatgcatgcgtatgtttcattatttatggcaaaaagttaaaatttaatggtaaagtagaggaccctgtcttatccttataaagagaatagatcaaaaacaaagataacatattttcttaattattttgagtgaaatacaaaacattgttcatgctagtttatggttcattagcaataatgaaggtatgaaactaaaattatgggaaatggaagattttcggggaaaagtttattgggttgttctgaattctgattggtttcttttggttaccttgtttgttgaattttctataaaaatgacgggttgtttttttcttcttgcatcagagcatgggaaagattgagatatcacatgttgtgcattgtgatttagaaaaacaaattttacattgaagtttgtttctttgtttatattttttatttaaatgtttttgttttggtataggaattca

SEQ ID NO: 33495 - DNA, 708 bp, Medicago truncatula
  Intron number 1 from transcript Medtr2g103000.1 (locus Med tr2g103000) derived from phytozome v7.0 (chr-ID MtChr2; po s 23813079 to 23813786 reverse strand)
gtaccttgaagatatagtaagctctatctccctcttcttctctaattatctttatccttcacgtaatttaattattatgcttggtatctttattcatttagatttcttcagtacactcgtgtgtcataaaagtaagaaagatattggctaattttatgtctcttctacttctagtcttctacatatacaattatattaactttttttttcctgcagttttagtttctattaacggttatttccttcctaaagtatttgctctactatcttccattttcaatatgggctatcaccatacttgttttggaagatgtagccatcaagattttgaatcaaagttaaacaactttcgtccacaattttttgatatcatatagatacatgctttgacttataagccatttttgttgatttataagtttttttatctttatctttatctttatatgcataaaaaatttgtcacgttatttaatgaatacaataaattatatattttctaaaatttatgacaaagcattattaaatgcatgtataaaatatatttttatcaactactcctatgtacgtaaatttaatggctagttatatattttctagttatgttggagtacattacaaaataacatgtacacattgaagccttaaattgtggttatatactttcttgtagaacttggattgaaaaagaataattcaaggcagggc

SEQ ID NO: 33496 - DNA, 602 bp, Medicago truncatula
  Intron number 2 from transcript Medtr4g110540.1 (locus Med tr4g110540) derived from phytozome v7.0 (chr-ID MtChr4; po s 25060501 to 25061102 reverse strand)
agaagaactcctgcagaacatcacaggataccatagtaaggccaaatttcaagtttgcttatgtgtgtagctatgtagcaccaacactttaaattacaagcgtgacacatgtggttacattcaacaacttctattttgttgacttattaccggtgtttatgtgtctgtgtttgtatcaatttttcatatctgtttagacttcctataattacatacatagaacataatattcaagaaaccagtttttttttttttttatttgaaaaaaatatacagttcttgataatattagtgtgagaagatattttcattgtatgataaactactgagatgattatatatagatgtttgtttcaattgctttaaatttttgagaatttaaaagtatttgattgatgcaaacattaaacaatgaaactggtattctcaaggatgaaaaaggaacacaccatgataatgagatcttggtttttttgtagtaatatagttcttccaaatattgtttttcagcaaaggagtgttctatttagttacatgaacttattataatttttgaacaatttgcagttttccattacaaccacatagaagacaacaaactt

SEQ ID NO: 33497 - DNA, 613 bp, Medicago truncatula
  Intron number 1 from transcript Medtr5g034960.1 (locus Med tr5g034960) derived from phytozome v7.0 (chr-ID MtChr5; po s 14375439 to 14376051 reverse strand)
gtggggtctccattgttttggaagtaacaaacaccattgaattttgtgatatagaatattagaagaagtataggggaagttattttatgttttcattccaagataaaaattattttttataaaatgaaaattttgaaaaaagacaaaaatgaaaatagtgcaacaaagtgttgtacaatgtctagtcttagttaacaacatgcaccactttattcactttaatactttgggacattacacgcatgcctagtgaattcgaataatgaactgtatttctcttatatgttttcctttcttttaaagattctcttcctttttcccacaaagagcttctaattctgaaactcttcaaccttttgtagttttgttcatcatttttttttttttttttattattttaacaaaattttccattatttttgtacatacccttcacacattcaccacttttcttactcctctttttgactcatttcacttgccaaccaagctaacatgatgctattcataattatgtctagctttaattgaatttttttgctttcttgcaaaatacaaaaataacaagtgtaattgaaagttttgttatactatttattttaggatccaaagc

SEQ ID NO: 33498 - DNA, 818 bp, Medicago truncatula
  Intron number 1 from transcript Medtr2g014140.1 (locus Med tr2g014140) derived from phytozome v7.0 (chr-ID MtChr2; po s 3493820 to 3494637 reverse strand)
tgacaagccggctatctaagggcgaaaccttgttggtaagtcgtatgactgtaatcagttcatcacgggttattaggtatttccaagcatggttattaggtattttgtcattgattcttgccatgcttttgatctcactgtatagttttcttcctgggttattttattatagttttctagtataaattttctgcaaacatcgcttggagtttgaatatacgagaaactagaaatagttccagtttcacatctaaacatacagaaactgactagaagttcaataacatatgctagtggaggcttctaggaactgggtcaagggttgccagttgccactaatttcgcgctttctgacaacagagagattcagttaagtcattgcaacggcatggttgccagcgtgttctgcctagacgaagatggattcaataacatatagttttgattttgatgcttgagtaagccaatgacttttgatggttgtgaaagaaggtactgtatttatagtcttcatgaccaggagatagtagtagtagtagtgcaggtttgaattctaaaacaagcagtagtccatcatgcatactggactaacaagcaagagaccgtggccatgtttggatgattttctagcttataagaactttccgacttagagtttcttaaaaataagttttgtatgaggatacaatagagaaccagcttttccactattaaaatgagaagtttactttaagtggttttatggtatatacctatcgttctttaatattttatggtggattatttgcagaggctgacttgcatagtagaagtccgga

SEQ ID NO: 33499 - DNA, 849 bp, Medicago truncatula
  Intron number 1 from transcript Medtr1g108550.1 (locus Med tr1g108550) derived from phytozome v7.0 (chr-ID MtChr1; po s 23200903 to 23201751)
ttgtctttgcatcatcatcaaaatcccaaaacgaggtacaactcagttttcttttgtctttgacaaggaatctagagtgttagaacttcttctctcaaaccaaaaatgaggtatatatgatttctgtttttttttcctgtacttttgcgatttttgcttctaataacatttttttagtagtgcatgcaatttttattttttattttttttttatatgtttcatgttcgatgcttagttggtggaactgaaaacagtgtattattgcattgcatgtattgtataatccaaaattggtgaatagtttaattgaaatgttgtgttttagctacattgctatgctgaactgtaactatgaagaattgggatgttgaatagatgacattaaaatttagagtaataattttccctacacctccaacacccggtaatcacgttcaaaatagattaaattagttcacttgagtagatggttaattcaatttatggtcaaactttgcagttaattcaaattcaaatgcattactaaccacaattttcaacgtgatctaagttaaccatatactcaactgagttaaccacaattatgcatgaaacatttttgttaaatttattttggtattatgcgatcactattttctagtgtctattcaaaggtgccctttacatgatttgaatgagagttgatggtcagtgctaattgaacagtcatggaaattaatattttgtgaaagttgttcattttgatgttaaaattaggcatggtttggtgggtgaataaacttgtttatctgattttctaatgcttgaatgcagtcgtcatccagaggtcaagtgggctcaaagggctg

SEQ ID NO: 33500 - DNA, 997 bp, Medicago truncatula
  Intron number 1 from transcript Medtr5g100880.1 (locus Med tr5g100880) derived from phytozome v7.0 (chr-ID MtChr5; po s 40349310 to 40350306 reverse strand)
tgtgctctccaaggttcttactgatctatctttcagtttgttgttcatttttaatttgtttcatgggattcacaagtaaaccaaatccttagagtgtgtttagatggggaaatgttttgagagaatgtaatgttttgagtgaattcagctactttaaggtgaattttattgtttgaattcaactcaaagtagttgaattccctcaaaacattatattctctcaaaacatttccccatccaaacacactcttagggagttgtggtactctataattgtgatttaaatagtttgtgtgccactttgtcaacatagattcaaattgtgatacactacattatgatactagatcctttttcaagattaaacaacatcttaggtttaatttttcgatatcttgaaagaatagagatgggattatagtcataattgagttaaaaaagttcattaattagtgtatcacgggtgaaaactttcatttgtttttatgaataaataaaaaaattctatataatttaaagatttgattcaattttaatgtattttaatcattggtaattagatgaaataatatctctttattttttatgaacttgtgttagctggtatcataatttgaaattttttgatagttctattagtgagaatgtatatgtcacattatgtgactccaagaagcataaaaatgtgcaagaaagagattattagaaaggatagatagagaataaagataataatgtgatagttaataggatttggatgaaagcgacaatggccaaaaaaggttatctataaggaagaaaaaaaattaccttaaaaataggactagaattcactgcatgtagccaatctctaagttgcatagtttagaatatcattgaaaatgtgaataattttattctattttgaaacttttatattaaaaattggttcctgtcctgtaatgtttctcaaactcatacaattaatacgaaaaaatttcacatttttatatttcag

SEQ ID NO: 33501 - DNA, 569 bp, Medicago truncatula
  Intron number 1 from transcript Medtr5g009230.1 (locus Med tr5g009230) derived from phytozome v7.0 (chr-ID MtChr5; po s 1967283 to 1967851 reverse strand)
ttacttgttacagttactttgataacccaggtataactttttataatacaaatatatagttttattgataggggacttctatggtacacccataaattacggtgtaccgttactctcgcttacaatttttataaattaactatcattttttatgaagaaaataagtgtttgttgatatatatattttagaaaacatcattttatatgaaaaaaacatcatttcattttttataaaaatcatactaattttttcacattttattgtaaaaaatactcaaaattctctattatgagtaataagaattcaaaaaaattaaattttattgcgttgatgtttttggtaaataagatttagttattataattataggtgatagaaaataattttttcctacaaaaaataactcatttaactattaatttaagaatttggtgtaccaatacactcaaattattgggtctaccataaaacttgccttattgataatgtataaataaattgcaatagcttatactacagttctaattatacaggtggaaatcctacaactccaaagaataaaactatc

SEQ ID NO: 33502 - DNA, 510 bp, Medicago truncatula
  Intron number 1 from transcript Medtr3g115040.1 (locus Med tr3g115040) derived from phytozome v7.0 (chr-ID MtChr3; po s 29237217 to 29237726)
tgttttggtgagtttatctccaggggtgttcttaggtggttatggtataccgtctatatggggcaccatttgtatcttgtttcgttcataccctgcgtcttgcggggatgacgtttaataatatgtgccgattcaaaaaaaaaaaaaaatattgtctttcagaatatgaaaactgttattccaaaccttgagttttgtagagtagtgtggcacccccttttatcgccagaattacttgactttgttcaatatcttcctatgatatggttcacaatcacattctctcgagaagtaaatctgtattcttcgtctctttgaatatgtttgtttaattacttgtaaatgtggtaatatctgaattttgaagtggtaccatgaagtaaattccaaacatttatgtattaaatatttgttgaagtagtttaagttctttatacacattattaaactctgctttaattttttttcaaaatttttaccgttggttttctgtttgcagctttgagaaag

SEQ ID NO: 33503 - DNA, 307 bp, Medicago truncatula
  Intron number 4 from transcript Medtr5g048350.1 (locus Med tr5g048350) derived from phytozome v7.0 (chr-ID MtChr5; po s 20425319 to 20425625 reverse strand)
ttgctgtgtttggtcttggagctgttggcttaggggtatttgaacaaaactctatcgtagttttaaattgtgattgtgatcgcaattgtaattcttctaatctttatatattaacctttatattacattaaagcgcgggaagatgtagtgaaactgtgtttgcgatactgcatcgtagagacctgtaattatggttgtggattgcaatttaaaactacgttttttgttttagttttttcttcgattaatttttttgattatatgacgagagtgagaccttgtggtgcaggtcataggtggagccaaa

SEQ ID NO: 33504 - DNA, 956 bp, Medicago truncatula
  Intron number 1 from transcript Medtr1g143810.1 (locus Med tr1g143810) derived from phytozome v7.0 (chr-ID MtChr1; po s 31856731 to 31857686)
ctcctaagattggttactattccaagaaagtacgcttttttatttccttttctcacattatacattctattgtattgtttacttttgtttttgggattttcaatcaaaaattgtttttaaggttaatcttgaggttggattggaagatgccaattcatttcgcggtatggtattaacaactgcattgtacatgttactgagattaattttatgtcttaatgaattcgaagatattttagagataactacttatatgtaaacatatttaagaataatacgtagtgtcctgtactctgtgatctagttgttgctgacatgtacatttgaacttgtttttgacttctgagcccggtctgtttggattgaatactagcttaagtcttgtgagactgtttggaagaacttatataaacaacttatcacattgttcataagctattttcagcttattttcataaattctccaagatagcttatgaaaacatctgataacttatacgaaaacaatttactttattttatcttttactatagaaataacacatatgcagacacctatcataataagtgcttctgctgtaagctgcaattaagctgtttatccaaagagggtcgagtctactttggccaattttggattagcttattgttcaaaggagtttttaattaaaataagttaatggctcttcaattatggaaaagttcctacaagcagcttataggtgttcattaaggagtttgacaaaataacttttgaaaaaattggggtgcaaagcttatttaaagtttgactaatacaagaagacattgtttaaaacctcaaggctgttataagattcttttgatattccttttttcctcaaatgtttgtgtagaagttcatctaaactttctcctattctatttactttgaattgccagggaagactgttgacaggagccacgttaggcctagt

SEQ ID NO: 33505 - DNA, 1041 bp, Medicago truncatula
  Intron number 1 from transcript Medtr5g019790.1 (locus Med tr5g019790) derived from phytozome v7.0 (chr-ID MtChr5; po s 7416522 to 7417562)
ctattcgagaagctcaagaacctcgaacccttcaggttatatcatcattttttcttcctcttcttcttctttcaattaatggttaaacttaggataaacaacttaatcaaatgcgtatagcataaacatttatcatataagttataagctgttttcattaacacctgactagcttgtagaattaagccgaacatattagctagtatgtgattttggttaggaaaatatgcagcaaactttaaagccatgaatatgtaaacaacctaaagatgataaatgtgattgattgaaatgaaaatgttgtgttcacattgacacttgagtagagtacaaaagatgatgatttgtgagtttaacttgtgactctcatgccaaatgatttaaaagagtagcgtgtttagatcttttgggtaatttaaaggtcctaggcaaggcacattgaaaccattttgttgtatcttgaaactgttcaacaacatcaggactgggcaactttttttgttaaaagctgaattggatacctataataagtatcagggaagcatccaaagtatcggcattagatacgaggaatgtatttgatatgattcaagcatcggtgcttcatagaataaatgtgaattcattcttctgtggtccacttttagggatttgtgaagcatcatctatgccaactccctaaacgaacagcatttgaacttatcacagaagtttcagaggaacttatgtacagcctaaactagcttgcatggctgaaaaccaaaaactaaatctgtgcgtagtttataaaaatattaaaataccattacaatatcatggatcgtttctaatagtctaatattgcaaatggctttcaaattgtgatcttatttactaataagattatattattttatgatctttgtagccccttgcagtccatatcacagtcttgtaagtgattcagttagatcacagtgtctgcacatagaatcgttaatattggacaatttttcggcaatcctagggctcgatcaccactcggtttcttggattaggttt

SEQ ID NO: 33506 - DNA, 708 bp, Medicago truncatula
  Intron number 1 from transcript AC231338_19.1 (locus AC231 338_19) derived from phytozome v7.0 (chr-ID AC231338; pos 100942 to 101649)
tctactcttcaccacctcctccttaccaccactaaatggtggtttacgatagtatcccacggtatacttcttattacatacaacccacacaaaatacttttatataattcaattacagtggttataatattaatctgataaatatctagttagacatagcttcaaataaaaaaatatttggtaacacatataaatgataaaatttagcagataaaaatttaatgatatcatttaatatcttttcttcttaaaattttatcatttatgtgtgcacgcccaaataaagtgtcgtggcttttgaaaagtttcttataaaccttgtggaaataggtttaaatgtgaaattacatatactttttaaagttttaatttaaaaaattcgattgttcaatcttttaaaatattattattggcaatttgaaacaataaagttgagacctgatgcagaaggtgagtgcatgaggtcaaccactatagattatgatcatattatagaacttagctagaaaagaaaaaatatagttatatgcttcttattaattttgtttgatttaaaatttcaagcgattaataatcctaataaacagttttagctagattgaataatgtttaaggcaaaaccattttcttaatgaaagatattgatatatttatgtgtgcatatactttgcagggtttgaggaatataattgaaataaagagaagaca

SEQ ID NO: 33507 - DNA, 858 bp, Medicago truncatula
  Intron number 1 from transcript Medtr3g019300.1 (locus Med tr3g019300) derived from phytozome v7.0 (chr-ID MtChr3; po s 3883053 to 3883910 reverse strand)
aggtgcttgtccttgaaaaaagtattgaaattaaggtgaagacttactttaagcaaattttaatcaaatattgtacatcttcatttttgttattataaaattcaatttctttttagttcgtaagtatatgttggactgacgaaaatgttaaaattattagattaaaattttgattaaggttttaacctcatctcttttatttatgtgtatcaatttttaatagttattgttgtttcgacaatttaaaaaaaaaaattcaattattttactaaaattagtatgactgctataaccaaagatcgttaactttataaaaagagttgaaaaaaccatgtataacaatgttgtgttatctatagcttcatggatgttttgtttagggttaaattagaaaatagtgctcctaaatatatcaacatttgattttaatcactttaaaattttctttaggtttttgatccttctaaaattttttatctatgaaattagtatcttctctacattgattattacactagagctggactaatttcatagatgaaaatttttaaaggattaaaaccctaaagaatattttaggggaattaaaatcaaatgttggtatatttaggaggactttttacttatttaaaacccttttgtttaagaacattagtttagccataaaaaaggattaacagcgtaacttgttatccgtaaattgcattttttttttttaagatctgaattgtacttacttaatcagaaacaatctgtcttgaatattcaatcctacttatgtctcacctacctttatacgtacttttttaaatgttgatatcagataaagcaaacctctggtttatatctttccctttc

SEQ ID NO: 33508 - DNA, 448 bp, Medicago truncatula
  Intron number 1 from transcript Medtr3g016250.1 (locus Med tr3g016250) derived from phytozome v7.0 (chr-ID MtChr3; po s 3092034 to 3092481)
gaagaggagaaggtttgatatatgacagtgcaccaatttttctactaacatgcattgtcctcgtcactttctctgatgtctctcctctctgttgttggtgtgttcattgattcatcaccactcttttgatgttgttgacatatatggcaatgcacaagaagaagagcaactctctagttagttttttttttttattccaacgacgtcgtaccattacaaagcctttgttggttaatcgtctctcacctcatccgccacctctaaatgtgacctccaaacaccccctagaaagccattgcgctaattttgtgtttggtcactaagtcaccgttcgatttgagatctaatgttagtgttgcttttatgatttctttgttatgtttctttgcttgtctttttattgttatttttagtttctttccaatttgtactctgaatttgctgaaat

SEQ ID NO: 33509 - DNA, 709 bp, Medicago truncatula
  Intron number 2 from transcript Medtr3g016250.1 (locus Med tr3g016250) derived from phytozome v7.0 (chr-ID MtChr3; po s 3092483 to 3093191)
cttgggaaaggtgtgttttgttggttttgtattttaagtaagatgtctatataggttgtcttcaaatttaacattctctcagtttacaattgatttatcaacatgcgattaaatttgtaacatcagaaattacttatagacgatatgattgaacacttaaaagtaactttttcttgtagatggatgagattaaagacttaggatcttgccttattattgacaatttaccatatgtgggaggaattagtttggttataattaagattttgttttgttatcttcaaaaaaaattgttggtttgttaatttttcattgacttatgaaaggcatacatgcattactagcgtgttttttttactctctcactcactatgtgtactatatcctaattttagcatttgaataaagcttatttttttgtcaaataaaaatacgggtcggttaaaaatcttagtctcgattattattttacgtagattgttataagaaactaatggcattaccaacatttagtatgggacaatactcattgagaaagaagaaaaaagagtattgtgacgtctagcaaacaaataaagggactattagtccttcacaaaatatgaatactcaaaaatggtttattatgattgttttgtgtatttgcaacatacaaatatggaattttatcccattttacattggaagagcttccactccaactcgtgtt

SEQ ID NO: 33510 - DNA, 996 bp, Medicago truncatula
  Intron number 1 from transcript Medtr5g092890.1 (locus Med tr5g092890) derived from phytozome v7.0 (chr-ID MtChr5; po s 36453783 to 36454778 reverse strand)
atttaggtgatttatgctttaggttgttttttctttagatgacttcttatcgttttttctttagatgatttaggtgttctgccattctttacatgatttctgcaaatgaaaagagtaacgttattgtcttttgctttaaaaaaatataatgagggatgtaattgttataatataattcttgcatttaagtgtgagatcctttacaatacatacagtgagtgactcatacaacagataaggaaggaaatttttgggatttgattttgttatattacctagctgattgcgtccatttgccttactcttgctttattctgctaccaattctagatacaactattctttttaatgctagcaataacaaaaataaacgtgtgtgacgctgtgtagagggaagttcatttctctatcatgatgagaaattcatcactcacagttttatctaatttgtttttgatatcttgcttcataatcatccatcacattaatttaatggatctttgtctaatttatcttttgtactctctttgtatctaagtacaatttttccttccttttaggtgggctataatgtttataggaaaaaaattggtttttatttagtgattgagacttgagtatttcagagaaagatttgaaaaagagaggttagtttactgactgataagtattagaacgttggagaatgatttgaaaaacatgtcagttcatcactttagtattggaagaatatgtcaatgaattatattttcatgcctttcatgctatcactttccaaatattttttaccattttgtgcaaaaaagtgtcaaatgtagaaaatttggttggttttacatagttttttctgagttaattattatatttcatctacataactttcttctaattttttctttgttataaaaggtataacattgttttctgtcaagcttcattgattatataacaatgatttaaactaacttcaattggatcatgtaaggttcattccat

SEQ ID NO: 33511 - DNA, 444 bp, Medicago truncatula
  Intron number 6 from transcript Medtr3g010500.2 (locus Med tr3g010500) derived from phytozome v7.0 (chr-ID MtChr3; po s 1844313 to 1844756)
acaaccgatcccaggatttcgtagagtaaaaggaggtgaagtatttatgtggattttaaattggcatggtttattcatcagattgatagccttagcaaaggaaaagagaacaagaagtcaagaaactatttacctttttagcataaaatttcttgtacgttagtagatatcatgaaaggtacttggggtaacaccaagtttgactgaccagatattacgtgcggagttttctgtttggccaaatagaaaatgataataatagaaccaaaatcaccagcaagtctgataataatcataattcataagcataatgtcaactgactcctcgaaacggttttctttcgaactttatttttttctccttatatcaaaagattgacatttttcacgttcttcttggcatattgctgctcaaaaattgaggacaaccaggaaaaacgccaa

SEQ ID NO: 33512 - DNA, 419 bp, Medicago truncatula
  Intron number 7 from transcript Medtr3g010500.2 (locus Med tr3g010500) derived from phytozome v7.0 (chr-ID MtChr3; po s 1844724 to 1845142)
tcaaaaattgaggacaaccaggaaaaacgccaaatgtaagacttctttctttaatgcttatgtagcagttaattattttacctatttttatgtttttatagttaacaatagcaaccttgaccaccaagtctgtgtgtatcaatgaagacatgcataaaaaaatgcaaattaatgtctctttaaaagtttgaaactatatattttgatccatgttaagacatgatttttcttgaattgtaaggggacaaataatgcaggctagtgtcaagcagcttatgtgtgtaatacacagtttactttaataggtgcaaattctgctgcagaagttttgatatagagaagattaattcatttttatggttgtttatatattgtgtttaacagataccgaaagacattttattagaggtgctcggacc

SEQ ID NO: 33513 - DNA, 828 bp, Medicago truncatula
  Intron number 1 from transcript Medtr5g049330.1 (locus Med tr5g049330) derived from phytozome v7.0 (chr-ID MtChr5; po s 21071570 to 21072397)
tatattctcctttgtcaaatcaacgccaaccacaggtaaaacagcttatttatttatagctattagacaaccaacaaccatttagattatatatgcttcaaggttttgttgctcatggctcaattaggatgagcagtatgtgacacacactacttaggcaatgtttcaaacacttatcatataagttcttatgtatataacaaaagataaaataaacccaagatgtttataagctgtaagttgttttcataagaaatcaggaagagcttatggaaataagctgcaaatagtttatgaatatgtcatgagttgtttccgtaagctctctcaaccagtctcacaaatgtttataccaattaataagttaatccacattcttgtacaatttttttatctttggttatgaattttgatgtcataggtttctgtcgtatgcctcgttttttctatcattttaatattaatattatccttccattttggattcaatggatggtagatcaatggacttgattgccaatgtacaaatcctcgtagtaatttgagtgacaatcatcttagtatttctggatgatatttcaaactcaataataaggatgtcatgccaaaatccaactggtagaattcaattcgatttcatagattttaagatttgttccaaacaagagatttttgtgaaatatggttttagtagttataattaaactactagtagtggtacttcttgcgtgagcgtgatgataatagtatgatcaacatttgcttggttctgaggtttctcttgggaaagcagacaaccttgcctaattggtgatttggtaacgacca

SEQ ID NO: 33514 - DNA, 527 bp, Medicago truncatula
  Intron number 1 from transcript Medtr3g103990.1 (locus Med tr3g103990) derived from phytozome v7.0 (chr-ID MtChr3; po s 25721365 to 25721891)
gtggggtgaatataatatttcatttaatttcttatcatgcccatttagataagtcaattcttctctaattagcttgtataaaaatagtaaaactttttatgctgttttttatatttgaattattttatttataattttatcgttctttatcaaattaaacaattgaattccaaaaacatttagataagattgtttgactctatcaattatttaactatagattttagatttgaatccaatcgtaaaaatgtagtagtgttaaatctaaatataatttattttttattatggtcctacttgtcttgacatcaaaaaataaaagaaaatgaatgttctatataaataaatttattttattttttagttttaattcgattttgtaatttttgaaagtttcaattaaattctttatctttgttgtgaatattcaaaattacgttagaaaaatatcacataagataatttttggcgtgtttcatgaattataagaagggttccgttccttttgtttatcttggattacccgt

SEQ ID NO: 33515 - DNA, 965 bp, Medicago truncatula
  Intron number 1 from transcript Medtr1g111730.1 (locus Med tr1g111730) derived from phytozome v7.0 (chr-ID MtChr1; po s 23882658 to 23883622 reverse strand)
atgtaacaaatttcaaaacctaatcatcatatttgtatacttttttttattttttatttctagccttttcatcgtgatcatgaaactgcacttgcacaatacatgttccactcgttttctatgcaaatctacccataagtcatttaacttaatttaaagttccaaacaaatcatttttctttttccatatcaaattagtcatttatctttaaaaatacttacactagtgacttaactttcattcttattccacttatttaccattgtctacatggtctttgaatatatactattaagaatgttccacactcaacactaaaattggactctagttgataacaagatcacaatcttggataaaaaattaaaatatatcatgctaattttgatattgtagtagccgttatgatgtattttagatgttgtattgataaaatgaagatgtaattaatctctttgaatggtttcgtaaaagttttgataacatacatatatcaaaaatgaagtttggttaaataccaatgaagtttttgaacataaatgaccagcttgacatggaaaaaaacatataaacgacctttttaaacctttagactgagttgctaaaaaaaaaactttaaattgagttaaaggattcatgttgtagttttgcctatttataactatattcaagaccaatcaagagtaagacttctaaaaccttcattttaagcacaaacaaaaagttatttttcattagatttaataaacaaaaaggtctcatatgcacaaaaaaaatctcatatattaaaatttgttttacctctcccttactatagaaaatcattggactataacaaatatattttacctgcttcaaaaaaaaaaactttatattttaccttctatcttgattcaaactaacaataatattgggatcaatacttgaagttttcggcaattcgggcgttccatcgaagcataat

SEQ ID NO: 33516 - DNA, 948 bp, Medicago truncatula
  Intron number 1 from transcript Medtr2g018980.1 (locus Med tr2g018980) derived from phytozome v7.0 (chr-ID MtChr2; po s 5111264 to 5112211)
actgagaggagagaggtacatactttaatggtccggcgacgcatcttgtcatggagagaacttataaaaaacaaaaaaaaaatatcattccaaataaaaaatcatgtgttgcaaagagaagttagagggaaagagaacactttgtcaatgttgatatgtaactcaaccttgtgcaaccgacatctcatacggattacgactataaatcgtccaacttctactttatcatagagtgtgttaacttgtgtaatattcaatcccccgtgcatatagtttagttgatggtgacttgcattgttataaaaaattatttattctgatttttttctttaattttctctatgttttcttaatttgcaatgataaatatatataatatttttatgtttattagtaatccatcccgtgtttttaagcatatgtaaaaaatatatttcttatcatttatatttgtccacaaaaaaaaagtgtcttttttatgtatcaatcacatatatgtgttgagttttgttaacgagtgtctccgatccggacactctttaagaagaattttgctcttcacccagcacaaaacactcgcatcctgcagggtgcgagttaactagcgcaagtgtaaatacatatattttattaatatgattcaaacattacatatattttaccctcttcggtatatatcaatagctcttggggaaaatagtgatccgtcttgtaggggaaaacgacatcaagatcccttgagttaaatttaaatttggttccttttatacccccatgatgattctttttacccacggtaaaaagattttgggagtaaaaggaagcaaacctaattttacctcaagggatgatgtctttttccccaacctaacggatcactacttcctcaaaagccaccgatatttacctaaaggggtgtaaagaccctagagactatagaaaccaaga

SEQ ID NO: 33517 - DNA, 999 bp, Medicago truncatula
  Intron number 3 from transcript Medtr3g136980.1 (locus Med tr3g136980) derived from phytozome v7.0 (chr-ID MtChr3; po s 34658037 to 34659035)
gggtacgtcaatcgttttacttttctcatcttctgctatttgcctttcccaacttaaacccaatttttctactaaatatcattaatttttggtaaaaaattgaataaaaattcaaaggaactgtttttaatcacctcttatagtttttattgggaaaaaacccaaatcccacgtgggatgagatagttaagactcaccttatggacctgttctgtaaggatgagttaggctccaaatttcaacaagtttcaattacgaacttgagcttgtaattttcacctctcttaagcttgggtacaactttggttgattttcattgtagcacggatatggaaacggacaccgacacgcagagaccgctaataatttgagaaaatcacataatttagtgtaattatatgtgtcagtgtcggacacgcctaacctgaggaacgtccatgcttcatagttaatttttgcctctaataacttatcacgcaagtcgaacatttgttgtaattgactgtagtttgtaacagaataaccaaaatcagaattcagaactttgacctgttcttttatcgtgcaaacgtgaaagactacgaggaaattcatattttcaatgtgttaattggtctgagaaatctccaacaaactatcataccaaaatattcaacagacgaggatacctacagattatgctattaaatctgtgtttatgatcaaatcaagttttttatcatcaatgtcgtcttcatttagaccaagctggtagactgattattatttatagttattagttaatagttgtgttaatcatgattgtggttaaacctgctttgcaacagagcagaggttgtcttggatgtttctcaaaaccccttgttatttcaatgggtgaggccgatgcatctaagggactaaaaactcaagcccaaacaatgaacaacgacaacaggtctgatgattttttttggagcagcagtgctattgaattggatcacggtgcaattcagtccc

SEQ ID NO: 33518 - DNA, 271 bp, Medicago truncatula
  Intron number 1 from transcript Medtr4g041860.1 (locus Med tr4g041860) derived from phytozome v7.0 (chr-ID MtChr4; po s 9996925 to 9997195 reverse strand)
ctaccgtcacgccggcaccatttccatccccgcaagtaatcttcaacttaactctttccgcaaatccatagcttctaaatactttaatttttttcttattcaaatgaaattatgcaatttccgttctatagcactgattagttttgattttgttttacttgctgaaattattgaattgaatgttagttaggttaattttgatattgttgttgtttttgtttttgttgcgtcaatttgagagcgtgagtgttttttcttgtagaattacgac

SEQ ID NO: 33519 - DNA, 899 bp, Medicago truncatula
  Intron number 2 from transcript Medtr1g111460.1 (locus Med tr1g111460) derived from phytozome v7.0 (chr-ID MtChr1; po s 23762136 to 23763034 reverse strand)
aaagaggtatccaacttagttactatttttcaccatcctctaaacacattttaagttcataatgttatttcacacaacgtttattttgatcgacttatttgagtttatatactgtgtaaacaccaatgagactgtttggcaaaacttatgaaaacattatagcttttcaaaacaacttatagtttatacagaaacaatatcttttgttatggaaatagcttataataagcgcttattctaaaagctgcaaaaattggccaaaaaaaaagttgcaaaaatatgttgtttatacagggtcgtagttacaaatgtaaggcgagattgttttcttctaatatataaacatgctgtcaaattgtcttacataatagatttcaagtggtaaatgtagagaggagttaagtagttaactaaaggaacggcagagttggcacaatttggattactttctagtttgttgaaacttctcaaccgagataagtatttggttcctgatttatgaaaaagttctttgaagtttataggtggttgtgtagaagttaaatgagaggtgcttatgaaaaagttgaggtggacaggctaacttcaacttatgtgggaagttatttttattatttagaagactagtagttcattgcaagattatttcatattttctttttctacatgtgcctgttgaaaattttatccaaaccggttctatgtgtaacacttggtgctcatgccttttgtttattggaacagaagatttgttgttgatagttacactatattttcgagttgaaaaacagatcatttaaggtcttccatcatgtttttcaagcatctgtgtggtcaatgatggttccatctgttgtataatatcatttttgtgaactttttatgtaacaggttgaagt

SEQ ID NO: 33520 - DNA, 635 bp, Medicago truncatula
  Intron number 1 from transcript Medtr4g129190.1 (locus Med tr4g129190) derived from phytozome v7.0 (chr-ID MtChr4; po s 30670174 to 30670808)
aacaagtggctgtcaaagtgattcctaaagcaaaggttgattctgttcttctactttatatggttatttttagctaatcatgaacttaaaattgtatttgtttagtgttgatactttctttgatgaatcacttggtatactttggaatattgttataggcttggaattcgttttgattttggtgattcatatattatttgcttgacaaactttgaggttttaggttgttttctggttacttgtgtttaaggatatgctgttgaggattgtttgtttagaattgtttggaaatgtttttctaggacttggaatgaagcgttagtttacgtgttttttggtgaaaatagagtagatcagcttcgattagtactcttattctgagcttgatctaaaagttagcttgattgatgttgatcaaacttattggagttaaacttgaggaataaagagtatagaaattgaatttgccttggaatttggacgataatgtttgttgtgtccatattttggaattttctatactccgtgattcattctactccgtgttttatttttgtttccttgcatttgatttaaactttctagagggtaccacatagaaattacatattcatctttaagtgttttgttgccag

SEQ ID NO: 33521 - DNA, 569 bp, Medicago truncatula
  Intron number 1 from transcript Medtr6g059200.1 (locus Med tr6g059200) derived from phytozome v7.0 (chr-ID MtChr6; po s 10610713 to 10611281 reverse strand)
ctgaagggtatttattttagtaataatatgtttttcatttgttaaggaaataatagaataaaaatttgtatatttatatagtagtattatatttatttaaataggggtaaaagtggaataataaagtcataatttattccgttccattcaaattccaaacaatggaatggaatatttgttccatttcagtccattccacttcattccattatgttccactccgcttccatcaatccaaagagagcctaagtgtttagtgcgctaagattttgactgagtaagagaacttgaaaaatgttcatagagttgtcgttttattcaagtcttcagctagggtatagtaaaaaaatcttatagatgttggagatgcactagcgcataagtttgagtccttgagaagtttaatcagacattggaatgtttcttgatttggttaatgtcgttgaaagctcattcgaaattcctttgcttcaaattaaattattcgtttcatttcaattgtccttgaagctctttgtttgtttctacacatagtcagaagaggacaaattaaactatcagagtcagat

SEQ ID NO: 33522 - DNA, 701 bp, Medicago truncatula
  Intron number 2 from transcript Medtr2g009540.1 (locus Med tr2g009540) derived from phytozome v7.0 (chr-ID MtChr2; po s 2118801 to 2119501 reverse strand)
gctaaaattgagcagacccatttgacggcattaaggtgtgtgtccaaatttttgttcttttctgtttgattgctgttgaatttgcttatttaatgttaattgaggtgtttttagtggttattaagtttgaatcttcaccgtatcgacggtctggataccgagtttaaaaaaaaaatgtttgaatcttgaggaaaaagttgagattttgagtaattgcatactgatattgtaattcaggctagtcctatggtgcacatgtgaggtaggtgttgcactatacacaagtttgtttttcatcattggatcaataagtctcaccatatctcacttgatctaagtccgagacttattgatccaatggtgaaaaacaaatttttgcatggtataacactatcttattggtcaagtttgtaatttaattgtttgataacttcaaatctatgaagtactattctataaatgagagtgatgaatatttttttgatcaaatcaaatagagtctgtggctatggttttcattctttgtgatctaaatgtgttggcactggttttaatatttttgattaatttccattttttgcatctattcttttaaagtaagaaatatgaaatctcttttttctttctttatgtggcttctgctttctaaacaaagttctaatgtttgcaggagaagtcagtgttcttctttaaaggcttct

SEQ ID NO: 33523 - DNA, 941 bp, Medicago truncatula
  Intron number 4 from transcript Medtr1g046720.1 (locus Med tr1g046720) derived from phytozome v7.0 (chr-ID MtChr1; po s 10980372 to 10981312 reverse strand)
ctcttcatcagtcaggaaccattgttcttcgtgaggtagtcctttttacatatgtttttattagaatacattcaataacaatatatttgattatgagaaatttccattagtactaagttaattaggagagatctgaaatatgatgatgaatttgtttgatggacatatattcttaagcaaacatttggcatgagacaatgttgtctttgcctaattattgatactaaacattaaaaaagcttatggaagagacatggtggatataattggcattgtggttcatgacaactcgcacatgagccaccatgccataatgaaaattttacaagcacgaacacatcaagagtcaaatgttttgcactaaatgtatttgacttttttaatctcttttacgtatattttgttacatatatgttttgcacaatctaattttaaccatgatacctaatagtacagtacttttcatagagaacattaaaatgcaatctttttcacattttttctatcaacaatattgagcttttaaaaatgaaatctatcactatcatttatcaatttatcaaaaaggaaagtgtactttgtaggattctatcacaaaataagtcatttttatccttttttattgagtcttttatctttttttattgagtcttttatctttttttttttgaaggagagtctttcttttataatgcatgaggtgtacaatagggtgtatgattaaagggtgttcatgtaacattttccttgctggaactactaataggaggaactagcatttttagttttgtttatgtttaaatttttattgtgtacgtgtgaaaatgtcattgtgggtactttgatagttaatttacataactaaatgtgttagttcaattttcttcttatgatgttatttttcattacagggtcgatttgagattttatctctatcagga

SEQ ID NO: 33524 - DNA, 734 bp, Medicago truncatula
  Intron number 1 from transcript Medtr2g121150.1 (locus Med tr2g121150) derived from phytozome v7.0 (chr-ID MtChr2; po s 28671690 to 28672423)
cacaaacaaaacacactctccctccatcttccaaggtactctctttccttattttcttcaatgcccattttattttttattttttttatctttactcaatacttttttttattgattggaatggtaaagttttcatctttgattcttttcatcaactttattgctagctgttaacttaacttttttgattgaaaatttgttttttttttatattttttatcaagttttaggtgtaagtatcaagcttttgttcataaagatatcaactcgttttagttaacatgaaaattttgtgaatgggggttttggggataattttttgatccagaattttgatattgatgaatggtggttgggatgataatcaatgaatgatggatattgatagtgtcacaaatttcatgtttcaattttctcaggttatgtttattttttgaagaagttatattatatgttaatgatggatatcggtggtgtgacaaatttcatgtttcaattatctcaggttatttagttggccagatattgagttttaaaaaaaaaattacaaaattatctcagtttctgtgaaagtttttttatttatttttattaagtatgtgaaagatatatgcataaaagcttatgttgatttccaatttctcttattgattgttgttcaaggagaaattttagttgttttttaatatattgatttggtttatcagattatataattaagagtagcattgttg

SEQ ID NO: 33525 - DNA, 845 bp, Medicago truncatula
  Intron number 1 from transcript Medtr3g142490.1 (locus Med tr3g142490) derived from phytozome v7.0 (chr-ID MtChr3; po s 36513393 to 36514237)
taaccagtggcggattgcagtggttggacaactccctaactatcttgagggcgtgtgtttgaatctcccacaccctcatttttatatttcatctgtattccaagtaacattcaggctaacgaaccaccacaccacatcataatcctaataagtgtttgaaactgtttattatatattctatcgatatttggcaccccaacaaaattactcaagatctgctactgcatgtaacttcaatacaacgaagatgtgataatcatattctctatatttggtcagtatatagagaacttgttcatgctattcgggcaagtttgactctacatgaatatttgaagaaattgggatgtgcatgtttgaatcagataaagaaattcttttgcctcatccatgatttggtttgtgtttaatttatgttgttgtcgttttttttagttgacgtcgttgttgtagaatttgattcaatgaaatggatgttaatcaatttctgaatttttttcgtctcattgagttcgaattctagaatccaaaatctcacatcaatcaatttcttaattatttttcttcttctcattgagttcgaatcctagaatttaaaatccaacatgttttatatcgtaaaattcgaatagagtaatttaaaaagacacatgcgatatgtaaagaaagagttccacataaaattactatccataagggagggaactataaatgtatgcataaacatatctttttaagttgtatatatgaaaatgtggactatcagactatggtaccatatccattgtattccgtagttctaaagctgatatttaggtgaaacttctaaactgattcatttagac

SEQ ID NO: 33526 - DNA, 714 bp, Medicago truncatula
  Intron number 1 from transcript AC235009_36.1 (locus AC235 009_36) derived from phytozome v7.0 (chr-ID AC235009; pos 145945 to 146658 reverse strand)
atcatcaacacttttctcgaaggtgtaattgtaaggtgagagtgtctctcttcataaaaaaaattcaactttatctcttttgagccaatatactctctcatgcccatgattattggatttcgtcttttggtaatttcgtgggtgattcaaatgaataaattatgatattatattatgtttttatatttggtttaagttattcttagtaaatagacttctaaaatgactaatgtcattctttattaattctgagttaaaattcattttgataattcacaatttttctatagactaattttagtcttgacaaaaataaaactcaaagcggatcctaacattttcatacaagagacaaattagtttttatgttatagtgaattgttgctagtataaaatgacggactatttttgattttaggtttgtcagaaactaaattggtttgcacgaaattataaaggactaaaatgagtttcactctaattgttttcatccgatcttttttagaattcaatgtgggacttggagttttttccagtagttagatccataaaaaaaaaaaaaaaaaaaaaatcaagttaattttacttggtttgtgattcactgtgctttattatccttaattttccatttaattaaacatctaaccgatatgattagttcttatttttttttatgcagataaaataaacacatcgagaattattgttgataca

SEQ ID NO: 33527 - DNA, 1009 bp, Medicago truncatula
  Intron number 1 from transcript Medtr4g098410.1 (locus Med tr4g098410) derived from phytozome v7.0 (chr-ID MtChr4; po s 21157343 to 21158351)
ccactgatttcaaaaaaccaaaggtgtgtgcttttttgttttttacatagagtttcattgtcgttttcattctgttttgttttattttaaagttgattttgttccattgtatgaggaatataattgtgcttttttgaattataagaatcttatcttgtcattggtattagggaacaatctttgtagttattaatataatgctgattaagaatttattatgtgaatatggctgattcctttactctttttatttaacttttgaagcagttaaagttagttttcatttttggatctattattgctcctttttagtgatgtggtttcttgtttttggattgttgctggtctaaaaccataatcaaagtttagatttttaatcccaagttttttctgattaaatttggattattaacttgtggacttgtttataacttaattgatatcaatacatgtaaagtttcacttgaaggttactttgttgaagtgggtgattgtgacacaaggcctgtttggcttgcttatttgagttaactattggcataagcagttgtgaggttgttttgaagagcttatgaaaacaacgcatggcatgtccataagttgttttcacatttcagcttatttccgtaagctctccacagtagtttataaaatagcttgtagcttatacgaagagtgtaaatttattctatcttttgttgtagaaataaattattcataagcatgtatatgataagcttttaatttagttgtttattcgattagggtgatagttgtttattgtgattattattgtcaagtgatgcggcggctgttgtattcatcataatttttgttttaagatttttttttggccgaaagttacaagggtttacattatatagatccaatgtacaaattaattttctgttagatgtttagactttccaataaagcttataaggtcatccttggtactttttttttttcctcagggattaacagttcagacatttgtaatactctctgc

SEQ ID NO: 33528 - DNA, 791 bp, Medicago truncatula
  Intron number 1 from transcript Medtr4g080820.1 (locus Med tr4g080820) derived from phytozome v7.0 (chr-ID MtChr4; po s 16676613 to 16677403 reverse strand)
ttcaggttcatttacatcctaatcattttttgttttatggtcaaagtaatgttttttaggatacatggtcaaagtaatgttgcttgcatatttctaagattgcaccacacccttccctggcaaaaggaatgtcaagcaaaccaagaaaatattgacagtgtgttgttaaaattgaattactgcttagcaattttaattccttgaaaagcgatgttattttcagttatctttatttgtgtgtatagataactgaaataagattgtgtttgaaggaattatttttgggtttagttattttttagagaatgacttttacatttggatgtgttaatccaaaagtattacaagaatgagtcttatttggttacttggaaaaattactctaggtatggtgtgcagtaccaaaaagaagagtatgaaatatactttatgttattatttggttgttatgattatgaatctatgattggtcatgataatggttaatactaccccaaaaggctgaacattgaaaagtatgttttacttctgttgaatcttcagctcacaaaggcttaaagaacccaaagttaggttttggatgaccacccaaactaagaaaaccagtaaaaaaacctcattttggttgtttccaatcaagcttgtgcttgttttacaatgctgaagcttgtgctccattattacggttgaagttctatggtatttatagaggtccagatagctcaagttagatacataaagcatcatatatgattgagcaccaactaataaaatttttgtattcataggtt

SEQ ID NO: 33529 - DNA, 900 bp, Medicago truncatula
  Intron number 2 from transcript Medtr2g030210.1 (locus Med tr2g030210) derived from phytozome v7.0 (chr-ID MtChr2; po s 8330315 to 8331214 reverse strand)
gcttcaggtgattttttttttttttttgtactattgtacttatttttcgtttcttactagatttggtgggatccgaaattttgaggtctcgtaaccaagcaaaagtcaatggatgagatcagaaggttcatatttgactttaccaatagaaatttaaatgttaattctctaatgtgattgaagaaaaatccatgtgtatgtttgttttaaaatttttatttttgaaagagacaaaattgactctgacataaaattgttttagtgcatttaaaattgttctaatttcaattatttaacttacgtagtatttaaatatcaattattttaactgaaattaatcattcaaaatcattgcatgatagtataactaaacacacaccaagtggtagttcttatgcatttcaagggaattggataatgtgtgtatttggttatgtgatgacaaaaaatatagtttgaatgaattggttataaaaacttaatcatggctacatcagtgtttgttcgtatgtttcccaactctctgatttccggcttcgcaaaaatcatggtagtataccaggtttacaaacatgcgctaaaactaaaccataaatttaagaataaaaatcaatggtagagacaaaaactataagttctagtttcgagttagaatcaactttggaagcaattttccataaaatcacatatcttagtcgttagatgaagatccaacgacctatatttcgagttatattttaaaacaaactcgatgaagccaaaatgccagcctagagatctttattaaacgactgacatctcttgacttcgattttgtaattctcctcaccgcagagaatctaagtccaatttcaagatggctgacttaattgttttattatgcaggaaaccattgttagt

SEQ ID NO: 33530 - DNA, 576 bp, Medicago truncatula
  Intron number 1 from transcript Medtr1g034680.1 (locus Med tr1g034680) derived from phytozome v7.0 (chr-ID MtChr1; po s 8361510 to 8362085)
cgtaagccttatccttttctattttgttttgattttgaaaatttgattatagttttgtttgatttgtttatgttatttcgtttctgattcgtctagatttcgtttgatttgttattactgggtttgaaggtattgaatgctgcggcctttttgcctaatctatgctaataaggtaccttttggttagtctttatgtattcatttggggtgtttgttatttgatttggatatttgtttgtgaatttgagtaatttggataagttcattatgtttatctgccattaactagtgtacattatttcccttgtaaatcatcaatttttagttttgaacacatcaaaacaaattagtcctaccttaattttagttgtaatgtaattttcatatcgttctccgtcgaaaccatttgaagataagaactctttctgattcttttatgagttttaggatgtcaattttgatttggtgatttgagtaaagaaacttattctgatatggtgatttgatgatttcttgtgtttgaaaaacatggttctagtagacccgatactgggtttcctgtggactacatttggt

SEQ ID NO: 33531 - DNA, 724 bp, Medicago truncatula
  Intron number 3 from transcript Medtr1g034680.1 (locus Med tr1g034680) derived from phytozome v7.0 (chr-ID MtChr1; po s 8362405 to 8363128)
actacatactagtgttgttttttcaggtggtcttggttggctttatttttgggccactagagatttcttgctcattgcgattttttgcttggagtttgtatttagtctttgtttgtattcgattgaaagaattcaatttgaacttgtaattaaaaaaattcaatctgaactaacggaaaaaaaaattaacgttaagactattgtgataaagaggaaaagaacaatgagcatcatatgttttttgtttttgttttgacgaataagaatcatatgttttttaataatgattcttaaaaattgatgtcccatatgtcttacaaaaacttacacaatcattattgatgttgcactttcaattttggttcaatcaaatgcaaattgtggagtaacttaagaaagtcagcaaattttgatgttatgcatgttatatattatcctataagaagtttatatataggatctgccgatctgcaactgacaagagcagtctgctaaaaacatgaagatgataatgtattttatcatacccattgatctatcctgctttaatatgacatgaacagatcctataatgcattttatcttgtatttcattgctgaaattctctatttgtcacttatgcttgctgactggtcttaggcttcctttcatttctacaacttttgtaaaattgtgttggttgccacagttagggagttgttggtttggaatttgactaagtat

SEQ ID NO: 33532 - DNA, 581 bp, Medicago truncatula
  Intron number 3 from transcript Medtr2g018380.1 (locus Med tr2g018380) derived from phytozome v7.0 (chr-ID MtChr2; po s 4839155 to 4839735)
tcagcaatccagtccttatctgagcttgaaacactgtacattttctactttctcatttgaattaatgtgtccattattaggttgaagttcttctaaccctaatatgatgtgtaaatgtttctcaacttctattgcgaccttcactctaaaaatgattaagggtttatacaaggttttaaaaaaatgcctgcgacatcaaagtttttgatgtctctgcgaccacgattgaggctcaatcagctttcttcaactgcgaatattaaggacaacaacgtggccactactatgatttaaaactttggctgcatgtgcacgtaatttaaatctgagttggactaaaattttaatccaattaatgatttaatacatatcttcttatttactttagaagaatcttgtactcattaggcatgagtcatataatgattattgacatgtgaaagttgcttaatcattttctttgaatgaattcatccttaggtaggacattttattttcactactaggttatttgtgattgcaatattcagttgtagctaaactaataacatgtttttgttcatatagggatatttcataca

SEQ ID NO: 33533 - DNA, 904 bp, Medicago truncatula
  Intron number 2 from transcript Medtr3g097940.1 (locus Med tr3g097940) derived from phytozome v7.0 (chr-ID MtChr3; po s 23586422 to 23587325 reverse strand)
aggaaaccgaagggcgacaggttatttcttatttgcctgtttaattttccagtctttttgcacgatgttgatatacatacaagtgttcatgtcagtcgataaactcaaataaatcaatatgaatggttgtaactctgttgactgttaaggtaaatcctgattttgttcacggataaagtggacaaaactttggtaatcaaagtgctgctaaactagcttgtatgatgggttatggtggtttagcagcttatctttcagaaaagtctctagttgagcagcttggctggaaatatcaacttattggaaacaggcacgactgatcattgaattatgataatcttaccagggaccagctgattctgaaggaaactttagcagaaacatggcgtggagattatgcgtgggaattgttaagatctaccattatagttatttagttaatgagagaagttaagtagttagaacttagaagggaagctagtaagagaagtttagtagtttgagaggatatcgtgtataaaacataaataggataaataaggatgagcgagggatctggtacatttgtttgttgtattttgaatggataaagtagcagccctttgtgaaagggataccattagaggagagtctcctcctattttcattctttaaataaaacttttttttttcttttcatttctttctattgattctccatccattgtcctttgttcgtaacagacctggtgctcaatgttttagacatagattgtcccgcattttgtgtttcagagtttgttaaattggttcttcttgcaaggttccctaacccttgaatgatgggacgacctttacttctatatttttgaaatttacccatgctacaggagatccactgaaatttctctagttatcagacaaa

SEQ ID NO: 33534 - DNA, 291 bp, Medicago truncatula
  Intron number 1 from transcript Medtr3g077340.1 (locus Med tr3g077340) derived from phytozome v7.0 (chr-ID MtChr3; po s 18213176 to 18213466)
aactggttagtcttagaaaagcggaacttgagaaggtaaacttgaatgctcgttgtcgtaaggcagaaagaaaaaattatggttagaagttgttaatggtaagaaactggatgttggcgtagcgcattattgaagggttgaaaaattcttccgttgatttatctcatccttttaatttgatttttatcttccatttcctctgttgaatttgcattttgtgattttttgttgttgtttaaagtttcttatatttgttgctattatgcagaaggatttgtaaatttgtgttca

SEQ ID NO: 33535 - DNA, 828 bp, Medicago truncatula
  Intron number 2 from transcript Medtr3g077340.1 (locus Med tr3g077340) derived from phytozome v7.0 (chr-ID MtChr3; po s 18213510 to 18214337)
tagagagattgaggccattagagactataaaagtggtgattctttcatatctttatttgtttttcatcagaattgtttctttctgttcatttcttaagtcataataggatttgtttcctttttagtaaatgtgtttggataactatggttgtagtgttgaaccattgcttctgcctcttccttgaaatggtactttttgtttcctttttattctgcctccttctctgctaaacaatataaagtactttttgttattctctttgaaatggtaaataaatccacgggtatttggactttgaattttttttttataactgaaatgatattttacatttgtgtatatctgagttttatttttttgtgcatgttgtttgctcaatgttcttgctctacatactcacttaaaaaagaaagaaataatgtattaaaaagtggtgaaaaatattaaattcaactttctaaaagtttgaaagttgtaatttctaatacaaaactactacttttagtttccttatcaagcaaaacccttaaaaaatgcatattatattttttttctctttctaattaaattctcaagcataaaaactatttcatgaagaaaactatttctgatttaattcgagaatataatttgaaatagctttaggtgccaaactttaaatttagttaattttgattaggggtttggtctatttttcttgtctttttgtttattttcctttttctttcgatatgcatactacaatgttgcatttgattgtcgatttgtcgggttatgttaagattttgctaattttcaaatggtgtatttgtttttaagaaggataa

SEQ ID NO: 33536 - DNA, 501 bp, Medicago truncatula
  Intron number 1 from transcript Medtr3g103590.1 (locus Med tr3g103590) derived from phytozome v7.0 (chr-ID MtChr3; po s 25530120 to 25530620 reverse strand)
atatcaactttgtagaatctctatttcaatttgtggatgaatttttgtttatttttctcttggtttaataatgtgataactatattattgttctcttggttttataatgtgataactaattaacttcgagagggctagaggctactgcacgtcgtaagttgttaaaataaaacaactacatgaacatcaaagttataaaaatatttcctggatatttcagttatgtgaaattatgatacaatatttgttcttggataggtgaaatttttgcttgattgggaaaggattgcaggattatgcttctggtggaatttacaactggaatatattagagcctggatctagttttgtatggtctacgattagatcatttgagcctccacaatctcacatatagattaaaaaaaatgttgtccatcatctgagaagaacagcaattaaatatggaattattgattgagtttagcaatacaagtcttcgggcaatcctcgtacttgtga

SEQ ID NO: 33537 - DNA, 756 bp, Medicago truncatula
  Intron number 1 from transcript Medtr3g103850.1 (locus Med tr3g103850) derived from phytozome v7.0 (chr-ID MtChr3; po s 25661707 to 25662462 reverse strand)
gtctagagtttgttctcatcgcagctctgtttagcgttagtaaaaaattttatacttgttttttatttttatatcccgatttaatcaatcatataggtgtttgtgtaatataaagtgcaaatttaacactttgaaatagagagcaaaagggatattgttatgttgtaattaaattactgtaagtaagaatcttgattgtcttcatcatcatataattttgattaatcctatttagactctctttaacaaaggcttgattaagtgttcggattttgatttttgcacttgcaataatttgaataaagtaacatgttatgatgtgaaacgttgtacaaaacaagcaatctagttaagtgtgtgtgtatgattgggttgaaacttgaataaaagtttgcaatgacgaatgcaagacaagttgccaaagagaaaaatagtcttgcctactgttacagttacagcttgacctaatcaaattgcaccatatcagaggattgtacaagcgtgacttaaaaagtgatggtgactttgccaaatatatgtttttggttggttattagtacttattattagtagcgcctaacaattagtttgttcaatttggtcagtgtctttgtgtgatgcaatttgcataggtactagtctaaactagacaggattcacacatgataataatcaataatttatcaagtacatttatttttatcaaacaagctaataagataaagtgtgtgtttgccatcacgtttgcagttccct

SEQ ID NO: 33538 - DNA, 761 bp, Medicago truncatula
  Intron number 2 from transcript AC233655_27.1 (locus AC233 655_27) derived from phytozome v7.0 (chr-ID AC233655; pos 178243 to 179003)
tttgggtctaataaaaattaattttaaataattggttttgaaaattttattttagttaaaaataagtctaatgaaaaatggtttatgttatgatgcatttacgtaaaaaaaaaaaaaaaagttgaacaataaatttaagttaaaaaaagttacatttaaagttaaaaactagggtaccgtttggccagacttttttttcggtctaaaattactttaaaataaagttaaaataaagctctttaaggaaaaaagttaaagctgtttggtttatttattttttttagttctaaatttatttttaagttaaaagttgtttggcaaaatattgtacaaaactttgaatttttttttttttttgtggtgtccggggttcgaacccgcgaccttgcatatatttatacattgtctatatcaactgagctaagctagagaatagcttgttttttcttttccaattatactgtatactccctccgtccctatatataagacccttttgccaaaatcacgtgaattaagatagtggatatttgtattaaagttgtttgtaatcactattgtttttacaattttatcctttaagaaagaaggttagtttatgttttcaacatgttatttattgttgattgaagaaaaagatgtataataaataggggcatgtatgtaaagaaataattaatgtagttggaaataacaaaagggtcttataattagggacggagggagtaacaaattttgttttaagaatatcatattttttg

SEQ ID NO: 33539 - DNA, 819 bp, Medicago truncatula
  Intron number 1 from transcript Medtr1g016730.1 (locus Med tr1g016730) derived from phytozome v7.0 (chr-ID MtChr1; po s 3303021 to 3303839 reverse strand)
cttaatacatacatatttttgtgggagaagtgaaggtgaaattaatgggaagaacctttaaagtttatatgaaacacttagctaattgtttttctctgtagataagtgagtttttcttggtggagtctgtattaataaagattattataaagtattgttcatttgtgaatgatggggacttgtgactgaaagaaaactgaagacttgtggtatacttgcttcatcggacctggattccctgcgtttaaaaatcatgcattacacagattagttgatccctgccagcgatttgagtttgatcgcctcacactatattttgactaaattatctttaaataatcttcactgttgatttgtgaaattgtgatcggacggtcaagatgaataaacacatcacacatttactgctagaatcaaaatcctgcttcacgactttatgatctcatagtatttggggcttttgatttcagaaacttgtttctttgttacttgtttttttgttatttgttcacatgtttggcatgccattttactcggtacatttcattatctcaaggaatttttatttgatatatatgtatattttggattattttgtttgtttgtttgtagtctttgattttgttgtttcatctgtaatctttgattttgttgtttcatttgtaatctttgattttagacatttgctattaacatgtttggcatgccatattacttggcatatttcattatctcaaggatttttttttacttcatatgtatttgattgtgattattttgttgttgcatttgtagtcttcgattactgctttaccacgg

SEQ ID NO: 33540 - DNA, 780 bp, Medicago truncatula
  Intron number 2 from transcript Medtr3g156390.1 (locus Med tr3g156390) derived from phytozome v7.0 (chr-ID MtChr3; po s 40993041 to 40993820 reverse strand)
acctgcaaccaagcagtaggaattacgtcacagtggtttgtattttgatgtaatctatacaattgatttatgagccatgtatacctctttgcaagacatgttcgctagttaataaattccgaggtgtcgaatgaagtctagactctggagtatggactctaatccacttcttttatagatagatctctattctaatgtctactgaaatgcaagacaacagttaaacaaagacaggccaattatccattgcttccaatttatttctccttaaaattcacaacactgaatttagtatttttgttttcataaataataataggctagatcaatttacaacaattttaatgtcttcaagtttgattcatcagtggcatgttatgctaagcaaatgtgaaattgtcgctcatttaacagaatgagatgtctcatttcttcttatgtttttcttcaaaatacatatagatgcatacattatttaatgttgaatgatacgaaaatccgttttttagttaagctgctagcttaccgtggccatggtattctttatgttcctatttttgaagaactaatgtataggatttgatcactttcagcaactttcacaaatttctaactttattgggagaaggatatttgtacttgttcatgataaaaaaaaaaagttctatcaccacctccttaatattactttttaagaagtcattttatctatctacaatcaaactgtagagtgctctgagagcttcagtcactcttgttttccctacagactggattcaa

SEQ ID NO: 33541 - DNA, 817 bp, Medicago truncatula
  Intron number 3 from transcript Medtr3g029130.1 (locus Med tr3g029130) derived from phytozome v7.0 (chr-ID MtChr3; po s 7597709 to 7598525)
cccacagtgcaaaactcgatacaataagcacaaaggtaaaataaggataaaaatctgtgtatatgataatgttattttcaattttgttaagcatatggttaaagcttcacaagacaaacaaaggttttgatgtggtgacgatatgaagttttcttggtagcaaatcgacctttttgatgctaggttcttattttagtgaaaatatgttcttttgattaaagaaaaatttctcaatgagcatattggatcttttataggtatgttaggctttaaactaaagtcacttagcaaaccctttaataaatcaaattcagtttttcattcttggaatcgaatcaatcgatgaaggagagtgttgggaggtgcatgttgtgccgctaccaataccgatctgtgccattgccttttactcatgccaaatcactgaagtgtatagatggttcataaaagaaattgtttacattttcttacccattcgaactgcttgatctataatacgtgattagttctttgacttaggagactggattcgtagtttttaacttattctagtttggtcggtctacatagtgcaaactgcaacccaaaaccatttaaatgcttggattaatgtaagctaataattttgttattttcccttttgtttcatcaataaaattgtattcctgcaagatgaatatatcaatgtacacaacgtatttttcatcataacatgtcttctgttttcctctaccattttcaaatataactagtaataagcatgcttatttaattgatttcaggtagtcctgcaattcttggagatcgtgaagaggat

SEQ ID NO: 33542 - DNA, 657 bp, Medicago truncatula
  Intron number 1 from transcript Medtr4g062550.1 (locus Med tr4g062550) derived from phytozome v7.0 (chr-ID MtChr4; po s 12154702 to 12155358)
tgtgctgttgtagctggagcgttattgttggtgcggttctatgggagggattttgtaaatttacttttttggagtttggcttgtttccgcccttccatgtatatttgtgcttattttctacttgttccttgccactgcttgttttataaggttggtaggaaccttttgtttggttgtaacagctagctcttttagcacttccggtgcttggctttctatatatatatatatatatatatatatgctgattcaaaaaaaaaaaactaaaatagtgaatcgatcttctcctcttgtgaaatcaatttaacattgcagctgcttctatgtggaacacactgccatacacaaactcaattataagaaaaattggaatctgaaaatttcatgaagaaaataaaaattgaagtctacaagcatctagccacccacaatttgattgaaaaacaaagagtatttgaagctttgtgagggactgtgttccattacaattctctaaatttcaccataaaccaaaacaaaaacttaattttaattattacttgtttcgattgatatgatgggtaaatctgcaattttattacttgtgaatagatttggtgaagaagaaagttggatgtttttgtgagaggtgtgattttggattgcagtggaagagaa

SEQ ID NO: 33543 - DNA, 1028 bp, Medicago truncatula
  Intron number 2 from transcript Medtr5g012930.1 (locus Med tr5g012930) derived from phytozome v7.0 (chr-ID MtChr5; po s 3813544 to 3814571 reverse strand)
cattgccggaagcgattcctgcgcctcaattaacggtaagctatagcttaaaccattccattctgtatcaagttaactattcattgaatcaaatgttgagtaccaatacatttcaggcctatttggatcgacttatttgagtttatctacccacacaagtatttgtgaggccgtctgggagagcttacggaaaacaattattacacgtccgtaagctctcaaggacaacttataggttatatgaaaaatttgtctttattttatcttttattatggaaatagcttataaaaaacttttatatgataagcttttaattaaactatttatacaaacaaattgtggctatgtttggataaacaacttaatcaagcattgatagcgtaagtacatctgatataagtgcttatgaataagctatttatataacaaaagataaaatgaaatcagactactttcataagctattctggacagcttatagaaataagttgaaaacagcctgtggacgagtcataagctcttctgaataatctcagaaatgcttaatgcattttggatcaggatacttgaacgaattgtatgaacttaactacgaacgtaaacccttgtgaaactgtttgggatagcttgcggaaacagcttatgacatggtcagtagctgtcttcaacttattataataatctctccaggatagcttataaaaacagcttatagctaatatgaaaataatttgatttcattttaaattgttgtataaatattttatacataagcacttatatgataagcatttatgctataacgcttaattaagttatttatccaaacagggcaaatagcattagttatttgtttgtttgttacctaaaaaataagcaaaagactaataaagtagaaacccaaatatggacaaataaagagtaacaacatgtttggttggtgtattttttatgttcttgtaagcttcaagttctgtgttcatcttttgcagccaggaaagctcataccatttactaattgtcgaat

SEQ ID NO: 33544 - DNA, 849 bp, Medicago truncatula
  Intron number 1 from transcript Medtr5g019470.1 (locus Med tr5g019470) derived from phytozome v7.0 (chr-ID MtChr5; po s 7256498 to 7257346)
gtactacttatcgaaaggttcagatctcgtttcaattttttaactaacttgctttttatcttgatctgcttcaatttcactgaattccttcaagttgaaggtttacatctatcttataagaaacttggttttgtgatctaagtggtgaagcttatttctgcatgatatagtgtattttttgctctaattttgaataagtgaaattgactttgtaggagtagaattaattttgacatgtttggatattctctagtgaaattgatttaacttcgagtaaaatcttaacttattgttcaatatatttttacattgaatgtgtgtcaacttaaattaatttacatttaagttgcatctagttgtaatcaattttatgaaattaattttcctcaatattgaaccagacacacatacgcactactaacttgaaaaaagttaataatgctgaagaattgttgaagtcattttacataaataaatgtatacaaacataagtcattttatgtttaagtcacattaagtcggaatcaattttacaaaatcaatttttcttaccgttgaactaaacacacatgaactactaaattgaaatgagttaatattgtgttaaagacttgtttaagtcattttacttgaatgtatactaaggaaaagtcattttatgtttaagttgtatttagtcagaatcaatttttgtcagaggtgaaccaaacaccataaactattaaattcgaagaaattaataatgagttgaagaattgttgatataaagtgttgtagatgattttgattgttgcctagactaatatgagtgaatgaatttgaaacagggaagtaagagaccattaccaa

SEQ ID NO: 33545 - DNA, 442 bp, Medicago truncatula
  Intron number 2 from transcript Medtr6g084010.1 (locus Med tr6g084010) derived from phytozome v7.0 (chr-ID MtChr6; po s 17288128 to 17288569 reverse strand)
gtgtgcaccatcacaaggtattactttgtttttattgtattttcccttcaaacagtcacttgtattgttaagcctgtacattgtgctgattggtcaaatgacacaaattcattcagtttaaaacttgataagatatcaacagctttagctgttctctatatatattgcaaaataaaagtaagaggtgtagaagaggatgtgatgcgactgttatgctagtgatgagaaattcagcatagccaagttggatccaagccaatcctttgcagatgtagtattataatggatatcaatcatatcatttttgttttgactcattttatgtctagtgtagatcattactaggaaaaagccgcattttatttggctgattttctgaccatgaatcattgtcatcaatcttgcaggatttgcttttctcatataacattgcaattgatag

SEQ ID NO: 33546 - DNA, 502 bp, Medicago truncatula
  Intron number 1 from transcript Medtr7g062380.1 (locus Med tr7g062380) derived from phytozome v7.0 (chr-ID MtChr7; po s 12771712 to 12772213 reverse strand)
attccaatctggaacgagtgtggaggaagtcccaggtacaagtttagttttcttcttgatcttgtttcgatactaattaatttttctcttagaagtaataaacaggagttcacttcaatggttcactgtacatctacttaattatttttcttataaggaaatcaaaataataaaagacagagtagagagggtcctcttactcttacacatcatatacttgcaagaatactcagctatacaaaaataggaaagaaccaaggggaaaaaagttggacatcctcaataggacgtccattcatctctattggaagtcctaaaattactatcattagtttactcaaagttaaatcatctccctgacctggtatttttgctaaaacttcaatatgatgaagagaggttaatatttgttaggaggaaaggctaatagtcatcttttaataattgctcttaacaattctatttgtttctatctaattttttttttttttttttacagttc

SEQ ID NO: 33547 - DNA, 801 bp, Medicago truncatula
  Intron number 1 from transcript Medtr3g087420.1 (locus Med tr3g087420) derived from phytozome v7.0 (chr-ID MtChr3; po s 20770243 to 20771043 reverse strand)
gaaaccaccgagaaaatcatcgccgaatacatgttagattcttcttctctttctctcacatgctgctaacaaacaaaaacataaacacacactctttttatgatgatgatgttgttttgtatgttccgtacgtacgaaaaacactactagattcttctgtctgtttctgcatatgcattaagttacgtccaccgcaacgttttttttttttcgaatcattcatactaatcatcaccatgattttttttttattacaaattaatatcacgactataaccagtgattattttctctcttttttttgttagtattttggttatttattttcttttatattgtttgtgtgatctatagacaatttttagattttaatttatcgtttatagatttttaagctgaatttgggatgaggatgttttgttctattttttaggcttaaacccatgatgttttttttcctgttctgactctgttttttgatggttgagtatggttttagtatttacttattctgaaaattgactttgtttttttgtttggaataaaattggtaaaaagaaagagattttttcagttgtctttttgtttgttgctttgttttcaatcaattttcaatacaaacccaaacctaccagtctacctataagtacaataccaaaccaaaccaaaccatgatatttaaattcttgtactaaatattgtttttatatcaaaattaatattaaaatttccccttttgattcattatttattttcattttgacaggattggtggatctggtttggacttgaggagcaaag

SEQ ID NO: 33548 - DNA, 804 bp, Medicago truncatula
  Intron number 1 from transcript Medtr1g046560.1 (locus Med tr1g046560) derived from phytozome v7.0 (chr-ID MtChr1; po s 10892359 to 10893162 reverse strand)
gcactacttgcacttctttgctcaaagaactcgaggtttttctctttcttttttcagaattcaactttgttttgataacttttgtgttttttcaaaatgatgaggttttggtttttgtttatatgataatttgttaatgatttgtttatgatactaactatttcttcttatttgtgttattctctaaccaatgatgttttgtttcttctcaggtcaactttttgtctgttttactgtttaaaagagaaagcacttatggttatagggtttctgtaggttattttattgtaagggggaaaggggatttgtctttctttgttcatgagatttatctgagttgaaaaagtcatttttttaagctttttgcttttctttaattttttcttgtttttagtacaattttcatgtggttgattttcaacaaatgggctagttcaaaaattgaaatttcactatattggttttgttaacaaattttggaagttaccaattcagttagttaatatgggattttaggatgacttggtctttgataatcactttatatttctgtttttctttttatttattcctattgtttttgccaaataggatagactctgcatatagaatgagtctcttgattggttgaagaaagttttagcattggtaaagttctgtaccatattgatttgcttgtgttttcctcagaagaaagttctagcactgttaaagttctttgatatattgttttacctttttcgttatttgttacttcaatttttttacctttggttgacaaatcccattttgtgtgcagcaaat

SEQ ID NO: 33549 - DNA, 944 bp, Medicago truncatula; identical to SEQ ID NO: 31789
  Intron number 1 from transcript Medtr4g143340.1 (locus Med tr4g143340) derived from phytozome v7.0 (chr-ID MtChr4; po s 35867833 to 35868776 reverse strand)

SEQ ID NO: 33550 - DNA, 919 bp, Medicago truncatula
  Intron number 2 from transcript Medtr2g006770.1 (locus Med tr2g006770) derived from phytozome v7.0 (chr-ID MtChr2; po s 806383 to 807301 reverse strand)
tagtcagagtccacaagaagatcatcgcgaagttagttatcattttctgttttgctttcattttacttctattgtacttttatgctgaattttctattgtaaattttgcatgtatattgtatatttagaggtagatgacaataactatagcctataggatataactaactattttctaattggatctgttaggatgaatggctaatttgcgctttatagcttaagcgcttatcatgtataagctatttctatagcaaaagataataaagttaagtgtatgtttggttatgttgtgagagaaattgattttgagtgaattgattatgtaaagttgagtctgtctaaattgagttgaaggtaaagtgttttgtgtttgcatacattcatgtaaaagtgagttgaattctaaattttagtgtaaaaattgattgtataatcgttagcttcaagtagaatcaattctggaggcaaaatcagttctattcgaaagcaactaaacatgtcaaaataaaataaaattctacacctctagaatcaattttagctcctccaaaagtggaaccaaataaacatatacagtaaattgttttcgtataagctataagctattttcataagctatcttgaagaacttgtgaaaataagctgaaaacagtttataaacatgtcataagctgttttcataatctcaggaatttattctagtagcaagctcaaataagctaattcaatcacgcctataaatcttattctctatttgtattgttatgtcattatttggtgtttgttatgtgatgtttgcaatggaatttgagaatgatttagatcttagagaagacagtgtttgtttgactaagcttttgttttttttggaattttattaggtggcattgattctcttcagttctttaaccgaaac

SEQ ID NO: 33551 - DNA, 962 bp, Medicago truncatula; identical to SEQ ID NO: 32813
  Intron number 1 from transcript AC233070_7.1 (locus AC2330 70_7) derived from phytozome v7.0 (chr-ID AC233070; pos 32 181 to 33142 reverse strand)

SEQ ID NO: 33552 - DNA, 420 bp, Medicago truncatula
  Intron number 1 from transcript Medtr5g077270.1 (locus Med tr5g077270) derived from phytozome v7.0 (chr-ID MtChr5; po s 28442298 to 28442717 reverse strand)
caattgcaatgtaagttacttcacatttcattgacttgttggtgagtttcaagggtttaacttgtcttgatttgttatatgtatgcctgcttgttttttccttaacttactgtttaattaattttgcctttggtcaagaacaagatgaaccaaatgattaaatctatttgcaaccttaatagtattgaacgcacattagttaaaatgtattcaaaagtatttttgttttgaatttacacacctaacttttgagtttattttatgtgcaaagaataaaaaggtcttctcttcacgtccagggtagctttgtgtgactagattatttgttgttgtcttcgtgttaatgataccaagggaacatgttgcaattctttatgtaatttttcattgttggaattgaaatgaaacaaatttttagct

SEQ ID NO: 33553 - DNA, 626 bp, Medicago truncatula
  Intron number 1 from transcript Medtr4g028510.1 (locus Med tr4g028510) derived from phytozome v7.0 (chr-ID MtChr4; po s 6571383 to 6572008)
gcattgttgcaaactacttggtgaagaatgcattagctcagtttttgcattaggaaattattttgagttttatgtatgtgataataagatagtgtcaattatgtatgtgttttttaaatggatttctttaataatttctacatttgaattgtttgaagactatgtagtaaaatggtctttgtttactttatgtgcaataataataataataatgatttacaactgatccgtaaggtaagggagtttaaattcagacacgtctctatgtccgtaaatgattgttgtacaaaagagtttattttaacatttatccgaaggagatgataagtggatttatttctaaactagttttcatgaaaataagaccaatatagtttgtttgtagaagagtttattcatgatttggtaaatgattttttttttttgtttttttttttataaaaggtaaatgattgttatacataagggtttatattggaatatatatttacttctcataacaataaggcatgtatgaaacatatgtttgaaatacgtctccaatgtcttctatgttggtaaataagaggtagtatattcttggtaaatgtttctatgttgttaaatgattgttatttagaataatc

SEQ ID NO: 33554 - DNA, 504 bp, Medicago truncatula
  Intron number 2 from transcript Medtr2g025540.1 (locus Med tr2g025540) derived from phytozome v7.0 (chr-ID MtChr2; po s 6791573 to 6792076 reverse strand)
gagctaattgatagtatcatctacacttgtaagtaacatcatttttataaaattttctttcttctcaaccaggttttgtttttgatatgattattatatttttgttgtgaaaatatgattattatatggaaaatgatagatggaccactctcttttgtacacacctcataccacttgctgatatgaatggcaattctgtaattttattaaaaagcaaggggcaaaaatgatatttcatgttcctttttccacaccctctctgaactctctccttcctctcaaatccaatctgcattttttcttttctctatgctccttctctctccttaggctgatctatctctctttttctcttcttctcttttacaacaaccatgtaaataaaacccaatctcttttacaatctgttctcactcattgaagaagcaagaaaaaaactcaccttcaatgttgaagcaacaccaattgagataaaaatggacgcattgaggtaagtacacaacg

SEQ ID NO: 33555 - DNA, 702 bp, Medicago truncatula
  Intron number 2 from transcript Medtr3g104670.1 (locus Med tr3g104670) derived from phytozome v7.0 (chr-ID MtChr3; po s 26086264 to 26086965)
acatacaaacaggtttttttttcttactaggttgatagcatggaacacggttgtatcactaaatttactgttattgggtatggttagagtagagtttggttcaaagtagatgatggaattctttacatgtagtagaatgcgatatatatatatatatatatatatatatatatatatatatatatatatatatatatatatatatatttatataactatttttcaggtttacttaggtaataagcatgtcctataatatagagtaacagtttagaagaataagcaccggctttaatcaatgatctttgtgtggtttcgtttgttttattttaggagatatggttgagttttattggtggtgggacatagatatcagataaacattatcttactatgttgactcaattgactctttttttgacttcatgctcttaaaccattgtcttgtagaatatgcatgtggtccttttgaaactttgattattgaatgtatgttaaaactatgtaattttgtacgttagtctcaagatttattgatagggtaaagcaatttcaaattattttaaagttttatgggcttgatgacataatgaatgatttttgtttcaatttgaatcatctgtgaaacttatcttatgaaatctcattcggttgtatgttatatcatatgtcaatttttcttaacaacatttcagttgaagg

SEQ ID NO: 33556 - DNA, 868 bp, Medicago truncatula
  Intron number 1 from transcript AC233682_17.1 (locus AC233 682_17) derived from phytozome v7.0 (chr-ID AC233682; pos 53706 to 54573)
gaactgattcaagtacatgttcattcttttctgtttcacctcttttcttaattagtagtataatcatgcatgtgtacaaataatattataaatgttttcaaaattatatttttgtcttgtttttgtgtaggttcagttacatgtactaagaccatgcttattcttcttttacattttaatatttttcttcacttttttttggataatatgcttattcttcttttatatcactgtcattgttctcatatctagagatgtaatcatgtttatatacgagggatgctatttcaacataaaaaacctatcatcttattatgccgtataaaaaaaaaacactatttttagtgtttgtttggttttgcggtgataaaaaattgattttatatgcattgatttcgtgaaattgattttagtccaagtgagttgaacacaaagtgacttatgtttaaatttgtgcgtaaaaatcacatttgtagtcaaaagctacaaattctagcttcaagttatagtcaattctggagtccaaatcaattttattggaaaaaacttaaaacatgtcaatcattataaacctctaaaattgctaatgtccgtgttatataagaaaaaattactttttagattcattgaataactattatagatccaaatacatcaactattcaatgaacttaaaatagattttttatcttataatagcataaaaagataaaatatatttcagttatttatatattaggtgttggactccaattttgttgtcaaactgaataacatttctcttttcaaatatagtatttgaatcccctataaataatagtattcgaagttcattttcataattttttttgttgtcaacttttacaga

SEQ ID NO: 33557 - DNA, 880 bp, Medicago truncatula
  Intron number 1 from transcript Medtr6g017750.1 (locus Med tr6g017750) derived from phytozome v7.0 (chr-ID MtChr6; po s 4258736 to 4259615)
ataccagccctttactcaggaagtatgttgcaaattttcaacaaggtgctcaagtttttcaaattattacaaaatatttaaatcttggaaaataaattatttcttttagaagggataatgatttggattgtttcatagttatttcatttagagttgtttctttgtattctactttttttctatgaggtcataactcatcgagcataatattgtaaaatggctagtagtaccaacttatttaataaaaatattctcccttctccaattttcaaaactgatagtattttactttgattttaaccgaattaaatagaaaatagtattaactattttaattagatactttattaccaaccttacattgatttgagtataaatagagttggattgttttaaaaatgtcttaagtttgagtaccgttgatgggaaaaaatattgttggaatgaaagactcaatagtggcaagccaagttctcagacccagtaaaaatggcaagttaattctcgtaaatgaagattagtaaccaacataatgtagtacacgtgataaatatttgtacattttaaccatttagtcctggattcgatctctgacatatatatgggaaaacattatttttggaagaggtcaactttataaatggatatcagttatcttaaggtgatcagtctccaaagtacgcgtggagaatacctttgctctactcgaaaaacacaatgtcaaacattaaaaatggatactctcaattagaattggtttaccttttttcttaaacgtaaagttggttctctccatttttgacaaataaatacaaggtctgcttatttacgtcacaatttttgtagtggaaagcctaccacataaaggaggagtgaaagt

SEQ ID NO: 33558 - DNA, 578 bp, Medicago truncatula
  Intron number 1 from transcript Medtr5g014050.1 (locus Med tr5g014050) derived from phytozome v7.0 (chr-ID MtChr5; po s 4418632 to 4419209)
ttaatttcttctctataattgagtaatttcttctctatatttgtaagtttcaacttttgatagctctttctaatttgtactatctcaatctagtagcacttgaagttgaaactagtacacatgcatgcatgcttgttttaaagaggtgatgggtgatgcacatacttgaagtttaaagggttatttccagtttcaaactagtttaatttgtctttcatgtatgtacgacgtgtcatagtcctagcaatgcccccttgcagcctaacttttggttgctcctcgtgtcaaaactcacaagcaacgaattcactttaaggttttctgtgagaaaaaaaaataaatgcaaagtgaaaattatcaattgattaatagttttaaaggttagtggattttaatcacatcgctaatttatttttttgaattacataagtactgaatctttttgataatttaaccaacaaacagtgggagcgcacaaaaatgaaatggccgactatttttatggtaacatgttggcacttgtcaaagaaggtttgcattatcccaataacctaactcatgtgattcttaagaagaaa

SEQ ID NO: 33559 - DNA, 317 bp, Medicago truncatula
  Intron number 1 from transcript Medtr2g052930.1 (locus Med tr2g052930) derived from phytozome v7.0 (chr-ID MtChr2; po s 14436094 to 14436410)
agaataagattgttgatcttaataacactgatcaggtttgtgtttcattctttaatttcatgtttttctttttaatctcttttgtgtttttattacaaattgatttaattaattgggtgcaattttcactgtgtttggttttgatttatgaaactttatgttcttgtatacattatggctttttggaattaaacatgttaatcttcaattatgttttattttgtttcatagaaaggttgaaaaactaagtttattttgatttgtgatggttgaaaatttcagataaagagggagatatcaaccttgaagcttctgaa

SEQ ID NO: 33560 - DNA, 573 bp, Medicago truncatula
  Intron number 1 from transcript Medtr4g142640.1 (locus Med tr4g142640) derived from phytozome v7.0 (chr-ID MtChr4; po s 35566824 to 35567396)
agatttcatcatcaatcaccttcttcctttctgtatgtcacttcattcacattgtgactgaataatctctacaatatatgctagctaatatggccattctaagttacaaaagtcaatccctttgacctctttaattttttgtttccattttgttatcttaaattttaaatgttagacactttgatcatttatgtcactttttggtttgaatatgacacaaaggatttgaaagactcaaatgaaaataacgactgaaatgactaacatatttaactttgtaagataagaaggaaaatacttacatggtcaaactaaattttaaaaaattgtccttacacactagttagcaaaactgttttttaaatatgcgaggatactcaaatagtatgtccaaatagttgtcaccaaccaaaacttcctctaataaagagaccaaaattgatgatttgcaaccaaagcatttaggttgatggagaaaattatagaagacaagagactaaaaaatattaatgtgtgagcatctcttttagccttgttattcttggacagggaatactcatacttgcgacagtt

SEQ ID NO: 33561 - DNA, 701 bp, Medicago truncatula
  Intron number 1 from transcript Medtr3g113810.1 (locus Med tr3g113810) derived from phytozome v7.0 (chr-ID MtChr3; po s 28679108 to 28679808 reverse strand)
attgggtgattcagccacgatagttagaggcatttccaaacatgtcccctaaaggcatatatcttagtagctattatcatgattagttcccttattgcataaaaaaagattagtttccttatttcattcagataaagaatccagttttagtttaaacaagggtcaagactatggcgtcatttgatccattagagagagagtgggggtagcacctatagtagaaaagttggtagaaaataggcttatatggtttggacatgtagagagaagacccgtagatgccattgtaagaagagtaaatcaaatggaggagagtcaggttaaaagaggtagaggaagacctaagaaaaccattcgagaaaccattagaaaagatttagaggtcaatgagttggatccaaatatggtttttgatagaacactatggcgttatttgatccatgtagccgacctcatctagtgggataaggcttggttgttgttgtaagggtcaagactagtcttttgtttcatcataataaaactataatcataattcaaagtaactgttctttctctccctccttatctaaaaccctataactttaacatgtacattatacataaattcaagttcattttgttttctgctagtagatctgatgtgtttgttgctgaattttgcagttgaaggagcatatatttgtggagtcaaataagat

SEQ ID NO: 33562 - DNA, 919 bp, Medicago truncatula
  Intron number 2 from transcript Medtr4g161210.1 (locus Med tr4g161210) derived from phytozome v7.0 (chr-ID MtChr4; po s 41128622 to 41129540 reverse strand)
acagcagctgttagtgccttatgcttatgcttttcaattttctgctgtgtatgtatgtcatataaaaccaacagctacaagtcttttttgcttcatgtggctgttttttggtttgttcacaagttagtttagccttatacttaacaaatatatttgaattcacacaagatcaatagatacaatgagtttagctttatgttcaattgcaaaattgcttaacaaatatattcactacaacacagcaacacaattcaggacattgaattcagaaaaatttattaataataggtgccgcatatagacggaacaccgcaaccaaatacaacattacaaataaacacctcagctgtgacagtaacaagttacaaaaccataacttaaactagcagcaaacagaccctataccccaaatcaatagtcctatgtttgattacaattcactacatctataactccaattcttctatagtatatagtagtcttctcctttcttgtcttcttccaaattatgctggaatcagtcttctaatcccttaatccatcttcttacatcaagttaactaaaaggtgtgcttcataatcagctaccttgttaaacacctgttacatcaatacattaggcaaaatagagaaaaattgatccaaattgaattcactcaaatttatctcagccccttttatacgcgacaacaataacccacacaggtaaaatagagaaaaatagagagagggaatgaacgagagaggcaataacaatggaaaaatgagacccacactagttgtaaacccaaatcgaagttttacgcttaccaccgacctgttcttctgccgtcgcgattaacaatcactacaccatcaagaaccccgtggtggaattttacgacaacgacaaagaattgacaagacacttctcgtgcag

SEQ ID NO: 33563 - DNA, 436 bp, Medicago truncatula
  Intron number 1 from transcript Medtr3g087060.1 (locus Med tr3g087060) derived from phytozome v7.0 (chr-ID MtChr3; po s 20601693 to 20602128)
gtattggacccgttcaatttgtaagtatcttatatattttttaaagaaaaaactcttaattctttttataagggctatttcatttttaccattatactacaagtatttaggtaaatttggaataccaacgggattgggtttagcatcaaatatttaggggaaaaaaaagtaattcggtggtttggggagaataacataagagttggaatgataatcataagtttagttaacaatccgtcactagcattgaggtctagcgcaagtggttgatgcgtagtgtgtatgcgtgtcataaatttcgagatattgagtttgattctactcataataaagtaatttatactttaatattagtttttgtgctagatttcttttataacgtgtaaccattttctttgcataacgttgtgtattgaagatccatagcacatcaaca

SEQ ID NO: 33564 - DNA, 581 bp, Medicago truncatula
  Intron number 2 from transcript AC233576_21.1 (locus AC233 576_21) derived from phytozome v7.0 (chr-ID AC233576; pos 70820 to 71400)
taaactttcattgaagtaaaagtagtaactagttgtttttgattagtttcatttcttatgatatgcaaccatttagtttgaacaacatttagtcttctagtaaaattaacaaggatgatggtctttagtattgatgtattctattgtggatcgataacaattctgcttggatgtttttaatttattttgctctaattttgcgacagacggcagcttgaagtttgaactttgaactctaattttgacgactaattcaatttttaaccacatccctatcttcctctaatatatatatataatataatatttttgacacataatataataataataataatttaatataatgagactaaagatgctttttttacttatatctttgttttatttgttttgtttatattctaaaagttttaagaatatttgttctcttttatttttaggtaaatatttggcagaaaaataattatcaataaggtttgtttcaatttattttgaaatattcaaaaacattttgatgatattttagttagttttctttgataggttgcaaatcaatatctctttggctgaagttcttt

SEQ ID NO: 33565 - DNA, 404 bp, Medicago truncatula
  Intron number 2 from transcript Medtr7g041150.1 (locus Med tr7g041150) derived from phytozome v7.0 (chr-ID MtChr7; po s 10487326 to 10487729)
attctgttgggaggaattcctcacaaggtaaaacttgactcttacttattgcaaaatctaatgatttttttaccatgatatttactttttttgaacaatttttttaccatgatattgaatgcaattttttatactgcattttgattcttgcatagaaattgaatgaagatgtattgaaaataaataagagtacacaattttttttgtcattaaatgtatgcgatagagtaactatagtcctcgaccgtctcaaattttcataaacatcattgaatgtatcttccattcgtaactatagtctagacatgtgattttcttcatagtagacaaaatgttgatagttggtagttttttgttacttgtaatcaggtgggtgtgctctctctcttctgtcatctcggact

SEQ ID NO: 33566 - DNA, 354 bp, Medicago truncatula
  Intron number 1 from transcript Medtr1g013700.1 (locus Med tr1g013700) derived from phytozome v7.0 (chr-ID MtChr1; po s 2621258 to 2621611 reverse strand)
cgatccatcacgtattctcaaccataaccatccaggttcatccctcttctctttctccttcaattcaacatcaacaatttctccaaattcaattttactgctgttttcttagcagaaatcatatcttcaaaacacaatatattagatttgaccacttggaaatcatgtttatttaaacattattcggatgtgagttgcaacacctttttatagtcattcgctatctactaaacgcaactaaacatatatttgatatctaatttggtgtcgaaatttgatgttgaatttttgtgtcaaaataacacaactctattttcaggaccgcttgtgcagtacaaaaatcttgttgatcaa

SEQ ID NO: 33567 - DNA, 236 bp, Medicago truncatula
  Intron number 1 from transcript Medtr4g032790.1 (locus Med tr4g032790) derived from phytozome v7.0 (chr-ID MtChr4; po s 7992260 to 7992495)
ttttgttctcgctacattgtagttgttgttattaggttgagatggagttggatttcgatttgagtgttgttgttcttttcgctgttattgttgttgttggttttttatgttgataattttttggttttgggtttgggaagaacatttatgttcatgaacttataggtttgagaaaacatttaatgttgaatgtgttattaggtttatagaaaaaaggaggagaaagaacataaaga

SEQ ID NO: 33568 - DNA, 966 bp, Medicago truncatula
  Intron number 1 from transcript Medtr1g100040.1 (locus Med tr1g100040) derived from phytozome v7.0 (chr-ID MtChr1; po s 20642702 to 20643667 reverse strand)
gcggccaggtataggcattcatattaacattaggtgcaaaattaacatcttagagcaatcaataattgatagaaaacgtgcaaggcattgagttgagttttcagactttaattgctatgatcatattcatatgctcatattattaaataaggtatcaatagaaaattaaattaaaattattaaagcttgggtgcgatatatagatactatcaaattatatccatttctatcaaaaactatattaaaattctattataaaactcatttttttacctgtatacgtttcttggtaaaaatgctataataatataatattaatgcatgatgtaattatagagaaaaaaaacacaacattagaagttggagtggattaaagtaactggagtacaaaattgaaacaataaaacaaaggttaaagtagaccaaatattgaatccaaaatataaactaatgtttgaaaccaacatctcatctaaagcgcttttgatgaactccaagaaacagtatgtcaattaaaagtgatccaaacacaaattccataaccacttgcaaatccctaacaaattcaactctttcgtcaatgattcaactctctccatagataatgacacaaacttctttacaccgtcttatgtctcggtcacgttaccaacatgttccttcaatgtttgtcccatttttttttcctttttccaatgacccttttgtggaatcttgaacattatcataaacatcattagctttatcataaactttctctttaacattatcaactgcatcaacaacattgttaccaacttctttcactgcttctttgtttgcataaacaatatctctcttcttatcaattgtttatgaggctttatcctttgctttctccattgcgtgtttgcatttaccatatgcatcacaaataagctctttgcattaggagatccaggccaaggtggacgcaacactgacaaa

SEQ ID NO: 33569 - DNA, 976 bp, Medicago truncatula
  Intron number 1 from transcript Medtr5g093200.1 (locus Med tr5g093200) derived from phytozome v7.0 (chr-ID MtChr5; po s 36643968 to 36644943 reverse strand)
gcaaggtaacaaatactgatttccttcattacctcttatggttaatatttgctaattataaataagaactaatctgatttaattacgtgtgtgtttgcttctatggtaacaaaaattgattttgtatagtggattccgagtctaaaagtgagttgcaagtaagtaaagtgatttatatttacatacattcatataaaagtgagtaaaagaataaatttaagtgtaaagatcaattctagatcaaaagcttcaatttataggtttaagttagaatcatttctggagtcaaaatcaattatagtcaagagcaactaaacatgacaaaaataatgctacacctctagaatcaattttggctcctctacaaatggaaccaaacatacacgaagtacacaataatcactaagtaattcaacagtgctcataaatactttatcattaagaaagcttaaataagctctgcttaactggaaagagcttatttgcagtttatttgagcttatcttctggtacaaacacctgtgtaagtgtttgagagagacatgttcttaagctattttaacctatttcagtaggtttgagaggatggcttatagaaacagtttaaaacttgagtttttaatgtgtttgatagttgtttagagcgaagcatacatttcaatggcataatagattaaatttgcacaggaacgaggaaggtttttggtttcaaaggctgtagcgcatttagccagaaaatccatataataaacagtaggttttgattttagatgattctcatttgtgagtttttttcccttcttttaatgaggtttccataaggtgatacacttcattcatttcaaggatcatgtgtcaatttcttgaatgacatgtctttttttttttgggtaaattcataatttaatacttctattgctgaccatgggtattttatccaggataattgaatactgcataaagaagagacttcaat

SEQ ID NO: 33570 - DNA, 897 bp, Medicago truncatula
  Intron number 1 from transcript Medtr2g074550.1 (locus Med tr2g074550) derived from phytozome v7.0 (chr-ID MtChr2; po s 17183175 to 17184071)
agtactcttttggtgttcttgaatctagaaacctagttgtttgctagggacatcaaaggagaataattgagattaataatagaagttatgtcattttgtaaaatatattattattgattaacaattacagataatttagtctttttttatttcttaaattatgtatcataatcttaaaccaattgtaacccaaaaatttcttaaaccaatcactgaaattacgatttgtgggtttgccattttcaaaaatgtgtcaattatgtttacctttttctctttattttttcctacgtatatcagttctgaagccccgatacttcaaaatggatgatgtatcgtatccctgcgtatcctgcaccgatacctgtctgatacttccagatacgtatcaggagtgtatccaaagattaattttttttttttattttttaaaagtaattatccaatatttcttgatacgtatcaggagagtattcgataattatcctgcactaatacctgccctaatacttcccaattaatgtttaactaaaataacttaactcttgagtatagtgattcttttttggatcgatatagtatagcactaacaatgtttctttttggatatagtatagcacttatggtactctttttgggatatattctgtatgtaattgactaatcttcactctcttaatcgtcaatattatttatatttatgtttatgtgctacgagcatatgacttgtttcttttgtttgttattatatacttgcatattaaaaaaaatagttataattatattgtacatttaattatatttttttattaacgtatcccaacagtatcgtatctcgatttttgaaatttttccgtatcagcatatcggtgcagtatcatatctcgtattcggact

SEQ ID NO: 33571 - DNA, 633 bp, Medicago truncatula
  Intron number 1 from transcript AC233677_4.1 (locus AC2336 77_4) derived from phytozome v7.0 (chr-ID AC233677; pos 22 188 to 22820)
tcatttcgacaccgcttccttacctcatatttttggttactttttatctatggaaatcgttagtaggctgatgtgacagaacagtggattctcttatgcgacacatgggaatagttggttagaaatctcactagggattcatctttcaaacccctctgtgtctctccctgaaccgccaaacctgcttaagggcattgcaaaaggattactctatcatatattagtaattgtttgggtttaaacagtttgttcaatcaaatatagaactgctgggctaattttagagaatcgtaaatcttatcaaattgtaacaatgaaaaacataatgaaaaataacaaagtttctcatatataaataaacattgtattcaatatactatacactacggctggagatgggtctgtctaggctgacttgttcattttgtattcttcttagtctgttcctaatccctaccccagtattccacttttattctaaaatgtggtatggacataacaatcctttagttgtttccctggcatgcattagtagtataattataatttaattataacttacaattgagatgacattttatatacttttgcctattgaaaaccactgcacactgtttgttgttgcagaggctg

SEQ ID NO: 33572 - DNA, 775 bp, Medicago truncatula
  Intron number 1 from transcript Medtr5g085530.1 (locus Med tr5g085530) derived from phytozome v7.0 (chr-ID MtChr5; po s 32676403 to 32677177)
aataaggtagttaattaaatttttccgcctgtgcactttttatgttataatgagctcttctctaattttatttcctttatcaaaatattactgaaattttttgtgagaagattagtggctatgttgatactgataagctttttacttttggttatacttttattctgtcatttgaatttgattaagaaagattctccctctggcataaactgagaagtttgcaattaaccaatcgttattatatgatatctatcacatagattacattcagcctgattttttttattttttttggtttcttcacactgttttcactcatcattatatattttatatgaaatattcttttcataaatggttgcctgtataattatctttgaatcgttcaggagaagccgagttcgattcctgatggaaacaattcttggataggctttacttacctcccgaccgaacatatcattttgtgctggtgtataatatataagtaataatagattacctttatttgtgattggctcatatgttttggtttttctatctcaatggcgacatgagttaatgaagcaccgaaaagagacagagtgtataacatctatttcaaacgtatgcatataattatgcgtgagggttggagaaaatgaaaactgagaaaaattatattttgaaagtaaagtaattagaaaaatcagagaaagatgaacagtggtgtgatgaacattttttttaatgtaactcctagtatagactttaataacatggtttaatttgtagg

SEQ ID NO: 33573 - DNA, 1011 bp, Medicago truncatula
  Intron number 1 from transcript Medtr1g149730.1 (locus Med tr1g149730) derived from phytozome v7.0 (chr-ID MtChr1; po s 33098055 to 33099065 reverse strand)
ctcttcatttgctctccaaggtttgtaccaatacatctttcaatttatgggatcttttttttttttttttattgtttttgcactgaattcgcaactaagctccaatctcattcaactttttgataagttgatacatactatattaaatgtgaatactctctatgagagattcaaactatgatacaccgtgttaggagactagccccatttatttattttttactcaattcaaccatatttagtattttgtaagaattatgatgcggttttgatcccaaatgagtcaaaaagctatattgttttgtgtatcttaagaaaaatgataaatttaattaggattttttatattttatttttcctatatatcatttgaagctttttactagcattcgtttatgtttatcttgttaattatatgtgaatataaaaataaaatattcttatatgcgttaaattcttgtattaactagttttgaatagctattgcatcattctttatttcatgagaaaattttatgtcacactccatgattttatcacgatgaaacatggttgaagaaatacatgtagttaaaggagaaagcaaatgagagagtgtgacaatgaatatgaggaaaaaggaacaaatgaacaatgaaatatgaatttaggataacaaatattattacaaaatcagacccacttcactataataaaaaattcatttcatccatgtagtcatctgatttaagtcattagatctaatcatatgatcgacaatgtgaattgggaaaataataaactcgatatctcgaccactcgatatacaataacaatagatatcattgattaaagtggttgatgattgaatcaaattcatttctaaaatcacttgggttattattgtgtttcacaagcttttctttgattttagaattttatatgttacaatcttgtagtacttgacaatgcttactcatatattatagttaacatatagatttctatttttcttggttttgtatatttcag

SEQ ID NO: 33574 - DNA, 888 bp, Medicago truncatula
  Intron number 2 from transcript Medtr5g032950.1 (locus Med tr5g032950) derived from phytozome v7.0 (chr-ID MtChr5; po s 13407919 to 13408806)
acactcagggtcgtggagatagtggttgtacacttgtactttgtcaactcttcaatgagggacaagcacccagtgcttttcaaatgaacgttggcacttcccttttgatcattcgctctcttagacgaggttaacttcaagagacaactcttttgagatttcagattgaatcttctgatcaactgtagcttctggtgatgatatagcttatgatgaaatcttgcttatgaagaactttgcttctgatgaacttctgcttctgatgacgtcattacttcagaggcacttgtaacttcagaaacacttcatagcttcagacgcagttttcttcagatgctttagattcctttgctctctattgttcttccaagacctattgaaattgattaactttgcctatggtcctgtacacttgaacaaatattagcaataaccaattgacaatttttaataccttgttatcatcaaaactcattaaggtttattgtaaaacacattttgttccaacaagtttggctcggttcaaggataagatggatttcccttcctcctaaattgcattgctttaaagatcaaacttcaaagccaacaacatataaactagttcctcaattttgacagattttttttatcagtttcaaattaactttgtggaatgaaatagaatggtttgtgaaatgaaatattggattttatggtgtaacatttttctttcaattttaccctcatttaattggagggaggctagagaaactttgtcttggtcaaagacaagagaggcatgtccttcctctaattagaataattgttactattaatttctatttcttaacatttgtactttcgatcgcagcactaacttcacgaattcaacgcggatcaggatct

SEQ ID NO: 33575 - DNA, 384 bp, Medicago truncatula
  Intron number 1 from transcript Medtr4g024820.1 (locus Med tr4g024820) derived from phytozome v7.0 (chr-ID MtChr4; po s 5769575 to 5769958)
ggtacgttaatatcacaaatcctttcttttcttcatcaataattgtttttgccatataattcagggacatctttttttcttctaataacttggtcaatcattttatgtcaactaattatgatgaactttgttctttaatatttataatttcttgtgaaacttcataatcatcttcgtatgtatcaaattatatcattttcaatgggtgaccctaacattgactttttgagttttttcttctagtttatttataaattatagattacaataggttattgagttacttattcaaaaaatagtttattgagttataatttatatgtatgtacgtatgctcctcttgatgtaggatatacaccgtgtccatcaacattggcaatcctc

SEQ ID NO: 33576 - DNA, 959 bp, Medicago truncatula
  Intron number 2 from transcript Medtr1g086270.1 (locus Med tr1g086270) derived from phytozome v7.0 (chr-ID MtChr1; po s 17015631 to 17016589 reverse strand)
agatcatctgtgttgcatctatcaggtatttgtccatagaaatgctggggttgattattcaatatcctctgcaaatgattgggtttattggtttaatgtctcgataattatttcaattaccattcttttgaaataaatgtgatataggtatttcctgccaatatgtaattaatatcacctttccttaggtcacaagataaggtatggaattaactaataaagggtgatgctcctcaccttacaagcctgtagagagtatttatgctccaaactcaataaagttgtgtgtgaagaatcgaggatcactagaaaacagaaaagggctttttgtaggtttggtccaagaggataaatttgataggacttgcccaaaaagatcataacgtatatgttcacaaaagaagggttttcgttagcccaaataaaggtaagactcggttcggtctgagatagtttttccggcgaatttgacccgagtgtgagagcgaggtgtcctccactacgagctcttacagtgcacatgatttctcccctgcaaatcctttcgacatgtgtgctgtgccacggtttttgcgagccttttcggtgtattatcctcgatgcagacccttctggtctgttcactgtttacgctgcacaagctgtctccaagtccagcccttttggcaagagtattgatgcaacatgggtcgaagaccaaagtcaataaaatggatatgggtttggagcagcaacataagttggagaaaagttaaaatcttgattacatatttaaaatctgtccttagttttctctgctttagctaaatcaaaatttcccttgtatagctttacttcgctgcccagttagctaatgtgtaatctaatcatactttgtgaaatattttcttttaattgatggaagagagtgtgatttttattctgatggttttagttttataattcatcaaatagggtcc

SEQ ID NO: 33577 - DNA, 387 bp, Medicago truncatula
  Intron number 2 from transcript AC235674_5.1 (locus AC2356 74_5) derived from phytozome v7.0 (chr-ID AC235674; pos 27 119 to 27505 reverse strand)
actggttcaagacccacaagatcatcaagcaccaagtatgttcttttctacattatttgcaattagattatgctagaattcaagggactaccggcgcattccatgttttcttgtgaagtaaaattggcatttagtttcatactatgacaaacaacattgacactagtaataatttgagaatggaagaaagtgaacctaatagtatgtcactcggtgtcgtgtctgtgtcacacaccagacacatcttcaatctaaaatgtcagtactacataggttttagatacttattttctctttttttttttaaatttcacaaattttgtttcaatatcaatatcaaaagagttatgaaactttttaattatgtgtttggatgttgtacagttt

SEQ ID NO: 33578 - DNA, 570 bp, Medicago truncatula
  Intron number 1 from transcript Medtr5g071880.1 (locus Med tr5g071880) derived from phytozome v7.0 (chr-ID MtChr5; po s 25536595 to 25537164)
tccttcgacgacttcattggtgtatggcataggcgacccctttgtggcgctacagtactctataatttgatgtaattgaagtgggcgagccttctaaggtgccttccgtactctttaagattttggtgggatatttattttgagacttcgtatttatgttgacttgtcttaatggttttgaatatgtttcccctttataatattcgatgttctttgtggttttgaatttgtttcgtctttgctttttaacttgtaatttatcttggtcttctgaccctgattctcctttttggcattaattcttcatggcctcttggccttagctcgcctgcggtgttaaatcttcttgaccttttggtcttagtttgcttgtggcgtcatgtcttcttgaccctgtgagtcttgattcttcttgacttttattgatcccttggttataacgttttgttgatttctactttaattatttcatgattttctttgagaaatgtttcttctatggccccttttgaggagagatctctatatgaggttttcttgtgctcagagcccttttttggggttggcgtc

SEQ ID NO: 33579 - DNA, 994 bp, Medicago truncatula
  Intron number 1 from transcript Medtr5g093620.1 (locus Med tr5g093620) derived from phytozome v7.0 (chr-ID MtChr5; po s 36845372 to 36846365)
ccgctgaagctcaactcaaggtaacctaatcaaagtcctcttttcactctttcgcttttcttcttacgcgaatcatcatcattggattcttgaaatgaatttttaattttttttaatgataaatgttagtaattagttgttaaattaatttttcgttggaaagaatctcaaacagtttttgattaattactcttaggatgaaactgggaaatatatcatgtattatcaattgattgatgtctttatgaattaggcactccatgtcctaaacacaagagaagaatttttttctcattttcattggataactgattgtatctagtctatattttagaccagatacatcaattattcaatgaatttgaaaaatgaatcttctccgtgaaagcacggacacctctgaaattatgcgtacttgtctatgccctgttcttggcatgattgtcaaactttaagatatcattttattagaaaggtgtttgcaggtatcaaggaaccatttcatacaaaggcatagtctgttaggtatatgatgcagtccttcaaggctcaataaaaatccctttgtggctgaacacaacatttcttgtgcctagatgtaattttattggaatatatagggcaattaataaagcattgaactcttgacatgttcgtcattgagtacaagtgtcaattgagcatcacccaaaaatgactaagctgacaagtatagatccttgaatggtttcttatatataagaatgaaacaatcagttgcaatgttataactagctgggctattgtgtttctaaccagttgaaatgtataatttatttgttaatctttatcctactgctgattaagataaacttaccaatctacaaatatgaatgattaacgtacctttcagtctatgaatgcaatcacttccttttatgcctaggtttttaacatgacaatactaaatgcatgattcctttgtttactatgttcaattcaggctgaccagcag

SEQ ID NO: 33580 - DNA, 775 bp, Medicago truncatula
  Intron number 1 from transcript Medtr5g038290.1 (locus Med tr5g038290) derived from phytozome v7.0 (chr-ID MtChr5; po s 16177852 to 16178626)
gcctcaacattcttttaccaacccaactttccaaggttcatgttattcttcttctttttgtttttgtttttgttttttttattgacttgcattttttcatataaattattttgtactttaagtttatagagctgcttttgttttggttttgttgtttgtgtgtttttcaaattgaattcggtgttttaagtgcatgtttggattgtcggaggtgaatttcaccgctattttggcaaaagttacactttatagtttctacagaatcctagtatcaccgtgattttgtcaaacttacgccgaatacaaacatgcattaagaggttcttttatttaatgagttttttttttttttttttttcaattgttttgatgtttttggtgtagttgaaagtttagactttagagaatattgtaggtgaagttggtttgttacttgtggaaattttcaaccaaagcaaaattatagttgagcaattactttaggaggatgatagaaaagatgttaatgattggtgcaaattacattttttttcctttttctcttagcattgtctaagttttcagccattttaggccagagtcaaaaatggggtaatggtaatattaaattcttattatgatatctatcactattgaccagttaatataatattttaattttttttggccatgtgaatctgtttcatcatttaatgcataatttatttttcatcatatcttagttgaattttgtatgatattttaaatttgtgtttgcaggaagcattgaagaggc

SEQ ID NO: 33581 - DNA, 600 bp, Medicago truncatula
  Intron number 2 from transcript Medtr6g005450.1 (locus Med tr6g005450) derived from phytozome v7.0 (chr-ID MtChr6; po s 321159 to 321758 reverse strand)
aaggtggatcccggaaccatcaggtttgtcctcaactcttgtgttatatattttttattgttatatgatgcgctgacatagtgtaagatacaggaagaattttcagataagtaacactttgaaatattatgctaaccggtaatggtttggtttgtgtaagtttcaattaactgattattttaaccttatctatgatgaggattgggattaattttgtttctaacgaactaaagatttaaggtgataatgtgttgtccaatttaaatattccttttttcctcaaatggatcctagagaagtttgggccattacatttgcttagggaatggactatgcaatatcatgctagaaaactggtttattaaaatgagctgtatttttctcaatttaataatacgtgtctaaatatcagctttaagttcttccatttttatccctcaaaaaaaaaaagttctttcatttttatcttgtatatgtttaaaaatcagctgtgcatttctcttgattgtagtttattggggacttaatttatttgtttgttattttattttttattttgtatcagagttccaaaggtgatagttttagctctcataataa

SEQ ID NO: 33582 - DNA, 729 bp, Medicago truncatula
  Intron number 1 from transcript Medtr2g107800.1 (locus Med tr2g107800) derived from phytozome v7.0 (chr-ID MtChr2; po s 25435119 to 25435847 reverse strand)
tacgtaaatcaaggtcacaaagattaaggatccatacctagtttcttaatttattttgattattttttctttttccttttagttttatcatgaatccctatacatacttaccaataattaatggatctatcatgtattcaacctagctactatttttctcattttgttatttggtataacaaaggaaaataagaactagcatatatttgtttacgagagtttatggatcgatctttcctagatctgcttttcttcaaacctaaaatccaaaaaataggtacaccatggaattcctttaaatgtaaattacatatgcatggtgtgtgtgtgcgcacacaccaaatatcctctcaaaaaaaagatcctaataagtacaatatttcctatagtccaagtagctaacgtgggaagtaataattaggaatacccatagagctgttgaacctgaaacctaacattgcttataaaaaactgcaatgtttcctagttttaatataattaaattaaatgtttttagatacttatatacaaaaatcaatctttatttgggagctgtccggtggtcttatgatcatatgtttggttcaatcttgttattctccttaaattaattggactggtatagaagactataccacatggaatttactatacattgactattcaacatatccagctcaacttgagtgttcaggccacgagagctccacctcatctcagctcgtccct

SEQ ID NO: 33583 - DNA, 774 bp, Medicago truncatula
  Intron number 1 from transcript Medtr4g090150.2 (locus Med tr4g090150) derived from phytozome v7.0 (chr-ID MtChr4; po s 18966475 to 18967248 reverse strand)
gaaagctgcaaaatctaacgcgtcctgttgaggttagtctgtcaagcaactggctgatattgtttgcaatgtttttaatgatatagtctgatgcatggttactagtatcgtacggtacatgcgaacatatcttgattttatcttaaattgaactcaatcaatatgaatctcttgtatgtgtatccatttggacatgaattccatcttgaatgccaattcatttcaatgaatcaccacttaataaacttagtgtagccagccacttattttgtcaactttgtatttcaacaaaaccacttttcttttctcatttatatgatttgaatcttaaattatttggaggtatatatctgtatattaactcctaattttgtcatgtcacttgttttttacttaaaaaatgatatattttcataagcaatatattttatgatagtaaaattcggttcacgaattgaaaaaaggtattctaattcacaatttgaatacaattggagaaagaacaaaattgccccgatccataccggctctgcagccgatttttgcagaaaaagtctaatttagtttttcacggtatttattctaccaactcaaacacatgaatacaggtttgtgctaaaaggtttaattccttttgtaataataataatattaatgtgcactagagtaaaagtttacaagagaaggtgcatggaaatgctggaatgatgccacttttttactggtgtcatctgattcatgtgatctaatcttggcaggtgattgcattttgtg

SEQ ID NO: 33584 - DNA, 789 bp, Medicago truncatula
  Intron number 2 from transcript Medtr5g027660.1 (locus Med tr5g027660) derived from phytozome v7.0 (chr-ID MtChr5; po s 11313325 to 11314113 reverse strand)
tcactagttgatagacaagagatcaccttaagggtgtgtttggtttggaagagaagttgtgaagagagaaataggtgagagagagtgtagaaagagagaaaaaggtgagaaatagagtagatttgatatattgtttggaagagaaagatttgagaaatagaagagagagaaatgcatttatttttgaaaggacaaaaataccctttagcttaataaacaaatacataatttaatgttgattgaaacacatttgctatcaatattaatttaattaaacaatcaattattaattattaattattaatttacatttggttaatttatgttatttgttcttattaattttaattatttgaacaaatagtaatttatatttgcttaatgtaatgataagaataagattgtacggtaccaaaaaaaaactgattgtgtcaaaaaaataaaatagcccatttcataaattaaaaaatctattctggttgcttcatttattcccacagccacaggtatacggctaggctatgcacaacaagcagacttccgtatatattttttttgtcttttatgatgcaatgaaagggtataattgaaatattattaaaaattggaactctccgctatttcttcgctattgagataagactaaaaaagcagtggaccctacatgttattatctctctctcccttatttctcaccacaaccaaactaaagaaatactcattttcttttctatctctctctcttcaacttctccctttcctttttctcttctaccaaacacagtgtaa

SEQ ID NO: 33585 - DNA, 560 bp, Medicago truncatula
  Intron number 2 from transcript Medtr5g048660.1 (locus Med tr5g048660) derived from phytozome v7.0 (chr-ID MtChr5; po s 20597643 to 20598202)
ttcattcctcccattgtttacactggctttcaagggtaatactccttaccttcttttcattacttctttttttttttttcctctacttttctttacaattttgtcctcaaatatgtttttcataaattagttttgtcattgaatgtgtattttgttagttaatttggttcataagattatctatatattaaagatatacttagagatatatttgtaattttgatacatttagggattatagtgataaagtttcacatattttgagattaaaatgagtgctcctagatccgtgaatttaattcagatggtagaaacaaatgcataatatatgcaggggtcagggttcgaaccccggacacttactcttttatttttacatacacttcaaagttttatattgtgttatctttttttatcaagcacgttaaaaataacaaaatgtaattctagctacacaaaactttgatcttaattgtatcaagtatataatgatgctactatagctacaattattttaattatggttatttcttgattatgttaggttcctcctacaatct

SEQ ID NO: 33586 - DNA, 655 bp, Medicago truncatula
  Intron number 1 from transcript Medtr7g020690.1 (locus Med tr7g020690) derived from phytozome v7.0 (chr-ID MtChr7; po s 4832806 to 4833460)
tcagcagatcgcttcctccatcttcggtaatctcttctttatttcatctctctatttcaaaatgtaactgttttctttttttgcttttttggttcggtttcttcattgtcacagaagagagatgcaatctgctttaatggatccaaattcaattgagaataaccgttttgatggtgctgagttccgcattcgtgactgcaaccgcaatttaatacagcattgattgatgacgttgttgctgctgccgtgatgtatctggtgtccgtgtctgattccgtgcttctgaggaatgaaaagaaaactaagcatggaacattgaaattggaaatggaattggaatttgattcatgaaattgatcaaagcatggaaaggaacaatggaattggaatggaacattggaattggaacaaacaaacaaacaattgtttttggtaaaagactcaagcactaataagccacacagaaaaaactgtggttgctggtgcatttttatatactttttttaaaattacttaaaaaaaagtgttatgaatttgaggggttattttaattttaaatttaacattatgattatgaatgttatgtactaatattttcaaaattgaacttttttgtgttataggtaagctttgtgattgtgaagattactgcaat

SEQ ID NO: 33587 - DNA, 346 bp, Medicago truncatula
  Intron number 2 from transcript Medtr4g070020.1 (locus Med tr4g070020) derived from phytozome v7.0 (chr-ID MtChr4; po s 13501199 to 13501544 reverse strand)
aattaccattctgcaaaccaggtcagttacaattaagtctaattattagctttcaattttgatctcatgatctgtgaagcacgaacacagacaccggacacgacactgacaccagtaataatttgagaagatgacataattgaatgtaatcacatgtgtcaatgttgacaccgacacatgtcggacactggacacaccttttattagaagtgtcggtgttacggagctcatgatgtagaaaaatgaaaatcaaataattaaagggtttgattggaactgcttggattgtaaaaaggatttgtttttcgcagacccaatagtgaaaaagatagaatctcttggagaa

SEQ ID NO: 33588 - DNA, 780 bp, Medicago truncatula
  Intron number 1 from transcript AC235567_78.1 (locus AC235 567_78) derived from phytozome v7.0 (chr-ID AC235567; pos 281773 to 282552 reverse strand)
ggaaagattcagagtcattattgtgggtttggacggttacaaccactaacacgtttttattgactgtattaatgacctaggacttgttttagactataaatagacttccattttcaacaaataccttaattcttcacttcacctcttttcttccattttcttcaaatgttttttagtttttcaggggtgtcgatggtgtcatgatcattgttgaccgttcataggaatatgttactaaatatatgaatatgaatacatcatggaagaaagaagtgttgtatgtgtatgtatttcaaacaatatgtttgttacttcttatttagtggaataacattggtcaaatgattcaacaatgcattaccattcgacgaaaaaaaaaatgtattaccatgttatgcttcttcatggtctgattttgatgttgtcattactcttatctctgaacgttattttcatcagtatttaaactgaggctaagttatcttattgcacctgtattttaaattcatttatttggggtttgaatatatctgtgaggaaacttatccggaggatatgtaaattttgaagctgatacctcacatttacacgtctgtatgcgcaaactgatgcataagttgttgccttgtaatctcaataatcttttccttgcttatgttgttgttgatcttgtgattacgacaacttgcctcttcagtcatcatggttacaacttacaacactcttttccatgctaattttgcaggtaagtgtgaacaacaaaccccgtgttgattatca

SEQ ID NO: 33589 - DNA, 778 bp, Medicago truncatula
  Intron number 1 from transcript Medtr4g125370.1 (locus Med tr4g125370) derived from phytozome v7.0 (chr-ID MtChr4; po s 29545144 to 29545921 reverse strand)
tcaccgttcgataaacgcttttcggttcttgtaagctctctccttccctctctctattttttttctctaattccgtttaattttttcattaatcacgattattattccatgttttctcttaattattatttttgtagctcatgatttcgttgaatttctatttcctctgatttaggatatggattttaatatttcatgtttatttgtttgtcatgttgattcgtttgttttattccccttccgaagctgtttggttgctgacaaatttgtaggaaatttcagaaaccctaaaatttaatgttttttttttttgtttcagaaatttggaacatgtttttgtctttgttttttttaatttgaaatgtaaatcactaaattgtagaaataaggagtgcataacctaagcttagttgacttttttgagttgcttattgtttatctgatagaaagttaagatttttcgtaatttttcttaggttggtgtctttatattttgtgttataattttgaaactgtagattcattggtttactgtactgtttctattttggtttttttaatgcaacaaagcaaaacaatgatgttagttcttagatctcaccttatggttttgtgatcttagccgtggttaagttgctaattgttgtgtgtggtgtcatatgttatgttttgtttcagtgaagaaggacccttctctttgcgcgtgtcccgttctcttctccaatccccaactccaccattacgtagacatctgtgaaatctgaataaaataaataat

SEQ ID NO: 33590 - DNA, 958 bp, Medicago truncatula
  Intron number 3 from transcript Medtr2g042950.1 (locus Med tr2g042950) derived from phytozome v7.0 (chr-ID MtChr2; po s 12176638 to 12177595 reverse strand)
ttccacaacgcaaacagcaaaaaaagctcttactggtaagttgtattaaggatacacctagcttgcatctactagtttggccattttaaaatatgagcatttgactgttgacttttgttgccctttgtcaatacagtgaatcaggtagaatttctaccttcgatacaacaaatcctcatacgacatacaattttatattgttcttgctaggatcctatcccgcgttctaaattttaaaatttgctatcctttttaagtgtggcatttctttagcgtagttgctttgtgaatacattgaagatacctgattcctccaagtaccattattactgtaacctgtaaattgaaaaaaaataaaaattcaagaatttctgttaatagttttgatagcactgattattatccacatatttcttcgatgtgatattctataaatgttgttgagggtggtgaggaagacaccattcaaagctgtgcgttggtgtcaagaaagctgtcttgcggatagaacaaaaaaggggaacatttgttgatggacatgaataaaaatatgaaatgcttgtagaaatgaatttatctaattaggtttttgcctggggcttttgttgtaaggaaataaagtttggatatgtgagaacttgatttatataatgttaacaataggatggtattctgttctctttgcatgctggaagaaacaattagaagattagtggaaacttaaaaggtttgctatggaacgttatttctggatggtttattaattctttccctttgctattgaaatagggatcattgtaataggaggaggggaaatagctcatagttttattctagtgaagtgacttggtacttatttcgacttttgattatttcggtctacttttaatatgctatttgatttccattgcatgtttgtgcagcaagctttggttggcgaggcttcaggggaagaaca

SEQ ID NO: 33591 - DNA, 511 bp, Medicago truncatula
  Intron number 1 from transcript Medtr1g007360.1 (locus Med tr1g007360) derived from phytozome v7.0 (chr-ID MtChr1; po s 396294 to 396804)
atccagtaatcctaattcctaattgagatgagttggttgttacgctttcctaagctgaagcataaaaaactatgaagcacagacacacgttagtgtctggcatttctataacactattacgacacgtgtcggacaaataagaccggtgtcctaaataaaattgttttttttcttttacttcaacattcctaaaaccagtgtcgactctaataaaaaagagatgagatttgggatttgttggatcttcttcccatgtttcaacagcgagaaatagagatgatcaatgctaataaaaaaacttgctatcattatgaaacatttgggatttgttggatcttcttcctatgtttcaaaccccaacagtgaatcaaatgagcacattgatgaagatgacaacaattattttgttgaagatgtcgatgaagatgacaatgattttgttgaagatgttgatgaagataacataagttatcatattgataactagtaacttggagtctcaaattttggt

SEQ ID NO: 33592 - DNA, 776 bp, Medicago truncatula
  Intron number 1 from transcript Medtr3g106120.1 (locus Med tr3g106120) derived from phytozome v7.0 (chr-ID MtChr3; po s 26684845 to 26685620 reverse strand)
cctcaggtacgcaattacatagctttattttctagtctcaggtatgcatacttctataaaatcaatactttagttgtcctatttgggttttacacgggttaaggaaatgattaatattgatgattttaatggtgaaatgtgtatccttattaattatggttagtggaatagttataaatgattaaaatgcaatagataagggtatgtcagtggaaaaattaataaatgttgtattaacatctttagaagggttaaataatttgagataatttttttttaggaaagaagacacctagtatgagacggagggagtacttaacactacaaacacaattatattttgttgtttttacacgagaatcaccttagtttttatttttgaattaccacggtttggtaagaattttgttggcatgcaaaatcaaattagaatgctctataacctctaaaatctattgtttgctctataatcaaattagtaataatatttttacatattaatattgttgtttttaatacaagggtagaaatggaataaaaatctattatttgttccgttcaacccaatttccaaacaatggaatggaaaattattttgtaacatcataaagtaaccaaacaaggaatggaatctttgttccattccgctccattccattatatttcattccgctctcctccgttctgttccattaatccaaacagagtctaatttttgttttaatttaattgtgtttgactttttaatctgtttctgtactctgcacagcccttcg

SEQ ID NO: 33593 - DNA, 781 bp, Medicago truncatula
  Intron number 1 from transcript Medtr3g019850.1 (locus Med tr3g019850) derived from phytozome v7.0 (chr-ID MtChr3; po s 4239463 to 4240243)
gcgcagaaagcaagcaacggtggtacaagcaacaagtggctccttgtgcaggaatggcgatacatgcaaagtaaaaagcttccgctctaggggagcacgttaaagtgatggactcacacttgaaggggagtgttggtttgcaagtgtgagttataagtctcacatcggataaaatagtaaaagttaaacaccttataagtaggaggacccataaactcattgccttaagattttgggtaagagtgtggtgtcttttttgcttatgcggatgttctagcctggatcttcttcccatccaccacacaaattatatcactaataaaaatggcgacaaagaatttgatgaagacattaataaagatgacaacaaattgtaatcaacatactttgtttaggatttacttcttgaatgattgtactcaaaatacttcgaattaactctttatattgtgaatattttgttgtttaattttgattctaatttttgtattacaatttatacttcaaaaaatatgatttttttatcaaacaaataagtaaaaaagattctttatatgccaattttctacttttgttttatatctcggttcctgcggcggttatcattttcatgccgattttcctgcagtattcgttgtggaagtagctgcgattttgtttgcagaaaacgtgacatgggcagaaaagctcacccaactctgaccgaaagtttcatgcggatttttgtcacatttcctaacgaaatttcggcagtaagtttcctgcgaatcataaaatactc

SEQ ID NO: 33594 - DNA, 608 bp, Medicago truncatula
  Intron number 2 from transcript Medtr4g067300.1 (locus Med tr4g067300) derived from phytozome v7.0 (chr-ID MtChr4; po s 13037720 to 13038327 reverse strand)
cacctcctaatcttcatctctgccgcgctgaaaaggtaactcctcacatgcatttttatttgagtttctttactgaatttttgtggatatttccttttttgtgatacttcagaatgagacatcataacagataattgttggaaccttgtctgcaatttactcaagttgaaattgttgaagaatggcgacagagccatctatataataaaatcagttttgaatctttcatatccagttgttgttcatttgcttttttatatctgttgtaaacttttttctatatgattgtttttgtcagtgacagttgacagtgttactttttctgcctttagtaaatcatcaaataaagatgaggtcgagaagcgccaacctaacacctactctccacttctagataatggccagtgaagagttctcatattgactcgtcaatgcctcctttgtgaacctttattttaagatatcagatctgcaaatattagtttggatgactttactgaaacctattttttgatttgacaagcatttggtctattacatagttcttcatttgtggtctatgagttcatctagttgaagcgaaattgtaatatactgcacttcttttg

SEQ ID NO: 33595 - DNA, 1003 bp, Medicago truncatula
  Intron number 1 from transcript Medtr7g010370.1 (locus Med tr7g010370) derived from phytozome v7.0 (chr-ID MtChr7; po s 2233395 to 2234397)
atcttccaacattgaggtatatatgtatttaattaatttgttaatttttattattcattttgtagtttaaatatgggttactaccttaaccttttttttgttgacaatatagacaatgaagtttgaatactggacctcatgaatactatccaaattcttcactaaaccaattttagtagctattaaccttgatttcttataataaggttatcttatctttagtagctgtcaatatcaatattggttttgtctaaatatatcaattttagtaaatgatttgttttttttttttttttttttttttttattttttttataaatcttcctcataaaatttatcttaaacctcaatatgtgttgggccataaaatatagatagatatctaggtgttacattttcatgaaaaaagatttagcggcacaacttgttgctcgtctgcctttcacttatgtgtaattttttctatatataaataacaaaaaaatatatatgtagaaaaataatgaatttgactcataaaagaaagtaaagtagaacaataaaaaaaagagtaaagtataaaatgaaaaaaaataaaattaagagttgttattttaatacattttatgatttatcatgatgtacttctaatattcaccttttgatttttttttttaaaggatattcaccttttgatagtgtgtgctgctaaccaaattgagatagacttgcaaatagtgataccctttacactatttttgcttaaaaacatttccacccttgattgatttatttttttaatgataaatattagtatgttaatattattatgttactaatataattattttaatctcttagttcaaccaagtaagttacacatcccctctcgactaaccatggttgacaatgcttagagtagaggaataagatataaattaatatgctaaactaatctctttttcttggtctttgaaattaaatacaggttttttgtagttgctagtgctattgtgagtggct

SEQ ID NO: 33596 - DNA, 399 bp, Medicago truncatula
  Intron number 1 from transcript Medtr7g012020.1 (locus Med tr7g012020) derived from phytozome v7.0 (chr-ID MtChr7; po s 3019935 to 3020333)
tttccaaccgtgtcaaaggaaaatctcaggtatatataaaacattatttctttctcttctataacaaatgtaaaatttaatttctaggttaactgttcattttatcaatcatctagtatataatacactactactctatctatattactattaaaagggttacacaaatttttgatgtactctcttttggctaatggtgtattatcttcaactaatatcttcgacacggataaaattttgaaaaaatggcataatagggttaagagagtacataaaaaaagagagtacataaaaaaattattcgttgtggcaatagggttaagaaccctaaacccataaacaaacaatttttctaatgtttgagttttgaattataggttgtggcaatagggttaagaa

SEQ ID NO: 33597 - DNA, 733 bp, Medicago truncatula
  Intron number 2 from transcript Medtr1g126270.1 (locus Med tr1g126270) derived from phytozome v7.0 (chr-ID MtChr1; po s 28135279 to 28136011 reverse strand)
agagaaatcgatatataattaggattccaattgaggtaagtaaagtccgacaaattattccaatcaaggatcgaactcatattctaccaaataatttgagcttaactgaagtgtattaaatgtactaattgcttttaggaaattttaaatttcagtttaattagtattatggacactaatcaactgacattaaatttctgaagattaagttagtagttattcactctaaatgcttaatattctagaattcaattaagataaacaagtgaggaaggtatcataggcactccacaattcacagactcatttgattggaattgaattcgaacatctcttaatatgaattctgactcccagttgaataaattatgcctccaattccgactccaaccaatgaatcttatggattatagagtaactgtcatgaatcttattttgatacttgttaaccaagaatcaattattaatttgttttttctgagtaaaaaatcaattaacaattataatattatattagcgttcaacggatagtctgtgagtatttttttttattgtgttaatgcgtataaattagtttttttataaattttgatttttacttccttaaaaaaaattgatttttttttcttttttaaaaaataaaattttgattttgaataaaattatttttgtttttgattaaaattatatgtatagatatttttcactttcatgttgtaactagaggtgtcaa

SEQ ID NO: 33598 - DNA, 917 bp, Medicago truncatula
  Intron number 1 from transcript Medtr5g073860.1 (locus Med tr5g073860) derived from phytozome v7.0 (chr-ID MtChr5; po s 26593957 to 26594873 reverse strand)
aggtctcataaagggcatttacctcctaattttatttagcacactattggatggttatgtttcatctctcttatttcaaattatacttttatggataaaatgacgagtctctattatttcgatttatgactatttatatattatgtcaaatgtgaatttgcaatcaaaattttgcccaacccctcgacccactattttagtacggaacgagccgtaaaaaagcatgaaaaaagcgactttatatttttaggccaggcctatatttttcaagggttgggccgggtcgggcttgcctgctggcccattaaaaatactaaaaaaattataaaacaattttggttgactttggtaagagatataccacaagtagaagatatattattgtctgcagtaccaagtgttcaagagacttagctctaaaagttgtcaattttataatttattttgtcttctattttgagttgtttgattggtaattattttgttatgtaagacataacttgttgtttcctactccaacattgcactttgtgagttgtgataaatattatcttcttttgcatggatgtattttgtggtatttatcttatatgaatattgatttaatagatgtttttgtggtatttatactctgtacttttgcatggatgtttttgtggtatttatctattacggatattgatttaatagatgttttatatgtcatttaactaagtttatgaagacatgtgattatttgatggatgacaatttgtgatgtttctaaaaataattatgtgatatgtagctttattgttcttagcatttttcataaaaaaaaaataaaaaaataaaataatacattttgaaatattggtcgggccggcccatcaggctatgtagcccactactaattgggttggactcaattttggtac

SEQ ID NO: 33599 - DNA, 932 bp, Medicago truncatula
  Intron number 3 from transcript Medtr2g043000.1 (locus Med tr2g043000) derived from phytozome v7.0 (chr-ID MtChr2; po s 12204346 to 12205277 reverse strand)
caaggaagattttgcagcttttgcgtttgagacaggtgatgggtgttgcttagtagtaatttcatttttgattgaggaacttgtcaaggaatgttgtgtgtatcattttaagttataatcacttgttggtttatagaaagagttgtacgcctgttttttgtacgcttgttttttgtgctgagttgtgtttatggatgtgctgtttcatgtatcatgcaatgaacctatgatttaggggttattcaatgttgatctcttgttaaattgagttaaaatgttgtgcttgttgaattaagctttcatctaatgccattagtgtatgcaactatatattattgttcatttcatgtgataagctagacaatataagctatccaaaattactctatctaaatgtctaatacccgagagtttaaagttgcatttggttttcactcaaaagttgtttttgcttatttattttatttaggatgtgctttgtgttatttaggatttaggatgtacatgtatctatgatatattataatattgaaatgaatgaaatttaatttaatacaatgggtaaaatcttgtgcatttacttttgatctcttgtttttgtccttactaattgtttgatactaggtaggatttgcatgtattataaccttgactttactattaaagcttttcacagaactgctccttgtttgatccattattaccaagtgatttagatctccatccatgtaattttttctgaataaaaaagttgaattttagcttggagatatggtgttgtgtgctgaaatttcaaccttttatatatctctttattcttttgcttctggacctctttttccatttcttgaatacttttataatttagactcggtgcaatcaatatatgggtgtaggcttattcttccaattgttttggctgcagatctgca

SEQ ID NO: 33600 - DNA, 905 bp, Medicago truncatula
  Intron number 1 from transcript Medtr2g032810.1 (locus Med tr2g032810) derived from phytozome v7.0 (chr-ID MtChr2; po s 8794897 to 8795801 reverse strand)
ctaattggtatgctatgaataaaaaaattaactatgactagcataattttctaacataaaaaatagatgcttaattcttttgtcaattgagtataaaataattagattttatatttttttattagttgtttaggttataatacaccgatgataatactttttaaaaaaaaattaatttaatattaagaattagtccttatatttaaaataagttccactattatttcagttatctatccatctgttttgttttacaagatatagggatttgtcttcaacgtatatttatagtttggatggtatttgggtcctattatgttctccattttttgggaggttattatgatgggtattgggagtttattttgttgtcttttgatccatgtgtgaatttattttgagggaatttattctctttggtggtacttgtggtggtattgggaccttagagtttattttgttgtgtttttaattttcgagaggtgactgtattgggaggtaattgtgttgggagtgttaattgtgttgggttcggctcatctagacttgtccattttgtttttttatggagtttcctactgtgaattcatggagtgttttgtttgttctgtctcgtctggctcatcttgagttaacggtgatgcgagtgatggttggtgttagtaacataacgcgacgactgatgtgggtggttataggtgttggttacataaggtttttcctgttgggttgggagtttgaacttaaatggtgtattttttgcgtggtggtgatattttggtgttgatgattagaagcttgtaagttggttttgttttttgggatttttttttgtttttccgtttgtggtgcttcgtggtggtttccatgatggtgttgatactgggtcttttgtagtggtgctc

SEQ ID NO: 33601 - DNA, 691 bp, Medicago truncatula
  Intron number 1 from transcript Medtr1g117180.1 (locus Med tr1g117180) derived from phytozome v7.0 (chr-ID MtChr1; po s 25003382 to 25004072 reverse strand)
gcttcttctcctcttcacgatcattataactgcaggtacgcttatatacgtacattccgagctgatataatattattattacagtaataaaaaaggggttgagattgtatacatcgacaacgtaattttttttctttcacatatatccatccaatcatatcactccacgattttgttaaaagtagtgttctatgatgtcacattttaaaactaattcttaaaaaacttctacaaatatttatttggtatatagattgtttggatgtatgtgtagaaaagtgtttacacggttagagtatataaattaatcttatataaaataatcctaatcaaattaagggttcatttgttttagattaaaacaaaagtgattttaatattttattaattgattaatattttgtgtttgtttaaacttaataaaaatattgtgtgtttccctttcttctattaaaaataaatttcttcaaaaggtgtaatcaaaatagttttttattttcaacaaaaaaaacatattttaagaaaataattaaaataaattacacacaaacaagaccaaaacatcaaaaataatttctttaaataatcttaaataaatggaccataaatataaggagattactttggttttaatttacatgcaatcaaattaatgcaaattcaaataatgtctttgcagaagggacatcat

SEQ ID NO: 33602 - DNA, 1006 bp, Medicago truncatula
  Intron number 1 from transcript Medtr3g148650.1 (locus Med tr3g148650) derived from phytozome v7.0 (chr-ID MtChr3; po s 38705626 to 38706631 reverse strand)
aagcagctttgtcttccgttgatttccagaacaaggtatgtttctatcaaatcacatctaaatatgtttattttcttttttcaattaagataacatgtgtagatttgagccaaacaattgttttttgtatatgctgctataagttggttttataagctatatattggagaacttatgaaaataagttgaaaaaagcttatgaaaactgtcataagctgctctcacaaaacttacgttagtagatatgctcaaataagtcaatccaaacacgtaagctaaaaagaacctgaattagcttatagaaaaacactacgagctataagcccatgagaagatgacagttaccaaatgagtccctttcattcatataagctcataagctatcatctataagctggcttactctgcttgacgaacagaccattagaatgtttttccatcttaatgaaaactgtggtatatatttggagctatcaattgctttgaattctaatagtacaacttcatgactctaaattgatcaaaagcaatttcatcaatgtggcaaatctttatgtatacaaataaatcagcctatacctgtttgtctttccttcgtaaatgtgcatcaaacaaaaaggagtgtaaacaatatgtcaagcaagttctgcaattccctgctacaatggctcttcagagattgaatagaaagccacgtcaatttttgtagtattaaagagggagcaacttacatgatcctttagcatacgactatctgactaaaatgatttattttagaacagctattatatcaaattctatgaaaacatttgatcaaagcaactttactgagtttactcctttgtcgttttctagcatccaactaatttagcatgtaatgcatgaaaaatacaccatcaaaatgttaaattcttctattgcaatacttgtgaaaagtactcaacttatttatatgcataattgatttttaaatttgatatggttttaaaggctgttgaagtgacca

SEQ ID NO: 33603 - DNA, 805 bp, Medicago truncatula
  Intron number 1 from transcript Medtr1g008400.1 (locus Med tr1g008400) derived from phytozome v7.0 (chr-ID MtChr1; po s 720419 to 721223 reverse strand)
caattcacatatcttcctctcttcttcatcttctggttagttccttttcttcctttttctattatactaatgttaattctaattccttccatttacttagagtaataatagctattttgatactaaatttagagattgattttgatgcaccgttggtgtaaaactttttacgccaacaatcctttgtatgacagtgtgagtttaattagtttgctttgtcagtgtaaagttattattcattaattgacgtgattacatattatttggatggatgtgtaaaataattatacattatcttcattaaattccagatatatttagtgatccaatccaaatccaacaattatgattgaattagtgtagaaaatctttacactctcattgcattaagttcataagtttattataatcttgtcaagttctgaattatatttataatttacatattcaatttctatgtatgcttcttagttccaattgatcaagagtatccaagttcaaacccttgctaacaatctttgaccagactttacttacctccaaactgaactccggaccgattcccccaagaaccaaaatgttaatacgaatatatatatatatatatatatatatatgcttcttagcgtgtgtgtgtataggtgtcttggaatgtgatttccagttagaagaaggatatcatagtttacatttcatagttagaagaagtattgtgatgctatttctttttctttttttcactctgaattttgggtttaaatgtgatgtagctggaggcagggaaactttattcaaccccgtgagg

SEQ ID NO: 33604 - DNA, 735 bp, Medicago truncatula
  Intron number 1 from transcript Medtr1g125720.1 (locus Med tr1g125720) derived from phytozome v7.0 (chr-ID MtChr1; po s 27848462 to 27849196)
tcaccaaatcaaatcaaaatataatctttccagtaattacttttctttcattaccagattcactcttttcattttcatcatttcaaatgttactattaatttgattattttttttatttttattattgttatattgtcagatgaaatttatttatgttatggatctagaataggataatttcatacgttcaatgcatgctcatccttacactaattctttattacagttcataaatgtttctttttttgaaggggttaagtgtctcaatttgggtttattttaatgcttttcatgaacaaaatcattcttaactgttttaatcaaattattcattttgggttaagctggattaataattatgctataaacaatgtattatatgcacaaaattagataaacatgataaccatcaaatttgaaatgagctgaagaacatgtttctagtttttttgtgacagctggcacaagtgtttatgttctgatttttaacaaaaatattggagaactaaatgggggtgttttattaacttttagtgattgtgtttttcatcgaacacacatgactccagagtcaagagccgagcctactaatgatgcatttagaatagtattgtatacaattgtacatatttggagcttcacttaatcacttttgattttacagagttatgaaccatttcagtaagactttgtatacttttcatcgcaggaagctgtttgtctcacttgcggtg

SEQ ID NO: 33605 - DNA, 900 bp, Medicago truncatula
  Intron number 1 from transcript Medtr1g042560.1 (locus Med tr1g042560) derived from phytozome v7.0 (chr-ID MtChr1; po s 9793453 to 9794352 reverse strand)
ttggtaagcatattcataatttgaatcatcaatatatatgacatttatctttttctgtatatacatatttacaagttttaataaaatttatttgtttgtttttttttttaatataaagaatgtgttgtcaattcgagttggcacgagtaattaaaaaactcatttagagactttagttttttaagagtgagcgtttgaatctgtctgaagttgttaaaatctctttaggtactcaatcattttcgaagagaaaattagaaacatttatattgatctgagcgaactgcaatcagatccattgactaaggttttggtagcgaattttatagataggaagaaaaaaaatgttatacactaaagttggcatctaggttctctgacgtagattaatgatgggctaagttaattggtcaatgttttgtacccaaaacattgtatctaaaaaatgtcctcctcgaggagatttcttggcatctagggtttattcagaagctacaactgtgtgaaactgtttgcagttttggcgtgtataataatcccatgggattcttgctagtttcaacccctgcatgtcatcggtaatgtcagaatatttatttttattaaattatttgtcattttatttattacttttattttccgaatgttacccttatttattaaagtacttgcaagtatatggctgacaaataatagatgaagtgcaaagatattctagtctcaacataatagtttccattgaaaattggcttaagtaatcatattctttagaagcgtgcacatctcaaatgagacacataacatgagacacaaggaatttcaacattaagaaatacaagaatttctgaacttttcttttatgcagactggtttttctgttagtcgaagtctcttgggata

SEQ ID NO: 33606 - DNA, 296 bp, Medicago truncatula
  Intron number 2 from transcript Medtr5g025510.1 (locus Med tr5g025510) derived from phytozome v7.0 (chr-ID MtChr5; po s 10200314 to 10200609)
taatccagctgatcttttgcttgatcttgccagtaataatcaataaccattattttattcttcgttattaactaaagtgacactaatagccattttacgactatctccgaggggatttgaactttgtccctcgagattacaatgtcagactcttactactgaactgacacgtcacggactttcaaaattcttttttactcaaatgaaatattcggtaaattgtcttttgaagaaacaaatgctaacaatgtcatgacaaaaatggaaaattgcaggtattgcaccagactctaagc

SEQ ID NO: 33607 - DNA, 913 bp, Medicago truncatula
  Intron number 1 from transcript Medtr5g098340.1 (locus Med tr5g098340) derived from phytozome v7.0 (chr-ID MtChr5; po s 39205929 to 39206841)
aacaaagctgtgttggtaattgtgtccagccttctaggtttttattgctcattcattattgttctgagttcggactgttgtttttcttgaacttattttaaaattcagttcgttttcaaaactgaatacaagcaatgcatactgagttaaaacagttttcaagagtacaaatgcacattaaacagtatcagttaaaatagtgtctaaaacattttatttagcttgatttgaatatacgatttgcagaacgacctagttttgatttttttttttttataaatgtttgtagttactttcatcggctcagcattaatagtgatgaaacacccgatatcttaaactcagcattaaattgtacaccttatggtgactattttaagcaaaattttgcattttagattcataatgatatatgttgtctataatagtgattggagggtgtaaatttcaatcttttatgtattagatttgcacaatttttaagatataatttccatctttgatatcttaacatatacccttagcattttccaaatatcaaatgggtctcaataataactttgtatcattaatttcaaattttcaacaaataatttatttattaaatcataatcatttagtttttgaattgtaaaattggtcaaattccttttgtttatctttgcttgcctattagaggggaaccccattgtttatccttgtggagtttgttcattgaaaagatttgtaaaaaattatctggttgaaaaagtaaaaagcaatctatggatgatcggtttgcgctcttaaaacttgtcttgtcatccttccaatttattttctttcattcttctagactcccacaaatattattatttttatacagaatctctgtcttgatttttttttgggtgtattagaagaggtggtagaa

SEQ ID NO: 33608 - DNA, 906 bp, Medicago truncatula
  Intron number 4 from transcript Medtr3g132990.1 (locus Med tr3g132990) derived from phytozome v7.0 (chr-ID MtChr3; po s 33578277 to 33579182)
ctgagtgggattttgaggtattttccaaacaaattccttctattgtatcattcttcctaccattttggggatgaaatgatattcaatatatttattctctgtgtgttgggacaattacttcatcatttgccacttaattatttacttaagcctttgttcatggttgcattagtaagtaagaactttgtttgttgatttagcaactagatccggattccctgcagtgggaaaggtacgtttctttcatgcagtaaacgatctcaagtgaggtctaacggtttacattacacaataccaaaatcaattttaaacgatctcgactgttaatttgagattggatgagttgagataaaaaaaattgtgtgaagctgcaccaaatacaaatctgagaaattcttcctctgggtaattgggggttgacaaattctccaaaccagatatgactcttcttgtctgtaacatatttagtgatcagcaatgcaaaataacgatttaagttccttgatgaacaccttacggatacttttcttttcagcacaaaataaaaggtggatcgcactgtgttagttgtattttgactcctataaaataaaaagctgagtatgtaaatgcttgatagtaaaacatttgaggttttattcaaggttaatttatgttattgattcattatagatatcaattgaaagaagaagagtttgtcctgtattttgaagtctcttattttgacatacaacctgcatagtagtttctgtgaatgtctttgatcttcacatgctcttttaatttattcgtttctaattctagattcaaatttaaatatctttttatgcatcactccctattcaagaagaatgttcttattctcttcctgatgttttgacttcgaaggagtggaaaaaagatcac

SEQ ID NO: 33609 - DNA, 706 bp, Medicago truncatula
  Intron number 1 from transcript Medtr1g090470.1 (locus Med tr1g090470) derived from phytozome v7.0 (chr-ID MtChr1; po s 18346662 to 18347367)
gtggtgtaaatctaatgttaactctgacattggatcctccgtgcatctctagactagtttatttaatgcaaaagttggacagaatgcaagtattttgcatcataacaacttattactactattagggtataatatatggttccattttcttctccctaaatctttgctttgttattagttatgttcaaattgagttgttactatccagcaaccaagagaactatgattaatgtaatgaaaaattgatgaatgcagatgctaataattatacaaattccaatttttaatttggatagctcctgtttttggctttcatttatcatatgttcacatttaatttgagtcatgcatatgcatacaatgtttaacatggtccaatccagttaaaaattacatgtttgtttgcaagtgtaggacacgtgtggtgtggcacttgtgtcttccttcgtagtttagcttgatgcctttgatattcttgcatgatcgatcttgcttaatgttttggcataatctgatatacatgttttttttttattttttattttttttttatatatttaaaattgttatattataaatagataataaaatgttcaaagcaataagaacaggtaagtttccgtactcatatggaaggaaaatcagcctctacaatgcaatctttgttgtgaactgtcatgtgttcaaagttggaggctttttcgat

SEQ ID NO: 33610 - DNA, 433 bp, Medicago truncatula
  Intron number 1 from transcript AC225518_30.1 (locus AC225 518_30) derived from phytozome v7.0 (chr-ID AC225518; pos 119172 to 119604)
gtagtaatgcagaaacgaatataacgttctttactgaagatttttcattcgagtggcattaacctcatttaagtgactttatcttggtattaaaatcgtgtaattcgctacatgttatgtttggaaaggtttctaagtttcagttattcactgttgtagaaattccctttttgtggtgtttttggagaagaaaataatgcataatgaggatcattggtggcagatagatagatggaacattttttgtgatttcgttctattctatttataattgatttggctatttgattttttgttgtttatgtttggttttcgattgcattgttataggatattttctatgaagctattttatttataacagatatggctatttgattttttacggcttatgtttcattttccattgtgttgttatagaatattgtcttcg

SEQ ID NO: 33611 - DNA, 549 bp, Medicago truncatula; identical to SEQ ID NO: 30513
  Intron number 1 from transcript Medtr5g041340.1 (locus Med tr5g041340) derived from phytozome v7.0 (chr-ID MtChr5; po s 17685783 to 17686331 reverse strand)

SEQ ID NO: 33612 - DNA, 562 bp, Medicago truncatula; identical to SEQ ID NO: 31633
  Intron number 1 from transcript Medtr6g031180.1 (locus Med tr6g031180) derived from phytozome v7.0 (chr-ID MtChr6; po s 7134675 to 7135236)

SEQ ID NO: 33613 - DNA, 696 bp, Medicago truncatula
  Intron number 1 from transcript Medtr3g110810.1 (locus Med tr3g110810) derived from phytozome v7.0 (chr-ID MtChr3; po s 27982258 to 27982953)
gccaatttagcagggtggcactctcaaaattacaggtaaacaaatgaactatccacctaatttatcatgtcatgacttgttgtgtttcaaatttcgaatataaactgcttcgtatcatgtgtatcatctgttttctatttttttaaattttgtacatggattatatattagataagtttgttcaactcaaaaataacaaacataattctaaatatgggcacttaagttgtgatatttgtttactcattaagttgtgatatttgtgaactcaattggatgtttaggttttgagaggcacaacttatgttgtactcaagttgaagaaaaccatttcaaacattcatatctttgttataccttacacactcttatatcacaatttttaggaatttttactatccctcattgggttacatttgtactttccaacttttaatactatgcacatgggtagtataaaaccatattaggtgatttgctttgtaaattcattgcctagaaaatagaacatcaattacctactctatctttgaattttcatttcctaatatctatttttcctttcttcttgctcaatcatgttgacaataaattttatataattactattatctgcaaaacaagaatgttgaccttctttcccctcccattcatatggtaggattgaatcaaatttcattaaggacattgttgaag

SEQ ID NO: 33614 - DNA, 810 bp, Medicago truncatula
  Intron number 2 from transcript Medtr7g009150.1 (locus Med tr7g009150) derived from phytozome v7.0 (chr-ID MtChr7; po s 1565614 to 1566423 reverse strand)
ggttagtaaattacattctcttgctcaagcctcttaatcttctttccaatgttttaaaaatcagattatatcagttggttcaattgattgaaataagaatcagctagttcgtcggttggtttgttcttgattatatcgtaatctaattgaaccacaattgaattggttgaatcacagttggttcaactagtttttatttttatttaatttttgttacttattaacttatatttttctcctctagtcaatggcgtttgtggttgaacagaccaaactacgactaggtcttgttgatttgatcttcggtacaattttgaaaatactactacttcattagtgtttcttcattgctgtttacactaatgagggaaaattccgtcagtaacattactgacgccagtattactgagggatacaaatctgccactaatgtgtgttactgagggtttatttccctcaataaaaaccaaaattcttgtagtgtttaaagggaagtctcattcattgtcttcgagagaaactgcaaatcttgtttggtccttatgtagattttctaccatcaagtggctcgtgattaatgcaatttgtttgtgatttcgccttatttttagagattggaaaccaagaagaaaataattatgatgaatatttatttttttggagtatcataaaacattgaaagatttatctaacctcaccaatcaagtatggggactatcaagtttggggctatcattcattccttctttcttttcgacccgtttatatcaaagtataattatgctaaactttcaatatataggagttact

SEQ ID NO: 33615 - DNA, 725 bp, Medicago truncatula
  Intron number 2 from transcript Medtr5g032670.1 (locus Med tr5g032670) derived from phytozome v7.0 (chr-ID MtChr5; po s 13260882 to 13261606 reverse strand)
ttggcagaggtattatgaatgacatggtatatttctctatccttattaacacaagacatgaaaaatagtcattgcatcttgttcacttttgaatttgaatgcacaaaaatattttacaatctgcaactcgaatttagattttaatttcaagtgccttaatttgattgatttgatatttcagtgttataatttatacttatatatcttatgtgtgcctacataatgtgcttcttagaaacgctttgacatcactctaatttaggaacgactcttaatcacgctaatttgcattcaatctcgctccaatctcaatcacgatcatttgctctcaatcttgttcttaattcgctcttagaaacatattcttgaaatcgacttgcgttgtatttcgttgatttgcgcctctctctccttatgatttgcactgcaacatctgtttaggtacaagtcatgaatatgctatatgtgcttgtatttcttatttttagtttttgcattttctcttcgctcgatattttgttttctatgcacatttctggttcgcacgctatgcatatgttcaattttgtatatatgattcacatttggacaaattttaacaagcattttgtctttggttgacattttgttttctatgcgcatttcctattcgcacgctatgcgttacctatttttatatttgtatataagactcacatttggacaaattttaccaagcattttgt

SEQ ID NO: 33616 - DNA, 340 bp, Medicago truncatula
  Intron number 2 from transcript Medtr5g016050.1 (locus Med tr5g016050) derived from phytozome v7.0 (chr-ID MtChr5; po s 5539899 to 5540238 reverse strand)
tccaaattggtgaatcttcctttactttacataaggtagtgactctttgctgcatagatataatatatatcaaacttatttgctttgaatcattcaagtgaagagtaatgatttcttaatcttgtaagatgtcacttgtcaatcaattgttaatgtttatttgttacaaaacatgtcatgtttttttctttctgtctcaatatataacttgaatttgaaagcaagatgttacatatgtttttatgactgattaaaagtgcaaaaaaactttatatgacagtgtgtatgaattaaattcgttgcagtatccattagtctccaagtgtggatacattcggaa

SEQ ID NO: 33617 - DNA, 1047 bp, Medicago truncatula
  Intron number 2 from transcript Medtr4g165570.1 (locus Med tr4g165570) derived from phytozome v7.0 (chr-ID MtChr4; po s 41724623 to 41725669 reverse strand)
ttatacaggagatttcgttgcaactgtattgcacggtttgtgatagtttttgtggctagagagtatatatagtttgtgctgtgtaggcttggtaacacagaattttgccattttgcattgttcgagtgcagtttgcgttatcatcctatgcttgaaattgttgttctgcattttgagctccaattggcctcattgaagtctcaagggtgacttaggcaacaagaggtctggttgataacaagatcaaataataaactataccaatggatcaacaatgttgaggaaaagcttgaaatatgaggtttgtgtgattcgcatatttttgaaaatattagcttgaaatatgaaagaaaaatgatataatgctatgaaatacagtccttaagactagtaagttttgagatcattgggctatgcctaatgatgcaagagacttacagaatctgctaatagtttctttagaaagacactcaagcaagcaaacccaatgtgattcacaaattagcattaatctttctgtggatattgccattaaaaaaaatctttcaatggatttttttttttttttaattcttgaagcattaatcttttcaaacaaaaatgtttacaatgaactcacttgggacccttaaatatatatgattaatatatccaaacataggaactgaaaatactaaagtggttttgaatgaacataattgaaattacaaaagctaaaaagctttgattacaggttatgccatgccaggaatctgacccataaacagtaaaaaaagttgatatattatataaattttaaactagaaagtaattcctttctttaagggaaaatgaagagataccattaattagttaacccatcaaattttaaactgattgcttctgtactgttaaagtacaatcatacaaaggattatggggatgaacacaagtttaatgagaggaaaaggtcaacattgaatttgttttactttcataatacacttatttgtcaactagttaatgatttatcatttttattgtgcatcacaggattgtcaacttccc

SEQ ID NO: 33618 - DNA, 700 bp, Medicago truncatula
  Intron number 1 from transcript Medtr2g114160.1 (locus Med tr2g114160) derived from phytozome v7.0 (chr-ID MtChr2; po s 26935042 to 26935741 reverse strand)
tgcatttcatattgctgctaaacaaggagatataggtattttcaacatctttgttgtttatttgtttgttccatgtgatttctaagagtacgtaggcattttagtccttgaaattatgaggattagtcaatttagcctcaaatttatgaaatagcagcctagtcgcattaattgaacaatgtcggtcaatttaatctttttttccttcaaatttaacaccttcgttttaaaggttatattcttgtcatgagtagtgttgtcaatcacagatcgcgaaaaacagtagttggttcaagttctgctacgctagccactatttgacagcaatgtgtactaattagtgtatcatggaacaataacaatatgttcatatactgcaacgctatagcattttagtgttgctaattgcaatggccgctatttgataacattcgtcttgatattgcaagagactactcaagttaatatttaggtatttcattggtttcgatagatgtttattaaacaagtattttgataaatggacgcaattgattgataacctttaagttaagggtttaattgctatttaggaaatttgaaggactaaattgaacagatattacaatttcaatgactaaaatgcctatttactcatttttaaagggaatctcattatctgaaatatttttgctttggtgcagatatattgaagatcctt

SEQ ID NO: 33619 - DNA, 463 bp, Medicago truncatula
  Intron number 1 from transcript Medtr2g132450.1 (locus Med tr2g132450) derived from phytozome v7.0 (chr-ID MtChr2; po s 32025793 to 32026255)
atagaattactgatccaaagagagtcaaaaggtaattatctaacacttctatatctatagataaaaattaaaacatgtaggaataggatgaaatttaaaacaattttttttcttctaaagttcttgcataattcaatttttctaatagtatatttttatctatacatatgcttaattttgctaataaacttgcaatgcccacatgacataattttggagtacttcattattgtagattatttttttaagcatgattttgatattctagttgtaattgttgattagttttcatgcatttctctttataattgaaatattgttgatcttgttttcttgaacttattatattttttttctttgtttgtaagtgaaaataaagcatttttttcctttgagttttgcaactgattctggtttttttgcattagaatcttggcgaataggcaatcagcacaaaggtcac

SEQ ID NO: 33620 - DNA, 433 bp, Medicago truncatula
  Intron number 1 from transcript Medtr3g025230.1 (locus Med tr3g025230) derived from phytozome v7.0 (chr-ID MtChr3; po s 6500522 to 6500954)
tgtgaacctttgtaaaagaacaaacataaaaattggtaagaggaaaattgaagagaccaaaatttgaatgaaatttttagagcacaaaaaattaaagttataactttgtttaatcagaatttctttatcaacatacctaaaacatttatctattttgctgcaaaggtaaaataaatagtatgaggaatataaactatctcactcttgtagaatagatttatgaaaacaatatcaattatcaacttgtttatttgtaaaaaaaagaaaaagttatcaacttgtttaaactaaaacaaagtgttaattatttcttgacaaatataaagtgttaatttaaaagctagttgcttagtaaaaaacctctatgatacatgaattttaattttatgcaatcacagagaaattcgaccctgaatcgtcagcaattcgggta

SEQ ID NO: 33621 - DNA, 928 bp, Medicago truncatula
  Intron number 1 from transcript Medtr7g032300.1 (locus Med tr7g032300) derived from phytozome v7.0 (chr-ID MtChr7; po s 7995625 to 7996552 reverse strand)
gggtagctatctatctttaactttatctctatcaagtgctttttggttttggaatttgaaatgtttaggatttgtttgtgttatgtaaaattttctttttttggtttctggataaacaacttaattaagggcttatatataatatttttttagaacaaaagataaaacagttaaaaaattgtttctatataagctataattttttttcataaactatcatggtgattaaagagcatatggacatgtaataagttgtttctagaagttctcccaagtagtctccacatgctttggttagtatataagctcaaataagtcaatccaaacgacttatttattttatgttctgttattgattgtttatctgtctggtttttgaaaattttgcttcattttggtttttggtttcgggtttttgtttgcttagagtgagaaatgaggattcgttggtgatttggaattttgagaatgggttctctgtttgtaaggtgaagttctttatttggttaaacaacttaattaagtgattatatatacacgctatttttattacaaaagctaaaataaaatcaagttattttcatataagctataaattgttctcgtaagctatcatggaggctgaaaagcttatggtaataagttgaaatcattttatgggcatgtaataagttgtcttgagaagccatacgaaacatattcacaagtgcttatgcttaaagaagaaaacctgaacaaaactagaaaaatcgggttggtttgttcattttaattgttgatggacaatgtctatgtttgttcttaggcttacacgggcctacaattttgttgtctgttcaagtttatgttcatgacacattaagaaccacacaagaggagtaaaaaatgatagtttttcttatgctaagttatataatttgttgcaggt

SEQ ID NO: 33622 - DNA, 777 bp, Medicago truncatula
  Intron number 5 from transcript Medtr4g021860.1 (locus Med tr4g021860) derived from phytozome v7.0 (chr-ID MtChr4; po s 4284559 to 4285335 reverse strand)
tggtatggtgcctctgccattagaaggtttcatgattttttatctgttcagtatcaaatctttgatgtgcaaatgaaatcattcttatctgtattagcttggtctttgattctttggtaggggtcgtttattttttgtccattggtgataaataatgtgcaataatacatgacttgagttctttcatttgttttttggtcagcatgcaaaattctgcaatttgttgagtttagcttctatgtctgttgttacaacccactcttagctcctgatcagtgtataaactaatactcatttaatactaatttatactgtgaaacccaaggatagaatcatactaagaacacttaagtaacaaatcagggagctactgaaaagttgatagatagggttgcccctatatgtctaactccaaaatgacaaacactcaccattaccaatagcacaatataaaccaaaagaaagaaaaatccccatctctacagctgcattatactgaagacaacaaagatcaccaattgaccacaccgcttgatccctatcccaataactgcattaaatagttaatttcatttgtcccttttagtagcaaggtctaaaatggttaaacttgatgtaggctatggttttgacttttggatagctaatcagtttatttgattgaacacgattaattatgtgcactggcatcgcctagttatttaatttgatgtatatatcttctaatactacgactttgcaggaaaaatttgctccatcaaccccaacacttttatt

SEQ ID NO: 33623 - DNA, 679 bp, Medicago truncatula
  Intron number 1 from transcript Medtr1g034920.1 (locus Med tr1g034920) derived from phytozome v7.0 (chr-ID MtChr1; po s 8440032 to 8440710 reverse strand)
cgtggagcgatatagaagattcccgacttaagtaagcatcttcctctctcttattctatccctttttccttttttgtttcttctcaaaatcaaaacgcgcttttcagtaaaaagcgcttcttcttgattatttttttaccaactgaaatcaaccgccactacctaatctcacttcccctataaataaacacatattctcatttcttcattttagtattttactacttctcagtattaatttatttactttccttcaggttcaggttctctctctctctctccacactccaatattttattattaatttatttcccctgtttcattgttgttattgctgttagacttcaattaaagggatattttcgggttaaaattgtgaactaaataattaattactagttttctggaacataattgtttgattagtgcttgtttcatcattattcttattcttatagtttgatttaatgaaaaatttggagtacagcaataatcttttgttttttttctccaacattttgtgatttatgctaaaattaaattattgtgctttcatatctgaacgcattgaatttaaaacatgacatcagagggtctgcatttcagttatttgacatgtttggattcgccgtgaatttgacagaatcacggtgattttgctgaaggtaagctttgaag

SEQ ID NO: 33624 - DNA, 635 bp, Medicago truncatula
  Intron number 1 from transcript AC235677_34.1 (locus AC235 677_34) derived from phytozome v7.0 (chr-ID AC235677; pos 148470 to 149104 reverse strand)
cagaaagatcaactcaagaaggttgtttttttattatgatttttgaatttaagattgacccttttgtgtttagggtttgttactgtgttttggactgatatggagtttgatggtgtggaaaaaatggaaaattggaaactggggtgtgtgaaaaatgatatttttatttgtttgtttaaaattgggttaaggatgtaattgtcaaaagcagttgtgtttgattatagggaattttgttgtaaaaattgttgctttattttgctttaaagtggctgctggatttgaagtttaggattttatgttttctattttatgtgattttagtttagatagaggttctagttttgaattttgattgagcagtagttatcactgtttaattgtggttttgtaaggatggatattattcagtggccatagcattgatacttctgatcgaaagtgtgtccggtggttattattgtggttttgctgtgatgttttgtgaaatcataatgcttcaactaggttaatcatcttgtatgtagttatgtctggttcctacatttttctctaccagttgatttgagttattttctagctttggtgaagagttttatagatcataatattttggaaatttattgacgtgcagg

SEQ ID NO: 33625 - DNA, 757 bp, Medicago truncatula
  Intron number 1 from transcript Medtr3g105050.1 (locus Med tr3g105050) derived from phytozome v7.0 (chr-ID MtChr3; po s 26198727 to 26199483)
atttgtattgttacaaagacattattggtaatttggtatgattgatatgtgggatcttgatcttccatagctttttgggagaattataatttaggaaattttgcaaacttatcttcgatataagaattaaccgaaataatggttcatggttggttaactaccaactccattaaccatgtatcccgattttggttgataaccttttcaattaaagagatgtttgctacttccgaagttaggaatctgccaagagtagttaatttagtaagagatagaatgtgttcttggcaaataggaaaattaagtagacttgtgtgcgattgactacttttgtgatatatgtatggtatttgatgcttgttgtatattgcatgtgcttattaaaaagtgaaatctagggtagtgatattttctttggataaagttagtactatttatctcggacccggattccccgttacgtggtgtttggcgtctcgaccgttaatcaaaattggacggttcaaattgcacacaaacaaaatcaattgcaaactatttcggctgccaattccaaagcaaataactaagctgaataactgtgacactgtctaatccaaatttgtatcttttgagttgtacttatggagcaatgtatgtttaatcttggggttatctctatttttcatagtagaaaccaaataataatgtgaatgcattcgtattagttattattttcgaaaataaaaggttccacttgcagaaggacccgaagaga

SEQ ID NO: 33626 - DNA, 411 bp, Medicago truncatula
  Intron number 1 from transcript Medtr2g046860.1 (locus Med tr2g046860) derived from phytozome v7.0 (chr-ID MtChr2; po s 13185558 to 13185968)
ctggtgcaggtggtgctggctctaagattgaggaagtggactaaatgtagttactttcttctgatatgtagtttatattttcttgctataattttgttttgatgtattaatctcactggacttaacatccaggttttggctggattgcgatttttttggtatttgattatcttcgtactattaagtattaagtgttatcttttgttttaagtatttaaaaaaaaataaaaaatataagtattaatcaaaatacaaaatattatgttaataataaccaaaaaaaaaaaaaataataccaagacatgcccgcacattatatagattgtatcaattttatgtaatactaagtttgttaattaatcataagtcattgatatttattgtaatatgcacttgttttttatattttag

SEQ ID NO: 33627 - DNA, 927 bp, Medicago truncatula
  Intron number 1 from transcript Medtr4g158210.1 (locus Med tr4g158210) derived from phytozome v7.0 (chr-ID MtChr4; po s 39627471 to 39628397 reverse strand)
agagaagagaggaagaaggaagaggaaagactgtggtatttttacagaattgcccttatttttaagtttgaaatgtccaatttacccatgatgtctgtattgtgtccaaaattatgtgttcagttatcattgctgtacaaaaatattatgcaaggcatctataaaaatggtattaagtaaaaattagatagtcatatctaatcttcagtttgtcactcccattaagaagcattttcttaactaacatggtattaaggtattatgatgcaaattattgaagaatattagtttttcttaaaaacaaaagggttaaggatggtatggtgtgaatagtagtaatttattttatatagtacagcgcgttaaatgacgattaagtaatttaggttccctaaaaaaaatgtaatttaggtgattactgcaactaacaaaaaaaaagtaatttaagtaatataaagactagaacacatagcgcaggcacgctcacgcgtgtgcactttctatttataccaatgcttaatcatcaaaacaatcaagattcaagaaaccttcgaaatacattttagcctacattttatgtgaatagtttttacaatctagcctatcaatttttttattagaaaggctcgttataactatgaaatcgctaagaacgtggctctgtaggctttgtatatatgtggttttcttcagtattaagaaaaataattgacagtcagagcattttaagcagtaataattttggtcaagaaaagatttctgttgatgtactctttattttatgaggcactacttgtcctttttcataatctaaccatttaaaccgggtgcctctttgaattgtgctttttgtggtggtgatgtgacgacgaaattagtattaagaaattatgtgattttgttttttaggacaagctttccatttga

SEQ ID NO: 33628 - DNA, 971 bp, Medicago truncatula
  Intron number 1 from transcript Medtr1g118070.1 (locus Med tr1g118070) derived from phytozome v7.0 (chr-ID MtChr1; po s 25581697 to 25582667 reverse strand)
actaatcaaaatttgaagaaccttacatcaaagtgcgtattctctttctctttttaattttttttttcgttttgttgcatcaaatttagcagaattagggttttttttggttaaggatcaaattgatggataatatattcttcatgaatggactcaattaatgtttaattctagttttgattatggttattgagattcaaattgatggatgatcaaactgatgttttatgttgattgtggagcttggagtaaattcgtgggatgtgtaattcatgaaagctgaatgttttgcagaataaaaaaaaaaattagaatatcgaatacgtagaattagaatattacagtatttcatcataggaaaaatggatttaaaactgatacagaagtagggggaaattttataagttttacgacatgacacagttagtcattttagctatcacaacccataaaaactctttccttcactgccccgatacatggttttaaaagatagattatggggtgagtggcgctaggagagtattgaagaatttgacggtagtaatacacacgctcatggcatcaacgtgtcattctaatagattttaaatgcctgggttgtagtggggagtagggaatgcaaattatggattttgtttcagctccgcattgttttagaacttctttatggatgatattaaaatgcaatggatttttcttttcttttttttttcaaaaaaactttaaaattctgtacatgtttgatacatctaatatgagtacttatgcatatctcggctaaagtgtttattttctattgtcggcccctgatctttgtctctacgtggccaccacaagaaaagaaaaaaatgtaacttgtatgtatttgatgatgcggtatttgttgctttatgttccaataaacttaacttgcattggttgtattttctacagtcgtcccttgcagcggctagagcagataactttta

SEQ ID NO: 33629 - DNA, 966 bp, Medicago truncatula
  Intron number 2 from transcript Medtr4g140530.1 (locus Med tr4g140530) derived from phytozome v7.0 (chr-ID MtChr4; po s 34499383 to 34500348)
ccgacctcactaattttgggggtttttttcttcttcttcttcttcttttctttgtattgggtctttggtgtttctgttttcttaatatcggtgccttttgtagtttttttttttcatctacgagttcttgagtgtcttacataaactcgacgtgaataaattttaccatttaaaaaaacgattgcgccaactattggaaatatacgggagcttccttcaacaaagtttacataatcaagagcatcactgcaactcaaattgtaaaccttgttgaaggaagctccgatctatcccgtgcttccgagtgacatccccgctaccatacctataattaatcaacgatataaaagaaaatataatatttatataacatggcttgttaatttttatatatataatatgatcatgcttaatttttgtgtaataatgaaactaactgcaaaacatatgtatgtataaatgttcatataatatgatgatatgatatgatcatcttattttttacggtaaggaaaacggtaaaatttacatacattaaatgttgagaggtgggaaaatacgagttcccacacttcaatatattaaatctccttacaacattttaccatccgatttatatttactaggataatataattgtgattttgacgttcagttctaattttaaaattggcaatttatttactctaggtgtttgataaaatatttcaatgattttttgtttgtttttgcaccattaatgatgaaattagttagaaattggattgttaatgttgatcattatagtgagtttcaatgcaatgtggtaggttagagattgaaataacactgctgaaattgaactattgttgttgaccagttagaagtgacgctatgtccctttaaaaatcattgattttttgcttttaaaaatattgtgtagatatgtctgagagatcggacagattgagagcaaggagggagagc

SEQ ID NO: 33630 - DNA, 908 bp, Medicago truncatula
  Intron number 1 from transcript Medtr4g106840.1 (locus Med tr4g106840) derived from phytozome v7.0 (chr-ID MtChr4; po s 23155849 to 23156756 reverse strand)
aacaacctttggagctttaagtcttgcatctcctggtaaactagagcttctggtgatcttcagcttctgatgagatgcttctgatgacgtcatcacttcaggagcactttgacttcaggaacacttctcttcagatacttcaagcttcctttttgttgattcctttgctctcttttgttcttctagaacctaataatgattccaaattttgtctatggtcttgtacacttgaacaaatattagcatatccaattgataatttttaatacctttgttattatcaaaactctcaaagcgtaatgttaaacatattttgttccaataaagtcacctaaatcttttaggtttctgaaatattactaatttttttttataatttttaaaagtttttgtcatgttattattattgcatgatatttttttttactttttgaataaatggtaataaaatgagttagcatattttctaatgatatccctaaaaaaaaatcgaatgataaaatggagctaagcccccctaaaaaaattggttccattcatatcatcaaccgagcttgaatccaattcactaacggttatattttgcatagatggatttgatggaatgtcaatatgatcaattaatctatctataatataatccacaagttagatccattaatggtctcatatgctcccataatacccaccttctgttagtggtgatagtgtcctcgttatgagttgtgtttcttaatgtctggctcttccatctcttatgccaataatccattagtttttataaactttataaatatatcaactttagtttttggtgtctgcaaaaattgtgttcaagcttttgcacctacatattttccatcagtaatttagtcctagcttcttttttgaaaaggcaaaacttatta

SEQ ID NO: 33631 - DNA, 270 bp, Medicago truncatula
  Intron number 1 from transcript Medtr3g005450.1 (locus Med tr3g005450) derived from phytozome v7.0 (chr-ID MtChr3; po s 295088 to 295357 reverse strand)
tcctcagcggtggaaggtgggtgaatttctcccaaacgcatcaattgaaagcgattgaagatcatgttacggtgtggatgtttcgccattcacaaaccaatcagttgtgttttgctcttagtgtgagaaaagtgcaaacttaaaaggtatgaaaattttatgaattaatgtagtatctattttaattttttttataagcttgtgctctatgttttcaattttgatttatatgcaggatcacttataagccattattaatcaaggaattaa

SEQ ID NO: 33632 - DNA, 706 bp, Medicago truncatula
  Intron number 1 from transcript Medtr3g080800.1 (locus Med tr3g080800) derived from phytozome v7.0 (chr-ID MtChr3; po s 19158891 to 19159596)
tggactgtgcacgagtttggttggcaagggacatttttcatttgctttcatacatgatacgatacatgtgttatgtgttacaaacacaaacggaatctttgcatgaaataatgacaaagattcacctccacgtggctagatacattcaccaaacacgtctaaccacatggtatctttggttgacaattgacgagttttaatggaataaaatcataaatgtagtcttttaagttattactcttttcaatttagtttttaaattatataaaataaaataaactaccgttaaacatgacatattggtattcgtttatttgttctttttattacattaacatacgtaacttatgaaattttgattaaaattattttgattttgattgaaattataagtatagatatttataataaatcatgtttaaaatttttaataaataattttaagtgtacttttcaatttaattaatctcttgagtatatataaaaaacctgtcaaattagtctataagattttgatcgcatgactaaattgataaactttatacattttagagattctttattatatatttatataatttagggattgaattgaagaattttatgtcaacttaggttagtctaattgataaggactcaactcatattttataatgctgcgagtttaactcttgcagttagtgtcaggaagtaagtgtctttataa

SEQ ID NO: 33633 - DNA, 663 bp, Medicago truncatula
  Intron number 2 from transcript Medtr3g143440.1 (locus Med tr3g143440) derived from phytozome v7.0 (chr-ID MtChr3; po s 36993452 to 36994114)
gtcaaagcacttgaccaaggagagcaggctgacaggtacatacatacatttatttatattagtaatacttcggtgcgacactaacacgctgacacggccaatagttttagaaaatgacaaaattaaatatgtgtcagtgttatgccggtgtttgacacatgtcagacacaccttcgatcagaattgtcgtgcaatagagtccactggtgtatgtttgaattagccgcgagctttgttgaagctctgccaaactcaacgccaattaatgggttgaaagttgattttgcaaaattgatttgtgttaaaagtgaattttaggtaaaatgatttatctttgaatacattcacctgaaaatgagttgaacaataattttgagtgtaaaatttacgttcgaaggcaaaaactataaatcctagcttcaagttaaaatcaattcttgaggctaaattattcattcgagaattctcaatactaaaatcaaatttaagtcttcagaatcacttgtagttctcacaaaattgaaaccaaacattgatttatgttgtgtgagtcattgtaaaaatggatgggaataattgcttctactatattatgatttactggtttgtttttgatattcttttccagagcacagcttggtaaagcttaccagaccgccggtg

SEQ ID NO: 33634 - DNA, 598 bp, Medicago truncatula
  Intron number 3 from transcript Medtr3g113520.1 (locus Med tr3g113520) derived from phytozome v7.0 (chr-ID MtChr3; po s 28526212 to 28526809 reverse strand)
ttattggtgggtaagtaagagtttagtctcttcatttggtaaggagattttataaatataactttcatttgcaatatttaagattataactcaaaaaatatacattgatttgattttcactttgtgaaaacctctaacaggtggtgaaaagtgatcatgctatattttatagaaattatatagacttaactacaagggatttgtttctgtcttttagttggttaacaatgtttttgtcccgcattttgttctcttagatgttacactttttagttgttaacatttaatgtcttctttatcttaatttatacctgtaagttcttattaattgatggaaatgtgacaacataatatatttagtgtataaaacgtaggacatgcttcgacagagggtatgaatatgaaccagacatttagctgcatgtgtgaatgttaactataacataatcttttattgttttatattcagataatatttttgagatttatttctcttcataatcctctttaggtaaaaattattgtcttcactcttttctaaactgctttgctgatttgttgttttgtagtcataataatattttttattagaggtttt

SEQ ID NO: 33635 - DNA, 280 bp, Medicago truncatula
  Intron number 1 from transcript Medtr3g113520.1 (locus Med tr3g113520) derived from phytozome v7.0 (chr-ID MtChr3; po s 28527080 to 28527359 reverse strand)
caacaggtcctttggttaataatccagattcatataattgagtgtttgctgctccatctttttgctttatttttttaatcaaacatttgattcttcagtttttgcttttcaatgtaatgaagtatcggtcttgctaaattctcttcataattttaatctaagcatccagattttattctcttttcaatttggactttctttttttacggcatctgtctcttattttcttaatcatgattttacaatttttcagattctccattgttgcagttttactacg

SEQ ID NO: 33636 - DNA, 647 bp, Medicago truncatula
  Intron number 1 from transcript Medtr5g035070.1 (locus Med tr5g035070) derived from phytozome v7.0 (chr-ID MtChr5; po s 14453876 to 14454522)
aaggtggtgaagaatcattcaacgtctgttgatgaatttgataatgaagatgttggtgtttcatgcaaatattgcgacggaaattatgaattgagtttattttgtaagatgtttcacgtctaagtatggaaagtacatgaactaggtcagattgagaataggaaaagacatcgtagaaactcaaatatattagttcaagtgtagatattattctattttgaagttgttttatatttctcttgttttagattcgatattaacaatgtacaaactcaaattaaagttcagttattattccttgttcaactggttttcattcaagtttcgttattatttccttaaaaaaaaagttcagttattattctttgttcaagtgatttattcttcctctgtatatcaattcttcacgttttatcctaaattgtagaaacacaaaatacgtcaatgtaacaaaatttttgttccaagaaaagctcaaccaaaattagattatgttgatatattttacgtcaatgtaacaaatttttgttccaagaaaagctcaacgaaaattaggttatgctgatatatttttgctaacttttaggattaaatatgtgttgtgcaatttttttaggtatagcttccaacggatttctggtaattag

SEQ ID NO: 33637 - DNA, 637 bp, Medicago truncatula
  Intron number 1 from transcript Medtr2g121500.1 (locus Med tr2g121500) derived from phytozome v7.0 (chr-ID MtChr2; po s 28848618 to 28849254 reverse strand)
aacgaagaagatcctcctgaacccccaaccaaaaggtaaacatttctactcctccatttttttcttcgtttttatactttttattttctacaatgatcattctgcatgctttgtaaatattcagttgaaagctactcaaactaaataattggaattttcataatttctagttattgttcatttatgtgccctaactagtatcttctatataataatttctcaaatttgcttttataatctgcagcacaaacacttctgattgaaagcgtttccggtgtttgactgacacatgtgattacatttagttatgtcattttttcaaatgactacctgtgttgacgtttcagtgtcaatgtcgtgatcagtgtttttaaataaagttgttttcataagttatcgtggagagcttattgaaataagctgaaaacaatttatggacatgtcataagttgttttcataagctctcacaagtagctgcacaagtgtttatgtgatcaatagataaactcaaataagtcaatacaaacaaagtaacaaaccatctgtacttttgcttttcttgttcataggtagagtttttcaattgcatatgcttgtttaaagtagctaacttcttcccgcattgtacagacacaa

SEQ ID NO: 33638 - DNA, 536 bp, Medicago truncatula
  Intron number 2 from transcript Medtr5g088300.1 (locus Med tr5g088300) derived from phytozome v7.0 (chr-ID MtChr5; po s 34208990 to 34209525)
aactccaagctcacgctgaaaaagtttttggagtgagtgtaatacacaacaattaattttcttttctttttttattcttcattcaatgttattgattctctttaaactactaactaagaaatctattaattttcttttctttttattattcttcacgagtttcaaaccctaattagggatttcatcccatattaaatgcacaattttcagttttcctaaaagaaaattcacgctagctatgaaacattggtgtcaaaactaccacctcaatgtaaatttgggatttttttttgtttttggatacaactacattaaaagggcaaataacatgagtacatgtctcccaaagaacgtgagggggaaaatcacacaatcacgatacttgaaaatcaaaagtacttaagccaaagaatattatcaaatttcatcgttatatttttgtaatagttcttaacatgaatggagacggatcttaatatatttatactttttgaattataggtgcgtgacgcggcagttcaacttcgagcaacagg

SEQ ID NO: 33639 - DNA, 932 bp, Medicago truncatula
  Intron number 3 from transcript Medtr2g105340.1 (locus Med tr2g105340) derived from phytozome v7.0 (chr-ID MtChr2; po s 25061234 to 25062165)
acattgttgaattcaaggaggcttgggttgagaaggtgagatacaccactagatccttgactttatgtgtgtatctttgttttcatattggattgtgaaaggtggttgactttttgcttttacattagatatgtaaagatggattttagggtctatatttagtaatttgaaatgagactaagagacaaatatttgttttccgttttaaaagctgtttataattggggaaagttatattactgtatttgcttgtctcatattaattttcttcttaaattaacaatgaattattaactatttttacctaatatctcattttacctaaaaccaacaactattaataataagcataattttggtaaataaaggttattttatcataaaaatgagtaaaactcgatgcttttcttagagagtgtatattacctttaaaacacaatatgaaacggaggaatataaaacatacaacattttgtttccaaacttcagtttgatcgatacaactgtttggtagcaagtcaaaattgattgttaaaattatgttaaattttagttaacattcaagtgtttcattgcaagtcaaaattgttttccatccaaagttcagtttgattaagagtaataaaagaagttattgcattgaactaagaaattcgtctaagttttagctttcatagtaaaaatattgaaacacaattttttttttccgtcaaaaaaaaaaacctcaattttaatcgaatcaatttaattcaaaaccatcaaaatcatgcgtatcattagcttgttctagcacactttcacaatttgttatgttatttttgtgttgtgctctctctgttgtaatctagaaatagtttgtatggtaagtttgtgattgtttgattccttttcatctaagtttttgattgttttacttttattgtagggttgct

SEQ ID NO: 33640 - DNA, 463 bp, Medicago truncatula
  Intron number 2 from transcript Medtr6g069820.1 (locus Med tr6g069820) derived from phytozome v7.0 (chr-ID MtChr6; po s 13019599 to 13020061 reverse strand)
tggtgtggcaaggcagaggcaagctatcacaggtatgtggtgatatatggatatgtcatttgtttctgttggatttgatgaaagaacagttttgaacagtgtgaatttgtaattaagaaggtttagttgtactctgtaaccatgctatacattccttgacattgtaatgttatatgagaattcaaaagatgatatgcaatcttctgctttatatgaacttatctttttccttaagcatcaaaagtatagttttgtttttctgttttatgagtatatatgtaagcgattggacaaactccatggtatgtggtgccaatctttcaataagtttggaatgtatctttggtttctcgtcggattattttttcttttatagggaaatgatagtatataactagttgttatattagtattttctcttttatcagtgtccgagtctcttctatttggaaatttggaggca

SEQ ID NO: 33641 - DNA, 309 bp, Medicago truncatula
  Intron number 2 from transcript Medtr4g114280.1 (locus Med tr4g114280) derived from phytozome v7.0 (chr-ID MtChr4; po s 26089969 to 26090277)
ttaacacaccaatacatctggtcagtactcaaactccaactttttttaagttgcagaagaatttttttcaaaagagaaaataaataaataaataatgtagcttaactaatggtttaaatcatggtactgttgtgctcacattgcgatctttgatatcaatgagaatcacaaacaaatacggctgatgcattgtagtcgcggagacataaaaagtcttgatgttgtagcctaatattaaattgttggcggtattgaattttgtttttctcttcagatagtttgcgacaaagacactttcactgtggacga

SEQ ID NO: 33642 - DNA, 764 bp, Medicago truncatula
  Intron number 1 from transcript Medtr3g102240.1 (locus Med tr3g102240) derived from phytozome v7.0 (chr-ID MtChr3; po s 24879962 to 24880725)
agatttttgctatattctacacatttgtgcacaatgtcattgaaaaatacaaaggctacacatgatttgatatatagtaaaagtggaagaaatttttagagagacaaaaataaaaaattgatatatttataaagactaaaaacatatttaactctaaattttataccagttaattggcgtatagcatgccatatactacaatgaaaatattcatatgttcattgatttattatattcatacattgataaattgttttttttttttttaagaaaaagattgataagttgttaaaaggtccaacggatacctttcattctgtgtagccttgtgagttgtgactttctaaggtgccaaaacggaagagagttgtatgatttaaaaaaaaaatggataattatacacagtaattaaaacctaattaaaagttattttttaaatgactaatgtcaatgattaattattatgttagtgttttttttctattacaaaagtcaaaccgggaattttacaatcccccaccccaaaaatattcttttctattttcttttgattcatttttaacgctaatcttattttctttttttaagacttctttttcttcaaaatttaatccatacttgcatgtttgattgaatttaagcttgtctactgaaataagttttgtgagactgtttgaggagaatttgtgaaaaacgacttatgatatgtttataagtttgagacatttgattcaacatcagatcattacgggtaatcaacaaga

SEQ ID NO: 33643 - DNA, 862 bp, Medicago truncatula
  Intron number 2 from transcript Medtr3g128170.1 (locus Med tr3g128170) derived from phytozome v7.0 (chr-ID MtChr3; po s 32760923 to 32761784)
ctagaaaataggtatgtattactactatattttagttatattaatccattgataaaatagtgtttgtttctttgcataatgggattgttcacaataaaccttatatgttcatcattttttatttttaatcttttacatttagatagaaatctttatatttttataatgatttataggaacaacaaaattcgaaactatgaccccatcaatgatgaattacttgatgatcatcatgataattgggtgttggaggattcaccgccatttttaacagttgaggagttggaatcattacgcaatgatcttgccaatatgaccatccaacctatttcaaatgatattggtatgtatgttttttcttataaggttaaaatttcattatttcactatatggttatataccaattgctaatatttatttaaattgatgttttcatagatggattgaatttggatgaggatgatgattatggcaatgatgcacctgacactaatgcagaaaacatggatcaaagtaatgtttttgatgaagctgctggagaagatgttgaattccttgatgaacttcaaattcaatcaatattgactccttggaattaaacgttattgatgataatacttgtgttggaattatactttcttgggatctttttggatttttataacaggggcaatctcttatttgaatttatgttggaatcatacttttttgggatctatttggatttttactaccaagatgtattttgagttatgactatgttttgaatttgagcaattagcctatgaaattattattgttggatagtttttatcttattttacaggggtcattattttagtttctaaagtgaccgagtca

SEQ ID NO: 33644 - DNA, 721 bp, Medicago truncatula; identical to SEQ ID NO: 29484
  Intron number 1 from transcript Medtr1g019380.1 (locus Med tr1g019380) derived from phytozome v7.0 (chr-ID MtChr1; po s 3883300 to 3884020)

SEQ ID NO: 33645 - DNA, 524 bp, Medicago truncatula
  Intron number 2 from transcript Medtr2g125780.1 (locus Med tr2g125780) derived from phytozome v7.0 (chr-ID MtChr2; po s 30371383 to 30371906)
agtcacgcgcattctcatatcggctccggtttgttctttttgctccattttattattttctcttatccttctttgcaacttgcatgaattttagtctgtagattgctataagtgcttgtttggagtcacaacgagtttgacgaaatcatgttgacaccatgattttgttgaagctctaaagcgtgcgtagcttatgcaaaaattacagtcacacactatgattctgtcaaactcgtcatgaatccaaatatgcaccaagtaaatacatgatctttttttgtttctttatttgttgtttaaagagttcaaactcacatgtaaataatgttttcctctagctcgttgcatcgctgaacttcaatgcaaatttgctaggtccatttgaaggattgttatcaatatttttacctcatgttttgacatctatcagctatgttcaaacttagcatgttattgagtagtagccttctttcttgtttacaataacaggtagtagaactactcgacgaacttttgaattcggg

SEQ ID NO: 33646 - DNA, 938 bp, Medicago truncatula
  Intron number 1 from transcript Medtr4g115970.1 (locus Med tr4g115970) derived from phytozome v7.0 (chr-ID MtChr4; po s 27001875 to 27002812)
ttcactgctccacctcaggtaaatacttaactcatttgcttttctttgtttcattttttggttccatggagtcaagtcaacgataatccaccacaatacatgacgaccccttaagccttctatctcattctctaaatataggactaattttaaaactcagtaacttttctgtcaagaaagaaaatataatccagaatttttttaagaaatttgttagtagtattatcaagtttattttgttttttaagctaataatttaggagtatattgctggttttttaagttcatttttcaagacatatattagtaatttatatttttttattataatattaatttctcctttaaaaaaggtaattaagagttatttaattaataaaaaattgcgtaaaaatatgaataattcttgtgtggacacacttttctggacatcttatttggacgcacacggtaaaaagaaatatagtaggaaaaaaaataattaaataatatatgttttcaaataattaaatgatatgtattttttgtgtgtgtctaaatgtatgtattcacataatataatcattcaaacttcttacaacacttgttgcaaaatacaaaataaagtacttttttttagtactaaagaaattaagtagttaatctcaagtttcattttggagtctaaatgatcaaatgctttctggttactagtatatactttattagctgagttaggagttatcattatttggtgaaagttgtgaattgtgaatgcacgtttggtttgaattggaaaaacgaacaaggatgagtgaaaacacaaaatcaaaagatacctttgaagttttgattcaattatttggctggttaacataatcactctgaatttgaatcaaagtgtttttttttttcttccttattctcctaacagcaaacgctagcacaagcctactcaa

SEQ ID NO: 33647 - DNA, 789 bp, Medicago truncatula
  Intron number 2 from transcript Medtr5g022650.1 (locus Med tr5g022650) derived from phytozome v7.0 (chr-ID MtChr5; po s 8857169 to 8857957 reverse strand)
aacaagagacgggaaaacaccggtggagtttttcggtcagtttgatttaagggtttctgttctcttcttcccttttcccctttcttctccaacaataccttctttatatttagttgcggtttgtcttcttagtttttaatgcttctgctatgactagaggaactattgggtttgtgcatggctttgctatatttgtagttgttcccacattattttgaggtatagaagcatgcattatgctttatatatgcaatctctgatgcattttgctttcatcaaatagaccttttggaagtaaaatttagctttagaggtattgttaatattggtgcccctaactattgacatgtttatgttcggagttgttatttattttcttttgggaatgaaatggtttatcaccaaggcaaggactggatccttattttccaaatagtagcttatctttcctcacaatttttctaaactttagaccattgtcacctttactttaatttcatcctactattttttcagattcaaacagttttttttaatatgtttcagatatttttggcaaggatcatggaaaataaagcatgccttctgagttaaagagagattgttggagattcgtataacaagtgtcaaattgcagaagttgtagtgagattcttctaccattaaaaagataacacaaatgaaagttgatgtcatttttacatggttttatctttctggttgtacacttttactagattcctaagcttagagtatatatctttatgatggatgcaataggaatcctac

SEQ ID NO: 33648 - DNA, 680 bp, Medicago truncatula
  Intron number 1 from transcript Medtr5g022650.1 (locus Med tr5g022650) derived from phytozome v7.0 (chr-ID MtChr5; po s 8857970 to 8858649 reverse strand)
ctttttgaatcctgatcagacaaattctcgaggtgctcatcgatgagaaggtaaattgataattaagttattgcagtttccttgctcatgttttggttcaaatctatttttgtttgtttgaaatctgtttttgaatttatggtctttttgttttgattttggtgaattcgtagggtgcacacgatgtgtttgataaaatgctgctatgaattctcatcaacattagcatcaccaccaggtttgatgttgctctttttttgattcatgaatatttcaataaatttgattatttgtttttgccatagacccaacccatatcctgcatacaaagattgataaatttttaaatgatatatccaagttcaataccctattctgttttaaatgatccacctctcatatttgtccttcttcaagtataaatcacatgcttatctatattgtttttattcatcttactcagccatccattcagtgttgaaatctcaattattttattagtttagtctatatagactgagttattttttattgttactagcatgcctttttaaaaaaaattgtttgttgctgtctaattcaattgcattgttttctttgttgaagacggaaaactcatttgacgaaggacgcgaaaaaagagagtcgacaagagcaagaggacgctagaaaagagtaca

SEQ ID NO: 33649 - DNA, 937 bp, Medicago truncatula
  Intron number 1 from transcript Medtr4g144470.1 (locus Med tr4g144470) derived from phytozome v7.0 (chr-ID MtChr4; po s 36386019 to 36386955)
ccttgtcatctccatcttcatatcactttttcaaggtacaatctttaatctattcactctttttttaagtttaattatgtctttatataagtctcatcattaagttttgctttggattttgtttttttgcaggtcgttcatgacatacttgctgttcatacttaggttgctgctgtagtaataagaagtaatacatgattatattgtcaatttttataattatatttatatggtggaagatgattacaataataggacaaattatttagttgtgtaatatcaacttcttttttgcatgttgtggatcaattacctttcactttccttatgtattaataataatttgtagcacagttgagagttccacattggatgaggtttggtctctgaaaaagtgtttataagacattagtcacctcacaaactagttttgtagagttcagtgaggttcagctcaaattttaaggtggtatcagagtccatccgatatttttcgggtcatttgctatcatgtcatgctctgaatgtgcagtcctgagcatgagagttgagttagatcaaatcgaaattctaaacaagtgagagtatattagcagtctccggcaggcatttttgatacatgtaggatgtagctgatttcacctagtgggaaaaagctttggttgttgtagacgtagtagtatatgttagccagttgtaactttgagagtgtattaacaaatgaaacgttgttgcttgctaatatactgcttctacatccaaacctttattttcctgtagctgcctctattctgtttctagttagcaaaagttgattagcagcctaattgaatttgtgtggatacttaactctctgttcaacatttgctttctcatctgaaatatatttcaacttttatattctatttgattcttaaatgtttatgtagaaataaag

SEQ ID NO: 33650 - DNA, 271 bp, Medicago truncatula; identical to SEQ ID NO: 33518
  Intron number 1 from transcript Medtr3g138600.1 (locus Med tr3g138600) derived from phytozome v7.0 (chr-ID MtChr3; po s 35453054 to 35453324)

SEQ ID NO: 33651 - DNA, 954 bp, Medicago truncatula
  Intron number 1 from transcript Medtr5g079110.1 (locus Med tr5g079110) derived from phytozome v7.0 (chr-ID MtChr5; po s 29359080 to 29360033)
aacaagggaatcgaactttcttcttctaacaagtaattatgttcaatttttaacttccttcttgttttatatttctggtttttactgtttactctctattaaaattttcaattttcatttttaatgtggagattgaaatgacatttaggctctgtttgttaaaaagtatagatagttgatagtggatgaacttataagtgaattgaatttgtagtaattgattaagatagttcaaacaagctgttgaactagctgttaaatttattatttttttattaacgttagaaaagatgctgctagagagatagttgaggtatataatagaaaagatggtggaaaataggcttaggtggtttaagcctatagagagaagacctgtagattcggtggtaaggacagtagattggatgaaggatagtcagatcacaagaggtagaggaagacctagaaaaactgagaaactattaggaatgatttaatgattaatgagttggattgaaatatgatttatgtagaacattttggtgtaagttggtccatgtagccgaccccactcagttggatagtaataattggttgttgttgtattaacgttacttgaagtagcctagaaaaacacattataagctcacaagaaaccgctgttaacaaagaggtctattttggtcctatgagcttttaagctataagctcaaacgttcatcttgccaaacagaaccttagttgtaaaacagttttacactgacttccaacacgaatccattattttgttatgtcaccccacttttcatatggttggatgctgattgtgtgacgtggaaaaatggtggcttctcattggatgtcagtgtaaaattgttttaccctggcagaatacaaccgttaaactcttttagagtttcatttttgaaaacatgtataatgtcttctctaatgtgttatgttgcaggattc

SEQ ID NO: 33652 - DNA, 891 bp, Medicago truncatula
  Intron number 1 from transcript Medtr1g118000.1 (locus Med tr1g118000) derived from phytozome v7.0 (chr-ID MtChr1; po s 25519829 to 25520719 reverse strand)
gctgcgtctgggtatgtttctctctctctctctctctctctcgtgaatctttttcttcatttcaaatgggttttgcttcttttatgaaaaaatagtttcttttttgaatttctgttttttcttttcaatgttatgatcattcttgctatgttcattgttattttcttttaatagtggatataattatttatttaacatccaacaatggcaatcatcctttttaattttaaatttaattttgggttgtttttgctttgcattcaatagacacggctttcggttgatgttgatcaaggttttatacgacgatcacattagggttataattataccgagcaaattgcagtcaattaggtatgatgtggctgcaattgcgatccatgatgcgacattaaaatctagatgtcttgacctaggtcgtgattgcgatgtagttatcctgatcgtgtttacaatcttctttttttttgtaactctagcagaaatatcaaaaacctaaatgtcgcggacacaatcgcttcacaacttggtgttgataatctcatgtctagtttttgcaagttaaacataaaaacaatttttgacaaaaaactcgctatggtaattccttctgattatgagatttctaaaagtcaatccaaacatgttttacttctacatgtcaattgtgtcttattcgtgtcgtccttggttcctttgttccaattgtaaacactaagataagattgttttccccctttgattaattttaccaattgtggctttttatttgagttgaattgtgctatccttgtaatagtggaactcttactgtcatcctgaacatagttaatttgtctgtcaacgtttatatatatagttatgcatcttttcttgtatatgtagaccatc

SEQ ID NO: 33653 - DNA, 399 bp, Medicago truncatula
  Intron number 1 from transcript Medtr5g020240.1 (locus Med tr5g020240) derived from phytozome v7.0 (chr-ID MtChr5; po s 7626310 to 7626708)
ggctctgcttgctcgtctacgctccgacccagcaagtaagaattgaaaatctttccttctcccttacggtcgagaactacgtaccttgcctgcattaagatttaaaacttgtcgtcaaaaaggcaatcaatcagaatcaagaaaaggaaagaccttgtgtattgaggaatgatatgactaggtctgcaactagtttttgggggctttgatgaacgtttgattgagttttgatgtgaactatggtgaacaatattgtttaaggtgtgtttaaatggtcttgataaagttagggaagtatcaatgtagaagaaaaacttttaattgctgccttggttaaaagaataaacacagtcttatgataattgagtatatgctacatgaattaatgttaatcccagt

SEQ ID NO: 33654 - DNA, 755 bp, Medicago truncatula
  Intron number 1 from transcript Medtr3g110060.1 (locus Med tr3g110060) derived from phytozome v7.0 (chr-ID MtChr3; po s 27684161 to 27684915 reverse strand)
tcaccgcttcttatcccagaagaaaacaaccccgagtatgaaatctttcatttctttcaatgtataaataaataaatttcatttattcatgtattccatatcgataagtaatgacacagacaccggatacgacactatactttacaaggacatgtcaacatcggtaataatgtgagaaaataaattaattgaatgtaatcactatgtggcaccgacactttgtctcgatgcgtcagtttcctacaccgatggatatgattacaactatgtttggttttacttctaggcaccttatttgatcatgacatgtttagttgttcaagtagaattgattttgccttcagagttgattctatttgaagctagagattggagattttgattttagaattgattttagcacttaaatttattgttcaactcacttttacatgaatgaatccacacattaatcattttttatcttcaactcaattttaaccggaatcaattcactcaaaatcaatttttgttgacgtagagccaaacatacattactttcaattatgtaatttccacaaataattaccggtgtcgatgtgtttgtgtctgcgtgagtgcttcataggttggacaccaaatacacattcaatttgaggtgtaggtgctaccgagtgatgttgtaaaattcaagctgagttgtaaaagggtaacgaattgaggaaaatgtgaacaaaatgtgatggattttttttctttatgtatttggttgcagg

SEQ ID NO: 33655 - DNA, 935 bp, Medicago truncatula
  Intron number 3 from transcript Medtr7g070660.1 (locus Med tr7g070660) derived from phytozome v7.0 (chr-ID MtChr7; po s 14336832 to 14337766 reverse strand)
tagtgagagttgattcttaaattaatttttcaactatataatgataaatatatattaacttttttccctaacgaaagaccatacaatcttaatcttaagctttttatatatttttgtgtttatctatttattttgtctttataattaaagctgacatcagactctgagtatgttttataaggattttcaagaataaagcgaaatgaaaagaacatatgttttcgaaattatgaacaaaagtttctctttttaatttgctgtctcttcactctcaagatcttcacactaatttgctttagtaaatatctaggtatgacaactttgtgtctttgttttttattttgttctttttttcatttttattttgttctttttaactttgcatctttgtgattaaatagattatagatactaattttgaagaatttgaatggctacactttatgctatattataatatcagctagaaaagctataagaaaaaggataatcccattataaactcaagtataaatcctaacttgaaatgttcattaatggctacactttatgtttcttgtccgatcttgaagcacaatataaactcctatgatgatgctgatgactcaatcaaacctaactccagcattcttcccatttgctctctcttcccttaaactctaccttgtgtttgctcatgctctctcttgtactcccatttgctctctcttcccttaaactctaccttgtaaatagggtaaggattagaacaatacttgcattgtatctagtccttggtattcaaattacattttccttaatactaatatttagaacacttcttgggtgatgatatattgagtttcaagtgtgaatgattaagtttcatatcaatcaaaaatggaagagacgttgggttaggaagtggtggcaaagtttcctacagatcctggaag

SEQ ID NO: 33656 - DNA, 611 bp, Medicago truncatula; identical to SEQ ID NO: 29560
  Intron number 1 from transcript Medtr1g092830.2 (locus Med tr1g092830) derived from phytozome v7.0 (chr-ID MtChr1; po s 18694836 to 18695446 reverse strand)

SEQ ID NO: 33657 - DNA, 782 bp, Medicago truncatula
  Intron number 2 from transcript Medtr3g122380.1 (locus Med tr3g122380) derived from phytozome v7.0 (chr-ID MtChr3; po s 30424860 to 30425641)
caaagttgctcaatcggcgcaaaaataagcttaaggttcttttcaaattatttgtttctgctcttcttttatattattgttttcaattttttgattatttttgtctttctccaattaactaactatttgtttggccacccataatgaactaacacaatatgacgccttagtgttcatgttaaatgtttgacaaaatggactgtgaaatagtttagacaaattgacttccaacgcctagcagaatcccgtttttcgttttataattcttccatgtgttccaaactggatttccggtttagggtcaagcatggccagaaaggcttagatgtaggtatttgtatatcagccctgctagataactacttaaccttccacaatcacactgaatctggtatgagttaatagattatctaggttttgaactatctactacacaactttgggccactatgacatgctaattaccggatcataacttcacccgaagttagtaatacttgaactgcatccataattaaaagtttatataaagtagaatggcataaaattcaaaatgtataaaccaatagtgtcccaactagatccaacttgctaaatgttcaactctttgttcctttaagatataataacttaataaaatattatagattttaagcctagtgtggaagcacaggttcagaaagatgtaagtatatgttctattctgttagtgtgtttgatgttctgattctgacccttgcattaaagggaactgtgagacttcttttccaacctgctgagaa

SEQ ID NO: 33658 - DNA, 754 bp, Medicago truncatula
  Intron number 1 from transcript Medtr4g155550.1 (locus Med tr4g155550) derived from phytozome v7.0 (chr-ID MtChr4; po s 38414878 to 38415631)
ggtacgttacgttctccaatttattgttggttattgctatcatcctcttctctgcaattctttttttttttttttttgacgatttagttacttagatcttcatgtttccgttttttcatactcttattttgatatcagctttatctatcgatatcactcaattttgcttgcttcatttctagtgactgtaatgtgttaatttaatggatgcttgtgattttcactttgcatgatcctattctgttcacacaaactcttataaattttatgatctgtgtttaattacttaattttgttaccttatttattttcagttgcatgttatcatgctgctgattgtggtttcatttataattaatttttggggtgatcaactttattactgtgattatatctaaatcacaatggtatcaaatttccggaaagccacccaacttatggatagtcttaattttgtttactactatgacttttttggttttaaacccccatatttttgtttttcctttttaattactgtaattgtttttttgtggtttaaaaaaatattatttataatcccttttgattctataataataatacctgacaaaaataaaataatcaaaacaaatttgattgcttttcgtcgactcaatcaaaagttttttctttgaggttttaaggaatcaagagagtcggaggtaatgttttttatgtttattttgtttgaatggtagatattgaggaggacattcgttctttacagcttgac

SEQ ID NO: 33659 - DNA, 800 bp, Medicago truncatula
  Intron number 3 from transcript Medtr4g155550.1 (locus Med tr4g155550) derived from phytozome v7.0 (chr-ID MtChr4; po s 38415806 to 38416605)
aaggtttgttgccatgaagtggttggttacgtgttttatttttgtgtcttccagtttcatgttcatattttctgtgaaggcaaatctcattagcatcgaaagtgggcgtcattgcattttatttttcattattgtctctattcttttttcttattttggatttcatttaaagtatcatcgtcattgtcattatcaatttcttttggtaccaacctttttctgcttcttacaatagtacctttcatttccccttgacacattcatttttgaattctcaattgttcagaaagatggttttgatggaaactttattcccaacggttgaaaacgagactcttaaaagatattatagaagtggtaacagatgcattcctgtcttccctcccttttcttaaggtctcttgttacaatcatgtacttatggcttatctgttttgaatgaatgaatgattgatagccaaaataggtacaccgtcctcaaaataggtctcatccaatctttgacaagctcagttgtgtagcgtctgtttgctttgtcagaactagagaacttgcttgcctattatttctattgtcgtgaagttcatgtatacaagctcagctgtttcttctagaaatggataatgcatttgttatttttgtgttcattgtcgattgttttattggttgtttgctgcctatgttattggtttacttctgtagtagtataacttaacgagggagatcgagagcatcgtatgagggatttcaatttgactgtttcagatccaaaggaggaggttcaggctcaggctgttgag

SEQ ID NO: 33660 - DNA, 786 bp, Medicago truncatula
  Intron number 1 from transcript Medtr5g091870.1 (locus Med tr5g091870) derived from phytozome v7.0 (chr-ID MtChr5; po s 35996585 to 35997370)
acaaggtggtataagagattagtcatattttatgccacatgtcacatttaggtggtaatcttgatgttctttgacttggtccatttgttagatcttcctatgttattcctgaagagctaatttgcttggactccttaatgaatgactagcctggcctaatttgcttgaattccttaatgaatgactagcttggaccttttaggcccatactggtagattatccccctagcccttggtcatgcagtggacaattggtctaagagtattgaagtgaaaatttttgaattttacccgatgtagatatatttgattttttttatgatacgattttagtttaaacccgatttagaactcgatttacagatggtataccccctgacttgcaacttagaggtgaggtgaaagtctaaaggatttttcatatgatactcaatggtttgttttgcttcatttcttgagcattatgacatgtattcgtagcacgacgtgacaatgagacaattgcttttttaggggtgcaatttgatatgttagatttgttaatggaaagttgtatcgtttgatcgtacgtgatgaaacattttcaatcattgatgaacggttccatccaatttgaatacttgctactttctcccccaccaccaccacaacttgatttaagtcatgaagtgcttttgcgactcatatttccttatgtttcaaatttttcattcatccctcctgctaagctccgttcttgctttctctttatgtttaaacaatgtttgtacaaaagcgctttgattg

SEQ ID NO: 33661 - DNA, 628 bp, Medicago truncatula
  Intron number 1 from transcript Medtr5g033070.1 (locus Med tr5g033070) derived from phytozome v7.0 (chr-ID MtChr5; po s 13467859 to 13468486)
gttttgcctgtctaccatttcttttattaagtcatggttgttaattgaaccaataattatgttttattcatatttttggtattcattttcctggtttgaaatggaacaatacctttttacaaattaagcttattctgtagaagatgggcatagaaaaataaattaaatttctatctaacaccgcgacttaacgccgcaatctacctttgcttgatgtgctattctatctgataacaagtctgacataatattcaaaaagagagaaacaatatgactgctgatataatttggtttgaaattttaacgatttgagaagaaatgtaactgatgtattcattccaccattgatgccgcgatttgatgcagcactttacctttaacttgatgtgcaggctctccttttttatttgatgaaatcattgtaacttggtctgttatatgcttcaactctttttcaatcttttttacttgattcaaatgtactgttcgatatagattctctattagactggtgatattctcttggtatgttttttttttccttcttttaaattgaacttggtagtgctcaaagcttcattttttactcttttacattcacatattttgtaggctggtctttttgtat

SEQ ID NO: 33662 - DNA, 786 bp, Medicago truncatula
  Intron number 3 from transcript Medtr5g033070.1 (locus Med tr5g033070) derived from phytozome v7.0 (chr-ID MtChr5; po s 13468750 to 13469535)
cttggacttggtgatattgttatcccaggtaggattactatgttgatgcattgatgtctttattttgtgaaattgaatctaaaaatacagtttagttcttagtataaatttggtgttagattttttcaaactgtgctgggtagattgagacaatggagaagggacaaataattttgacttatttacattgtgcatttctccttgctgtcacaacatgacttcaagtttttgggacttaaaattgccatgaatttgctagaaatggtttgttaaaatgtctgctctaaccggtcctatgggaactgtaatactaatgaaaaatgtataagggaatggatggaatggaaaggatatgtatcccttattctccctgtttggatgattaattgatggaacaaagtggaagggtcacaaatgtaaagtttctttataggttccacaacctgcaatttgaatgggaacaaagaaacgagggttcgaaaaggaaatggctactctctgtttcttcccttttataagtttgtaaacttccaaacaatgagatttttcattaaccctttcattatttatacatatataaatatagtgatagagttagaaaaactgttttgacaatttgcaagaatagttcgtcatgcatttggagcctaatatacattgcagggaggtacatttactatgtccactttattagctgtatttattgtttctcataatgatcatcttcctacctttgcttctacatgagcagctgagaggagggtcgttccaggttcaggtggtgaa

SEQ ID NO: 33663 - DNA, 676 bp, Medicago truncatula
  Intron number 1 from transcript Medtr6g013690.1 (locus Med tr6g013690) derived from phytozome v7.0 (chr-ID MtChr6; po s 2971192 to 2971867 reverse strand)
cagttccattctcaccgaaggatcgtgatattcaagtattatttttcactatactgttcagatttattttaatcttaatttgaatgatttattttaatcttaatttgaatgttggtgttgggttttaacttttaaactctctgttatctgattatgggttttaaaataactttattaattttttttaattttttgtactaacatattgtatattctctcaatgacaatgagaacttgagggattcttagttctaccattcttactttttaaaatccattagactaataactctatctaaattttttttgatgtttctttcaaatctaaaattgtgtatatgtgtataggtatgttgggatgcatagtatttaatttggtagcatttggatcacatttgattggtcaaataatattctgagatcacttgcttctcatttgccacatttcatacatcaatgagcttctttaaatacttcagcttaaccatgttgatcattgcttctatttgctacttctggtttgttaaagcaattatagtttacctgtttccgccatcttcaaaaccaatgccatttatggtctcatttaattggacatatgttgctgttatcggtcatgaaaagcttgcatgtgtatgcgctgaatattagtcagatttcaggttataactcggtc

SEQ ID NO: 33664 - DNA, 345 bp, Medicago truncatula
  Intron number 1 from transcript Medtr5g028520.1 (locus Med tr5g028520) derived from phytozome v7.0 (chr-ID MtChr5; po s 11779168 to 11779512 reverse strand)
tcatcgtaaataaatcctccaaccctgatataaaggtaatctaaatcctccatcttcctatttttctttttaatggataaataagtaaataaatagatgaatgcacttcatatggtttgaacactaataagtaaataaattctatctagtcaagtttgtctttgatttgctcactaattaagttttggagtttttggaaggccaagttctacaaatatacttatatttttcatgttattctcttaggaacagttgatataatattatagtcaaccattttctgcaacttcatcgtattatgtttctattgaacaagttttatgatgtctttgaaggatcaaggta

SEQ ID NO: 33665 - DNA, 369 bp, Medicago truncatula
  Intron number 1 from transcript Medtr4g089650.1 (locus Med tr4g089650) derived from phytozome v7.0 (chr-ID MtChr4; po s 18728121 to 18728489 reverse strand)
tggtaagacgaagatctaatttaaatagagatcatggagtaaccatcaacagtgttattcgtgtatataacaacaatatgggagtagaaaaaattattttaggggaggattaatacttgattggtcacaatgcaaagaaaaaattatttaggcacatataaaattctacatcatttaatttaaaatatgcattatttgatttcttttttctttctattttttctttttttatgtgtgtatgtcaaaaccttgtgcttaaactttgcgactataagaccttctcagaaaccaatcctcttcatggccctgtggccttatttttttgtgtactcagaggtttcccgaattagctatccagataatcccaca

SEQ ID NO: 33666 - DNA, 560 bp, Medicago truncatula
  Intron number 2 from transcript Medtr6g044230.1 (locus Med tr6g044230) derived from phytozome v7.0 (chr-ID MtChr6; po s 9391877 to 9392436 reverse strand)
aatttgattctgaatttcccagcccaatttccaaagtaagactcctttttaagtcatttttattgcttctaataaaatttaaaatgcctatatcattttagaacttatgacatgtccatacatcttattatcataaaatatttgggataacttatgagaacagcttatatcttgcataaaatttgtttgaccttactttctctttatagaaatatggtatctttcgattgcttattttgacttatttcctgacataagcacttgtgagactgtttgacgcaatttatataaacagcttatgacatgttcataaattaatttcttcttttttcagtagcctcttaaaaatagcttatgaaaccaacttatagcgtatatgaaaataaattaactttattttatcttttgttatagaattatcttatatataagcacttatatgtaagcgcttaattaaggtctttatccaaacaagaccttgtgacataactaaaatctaacttttttttcatgtattttcaataggaaagtgaagaaacatacaatcatcaaagaaagcc

SEQ ID NO: 33667 - DNA, 984 bp, Medicago truncatula
  Intron number 1 from transcript Medtr6g044230.1 (locus Med tr6g044230) derived from phytozome v7.0 (chr-ID MtChr6; po s 9392540 to 9393523 reverse strand)
ccggtctcctctggaagtcaaaacaaaaattcaaggtttgttttcttttcctttttattttattttattttatgttaattttcttcacattaaaatgtgcatatagttatgttaatcctatgatgaagtcggcaaataggttttgtatataataaaatgttgctttgttgatttctttaattcaaaggttgatatgattgatttgattttcatttcttaaatgatgatgggcccttcataccttcatgtgaattcatgaccataagaaatgatatattgatagctagctatgttatattgcatttatgacaataaccaaattaataaatattataaattttcctggagttgattttaagaactggaatttcacattttggaagtaattttttctccttctggggagagttagaggaaaaaacttttccaggtttttgttttgttttagattagttttcccctttcttaaacccttctggtgccggctcatcaatcgaactacctacatgagtactttcttgtgttagttagctatagctaacatgaatctttaatcaaatgttaattatgattttgactaatgaaatgttaattatgattcataatttatgccttttagattttcttagaatgggtgtgcatgcttaaacacaagacattgtttgtttctatcaaaagaaaaaagatttttttgaagaaagttgatgaatgtgattcttgttgtagttggttttaaagttgtttgtagtttgttatttgtcttacattgagtgtataaatatgtctgagtatccatatcctttgagctagtttttaggatcagatctaactctatttaacaatttcatatgtacaagattactataaaaaaattgtacttttaagaaaattttagtggttagtttttgtttgtactatgtgattctttgaattgattctattgtaacacaactttttgtttctatatttttcaggtttagcagc

SEQ ID NO: 33668 - DNA, 787 bp, Medicago truncatula
  Intron number 1 from transcript Medtr2g122230.1 (locus Med tr2g122230) derived from phytozome v7.0 (chr-ID MtChr2; po s 29268622 to 29269408 reverse strand)
aagtatcttagcaagttcagaaacagaattgataagtaagttttcttatgaatttctcattcaaagtctatttgattcataattttcctcaaaatttttaatactataaggaacactgtcaataatattaaagtcattttttttttgggttctacttatttctgacttgcacaatttacaattatgatcaagtagatttttttaatgtaattttagtttggatttattttacaagttttaaataaaaataacaaaaatgaatgctattttctagacgcatttgactttgcggtcggcaagctaaatgccgtccggttttggtgttgaaatatatatactaatcgtatgcctttgtcatcattcctttgcaagcaaacatcaaaataatactattagtagaaaacaaattaacatgatggtgttggaagagttaccaacatgactctttctcgaaaaataatcttaaatttaatttttagaatccttcatttgagaaatagtctagttaaaaaattagttaacaaaagttaatgtattttgttcaaaatttatgtcagatacatcaatatttattgacctatttttttttcttgtatcttgcgagaaaagaagtagttcttaaacatacatgatacacacacttctcaaacattttgttccgtcacacacccccatacttaaggtagaaaaattaccatccacttgtttattaattaaactgaaattaattgttcctattataattattgtagggttggtattaaactcccaacagtagaggtgaggt

SEQ ID NO: 33669 - DNA, 121 bp, Medicago truncatula; identical to SEQ ID NO: 31472
  Intron number 2 from transcript Medtr7g025420.1 (locus Med tr7g025420) derived from phytozome v7.0 (chr-ID MtChr7; po s 6217498 to 6217618)

SEQ ID NO: 33670 - DNA, 273 bp, Medicago truncatula
  Intron number 3 from transcript Medtr5g013690.2 (locus Med tr5g013690) derived from phytozome v7.0 (chr-ID MtChr5; po s 4173930 to 4174202)
acttcaccttttaggaaaaaacttcaatttttaaggtagtgtgtttgattcttcgattacaaaaattgattgatctggttatttaaaagtgattttgctaaaagtgaatggattgtgacacggtgactttggtgaaggaaaagtaattatgactttagtgtaatattatggctgacccttttctataatgatgtttggaattatccatattgactgatatgtttgtctttttttgcagaattgctgcaaaggcaccttatcaaacaagtaatc

SEQ ID NO: 33671 - DNA, 363 bp, Medicago truncatula
  Intron number 1 from transcript Medtr5g085860.1 (locus Med tr5g085860) derived from phytozome v7.0 (chr-ID MtChr5; po s 32875681 to 32876043)
ttgctggagagctgtccctaaattggcaggtctcctttcattgctcttgctcttttttgctagaccatttttcttcaatatcaatgatgaccacatagagattaatcaatgttttctataagcacattttacaaaatattttaatttgtggtcatagattacaaataattgcggtcaaatgcagttgatacatatagtcgttcctatcggtcccagaaacatcaaaaatctcgtctcaaaattttgatttcaattcttagtatgcaagtttgtataattcaattgcaatttggttatgaatatctctaaaatgtgactcaacatgcagggctattaaggtgtggaaaaagttgtagacttaga

SEQ ID NO: 33672 - DNA, 901 bp, Medicago truncatula
  Intron number 2 from transcript Medtr3g079930.1 (locus Med tr3g079930) derived from phytozome v7.0 (chr-ID MtChr3; po s 18687171 to 18688071)
ttgaaggtttgaatttgtttagttcgtagaaatgggtatatgggttggtgggtttgcataagattttcatatgggaaagagatttatgatgtgaccaaacgtgtgtgaatagaactagagattgtaatattttgctggagagtttagaagattggagtttaattttttgatgcaattttggtagaagaattttacatttttattgaaggattttgttgggcaactcatgatgaatctaatttaataaatgatgtggttgccaaactgctatttcacataacggattttcggtgtccaccgttttctgcaatcagctagtgataacacttatttgtttagtctaatgaagctccatgggggaagtattggagaatgttttctttaaatgaacgaaactgaattgtgaaaaatatattacaattgaatatatttgcaatctaattgtcacattcttttgttaactggatttattggtcaacatttcatttatgatcactgtataaattgagaatcccctgtgcgcaagcaattagtaatctgtgttggttggtagagagcttcttatcacccctaaactttactttcaatgcaagaaactatatatattttattcgcgtatccagtcttggcttctagtttttctttctttttacatcttctttcttggaagtctgttgtagaaataggtatgacaatcatcaattgggtttggggatcgtctttttcttggcattcactgttatacatttttacccaccttttagaatttgttatcaaatgcttcctagttccaacatactagatatttttatcttttatcttcttcggaaatacttttgtagttttatgtatgttttaacttaaatttcatttttaatgccagttttctgtctgcacacca

SEQ ID NO: 33673 - DNA, 717 bp, Medicago truncatula
  Intron number 1 from transcript Medtr3g079630.1 (locus Med tr3g079630) derived from phytozome v7.0 (chr-ID MtChr3; po s 18493744 to 18494460 reverse strand)
atcattgccaatatttcttggctctggtagtaaatattcgcatatgatattttcgattgtatctcttggctcctcttaatcatcccttgtggtgttgtttttattgacattgccatgttttgaagtaaattcatcatacaactttagtgaactaagtactaactataaactcccctcttatatgcattcttatacatttgtagtttgaattcccgctgctctgagtaaaagtatttggtgttgaaagagtaattgagtatacactgtcattgttatagaatgtatgaactagagatcatgaaaatcaacggcccaagttgagaaattaccttgaacttaacattgattattgataccaataaggaagttcttgtgaaaagattcaaaagaacccatcatgaactatagttttctagtctgcgtttttttaaaaatgattttgagtatactgttgatcaacattgataatagaaatagtaatctactagtagaaatgaattaacttattttatgtatctttcttattgttactaatcataaactcttatttcggttacttcaaggtcttaattatcttcgttctgtaaatattcttcaccgggatctaaagcgtgagaatctgctcgtcaatgcaaattgtgatttgaagatatccgacttcgggcttgctcggacaaatcaagttgatggtgagattacgacagagcttctattagc

SEQ ID NO: 33674 - DNA, 714 bp, Medicago truncatula
  Intron number 1 from transcript Medtr1g126970.1 (locus Med tr1g126970) derived from phytozome v7.0 (chr-ID MtChr1; po s 28420336 to 28421049 reverse strand)
ttcagctttatctgattgccacaagatcttctcttgtatgttttgttttgttctttttagattctttttctgttgacttcattttcgaaagttttatgaatcttttgaacttgcttaattagttcctagttgactgtaacttgattttgatgcaactaattttgctttgtttgattttaaaatgtaatatgtgaattttagagtttataatgattttcccttaatgtataatgagtttgtgtgtgcctaattttacttgtgaatttggttgtattaaagaattttttttaataaaaaaatatcaataacctactacactgcttgaagttcgtgttgattatgtagaaggactttatgtgattgaaattgaatttgtttttgtctccctcttctaaattgaacagctgaagtttcatggcttcatggctagagttgcctggtaattgctttcttgggcttttaccttatacaagtacatgctacatttgttattatgattctgagtatttataaggtttgaaattgaaagttctagatataattgtatttttgagctattaatataatagctgtgaagttttcataatccagtccaatgtcatgtggtgctaaacatgtattttattttgcagtttatgggagagctgcatttcttctaactaaagctactgtttttcaggtgattcaaattcaataactgagaagctggtggag

SEQ ID NO: 33675 - DNA, 429 bp, Medicago truncatula
  Intron number 1 from transcript AC233842_6.1 (locus AC2338 42_6) derived from phytozome v7.0 (chr-ID AC233842; pos 18 575 to 19003)
aacattgcatcccagtaatgaaaatcagagtcaaaaactcatagtcgaatgagaaattgaaacacagtcagaagctcagatagcgagcagtgtcattccaagtcaatgcaagttgtgaattaagcaagtatcatgacctaaaccaaacacttaatttatatcattttcaattcttatcagatctgaaacaaaagaaaacaatatcaaacacataccatttgtttttgcttttgttgtgaagatatcttaagaatgaatgtttcaacccatagctcctgcaattgcaattgcatagttttatattacattcaacttgtctgcaagaaacattaattaagatttaaatccaaatttccatcaaagagagattcttatattcataatctagttgtaggatcaaacccagttgggtttcaagttacattgaca

SEQ ID NO: 33676 - DNA, 446 bp, Medicago truncatula
  Intron number 1 from transcript Medtr4g073100.1 (locus Med tr4g073100) derived from phytozome v7.0 (chr-ID MtChr4; po s 14347794 to 14348239 reverse strand)
aattcagatatacttctgcgcagtaagttctaatcaaacttctattttatatcttttttttaattgaacgaatggaatcttcaagaactttactaccttttttttttcttcaaatggtgactgcgtgctcattcgtccatctgaactaatccgtcactatctgtggttaagttgagtagagcatataaagatggttttcttcatcaaaatggaagtttatttcctcgtgcattgccattttgtgttaacaaacgtaggattggggcaagagaaactaacctgcctcagcttcaaatttccttttcaacgatttttagatattcagttcttgtgaatgaaaataagaattacttattaaagtactttttccaacaaaaaagagattgtgatcaaagtaatttatgacctttggtaaaatatatgtttgtgaagctttatctcccttt

SEQ ID NO: 33677 - DNA, 478 bp, Medicago truncatula
  Intron number 1 from transcript Medtr4g142980.1 (locus Med tr4g142980) derived from phytozome v7.0 (chr-ID MtChr4; po s 35727007 to 35727484 reverse strand)
gaagaaggttgaaatttgaagaaaaaaaatgttaatgaaaatttgtgtgtgatgtgtgttggttttgtgtgcacgctgatgttggctttgtgtttgcgtgtttgtgttaaaaatcaacaaataatgaaaattggggttcaagacaagaacaacaacaaaacatataattggcgttcataaccttgatgatgagattgcatggttgtgattgagaaagtttgcctattgttacagaatggttttgatgggcaaatacaataaagaaaaagtgtgtgttgttggtgtagtcgttaaagaataagacttaattttattttattttgattttctgtgtttcttggaaattttattgatgaagatgtttttgatgatgatgaaaagatgatggaagaagacgaagaaaaagagaaaaaaataaagtgtttagatttggatttcatatgataaaggtaaaaaaaaaaaaatcttctgggtttgt

SEQ ID NO: 33678 - DNA, 959 bp, Medicago truncatula
  Intron number 1 from transcript Medtr7g006300.1 (locus Med tr7g006300) derived from phytozome v7.0 (chr-ID MtChr7; po s 985726 to 986684 reverse strand)
gtggctcctgtgaatccggttctttagggttttgggttgggcctttggtttctttggatctttacgttttgccattcctgtgctattcacacccctgttttttgctacctgcacctatgtcttgattaaaattgtgacaaaattcctagaaaaattcatacatgtttcttgatattttcttagtgtttttatgacatttttgcacattaaggatctatgaaatttttgtataattaattcatagcattttaattctttttgaattacttgttatggattcttcttcacacatttgtccttgatgtgagaatatgtaataaaagctacttaatgtgttaatatgagagatttgtgcttataatttcatgttgatttgctgttttgatttggttcataagttcttgattttatgaacaatatatgcctattttgaaagatataaaatgccaagtttattctagaaaatatggcatgaaaccatgcttgcatgtttccaataattccatgctataacttgaggtaaagaaaactctttcaaaatttgttaaagcatgagaattagaggccaagaatgctttaggtttcatacctaagtttttagggtttaatgtcattttgttaactttttgtgccatcttgcatgcttttatttcttagtacttgttatgtttttcttttcactaacaagtttatttccatgtttcatgcatctcatttagcattccctccaccttctttagcctagcatttatttttgcaagttttaatacgttttagagatgtaatttgtcatcattattttgtagcttggcaaaggggccatagaatgtatttaggcaatttttgtaatatggactatggacactatgacgcaccgacacgcacacactcaccttagatgtatgcataggattgtatggttagataagcgtttaggttttaaacccttagagaaaatc

SEQ ID NO: 33679 - DNA, 465 bp, Medicago truncatula
  Intron number 1 from transcript Medtr1g107440.1 (locus Med tr1g107440) derived from phytozome v7.0 (chr-ID MtChr1; po s 22663048 to 22663512)
gataaaggagctctcgttgagttctacgccccttggtaattttctcgatcttcttatttttctgattcgcttcgatcggatttgttcagattgtagttttatgaattgttgtagtaaatggtacggtgccgttttagctttttgatgtaatgtgtatgcgattctttgatttaattactattagtaaagtaaactaactcgggttttttatctttcaatcaaatagttagagaataataataattaggattaggatgataagagagtagaaacatttttagaagttgtaaacaaaaaataatcatgttatatgataagacaatgtgatttgatatgcataaaataaataggctgataactaatcagggacttatgttgcaaataagatgcatggttaacttatatcagtgtttcgcattacctgtaataataggtgtggacactgcaaaaagcttgctccagaat

SEQ ID NO: 33680 - DNA, 887 bp, Medicago truncatula
  Intron number 1 from transcript Medtr4g032240.1 (locus Med tr4g032240) derived from phytozome v7.0 (chr-ID MtChr4; po s 7652632 to 7653518)
tattctcttgcagattatattcatttcatttccatgtaagtttcaagatcactcttaccttttttttatttttttttaatctttttttctattttatttctaaatttatttcactattccacctcctccttaatttgttaatttttttatattattttattaattaatttatacccataattatatttgattcatctattttttttgcaaatttgttttaatttttatgaagcatgtaattataattagtaaaggctagagtattaggaagctaaattacatatactaatttggttcatgaaagtgtttaatttttaatcttaattattttctaaggttgggcagctcaaatgtttttgatagctgtatgaaattaagggtgttatgattttgggggggtttagttagcaatgggataatgctgctggattttgagattttgataatctgtttgttgttaataatagacactgttttggttttatgagaattaattaataaaaaggtaagcttttatttttatggtagttctttgtggtaattgggtgcagaggaagaccatattttgaagattgtttgtttctttgactttgctttctatgttcatttgagatgagatgagattgtctttactggttttttagttctatggtcatgattgtttcgagggaattcgtattgataattgcattagccaagtggttaatgagctttagtaaaggtcaaattgatcgggattatacgagttccaactctaggtggaacaattcttgatcagacgttacttacatcttggtcaaactccggattaccgggggctattattattgttttttaagatccatttcctgtgactgatgcttaaattttacgtctttaatgtagtt

SEQ ID NO: 33681 - DNA, 679 bp, Medicago truncatula
  Intron number 3 from transcript Medtr5g026950.1 (locus Med tr5g026950) derived from phytozome v7.0 (chr-ID MtChr5; po s 10926471 to 10927149)
gctgaggcacaggctactgcaaatcgtggtatgcatagtagaatcaatttcaaaataacatagtgcttatgatccaatttatggttgttattttatactgcctagtgcctatagtattatgttatatagcatgaatagagtgatggatgtttttgtagaaattaccatttgcatgctatttgtatgtttttgtggatgttgatacatgagaagaatatccctaataaaaaaaaatacatgagaagaataaaacatacatgaaataaaaggagtgacttaaaagctataaaacactgactcggacacgataatgacattgaaacgtggacaccggttactatttagaaaattgaagtaatcaaatacaatcacaagtaccacaccgtcaatctatattgttggtgctacgtagtttaaaagtcagtcaagtagcattcttttgatatttgtattacaaggtttttactgataagcattgatcattatgccagatttaccttctttagaggatgaaaactagaatgttgttttgcttggttgatgtggtaaattacctgctcattgttcaacatacttcatacttgtattgagatgtcatatctcatgtgaatttcagcatacatgcacataaatattgcattcttttgacgcctggtaattttcattcaaaaatttcagc

SEQ ID NO: 33682 - DNA, 395 bp, Medicago truncatula
  Intron number 1 from transcript Medtr2g052290.1 (locus Med tr2g052290) derived from phytozome v7.0 (chr-ID MtChr2; po s 14148446 to 14148840 reverse strand)
ttaccgaaaaaaggtatttattcactgtgttttttttcttcttttaaaaatagaaaaatgttaacaagtgctcgagttgatagaaccccaaatttcaaagtccacttaaaaaagccctcgctaaacccactaaattaaagctccttaattgaacataattatttagggtcaaatccactataaaatcaacttatttgtgggcctaaaaaagccccatattaattattaaaaaaaaaaatagttttttgggtaaaaaaaaagtgtttttttgggtaaaaaaaaagcttttttcttcggtaaaaaaaagttttttttccaaaaaaatactttaaaaaaatatgtttatagaaattttggggcttagggccttttgatttttttatttgtaggcttgc

SEQ ID NO: 33683 - DNA, 844 bp, Medicago truncatula; identical to SEQ ID NO: 28409
  Intron number 3 from transcript Medtr3g136970.1 (locus Med tr3g136970) derived from phytozome v7.0 (chr-ID MtChr3; po s 34658037 to 34658880)

SEQ ID NO: 33684 - DNA, 763 bp, Medicago truncatula
  Intron number 1 from transcript Medtr6g025400.1 (locus Med tr6g025400) derived from phytozome v7.0 (chr-ID MtChr6; po s 5694119 to 5694881 reverse strand)
gacaggtaaaaattaactagggctaaatatatggtttgttcctatgtgtattttgagattttatttttcgtctctataaaaaaaatagcacttttaaattttatgaaatttatattatacaaatgaattatgttattaggttaatattgtttcaacgtttgaatttttcattcctcaaaaaaacttcaaatgtttcaatgattttcttacagctatgtatatttagcacattataaagagttcatccacaaaaatttgaattttttaacatgagatgaatcaaatataaattatttcaacttcaaaagttcaagataaaaaataatcatgatttctttattataatgtgctaaacacgcatacaaataatcactcaaaaatttgtatagacttaacaacgaaaactaaaattactgatagtataattttgtagggattaaaagtcgaagaagaaaaaagagaaaaaataaaataaaatttatatagacttaacagcataaactaaaattacttatagtataattttgtagggatatattaaaggttgaagacaaaaatagagaaaataaaaaataaaattttatagggactaaaaacacatttaaccatatttactatataagactttatttatattttgtcaaaaaaaaagactttatttatagtttacactatcaaagagttttttaatgtaaaaacaataaaaagataaatatgattaaaatcattaactttttctttctttccacaacagatagatatt

SEQ ID NO: 33685 - DNA, 1045 bp, Medicago truncatula
  Intron number 1 from transcript Medtr1g083350.1 (locus Med tr1g083350) derived from phytozome v7.0 (chr-ID MtChr1; po s 16358203 to 16359247)
aacccacttctcgttcttctcgtgctggaattcaggtaaaccccccttttcccattcttcgttatttcgatttctttattttttagggttagggtttgaaacaaggaattagacgataattctcagatacccatccagggtttgattatatagttttaatttttgctagatctttcactttcgatttttctgtgtaaattttttagggttaaggtttgaaacagagaattgagcgatagtttcagatacccatagttttaatctttgctaaacctttcactatcgctttttctctgttctttaatttttttagggttagggtttgaaacggaactatgcgatggttttgggatacccaattgggggttgattataaagttttaatctttgatgtgtctgttttttttcttcccctgattacatgttttttttcctgtttatgtcgtatatgtgatgtgatacatgtttttgttttttgatgaaaaattcaactaattgctttcagagagtaaacaatttcaagatcttacaacttcaattcaaattgaagttttttttttttttttgtggaaattcaaattgaagtttttaattaacttagcttgattttattgtaaattgtagcagagaagtaattttttgttggaatgttgttataagtttaattttgatttcaggttatgttaaaagtttacagcgttgaagaaatcacactgaatatttgtaactttagaattagtgtatgggtatcaaaatgttttcaaactttaacaatttttgttgtaaaaaatactttacactattagtgtatggttatcgaatgtccttttatttaaccggagagctgatttttgagattaaattattgccttttgatttcatgtagatgttgtttcctgttaattatcatttacagattagagagactcattttcctcttgtttttttttttttgtttttgttaagtaacttttgtttattaactgtaaaatttgccatggtggttgcagtttcctgtgggtaggatccacagacagctgaagca

SEQ ID NO: 33686 - DNA, 716 bp, Medicago truncatula; identical to SEQ ID NO: 31083
  Intron number 1 from transcript Medtr4g080840.2 (locus Med tr4g080840) derived from phytozome v7.0 (chr-ID MtChr4; po s 16682948 to 16683663)

SEQ ID NO: 33687 - DNA, 776 bp, Medicago truncatula
  Intron number 1 from transcript Medtr2g096260.1 (locus Med tr2g096260) derived from phytozome v7.0 (chr-ID MtChr2; po s 22251252 to 22252027 reverse strand)
attctgaatcagtactacatatattttattttgcatgcaatattttacgtacatttatatacatacgcgttagtatggatattgttattgtgatatagcaatggttcacctttgaaatcaatttttaaagatatccacattagattgaacattttttttttgaaagtaaatacgttagaaaaaataattttacacatcaaatttcataaaaacgcagaaaaaaaaacgtttttgcccaacagtaattaactaccgttcgatctttctggcgatatttaactaccgttccacatatacaacttaagaagaaaaaaaacatcaacaatagttaactacgtacgttggagttttatcttaagttgtatatgtggaacggtagtattgcattgaacatttttatttattcaatgtgccattcataaaaaagtaaatcaattataggatccggttatcgtaaagtactccctccaatgttatatataagagatcagataactcaactttcttttacatatagaacgttcatgtattttcaacctttaaaatgcaatcaatatagctgatcaatctaaatctgacaatcaaaacataaactaaatgtaaaactttattaatttaatccaacaaataagaatgattcatcaagaaaccctaactaaagagatttagttgcacatgtaaactaaacctaattttgtcttcagagatttatatttagaaatttaaatgcaatgtaaatattccagtccttgttacttattgaccgcaggaaatcg

SEQ ID NO: 33688 - DNA, 466 bp, Medicago truncatula
  Intron number 1 from transcript Medtr5g071970.1 (locus Med tr5g071970) derived from phytozome v7.0 (chr-ID MtChr5; po s 25569891 to 25570356)
ggtttgaggcttaagaatcgcaaggtatggccattttatataaacaatctaagagttcagagatattcataattgtaacgccttctgttgtttacttacgtaccatgcaatgaacaacgaataaataaaatatctattttgctttaatagttattcttattaggaattatttttgtactttgcagtagcaacgcatgcatatcaacttgacttgcgaattttaaagaaaatggaatggtggttgtttttggaacacattttttatcttgacatatggcaaccattttagtattttcatgtttgaagtttttttcttcattatctatcattgcatgatttgattatattccttgaatatgatcagctcataatgtgcttgtgaaactttacaataatgtggataatcatgacaataatgctgatatccatagattgtttctgcccgaaatattgttgtcaaacaact

SEQ ID NO: 33689 - DNA, 472 bp, Medicago truncatula
  Intron number 2 from transcript Medtr4g025050.1 (locus Med tr4g025050) derived from phytozome v7.0 (chr-ID MtChr4; po s 5894958 to 5895429)
ttagtaatgtttttgatctattatttataatgtctttggatattttaacgaatttagagattgttgagtatggctcatacttgcctgataagttgtacaccgtaaattcatgtttgaaataatacaaaggaatttatgccaatctgcagttagagatttcggttgaattggctgaactttgttatggtcatcgcttgtgtttttcatatattcattcttttcaattaggattgctgttctaacgaagtccaacgcttactgtgcagaactttttttttcacggttattcaatcagatcttatcattatactattttgcagtaactttttttaagtatctcaacaaatatttgcacgacaagttctgattggatgattgtattcaaagttttacactgcaatgcatagttctttgatgtagttatttgtgtgagtactagcagattggaaaagcagtggtgtgactcacaaga

SEQ ID NO: 33690 - DNA, 410 bp, Medicago truncatula
  Intron number 1 from transcript Medtr3g163690.1 (locus Med tr3g163690) derived from phytozome v7.0 (chr-ID MtChr3; po s 43048320 to 43048729)
aaccaaggcttcttgcacttaacaaatctaacgtaactatacctcaatactactgcatttttgtttattgtcatttaccattttttataaattgatttctttttctcattcatttgctgtcactgccataaattttctatatcaaaattgattttgcaactgccctgtaatcatattagtattaggattcaacatttgggaactgtggatatctattctaacttatattttctattttgatacaataccattttcctcataaatcaatacaaattactactagacttccatgctctttcttcaattccttccgtattgcgtatatatctattcgtatatctttatgcttccgcaccaatgatttaatttatcttaacaacaataattattatgttgtagtgctgtcttgg

SEQ ID NO: 33691 - DNA, 460 bp, Medicago truncatula
  Intron number 4 from transcript Medtr2g092630.1 (locus Med tr2g092630) derived from phytozome v7.0 (chr-ID MtChr2; po s 21228556 to 21229015)
gcaatttcgaaatcagagttcatccttttgattttgtacgttgtacttcttttttctatctatttttttttctttccaattttattaaaattctttgattgaagaatccccaatattcatttcaattaatataatatgaggccctttttttggtatgctgtcaattgtctagctctggtcctgatttgtcctcggtggtgtgatggtttatgttttgcaccttaagctagtgtttgttgttcctgttttatttgtttcagactgattttttttttggtcttgttccggtgttgtagaaggattctatgcagtagtaaaaataagataattggtgtggttggtgtggttttgcggataaggggattaatcttttttgaatgaactatatgccacattgcaacattgtgagtataatagtgaatgaatttttatttttatcttgtaggtaaaaaatagatct

SEQ ID NO: 33692 - DNA, 695 bp, Medicago truncatula
  Intron number 2 from transcript AC235487_24.1 (locus AC235 487_24) derived from phytozome v7.0 (chr-ID AC235487; pos 114990 to 115684)
ctttcttgaaacgtgagttcccacctttcatcacttggttttgctagctttgtcctggcgtgaatattttgagtgcatttttttagctatgatcatatttctattgctaaattttcatgtattcagctactatctgttaactatcctgattaatggttttcttgattaattcctgttcaaatacttgctgaaaagttttggctttgtgatgctatctaggtttagcgcttgcttgctaacccgtatgtttgcttcatgggttaatacttttgatctgtcttgcaattaacttagtggttcctgggacaaggctatttttttagcggcctgtagtgtgccgggtttgagcaaggaagataggggagaattgcttatgtgtcagttagtagggatagacaaccgaatatagggaagggaaaatagaaagggaaccactctgtatcattttcggttagaagcgtagaggttgggaaaaggagaatatttcttctccgaggagcaatagctatgggattacatgtgttttttctataatatttctagaggattcaatgcatgccaagtctaatcattaatctttattttttacatgttcaaattcaaacatgtatatttttgtctctgcacaagtctaacttttttgatgtatctaatttacagcctatttcttggaggcttattgtccggtcagaaaa

SEQ ID NO: 33693 - DNA, 561 bp, Medicago truncatula
  Intron number 1 from transcript Medtr1g034660.1 (locus Med tr1g034660) derived from phytozome v7.0 (chr-ID MtChr1; po s 8355825 to 8356385 reverse strand)
gctcgatcaatataaccagcttcactgtgaaccaggtttgctacaaagggaatgtattcttcttcactgtttatgagatactctttagaagagagaaacacaaactttcaaaataacagttttggcccttaattttagctctttttacaaaactgacgtccccttaattttaaccaggtcagtacatatgtgaatatcaaatttaatgactcagataccacacatgtacattattatttggcttttgatcccgagaattgttgttgacacatatgatagggctgaaaaacacatataaaagacgaaaatgcctctgcgacagttaactactgaagtaaggaaccggttgcagttaactgccgacgaaagaaaaaaaaaaaaaaaaatcggcacttaagttccgaagaactctttattttcacagaaaccatttttgaatttatgcagggtgcataaggatttccttatgcaccataaccgcagccatgccaaatgggtaactggaaaaatacatattttctcacattgaagagagtaattccttgagttgtgaaaaattgc

SEQ ID NO: 33694 - DNA, 669 bp, Medicago truncatula
  Intron number 1 from transcript Medtr1g108150.1 (locus Med tr1g108150) derived from phytozome v7.0 (chr-ID MtChr1; po s 22983549 to 22984217 reverse strand)
accggcaaattcaaagtgtatctagagctgtaaatgtaacgagtgttaagtttgttattgtttttttttctggtagataagtttgttacttctttttttttctggtagataagtttgttattgttaattatgatatgttggacatgttggttcctcttccacgtaacatcatgtgtagtggaaatggattttgtagataacggaaggggaaacgggaaagtatggtgtaggtccctgcttcaatgagttttaatacattaaacacaaaatgaaattgtggggacagcttgtatagactttaattaataaatataaatcatagtgtagtatattgataaataaacaaataactaagtgaatatttgaaatgctaaaacatatgttaactgattagaagcagaggtaatttgaattttggctagttcaggaattgttcttgggtagaacaaaaatataacttcgcggaagttttcatggagttgtatctgccgatactggtgatcatcgagaggaaggtatttgcaaaatatgctgtgatatttaaatcaaattcggcatagtataacataagagaatggctaacaacacttttttcaacaaatcatttttatatttattgtcttattgggtgaaagttatgtaggatctacataaagcgttaagactcac

SEQ ID NO: 33695 - DNA, 884 bp, Medicago truncatula
  Intron number 1 from transcript CU651589_11.1 (locus CU651 589_11) derived from phytozome v7.0 (chr-ID CU651589; pos 58742 to 59625 reverse strand)
ggtaaggtaaatccgctttcatgagttcgggtttgagtttaggtaattatccacaaatttaaatgggtatgagcgcgggaggacactttaagatttaatccagcaacctgcgtatacatatttatataatatgattagagaaatatatttaaataattaatttatttttggtgtacaattaattaattaatttagctatttgagcctaaacttaaacctaaaaactgtttaatcctgtacacatttatttttagggatattttggatgttttttatttggctaaatactacaatttgtactataatgagttgatttggattttttttggatcatagttttatttcaattgtaatgtttgttacttgtttttcatagttaaagtaggagtaatggatgcatgtatgatcacttgggtggccataggtattgggaagagcactaaagttgctccatgaggttacagacttaaataggggtatttttttgcaaacgcaggtatggaaaggggcactgtaataccctgcccataggtacccattgccatgtatcaccaagtttgtcaactatatataattgatgtcgtaaaacttttaaaatatattgattgtgttacttggatgagaatgctcatcatgatttttctcattttgttttcctacaacagattagtctgaacaacgtttctctcacttctctattttctattgcacttcctcaacacaacattcattgtgcatgtttctatttgcttatggaaaattaatgcttcatttttctattggctttacacatttcatatatatgtatatatatggcatacatacattttatgaatagaaagttagaaggagaacgtgcttagcaaataatacaaagttgttga

SEQ ID NO: 33696 - DNA, 546 bp, Medicago truncatula
  Intron number 1 from transcript Medtr1g117010.1 (locus Med tr1g117010) derived from phytozome v7.0 (chr-ID MtChr1; po s 24925106 to 24925651)
aaaaggttattatattttcttgtctataatcttgatcaaagaaacttaagtattgattaaaaaccattttgatcctaccatggctgcaggcctgcagcaaatccttaaacacatatctttagcttgaaggaatgtaagttggtacctattatctcactttgaatataagattgtaactgcctttttgagaaaagcaaaggttttatagtgtctctacttagtggccaccaataaaaacctcatcacaaaacagttgttaattgtggattcaataacagattaattccagatatatagtataatttcagccaaatacatccaatatttctattacagattctcataataaaggcaagtggcaaagagcttttgaatgtcttttactgcttttaaaagtcacaaaagaaaacaagttgttgagatggacagaaagaatattgaagtgaaagcaaaacaagcttctgctaactcacataggcataagataacaataggagtaagtctttgagaaaactcatgtgtctaatttgcagaaagagagagaag

SEQ ID NO: 33697 - DNA, 953 bp, Medicago truncatula
  Intron number 1 from transcript AC146630_11.1 (locus AC146 630_11) derived from phytozome v7.0 (chr-ID AC146630; pos 64131 to 65083 reverse strand)
agcggagggagtattaacaaggtttgtagatggctattagtattctgatttgactgataaaagagaagatggtagtaaaatttctgtgcattcagttacattcacagtcctttagtctctcttcggcttctcgcacattaaaaaaccgaggacttggtgtgacatgacacaagcttttctttagaatttccttttgtgagaaacttatttatttgattcttcagcctcttataaacttgtgtttgagctgttttattgggataaacatgattcctgcatgtactcatgatgataactgatgtatggcaaacttccgatgggaaaaggcaagggggggagggatggggatttaaagtaaaaaaacgctgaacattgttcgatcactgacttcagataaatggatgccgttaatgtcactacctactgattagataaagtgcattttgtaagttactgagatgaatttggaatcctaagtatgttttctcttagtttggctgggttgcttttattgtctgctattacatccgtctaatgttacttatttactgaggacatttggaatttcaccatggctgtataggatcctatgtgttcaataactttatttgctcattcatttttgctattcgtgattcattttcaatgaaatgatcattttgttggtttttccacattatatttatcattccattccctgtttcagagtaactttgtcaagatatagtggcaaatttggtactgacttctctctagttttaaaacccaaataaagtaaaagcattaaaaagttaaaagtcacagatgggaacatgtaatttgtgatcagaagttttttttgattgtccttagtatcctacttgctattattgaaactttgagttgcttgttgcatctatttggctaaatgtgttatagcccaggaccaatttccctgtggatttcattaagtg

SEQ ID NO: 33698 - DNA, 538 bp, Medicago truncatula
  Intron number 1 from transcript Medtr1g060120.1 (locus Med tr1g060120) derived from phytozome v7.0 (chr-ID MtChr1; po s 11854132 to 11854669)
tttgagtttttttactcctgctgtaaactggatttatgcttttttagataattattagtgaaattatcttcactcttggcttgttagatttgtaagaagatgtattaagatctcaattcagaagggttaggatgaattcttgaagctgttgttagctttatgtggaatttttctacttaggtatcgtgttgtgtagtttggttttcacagttagaaaacaaacatgttacagttctttttgctttagatattgctgatgtattgatattagatgaaccccgaacatgagggttacatactattatatattattgatatttgatattatctcaaaatctaaggatgattggttggaacttatcggatgcatttgatatttactttgatagattattgttgcggtttacttttaaaaattagattttgttttgatagaaactttttattcactattttgttgatgcccttgttttattcttattcatgttagttagtacacacatctttgacatccctgaacttgttttctaaagggcat

SEQ ID NO: 33699 - DNA, 685 bp, Medicago truncatula
  Intron number 1 from transcript Medtr4g095710.1 (locus Med tr4g095710) derived from phytozome v7.0 (chr-ID MtChr4; po s 19970393 to 19971077)
tggcgtgtgatctctgggtttgtgtggcactgtgctctatttataagctgccatgtgtgtttctgaaccaatgagagaagaccacctgtttttggacttagggacctttctgcaaaaagaaaaaaaagaaggactggacagcaaataagaaaaagggctaaaaagcaaatttaaaaagttttggactaaaatgcaattctggaaattatttgagggactaaaatgcaattaaaaataaaatgaattaaaattggtaatttgaccaaatgtaaagtgaaacctaaaataaaatcaacaaaaggactaaaatgaaccatctacaaaaatgaggtattttaaaatacctctctgccgaaattttgatgggaaaagaccaaaatgcccctagggactaaactgactcaaactgactcagatgcaattttgaaatgatttttttaaccaagactcaacaatgatttataaaacaagttgaaaagactcagagacaatcacaaggactaaaatgggttccattgcaggaaatgatcaaaaataccctttttgtatgattttttgaaataaaatgcaagaaaagtaatgtgatgtttcagagagttttcaaatgacttgtaatgcaagaaaagacactttgaatagttttatgcaagaaaatcgagcttgaacgtactttgagacagagaca

SEQ ID NO: 33700 - DNA, 828 bp, Medicago truncatula
  Intron number 2 from transcript Medtr3g061710.1 (locus Med tr3g061710) derived from phytozome v7.0 (chr-ID MtChr3; po s 14011911 to 14012738 reverse strand)
tcaatccaacgctccctgtgcttccaggcttttaggttttgggcttgggcctttttctttgcaatttcctacgttttttgcttttttcttgctattcacaccctgttttcttgctgattgaacctctatgtgcttaattttttctctaaaaattcctaaaaaaattgttggatgtttcttaatacattttaatacttttgtgatatttttttcaatggtttaaaaatgataaaaatgtgtgtgttatttttcttgattaattttgtgtttgatctaagtttgtgcattttgtggtatatttctcataaaatgttggcatgtgatgtggatgattggtgtaatttcatggtgaatgtgttgctgatcatatgtatgttttgctgattgtggatgtagattttcatttctttcttgttttgcaagtaatgtgtgtttttatcaagaaataaagtgcaaaatatctttaaaaatgtgtcataattcttggcttgaatgtgtcctatttgttctcacattatagctcaaaatcaaacccctttaacgttgctatgatgagaggattataggtcatgtgcatgtctaagtgtcataaccaattttaggtatattttgccattttatttcatttcattactcttttttttctcttgctattctattcaattttgtttacctttttaccatttttatgccttatgatactaaccatttcatctcacatttcattcatcccatagtttaggtatcatttttctattcatttctatatcaaatgggtttgtaataattttaggtagattagctttcttttaattactcgcaagacca

SEQ ID NO: 33701 - DNA, 645 bp, Medicago truncatula
  Intron number 1 from transcript Medtr2g098010.1 (locus Med tr2g098010) derived from phytozome v7.0 (chr-ID MtChr2; po s 23101241 to 23101885)
attgttttgtaaatgtaagatattgttaaaaaaataatttattaatgcattatatatatatatatatatatatatatatatatatatatatatatatatatatatatatatatatatataatttcagtttatatcttattcttacaatataggatatatttattagtaaaagtcttgaatagttctattacattatatacatatctatagtcaacagtttttatccctttcaaagttgtcaaaatgtgtataattatactccccaatatgtagtactctatttggtaaaatagtttttgcgatttgagtcttataaagagagatactcttcatcttacaaatagattttataacaatgaattatgccaaatatataaaaatcgaacactttttttaactacaaaaaccgaacatttagatttccaccctctaccctctaacacatgaaaaaactatttattttttagaattaaaaaatatggaaaactatatttcaaaacatgaaaaaacaagcatgataaagttgcattctgaattccataatccgttaaataacattataaatatgaaacaaaatatattggctctatttttaaataaagatataatcacatgtctatttatttctttgtttattttgtaggg

SEQ ID NO: 33702 - DNA, 711 bp, Medicago truncatula
  Intron number 1 from transcript Medtr2g123520.1 (locus Med tr2g123520) derived from phytozome v7.0 (chr-ID MtChr2; po s 29996798 to 29997508 reverse strand)
cttgacgatcaccgttcagtccaccaggtttgtttttctcttccttgaagcctacgatgcatttctagaattaatgtgaaagttcgtgtctccagtagtctatggagcaggataggttctgtagcaagctgtgtgataattgggttttcttgtgggtgtgtgcggtacggggttttggcctttagagggtatttgttttccagacttttgtgttctttgtgagcttgtttacttgttaggctgctgattgtttcctcttgtattgttgatttgatcacggattgttttttctattcatctttaccacctctcacgccaaagaagggctacaaatattttgctttctcaaaacaaaacaaaaatgtgtctttttttctcacgctaaagaagggctaataatattttgctttctcaaaacaaaacaaaaatgtgtcttcttttgtgttctttatttattcaggagctttgccggttcttgtgatcatgcttcactggcgcatccacaactgtgattttcttgattaattagttaaaaaaattcgaaacattcatcgtatgatgtctgtcatgtttacatttattttatattttgttataaaaataacttatacatgcgcttaggataaatgcttatttagatagggactatgtatattatgtgtttgacttgactttcaagttttcttataaagatttgcaaccggtcaaagt

SEQ ID NO: 33703 - DNA, 794 bp, Medicago truncatula
  Intron number 6 from transcript Medtr7g070760.1 (locus Med tr7g070760) derived from phytozome v7.0 (chr-ID MtChr7; po s 14386693 to 14387486)
agttaagtaggagaggaattgcacaaacagtattgtttgaaacttcaattttaccaatctattagatttttcgctttctctacttgtctgtttctatttcattactgcttatgttttttttccttccattcgatattgtgtttcttatatgtggtggctcaaaattgaagactatggttgctgacataaaatttggagtcgaatgcttaacaaaattaacacattcaatgtgtaaataatcttttccatgaattggttagtagtcgataaggtttgtagaatataattttgaccactttgttttgcatatgcttacaccagtgtatctgagattgaaagaaacttatttttttaatggtcagaacttatttaaaaatgtagtatgagaaagaaattattatttacaatgctgaaatcagtatgctaactaagaatatattcattctttcatattttacattttcacattgtcctcgtacatagagtgaccatggtaagtgagaatatcttaccatttatttggtacaccgtgttttattttgtttttggttttcaaatgacatgctttagtgttatatgaatactctaccttaacatgtttcagtgttatcttttagaaattgtttgtttttatatcagctacagacaagcatgttaaggtagagtatccatgcaccaccggagcccattacaacacgtgtctattttgattcattgtagttgatcaaattcatctctttcattggaccatgatcgtttgttctttatttatttttttctacaggttgttgact

SEQ ID NO: 33704 - DNA, 329 bp, Medicago truncatula
  Intron number 1 from transcript Medtr4g159160.1 (locus Med tr4g159160) derived from phytozome v7.0 (chr-ID MtChr4; po s 40089669 to 40089997 reverse strand)
attgtggtgttctcaaattggctgattttggacaggtaaatactaaatagcatatctcattaattaaatgagctccttcatctttgtgttttttgtgattttttcttctatctagatcggggatagtaatatttagtttgaggaaattcattttttattatgattattagacactgtattttaggctataattgcatcatgtagtttgagtttaagttgaaccagtgttgtgcaattgcatccaaagaagtgtataaggtttttttctggaatgaaatgtttcattgactaattttctcaggcaaggatactcatagagtctggatttg

SEQ ID NO: 33705 - DNA, 626 bp, Medicago truncatula
  Intron number 2 from transcript Medtr4g149620.1 (locus Med tr4g149620) derived from phytozome v7.0 (chr-ID MtChr4; po s 37231404 to 37232029)
gaaccaacccctgagtccatcaacaaaggtatcctttttcttttttaacttttaataacattaatacttgtgtagaagagcttatgacttgtccataactcgttttcagcttattcctgcaaaaattttaggatagcttacgagaacagcgtatttgcgagcagtttgattttattttatcatttgttgtagaaataattaatacatagggcctgtttggataagcagcttatagcacaagtgcttatcatgataagcgcttatgtataagctatttttgtagcgtaagataaaataagccaatccaaaacaccttatgaaaattgtcataagctgttttcataagtctccaaaacagcctcacaaaacttatgttagcagataagctcaaataagccaatccaaaccggctcataagcacttatatgaaaacataagcagttataggaaaggataagctgttaactaagttatttatccaaacgggaccttagtatataatgtcttgtgtttctgtttgtttgtaatatatgaaagtatattttggattctaacttggaattcttttttaccattgggatgtggtggtagttgtcaagtttgctagggttactggtgatctacag

SEQ ID NO: 33706 - DNA, 887 bp, Medicago truncatula
  Intron number 2 from transcript AC235487_5.1 (locus AC2354 87_5) derived from phytozome v7.0 (chr-ID AC235487; pos 19 999 to 20885)
cggtcagattgtcattttggtggtgtattattgtggtcttctatcgcttctaattttttagcagctttgtataattcatttttcttggttattgaatgaatggttggttggttgaatgttaggaatttccgtttgcctctcaatcaattgatttttcttggctattttttaaattatttaatgattagttggatgctatgaaataaaacttctatttgacattttaatcatgttgctgaaacatgataaatattaatgatagtttgatttgtctataaacattttatttgaacattgatgcaactctagattatattttagagggaaatggtagatagttgaatttatattgtttgatgaaattggtggtttcactgtattaaaaatattaaatgacataaacaatataattaattaatatttttttcaatcaagataagacatgtaaaattgagagagaaaacaataagttttaaattataagctacttgatttaacttataaaaaaaatgctataagctattaaaaataaattatgagctcgtggtaaaatgacgattactacagatatcttttttaatcatatggacttataagccggccctagttttctctttttagattttctcttagagtttcttcattgagggtggttttgagtcaattcttgacctgaaatcacacatcttcatctttttctctatttcaatctaaataagtgattttcacatagatctagattttttctttgtgatttcatcatctaagtgtggtgctttgttgttcgtcgtcttgtgcggcgttgtttgatttcccgtcttcgtccgatgctcatttgattcttactgaaagatcgattattcaatcaaagatttgggcgtcaacgt

SEQ ID NO: 33707 - DNA, 1036 bp, Medicago truncatula
  Intron number 1 from transcript Medtr7g026400.1 (locus Med tr7g026400) derived from phytozome v7.0 (chr-ID MtChr7; po s 6758468 to 6759503 reverse strand)
aactgtttgacaaaaagcgtgaaagaaggatcaaggtttcatggaatgtattcattgcttctttcttatgcacatgattgagagtatgatactgttttgaaatttcttgttgtatgatatgcaacacttgttgattaccttgtctctatggtgaaggttgagaaatttgtccctaattctacttatgttgttgataatgcttatgaattattagtgataatttgcactttcacagcgataggcgacccgttttccattcacagttattattatttatatttatcttttttgtctatttttgtaccgatatgtattcaagtgcttccaattcaagaaagaccttatgattcttatgactcttatgactcactcttttaacaactcagttggtaagatttatcccatctataagaaagaccttcaaccacatataagctcataaactgtttgaggaaatgtaatgtttgattctttcttatgcgcaggttgaagaatatgatgttgttttgaaaatgtaatttggtgttcaacactcccttggttcatatgcgttgcaaataatatgggtggaaattgctaacaaggtgtttgtttgaaacaatgtcttagagagagagagatgtgaattgaataatcatgtttttcctgtttgaatttttggcataataaagctttgtaaggttcacttatttataatgatcaatttatacttgtttaatcttagtcactagtttttaaggttcacttatttatttagcagtaactacacaatcaatctttttggcctgctgtggctaacaattggcctttgaatttgtcacaaaccagaagggaatttgtgaatagcctgcaactcaaatacttgtgttgctgctaaccaatggcagttcatatgtaccgacgaagtaggatattgttttacaattcaaaagttgaaactatccttatgatgtcacagtttttccaccgttaaacattaaatccaactagaactttgttgtcatagaaaatgctttgttcaggctgctattgttga

SEQ ID NO: 33708 - DNA, 788 bp, Medicago truncatula; identical to SEQ ID NO: 29956
  Intron number 1 from transcript Medtr2g076830.1 (locus Med tr2g076830) derived from phytozome v7.0 (chr-ID MtChr2; po s 17489990 to 17490777)

SEQ ID NO: 33709 - DNA, 318 bp, Medicago truncatula
  Intron number 1 from transcript Medtr1g023580.1 (locus Med tr1g023580) derived from phytozome v7.0 (chr-ID MtChr1; po s 5292298 to 5292615)
agtgctgccgaagaagttcaggaatctgcagataggtaccaatttcattcttattgtatcagcttcttcaattcttcttccaaatagctatttgatttttaattaatttgttattaatttttttttggataagaaaatgttgggataaaatagaaattgtattttttgtaatttgtactattatttttttcctttatcctattgaatattgaattaattgaggcttgatatttttaagttcatttgtgtgcataaaattatcatgtgtaatgctcaaaatttatggttattgatatgttttcattgtgtttttgaagg

SEQ ID NO: 33710 - DNA, 469 bp, Medicago truncatula
  Intron number 3 from transcript Medtr7g046270.1 (locus Med tr7g046270) derived from phytozome v7.0 (chr-ID MtChr7; po s 11327684 to 11328152 reverse strand)
ctacattcttagtttctggtaccttacaattggtatgaaaatctcattttctctttaatatattgttcaaacacaactagcgtgtatttatttaattttttttaaagatggagtgtgtatttttttttattttttttttaatgttcaaataagacaatttttctttattatcttctggaccacgtaaattatatattatttgtagttaaaactcactttagtttgtgatctcgacggtagattcagatccgacaattgagattataattttcaaatttctcatagttatgttttgtgtcgtttgatctctatccaacaacctaaatggactaattgcaaacactatagaaaattctcaatgtaagaattcaaatctttctcttgtgcctaatattagacatctagaggtaactcaacaacaaatataaaatacaacggctaacaacatatatataatcttagattttaa

SEQ ID NO: 33711 - DNA, 453 bp, Medicago truncatula
  Intron number 3 from transcript Medtr2g123460.1 (locus Med tr2g123460) derived from phytozome v7.0 (chr-ID MtChr2; po s 29957248 to 29957700 reverse strand)
acaacttgcgtgttgccgaggtttgtgttgtaaatgccctgtcattattgtgtatactcagcattcaactgactcattttaacatccccaatggtattatatacaaaaacagaaatgtccattcttatcaatggctatataaacaaaattttgagatgttgcagcccctaagaaaaattttcaacttgataattttcttagatacttgttatccctttactgtgatgaactttgagttcaatttttttcatgtgtcatgcactcaataatactctaatttagttatgaactttataaaatgcataacaatcagtaaagagcatatattgaactgaatcattgctttgatacttcacctttctgcaaccgtttttctttgatcttgccttttatgctgtgttgtttgccaaacattttatttttcagctgtcaagaaggcctcatcctaacttc

SEQ ID NO: 33712 - DNA, 697 bp, Medicago truncatula
  Intron number 1 from transcript Medtr2g123460.1 (locus Med tr2g123460) derived from phytozome v7.0 (chr-ID MtChr2; po s 29958349 to 29959045 reverse strand)
tggtggagcagctctcagcataattctcagctcaggtaattcttcatgcacaaatctctttaacaaatgccacattcttcttcaacactctttttttgttgttgggtttcttggatttgtgattattttatctgggtccatgagaaattgttcttaaaagagaagaaaattataaagattgaatctttgatacacattctcaaatgggtaatttttacaatatttttatatgaacattaatggcactttttgtttcttgttctgcatttgaagattgtttctgatgtagaaagaaaaatgggtttagttaaagtaatctgaattttgaatttcacatctagatacttttgttgcatgattaaggtttgccaattgcatggtgtttgattttgaataaaagttgtattgttgtttgtgcatttcaagacatggatttggagattgttgattgcatcaaggaaagtgtgtttcttggatgttaggttgttgatcaattcaaaattataaagatgtgtcttttatgtattgtttaattacattttcttgtttttggttctttgatattgatccaatctatgtttacatttactaatgtagtaagtaatgtacactacttttcttgattcctttcatttggctcataactggctattttattgcagaattctcacatcaagattttgtatccattgcttct

SEQ ID NO: 33713 - DNA, 982 bp, Medicago truncatula
  Intron number 1 from transcript Medtr2g024380.1 (locus Med tr2g024380) derived from phytozome v7.0 (chr-ID MtChr2; po s 6161219 to 6162200 reverse strand)
aacaacaagaagaccaccttgtacatttgtttcaggtttttctgtttttttatgacacccctttcactatttttgataatgtattgttgggttgtattgaaattggaaatacattttaaagttgtttgcttttcttcatgtttaatcaaattttgcaatcgggtcacgagctttaacaataggaagtgtatgatatagttcttgaactttttttttttttttgggaaactcagtattcagcccaaagatcaactaatattgggtaccaatctcaccatccactagcagatgcctaattgaagcgagaacaaacgttctgcattgactgacccaacacaggaattcttgacacccggtggatttgaaccttagacctagagaggagcacaatcctaagtcccttcagcactaggccaaccccttgggtttatttggtgaactaaattgacggattgaaaatagtttagggaatacttattatatttctatagttaatggaccaaattggagagacaatgataggttagataccaaattaatggtttgtttttgtttataagttgatctctacactttcattcatttgatattggggaaaattgcaagcaaattcggcaagtcagccacaatttgagaaaatgacatgattcaatgtaatcataagtgccggagtcgtgttggtggtgtcggacaccgactcatgtccgatactgagacacacctaatctgaggagtttccgtgcttcataggccgtggcacccttgcaaagctctcacagtaggactgcagttgcagttacaaatgacaattttgaattatacaattaaaagtttaaaaccaatacacactgttattggataaatgatatgtcatatttgttctccatcacatatgaaacggtgatttttgttgattatctttaaactaagcatttggattatcacaggaaacttcaccatcggttgtttccattaaagacat

SEQ ID NO: 33714 - DNA, 267 bp, Medicago truncatula
  Intron number 1 from transcript Medtr2g096460.1 (locus Med tr2g096460) derived from phytozome v7.0 (chr-ID MtChr2; po s 22367408 to 22367674 reverse strand)
aacgagcttagggttatagactagttactattctggtattggaatgatttcagggttttgatttagttttttttttttatcagttatcttttatgcttccgtaaccatggtgatcatgtttagggttacatattcttatcagtttttcctttctctgcaaattattccacttaaataattttactatgtttttcctttctctgcaaattatttacttatttttctcttcttctctagcattttcagtttctgtttttaggattttgt

SEQ ID NO: 33715 - DNA, 579 bp, Medicago truncatula
  Intron number 1 from transcript Medtr5g021040.1 (locus Med tr5g021040) derived from phytozome v7.0 (chr-ID MtChr5; po s 7964087 to 7964665)
acctacaaaccgttcactcactctcccttcagcaggtatattatatcgtatgttcattttgttcctattattgttgtcttttattgtgttgtcacttttgatctatgactatatacatattttcatatattactgaaacttctgaaaaagataagtgaaggtaccgagaaagttttggaagagaatatagattgcgtgtgtaaaacaaaatttctgttagactttttcttttccaaaacagtgttgttctgacgaatgaatgggatcagtgacagggaagaagctgttactgttagtttctgtagtactactgttctctttcttttccaacaacaacactcactcttccacaaaccaacaacactttcacagctttcaccttttctttgttcatatatgtcacatcttatcatgtctgagtatgatgctttctcacagatacatgaattattcaataaatttatgtttgtttttgttaaatatccatcatggtatgtatatacatgtttacctaactaatagtttgtttgcttctgttcaaaatatgttaattaacataaaaaaaaaaagggttattgg

SEQ ID NO: 33716 - DNA, 489 bp, Medicago truncatula
  Intron number 2 from transcript Medtr5g095020.1 (locus Med tr5g095020) derived from phytozome v7.0 (chr-ID MtChr5; po s 37678454 to 37678942)
cttcgctttttccgcatatcatctcatcacattttgtaagtttcgtgcttgaaatgatatagcaatgtttggatatccagcttaatttggggcttatagtttaaacaggtatagcatatatatatgctatttctataactggataaaataaaggcagattgttgtcacataagttagagagctttcttctgtcaaaaaaaataaaagttagagagctttatgaaaataaactgaaaacaacttatgataagctctctcaaacaatcgtacgagtggttatgtcactatatcaactcaaatatgtgtcattccctacagccttattatcaacagttgaacaaactaatttagattgaacaaatagattatatttttcttttttgataagcaatgaacaaatagattattcagggtaggataaagattttagcatatagggttgtgaatgaaacagttccatagattttagcatatatcaactccttggtg

SEQ ID NO: 33717 - DNA, 1025 bp, Medicago truncatula
  Intron number 2 from transcript Medtr6g078180.1 (locus Med tr6g078180) derived from phytozome v7.0 (chr-ID MtChr6; po s 15878380 to 15879404 reverse strand)
gtatcggtattttgatctgccattttgtataccaggttggtttttccctccaattctcttattagtagtgttgtgttaattaaagtttcaatttttaaatcgtggttattcggggtttgaagttatggttatgttggttagtatcattttactgcgggaaattgcggttaaatatggttgatggcgtcacaattatagttgttgagacatgaatttttaaatttttaaatcgtggttatttaaggttttaattttaagtcatgggtatgttgatatttttgttgtggaaaattgcggttaaatatggttgatgctgctgcgataatagttgatgccgatgcaattgtagttgtggagacatcaaggtttgatttttccactaaaacattgaaaaaccttgatgcaatgttcaagattaattgtggttaatgacagtttcttagaaccttgatattaatgatgagaaaatcaaaggatgagggtaatattagatgaaaatgttttcaaatatcggatccggatgccatttggttagcaaaatcctgcatttacaccgttacatgatttaagaattgaacatctgaacttcacaaaaatgattcaaatcatgatgttaaaacatgggccatcttagtcctcactgttgcatcctagtggtttggctgtgaggatatttatgtgaatcccaggttccaacctgagtcaccgcatttctcccccgcttcgcatgcgtttatttgagaatgagtggctactatgccaatagctaaaataaaaaaaacatggaccatccaatcaagattggatggtctagttatgcaacattgcatgactgcagccagtttacttgccaaattaccacaactgattttcttatcagtagttaagatgactcaatatttaactttggaagaggcaaattttgaacttgtttgcattttgagatattttctttttggggttttgaattgtttgatgtttcatttgtagatcatttgaaagagaagaaagaagcactgggtgaa

SEQ ID NO: 33718 - DNA, 387 bp, Medicago truncatula
  Intron number 1 from transcript Medtr6g078180.1 (locus Med tr6g078180) derived from phytozome v7.0 (chr-ID MtChr6; po s 15879376 to 15879762 reverse strand)
ttcgctaacaaagttggtccttttcataatccaaggtgattcttcgatccgttattcacgtgctggatctgttttcgtttcatcatcaaagttctcaattacttctagattcatcaatttcgtaattttcagtattctgtcacattttttaattgaatttttcattcatcaactaattagttacacagacaccggatacgacacagacaccagatacgacaccgtgataattttagaaaatgattaattgaatgtaatcaaatgtgtcgcgtcggtgttatagagttagtaatgcatttgatttgatgttaatgtattgatgtattgactttttgttttgtttgattttcagtgagacgtatcggtattttgatctgccattttgta

SEQ ID NO: 33719 - DNA, 848 bp, Medicago truncatula
  Intron number 4 from transcript Medtr4g133900.1 (locus Med tr4g133900) derived from phytozome v7.0 (chr-ID MtChr4; po s 32174564 to 32175411 reverse strand)
ctcggccgtcagaaacagtgacaaattccgttcaggtttcctcttttatttatttttcgaattttgctttccttctcctgtttcacacgctatgataattgaattgggtaacactgtgattacgatcataggatttcggtatgatgtgattgttatttcatttatctttccattcctattcctcagatttatttgccctatttcataattgtattaagaaatattatgtgtaaacaacgatgattaatatctagtaatgtaatgctgctcttcaaattatcacaatcacaatattagttatacttattcaaccattcttgtccttttgcttagataacttaattgacaatagggtttttgatttaataccaaagtaatgctttaacatcattttatttatgcaaatagagatagatgattcaaattgaaagaaaggaaaaccaatcatcaagaaaggaagttttgacactcgcgcatctacgcgcgaaggcaggcacatgcacgcgtgcgcgcacacacacatattgaaaatatactctttttagctattgaaaaaaaaagacttcaattacatttttggggattttttttataagaagaatttggctagtttttgttataaattaaactttgtcttcataagcacaccctaattcactaattttcttgcttcgttggacacgtatacacttttgattttgcatttaatttaaaattttacagtagatccatatgattcacttcaaacaaaattgcttggtagtctctgggccacataaaattatgttagtctcttgcttttgtttttgttagtttttttgcatactgtattgattgtcgtacaaaaa

SEQ ID NO: 33720 - DNA, 219 bp, Medicago truncatula
  Intron number 1 from transcript Medtr5g019730.1 (locus Med tr5g019730) derived from phytozome v7.0 (chr-ID MtChr5; po s 7393489 to 7393707)
acgcaaacggccttcgtcgccggcaaccagaaacggtaagaaactctttcctcttttcctttcttttgctggttaattaatttcttaattgattattctctcataattaatcctgcttcattttcttttcttttggtaatttttttgtattcttttgattttgtgataaattgttgattttatgaatgcttgatgcaactgattaacaggttcatccac

SEQ ID NO: 33721 - DNA, 677 bp, Medicago truncatula
  Intron number 2 from transcript Medtr1g122050.1 (locus Med tr1g122050) derived from phytozome v7.0 (chr-ID MtChr1; po s 26734951 to 26735627 reverse strand)
tactatatttggaattgctttttatttggtggtatattttcacgaagttttaaaatggctacaaatactgaagcagaaaggttgtgacatatatgagaaaggtatagatgatacttgattgaacggtggtagtggtgagtggtttgacataaaaagaagaaaaaagaccgaatgtttttttttttttttttttacacataaaaagactagttacagaaaggtaattaattttgcagacaatgggataaaatagttgaaatgagtcaatcaaagaacctatcttccttcccatttgattagctcttctacgggacgatagacaccataattggccaaatgaggttattttgaaaatcaacatagtttggggcattttctctaagagttcaaggatttcaatttaaagaaatgaaagaacttacttcaactttttcaattccatctttgaacattttcaattttgaagtctttgagagttagaccaaatgttagacaaagtattatgtagtgatcctttgaggataggcttgtcttgtctgtcaaaattttccctaccggctatttttaaatatctttatatttctttaacatcatcttcagaaaacataattaatgtctcatcttgattatattcctcgtgattcagacattgctctgcagagttgttcatattgcag

SEQ ID NO: 33722 - DNA, 688 bp, Medicago truncatula
  Intron number 1 from transcript Medtr1g122050.1 (locus Med tr1g122050) derived from phytozome v7.0 (chr-ID MtChr1; po s 26735631 to 26736318 reverse strand)
gatttctgctgtttgtgctgtccttggagttggaggtgaatgttttagtctcctgtaggaggcatatgttggagcttagaggttgctttggtcttcctgcataacgccagctgcctctcggaattgtattttagtgaggcggtcttgggaggcaagttggctctatgcttgagattttggttataaattggcgtggtctgaggctatatttaaaaaaaaaaaaaaaaactttttgcctcttcaaaaaaaaagaaaagtggcatgttagggagagcaatatatatgtttgtgcatcattggataaatagttaattaagcgctttttatataggtgtttatatataagctatttttgctataaaagataaataagtaaaattattttcataagttaatttggagagcttctagaaataagttgaaaacgcctaatagatgtgtcataagtttttttcatgagttttcataaacaatctcacaaatacttatgttattagataagctcaaataaataaatataattcggtgtatggtttgatgtttatgtggttttagatttgtttacattttgttgtttatatatttaaattttttaattatctttttacttttttttttgagcaaatcttttttctttatgttgtcataatgatgctggtgacattgttcatgtaggcaaaatcacgtt

SEQ ID NO: 33723 - DNA, 676 bp, Medicago truncatula
  Intron number 3 from transcript Medtr6g093370.1 (locus Med tr6g093370) derived from phytozome v7.0 (chr-ID MtChr6; po s 20008859 to 20009534)
acgattgtgttggcaaattcggtaagttctttttcttaattttgttaatttgttcgcttttttaaatagaaaaaagttagtaatcagtggttatgaatgtgtacgtgttttgtttttgttgaatcaattcatttcaattctgtaaattgtttgaataggaagctaattcttgttgtttatccatagatgctaaaaattaaagcctattgattgttttgttttgatgttatcagaattttgttgtttgctatagggtgttctgtcattacaattttgttgtttgctagttttttctgtcattggtggaatgtctgattgctgagaatccaatttttgagatgagtcactcaaatgttatgtcatatactttttgttctcggataaaatgtgctgctatctgatttatgtttgctgtggtgtcctttaagtttatcttatctcatttacatgcacatttatagaagtataacaccatagtaatataatatggaaactaagaagtttcaaatggcatagaagaaattgaggaacaaaaaagatattatctagctacgtgtaaacatggacatgccacattgaaatgaaatttttttcggattctccttcacattttctattaccttttgagacctctctttagcttctttaaaccgactaaacatggttttttacagga

SEQ ID NO: 33724 - DNA, 271 bp, Medicago truncatula
  Intron number 1 from transcript Medtr2g125990.1 (locus Med tr2g125990) derived from phytozome v7.0 (chr-ID MtChr2; po s 30446184 to 30446454 reverse strand)
aagccgctccttccgctcagttccctcctcttcaggttttctcaatcgcaccattttttcactcttctatttttaggttaagtttatatgcattttgattttaaactatgcttagcttcaattagtttcttctattagttagaattgtttttgattgtgaaaattgaaataattattgatttttactatgattttggggatttatgattttgaatttacctttttatgttgtttagaggaatttggatcaacttgaagcgttatcgaagaa

SEQ ID NO: 33725 - DNA, 587 bp, Medicago truncatula
  Intron number 1 from transcript Medtr7g026680.1 (locus Med tr7g026680) derived from phytozome v7.0 (chr-ID MtChr7; po s 6888103 to 6888689 reverse strand)
ggaagttacaaaccccgacgtatgtttttgcagctgatttggttatgcacagtttatgttgatttggttatgtacagtttatgtgcactggatcgaaaagaataatagactgttttctaataaattaaatcctattatgcagctcatggaaaagatcaaaattacttccttgaatggcttaaagcaaaaaaagttgtttttccctttggttatcatttgtggtggcagcaaccctttgcttgtttggacatcggttgactgtcttttttgtaaatatttaggatacttggtgtttcttgttctaaccttctaggcacatcttatgctagaaggtagaaccttttcttgtggtaatacatctcatttttgcttgttcaaaaaaaaaaaatgagtatagagaccaaaaacatattttattgattataaatgaaattttactgattataacaaaaacatattttaagggtgttatatataatcagtaaaatatgtttttgaacaagtaactaatgttttggtgaattgttataattgttttaatgaacatgtgaacaacaaattatccatcactattttaatttttgcag

SEQ ID NO: 33726 - DNA, 501 bp, Medicago truncatula
  Intron number 4 from transcript Medtr7g064510.1 (locus Med tr7g064510) derived from phytozome v7.0 (chr-ID MtChr7; po s 13003403 to 13003903 reverse strand)
agaagcattctgaggctgctgcatcttacattgaggtgatcttaacatgtaacatctgtatttttttcgctagagtatgtttggaggggaggacttattattcttttctagcttaaggaagctataaattgtttttaaaaataaattaagtgtgattaaaatgttatatgatcatctatgatattattctttaaaacttttattaatctcacatacatatacatgtagtcctccaaaaccctccatccatatatatagccttagttattttaaatattggaaggcgagccttgccgcaatgctaaggtttctgcctgtgcctagtgagtggaggttatgtacatctaacctctccatactccacttggcgggaacttcgtgcactgcgccgatttttgttcttttgaatattggttcgtagcaaactggatcttatatattaatatatgaatttgtttgttggtagacccagcaaacaaaggtgagagaacagcctcaaat

SEQ ID NO: 33727 - DNA, 874 bp, Medicago truncatula
  Intron number 1 from transcript Medtr7g064510.1 (locus Med tr7g064510) derived from phytozome v7.0 (chr-ID MtChr7; po s 13004474 to 13005347 reverse strand)
actttctccatctgcactcaaatacataaataaaggttcagtttttatttcttctcttgaaattgggtcctaccgtcatagttgattttgcttaattttgtgttttcatggttttagttgtgtttttgtatcatgggatggtgatttaaggttttttttatttaattgtgaaagttgatgctattgtttgtgtaattgtgatagttgatattaatttgtatgtaaaattgaaagttgatgataatttttgtgaaagttgatgatgatttttgtgttattgaaatttgatgttagtttctgtgaaagctgacgataattttcgtgtatctgcgaaaattgatgttaatttttgtgtaattgtgaaatgattgttagatttcaagggaatctgaagtgaaagaaataaaattttggttttgagttgccagaatttagtccttatgaaaatgttaaattgaaaaatgagaaagaaaattgtatgtatgtgaattagaaagatgattataatattttgtgtaattgtcaaagttgaagataatttttgtgcaactatgaagtttgtgttaacttttgtgcaatggtgaaatgattattagaattgaagggtttcagaagttaaagaaacaaaatttgggatttaatttgttaaaatttagtctttatgaaaatctttgattgaaaatgagaaagaaaattgtatgaagtttgatttttgtttgagtctaattactgacgttggttttttgtgtgatcatgaaaattgtatggagtttaattacttttattatggttgattttcgtgtttaaaggcttctaagatatattttctttatttgcagggaatatagcacaggtttctttgaagttggtttgt

SEQ ID NO: 33728 - DNA, 716 bp, Medicago truncatula
  Intron number 2 from transcript Medtr2g076710.1 (locus Med tr2g076710) derived from phytozome v7.0 (chr-ID MtChr2; po s 17403158 to 17403873)
agaatcttctcttaataccttctggagtagtgcaggttcctttcttttattttctaattttttttttccgttttatttatttattcatgtggaatctgcatttagtgtgtttagttattcagtaaaccgttattttgatcctgaatgtatcaattggtgtcaatatagttgtaagcacggacatgtcgacactgataaatttttgagtaggatttgtggccatttgtttttgtctagcttttgctagcttctgaagagctagccagctagggttagttattttgcgttggcttagtctgcccttgtacagttgtaccacaagagctgaaaaatttacgcactgtgttctaataattaggatttggtagtgacaaccgagggcctgttgtttctgtttatattttatgtttttgcttttaatttcgaaactgtcaccttgttgtctattttcatagatttgtacaggctacactaaaaatagaaatgcaaaaatctttgaaatcatggcagtggtttgtaattaaaattgaaaactgaaaactagaaatgaaattggaaatgttttttcaaagtaaacaagcaagtttgtgttgtgtttgggtgagcatatgtcaaacttgaatttgtgaatgattttgattttgtaaaattttctaccttagtttgatagattttgttcagattacttctgatttacatcaaaaagctgggcttgg

SEQ ID NO: 33729 - DNA, 690 bp, Medicago truncatula
  Intron number 2 from transcript Medtr5g090340.1 (locus Med tr5g090340) derived from phytozome v7.0 (chr-ID MtChr5; po s 35242563 to 35243252 reverse strand)
acaagttgatcgtttgacgatctacaatacatctggtgagtatactaaatggagttcaaccatcatatgatggaaaaagaagaaaaaatcttatcttaagatatggttattgttgagaaagagggaaatgaaaaggcatctaaatgagtccatgttcacacagtgtagccctactgtacacataatttgtttttgactatttcatgtgtcactattttaattttgacaatgacgcgatggcaaaatatgtttttatcaacaaggattaccgtgtttgagtcacagaagactcatttcgttgtttatagcaaaattttctgtgtaagttcaaaatgccatccatattggattcaaatccagagcctatcatttgcaaaacaaatatttgactctgcaccacttaaaacatttatattattttgtgcaaaatgtgatatataaacaaatgtatgggggagccacgactcccacaagtcatagtggactccgccaggcaacagaccaatgggggtcgtccggggtttgttttgtatcagatggttctatatttgatttaccatatttgatttcacgttatttttaaatcttcatatatcaatctgaatttcttcatatttcaatgttttatcaactcaaattttctttggtttaataggtgaaatagtttcagttcggcttcctcgtactatc

SEQ ID NO: 33730 - DNA, 806 bp, Medicago truncatula
  Intron number 1 from transcript Medtr2g077400.1 (locus Med tr2g077400) derived from phytozome v7.0 (chr-ID MtChr2; po s 17833314 to 17834119 reverse strand)
gaaagagtttggtgcattgacgctccgtgttggcggtagtagtcattatgtaccttaagatttgttgggtatttttgggttgtgatggtgggtccttatcgctttttggtttggttgatgtttactctggcgacaaacgccttcttcttgtcactagtggccaccttttttcgatctgcgttgtgtttccgcttcagggcgacgtcgctgcctgtgttttgttgtttggtttcatcttcctcttgatttgtgatttgtgtggctgcttgtttcttgatgaggtggtttgatgacatagttaatgtctatgtcactagtttgtgggtaaattttttttggttgtttctttggattgctgttggatgttgctgctttccttggagactttaagccttgttgtcttgctcttgtgcttgttgatccttttggtcgttctagttttagtttcgtattgtttttgttctgtactgttggttttggtgtttatgttgatgtactgttttgggtggcatcaaacttcccctttttggtggtttggtgtcgttttaacccgataggtggtgttgcaatggtggtgctggtgatggtgatgtaggggtggtggtgtttcagtaataaggagtggttggtgttgcttaggtgaagaggtggaaggctttttgtggtggttgttgtggctgatcccttttagaggtcacctctgtttattcggtcaatatcagttgtcgctaatcttgtttgtttgaattttgggttgcttaggtgtttaaggtgcgttcagggtgtgtgttcttcgagttgagctt

SEQ ID NO: 33731 - DNA, 796 bp, Medicago truncatula
  Intron number 2 from transcript AC233677_10.1 (locus AC233 677_10) derived from phytozome v7.0 (chr-ID AC233677; pos 55212 to 56007)
cctgtgcctcacttttgaaatcaatactttgtgcggtaggtcttttttatccctaaattatttatttattctaaagagaacctaaagaaaaaatatatattcaaggttttttatagggaagtagagggagaatttgtttgtactttgtctattcttatttataagacccttttaaaagatatgtctatccctaaatataagactgtacaaatttctagatactattgctctttctccaaatacatcccttattaatactatcaattggtcttgaaatatgaaaagtcaacattgaacacacttatacacaaaaggtaaattagtaatagtcaaaaacaaattatacacatcaattacactatcaacttttcttaatatgaataaagagttccaaaaggtcttataaataggcacgaagggagtagcaatgatcgggccctagaccttttgcttagtactctttcagtgtctcaacgtgggctgggacgagatcttgatatattcaaacctggactagtaaccgatgttttaaatcgcagttgtgattacagtcttgatcccaaacattccgaagaattgcagtcttatgcgatcaatgcagcttcatttacggttacagagacatcaaaaacctgtatatcgtgacttagattgttgttgcagagctttttttttttcaaaaacctgccagtaaccacttttttcagttcaacaattaacttctgacttgtatgtagctagctaactttgtttgtttgtagaggtgtgaccctttttcaggccagctgtttacggt

SEQ ID NO: 33732 - DNA, 908 bp, Medicago truncatula
  Intron number 1 from transcript Medtr6g012980.1 (locus Med tr6g012980) derived from phytozome v7.0 (chr-ID MtChr6; po s 2604116 to 2605023)
aagtggagggcgttgttggtggtcggtggtgaggacgatgttggtagtgagaacgacggtggaggaggactgcagtggggtggaggattgtggtagaacagagggagaagcatacgtcgtatcagagaggaagaagaatgatgtgttgcatttacaaaaataccccttctttaaggttgacaagtccaaattatccctggtgtctgtattgtgttcaaaaaagtgtgtccagttttcattgctcattaaattaagtctatttccatcatcttaaatacttaagcggttttcctctactgctttataaatcagagtgagtttgttcttatcacaaacacgaaaatgatattgatgttgctattaatttgtagatttatcatttaaacaaatttctttaatgttagtatgttaattgtcatgtcaattttttctcatacttgaaccttgaacctcgagcttcttaacctttagtttaaactagttgaactatccaacaaatctataaattcttttattcagatttccattttagaaaatccagtagttcttgtatcttgttggattttgcaagatttctatccacgttacccatgcctaccttaggattactatcacttttgaatagagaaggttgataattggtttttagattaaactttttttccccattcatttgagttttgaatctaaaatctttaaatcattatcttttaattcaaattagttgagctgctcaacggtcaaacctatcactatcacttatgtatcatggccaatggactacaagctcactatataacccctcacacgtcattaagaattgcttttctccatttcaaaattactctttttttttttaaaaatgtccaacgtaaattaacgcatgtaggtacaaaagcaaaagcgga

SEQ ID NO: 33733 - DNA, 1054 bp, Medicago truncatula
  Intron number 1 from transcript Medtr3g111100.1 (locus Med tr3g111100) derived from phytozome v7.0 (chr-ID MtChr3; po s 28083306 to 28084359)
acaccactcacttttcctcatcggccactctttcagtaagttctttctctcttaaactttcgaatttacattatataatgagattcacgctttcattcctgcattttctcgttcagttactctttttttattgtatttcttctaattatttatttatagtggtcgaaattcgcttagaccatgtttcgataaacaacttattttccaaacatatgaataagctatttctataacacgtgataagatcaaataaactaaaatttgtttttttgtataatttataagctctttcataagttctctgaaacagtgtcataagtgcttatgttagttgatgaactcaaataagtcaattcaaacagacattcagtttgagcaatgcaagcaaatcaacaaactttttgtggttgccgtaacggttatattactatccttaatattgtggagaattccagacaaatgtgtccacagttgtattaaagaccactaaaaccttcatgtgtttggttctgtgcaaaaatccaagttttatattgcttgtgttacagagatgaaatgttatgatggacagtggacagatagatttacggaaaattggcattgtttctttagtagacaagattgcagagtcttgtctaaagtgtggtttgaacatgtgtgttgaaaatctttagaactacctctaaggacgggtaaccaggtagagagtaattcaatagtgagagataaagagggaccaagaaaattattattgattaaacctcttaggggtaagcggtctatttttgaacttaattcatgagaggaaattacgagtcatttaattcatgtaaaaatcctcacatagtggaaaaaaaaacaatcattcttattgtttaataccatgataggtagggttgcctagtgtttttgttccatgggttgcaggatagtgtcttctcatttgatttgcatctgtactaaacttttactcttctatttcctacatgtcagtttttcatgtatattttaaagttggaggcatatttcgttcagagattgtgaggattcattt

SEQ ID NO: 33734 - DNA, 666 bp, Medicago truncatula
  Intron number 1 from transcript Medtr6g062140.1 (locus Med tr6g062140) derived from phytozome v7.0 (chr-ID MtChr6; po s 11287626 to 11288291)
ctaattacggtattttagaagaaaaaaaaattataaagttatttgaagtttactctcataggagcctaagaagacctacgcggtggagatattttggacatcaagagtcaaattatatcaaaatttttataataatgatatttgtataactatttaatttattgacaacttttttgacattctttatttaaaaaaaacttttgtgatatccttcgttttctcattttttattggtcaaaaaaaatagagagaaaaaaaaaagtgagtcagagcataatgtgagtatgagatagttgtttaaaagttgtcatataatggtcgtacaatattgtttttttttttttttttatttataatttggcacttgtttactcaatcaaataaagattttttttaatttcattaaatttttaatttctattatttttattgagaaaagttggacatatatatatatatatgagattttggtttagaaagaatcaacaattacttggacatatttgtttaagttttctttgcccttcaatcatgaacatctttaccgttcttttatttcacttttcttgccttgccttatcagcgtttcattttggtatatgcactcaatgcttttgaaatgaacgtgaagcccttttaacatttagacaacatctcattgatcca

SEQ ID NO: 33735 - DNA, 663 bp, Medicago truncatula
  Intron number 1 from transcript Medtr4g159840.1 (locus Med tr4g159840) derived from phytozome v7.0 (chr-ID MtChr4; po s 40403533 to 40404195)
aatttcgtttactcatttccagttgtttgtttaatctcttccactctatgttttgttgatttatgttttcttgaacatttgattttaatttgatttgaatgttgtttgtttgattagttttttgtttgattttgctggaatggataatgctttctttatgtttgctttgttgaaattgtgtaagatgtttgaatgcttgtcgtgttctattttggctttgttatgtaacttatgttgcttacacaatgaggatccataaatgattgggacctgagatgaaaggtgaggtatatataggactttttccatatcttcttcactcctcactataaagaacattcaaaggattcttcacagtttcttaagcaaaagcgggtgtttcctccatctgtttagttactaacaccttagcttcatttagactcatcaaatattgtatatggttgtgttaagttctctaatttgttgtgctaggatttctgattgtggacttgaattttttggggttagtaagagggatagttggtcagatggatgatgaatattagaaagcaggtcggggaggtgtggtggttctaaggaaaatggtgtttattggttagggttgattatgttggaagtgaaagatgtgatgtagtgtttttggtgcagtgagatttagtg

SEQ ID NO: 33736 - DNA, 739 bp, Medicago truncatula
  Intron number 2 from transcript Medtr4g107870.1 (locus Med tr4g107870) derived from phytozome v7.0 (chr-ID MtChr4; po s 23680071 to 23680809 reverse strand)
ctcctcgttctgatttcaaaccaaaccaatcccaggttcttattactcttttcatataattcatactgtcttttagggtttaattggatttttgtatttgagattatggaaacaacttataacatgtagtttttagtttatttcaacaagctctttatgactatgaagtaatgacactaacacgtccaaaacaactattgtatgggaaaatgacataattgaatgtaataccggcgctgcatagcttcacaatatcttaggacaacaacttgtactatatataagcatttatatgatagatgctgattccagaagcatttaattaagttgtttatccaaacagggccttagtttaaacaacttaattttccatttaataaactcttgagagtacttattagataagcttaaataaactctttgatacatcccataatatatacagattgtgaaggcgttttctttttttttttttatttttttttattttttatttttattgttgaccattgtttataatacatggctatatcattgatgctcttcaatatttaatgagtagcttttttgtttataatacatggctatatcattgatgctcttcaatattcaaggagtagcttttatgaggttctcattgttgtgtttgattttaccttccttgttaatataattatgtgatcatttgatttagtattgatggtttacttctgatgaatcagcctcttgaaaacaacaa

SEQ ID NO: 33737 - DNA, 826 bp, Medicago truncatula
  Intron number 1 from transcript Medtr2g114540.1 (locus Med tr2g114540) derived from phytozome v7.0 (chr-ID MtChr2; po s 27106191 to 27107016 reverse strand)
tcacctcataaagcttcttttgatcggagatagtggtaagttactcctttgcctcttctttcttgttttctcatagtgaggccgatgtactttagttttagaattcaatttttcaatcatgtactttgatcaattataaatgcaatattttgtcaagggttttgacttttgaatttgtacattgatcaatctagtccctgaatttgtacacccataaatttcgtccctgaattttttgatacagcacaatagtctttgacgttgatgacgtgcaaaattaaacaatggtgtgtcagtccatgcgagttttaaatcacttccacattgaatctattgggaatgaattcaaaacgattgtactttgaacaactataaatgcaattatgttgtcaagggtttgaattgggaatttcctctgatcctagtttgataatgtttgttacccacttaaacatgatatattcgttgtcccttccaccctccatttgtgtaattttttgttagtggatgaatatgataaaagattaactgtaaactataaataaatggaactaatattagtggtcgggcctagcaaaaggaactagttctcgacaatgtgacgaacctaagttcaaattcttgctggaaaaggcagccacatttagtacgtgacgacccctcgaccccttccaccctccatttgtgtaattatctgtcttttccgtatccaaactttaagtgtataagggtgctttggtgtaaaaattccttaatcttctacgattcctgtatgttattcttcattgcaggtgttggaaagagttcccttcttctacgtttctct

SEQ ID NO: 33738 - DNA, 905 bp, Medicago truncatula
  Intron number 1 from transcript Medtr5g082780.1 (locus Med tr5g082780) derived from phytozome v7.0 (chr-ID MtChr5; po s 31200331 to 31201235 reverse strand)
actgcttcgttaatgtaagttataatataaatattagttgatcattcttaatgctcaattagcacgggatatcccttagtattaactttatggactatcaatattttttgtgatcgtggttttatctaacttgagaaattagtgtttacaagattgcacatatatgatgcttgatttatacctaaaaaaaacataattttgaagagttccatgcatgttgtagaatactagaagtggttattatcctttgactaaacataattttagtatatatgtttaaatattttcattaatttaaaaatttacattaaaaccatcttcaattggttttaagtgtgtacttacacttaaaatcagttcttaaattttgttccactagagttcgctaagggacatccatacaattttttaaatgaagttggatgtctccatattgacaatttcaaacattgaactcagatttttcatataaattttatggccaaatggaatcttaattattttatgcagggcacaaacaaacagaaatttcaagaacacatatgaaatttaaaattcttacgaaaatgctgtcttacctaattattggccgcttgcttcagttacttttttctattaaaaaccttagtttattttaatttcaacttcaagaaaattaaaatttcaaatttccacatgctaagtattttaacaacaactaaagagtatttcttaattgtgtcttgtgatcttcaatatggtccaaaaattggtaatctaagtaagaacattttctcatataatagaaattactaattcaaatacacattaatattttaaatataaagataacacatgtgaacatgtcacatttttcaaaacatatttaactagtttaatatcaatgattgaattttagggttgtg

SEQ ID NO: 33739 - DNA, 797 bp, Medicago truncatula
  Intron number 1 from transcript Medtr3g024940.1 (locus Med tr3g024940) derived from phytozome v7.0 (chr-ID MtChr3; po s 6370420 to 6371216)
acgttcaaggttttaattttattgagattgtttcttctagtcaagaacattgtatcaaaaccatattggataaacaccagaaaactttgttgattgtttctttatttttcagtaatttgaatgcatgaagctgtgtgttctgtatgcatctgtgctacctgaaatcccctgttctctctgtgttaccaattgcccatgctcattatcccttattctttcttggagttagtggtacaaaacaaaaaacttgcattaatttaaagtagtaaccttgaaaatcttcagcttattactaattattgggctgagtttttactagttattggacggagttaaaccactgagttatttttattgcttcttagtattgtatggtggcttgacatagaaaaatagttgcctgttgactgcctgggggtttgatttactctgttcgtgtgcgcagagcagctatagagacatttgctcataactgggtggagtgcatttgcgaacaagaaaatgcttgtgagcagtgatgcttaatattgtgtagtttcttgtgtgtgtaacctgaattctatcaaatatgagtattcttaaccaaaactaacattttattattgataccaagggtgtggatgcgtttcgaaactgaattgccttgatttggtatgattcctatccttataatttcaaaagtatattgattatgatattgattaaaaatgaagatttatttgcattgattttaatatttttttgttacaagctttaaagcagccatctataaagatccaaatctagccttatcaaat

SEQ ID NO: 33740 - DNA, 753 bp, Medicago truncatula
  Intron number 2 from transcript AC233662_32.1 (locus AC233 662_32) derived from phytozome v7.0 (chr-ID AC233662; pos 149800 to 150552)
ataatacacaggtttgttaagttacaacaatgttttaacttttaatgttgtcacattagtttttttttttccttttcaggatttgatattttctatccaattggttgttctgaaatatgaagattattggatttattgtttgaaattttgatttttggtatcatattctattggttacttaattttgacaaaaatttgtcattttctgctataataagaaactattttttagatgaatttttgatgaaagggtattttgctttatatccaatcaaagccactctttatcaggttgttttgtatgaatttgaagcattgacttgatttgtctttttatttttttgacataggattgatttgttttgctacttatttgtacaagtataaagtgaatatttattatcctccctgaggtgataactcagaaattgaattccctgcattgattgggttcatgtatttgagacattgatcggacgattcacaaaaaagaagagtttcatttttattttatacttcaaaatacttaacatgagtctaaaacgtccgatcttgtccggctcacatgtgtgagtgcatgaaaggccgactgtagtggagcatagctcagtggaaagggacgtataatacaaagcctttatgagatagttgtaaaataataatactactctgattaataataatgtaccgatttcaaactgtctcttttaaatgttgattacgctccaaaattttgtagaggacttttgtttt

SEQ ID NO: 33741 - DNA, 1056 bp, Medicago truncatula
  Intron number 1 from transcript Medtr2g095260.1 (locus Med tr2g095260) derived from phytozome v7.0 (chr-ID MtChr2; po s 21705546 to 21706601 reverse strand)
caatcactcctttctattttctatcctaaatttaggtgagttatttttccctcatctttcttgcacctcttatataatcattcatccattcccatcatcttcttcctcttttttctaaattctccatttttattattgatttcaattttttttatagattccgttttatttttcttcttctttttttggacttctatttttctttatcaatttacactccttttattttttgtttatcatttctattccttcaattttttgtttatcatgatcaatttttattccttctatcttttggtatgttgtggataatcattttgaaaattcaatttgttaaattcatctttttttttttctttccgatttgttttcctttttttcttttaaattcatatttttttctttttttatggatttgaactttcctcttcttttatttttagatttctattcttttttcttttcttttcagattcctttttattttgttttttttttttatggccatcaatggatttcaattttttcatctattctttgatgctattataatatgtataatatgaaaatctattaaaaatgttattgattataagggtaattttgtaatttaatatgataaaatattgttatcctgatgcttatcatgtgcgcatcaaacacataataggataagtgttatcatgtctatatcctataatatctctatccaattttatatcatgtcatgtctctatcctatcttgcgcatcaaacgaaccctaaatatgttgttcaatgaagtagatgcatgcaataggtggggtgattaaggagaaggattttatttcaatgggagagggaattagttggggaatgtgattctctattaattgattgttctttgatgttaatgtatctaacatgtggatgtggggaaatgagaattgcgacgagtgtattgttaaaagtgcttataaatcactttcaagtggaagtgtggttgaggattgtacttccggcgatttagtctagaacaaagtcgtgcctttagaggtagcactttttgtttggaga

SEQ ID NO: 33742 - DNA, 518 bp, Medicago truncatula
  Intron number 2 from transcript Medtr1g037310.1 (locus Med tr1g037310) derived from phytozome v7.0 (chr-ID MtChr1; po s 8743785 to 8744302)
ggattcttgtccagcttcctctaccacaagtaatttctgaatctgtgactttttgccgtaattttatgggttactattctcatgactgtcatcttccatttctcacacttgctctcacacactttttcagctcccatcgcttgctgagctttagcatagatcctgtttgaaataacatttataattatttatggtccaatattatcatgaaaatggggaagaataagatgaacgtagaattgttttctgtcgttggttaaatgagatagtacatcaaagtacaccaatctactacaattctaagttttgttgtttggaggagtcatttgctgatgcaatattcttttttttcttcttcttctgaataaacaagtttacatgtcagatggacattcataataaataattaggcaaatgaggattagcacttgtgttcaggattcgaagctgtactgtgattgatttgttgcaaaatgtttgggacagcatctggacgaggaaaaaatcctagacgctgt

SEQ ID NO: 33743 - DNA, 263 bp, Medicago truncatula
  Intron number 1 from transcript Medtr4g110030.1 (locus Med tr4g110030) derived from phytozome v7.0 (chr-ID MtChr4; po s 24784479 to 24784741 reverse strand)
ttggagttgtaagtttttttctttgtctttctctatctttggtccatttttcttcttgttttcatcaaactcaaatctatttgagaaatgaaatgatccaatgtaataccataacatagcaacactgttctatcgttttttatcatcagatttataattcgtgcgatattattttgtttttgtaaaattatatttgcatgcacacaatgattttattaaatttatttgtttgatttgaaaattataacagggtgcatatcggg

SEQ ID NO: 33744 - DNA, 739 bp, Medicago truncatula
  Intron number 1 from transcript Medtr2g026940.1 (locus Med tr2g026940) derived from phytozome v7.0 (chr-ID MtChr2; po s 7425591 to 7426329 reverse strand)
ttaaaatctagtttttgaacctacaaatgttcaatatatatgttaaaatctagtttttgcttaaaccttgttttgaattcaaaaaatttcgatttcgttttgttgtatgtgctagttagtatcaatgtaaatttacgttattcatttttttttttttttatatttaaaactaaactaataattaccgtgaaccctggttgaattaaatcccggtaagatctttaaaccttacaccaatgctacactagttcaatgtccggtccaattttgattagtttagttcgtataaattatatgcagttgaagtagatgaaaaacatttgcctctatttatggaaattgtgaaatactgttaggttaattccaagaaaatgtagagatgcataaacaaattgttggcaacttctaagaaaatgcttatactcaatagaaaaacaaattgtatgcatgcaccattatatgaagaaagcaattgatagagttggaaccttagggctgaaattcacaatgttctattttgttctttgtactgtttcacaagttttcagccatactgtttgttaactaattcttttatggtacaatatcctagtaaccttttttaagggattattaaaaatggattctttgtttagctgattcttcctttatttgttcattgagttttgtgaaatctatggttttaattgacaaaatgcactgactttattctttgaattaatttgtttttcatcagatt

SEQ ID NO: 33745 - DNA, 649 bp, Medicago truncatula
  Intron number 2 from transcript Medtr2g110060.1 (locus Med tr2g110060) derived from phytozome v7.0 (chr-ID MtChr2; po s 25709069 to 25709717)
gggtgatcctagtgaggtatatgacaaaaacagttatttactatgcaagaaattatttgtggcttatataatttttacttttagctctcatatagtagaactacattactacaaatatgactagaattatcctttatgaaattggaagaataaaaaaaaccacatatgtactctctctgcgatgtccggccgtctcatttgcatgtgttgtttatggtttgtgatgtcagacactctaatttgtatgtggtgtctatgaattgttgtgccgagtgtatcataggaaaatagagggccatgcttaactattttttttctcatgcttcaacctcagttgaaaaagggtatactagacaatcaaaactgttacccctgatgcatggccaaattagctagagatctgcactaatctcatttctgtcttcatgcagcatctatgcatgcatgaagaccattgcatatgagtctgtcgggtgatatacatgctgataagttttttttttttagagatgcatgctgataagttgctttcttgacatggatagtgcttacatcttagacatatatttctattccatttcgcaatcttacagcgaaaaccatgaattctgcaggacataaagaaaaagccaaagtatttacttacatt

SEQ ID NO: 33746 - DNA, 800 bp, Medicago truncatula; identical to SEQ ID NO: 28394
  Intron number 1 from transcript Medtr1g094050.1 (locus Med tr1g094050) derived from phytozome v7.0 (chr-ID MtChr1; po s 19358570 to 19359369)

SEQ ID NO: 33747 - DNA, 605 bp, Medicago truncatula
  Intron number 2 from transcript Medtr3g100740.1 (locus Med tr3g100740) derived from phytozome v7.0 (chr-ID MtChr3; po s 24240386 to 24240990 reverse strand)
tcctcacagatatcgggttcgtatatatacccatccccatcatttgattaattgatcgttaatgttacatattaatccctcaaattttgctttggcataaacacatttttagttatttttgcttttgatccctcaaattttgtctcctagttggtttccctacatgaacttggattctctgtagttgtcctgaagttgtaccgaccgtgggatttagaaagataaaacttctaaatttaacggtccctacagctgcagcatcatccgtagagaatccaattttaagtgcttgatggttgcaagtaaggattctgacaccaaagatttggtagcctttatatattagctctctaatttacatggttagctataagaccaaagatatattttaaggggctaaaaacacatttaacagaccaaagatatatttcgaggggataagaaaacgtttaacccttctaatttttaaaagcggtaggcacacacgcgtgtgtaatttaacctgaaagggggagagaaacacatgatttatgaatatgtttttgatgtttaatttgttttatcatgcaggggtgtagttcaagaggaggaactattaacaataa

SEQ ID NO: 33748 - DNA, 891 bp, Medicago truncatula
  Intron number 2 from transcript Medtr6g013820.1 (locus Med tr6g013820) derived from phytozome v7.0 (chr-ID MtChr6; po s 3047658 to 3048548 reverse strand)
atattagggttcttcgctcccttcaccaacatcaagttcgtttctctttttctttttcttctttcaattgattattgatgttctaattatcctcttcattttgatgtctttcatgtttgttcttgttgtgtttttgtcagtttgatgaaatatgaatattgtttatgtttgatgtttcagatcattagaattatgcatttgtgatatttaggatctttttttttttacccaattgcaaaaaaaaaaaaaaattgtggttaaaacgcttcatattgttgatttcaattggatgttgttgtgtgatttacatgcttttggtttcaattggtccttttttgcaaatgttctttggattcaattattttaagtctttgtagcaccgacactttaggttgaaggtgtttctgatgtcccatgcgtgagtgtcagactatgacatgatgtattcaatcatttatattagattaatatattaccattgtcatgttcgatgtgtgatgtgccgatgttaacaagttttaagtgaatgttcaaattgaccggaaaccatttactacgtccataaactgttttcagctttatccgaaaatgctataaacttccatatgacaacaactttatgaaaatgcttaacccttgttgggttccattggatattgttgtgtccttaaattacttttgttttcagcctcaattacaactatgatatcagttttgttgggttagtattgatttaattctcactcaaccatgagtgtcaaatgctatgattttagatttgtttatgagttgttatgttgtttcactccttattctgtcacgtagattatatgttatatgcttctttgattactctcttaacaattgcgaatgtgtttgtgtttaagcagg

SEQ ID NO: 33749 - DNA, 676 bp, Medicago truncatula
  Intron number 1 from transcript Medtr6g015420.1 (locus Med tr6g015420) derived from phytozome v7.0 (chr-ID MtChr6; po s 3838710 to 3839385 reverse strand)
ggtaagacttcaattctaataaaatattacatttcttttgtagaactctaatgggattcggaattaaacttttgcactagtttaattttttttttgcctaaaaaaacacatttatatatggcataacttaatgtgatggttttttgtgattggtaatggtaattggtaagtataattatttgatctgaatctgggagatgaaaacacacaaacattacattatgcataacttgcatgctaggccctaagaaaacgtgtgttaatatgtttttagtctctaaaatatctatcttctgagttttgtcgctatggaattttatttgtttttagactccatgtttgacaaaaggtggagactaaatgaataatttattttgggaaatgttaacgagtgccctcgagacacttttaaaatttttaaatggtaactttttatggaaatttgtctgatcattgccttggaaattgaaatatttgacttttttacgaaataatttcttatttttaaatcctaaagagtgtcccgggtgcactcgttaacaggacccattttttcttacaggaactaatcttaaaaatctgtgattttttgtggactgcaaacatatttaaaccacaaaaccatattatttgcttagtatatttttcttagttaattgagtatgcaatttcaggt

SEQ ID NO: 33750 - DNA, 956 bp, Medicago truncatula
  Intron number 2 from transcript Medtr1g042480.1 (locus Med tr1g042480) derived from phytozome v7.0 (chr-ID MtChr1; po s 9750473 to 9751428)
gcattgtaattttatctttttatattggcgttgtcacctttttgctagcatcggcctagacgattgataactttcctagtatcttgaattgtcttctttgtgtattcaacttgtttcttccatatttcgttaaacttgcaatttatttattgaagtcttgtaatgcatttttacctctttgggtgttgatcttgacccagttttggcctttagagagtttcacctcctttgctgacttgctcgttggttctctttgcagacatactctttaatttgagctcttgcttttttggattggggtccatgtatccagtccttgagtcaaggcccgacttgggtgcatgcccgtccattttctcctgggtggtctcttctctaaatcaaggccatgagttctgctcccaagttaagaccatttttaggcacatgtccgtccattgtgtccttagagtacttgcccttccttttttttgtagggaacaaagtcgtccttttatggcattatctgttgtctcagacattctgtccaatatagagaatgcttcttacatttattctttgactaaaaaatgtggaatttgactatgtcgtgctaacaaaacgtttcaatttactttctaggttttgtgggatacctgctcctgcaaatttcggttttatgatacaatcacattattattttctttcagcgaagtttatttatgagtcttatttactcattttttctccaccttcgaaagtttcttcttttctgaatttatgagaagagttgggttgctaaattctcatgacggtgttgtatgtcgtcaaccattcatacttttcttattatctgctcatggtggttagaagagtatggttgttgacggtggatctttgctatttatgaggaatgaatgtgtggttaaacatggtgttagagtggttcagagagagcttcggtttgtggcctctcg

SEQ ID NO: 33751 - DNA, 849 bp, Medicago truncatula
  Intron number 3 from transcript Medtr2g014020.1 (locus Med tr2g014020) derived from phytozome v7.0 (chr-ID MtChr2; po s 3429519 to 3430367)
ttattctggtaggtttctctatcgttgtgaggacatgtattcctctccctatcctgtttgggcttgagtcatcatgcattgaatatcatgaatgtcttgtgggttatatgcttctcccatttcctccatttcgagtgaaatgaactcaaaaggtttctatttcattgttaacggagaataaggggaagttcattgtcatgcaaaataaaagtttccttgacagttaatctgaatagaaccagttattcaaagaaatatgctaagaaactgaactatgttgaggctggaattcttcttttcttttggcaataataaataattttcttattagaattaattatactgaaaattgctattgttacggcttcagattattattttagttttctttccctgctctttcaattaagttaaggttagacttgtctaatatgtagagattttgttttgacaccgtcttgcattgaatttgtccttctctttccattttggctccatttctagccagtttgtttatggtgcctctcctgtttttgtttgttgatgtttaactttttaaatatcaatccagtctgggtttgcatttgttataccgataaaggtctaaaattatcttttccctgttagttgctcttttgtatgcccctttgtcatttttagcacatgtctttaaatcataaactccatgacaagcaaatgtttgtaatttctggttgtaccatgatgcttgaataatatcttattattaggacctatttggatgcaacacttttggcatagtgacttttctctttatctattatctgtatctcagccatctaacctgccgtggccacaatctttatctct

SEQ ID NO: 33752 - DNA, 572 bp, Medicago truncatula; identical to SEQ ID NO: 27903
  Intron number 1 from transcript AC235009_31.1 (locus AC235 009_31) derived from phytozome v7.0 (chr-ID AC235009; pos 125525 to 126096)

SEQ ID NO: 33753 - DNA, 822 bp, Medicago truncatula
  Intron number 2 from transcript AC145328_9.1 (locus AC1453 28_9) derived from phytozome v7.0 (chr-ID AC145328; pos 42 595 to 43416)
tgttgcgagtatggttctccggccattcaacagcgatgacttgtgtttgtctttttggtatatcgtggttgatatcagatccgttttctttcttggccgtggatgtaggtttagtttgctcccaactgggtagtgatggatcggtcacgtggtgatctgatatggttttgatggatgttttgttttgttgtgttgggttgtggtggttcgcggtggtttctatgatgctgttgatactaggttttttgtggtggtactcgtggtggtttttggcggtgatgcgcgtgatggatggtgttagtttttggtggtgatgctagtggtagatggtaatggtagttttggtggtggtggtggtggtcgtttttgcagtggctagtggtggtagttttgttttttttttttttttgttgtgggttttcttcattgggagtgatggagtggaggtccttatcataaaaaaaaattcgaaagggattgcggttgatttgggaggttgtgatttgcgtcatttggggggcgataaatggttgtaattaatttcaataacgagataactatgtgggatgagttagtggatgaggttaaggttatgtctttgaagtggttattagggagatttaatatgccggcatgtatgttttatgaatggtgttggagctcccaggaattcttgttgaggcgaagtttgttcgtcgactgcacgtgtttgttgctgtttttttggtttaggttgtggttgaattatgtcactcgtaggggctgctgtcctctgcgtgtgtagcaggttgtcttccttttgccttgtgttttggtgaggct

SEQ ID NO: 33754 - DNA, 958 bp, Medicago truncatula
  Intron number 4 from transcript Medtr4g154660.1 (locus Med tr4g154660) derived from phytozome v7.0 (chr-ID MtChr4; po s 38027175 to 38028132)
ctcaaccgaagaaacaaccacaaaatcaagctcaagtaagtatagttcatagctatcgagtaaaatattggtgttttgtcccaatccataactgatccgcataatatactgctggatacagagtaccctttcattttgttttaaaaaaatatagttttaaaggaattttcctatccatctaatctatgatctatctgtcttggatcaaatatctggacttagtaggtatatagtttctgttaagagtctcacattgaaagagatatgtcctgagtttgtaagtgagtgcaaaactcaacttataaactagctttgtaaagttgagttatgcacaatctcaaattctaatatggtaatcagagtctatccaagttctatttggccactcgggtggttacgctccagtccagatgtccaatcttgggtgttagggtatgtgttaagagtctcacatcgaaagagatgtgtcctgaacacgggtttataagtgagtgcaatactcacctttcatgccggttttataaggttgagatggacccaatctcaaattctaatagtttctatccttgaaaaaagtttttcatagttagtctttgttgggtaacaatagatttaggggtggataaatcaacatattttgctgggcggcattttgggtcttagttggaatttgttgcttgtgtgaaatggaatttcaaaagaagctgataacttcagcttatttgggctgccttgccatgttctagttttcttgcagtaggtttctgtagtctagaatactattaatgcgactgttgagatataacataaaaacaattcctaattttctacaattcattcttctagtcatcaaagttccagcaatggcaagttgttggcttcctctatatgcacttcaaaaacaatgctatttgatgatatttcacatctgaaattcctcatttattgcaggataaag

SEQ ID NO: 33755 - DNA, 904 bp, Medicago truncatula
  Intron number 2 from transcript Medtr5g094250.1 (locus Med tr5g094250) derived from phytozome v7.0 (chr-ID MtChr5; po s 37177949 to 37178852 reverse strand)
cttcttcttccttcttgcatctttctttttcttccgtcagttcttcttctattttcctttttttttttttttttctagttatttatttaggttttagaaggggataaaaaaaatgttttgctattctgaagaagtactttaggttttgactttagttaagaacattaggttttgcgattaatgtttttcattaggttttgactttagttaaaaacattaggtggggaatgaagtgcattaatgtgctttagttaatgaaaaagcacattaggttttgcgattcttccttttgttttataataataatctaattttcattttaattttttttcaaaaatgtgagatggattttaaaaaaattgaaaaataaactaatttgtccagtcagcgtgccacattagtttagttgcctagtcagctgaggtcaaagttgttttagatggaatttttaaatggagaaaacttaggtacaattctgctttttgtatggttcttaactaaaaatacatattttttgttataacaaactttgagaaaattatgaatttgaggaagtcatggtgaatttagttaagaaccgtacaaaaagaaccgtacaaaaagcacggaatgaattgtacctaagttttctcctttttaaattacaaaggggatctataaaaaattattttacagggattttttcaaaactcgctcaaatatcgggagtaaaacattatttaacccatttttttaatgttttttgaaaaagaacccattttttaatgttaaccgtaacaattagatatattggtgtctccagtggtggagccagaaattttatagagcctgggcaaaaaaattattgcaaaatgttacttccttcctgcgaataatttcacatttcctgcggaatctgcaggaa

SEQ ID NO: 33756 - DNA, 990 bp, Medicago truncatula
  Intron number 2 from transcript Medtr7g068180.1 (locus Med tr7g068180) derived from phytozome v7.0 (chr-ID MtChr7; po s 13906189 to 13907178 reverse strand)
caggtgagagtgtgatctgtatgtgtgaattagtttaattttgtggtaaaaattcaattttgttaatttgtttttggtatatgcaggggagagagtgtgatctatgtatgttaattagtttaattttgttgtgaaatgtcaatttttttatgtttttggtaatgtttttatgaattagctcgtagaaagtaacaatgatgtgattatgtgagggatcagaaaagtgaatgaacccacctttggttagatttattgaatttttagtatttggttgtaaatgtaagtttgagttcagagggtagtgaggagcagtactctttttcatgtttaacaatgacataggttatggttatacttttctgaataatgtaccttaagagagatttagcggtaaaacggcccatttttgtagttagtatatgttatatgttagtgatttatgtcatcattcgtaaattgaaccttatctagtgcaataatgtatggatccattggttacgcacaatttggctcagctcagatggttataggttgtacaaactctaatggtattaatgctgatgctaaatgaagagagcatttctagcaattttggtggaaggaggagtaatttatctagtatatttcttattttctattgcaatgattttatctcaaggtgctggaacagcttcattagatgtagcttttggagttttgactgaaccctaatcttgtgtatattagggatgtagtagctatggtgaaattggtgttttgtcttctccctagagtttttctcgcttctactgagacttagtattatttatcgtatactagcataaatgaggactcaaaataactgatccagtcttgaattcttgaaattggtagtgccaggttgattttatgtacctgtttaattttttagcattttcttacttttttgtgttgtgtagttgaaataaccgatgcttggtgttgcagggaactgaagaacaacctggcttg

SEQ ID NO: 33757 - DNA, 1021 bp, Medicago truncatula
  Intron number 2 from transcript Medtr5g019080.1 (locus Med tr5g019080) derived from phytozome v7.0 (chr-ID MtChr5; po s 7076208 to 7077228)
ttcttgttggaactcagttacactctcataatgtactgtaaagtgaaagggatcttttgtatattatacatcaatgccctgacatcaaagattgtaccaacaatactgcatcacatatatgattgaactgaattttaatacattataaatcaaatccaattgtaaagattattatgctcttaatgttgacatgagagaagctccaaatttttttgaaataggcttttgtttttgttagtttacttgcatgattgcatcactttttctttttatagctgttccaaaatattcttatatactagtagtagttgttttgcactcagataatcaaattaacaacatatattttttgtctaaataatgtttctccattattgcaatcagggcctttattaagtacaactatactttctcttaagaattttctactaaaaccgtaaataaaatagtaggaaaatattgttatagtacaataatgtcaacactctattgacaccttccgtccatttaaattttccactaaggaactaggaaaaaaaaattaacgttttaaacaaaagatcaatttatagctttttcaaataaaacatagtttatgcaatagaattttctgaaatttggtaaaatgtcaacatttgatttgaagatcatcttctttcatgtgttcatgtgtcacatgatcattgccaattttgggacatgcagtgagtgcatggattcttgacttttggaaaaatcaactttcttcatacattttaataatgcaatttggaatatgcattaaatagactcacaagggttcaagactcggagcatcgcacgagggaatatgcgacacacctgatagcaaaatctattctaaggatgactattggtgaaagatctcacccttattcataaaagcattcaatagtatttttactttttggctgaaccgttcaataatggttcaaaagtatttttacctcttgttgaattcggggtaatttaccgttaatgataaatatgattcaattttaga

SEQ ID NO: 33758 - DNA, 771 bp, Medicago truncatula
  Intron number 1 from transcript Medtr2g018660.1 (locus Med tr2g018660) derived from phytozome v7.0 (chr-ID MtChr2; po s 4988509 to 4989279 reverse strand)
gtggtttgctttttcttctctattttttgctcatagtaagttttgattccaaaagttcaaaaactttctcattttctttttcgctatgtttcttagaatttgagtagggtctaactcaactcttacaaaactggtgacttgtaatatgaggattgcccactcctataaacttatgttcaggtttatcttatccaacattaaattcttattgcatacacccttacacttaaaactgtgacatttggagcatgaaccaatagtggtgacctgatagcaggtggctcacttaatcttggtagactctgatttcatcttagaatttggtttgaacctaactcaatccttacaaaaccggcttgtaaggtgagaacaatccctgcttataaaacttaagtttaagctttatatatccaatgtgagcctcttaatatatgtcattttccccttttctgtaaaaataaaaacatgaatttagggaaaaaaaaatcaatatattaagatgaaaaagtactttaagctctctagtgatcagaagattttattcttcataaattgaaacttgttagtaatcttgaaggggatttggtgacacttctgagttgctttacttaaaagaattagattcatagaaaaacgtgagatgttaaatttaataaatattgcttcttcatttggaaattccttcttttgcaaactaattaatagtaacatgatatttgattttgatgtatatcagaggagaaaataaacagcaacacagcaagagtagta

SEQ ID NO: 33759 - DNA, 987 bp, Medicago truncatula
  Intron number 1 from transcript Medtr2g077010.1 (locus Med tr2g077010) derived from phytozome v7.0 (chr-ID MtChr2; po s 17583774 to 17584760)
tatagtaccagtgtttatgtaactgttataatgagtatattatacataaatatacttattatattgcataatcatagttcgacgatccaataattatcatgtttatgttattatatatgagttatgaaacctattttagatgatactatcaactttatgacttaaaccagtttcgtggtggtcgcgtcaatcatagtagtcaatagcggccgcgcggtgcggtgcggtgccggagcgctacgcaaaaagccatagcgttgcggtgtgagatagcggcgcaatgcttcgtagcggttttgcggtttagaaccgctatttcattttaagagaaaatacaaaattgtccttggttttaaaaaaaaaagggtatttctgtaaatcttcctctgcttttctgctgttctgtaaaacttcttcacctctgctgtaaatcttcctctactttgtcgtgtttgctctgttatcctgttatttttttgtttaacaatctcaaaactctgttgtcctgttacttttttgttctagttttctttgttattattgattccaaactccattctgctctctatgtttctgtttgtagtttgtacaaacaatcctctgttttgttcatataaaactctattctgctctctctttttccttatttttgttgtttttgtttttatgaaatagcggtcatagcgctatgcgctatcccactatagcatttttggggtcggccgctacgcgccgctatccgctattaactactatggtgtcaatcaataatgaatgatctttgaattaaattttgaactattaaccatatttatgccaacagtcccataaaaatctctaatattatgctgattaatttatttagtccaagaaaattccccctattttgtgctaccttattctcacagctgtttgttgtacattaactatttggcttggttctaatgatcagggactccttacagagacaacagtagtggacgtgtt

SEQ ID NO: 33760 - DNA, 320 bp, Medicago truncatula
  Intron number 1 from transcript Medtr5g084470.1 (locus Med tr5g084470) derived from phytozome v7.0 (chr-ID MtChr5; po s 32159942 to 32160261 reverse strand)
attgttctcagcccttaactattcccgtctttcaggtatgcatctcattttctttttaacaagttatttttgtcatttgcaaattttcgaatgttttttatgttaaaaatgttgcatgctgaaggatacttggttgttccttcgaatgaatctatgaattctttattgttgtaccttttttaatgtaaaaagttgtagctctatagtttgttggaattgaagaaaataaagaaaacgggaacatatgttttattttattctagcaaatggttcttagtctaatttgattattttcttttatgttgcactacagtgtgata

SEQ ID NO: 33761 - DNA, 518 bp, Medicago truncatula
  Intron number 2 from transcript Medtr6g098640.1 (locus Med tr6g098640) derived from phytozome v7.0 (chr-ID MtChr6; po s 21390683 to 21391200)
gttctctcatcagagagcttctttccaaatctgaagtccaccagctacaaacagcaacatgcaatttaaaaataattaacatgataaaataagaataattaataagtttgatatgctaaaatataacctaatcatcttcattattcgtgatacaagctattctatttgtattatttatattatgcatattttatggattttaacttgttcatcattcgtcaaacgttttccgcaacaccatctgtcataattctacacatgtttgccattgataatgatgaacacgaatatgatgaataaaaaaaacaaaaaatttcaaacctgtatatgtcctctttgatccaacatcaaaacatcatgcgagacacctctatacagaacaccattctgcaattcaaatatgaaatatgccgaggagaaaaagttagagaatcttagccactagaaaaataaaaatcaaggcaaaaatataaattattttagatacaagaccttgtgcaagtcttctaaggcaatca

SEQ ID NO: 33762 - DNA, 686 bp, Medicago truncatula
  Intron number 2 from transcript Medtr6g093740.1 (locus Med tr6g093740) derived from phytozome v7.0 (chr-ID MtChr6; po s 20344605 to 20345290)
ttcacaaaacacagatcacaaaacttagaggtaagtaactttgataatttataacatcgcttctaggttttttacgggcatacttacgctagtagatttgatatacttgagtagtaattaacagccacaataagaaaaacaacccgacactagagctactaatatgatctttcaaccagcaacacttgtaaggttaacatgagttctattttttttttatttgatgttgattttggttagatttatgtctgtcaaacggttctttaaatatggcaaagaaagtagaggcatggtgttatttttggtctctagtatcatatgaattaaagcctttgatcatgcatttttatacctcttacaaacttcatgagtacatatcatattaggttgtctataattagggaagagcaacaaaactcttgttttttttttcttctatgattgaatgttgtaatgtaacagtatatttggcgatcatactaatgtatcaacaatatatataataataagtaattaatatatactatgaccaatcatataattcaagacgacaaaaaaatactatatgccaaatacccacacaaaaagtccacacaatagggattaggccgccgcaaagctcatgatgacatacacataaccctatcacaggtagaggaaaaaaatcagggagaagagagaaaggg

SEQ ID NO: 33763 - DNA, 547 bp, Medicago truncatula
  Intron number 1 from transcript Medtr5g076030.2 (locus Med tr5g076030) derived from phytozome v7.0 (chr-ID MtChr5; po s 27757000 to 27757546)
agaaccatttggtgttggtaaacttaagaaacaaggtaaatgttacaattcttgtcttaacatttcttggtaatattttcatctcaaataactttggattgtgccattttgttgatacatggagtgctgagaatctaaaatcagctattgcattgagtacagtataaagcctcattctttaatagtttagggtgaaatagggaacaatgtgacttatagttgcacgactaggttgttttaaaagaaaataattatgagggacatttatacagtaaattgaaatcctactttaccaaccaaacttgaaaaatttcaggccttaaagacttgtccaacctttttagtttttccagaaccttcaaattaatcaacaatctgtttgttaaacggccaatttattttattggatgtttacattgtttaaattaactctagattgtaaatatgttgatattgatgttgggtttaatttggtttgtattatttatattttgcaatacatcaaaggaacacaccgtcttatgctgttgcatttgacagggcattg

SEQ ID NO: 33764 - DNA, 992 bp, Medicago truncatula
  Intron number 1 from transcript Medtr5g086330.1 (locus Med tr5g086330) derived from phytozome v7.0 (chr-ID MtChr5; po s 33099918 to 33100909 reverse strand)
aagaccgtgaattttagaaattaggttattattccaatgtgattctcttcttttatatatatttttttaataattaatcaatgaatttttattatatacatatataattttgatttaaaaaataattcaaaccaccaatagattatgaataaaaattagattaaaatgtatttttcgccccataaattttaaaatgttgagatttaagtttaaaatgaaaataaattaacccatttgcaacggtaatcatttttagcaattttaatcagatcaatcctatatggtatgcgacatgttgaattactaaataaaaaaaatgccacataaattacaaaattactagtgaaatgtttgagttttgaaattcggtatctgatcagattttataaaagaaagtgttctcaagtaaagtatttaaattaaatatttttattgattgtaattattgggaaaattaaaaaagttagtaaagtatagtaattaacaatgcgtgttggatacggcagcgtttgacagaaagagaaagagaggtgagatgagagaatgaagaagtgttttggaaatgaatgaatgatcaagtatgaagatgatgatgatagtacgattcagcctcacacacacgctatcgaaaacaaaccctagaagtagaagtagaaacgcaacagtaaccattcaagctccgtgttactgagaaatacagatcccatttccaattctatccctcagatctcactttcttcaactcgagacaaacactataaggtaggtagttactttttataatgatattgatcttgttctggaattttattttaatgtagttttgtttatttgttgcaattcaaggaattttgatatagtatgatatatgaaaaccagttgttacttcgcccccacccgccatctacaaatcttatcttgtaaatagttttctttttgttattattgtgtgtgtaggaagcagtttgtagggccaccatagcacggaagtt

SEQ ID NO: 33765 - DNA, 678 bp, Medicago truncatula
  Intron number 1 from transcript Medtr5g093000.1 (locus Med tr5g093000) derived from phytozome v7.0 (chr-ID MtChr5; po s 36492057 to 36492734)
ttttttatttttctgaaggaaggtctaatttattgtttcggtggttttatatttgttttttcttaaaataatttaaattataccagaacaatttcgatcgttgccgcaaataatcaataataactgttctggtttctgtgattcgtgttgttgatcttcttttgtgcgtttctgtgattttttttgctatatatttgaagaattcctttcaatctctcactcactgttctttatcttcccctccatctaaattttcaggtttctatttcatccactttttttatgtaatatgtgactagaagaatacggaagcagcacacacttcctcgacggaggtaaggattcatccatggccattttcgaattttcagattcattttatttgtttctgcaatgaataatacaatctgataatgtagtcaataaaattgttttggtggtgctgaaagaagtaaaaataaaatagtcagaattcctttatcaggttctattataattatgttgattatggagtttttaagagagtttagagtgtgatagaaggatagatgaggatacaatatgtactttgttgatttggtttatctttatctgttcatttatttttgaatctaatgagtttaataaaaattcatccaaacaggccgtgtcaagttcctagacttttcttcaatagtt

SEQ ID NO: 33766 - DNA, 371 bp, Medicago truncatula
  Intron number 2 from transcript Medtr5g093000.1 (locus Med tr5g093000) derived from phytozome v7.0 (chr-ID MtChr5; po s 36492805 to 36493175)
aatcctctaacaaatactgcactctacggtgtaagtcacaaagcaaaataatccttttataatattgtgtttggaatgtttgcattcgtttcctaattgttcctatcaacatgaaaattcacgcttgattggacataaatatattgttgctttttttaatttggcttctataatatattgttgttatttgatcattaagatatgcaattttgaacatagtttatttatttaactagaattttgttatttgtgtgaattaatatttaacgactatgcaatatgcaccttgaagatcatatcatatatcatatctcttgcatcaatcatgtttgttttctgtattttcaggtgagtttctcttcattggcttc

SEQ ID NO: 33767 - DNA, 894 bp, Medicago truncatula; identical to SEQ ID NO: 28780
  Intron number 1 from transcript Medtr1g137770.2 (locus Med tr1g137770) derived from phytozome v7.0 (chr-ID MtChr1; po s 30586406 to 30587299)

SEQ ID NO: 33768 - DNA, 730 bp, Medicago truncatula
  Intron number 1 from transcript AC233675_12.1 (locus AC233 675_12) derived from phytozome v7.0 (chr-ID AC233675; pos 64665 to 65394)
tttcatttgtttgaacgcaataactatttccgcaggtttgtatcttgaactattctacttcaattttctgttttgtggtgttttttttgagacatgcattatgtattataagagcattaacaagtttagattctttttaattatatgggggcttttggcatgtcacatatatgcaattaagcacagtcacactcttcaattcttctcatattcgtttgtttcttcttttttaatcatcgcatgcatatatttaacaataccaacaaagtcacaaaactcaaaaacaagaggtacgaacagtaatagtatatttgatgtatagatttagaagatgtgtaaaaaaagggaagtatatttaaaaagatgaatttctatgaatggtgagaggaaaagttaagttaagttaggttttataatagaaagaaaatttacttatgatttggttcccaactttcatgttaagatttgtcaaaaaataaataaagattccatgttaagtcaatacatgtaaaatattttaaacatgtattctctatcctctaaatcccctcaaaatattgagggtatagataatttgtagcttgtttgatggtgcagtcgttagtaaaccaaactctcatttttctaaaacaaatatttttatatataaaagttttagcacaaaatctgcttctattaattatatgattattatcttatatatgaaatttactttaaatctccttgtagg

SEQ ID NO: 33769 - DNA, 830 bp, Medicago truncatula
  Intron number 1 from transcript Medtr2g056410.1 (locus Med tr2g056410) derived from phytozome v7.0 (chr-ID MtChr2; po s 15451266 to 15452095 reverse strand)
ctcttgagattgttcagtgtcaaggtccgtgggtatgcctttattgaatttttttgaattatcaattctgaatctttagattttgataagcataaattgttctaatcaaatcaaatctaatatgtaaattataatgatgcagtgattctataaattgtgtcttgatataacattattccttgatataatgttttcatataacattatcttttgttgacagatcaatttgtttaatttttttcctatgatcatttttctgatataatttgtcctggtttttgtgttgaattcagactaaacatattactaaaattcccaccccatacaaatgtctgtgtgtgtgtgtgttttcgaaaaagcgaactaattaaataacagcaaaattagcgctttgtcagaacaatgttttgataaaatatctaaaacaaaaaagtcatagacctcccagatagaaatcctcatcttgcattaaattaaacatgttctgtcccttggtctcaaacgctatatcttccatatgcttcaactctgcaattgcagaggttaaaaatttatgtgttgcaaattttttttataatgtcggtgcatagtaattaaattatatattttaatgtatatataaggatgttaaagttttcttatttacttatatgcctattaagaatgatatttttgatgaattatacttgatacaaatctcagccaaatttgtttgttaaacatgtcaggattaatgtggagcatcccataaatttttcaatgcttagtgtgtttacttaatgcttataatccatattaagtttcttgttaatttatgttgaagtgtaact

SEQ ID NO: 33770 - DNA, 682 bp, Medicago truncatula
  Intron number 1 from transcript Medtr5g089140.1 (locus Med tr5g089140) derived from phytozome v7.0 (chr-ID MtChr5; po s 34592206 to 34592887)
ttgttcagtccttggtgcgtcattacaattttagtgtaagtacacttcttatgctcaatttttcagattcattttaagtgaaaaacgtgacattagttaataagagaaaaagttggaataaaagcattatcaaaataatgcttcctaaattcctatgctactgataaaatatgatcacaatttcacaaatcaccactggctatgcatttgtaggattttcttaacaaaaaaatagggacaaataaaggtgaagtggtgacaaatagtgagtattcaaataaacagtttaattaagtacttattcttaaattatctagtaatgattattaaaataagctaaaaatatcttcacgagatgtcgtaaattatcttacatgtattctaaaattaacgtagatacttacgtgatgagataagtccgaataaactctaaataagcttttgcaaagacctcacgattatcctaatgcctcgttaatgaaatatcacctcggtggcatgagtttgacctttataacctcagaggacggagttcaaactttctcagggacgattgaaaaatgacccataatgtcactttaatttattaataataatttgccccttccccatatatttttttttaaaatagggaaactaaatatttttcatgatggtcaatgtgtgcaggtggtactgaaga

SEQ ID NO: 33771 - DNA, 1015 bp, Medicago truncatula
  Intron number 2 from transcript AC233672_2.1 (locus AC2336 72_2) derived from phytozome v7.0 (chr-ID AC233672; pos 89 00 to 9914 reverse strand)
ctctttctctttccaaggtacactgttctctttctctctacttttcacaaccttgatagagtaattcaattttcaatttagtttgttagttactgctagttataactttctgttacttagctttgtgtctataagactcagcactatcttagtataaatacatgtgtttgatatgcttgccaataaccaattcaatactctctccggtcttatacataagagaaagttgggtaaacaaaaattgatgtatctggtccaaattttgaaccagatacatcaacttttgcttacacaactttctcttatatataggtcctgaaggagtaatacaaaacttattttgttttcctttctctcttttctatgcgtgtgatcatcaaagtgttggtgtattgtgattattctgataagatatcagaacattctgatcacatcagttctgatctctctcagtctgtatcatcatcaattagtctagcatatgctagtctagaagttcacattttatacttgtatattattgtgtattcagttttggattcaacacttgattatttttttgcttaatttttttctcttatattaggatacatcgagtgtttaataattatacgaatgggaaatgcatgattcacagttttcaaatgtaattcgtctttatgtcttcattgtgctacaatgctagttgtcataatttgataaaaaaaaaatggtatttgtcataacacataaagagctgaagtacacagtcgcagctatacagatattgatcaataggaacttgaatttgatccataagggtacggactgatatacttatttaaactccagctccagctagcatgaaatgaacgggagaacaaattaatttcaacgtttctctactttttcaattcaaactcttctccttggagtgctctctactcgaaagtgacattattcacttcaaattcatcccttttatccctttcatatgattaatctgttatgtcaaattgattagtcctctttgtca

SEQ ID NO: 33772 - DNA, 972 bp, Medicago truncatula
  Intron number 1 from transcript Medtr2g045370.1 (locus Med tr2g045370) derived from phytozome v7.0 (chr-ID MtChr2; po s 12525732 to 12526703 reverse strand)
aaaacctagctaaggtacaccggactccctcagtgacatgcaggcctaccttgtggagcgtatcctgtttccctcggagaacctctcgtatcccccttggcgtggataacggaaagacacgacacctacatcttactttatggtcttgaccatatatgttaacttgtcttagtacttgcttacttaatcttgtttaatcataatgcggagactattgcttatcaatgcccaacttaacttgcttaagatacattgctaactttctagtttctcgatgatctatgtcgaggctctatgctttcctcattcttagttcatcgctacccgaactaaacatgttaaactctcttgtgtcattcttgccgtatatgataagatttccatgattttcatttcagagatcgtttgatgttatttgcattgcttagatgttgtttaggggttataaagttagaaaacatcgcaagaaagcctcggatttcactaccgacctttatatgagtccaaaagccatttgaaaagggtgggaagtcagagactttcgggtttgtagtgcagattttgcattttcaccctaaattcgccaaatcttgatcctgcaatgcacattacacttccagcaacttatataaactttataaaacattttgcatggcaattttaacatacagttagcaaaggatgaacattgggtactaaaatttctattaaactaaacttagcacaatacatgtttttttgctagaatcacacaaccaaaggtaggttatctatctaagaactcaccttaacatattcttgaaattgattcaagatccaaacttcttagttcaaaccctagctctttatcttgctccaagaatgtcttcaagttaccatcctcttgtaccacttctaattctcatttgatcttgcacaagacatcacccaattcatgcttgattacccataagaacaattcttggaaggttg

SEQ ID NO: 33773 - DNA, 541 bp, Medicago truncatula
  Intron number 1 from transcript Medtr7g026150.1 (locus Med tr7g026150) derived from phytozome v7.0 (chr-ID MtChr7; po s 6634562 to 6635102)
acgactcataccttgttgtgtctaagtcgttgaaggtatgaaaaccttattgtggaccagggtgtatgtatttttctttttaattacagggcctttatgatgtggttctggttcaataataatgaccatatgaatttatatgttctgtttaattatgtgttcttaccatatgggtcgtcttgagcatggtcggtgggttgctcgttttccagttgcacttctcctttgagagtgttgttatctcttgctttttggggtagcgggctttgatggacttgttgtgtttttgttctcttatctttccgttttgggttttataccttggttttactttgttctttattcctttggttttatatcttccttaatagtctcactagtcactagccacaacttctagcttcacccacccaccatcatcgtcacctccgtcatcttttttctcctcttcgttgctgttcaaaacacttcgctaacaccactactctccttttcgttcacaataggccgccaacaacaccattgtcgtcgccatcataat

SEQ ID NO: 33774 - DNA, 550 bp, Medicago truncatula
  Intron number 2 from transcript Medtr4g134780.1 (locus Med tr4g134780) derived from phytozome v7.0 (chr-ID MtChr4; po s 32573160 to 32573709)
tcaagagtcatttgcaggtacataagacaaaatttgaggtagatatatatgtttcttaaaagaagaaaaacaaaactgtacaacttcaatcttatagtcactgatatttttgtatcacgtaaaatatattaaaataaaaggggggaataattgagaaacatatattagatcaattaatttttctgcagggtgatccgtgtccagcgggggataatgtttgtaggtttttttaaattgatttttgaagttctttaagatatgttttataaaaaaataacaatcatttgtatattaaaaaaatttgtacattccaaattaataaataaaaaaatacagaatgatttatcttggaattggatattttttgaaaaatgatttttagacaccaaagaataatatactagagagagaaagaaataaagatggtgatgtggaagtgttgaatgaatgtaaaaaaagtatagatgttcaaatattaattgctcaattttttttccttgaaattaagttttgatatatgaatttcataaataattttatggctatgcag

SEQ ID NO: 33775 - DNA, 696 bp, Medicago truncatula
  Intron number 1 from transcript Medtr2g055800.1 (locus Med tr2g055800) derived from phytozome v7.0 (chr-ID MtChr2; po s 15040232 to 15040927 reverse strand)
gactcatatgtaagattattttgaaaactatgttttgtttatttcatattggtccttgctcatattaattatcatataattcttatgtgttttagttttcttttttatttatagttataaaattcatttatttgtattgccacctccaaatcaaatggcaaccagagggtatttggtttgagatacttattttgtttctatttttttatccacggttatattggatcatttatgtttttgatagataaaaatgataccaatcgaattcttttccgatatctctcattcgcattaagaaatttggagtatcgatggttgaatcatggttgatttactcatataatatagatccgcttttctattgtaattatttatccatcttttttttttgtttctttaatattgtttgtcattttttattttttgaacggtaggttatgtacgtttgttggaattacggccttaagttgtaacttctaaactatcttggagaaaacaatagttcttttaaaatacaataggttatttttcgaaatttgtcaataataataataaaataataaaaatatgatacatcaattttttttttttttttggataattttttttttttttttatcgaacaactatattatgaataacacgtcctatgacgatgcagggtgagaagattcacgcatcagtgcacagctcgct

SEQ ID NO: 33776 - DNA, 669 bp, Medicago truncatula; identical to SEQ ID NO: 30527
  Intron number 1 from transcript Medtr5g005230.1 (locus Med tr5g005230) derived from phytozome v7.0 (chr-ID MtChr5; po s 93783 to 94451)

SEQ ID NO: 33777 - DNA, 152 bp, Medicago truncatula
  Intron number 1 from transcript Medtr3g144200.1 (locus Med tr3g144200) derived from phytozome v7.0 (chr-ID MtChr3; po s 37326201 to 37326352 reverse strand)
ttcttctggtaatatttattgttttttttttcttcattattatttgttggtaattaacccgtgaaaaatgttgtctttttttgatttggtgttgttgggttttaattggattattcatagcttaaacaaatgaatgtatgaatgtataggta

SEQ ID NO: 33778 - DNA, 839 bp, Medicago truncatula
  Intron number 1 from transcript Medtr3g019560.1 (locus Med tr3g019560) derived from phytozome v7.0 (chr-ID MtChr3; po s 4085810 to 4086648)
cggcgcagcttgttgcccgcttgcctttgattaaagtgtaaataattaatggtttatatatttgagaataattttggaacaagaaacttatcaagagaaaaatatatgtcattttataaaagtttatatgagtattagtttaagtgacataagtttaattattgtttttcttatgttgcggtttgatttggttaataaaataaaaaccgcaaatcaaaacaaaccatgcagtggagtaagaaaataatcttaatacatctgaactaaatgcattttttacaatttcggttttgattgattcagttggcagcttttctattaggttgattggtttttaacaccctaatcaatatcaaaaacgaagtttttgaactagccttatccaccggctaacttgtctttacacacgattaaaaaacccacacttatctttgcaactatagagcatattctttcgatcaatcaaactagtccagagaaagcaatcatattgcatgaaagcatttacgggattcttttataaaagaatgaagacaatcaaggacacttctagataaaaggacaattaagaaataaattattatttgaattctctttaaaattatatccacttatgcatctagtttaatatgagtcgttgatttctcgtatggaccactaaggaaggttacaaatcccacaaattagaaggtctataaaccttcactaaccaacaagatataagcgtgacaaaaatcatgcacatcagtttatagtgatttgattagacaaaaactaaaatcgtcacaaaattattttaaatctcataaaatggatctctgatttttaatttttttcag

SEQ ID NO: 33779 - DNA, 730 bp, Medicago truncatula
  Intron number 1 from transcript Medtr7g047110.1 (locus Med tr7g047110) derived from phytozome v7.0 (chr-ID MtChr7; po s 11773702 to 11774431 reverse strand)
aagcgactctttctgctgttgatttcgtcaacaaggtactcatgcttttatttattcataaataactcacaaattagggtttgaagtttagcgttatgatattttttttagtagactaagtgataaaaaaactgacatgcaactgtttagtctacaaacccgtgttaacttctggtgtcgatgtctgttgttttgtgtacgtgtttgtgtggttttcatagtcagattattgatgaatagcccatgataggaagatctattatgttaaatctaatgagaggttagaccctctttctcacttgcttcattggcctaaatatcaatcttcattcttgtttccaaattgcttgatcactgatatattaacttgtttccaaacagctaaatttaattttaataattccatatacctgaaacctttcattgctttcattttgtgtgcgacatatgttggatcaataaatctcacaataaatccaattgtgaaaaacaaacttgaatgttttaccacttgtttgaaaactctaattagcacacacgaagaagtgactttagtattatgaatttatttttattttgaaaatacaaacttgctactgtctagaaaaagcattattggtataaccattttctgtgacatcaaacctttgactcattttgaatacctaatgtcttgctgccaattatctgtataggcttattttgcaactcagtttctcataactgtctc

SEQ ID NO: 33780 - DNA, 849 bp, Medicago truncatula
  Intron number 1 from transcript Medtr1g137400.1 (locus Med tr1g137400) derived from phytozome v7.0 (chr-ID MtChr1; po s 30465032 to 30465880)
tggagacgccctgttcctgttgtggtagtttgaaggttagttctatactagcatgtttgtaatcacatgttttgatatgggaaatgaataagcttttatattcttgtagtttgtaagaatttgtgagtcatgtttgatgaaatttgtatgttatagtttaatggcaaaccaaatatgttgtgatggacacagcttggtgaagaacttcaaatataaatatgctaaatcttactggcgtattttatttctgttggtgggataacttttaacccctgaaaacctttattcagtgtataatccatcttacctagttacatataaaaagatttggttaaaatgctaggaacaaatatctctatctgagtatttatggcaaggttagataggaccttttctccattagacccttgacagcagaaggagggggggtaaagaacttacaagatgtgattaactggaagcattcttattttgcacgaaattttgaagaaatgtgtgaactatgcatcatagaagcttctgtcactatttgtttgacatgctatcattaagtagaccttagacaccttttacacaacagagaagaatttggggaataccaaccagcttatattgcttatatttgttcctaacatgcattgcattggtgaagacctttgcaattacagttttgtatgtggtggttccatggattataaataatgcaagtagttgtaaacggtcttaagtttcctgctttcaatgcctgacgaaagtttctcaactgatatttggtctattttgtttttttttttaaaagtttgttgatagcttaaactctaattgatttttgcagtacgcccatagaag

SEQ ID NO: 33781 - DNA, 512 bp, Medicago truncatula
  Intron number 1 from transcript Medtr4g009020.1 (locus Med tr4g009020) derived from phytozome v7.0 (chr-ID MtChr4; po s 1354159 to 1354670 reverse strand)
gaaccagcacatcaccacaacaccaacatctctatgttaggtcatctctttttttccttcttttctataaactcccaattttggctcaattttgattactatattgaaattgaaattgattttagcttttaggttttggaattttgttttattacaactaattttataagtgtaaccactaacactattactccaaaatatgttattatagctctgtgttttgtatatttgaaattatatccttccaaatgtctcattacttattctttcctcttcctaaatcaaggaggttaaaatgatatatagcgcaaaagcataaaatatttcacgctcctatcataaaaggtcacttaaataaaccatttaataactaatgcacaagaaacatcttaaaataatttaaagcattatatataaaaatattaaaataaatagaattattaaaaagaacatatataaaatattgggttgttacaggttgcgggaccagtgtgtccgcatatatttgttat

SEQ ID NO: 33782 - DNA, 510 bp, Medicago truncatula
  Intron number 1 from transcript Medtr4g130160.1 (locus Med tr4g130160) derived from phytozome v7.0 (chr-ID MtChr4; po s 31155620 to 31156129 reverse strand)
ccttgcttcctgaacttccttctaaggtaaattcattttcatcttcaatcagttcgaagataatacttgcatgtcatgtttcttaaaaaaaaaaaaaaaaaactcaagtttttcatgcactagatcccctagggttcttaaacttggatccttcttgttaccgtagttagggaccaggcccgaatacaatgtcaaacttggatcatttacaatgattagtctctttgattgttgaactaattaatctaaaactcaattttcttcttgtgttaaccttcgaggtttggccgtgaggtaagtataacttagccaaaaattgttccacccaggaatgaaaatcgggttttcccaaacaattcgtcatttgtggaactcattaatcacttgataattaaatattatttttgtatttttgcacttgaggtaagtataacttatttccacctcaagactaatgaagatgtttaatttgatttgatattttacaggctgataaatcaaccattgtag

SEQ ID NO: 33783 - DNA, 578 bp, Medicago truncatula
  Intron number 2 from transcript Medtr1g099600.1 (locus Med tr1g099600) derived from phytozome v7.0 (chr-ID MtChr1; po s 20411442 to 20412019 reverse strand)
tcaatagacacgtatgttttttctcccttcccatctatgcccccttggtttgttgcatatattttgcttgaaaaggattcttaagtgtgttatatatataggtcaacaatgttagtaataattaacattatcgtcaaaatggtgtgttattttctccaggtagcatacgtgcatgcttttatagtcttgtaattcgtaaacttctccaggttcaaaactacgtttaaatgtttaaaagaactaaaaaaaatatatagggagtttcggaatctgaagtaatagaagaagcgtaatgacataccaatttaaaaaatttaattggtgaaagggattagatagccttattcaattgatgattgttttggtgagtttgtatgtaaactttcccttctaaaaattcttcttttattgaaaaaaagatgccagaaatttcaaatcttatattctcttatcaaatgaatgttaaattagatttcataatccttctagtattgaaatttatgctacgtaaaagaaagtaccttaaccttggagcttttccagggagcttttcctaggacaccagagtttgctctgct

SEQ ID NO: 33784 - DNA, 479 bp, Medicago truncatula
  Intron number 2 from transcript Medtr2g032720.1 (locus Med tr2g032720) derived from phytozome v7.0 (chr-ID MtChr2; po s 8733150 to 8733628 reverse strand)
ttgtagtggaaagggggtgccataatatactaaaggttgctggtttgacaccctcatcgtttattttttacatatttaacttgtactttttccttaaaaaaaaaaacttatacttttacaattttacaaattgtattaaaaaaaatgtttttgatgagaatcaacccacattctcatgatacattcaaactactcataccactagtgacagacgtttctaatttaatttagcacccataattcattagtgagtctgtaatcttttaacttattgaagatgctgcaataattacgatcccatgtttagtaaagtttgaatttattttcttttgatatttgatatagtaccactacttactaaaacaaggctcacatcatcgtcaaaagacaagtttgtaccaagtgaactttgttatttctacttattaatacttgtgtgcacagtgtgctcttgctttacctttttctggaataagaat

SEQ ID NO: 33785 - DNA, 752 bp, Medicago truncatula
  Intron number 1 from transcript Medtr3g030380.1 (locus Med tr3g030380) derived from phytozome v7.0 (chr-ID MtChr3; po s 8214235 to 8214986)
gatttcgactccgtaaatagcaacgataatccattgtttaattttttatgtaaatatcaatagtttgtaattactgttttgtaatgttccttttttatgttttttcataggaaaatgatatttgattatatttagtttagtaggggaggaggagtctgttagcaatagggatggaaccctagacattctttttaaaactcctagagcgttccaactaataacactaggctacaccttattgtacaaatttgaagtcataatgtcatattagtagtatgagcaatgatatttgaacaaccatttgccaataacttttatgacaacctcctttttctctttcattgttcaaaaacaatggagagagaaaaaagaagagaaagagtaagaatataatgtgagtatgagagagaaagttgtctgaaagttgtcaaaaaaagattgtacaaatatcatttctctagtagtaatactcaatgatttatttgctcaatgtgttgtggctacaactacaaagacgcgttcaataataagtattgatgtcaggttcttaattaacccaaaacatgtgctttgacgaatgtaaaattgcaagcatcgttatgaatacagacaagtgcaacaaggtaaatgattgtacatgttttggatcggctagagcgccaatcccatgaagacacgtggacccaaaaccgtcgaaacaagacgttacagactgagtgagcacgctagttccggtgcacaacaccacactg

SEQ ID NO: 33786 - DNA, 231 bp, Medicago truncatula
  Intron number 2 from transcript Medtr2g025200.1 (locus Med tr2g025200) derived from phytozome v7.0 (chr-ID MtChr2; po s 6642785 to 6643015 reverse strand)
ccagatacaaggtactttaactttttggttacatttgttactaacacacattaatcctatatataaggacttttttttaatttgattatgtttttaacatagtaaaatgatatatatgttttgtaggataattggtacactcagaagaaataggaaaatctcatcaaattagagaaaaagaatgtatatgtgacgtagtctatttgaaggatgcagggaataaagctcata

SEQ ID NO: 33787 - DNA, 805 bp, Medicago truncatula
  Intron number 1 from transcript Medtr2g025200.1 (locus Med tr2g025200) derived from phytozome v7.0 (chr-ID MtChr2; po s 6643026 to 6643830 reverse strand)
gttggtatctttgggaaaaaacgatatcaaaaaatgttagtagctttattctttggaacccacttaaccataagaaaatcatgcttccaccccttaaacacaatggcactccttttggtaattgcattttgacatcccctccaactagaaatgatgaaatatgttccatttatttattttgctcacgttgcccttcaatattctactaccaacttggagataagcaatgtactaaagtgtgcttttatgacgagatcgtgagggttgcagccatggagggtgaacacattccacagggagatatgacctgttttagtgaccctgtttactgtaatggttgcttgtatgcaggaatgaggactggttggtttgaggtttatatagtagtaattgaaaaacttcaacctaatggatttacactaaacatcacacctaatcgcatgggaaaacttcccgctactagttgttttgagcagcatataagtcacttgattggattcaacaacgcactatttcgaatagaaattatgcatgcactggatagggttactgcagtttttgtttacaaattttattgtactcaaagagtgtgggaaaaggttgaaagcgttaaggatacagttttctttatatctagtgttgactcagcctttgcttgtcaagcaaccaatccagaaactgaaggaggccgagtctatatcgccttaaaggattgcaattttttctacatttacaacattgaagacagaagtcttgtaacttctcaacatttctccaatttatcagcaagacggtcttattcaag

SEQ ID NO: 33788 - DNA, 970 bp, Medicago truncatula
  Intron number 1 from transcript Medtr3g157210.1 (locus Med tr3g157210) derived from phytozome v7.0 (chr-ID MtChr3; po s 41405638 to 41406607 reverse strand)
gtctgcaaggtcactccaaattcaggtacactctgtgttagttctgtacatgattatttctgatgattatagttaatcactctacttttaaaatcaaaatcaagtttggttttgacctatatttcattttccgttgagttttacccccaccatcacttgcgcttatttatcaccgtttcgaattgcatacatatgtcatcttatctttttccattttgtataccctagaaaagtagttttgcaccggttatctgcatgtctctcacacgctcataaatcatgataaaaaagaagaaacatgacacgaagctgtttttggtacggtggaagaacatggaatgaaattaaacggcagcttttctcttcttggtatcatagatagttagttgatttagggttatattttattatgggctttctaagtccttgggcattatacgcacactaacaagattttaaataatggctgcggtcacctataagatttctcaaactcagcagtaatggattctacgtcacaaagaagggttgtgtggtgtgaattaatcacaacattgcacaacttttaaataatatatatactaacttaaattaggataaaattaaaattctaaactaggaaaaagtgtccaaaggggataacattatgtattctatgttcaattctctactaaaaatgtcattttcatccacctcaattgaaaaataacgtgattctccgtctattttcatgaattgcgttttgttacggcagtaatggtgttttgtcgtgcggccttaagtgcgtttcattgtgatttttattttatttagtgttttttaatatgtaaaacggggaagactgtaacgacagctaccttttaccttttcgtcatggcctttttctcggctacaaatccttttttaaaactttgtctaacggaaaagttttgcaggtcagaagaatagcgaggtggagacagcgaccagc

SEQ ID NO: 33789 - DNA, 411 bp, Medicago truncatula; identical to SEQ ID NO: 31812
  Intron number 1 from transcript Medtr4g121420.1 (locus Med tr4g121420) derived from phytozome v7.0 (chr-ID MtChr4; po s 28466967 to 28467377)

SEQ ID NO: 33790 - DNA, 1012 bp, Medicago truncatula
  Intron number 1 from transcript Medtr2g046130.1 (locus Med tr2g046130) derived from phytozome v7.0 (chr-ID MtChr2; po s 12862571 to 12863582 reverse strand)
ttgtcacttcagtttctagtggtcttcgtaccatagtgagtggtttaattaaacgattacttaccttgcactacgtaattaaataggtgaactggactgttttatcctggaggcggcgcgattgttggtctaccttacacaaacttgaactcaatccagtaatatactcggtgttaattttgattttgataaaaggtatatttctttcttggtacaaaaataagggcagacgacgataaaaggtatatttctaaactcgaaaaataacatatagtttttctttggtccgttgaaaatttttacaataaaatatcatttttttttattgattttatttgtttatatatatgttgatttattattttccctaaaaaaatgttgattcattatttatctttccttgatatatgtcgttgttgttcttattattattaattatattatgattattattatataataataagtgagtgttaagtttattattagatttatttttttcttcttattcctattgaattttttttttttttggcatatagttattatactttttgcaattaggaaattgttctaatgaaataaccggtttctttatatatatataatgagggattcacaacaagaaaataacatagaaagggtaaggataaatatgtctatgttgtttggaccatagatgaaactaatgagttgttgtaacttttggtggatgctataaatagagggttactgatgtcaatgggtcacttggtaaacaaaatgtagagcaaatttatcgttcaatgttgtaagtttgtttttatccgctaaaattcacgtcctttgaaatattaaaatctcataaaattctttaaaatctttaaaagtgtgataaatccattaaaattttgagtttataaaatatttttcataaaaaatcttttaaaatcttatagaatcaatacaatctctcaaaggaatattccgttgtttaggtcaaatacacactctcacactctgaggaacacta

SEQ ID NO: 33791 - DNA, 1041 bp, Medicago truncatula; identical to SEQ ID NO: 30307
  Intron number 2 from transcript Medtr4g108860.1 (locus Med tr4g108860) derived from phytozome v7.0 (chr-ID MtChr4; po s 24215592 to 24216632)

SEQ ID NO: 33792 - DNA, 602 bp, Medicago truncatula
  Intron number 1 from transcript Medtr5g071590.1 (locus Med tr5g071590) derived from phytozome v7.0 (chr-ID MtChr5; po s 25363468 to 25364069 reverse strand)
tgggatttgggcactattgacctataaccaggtgtgctatgtctacgttaatagataaaggatttcaaatattatactcaacatatatcagacgcacacacaagttttgatcaaactcatggaattgccttaaatataatggtgcgacagaactcttttacgacttatttgatgaagaagcagaagaaacaactcaataattttaattcctacaacatttgtttcaatggggaaccgaagggtggttgagcaactccttttttctttagggtcacttttcttttttgttttgtcttattttaacttgcttttgaggatttcggtttgtcccccatcttgtacatactttcccccatttttaatatgtattatgagtggatgacaaaggatatgaatttcttgaagataccaaccgatttgagatatctgagtctctccttactgtttaaacccactcttaacttataaagaagaaaaaaaactagtttgcatttaatatattttgtaatcatagtgacattgttagctggtattttcaccagcctcatttaatgtggtcaacattagttgacttttactcttgcacgaatcaaagtcttttc

SEQ ID NO: 33793 - DNA, 673 bp, Medicago truncatula
  Intron number 1 from transcript Medtr6g013230.1 (locus Med tr6g013230) derived from phytozome v7.0 (chr-ID MtChr6; po s 2746542 to 2747214)
gatcaaaaaccgttcacgctggtactataatttgtctctcttttatttttctatccaaaaaaatatttgtgatcacgttgaattcatgtggaaggtttatgaatattttaaattacgcattataattagttccttataacattttatgattttcaaataaattattcaaagaaagttttttattttattacgttaaatagaagttaaagtggatgaaatcaaactcagccttacaattaaagtgctaacaatagatctcagacgggtgcgcatgaaaaaacattcattaataaatgtcaattgttaaaagaatcttaatcaactcaaatagattaatctctatagttgcatgcagaagatatgtttgatttaaaaaaaaatgctaacaatacactatgtaatacacttttttactgattaaactagaattttttagaatcacattaaatttatgtggaattcacatgatttgttggaccaatttggttttcaaccaattaagtgtgttagaaacagttgtaatgctctttggtccttgttatttcctatagacgcaattgatttttggtagaaaaagtaagtaacataaatgtttcattgatattgtaaagcgatttataatattggttttgagttaatgcagctgaaagattaggtcgaggcatagtcacag

SEQ ID NO: 33794 - DNA, 884 bp, Medicago truncatula
  Intron number 2 from transcript Medtr2g095380.1 (locus Med tr2g095380) derived from phytozome v7.0 (chr-ID MtChr2; po s 21775199 to 21776082)
gcgaattcatcattgcttcaggtacactaagtccttctttggatattataagcacttatctataagctctttttatactaaaagataaataaactcattgttttagcataacttataagctgttttaggccctgtttcggtaaacacctcattttcagcttatagcacaagcacttatcatgataagctccttctataggaaaagataaaatgaagttaaattgtttttgtatatcgtatgctatcttggagaatttatgaaattaagttgaaaaaagcttatgaaatgtgtcataagccgttttcataagttttttcagacagtctcacaagtgcttaagctagtaggtaagctcaaataagctaatccaggatttagattgcagctgtggccacattttgatttttgatatttcggccaaatatgctgttacaatcgtggttgtggagacattcaagccttcaattgcatcggttgtaataggtagttgccttggtagttagctgtcaaacaagacactgtgggctgagaaaatcatgttttaggttcccacaaccagcaggaaacacaaactatgattactagatagagattttgattttacttttagtgttcagttttgaattccttgagtcttgaaaaaaattatagcgagaatttgtagttggttaagacgctaagttaaaacgtgaccagtcgcgtgttgtataagataggaggtttgcttctaaataagatgcatttgttaagtatttgatttgatgagagcatagagaagaatgtgataagtaaggaatgatatatattaattcaatagtcatggcattcatgttgattcaatattgaaggtatatatccaccacaagtaaaagtgtacgaggtc

SEQ ID NO: 33795 - DNA, 730 bp, Medicago truncatula
  Intron number 1 from transcript Medtr3g164060.1 (locus Med tr3g164060) derived from phytozome v7.0 (chr-ID MtChr3; po s 43212072 to 43212801)
ttctccacatctctcaggtagttaggttatctctctctctctctctctctctctctctctctctctctctctctctcaatactccatgattgattaatcgtgtttgttttagcaataataataatatgggattagctagctagttagggtttcccgatatcgaatggaatggaaagcaaagaaagaacaaaccccccttcattgtttgattgattcattcattcattcatggactactgctatttttggatggagcagcctgttgttgttactccaaatgtcaaatatgttttccttttaaatacatgtcccatggattggttgctattttcagaaaatttcattaattaataataaactctattgtctcctcttccatgcaattcaccattacgcaatatacaattactcgttatcattggaaatagtgcttgtttcttttcagttataatttttaatagctggggcagctagagtcagtgtttccagatatattagaagccacaaattcgagcttcactattaccgcgctctccacataatcggattttcccaaacacactcaataccatcagagttagttacaggtagttagagtgagggcatgctggaattttggaattaactgttgggaggatattgtttcctcaaacaaccagagctgctgtctctgtcattcatttcattcttgggtaggtaggggtggccgggtgggtataagccagggtac

SEQ ID NO: 33796 - DNA, 396 bp, Medicago truncatula
  Intron number 1 from transcript Medtr2g052840.1 (locus Med tr2g052840) derived from phytozome v7.0 (chr-ID MtChr2; po s 14396527 to 14396922 reverse strand)
tgcgaggtgcggcccctagccgcttggaacagagatcaaaatgctatttatttgtggccacttgctaagaacgttaccctactgttggatcatattttatcttatgtacattcgataggtaaaagaattaggttcaaagttgaaaaattctctaagtccatgactagaggttgttgggttcgactgacattgagatctctcgacaagagacacgattcgacaggaaattaatttagggaagatgttggcttcaaatgtctaggaagtggtgagacaggtagtttatggtcgaggaagtgtggtccttagtagttttgtttttgcagttatttcttctatgtataaataatatttttcataggaaaacgtgtcgcaaatcatttatagaattctagc

SEQ ID NO: 33797 - DNA, 461 bp, Medicago truncatula
  Intron number 1 from transcript Medtr5g049150.1 (locus Med tr5g049150) derived from phytozome v7.0 (chr-ID MtChr5; po s 20954290 to 20954750 reverse strand)
caacgctccctgtgaatccggatcctttggttttggtttgggcctatctttttcgtttttttattgatttcttgctatttgcaccttgctgtttcgctatttgaacctctgtttgttcaatttttctcttaaaaattcctaaaaaaattcctacgtgtttcttgatgcattttaatattttttgtgatgtttttactggttaaaaaaggataaaaaatatgtgtgatgttctttggttgatttgttcttttggatctaagtttgtgaattttcttgctatattttcttcatgaaattttggcatatgatgtgaatgattgatatgctattttgtgatgaatatgcctctgattatgtgtttgttataactgattttgatatgatttgttaatttcttgtgctataaataatgtgattcttttttaggttttggttatcgttgatatttttaccatttatct

SEQ ID NO: 33798 - DNA, 423 bp, Medicago truncatula; identical to SEQ ID NO: 28233
  Intron number 2 from transcript Medtr3g080490.1 (locus Med tr3g080490) derived from phytozome v7.0 (chr-ID MtChr3; po s 18964885 to 18965307)

SEQ ID NO: 33799 - DNA, 950 bp, Medicago truncatula
  Intron number 2 from transcript AC225518_19.2 (locus AC225 518_19) derived from phytozome v7.0 (chr-ID AC225518; pos 65045 to 65994)
atttgatcctaaatcatcgactgctatctccaaatgtaagacacgtgcttacacgttattctcaaaaataaaataaaaattattacgagtagtaactgtctttctcttgtcaattctgaaccttagtacaattaacactgccgttactttcagataattatttcaaccacttaactgccggaagataacaagtacttgaattaaatgcttatcaaggaaattaaaaacagtacatagtacttcaaaatactttgtatggtccaaaattgaacataagatttaagataattcacgtacaaatatacatcatttaattatttaaaaatatatattgtataattctcttatctttttatgaatgtgtcaaaaaaaatttttgaccagcataagagtttctctatgctaaaattactttgcaaaggagatattataatgggattaaagctatcccttatcatttagtaaacaattaaactttataaaaattaaagaaaaggaaaaataataatattttattaaaatggaaattcatttggctagttttgcttgttcaaagaaaaaaaattgttaaaatgtaagggtctctctttgaacatttttgaaggttcatattagatacatacattagggatgaaataattagtgtttgctaatgataaaaaaaccttaattaaataattttcttggatgattcaattggtttaagctaaagattgaaaaagttagaaaactaacaacttaacatttgcctatccaaaaccagagtttgagatacactggattttggataaaaaaaaaaagaatacttccacaaacaagtataaataagagctcttaatgcaccttaaaaactaaattatccctgaacattaatcaaagagaaaacatttgcagcttcttggattagcactatatttattgatttatggggtgttctgtttgtttcaggt

SEQ ID NO: 33800 - DNA, 923 bp, Medicago truncatula
  Intron number 1 from transcript Medtr5g010700.1 (locus Med tr5g010700) derived from phytozome v7.0 (chr-ID MtChr5; po s 2726030 to 2726952)
tcctcgaccctgaccaaaatactatactaccctctgttttaattttatatcttggttttttttttatatatatatatatatatatatatatatatatatatatatatatatatatatatttttaataaaatcatataaacatagaacgcttttaaaaataactaaatatatggtttatgtcaatttattgtgtaaagggatttaatgggatcattgagataggaaaataacctcctgctgacttaggagatggagatgaaattttgtttaagtggattgaggcttgagtgggcttggacactatattacaaaaaaaaaaaaaaaaaaaaaactagtccaagtttggacactacaccgacatcccagtagaatatatattaaacagttttaaaaaattatcgaaagtattaggtgcattggttcatttgcttgaatactatacggggatggcagttcaaattccgacaggaacatatttttagaataaaatattattaatgcaatagaaatattaataaaaactattggggattgaacccacacctgctaggtgattgcaagattgtctatccgctgccccaaccataagttatgtgaaataatattcatactattgaagatctgccacccgctcttcccccacctaattttggttggcatggttggccaatggcagtttgaaatttttgtccacctttgtagttagtttttaataatataaaactttattcataatttaactttatgtttaattgtatgtgttttgttcttcttaccttctcgtttggcctctatgatactatcaaacatgaatccttttttgcgtgttttgatttatttatttattttccttttattcctttatgtaatatagtgtggctatgaatagaaataaggattcaattacccccgcaagtgatacc

SEQ ID NO: 33801 - DNA, 347 bp, Medicago truncatula
  Intron number 2 from transcript Medtr3g125250.1 (locus Med tr3g125250) derived from phytozome v7.0 (chr-ID MtChr3; po s 32086420 to 32086766 reverse strand)
tttacttctgggaagctaaggtatattactaattaaccacacacacattttctgtctatttgtctatgagaaaagttatttcgacaacccaaaaaattcataagagaattttctcttatgtagtttggtttgattacataacacgttggggtgcttagtttctaacaaaaaagttaatttatgtaaaattcttctcgggtttaattttagttagaacatattagcttcctggtttttggtttagttttataaaaaggttttgatgttctgttgtgcattgcagtgatttaatatggttttcccttgtttcagggtcagactccattgtttcctcgaatatttggtca

SEQ ID NO: 33802 - DNA, 507 bp, Medicago truncatula
  Intron number 1 from transcript Medtr5g018820.1 (locus Med tr5g018820) derived from phytozome v7.0 (chr-ID MtChr5; po s 6950789 to 6951295)
cggtgttcctgaatttaagaaattcgaactaacaggtttgtttcactgcaaattcaatgaaaaaaacattcttttttatttgggtatttttatcacatttcaaaatattatttttttgctaaagtttcttgaaagcatagcggtgaagttgaattatattttagttgttgattctggtagaaaacttgtagagtcagtagcagctacacttctgatcgaaaacgtgtctggtatccgacatgtgttggcatctatgtcagagttcacatacattgaatcctgtcattttctcaaattattattagtgttgatatgttagtgtctgcgttgtgtccggtatcgatgcttcgtagaagtgcatctgtattttgaagtttgtactcaatgcatagcctatagtttattagattagtttgagttttcttttctaatatgaattgtggaaatgtgttttgtgacctgtttgtgtggcatattttcaggaaaaagggaataattttgtgtaat

SEQ ID NO: 33803 - DNA, 713 bp, Medicago truncatula
  Intron number 2 from transcript Medtr3g151210.1 (locus Med tr3g151210) derived from phytozome v7.0 (chr-ID MtChr3; po s 40041905 to 40042617 reverse strand)
tagaaagtacacgtgagttttcaacttttcaatatgtacactattttgttttccggataaacaacttaatttgcagtttatagcataaaaacttatcataataagcaatttctaacaaaagataaaatcaaattgtttttgtatatactatgagatgttgtcatatactaccttggagagttcatgcaaataagtttacccgagcagtctcacaaatgcttatgcttgtagataaactcaaatatgtcaatccaaacaagtctgtagtggcataacattccttagaaactgtcggcataattttaacgagcgttgggtctagtctatcagaagggctagtgtcctacaatacaatgtggtatgtggagaactaatgtctcgctcttgtggagggaacctatggaaaagaaaaagaagaaaaccaacatagatttttctattataatgatgaatgttgctctagttattaatttgttaatgagataagtatttttttgtttagtgttagtgggagaagttaaaatcacattctaatcactacgattcctatatccttgaactctattgtcgctttttatttttcttgaactgattcaaattttgatcattgcggccaattaaatagaagttaagccacagctctcatggtcttaaatttctaatgccttaatagttccttcaatcattttttagggaagggcttggagaggcat

SEQ ID NO: 33804 - DNA, 702 bp, Medicago truncatula
  Intron number 1 from transcript Medtr1g065970.1 (locus Med tr1g065970) derived from phytozome v7.0 (chr-ID MtChr1; po s 13292199 to 13292900 reverse strand)
ctggtttcgcctttgaagcttacactactcctcctgtatgttctcttcttctgcttttttgtttgcttattatagattagtgaaatgaagcttattatttctatattagtgattttaatagtaattatgattgacgtaagtagttttagtttttaatgatatgtcaattcggggtatatattgattaattttgagtttattaggcatgcactgacagtgtaaactagttatacactgtcattcaataagaaactgtttttgggatttgatggaatacagatgcttattggatgtcgatgtaaaactattttacactgtcgctgcgtcatacaataataaactaagtctagttgcgaattaaactatttctagagatcaaactcgaataccaatcgagttcgtaggagggtattaacacttgcgtccaaattagtgctcgtttggtttagcggtggtttctgtagaatcacagtgaattttcacgtttacacaaaagcttgcttttgtagctttagaatttccacgtcaagcttgccccgggatgtgatatttgcattgcaaaagctaatccaaacacgtactaagaaatgtgacattgggactataattttttttctgtgatgtatatgcactccttttaatccttttattttacttcccattataacatgtttcaggaaaacttgggtaggcgtgaagtcg

SEQ ID NO: 33805 - DNA, 980 bp, Medicago truncatula
  Intron number 1 from transcript Medtr3g021680.1 (locus Med tr3g021680) derived from phytozome v7.0 (chr-ID MtChr3; po s 5464999 to 5465978)
ctatctcaaaccaaagattcaaagaaataaagttagttaataaaatagaaagtgataactgataaagtataaagaaaaaaatagaatagattagaaagtgatgtaaagtaaacaaagacaaataatatgccccatttagatatcattgttgcttacgccaccgccccatgcttgcttaaccgtgctcaaaagtgtctaaactaattgtgaatattttttttttttttttgagaaagagaatagtttttcttaagaatcaaaactaatttaatgaaattgatatccgagataatcaaatatgagattttgaaaggaacattaataagaatagtcggtttggattaaccaaatttagcaataacattcattcatacagtcaatatatcaatagacatgtccctatcattttaaggtcaagtttaagaaaagagcctatgtatataatacattataagtttttccttcttctggttactagttttcacttttcatgttctccattattctctctaaactatttattttctaatcatacgatgctctgttggaaagatcgactccatattcatttcaagcgcaacacatttttaaggatccatattttttgttaaacctatctttccatagttttcaaaatacaataacatatattagaatttttttatgtagtgtcaatgcacaaagacttggattgcaataatttgttcactatattaataccaaacaaaatatcacaccaaacaactataccatgcacaaactcaactttctagtgcattaatcaaacttgctgctttattatttgtctttgcatcatcatcagaacattcatatagtttcgacaaagtcaattttctttggatgcattgaaatctaatggctttaacactattaattcgacttttccaatcttatttttctctgtattttaggttttattacttctcaattatgtatgttggcaaataaaatcccagggt

SEQ ID NO: 33806 - DNA, 1032 bp, Medicago truncatula
  Intron number 1 from transcript Medtr5g036330.1 (locus Med tr5g036330) derived from phytozome v7.0 (chr-ID MtChr5; po s 15129741 to 15130772 reverse strand)
ttacaggtaaatgactaaagaatgatttccaatttctttgtttacttcattcctgatagctaaatgatgaaaagattgtaaagattgtacttcatcataaattaccaggttatgacatcattctttcttaaagaacctgcgaatattaaagatgcatggaaaatacacataaaatttgctctggatttcttcaattcaatcaaaacaataatttctgtatgtgcatcaagtatttatatttcaatctttaaatttgaaagtggcaggcacattggatctattgaactgtaccaatcctggctgaaagaaaataataatgctagggtttgaaggtgtggtagaagtagaccaagggtgatgataaggttgaagaatagaaaaagaaacgctcttttagatttgtccacaatggacttagttcctcatcttgtaagatcatcaaattacttgtgttttgtatacaattgtgcaaaatacttgtgctcatgttaattggtttggtgtatatatatggaaaacttccaaatagagttcgctcttttttattttattttcaatgagatgttgaaacatattgtacaagagcatcattgaccgatggaaaacttccgaatagatttgtccataattctaatgtgtaaacttttgatttcacttgatcagtctcaagcaattcatagccattcccaagcccccttttgaacttgcgtagatagtcatttgaatgtcttttacacaatccaccattgaatgccactcattacgttcagttcgtacacatctcgatgccagattggcaaaaatgaatatagattgaatggagtaagaatttcgagtcatctctagatctatcacctcacgaagcttcctgtggttattcagtatgtgcctcacctgcttataaatgtgaaacatattgaactcttgctgctgtgtgccatatatgtctaaatgttgagtgtctgtttcacacctgaatatagtttgattctaattttctaagagtgtgtttcccttcaggaggggcattgg

SEQ ID NO: 33807 - DNA, 878 bp, Medicago truncatula
  Intron number 1 from transcript Medtr5g094570.1 (locus Med tr5g094570) derived from phytozome v7.0 (chr-ID MtChr5; po s 37423330 to 37424207)
ctgccaggtatatgtttaacttctctcacctccaatttgtttggatttttcagatttcataatctttttgccctaacttttgtatgtataaaatcatatcttagataaatacatatttttgtataatcgtatattgcaagcacataatattagacatatcgggctagcaagtacaactcatttggtaaagaattgcatagatatttcatatgttgagacgcggatgagtttcaccgcatcactctttgaaacaaaaaagaaaatgaaatattaaacatatcatgagtttaaagactatcacattagtgttatttaaacaattaaaatttgacaatgtgtttagcgcgattcaaaatcgtggttagtcatgttcaatactccttccgtttcataatacttgtctattttgaagaataattttgtttcacgatacttgtcactttcaagtttcaatgcaacattaattattgtcttgtcaataatacccttgcatatttattgcagagagtgaaaaaaaatagaatgaaataataaatggttaagggtattatagaaaacacacatataatttcatcaaaaatatcaaaatttatttagtttcttggttactgcaatttctccaaaatggatgtgtattttgaaacggagggagtatatgattaatgaatataactaatgagttgtaacatattgtcatactcattaatcatcaattgaacctaatcatttaaattgttgtcctaaatttgttgtcaaatatttgtgtatcatttctatttgttttaagccatttctcattttcttctatatgtatgtatatactatccatttcaacaaaatcaggattcacaaaggaacaattgagagtgcaagtgact

SEQ ID NO: 33808 - DNA, 354 bp, Medicago truncatula
  Intron number 1 from transcript Medtr4g156920.1 (locus Med tr4g156920) derived from phytozome v7.0 (chr-ID MtChr4; po s 38975568 to 38975921 reverse strand)
ttggtcatgtagtaacaaggatgaatatcagaaaaaaatagtttttacccgtgccatgagcactattgttgtgatgatggtgttggaaagagatgcagggaaatcagaacaaggagagaataaagaagaaagaaaagaataatcaaaagtagtaacttattttgttttttaaataataataacaaaaaaaaagggacatgtcaatttcgtaaataaaaaaactcgagtggaatatttataattaacttaaatgggtcaaaagtataaatagcaaaaataatataaaactattaaaactagtggtaacctgcaattgcaggttttttctcacctcccaccgtaagagacctgcaa

SEQ ID NO: 33809 - DNA, 667 bp, Medicago truncatula
  Intron number 2 from transcript Medtr1g016930.1 (locus Med tr1g016930) derived from phytozome v7.0 (chr-ID MtChr1; po s 3446180 to 3446846)
gaaaccgcattctccatcttcgaaaatcggtttgttcatcaactatattattcaagattcatctctattttctttttttatttagtgaatttctatttattttcttcctatatttccccttattatattttatataagtaaatttagtcaaaagaatactcaaaactcattgcaataaagtagagtcatacactttgaagataagagagtggattaatccgcccgcccactctaaaaaaacatatgttttgtttctatcctccctacaaataaaacaagatcaagacaaatctaatttctccttaatttgaatgaagaaaaaaaaatgcaacactcaatattgggattggtggagtagttaaatggatttttttaaaagggaaaatatttttttaatagaaataattattaatataacatgtattctataatttttaattaatcaatattagctcaatatctcataagacccttttaacaaaaaatattatctcacaaaacaagctagagtattttatgatctttaacacaagttttaacagtatcaccaaaaaaaatatatatagcaccaaaaaaacacaattttaaaaactattttaacatttattactctttggttttaaagttaaaaatctagacggtgactgctttgtattgcagctgctaa

SEQ ID NO: 33810 - DNA, 764 bp, Medicago truncatula
  Intron number 1 from transcript Medtr1g129450.1 (locus Med tr1g129450) derived from phytozome v7.0 (chr-ID MtChr1; po s 28916614 to 28917377 reverse strand)
cagaagcaggcaagtactagtattttcttttcagaacatgaattttaatctaaattattataccagttaaaataatcctataactgtaaaatgttaatgtacatgtctaaagttgatatcaaatgcattcttgaaatatttacctagtttcaaatccatctcctcaaaatttaccaatttaatgtcattatagccctgcgaatgttgcatataggtagctgttctggtgagcttaggagcaccaaagtggttttaagaggagattaaatgttcaaattctgaaactaacgcaactacttactttctaatattttcctgaaaaaaataatcgttactgcaaataacgaaggaagaacgaatctagtcaacattataaaattttagagattattttgaaatactgttaatgtagttgattaagttaaattcagaaaccaaaccatttagtgtatgattcaactgtttgttaaagttgagattttcttaattctggccagtggctaatatatatcgacaaatttaaaaatcatatagcctgtactatttattgtaattagtatgaatgtgtaaaattcccctttgcctatacgtatatagctcttaatttaattttccaattgaaatcataggatattgcagatttcagttgtttttatttgtcaatatgcattataacttcatttgttgcagatttcaattatttccctttgtcaatatgcatcataacttcaattgttgcagatttcatttccagagctgggatc

SEQ ID NO: 33811 - DNA, 975 bp, Medicago truncatula
  Intron number 2 from transcript Medtr3g151070.1 (locus Med tr3g151070) derived from phytozome v7.0 (chr-ID MtChr3; po s 39935683 to 39936657)
ctgctggtcaaggtgttaagttcactgaacctcaggtactataattttaacctccttttggcatgcttaaattataattaaattaactgtttttttctccttttattgggtttaattacataaagttgtttcatttgatttgcattaattttgtttgtatagttttaggcttttgatcttgctcctagctcttttctaggggaagttgggacctctttttactattctaaccatatttagctttccatttatttcatgatattcataaatcaatattgtccaaacttctcacatccttgtatggtatgcgatatttttcaattacatattctctcttatggaaagaatttgacttaactaagtgttatatttcaaatattaatattttgtgtgtgttgagaagcctagtagattatttggttgttttttcttagggtagattatttggttgttaagaaaacgttttttaatttttagtcaacccctactttgaatggaaaaaagagtttgcacatcaaataggtagggcgacttcacattttatacagctgcaattgattgttaaatcaaatcatataaggcttatttcataaaaaaattagggtcttgttaacaagtgccctaagggcattgtttaaggaacccacaaaaagaaattatgtcttgaaaatacaagtcaaacatttgttaaagtcataaccgtacaatttccaatgcaaaagttgctacttttatatgcttaaacaatgcccttaaggcacttgttaacattttccaaaaaattaaccatgagacttatttcatggaaacttttgcatttagtaattgatggagtcttttgaagcagagctgctttttcaattatcagtgagactagatggaagaaagactcagtcatgttttgataaaatgttgaaagaaaacacatactgaaaggctaaattgtctctcagtattttctctatgacaggttaa

SEQ ID NO: 33812 - DNA, 417 bp, Medicago truncatula
  Intron number 1 from transcript Medtr3g010600.2 (locus Med tr3g010600) derived from phytozome v7.0 (chr-ID MtChr3; po s 1886394 to 1886810 reverse strand)
ggtgcttcttgctcttggtgtcagtcatacaagtcagtgactgactgcttctgatatctcaataaatgatatcttgtacaatagaaaattaatgtaaattcaaaggctgctttgtcataccatgctttgacgcttgaattgattttgtgttcaattcttctaattttttaagtttttattcaatagaaattgtagggcttggactttggagagatcttttgagaaactaaaatatttatatttacttaacttcctattattcatgcttaggattctaatagtccattttgttgttgtcttctattttagtgaatttattattgtaagcattgatgcaaatgacttgtaggtttaacattggattcctaaataaaaattattgaacatatgtgttggtttttgcagaactggagcaaa

SEQ ID NO: 33813 - DNA, 405 bp, Medicago truncatula
  Intron number 4 from transcript Medtr3g169340.3 (locus Med tr3g169340) derived from phytozome v7.0 (chr-ID MtChr3; po s 44184247 to 44184651)
aaaaggcaagttatttgttctttatttcgaaatctcttcaatgtttgccagtccttatactttaactagttttctactacaagttggttagttggagatagtatcattttaagtatatgagattataaattggttggattgtcaggtgtttatttgtttaggggctgattggttcttggtcggattgtttttccgtatctattttgccgtatctctatatagggatttgattttctgctttgatgttaatttaattcttaattttgcttactaattttaagttgattcttaattttgatatttataggttaatttagatacatttgatttgattttaagttgtttattaacttttcttgttgatttttagttgtttcatcatcttcaagtgttgattggtgtatc

SEQ ID NO: 33814 - DNA, 350 bp, Medicago truncatula
  Intron number 2 from transcript Medtr6g014470.1 (locus Med tr6g014470) derived from phytozome v7.0 (chr-ID MtChr6; po s 3375254 to 3375603 reverse strand)
gtacattgctgttcatacttcgaagtaagacaatacttcaaaatcataataatattaaatttatattcttctttagctcgtttataaaatttctctgcactactttgtcagcttcttgttgcatagattgatttgaaagcatttgaattcaaagtttctttcctctatgaacattcaaaaacattcaccgatgatgcaaatgcaaattgtgtgaaatcatcaatgtcccctacaaattcttatctatatatgtgaacttttaaccctacaaattccctcttttgttaccttagaattcccacttttttaccctgaaaactgatgcaaaacctgcttatctatagatcttg

SEQ ID NO: 33815 - DNA, 698 bp, Medicago truncatula; identical to SEQ ID NO: 32191
  Intron number 1 from transcript Medtr1g083240.1 (locus Med tr1g083240) derived from phytozome v7.0 (chr-ID MtChr1; po s 16296538 to 16297235 reverse strand)

SEQ ID NO: 33816 - DNA, 711 bp, Medicago truncatula; identical to SEQ ID NO: 30168
  Intron number 2 from transcript Medtr4g114320.1 (locus Med tr4g114320) derived from phytozome v7.0 (chr-ID MtChr4; po s 26105209 to 26105919)

SEQ ID NO: 33817 - DNA, 229 bp, Medicago truncatula
  Intron number 1 from transcript Medtr6g038920.1 (locus Med tr6g038920) derived from phytozome v7.0 (chr-ID MtChr6; po s 8501346 to 8501574)
tcataagtaagcaatcttccgtattggtattgtatttattgatcgtcttgtgcaaattttaaagctttgactcataaaatttaattaattaattacaaagccctcgacaaactattttaattaatcaaaaggaagaaacttcgttatttggttatattatttttctttggttttggtatgtgatgattttgtgttgttggttaattgttttaaacttgcaggccacaac

SEQ ID NO: 33818 - DNA, 826 bp, Medicago truncatula; identical to SEQ ID NO: 27754
  Intron number 1 from transcript AC225507_17.1 (locus AC225 507_17) derived from phytozome v7.0 (chr-ID AC225507; pos 67774 to 68599 reverse strand)

SEQ ID NO: 33819 - DNA, 957 bp, Medicago truncatula
  Intron number 1 from transcript Medtr1g100200.1 (locus Med tr1g100200) derived from phytozome v7.0 (chr-ID MtChr1; po s 20702385 to 20703341)
agcttcatacaattctctgcaatatctatagtaaggtatgaaaatggtgtttaaacgtgtgctaactgctaggtaacatgggggttttgagatatttttcttggtgtttctatgtacaatttcttattttattctgtagcaaaacttgggtttgaatacattttttttttttttttatttataaaaatgacatgaaagatcaaatctaagaaaaagtaaggcaaaaagaaatgttaatttttctttgggtggggggtcccaatttaattaccaattaagaatgagtttgagtttgttatatcccttgatccggggcttttcaaaacttggaaagtaactcaatctttacatattcatttgtttttctaagactggccatgtttgtataaataacttaattgggcgtttatagcataagtatgaatcatatatgtgtttatgtttaacttttactacaaaaaataaataaagtcaagatattttcatataagtttaagttttttttttttttttttgagagaatataagtttaagttataagctgttttcataaactatccttgagggtttatgaaaataagctgataacatcttatgaacatgtaataagatattttttgaagctttttcaaaaaattttgcaagtgttcatgtcagtagaaaaactcgagtaaaccatgagccaccatgttgtttttaaggcaatggttgtaggtaataggataacaaaacttgtgtgattttttttgtcaaaaaaaaaaaaaaaaaaacttgtgtgatttcttcaatatttattaccaagaaaaatggtaaagtaaattctaaaagattaaacgtttccttaatcggactgtaagatgaatttcgtagtatctttacctgtgatatcatgtttaactgtagtactgttttcattgttcagattttgtactatatattgattagagtagaagcaca

SEQ ID NO: 33820 - DNA, 406 bp, Medicago truncatula
  Intron number 2 from transcript Medtr1g092770.1 (locus Med tr1g092770) derived from phytozome v7.0 (chr-ID MtChr1; po s 18669695 to 18670100 reverse strand)
tggcattgcagctttggtataattcagagaacgtaagtgtaatttatttaaatgtttttctttatgtttaattattttctttatatgtgtgtttgtttaattattatatcaacttttatatgtgtttttttaattcttttctttatgtttaatcattttctttatattttatttatttcaacttttattgttttctttatgtttaattatgatttaaattgtttttgttatgtgttttttttttttaagttttacatgtgttatgtcttaaattgaaaatatgtgtggcaatttaaatttgtgatttttattttttcatttgttaagttttattttgattactcaaatgtttacattgtttaaactatgtttatttttctattatttcagtgtcgtaagaagcgtt

SEQ ID NO: 33821 - DNA, 398 bp, Medicago truncatula
  Intron number 2 from transcript Medtr2g129960.1 (locus Med tr2g129960) derived from phytozome v7.0 (chr-ID MtChr2; po s 31564833 to 31565230 reverse strand)
gtggtggttaccacccatttcattgctttcaaaaggtaaaggtagcatctttttcactttttctcatgacccttttctttaatctgtcatttgatttatgggtttctctcatttcttcctttagaacaagagagagagatttgtaaatttttgcttatatttaagatcagagtgactattgcactgacatttcaaattgtgtgtcggtgtttgtgtttgactggtgttggtgtctgagttacatttgctcacttctattttcttaaattattaccggtgtttacaagttagtgttgtgtttgatgtacgtgttactgtcattgattcatctttagagtagtgtattttgatttttgatgattttttatttgatatatgtagcaggttcatcaaagact

SEQ ID NO: 33822 - DNA, 950 bp, Medicago truncatula
  Intron number 1 from transcript Medtr2g129960.1 (locus Med tr2g129960) derived from phytozome v7.0 (chr-ID MtChr2; po s 31565228 to 31566177 reverse strand)
ggtcaaacattttcaacaatcaaacataaggtaaggtcgcatttcttggatcttttgttgcttaatttgtttattttttttctttttttgtgctaaactagttcgaattataccccatttgaatgttttttttacaatatccatttaaatttgttgttaatttaaaatctgtccatcttaaatttgtattaacaacatgaaaagtattaacaatagactcttttatcatataatttaattctcttttaacaaataataacgagtatctatattttgatatcagacatatcttaaatataattaaagaaacatttctaaatcatcatacaaaattttcattattgtttaataatgtctaatctccataaaaaatctcttaaatacatatataaattctcctagtccaacataattttttccaaaacccattatattcgtccaatctctattattttattttaaggatttcaaatccttaaaaccatttgatttgaacgttggtgaaaatttattatccatcaatcaatcaatgtatgtaatttgaacagctataagctgaccaaattattaaaacctttttccaattcaacatatgtgaaaaataaagtagtgacatacacattgtgatgaagtaatacacaaaattagtagtgtatgatcacatcacagaggaatccaattcgaaattcaattcacgattcctcaaaacacaacataacacaacgtgtgtggtcccaataacactcaataaatagtaacaacatagtgtgtgtgtaaagtgtatgcatttgtttctttgttcttaaatggtgtcttttgaaaacaacttcaaacggttctttcttttgcctttcctcttcctctaaggaaccctctttctcttttcctataaagatacactcttttgttcattagggtttttcttattcatccgtatctgggtgttggtg

SEQ ID NO: 33823 - DNA, 948 bp, Medicago truncatula
  Intron number 2 from transcript Medtr5g037360.1 (locus Med tr5g037360) derived from phytozome v7.0 (chr-ID MtChr5; po s 15709837 to 15710784 reverse strand)
tcttgcagaattgaaaaccattaaggtctgaaaagtgtttctttacataactagaattttacgatgtagagaatgcttctagtagctcttctttgcagcatcctgtcatctttttctatacgcactttcactaatattttggattagtttagaaaatctctctcctacgttagttttagcaatttttgtctgtttgactgaatgttattagattgtatggatttcggcaaacaaattcatacccaatatatatatattttttttgtatttatgtatgtggatgtaaaattataaatttgcaaagttcctaatcatctgtttgctaagtttcatttgtgtagagttaaatagatcaatctttcttaataaaatgcgtttggaatggtaaaaactaaaaagagaaaggcaaagaagaacaaacatgtttttatttttatgtgttttgcagaacatgtgtatgcttgcatatacatttgtaatgtttgtagctattttttctctaggttagagagaaagggagaagaggtccaaaatggattggtcgacctatacagttaatgtactgatatgatataatttgatccatcctattaaataagcttgctagttcttcgtgataaaatcttcagaactaattgagagaagccagtattcaagtccagaattgttagcatgtagctgaagtagtattgatgctatttcaaaaataacttgacttgaagagttaatcttttagatcaggggttaaagagtgagataatatatttcctgtgaatttgggatttacacctgaaatatgctatgtcctgatttctatgcatatataatgtgatttatagtatgtggtctgcatgatcttcttttgtgtttctggttcttgagaaaagctcaaatattttaagttcttctgcaggaaaagtggcttccaactctcagaaatcttgtggc

SEQ ID NO: 33824 - DNA, 894 bp, Medicago truncatula
  Intron number 2 from transcript Medtr1g129850.1 (locus Med tr1g129850) derived from phytozome v7.0 (chr-ID MtChr1; po s 29081863 to 29082756 reverse strand)
cagatcatcgaagaggagcaacttcaattgcataagtaacttctcttctatttctcttcattcaatttctcctacattatcacgttctttcaatttacctcattctatactaatgttcagatcaaatttcatcatatacgaattttttgtatgtaatttcttgttcatatcaagaattattctttttgccattaacaatcaatcattttaggtcagttagattcatgaaggatgaaaaagaaattgcattttttatgcaacatgatatcatatgaaaaacaactggtaataagtttacagaaagaagtagactaaatgctatgagtttttgcatttgtactgaaaatgttagaatactaaggtgaattgaatcaatttcattgtgctatggtggtaacactagtaatccttgtttatggatagaatatataccatggaatatggattagtgtgtgtgtgtgtgtgttttaatcttgatttcattgttctgaagttgtaatttagtataatttatgtagatcatcgaataagaactgtgacttgtgttttaagctaatcagttgaagaggaattttgtagtttacctatacggaactaattggcgttcttttgtagtattgttaatatagaacgaggtgtctatttattgcttccgagaacttttttacagccaattaagtaactggacttaatctttaacgtaagtttttagataccttggagtttggttgggtaccggtaccctataggcaaaatttgtttaacatttgaatttattttatgtcattgaatgattggatgatgggtaccattgtgttcaccaatcttgaattttaattattgtttttattatcatttacagatacattcaagaaaactattcgaaaattcgaa

SEQ ID NO: 33825 - DNA, 800 bp, Medicago truncatula
  Intron number 1 from transcript Medtr3g159610.1 (locus Med tr3g159610) derived from phytozome v7.0 (chr-ID MtChr3; po s 41808108 to 41808907)
gcaaaattgctcggtatgcaaaaatagaaaatcataaaatattatttatgagatgataatgttagtaaaagtaaagactggatttgctcttcataattttctagtagatcgatttaacaaaaataaaataagagcaatgctatggacaaactctctgtcacactctttttgacacactttcactcattggtccacgtcactaatattttaaaatgatttacctgttactggttctgcctgtttgtgtctgtttgacaaaagcataactacgcacgatctccaaaagcccaatagggttcccatctctctctctctcccttcaattcgggttcccatctctctctctctcccttcaattcttactacctgaacaacacaaaaccttcaaaaaacttcttggatctgtttatgaaagagatgaaacagaaaacacaattgttaaaaaattcttcttcaatggttttttttttttttttgaatggcaattcttcttccatggagtggatctgtttgtttttgaagatatgaatttacagttcacacccagcacctagttaattcaaagtttagatggaattgccctttttatcaatctgacagacagtattctattttttacccattgacattcacccaggaaaaacaatggttgttagaacactagcttgtggggaaaaatgaatccgttatcaattatttaccaccaccaaacattttttgatttcaaattatttttgggtaaccatgattgaatggagtttgcagtgcaggagctctttagaacgaaggaccaaggaaaa

SEQ ID NO: 33826 - DNA, 719 bp, Medicago truncatula
  Intron number 1 from transcript Medtr1g132540.1 (locus Med tr1g132540) derived from phytozome v7.0 (chr-ID MtChr1; po s 29603704 to 29604422)
tgaaggttaacatttgttcgtgatagccatgagatgaggttattggttctagttctagtaaaattgttaaactagaactggggtttggtttggtttcctaagcatgaaggcactgtaatgtttgttgaattttctatgcgacaaaaaagtctaagcactagcaacttatttgaaaaaaatgtataaattcaatatcaaatcaccttagcattttgtatacgtaattgagtttagactcaagatgcatatttgaacttttactaatcaaaattatctattttttactcactaattaaagttatctagtaagctctttacaagattattacaatttacattctatacgtcttgtcttctaatggtatactactccactactactagtcaactttgattggcatttttcttttgaaaatcatgaattctagacttatctaaacttttttcttccatgcactgtcctaatccaaagaaaagactcttctccaattaaaatgcatataaaacggttatagttacaacttcagcttcatcttccaactcattagtctttcccacaattctctcttttcttccaaaattattaatgttaccactaaattccttgcttctttcattgcatattcttagctattcatcttttctagaggtcaaaggaccaataatcataataataccattgaattaggctccagaattgttgctggcactaattcatc

SEQ ID NO: 33827 - DNA, 978 bp, Medicago truncatula
  Intron number 1 from transcript Medtr6g059750.1 (locus Med tr6g059750) derived from phytozome v7.0 (chr-ID MtChr6; po s 10986397 to 10987374)
tcatagctgctggagctctgtccccattaaagcaggtgcgtttctttttattttttcttaaatttataactccttatcaattatatttgtagcatgttcctcatatcttcaatgaattcataacttcatttgttttcttcaagtgaagtttctcttcattttacttgataaaatgttcctagaatttatttgacctcaaattaataagtcatcaaacataaggtatgcttcacttaagttggtacattgaataattaaaaaaatatatattttgatgaatcggggtaatttacgtctatgaaaaaaaaaataacattttcttcatttttattcttagaatcagttatcattttcatctcaataacattatacttcttcttcatcttccttcaacatgtgatcttcccctcattcgttccataatcgaatcctacttgtctttaagggtaaattaccttcaattcatcaaaggaaaatgtaagcctcatccatagtgctttttcttacaatcagtaccattttcatgtagagaacatcaaacttcctcatctctttcattcaacatgtcatctttatcttcttcagttcagaataaaatcttacttatcattaaaggtaaaatatcaccaattcatcgagaggtaatgtaggttatcaatttttatgccaattacaaacatgctacaaaaaattgattgtgattaacctaccatcatttattacaaatgtgatagaatttggtgtgtttgtatttattttaattgatgctactaatagttctacatttgataagataagataagatctaaaaatatgattatatagatagttaagttataaccaatacatcttctgagagtgtatgagaagagctcctatttataaacacattttcagactattttagtccaatattaagactcttaaccgatgttgaggtgctgacatagtacattgaaaatccaggcttgcaaagga

SEQ ID NO: 33828 - DNA, 776 bp, Medicago truncatula
  Intron number 1 from transcript Medtr3g044200.1 (locus Med tr3g044200) derived from phytozome v7.0 (chr-ID MtChr3; po s 12268747 to 12269522 reverse strand)
aagtgtggggggagcctaataaagtgtctttagtcgtagtgtttccaaactcccttgaactttattcttttgttttgttttattgtaaaaggcatggttaagtagctaatttttattgaaaatatcatgacacaaaattttcattgtctcctcttatttgattgattcttgtacataaaagcaaactcttgtgttttaagtcttcttgatatacccacatcttgttttaaagtgaataaaattctccaatgagaaaaacacagatgttgttccttaaataaagaacttaaatgtgcaaatggcaaagaacaaagattctcaaatactcccatctctcttatatgaattatagaaggaatctttcttggttggtttagtgctaggattagaccatgtttcctcataatgcctatcttatacaggagcaagaaaagggttggacttcacacacacactcacttgaaacttgatcgttgggttgaataaaaattacaagaaatgcttgagtttgtgattagtgtacatttgggatttaagcccttgaggagacatgtgctttaattgaattgtcatttgataaaattgtttgtgctactatgtttatgccttttgcttgaggacaagcaaagattcaagtgtgggggagtttgatgagtcatttattgactattttaatatgctttttagtttagttttatttagattttatttgattttatattagtattgtttcctttttaggatagtttactttaaattgcattttattatatttc

SEQ ID NO: 33829 - DNA, 711 bp, Medicago truncatula
  Intron number 1 from transcript Medtr3g132800.1 (locus Med tr3g132800) derived from phytozome v7.0 (chr-ID MtChr3; po s 33476937 to 33477647 reverse strand)
agaattccgaatccttctgttgctactattgccaggtaacttttttttttttatctcgatctattattattctttctagccatttgcttaagatttttattgcttcgaattaggatgaatttaaaggtttgttttgctaattatatatatacatatatatcgcattagttgtccaattttattgtatttcatattttgatttgttatcaataactataaccgaatagaaaaagcattcgaaccaatttggtttctttgtaattgtaatttctgttgttgataaatcctaatgtattagaattagttatggcttgaccttctaatgaattttagttaggttcttaagtattcaatccttctttgcttcgtctgttaatgttatgcttaaacctgcatttctttttttgattatctctttgtacaagtttaacagctcgtttgattagatgaaagtaggttcatagtttcaatttttgatctacttgatattaagatattcgccatttgattgtcgccctgaaaagtgtagagttagtaaactgattgaagttaatgacccatgatggagcctggttatttacacacaagcctttcacttgatatttatatttatgtactttttataattgaaatatgttactttatcaatcgtgtatcccctttattctgaagattctcgctttgactatgttgcagtctgaataaacagac

SEQ ID NO: 33830 - DNA, 237 bp, Medicago truncatula
  Intron number 1 from transcript Medtr4g143430.1 (locus Med tr4g143430) derived from phytozome v7.0 (chr-ID MtChr4; po s 35901433 to 35901669)
gccgtctcaaacgaaccggtacaaattttctttcaggcagtttgtgttttttttttgagttttttgtgtagtgtgatctgttttgcatgtttgtttatggttagcttatgttgttcttttctgctatataattttttttaagatatggtaatacatatgatataacatgactgacatgattaattgaaataaatatatgcaggaagtgtttggaccgcaagctcacacattataaca

SEQ ID NO: 33831 - DNA, 680 bp, Medicago truncatula
  Intron number 3 from transcript Medtr4g143430.1 (locus Med tr4g143430) derived from phytozome v7.0 (chr-ID MtChr4; po s 35902078 to 35902757)
acgtgagttcaagaccctataaatttccaacttttttaatttgacaaatataaagagtgataaaagggttgagagcattatcccgacccataaaataacattaaaatactatcatactcattttaaataaactataattaagtatcttttggactttgaagcctttaataatttgtaatgatatcaaaatctattatcaacttaagagtatgttgagagtctcacattaatatgtagtaaactttgatgattattagtgacatacaactttcatcatatgagttgataatttcaattctgtagttgaattagatcctaataaaaagttcaagtacttgtttttgagggaagtacaaattctaacaataatattacatcttgcttgtttaattatatcattaatagattttggctttttaagaagaaaaacatttaaataatttatttagttttacgaaaaacaataatattacagactttatttatttttttcacaagcttacacccttaaaaaaacatggcttagcaaaagcaaaacatacaatctcaaattaatgtgtggcataaataggaaattggtttatgtagattaatgataaataatttatggcttaattttaatttcattggttttttttttgttaacagggctattaaaaaatcaaattgtttccatcaac

SEQ ID NO: 33832 - DNA, 457 bp, Medicago truncatula
  Intron number 3 from transcript Medtr3g105270.1 (locus Med tr3g105270) derived from phytozome v7.0 (chr-ID MtChr3; po s 26316254 to 26316710)
acttcaagtgagtgattttctatcttatggcattaaattattaatatttctcttcaccaatcttgttgaattgcacgtgggatgatttacaatcaaataacagtctatcatgtgctgtatttattccgacaggcgaattttagtagtagttgttatgttagtttctagggtttgaaccccgaacttcctgcttaagagttaaaactcatttggtacctcttagctcgccaactgaactacctatgtgggaccaatcacgtgctatatacgttgttatatctctctcggccatctcattgtgcagaatttccacgttcaacttatactgttttttgtttgtgctgatattgagaaaattgtcgagacataattgattttgagtttatgttgttgatttatattctcaaaccttttcttcgcagtgattgttggggaaatagctaatttcgcagcttat

SEQ ID NO: 33833 - DNA, 705 bp, Medicago truncatula
  Intron number 2 from transcript Medtr4g101440.1 (locus Med tr4g101440) derived from phytozome v7.0 (chr-ID MtChr4; po s 22048328 to 22049032)
ggagttactcaccaaagtatgctttatcaattggagttttatatcttgcttcttgaactatgtgctttatgttgtttcacctgcttgttaataaaattatatagtttagtaaaatcattatgggattatttttttattttttaattttgctttggaatgacatctaattctaaactttaaaagctagggagtaggaagttactgaagctacccatactgggatatattcctattgactgtttcttctatattaattaggttttcgtgctgcttaaataacatgtttcaattagaaactgcaccatcactcactgcagctaaccaccacttccatcctgtcaattataccatgcctaccactactgctctgggttccctttgatgacaaattatatttttgaattaatagttgcagataccagtcttagcactgccaatcccaacccaacgtggccttcggtttctaaatgtggataaattaatagtaaaagtcaattaaaacgttcaattcaatttgaataagctcgctaaagttattatgtttataggtgtctatctatcgtgtttgcagtatcttcaaacgcaaaagttgatagttatttagttcctcagtagatatatagtgcattactaaattcttttgtggttacataatctacttctttactgtattgtaggtttataaattaccatcagatcgcattt

SEQ ID NO: 33834 - DNA, 310 bp, Medicago truncatula; identical to SEQ ID NO: 31490
  Intron number 3 from transcript Medtr5g081290.1 (locus Med tr5g081290) derived from phytozome v7.0 (chr-ID MtChr5; po s 30501840 to 30502149)

SEQ ID NO: 33835 - DNA, 849 bp, Medicago truncatula
  Intron number 2 from transcript Medtr7g014870.1 (locus Med tr7g014870) derived from phytozome v7.0 (chr-ID MtChr7; po s 3625920 to 3626768 reverse strand)
gcttgcttttcacttggggtttggacttctcttactctttgcttgttttactcattgttcatgacttcatttattcattcaaaaactgttttatagtgttggagctatttttctatgatacttaatcactcaaactaaacaaaattgaaatgaattgctcataccttcacaccccaattttgggtactagaccctgctagggtctaaggagcatttctttagaaggaacttggtatatttctaggacgaacacgactcattggagtttccgttgcatttcaaatatggaatgtggtttgtgtcaggagagaccatcttctgtatgtagttcattccttcttgtagttagagttgatttcatttgatagtttattactagtagggaacaatatcaatcaatgtcatcaaaagcgcgctatagcagtgctgttactatggtagacaagtagagggagcggtttaaagtagtggctgtcgctgcagtagttgagattgcagtctgtcaggtgcaaattggcttcggcagaggagtccccctgaccccagcctactctacggtgactttccggaaagtccttcattttcgagttatcatgtggtggattctcacgaaaaccactctcttctgctcaatcgcatatgcgtatggctaaatatgctctgctatctgggatcaataacgtttatatggtcaagagttaattagttttgctatagatttttcctttttaatttacaattttaattttaagtttgtttgctattattaatggttttatatcgtggctagtaaacataaaagtggcaagtgtcaaaggctaatgcatgtatcccatttctcaggggcta

SEQ ID NO: 33836 - DNA, 768 bp, Medicago truncatula
  Intron number 2 from transcript Medtr1g120510.1 (locus Med tr1g120510) derived from phytozome v7.0 (chr-ID MtChr1; po s 25956117 to 25956884 reverse strand)
cttttccactaaaccacccaccaagtcttttcaaggttttctctttctttcaattcaatgttcatgtgtttttattgcttcaatcaatgaattgtcactacctgatgttgctttcttattattagattgaatattggactagctcggtaaatgttttttctttaattcatttagttattgaaaatgggtaaagaaagagatatcaaatgggataatcagtaaaacaaagagatgaggggttattgtttctgatttttcttatcatattttgtgctggaatctcatttccttacttttttttattttatttttttattaaatgggtaggtttgttatgattttggataatttgtttaatttggagcttaatttgggtgatggtttaattctatctcatatggatgattgatgatggctatgaagcactgacacgccgacatcattaataaattgagaatattaactgtaatttaatgtaaccactgtttgggtgttgtattggtgtccgacaccgatacaccttcaatttgaagtgtcaatgctacataagctaatgggcactttagctatcgttgtagctttgctttaaatttgacatttcgtgatgtgttagggttttctttgaggtaggattgtcagaaagtgctatgctttggtcatttgagttgattgatatctctgttaagaatttgtcaatatatttttatgattattaccgtttttttgttgtcagtgaaatcagtagctgctcctacagaatctatatca

SEQ ID NO: 33837 - DNA, 807 bp, Medicago truncatula
  Intron number 1 from transcript Medtr5g032180.1 (locus Med tr5g032180) derived from phytozome v7.0 (chr-ID MtChr5; po s 12954785 to 12955591)
cgggcagaaagtgaaggaaagagcccaacaaaaaagtaattaattttatctaatatttatggtacaattttattttatgttttaattatagaggaaatatgtttgtttaaaatttttaaaacattgtaagaaagatgaaaacattgaaaaatgaattgggtttcatttgaaacgtggtggcatggccatggttggtatttttaaattgatttttttttttttttggagatgattgattatgtttctgtagtgttgttgtcttgataaaaaaatgttttgtactttccctttgcatctggtcagagatatcgagaagtagtctattgaaccaattaataaaatactactaataataatactcctaaaaggatatcatcagtgacgttaaataaaagtcattaaaaatataaatttgattttggaaaaattatatttttaatgacttctataaaataatactatcaattttgaaaacgctaaaaaggtttaatgtaaattagaattgaaaagtagaaatgtaaagacttaattgaaaaggtttaatatatttttttttttggcagggttcaaacctcaaatcttatatatattatgcattattttttttcaactgaactaaactcacgaggaccgcatagtgtatgtttatgagtatggtaccaggttcgatttatatttcattcataaaatgttactaccatataagacatatctttcttcctttttaaaaatttgtctttatctttcatttatttctataagttattttctatgttcacacactcatgttttggatcacagctgtaa

SEQ ID NO: 33838 - DNA, 963 bp, Medicago truncatula
  Intron number 1 from transcript Medtr5g086080.1 (locus Med tr5g086080) derived from phytozome v7.0 (chr-ID MtChr5; po s 32985237 to 32986199)
ttgggaccccgcccctaaaaatccaaaattccatcgtttagacccatttttttttttttttaaatttttcatattctcagaaaaatccgaaaaaatttgcattagttttatttgatttttagaattttttggtgctatttttatgattttatttgacagatttttagcattttttacttggtgttttttgttgtttttaaaagcaaaactcaaaactgttaaaatgtgagagagtctgatggctgattatacataagaattgtccggattataaaatccgaaatagtaaacatgaatccggattttaaaatccggaatgcacaagtgcatttttgtaaaaattacagggcgcgggagaaggtcatagatggaaaaagtaatagtctaaatattaaatagtaggtgttagatggagtattatacttttggggagttgaatccacaacatcatttttacttcaacttatatattcaccccctcaaaccaccaagtcatgctaccaaacttatgtgcaagagtactttgtatcagatagtgagatgaaataatcttggtcagaaaattaagaaaaataattaaatcatgtaaagtaatgtgactgtttagtccctctgttaaatggtccgtttatactctataaactatgaaatggagtataaactcggtttgtttgtaaggttcattccacaccttcattatagcttcaacttctttattcgtccctccaatcaccaagccatggtattaaatctacgtgcaagattaccttgtatgagatgagatcattttggtcacaacatcaaatgaaaaataatcaaaatatacaagagactgcttaagtcaatattatataagtattttgtttgttttgataaaatatttgttaagaagagagatgatgaatgattactcttgttgccacatgagattgttacaccatcatatagaagaaattcagctgt

SEQ ID NO: 33839 - DNA, 1012 bp, Medicago truncatula
  Intron number 1 from transcript Medtr6g083760.1 (locus Med tr6g083760) derived from phytozome v7.0 (chr-ID MtChr6; po s 17136054 to 17137065 reverse strand)
ctttctagaggtctactgtaagagtaaaactagtgagttgttttctagttacaatctgttattctgaatttgaaataacaaattgttagtctatgacacataaaaaggaaattggactaaacatagttttggtaaaaaacagctgctgtaaggttcatactgatgtgttaataatagttgaaaatatgatttgttatcttgtttcgacatcttgtagctgggacagttacttttatagtcagataaaaaccatgtatagaataatgataactctggatttgaattgagttatttttccctatgcttgctgtaaagatcatcatgacatcttcatgatttctttttcattgcagaatttgttattatgatgccttcaaatcaaacaacatcattgtttgcacactcttgattctgattcgtgcaaatgtaaagttcgctcagtgttattattatagcttcaatgtgattgtccacatcctccccgtatacaattgatgcttctcactgtagtgctccataattcctgaccttcttgttttgagactcagattagtgtaaaattaggtaaattatttaaatagttgggtgtctaaagcaagccagatcctgtttgatggcttttgtccatccttgtgtttgattgcttgtgcgtctgtatgcttgatttagcttttgtaaaacccctgataattcttcttcctggtaaagaaaagaactaacaggaagcattcagtcattacttaccgagttaccttctcttgctatgttttcaaaatggcatagtaagaatctaggaaggctttaattaatcaaagagaaaccatgccaaaatgagtatggacattttagcaaaataatttaagagaggcttcaatatgacattttagcatatgtgaatttgttagattctgtactattggtctgcctcatgtatactattctttttctttcatgatgcttccttaatttgtttctagttatcaaaaagggtgcagcataaacccttttttcc

SEQ ID NO: 33840 - DNA, 483 bp, Medicago truncatula
  Intron number 1 from transcript Medtr2g042030.1 (locus Med tr2g042030) derived from phytozome v7.0 (chr-ID MtChr2; po s 11703205 to 11703687 reverse strand)
gttgttgtacctgagtgagttaattccttaatcattgttcttgttcttattcattgttctttgtttcaattgttccactgccactaaaacacgtttttttttcttcttcattgttattgttctttgtttcaattgttcttcatttatacccattgctgttttggttttgtttatgttgttccctttttctgtttttgttcttttaccattgttgtagtttcttttatctgcttgttcccttataatatgttgtttcaaaaaaagttaatacaattattatggcaagtgaaaaagaacccatagtaaattcttacttgttttttcatgttattacatttgttatcagttgttctttcatattaatacatttgttattagttgttctttcaattgctttgcaactctactccacattttaaaccttcctgctttcaatttatttatgtaggttgagaatcacaaatttggttgatttgaacaatc

SEQ ID NO: 33841 - DNA, 854 bp, Medicago truncatula
  Intron number 1 from transcript Medtr4g087410.1 (locus Med tr4g087410) derived from phytozome v7.0 (chr-ID MtChr4; po s 18406703 to 18407556)
agaacttttttctccactttctcgtgtcaccttcggttcttctcaacctcaatctcacacttaccttgcacttcaatttttattttgttggaatcttaaaaatctagtggtgaaacttatactatttttttttgtctgagattaagtggtaattcattaaaattaaactcacacataattgtgagatttcgggttcgaacacgggtcacaacgtccggtcttacaatttcagcatttgtcagaatatcgagaaataagaaattacgagttagaatgtgtgttacaacatatcagatgtttctgcaattacgagttagaatgtgtgtcacaacatatcagatgtttttaaatattttatttatagtcctctatgaaaattttattttttattatatattcaaatagtattaggtaggattcgatgaagtttgttatattttgttcctagcatatatatattggcgtgctctatgagtgcgttggtgcacgtcccaccacacaatatttcaatgtaaagttatatagttttggtatgtttagaccttcaacatgtcatgtcatttccccttcacgtatcagcatgtcatttgacctaatgaatgttcttgaaattgctcaaatcaatctaaagaaccctttttaaaccattttatacaaccattttaaagtgaaatatttttttatatcagagttttgatgtcgaatttgtacccaaaaaacaattgatgtcgaatacaatgttttatgtatgtatttttcaaagttttgtaattgatgttatgctaaagtgaatattcattcaagtctcaaatcgagtagtttgaagaaatcagaggtaaaaatttattataaac

SEQ ID NO: 33842 - DNA, 215 bp, Medicago truncatula
  Intron number 1 from transcript Medtr2g025010.1 (locus Med tr2g025010) derived from phytozome v7.0 (chr-ID MtChr2; po s 6525437 to 6525651)
gactctacaactccgcccagatcctcgtaagttcaaaacctattcttcttcttcttcttcttcttcttttttccctcttttttttttttcgcatttgagttttaattctacactaaaaattgttgcttttcgattcatttattaatttgggtttaattaaaagtttgtgttttttgaataacagggttgttttcttgtttcttcacctgctgcaa

SEQ ID NO: 33843 - DNA, 597 bp, Medicago truncatula
  Intron number 1 from transcript Medtr2g122040.1 (locus Med tr2g122040) derived from phytozome v7.0 (chr-ID MtChr2; po s 29109794 to 29110390)
attcttcatttgtctcaatcgttctacaaaccctaaaactgttaaacatgtaagtgtatatctgattctttgatttagttttgtttgttaatgaatttgatatttgatttggttttcaatttaaattttcccataaccctaatcaaaacaaaaggggatttttgatttttgactattatagctagcttatagttggaattaaatctaatgtcattttcaaagaataatcacgattttgatttttgactatgtgtatgagtgtatcattgaatattatatatgcccagagagtcctacgaatctacaattatatgaagttctaacccaccatcatatattttaattttgaaataaaactgtattgcttgcaacttgaagcagataagcattttgatttagaaatatttgatagtttaatgcataaaactgacaaacttggtcattctgataccgagttgtatatcctataatataacctgactttggtcaccacaagactcaatcttttgcctaaatttcaaagtaattatgctgattaaaaatatcctttgaagaatgtaagaaacaaagtgacttcatctcctcttcctgcttcat

SEQ ID NO: 33844 - DNA, 746 bp, Medicago truncatula
  Intron number 1 from transcript Medtr6g081090.1 (locus Med tr6g081090) derived from phytozome v7.0 (chr-ID MtChr6; po s 16509834 to 16510579 reverse strand)
acaagggttgaagcattcgctcgcaagcaactcaggtaatagaatttaatttttaattaaatgggtttgccatgatcattcatcaaaattcaattgcataaagatataagcaaatatattcaattgcataattcttttacacattataaaagaagacaaactatgcagtggggtcactatcaccgtagtttttggttgaagtcatatgttgtttacttgttggtttttcaagttctgacatgatattatttttcttcccatttccagctgaactactttacgtgcttcaatttttttcaatcactgctaaattttagtggataagaaacaaatgaatctaaaaaatttacgatcaaccaaattctgtttggaggtgaatgtttcttcataatctaactttgtaaatgaattttaagtgatttgaaaacatggaataaggtcttcaataaataaatatgtatcaggtgcttttggttcagttttagacttttagatggtagggatcgtgcttttggtttgatttacaattattgtttcttgtactgctattgtgtaggtcagtgttttgtacttttttttttgttccttatctaagtttctatggtcggtcttttcgactataatggaataatacatgttatgctactgcaatgtagttattgcttctagcatggcatttactaggctgatttggtcttttcgaactcatccaaggactgcaggatttggaggacttgatcggaatt

SEQ ID NO: 33845 - DNA, 825 bp, Medicago truncatula
  Intron number 1 from transcript Medtr1g046440.1 (locus Med tr1g046440) derived from phytozome v7.0 (chr-ID MtChr1; po s 10809611 to 10810435)
attgctttgtgagggtaagctcatgttcacatcaattttcatacatatattagaaaaacttaaataaatgactgaaaattaaacacaaaaaatataataagtctctaatttagtgtctttatcttttggatataattatgaacatatttaattttcttttatagtgtctaaagaggtgttttgattcaaggatcaaaatttatttacaattacaagaacacttgttttggcatgtccttacattcaaatatgatatttgtttatggttttacaaattatgtttaagtactttttatatatatgaagatgatttagggcctttggcttattttagttttatctactagcataagaacttgtggcactatttagaaaaacttataaaaacaacttaggacatggtcataagttgttttcagcttatttcaatatgttatccatagttgtttatgaaaatagtttgacttaactttattttatgttatagaaataatttattcgtaagcgtctgtaaaataaactatttatccaaacaaatttttactcgtattattttcattcgcgtgtcaagggtgagaatcaaacattttaatagaaataaaagataatctatacttttaacagtttttttttaaaaaaatagataaaaatttcaaaaatattcttcagtattttaattgcttatgaaacacaatggttgagatagaatttctagcaataaatttttgaattatgatttttatcattgaaacaaacacacctaaatatatgaaattgatgacttccaagtatctaaatatattaaattctatgtatagggttgtg

SEQ ID NO: 33846 - DNA, 759 bp, Medicago truncatula
  Intron number 1 from transcript Medtr5g015500.2 (locus Med tr5g015500) derived from phytozome v7.0 (chr-ID MtChr5; po s 5183538 to 5184296 reverse strand)
ggattgtgggaagcttttctgaattggttacgcaggtaagctattttttttttgttcatcgtcattgttcttttttttgttgaagaattaggttctggtaattttttttttcttccgtgaatttgtttgtaatactgtggtgattttcatgattttatttacacctttgatatgatttgtaaatcaatttgttttcaattcaattatgatgttattgtgttgcaaaactttgatattagcagcgtcgacatattagggcgagtttgggtaatcagcttaattaagtgcttattggataagtgtttattttgtaaatgcttatttaattgtttacgaataaactataaaccatttctataatcaaagaggtaatgcggtcaaactgaatttgtgtaggtcataagttgttttgataagctatcatggctaacatattgaaataagctgagaacatctcaaaagcacttattcaactgcgaatgtcataattaagcctaaataagctcttccaagtgcaccctcagagctaaacaacattatttttttcttcataaaaggccgttgattgcattaatctgctttaccttttcacaaagttactaattttcagttttagattgtctttggaagttgaattattttatatttatgtttatacctatatgcatgccctgtgcgaagtggatcactttcttcaagatgcatgagcttattatgttttaaatttgatttgattgcagccttttcttcaagcaggag

SEQ ID NO: 33847 - DNA, 753 bp, Medicago truncatula; identical to SEQ ID NO: 33740
  Intron number 2 from transcript AC233657_10.1 (locus AC233 657_10) derived from phytozome v7.0 (chr-ID AC233657; pos 39838 to 40590)

SEQ ID NO: 33848 - DNA, 820 bp, Medicago truncatula
  Intron number 1 from transcript Medtr3g136050.1 (locus Med tr3g136050) derived from phytozome v7.0 (chr-ID MtChr3; po s 34210927 to 34211746)
ctcagcccagtgaggacaaaccggagcattttgaggtttgttcatttttttattttttaattattataattgttgttgtttgattcctcgatgtttttttttatttttattgttgtcctgttactcactttatgtgcttatgtaaggattatgtcatttttctgtttgtttggattcaattgctttatgctaaaatgatgtttgaacattcttatttttatattgttatatagttttaatttgtaaattaccagtactgttgatgactattgagattaaggttagtttgattagtcatcctaattatgttttctattgaagaggtaataactgaagttcagcacagctaatttgagagtttatgaacacaagttgaaaataaggtatatgtatttcataagagattcccagaagctcttcaaatacttaccaacatgttttatcctaagataaatcttcaaaatgtttttgtgtgatgtgttttttatgttcttactttgctttggttatgcctgatctttatgataactgtgtttctacgaggcattgtttttgtctgtgggataaaaaaataggttttgttacatgcatgcgcatgttggcttgttatatatgttaaattagtgttcctttgaatagtaatgataaactttggactgtctatcacatgcgctaaatgtcaacgattaaagtgtgtagtgatttatctgtgttttctttgtgtggctattgcttgaatggtttgaaaaatcttttgatgttccagatttgttactttgcaatttttaacaggaatctgagagtgaagaagatattttag

SEQ ID NO: 33849 - DNA, 384 bp, Medicago truncatula
  Intron number 1 from transcript Medtr1g031270.1 (locus Med tr1g031270) derived from phytozome v7.0 (chr-ID MtChr1; po s 7545474 to 7545857)
ttcatctcttgtatgttcatctcttggttagtgagtgaagattagaatttgcgatttgcataaaattttgatcgcgtgtgattttaactgcattgattaataattttttttgaagaatgatggatgaatgaatcttggatcatatgcatgaaatattgagtaaggttaattataaatagttgtttgaaaaatagagaacatgaaaaaacaaaatatgaatacaattatacaaaattctatgaaatattttgtgaaaatatgaattttttttaattgtatttttaaataaactgatcaaccgaaccaatccaaaccgaactcaaccgattagcttggttcagtttcttttttgaaaaacagtgaaaatcgaaccaatacaaacca

SEQ ID NO: 33850 - DNA, 636 bp, Medicago truncatula
  Intron number 1 from transcript Medtr4g107290.1 (locus Med tr4g107290) derived from phytozome v7.0 (chr-ID MtChr4; po s 23388638 to 23389273)
ctttccctaacgttgattttatacaggtaaagaacctttgaatagaatagtcttgactcttaattagagaatgcaagtaatgctccatcgtttatatgattgcttgagttaatatagttatttttctttgttattgttggtagtagctaaatgctgattatttcatttaattatgagagaacgtgtgagctttaaaaatttaatagcaactgttatatagggcctgtttggctaaacaaattatttgctgcttatagcataagcagttatcataataagcacttttgtatacacttacatcagctatttctatagcaaaaaataaaataaagtaaaattgttttgtatatgttaaaagtcgttttcataagctatcttggacaacttataaaaataagctgaaaagaactaaggaaaaatgtcaaagctattttcataagttctcccaaacagtttcgcaaaacttatggctgcatataagctcaaataagttgttttcataatactctttttgtgccgttgatgttcatatccacaacaaattctagaccataaaagttgaactttatttgtttatgataataatgttgttttcctagattattaatagccgtaagattgtttctttttagggtt

SEQ ID NO: 33851 - DNA, 718 bp, Medicago truncatula
  Intron number 5 from transcript Medtr3g133360.1 (locus Med tr3g133360) derived from phytozome v7.0 (chr-ID MtChr3; po s 33780769 to 33781486)
agagtttgaagctgcacgagcttctcaaactcaaggtacctctcattgccttcattcctgttacttactctcttatcctttctatttttcaaattattcatgtttatgtgcgaatgcatatcttcaaataaaattgacatcaaattaggaggctaagatgagtgtttaccttagattagatatatgacaagccttcacacattaggggacaatgcgctggttgggtcggtttgatactgagtaaccaataaaacattgaaaacagctagcaagtagtattcttcagtgcctttgtgttatttggcatagcctggcttggcggcttataacttgatttttgagtgtttagtcatctcttggttgaaatagtttgtttaaaagccttgatattgcactatttttataccgacaagaattgatctggacccaaaataaaataaaagatatttttgttgttgatgttagctgatcatttagaataaagaacggcaatttttttgcatggaatgacaaaagagagttgaacaaagaagaagctttgtataatctaaaatattttaacagcacggattcttaagatgtaaatcttggtcattgtatgagataatacttttgtaatatcttaaatgctggccgacttctactgttcattcatttccttaagagatatcccaaagaatgcttcttaacctccttttttttctagagatatatttag

SEQ ID NO: 33852 - DNA, 819 bp, Medicago truncatula
  Intron number 1 from transcript Medtr1g065260.1 (locus Med tr1g065260) derived from phytozome v7.0 (chr-ID MtChr1; po s 12905528 to 12906346 reverse strand)
agcttagaggcaaagccattgctttacactctcaggtgaatttaattctaagttcttattgtttgtgttgtttactattcttttgcatactttttttacaagttttttgtttatctcttttggaattttgtttgtgaggaattggaaattttagtattacaactaggaacttgtttttttttatatgattctcttgaattatgattttatgtggtttatctgtttcaaagtttgtttggttagattgaagggttttatgaaatttgttgcagagagattcaagtaggaatattaaaagacaaaataaagataaaaattgtaggattggagtaaatcatagtcgtggtcgcgttgtggatattgtgtagaattacggtcaaatgcggctgatacatgtatctaagagtataatatgactttgattatgacacactttgagtgatgttgccataatcgaagtcgtattacactcttagatacatcaaaaaccttgattttatctggtttgtgcttggttaaatattgagatgtgaaaatttaataataaagttaaatttcctctatgacaggataataaatggaagatagggtaagcattttatgtaatttatatattgaaagaccaattagaaactactaattatctaacatatgataagagattgggaattgtgtggaagcaattgtttcaaaatctttggttagcacttttttgaatataatttgatgtaagcatatgcagcataacttttctgtacttaactttcatattttgaaatgctaggtaattactgaattctgcaaatcaataggagcaga

SEQ ID NO: 33853 - DNA, 555 bp, Medicago truncatula
  Intron number 1 from transcript Medtr2g030170.1 (locus Med tr2g030170) derived from phytozome v7.0 (chr-ID MtChr2; po s 8300123 to 8300677 reverse strand)
gatcaggtggtggttctcttagtagaagaagaaatgtcagtaattctttctcttttttaatattctgtttgtttgttttatatattatatcaccttcaatcaaagggtctatttttttttataaaattacaactataatatttcagtgtcataatcaaagttttaaggatctttaatattaaggagaattggactgtccgattttattagtagttttttagttttaatttggttttgcagttacaaaaattgactttcaatgaatttattctgttaaattggtgaattgttgttaaggtgaattaagtgtgaagcgatagagttaaattgattttagttaaagatagatgaaaattgatgatgaattgattctgtaaaattgatattagacaatcttcatcatatttataacaaataaagcaaaaaaaaaatatgggtgatgactatcattgtgatcatattctactgtagttttagatgttacacaacaagaaggtttggattttatttggtaatttggaaattgattaaggatgttaattgtttttcagactc

SEQ ID NO: 33854 - DNA, 425 bp, Medicago truncatula
  Intron number 1 from transcript Medtr3g105650.1 (locus Med tr3g105650) derived from phytozome v7.0 (chr-ID MtChr3; po s 26476549 to 26476973 reverse strand)
tattaggtaatttatgctacactcctttgtcaatctcaattattcttttcattttttctttgagttgaaaaaactattattattaccatgttcagctttatactatgttcttttttttggtttcattatattatatactatggtttttcatttgtaaagattattgtgttatgtgttcttagtcaaaatacgtctagccacgtattcttgtaatcttttcttcatactctgagcatatgctacttacttatttaacttcatagtcagaatttttaagaataatatgcctggacatttttctaagtagttgtttctaaaattttataataattgaattagagtactgtaagaaatatttttccagttgatattagatcacattatttatcatgtaggtgcatttgtgggggtaaacattggcactc

SEQ ID NO: 33855 - DNA, 719 bp, Medicago truncatula
  Intron number 2 from transcript Medtr5g080370.1 (locus Med tr5g080370) derived from phytozome v7.0 (chr-ID MtChr5; po s 30060747 to 30061465 reverse strand)
tcaaagtaagacattggtccatgtttttcttcatgggggcatgtcatatgagtatgactatgtatctctctcttttaaaaaaacattgtcatttttgaaaactctatatttgaactcagattgtgaatcttcaatgaagtgaattattactaattactgatcttggggtaagaataatagaagataactagcaaagttataaaatgtttgggctgttatttgtgttctgctggtatttcttgaactctagaaattaactaatttttcagttgtatgaataatgtattttgttttatacatgagttaattagctcatccgccatgacaattagctcatccgccacgactctcctccagcggagcttttgcctctcatgctgctggaaccttttacttgagactttagttatctgtttgtttcttttgttttccttgctctttagcctttgtaacaaaaaaaatacatgggttaattagctgactatcctcttcatttatttcttttgcaatattttattttctttgtttgaagttttaatagtttgttgttctctacgaaagcaaaaactatttttattttattttttattcttgaattgtaatgccatgttgtgtttttcaagaccaaaatgagttgattttgcatggttgagctgatttggtattattctctcattgctttagtccgatctttttgacaacacgggcattgtttatcc

SEQ ID NO: 33856 - DNA, 652 bp, Medicago truncatula
  Intron number 1 from transcript Medtr5g080370.1 (locus Med tr5g080370) derived from phytozome v7.0 (chr-ID MtChr5; po s 30061515 to 30062166 reverse strand)
agagaggtgtgataaaaatttactgttcattctcaattttgtgcaagttactttactcttttcttccaaaaatagcctacaataattttaggaaggtttacacaactgcgcttgatttattgccacaagacacagttatgttcaaaccttacaaaatatcatgagtgttcaatcataaacactactagaaatcgggattatagcgaaggattttgacaataagttttcaatcatcataaagttctaaaatattttttaacaataagtttttgcgtctccaaatgtagtttggagactaaagtagaacccggtgtttagtgacagaaaattcaatctctgatatttgtttacccattctattaaaaaattagcgaccaactttccggtcactgtagcatgtgctatactctaattatttcatttttgtttcatccctacagtgtcattttaaaagtaattgtgtccttcttcttcgatggaaagtgaccttccttcattatcttgctaagacttcaacaaagataaaaagtcccattttttttgaaaccctaaccattttccttcactactttgtatcactttattgatttgattcttagttcatatatttttttgcaagttcttgggtttaattttagggctaggcaaagaa

SEQ ID NO: 33857 - DNA, 884 bp, Medicago truncatula
  Intron number 1 from transcript Medtr2g111400.1 (locus Med tr2g111400) derived from phytozome v7.0 (chr-ID MtChr2; po s 26412343 to 26413226)
aattactacagaaaaatgtgggtatactagcccgtctttccgctagtaaacataatagcattcaccctatttctttcaacacctttcggggcaaagtgtacgtttcccttttgcattttttttaactagtttccctgtacaattattcaaagttttacacatattggtccacatttttattctttttaaaatggttagatttgactgctcttgcggcccctatttggtgggaacataacctccgtatctccccttacagctttgcatttaaaccaacagtaggtttaggtaacaaatgaattatttgctaaaatgccatctaggctataaatcttgtggttgaagcaggtggattttgggcatagtgatcataggttcatgttgtaagaatccttattgaccaaagaagctagtttccaaagacagattagttcaaataattgtgcttctcttacagtaagctatgaactaccataatgagatgaatgtatacttggaaaccatcaattgaacttggtgatagttctgggagtgttttcttaatttctttgtattatggtggatagatagtgaattccccatatgcatatgttactgactgacttgtattttccttagtccctttcctaggactaatgattcacatttcactcggatttatttaacttcatatttatgtcatctggaattgtttagccataatctctttcacgattacactatttgttttgctttatgcatttatatttctttttttatttgaattgttccgattttggctgtctgtattggccaagaatgcaatcaagttccttttgtttctaaagcaggaagttttaactttggtgcttttgatttttcataactttcaccttttatcagcg

SEQ ID NO: 33858 - DNA, 643 bp, Medicago truncatula
  Intron number 1 from transcript Medtr3g097560.1 (locus Med tr3g097560) derived from phytozome v7.0 (chr-ID MtChr3; po s 23385776 to 23386418 reverse strand)
gctggttgtgcacggagatttggtgaggctttgaggttttatgaacagttgagaaggagttgtgtattggatatactccctccgttctaaaatataagcaaattttgtaaatttactttttaggttcattcaattaatgatgtatgtggtccataatatgaaccacatacatcattaattgaatgaatctaaaaagtcaaatttgcttatattttgaaacggagaggagtactgagttatgtttgccattgtcttgattgtttgtgtaaaactgaaagaatcttcgcttaatttttttcttcaatgttatgtgatttttagaaacctagaaattgggggaatcacatttctaggtttccaaatatgactttacaacatttgtaatatttaaatataacaaataaatttatactttaaataatcctcaactaaaagaaaatcaatactaagtgcacaagcaaattattatacagatattggtaccgtaagtactaagtatagagattatttgttctatatcagttctatattagtgtttacttgtcatctattcttgaattcatgtaattggaacattttacttctcatttattttctgatgcgtacttctcatacttgatcatctcctcaaaggcattggatt

SEQ ID NO: 33859 - DNA, 938 bp, Medicago truncatula
  Intron number 1 from transcript Medtr4g110210.1 (locus Med tr4g110210) derived from phytozome v7.0 (chr-ID MtChr4; po s 24883616 to 24884553 reverse strand)
tggtacgtataataaaccaaatatatattataataagagttaagaattaaatttgattttagtgtctttaaactttatgtttcttcaagtttaatcattatataaattccttacaattttagtcattactttgatttatagggacaaaatgtagagactaaaaacacaatttttttgttgttgtaaaaattaataaaaatagagactaagattaaataaaatttatatatggactgaacttaaaggtcacgattttttagaaactaaaaacatatataatcatatcatgtaacaaataaccctaaaattattaactaaaaaaactattacataatgatggatatatagacatattcagagaccgaaaaatatgtcaaatggtcactaacattagcaatcatgtcttagtgactttagatcacttggtctctaaatcaactacaaacttatttaatgtccgaatttagagaccgatttaagaccaatttgaaaaatcagtcggtccatagtatattttgggaaatattaactaatgtctcttgggcactctttaaggaccataagtaacaagtatttataaaaaaatgtgtaattaatgcattgaaaatcaaaatatttaatttttaaaaaaaataataactcattttagaatgtataaaaaatgttctgaggatactcgttaacaaaactcatatatttttttttatagtagcatagaatctaataagtaggtactatacaaaagtttacatccttcaaatattttttttttttacatatacatctaatcatattttacggtcacaacatttatcactttcttctatgaaaataaacatttatcgttttctaacatacttgcacaatttttttggttgttatatgaacttgtgaaaaatataggtagttgttgggcattttcaactgtggcttccata

SEQ ID NO: 33860 - DNA, 811 bp, Medicago truncatula
  Intron number 1 from transcript Medtr4g156200.1 (locus Med tr4g156200) derived from phytozome v7.0 (chr-ID MtChr4; po s 38665013 to 38665823 reverse strand)
gggtgtcttgaagtaatctctcttacttctttcaattcctttactgcttttattttcatcactttaattatgattcacttgtttatttatttatttgttgttatgtttatatttatattcatgttttgttgagtcaacgtgaattttgggtttaagagatgaataaagatgaatgagagtttttattgaaggatgaagaaaaataaagggaaaaaaatataatgtagaaagactatgataaaatcaatgtttctcttaaatttaatggttgagatttactttcccatgatgggaaagaagtttgcttttccaaattaaatggcaccaagaatttgatacaccaccgtttgaataacattcagtgtgttatatctcagttcaagttgttcatggtaaaaacccagcaaaagacaaaaaaaaaatagaatattcttctaaagcttccctcacaacaacaatcttgcttttgttcactgatattttcggcaatggcaatataattatcactttaaagtttggtgttctaacacacaaaacaaatcatacttgggacggctatcattctaagtaaaagaaaagtaaagcttttacatttatctggaatcaagtagttataaagctgcatctcaaacataaatgatgatgattgggatgcgaattttatcgttctaattttttaacctaagattgaaattataaattttatgaaaattgaagttttggttttgttattatcaaaattttgtaatgaatgaagattacgaaattgtaattttcttgttacaagtgcatctgtattacaatttgcaga

SEQ ID NO: 33861 - DNA, 876 bp, Medicago truncatula
  Intron number 3 from transcript Medtr5g015110.1 (locus Med tr5g015110) derived from phytozome v7.0 (chr-ID MtChr5; po s 4952929 to 4953804)
gacaggtaggttatatatttattattcatgttggattcatgttttcttatacttgacttgatgtagttgcttttgaccttaatcagtatactattgttgttaatccgggatagcagaaagtagtgatttgttaaaatttcgatacgcaagagggctatagctctattatagccgctgttttataacattttatattagaattttgggttggatctaactcaaccctacaaaaccggattgtaaggtgaagattgccctcactacatgttcagactttacctgttccgatttgggactcttaaccccgcgcataggattgaacatctagagcgtgatctaagtggcctagtccgatagcagtgacctaatagtaggtggcccaatggatcttggatatgctctgataccatattaaacttggtgttgagcctaaatcaaccttacaaaacaggccagtaccgtggtgaggattcccatcccatcacttataaacttatgttcaggccttatctcttccaatttaggactcttaacattttgtatgaaatagcatatcacaacttatagttattggtccaaattctgctacagtgtagtgccgttatagcctctatttaacaacactgatctatacttggttttgaatttgttttagattggattgagtcgatatcatattgtaattgtaatagagctttgttttatttttaatgtggacagggtataacattttgaagagttataactattttaattagaattgaaatctatttttgtactttacgtttggattgaattttgttattgtttatttggtaaagaatgtgcttctctgctttagggattatttgagggtttgaaagcttaccgtaaaga

SEQ ID NO: 33862 - DNA, 923 bp, Medicago truncatula
  Intron number 1 from transcript Medtr3g046530.1 (locus Med tr3g046530) derived from phytozome v7.0 (chr-ID MtChr3; po s 12625673 to 12626595 reverse strand)
ttttagacggagaggctcagtttgtggtagttgtggtttgttttaaatgctctgttgattttggtaatgtggattttgaattggatttagagtgtctgcctttggagcatccgacggttgtattgcacactttgaaggagaagaagttgtttgctaagtcgtcaaagtgtgagttttggttgcaaaaagtgagttttcttaatcatgtgatttcgaagagtggtatagtagtggatccgtcaaaagtggatgcaatgttgcggtgggagactcagaagtctattttgagttatcatgcgaaatcattttagctttgtattccacttggtttatattgttagcttccacgtatttttcaccaacatacctttgatttttccgcaaacctctcttttttcattcggtaaaatttctctttcgttttcctttcaaaaacaattttatttgcttgatgcagcaaagctctttatttatattgtaaagacactattttattttataattagttatataaattatatataccgtcaactagttgttgctttttggaagtttaaataacattgctcctacttaaaagttaaaccaatacattgtgggctaatcactaactttttaacaaatcttagttaataaaaaaatggatcttgctaacccgtactcagccttataacattagttaacattctcctaaaaaaatattattaaaacaatcaatttaaactttaaaaattattaaattaaattaatttatacatttatcatcaattaaactaatctaagaaaaacatttatcattttaaactaataaattttagaaaaattaaaaaaaacttagttttcccttcaagtatggggtaaatagggatcagattgattaaacgagagtgcccaattgtcgtaaccaggcttggggcgaacac

SEQ ID NO: 33863 - DNA, 865 bp, Medicago truncatula
  Intron number 2 from transcript Medtr1g009000.4 (locus Med tr1g009000) derived from phytozome v7.0 (chr-ID MtChr1; po s 1015898 to 1016762)
ctgccttagctgttgataaggaggtgaaatgtcttaacatttgagctttatgaatttttggcattgtttttctttaaaaaaaattatttaggtacaaaatttggacgtggtttcttaggtgtttaactacatgtaaatttgaatgcttaaagttacataaatggttaatcacgtcccaaatttgccgttaatgaagttacattaatggtttaattgcattgaccactttaaaagttgttacaaaacttgtccaatttttagttcttcacataacacaattgttttctatgtcttctacagttgcaacctaacaaagtaaaacgaatcatggcagtgtctgatggaaaactatctgtgtgagtattcctttggcgttgataattggtttctgtggaagagtttaaagtcgaatcagtagttcaccgtttcctctaatgcaataactgttcagtgttatgttcttaaagttaacttttaaatgaaattgtttgtaatgtgtttgcattgtattcaattttatgtatgagtatgaagtgctttctttgtatgaatacttaaagttttgaatatatcatctggaatggtttgaagcaaattctatgtatgaatgcattgtttggtttaactgtaatgaatttttttttcattgatcatctggaataatatgaggcaaattctctgttagtcattgatttctagctgtcttgtatctgaaaagatttatttattgttgtcattacttgatttagtttaagggcatgctggagtgctgaatgtgtagtcttttcttgtttaatttttcacctctcattggaatcctttatattcaggcacttcgaggcaatagaagccagatttcttcggg

SEQ ID NO: 33864 - DNA, 489 bp, Medicago truncatula
  Intron number 1 from transcript Medtr1g124990.1 (locus Med tr1g124990) derived from phytozome v7.0 (chr-ID MtChr1; po s 27423100 to 27423588 reverse strand)
acactgcaagagtgagtgtaattccattttctttatctcaaacttgtttcttgtttaatacttgctctcttaattgctgtgaagaatttgtagcttgaatcatagcctttaaaatatgtgattatttctctgaatttgttttctatctgagctgcaacaggtgtactagtttatttttttcacccttttgttgatgtattcttggaattttccatctaagttcttccatttgattttacaaataatcaggaaaaactgtttcacttgtcaagtatttttgtaattgggtctctgagggtctactataggtcattttcttgttgtttctttccctttttatgatttctatatttatttttctgaatatcagtgctgataattaactgcatgaaggtttttcactttgaagctgcataatttgcatagtgaaaataatgtactgtctcatgtgtgcatgtaacatttattgttcttatcaaatgcaggtga

SEQ ID NO: 33865 - DNA, 384 bp, Medicago truncatula
  Intron number 2 from transcript Medtr5g014430.2 (locus Med tr5g014430) derived from phytozome v7.0 (chr-ID MtChr5; po s 4622764 to 4623147 reverse strand)
ataagctcactggaaaacctggcctggtaattcattcattcactcactcactctcatttttaggacaagaaggttaattacttaggaatgacttaagtacttattgaatataagagcttatgaataagttattttaatttacaatcaaatagagaataagaaactttgcaaagctaaagagataagtgaactagtggtgtatgtttatgaaaataagctgaaaacaacttacctcaaatagttacacagatgtttatgtcatgacttatgaaataagtcaacatttaatgtctttgtctttaaattaattaacagcttatacaagttcatacttatttatttatttttattacttttgtgacttgaagatcaactcaagcccat

SEQ ID NO: 33866 - DNA, 549 bp, Medicago truncatula
  Intron number 3 from transcript Medtr3g094620.1 (locus Med tr3g094620) derived from phytozome v7.0 (chr-ID MtChr3; po s 22724576 to 22725124)
ggagttaagaagtaagttctttgctctatttacggatcctgttcaatttattcttgtgttttgatgcttgtttttaggaaataggaacataaaaacttgctccgaattttgattagattatgcttgaaatttgttgcatgcattgttttcaattagcagattggcacaacaaatgtctatctagttctttgattgttatgagttttatttttgtccaaaatcctcacaagttgtgtttaccttgcttctgttgttgaataagttgttatttgaacaacaaaatttggcgatgatcgtcaccacctacatgtagttggtggttaatctgttttgacatgtagaagagcacttgaaaattatgattaaccatgttcaagtttgtgattaatgaagttatgtttgtagataatgagtttcaatacctgatattgaacataatttacctctatctgaactgcattaaccacttaaaaagttgtcacgaaagttatctaaatttggttgtgccaaaataatttctcttgttgaatagcctagcagagcctgtgg

SEQ ID NO: 33867 - DNA, 397 bp, Medicago truncatula
  Intron number 1 from transcript Medtr5g102440.1 (locus Med tr5g102440) derived from phytozome v7.0 (chr-ID MtChr5; po s 41023669 to 41024065)
acctcatcgaaaagaagaagaagaagaggaaacatgtaagtactttgtcgtttcttctgatttagtttttatgttttgatacaagtcagctttgctactaaaaattgatgaaattaattactggattgaaaattcaaatcaacgattaacaactcttagcaactatatatatcaactttgaaattttcaatacaagaaaccctaattgacatagaaatccctaattctccctttccaagacccttgccgcctttctttttctgccgttcaccatatttcatattttgtattattttcatttgatgaaaacactcttatttagtttttatttttttatttttttcatgtgaaattctggaattgaatgcttgtattttacttttgtaggccgttttgc

SEQ ID NO: 33868 - DNA, 372 bp, Medicago truncatula
  Intron number 1 from transcript Medtr3g162680.1 (locus Med tr3g162680) derived from phytozome v7.0 (chr-ID MtChr3; po s 42534921 to 42535292)
cccgcacctcttgaccgacctgtcaaaattggtgattagtctaactaaattcttcaattttatgtttcatcaaatgcataactctgcaggttttgtttgcagttaggcatttacatatatggttcatgttaatgttatgattggaaaacagaaaattatatcaaaatgaagcattttaatctgatgtaatgttatgaaataaatgaacaatgcattaatgtatatagctctattcctgtcttgcattctatgttatttattgatcataaaaaaaaaaaattatattttccaaattatccattcaaaaaaataaaataaaaaattgccaaaactttctctgaattaattttctttttcttgtaaacacaggtc

SEQ ID NO: 33869 - DNA, 477 bp, Medicago truncatula
  Intron number 1 from transcript Medtr2g029260.1 (locus Med tr2g029260) derived from phytozome v7.0 (chr-ID MtChr2; po s 7771799 to 7772275)
gttttcactttcactttgaaagctgaaatttctaggtgcatatgcctgtactataatctgaaaattatgcattattaagaacctgtttatctttaattcttcaactttagttttacctatgcattaatggccattaccattgccactcaactgttatttaatgtctgcatatgatgttgcagacttgattttttcgagaactggtgcaaatgcaatgacttgttatgaaatattgacgattaggaaaccgtctatactgattgatagatcttgagtgtttcaaaaaagtcccacattggttgttcaaggaatcaagtgaagggacttgatatataaaagcataagcaagttcatctttcaactcatacctttctcggccttttggctaagatcaagtgtagtatctgttcttatcagtttaatatttgattagtggtattaagttagttttttttgagagggagaggccatttcaat

SEQ ID NO: 33870 - DNA, 523 bp, Medicago truncatula
  Intron number 1 from transcript Medtr5g078240.1 (locus Med tr5g078240) derived from phytozome v7.0 (chr-ID MtChr5; po s 28985610 to 28986132)
gactgaagaggaacacaagtaatttttttaccttttgtttttgttgttattgttttatgaagaaaaacaatagtatattagttgatatgttagtattttttttctttactagggtttaaattctaaacctttaacgattagcgcaaaccaattgagctactagtgttagatagatatagaagaatgtatgtatgtttgaaacatcgtgcgcttaagaaagtataggattaaaggatggaatttacaaaggtaattttagacctaggaggtaggaataatgttttttagctttcacataggctagtgataagtctaaataaagcttataaaatttagacaatccttacactgcaagatgattttgtaaggtcgagttaggtcaaaatcctcgaatatcatcttacgttagaatatgttatgatataagttggttttgtagggctgatttagactaaaacattgtgttgccatcttaagttagaatacatttcctgcagattatttctactaggcctaaagaagt

SEQ ID NO: 33871 - DNA, 694 bp, Medicago truncatula
  Intron number 2 from transcript Medtr3g123620.1 (locus Med tr3g123620) derived from phytozome v7.0 (chr-ID MtChr3; po s 31129092 to 31129785)
gagacttgaagtctgttggttatctgttaaattcggtactttttcttccgccctcctctcgcatactcttcagtaattttgatttcttgttatgtccgcatggtatgtattagttgaagtctcagaatcaacatcataagtctagtaatcaatgtattcaatgttgttttaactgtttcgagagttaatacttaagaatacagatttatggggtggtaataggaccagatttttgtataatggtaataaaggaggagtcaattgtttgttttatttcatttttgtttgttaataaatttgtcacgctttgttaagcttgaactaataaacggtcaccaataatatacgcagccaagttatctgcaatccttgtctgtctgaaaagcatgttttcacgtacagtacagagtgctttcacctgcgctttctgactttctataagcatcacatatttgactctattgtattgaagtagtttcctttgtatctgtcttggtctatattagttaccaaactcattattgcaacaattatatgtccaaattgttgttaaaatgcatttggcgagcatttgcacctctttctgttgttgttccctctaattttttttacgcctcactccattttctctatggtgtgcatttatatattttctttaatggccagttgaaagaagttgttgataccttaaagg

SEQ ID NO: 33872 - DNA, 858 bp, Medicago truncatula
  Intron number 2 from transcript Medtr4g155120.1 (locus Med tr4g155120) derived from phytozome v7.0 (chr-ID MtChr4; po s 38216009 to 38216866)
aattttgatttgatttcaactttgcttccaatcaggtacttccgtttttctctctaatgctgtaaatatttcacaaatcattctccaatattgctgcttatagttttcttttctttttcatatttttattctgttttgcttccaattatgtggttcctttttatctttacctcccttattttaggttctttttaggtgtgattgagacattgagtcaaattgtggaatttgatggatagattgatagaaatattgtttatgttgttcaaaataagcaccaatctagactatgacttacaatttttgtttgcttaatgtccgtctcttcaaaagtcacaacaggatatttagctactgatttgttgacattgattatgtcttggtttgagatattgttattgttactatgttaaaatagaaggtactgatttgttgttatgtaaatttcagttttcattgagcatgccaaatggaatccatgattttggtttgtttgcttcaaaccaaaatcatggagcttatactggagaatgatttgcataacttcttcactatggtttggagcttatcaggttatcctctataactttaggtttgtgaatcaattatttgtgacacaaacacctaaattaagcatcaattatttgcgagcagtatatgaagtttattttcctaacattgattgtatacatcctggtggtaggcagcaacaaataatgatatgactttaagggatgacattatttattccttaatgtttttctatttatatttgtttgttcttacaagtcatttattttttaaaggtttgattcctaattaaattgcattcttctgatgtagtcatcatattatcgg

SEQ ID NO: 33873 - DNA, 640 bp, Medicago truncatula
  Intron number 1 from transcript Medtr6g038770.1 (locus Med tr6g038770) derived from phytozome v7.0 (chr-ID MtChr6; po s 8420169 to 8420808)
ggtcatcaggtaacattttcgtttatacccactactactctgacacccgtttgcttctcttcaatcgctgaatcaaataaattagaaagatggatttttttggagtgaatgcaaaatacttaaaggtcacagatctaatatagaaagaatgagtttatttgtaggttgtgcttgttcaaattataattcaatccattctttaggttgttcttgtgtttgtgcaaattataattcaatccattcttaaaataacgatacataatcaatagaaattaagaattaggaattaagaatgaatgtttatgtgttaagaattaagaattaggaattaagaattaagaattatttgtcatagaattaagaattatgtgttaagaattaggaattaagaattaagaattatttgtcataggattattcttaatcaataggaattaagaattaggaattaagaatgaatattacgtgtagtacttaaaataacttttttttcatgttcaatgttaggtgtagtactttcttatttttatataatcgtaaagaattaggaattgagaatgaatgtttgaaatttgctttgttatagaattatttgttgagtcgtatatggatattttgcaggctgaaaatattcaaacta

SEQ ID NO: 33874 - DNA, 364 bp, Medicago truncatula
  Intron number 1 from transcript Medtr1g099760.1 (locus Med tr1g099760) derived from phytozome v7.0 (chr-ID MtChr1; po s 20508340 to 20508703 reverse strand)
caggggtatgcagtataattatatccagcttgtgtaattagatggttgtttatattttgaatgaatcaggatgatcatgtcttggcaagagaatttcaattctaagacaccatatgatgaagtattgggaagtagaaaaatttataatttttatttttcttctgtttctcattttcaattattcttgcatgctccattgtagattttgattgaaccaagctcaatagttaattttgcattatgatatataaaaaatgtttgctgcacattctcctgacaccatttgatgatctttgaaaccaatttacgagttcaatttctttctccagctgcccaagttgcatctaagaaggactcataaaga

SEQ ID NO: 33875 - DNA, 470 bp, Medicago truncatula
  Intron number 1 from transcript Medtr1g143220.1 (locus Med tr1g143220) derived from phytozome v7.0 (chr-ID MtChr1; po s 31552030 to 31552499)
aagagtgtctggtctgctttggttgagtgtggagaggtgcatgtgctctcttgctgaggtggaacagatccaatccattgcattgatctcaccgttaaaaaaaactccctcatacaatgagggacctattcactacctcattttagacttcgccgtataatcgtttaaatttatttaattacacatcaattgatatgttaatttttaatatttaatttgtatattaaaatattttaactacgcgtcaatttaattgtttattttattttaaattttttatatacttgttatgttaaaatgtttaatgtttattttaatttttgtttttctacgattaaattgttatgtctttttttagttattcaaatgtttatattttttaagtgtttgttcttcatttaattttttgtagtttagtttcggaggacgcataaggtgaccctgcctcgcacgggaagaagcataaggct

SEQ ID NO: 33876 - DNA, 607 bp, Medicago truncatula
  Intron number 1 from transcript Medtr4g156900.1 (locus Med tr4g156900) derived from phytozome v7.0 (chr-ID MtChr4; po s 38965567 to 38966173 reverse strand)
gctcgtcacatgaaatttttgtatctctctcttgatgacatgaatatcaataaatattattatgttatggccattttaatgctcatgtaaagaacacatcttttatatgaatgtacaatctatgaagctcctgctgaggtggagttcaagaaagagtgagacccataacaaaactaattgtcggcggcactctgaccttacatatgcaagaggtttaatcatgacttaaacccgtcatatagttctcgggatcaacagaaaaagacattttttaaacaaatacaatatttttcacaagctaaataaagaaatagaaacttctccataaagccactatgataaaagaaaaatgtatttgaagttgtaaacaaacacgtttttttctttttcttccatgtcttgtgtaagttctttttcttaaaaaatgaagagcaagatgcattaaaaattttcgcttccacttgttttctaagggtgggtttaagtttaaatgtcaagtgtctactaattttgattttgaattttcattcaatactgtttaagcagatctttgaagttagacgtttaaccgtgttaaaatacattacgttccttgtttcaggatcaa

SEQ ID NO: 33877 - DNA, 422 bp, Medicago truncatula
  Intron number 1 from transcript Medtr4g097520.1 (locus Med tr4g097520) derived from phytozome v7.0 (chr-ID MtChr4; po s 20886282 to 20886703)
tttgttgggtgtgtccaaggagagaaaaaagtcatgtatcgatagagccttttcacctgctaaaataacaaactcaaagcaataacccataaaacaatgaaaagttaaaaacaggaggttattaccactttttgattgatagcttgaaaacaccaagcttatgatttcataagaggttaaaggttaaacttttagatttagatatggaattggaatgggtttcaaaaacaaaaaagattagagaaatagaaaaacagacaatctagagaaaaggaaaaacagacaagtacaagcaagtctcacaagacactgaataaacagaagaaaaaaaaaaaccaaaggattggagatagatagataaagttaacaaaggttaaaaacaagcagggaagtgttgagattcgatctacacggtgggggct

SEQ ID NO: 33878 - DNA, 1063 bp, Medicago truncatula
  Intron number 1 from transcript Medtr2g056650.1 (locus Med tr2g056650) derived from phytozome v7.0 (chr-ID MtChr2; po s 15528107 to 15529169 reverse strand)
tgtgttattttcgttgtgtctatccctcagttcaggtgtgattaatcttttttttttttatctttaaacgttggtcctttcaatatatatttctctaaattttttaggtattttattgctcaacaacataaacatgaatacatttttttttttttgagggaaacataaacatgaatacttgtgttgtgtaataaggggttaagaacatatagagcatgcaacaatgtttatttatttattttaaaatagtttaattatgatcataaacaatgttgaaacatgaaaagctgcagagttgtagagtaaacaaaatttgtgtgtattttccttaaaaaaaaaattaagttgtgtgtatttggtatgaaaatgaaaatgagaattaatgttgtgtcgcaaaaactaataacttcgtttaatatgaaaatgagtcgaccaataaatttgagtataaaaatcatgttgtgtcgcaaaaactaatattctaattttaaattaagtttttttgaaaggaaaattagaattaatgttagatacgtatcaaaattaatttttaaatcttcatgatcacttttgactcctccaaaactgaatccataaaaataagtcttgtaacatctacatgcttgtttttctatcttgcacaatatccaaaatgacaacatttgaattcatgaacagacgatgtttttccattccgcagtcataggacacatccatgatctcggtcgtaatattaaggttcttttgtctcttcgacggtaacacaactgtgatagaggccgttgaactgaatttaaccgcgatctgccataatatcgaagatcccaaccacgatttaaaatctgtatcatagcatcaacaaaaagattcaactgaatatgttgaatttggatgaacttattaacatatatagtttatgaaacatgcataaataaagaacaacttattcattaattcaatcatactatgcaacgtattttcatatatgaaatgtttaagagttgacataactttattttgttttacaggtttaggtacagccataagattaagagaagattca

SEQ ID NO: 33879 - DNA, 785 bp, Medicago truncatula
  Intron number 1 from transcript Medtr3g033830.1 (locus Med tr3g033830) derived from phytozome v7.0 (chr-ID MtChr3; po s 9190111 to 9190895 reverse strand)
atccacggagacaattgtctaaggtactatttaattaatattagtttagccaattaaacattatgtttattaatattagtttacattctatttcataccggatcaatcctaagtcactagctcatagctcataggtggaccatcaatatggactccctagagacattttaaaagatcagattatgaccatatgatcaagtcaggactgtctgatgtagagacaaccatgaatcgtctaccgtggtccacggagacaattgtctaaggtactatcttgggtgttaacaccttatacatcatattattaagtccaacttatggttgtggctcaatctcaattacacatctcttagactatataagccttacttcatcatcttttaaggtatgcttcattctaaacctagtcacgacctcaaatatatattaacttgagcgtcagagcattttcaagtacaaccccacctccaaggcgaaagatgtggatatgtttaaccatcaccaccatttgaagacccataagcctcgcccccattagcacttttgtaaatccaagtttcaggaccggaatgcattcaattactacatgaaaaatcaatgagtacaattggaaatgtgaatgcaaatgcagttcttccatttaacatcaaagagaaatcatatcgtcctttcaaaaaatataaacatttttttcaatagaaaagtagataatttgttggaggtagtggatagggtcaaacatttatcaatgatattggttcatttgtaaagagggtcaaacgtca

SEQ ID NO: 33880 - DNA, 673 bp, Medicago truncatula
  Intron number 4 from transcript Medtr5g103660.1 (locus Med tr5g103660) derived from phytozome v7.0 (chr-ID MtChr5; po s 41516999 to 41517671 reverse strand)
cagcatccacgtaaagccataaattctctacttctctttgatttttcctctctgtttgtgtgcattgattgttatgaggcgtattacttaccacgaagaacttttttttacgttatctcatccacgtaaaacgtgtaatttcttatttattttttttgggataggaaaatgttagtgagttagtggttatgttagtttctagggctgaaccttggactttcttcttaaaactccattgttgtccatcaactcgccaactgaactactcacgtggggcacatgtagttttttatatgaactactaccatagatgttcttaaaagttattttaagaaattcacaagtccaggagatgaatgtgattattacttaaaatttggtttagatactatgctttgctcacagtcagttccgctatgaagatcagttttcagcttttcatgatttgccaagtgtgaatacattcaaagaagtgaataagagctttacatgatgtttgctaattatgaaactgatcatggcttgttgtatgattggatgacaactagtttccaaaaaatttaagtttttataaaaagtagctgaaatggggtatgttgtttctccctcatggagttttttttcctgtgcatttgtagattggtaaaacccggaggagtattagtttacagta

SEQ ID NO: 33881 - DNA, 332 bp, Medicago truncatula
  Intron number 2 from transcript Medtr1g031950.1 (locus Med tr1g031950) derived from phytozome v7.0 (chr-ID MtChr1; po s 7865764 to 7866095)
caggttcgttctacttctggtgtacattcgagcaaatcctttcattccaacttacaaaaagaaaccattactgatattccaagcaacatgaggcatgattatgtgaaaattgacacatccttttcctctataaagtaatattatctgctcttcattcttcttgtaatgtcttaaatatggatttatcagactttacctaactgttgccttttctcttatcatgctcctcagtatccaatatccatccatccttggcctttgattaattatttaacttgaacttgatcttggtgcaagccggttacaagttcaagatagggataaaggtttga

SEQ ID NO: 33882 - DNA, 759 bp, Medicago truncatula
  Intron number 2 from transcript Medtr5g022680.1 (locus Med tr5g022680) derived from phytozome v7.0 (chr-ID MtChr5; po s 8864503 to 8865261 reverse strand)
tctactcaaggaggtaaggatgtagcttctaatatttgattttcattaagtaattaaatttgatgctccttttgaaatcgtaattaattttaatcgtaagacacgtattttaacttccttttaaaaactcatgaacttgatgttacctattttaacttccttttttccattctatttggagaaaggaaggtttgttgttacctatagatctcatcacctaaggttgtcatgtttgatcaatcaattgattttacaactaatctattcatgttttttttttgtaatgacaaatgttagtaattagttgttagattagtttttctccttcgcttgggtttgaaccggtacctccaactcctcaacccttagctcaaacctgttcagctatccaactaatctatttatggtgttgtttatatttgttataattttagttgctttttgttatctaccacatttaattatatcttagctctcactgttaatgaaaaaaactcatgtggccccaatctttcattactaatttcatcgtagaaacttcctttttaccttctgtgttgatggaggaggaaaaaatggacagtttctataatgtcagcttttcgatcttctttagttgctaatcagtaaatactttctcgagactattttattcccagaaaaattgaagttttagctaatattatttaaccgttgttcctgaatattgttgtaatttatataggtgtgcaaagtttaaattgagggaagaaagtgaag

SEQ ID NO: 33883 - DNA, 489 bp, Medicago truncatula
  Intron number 1 from transcript Medtr2g127290.1 (locus Med tr2g127290) derived from phytozome v7.0 (chr-ID MtChr2; po s 31030927 to 31031415)
ctacccactattgtaatacactatattttatttaaattataataacatatgccttattttatttatttgagtgttatctgtgggttgactttgaagtatttaattgatttagaagttgtcaatttttgttaattattcataggtagggttataaatagtaaaccagctaaattggcgagcttataaattgggtttcctttattactaggtaaaaaaattattttggagatgcacctcccttttctctatcctcacaccaaaccattctataagaaatcttaattgtctatttttatttattttgaataataactaagaacttgcaagatttgatcatgatgtctttcttcttctgcaacacaattactatagaactaggaaatgtatcctaatatgggctgccattgtgtctccataaatagaccccctgttcatcctcaggtataacatgtagcgagatagtttgtggtttagagtgttggaaccaag

SEQ ID NO: 33884 - DNA, 667 bp, Medicago truncatula
  Intron number 1 from transcript Medtr5g007200.2 (locus Med tr5g007200) derived from phytozome v7.0 (chr-ID MtChr5; po s 1013849 to 1014515 reverse strand)
tccaacaacacttgtcccttcctttctttcttctggtaattgggttttcattctttatttttgttttctttgatgtataaggtaatgttttgaaattaatcaattatcacattattacaacaactgggtcattctgaaaactgtaaaagattacattttttcactgttttttttgtatatgatcaaatgggtgtgtttgatttgatgtatttgaatcattacaacaattgggtcattttggaaagtgaaaaggtttacattttttttctctgtttttgttcatgatgaaatgggtgtgtttgatttgatgtgtttacatagattaatcattgatttgttcttttagagatgagtttgagcaatgctttgaaattaatcaagtatcgcattattaaaacaattggatcatgtgaaaaaaaaatcatttttctatgttttttctgtcatgatcaaatgggtgtgtttgatttgatgtgtctgcatagattaatcattaatttgttgtttttttctttttcttacagagatgagtttgagcaatggtaaaaaccaatcaccattaccaactagtaatggtaatggtaatggaataggtgcacccttcaagatctttgtgggttatgatccacgtgaagacattgcatttcaggtatgtcgtcattcaatc

SEQ ID NO: 33885 - DNA, 733 bp, Medicago truncatula
  Intron number 2 from transcript Medtr1g124560.1 (locus Med tr1g124560) derived from phytozome v7.0 (chr-ID MtChr1; po s 27164041 to 27164773)
taaccacccatttgactattttcgtgctctgtgtaagtttcgcgattatcgtgttcaaacaaatggttggcctagtgcctatttgaatcgacttatttgaacttatcatcttacataagcacttgtcaaactatttaggagatcttatggaaatcacttatcatttctctatatgacttccataagctctccagggtagcttatgaaaataaattctagctttatatgaaaacaatttattttttatcttttgttatcctaataccatataaatagttaagttgtttgtatgaacaatagtctgcctttttgtggcattaaacatacatacttataagttatatgcatacattgttaaattgacatcatgattagttacatattataaagaagttattagaagaagcaagctgaaaattttaaagccttgaagttgtaatttgatctgtcagttacttgtatttatcctcatgtatatatcattttgaattgataatcgtttcttctatgggatgtgctgacttcttagcatgggtattccaattttctggtctgtttttgacgataaaaatgagcagttatgtttctatctcaatggataaatggccttttatgatgtaggatctttcattttagctgaactagtcataagttgcctcttgtcatttttatgtataccatacttatgaatattgtagagggttgcattgctggaggtgttgctggtgttgct

SEQ ID NO: 33886 - DNA, 396 bp, Medicago truncatula
  Intron number 1 from transcript Medtr5g071690.1 (locus Med tr5g071690) derived from phytozome v7.0 (chr-ID MtChr5; po s 25420587 to 25420982 reverse strand)
gggaaccgaagggtggttgagcaactccttttttctttagggtcacttttcttttttgttttgtcttattttaacttgcttttgaggatttcggtttgtcccccatcttgtacatactttcccccatttttaatatgtattatgagtggatgacaaaggatatgaatttcttgaagataccaaccgatttgagatatctgagtctctccttactgtttaaacccactcttaacttataaagaagaaaaaaaactagtttgcatttaatatattttgtaatcatagtgacattgttagctggtattttcaccagcctcatttaatgtggtcaacattagttgacttttactcttgcacgaatcaaagtcttttctctaatcaaaggagttcaacgaa

SEQ ID NO: 33887 - DNA, 554 bp, Medicago truncatula
  Intron number 2 from transcript Medtr4g137790.1 (locus Med tr4g137790) derived from phytozome v7.0 (chr-ID MtChr4; po s 34018349 to 34018902 reverse strand)
ttgttgcagccattgaccaggtacatataaagacagacaagcgactcattgctctttatgccatttatgtgtcagcaatacatgataaatttatttgtagccaatcattcacacaatttttcttacaacgttcatattcaagtcgtgtcctccttcctcaagtatgtgttaatgtgatttcgtggttaacctatttgatccattttcgaagaatctgtttattttttttgggttcatatacttatgattcagcgacgaacatgttttgtagacattcttgggaatcttaacttaaaacagttaccaatcctattgtattttattttctttttttttatttgtgtgtctatttatttattttaaattttttatcaaggtatgcacagtcatgaatcaaagagttaccgtaaccgttcagtattgataatttgctcccatgtggtctcttcaaaatctatttactaattgcatccacaattttataattctgttaaggcttaatattatgattaacttgattttttacaggcagctcaagatagagttgatataat

SEQ ID NO: 33888 - DNA, 1059 bp, Medicago truncatula
  Intron number 1 from transcript Medtr4g158100.1 (locus Med tr4g158100) derived from phytozome v7.0 (chr-ID MtChr4; po s 39583943 to 39585001)
tctactacaggatcgccgataatatcctcaaacaggtattcataattcaaattaattcaatccacccacactttttaccttttttttcaatatttatttcatttagttctgtatcaattgttgacttatatcatgaaattaaactgttacttaggttatatttcaatttctagtaaatagtggtttgttcaatttctgcaaagcgctactatttgaggacattcatattcatcaaatttcacattagttggagaaattgaaaatatcaattaacattttaccttattatttatggttttcaatttagaagcgtttgatagtaggttatgtgactgataagataaattacatgcacggatttcactatatatagttttcatgctgtcatactggcttttattttacagtcatgttatatattctgcaacatcatgtaagtgacaattaagttttaacccaacatgtctgtgcttctattccgtgttgttagatagtggcactattgcatagtggaatttgaacaaatgactattgttccgtgatacgctgtttagcacaaaatattgtgaaatagcaactatatcggtgttgtggcactgttgcgtagtgttatttgaacaaaccactattttccaccctttacaatataagggtcagcccaagggttaggctactaaagccctcactttaggcccacacaaaaaattattcttcattttattttgataaacaaaattttcatatgcagagaaaaaagaccccatattttaaaatcttcttttcgcctcacttgctattaaaaattattgggcctgccttgctgcaatcaacaacactgcatctactcttagttgcttgtactgacttttcagatgttgtttttttgctcctgaatttattgtactttattttattgttatatctggaaacattaatgtggttatgtttccgtttaaaagaccaaaaatttcgttacttgttctgcatggcttctcatatccaaatatcgaatttgattttgcaggctgatatctttcgtgcagagaaaaatattattga

SEQ ID NO: 33889 - DNA, 658 bp, Medicago truncatula
  Intron number 2 from transcript Medtr5g011010.1 (locus Med tr5g011010) derived from phytozome v7.0 (chr-ID MtChr5; po s 2872120 to 2872777)
acgctgggtggtgagttgcgtgttgtagtgtttattttttatttgatggatgtagccgaccccacttagtgggataaggcttggttgttgttgtacttcaatattattttagttgtgttggcctgttttgattggcaagatttttcctttgtttattaatatgttttcattttagctgaagatctgctatggctgctaggatatatgcttataggatgaattatttgcagtgacgattagtctattttcttcctctttattatatttggattttgagtctttttgtgtctggatttctttgtttgtagatattgaaaattggtactgtgctgttttcactgttactttttcctataccagaatgtgtgacctaagaaatagtgcttgtattttatctgtagttccgtggtataccagaattctattatgtcatttttttaatgaaattacacgcgacagctctctgatgctatgcttgcatgttcccttttgtcacattttaatgaaggttagtttattctctagctactactaatggtgtaataacaaaatcggttatgatgagatagaggttgagcatcgatttcagctaatgcttacaaggagtacagccttggtctcacttgtttgtttttgtttttaggtttaaaagattgat

SEQ ID NO: 33890 - DNA, 928 bp, Medicago truncatula
  Intron number 1 from transcript Medtr1g008180.1 (locus Med tr1g008180) derived from phytozome v7.0 (chr-ID MtChr1; po s 614337 to 615264)
gaaaacagtatagtctgagagcagcttttaacttaacattttttagtcaatttttttctttctctctgataattttatttgtatgtttagatatataaactttgttttgacagataatggctgttcttttatctgtacttctgtcctacctagtgaagattatttgtttgtttagatacataaactttgttttgacctggaatggctgttcttttatctgtaagtctgtcctacctagtgaggaaataaactgcattacttacatgcaatctaatttcagatttttcttgttggtctctcttattaattgtgaatcatgttcatctggttgaaacgaaaataccgtagtttcaattttttccagtattatgttcgaactattatatttctgatgtgcttttgacattttgttttgcacctatactgggaatttataattctcttttacggtcagcattaagtatagcatatgaatttttatatgtttctagggaaaaaaggccttccacttggcaatcgtaaatgctggctatctatttgctgcttatttctcttgttagtacatcactcggttgttcaataaactcattgtatatttccaatgcaatcaagcatggggcaagcaacttgtgattctgacgagcagctggctgtcttggaagctcaactgttgcgatattgttaacacatttgttgtgcctaataacatgagtttattgaacatctgaagcagattaggtatgtttgtatggtttcatccagatatgccttttgtcagtgaaatgtcttaatgttcattttgtttgatggcacaaagcttcattttcctgttactttatatacatctctatctcagtaaaaaaataactttcgttggaaacttaagtttagtggctgtggtcatttgcagatttgtacatattggttc

SEQ ID NO: 33891 - DNA, 629 bp, Medicago truncatula
  Intron number 1 from transcript Medtr5g080750.1 (locus Med tr5g080750) derived from phytozome v7.0 (chr-ID MtChr5; po s 30230372 to 30231000)
aaggaagaaaaaaaagggtgtatagcgagcggtacgtcttggaattgagagcctcgactagcgcgcccacctgcttcttccttgagtggatcaacctcctacttttcgaagaagatgttcggtgatttggtttttctttttattgtttatgtaattccgatgtggcgacccctcttgtaatgatttgaccatcttaatgaaaataggttcctttgttcacttttttgccttgagctttgattctttatttgtgtcgcgttgatttgctttttatttcatgccgccgttttatgcattttatttcatgccgcatttaatctttacttcatttgcttgcgttcgtctggcgcccaagggaacatgaccggtgaaggtttagtccccccaagttgacacttggtttcatgggtgtttttagggggcgagactctctagttgaagggtgcctaacccttaggcgggtctgccacaattctttaggttgtcgtttcatttggtagtgaaagccatgctaaccgttagtctttggcagttgtttagactgtcatttcactttatagtgaaaagccatgctaactgatcgtctttgacggttgtttaggctgtcatttctcttggtagtgaaagtc

SEQ ID NO: 33892 - DNA, 889 bp, Medicago truncatula
  Intron number 3 from transcript Medtr5g073990.1 (locus Med tr5g073990) derived from phytozome v7.0 (chr-ID MtChr5; po s 26646843 to 26647731 reverse strand)
tgtaccccctgttttgcttgctggctgtaccccctgtttgcttgctgcaccccccttaattcatgttgatattcttatgttctttgcatgccttatcacatttctttgccttagtacatgatttcacttgagttatgcttgtttagttagtattttaatttcatatagtatgccaaattattttaattttccttatattcgtttaaatcattttaaatgcctttttacactaatttttggccatttcatgcttctaaaaatttctaaaaatatttctcgtgtttttttttttaatttctttttattattttatgtacttttcttcttttgcaaatatttctatgtcatgttattctctttcatcattttaaatatcttacttacattaatatttgttttttttatgtttctaaacacattctaaaaaatatattgctttttttttttttttttactttacttttgagttgctgtttttttattctttatatttttcaccttttttttgatactttttgtttctaaacaatcataaaaacatattcctcaaccattttatctttttcctaagtgttaaaatttactcttttgacttttctatgtgtctttttttcccttaatttcttgcttgttacttgttcatgtgttcattttaattccttgctcctttcatcataattttctttatgtttattattgctttaatacttgtttaaatcatggcatacacggttatttatttatttttcattttattttgtcattgacttagtgcgtataaataggaaattgatgtaattttatttcttgcatttttattttggcataaaggccttagggttgtatttaggaattgatgtaataatgtaggtaacacaagcaccgacac

SEQ ID NO: 33893 - DNA, 750 bp, Medicago truncatula
  Intron number 5 from transcript Medtr2g077020.1 (locus Med tr2g077020) derived from phytozome v7.0 (chr-ID MtChr2; po s 17590207 to 17590956 reverse strand)
agggaccacttgaggctcttcggcctaaactacaggtatttaatttaatcaacatcccaacatctgatttatatatggcaacatactttctttttggcttgataataactgttctgctgggtgaattgcttgttgcctgatggttcttgagttttgacagtttttttaaatagttaactcatagctatgttagcttatctatgggataaagcatacacataaattttctaattgtagcatcatgcatgtgcctagtaaaatagtttgtgtgggttatctccgtttttcaaaagaaatggagatatttattactacagttttttggtgtataaagaatataagcggatctctattgttttataatcccagttggagtgaagcttccaccgatggagtatttaatattacaaatttaatcattccatctaacattcatagttgaacacaattaagggtctgtttgtttgaagtttttgtagaaaaagtacttttttcatcaaaagtaaaatttctgatgaatgtgattgtatttcaaaagctgcaaaaaataagttgttttgtagaggctaggaagaattaattctgaaacaagctatatcatagaagttctttctttcaaaatttatccaaacgtgccttaatataatcacactcataccttccattttattgtaatgtgcttgacgaagttctgtttggctcttttgtttttcagccaacacagcagcaaacacgttaccggaaatctcc

SEQ ID NO: 33894 - DNA, 638 bp, Medicago truncatula
  Intron number 1 from transcript Medtr3g087740.1 (locus Med tr3g087740) derived from phytozome v7.0 (chr-ID MtChr3; po s 20965578 to 20966215)
atcttatcagacgattagctgaaaggtaatactattatcttctttttggtttcattcaattaattagttaggatttgttcttttttcttattatttctattcagcacaaaatgcaggttagaataaattgatacaaaaagaaggcgtataaaatgattttttttcatccaagtataaaacgatacatttgaaaagtctttttccaatttttaattatttgtgtaatatttatatcaaattttatttaattttttgtttttgcatatatgttatttgtgcataaatatataatatatgaaatcttatgtttttttttgaaacggaaaacttaattattttagctaagaataggattaatataaatagtacttaatccacaatattgaaagaagtacaaggggtattcgactcatgtcgaaatcaaaaaaagaatcttaaaaaagaagaaagatggttcgaatacctctcatagtacaagcaaatatattacgttcgacccatctatgattttacttatttattttgatgtaacaactaaacatttattttctatttcttggattaatgatttctgctgtccaattttaccttcaaattgtgcagaactagtaatttgcgacgcattcgcatctcaaaat

SEQ ID NO: 33895 - DNA, 941 bp, Medicago truncatula
  Intron number 2 from transcript Medtr4g008870.1 (locus Med tr4g008870) derived from phytozome v7.0 (chr-ID MtChr4; po s 1236310 to 1237250)
ttgagaggaagcatcagttccctggagtaaagtaaagttttcatttttaatattcattcatcatatcgccattatttggggctattcaattcaatactttaggattacaatttcaagcatttagcttaattgctgtcattttcactttcttttgagcacaagttgagttaaatcacggttgtcgtagtattcacttgctttctaagtatcagagaataaaggaatagaaacaaagatgccatcattacaattacaattacaattttttctaatatctcaaattaggttataattaaagtaaaattgtaatgtctagtgttcaaatatattaaataattatgtgccatagtatgcttctatgctcagcttttggaagaataatgtaagattgttgtgttcacctatggtcaactacacctatccaccgagtggttcttactattggatcaaagtaatttgacatggtgtattattagattgcagtttttttcaactgtgttttatgtgtggctgtctgtttttgtttagccaatagatgccatttgcttttgttgtttttgttgataatttgggacattcatttgtctgtaatgttattcatgttagacacgctagttccatgaatttgcttgacatgacatgacacatttttaaacttcaattcttcctgtgcttgaggttttgttaactagtgttgttaagtagaggctatatcagcactatagcgctaatatgttatttatgcagaatgttgtcaaatagcagttatagcggcgctatagcactattgcgttgcaaaatttgaaatttcgagcaaaccactattttgttacgatccacgattgaaaacactgtcatcaacattttattattctgaagttctttatgccattatcttctatgcaggaattgattatccgagaattttcctttcatcaact

SEQ ID NO: 33896 - DNA, 1017 bp, Medicago truncatula
  Intron number 1 from transcript Medtr3g064450.1 (locus Med tr3g064450) derived from phytozome v7.0 (chr-ID MtChr3; po s 14667788 to 14668804 reverse strand)
ccggcgtctacgtccttatatagacgtttgaaccggtccggtttattttgcttccattttgaaccgtaggatctagggtttcttttattgaatggctgtgatgcgttgttgctgtatgcttgatttacgttaccatgcgctgcgtgttttgaaccgctagatctggatccggatcaatccaacgcctctgaggcctttggatgatccaggtccagtctgttttgggttttggtttgggcctcagttttctttcacgttttttcgctttttttactatttgcactgtttttctttgctatttgaaccaatgtcttgattaaaaatcttgataaatttcctagaaaatccatgcttacttcttgacattttcttgatgttttacggtatttttgcacgctggaattggcaaaattcttgtatgattaatccatggcattttaatttttttttcttggattatttcttatgattattttgtcaattctatcattgatttgtgaatacgtgataaatgccatttgacatgttaatgtgaggtgctcatgcctacaatcctatgtttactttgctgttttagattgattcatgaaaccttgattgtatgagcaatgtgtgcatattctaaaaaagggtaataagatgataattctatctcaaaattggtatgaagctaagcttgtttgtttctaatgatcctatgtttatagcttgagataaaagaaactatttcaaacttgctatagcatgagaattagaagctacaaatgccttaggtttcatatcaaaattttgggttttattaccattttattactatctttatggcattttatgcgtttttgcctcttgctactctttatgctttatttcactaacaagtttatttccgtgtttcatgcatctcatttagcattccctccactttctttagcctagcatttattttttgcaagttttaattcatttgataatgtaatttgttatcattggtttgtagcttggcaaaggggccataga

SEQ ID NO: 33897 - DNA, 750 bp, Medicago truncatula
  Intron number 3 from transcript Medtr1g100320.1 (locus Med tr1g100320) derived from phytozome v7.0 (chr-ID MtChr1; po s 20773566 to 20774315 reverse strand)
agggaagactttccgcagttgcaggtttgttgttttgttcgtttttatttgtgtgtatttaagtaatgattagcaattaatgttttgttgtcgctgatctctgaagcacgtgtacttgtaaaactgtcaagtacccgtaccagatgcgtaccatggtacctttacatgtatggtgcttgttggaactctattttttctctatattcggccgccagtgaactttattgttttttcatatataaatataaatacaaatacataatcatatatgattattattatttgtaagaagagtagatcaaatggaggagagtcaggttaaaagaggtagaggtagacctaggaaaaccatttgagaaaccattagaaaagatttagaggtcaatgagttggatccaaatatggtttttgatagaacactatggcgtcatttgatccatgtagccgaccccacttagtgggaaaaggcttggttgttgttgttgtgagtttctttattgttgtgaccaaacctagtttttgaagttttaacttttattgtgatgttttgttgtgaattgaatataactcttttcctgttatcatatatataaatctcaaaagttttattattgacgtacccatacccttaactttgtaaaattcatgtacccaccgtacctatgcatccatgttgctgatacatgaccttaacatcatgtattgtgtgttgcagtttgaggcagcttgggctttgacaaacatagcttc

SEQ ID NO: 33898 - DNA, 451 bp, Medicago truncatula
  Intron number 1 from transcript Medtr4g132660.1 (locus Med tr4g132660) derived from phytozome v7.0 (chr-ID MtChr4; po s 31593618 to 31594068 reverse strand)
gacaataaggttgtttaaccccaatttttttttatatatttttatatacgcttttatattagatcgtttttttttgttcgtctgtcttttgcaacatacgacaaccctttctcatttaatgttttcttatcatccaatcaaattgaattatgactcatttgtttttttattagctaatcaagacggaccatgactcgtttagttttcaccaaccaatcaaaattgattacgcaatgattttaacactttgtttttcattattttcacgtgtctcttccccccataatttttttcgtaaaaacaagtattttatgtgttttaaaagcatataagattaatcacttggttgtagatcatggggttgattttcttttttatttgtatctaattgtttattgttaatgctactttctcagggttccattggagagcacgtgtctacgttctacga

SEQ ID NO: 33899 - DNA, 786 bp, Medicago truncatula
  Intron number 1 from transcript Medtr1g129590.1 (locus Med tr1g129590) derived from phytozome v7.0 (chr-ID MtChr1; po s 28982155 to 28982940)
gattgaggaggagaatccaagagttgcttatctttgtgagttgttttttcaattgtttttgccttttattttttatttttaaataattatctttctgagtgtggtgagtttggaagttatattatatatcatgtggatttcttgaccattttgtgtaattattttaagaagaataaattttattggagttagggattgaatatcctaatatagagttgtaaaaatctataatctagaccaagtagaaaacacttgaaatctaaagtttgtatcacttgttattgcatgattataaattttttagggggaaaaagattagaagagctgataagatatcatcatgtataaaaaaatatagtttccaatgttaattcttttccatggtcattggagttgatcaaaagaagctgattcaaattgtgagaagcatccagcacttccctgcctaatacattaagtaattaatcggtaaagatttggttgtagagcaacatggaagcacgttttcgaatttccagtagatagttgttattaaataggttaattaagaaccaccgtccatatgaaaatgagaaatccaattctggttgttgaaaggttactttaacatcaaacacaatttcaaagtcaacaagttcacattcaatatctaaaaagtagaaatgagaaaacagaaatcgaaacctaactagttacttaataagcatgttaaagatgttgtcaacctatgtttgcaaaagagtgtactatactgatatattttcttggtgaaattaggtcgttttc

SEQ ID NO: 33900 - DNA, 616 bp, Medicago truncatula
  Intron number 1 from transcript Medtr2g045850.1 (locus Med tr2g045850) derived from phytozome v7.0 (chr-ID MtChr2; po s 12742504 to 12743119)
gagaagataaagggtcagtacaaacatgtatgcatttaattcatgtttctttttttgtaattattagttattaatgatggaggtttaaaaactaaatacaatgcgttatttttctaattatgtattcagtaacctatattttgaagttttacgtaagtctatggataaatttttttttttgaaagatgaaggttcagtacaaacatgtatgcaacatgatgcaatcacattcaaaagtagcaattgcaattcaacaatatatattatgtggttgtaactttgtattttgggtggatttattagttcatagttattcatgtgatgcttaaatgtctagtattgatgttatcagattatatttcattttaacagctacaattttgtcatgtttcagtttttttgttttacaacagaaattgaaatttgtgaaccctgaccatcttgaattgtgatctttaatttgattagtaacattttctgacttggggttttgtattatgtctgaaatgtaaactcaaagttagcataaaagttagaacatgaattaaccattatgttttacaatactttcttttcataatttatgtgcatatgaagtttttcaacaactcttggc

SEQ ID NO: 33901 - DNA, 793 bp, Medicago truncatula
  Intron number 1 from transcript Medtr3g043870.1 (locus Med tr3g043870) derived from phytozome v7.0 (chr-ID MtChr3; po s 12049688 to 12050480 reverse strand)
gcaaccaagcaattgtaacttaccaaggtaacaatttaattaaactttatgtttttataatttctctcttgattttttcatgtgttttattttctagtgtttgttattgatttggctatgtcattgattgtgatcatgtgtgtgtataaattgatggtgtactatagttacagcttaatgtgtgcttataggcaaggttgtcaaaatcacaattttgcttcaggtcggaagggaagagaaaaatcaaaactcgtaaaatcgcaatcaaaatcaaaagattttactcaactacttttgtagaatcgatataagaaatcgtaaaatcacaatgaaaatcgatggattttaccaaaacaaaaataatactaactatatgttaaattgtatagtcttattttttatacaactttttgatgtattgagagatgcaatatatatactctcggtctcttaactttcaattttctctacattctcaagtttttttttatttaggttaaatacctctttttgatcaaacgagcttataagctataagctcgtttgatgactttaccaaacagacccttagtcttttgaacttactttaaagggttaatttgatcattaaaaccagtcaatttaattttttatttttcataagttaaaccaactttaaaagtagtcaaacttatgtaaactaaagtaacttagttcctcaaagataaagatatgacattttatgttataaaaaaaataattgtcttggctctttgcagatttgacggaaaaagtttcttgacaaaatttaagg

SEQ ID NO: 33902 - DNA, 552 bp, Medicago truncatula
  Intron number 1 from transcript Medtr5g095910.1 (locus Med tr5g095910) derived from phytozome v7.0 (chr-ID MtChr5; po s 38069587 to 38070138)
gtctcagggtcccttatttcgtttcacaaatcgtaataataattcttatgcatttcacacttctttttttctctagctagtttgacatgtaaattgaaaacatataaacacaattttcatggcatagatctttagggaaattcatttgaatgaatatcaaaactaatgaaaacaactttttcttctttgtttttaaaaaaaatatgatagtattaatttttttcaatctatgtacttatttaaaaggttggagtagcaatgaaaacaaattaaagacatagaaacatgaaattcatctataatttcgttaccaaggttttgatttttaggaaacgttgctaagtattacacacaacaaaaattagaacaacatcaaattattcttctctatttttcgttgttaattcaactttttctaaaagaaatgatttgatgagatacttgttacattttagttgttatttaaaaatatatttattttcatggcgtcaaaattaatgatacataaattttgcaggctggtttagttctaggaccatctttgaagttttc

SEQ ID NO: 33903 - DNA, 628 bp, Medicago truncatula
  Intron number 1 from transcript Medtr6g017990.1 (locus Med tr6g017990) derived from phytozome v7.0 (chr-ID MtChr6; po s 4463242 to 4463869)
tggagggaaccccttggatttgcaacatgtggagggaaccccttggatttgcaacgctatcatccatcttttttttttatctcttgaatgttaatcggtggacatttggcatattttgtttggttgtgaattgcgaaatcctctacgtacaactacaaagactaatatctccggttaagaagaaccataatatttgaacccgcgaccttttaattaaacggaatatatcatcaacatattatccaagtgcacttgattgccattttgtatatttcataatacttcaaaaggattaaaataacaaagagttataaaaaaggaatatatagcttagaaagactgctaaaaattaatttgtggtttactttgattttagactatatgtttagcatttgtggaaaaaaaaaaaaaaagactatatgtttagcatctcatttttcatagataaataaatggaacaagcctaaaaggaaagaaactacatgcgaactaaacaagtatacaagctctcatattctctgcagtaaaagtacaagtacaagcaggattgtaatcaatttacatacacattgatttacttttacacgtacaagtacaactgtacaagtatactttctacattggactc

SEQ ID NO: 33904 - DNA, 531 bp, Medicago truncatula
  Intron number 1 from transcript Medtr2g005240.1 (locus Med tr2g005240) derived from phytozome v7.0 (chr-ID MtChr2; po s 146760 to 147290 reverse strand)
cctctatataagggtgaccttgcgtcaccctcaaggtacgtttcattttcccacatattttacacattcaacctcacttcctacagtaatttgagcgttgaaagcatttgcaaagaaattttgaataagctaggcatttcaagtgctatatcgaacatgttatctaattttatggtctcattatgcatctcaagacatcgagagaaagattttattttattttatttttttgaataaagaaagacttcatattatttagttgacttgtgtttaagtaatatagaaagaacatagcaatagattgttcaaccaaactgaatcacatatgacttatactttggagaagatgaaaattcatgtttggtgacaaaatccacatgttttgatctaagtcattggcagttgaatccactagattagagttgttttttgtttttgtttttgtttttgaatttgttgtgtttagttttggggtatttctgttgcttttgattagtggtgtgttgggctagcattgttgttgatatccaa

SEQ ID NO: 33905 - DNA, 630 bp, Medicago truncatula
  Intron number 1 from transcript Medtr2g114330.1 (locus Med tr2g114330) derived from phytozome v7.0 (chr-ID MtChr2; po s 27012593 to 27013222 reverse strand)
gcctcttacaggtaatcttttccttgcattgcatcgcttcgcatcgtacaagtgaatgctctcgatgtgttatgttatcattattactcttcgcaacactctttctttcgtaattcacaatactatcgcatgaacaatatgtgctgtgtctagggtttaggacttgcttaggttagattcacttatttgagataagcacttctgagattgtttccaagaccttatgacatgtcaataagttgtttttagcttatttccagaaactctccaagttagcttatgaaaacaatttgtctttatttttttgttgtaatagaaataacttaaatataaacacttatattataagaatttatatgtgcttactgcttagcattgtaactttaaaataaatcaataaatgaacaaccacaacgcatgagtggttgatgatactcttggttcaagtatttcctctttttagtagtttgatgcttagtttgctctataatttacatacattattacatagtatgaatgggccggtgcaaattactcttaacactctctctgaatggatagcacaaaaccctcttacagtccgagatttattcattgagttatagatgtctattcttgcaggaaaagatc

SEQ ID NO: 33906 - DNA, 571 bp, Medicago truncatula
  Intron number 1 from transcript Medtr3g086940.1 (locus Med tr3g086940) derived from phytozome v7.0 (chr-ID MtChr3; po s 20525751 to 20526321)
ttattgcttcaaaaagttatagttatagagtaatttctatgtgtttggttggattcaatgtttgataatttggaagtgaaaatgccactcaaagctcttaaatcatgtgcaaaatgagaaggagaaatttgagaagctgattttgtttgaatttgaatctgacggagaaaggttcttatggataaagtttcttcttccacttttatttgtttctttctcatctattttgctatagaagaaactagaacagttggatcgtcatgttctcttattcatattttttctctttagatttatctatattgaaattgttcacagcgactgtagcaacatattcttgaattgctatgtgaaaataagtcaattttaatttttaagcattttatttgtttctgtgtgtgtgaccaactatagttgtaaaaccatctcttggtttttctttttaagcattttattgctactgtgaaaaattcttgatcacaccaactatgagttattgatatcacttttatgtcctctttcttaaatcatttcagtgtattggaagtttacaaagcattcaaatttggat

SEQ ID NO: 33907 - DNA, 594 bp, Medicago truncatula
  Intron number 2 from transcript Medtr3g086940.1 (locus Med tr3g086940) derived from phytozome v7.0 (chr-ID MtChr3; po s 20526342 to 20526935)
tcgtttgtgagggagctttttcttcgtggctgtcggtgtgtgttatgctgcattatgtgttttgtttatgtaagtttttttcctctgctacttcaaattcaggcctgctttcgatgtttctgtttagccattttgtaggatatgctttgttcatttaattttactctttgcgtaatcgttgttgcatgcttgaatccatgactctcttctttaggacttctcatgtataaataggaccatttactttattttgattcacactgtcttaaaattgtttatatctttcctttttattattctctaacacttctttgtttgacatttttatggatttgcatttgcaagaatttaaacccctcatttgggtttttttgcatactaatttccctagattgtgtgattatgaaaggttaaacctgaaatgagaatgacaaggtcctgatacattgattttcttcaatgcttctgtcgatcttaaggacatgatgttatctattggtatgttcaattatattatgcagatttcagtttctaacatgttaaaaataagttatatcaattaactcatacagaaccctatatctttgagccaag

SEQ ID NO: 33908 - DNA, 460 bp, Medicago truncatula
  Intron number 1 from transcript Medtr6g009600.1 (locus Med tr6g009600) derived from phytozome v7.0 (chr-ID MtChr6; po s 1641054 to 1641513)
ctacatcatccggttgttgagaagtttaagacttagtaagtttgcattatgatttcacaatacagtgttagagtaacttattatttcacaatccgatttgattgttttttgaccatgtttcttaaattgttgtcatgaccttaacacttctcaagctcagagtcaaacttcagttaaaacttaagtcagagttcgacttcttctcaacgtacttcgtacaacgatttttccaaactttcacatgttaggccaattgctgaatttataaacttagtcaatgtctgctttttttatgaacaaacatattttgagtttttttacgcacaaattaaaaatacatattgtattattctttatttcatgtgcataatttgtgttaggaaagatattgcatcactatttataaaacaactaaattcaatcataaccagtttggattgtattatgacagttgcaccaa

SEQ ID NO: 33909 - DNA, 376 bp, Medicago truncatula
  Intron number 1 from transcript Medtr1g059670.1 (locus Med tr1g059670) derived from phytozome v7.0 (chr-ID MtChr1; po s 11706305 to 11706680)
attcacttacagttccacaccacaccactattgttgttattttgtagcgattcacttccaatttcacaccatgtcaccacaccaccagtataagtagcgattcacttccagttccacaccactattgttgcaaaaaccttctcttctgttgttgttgctttgttaataaacattaatcccatgtaagttgttacctttaatcttatttttgtcttctagttctactatattattgagatttattttttttcccccaatttttgacttatactgtattattaggtttagtatttttgccccaatttttattatgtctcacttgtgcttgtattggaatcaagtactaaattagttatattatttgaatatgctagaa

SEQ ID NO: 33910 - DNA, 763 bp, Medicago truncatula
  Intron number 1 from transcript Medtr3g106670.1 (locus Med tr3g106670) derived from phytozome v7.0 (chr-ID MtChr3; po s 26924501 to 26925263)
ttacagatcttgtcctgtgttttccttgccttaaggtaattttcttatcattatttgcacttttttatgtttttttttttttcttcatgtttcatatgttttttgttttagttgatgtttttctgggcatgaaattttttttggtgagtactaagacaatgaaaattttaagagattgttaattattttgctatgtgatgtttgaattaattagataagttattcttaatgtttctgttaatttttccccttttattcatgttttttatggtatatcatatgattctgtgtttgtgatgtttatgagtctatgagtttttggttctttaatattgatctgctactaatagctaagtttttattctttgaaattgtttgatggttttttattggttgaaattgttttttgttgttttgatgatggtgaaaaaaaaaaaagaaaatttcagttggtgtgtacaataatttatattttcaaatctaaagtccccttgcaagttcttcttagcaaatactatacaaactttgttgttttgaactttttcttgatacttttatcttgtttggaagtttttatgatccttgttgaatgaaactatgaattacttgtcatggcatgtatactattgttcaaagttgtatttataattcaaattattgttttcttttctctttacactgctagttatatgctcttaataaataccaattcatttgtttctttgcaggtcgaatccacagtattgaaattcagctatcttta

SEQ ID NO: 33911 - DNA, 476 bp, Medicago truncatula
  Intron number 1 from transcript Medtr6g005370.1 (locus Med tr6g005370) derived from phytozome v7.0 (chr-ID MtChr6; po s 244803 to 245278)
tagaaaagatcgacaagaagaagaaaaataacaaggttagtttgtcttttcttttcttattcttatttacctccaaaaaatttggttttttaatttgtttgtttgtattttttttgtttttgtgtttattttgattaagaggtaagagatgatccaatgactagtactagtgatctaaattgtagaattagtggttctcttatacccctataacataaattatatagtaggttttgataatttgtgtgatttagatgattaagtcatatagtatatgaattctcttttaaaaatattcattgctttaaaaaaattaaaactaaataacttgtttgattagtaaaacagttttacaagtaaccgtagcataactcaattaaaatgaacgttacaaatactcttttatttttaagaattgaatttctaataattaaactatttagtcatatcaattttacaaagttcaaggtaaaatc

SEQ ID NO: 33912 - DNA, 856 bp, Medicago truncatula
  Intron number 2 from transcript Medtr5g096300.1 (locus Med tr5g096300) derived from phytozome v7.0 (chr-ID MtChr5; po s 38266038 to 38266893)
gaatcattgttgccgtccaaccaaatatcgtactttgcttttaatattctatttttatcttatttctatgagtggattctcattctatatactaaactaatgagaaaaaaatatgaaatccaatttaagtattgtttgattcaattatttgagtttatctatttacggaaacaacttaaaacatgttcacaggctgttttcacctaataactctaggatatttcatgaatacaacttatggcttatagaagtattttatatataagcatttatataataagcacttctgctataagcacatagttaagttgtgatataatactttagaaaaaagtccacaagtaatccctgacctgagagttactaaattaggggacatatttatccaatcgtctgagattgttttaaaattgtttttggggctaattagagtgttctcctatcaaggtctcaaattcgaatcccccaggtgccaacaattcatgtgttggtccagttctgagattagtcagtccttggatcggattttgagtttccaaaaaaaaagggactaatgtgttccaaattggtaattttgatgagagagcctaaattagatgccacattttcttttggaaactaaaagaactaaaaccagtcttcactaattttttattttcatccattatcttcttgcctattttttccctttttatctttgagttatgcttcaaatattttttatgctgatttcctttttgtttgttcaatggttttctttgtaacagtgaaccacattaagttttgttactttcttttttctaatgtttgtattgtttggtttgtttcttctgtaatttctattgtcaggttggag

SEQ ID NO: 33913 - DNA, 819 bp, Medicago truncatula
  Intron number 2 from transcript Medtr6g013840.1 (locus Med tr6g013840) derived from phytozome v7.0 (chr-ID MtChr6; po s 3056622 to 3057440 reverse strand)
ctcctgattcttacaaagctgctattatagctcaggtacaaatacctctcaagaaggccttacttcaattcaatcctttttatttttctacgttctacaaaattcattagatttataaagggcaattccgcatcgaattgtgcaaacacatgatccaagtggtaattaactcatcatgctactttttgttggataaaaatatggtatttgatagaacattatgacatcgtttgatccaagtagccgaccccacttagtgggataaggcttggttgtttttgttgttgtatgctattttttgtggtataaattgctttgttctgtttataaatagataaaactttacctatagtaccataggttctattttccactaaaaatgtccttaactgtctgcataactgatcttagaatgctaactttcatgcgattttttgtcctttataaatctattttgtaaccggtaaaatggtattgatttggatggacatgctttctaagttttagcagtttccaaccgttgtagattgcgaagggacattttctggtcagtgttgtcaaatggtgacgctatagcaaagtagaatttgaactaatcactgttgtagttagtacaaagtgtgttatcaaatagcggctatagcggtactatattagtgtaaattagcagaattcaaactaactgctattttcttcaatcagcgttgataacattatttctcgtttcatatttatgatgtaaggttgtaacctggatttttcgcaaaatcaactcaactttcttttaccgcgatgattttgcaggacaaggataggttg

SEQ ID NO: 33914 - DNA, 771 bp, Medicago truncatula; identical to SEQ ID NO: 30701
  Intron number 1 from transcript Medtr3g106480.1 (locus Med tr3g106480) derived from phytozome v7.0 (chr-ID MtChr3; po s 26814328 to 26815098)

SEQ ID NO: 33915 - DNA, 758 bp, Medicago truncatula
  Intron number 1 from transcript Medtr5g015070.1 (locus Med tr5g015070) derived from phytozome v7.0 (chr-ID MtChr5; po s 4942333 to 4943090)
ccactgctctcatctgcttcttctatcgatctcatgtatctcaattcctatactctttcctttaattgattcaatttattttcatggtcgcacgctacactagatggctcgaatttaattttttgattctgtttttagggtttttgaggggataaacacgatcttttgatagtttagtaaaaatttgattttgagtttgattttacatgcccactgaccttttactcatttattctcttctgctcatatttaaatcaccattttttctattccccagattaaagaagagtttttgaagatacaggtaatcccatcacattctccatggttcttttatttttgcttttgtgttatgtatattgcttttgtcccatttaagttaatattttatttttttaacaatgaaattaaacttcatcttatgtttactgtatattgctcttttatttttactatgtatgcagaaagaaaatcttgcagaaaattgatagtatgcacctattaatatgatttatttacatcttaaaaatacatgttatgctttcaattgttattatccgaagttaaacaaaaccaaactggaatctgcatctgtttcttatatggtaggctttgtgaatcaatttttccacttacttttgcctcccccatctttttgatataatgtttttatgaactttcacctataatttgacttatattatttgtgtgttttggctgcagtgagtgctcaaatttcgaaatcgttgggacttaat

SEQ ID NO: 33916 - DNA, 343 bp, Medicago truncatula
  Intron number 2 from transcript Medtr5g015070.1 (locus Med tr5g015070) derived from phytozome v7.0 (chr-ID MtChr5; po s 4943128 to 4943470)
aaacacaacttggcggtaatcacattcctttcttccatgtgactagagattcttcaaattcttatgtgaggataacaattaattgttcgatactttttttttctttttttcattttgtaatttggaattatgcctcagacaacctctaatatgtccttagtttgtttattgtttgttctttattacttctctccactgttgaatcgatgtcgccaaatgcttaatcaaatttggcactgatctcatccgtcaagattgttggaaaaacatggtaattcttttattccttcctctgtttttctcttttgaagtgctcaaagcggccgccgccggcacctattga

SEQ ID NO: 33917 - DNA, 549 bp, Medicago truncatula
  Intron number 1 from transcript Medtr5g025020.1 (locus Med tr5g025020) derived from phytozome v7.0 (chr-ID MtChr5; po s 10002574 to 10003122 reverse strand)
ctacaccttaccagaggtatgtttatgtttatttttattttttataaaaaagattgaagaaaagggaatttttttttatttaattcaaatacactaatcatcattttcaatcgtaggagagaggatttgaactctatgtttatctatttagttttttttttttataagtttaaatatatttttagtttatgaaaatataccatctttgcttttaatccttgcaattttaatttgtttttgttttagtctttatacacacatatttatcgttttattggtttgatctatgatattttattttagttcctacaaaatatgttcatattgaagtctctctatataaaaattatttcaagacttattcagaggaactaaaataagatattatacatattaaagagaccaactttaatgtaataaattttaccatgacatgaataaaatataaaaatatattttcaatttatgaaaatatatcatctttgcttttaatccttgcaattttcttagagtgtgaacggttgattttctttgattacaaggcaaatc

SEQ ID NO: 33918 - DNA, 730 bp, Medicago truncatula
  Intron number 1 from transcript Medtr7g075630.1 (locus Med tr7g075630) derived from phytozome v7.0 (chr-ID MtChr7; po s 15201492 to 15202221)
ccacaaccacatcctcctcaaggtaaggagtgatgtgaacttgcataaacacactttgcactccactagaatcttaacaatctcgatcaccaaatccacttggattaatataatttgttagataataaaatatagggcttaagttataaaacaatcaatcaacaatgatatacaaagttgaaaaaatagctttcattcaattttgtaatgtgaggatagagtcatattgatgatcattttatattgagatgtttgatgataatttgttgaatacattagagatatgtaagatatttcttcattaaaaaaaattgacaagaagggatttcattatttagagaaggttgttagttttgtttgacagattgtaaatgttgttgttggagctacttagtgcatattaatattgaaagttaatatcttgacagtctcgtatattcaatatcttgaaatttataaaaatttatttattttcaatataaaatttgtgtaattgacaattgattgctgctcaagctttgttaaatttgaattgcacaacgtcgagcttattagggatttgagaggttattgttaggatcacacatatacaagaaacatcatctataacattactttaaaaagtatcattcattaaaaaaaaaaaattagaagaacgaaatggtgtttactaatgttaggtttttgttatgcagaggtggaagtaaataaggtgactaatccgctgtaa

SEQ ID NO: 33919 - DNA, 340 bp, Medicago truncatula
  Intron number 2 from transcript Medtr4g133410.1 (locus Med tr4g133410) derived from phytozome v7.0 (chr-ID MtChr4; po s 31953825 to 31954164)
tactaggttagtttcttcagttatgaatatcaatgtttttttttatctgtttgattatgaatatatgagaaatatatgttgtgcggacaatgtaattgaaaactctagctggctggggcggtgttctgtctaactgtagaagctattttctgttagtttcattttatcgataacctggaaagggaactttattagttggaacttggaaatgaatggttgcaggatatttttttttttgtttttgttctgtttgattttgcttggctagattaaaggatgatgctaaactaattcatacttttcagatatacttttctcaaagtttcgacttgggtggaaa

SEQ ID NO: 33920 - DNA, 998 bp, Medicago truncatula
  Intron number 2 from transcript Medtr3g103780.1 (locus Med tr3g103780) derived from phytozome v7.0 (chr-ID MtChr3; po s 25630919 to 25631916)
tccttgtgtttgttgacaacaaggtaattctctccttctctctctgcctttagattaataatttagattgaatcattgctttatttttatgtttttgtaaacttttctggtttcccatcaatctaatttagggtgagtgatatagcaaaattgggagaaagctttttataatattcgttcaattttttacaaccagcatcatgatcaactctcatagtacatgtttgaaatcttggggagtttgataaaattatggcaacaccatgattttgatgaagttttaaaaggtagtttttgtcaaatttgcggccacacaagacttatgttgtatttagggtgatgatttccttggaaaatagtaagaacaaaaaaaattcatgctagttttttagtgagtagtaatagcttgatttgaaatcaacaaaattggtttggttgcacaatccttatgcggcggttggtgaaatataaggtgtggaatttccttaattcgtcattggccagccaaatgaataaaagagagttctcgtttttttttatcattccatttttattgtcattaaagcaaccctaaaaccttcaagtgtatgtgtttggctgcaaatttgattcatatgattgattggtaaaatttgcttaatcaacgggcaactggcattcttagtttagagcttacctactgtatctgtaatttctagtccactgtgattttggtgttttcaggatgattggttgttcttaatctaataatagtaagtagtaactttgatttaagactaactgtatatttttaacttatattttcttacttaaaggtaagattaaaataaaaacaaagaaagttcgtgcacaaagtgaaaatgaaccagtgttcaaacatattagtctgtgttcttccagtttcatgataatgtttgaatgaattagagcatgactcattaatttattaagccatttgtggttgaactaactaactagcatatggtttgagtaggtgg

SEQ ID NO: 33921 - DNA, 629 bp, Medicago truncatula
  Intron number 1 from transcript Medtr3g067820.1 (locus Med tr3g067820) derived from phytozome v7.0 (chr-ID MtChr3; po s 15637813 to 15638441)
acttttgaaaaaggtatatttcaaatcattccgacatcggatgcaaaatctgcgttatttcgagcgagtctttctagggtgccacttcatcctcgatacgtgccctcagtttgtctacatcacaaaacatgacatatttgatataaatttgaatttgaataggtaatctataagaaaagaatatagttttaggaaattcggtgaccatacaatacaaataccatgatctttcttttttaagcaatgactaaaaaatgaaataaaaaataaagactagtgaatgaaggagttgaaggtcacgggttcaaatctgagtgaatgaaaaatatactaacccgacaactagttaataaaattactaaaaaaaaactaattagtaagattggccttttgcatccccgtgagcttagctcagttggtagggatattgcatattatatgcaggggctggggttcgaaccccagacactctagttctccacaatttaattgtgtgagttctagtcactaggctacttgacaaaaataaaaaaaagattggccttttgcaattttttttgttgacatctttgctatcattggaataaaatatttattaaattgatacctttgaaggtttctggactggt

SEQ ID NO: 33922 - DNA, 665 bp, Medicago truncatula; identical to SEQ ID NO: 28685
  Intron number 1 from transcript Medtr2g100760.1 (locus Med tr2g100760) derived from phytozome v7.0 (chr-ID MtChr2; po s 23553203 to 23553867 reverse strand)

SEQ ID NO: 33923 - DNA, 831 bp, Medicago truncatula
  Intron number 1 from transcript Medtr2g090680.1 (locus Med tr2g090680) derived from phytozome v7.0 (chr-ID MtChr2; po s 20266258 to 20267088 reverse strand)
ccagctggttatagcataactggaaagacgttaaggtcatgtgagaggaagagcatgatgaaaaacgcctaccatgacaatacccacctcctctaggaactaaccactacacataccttgtaaatttatgtaatttttgtgtgtctaatcagacttctcaatactgtatttatagtgtatttgctataaatacaagttaatgtgattcctaattccaacttactaagttctaaattccaatcccataagcaagttgatgtaattcactttttatgaggtgcaagttaatgtatttttttaagaaccacaaaccctccatttacaccaaaaagatatggatttttctttacgtcagaaaaagggtttttagatcttgcaattgaaaagagcaacttggttcaaattatagaattagagatccaatttaacccaataaaagagttaaagaaccaaaaacagtatgtacgcaaatgaaaaaataaataaagcaagaaagacactaatttatatcgttatctatcttattgtttcgctggattttgagaaattgcaatcaacggtacactacctgaaaatcttgtgactattaaaacattaaaacacatgtaatattcatacttgctacatttttttttactatagctaaccatcaaagtttcttttgttaagtttaacttgttttacaaccattggcatttttgtgtcgagttttccaaattacaggaatttttttctatgacaaattttccccctagaattttaactcaatctcaatgtgatatgatatctttttcagagacctcagctttaacagattaagaggaacaatcc

SEQ ID NO: 33924 - DNA, 992 bp, Medicago truncatula
  Intron number 2 from transcript Medtr3g022190.1 (locus Med tr3g022190) derived from phytozome v7.0 (chr-ID MtChr3; po s 5687586 to 5688577 reverse strand)
cacagagtaagttcattcctaattatcatattttctttctcttattgctattactattccaataacttattcgatctgcagagtaagcctctggaagtagatgttgaacatatgaatgtccaactacatttttttctaacggaatagtagttagtagtaaccttaagcatgtttattgcaagtatgaaacttactagtaagtttgtgggagcagccggtggaaatggtgatgtacgtagtgatgctggatttcttttagaccattagcacatagtctttatcacttatactgatgataagagagcttcgggtgaaatcgaaataacagaaaacattaggtgcaaaattttaaataggcaaaatgtcgagatggaaaaaaaatggtcatttcatatcaaaaatatcagaaactatggatttcaaattctacgaggaggtggaactcaaggaaacactcatgtttaaaatgtgtttgttctgggagagttgaagtaaaaaaaaaaaaaaccctccccctaaaaaaaaattgtatgttactgatgcaaaaactgaaatcaaaatgcatccttttacttcttctggctgaagaactcacttttttcatattttttaacagttgatagtatatatgtttgaactctaaatgttattgcttcgtagtagattacacacactcttattttaatttgtatggaagagcatctagtcacctctgtggtgccaaactgacttgttaatcattaaaagcattgttgtcaatccggatcgcagattataacagttattcaaattccactgccctatagtgctatattgtagctaatgccactatttagcaacactttatattaactcatgtactgccactgattaaaattatgtttgttgatgtattctatgagagattctgtgttaagttattattctaagtgtgtttatttgcatgcattttattaggtgctgctaaaagaagaagagaagttggcagccca

SEQ ID NO: 33925 - DNA, 672 bp, Medicago truncatula
  Intron number 1 from transcript Medtr3g121800.1 (locus Med tr3g121800) derived from phytozome v7.0 (chr-ID MtChr3; po s 30215820 to 30216491 reverse strand)
tcgtaacacttacctacatttttcaaatcaaagaaaaagaaataaactttttatgttttcttaataatagctcattagttcaatttcatatcttggttcttggccatgattattttggttattttgtttcttggttttcttagttttcctagttttgggattttaactgaatttgtaccataattagaataactaacaattctaacttaattaactagtgtaactaattactgcaactaactatttatgcctgtttggtttgacttatttgagtttatctacttccataagtattgtgagactgtttttgagaacttatgaaaacaactttatgacattgtttataagctgttttctccttattttcagaagttatccaagatagaaaacagcttatagcttacacataaataatttaactttcatttatcttattctatagaaatagcttatacataggcgtttgtgctataagttgcaaataagctgtttatccaaacagggcctataggctatatctacaagtacttgttaatgaaaaacatgttttgtgtttccccttttcaatttttggaattgatttgaggatattgaattttgcgttttcccatagttgacgggcattattcaacatacttcagtgtcttgcaggttattccatccttgaggaga

SEQ ID NO: 33926 - DNA, 478 bp, Medicago truncatula
  Intron number 1 from transcript Medtr2g122570.1 (locus Med tr2g122570) derived from phytozome v7.0 (chr-ID MtChr2; po s 29439288 to 29439765 reverse strand)
ctcctgctgcaaagtatgtttatttacatcatccttcttattgtttttagattttacaattgcttagttctgttctgtttagtttttttgagtaatcttttgttcattgcataatcaactaaatcatggaacatgttgataaacaagtttgatatagatcatgtcatgttttggttggctagattagacaaaggtgaaagatattgtaactcataaaaaactagacatgttactgtttttttttaatggctttatgttctgtgattcaacccttcaatagacatgatttttttctttttggggtgagttttagttagatatattttcttatgcaaaaattgaatttttctatatataattcaaaaatagtggcttatgaatttttgggttgttttcagaaaaggtctcatcttcaaagttgttaaacttatgtgttcttcattgtatcaaacttctgtaatagggcacaggttgtggg

SEQ ID NO: 33927 - DNA, 559 bp, Medicago truncatula; identical to SEQ ID NO: 31167
  Intron number 1 from transcript Medtr6g046640.1 (locus Med tr6g046640) derived from phytozome v7.0 (chr-ID MtChr6; po s 9901188 to 9901746)

SEQ ID NO: 33928 - DNA, 160 bp, Medicago truncatula
  Intron number 1 from transcript Medtr2g097230.1 (locus Med tr2g097230) derived from phytozome v7.0 (chr-ID MtChr2; po s 22763404 to 22763563 reverse strand)
aagatactgcaagttctcctatcaatagccctaaggtttttacttttgtttttcttcctacatatttgaattagtttatatttataattgttcattcaattatgattttataattaatattttaggtattcaaagcaaaagagaaggaagaaatagacca

SEQ ID NO: 33929 - DNA, 575 bp, Medicago truncatula
  Intron number 1 from transcript Medtr4g142700.1 (locus Med tr4g142700) derived from phytozome v7.0 (chr-ID MtChr4; po s 35625473 to 35626047 reverse strand)
acccagtttaatttaaacttgaaggaccaatatatgagtaattgagttagagtctattttgacctaaaaagtcaaagtctatagtaacgccacgtgtatatgtggacacaaaacatctagacaaacattttcctaggtcttttatttgaaactcacgttccattttccttgctgtcgtcctccctccgaagcatttctttctccccgtttccccgcataactcagaaatggattcatcaaatatccttattggaacagattgggggtatttctaagcatattaagaaatcatttgctccattccgcttttagtaactgatatatcacatttttattgagaaatgatcctctccatttaacaaaataaatgaagtctgcaattcggaaatatattgacacaaaaagtgtagataatggatcctaccattaagtgagttctatcgtctttaattgtgtttttatttttcaaaatggaagaaatagagaaattataaatggagagaatcctaactcctttttattaacaatatattcttttcaaatttggcataatttgtggaacacttatcaggaca

SEQ ID NO: 33930 - DNA, 530 bp, Medicago truncatula
  Intron number 1 from transcript Medtr2g121270.1 (locus Med tr2g121270) derived from phytozome v7.0 (chr-ID MtChr2; po s 28748036 to 28748565 reverse strand)
ccaaggtttttttgccccctctaactatatttgatgtattattaatctatgtttcacattattaaggtttttttgactgtgtaatgtatctgtatgagatccttgttctttggagtagcttttggaacttgaacatgtaatatttgtggcacaaatctttacttcaagagcaacataaaaaagacaagaatcatgattaactctaagacagaaaatcaatttgctagttttagaaatagagtcattttccatatgatgatatgtgtatgtcaactaaaaaaggaaactatttctctttttaaaataaaaaaaaatggaaattaaagataattcattattaataacagcgacattaatgatcattttacaacttttttagtggattttgaaactcgaaagaagtttctcttcttaactcatacatatatttccttaatttttgtttgtttaggtaaacaaatttaactacaataagactgaaatttaactacaatgtttgattgcaggcctaggtaaacaaaacttgaaca

SEQ ID NO: 33931 - DNA, 526 bp, Medicago truncatula
  Intron number 2 from transcript Medtr3g103500.1 (locus Med tr3g103500) derived from phytozome v7.0 (chr-ID MtChr3; po s 25484666 to 25485191 reverse strand)
tctattgggagagaactattaggaaggtataattatgctctcattttcatcatctgattctgttttgacttttgaccttccttgatcaaaagttttgtatcttaaattgttactctcagaatgatttggttattgaaattaaaatctatattagttgaagagaattttatgaataacatcattaagtagggtaaattagttcagttttacttagattttgaattactaaatatgaaggttttatttaataggagggattattattctttggtagaaaaagcagaattagtttttttctataataaaaactaagagttaggggatggtgccccaatctagtttttttctcaaatagcacttacaaagggatttacgtttacctccctccggaggcagcatagaggctcaaacttgggacctccaagtccaaaaccactagaccgaacctttggaattttcctgtgtctaaatatgtcttcatgttttaacaggagacaagttctttcagctgttccacatctcttgg

SEQ ID NO: 33932 - DNA, 368 bp, Medicago truncatula; identical to SEQ ID NO: 30785
  Intron number 3 from transcript Medtr6g098750.1 (locus Med tr6g098750) derived from phytozome v7.0 (chr-ID MtChr6; po s 21456729 to 21457096)

SEQ ID NO: 33933 - DNA, 723 bp, Medicago truncatula
  Intron number 2 from transcript Medtr4g079960.1 (locus Med tr4g079960) derived from phytozome v7.0 (chr-ID MtChr4; po s 16260403 to 16261125 reverse strand)
attcctaggaatatttgtgaactagagtcgttgaggtgagaacactcaaaaagggtatacagtaacacttgttgtataaagaaatagacatattgagaacttttgagtgtcattttttgggttgaatgtttagcaaggcaagccattaggattagattaatggtaagtggtttgggttgtttgtatgaagacataggtttaaaccaaaatgccgtcattgtgcatagaaagtatctggtgttggagtttggaagtttttatgtgattgttagataaccttgtttgatggaatagaagagcataatataataacaggcttctaatttgtaaatgcaaaaaaaaaaaaaatgttcctcacaattctgcgatgacagtgaaactgttactgtgtatctatttataatgcaatctattgttgtctgaggaccttgcgtaatttttcagtatcagagacattgatattttccctagaagctgatagtgaattagtctcttggtctcaaatataaggaaaaaagtcttatgtatttagttcaaatttggaccaaatacatggacttcttttgcttatatttgagaccgaatagactattagctcattatttataaatttacccatcatatttgacgtgaagcaagggagttgaaattgaataaagcttaagaaacgtattaaatatcattgcagtattttctatatcaactcttgcgaggattgaagta

SEQ ID NO: 33934 - DNA, 887 bp, Medicago truncatula
  Intron number 1 from transcript Medtr7g022780.1 (locus Med tr7g022780) derived from phytozome v7.0 (chr-ID MtChr7; po s 5783193 to 5784079 reverse strand)
agctgtagtttggatctccccaagaagaagtccaggttcatgcttaagatttgcaatatatatttccttttttttcttagcaaatatacatttcttttttgacaggatatattttaccttttaaatgagtatacttttcattattgattaggatttatgaagaaatcaatactaaatataaatagtaaggtttctaaaaacaaaaggtaaaaaaacaatttaaaattttgtatataatggaaggaatgtgtaaattatcaaataactcttagaagaattatttggtaggttgcacgggtttttgataggtttgatggttattttgaagggcgtttatactttggttttgaaagatgactttgtggttttggtgtttagtttttattggtttcgagtaccctcaatggagggtgttgttagtttgtttgtagaagttttttatttgatgttcggatgcgtgtttcagtgttccgcatatatacggtacactttttctttgtatgttgctatttaagtctcctagcctagcaatcctcatgctagctataattaaaaaaaaaaaactcttagaagaattactccatttaataactcacgataaacacaacatttttaatcattaactccatttaactactactactaatacaaaacaaactccaacaagcatttaaaaaaaaaaaaaaaaatgccctcaagccggtgatctcaaacacataaatcattaataaaattatctaaacttgaatctttcgactggaattatgaaccaccacaatttaataatttctataatattcctaaaaaaaattattttctacaatattataaaaataagaatgagtaattcttagttaatttttttttcctaagtaacagatagaaaa

SEQ ID NO: 33935 - DNA, 916 bp, Medicago truncatula
  Intron number 1 from transcript Medtr3g025440.1 (locus Med tr3g025440) derived from phytozome v7.0 (chr-ID MtChr3; po s 6580508 to 6581423)
ttttgttcatcgtcttggtgcggtgttgtttgattttctgtcttattgcggtattttttagctcatactgacatattagcttcaatcaattacatatactcaataattgactagattgtcacataccaaagacaaacattgtggccactttaatttactcacattatttataggtattttgctgtttcatgctattaaattatattggatattgtgagtttgagcgtgtattcaccattttttatttcatcgatgttgattttatgttcattatttatttatatgctctaccaatttaaatgaatgaaaataatttcttttagtaaaaaataagatttatactcattactcgtaccagttgtggtcgactataggacctatatattctatgttagtattttcgctgagagtatggagtgaaccatcaacctctttaaacatcccttcccagccaccaaactaactttatatctcatagactcatactaaatatgttaaaatggatggagtgcagtaaatgcttgataacctttttcttttatgttgacaaagtcaattttacatcttagtttgattttattcctttacaaaaattgaagaaagctaggggacaaagtcaataacaacaaatgggtctaattcaaaggaataaaatgacacaaatcaaatcacaatgttgacaaattatgggtcatttctttcactttcgtgacatgcttctagaatcgtctcctttgttttttatgctgtattcatttatctttcgtcttcaacatttttacacacatgcatatttgtcaaattttaacactttacgtttattattatcaaataaaaatgtgaccgttgaattcaaaaggttcacatgcataaagggaaatattaaccacaatatccaagctcataggtgcatcaa

SEQ ID NO: 33936 - DNA, 1043 bp, Medicago truncatula
  Intron number 1 from transcript Medtr4g114460.1 (locus Med tr4g114460) derived from phytozome v7.0 (chr-ID MtChr4; po s 26177896 to 26178938 reverse strand)
caggatctctctctttcacagaagcttctctaacggtattcattctttgatctctttttcatttcacttcatttgcatgttgttgatacaatatctggattctggatcttgatccatttttacttctcgtcatccttgctttttattttattattattattattattattattattattattatatgaaatttatttcttttacatacgtcggtgggagcgatcggaaagtgcactacaccgtttgttaagccaccaccagcaatatgataaaattactttccgatctgtatgtggctccattctgaatgtcccggcctttattagcttaatctgtatccgccgtataccaacttttggtgccggtctattctttcaattttagtgaatagtgacaaaatgaagagagcattttgtttttttgttaacgttaaaaggaatatgtttcatttgtttcattcttttagtctcacttcttagtgtcaagttcaatcgtgattttttaagtgcatttccatcaaattttgcttgtcagcactttggggacaaaataataaattattacttttttgggtaaatcattttagatgaacgttttgccactttgtaggatggaaattatcttaacattagtatgccgattgaaaatagccgaaacttaaaatacctcccattgaaatgaaaatcttaagattaaatattttatgggttttggtgatttttttattgttttcatactatcatcttcaacttcttgctaaatgtgaagttttcatctgaacatgcagagtattggaaattagtagttgttattgagactaacaatttgcatgtttgtatgcataatggtttcaaattgtcaaagtaacactttgcttgaagaggttcgttttgttaagaataatgcaatcatacaaaaaataaaaatggcaattgatctgatttacttgttgattgatttaagagtgaagttgattatttgatgttgtgataacaaagctaccctcttctatgttacaactacagttttgaacaatctgaagt

SEQ ID NO: 33937 - DNA, 903 bp, Medicago truncatula
  Intron number 1 from transcript Medtr3g058620.1 (locus Med tr3g058620) derived from phytozome v7.0 (chr-ID MtChr3; po s 12831811 to 12832713)
tctggccgaggagggaggtaaatgaaaaggaagaaccctctacggttttggtggttgaagaagacaaaaaaaaataaattatgttgtttctatataattgttatattttaactagattttttttttttgacaagaatattttaactagatatatgcactaaattataaacataaattttatacaaattaaatatatttcataaaaaaaaaaaaattaaaatttgattatgtatctagttttaaggataaaatcagacaaaattataatcatcgacatgcgatcatatattttttttttagaatggggcatgtgaacatatttttattttttaaatggatcatgtgaacatatttataatttaatatatatatatatatatatatatatatatatataccaattaaatatgttcaataaaaaattaggatttgattacatacctagtttaaaggataaaatcaaaaaaaattataatcattgacatatgaacatatttaaatttactaaatatatgtagtaaattaacatagattttataccaattaaatatgttcaataaaaaatttggatatgattacatacctagtttataggaaaaaatcaaaaaagctataatcttcgacatgtgaacacatttataatttttatttataatgttaatttctatttttaatatattttttttagattatacttgagtgtgtgatgtcatcccaagtacacttaataaaggaaaatgattcatagacatcctttctcataccactcttgtataccccccatatgacagggtatattggtaatttcgcaaacagtgaaccacaccctcactgcctcacacttttttttttcctttcttctcctcagtcctcacttgccaccaaccaccgccgtcaccacca

SEQ ID NO: 33938 - DNA, 270 bp, Medicago truncatula
  Intron number 2 from transcript Medtr3g005350.1 (locus Med tr3g005350) derived from phytozome v7.0 (chr-ID MtChr3; po s 257361 to 257630 reverse strand)
tcctcagcggtggaaggtgggtgaatttctcccgaacgcatcaattgaaagcgattgaagatcatgttacggtatggatgtttcgccattcacaaaccaatcagttgtgttttgctcttagtgtgagaaaagtgcaaacataaaaggtatgaaaattttatgaattaatgtagtatctattttaattttttttataagcttgtgctctaagtttttaattttgatttatatgcaggatcacttataagccattattaatcaaggaattaa

SEQ ID NO: 33939 - DNA, 949 bp, Medicago truncatula
  Intron number 1 from transcript Medtr3g005350.1 (locus Med tr3g005350) derived from phytozome v7.0 (chr-ID MtChr3; po s 258479 to 259427 reverse strand)
gcatttaagagcaccgacattcaccttctgatcaggtacgatcacattccatctatctttttttttagatagatggaatgattataacgataaaaactcataggcataaatggagtgattgagtttaatgactgtaatcattaaaaactctcagacataagtgaagtgatcgagtttcgaactccggtcaaaacatcccgacaatttcaatatgttttgtcacttgatctaagaatttttgactaacatacattgatttaagagcaatgataggtagacacccttaatatgttcacccgtttaccactcagaaaaattccagttaaccaaatatattgtctgtgtgaccacgttttttagttgcgtgaccactatttttccataatttatttggttaactaagtggaaaaaagtggtcacgcgcattttagttgcgtgaccatattttttcagcttataaatagtggtcacgtaacagaaaaaatgtggtcacacagaccataaaattggttaactgaaattttcgagagtggtacaaaggggtgtacacattaagggtgtctaccaatctttattcttgatttaattccaaaaatatgtaaatttacaaaaaaaaaaaaaaagggaaaacacaaaagaaaactcttagatatatgtaaaaatcacttatttgaattgaaagaaacggaaaaaagatgcagatgtgtgattctaagtcaaaaaatgacctataataatcattcttagagaagttggagtttagttttttttttttttttcttctctttatgatcgattagttagggctatatcccatttcaatatgttttgtcactttaaccgaaacttttggactaacctacattaatttaattccaaaaagatgaagatttacttttaacgaaaaaaatatgatgattcatactttattttcaggtttgtatcttct

SEQ ID NO: 33940 - DNA, 981 bp, Medicago truncatula
  Intron number 1 from transcript Medtr3g067230.1 (locus Med tr3g067230) derived from phytozome v7.0 (chr-ID MtChr3; po s 15383022 to 15384002 reverse strand)
aagaacgtggttttagggtttctggatgaatgaaatgtggaggtagaggaaataagccaacaggttattgggctcagcccagttctggatagtgcggtgatgaatgtatgtctaaaacaggtgtgcaaatagtaataagtctaatattgtatttttattattaaattaatgaaacaatttcaattatttttttgagcaaaaaacaatttctaatctattactttttttatggtggccgggatttgaacagagtaccttgcatattttatgcattctctttactaactcagctaagctcaagaggacaatttcgaatctataacttatatcactaaaacaatttctaaaattgtaagatatgtttattcaccgataaattgatggtatataactttgttccttgcgttttgctctttgtaattcttctccatacatttttttttttaaaattgtatgtgattgaatgattttgtttgtctgaatgaatctaaatgtttattttttcaacctctttgatttaatgtttgtgtcatatttcatttgatctattttttaatcgtttggaaaaaaatatttctactgtttagtgatattaattgactaaatgatgaatgaagatcgcaattaactgtaacccgtgcaagggcatcacaatttagtatataacatcaaaaggtaattttatttataaacaatatagtgcatgaattttttttctatgttacaatgcttgaatttttttgtttgaaatatttctttccctctattttgttttaaaactgcactgagtcgtcacctgatttacggaatcgttttattttaaataaatttttggatttgcaaacctttttcttttgttcatatttattaggtagacttttgattcatattcatatttttagttgtattgtttgattaattgacgaccgctacaattatttataagcccgtggcatcgacacgggtctcacactagtttta

SEQ ID NO: 33941 - DNA, 760 bp, Medicago truncatula
  Intron number 2 from transcript Medtr3g039610.1 (locus Med tr3g039610) derived from phytozome v7.0 (chr-ID MtChr3; po s 10537108 to 10537867 reverse strand)
caatctcctgtcctgttgttgaagtggacaaagtcgtatcttattcttaggtaaatgtcttgatcttgcactgtgattggtcttctattgtaatcttcaattcaatgtattcagtcctttaattggttttaatttgtctttgtcgttactctgcaaactcttatactgtggtaaaattgaaagcatgttctctatcaattcttactgcaattaactaattattaatgacattgaaatcaaacatgtcttggggtctctgtttttagtgatttcaaattaggactaaatgatttgaatttagaatacatgttttaagttgttttaagttgcagtttattatattatagcttgataagtaataggttttatattatagcttattataaaaataaaaataaaaaggttttaaattattatataatatgttgttgtatctctcttgacttcttgatgccaaagcaaagtatttatattagtagcttctttattagcatgcagatttttctcttgtgatcatgagttaacctgaattgtcaagtagatattagattgaaatttgaacaggtcgttggaaccatttcaatttaactctagtacgtagtatttgtccttgctgccacaatagaggtttttctcttctcattgttaggtttcttcattcgtttatgtatgacaattcagtccccttttccccccttttttttgttgtatgcacatatcagttacagtactgttagcacacgtgctacaaaaccaaaag

SEQ ID NO: 33942 - DNA, 721 bp, Medicago truncatula
  Intron number 2 from transcript Medtr1g028470.1 (locus Med tr1g028470) derived from phytozome v7.0 (chr-ID MtChr1; po s 6921144 to 6921864 reverse strand)
tcctctctttccggcgttccctcgtagtctctcaggtttgtgtgcaatttcttcactgttttcatctttatatgataattttgggggaagcttttataagttgtattctatgttctaggtgaaaattgattggttcatagtaatatgatagaaattcttcagtgtctttgttactgtaaaaaatatgatagcatttcaaaataagcattgaatttggatgagaactgtgaatttcaattaacagatgctgttgctagaaatcagactgtaaaattgtgttagggcttgtttgggatttttttttttgttgagaaaaaactatttttttaacccataaattacttttattattttagtagtgtgtgtttgtgttaaaaaaagcatttttaaccttaaaataaaaaagccattcctagtagtagcttttctagaaacaaggaacttgaatgtaagattctctaaacaaatctgtagatttttttaaaccaaacaaacgtaccattagtttactgcttagaaaaatgatttagtgttgcgttaaaattgattggagcttacattttatcttctgtctgtggtatgataagtctgcataatctaacttgtgcggttcttaaagatattagaaaaaaatggcattttagttggtacttactgctcctgcaatattttgttttgatctaatacttattgtacatatttgaagtagaaagcaacatca

SEQ ID NO: 33943 - DNA, 532 bp, Medicago truncatula
  Intron number 1 from transcript Medtr7g018000.1 (locus Med tr7g018000) derived from phytozome v7.0 (chr-ID MtChr7; po s 4249644 to 4250175)
tgtgtattcattcttaattattacatgcacaattttaatggttaaatatatttagtccatacatgcacaatattgtctttgatggcatgtccgacgtttgcatgtcttggaatgttcgtttagatttgtagttttcttcttggatttttcccccttttgtaccaaaaaaatatgtttttaattcttataatagtaccaactaccaagtctttataaaagcaaaataaaggttaaacctcaaaaatatgtttgcatggactaaatttaatttcaaattgcggttacaatgtaaacctttctattgatgtaaaatataggaaaatgcgcttgatgcggttgaaattgtagttgcaatgttgtcgctgagaccttactttttaaaagtcttttataacgcggttgcttgtagtgcagaccgcaatttaaaaccatgtttacatgtgttgtattttgcatttatgtggtcaattaaaatggtgatttttgaacttttgtagcttgttagagtatctagcattgcagctggatacac

SEQ ID NO: 33944 - DNA, 652 bp, Medicago truncatula
  Intron number 1 from transcript Medtr3g101790.1 (locus Med tr3g101790) derived from phytozome v7.0 (chr-ID MtChr3; po s 24689420 to 24690071 reverse strand)
acacagagattgaagctggaatagttaacaaacccgtgactactcttctttactgacttttgtctcgttgtccgtggcaccgaatgcatctttttctcttcacaacctctttactttctcacatgcattagatcgcatcctttccctgaaaacaaacacaatgtgtgtatttcactccattttaccggttctaccctttccttttatagtcaaccaagacaagtcttcaaagttctcagccctaaatcgtaattttagttatttattcctctacctctaaaattattcttaataatattaattttggcagggaaggtaactaccgtgtctgtctggtttcttcttaaaataatttgcttttatgaaatataaatataaaaataaaattatcttgttttactctggcatatcgttttaaatcacaattaattttttatactcgttcttactattggccagaacagaagatatcacatagcatttgtcatttccttccatattaattaaaataattacacttactatttttaacgtgatggttgtattacaagttattaacataaaataattgttcaaataatattttttaaataaaaatgtttttgatttatcaaaagtccgagttcactcgcacaaggtccagtaaaaacat

SEQ ID NO: 33945 - DNA, 855 bp, Medicago truncatula
  Intron number 1 from transcript Medtr3g009280.1 (locus Med tr3g009280) derived from phytozome v7.0 (chr-ID MtChr3; po s 1311434 to 1312288 reverse strand)
aaggtgagttcccttatttggtagctcatgtggaactatattctcagaatgaaagtattcacaatggatcaagttgatacttaggcagaggaataggataaaaaatggggtgaatatgtttttcatatttcttcttctttttgctaatatttggtttgatgcttttttatttgtgtggtgatagtgcaagtgtatgtgtgcatatatactagtattaacaattttttaataaaaagaacattagtatgacttttaaataagcagaagtgtaaatattaatactccatatatataactataaaaggaaatcttttttttgagcatgatacattaggattttttaagcagaagtgtattattttatgaataaaggttcttccttctatgttctatgggtgataattgagaatcaaatgcttccatttattgattgttgtgaccagttaagttgctgcagtcttttaccacctggaacaaccatatgatggtacttggtatcaaagtgcttgtttgactgtgttgcattttctgttttgaaataatatactgtaagaatgttcaacctatcttttacaagacaaatcttgaagtaaattaaaaaactatatgccaatattaattgaaaaacatctttttaaaaattgcttgataaacttattttgacatgttttaaagggatgtttgatgataacaatggtaaaaaaaatgacttggacaatgattgcatgtgggaatatgatggtgaaagttttctgggtgacgatatgggggagaattattacgacgatcatctgttgaaatcgtccactaggcttacgctgtaagaggagaagttgcagacttgcagttaccgcg

SEQ ID NO: 33946 - DNA, 912 bp, Medicago truncatula
  Intron number 1 from transcript Medtr1g012870.1 (locus Med tr1g012870) derived from phytozome v7.0 (chr-ID MtChr1; po s 2136256 to 2137167)
gtgatttctctaagtcttcttctgtgtaatgttttaattttaacatgcattcaatgagttcaatgaatcttattgtagatcagtacatggtttaggagaaaaatgcagtttttttttttaggatttttgctcattttaggagaaaaaaacacagtaatatgattttttaaagcatttctaatttaaaaaattatgtttttttttatataagagtgaagatctattttggtccttcacaattttgtgcggaccaatttagtctataacaaaaataaaacgccaagagtcactgacattgtcatatggacaaattagtccttctgttatactgaatcaggactaatttgtccccggtataaaaatgtcacactactttgggttttattgttgcagggactaaatcggcccacatgaaaattgtgaagaccaaatcggttttcactcttaatatagattaaaaaataattacacatgtagtttatgtaaaatcaatcttgcgttcatctctctctaatagagtcctgtcagattatagttttctcatctttgtttgcaaaatgttctaatgctatcacacatttagctcaaaggcaaaattacgatattatagtaaacaatctttgtaactaaacaccattttgttatttgaattcaaaagagtaatttgtgttttaagtatctatagatgtgggtctagcaaaaattctacatacatggatactaacttagtttgttttcttattcttgtatgttctcttcgtttgaatatggatatatttatctaaaggcaaggaaaccatcaaagtctacccgcctaaaaatgatagacggggagccggatagaattagttatttactaggtgatgtaatagacaagattctgtcacacttgccaattagggaagctgtgag

SEQ ID NO: 33947 - DNA, 883 bp, Medicago truncatula
  Intron number 1 from transcript Medtr5g007060.1 (locus Med tr5g007060) derived from phytozome v7.0 (chr-ID MtChr5; po s 962520 to 963402)
gccgaagaatcccaagcaaggtatgcattcaagatattatattttcttctgaagagtttagaatttacaatttagtgtagacgtatgccgaaattgttgcttaagaaaaaagaatatacagagatctatttgatcacagtgagataaaaaaaaattactaacttggttcacagaggttggtcgaattagttttttttttaggaaagttggatggtcgaattagtattttcacttttaagaactaggtgtttacatttgttagggatgattccctcagcaaaaaaaaatcaggtctttgttttttcaaggacaaattaaccataaatttttaccattttaaaaaataaaaatgcataaatgaaaaaatttattggaataaaatggtaactaagtaaatgtacttattaatgattttaatttcgacaaacaactgttaatttatagtgaaagaatagttactttctgtatgtattttaattttcccttttcatttcattagtattaggatcttgtttaaaaaaaaataaaaaatcattagtattaggatctgaattgaattgatttgtttccaaaattgattaaaataatttgattttgattaaaaggatatgtatagataatagtattttgtcttgttcaaaaaaaaagataatagtattttgtattttcctattgattttgtattttgttttttgattctcagtatttcattttagaccttatagttttagttcctagtttaagttctcctttacaaagtgacgtaaatgtcaaaaaaattcaagtgattatgaactataagaatttttcacatagactagttaaagctaaaatatatgaatttttattgttcatgcagaaggtaaagtggggtgaaaatagc

SEQ ID NO: 33948 - DNA, 349 bp, Medicago truncatula
  Intron number 1 from transcript Medtr4g160510.1 (locus Med tr4g160510) derived from phytozome v7.0 (chr-ID MtChr4; po s 40692677 to 40693025)
gaagggcttcgcttttgctcctcattggcttctgagtttttcatactgtggaaagctgtatttcatggggagggcaaacattttttgtgtttgatccttattcaagaaaaaggtacactattaattatccatcggaagccgatgcgatgaatatagtgagttgtgggtttctcgggatctcttgtagtcgtttgaggatagctgatattagacaacatgatttgagagtttgggaacatgttgaaaagaatcagtgggatttgttgcattgtattgatatatctaacaaaattgccacaaaagttttgtgttaattactacaagagggttgcagggtttcatccttttg

SEQ ID NO: 33949 - DNA, 525 bp, Medicago truncatula
  Intron number 2 from transcript Medtr6g028350.1 (locus Med tr6g028350) derived from phytozome v7.0 (chr-ID MtChr6; po s 6421391 to 6421915)
acaaaccggcattacttcttcagacaaaggctcgagtaatggtttcaatttcatcttatttgcttaatgtttctattctaatttttctacatctaatagaagtaaatatgttagacagatttgaatttatacatgtatttcaatttttacatgtaaatgtaaaagagaaaaaattaattatacttccattttgcccatcttttcatattgttttgcctcttgtggattgatatatttgaacttatacactcatattagcacttgtgagactgtttcgaagagttaatggaaacaactaatgacatgtccacaaaagttgttttcagcttatttccatatgttgtctagaaaagcttatgaaaatcacttgtaggaaaacagtgtgacttcattttatcttgttataaaaatagcttatacatatgcaattttatgataagtgtttatctttaaattcttacataagatttctattttttaaatgtctattccaccccctttggattgcagcaaaccaacacttac

SEQ ID NO: 33950 - DNA, 749 bp, Medicago truncatula
  Intron number 1 from transcript Medtr5g022180.1 (locus Med tr5g022180) derived from phytozome v7.0 (chr-ID MtChr5; po s 8625341 to 8626089)
atcctccgtccgccacctgactctccaagcctcgggttcgttttctaacactcgacagaacaatctgaatgaacgaatctccttttttataattagggttttttgatgttggattcttttatatgaatctaatagtgtttaattggttgattgattatgaaattgggatttcttcctcgacagatttcttccaggttcgttttctaacactcgacagaacaatctgaatgaacgaatctccttttttttaattagggttttttgattttggattcttttatatgaatctattagtgtttaattgattgattgattatgaaattgggattatgagtaatatattagtgttgtgaaaccattgttagggttttgaagtgtccaaaatttgggattttgtgattatgcaattacgcagttggagattttttttggtccgaaattggtactaattttgtgcggccgatcgaaagtgaacttaaatatatgcgttttgagttccaaaagacattacttttcataattagtgttttttgatgaagataataaagactcaatatagatagcaatagaaatataattctgtctgcttgatgcaaacttctgattttctccgtatagacaattaactgcaattccttgaggctacagaaaaatttattcctttactttagaactttgaattgtactattgaccatacaagtcatagaaatagtaatcatctgtggaccttcataagatttacaggtac

SEQ ID NO: 33951 - DNA, 960 bp, Medicago truncatula
  Intron number 2 from transcript Medtr2g074620.1 (locus Med tr2g074620) derived from phytozome v7.0 (chr-ID MtChr2; po s 17234665 to 17235624)
gttcatcgaccgttctgtttctctccatttttaaggtaaacatgttactcctttttctgtatttccttcctgtagtagccatggttgttattagggagtgtgatgtattgggtagggttgtagcatgatgtagtaaatccgcaagtgcacggtttaccggtgtagtaataagagtactgttccgacagggagttgtttaattcaattaacctttatgaatgattagaagacagttcacttgaaaagttgggatttttaacaatttaaaaaaacaataataagaaaagcgtcttggaattattggtccgtcatggtgagaaactcttcataaaccaaaccctatacctagaactttatgttggacctattttctaaagacaagtttctctttagcctatcacatctccttttggtctcagtgggtgtgtttctctagaaaccacgcctattttcatggttgattgctattgaaatccttgaagctcgaaactttattgtctcaaggtttgctagactattttcatgtttcgcaatcattgtctaaattcacctgttccaatattaaaacttcatcttttgatccatcgcttaatatttttgatgaatcagtaacaactattaaacttcatcttttgatccatcgattaatatttgttattgattataagaacggtgaaatagattagaaaatagatttacataaaattagggttcaaggcttggtttgattaggattaggtcattggacttatccaacaatcccaagacaagaagagtctactcactcatgttcattgtagacatagaagagaagaagtgatgagtcatttatatactattttaatatgctttttagtttagttttatttagattttatataattttatattagtattatttcctttttaggatagtttactttaaattgcattttattatatttcaggaacgaatattgg

SEQ ID NO: 33952 - DNA, 451 bp, Medicago truncatula
  Intron number 6 from transcript Medtr2g074620.1 (locus Med tr2g074620) derived from phytozome v7.0 (chr-ID MtChr2; po s 17245769 to 17246219)
ggtttctagtatccacagtaggggttatgtctagtaggggttatccacagtatgggttatgggttatatcaggtttatcacacagtaggggttatgtctagtataacccctacagtatacataatttttggaagaaaaaaaaaatcaaccccttgtagaaacccataaccccaaatgtggataacccctagtagacaaaacccctactttggataacccctacttgcaccgagcacttggaaaatttgcaaaactggacattagaccaaagaattaaaactcgtctagaagataccggtttttcacatttcaacgaacttgcaaaatgtcaacatgataaccagcttatggaatgtgtggtatccaatttcaattcagagagatgtagatttgaatttaatgttataaaattagtttttgcacattacaggcaagcctgtcactgggatca

SEQ ID NO: 33953 - DNA, 586 bp, Medicago truncatula
  Intron number 3 from transcript AC233683_8.1 (locus AC2336 83_8) derived from phytozome v7.0 (chr-ID AC233683; pos 50 336 to 50921 reverse strand)
ctctaattgctttcacgcctgcaactgcacctggggtatatctttgatgctaattctaaatttctatatcatagttagtagttattattgtacactgaaactaaatgcatatatgagagacaaaagtgattatagacagataaacttgattttgatatgtttgagttttcgaataaaattgactttgcctctagaattcattctagcctaaaactgctttggagcttttacctccaaacatgatttttagcctcagatttattgtctaacagtcttttatgtgaatgtatacaaacataagtcgttttgcgctcaactcacttttaaccaaagttaattcatccaaactcaatttttgtcaatgcaaaaccaaacacacactaatatttgttttctgagtataaccgtgttaatatctacggatacttaaaaataattatttagttctcattgtgtgtgaagattttcttcaatttttagttctcattgtgctctttcccactatatcattggtttgtgccttaatttatgattttttgagtgatatgcaggaactgtcagcacgtcattaggttcaaagaaacac

SEQ ID NO: 33954 - DNA, 514 bp, Medicago truncatula
  Intron number 3 from transcript Medtr3g133130.1 (locus Med tr3g133130) derived from phytozome v7.0 (chr-ID MtChr3; po s 33647371 to 33647884)
actctcctcactttgcaggtttgcattgcatgcttaatctatctttctcttttatgtattgatatgcatgtcttcaattctgacttatatcttccaagacacttagcatgcatcattaattattatgtctatatttattttaaaataataataataataaattaatctagtaatttaaaacagacttttttttagggacaaacagacttatatttaggaataaactttacctttccaaaatgcttatattgttagtgataaatcataaatgtaattcctcctaccttaaatataatcagaaaaaaagtatatatatttggtccaaatcatgtttacatatacttttcttgcttatgtttaaggctcgagggagtatctaataatttgattttcttttttttatttaagtaggtttaaattaagggtcagatataatattgttttttaacattcatttattgcttttttgtctttcttagcaactggttaccaccttgcttatacactttggtcg

SEQ ID NO: 33955 - DNA, 671 bp, Medicago truncatula
  Intron number 4 from transcript Medtr3g133130.1 (locus Med tr3g133130) derived from phytozome v7.0 (chr-ID MtChr3; po s 33648072 to 33648742)
gggaaggggagacctacaactcaggtaatggtttctgtagttttcttaattttttgtttgttaatgtcaaagctttgtttattctgccaccttttaagctagtttatgaacgataaacaacaaaatctcgtgattaaactgtggtcaacaaatatcaaagagggttattagaaaaagcatttgttgcttttaaagaagaagaagaagaataaccattggcaacagggctttgttaatgttatgaagagggtgtttaagctggtaatacaactttgatcttcgtgtggaaacattattcccaaaatggattctgaaaattgaagaagggaaggaaccttatataacagtagtgaacagtatcaaaatgttatgtttgtttgattgggtgccttctgcctactaagactattgctagcattatattatatccctctcttaagctgacaaaaaatcttttgatgtttagatttatcgtcatttgcttttatcttaatgaatttctggtagagtagacattatggaatctcaatctaaactacgattgtatttattttgcgggggctgttttgatttctctaccaattttagtaaagtttacactgaatagaagtggtgttcctttctgtcatatatcaggtgactctctcagtgatattgactgctgctggagt

SEQ ID NO: 33956 - DNA, 956 bp, Medicago truncatula
  Intron number 1 from transcript Medtr6g089050.1 (locus Med tr6g089050) derived from phytozome v7.0 (chr-ID MtChr6; po s 18080160 to 18081115)
caaataatgtaagtgttatttattttttttggtacaaaagagggcaaaagtccatataagtgttatttttaattgtattaaattattctttgcgtaatttttatatgtgatactaaaaaaatattatatgaacatatgtagttgtatgttattttttattattttttcaataattgtttgggtaaatttaaattacgcttgtcaaataattagtgatggtttttggatccggtaagagcgagcggattatatgatttgatttatacaggctacaataatataaagtttattttttcttgcaatatatattttccatagccacaatcaaaagtattgaattataagtctaattggtagagaatccaagcacccaccatttgtttttttaattaacatccggttcttactggaaatgagctctagtaattaggagttctaccaaaaagtaatgtaaatttgattttgtaaaaaaaaaagtaatgtaaatttaacaaaaaattatccaaatcaaaaatcaaacttagatttatttaaatgattcatcatttgatgaaactcattgactacttggttcaaacacctattattttgatcacagcctattaataattgttacatttgtttctaaaatattttcagaaatgcctataaaaatttaactggatttatttatatggaaaaaattcattgtaagtagataacaattaatctcactaccaaaaaaaaagataacaattaatctcaccgtaaaactatcactttgaatgttaccacactatccatgattgtgtattcttccacaaatatcagtaattatttttgtcctatgtaccattgtcatgtgttgttgacgacttgagttgttactacttactatacgagtatacggccagaaataggaaaacaaagccatttaaatagattatatctggaacagtcatcgccggtttcacgag

SEQ ID NO: 33957 - DNA, 632 bp, Medicago truncatula
  Intron number 1 from transcript Medtr5g088330.1 (locus Med tr5g088330) derived from phytozome v7.0 (chr-ID MtChr5; po s 34224072 to 34224703)
ctagtggaggccggtctcttgatcaaggttcaagcggggctttgaacttgactttttttctttcttgaggactagtttgaggcaaggttaagaagatcggtggttgatcgttaaataaagatggagacctgttgttattttagtcaaaattatgtgtttaactcacgtaaaacatattattggcaagatgggatcacgacacaattttctaccagccatggcaacaatattatgtacttttgggatcaagaaatggtgtgggtaaattgtagcgtgtttataaagtgtaatttttaaccaaattgataaaaaaaaaactcattgaaatcaaatgatggaacttttaggaaccatatatgctaaggatttagggtctttgggtgagatttaagggttagaaacatgtagtatttttaaaccaaaagagggtgctattgggaaatggttggtgccctatggggagagattcattggttgggaaacatacgagggacataagatttgtgaaaatcttgagtcatgttgtcaattcatggttgctgccttatgttgtctattatttatttctcaattgtcctaatttaattgtcaattcatgtcattggtagtaatgatggagatagcagcggagg

SEQ ID NO: 33958 - DNA, 572 bp, Medicago truncatula
  Intron number 2 from transcript Medtr5g088330.1 (locus Med tr5g088330) derived from phytozome v7.0 (chr-ID MtChr5; po s 34224763 to 34225334)
gtgaaggtactagtaatggtagagtaatggatagatcatacagaaagtgtggggaagtttaatcatgtgtgttgatctttccttgcagacacctatgcttgtgtattatgtgtggggctatggttcttaatcttgattagttatttagtggtctctgtttttgtgttgttatgagtacacaatttatgtatcttgacacatctccaaattttagtgactcacttctacacatttgatgtagcagagatgcagaaaatgatcatagaaagtgtagaaatggaaattttgaggaacctgcactaaaggtatggaaacatcatgatagctatattttaaatttttaatttaatagcaaatattgtcaactgtttttgtcttaagagttttgtttttggttttaaattcgttatttttgtcattgtattgagtttgattggagttttaaattcgttatttttgtcattgtattattcttgtcttttagaagttaaataaatggtggttttagtagccctttgtgttgagtttgattggatgtcttcctttttgatttcaggctatagttggaaggg

SEQ ID NO: 33959 - DNA, 997 bp, Medicago truncatula
  Intron number 1 from transcript Medtr4g133160.1 (locus Med tr4g133160) derived from phytozome v7.0 (chr-ID MtChr4; po s 31787710 to 31788706)
tcctgctgcatctgcagctccaggttggttatatattatttccaatggtgtgtttaatgtgccattcaacaagcattttcattgcaatggtgtgtttaatagtagttgaatggtgtgttggatgagagagaggttgaaccaattcaacacaattgaatgcagaccggattgccacgtggcgcgctgccattcgctgaaaactggcgcgtgagcgtgcagagcgcggagagagaaaataatttttggatagataaggacacgtggcacgttttaattggttgtccggattcttatcattttcataatttaacctcaattatttcgttgtaaattaaatttttttaaaaaaaaaaattataccaaaattcatgatttttttttctctataaatagagatttggttcttttgatttggacacagaaaaaaaaacccaagtttttcactatcttcttcttattattatctttctattagcaaactaattgaagttttaatcttatttttagtgaaatggatcccaataataaccatttcaacaaccaaaattattctaattacccatttattattgtgtgttgtgtgcttgtttgttgtcttgcattttaagctatttgtgtgttgcgtgcttagtttgttgtattgcattttaagttaagaaaatataaataaattatttaaataaattttgtttttacaaacaaaaaaaaattaagtgtatctttattttaatttaattaataatcgataattttaattttatataattataaaaacaaaaatataaaattaaataaagaataagaaataaaatgtggtggggtagggtgttgaatgaaaaaaccattggagaggtaaaaattgaatggatgttgaattaagagagagaaaatgatgtggagtgttgggaattgataaagtgggtgttgaatggtattattgtgttgaaccattgtacatagagactgtccaagctgcataacttcctgattgagggca

SEQ ID NO: 33960 - DNA, 798 bp, Medicago truncatula
  Intron number 1 from transcript Medtr3g163930.1 (locus Med tr3g163930) derived from phytozome v7.0 (chr-ID MtChr3; po s 43156838 to 43157635)
gtatgcataaattccatatccgatttgaattttgtcttttactggactctttaagagaatgggtagctgataggagtatctgtgacctgacatagctttattgaactcgtcaactattcaaagatttaatgcccgattttcgtcctctttacccgttgcgcgtatgcagattagagacacccaactcacaacttttgtctccctttcttcctctctttgccattgttgtcttgcaagtcgatttgtgagaggggaatgaaagtgaagaccataaaataagctattggcaatagaagtaagattgaaatcaggctgagggtaattagatcaaaaatacaaaatggatcgaagaaatagttgcatctttgaattaagggtgtgtgaatgtgactttggattgtggtggttgattttggatcctgtttagtttctaaattgtcaccaagtctgaaagcttctgactattaatttataaattgtttctttcgcatcaaggttatactaattgaagggaaactgaaaatagataaacttgactcttatgtagaagaaaatggagaaggaacaataagctctggtgcgaaggctgaagggagatgaaaaatagaaaccaaggcgtgtgaaaattctagaagcagaggcactcgagtcatttattttgatcttaatggttgataataaccctctcactccaacataaaaatattcatcctcgttgatatgctccctaatccctatagtgtatatatgtggatatgctctgaacacaactgtagattcctcaagttagagaggatt

SEQ ID NO: 33961 - DNA, 425 bp, Medicago truncatula
  Intron number 1 from transcript AC235667_10.1 (locus AC235 667_10) derived from phytozome v7.0 (chr-ID AC235667; pos 31092 to 31516)
caagtaaatccacaaatcctttgctttgtttgtacataactttaattctgcaaaaatgtgtttatttggttttgtttatactttatatgattctaaggaaatcagagtttctggtagttattttttgtttctgaacatatatgtgtcgaggtatgacaaatattttaaactttggttgaagaaaattttggttatactgctgcagtagataggatcaatttaaaaaatgtacacatcacctatgaaacaccgacatacatatgtacaccagacacgatagtggcttgtcgacaccaataataattagagacgattgagttcgactcaaaccacatgtgtcggacacctaacacacctttaatttgaagtttttgtgctacatagtcactttgtattctttgttaacagggtgtatatctgaaaca

SEQ ID NO: 33962 - DNA, 798 bp, Medicago truncatula
  Intron number 1 from transcript Medtr4g096520.1 (locus Med tr4g096520) derived from phytozome v7.0 (chr-ID MtChr4; po s 20338275 to 20339072 reverse strand)
atctcggtgaccttggcctccttcagttcaaagatgttagtattcatccataaacccttctctacttcgttttcgattttattttcttcttaattgcttctactttctgattagtattcattgttctgtttattgatccttttcgattgcttgtttcatattttttattaatcggcttatttttttgatctgattaagctgccacttgtttttcacgtgtacgtaattggtttatgtgaaatcttaattatcatgtttttcatttgaattgattagttcattgaacttcattgtggttcgatgaaaatagtctttgatcatacgattttcaaattgaagatcttaatttcgcatcatattgttattgcgctctgttgtacttaattggcgtatgtgaaagcttaattatgatgttttttttatgataattgattacttcatccaacttcatcgtggtgcttttcaaatcgttggtgaaaaattgaaaatagtctttgataattgaattttcatagtccacgatcttaattttgcatcacactgttgtttcactttttttatatatgttttttttgttcttaggtttatgtttgtatttgatagatttaaataggactgcatagaatatgtaatgcaagcatgaaatttccagcaacgaatcatgtggtcctgttattttaatttatctaaattgaagcgtggtgatgagctggattttgaggtttttctaagcgtaatgtgttctttcttatgatattttcagcttaattcagagaagagcccttttcaacgtactta

SEQ ID NO: 33963 - DNA, 587 bp, Medicago truncatula
  Intron number 1 from transcript Medtr4g111540.1 (locus Med tr4g111540) derived from phytozome v7.0 (chr-ID MtChr4; po s 25576858 to 25577444)
gctaaagtcgctgaactcgaggaagatctgaaggagtgataaggtggagcgatcttatagaagaaggacgaagaaaacgaatgaggaaagacctacagaaaaagaggcttgtctcttttgtgtctgatatgtgaaacactcttgtttcttgtttttcttttttattatggctcctgttctatagtatttgatataactatgcagttaactgtttgttaactatggtaacactataacaacttttctttattggagcttctcttattcttttagtacttcttcatttttgctttttctatttgagaatagaatttcaggttgcataagtcaatgacagcaacctcgtctgttaaataagtctctgttcagccctaattgcgcattaatgagtgtaccttagtaatagacatgtttgcgagactcactgtgattttaacctgaaactaactgatgtatgtttttgttttggagtactgatgcattttgttgttgttttttttttttttttggtgtttcatgaagctctgtgttgtgttgtgatgtgcactccaggtccgttgtgaattttctctgcttgagttagttct

SEQ ID NO: 33964 - DNA, 525 bp, Medicago truncatula
  Intron number 2 from transcript Medtr3g103120.1 (locus Med tr3g103120) derived from phytozome v7.0 (chr-ID MtChr3; po s 25309063 to 25309587 reverse strand)
ttcataatttggttgcatccgtgccactcgataaggtattatcgattcgcttctttatgcttcactgatttcattattcttgtttattttctgaatttcgtcttcataacatgctcacttttgtcgcgaaaatgatttttgaaatgctgaaatctataattcgtggtcaaattttttatttggaagaagaagaagccttgtcattatttttacatagttattttgaaggattaaatttgtatacaccgtcaatataacaaatttttaccctgtcaatcatactcattacatcattaaaaacgtttgacttgtatcctaactacttttaaagtcacacatattacatatagatggttgtgatatgctgatagttgtaaaactttttacactgacagtgtatgaaaattaaactctatttttgaaacatgttcttgctgtttgtatttaattctctgttgtttttttcacctaccgtttcactaagtggattgtgttacttgtattgataaaaactgcaggttacat

SEQ ID NO: 33965 - DNA, 914 bp, Medicago truncatula
  Intron number 2 from transcript Medtr2g117040.1 (locus Med tr2g117040) derived from phytozome v7.0 (chr-ID MtChr2; po s 27417139 to 27418052)
aaaaagagttacaagtatggttttttacttctttttatttttaatttttttaagttcattctcttcaatatatgtgatttcttcatgctctgctataatctttatactttgtttaatgtactgcttttgaaataaatttgaaatgcgacgaagtcactacaatatcctctttggtttgagaaaaaagtttctataagcattttcagtttttatttccaattgcaaaaatgctatcttgtttttttactttattttcaattaaaaaaaagtagtgttatgtattcaaaccaagcatcgttaaattgatgaaactacaaacattatgatccttgtgaattgtgttctagaaaattctgaatgtctcaagctgaagtgaaattgggttgccatagtgaattggtgagtgttagccgtgccttggtgactgttagattcagatcaaatagttcacaaaatatgtggattttgttataatcaaaattaccgagcttgaaatgcggacaatccgatctttatgcaacgctcaacactcctttctgacggttatgcattttaaatgtttaagatatttctgtgtttttagttcaatcatgccaaaatcaaacatgaattctgttttttacatttgcatattggcaaactaatgccaaattttgagtgctcattatgccaattttgtatgtaacaattattctatcacatggcataccaagcctttagaacataactcaatgcatcaattattgttgtacttgtaacaaacacaatgaagaagacttggaaaataaaactgaaaaaagtgactcctttatatcttaattttatttctttccgagttatcttgttctgctgtttttcatcattccttattttgtatagggaactgttgttcttgtttttcaaccagcagaaga

SEQ ID NO: 33966 - DNA, 757 bp, Medicago truncatula
  Intron number 8 from transcript Medtr1g083990.2 (locus Med tr1g083990) derived from phytozome v7.0 (chr-ID MtChr1; po s 16759176 to 16759932)
tcttccactgagtcaatcacaaataccaatattaggtgattcagtttttcccgtctcttttcttttggtggtgggtgggggttaatatcctagttcccctcctgtttatttagtgtgtgggtgagggactttgtaggttgactttgcttaattccatattaaaaacttaatgaactaaagtggacagttctacagatctgtggttgagttaagtatattctaaatttggttaggttctcctgagatactattgggaaaaacccaagtctcacgtagaaaagataggactcttgataagagtttataaagagtggcacctctcaccttacaagccggttttgtaaggatgaattaggcccaatataaaaacctaatagatatgaaagagaaaacaatcaaaacatcagttttaaaacaaaattttctgtgttagtggggtgcttggaagtcgagtattagtattcactcctgaattttgacaaatacttcgcttggggaaaaaatccttactactatttagtatttatgactaattgctggagagtcttctcagcggcatcctctgaaacttgcttaaaaatcataaaaagaaccggttttctgaaaatgagatcatatagaatgttgtataagtcatcagttgagcttgttaattatttatttttattatactattgtgagaatgtgtgaaattctgtctgttatgccaatactttgaagtttatctatattataattctatgttgtggagcaggtc

SEQ ID NO: 33967 - DNA, 477 bp, Medicago truncatula
  Intron number 2 from transcript Medtr1g031870.2 (locus Med tr1g031870) derived from phytozome v7.0 (chr-ID MtChr1; po s 7814496 to 7814972)
ttggtcgtagattacaggtaattggatctcatggtttaaagcacacaacagtagtcgttgaatattaattaattaattattattgtgcttcaatgagtagtcacatcacatgtcttgttttttttgtaagggacaagtcgttgtttatttttactatttttaatactaaaactcatctttttaaatcatctgccaaatgaaaataatactaataataaaaggaatgattccgaggtaggtttggaatatatcattattccagttttattaaatacgattttatagtactaaacttagaaaaaaaaaacaaaagaaacagatcaacagtgtgtgtaaatttaaaattttaatacccaatttttgaatcactgttctactaaattaatctaagagatactctaatattttgagtacacacatggttcatgacatattttgatgtgaagatatgtagtacacattccagaaagcctacca

SEQ ID NO: 33968 - DNA, 313 bp, Medicago truncatula
  Intron number 1 from transcript Medtr3g110300.1 (locus Med tr3g110300) derived from phytozome v7.0 (chr-ID MtChr3; po s 27771102 to 27771414)
ttttcctcaaacgttctatcagtctctctttcaatgtaagtacttttctcttcttcatgctttcaatttcttataatcactgcttcatttacttataaaaatcctcattttgtgtgtgcacaatcttggaataactgaattagtgtgtttgatttgataaagatagtttttttaaatatgggggttttgtgattagggttttttggtatgattgcaaaattgtaaaaatcacttctttgtgttttgtttgttaattattgcaatgttgttaattgcaggttctttaattattgaaattttgatttattttgtt

SEQ ID NO: 33969 - DNA, 511 bp, Medicago truncatula; identical to SEQ ID NO: 29469
  Intron number 2 from transcript Medtr2g009920.2 (locus Med tr2g009920) derived from phytozome v7.0 (chr-ID MtChr2; po s 2276435 to 2276945 reverse strand)

SEQ ID NO: 33970 - DNA, 1029 bp, Medicago truncatula; identical to SEQ ID NO: 28712
  Intron number 1 from transcript Medtr3g044450.1 (locus Med tr3g044450) derived from phytozome v7.0 (chr-ID MtChr3; po s 12399577 to 12400605 reverse strand)

SEQ ID NO: 33971 - DNA, 893 bp, Medicago truncatula
  Intron number 2 from transcript AC225530_5.1 (locus AC2255 30_5) derived from phytozome v7.0 (chr-ID AC225530; pos 46 455 to 47347)
ttcaaagctttgattaagaaaaagattcatatagggtgagatatgcttataatacaatttgtcatcgaaaaaaatgggaataactttagtgttaaagggctttagcaaaggataataatatgcatatggtggcttgaaaaggctttatgtaccagtaaaaaaacacattaatatgttcaaatgtaaagaccaatcagctatggagaatgaatgcaattcttgaaactaaacacatggagggatgctcacatatgaaagaaaaatagtatacaaagaatatatattttagatcaaaattctcataacaatgatttatgtgaaagttgttccaattagaacgtccaattttttcctcttttgtacccttcaatccatatcttgaactttcatgatattctacgtaatctcatcttagtgtgtatgcaatttagaacttagactttgaagttctcgtaatttagaacttagagttttaagttttcataattatcattcagcgtgactaaccgagaaaatgtcatggccctttatgttacaatggggccaaaggaggtggaatctacgaaggagttttttctttacttggctttttatgataatagatagatggatatgtaaaaatgatctataaccacaaaaacaaacagatattattttctggtaaacataaaagtcttctattaaaaatataataaataaatgctaacttattctcttagaacacaagtataaaaactaaatatataattttttttctttagcattcaatattttaaaagttttatagttttatttatacatgtcaaatataaaagttatttttaatttcttttttaactttttaacttatgtccttagacgctttgaaaagagaaaaaaagtgtgcacttaaa

SEQ ID NO: 33972 - DNA, 775 bp, Medicago truncatula; identical to SEQ ID NO: 29020
  Intron number 1 from transcript Medtr1g117320.1 (locus Med tr1g117320) derived from phytozome v7.0 (chr-ID MtChr1; po s 25112117 to 25112891)

SEQ ID NO: 33973 - DNA, 601 bp, Medicago truncatula
  Intron number 1 from transcript Medtr5g092740.1 (locus Med tr5g092740) derived from phytozome v7.0 (chr-ID MtChr5; po s 36390881 to 36391481 reverse strand)
tatctgtcaaggtagctttggaggaacccttttggacacgggccctcattccggctgagttaaagctagaaggcttcactttattcacttgcttcttcttctttctctccaccttattgctctcagattaacttggatagtgctactcagtctcaatcgtgtggtctagtctttcatcatggatgagagtgtcctccaacacctcttttgacttggagtaaacatgttcattttaaagcatgttttattaattaaagaaaagataaaaacaaaattaatatattattaattttaaattaaaaaatcaatttttaatattagataaatcacgcataactatatgtatgaacattatttttggagtcatgaatttcaatatgctcacaacaccattaactatatgtatgaaacaccaatatatcttaaaaataatacatatttcactcattactcatgtattgaaaaggaaaattgaagtcatgcatttaaatcacaaactaacaacatgcaaaaataattgatatatcatgctaataatagaccatgtcgtaaagaatgattttaattgtcttatattaacctccacacagtaccacagtgg

SEQ ID NO: 33974 - DNA, 997 bp, Medicago truncatula
  Intron number 1 from transcript Medtr5g078800.1 (locus Med tr5g078800) derived from phytozome v7.0 (chr-ID MtChr5; po s 29207711 to 29208707 reverse strand)
tagctgttgctgctgatttttatagccttggaagggtaagtgtaattagcttcattaattcatattatgacttcttattagttttttaaacaataatattagcatttgtgatcttatttatcacttcattcgttaatagtatgtacattacacattgcatgtatcatgtatgcacgtgtgtaagttatatgtgaactcaacttaatcgttattagttgtttcttgaaatgtgttattagttataaatatttattcaaatttcaaacatcttttaatgtttctatttcacaagaaatagatttcaagttagaagaattacatccctcaaaaaaatagttagaataattattttttaaaggaatgaattatatattttttttgttaacccttcgattttcagttaaaaggatttcaatttttaaagcaatgaattagatttcaactttagcgagtttttcttacgatataagggagaatcaccaagctcaaggaaaatgtacaaggaaatccaccaatgacctttaaattgtacgagagcacaaaaaatttcgtcattttccttagttaaataatccaattttttaactataaaatttatagctttttgtataatgcctagcataagtagtgtctaaaaaatctttatcattatcattatacataagaaagttttttttttttttttttttgtaaaaaaataagaatggtttgatagccgtgagaaaaaggtagatattgatatgtgattgtaggattaaagtaattcaaaatgaaagttatttgaaaaaaatattaaatacgaaaaattgacgtgcctttaaataattaattattgaataatatactcaaaaaattgtcatcatgtatgaaacaagaaaactaatgtgattttacctcaaaagaaaaaagaaaatatgatttagttgtttgtcaaataatataattgtttttctgcaacgtagccttggatttttgctttgagcctacttggacttgc

SEQ ID NO: 33975 - DNA, 509 bp, Medicago truncatula
  Intron number 2 from transcript Medtr4g158230.1 (locus Med tr4g158230) derived from phytozome v7.0 (chr-ID MtChr4; po s 39630099 to 39630607 reverse strand)
atcaaaggagaagaagaagaagctccagcctccaggtatgttttgtcagacaattccaaaatgtgatttatataacttcattcttctactgcttttgcaaattatgttcttcaatttagaggtagactttgttttataggagtcatgtaattttttgtgaggagggttgaaagggtcaaatttatgtcattgtaaaagttaaatagttttgatgctccttgtgttattatggtctgagaaaaaaaaaacaaatttggaactgattctatcgttaaaatgtgaattgatagtcctgattaaaattctagaaattatgtcatgtgtaactcttgctaattaaatcaagagtatttagatgaaaacatagtatgagatgatcctttaaatctaatattttatgtttcatggtgatgatgtcttgataattttttatgatttttctgtatttgattgctaatgaatttacataactaggagaagtgtgtttgagggtgcaatacctattcatc

SEQ ID NO: 33976 - DNA, 564 bp, Medicago truncatula
  Intron number 3 from transcript Medtr2g010530.1 (locus Med tr2g010530) derived from phytozome v7.0 (chr-ID MtChr2; po s 2588546 to 2589109 reverse strand)
agaaaagcattgaatcgaagagaaagagaagcgaggtagccaactattaacacttgtatcgtgaacaaatttttcaaataatttcttagtatagtaggtaaagttggggttttgaaaatggttttcaaatgcaatctaggttatgtttagataaacagctcaattatgccctttaagtgttcttcatataagtgcttaagcataagtctataagccatacgccatttatatgacaaaagatgaaacaaagtcaaattgtcttcatataatctataagttgtttgcatattttatcctgtagagcttatggaaataagctgaaaatagctatgaacatgccataagtggtttccattagttctcacaaaaggtataataagtgtttatgccggtagataatctcaaataagtcgatcaaaacaagctgctagtcataaacaatatcaagaatcctgatgtgattggactaaaaatcttgtgtagtagagcctttaaagtgacacaatttttcgctgttgttatttttcagttcgaatttgaagtgcccgaatactgctcctgcaa

SEQ ID NO: 33977 - DNA, 685 bp, Medicago truncatula; identical to SEQ ID NO: 29991
  Intron number 1 from transcript Medtr2g030270.4 (locus Med tr2g030270) derived from phytozome v7.0 (chr-ID MtChr2; po s 8351731 to 8352415 reverse strand)

SEQ ID NO: 33978 - DNA, 656 bp, Medicago truncatula
  Intron number 3 from transcript Medtr1g086910.1 (locus Med tr1g086910) derived from phytozome v7.0 (chr-ID MtChr1; po s 17355182 to 17355837)
agaagctaccagagtaattcttaagtttaactatcatagtattttttagatcatcaccagttttttttgtgggctacacttacagttacaggtcattcccagtgaatttattattttaggatcaaattaaagcaaaacatagttttttttgccgatctttagcttctttttttcctgggaactgcattttggacttgttagaaaactttacttgtattctatagataacaatgttacatttcatacgaagattttccatacagatttcattacattcatcaacatcaaatgtttttacaaaacattccaacaattgtttctaccgtttatgagtatgcatgctcttttttattcttttcctgtttgtaaagataaggtaattcaacaacaatgaaaaagtaatctttccaacttggttgagtaggctgcatggattaaagacaccattgtgtttcataaattaacttttaagaaatatcttttaatggtttttcttagagttcttttatattttgctctacatatatttatcgagctatcttctatctatttagtccttcttaaattggcctttattggttaggagaaaataaataacgtatttaagatttctttttacaggtacaagtttacattatttaacgaactctactttc

SEQ ID NO: 33979 - DNA, 707 bp, Medicago truncatula
  Intron number 1 from transcript Medtr4g098650.1 (locus Med tr4g098650) derived from phytozome v7.0 (chr-ID MtChr4; po s 21329273 to 21329979)
cctcaattttcaaaattaatattctcacaatccaggtgacattattataattcgatatactagaatgctatatatgcaaattggtggaaaaatttggtagtagaatttaatgaatatcatttatctttcgactagtttttggcataatatgtagacaatcaattttaccaatttcagtttgcaaaacaatggcaaagttacgaccatgataacaacaaacaagcaacgatcgggaatggatgtttagttccaatctaataagaagtaggcgagttagtaatctaataagaagtagaggcgagctaaataaaagaaaacaaattaaataatagttagtttccattgaatatgattaaatatgattaaaactctcaatttcttttatttatttacttcggaagtttggaggtattgttatatttcaaataaatcaaggttgggatactaaacaagcccgccaaggaccagatgaatgaaaggagagaactcgccaaacaatacgccataattaaacaaacatggaagaaacagtcccgccattgaaaacatacagatgaaacgcggaattacgttttaaaacaactttttcgacctttgagatttgttttgcaggtttttaattaggcgccctaatttcttatataattgtacctttgtttttattttttgcagaaaagaagactgtcgagaggacgcccaaactgggt

SEQ ID NO: 33980 - DNA, 803 bp, Medicago truncatula
  Intron number 2 from transcript Medtr4g133640.1 (locus Med tr4g133640) derived from phytozome v7.0 (chr-ID MtChr4; po s 32082387 to 32083189 reverse strand)
aatctattcaaggaaatcgtcaaacaccaaaggttagtttcttcttgctttctcacattttccttcatttctagaaaaaaccgaatgttgtaaatagctaaacacattctgtaatataaaagctctagaaatattaagtattttgtgtgtgtttattctccgattcttgatggaaagaaatcctagtaatctaaagtttaattgaaagataagtaaattttttatctagaattgttcaaaaaaaagctgcaatatcataactctaaaaattgttatataacttatttttgtttgaaagggcttatgtctatcttatgtgtatcaatcataagatattggattctgtcgctttcgcatatattcttttacgttgcattatatttttaaggttttatttgagaatttggaggggagaaagggagaggaggaccttggaagtgaaatagtatataagaaaaatggaaaaatctttaattttttttaaagtgtattttttatagaatgataaattaatatttatgattaatatatttttaattttagaatattataacaaaatagaataaaatttaaagaatttatataaacttctttcaatataatttttgaatttttcaaaataaaaaagattttatattatgaagaagaaataaacccataaagctaaatgttattgcttgtacaatctagaagtaatttttatgtcgtaattctaagtactatttactttaagtttcttatcctgattcagctaaccttttttctgtttttcatatcaatgtatcttcagctgaatttgaaaa

SEQ ID NO: 33981 - DNA, 610 bp, Medicago truncatula
  Intron number 1 from transcript Medtr6g008670.1 (locus Med tr6g008670) derived from phytozome v7.0 (chr-ID MtChr6; po s 1214016 to 1214625)
cctccgttactcctcatcgctcttctctccactatgttcttccacatttccgtttactttttttccttttttgtacttttttttttcttctatgcaatgtactcgaattaggtttttatttcttccttgaaacgtttttctcttcaatcttgctccgtgcaaagtttttccatgtaaaacctacacccattcaacgacgattcgccgaccactaccgtacaaccactcactttgtcgccccctttctgcatcttttcttgcacacgattcttaacatattttcttatttgaatctgagctttccaattcttcctatttgatctttgttctggttatcctggtgtttaatgtttgagattagttaactaattaaattaaattagatggtcatagatgcacacctgaacataaggaaagaaattagtttatgcgtaaaataaatttagagattgtatattaagaatttggaaggaattaaagatctgtatctacatggatattggacaatcccttattgaagatctgaatcatgcaaatagtctattaaaatcatgcaagattgaagccttatgcaaagggccttagcatgtgtttgttacgggacaggtga

SEQ ID NO: 33982 - DNA, 721 bp, Medicago truncatula
  Intron number 1 from transcript Medtr6g015210.1 (locus Med tr6g015210) derived from phytozome v7.0 (chr-ID MtChr6; po s 3757246 to 3757966)
cctcctacacctcccagagaacaacttttggacaggtaactcacgtatgattgcatttaaacatggttatatctcaaaaatggtaacgattttcctttattatgtgaagttttgagtatggttatgagtatcctacgatacatgtgaatcgtatctcgattcagtacagaattgaactcaatcatatgaacctctagtgcatatctatttttgacacgattctcatcttgaattctgattcattatgataaatctcaatttattctattgaatcactacctagtgtagtcagcttctttttattgtcaactttgtatagctggccacttttcttatgtgaattgatttatgacttgaatcttgaattgctttgagactcatatgatatatcaacttataattttgatatatcacctgtttttactttaaaatgttttcgttttgttggtaaacgtatcatacgattcataataagattcgattcacaatttgaaaaacacgttttctgatttactatttgaatctcaaatttgataactgtgatttcaagtgaagaactttacttaagtcaagcataaacaaaatttttcaaacataaaattctaaatagaacaatgttaaaaagttattaattgcattaggtatttgtaccatattcttcatttcaaattattaaatttgaacaggtactggagccatacggtgaattgcaagagttgca

SEQ ID NO: 33983 - DNA, 895 bp, Medicago truncatula
  Intron number 1 from transcript Medtr4g079760.1 (locus Med tr4g079760) derived from phytozome v7.0 (chr-ID MtChr4; po s 16135104 to 16135998 reverse strand)
gggtatacttccaaagaggttataggaagaaactggtaagctataattagtaactctcacttattaacttttatttatttatggataaacaacaatttgatatctgaatttgtgaggcattgtcatttagagaccaatgacaatgtctcacgcactcaatgacagttgacgatattatgttataatgcaacatctaatattcagaaactaaaatggttgttttttttatgaaatcaatatatattacgcactttgaaaatgaatctcagtaaaatggtaggatttacattgattttactctataaaagattgtattttagatagaaaaaatagtgtttatactcatcttttaaagtaaagattgattcttacctcaataaaaaaattaataagttcagttttttgacaacgtaaaaacttaataagatcatttacttttataaaataaataagtcatcacaattataaaatcagatcacattatgggccatttgcttttttaaaaaatatatctaattttttatttttctcttatcatgtcatgaatggaaggccatggcgttgaaaaattgtgacaaaaaggaaacgaatgattaactagagatcttttttgaaggagaatgattaaatagagatagtatattttttaaaacattgaaaataagtttttgctattttctaaatttctgaaaatacatgtgtgatttacattctactttaaaaggtgtgaaataatattgtgacatttttgttatagataatggtttagagtttataattctgaagaggtattcatatacaatttttacattgttaagtgcaaagaataaataattggttcaaatctagtaaactaatatgaattacgggtcgggtggggggatgaagtcgattt

SEQ ID NO: 33984 - DNA, 974 bp, Medicago truncatula
  Intron number 1 from transcript Medtr6g067180.1 (locus Med tr6g067180) derived from phytozome v7.0 (chr-ID MtChr6; po s 12395144 to 12396117)
aaggtaattttgatgaaggtacatgacaattttagaaagaaaagttgctatttttagcctttgatctggttagttagtttgtattatgtttgtttttgttatgttttttagttttactattacatttgttggaaatagtaattgttagttactaatcttgaatgtgtgtttatgttttgttttggatttgatttgattcatggtttggaagtggaatgtgtggacccttagcttagattccctttcagatcttaaattgaagatgtgtggatactttgctgtcatagtaatgtgaggtcggttttcagatcatttaacacatgatacatttgatgatgatattttttcctttacgagggtaactgatattatttgattcggaaatggagctaatggaagggattagtttttatcaggggtaaacgatacacatgattgcaattagttaattcattttttcaaatttttaccggtgttgatgtgtcagtgtcagtgtcatgtctagtgtctgtgttaaatggtctgaaaattgtcctgcagtatctttgtttggactttgtattatgacacgttgctaaataaggactcaaaattgtataatctgtgatgtgaaaaggatgatggttgaatttgcatatttgaaaattcagtagttttacttacatcctagttgtttaattttttttattgtttagatctttaaatgaattcttcattgcagaatgtaatggttttataaaatgacagttttaatttatctggtcatttaattgcatgaagatgtttcaagtcatcgatgagttctgtgtctaatgcatcacctggttttgtctttatgcatatgatttagtgaagcagggtgaatctattttgctaatataattggacacagactaatgacattttgtgaaaatgtataaaatggttatttattaactcatatgatttatgcatttggaactattttgtagata

SEQ ID NO: 33985 - DNA, 479 bp, Medicago truncatula
  Intron number 2 from transcript Medtr2g104470.1 (locus Med tr2g104470) derived from phytozome v7.0 (chr-ID MtChr2; po s 24643556 to 24644034)
aaggtaatttgctagcatatgattttttaaatttgattttgttgagaggtgaattcattaggataatattcatatctgaaatttttgttttaaaacttgttttatttaaaggggtacatttttattgcgttcatgaagtttttttcttctgactaatcataatatgtgacacattaggcgtttcaacgtacctcacgactaaaaatatttgaacctgctatggaactaatcatctcgtcaacaaggaaacctatgtttttttatatgggattgtgctatctttctaatagatagactttagaaatcaaactcattcttttttttttaagggacacctgttttacgaactcttttaacactattctgatgaacaaattttacaagagtcgagtagatgaaatttttattaccatctcatgaaatttttgttgtctttatttgcaggaggaatacgggtacctcaaaagtaaaattgagaa

SEQ ID NO: 33986 - DNA, 802 bp, Medicago truncatula
  Intron number 2 from transcript Medtr6g033420.1 (locus Med tr6g033420) derived from phytozome v7.0 (chr-ID MtChr6; po s 7391146 to 7391947 reverse strand)
ttatacgatcttctcatcatcatcaaaggttataggtaattagtcactattataattttgttgtaatttgcttgcatgtttccataaaattgttttagtgattttagggtttgatttcttggttttgggtttgttttagtgattcgttctcccaaatgaatgcattgttagtttttaaggttttattgtgaaattctctctcttcatgtctgattttgtgatagtaccgatgtggaacattgtaagcttcatctagatgatttttatttttatttttgatcaaaaaatggagagttttgcaaatttataaggatggttttgtttcaattttctataaatattgtttttggcaatgaattagatagttggtaggtaagaattatgtgattttctttcattctggtagtgtttagttgaaggtaaaattatatttgtcctaattttgcactattctctttgaattttgcaattgaatcattaaattttataatatgcatacggtgactcatgttcatctacattctttcatcaaggatcattttacatgtttgattgaatgcctcatggattacttttacaactcatgttcatttagggttacaaatgtgtgttttatatttaggctatgaaattgtgtccaagtcctgttaaattcttcaatgaatccttttatttaagtttcaattctctaacaccattatgcaaggtattgagaatagataaaacagggctcttgattttgttttatttatccggattttttgtaggatatactccgtcccgaaaggtagtaccgacaaac

SEQ ID NO: 33987 - DNA, 654 bp, Medicago truncatula
  Intron number 1 from transcript Medtr6g033420.1 (locus Med tr6g033420) derived from phytozome v7.0 (chr-ID MtChr6; po s 7392001 to 7392654 reverse strand)
cagaacctaaggtaacttattttgttctatcatatgtttcttggatctactgttttttctcctattaaattgtgtatttttttctgctactagatctatgagccatgcgactaatctcagcttaaggactattgtatcaatttacatgggctggtttgacttcataaaaaagggactaccatgtcaagaatttttttactcctgtgactttcatttctcagataaatgagacaataaacaaacaaagaagatatgtttttgctttcttttcaattcaggtacaatcttgaatatatgtatgtcttcttttgtatttaaaattattttcatttttttcttttaactagagtagtattgtcagtattttctttaaatttgtagaatatattcttttaaaattgttgattggatggcttataatgctttgtaaatttcctctaaatggaacatagttttatattgtattcaattttttttttatctactaactatattaaaaaaataataccagcgttttttcccattttgccctattggaggtgctttggtaatttgataattgctgaattcttttggtagacacatcatctaccattggctatatatcaaattgttgtagtggtgtagtgacattctctctaaatcacatcggga

SEQ ID NO: 33988 - DNA, 378 bp, Medicago truncatula
  Intron number 1 from transcript Medtr5g035580.3 (locus Med tr5g035580) derived from phytozome v7.0 (chr-ID MtChr5; po s 14705019 to 14705396)
atcacacaagagaaaaacacacacctaaaaacaaggttcgtcttataaataatgcaattcttttctaattccaataccagattcaaatcaaatcatgctagtttatacttataatcacctcaattcacgtcacaaattttatatattgattgattcatcttcagtcttctcttgtctttgtttcattaatcaattttcacgtatgtcgttaaattcaactcatgcataatatcgatcaacaaattatttgatcgttaattttccgtcaaaaaaataaaattgatccattcatttatgttacaatcatcacatgattttggtgttaatttatattaacgggatcatttgttttttgtatgaaaaaatcagaaggaagac

SEQ ID NO: 33989 - DNA, 442 bp, Medicago truncatula
  Intron number 2 from transcript AC235092_8.1 (locus AC2350 92_8) derived from phytozome v7.0 (chr-ID AC235092; pos 28 178 to 28619 reverse strand)
aggtgatgaatatttgtatattattagaacaaatataagcagcggtggtcctgaggtgggcggaaaggccggcagtccaggggcaccattttgttgaaatatagatatatatttctttttaattctctttgattaattatattgaaaatatatttttagagaactttgattataaataaatcttttgcaacaaaaaatgtatgaagaaaaacattagaataattaaaaggacaaaattttaccgtttcgtttagggcaccaaaaatcttaggatcgaccctgaatataagtctcatttttgtataaaataacatttttctttctttctgtttttggatattttaaatgacatttttactacttttttctcattatgtatacgtaataagtttgtgtgtgatatgtagataatagggaaggacttgtttaaattgctgaagga

SEQ ID NO: 33990 - DNA, 643 bp, Medicago truncatula
  Intron number 2 from transcript Medtr4g029120.1 (locus Med tr4g029120) derived from phytozome v7.0 (chr-ID MtChr4; po s 6888601 to 6889243 reverse strand)
ctaactagtcagataataattatttggctttcaaggtaatgattttctttttcgtttgttagaaaatgataagttgtgcattttcttaattgcacaacttatcatttgtatagttacaaaccttgccggtacacacgttcaaacgtcaatcataattgcacgttacaaacctcgaccagtacaagcctttgataatatatacttttgatctttaacttaagtaattatgataatgatttttttttattttttttagctttaggaggccaaaatcaaattccaaatgtctttaaaattgaaaagcataagtttccaagttttcttagtttatatactgatttatattactatatttccctttgataatgatcttattgtaatacattaattttcttttcaatttaagcatgttctctaggaatgtcccccatttaaagctgattgaagttgataagattcatgtcattaatttacattctgaaaaataacttgttcataaaccccatgtccctataaccctattcaccttatgtttatgtatcgattattatcgaaaatatttgaattctgaaatattgtttctcattttttattccttgttattttaggcaaaggaacaaatttcagagttaactgaagagag

SEQ ID NO: 33991 - DNA, 245 bp, Medicago truncatula
  Intron number 1 from transcript Medtr4g136470.1 (locus Med tr4g136470) derived from phytozome v7.0 (chr-ID MtChr4; po s 33334179 to 33334423 reverse strand)
agcaccgacctctgtaaaggcatacccactactaggttccctcttttcctcacttcctctctttcatttttcttcaattggcttgtttttttagtgtaccctttatgattattttgttgggtttttctctaattgattatttgactctaaatcaatggtaaaaatttgatttttaataatgggttcaattgggtcagaaaaggggttaactatgtatattgtgttacaggcacattgagtattgt

SEQ ID NO: 33992 - DNA, 528 bp, Medicago truncatula
  Intron number 2 from transcript Medtr4g159240.1 (locus Med tr4g159240) derived from phytozome v7.0 (chr-ID MtChr4; po s 40126911 to 40127438 reverse strand)
gtggtggtctcccgttgttataccaattcaattttatagtactgatcacttgctaacaccttaatttatgttgtttctgtgtggtttacaattcattaggcggccaacatattcaaatattacattctcatttgtttaagtaaaaaaaaacttagataaaatttccatagaggaagcgtctatatcctatacatatcttgtgtcttatgactcttcaaacatgattgtgttggtcgatactcgtggttcaagtgacatgttaagttattaagataatgatattttaatgtctcaacaatgtcatgttataaaaaagtgtggcttagaacatgtaacataaatttttgtagaaaaaaaaaagactaatgttgataacagaaaatttagaggtatcaacgctcttaggaaatttagcttactaaccaagctaactacaatatatttttgtattaataaactgtaaaaaaaaagaaaaagttttttcattaggcaggccaacacgccaaaaaatagggcaagccaaaaatt

SEQ ID NO: 33993 - DNA, 777 bp, Medicago truncatula
  Intron number 1 from transcript Medtr3g020800.1 (locus Med tr3g020800) derived from phytozome v7.0 (chr-ID MtChr3; po s 4811742 to 4812518 reverse strand)
gcaacactgttcaaaggattgaagcttctgtaactgtaagtcaaatttcacttttcttccgtttttactttctatggcacacgattcaatcaaacagggtagttcaatttcataattcatctatgatattttgatttgtttttactataatatgttaggttttaagaataagaactacttttacttgtaatgaaaagtgattttattttatggagattttgtaggttttggtagtgtttgaattgatgtatttgctcttgtatactgccataagttgtttgccaagaacttattgaaacagcttatgacatgttaataaggtgttttcagcttattttcataagtcatcgaagatactgatttaacttgattttcccatttaccctttgagaaggataccaaagtccccggccaaaccctgaataattatggtgataaaatatagtttgaatgttaacaatgtgatgtgaacaataaggaaaagttagagaagtgaagaagttaagctcaatttttaattatgagttcttacttttccacaattttcatataatttacagttacttggttcacactttgagtgggaaatactattaatttaatagcttagtactagttttgatcaacggctgtgactccttcgcatattttcactaattttcattcgctatatttagcattttccttaaatgttatatatctattttgccaagtgagcttgttattgatttgttcgtttcagttccagttcgtgactcttttgtgacttgttaatta

SEQ ID NO: 33994 - DNA, 984 bp, Medicago truncatula
  Intron number 2 from transcript Medtr5g092880.1 (locus Med tr5g092880) derived from phytozome v7.0 (chr-ID MtChr5; po s 36450640 to 36451623)
ttgtaagttcccatttcttaattactattgtgtatgtttggttttgcattgagaaaaattgattttgactgaattgattctgactgaattagagatgatggtaaagtgatttatgtttggatacattcctgtaaaagtgagtcaaaaactcaaaatcgatttttgagatgttgatatgattctaacttgaagctagaatttagagcttttaattctaaaattgattttgacatatttggttgctcttcgagtacaattgatcataacttgaagctaaaatttggagcttttgattctaggaattgattttgacatatttagtttctccttagtagaattgattatatattgaagctagaatttggagcttttgattcttagattgattttgacatatttgattgctctgtaatagaactgattctaacttaaagcttgattttggagtttttgattctaaaattgattttgacatatttggttgctctgaagtagaattgactctaacttgaagctttttattctaaaattgatttttacttcaactcacttttacatgtgtatccaaacaaaaatcacttcagttttagctcacttttagtctggattaatcaattttggtcacagcataaccaaacacacactatgtatatgtttaattctggaagtgtgaaattgattttgacatgcttgaacgtttttgtctagaatggactctaacttgaagctagaatttggaatttttagcctactattcattgttcaacccttttctacataaatatatccaaatgtaaaccattttacattcaactaattttgttcagaatcaattttacaaaatcaatttttaatatttaatcaccctagaatcaaacacagtcttcatatatggttactgggaaatgaaaatcatcatgttttttcactcctcattttctttgtgcagtttggagggcttttaacagctggaatcttggcttt

SEQ ID NO: 33995 - DNA, 519 bp, Medicago truncatula
  Intron number 2 from transcript Medtr3g133320.1 (locus Med tr3g133320) derived from phytozome v7.0 (chr-ID MtChr3; po s 33761546 to 33762064)
gcgtttaataatatttgctgattcaaaaaaaaacactatattattctttacgctatcttccaccctctctcttccatgtctcacacacccacaaccaccactaccatatcaccaccaccaccaccaacatcaaacccacttctcaattgtactggtaatgtagatccaaattcagccagcatgttcgaaaactaagaaaataaacccttaaatgttttgcttccattcttttcatatttaaaaataaacccttaaatattattcaggagcaaaacgcagacaaagtaagaaaaagtataagatccgcaaagtttttttggaggtaaagatctacacaagttatgccaccgaaatttactcttcatttctctctataaattgaaattttttgcaaactcagattccataaacatgtatattgtcttttttgctggattttgtttcttattttttttttcttcgaaagggtattggatacgtgatttcaatagaaatgtttgaaaaatgagagaataagct

SEQ ID NO: 33996 - DNA, 622 bp, Medicago truncatula
  Intron number 1 from transcript Medtr1g013790.1 (locus Med tr1g013790) derived from phytozome v7.0 (chr-ID MtChr1; po s 2680871 to 2681492)
tctcaagtcttcggcttttctggtactttcaatgatcctttacgttttttatttgattcatagatttttaggttgtgggtgtgttttaaattttgcaaccaaaaatagtagcatgtggttctagatatttgattagagatgatgattttgatgttcataggaaagtttattttttatgatgattttgatctattttatatgaaataattatgggtttgatcttaattctcttattatgttatgtggtatggataatcatgtggttaagaggtaaaattttagctgggtaatagtatttgtgttatagatctataagattagtatttgggagggtttgtatgacatagttttgattgattagaagatctgattagagatatgaatagattataattttaatgagatagtaagatactttagcataagttgttttaagaattttacttttctgatatcttatgattctgctttgagaagtttattctgcataggtttgatttaagcagttttgttgagtttgatagttataacttatataattgacatagatcattatatttatatgcttaatttgttctttcctgatgatcttgccttatgttttcaggtgataacttttgcc

SEQ ID NO: 33997 - DNA, 652 bp, Medicago truncatula
  Intron number 1 from transcript Medtr5g073690.1 (locus Med tr5g073690) derived from phytozome v7.0 (chr-ID MtChr5; po s 26515347 to 26515998 reverse strand)
ggactatccaaggagttttgaagcactaaccaagttttcctcttttgattagttagttttttttttttttttgacaagtgattagttagttacatattaacaatgttgataataaggccaaaatagaaagaaaaaaactttataaaattagggccaacttaaaagtattaataaaattgaaaaaaaaacaacaaatagcaaacaactttaactttcccttttaagttttaatttttaactttattcttaaagtaatttttaaacctcaaaaaagtagggtcaaacgcaccctaattcttcaaaagaaaaggagtatcttttctttcatcatgattcatatttttcttatgaggtaatttttcattgtttgtattcacaaaatcatcacttgtcttttagaattttggtatatgattgccctataattggaattcacaagagctattttcattgaatgatccaataacacattcaaaatagacatctaataacatgttaaataccaaaaagaaaatgttacgtgaatattatttttaaatcatcagaaaaaaaatattctcactaatatatgtgttttttactaattcaatgaaaacaatgtttaagttgttttattgttcttttcagattactgatcgaataggtagcaaca

SEQ ID NO: 33998 - DNA, 1045 bp, Medicago truncatula
  Intron number 1 from transcript Medtr2g055630.1 (locus Med tr2g055630) derived from phytozome v7.0 (chr-ID MtChr2; po s 14940645 to 14941689 reverse strand)
catttcaacgtcagggtcaagcctggtactacccttatcctttttatgctcttctaatttatactttttttttttatgaaatgtgattttttttgttgaagtttttgtgattgtgaagtttaggatttggaagaacatgttgttctactttaagttgttggtttactgataggttacttgtcatgtttcttttagtgtttatcagtggtttagaatattttaactcatgtagatgtgtagtgaatgcatattgtttgaagaaatgattctgtcaaggtcttatactcatatttctgctccttgatagattctagatagatccctctatgtagaatttgggattggttggtgttcttatggactacatgtaaatctctgagaatacaaaagatttttatgagttctttccttattttctgattgatatgatttgattaaacaatatatatgagtggtgaaagtctgtaatttgtgcatttgatagaaacagacctgtcaatgaagattgagactgtgacttttattcttaacctgataagtattcaatttaatttgttttctttgaggtcttaatgaaatactctataaattattttttcatttttcattttattttgcttcttattgtccgaatgatggcaatttgcatgtataaggctcttgtattgtgtatcccacctctgactaggagtcaagggcgccttttgtatgataggcaatagtccggttgcatgaacctgctttgcattcctattagtcagtgctacattttttggctgttccatacgtttatttcattcctactacccctatgatacttcaaactcacatttgttcaacatatgtttattatatgatggtgaaggacgctgttgttattttctttaagccatcttaaatgagacttcacaatacaacatgactgaaatgcattgtgtttgttgaatctgctgttgaagttttgccgcttttatgtaatgtaatttttaatattttcattgctctcataggttctgtacgactgggcttcccagcgatatagttg

SEQ ID NO: 33999 - DNA, 769 bp, Medicago truncatula
  Intron number 1 from transcript Medtr2g126230.2 (locus Med tr2g126230) derived from phytozome v7.0 (chr-ID MtChr2; po s 30540237 to 30541005 reverse strand)
gatccgtcaggtcctcactcaggccgttagccttggtcagttctctctttccccaattcaattcaacaaaaaaaaactgtctttacgctatacaatttctatttggtacctacattgatctgggtcgactttgaaaccatccaattttgaagtttttgatgaaaaatcttcacttttttatttttgtatttttagggtttatgtcaagaattccaattttaatgaattattatatggggtatcatttttttcaattttagatgtgggtttatcatcaatttaggttataattcaaggttttttgtgttttggtttccggggttatggagtaaacaagaaattagaagctgaatttgatctcagtattaccttctttaaggattttgatgagggaaattgtgaggaattctaacgttaaagggcatgtttggattggcttatttgagtttatgcactcacataagttttgtgaggctgtttgaaaacagcttatgacattgttcataagctgtttttgacttgtttttcgtaagttctcgaagattgctttttaaaacagcttatatgaaaactatttaactttattttatctttttggctatagaaatagcttatacataagcacttatcacgataagtgtctatgctatataatgtaaataaactgttaatccaaacagggcctacatagattatatgaacgccgtagaattgcttccagatcattgtttattcatagaacttattttccttgtgttctgcttcaggc

SEQ ID NO: 34000 - DNA, 157 bp, Medicago truncatula
  Intron number 1 from transcript Medtr5g097050.1 (locus Med tr5g097050) derived from phytozome v7.0 (chr-ID MtChr5; po s 38659045 to 38659201 reverse strand)
gtgttagggctggtcggaatttttctctttcttcttctgaattctgaattctgaaaaaaaaaaagaatttgtttttgttgattattattatgcatggttttgaatttttatttattttgtaggtgttggtggttattattatctattggaacctcta

SEQ ID NO: 34001 - DNA, 814 bp, Medicago truncatula
  Intron number 1 from transcript Medtr1g094160.1 (locus Med tr1g094160) derived from phytozome v7.0 (chr-ID MtChr1; po s 19407962 to 19408775)
attcaaggtaagccaaatagttgtaaatttttccttttatttttcatacttactaatagttgattttactcattttagtggtgcttttaccaaatatttcttattaatttgtttaagatatgacacatggaaaccaaatactaaataaacataaactgagataagcttgtgtcagccccgtgatttggggctgttctaaatgcaatgatccctgacttcaattcttctcaaatctcaactacttggcattggttcacattatatttaatgaatttgaccttgtgcatgttggcgttgcaacagctgggtgaattgggtttcatcattacgtcctctttcccacaaggaaatgcttattgttgtgaggggtgtttgacaagaaacgcaagaattctatgtggcagcatgtaacacttacaaataataagggaaaatttgccatgttgcttataaccacattcatttggctgaaagctcttttcttgggcagttaattttcaaaatacaacccttcgaaagctgacaaaaaaaaaacaagttttctcgttgcaaaataagctactcaaaacacagatagataaagaccgactaatcctgtaaacccatgatcctagaatcgcatggcaggaaattgagagcttggaagcacgacagtggcataagggggtctttgttttatatgtagtagtagatactagtttgacaggcttgtagtagttaatatatccttttgaaaatcggtatggtgataatgatattgtgtgcaacattaaccattttaagcattgattttgcagcattccgttctctattg

SEQ ID NO: 34002 - DNA, 660 bp, Medicago truncatula
  Intron number 3 from transcript Medtr5g013370.1 (locus Med tr5g013370) derived from phytozome v7.0 (chr-ID MtChr5; po s 4037587 to 4038246 reverse strand)
ctacgtgctttaaatttcaaagaaaaggacggaaggtatataattatatatggtcaataatatatgttgtgtgcattgcataggatggtctcttatcttagatatttatcatttatcattattggtttttgctacggtacaccaaaaaactctacattgcttaggaattgagactaagaagagtgttatcgacactctctttctaacaatagaatagtccctaacaacatacattgcttatgaatttcaaagaagaggatagaatagtactccctccgttcctttttaagtgtcacttttggagaaaatttttgttcctatttaactgtcactttcaaagttcaatgcaacattaaatgttgttttatcaatattgtccttagttatttattgcggagagagaaatatatgaaatgagatattaaatgaataaggttattatagtaaaagtatagcttattgtatcaaaagtagtatcaattgtttattgtcttgctttgtgtaaaatgtcaaaatgtgacaattaaaaaggaacggaggtagtatcttattttagatatttatcattattggtttttgtcattgttacaacaaatatttatgaaatgtatgggctattgtgcagccaagagttgcgtgcagtggagaggagggtacttt

SEQ ID NO: 34003 - DNA, 780 bp, Medicago truncatula
  Intron number 1 from transcript AC233576_27.1 (locus AC233 576_27) derived from phytozome v7.0 (chr-ID AC233576; pos 85057 to 85836 reverse strand)
cacacaagaatctccaaccgtccaaaatacacaaagtccaaaacatacataaaaaagtccaatcacattttatagaaagcattgaaaaattcattgacatgctgtattttccatataataatatagtatatagataatatttaatgcacacaattcaatgatttatcaaaaaaatatcaataaaattgtacttggttcctaggttattttttctttttatttttgaacttgatatttaattcaaaaatcgacttatttaaaaagatcaatttctctgctcacttgggagagccctatttaaagggatttggttttgccgctgcagcaaaagccataatttcacacagtttttgattttggtcgttcatctgagatcgaacggtaaagattgaaaactatgtcttttaattaaaacgatccgggtcatataatttcgattggacgactgattttggttactgtaccctattgtaatagcatgaaatcctatttccatttaaagacataactctgtaatcatatttccatttaacgatataactctgtctgaatttatccaccgaaattgacagcagagagaaccgaaattggttcataggttattattatttgtgttgacaaaagattgcttctttgcaagctttctttgttttttttttttcaatacttttgtttgacttgttcattcacaatactaatacaaagatcatttgtgtcggtatctatctgtctctctctctctcagccaaacaatcaacacttcttgctctctctctcctc

SEQ ID NO: 34004 - DNA, 599 bp, Medicago truncatula; identical to SEQ ID NO: 28744
  Intron number 1 from transcript Medtr3g162460.1 (locus Med tr3g162460) derived from phytozome v7.0 (chr-ID MtChr3; po s 42431394 to 42431992)

SEQ ID NO: 34005 - DNA, 731 bp, Medicago truncatula
  Intron number 1 from transcript Medtr5g045600.1 (locus Med tr5g045600) derived from phytozome v7.0 (chr-ID MtChr5; po s 19095284 to 19096014)
tgaatacaatctttctcaactttcacttgatcctggtaagtaaccaccattcaaacatacccttttgcttgcattctttgttttttttaatatagatgctaaaaatttgttctttaagccttgtttgtttggttttttaagaaaaaaatttaaatttactttgacttattggagtgtgtgtggaaaaaaacatttttttattgtttcttactcttgcatttggggttgtaaacttgtagtaataatttatttatatttgtgcattttttaacttcaatgaagctaggttttattcagattttagattggttttgctgtttttaatgtgaaaatgtaaggtcactgtttcacttgcagcaattgatcctttatgtttttgaaacataacatttttttgtaacttgagtgttatgtttttgcttagtgatgttttttgttaaaagtagatttaatttaaagtgaaatgatcacttgtttggtctcacatcaagtcaaaattgatttattctcaaacttgctttattaagaagcaacaataatttgctttttgctttaagcacttttagaaattatcctaataacattcttcacataagatatatctaactatgtgatcaaaaagatacttagttatttgagcttaacaattaatttatgcaaaaatgatgaaccatcttatttatgataatgatttagctccaaaggaacttcagaaacaaactagaccatcc

SEQ ID NO: 34006 - DNA, 528 bp, Medicago truncatula
  Intron number 2 from transcript Medtr3g143410.1 (locus Med tr3g143410) derived from phytozome v7.0 (chr-ID MtChr3; po s 36971607 to 36972134 reverse strand)
ccaatcactgtccaggtaattttttcctttctaattcttacaaccaatttctacacttgtattttcattcaactatggatgatttcgagtgtgtttgattcttccgtgacacaaattgattttgtcaaatgaatttaaattaatcaattttacattcaatgcattttgtagcttttgggttgaaaaatagatttaggctaaaaatcaattgtaggagtcaaaaactacaaattctagcttccagttagaattgattctgtagacaaaatcaattgtactcaagaacatccaaacatgtcaaaatcaatttgggctcttcaaaaggtggaaggaaagatgcacttcttgtggttagaattctgtcatggaggaggaaataatttattttatatttatcattataattgcttggtttgattataaaaatgaaccctgaaaacatttttctgaaaattgtgcttatctttatgttgtttgtttgtttagctataaaatgattcattcgtcttgttttgttcaggggcagtg

SEQ ID NO: 34007 - DNA, 388 bp, Medicago truncatula
  Intron number 2 from transcript Medtr5g082700.1 (locus Med tr5g082700) derived from phytozome v7.0 (chr-ID MtChr5; po s 31169775 to 31170162 reverse strand)
ttttagctatagcagctcgagactctgttgccattgtaagtctttccaatattttgcactttttaatcatggttttaaattgcactaaccctaattgcgactgcaatataaaaaataaaaaaaaataatagtcttctatgttgctaaatttttctacaatacaagtttatagcattaccgcaaccgaaactctaatttaaaaccatgtttaaatcaaacactaaatattgaaggacactcgttggcattttctttaatattttttggttttttaattttttgttcactcattcaactttttctagctagtatatataagattgacaactaacaaattttgcttcaattaacagttgggtggtaagcaatattggtaccaagtgttact

SEQ ID NO: 34008 - DNA, 421 bp, Medicago truncatula
  Intron number 1 from transcript Medtr4g129580.1 (locus Med tr4g129580) derived from phytozome v7.0 (chr-ID MtChr4; po s 30858007 to 30858427 reverse strand)
gtggtgtgggtggtttgatgaggaacaagatttcatggaagtaggacattatcaacatattttgctctttatttttagagacgctcatttgatttattatgctctttttttccgtaataactttattatggagtttgaagttgaaattttgaggttaattggtgttccattgtagatgtgtcatttacaatgttttttttttagagtcgtcatttattttttaaagactcttattacgattctacgagtcttttacaaaacaaaactctatagattcacgactatattttaatcacctccccacggcaaaaaaaaagtagattttgttgttctattcccgatcaatctctctctctcttccatgttattgcaaagtgttggtttcattttgacccctcctttccccttttctaaacagttt

SEQ ID NO: 34009 - DNA, 638 bp, Medicago truncatula
  Intron number 1 from transcript Medtr7g022340.1 (locus Med tr7g022340) derived from phytozome v7.0 (chr-ID MtChr7; po s 5560113 to 5560750)
caaaggtatcgaatcgaatagcttatagtttctttgatagattttgcattatcttgaatgttgttcatttgaatagaaaatgagaaattaaataaagatttgatcttttattgaattgttttttgatggtatagtattagcgtaatttgaagaatgatttgatattttgttgtattgtttttcaatttgtgtttgttcaatgttcatgtgtttttagggttttagaattgttgaaatttttttgaatagaagttcacattgctcgtaagatctgaaatttaacagctatgattgtaaagaacaagaatgttcttgtttgcattttgttttttgagtgaagatccaattttttcttggcccaaattacgttttgttataatgaatcagagactaattagtcttctataagaaaatgtgtcaaaaactaaattgggccgcaaaaaaattagagaccaaattgggtcttcactatttttttctttgctgaaaaaaaatgagatactagacaaacgattcgaacatattttgttttgagaagacatgatatgaaattttgtaatgatgcttattgtgtcttgttttgttggttgttttctttacacgatttgtttttgttttgtttttctgattgaagagaa

SEQ ID NO: 34010 - DNA, 1066 bp, Medicago truncatula
  Intron number 1 from transcript Medtr1g025290.1 (locus Med tr1g025290) derived from phytozome v7.0 (chr-ID MtChr1; po s 6228888 to 6229953)
ttcttcaaaccaccaccgattttcaacaacaacttgtgagtacatgcacttcatttcgtttttcttcattattttgacttgcccgccttttaacttttgtatatttttacaattcctttagctgcgattaatttttttgaaaaaagttttgagcttttgatttttgtgtatgctgttaatgttattcaataatggctcaggagctttgacagtagttgtagatctgtttttttcccttcatgaaccaacttacttgcattgtcccacgttggaacttggaagtcatgaacccagtgcgagaatttatataggattggacaattctcccctttaagccatgattttgtggtggacttatgttcaatccgtatcacattgcaatataatctgttggggattttggggggtgcgggagaaacaacgggtccaaatattccatgaccacgagatggtgacaccacatctccacccaaaacctttaagacatgaggtatatgagtcatattgtttatatattttaataagagaaaaaggtaggaattagggtttgttcatgtcgaacattaattttttaaactcttttgtatctttgtaaagactcgttgattgtgaatcagagagtggtaaacaatcttggtgtttgtctctctacgatctttatattgttgtctttggtttgattgtgttgaatcattattttcttggactatttagtttggttgccattgatatttgttccactgttcttgttggttttaacaacgagtggtttgaattcacaacagggaaaaaaatgaaaagaaaaggaagtgaaaaaggagattgtagcgtaggttttcttggtttattattcttttccttgttctgcaaacattatctatttagtcatgtacttgagatgattactggctgtttctcaagaaaatacttatgtttagctcttatgtagatatattaatctaccaacatctcttagattcttcaactcaatgtttcttagtctcaactggaaatctataaatttattgcaggcccttccgaaaacattttcagacaatttaaagaa

SEQ ID NO: 34011 - DNA, 918 bp, Medicago truncatula
  Intron number 1 from transcript Medtr5g067770.1 (locus Med tr5g067770) derived from phytozome v7.0 (chr-ID MtChr5; po s 24086546 to 24087463 reverse strand)
tccttctttgcagagcaagtcgaaggaaaataaaggtatgcacatcaaagagattcaagatttccataaattttttgaagttgtgcataatccattaaatgtcgaaaaaattgtgaaggaagctgcactggttttaaaacaaaaagtacttgaaaaagtttcaaagataaaattttctctttatataaataatgcacaagataaatataaaatggccttagcatttcactgcataaaatttccaccattgcctagtgcatacttcacattatctttcgaaccagattctccctcttgatttcattttggctataaagctattcaaaatgcttcgcaaccagaaaaaacaaagggtgacttggactaaatttagtttacacaattatccaaaaaaaaaaaatgcactctggacttcactaggtttgtgttgaatgtctagatactgatcttccagtaggtgacatatataagagtattgtatcttaactccctcttaatcatatatctcattgtttaacatgtctttctcattgatcttataagtttatcccgacataaaactcaagctagcacaacggtgcaaggagagacatcagaagactcagaaccagcatcaagattcaaacaagacaagtaaattttgttatacttgtccgtttgaaaaaatgttcacctaaaactgaacattctaccatcttctcttcagagtcgaaaaaaaggaagtgagtctaaatcagatgtagctagcaagaaaataaagaagtcaaccacctcaaagaccaaaaagagttcaagggtaattattttatagttttgacaaaatacttcttttatgtttcactatcctagtttttgaacttttcttcatgctcaaatcatccagtccaaaggtgcaaaaggtctagaagaaaagaaatt

SEQ ID NO: 34012 - DNA, 877 bp, Medicago truncatula
  Intron number 1 from transcript AC229695_18.1 (locus AC229 695_18) derived from phytozome v7.0 (chr-ID AC229695; pos 71916 to 72792)
tggtctcttttcggcattgttaaactacatatgtactcttagaactaccgaactatgataaataactgctaatcatttgcataaaatttcagggatgaaatatattttattggtaatttgttattggtatatgctaattaattcttaaagttaagtcttggttagaatacagtttatgttccatattggaatagtttaacagacctggtactgaattctgggtttgtctcaatgaaacagccaatcttgctcaagaacattttgtccctctagtgattctctgtgtgtactttgttaggaaccaactatcctaaaagcatatatccttttcatattgtactctcatttctcaaacgagcttatttctagaacttaagctgttgtatgaaaacacaatgttttttatatcgaacgttatcatttgatatttcaatcgtttaactgttctgcttttacattggcagtactagcttaatttctaaatgtgtatatctatttttttaattaattttttgaccaaatgtatggctattagttttatagttattatagttatggatatcatttggaacttgtgttgcctttgttgtctgttcaactactgaacgggaaggaccaacttaaggtttattataaaaaactcagaatgtccccttgagcttagctcagttggtaagaacaatgcataatatatgcaggtctcaggattcgaaccccggacactaccaaaaaaataaaagactcaaaatttgggcacatttcctcaaggaattagatatcttcctgacataacctacataattgcacctgtactatttatttatgcagacatatattttatagaagctcttagtaatattaagtttttcaggataac

SEQ ID NO: 34013 - DNA, 523 bp, Medicago truncatula
  Intron number 2 from transcript Medtr4g140870.1 (locus Med tr4g140870) derived from phytozome v7.0 (chr-ID MtChr4; po s 34648156 to 34648678 reverse strand)
tcaataacggtgagttatgttgttattcgcattgtatttatcataagctatataagctgttagtttcatttgctatcccatagagtttatggaaataagttgaaaacaacttatgtactacatgttataagctgtttccatcagctattctgaaaagtgattatatcaatgtatttgattatatcccatagatttgattctgacatgtttgtttgttttcgagtataattgattccagttgaagctaagatttgttgcttttgattttagaattgatttttacgcacaaatttatattctaactcacttttacatgaatgtatccgaacacaaatcaattcaccttcaactcacttttaatcaaattaattttacattgtcaattaactcaaaatcaattcttgtcaccgaagaaccaaacatatacatagtagataagctcaaataagtcaatcaaacatactctgattcccttcatatctatcatgtgatttagtaacagcgcagtcagttcaccctgcta

SEQ ID NO: 34014 - DNA, 864 bp, Medicago truncatula
  Intron number 4 from transcript Medtr5g096080.1 (locus Med tr5g096080) derived from phytozome v7.0 (chr-ID MtChr5; po s 38172125 to 38172988)
ttctacattgtataagcacaataaaaattgctcaggtacgtcatgatcttgtttgcttgaacattatttgcagttccatagattcttccatttgtcataatatgagcaatcctcttatttatacattcattactgttggtctaatgtgcacaagtaaattagtcttgcaccatgcacaagtgtgtttttcaccaatgcaagacttatggtgtgcatcataaaactagccttcattactataattatgtgtgaacttttacttacattaatcattttcacccaaaacaaaaaaattgtcaagctcatgatgatgtatacatacatccaaaatttatatcaaccttgttaattacgctgtaaaaatatagaattttatgacagaaaatattattaatttgttaaaggccttacatacaattttgctttaagtctaaagtatgttggtttggccctatgtaaacctgaagttcaaagatttatttgttgtatatgtactaatttattattttttatttatttattttttggggtcaaattgtacgtaatttatttgaaatcatttgtatgaaaagcttcctttattttttattttaaattgccttatcttgcaaaagtggaccagggaagaaaattcaagtaaaattaaatatttatggaaatctaataatttcaaagtttaagatgcaaattaacactgactgaaattatgatgtaaaattttaacttcctttttttgacaagaaagttttaactttcttcaaagtaataatctttggccgatggtattggtttcagttctctaattgactgttcataatcacagttttatttcatcttgtgttgtgtgtggccaaaactaggttc

SEQ ID NO: 34015 - DNA, 422 bp, Medicago truncatula
  Intron number 1 from transcript Medtr3g086460.1 (locus Med tr3g086460) derived from phytozome v7.0 (chr-ID MtChr3; po s 20215253 to 20215674 reverse strand)
ttttaggtctgtcaggctttcctatctatactccctcttctttcatatacttactgtgtgcttaaactacttcacttttttaacattctttgtataggatatttggtattgcatgttattgtcttcacattcttgtcatgctgtgatttgtcattgcattgagattctttctatatattgtgtttgtttccattttctaactaatatcacatctgagttcaatatattatagtcccatggtgatgtttttatcatttcattcctatgtttgattcactaattgagtttctttacacaaaaaaaagttcgtgtgccactaatttagttaatgattgtaccaagtatgtatgaaatgtagctcacaatatcctgtgttacttttcatgacttaggtccaaaaactccagtgaaaaataatcaag

SEQ ID NO: 34016 - DNA, 701 bp, Medicago truncatula
  Intron number 3 from transcript Medtr3g114490.1 (locus Med tr3g114490) derived from phytozome v7.0 (chr-ID MtChr3; po s 28987766 to 28988466 reverse strand)
aaataattgagtctggggcattcaaggttgttgtggtattattcctcattcttatttgatttatatgataattaatttcatttatattgaatgtttgatgtccgtctaccaacaatgtgtttggaattttgaaaaattggacttgatttggcaatcaaatcatgtgtcagcctgttaggaatgtttaagaactggaaatgattttatttttaggtgtaaaaatcttctaaattgaggttgtcaacttgcatgtaatgtgatattcacccttgaactttagcgtttaattttattttaatttattaaaaagaaacccaacgaattccatatataggctcatcaatatctcatttttacaaagggctccaaatgaagaactagatttctaaagcaaatcaaaccattttttcttttgaagattctaaacacaatgcaagatgttttgacatccctccttaatctaaaaattattcttctgttgttataatttgttttttcagtgccaaacttgtgtgttcaaaatcatgaactcttctttaatttgttcaaaataaataaataaattatgaactcggatttcttgggtgtttttgttcattcatactataaataaacatttttatgtttgtaattaaacatgatggatgataacgagtatgtttgcaggaaaaacaacccattgaagtgacacgcgatcaggc

SEQ ID NO: 34017 - DNA, 795 bp, Medicago truncatula
  Intron number 1 from transcript AC233671_11.1 (locus AC233 671_11) derived from phytozome v7.0 (chr-ID AC233671; pos 39961 to 40755)
ttgatgtaattaatgattttatctctctttagtgatttgaatatgtgaagaattcttcatctttttccattgtttctctaaaaaacaatgttttgattagtgtgtaagtaaatatagtcattatttttatctttgccttctttatttcacgtgctcttcttatatttattttcattataaaaaataatgggaatgtccttaacgagtattgttttattaaggttgttgagaatatatatatggattagagaattgcacttatgggttagacaatttatttttaatacaacaaatataatacaatagtatgtgtattggttttatgtagttttgactttttatagacgaggttttcgttattactcagctcagtattgtcaattaggaatcgcgaaaaatagtggtttggtcaaattccactactcaacactgctataactccgctacatatgttatttcataatttttttttgcactaaatagaataacaatggcagtttattcaaattctccaatgtaacatatctatagtgtggctatgtaacaacaatatttcgaatcagtagctaggttcgaggagcacatgacttttcatagttgggttaatattaagacttgataagttatcaaaggtttaccaatagtgttgcgtaattgtgttccttcttttccctcatttccctttcctgaaatctcttacttattctatattctgtttggttcaccctacatgtatgagaaattgctaacaacaaatttatatgcctcattacaggtgaaaaatctcatagagcg

SEQ ID NO: 34018 - DNA, 1020 bp, Medicago truncatula
  Intron number 2 from transcript AC233671_11.1 (locus AC233 671_11) derived from phytozome v7.0 (chr-ID AC233671; pos 40807 to 41826)
gaaagcaaatattgagcctgaattcactgaaatcggtaataaagttattttcttctatttttgttaatttacttttgatgtattctacgatatctaacttgattaaaaatttaattgaaatatttttttaatataaatcatttaattattgatattttgtttatattttgttctaaataaagcatagatttctgaaatatgaccgaggtctaattttacaatagctatgtttttcaatatgaaaagattaattatagtacaacaatgatagttaagaataagattttaagaagaaattgagagttttcaagaagaatttttattatgtgcttgatatttagtctcaagttctaagtagtaacaatgataatattattttctggttcatttgattacgttgccactactttatgttattttgtaaaaaaaaagaagtcaaaatatgttatattttgaaaggagcttgtttaatattcggggttgtgcactcttgttcatgattgtttattctgtatttttatgattggttaggttgatacttcaaaaataagaaacatttttcttcattaaaacttcaaattaaagaaattgaataatttttgaatgtgtgcagtgacaaaataaagaaactagcttgtttgctttatatatgcagtgaattcaattaatggttaaaaaagctttcttagattagatacaactagagtacggttccataaatgtaacatgttttatttaatttttcaattcttgtttatttaatcttacattttccatcactgcctttataattgctatggtttaatatttggactatcatttttaagaggttgataaataaaaacacacacacacacacaagttgcaattgataatttaatttatagactttcaatgtatatccatcccaacgatttttacatttttgttataataaaaaccgcaatagttttattaagtttctttttccttctcgtctttttagtttggcaaaagcttaaagaagaaaatcctgagttc

SEQ ID NO: 34019 - DNA, 808 bp, Medicago truncatula
  Intron number 1 from transcript Medtr3g024460.1 (locus Med tr3g024460) derived from phytozome v7.0 (chr-ID MtChr3; po s 6048202 to 6049009 reverse strand)
atccaggtccagtctgttttgggttttggtttggggcctcagttttctttcacgttttgctattcctgtgctattcacacccctattttttgctatctgcacctacgtcttgtttaaacttgtgataaaattcctagaaaaattcatacatgtttcttgatattttcttagtgttttttatgacatttttgcacattaaggatctatgaaattttggtataattaattcatagcattttaattctctttgaattatttgttatggtttcttcttcacacatttgtccttgatgtgagaatatgtaataaaagctacttgatatgttaatatgagagatttgtgcctataatttcatgttgatttgctgctttgatttggttcatgagttcttaattttatgaacaatatatgcatattttgaaagatataaaatgccaagtttattctagaaaatatggcatgaaaccatgcttgcatgtttccaataattccatgctataacttgagataaagaaaactctttcaaaatttgttaaagcatgagaattagaggccaagaatgctttaggtttcatacctaagtttttagggtttaatgtcattttgttaactttttgtgccatcttgcatgcttttatttcttagtacttgttatgtttttttctcactaacaagtttactttggtacttcatacatatcatttagcattccatttccattcttttacatagtttagtttctttgcattcattttttacttttgtttggaattgtaatatttaggtaggtgttatcttttatatttc

SEQ ID NO: 34020 - DNA, 950 bp, Medicago truncatula
  Intron number 1 from transcript Medtr4g110840.1 (locus Med tr4g110840) derived from phytozome v7.0 (chr-ID MtChr4; po s 25242406 to 25243355 reverse strand)
ctcaacaagcttcatctctcaaaatactgctttctgtaagaaaaatctttccattaaacttcatgaatatattagagtcattatttttatttgttaagaatgatttttcgttgataatgaattcaaattgatccgtataatgttactgttatacagattcattttattttttttgcatttcaaaatttttcctgttcatctaagacatagaataagtaggagactctgggtgtttctattatttacagttcaattgtgcacattatgtgtttgataaaatgccacgacggtttttacttcaaaatgtgtcacatatctatgcattttttttgttttctatcattttgaaatgttgtgatagtttcaaaattgaatggggtttttcttaagcttgatatatgtttttaaaagagttttgttacttctgctgtttggttttatgctctataagggattgttccaaccctaaaagataaaataaattaagcgtagcagagatgatgatgttgagttgaatgtgtggtgagattagacgggataggattagaaatgacaacattagagacagatagagttggggtagcacctatagtagaaaaatggtggaaactaggcttaggtggttgggcatgtaaagagaacacctgaagattatgtagtatagagagtagatcaatcactagaggcggaggaagatctagagaaactataagaaaaactattatgaaagatctagagattaattagttggatagaaatgtggtatatgatagagcattatggtgttgcttgatccatgtagacgaccccacttagtaggataaaacttggttgttgttgtatttatagtattaccaattcttatttatttgaaaacttgattgataattgattctcaactttgtgtgctgccagaccccagttccggtttttaactaggcgcgcctcca

SEQ ID NO: 34021 - DNA, 567 bp, Medicago truncatula
  Intron number 2 from transcript AC233572_4.1 (locus AC2335 72_4) derived from phytozome v7.0 (chr-ID AC233572; pos 25 844 to 26410 reverse strand)
aactttgaagttcccaagctgaaggtgttgaactagtcaaatacaagcgttgatgatgaaactctttatgtgatctcaaagaattgttgtcggcttttgcaactatttttgtacaactgtgataatgtcacacagaagggagtgaaacatgtggcaaaaaaatgcacaatttataagtgacaaaaataaggaactcatcttgcatagtggaagcttctttgctagtttgaagtaagttgttcgttttttaagacagatgaatttccttcattgaaaactttagtttgaaatatattttgctttgttgctaattagtgctttcataatataatttgtgggttttagattctatacaagacatgcatgattaataaattacataaaatttttggaaacacaactaaaaaaaggtcacaaacatgatgagatattgctatgggacagttttagctttatttgttatgaatgtgaaacatgctcaagtgggaatcccatgttctgcgtgatagaaattggaaaagatttctggttctgattggtctttttcttgtgcagcagttattcata

SEQ ID NO: 34022 - DNA, 648 bp, Medicago truncatula
  Intron number 2 from transcript Medtr2g029120.1 (locus Med tr2g029120) derived from phytozome v7.0 (chr-ID MtChr2; po s 7672387 to 7673034 reverse strand)
ccaaatttgaagttcgtagtccaaatcgtttgcaggtttgttcgtggttctccttttcgtttatttatttccttgacgctctagtaaccaccttttcgtttatttatttccttgatgctctagttatgagagaaatcgatatataattagtattccagttgaggtaagtaaagtccgacaaattattacaatcaaggatcaaactcatattctaccaaataatttaagcttaactgaagtgtattaatcaatggtgcttaccacctgtttttcttttcgagtttagtaatacatcattgttggtattagtgttttagatgttttattaaataaaatatttgagttgatccttgagaaaaaagatggacacttattgtctttgaaaatgtcaaatattagtcaaattagtctaatgaggagaatcaaactcaaaacgactctaataggtacggaaattttgtggacactaatcaactgatattaaattttttgaagaacaagttggtagttattcactctaaatgcttaatcttgtagaattcaattaagataaacaagtgattttaatcatatcatgattcaagctgttggtctcatcttttatgttattcagatcaagtttgaggaaggtgtcataggcactccaca

SEQ ID NO: 34023 - DNA, 957 bp, Medicago truncatula
  Intron number 4 from transcript Medtr3g025940.1 (locus Med tr3g025940) derived from phytozome v7.0 (chr-ID MtChr3; po s 6885882 to 6886838 reverse strand)
gttttgaaggtatggtttttatagttctatcatttttacaattgttttatagtttatattattgtcaatagaactgactgaaatgagtttgatgtgaaactcatgaatgaaaacttatatgacaatttaatttatgaatcaaaacatttcaaaggaagcatctaacattaaatcttgaatcttgaatcttgaatggaagcatctgctcatttcaaaacttagttagtatctaacattaacaatcaaatttctcacagaattgatttatttttagttagtatgctagattagatagttagtatgctagaatgagccatttgagcctagatgaaaggaagcatctgctcattttgttgttgctttaaatcttgaatgctagattagatagttagtatgcaatattcttggactttcatgattgatttttgttcaatatttaacaatcaaatttctcatagaattgatttatttttagttagtatgctagattagatagttagtatgcaatattctcacagaattaatttatttttagttatcaatactgaagtgattttttaatctctatatttaacaatcaaatttcgtaatttgtagaattatatgatgacaacaatgatgttcaagaagatgaaactcatggaagtggacaagcatcaaatagtactgtggatgttgtgaaccttgaagaagattaagtgactttgttgggagtgactttttggattaaaacttttgttatgttattgttattacttattctggataattagtaatttgaatttagaatcttcattctggataattagcttgatggaagcctattgtcatcctagttgaaggattgtcatcctagttgaaggattaaacaatagatacttctactgttttacatgatgcctgtctctgttaattacagttttggattttagggtacattaaccaacaggagttggc

SEQ ID NO: 34024 - DNA, 700 bp, Medicago truncatula
  Intron number 1 from transcript Medtr5g105260.1 (locus Med tr5g105260) derived from phytozome v7.0 (chr-ID MtChr5; po s 42277522 to 42278221 reverse strand)
aggtcaatattgacaaagtgagaacgcaaaatccggtaaacacatcctactactattaccacatctcatatttacttcttttttttcttttgagaaatctaattgatttacgaaaaatattactcaatcatgtgaatgtattttatattgattatttatattttatttttgagttgtttaaataatggaaaaattaattagacctaaaaactactcaaatttaattgttgttaacttttaataaaattactcttgttcttcaattcatgtaacgattttgtcatgtatcttttcatttacatcatttttgttctttggatcaatttgcatatggatttttaaaatttaaatatattttttttttatttcgatacttactcttatgtttaaatttatggcctttcactcatgtttttatatgaattttagatccgatatttgagaatccatatgcatacaaactgaaatgatataaataacttgaaaaataaaaaagataaatggcaaaaaattattagctaaaattaagttaaaggaccgtgaatgtaagattaccttttttctttttttaaagaggtctcaggcctctaaatttgtcgggacatcctgagtatgactgactagtgagaaagtcattaatatgtgttgttggcttttctttgtagcattgtattctgaaggttaatatcaattgtaaggc

SEQ ID NO: 34025 - DNA, 624 bp, Medicago truncatula
  Intron number 2 from transcript Medtr5g030090.1 (locus Med tr5g030090) derived from phytozome v7.0 (chr-ID MtChr5; po s 12601264 to 12601887 reverse strand)
cggtgaaaattgcacctgcacactgtatgtcacacactgctcctttagactattttaattttactagcatctaaatgattttgatcaaaatgagttaaatgtaaagtgatttataatatttttcaaaatcgaatgaattggttggttcaactggttgatcgagaatcaactagtttcctcgatttgatccttattccatcgcagtttcattgttttagattgaactaggttataacccgttcaacggttatcagtgcagcaaattgtcatttttacgctttttattttattcttttacttatttatttagttgtaattcgattcaactattgtcacatcggaagtcttacccatttgatccagagtccagtttttaaaacaccgataaatttaagattaaaataaactctagacataaaaaactttaaatcagtttcatgtcagaattaactcttgagataaaaccggttcgacttataaaaccggttcgacttgagaccattcaaatatgccacaaatctaggcttatataatcaattttttctatattattttaaagtatcataattcatttttggaagaattttaccacatatatgttgaccaactcttatgcatgcagtg

SEQ ID NO: 34026 - DNA, 342 bp, Medicago truncatula
  Intron number 2 from transcript Medtr2g052470.1 (locus Med tr2g052470) derived from phytozome v7.0 (chr-ID MtChr2; po s 14242768 to 14243109 reverse strand)
ttttcctttggaagaaagttattcctgttcctactgtattatctgctgttttttttttttttgagcaaattattctaagctactgaattgttcttttcgtttattttatatacatatacctataatccaatcgactcatgaaccaaacgagtcgaattttatatagtatagttcaagttcagctcatttaattaacaaacttatttttagttcaagtttatctcatttggttcatgaagcaagttccaccagttaattgtcgagtagagttcgggactatttttgatttgtctcatttcattgtcagccctaactccaaccaattacagacaccacatactc

SEQ ID NO: 34027 - DNA, 951 bp, Medicago truncatula
  Intron number 1 from transcript Medtr2g052470.1 (locus Med tr2g052470) derived from phytozome v7.0 (chr-ID MtChr2; po s 14243079 to 14244029 reverse strand)
ggtaccaatttttttttttttgagtgaataggtatatatttatatttacttacccttaataatatacattcatgtaccccaagttttattttaagtggaataatcttttttcatccttatttagttttcggtcgtatttcgaattatttgattttgttgtataggaaccagaggaataacacttaaaacagttaaatgataaataataataatctttggtttatttaacaaattaaacaagataatagtagacccacaccccaccacacaattaataaaacaaggataagtggatacacacttttttaactttccagttttcaccaacacagaagattacaaataatataaaatgtttttcttgcaaatagtatggttatttacattgaaaaggacatttcaagtcattttagctaagatgcaactatggatgaatttgagtttttgaagggtcttcgagttcaattttcataaatagttactattagtttttatttcttttgttatagtttttttttgtacaatccgctattctaccgtgacttttttgatacaatttgttattgctgcatttttggtataatccattattgtttaatcaagtacgtatattttatgagaatattttatataagtaatacttattgtgagtatttttttgtctgtctagttagatcagtttaatttttttttatatgtaaccacctcatagaaatattgctagcttcgccattggatttaaccaccctacattttattcatctggacgtcaagggtcaaaatcaaaacaattcacgtgtagcattgagctatgcaaaagcatcatcgcaattcacgtgtatttaaccaccctacgtattttttttagaggaactgattgggtaatatgttgttgcatttgttcggttatttgcaggtttttttcctttggaagaaagttattcctgttcc

SEQ ID NO: 34028 - DNA, 514 bp, Medicago truncatula
  Intron number 1 from transcript Medtr6g044050.1 (locus Med tr6g044050) derived from phytozome v7.0 (chr-ID MtChr6; po s 9318309 to 9318822)
gtccctacttcaacccagatcaggtaacaatgtccttttcttgctctttatcaattcttcataatacattaaagtctattaaagtcactatgaaataagatctttttaattttatagtacaagacaacaacactgaatcaatatccccttctttccagtaaaagacatattataaccttataaattagttttagagtcaacgatctcataaatcaattgcatggttaattaaattataacgattttattaccagttatttttagatattaataaagcgttttttttttacttcatcttatttatcattagattttcaaaaaaaaatattaattatcaaaccatgatcaattcttttaaatcatttatataaatcataaatactttaaattcatctgttttcagttatggatctttatctatcagagcaatttactataacattattaattttgtttttgaaattgtattctccaacatttgactttttctaatcaaaatgtgtcattagtcaaa

SEQ ID NO: 34029 - DNA, 390 bp, Medicago truncatula
  Intron number 2 from transcript Medtr1g149540.1 (locus Med tr1g149540) derived from phytozome v7.0 (chr-ID MtChr1; po s 33034115 to 33034504)
aagatcgaaacgcaacttagtttctctgcaaagaggtaaggttggtatctctgcaacgcaacttagtacttcggcagtcacaaaaatatatctaaagttggcatactaaatggttgaacgtcctatcaatattgtcttatttggtttcgaaagtcaaattggttgggttgattttcttggatattgagtgaatttgttttaggttccatgatgtgttagactgtgccatgatatacttagtggtatatagtcaatgtttgttgcacttggttgttgaagttaaaacttcaaactgattattttactctttcttctgctacctctattaattttgtttattgtataattatgacagggatatctgggcgagacaaggataggggtaaggct

SEQ ID NO: 34030 - DNA, 573 bp, Medicago truncatula
  Intron number 1 from transcript Medtr2g032780.1 (locus Med tr2g032780) derived from phytozome v7.0 (chr-ID MtChr2; po s 8766494 to 8767066)
atagaaataattctatcaagagaagatcttcagaggtaaacatgacggcagtccttaatattgcgaataactgttggaacctcgctttttttttctttcactaggaagcaaatcatggccgcaatccttaatattacaaataatcacagttaaattttgcgaataatcgcagtcaaatgcagcctcaatcacatagacatcaaacaccttaaaactgcagttgctagtttttcttagccctgcttggtatcaattgagaatcgtggaaaataacagtttattcaaatttggctatgctatagtgctatagctgctgctatttgacaatactaagcactaaaaactgtattgtagaacaaaagcgatttgttcaaattccgttatgctatagctgttatttggcaatgctggttttaatacaagaggcacatacattatgagaagattttcaagtttgcatcagtgctttatttgcatgactttggaattcagaaataacatttttcattgtgttatagtgttcattatttatgagttatgcttcaggatcattaactttgtgtgatatgcaga

SEQ ID NO: 34031 - DNA, 881 bp, Medicago truncatula
  Intron number 1 from transcript Medtr1g020420.1 (locus Med tr1g020420) derived from phytozome v7.0 (chr-ID MtChr1; po s 4456935 to 4457815)
gccgtgttgcaaagttttggcttaccacaggtaatcatgttggttatataattatatgattcatttgacattcatctcatagtgaacctacctgtcatccctcaatggatttgtgtttgagtaaaataacttgattaagtgcttactcaataattccaggaagtttaactgaatgcatattcataagttgttcttaaaagtttattggaataagctgaaaaactgtttatagatttgttataagttattcttagaaagttagaattgtattcaaacactaatataagtgtgtatgtcatgacatcataagtccaaataaaccatgggttatatcagttcataaacaatgaatggtttatatagggttcatttacttctggtgtttcctgtttccatttctactgataaaataaaccttagagaaggcattaggaaagttgctgaaaatgcatttttgaaaattcagtttataatgttttcaaaaatgtattctcttcagttagttttcatcttctctatattaaaaggaaacctttatatcaaaggtcattccagccacccggcatacaagtaaaaattgaatatgttgttagaaagtaaacagacaatgtatatttcaaatatatgcagcagtttttattgatgtatcccacctccattttggccggtcaaacacaatcattttttctttgccatagcacaactgaacaatatcaataatttacgtttataagccatatgtgctcattattatagtaatatatagatatagcttgtggttgactacctgtaatacttatgcactaattttttgcgcataattttatttgattaattcatagactaattatcatgatgtaaacttggttttgtctatcagg

SEQ ID NO: 34032 - DNA, 862 bp, Medicago truncatula
  Intron number 1 from transcript Medtr4g018550.1 (locus Med tr4g018550) derived from phytozome v7.0 (chr-ID MtChr4; po s 3606546 to 3607407 reverse strand)
ctcaaatcgttcgcactcgtgaccctcaggttcgtgtgggacccatctcggccccctttggtttctgagatttttttaatttattttttatttttaaactgtgttactgatgaagtgtttagttttatttggttttgtttcattatttgttgttgggtattgtgaaaaatttgattttttatgtttggttgatgaaaaatatttgattttttttatttcatttttcgtgaagagttctgtttttttgttggttattgagaaaaatatgatttctttacttgcttcatgagaaaaatttgattttttttcttcaaaagtgtattttttattggttattgagaataatatgattttttttttcttaataaaaaagtgtagtttttattagttattgagaatagtatatttatcatttcacttgatgttaaatagtgttgttgctgaggaaatatggtattttttgtttggttgatgagaaaaaaatgagttattttagattgattgctatgcaatttcgatacttttgttaggtcactggcgaaatggtactataagagagactattaagaaagatctagagattaatgagtttgatagaaatatgttatataatagaacattatggcattgttggatccatgtagtcgaccccatttattggaatcagggttggttgttgctggcaaaatgtgatttttattgttttttcatgatttatgagcaacccagtgagatattggtttgtttaggaggtattttactgttaaatctagtaagtgactgaaaaatcttgcagcttcaatgattttgtgcattgattatttggttgctgagcaaatgttggtgctattagataatagag

SEQ ID NO: 34033 - DNA, 1003 bp, Medicago truncatula
  Intron number 2 from transcript Medtr6g043610.1 (locus Med tr6g043610) derived from phytozome v7.0 (chr-ID MtChr6; po s 9122941 to 9123943)
acaaaagtatgtcttctctttctttatctcttctcatgacatttttgtttgcatcttctagtctttagtttaatttaatcagattatttagaaacagctaattatgattatccacacatatacatttaattatgattatgatgtttgtcatttgttatgattttcactgactcagtcaaggaaagaagaatagaaggacgtcaaggaatattgtgattattccttgtatttagtttaatttaatcagattatttagaaacaactaaaatcttaagggtatatattggtgattccatttgtgaaaggagttgttgtattgcatttgtatgcatgtgcaagaaagtcttcattttcatactaaattatcatacacgcagggccggcctaagggccaagccaccaaagcgagggctttaggcctcaagattttgggttaaaataaagcctcaaaataagtcaatttagttataaattataactaaaaatggttataggtgaagtttactactgtaatatgacatactaatgatcaatatttatctagcttagttggtcaattttaaggcctcaaattcttttgcaccaaagttcaaatcttagattcaacaaaatttaatttattatgtttttaataagcaatgtgttattttttttttcaattccaaaaggcttcattataaaaaaatttggtacatgctgggtcctttgccaagtttttggtacattaagccataaatatgcatggctatgtttgttatacacaagtagaatactcccctcgaattaaaacaatactaactcatctttgctttaacaactaattactgcagctccatggaattggaagaagaaactcgttattggtaataaaatccaattttcctttgattgttttcatatttttttccgtgtagatactttattattatcaaaattaactgatttcgatgtcgtatcattgcttgtaggtgttgtttcttctgtgttaggatcatttgcagtg

SEQ ID NO: 34034 - DNA, 568 bp, Medicago truncatula; identical to SEQ ID NO: 31247
  Intron number 1 from transcript Medtr4g158960.1 (locus Med tr4g158960) derived from phytozome v7.0 (chr-ID MtChr4; po s 40023397 to 40023964 reverse strand)

SEQ ID NO: 34035 - DNA, 1027 bp, Medicago truncatula
  Intron number 1 from transcript Medtr6g059510.1 (locus Med tr6g059510) derived from phytozome v7.0 (chr-ID MtChr6; po s 10762952 to 10763978)
cattggcatcacagtcagcatcatcacaaacatctgtatgtatttcttgtttttatgatctgaaaatatttcttagaattctattatggaagatagtaattgaggacctttcatattttttctttgggattcctttattgttgtcgaatgctcttgtcagatatttccttgcataacgtttagtttaccccattcacttgtactatgagggttatggttattgctattagtaaattcacaattttcataattagttggtcattgttttaacaaagagatgttttgatttgttcatttgtgtttctctgccagcctaaggattaatgaaattgtttgggagagattgttgaaacaacctatatcatttattatggtgtgcctagacatagatatgagtccttactttggtcaagttgttgcgatgctaagtttaaagtaatgttaccgattagacatagatatgagtccttaattttctcagtatgatgttgggtctggttttgtattaataaaacttccatgtttcggaataaaaaacaattgtttggctatagattttcagcagacacgagaactactgatttgttttagaaccaattgaaacattaagtaaatatcgaaccagttgaatccaattttaaaaaatctgaatctcaatttcaacaattcaattttcatagacatttgaagctagtcattcattgatattcacaagtcaattcttaatattcatagacaaaattatctaagttgtgaagatgacacgcctttatatttttgttttctttttacgataaaaattcagttgattgacaataacaattgcatctgttgtagtcttctcaaccattacactaccagttgatttctcgtggtaattctagcattgtctagtcgacaaaatggtatgtgtatgcaatgaatgtcaattagtttgtttgatttcattagtgttttgtgtttttgttaatgcctttccttatatgtcatctttggaattcttgtttattacagttacgtctcaggc

SEQ ID NO: 34036 - DNA, 864 bp, Medicago truncatula
  Intron number 2 from transcript Medtr3g086560.1 (locus Med tr3g086560) derived from phytozome v7.0 (chr-ID MtChr3; po s 20264437 to 20265300 reverse strand)
acgattattggtgttgtggtaagtgctttaatgtttatttttgcctttattatgggccattcaaatacatttactttaatttgttcttgtggtatatatttatgcatttcatactgccatgacaatccaccgtcttatatgtttctggaaaatatgatcttgcccgagtttttcttacaaatgcctctatatattgtttgaacctacatatcttgaattctgattatataaaaaatgcttgatatattgctgttatttatgcttgataatatgttggtgttatgtatgcttgatatgttggtgttatatctatcttcaattctaagagatttcacaatttatgtggtatactttttatttttgtggtgttgcgattgaacactgccccagaattggcaaccttgtataaaatttttaacctgtttttgttgttgttgttgttagatataaagttagttatatcagttagctatcctagttggttaattagattagttgcttctcatcactggcaatgggacgagcaaatttgaatatcaaccttttggctcctcattatcgatacactgcttccactgataaacctggaagctgaggtacggagtggagtagtcaattcagatgttggatcaggacggagtatagcaatggagactctcctccttgcctaaagagctgcgttgccgattgcactggtggtctcatggcaatgaataccctgcttattgatcttgcagagcgttcaagtgtttgttgtcatttgaagttcttctggccgagttttcctttccattcatttgatttgtgcatctctttgatggtataagagacgagggaggcaagaaattggttatccttctaagg

SEQ ID NO: 34037 - DNA, 901 bp, Medicago truncatula
  Intron number 1 from transcript Medtr7g022240.1 (locus Med tr7g022240) derived from phytozome v7.0 (chr-ID MtChr7; po s 5516882 to 5517782 reverse strand)
cttcaactggtaaagaacattcgatgttattagactgaacacttttatttacattcaaattcataaatcacataattacgtgtgtgaatttcagtaaaaacttgtcacttcgtatataaaaagaaaaacaaatatcagttcaattggttaaaacgatatttttatcttggtctaattgacccttaaacacactatgcaatagaaccgtgcgggaaatcatataacttgaaaattagtcaaaatcaactgttgttctgattacattgttgcaccatatttttcatgttttttcgttctcttttttcaaaaattaagaaaaatatgtcatctcacatttttgtgaatgggtcccatcatatcaacatttgacaaagtcaaaatgatttaagtttccataaatggcttcatttatggtgggagacctgaatagatctcctaccgtaggagatatttattttttttattttttttttagaaaaatgaaatatgaaccattggataaggactaattaatttttggatcaaattatttactatacacctccaacactcaattgctatattttattctaaattaccccttctctcttctctctaccccgtcttccttctttttttccagcaacaacacatacaactttaatggagcaaaaccaatcaaataacccttcaatatgtgattttaaagcaaatttgggttgttatagacttgaagatttcaattttaaagccaatttgtgacataaattgtagattaaaaaaattaatggtagattttgattaaactttaatttacctgcatacaacataagtgactacagtagtgacaacaaatatattattgttttctatattttgattttgagggaaatttacaaacccagaaaataattgggtgtta

SEQ ID NO: 34038 - DNA, 979 bp, Medicago truncatula; identical to SEQ ID NO: 29388
  Intron number 1 from transcript Medtr1g121730.1 (locus Med tr1g121730) derived from phytozome v7.0 (chr-ID MtChr1; po s 26605167 to 26606145 reverse strand)

SEQ ID NO: 34039 - DNA, 369 bp, Medicago truncatula
  Intron number 3 from transcript Medtr3g013520.1 (locus Med tr3g013520) derived from phytozome v7.0 (chr-ID MtChr3; po s 2600542 to 2600910 reverse strand)
caggtgcaaagttttggcttaccagttaactaaaactgtttttggttatatatgcattactagaaactatcgatttacctgctgatttttcgtggtagtttaaccgcaggaatacctgaggattttcatgcggttatcattataccgtggtcatttcctgcggcttatcttatgcttcaatttcagatttaaatcttcgttttctcttgtgaccaatgttaacttcaattttcaaaatctagcgtaatcaggttgaagcatttatgtaacttttttcaaaatttatattcttgagtaatcattgccttcaatttctttgttgattgtgtttttgttccttcttttgatttgcaggaagttgatttgggc

SEQ ID NO: 34040 - DNA, 523 bp, Medicago truncatula
  Intron number 1 from transcript Medtr4g165650.1 (locus Med tr4g165650) derived from phytozome v7.0 (chr-ID MtChr4; po s 41778036 to 41778558 reverse strand)
gcaatgtgttgtgtatgcatttatttggtgttaatggtacgagagaaatgtaatttgtttttgaagaagtacatatcgctgtctctttatttcgaaaagaattgccttggcttttatggtgcccggctaatgagatatttttagggttctatggccgatattagtggtcttgttttcctgatattagtttacttgtttaatcattattgttacctttaataggatatgttggcagcatatcttttctaataaacaaaattcttatgggacatacatggtgggagtagatttgaatgtattgtcatttgaataatttcctctttattttgtttgttatatattttattttctagctgcatatgttatcctatgtattcataattccatctttttcaattaataatattatttataggaaaatcttactggggtgcttcaaattaagttatttgttttgtttttatatactgttagtttgaatactctaactgtgatacaataaaacttttgatccagtatttct

SEQ ID NO: 34041 - DNA, 741 bp, Medicago truncatula
  Intron number 1 from transcript Medtr3g123410.2 (locus Med tr3g123410) derived from phytozome v7.0 (chr-ID MtChr3; po s 30960196 to 30960936)
ggtcggtagatctctcttttctcttttagatctcttctttttctttctcgatctgttttttttcaaatcgattcaatgttcgtgttaatcgtgatcgcgttcttctgtttattgtttctttcgtgaatcgtgattgatagaattattattattattattactactaaaggaaagaaaaagcgattttttgtttttatttttaaattgaatttggtgtgaaaacaatgtaattgaaatggatcttagcgtgattttgaaatctgaatggacaatgattctttcttttatgattttcttagctttagttgcttgtgatagtagcgatgtgtttttttcgatctttgaaattgtgatttttactctttttctttgctttttggtttctaaattgttgtttacactatactttgcttatttatgatttatttactttatctttttctatgattacttttatattttttaattcaaatgtcgttttcattattcgaattttaatgttggatgagatcgcacttaaactgtaagtttttgaaatgagttgatttgattatattttatgttttgatctgattttagtaactttttctgattaccaagttatactttagatgacactgttgttggtgtacatattacgtaatcggaagatagtaattgttactagagatgttagtttttagtgatctaataggtatcttttttgtatggctatagctggtgattggttacaaggtccat

SEQ ID NO: 34042 - DNA, 789 bp, Medicago truncatula
  Intron number 1 from transcript Medtr1g125520.1 (locus Med tr1g125520) derived from phytozome v7.0 (chr-ID MtChr1; po s 27721410 to 27722198)
ggatttcggtttcgctaatttggttttggatcaaggtagatgtggataattttgagtttgtttatgggttttatctggatttgatttgatgaatatgacaaaggtccggaggagaagggaagaagatgaagaaatgttaaaaagattaggtgtgtggggtgcaccataaagtagtcatgtatgatctaatggttgtatttaaaaaaaaaaaaaattaaacaattaatgttaatcaaattaatgaggtctttggtggatcccctacaatgttatccacctcaaacattggtgtaaaagataacagaaaaggaccaattggactgacataagtaatgttggaccaaaacgtaacaacaattaaataagtaaccaatatgaaaataacaaataagttagggtaacaaatatgcaatttagccaaaattaaactatcaaaattagtttatgactctttagatagatcttaaatagattcccaactttatgaatatttcaaaaaggtcattgactcttttaaattttattgatattaatcctttaaaaatatgtcagtgaataaattaattgtaagtgaataaatttaagtaccaaattgaaaataagttgttaaaatatggggttgaattgataggaagtggttttttttttttttaagaagctattgataggaagtggttaaatatacaaaatcaactttcttcaaccagagatgtatggtccatcaatacttcattgcttttgacattatcatcaaaattcatcacttaattctaatgtctagaacagcag

SEQ ID NO: 34043 - DNA, 814 bp, Medicago truncatula
  Intron number 2 from transcript Medtr3g008930.1 (locus Med tr3g008930) derived from phytozome v7.0 (chr-ID MtChr3; po s 1193490 to 1194303 reverse strand)
agaaagtggaggagaaggtaatgattatacttcaaattgtttgctttcatttattttggactgtctattttttttatttgagagatgcatataaatgtttctttagaaagaaaaccttgttcactccatgacactaagtaagtatatctttagtgagaaagaataatagaatgccgaaatcaacatgatgtaccttaaccttatccctttggctagtccagttactctttattatctcatgaattcacgatattcataaaacataaaaagagtaggtgtcttggttaattggtttgtgcaaccgaggattaaaattaagggattgttctctgatgcattcccatttccaaaagcagcaggtctagaaggagctgtcatgaagagttgtgctagtgacattttcaactaaaacaagaaatcagccaaaagtgcactttagatataccagagggaagtagaggtttaggctttcctctgttagactttgtctgccttgacattatttgttctttttccacagcagtacagccacgataattaaatctttttttcctgctggacgatgttagctctgtgtgtcatatgacattaaaactgttgctaagtttcagaatatttgttttatggtgctaaaattaaatattgatgtgcagtcattagtcacttgcactgtccgttcttcattttaatacgacgagcagtgcttgctttttcgtttatgtttaccgcttatttcaaaacatgcattctctttgtgaataaactcatttaaaaagctgtacttgtaattttccagggggcatcaggtttgaag

SEQ ID NO: 34044 - DNA, 438 bp, Medicago truncatula
  Intron number 1 from transcript Medtr2g126850.1 (locus Med tr2g126850) derived from phytozome v7.0 (chr-ID MtChr2; po s 30818379 to 30818816 reverse strand)
tttgaagcttttacctttggatttcaaggtgagaagaaagaaccttcttcaaaaccatttctcttttttttttttgcagaatctcttacttttaaactttgaagcttttcttttaagtgattaaagttttaagcttttttctctattttgcatcttggattctttttaaggggttaaagctgctttttttttttcatatgcctttgataattttttatggttgattttttgggggttttttctactttttttagggtttcagtgtttttattgcatgatgaattgttgtgtttttgctgattttttttttttttgtgttatggaagttttttcttccataagtgcttttgctagttaaattatttgattatttttcgcagatctagtttagtgtttgctcattttgattttcatctgatccaagacaaaggggttgcc

SEQ ID NO: 34045 - DNA, 497 bp, Medicago truncatula
  Intron number 1 from transcript Medtr3g102020.1 (locus Med tr3g102020) derived from phytozome v7.0 (chr-ID MtChr3; po s 24800511 to 24801007)
ttaaggaagaaataaaaagtggtagggctgagtccctttttttttttttctctcgttaagaaacattcatttttttatcgagtgaaataaatataacttttatgtgagatttatttttaaagactgagattcacattaattttaatcgataataaaaaataaatactaaaaaaaaagcgtttataacacccgtctctcttgaattccaagaagagagtgaaagtgaagtgaagtagacgcgtacgtacagaagattgtcaagttgattacatcaaaagagcaagttggtattgcatctcttatttattgagaggttaggggaatgtgacatatctttgtcgttgatgtgtgtgtgtgctcatttctcaccttgcctggacttcgtctttctttttcctatttgaaatgttatgattaataatttatagtatacgttttaaatgtttgtatgaagatttttataaagattcacgatttattttgcagggcaaaaccgt

SEQ ID NO: 34046 - DNA, 837 bp, Medicago truncatula
  Intron number 2 from transcript Medtr4g120660.1 (locus Med tr4g120660) derived from phytozome v7.0 (chr-ID MtChr4; po s 28086889 to 28087725 reverse strand)
ggatctgttcaaggtgattcctttttgttcccctatagaatttggggtgctttgtttttctgatattttgttacttgtttttcaattctgtaattgtaaaaaaagaaatttttgatgtttttcatagctgggttttgttctttatgtgaagtaatgtgtgcttgatacgagtttgggttaaattggctatgtttcatgtttcatgtggctctactttgcttgttttgtatttaattttatgacatagaaagttaagatttaggtttgttgccggctttggtaatgtgttggtgttgtgccattgatttgtttgtgaaagatggtctaatttggtgccattgatctgccatagagagatttttgtgtagtggtatgatgctagctgaaaatgtgtcgaccggttttttcaactttttagttcttggttgatgcttgagttttttcgttaggggaaatcctacgggatgcttgagtaccctggtgatcagggtgaatagcgtttttcctattaagggatgcatatcgcaggaagatgttctccattatgtcgatgggatgggagaggcgtgtgctgagatgcttggacatctcctataacaatccttttcttagacatactttctaaaaataaaaaaacataggacgagtaattttatatgtattttcttctaatttttcttcttctcctagcacttttacatggtgtgatcactgtactttcttgctgtgcaagacattttatttatatatattgttggactcttgtctctgttatttttgaacggaaaattcctgtctctgttattgattattattatctctaaacagatcccgcta

SEQ ID NO: 34047 - DNA, 484 bp, Medicago truncatula
  Intron number 1 from transcript Medtr2g129910.1 (locus Med tr2g129910) derived from phytozome v7.0 (chr-ID MtChr2; po s 31541916 to 31542399)
attgcaaggtaagccaaatcaaaatataatttatataaaaatttaatttccttcaacatgataggacataacatgatcatttgttatatattgtatttcctacaaatttgttgaaatcacatcaattggtattagtgtctcggcctaatacatgttatgacttttgtgcaattcatatgtacacttatatgttgctttcttttgatataagtctaaagaaaggattctaacataagtatatactttttttgagagaaacataagtatatacttagttcttcgagttatgtaattttactttcgaatatacttgttcatatatctatatagttaatataatttgatgtgtatataaatatttttacatagttgatgcataattattaaaatcctatttgaatctcaatttaacaagaaaaaaaaatatataatactagttcatgtgtgagtaacataaattctttgttacatatacagattgaat

SEQ ID NO: 34048 - DNA, 690 bp, Medicago truncatula
  Intron number 1 from transcript Medtr1g078900.1 (locus Med tr1g078900) derived from phytozome v7.0 (chr-ID MtChr1; po s 15653990 to 15654679 reverse strand)
gggtagtgcaacgaggtttaagccgtaaattgcaggtaaactattctctgaataacttgcaccttatttgaagatttttttttttttttttgaaacagcaaatcttatttgatgagagttttatttactttcggttgttttaaatttttgttatggttggtatatgaatttaaggcaaatgagatttgcaatatgtttagggaaggatttatgtctttgatcaactatttctttaaaactgttctctgaatactcttggaacttatctgttgatttttctttttttaccttagttagttttatgttgttatgttagatgaagttatggaaaatacaaatgcaatatgttcaaggaagcatttatgtctttgatcctctatttacattccatacctttatagtataatgaagatgtcctaatcaagttagaaattcagaataacagattaaaatagttaagtttgtggaatgatcttgttgtatcaatctcctatgttttttttttttggatcactagtttgttcaccttgctgcaattgccacattgtttgttaaattccgtaaaatggtgattcttattattacaagccgttattgttgctaaacttgttgtgtttgatctatgattgagaccttcttatcttttattcttcaggtgttcttgactcaagaaggaaagagctggggcgt

SEQ ID NO: 34049 - DNA, 736 bp, Medicago truncatula
  Intron number 1 from transcript Medtr5g076500.1 (locus Med tr5g076500) derived from phytozome v7.0 (chr-ID MtChr5; po s 28010091 to 28010826 reverse strand)
ggaagtggtggatcattgaagttcatatgagcaaataccattttccaacaaacacaacaaaaatagtatcataataaaagaacagttaccgataacaacaaattctaaacacaacaaaaataatatcataacaaaggaatgttaacaataacaatgaataaaaaacgactaacatcataaaataaataagaaaagattgataaaaacctaaaattaaaagggttataattttttctaaggaccggagctataaagggccgataaattagtgtttttttatttttatttttatatatgattacgctttttgccccacacaaatgtgcaaatctttgggacaaaaacttcaaatgacatttttagtttttttaaaagctttggaagataactttcaggataaagaggaaataatgaagtcaaaagagcaagcatttttttttctttctttcgaacgtaaacccttgaagataatgcaattaattatcagaataattcctaatcttcctcgcttaacctaatgcaactaagccagaatgggacattaggcaaaggaaaaaacactaaatgcagaggacattcacattagtgacataataatatgtaaaaagttgagctttggtgttaaaagatttggtgttaaaagatttttcagcagtgttaatatttttccatagttctttcaacgttcaaagaattgataggaagcagttgaagaagcacaagagtgaaccacaac

SEQ ID NO: 34050 - DNA, 850 bp, Medicago truncatula
  Intron number 2 from transcript Medtr5g044290.1 (locus Med tr5g044290) derived from phytozome v7.0 (chr-ID MtChr5; po s 18372593 to 18373442)
actgtgatcctaataacgcttttgacccatcccaggtatttcattatacatcaattaatattatttttcaaacaatcttttttctttgacggatttttcgatcaattgattgaaaagaataggttttttggattcacaaaatctcacatgttttctaaagtgtacttttaaaaaagagtttaattaaaaaatttagtcaaaaacctccatgttttctgaagtgtactttcaaaaaagaattttgtttcacttcctaatcaaattttgagatctaaagacaataatttttaaaaaaagtaaattgattattatatcaacacaaaacttttgtcttcaaaattattttttaaccccaaataataatatttgttcaactaaattttatacaaatatacccaaacatcaattatacaaattaaaattcaaaaatttgttttcactaacaacaatcaaacaaaccaaactgaatttttttttgacaaaaaaccaaactaaacttattctttttctaaccataaatagacctttttaatcattgtattgatttacaagtcattatacaattaacgtgtttgtctatagtcacaaaacaaatgtttccttatccattttagcttataccctttctctgtctttattaaaacttttcaactttattctaaactttgccttaaatatatatattcttgacataacttgtacgtagagaattgactaaacctaaaaaccagtaatttgtttgtatcctataaaatatttagtttccatattaatttaccacagtatcactaatttgtttgtgtacatgattacagatatctgatctcaaaagcaatttacaacagaactg

SEQ ID NO: 34051 - DNA, 997 bp, Medicago truncatula
  Intron number 2 from transcript Medtr1g107980.1 (locus Med tr1g107980) derived from phytozome v7.0 (chr-ID MtChr1; po s 22905656 to 22906652 reverse strand)
cgggtgtttgcagcaattcgatttttttagtacatgtagttttgcatcagtgcataactgtctcaattagatagaggtctaatatgtatttgtttgaatttatggggtggatatgctgtatgattgaatgtatcaatgagggtagatattagcaagtatgtgttataatagcaaatagctttgtgcagagaagagtaacagaaaattgtttggaattccgtgatgttatactcagcttagttgtgtaagaggtgtaatgtacttgcacaacttgtgctcctgttaataaaattttcttttacagaaatgcactataaaacacatatacacacctctgtagacttggacaaatttgttttatctacagatctataaatagatgagaaaaggaaaaactagtattattttatttgaaacatacatgaatttcacttgcctcaaacttttggataggtttgagttaaaggattataagagttgaggagttaaaggtcaaaggttcatattctgttaagaagaaaactaacataacaaccaacacactaacatttttcgttaaaaaaaaataaaaaaacgagtgcatttgtctggttgacttgagcttacacttgtgggagaaaaaaagtgcagcagcaagagaggtttgtcaggggagagagaaagagcatgaatcatgtgtggtaaggactaaagagatcctgtaggctattaatccatcggtcaaattaagtggtacaccaatgagggacttaatagagtcctcaccttagaagccacagttttttttttcctacttgcacgtgtttcaccgacctttacgtcgaagactggcatacaagttgttgattgttgttgttttgcaactgctttaggatcatgactcgatttccattatcactttttaatttgtttctatatgttcaatctggcataattcttagctattttattatcttcctaagttgctgcgggaagaaattatccggaggtacttcag

SEQ ID NO: 34052 - DNA, 571 bp, Medicago truncatula
  Intron number 1 from transcript Medtr1g100030.1 (locus Med tr1g100030) derived from phytozome v7.0 (chr-ID MtChr1; po s 20637643 to 20638213 reverse strand)
tggttgactcatcaggtttgtctttattttcattatgttttttggtgctgtgttctttattgtactagcttttgatccttggaatcatgggcattataaacgacttataacataaacgcttatacagtaagtgattatatataaactatttctataaccaaaggtaaaataaagtcaaactattttcctggagatagcttataaatatgtcataagttgtttccataagctcttctaaacagtctcacagatacttacttacgccagaagataagttctaataaagcaatccaaaatggtccttaattttactttaacgccatgagtctaggcaatagtagtagagtctagcttctttatgtagagatcaaatggcatccaactagaggaggtttttggttttctcctcaaagatatccttccctctaccaacttgccaaacttctacttcatagttgcacatgtaccaccagaatttgatttttctcccttaatacattctcacagttcttttccaaatttaatatgttaatgtcctttctttttcttaatggagtagagctacccaaca

SEQ ID NO: 34053 - DNA, 599 bp, Medicago truncatula
  Intron number 2 from transcript Medtr2g102820.1 (locus Med tr2g102820) derived from phytozome v7.0 (chr-ID MtChr2; po s 23724040 to 23724638)
ccggcggtgagggttagagagaggcgagaggagaggtaagcttagagagagaaagagatggaagaaatggactggaccggtgtccgcgcccttatatagacgtttgaaccggtccggtttattttgctttcattttgaaccgtaggatctagggtttcttgtgttgaatggctgtgatgcgttgttaccatatgcttgatctacgttaccatgcgctgcgcgttttgaaccgtcagatctgaatctggatcaatccaacgcctctgaggcctttggatgatccaggtccagtctgttttgggttttgttttgggcctgagttctctttcacgtttttgcttattttcctgctatttgcaccctatctctttgctatttgaaccaatgttttgattaaaaatcttgataaatttcctagaaaatccatgcttacttcttgatattttcttgatgttttatggtatttttgcatgttggaattggcaaaattcttgtatgattaatccatggcatttaaattctttcttggattatttcttatgattgttttttgtcaattttatcattgatttgtgaatatgtgataaaggccatttgat

SEQ ID NO: 34054 - DNA, 853 bp, Medicago truncatula
  Intron number 3 from transcript Medtr2g102820.1 (locus Med tr2g102820) derived from phytozome v7.0 (chr-ID MtChr2; po s 23726082 to 23726934)
gtaaaggatttcaccttaaggcacaccctattaaagtaagtgttcccattctttttgagttttttgggcttcagtagatgcatctgtaataagaaaatttctcttctcccataataaaaaaacactcatgtccaactgaatgaacgaaagtacccttgcgtgacttaagtcacgctacatgagttaactcacgcaggttataaacccaagtcatgttgcgtgttgttaataaacagcaagtcagaaacataaccattcactttccaaactttctcaaaccttccaaagtgtgctattttcactttcatgtgtgattttgatcattcttgcgtcattcaaactcaatttctcccacaaaatcaagtaactgtttgcattacccttttttggtttaaattttagtaattttggagaaattttcaattttaggtttatagaaatttggtttgcatgttagatttgttgatgaattaagttacaaattgttgtttagaagttgattagagtaggtttgattgaaatgtgatatgttaaagttaggttatagttaagaattgttagaaattttgttgaactctaggtgtttgataaaatgtctcaatggaaatttgtttgattttaagattgttaatgatgaaatttgttagaaattgatttgttaatgttgaatatagtatgtttgactacaatgtggtagtttacggattgaaatgacacttctgaaatttaactgttgtttagttagaaatgacacaatgtccgtatgaaaaaaatcattgattttttgctttttgaattgttgtgtaaatatgtctcagagacttgacagagttaggggagggagggagtccac

SEQ ID NO: 34055 - DNA, 730 bp, Medicago truncatula
  Intron number 1 from transcript Medtr2g010860.1 (locus Med tr2g010860) derived from phytozome v7.0 (chr-ID MtChr2; po s 2713870 to 2714599 reverse strand)
tcagctgtcttcatctctcctctgcctttaatttggtaagcataattcataacctgcaacttttttttagcataatttgcataataataatttaagctgccttggttgtttctttcaaacctaaattccaatcctatgctttctttacgttgttaatattccaagcatatgcacaaacttcaaagttcaaatcaactagtgcgtttccaaataatttttggaaaaccatctttatttcttccaaaaccctctctttgttaactacaaatgaaaatcatgttttttcttctaaatcaatgatatatcttatgctttactctctatattattaagaacaactaacttcttcatgtatacatctcatgtggaattttcaccagagatagtttggtaaaaaaactgtgattttcactgtagaaatttttcacagcaaaaattaagtccggttaattcaatgtaattatataagtaaaggctcgtttacctttacagtaacattatctttatacggcaaggttggtttagttgataaagagttaactcacttgtaaggttgtggattcaactctaagtgtcggttgaaaaccttttgagcgagtgatttataaatacctatgttagtgctcgtcgagccttgaagcctgctatgaccctggtgtgccccagaggctgagattccgctgcataaaattttcagttcctcagaatcattatataaaggttcttcttg

SEQ ID NO: 34056 - DNA, 872 bp, Medicago truncatula
  Intron number 1 from transcript Medtr4g008800.1 (locus Med tr4g008800) derived from phytozome v7.0 (chr-ID MtChr4; po s 1203572 to 1204443)
tgcttttgcaactaattttgtccaagacaacgctggtttgtactttgctttttctaacattaaaattgttggttgatataggatatattaaaattttgagtttattatgctaatttaacaacaccgaagaaggtaatttatgggtgaggatcaatgtaatactgacacttttgatcaaaagatgcatggtggccaatacgcgtgacactgatacatatgattatatctaataaattttatcatatcaaattattgtgagtgtttttatggtgtttggtattttggtcatgtttcataagtgaaggtcgaacaaagttttaaatctaaatccttaatatcgtaaagaatagtggagaattatgtttaaatgggcacgatgcagcccaaactgcaatcaaatggttgcacatcaaacattttaacgccgcgatctagatcacactagtggaccttggtagaaaacatctagagcacgaggttcgtagaattaggataaaattacacaattgtttctagtttaattagatgtctcgagtttgtgttttgaaaatgcaacaaggttggaatatttcgagggtcgtgataccttatttatatagaaaaagatatttatcacatcttagatagattttgatattacattatcattcaactcgatctaaaagctagctcatgggacagggttacccccgcttgtaagggactctcaacgtgatctagctttatttgataaatggtgtaagaaaattgcaactttcacatttgttttttagtttggggtgaaaaataaaacatgatttgttatatgatgatggtttctaagtacatgttgcttatttgcattaattgttcttctgttgtgttttcagata

SEQ ID NO: 34057 - DNA, 838 bp, Medicago truncatula
  Intron number 2 from transcript Medtr2g029610.1 (locus Med tr2g029610) derived from phytozome v7.0 (chr-ID MtChr2; po s 7933420 to 7934257 reverse strand)
aggtgcttaatttacttctttaatcactttgtttttctcgcttttaattgctcattgtttttatttataaacaaatgtattctgtattagtagttttttttcatgttagatagttcaaaaatttgtcaaatgtgtctaaatagggagacatgattggaatttggaagaaaagtcaattttttttaagaataaatataggttttagggaccgtttggatcaggcttattttgagcttatacaaaacatcgtatgcaaataaataaccttttatgtattatcataaacttgtcaatgtagtttatgtaaaaacagtttatgaagatgtacttttcgttgatgaaaactcataaattaacataaaagtttatttatatgcataagctcaaaaataagtcaatccaaacgggcccttgtacttttatcatttgtattatgttacttcttgatgttgttgccagaatgacagtgtgtcattgtgattttagaaaaaaatatatatttggggattaaacaaaagcgtgggtaatttttcaaattcttccggacgtgcaattaatatgtaaaatgatttaggaactgaatttctgccgtatctatttggaaaagtatctgtatactatttcaagacaatttattgtataaagtctttgacagttaccgtataaaatacacccccgagttaaactttgcattgatccgaggagagagaaaattgcaataaagaaatcaaaattgtattaatatacgttgccgggtgtcaattgatgcatcaaaataacttttctgaatgtctttatatcaggttattccagaagttagtaaagcgaacggcagcgg

SEQ ID NO: 34058 - DNA, 805 bp, Medicago truncatula
  Intron number 2 from transcript AC235756_1.1 (locus AC2357 56_1) derived from phytozome v7.0 (chr-ID AC235756; pos 10 706 to 11510 reverse strand)
tgtttcgttccacacttgagaaaattgccattcaggtaatttgtttttttcttgattctgaacaattgttggttcagttgattggtgttggaacaatcttgatgatggatgtgatcataatcatgcaagttttagtgttatgttgtgtatggtgtgattgttgatgtggtagatgttttttggcttaggccccgctatgggactaatcctcaagtagtgagacatctgatttttttaactaggactgagctgcctcccaaatgggcaactccaagaatcgaacccggattcttttcctgagagagggtcatgttgccaactctctcaacttgttgaaattaatgcatatgaaatataatatgttcggattgctaggttttactttattttattcacacacttgtatacatttgattttattgatcgtatgtgagtgttggaaaggtgagtgaatttggaacgtttgatttagagttgaacattgaatttgtgaatgacgatttgagaaaaattagaagtcagggaaggtatcattataaccacatagtttttcttgggtttgttatctttgtaacgcctttgattctgttaacttttattttacccttcatagtaagaaaatgctagcatgtatttgaacataaactttgaaaattttaaatcttatagcagttgtctctaatcttatccaatagctattgctttcatgttatcatacatatacattttaagatatgggcatttcctttcctggttttattttattacagggtctattttctagtgatttagacagtgctgttga

SEQ ID NO: 34059 - DNA, 794 bp, Medicago truncatula
  Intron number 3 from transcript Medtr5g039010.1 (locus Med tr5g039010) derived from phytozome v7.0 (chr-ID MtChr5; po s 16471986 to 16472779 reverse strand)
atccaaacctcaggtggaaaaataaggtatccaagccctattgatttatttttcactctcattagtttttcttataattttgtatggttttttcttcttcttgaaattgtttgtatccctagcaatagggatatcatttgtatcgggcatgataaattgtgtccgtgttatttttatcctttttcattttttgaaggatctaaaatgaaaagacgacataaagttatatttttaatagatcttggatggcttggatcaaaatctatctatccagattttgatatcactcaatcaaacttaaaaatgacaggctgatattagataacaagttttaattatttaaaaaaaaatataatctacaaggaatcatataaaagaaattttagactcgtattaactcacttcaagtgatgtataaggaaaatcctttgtaagagttaaagggtgatccaaaattcaactctgagaatgaatctttgattatgaatgaatacacattgaaacccaatcctcttcatcctttaagagtttgatttagtatatgaatatgaagaccaatattgattctagatcataatcactagctattttataacatatctattttgactataaaaacaattttgatgtgaggtaagctaatccttcaaagtataacttctaacaaattgtgtggtgtcacaatttagtataacttgttatttttaataataaatttatgtttatagtttcacaatttagtatatatgttaaccaattactttcgtagatcgttcgagttaatagaattctta

SEQ ID NO: 34060 - DNA, 369 bp, Medicago truncatula
  Intron number 2 from transcript Medtr5g039010.1 (locus Med tr5g039010) derived from phytozome v7.0 (chr-ID MtChr5; po s 16472786 to 16473154 reverse strand)
ttcatcaaaatttcacgtgggaaaagaattacagtgtaactgagtctacttactttattttaagtcttattagtttttcttataattttgtatgttgtctttttttctgttgaaactattttttgattaaaccataatgaataaggacgtggactcatacagtcaaatattttcattaatttaagaatgaagaagattcaaacttctcaacttttctagaaattgagagtgaagatgcaaatcttccacatcggttttttcttttaatttatatgttgaattttttttcttgaaacttttttttttcgatcacaccaaaatgactaagaatttagactcacacatgcagatatttgcctgagttgaaga

SEQ ID NO: 34061 - DNA, 531 bp, Medicago truncatula
  Intron number 2 from transcript Medtr4g005370.1 (locus Med tr4g005370) derived from phytozome v7.0 (chr-ID MtChr4; po s 203412 to 203942 reverse strand)
caattttgttttgtgatagcatcttcgttgttctggtatgttctggatccattcctttgtttctggtttgttttaattatggcttgtgattttacattttgtgctaaattctccatttctggtctccaatctatttttgttatgtttcatgttgattccatttaattcattcgtcctcatgttttcaatttcttgtttctggatttgattttagtctcattgtaattcaaaattttcattaagaaagcacttttcaattcatttctgtcacaataaaagaattaaattgaaatgtcttgttgcactactcaatctagtagtctttttttttttttttttttttcatttcaattcagcattgattttggttaggtttggttttttgtttttaagaaggttttgatgttctcttaaatggtgtggtgctggtcatatatctcattttaattcatcataattgtctgtgttttcttttcgctcttttggatttctgtagtttttgttctggtgttgcagtttgcttgagttgct

SEQ ID NO: 34062 - DNA, 542 bp, Medicago truncatula
  Intron number 2 from transcript Medtr4g080530.1 (locus Med tr4g080530) derived from phytozome v7.0 (chr-ID MtChr4; po s 16551454 to 16551995)
gcaacacgggtacttccaggaggtcacccatcctagtactacctatttctctattagttcattttagtttactagagacatcaacatatttattaagctcgacggaaattttattcttttctccttcccgtgccccatgtggaacaaggttttgtagttaatttacagtttccagctgattaggtgactatgtttgtatcaatcaaatttaaagctagaacatatactaatagaaaatataagggctgtaagtaggttattgtgtttgtaacaatcaaatttaaggaagaacatatactaatagaaattatgacttgctggtgtcgcctcatgttttaatgaggcttatgaaggaggttttgcattagtctttttggtgaacgattgttggtgtgatttagtcatagttctttgtttttgatgtgagcatttccttttcggatgttttgtttagcttttattgtgtgtgtctaaaactcatatcgaagggattttaccttcttccaggaataccgggttgtgcaaagtctgccctttgtaaa

SEQ ID NO: 34063 - DNA, 979 bp, Medicago truncatula
  Intron number 1 from transcript AC145328_5.1 (locus AC1453 28_5) derived from phytozome v7.0 (chr-ID AC145328; pos 24 154 to 25132 reverse strand)
ttcagtttatagtataggatttgatcttatttctatcagttatttatattctttataagattttgtttgtggactatatattcttaggtttgagtatttcaatataataattcttgcatgtatggataaattaaataaataattcattaattttagttaaatttcatggatttcatatttttattcttttttaattatgtatgagagtaggatgaaatattttattagaggataaatctcttcatctattttttatactaatttttaaatgcaatatcttgtttgtttcttttgtagtttattattcttagctctggtcatgtgtgatgtattcaatgttgaatgtattttaaaatctatatttgaagcatgaacacacttcataggaatacgtaattataaaagtttacgaggaacgacggaaaaacaaaccctagtagactcatgggttttcaaaattcacataaaattataaactcaaaatggacaaattttttattaattgaatatattaatggagtataattttttttatgcgaagtttttattctgttttcttaatgtagttttcatgttgcacccttttgaaaaaaaaaaactcatattttggtacgatattagaaaaatatcattagtatttttaatttatatttctatttagaatttttttaggatttgctctttatttattttcatttgagggaagatctatattttattcaaatatatgatttagaaatatgttatgtataaaaaaaaatgagggatgatttgttttttgtttaaaaaaaaaatgttttatatgaaaattataatatcttaataagatattattaaaatatcattagtattttgattttatatttctatttagaatattttaggattttttatttatttacttttatttgaattttctatgttttttttttttttttttttaggaaatatattgataatcaaaaaagagaaacaaaaa

SEQ ID NO: 34064 - DNA, 881 bp, Medicago truncatula
  Intron number 2 from transcript Medtr4g121260.1 (locus Med tr4g121260) derived from phytozome v7.0 (chr-ID MtChr4; po s 28375526 to 28376406)
ctgctcatactatattggaaacaggtttattattctactctgcactcgggatcttctaattgttaacaaaaacaatattcagaaagaagaatgtgttttttttttgttgtaaatgtatgcttgtgttggttgtctttttcatctacttcggtaaacatgctgattagtcatatttctgtatgtggccattcagtagtatttatttgagaaaagcccattgtcattggaatttttccatctttgcttctgtgtgatttaggaatacatgtgagattattttccaccttttctaggttatatgcattagtttggaatctggattattgaccattatccttgatatgagaaacaatgtgcatatgcagtcatgtcttagactgtttggtatttttaacattctctttctttgtaaattttttatgttaaaattgattttcatactctttattggttcaacgtgattgtggtgaggaatttcatcatgtcattgcaaaatatacagtgcttgtgtaggttttcaaatgccagttaaaagagtcttttgtctgtaatttaactcgaagtgcttccaaatgcctcttatattagtttgtttatcatcatgaaatacaaaattactttatagtttaaagcgaagggttgagcatggatggtcagtattatgcatcaaattatagttgagaagttctgatgggactgaatatctttgttaatgttcttttgttgatcgttgttgttgttgtgaaagtttgagtttgaactataactgtgtcgattcctttttgtctataagctcatttctattgaaaattggttggtatattcttacggctcatctaattgcagatcaagcagagcttgactttgaggcaaagaaacta

SEQ ID NO: 34065 - DNA, 342 bp, Medicago truncatula
  Intron number 1 from transcript Medtr5g047240.2 (locus Med tr5g047240) derived from phytozome v7.0 (chr-ID MtChr5; po s 19925450 to 19925791)
ttttgtgctcttcctttctctgactggatattcaagtaagcaactaaatttggttgttttgatttcattcacaagtgtttaaacatcctttttagttctaaaaatccactttttcatatcttacttttgttttgattatgtcatataagtctgaaaatagcaaaattaattttcttctaaaagtgccttttcttcttcttcttttttctacactttttgcttaaagattttagttcattttagttagtgtcaatttcattaaacccttttttctttagtaccaatagataagtttatttattttttgttcaataggtggtgctctttattgtgtgtgtaaag

SEQ ID NO: 34066 - DNA, 795 bp, Medicago truncatula
  Intron number 1 from transcript Medtr3g103750.3 (locus Med tr3g103750) derived from phytozome v7.0 (chr-ID MtChr3; po s 25619219 to 25620013)
gctggaaagggttatagttttgttgggtatttagctttgattcctattgatgatatatctaaggcatttaagaagggagaagttaaggataagaaatcaaaataatcttatactgattgagttttactcttctaaaaaatttgcttctaagcgactttgttttctatgttgagacaatttgggcctagttgtggctatgaatgtttgacgttaattagtaagatcttgtaattaatccaagtatctaaaaatagtgatagtgatcatgtaaatttgcgataaaatggttctgaagtttgcttagtgttttttgttacaagtcatggactcggagctgccctcctatcactcttgtcctggacttggatggtaagaaagtcatatcccaattttaagttgctaattagatgctttaatttcaactcacaatggtataatcataaagaagctgccttgtaactttttggctgtgagttctagacttctagtaatgcaaaacctgaaaaccacctttctgcataggactggtctccatttaattaaagtgatcttgtatctgaagctatccaactatttgaaaatgcttgctagctgtaaacatgttttattttttttgagtggtaaatggatttttctattcttcctgtttgtataattattttttttcagtttatcgcattcatattttccttttctcttgcacaacctttggttgaactgctcatttttatgctttgttttggtatttttctctctgcagaaactttggtgcactcttccctgaaaccttctgag

SEQ ID NO: 34067 - DNA, 926 bp, Medicago truncatula
  Intron number 1 from transcript Medtr5g085920.1 (locus Med tr5g085920) derived from phytozome v7.0 (chr-ID MtChr5; po s 32910830 to 32911755)
gctttttgcagtttctcttgttgcagctggttagttccttccttactatgctttctttgttttcaagagatgctttgtttgtttttcactttttgaatatatgcttgtgttttgaatcttcctttgttcttttagttctatattctttacattggtcagcattgttcagaaaccactaaaacatttaatatttgttttaactttatgggttctgcttgttaagccattgtttccatgtttagggttaaccctctagcagaggagtttgttatttattaggaaaattttcaactttattttctaaaaaataatgcacagtagtggtggtgtggtataaacttgatttaggttaaagtgttgttttagatttgaacagtgttgttgaagtgttaagaactaaggtttgaagagtatgcatttctgtttcttaaaatgttgtttatttgttttatgtttaacttttggctaaatataagtaatgtgtttaaaataattaattatggttttatggttaattttcttgaatgtggtccttctttaggattctgatttattatttgaagtagaatgttttttatttgtcattttccccaacattgcaaaattatttttgaataaagctttatttttgaggggtctattgttctattcttgaaaagttttggttgtaatgttagacagcaagcatcaattttttaagtactaattaagtaatgtacactagcatatttatggacatattaaccatttatttaactttttccccccaaatattaaaaatattgttgcatatgcttccaagatgaaccttgtgtttatgtgagtggttaattctgtgaggacttgttaaaatcttattgttaatggatcttaatgttttgtaccttgcagcaccttttattggagtgaacattggaacaagtctc

SEQ ID NO: 34068 - DNA, 924 bp, Medicago truncatula
  Intron number 2 from transcript Medtr1g108310.1 (locus Med tr1g108310) derived from phytozome v7.0 (chr-ID MtChr1; po s 23052758 to 23053681)
gggagttttttataagcaggtaactcaatgtcaatattagtttctactttgcttgctgttgatatgcatatgtgcatgactttctttgtttgcgtgtcttgtagtgtatctcatgtcacaattatagaggtacattgattaaagggtgttctataacttgtattgcaaatatggtcagttggtgattttaataagaaatacttttccatatattatccgtgagttaaaaaatttgtgaatgcctttataaaaacaattctttaattgattaaccatgctactgacttgggtataaagaagggaaatgctaacaagtgccccaatgacacttgttaaaaagtttaaagtggaatgaaatctttatcttggaaattgtgcattcaacccattgaaacaacaaaaaggaactttttctacataaaatttatcgattatttccaattttgaatccttaacaagtgcccttagcataacccaagaattattattggtatcatcagttacaatcacaaattatcaaaaagaatttaccctgaatataatttttaatgatttatgttcattgccactaacaatgatttgccagtgaatagaaaatgattattttctttatgcgttgtatcgtacacttgaggggaaattctagtatcaaaaggttgaaaagaataaatgtaggtgaagaagacaaataaaagtatgcaaattttcagctaaatctaattagtctttatgaccccatcttctccccccaaaaaatagaaaaagctaagtgcgtaaaacatgacatacgttcacgaaaactaatttatcttggtattagtttatcctcttcacttcttttaaactttgttatgtacttgacgtcatgacccaattctttatttttcaggcaagaaggtagagacgtagaaaatagctcatctc

SEQ ID NO: 34069 - DNA, 163 bp, Medicago truncatula
  Intron number 1 from transcript Medtr2g025140.1 (locus Med tr2g025140) derived from phytozome v7.0 (chr-ID MtChr2; po s 6612826 to 6612988 reverse strand)
aaaaaagtgtgcataataaaccaatagagttttcttgagataaattaggattatttacttttttttttttttgtgcatcatgcatggaactttcttcaaagttgtcatgtatcatatgaactttgattatgaatattaatttggttttgtatgtgtgcagagg

SEQ ID NO: 34070 - DNA, 568 bp, Medicago truncatula
  Intron number 1 from transcript Medtr3g044170.1 (locus Med tr3g044170) derived from phytozome v7.0 (chr-ID MtChr3; po s 12259880 to 12260447)
ttattgtacagtacaaacgtctatgcttcttaatattatgaaatactatatgacaatcaagacattcatctaaactattttattacctattaccgtcaaatattaccttcgatatgacccttacgttagcacgggtcgatggtctagtatataaatatattcatatcatgtttgttacatttttttaatattgaaatttattcttatctatttgttgcatgtgttttttatattgaaaattgaagggttttttaaaaaggaaaagtcagctcaaaaagttcaaagggttttttttttatagagtatagattaattaattttctctcaaaagatagaaccaaaccaacttgttccactcttacatgtctcctaaataacaactcttttttatctgaatgaaatgaaatgtaccagagaaacttacacacaataactctttgttacactcttgagcgtgttttgttccatgcaatgtggcataagcaaattccgttaaaggttttagtgttttcctgacgactcctttacaacagaatttcaaccaaagacaatcttcttcgttggagag

SEQ ID NO: 34071 - DNA, 586 bp, Medicago truncatula
  Intron number 1 from transcript Medtr3g025790.1 (locus Med tr3g025790) derived from phytozome v7.0 (chr-ID MtChr3; po s 6798075 to 6798660)
tcctcgttctttgtatgttcttcctagttcatacaccggaagttgacgtgtcagtttagtgaaattcaataaaacactacgtttaataaaactatgaacaaatcataactaaattctggttggaaatcatttctttttctcagtttgtgaataagcttatctatctgcataattcgaaggttctgctgtgctcaaaaagaaataacagttcgttagcgtatgtaattagctgcaaagactgtaggataaactcatatattaataattgtaatttgactattcagatcagaattttattttatgaatatatgagaatatgttttacaacgctctcaattttctctcacttctattagatttcatgctggataatgtccgatgtttgtgagtctgatttctacatatcatgaaactcttttttggtaatataaattgcatcacatcaacttttccctatttttaaattcaatcataattaagataacacataattatctcactgacacaatctttttgtaaagatatttgatatggagaattcgtttgaagaatctaccccaggaatatttgagacagaaaacctagt

SEQ ID NO: 34072 - DNA, 370 bp, Medicago truncatula
  Intron number 2 from transcript Medtr3g068920.1 (locus Med tr3g068920) derived from phytozome v7.0 (chr-ID MtChr3; po s 16359113 to 16359482)
aagttttgtatttgaagcttttgattccaagaaaggtatattatccaaaatccattttcataactttctattgtgaatttttttttttttttttttttatgtatgcatctttgaatatttctctaatccctcctcctcctccatcttctagtttcttcaatactattataataaaagtttactttttacatcgtcaacaaatcacaatgatcagttattttttttttttatgctataactacttatgattaaagctaaacatttttaatgatctgacaattatgaatgattgaaattgtatacgaattaaatcctcgaactgaaattctaattaattttcttgtgaaaattttgttctaaaagtgaaaga

SEQ ID NO: 34073 - DNA, 813 bp, Medicago truncatula
  Intron number 1 from transcript Medtr5g089980.1 (locus Med tr5g089980) derived from phytozome v7.0 (chr-ID MtChr5; po s 35024751 to 35025563 reverse strand)
tcaacaatatcaccctcggcggccgtggcggcactgtcagctctctctctctagaatcttccattttcgttttctcgatttcacattacatgcatcactcaaacttttcgtaattaagaaaaaaaaccctaatttattttactattttctttctctttattcatcgctaatccctaattattatgattatcgttattagcattctaattatctatttgttttgtaaatattttcaaaattagggtgtttggtatttgtttctcgtatcaaaacggttattttgatgcttcattgtgtccgacgtgtcactgtagaactcgaatttatctgttccaatgtgtcttttgttggttaatttggttctcaaatgtgtcttttgttaattaatttggttttcgagtggattttctatctgtcagtttttttactcgaaaagttttttggttatgcagactaacaagcatttgcaaagtcatttttgttccaaattttttatcttccaatataaatcctactcaaccaagcacactgaatgatttcatgtataatttatttaaatatccataggaaggagtcgaatattcgcagcctttctacttaatgttgcattgcttgtcccatgccaatgatttatcaattttcacttttattgttttataaaagaactatgataactgggggaaaatgagttttttgtttttagcaaatttgtaaataaataggtggctaaatatagtgattgttttgtatgacatatgacatattatcggggttgcagaatccggggcagataaaaatatattctgggggaat

SEQ ID NO: 34074 - DNA, 600 bp, Medicago truncatula; identical to SEQ ID NO: 31332
  Intron number 1 from transcript Medtr5g098830.1 (locus Med tr5g098830) derived from phytozome v7.0 (chr-ID MtChr5; po s 39477820 to 39478419)

SEQ ID NO: 34075 - DNA, 560 bp, Medicago truncatula
  Intron number 2 from transcript Medtr1g046170.1 (locus Med tr1g046170) derived from phytozome v7.0 (chr-ID MtChr1; po s 10686045 to 10686604)
cggcaatcggagcatatttctacacaacggttcaagtaagatactacactttctagctctactaggacaatttttatttttgttgtgttaatgtagtagcataagaaatacagaagactttgagttcaagaaaactgtggggacatatataatgcaaatagaagcataagactaaaaagtgtttaggtaatttaagtgaaacaatatagctccagtaaaatgtttagttacattgacttcgacgttgtagaggtgttaaaccgaatattagaaatttatgcaaatctaggatattggaaatttgcaaagaaattccaataactaatgaccttgggcttatttgcgtacgtgaataattccaataactaatcctttttctcccacaaatacgcagtctagcatttctttaagttcacacaaattacctgtcttaagtaacaatgctataagaaatttgttggtttattaatattttaattttatagagacaaatggctaacaaaatcttttttgacaggcatgatggtcttgattgtttatcacacagtgtcaacaattct

SEQ ID NO: 34076 - DNA, 904 bp, Medicago truncatula
  Intron number 2 from transcript Medtr1g068790.1 (locus Med tr1g068790) derived from phytozome v7.0 (chr-ID MtChr1; po s 13816243 to 13817146)
catttgtctccatctctccaacaaaccctaactgagtaagtgtatattatttttgtttttttgtttggtaatgatactggtgtttcctattgtttggtgatgtatttggtgtttgatttgtttttcaatttcaatttttctataaccctaatcaaaacaaaaagggaaaataaaaaagaaaatcaaaaactgaaatgttgattcctcaattgtaatattgatttataatagttttgaactgcttattaccatttagtgagttttgaactgagagtgatttttcagtgacttttcctatataatattaacttgtgtatgctatctttttttctgaagtgtttttcttttggtgtgagttttgttgtatggcaatgacttttgagaggaaaatgtaataaataatcctaaatagtagaggtaaaaaagatggaaaatgtaagcttatttgattcaaaaaaatgtaagcacatcttcaacttcaacttgtagcgtgcctagatatgctaatcttgttgcttcctctatttttgattatgtatggtttttctataactataatcatgttctagcaacctctcatgaaaagtagcaacattcatggcattttccatcagaaaagttctatcgaacctggctcagcttttgaattcagctaacatggtcttatgtttatgaaaatcaagtgaaatataaattggttcattttgaaatcatgtacgttatttcaatgaaattgaaactggcttctgttatgaaatttgaatgttattagaattaatgtaacattgaaaccatgtattgtaatttgatttttacttttttttttatttgattttgaaattatgttgattttgaaagtgtttcaacaggaaaagttgaaaaatctcttcattttttaagagga

SEQ ID NO: 34077 - DNA, 1040 bp, Medicago truncatula
  Intron number 3 from transcript Medtr1g068790.1 (locus Med tr1g068790) derived from phytozome v7.0 (chr-ID MtChr1; po s 13817774 to 13818813)
catattgtgagagttgctcattgagactctttgaggtatatttatcgacttacaattctcaattagtgtttatttacacatgaagattcgtttagaaattattttgtaggttagaatggataatgtagggattttatggttaactctagttagagaagtggtagaatgagtttctaattcatgagaaaatattattgatgttcagattcggtggaaattgctccggtggtcattcggaaaggcatcactaggaattgatattttcacgaaaattgaatttttatactttctttgaagttgattattttgatttcatttcattaaatccgatttttatattctatttggatttctattatttcaattccttttcattatgtgtgatttctatattttctttaaggttgcggatttgggttgacctctttacaacattgggatttcgatataatcttatttggtttgataaatttacaaagttttttgaattttcatgtatacacttgattgtgaattttcatgcgtataaacgattgtggattacttaaattttatacggatactagttttgtaaatctatattagatttgagaaagtaaataattgtgcttgtgtgtttcccttctagttggtggtgattgttgtctcctcactaagtctttatgacttaccccttcttcttatatttttttcagattcaaagtcaagtgcgtagaaagcttgtagcagagttaaagatctgtcaatgtcattcttttgggtaggtctcctccctttgtataaactgaatggtcgatgtatctgcagctattggtagtcgacaaatgttttgttttgagttgtataaacatctagttatgtcactttgagattctgctgataatacaagtatataggcaggattcatatcttggaaagtattcaaaatatagagcatacgctgtcgaaatttctgtggatatcattataagtgaaagtaaatttgaaaattgtttaaattatagtttgtcaaggattgtcaataggcttgccggactagg

SEQ ID NO: 34078 - DNA, 1066 bp, Medicago truncatula; identical to SEQ ID NO: 29698
  Intron number 5 from transcript Medtr1g068790.1 (locus Med tr1g068790) derived from phytozome v7.0 (chr-ID MtChr1; po s 13819320 to 13820385)

SEQ ID NO: 34079 - DNA, 1062 bp, Medicago truncatula; identical to SEQ ID NO: 31171
  Intron number 1 from transcript Medtr4g025980.1 (locus Med tr4g025980) derived from phytozome v7.0 (chr-ID MtChr4; po s 6290779 to 6291840 reverse strand)

SEQ ID NO: 34080 - DNA, 889 bp, Medicago truncatula
  Intron number 2 from transcript Medtr3g147770.1 (locus Med tr3g147770) derived from phytozome v7.0 (chr-ID MtChr3; po s 38351667 to 38352555)
ggagggtgtacaaagtggttcctccacgtttggatgtatatgtatcgatgctcattttgatttgatgtttaatgcacaacgtttctcaagataacccgagttatttaattttaagatgggaagattaaaaatgaacacaaagtgaaactcaatattattatatagtgcgtaatcaaccaaagtgctgcatgtttttctgtaaaagtttataaatgaagcctatatgtggtcataaaactaatgtatcaataactatgtttcaatcattattttaaagtgtctctaatcatgtgtttttcttctttaagagtttcgattgaaaatggtgtctttttagagtttagataaaaaaatggtgtctttttagagtttaaaaatgaatgcagttgatctaagtttcaaatacatggacatattttctaataattataacctttataattgatttttccgtgttgagattttatttggataaattatttggattttttgcctataatttttattcttatactccatgagaaatggcatggctattctttctttgctaattactaatcactactaatttagttattactaatgttcatgctatatccatttgttttgccaattcagtgactttctatgtgtaaaagtaattgcctatgaggtagatactactagctaaaactaaactgacaacatttattaagacaacagtaaggttgtctttcccctctttttttttcttttttattcctggaacgatagtaaacattgcatcctatattattttctctttgatttaaatttgtacattggcatgatataccgacaatacaagaatggataaatatattttagaaggaatgatgatatcaggaagccaacattggtgataaggtgt

SEQ ID NO: 34081 - DNA, 674 bp, Medicago truncatula
  Intron number 2 from transcript Medtr7g032060.1 (locus Med tr7g032060) derived from phytozome v7.0 (chr-ID MtChr7; po s 7855745 to 7856418)
gatctcctggctcaattggttagtaatattatgtttataatgacattcttttttgatatatacaatttgataaatttataaaactttagtgtaaagaataatattttatctcttataataacattctttttcaaataattatttttatcattccacctctttaattctcttttttctgtttttttttttttcttttctattaggtttaaatattgcactcgtccctgcaaatatggcccgattaagttttcgtccctgtaaaaaaaaaaaattgtttttgatccctgcaaaatttttttgtttttggtccggagactattttcaaaaacaaaaaaaaaaatttgcagggacctttttaaaaaacaaaatattttacagggaccaaaaactacaaaatgcgttcaatcagcgtgcgccatgtaggcattttggtgacttgtcatgacttaaatgggtccaggggtatttttaaaagacagatttttttgcggagattgatttctgaatttttattttacaaggaccaaaacttaaacgagccatatttgcagggacgaatgcaatatttaagcctttcgtttatatatcaggtaaccaaaaaaaaaacttttattttggtgggtatattttcttattttctagatgatctgtttgtttatgagtaggcataccag

SEQ ID NO: 34082 - DNA, 243 bp, Medicago truncatula
  Intron number 1 from transcript Medtr3g061340.1 (locus Med tr3g061340) derived from phytozome v7.0 (chr-ID MtChr3; po s 13567698 to 13567940 reverse strand)
attgttggttgggagacaattacaaaggtaacagcagttaaaggatcaatggcgggctcatagggtgcttggtatgaggaaaaaatgatttactgaattattacagttctattgattgattgttttattctctgtttttttaattactgatatatcgcttcattagcaatcttctttgagtgtaaaagtaaagtttgtttttttttttttttgttgactacttttgtgtaggaggtagtgata

SEQ ID NO: 34083 - DNA, 611 bp, Medicago truncatula
  Intron number 2 from transcript Medtr5g017660.1 (locus Med tr5g017660) derived from phytozome v7.0 (chr-ID MtChr5; po s 6341805 to 6342415)
ctgttgttcgaatatttggtgagtgacaataattttattatgcattgttctttctaggttaatggcacacttaatgttgcagagaggagaaaataaatggtcacgcaaaataatattggattatgaataaaagcactagggagaaagttggggaaacacctgctgtgtaaaagacatcagagtcttgtgtggtttgggaatgtgtggagaaacccatattcacttcagtatccactccctattgtacttgggtttcaagctcattagttagtgatttgtaacagaattgctacagctaactatgtataaatagttagctacactgtaatcagttcagttgagatgcatcaatcaaattacactctctctctctctctctgtgtgtgtgtgtgtgttcgcactttctatatttttaaacacatagaataattggtgaggagggtaaactagatagaggatatttcaataaatggaggtaagggaagaccaaggaaaattgtagccaaccccacctagtgtcaaaatgttttgcttgttgttgtctgctttctattttaatcattattcttcatagtaaatttgtcatctcgtgtatcattctatagagaacc

SEQ ID NO: 34084 - DNA, 391 bp, Medicago truncatula
  Intron number 2 from transcript Medtr6g080640.1 (locus Med tr6g080640) derived from phytozome v7.0 (chr-ID MtChr6; po s 16207662 to 16208052)
atagaaggtattggccttattttgaaggatgtatcggtgctatagatggaacacatattcctgccatattgttcccactaaagatcaaattctttatattggcagaaaaggatatccaacacaaaatgtcatgttagtctgtaatttagacatgttaatcacttttgttgttgttggttggcctggtactgcccatgacacacgtattctcacatcagtacttgaagaatagaaaaatgtgttcccctatcctccagaaggtacaatttttatatatatttttttataaatagaatttttgatttatataattctgacaataacttttatgcataaactaacaatgatttatttattttttaaatatttctaggaaagtattacttggttg

SEQ ID NO: 34085 - DNA, 1046 bp, Medicago truncatula; identical to SEQ ID NO: 27843
  Intron number 1 from transcript AC235009_45.1 (locus AC235 009_45) derived from phytozome v7.0 (chr-ID AC235009; pos 184464 to 185509 reverse strand)

SEQ ID NO: 34086 - DNA, 900 bp, Medicago truncatula
  Intron number 2 from transcript Medtr4g140930.1 (locus Med tr4g140930) derived from phytozome v7.0 (chr-ID MtChr4; po s 34667851 to 34668750 reverse strand)
ctgctaagtaacattttaagtgtaaactcagctggtgatattcctctattgaatcctatcaataaccagttgatcttacaactaactctacagaaatatgacaaagcaaaaaaatgaaaaattattgcatggaagtttggtgagattttgatgacacaagatgttgagattactcaggttgtcttctatggctgaaacttgataccaaagcatcaaaagctagtagtacaaataattgatttagtgctgtttgaatgcctctcataccgtagtggtttcaactccttttgaaatcaagttgttagctaactgcgatgtaatacttgtcacaaatattgaagccagaggcgtaagaatagacaccttaaatgattaactaccaattctcagtatgtatgtagcctcagtcctgttaaataattgtgagaaaaacaatgaaaactataatgacagagaaacatataaaaacattaaattcattcaacaatgacagtaaacattacgcaaagtacttcaatttctactaaggagaatttgtttagagtctaaaattgaaatgagtaaaaccacattgtatttcaataagtaagttttcttataatcaaatatataaaatcaacatagcttttttagaattatttaaatcttcatatgactgtaaagggtaaaaataatgaactcagatacaccatacaatattctactccaacagactgtgtgcaaagcagtagaggatttgatatatccaaaaatagtagctcaacttgcgtcgacatctttcaatgtttataaaaaccaaactgaatcagatactatcatcttccaaattttctaatgctgatttggaacaatatcaatgatgaatgcattagttaatggtaggtatatttcagggtttaa

SEQ ID NO: 34087 - DNA, 481 bp, Medicago truncatula
  Intron number 3 from transcript Medtr5g022490.1 (locus Med tr5g022490) derived from phytozome v7.0 (chr-ID MtChr5; po s 8771848 to 8772328 reverse strand)
caacacttagagttggtccattcattgaagcataatgaaattatgggtaaggccatattctttgttgattcaaatttttcgtccaaatactaacgagggttgagtcaaacagaaaggttattcctccagtgtggcgaaccacgagttgaactttgtcgatagagacatatacgttcattgtgtgacgctttcttgagcaagattgactccgtatgagaagaccaatgagttcatccaaaataagtttcatccaaatatttgaattaataccactgatctttgtaaatcttgttcaactgatttgagctaagagttaaagaagttgaaaaagttaatgattcaaggttcaaaccctagtgaaggagaagatactaacataacaattaatatgctgacatttgtctaccaatttttatttttttcttaccacaaatctttccttaatctcgttttattggttacttttcagagaattaccaat

SEQ ID NO: 34088 - DNA, 1007 bp, Medicago truncatula
  Intron number 3 from transcript Medtr1g124700.1 (locus Med tr1g124700) derived from phytozome v7.0 (chr-ID MtChr1; po s 27250886 to 27251892)
atttggagagactcaagaagatccggtcagttgttacttcattgtttatttcattatggtttttgtggtgattatgtcattgattgcctgtgtaaactgatagatgattctcactcatttggttttttagtgtaggtttaatttaacattttaacactactgcataggaatattaaagttgaggtgtagtagtaagataatagaattaataattattgctttgatagttggttcttgatgtttagcttccttgatagtgtttgaataatagaatgaggattcattattagagaatctaaagcatcatgcacctcctctgtcatgattcaccactattctaaccagttttaattgaattgcactagacaccagaagagggataaaactaacgtccattgctttgattgtgcgtggagctttagcttccacaatagtgtttagaaattgatcaacaggaatgttattagtttacttgaataatcaaagctttcccataagctaaaatataggcagtaaaaactgggctgaagttatttgctggttgacttgtatttgtttttctcttggctatatagtcccaattgtcatcctcacattttttactatatataatattcatgtaatcatacaagtgcttatatgtaagctatttttatagcaagataaaataaagtcaaagtgtttcatataatctctgaagcttttttcattagttgttatggatataagatgaaaacagtttatggacatgttattaactgattctacaagtgttccccaaaacagtttgcttatgcaaattgattagtttaaataaagctaatctaggcaggccattattatattttttacttctcaaattctgtattcagtattataatggaggatgtatgtggagaaattgggaattggctggttagtaaattttttgttgcggtacacttgaagactaacatcctctctattatgcagtaatcatcgtggtttgaggcactactggggccttc

SEQ ID NO: 34089 - DNA, 916 bp, Medicago truncatula
  Intron number 2 from transcript Medtr2g041640.1 (locus Med tr2g041640) derived from phytozome v7.0 (chr-ID MtChr2; po s 11488614 to 11489529 reverse strand)
ctgaggaattgctttttctcagtagtaaggtttgtgatttggaatttacgaaattgtgtttgctttgattttatattttagtattggtgcattaatttagttggcgataaattttctattgaaaaggataatgtaagagtttgttgtcgataattttctatcgaaaaggaaaaggaaaaatagagttaattgtattcttttttagatcacagttctaaattgtggccgcgaagtttgatattactggataatgtaatcgacgcgctttaaaacctttatactgtagttgtagaaagcaatttagtattatgatttagatctcattagtttgtgaagttcatttttgctatgtgagtggcagtttatacagtgagtgatctgtagaagtgatttgacttcgaataattacaggatctttaggtagtttgagatcttgatttgctttttaagaatattaatatcaaactttatcttctaaccgacaatgaagcattgacatagacatggatgcatcgtaacatcgacactagtacaaatttgaaaaaatgaattaattgaatgtatgtatcagtgtcaaacgcattccattagaagtgtcggtgctacagagctaactaagtaaattggcttcaaaatgaaagggtttctgtcttgctttcaaaacaatgtaaaatgtatgaattcctgatattaatatttgcttcaatggcagttaatccggattaagggtaaatgttttaataatatatatatatatatatatatatattttttttttttgtgactatggttttgaaaaatttaacctccatctttcatgttgattagatgattgatatatggtcaatgtctgtttgattattatcttgttccttgtgcaggctatcttcaagcctcctaaggctattcgtggagg

SEQ ID NO: 34090 - DNA, 1020 bp, Medicago truncatula
  Intron number 3 from transcript Medtr5g080020.1 (locus Med tr5g080020) derived from phytozome v7.0 (chr-ID MtChr5; po s 29883258 to 29884277 reverse strand)
atagcattcaggtggaaatcccagatgatctactcgttaatagcgcaagtgatcatattgcttcaattgttgactgcatctatccgtcaatattactcaatatgcatgatacatctttttttcaagataaagcaatattgactcctaaaaatacaattgttgatgaggttaataactatgttttgtctctcattcccggcgaagaaaggacatatttgagttgtgattctgtaatagcagatatcgcatcagtcaataggccagatgatattcacataccagaattcttgaacacaatcaattcatcgggtcttcctaatcacaagattactttgaaagttggagttcctattatgttgttgagaaatttggacataacagcaggtttgtgtaatggtactcgactaatagtcactaagatgggaagatatgttattgaagggagggtaatatcaggaagcaatgttggagagaaggtctacataccgagattgtcattgaaccatctgataccagaattcctttcaaatttcaacgcatacagtttcctatagctttgtgttttgcaatgactataaacaaaagtcagggacaatcacttaagtaagttggcatctatcttccacaaccggtcttctcacatgggcagctatatgttgcaatatcacgtgttacatcaagggatggtctgaagatattattaacggatgacaatggggattgtataaggaccacttcaaatgtagtttataaggagatattcgaaaatgtgtgacccaatattttgtatgcccttaaatactttttatgtttatttattttattttttatgtaatgaataatatcggaacatttttaacttttccatttttaatgtcccgggcgttagcacgggtaatagtcctagtcatgcttatatctaatctttgttaacattgctaatgaaattgcaaaccctaaacctaaatggttttggctccaaaacaagggaggccgttggatctcatcatttggctaagc

SEQ ID NO: 34091 - DNA, 550 bp, Medicago truncatula
  Intron number 1 from transcript Medtr5g080020.1 (locus Med tr5g080020) derived from phytozome v7.0 (chr-ID MtChr5; po s 29886417 to 29886966 reverse strand)
tttaagtattttgatgtttaaaaaaaactctgtttttatttctctgtttatgtcttttgatcatgattaactaaggatcaaattgctgctagtatgtgcgcatatgaacaatgctttttgatgttttgaaatgctaggtttgataccttgtaatgatcttcatgatttatgaattatgttgtttatgttctatattctcattttgcatattaaatcttgaatgcatgaattgagggggagttctttgataaaattatcaaactcaattgtccataaacaaattctggaaaactctcaaaatggcacaaaattttggttgctaaaattgagggggagtttttaacaaatttttcaaaaactcaaaatcaaaatcaaaataaattataaatgtttgtcatcatcaaaaagggggagattgttgagacaaaatccttatttgatgttttaaagattacaaacatattatatttatttaatcttgttatctactaattcgtttttgtgagaatttgtttcatgagaatgaaatgagaacgttctggcgaaaacg

SEQ ID NO: 34092 - DNA, 644 bp, Medicago truncatula
  Intron number 1 from transcript Medtr3g106510.1 (locus Med tr3g106510) derived from phytozome v7.0 (chr-ID MtChr3; po s 26821830 to 26822473 reverse strand)
tcttcttcaatttccatttcagctccaaaaacctagttagtttttctgtttcctaaattatgcttatatctattgaatctgttatttttattgtttttatattgttattggtgttgttttaatttgaattaagcataattttaattttgggggtttttgttgcatattttcgatccctaatttgatacagtaatctttttactttactgaatttcgatttaattgctcgtgattttcaaacgaatttatatatatatatttttttaacaaaagtgattttttttattgatctataaattgaaactgcttgatttttttgaaaaatttaggaatgaagaagtaaaagtcaagttagaaatttactatttatcttttgttgttttcttagggtaaagatttttgtgttcaaatttgggtttctttgcaaccttaaaagcatgaattttatgttgatgattgaagttcgtttaatttaggaccgcatttgtgtatgttgattttaattatgcaataaaatgtgagctttaactgtttctcttttgttttcattcctaattcccactttgtttgcaggcgatgaaatgaggtttgaagggttatgcagggtttagcttttgtctgaagggttttgtgaagttgtttgg

SEQ ID NO: 34093 - DNA, 891 bp, Medicago truncatula
  Intron number 1 from transcript AC235758_10.1 (locus AC235 758_10) derived from phytozome v7.0 (chr-ID AC235758; pos 51182 to 52072)
cctcgttttctctccgctcattccactttctcttggttctctctctctctctctcaaacttgatttcagttgcattcactttactcgatttgaattttacacgcattttgcgtttaaacttcaccgttcgtgtatgtgatatatcatttgcacttctaagcttccgatcagaaattcagtttgaattttcggttagatctgaattttgaactgtttttagttttactaagttgatttatatgtatattctgtttaattgaacgaatcagttgaattgagttgaatctatgcatactctgttacttcgttgcgatttgaataagcatcttcgtgtttgttcgtttgaatacttttctgctagaagcatttgaaaatcagatacgattatgaattttttagttcaattttagatcgcactttattttgttaattttaagaagtttttgaccgaagatgaaatgaaaaatctgcatcggatttgattttgaatatttgattctgattcggttagatgagtttttctgttcagtagcgaagcttattttctgttgaactctgcaaaatgtgtttacgctgagtcagtaatttcagttttgaacttcacgaaagcttaaatgcttaatcactttttcaattctgttctgttttccgaatttaaaaatgttcaaaatattcaaatattcgttttctatagtttttatatgtggaaatgattaattaataaacatgcataagttttaaaataatcattcgctaattttctatagtttttatgcgcacgaagcattaatgatagaatctaatttgattttgattaatactaatttatcattcgtaatttttatagattttattgattaattattaatctgaattcttaatgaaggttcg

SEQ ID NO: 34094 - DNA, 799 bp, Medicago truncatula
  Intron number 1 from transcript Medtr1g008240.1 (locus Med tr1g008240) derived from phytozome v7.0 (chr-ID MtChr1; po s 638430 to 639228 reverse strand)
gcaagcccatacgaacaggtatacataactctttttctttcgcaaaattttatgcttggtgaaatataatctttctccgaagcacagacacttctaggaggtgcgtcgacgcatctgtgtctaacaccaatacctataattatattgaattatgtcatattttttatttatcatctgtgtccatatctatatccatgtttcatagctctcatttaaattgtccaataaaatgcaatatacaaatgctctcatttaaattgtccaatgaaatgcaatatacaaatcaaaatgtgacctgatgtggttgtatctacatatataaaatttcctcaaaagcaccatgatttcgttatattttaaaaatgcacccatttgaatttggatttcttttcctttatgaatcacttaataatgttaataaattttggaaagcttacacacttgccaattattagctttgttttttagtatctctcctactaatgcctcttgcccgtttaggttaaacaatttggtgcaaatattttgtgagagaagatagaaattaagggaattgcccttcgagatttttgtatattgggtaactaatacctttgaggcgacacaacctatgtcttttccctctcccacaatatttgatccaaatcgtttaacctaataatgagatggagatgacgtacgctaggagatgtaaaatgggtacgcgtttgataagtggtcaattttgtttcttcatgtcaaaggtgatgggtacacgtattataacggcagtgattggtgctggtgtgctgacattgcc

SEQ ID NO: 34095 - DNA, 491 bp, Medicago truncatula
  Intron number 2 from transcript Medtr5g044460.1 (locus Med tr5g044460) derived from phytozome v7.0 (chr-ID MtChr5; po s 18472490 to 18472980)
tccatcccctgaatctgcacaggttaagaaaggtaaaaaaaaaatacttttgataacataaatagaaattcgtgttcatcataatcgaagtcaaagtttcctctaatgattctgaaatcaatcataattgatgtcaaggttcctcttatcttaatttcaaaatttgaaaaaaaaaaaaaaaagattcctcttatcttatgattctgaaatcaaaatttaagtaatttttgttcaatgatttccaaagagtatttcttctagaacaaaaagactcatgttttctgcttagttttattatcctattaatgtgcagctgcaacagatttgaatcctgtccgcatgaaaatcaatttctttttcttacaatcttcatctttgctgttcttctgctatattaatttgctgatccagatgttgtaaatactgtaatgttcttttgcataacttcttttaacttcctttacttatattgttgtttcttatgccagttg

SEQ ID NO: 34096 - DNA, 319 bp, Medicago truncatula
  Intron number 1 from transcript AC233672_3.1 (locus AC2336 72_3) derived from phytozome v7.0 (chr-ID AC233672; pos 10 607 to 10925)
ggcaatttgtttattcatcactacctggtatgttttgcacaactttttttaattcttagcaataattagtttgctttaaaatgttttttgtttgatttcacttaaatgtgtatgtttggattgacggtgaatttggcaaaaccacagtggcaacaaaattagtagttaaattaatagtgacaacaaaatattttgaggaacaaaacaagcagaaaggttacacgtcgaaatttgatgttttctcttgttatctagtcattcttgatgtgtcatgtttgtgatgttgatgattcaggttgacatttctcattgctgcttc

SEQ ID NO: 34097 - DNA, 553 bp, Medicago truncatula
  Intron number 1 from transcript Medtr2g080180.1 (locus Med tr2g080180) derived from phytozome v7.0 (chr-ID MtChr2; po s 18411078 to 18411630)
tcacctttagtaaatctgcttctacttcacctaatgtattttcctctctcttttacattttttttttatgttgaggttttcatcagggaagagggttctttcatttgggtagtttaaaaatgaaagttttttttttttttttttttttttttttttaatttgataaaatgaaaaatgaaagcttgttttggataatgatatatatgatatgcttatgatgttgaatgagggccctatcactttttataatgcttttatatctgttctgttcaattggacccattcaccagtgcttttattttctttcaagcttataaaaccctttgaaatggtaaatattttggtttgggactttggttggttagtattgggtacttctgcataatttacaatctgcaatacttggaaaaattacaactttatgatatttttgccagtaaaaatgttaactttatggatttctttaaagtggttttttttttggttgtaattctttaatgtggttcattgatgatgagacttctttgtgtaggtgatagataaaaaggtttct

SEQ ID NO: 34098 - DNA, 747 bp, Medicago truncatula
  Intron number 1 from transcript Medtr2g018100.1 (locus Med tr2g018100) derived from phytozome v7.0 (chr-ID MtChr2; po s 4673028 to 4673774)
gataaggcaaacacacaggtaattaaaaatcctctgttttgatcaaacccattaaatgatggttattttaatttttcattttctagaaaccttgtcagttccagtattttggccaaattttaagtataccacattcttttcatagcgcaaaattaacatttaagttggcattcttatttttcatatggtctgactcctcagatactttatctattattgtgttgtttaacggtgaattctcactatactttaacaaggttctgatgttctgttttatctgttacaacaaaattggagaagttcaaaattcctgctagatagggtaaatatgtagattgctaagtaaatagattgtatttttgacacaccatgtctttttgtgtttgtggatcatgatcagctaatgctgaaattttctgttggggataactttacatctctgctggaaacatgtgtatgattgtgattgttcaacatgtatatttgggtttaagattcaataaataccattttccccttgaaaaagtcaaataactggttcggtagttccctgttttctgcggcaaaatgatacaggattataattgactcttggacttttgactttgaccactaacttcatatccttaatatcgacaaattcttgctgaattctgtcaagtgttccaggttgtttagcgtcacttcagacaaaagtttgttctagttttgaacttttaatcaagcagaggttcctcatcatcggat

SEQ ID NO: 34099 - DNA, 639 bp, Medicago truncatula
  Intron number 2 from transcript Medtr7g041310.1 (locus Med tr7g041310) derived from phytozome v7.0 (chr-ID MtChr7; po s 10557714 to 10558352)
taggtaaactaatttgtagaccaattttaattcaattcattttacatttcctttaaatttatgcgtttaaacttttaccctttcctttaattttgtcttgcttttaattgcaatctcaaacctgtcgagacatagtgccctttttatttcaaaacctgtcctgctctttaagtagcctgagtgcttatcatggcccttttttaaaccttttttttatgaaaacctttgtgtaacagcccgattttcgctatatttattttaattttttttatgtgtttgtgtgtgattatttatcattgggtgcattttaatgggttttcgtgttagaagagtaaattagtaatttctaatgaggattattttagtgtttcaagtgagaaccatcatttttactaagttactagtgtggtaattagttgtgagccggtaagtgaccattgttagtattttaccgttaagtgtgtagaaactttttagaattgtgattgggtgggttaagtccactaaggcattaaggttaagcccatttgagaatagcctatataaaccttgtcttaagagaaaatagcattcattttttatttcataagatttttagagagaggtagagagagaaagtgcaagagaagaggaaaaggg

SEQ ID NO: 34100 - DNA, 582 bp, Medicago truncatula
  Intron number 1 from transcript Medtr4g133720.1 (locus Med tr4g133720) derived from phytozome v7.0 (chr-ID MtChr4; po s 32120427 to 32121008 reverse strand)
gtgcctgtaattttggtggccttgcaaccattgccgtaactgacccaagtatgaacaaatgctctattaaattattttttaattaatttacttttatctttttaccaaagattaattttatttcctacaaaaccgtaaaatattgatttggtctactaaaaaaaatttgtttcattttttttaaaatattgcttagagtccttttagatgagataactttgactttggttttccctcaaaaaaaaaactttgactttggttcaaacaaaattactttaatttctttggttttcataaatctaaaacctagagtatttattttggtaattaacattcaatttaagaccgataaatataattcaatttgagtttaacaaaacatttacaaatgtttgcaaagtgctagggacaaaaggaggatgaaaaatgcaaattatttttatgaggaccagttcaaaattcactttttacccaatttatacatttaccgagacattatttatgtatttttgcgttgctgattaattgtattgtggataaataattgatataatcttctttatttttatgtgggtttaggtt

SEQ ID NO: 34101 - DNA, 930 bp, Medicago truncatula
  Intron number 1 from transcript Medtr4g136340.1 (locus Med tr4g136340) derived from phytozome v7.0 (chr-ID MtChr4; po s 33278301 to 33279230)
ctgctgcacccatttcggttataagaactcaactcgtaagttttaacttttactctgatactcatcttttacattgttttgatgggttgaatcaaatagattgttatgatgctttctctttattttgatcagatcactattgttccgctatacactattttttacaaaatattgtcaattaggtgctacaatggcgctattgcgtagtggagtttgaatgaaatgcaatcttccgctaactacaaattcacgtttaataatcaagtagcgaagagtttggttcccttcaggcaaagtcttgaattagagtattgtagtacaaatagatgtcgagagttttccctccttcgtatccttggattagttagggcctaatgagatttttttaatctcaagggtctagaccagaaaactaccttaaagaacaagttgcaggttcaagtgcaatatggtacgaaactctagtatggctgccctggtgaatcaatcaaaaaaaactttcgctgaaacaaagtatttactattcttaatctgtttaaggtaaaactttgtactctgatggcgaacactacttgtcacttcacttggaggatgcatctttgtaattttgaaattcatttcccttttagttcaatctactttcccttggaacataaattgatatcagagtgttagctaatccaatgaaggatgtagtcatctctgaagactctgcgcgcttgttctaaaatcaaagagcatctttagttcacaagagttaatgaattatgtagcaacagcattagggtaaaaccataaaagtttgagttgaagtagacgaaagagtctcactaatactacagtgtgagtgagttttttttactttttggctcatctttttaccagtgtctgtgtgagtattttgatacattgttttaatgtgcagcttac

SEQ ID NO: 34102 - DNA, 639 bp, Medicago truncatula
  Intron number 1 from transcript Medtr4g021690.1 (locus Med tr4g021690) derived from phytozome v7.0 (chr-ID MtChr4; po s 4224958 to 4225596)
cttacttatttgtgaagtagatgtttaagctattattgacaatgactttttactaagtttccttttgtaattgtttgttttttcttttatatatttcttttagtgttttgtttattaagtttgaattaaattagttcaaacttcacccacaattcaaactcaaaattcaaacattcacactttcaatctctcactctttatttcttattcttctctctctgtgtatggcataaatcatattgaatattctctaaacatatatttcaatgctaacctcaaacaaatcaatatttcctatacatgggggctataaatatttgatggtagtttgaaattttatatttctctaaatatgggatgctataataagtatttgatttaagtcctaaatttcatattcttcaaacatggggctataggtattttagttaatgtgaggctataataagtatttgatttaagtcctaaatttcttattcttcaaatattgttgtgattaacaattgtattagtgttaaaatcacaaactccactcaattaaattataagacaaactccactcacaattcaaatacccacactttcatcctattctcactttcactctcaaacattataatattgcatatggacagttgt

SEQ ID NO: 34103 - DNA, 749 bp, Medicago truncatula
  Intron number 1 from transcript Medtr2g123070.1 (locus Med tr2g123070) derived from phytozome v7.0 (chr-ID MtChr2; po s 29709448 to 29710196)
agagaactacacactcacataaaccaatcacggtcgtctgcagtccgagtgcacgtaatatttaatcccaactgttgttttgagatcagacaattgataaacgcgtcacgtgtcactgacacaattacaccggaaaatctatttaccacacacatgatttatgatttggtttatacagaaagcaaagccaatttcgtattttatttatttttggtgattagaagaatgatgcatatttatcggtttcttgtgtaagaaactttcatagaagtctcttattttttttgttctctaacacaaataccctttcattcctttcatttttctttcattctttacgtctttcaatttatagattctggcactgacaaatttcatgaccattcctctttttcttttgttccaaaatgtcacatgaatcacctatgattcttaatggttaccaactccagagagacaacaccctttaattcttgtaatattctctcttttacacctcattttctgtcatatcatatcctaatcttcctctctaagttttctcattcctcattataaaaccataatttgtatcaaggtcttttttcttttcttgaatatttcttgaatacttttttctctctcacatattatataaggttaacgttcattcttattttcagcctatttttcattttcacctttacatagcaattaacatcctcattaatttggatcctgtttcaatacaattctttctcagagtgaaa

SEQ ID NO: 34104 - DNA, 475 bp, Medicago truncatula
  Intron number 3 from transcript Medtr3g012640.1 (locus Med tr3g012640) derived from phytozome v7.0 (chr-ID MtChr3; po s 2134713 to 2135187)
caagtggagaaaagggtcagctcacaccatttaatgtaagtccagatcttcgtttttcagttagacgctcattattatattttgattgttggtttatgttagaacttgcttgtgttgaggaaaatgatttgcatgattgatttgattgtaaaccttatgtttacgtttaatttttggtgattttaattttctttatgttttaggaaaacttggtacttttgtgtaaaaccaatttaagatgttcccacactataccattggtatcttggtatcgttaattatttatgatattgctacgtgttatctcgtgtcacttttgatatttatctaccacggacctttttcccatactctctctcgtagaaactcattaaccagtctttatgttgttgtgaatatgtgcttgcttttacttgctacttttttcaatgatcttgtagaaagacttgtttgagcaagtagttggagagtgcag

SEQ ID NO: 34105 - DNA, 597 bp, Medicago truncatula
  Intron number 1 from transcript Medtr4g023530.1 (locus Med tr4g023530) derived from phytozome v7.0 (chr-ID MtChr4; po s 5152077 to 5152673)
ttgggtcttagccttgcaggttctagagaaaaggggttctgataatacttagtttggtcaggatgtaagtaaagtttgtcggaagattgtttgagacagacatttaacttgtatcttattgcttgatagtgcagttggatatttagatgactgaattatctggtcattatgacttggttttccttccatgacaaaggttgcatattcacgaactttgaatttccggttaaaacatgtttttagttcctataaaatattcactaatcaagtttagtatctagaaaaatttccattgatgttaacaagacttccgatggatgattttctttttgttctcaaaatcaccaaattgaggactaaacatcaatggaaaatttgcagcgactaaacttgataagagcgtactttataaggaccaagaacatatttaaatctttgactttttattatgttgtctatagaatggagctgatttttatcgttgtgtaattatgtttgtttaagttgatctataaacttcccattgtgctataaacttcgttactgaatgacgtaaattttataatgcagggatctgttatacaagcccattgtgct

SEQ ID NO: 34106 - DNA, 463 bp, Medicago truncatula
  Intron number 2 from transcript Medtr4g023530.1 (locus Med tr4g023530) derived from phytozome v7.0 (chr-ID MtChr4; po s 5152908 to 5153370)
tgaagcttacaagagaagggaaaatcagactctgggtatgtttctctttttaagggcttatgcatgaacataatgaaatataaatttgcagcatgcctcacatagtttccttctgtaaaagcattttgtcgcatttcactagaaggtttagcgaatggactgactgtttttatgataataattcttttagaaaatttactgtctatgttgagatattgtttaagatttgatagatctattttattgtttttattactgtattctttccttgcctcctgatttagctgattctaatccttaaagttcaggatttgattttttcaaccttttattatatattgtacaattgtacatatattccatgctctaagacatagaatattcattattgagttttaatatggttcaatagttttcttgtcctgaagcccttgttttgggttcagccttcgtcaaggaggtt

SEQ ID NO: 34107 - DNA, 994 bp, Medicago truncatula; identical to SEQ ID NO: 30553
  Intron number 1 from transcript Medtr4g079610.1 (locus Med tr4g079610) derived from phytozome v7.0 (chr-ID MtChr4; po s 16071890 to 16072883)

SEQ ID NO: 34108 - DNA, 577 bp, Medicago truncatula
  Intron number 1 from transcript Medtr3g022170.1 (locus Med tr3g022170) derived from phytozome v7.0 (chr-ID MtChr3; po s 5682888 to 5683464 reverse strand)
actgttgaactccacagcaaccattaattctagaggtaagattttcttccaaatgtttcttcattttcttctgttcattgaacattaagattttattttttatatcaaagtttgatataagatttttattatatatcaacctgttatttatagaatgttttcttgtgattacttgctcatgtcgtaacagctgaattatacatcccatcttctaatatattcaagccttcatatctttaattggtggctttcccttgtgcttttatagttaagattaaaataataattttatagttatactttgattcctactaaaaaaattgatgaattttaaattgtaatttgtttttgcacttcttcatcgatcctttaatttctcaacctaaattcaagtactctttcatatttaagatctaacttggttttgtttatttgtgaaatatagaatttcactttagactataatattgaacaagaagttttttaaaaaaatattgaaaaagaatctgttcaaaattaataattttttttcttttaaccaggaagaatcgaaatctacgtttgacatccactgaag

SEQ ID NO: 34109 - DNA, 778 bp, Medicago truncatula
  Intron number 2 from transcript Medtr2g076650.1 (locus Med tr2g076650) derived from phytozome v7.0 (chr-ID MtChr2; po s 17360587 to 17361364)
cttctgctgctacaccgactgattcttcttctgaggtgtgtgagtttttttcatttttcattttctttccattaatttttttatttcggttcaataaaagtgatgggtgtgggtttgttattaactttattttgggtgtgtatgtggtttgtttaatttaacttacaagagtatgatttttttggcaactgaaaataagctctatgttattatttttcaagattctgatttgttaataattttttggggaaatggtttttgatttttttaattttttttttgtttaggttcaaaaaaagtgatgatggtgggtttgttattagttttgggtgtgtctgtggtttgattaatttaatttacaagagaatggtttttttggcaagtgaaaataagctttgttattattttgcaagatactgatttgttaataatctttttgttgggaaatgatttgtgattattaaagccacggtctcaaattaagttttaattttgagtgattgataggatttattttaatgataagatgttttatttactaaaacacccttattagttatagttaataaagtagttagatgattgagctgtaccagtgaataaggttaggtcagtggaaaagaataatttgtttgtattatataattgtaaaataatttgagaaaaagtaaaatagtaaagaggattagagtgagggagtaattttttggtacatttattactactactatgcttattaacaaaaaaaaatatttgtcaggaggattacaatattgtg

SEQ ID NO: 34110 - DNA, 1070 bp, Medicago truncatula
  Intron number 2 from transcript Medtr3g024490.1 (locus Med tr3g024490) derived from phytozome v7.0 (chr-ID MtChr3; po s 6068287 to 6069356)
ctgacaaagatctcagtttgttctcacacttttaggtaatctctttatttgttaacaaaagttaatctttcaagatatgttatgcgatatgtctgtgttactttcaattttctatgtcatgtcaattattactttttttgatacaagatgtcatgttatttttcaattatactatcttattattaatatgagtatcgtcaaaaaaaatacactatccgtatcacttcaaaatttatgccccctacgttttatttataatagtaacgaatacatgataatttgataaagttaattattgttaaaattattttttgaggggtattgctaaaattattattttcattatacatttagttttctttaaggtggttcaaatttcatgtgacaactgtaagaaagatgtctaatgttttatgtcaccgttataaaaaaaaaaattctcattcttcaatttatcttttaaaatagtatataaaataaacaagggtatcacttgttttaaaaggagtatcaaatgaagagattattaattctttatcttaatgaattatctgctcgtgccagtaatacacaattttacaacatgctatatatatctttatcaccaataaaaaattggcattcctctaaaaaaaaaacttggcatctgtacccacaaaataaaaacttggcctagaaccaacacatatcatctctaataacacccccttaaaaagaaaaccatctctcagaataaaatgatcggcatgtgataatcttttgactttcatatttgtattaatttttgaaaaaaaaaatcatttcaagttgctaaaatgtatattattaagaccaagatagctaaatgtatattattaaaactgagatagctaaatacttatattaaaacaaacttgaaaaaagtttcgcctctatttgtaaatttcatatcaaactgttgtaaaattgtattagctagtagcatcgtatgattatatatttaattattgtttcattcattttatttgatagaaagaacacatttccatcttgcagaggctttaagacttgtgctttaggctcaacatatc

SEQ ID NO: 34111 - DNA, 770 bp, Medicago truncatula
  Intron number 1 from transcript Medtr2g017940.1 (locus Med tr2g017940) derived from phytozome v7.0 (chr-ID MtChr2; po s 4608135 to 4608904)
accgtccagatcatcatcaacgacctcctagaaaggtgatgcatctcgttgagtctgttatgtgccttcgcacctatataaggttgattcagcaccaccctcaagatacacttcacttttaccacattttgcacttaactgcttctttcagattcagatttaagcgcagtgatggaggacaacatgggctgaggtgggccacggcccatcccaaaaaaaattcaattttttttacctagagagaaattacaaaaatacctttggcttgatttgttttttttccaactggcccacccaacctcttcactttctctattagataactaaacttctcattctcttcttactctttcattattttctcattctcttgtttgttgttatcgtttgttgatcgttggtaatttatgcatatgtcatgccactttgtcagtgtttattgaattgttcttttttgttgcaaatgctttttttttaataccgtagttcaatctatgttgcatactttagttcaatttttcttcattttagaagtagtttatgtttaacttatgcatataataaggcttttttttcaacttatgcatattgtagtttatgtttaactacaaaagtttttctttatacttgttagtttcttttttttaccttttataagcttttaataatgcttaatttctttaatttagattgttattgacttgtggaattatttgattttttgaaaaattgatcattttttaaaaggaaagtttgtgggagtgaaagag

SEQ ID NO: 34112 - DNA, 796 bp, Medicago truncatula; identical to SEQ ID NO: 30821
  Intron number 1 from transcript Medtr4g121450.1 (locus Med tr4g121450) derived from phytozome v7.0 (chr-ID MtChr4; po s 28488135 to 28488930)

SEQ ID NO: 34113 - DNA, 648 bp, Medicago truncatula
  Intron number 1 from transcript Medtr2g121370.1 (locus Med tr2g121370) derived from phytozome v7.0 (chr-ID MtChr2; po s 28799199 to 28799846)
acgaagaagattaacgaagcaaagcgaaattcctggttagtttcatcatcttcttcgcgaatctcatgggtttcgagggaaaaaaattgattagggtttcgaaagtctctagggttttgaagatttcgataaatttttaaccttttaaggctaatttcctattcttctttgcgaatatcaagttaaaacaagttattttgcctgatttggaatgagaaaatttgacatggttttcaaaaatttcaatgaatgtgctaccttttaaggtgttgtatgcatggatttggtttatttattgtttattccttctcaaaagtcgatttttgtctgttgtgttggatttccatatgttaaattagggttttatactattgtgtggtgtgtggtccaattatttcgaattttgtgcataaatctgattaggttttgtttcttttgtatattaatggtaaaaaaacagatggaccaaatatttgagtgtgtggtacatcatgctggagattttagttgctttatggaccctgattattaaggaccagtagaaacactagactgtgacctatacttttctcatactttgctttgttatcaaccttaaaaagatgtggttatgttagtctcaagtctctgtggtatcataaccctgct

SEQ ID NO: 34114 - DNA, 428 bp, Medicago truncatula
  Intron number 2 from transcript Medtr6g059730.1 (locus Med tr6g059730) derived from phytozome v7.0 (chr-ID MtChr6; po s 10933501 to 10933928)
ttttggatcgagggtcgagtccagatttgactagtgtatacctattaataaaggcaatacttttgtttggtgtagcctatttttttaaatactaaattgtcctttgaagttttgttttacatactgttaacttctcaccacaagtttaattacggttacttacttttcattgtcctctcttcacacaaaattttcattaactacttctcattatctgatttcataaacacataattgctacaaacattcattaattgtagcaattttcattaacaatttttctttcatagatactattgagttatctttttcttcttttgattttcttttattaactttcacatgttctaatatatagaggagaaatattgatatctaggatttttttcatcctgttatcatgttgtttatacttttaatttgcagca

SEQ ID NO: 34115 - DNA, 855 bp, Medicago truncatula
  Intron number 2 from transcript Medtr4g109280.1 (locus Med tr4g109280) derived from phytozome v7.0 (chr-ID MtChr4; po s 24415697 to 24416551)
aacctggtatgtgttatcaatcatatcattcatacaatacatgatcaattttaagagtaatttcattacaaatatcttactttacctcagtgacatattactattggttgaaaaatcaaagatgaaaaggttaataaagaaacttgaaaaaaatgccgcattcctcattaatattttccttttttttcttcttctcaatattgtttagatttcattaatagaattaactgttaatttatgattatttcatcttgtgcaaaatgtttgatagttttctacttgggttgtgtggtcaatatgccttcgaatatatgatgattcgaatcatggttctgaaattgagttcaggttgcattctggctagtgggattcgaattcaatataagcatgattcgaatcatgctgttaaaaagcaatttttgttgtgttatcttaaactgttggggcttattttttgtaacaagtctgtatcttttctaaagactcattcgtagtgaatcagagacctcctcttccgcagacgtaggtcaattttgggccgaactgcgtaaacaatcttggtgttgtttctctactctctttatcattgtctttggattgattgtttggattatctttgcacataagttctagattcgttctaggttgaatctttctttgcttggactgtttagttttggttgtcattgttatttgttccactttgtcattgttatttgttacacacagagtatgctgactgtatcaaaatgttaaggtggacttttattccattcataataacttgtcaggaggttgtttgttgttcatttatctgcaggaacttcagcttgttcggcaggaaagttttattgt

SEQ ID NO: 34116 - DNA, 554 bp, Medicago truncatula
  Intron number 2 from transcript Medtr4g100780.1 (locus Med tr4g100780) derived from phytozome v7.0 (chr-ID MtChr4; po s 21642005 to 21642558 reverse strand)
tgaaagataaagctctgcaaattagctcctgcttggttagttgcttcatcatttcggtcattgtagctcttaatgatcattactgaattataaatttcatgattatctatgaagcactgacactagcactggacatgacactgacacgaacacgtctaattgaacataatcacatctgtcggtgtcagagtgtcagactccagacacaccattatatcaaaagtgtcggtgctatagaggtcactatgtttatatttggggtttcgaaagtttacggtggaccaaaagattttaattgccgagagaaaattcaaattatgtttctaaccagtgaaatttgaaaaattatccccatgattggaagtgatattaatgctattgaatagatagttttttttttattagtcttcttgattatgggttggggaatgtacttgttagtgttaatttgtcaagaaaattctgtatgttgattgatttatggaggtgtctttttattgctattcatgcttatttcagttactggacgaggttcaatcgtacatacttgttga

SEQ ID NO: 34117 - DNA, 963 bp, Medicago truncatula
  Intron number 1 from transcript AC233576_17.1 (locus AC233 576_17) derived from phytozome v7.0 (chr-ID AC233576; pos 64043 to 65005)
acagatttacagttgccggatctgctgctgtcgtggttttcactgctgctttgatgatgtagagagttacgctgagtttatttttgggttgatgctgagtttttctttttgacttattttgttttttaatcacgagtttacataatcctgactcttgttattatgttttttttatctggaatttacatgaatatatttctgctatttgcttgcaattatttgctttgtcgattgttgttttgaattgtacatcatgatatcccttcaaaaaacaaaataacaaaaaagaacttcatcaatgtttattggattatgtattattttttggttttgtttggtaatctcttccatcagagatggtacactcttcctcacaacaaaaccttagtgaaagtgcaaagaagatgtggtaacaacaaaaccttagtgaaagtgtaaaacagatgtggtaacaacaaaaccttattcagacaatctgatagaaactggtacacgtaaccaaagaaaagagaaataatgcaacaatcctttgattctaaacagaaacacaatccttaaaaaataataaaaacataactgcccgtaatcgctatcatatgcagtctaacacaatcctttgttttgtaatagattttcttataatgaacttattatctctaaaccattgccacgaaattgagaagatttcatttgatttgtttaggattggacgatctatgttattgtttggttttgttactataatcaatgattttaaatgtattcttcactactatgagatcgtatatcatctctcaaaaaaaaaaaaaaaggataagtatatcatactaagaaaaatattttctcataagctacatttaagaacctcccattcgaagttgtttttagatttttttttagggaaacttttgattttttttttaatttttttttataacaaactgatctgtctggtgagaatag

SEQ ID NO: 34118 - DNA, 862 bp, Medicago truncatula
  Intron number 2 from transcript Medtr5g035060.1 (locus Med tr5g035060) derived from phytozome v7.0 (chr-ID MtChr5; po s 14436116 to 14436977 reverse strand)
tgaagaattgaaagtttcaaatcttgcctaaatattttccaacgacattttactatcttaaagatgatattttttttttgtttgagtttagtctatagaaactatgtaaactaaatccattacacattaacctgaaatcaggtatttttgacggtctaagcgaattctattggtctctgaatcgtgaattattttctatttcccaaccccctctttcttgttaaggatgtgtgaatagaagatttatcttgaatcatactattagaaaataattttggcatagaaaccaattataataacgatattatttgatttgtaaaaaaaaaaaaatgagaggatattacatgatgtggtacattctttataaatgagagtgtaacacagaaacaaattctccaggttctactattgagcagactttattataattgttgtttttttaattgatttactatttttatgttcaaactttatagccggttgtaggcactcaggatacaaagccaactaatttaaatttttcggcataatacaatgatgatttgtttttatgtggtggtatcctttggaggttgacgttgtgtcgtacgttcagaactcatataagaggtgtcgtttttaatttcgttcagagctcttatatgggttgacgttgttcagagctctcataggggttgacatcgttcagagctctcataggagttgacgtttcttgtccgttcagagccttcataagggttgacgctgttcagagctctcataggagttgacgtttcttgtttgttcagagccctcataggggttgacgccgttcagagctctcataggagttgacgtttctagttcttccagagccctcaca

SEQ ID NO: 34119 - DNA, 999 bp, Medicago truncatula
  Intron number 1 from transcript Medtr5g035060.1 (locus Med tr5g035060) derived from phytozome v7.0 (chr-ID MtChr5; po s 14439073 to 14440071 reverse strand)
agctgctggatcagcttagaactaaatgtgtgtcatctcactctgctatgctgaagaagcttttggatgatatgcatgaagcagctaaggagaaagagctgaattttgtgcctctgctggacatcactcctttctatccagaagaagagtacatcactagggctgctagaattcaggctggatttaaacgaagaatgagggaaaaggatgagctacttcagaagaaggatgatcagatcaagtatctcttagaacagttgtataagcaagcccaaccttagttgcacacccaactctagcttgttttttacttttgttctcagtagctgtgtctttgtatcttaatctttctttatatatattatcattgtttctggatcttgtgttttttcaccttcaatatgttttacaagctttaactctgatgatatttactgttttcaatgctgcttgctctgaaagattatatgtttattcttttgttttgttttggctctgatactctttcttttgtttctattctttttgttgatgacaaaagggggagtaaatgtatagtatttatttaggcactgagccctactataaccacttctaaatttcttttaaatacttctgatttgattttataagtattttattgaaatttaattaataagaatagaacttagggggagcttacaaacctcaccttaaagaactattagacttagggggagcttacaaacctcaccttaaagaactattagactcagggggagcttacaaacctctgtcccagtagtcaacttattaattagatcaacaacaattgaacattttaaatactattgtttgtcatcatcaaaaagggggagattgttggaacaaaatgtgtttcacaatgaaccttattaagttttgatgataacaaggtattaaaaattgtcaattggttattactaataattgttcaagtgtacaggaccaaaggctactcaagttatttcaataggtctt

SEQ ID NO: 34120 - DNA, 761 bp, Medicago truncatula
  Intron number 1 from transcript Medtr5g080950.1 (locus Med tr5g080950) derived from phytozome v7.0 (chr-ID MtChr5; po s 30382420 to 30383180)
gctcctatgttagtattcattatccaatcttcactttcatatataagttttaatatattattattctctaatgtttaatgcacatgtttgcacttctaacttagtaattcttattattttaaggccttataacaactatattattatatttttcttccttttgttactatttaaaattagtgacaatatttgtagaaaaagttggattatcgaccaaaattgatgacaattcttgctaatagtgtatattgcacactcttttttttttttttgttttttttttttttttttttttatactaagcacacttttttgttattaatatcgagtcgtcaagtgcatgaagatttaacctgttggtgtcaattaagcgatgtgccgacttttgtttagatggtgtgcgaactcttgttgctctctatccagataataagttttatgttacgtcaatttgaacttgttcgatctattcaattgcggttaattttcgtcgataactaagtttttggtaatagtcaatctttgatgtttttggagaacttgattaggtaataataaagaaatagttaagacttaaaagtgattgataatgtaacatatttagttcattttggatacaacttcaaagttatttatgtaattattttatttgcactctcacttgaaaatgaatttgctagaatcaatacattttattttaatctcattaacataagatatgaattatgatatataaaccttataatttattttttgtttag

SEQ ID NO: 34121 - DNA, 849 bp, Medicago truncatula
  Intron number 1 from transcript Medtr5g005630.1 (locus Med tr5g005630) derived from phytozome v7.0 (chr-ID MtChr5; po s 281665 to 282513 reverse strand)
cccttttttcacttcatcttcgccttcatcttcaggtaataaactattttttgcgtaaacattattcgttttagctctggacaaattttgttctaggtgcacgtttgatattacattgacttgttgaaatcattcaagtaattttacaatgaacttaattttatttttccatcatttgtcttatattattctagaacagaacatcgagatcctatgtcgtggtgtgtcgtgctcaaggtctagtgtagtgtttaggtgggataaatgacctatcattctctccttcttttggtcctcctccttctataattttcatggaataggagagtgagccaagtataaatattctagggcgagcacctttgggcctcgtcgagcactaaagaccatttttttgaaaattcgatatttaatttattgaccaacaaatatcaaaaaccgtgactcgagtgaaaagaattgagtcaatctgagttagggtagtcataaaatgacgtgtctcttaaacattaaaaatctcgtgaagatacacttttattttttgagagaattggaataatttttcttttcattttcatttcctattttttcgatagtagaaatacaatttgtaagcctaactccactaaagattttgttagattgaacatcttcacttatatttaaaactgaaacctcacaattgtgtgtttcatcgttggcaaaaccaacaaaaatattccataagttcttaatccttaattttaatgtagtatttgttggtttgattcttcgttgttgaccatagtttaattaattaatgtacttgaccaaaattttccacaatttccacttggttatgcaggggga

SEQ ID NO: 34122 - DNA, 859 bp, Medicago truncatula
  Intron number 2 from transcript Medtr5g035230.1 (locus Med tr5g035230) derived from phytozome v7.0 (chr-ID MtChr5; po s 14541067 to 14541925 reverse strand)
tttctggcaaggacttacctatcaagtctgcacaagtaagtactcttaatcatgatttagcaagtttaaacatttactttgttataatatactcttatttgtgtagagaaataatttttgtataactgaatttaaacaactttcgtgataactttttaagtggttagcgtagttcaaataagtggttaactatgtctgaattcatggttagggaagatatgtcgatttttaatgagttttgactctcgtatatctactaatcatccactgaatgtaattaaccatttaaaatattgtcgtgaaagttatcaaattttagttgtagaaataacacaattgattagttaataagcatgagtttatatatgaaatctattgactaaaatttgtatagccattcaagactatttcacttttactaaaagtaggaaagtttgtagaagcagttgaattaattgcttatatgataattgcatgtcacataagaatttatgtataagttgtttctgtaactgaagaagttttagagataattatcacacaaagctctgtgtaagctatcatgatcagcttataaaaataagctgaaaaatatcttatgggaacttcatgagctatttaataagctcttgcttgcattgtgcttaatatgctcctttgcaagtgcttatgccataagataagttcaaaataaatgcgacgtgtatgcaagtttaataaaggtccattttttcagaaatcaacaagatttcacaatgttcttgattcactgtagcgtgcatattagacttgagtaatgaatttgttttggtttgtgccttaaggttacagaagccactgatttcactgagctgcaaga

SEQ ID NO: 34123 - DNA, 319 bp, Medicago truncatula
  Intron number 1 from transcript Medtr3g080200.1 (locus Med tr3g080200) derived from phytozome v7.0 (chr-ID MtChr3; po s 18782814 to 18783132 reverse strand)
agtgataaaaattcaaaaaataataattttatttcgttgacatttttgatgaataaaatttagttattataattataaatgataaaaaataatatttttcttaatttaaagagtgggtgtaccgatacactcaaatatactgggtgtaccataaaatttgcagggaagacacaaattaactcttcataaattattagcgatatccgtgtgtccgtgtccatatccgtagttcatccgcagcacaaagaatctctgatggaagtattgttgttgtgtttgttttggtgtaagcagcttcaaggagatacgaagcatcaga

SEQ ID NO: 34124 - DNA, 781 bp, Medicago truncatula
  Intron number 1 from transcript Medtr4g076170.1 (locus Med tr4g076170) derived from phytozome v7.0 (chr-ID MtChr4; po s 15059905 to 15060685 reverse strand)
tgaaggtgttgttactcttactcaagaaaacgaaggtgacccatctttttaatcccattcaattctccatttttcttatcaattatcaatgttatgcttcgaaactagaatagttgaaatttgttctgtatatgataataatgcattatgaattgttgtagtttttgggtgaataattgtcttgatttgggccatgtttggataaagagcttaatttgcagcttatagtataagcacttatgttttaagctatatctataacgcaaggtaaaatgaagtcaaattgtttttatataatctataggttgttttcatattctatcctggagagattatggaaataaggtgaaaacagcttatgaacatatcataagttgttttcataagttttacgaaacagtgtcacaagtgtagattattggataaacaacttgattgagtgctttttgtattaatgctaatgtatatagtatagactatttctataacaaaagataaaataaagtcaaactattttcatgtaagctattagtgagtttatgagaataagctgaaaacaacttacaaacatgttacaagttatttctataagctttctcaaacagcctcgtgagtgattttgccagtagataagctcaaataaaccaatccaaacatgctcttcttaattagttgtagttattatttaagtatacgtggtaatataatggttagttttttgtgtgttgaattgacttgtagctatttgtgtttttgtgatgagtaggtccaacaacagtta

SEQ ID NO: 34125 - DNA, 958 bp, Medicago truncatula
  Intron number 1 from transcript Medtr5g088310.1 (locus Med tr5g088310) derived from phytozome v7.0 (chr-ID MtChr5; po s 34213735 to 34214692 reverse strand)
gtcttcctactagccacttactcggttcagttcccgtaagaatttttttcgtttttttttttgttgctttagtttagtttattcattgcatgttcgattatgtagttcggaaaatcgatctcgtgttttgtttgagtaattgagtttggaattttgatgagaatttttttttttggaagaaattgtggaaatggaaagaagaattcgcaattgtaaaattgaagattaggaaatttgtttctgaattaagtagtagtcgaacttattttttcaggtttgatgttaaatgtgatttttattttaattaattttttaacattaaattgatataagttaattatgaaactgaattggtatatgtttcttgtgtagttaaaattagtatgatctgagttaccattgtgagttatgttttgccatgtttggaatctatttagcaccaacacttctgaccgaaaatgtcttgtgtcggagtgtgtgtgtgtgtgtgacacaacatcagaatacactcgttcatcttatttttcaaattactaccggtgtcaacatgtcagggtcgtgtctggtggccgtggatgtgtcaatgcttcataagttggattgacttatttgagtttttctattaggatttgtttgattgtttaggagagcttataaaaacaaattgtgacatgtccataagttgttatcgacttatttccataagctctccaagatggcttatgagaacaacttatagctatatgaaagtattgtgactttattttatcttttgttatagaaatagcgtatacataaggacttaaatgattaacatttatggtataagcgcttagttaagttgtttttttaaaaatgagctaaatatatatgttagtttgtttaatattgttggttttgtgtattttctgtttggtgttcaggctgtcatagttgaaggagaaaagactacgaaaca

SEQ ID NO: 34126 - DNA, 582 bp, Medicago truncatula
  Intron number 1 from transcript Medtr6g041040.1 (locus Med tr6g041040) derived from phytozome v7.0 (chr-ID MtChr6; po s 8715167 to 8715748)
aaaggacaacaagctttcatttgtaagtgtgtgaggtgggtgtgttgttgtcgtgttgtgaatctatcaaaattaatcctttttttacttatttcattaaaaaaaatcctttttttatttcgttttatagaattcaacaaatgaattaattattagtgtattagaatggcattgtgttgtctatcaaagttaacttaaaatgcataaaaatgtatgagacttaatgtgaaaattattctatcctaacactaagcttgtcaaatgtatgagaaatagtcttccaaatgagaaaggtcactttgagtcaatcaaatattctatgaaagtgaaaattcattagtcatatcaatacttaaagaaatatatttcttctatgaacggggtaaatattgaaaatgaataaaaattgttaacactattttattattgaatgttaacaaagtacaagaggttgcaccgtcgaaataaacaaactacaaaagtaaactattccaaagttacgacatagactaaaaaattacaatattgtagagatattctttgtggattaataaaactaatgaagtgagcttagtgacaacc

SEQ ID NO: 34127 - DNA, 1056 bp, Medicago truncatula
  Intron number 1 from transcript Medtr4g144130.1 (locus Med tr4g144130) derived from phytozome v7.0 (chr-ID MtChr4; po s 36168777 to 36169832)
ctccattttgatctctttcaaatcgatcgtgataggtaaacaccaatacaatacaatataatacaatacaatacaatacaatacaatgtctctcatctttctctagatttcatcataggttgaatctgttacgaattttgaatattaggtgcaacgattcttaaatcacttttcacaattttaccgttcaattctgcaacagtactttccgtgccctacaatttttttattttattttttatatttccattatcattttatttggtattaatcgcttttttattcttattcttatatcacatcatttatgaatacggaataatgcactagtataaccaaatcttgatttttcgtttgattcaaagtgtgtttggttctggttaaaattgagttgaaaatggagtgttttatgtttggttacattgatctaaaaactagttgaacaaacaatttgagtgtaaaaatcaattctagaatcagaacctatagttccttcctagcttgaagtaggatccattttgggggtgaaatcaattttactatagagaaaccaaacatgtcaaaatcaattatacatctctagaatcaattttgactcctctaaaagtgtaaccaaacatatactacattcatgtaaaagtgagttgaacaatgtgcaaaaaccaagtttggagtcaaaagctacaaatcctagcttaaagttagaatcagttctagagagaaaatcaattctgattgagggcatccaaacttgtcaaaattcaaaccgaacatacacatgcataatttacatctctacattttttttttttatatatattttatctatgattttctatgtttatggaaactgcatcagccttgtgaaccccattctggaataaccaactgtcatattctcttcaattttgctgcccatactttatatttaatttcagttattttgtcagttagattgattttatttattttttaacttatctgttatctataacaatgattgaggtttcttattgaatgatcaggttgtacattttggtagctaagtagaaacga

SEQ ID NO: 34128 - DNA, 412 bp, Medicago truncatula
  Intron number 1 from transcript Medtr1g090480.1 (locus Med tr1g090480) derived from phytozome v7.0 (chr-ID MtChr1; po s 18349808 to 18350219 reverse strand)
gaagtttgcataacaccttacagtgaacgtgagtactcttttttctctctgttatttgttggccttttgtattctattgctcatagggcggatgaagatttctctataatatcagttgatagatacttctttagtagtgtacgttcttttagtttttcattttaggtttatctgtcaatgtatatgtattctatgatttctatggtccattctggctcaagatttattatcctttgactgcaatggattgtttgatttccatcaaagaaacaaaataaccctgagaattgagtattaaatggattttttaattattgaaagatattttttttagaggtttagcctttatgttataaataacaagccgtgagtttgaaacttacctactgaaatttatgttggattttatcag

SEQ ID NO: 34129 - DNA, 614 bp, Medicago truncatula
  Intron number 1 from transcript Medtr4g062330.1 (locus Med tr4g062330) derived from phytozome v7.0 (chr-ID MtChr4; po s 12044068 to 12044681)
ggagggattttgtaaatttacttttttggagtttggcttgtttccgcccttccatgtatatttgtgcttattttctacttgttccttgccactgcttgttttataaggttggtaggaaccttttgtttggttgtaacagctagctcttttagcacttccggtgcttggctttctatatatatatatatatatatatatatgctgattcaaaaaaaaaaaactaaaatagtgaatcgatcttctcctcttgtgaaatcaatttaacattgcagctgcttctatgtggaacacactgccatacacaaactcaattataagaaaaattggaatctgaaaatttcatgaagaaaataaaaattgaagtctacaagcatctagccacccacaatttgattgaaaaacaaagagtatttgaagctttgtgagggactgtgttccattacaattctctaaatttcaccataaaccaaaacaaaaacttaattttaattattacttgtttcgattgatatgatgggtaaatctgcaattttattacttgtgaatagatttggtgaagaagaaagttggatgtttttgtgagaggtgtgattttggattgcagtggaagagaa

SEQ ID NO: 34130 - DNA, 447 bp, Medicago truncatula
  Intron number 3 from transcript Medtr3g103460.1 (locus Med tr3g103460) derived from phytozome v7.0 (chr-ID MtChr3; po s 25455372 to 25455818 reverse strand)
gggtcttgttctctctattctgctcacaaaattaggtaggttcttaagttatagcattccaattgattaattcctacttttttgaatgaagtttccttgtgaagtttgtttgaaaatgatgcagcaactataatgacatatattatgttttcagtttgcaattttgccatgactataatttctacttcaatgttgatatatttgctgcaaagagttcaatgtgatagataatgcaagattttaaaataagctatagtttcctttgctaatttgtgttactagcttatatgactgctcctataccatgaagaataacaagcataattgaaagatatcagtaaattgatgatataagacatatgggattatgaagaacaacttcaaagttcatattccttttgttttattgcaggtattaattgcacagttttggagagaaacaaggca

SEQ ID NO: 34131 - DNA, 891 bp, Medicago truncatula
  Intron number 1 from transcript Medtr3g103460.1 (locus Med tr3g103460) derived from phytozome v7.0 (chr-ID MtChr3; po s 25456481 to 25457371 reverse strand)
ggaacagtaagtctgggtccctttgtgcaaattgggtaattttcttctttcttcaatttcactgtattctaatatttttctcatcattctgttgctctatgatttcgtgttcaatgaacattagtatagatgatgaagtatttaatgttcttctactcattgtttattagcatagtttgtgatgctatggtacactgtatatacgcatcttgttttactgttaggttccctttgtaactgcccaaaacctgtttgatataatgagattaacaaaaatgaacacattttaacaattcaaaccctaaaagtaaaacaacaaaactaagtacatctatagtcatgttatcatcaatagcaaggttgtataattcgtgtttgtctcacaatcccaggtgacgaaatctggttataattttgttaatttgctacttatttttattataaaattattactttgaattttggttgtcgtaataataatattatatttcattcaccaatgctaatgtaatagtaagtatgcatgtaagtgtttaactgtgttatgaaaataattattagaaaggcatcttagtcattattagttattcagccattaaacttgaagcatataaatgagagagtcaatagtctaaacaaaaaatacagcaaaagaactttttttggaatttcttactccttctttatgttctctcgtggctgaacgcctgaaccatagaaggagggggaaccactttgttcacaaaaaccattgcatgtacccttattattctccaatttcatcttccatccaaacaaaccaatttcccattgcaagaaactcatcttccctcttccgtctttaaactttgttcagcaagagagatagaaaagggggttccaattcttgta

SEQ ID NO: 34132 - DNA, 610 bp, Medicago truncatula
  Intron number 1 from transcript Medtr1g023860.1 (locus Med tr1g023860) derived from phytozome v7.0 (chr-ID MtChr1; po s 5429798 to 5430407 reverse strand)
cacgcactcctcttctctcaattttccgtttcactgttgaggaaaaggaaaaataaattaattatgagattttgatagttttgtagtttgttacgcgcatgcaatgcttaattttgcaattgaattgttataactctttttttagtgttaattcttaggttttatatgttgtattcattagtttcgaaggaaatcttcattttctgttgatttaagcgtgattagtgtgatgattgattttgcttgaaagggagtagaatttttttgtcttgaccctgggaacctagaattttagagttcagccagatgtgaggtaagtaaagtcatcaattattttttcatctagggctcgaacaaaagagagagaatgtaaacatgtttagataaatttaaggaaaactgagttaaataattaatttgaggctcaaagttacatttggaggcataaacaattggaactcttgtactcgagaacacacaaacatttggtaaaatgaatacaaatatgcacttaatgtctgcacactttgaaattgaactagagtttgtaattgtgttgatattgtgaagtgcagattttgaaaattttgaagcatcaaagtgtcagagg

SEQ ID NO: 34133 - DNA, 834 bp, Medicago truncatula
  Intron number 2 from transcript Medtr3g086850.1 (locus Med tr3g086850) derived from phytozome v7.0 (chr-ID MtChr3; po s 20488588 to 20489421 reverse strand)
gtgatttcagactctttggtgagaatttgttggctttcgtgttactgtcattttattttattttctatcaattaaatttgtgctcactcaaaagttatacaacatatttaaccctaaaaaataataaattttgctttaacatttttttttccaactttatccttaattattttttactttcaattatattccaccaataaataaatcaacaccacatatttaaacaaaagagagagcaccaatggggacgacatggccacatgggataccaaacccgtacctaatctaatcgataagtatttattattcttgtccaaaaaaattttaaagtctttataatattaatattttgtcatgtgcaaaggaatatatattttttaatagacattacgtcatgttaggcttttaaaatggtcatagtaaaccaaacaattatcttaatgaaaatttagccttagttagaaagctcacgcaaatatagttacgatcaaatatcatatcatatttgttagtagttaaattttcatggtttctttggtttgtatttaataatccatgatatgtccttcaaaagaaaaatccatgatatgtatcctttttggctagttaatctgttaggttatttaaagagaggccaaataatatatttaaaagctttaatagagatataaatatttaaacaaggtaacataagctgtaatatgagatacgtctctaaataaagtaatatgttgtttttttttctagggcaaaataaagtaacatgttatgttaggcttatcttctgtgatatgtgtagaatcaagggcaattgtaaggtactacgcagcaaag

SEQ ID NO: 34134 - DNA, 702 bp, Medicago truncatula
  Intron number 1 from transcript Medtr3g086850.1 (locus Med tr3g086850) derived from phytozome v7.0 (chr-ID MtChr3; po s 20489425 to 20490126 reverse strand)
gagagcaaaagaaacctgaattccttctcctccaggtagtgtacagtttataaatgcacctccccttatgttgactcaaatgtttcttgtaaataaaatcggagaaagtaatattcttaaagtatcgtaaatgatataggaaacgttgagatattttgatttgtcagatgatgttgtttttacactttttttctttctttcttgaaaaaaatatttcttctttatttataaatgtgtgtggtgtactgtatatacaaatttaagaatctcaaatgagagtgtcaattaaaagtgggaaaagttaattttattagatagatttatgatattgattgatggtttattttggcatgattgttttttttaaagagtctagtgataaaactcacacctacactaagggaagagatataagtaattgtggttcgaaaatgtgcacccaacagtaaatatttgtgcaatctttgtatgagacattttgcatgagtatttacaaacatacacaattatatatatgatcaaatattctttaaaagaaatatatgatcaaatattgacatgttgaattttgtctgattaacatagttttgactatatctttgattctactcgtatttcatgagaatgtattattgtacaagaaaccatcatgtaatcaatttttctttttgcagccctttggtcaagttccagttgtagagg

SEQ ID NO: 34135 - DNA, 581 bp, Medicago truncatula
  Intron number 2 from transcript Medtr2g110430.1 (locus Med tr2g110430) derived from phytozome v7.0 (chr-ID MtChr2; po s 25949371 to 25949951)
aaccaggtgcttttttcactaattctctgtaagcttcttctctcactctcaagtctcttagaatttttgtgtagtgattcattgtttgcactcagtaatacattagtattgattttagtgtaaaatcatccgaagataaaccactttactttagatcaaattttatcaaattagctttacaaaatcaattcaattatgttcgatatggctcatgccttatagtttaccaataaacggacgtacggtttaagggtaatattgtgaaccggattgctggagcatagtatataatcgcacgttgtacttttaaaccctaagttttttagtgagaatagaaaggtattgcaatgcagcctctctgcagtcggagacgtaagtacaattgaccgaactccatggctgttctaacaatttcaagatcacattaatcaaacattcttacaaacacatgctaagaatagtaagaaaaagctatctacttatctgcttgaacaatgctaagaatagtaatcaaatattcttacaaacacattaatcaaacatttttacaggtagggtaaaagaaaatatagacaagaaca

SEQ ID NO: 34136 - DNA, 428 bp, Medicago truncatula
  Intron number 1 from transcript Medtr6g006580.1 (locus Med tr6g006580) derived from phytozome v7.0 (chr-ID MtChr6; po s 973689 to 974116 reverse strand)
gcaacaggatcctcattgctcatccatgttatatgactaaatctgaacatcacataaatatgattttagtctctgctattatagtgttttttggttttagttctgtaaatttttctgtgaagactcagttctgcaagttcaaaaaccattgtttttagtcccttgcgtcagctaattgagccacatgtgattttgttgggccacttatacgttagggactaaaaacaatagctttgaatttgcagaattgaatctaaacaaaaaaccttatcgggactaaaatgaaaaattatatataattgtagggattcaaattatatttaaactatagattagtgagaaatagatgctaatgcgcactttgataaattaatttttcttaattttgtttaggtttcaggtcctcttgatcagaagcctgacgaaaa

SEQ ID NO: 34137 - DNA, 956 bp, Medicago truncatula
  Intron number 1 from transcript AC233668_44.1 (locus AC233 668_44) derived from phytozome v7.0 (chr-ID AC233668; pos 182371 to 183326)
atcagttccttgcaagtctgttgacggtagctttggtaagaaagtccgttggaaaaatatccagttataatagcaagcagcagcagcaattatcagagaagctggatggaatttgtgcactgtgtactaaaagaaagtaagtatagagataatggtattattataatagttcagggaacacatcagcagaacaatgatggcataggtttagaggatggacaagaaagaaaatacagatattgacttatttatcaatatgaaaaggagtcctaaaacagaatctcagatccttgataaaccaatctcaaaagataacctaagatactaagataagaccaagatattataagatatttttcatattattatatctaatagagcagaagctaagttaaattcattttagaacaaatgtcaagtattacactctgaatccagagttcactctttttctgaagaataggttattgtcctgatctaacaaagacacaaatggattctgtgtaaaatcttagtagaccgtccgcctctttactatataagttttgtttttgttaatatcgcttagaatgaatgtcgtgccttgtgttaacattgtcaaagagtttgtttaattggcaatgggatgttgaacaattattcagccatctcttaataatcataatttgaatctcatgtaaatgctttataaaaaaaagtttcctggaagaatttaaaaaacctgtcctatttgttgctatagacgaaggacaaagacttatttgagggcattaatagctttttactagattttttgctaacagcattatttgctcgtctgtttccaacacaatgttaatgtgaactactatactgctgttttcacatcttatttggcgttttgaggtttttattgactctgaaaacaatcttgttatgcaggtgtatcccgactccacactggattgaataccgcg

SEQ ID NO: 34138 - DNA, 777 bp, Medicago truncatula
  Intron number 1 from transcript Medtr3g104140.1 (locus Med tr3g104140) derived from phytozome v7.0 (chr-ID MtChr3; po s 25796444 to 25797220 reverse strand)
acatactagtatagaaaaatttaaaacatcttctggtaagtactctaaccgcgtaagcttgaaataaaccctacatactagtgtaaaaaaaaattaaaataaatttaggggagaccatggcctctgccggtcccccatctagctccgtccctgggtgtaagtaagtagtatatgttggtgtgaatgaatagagtagagtcggtaccttttgtattgatcaaggatgggtgcaaagaaagagtaactgacagctgtgaaggttgcacggtggttttctgtagtaacaaaaaaatattagaaattgtgaagaagaaaaaagagaaaaaagtgtgacgcgggtgtctaaggagtgtaaaagtgtgtcgaagcaaagttttgggacacttgtctaacagtgtaacaggggtgtcgaacaatgggacgcgcttaatgctagagcctagaggtgtccgtgctttggaggtgcaatgcaaatatgcaatagagaaaaaagggtgtaagtgagttactagagagaaaagtgtgtaagtaagataatggaaagaacctgccagtctaactgttattaatacataatttagaagaaaaaacacattcaggaaaagagtagcttcaactaaacagtagcatcacgtaacaaagtctaagtccaaaggtaactaatcaaggttgtttgacatttcatatatgtgctaaaacagttcatagtttctatagtggttatgtgaactgaacggtgatgatgctaggatgcagtaattggatccaaccgtgttt

SEQ ID NO: 34139 - DNA, 705 bp, Medicago truncatula
  Intron number 1 from transcript Medtr3g147250.1 (locus Med tr3g147250) derived from phytozome v7.0 (chr-ID MtChr3; po s 38064621 to 38065325)
tggtggctcaagagtcgtgtctagggctctgatacgtgggatgggaactgttatttatattcttgttgtttcttttccatgtatcgaattttgaatttgtgatgaggagcctttattgtcttttgaataatgttgttgaattaagctaaggcctttaatgccgtaggatgttgttggattgaaaactattccgctgctatgttttcatattttatcaagtggtttgattaaatagttttattttctatttaagaaatttgaaattgcaatgtagcatacccgtttggtgaaatactctgatgattattgttatttatttacttttgggtaacggggtgttacagttccgaccagtttttccggttttactgtcggttcttggactaccggtttttaagaacctattcgggtcggtgccagcttcggttacgggtgaaccggcctgcccggtccggttttaataacattgcaccatcatcaatggacctttcgatttatttttctcattttatttcttaattttttttattttaagttgaattcataaataaataaataaaaatgtgttttagagtgaagtctaactctctctaaccaaatcaggttttctttaattggtttgcgaaggctttcatgccagtaaatttggtcctcatgacatgaaatttgtttcttcttaataggttcttgttgtttctcttctca

SEQ ID NO: 34140 - DNA, 599 bp, Medicago truncatula; identical to SEQ ID NO: 28744
  Intron number 1 from transcript Medtr3g162470.1 (locus Med tr3g162470) derived from phytozome v7.0 (chr-ID MtChr3; po s 42432998 to 42433596)

SEQ ID NO: 34141 - DNA, 590 bp, Medicago truncatula
  Intron number 2 from transcript Medtr4g011700.1 (locus Med tr4g011700) derived from phytozome v7.0 (chr-ID MtChr4; po s 1764702 to 1765291 reverse strand)
ggactctagtattattcatgtatgtgaaatatgtgcggctactcatccatttatagtatataaactctctgaagactattataacattagtctttacattcaaagctttactaactaaaatttggttaatttgagttgaattttggaccaagaaactgatatgtgaatttgtattgcaactttatgcattgaattgacatgaacatatcagaacatgattattaaataactacaaaagctgattacagctctaaacgaattttgcttttcaaactcagtcttggtttatattgaggaaaaggattattttgtaaacttttaacagtttgttttatttttatctattcacaaccatagatcagattgaagtgtgaaaataatttgttaccattggttagaatagtctgtttcttatcaatactttatagtatgataatttgatcttagaaaatgttcatgtctataaaatcaaaagtagcatcatgaaatcaaaggaacatatatttcttcttcaattctttctaacgttatcttttgtgattcctgtttcttcagagagtttcaaagcaccagttaaaattgtgggcaat

SEQ ID NO: 34142 - DNA, 489 bp, Medicago truncatula
  Intron number 2 from transcript Medtr4g045080.1 (locus Med tr4g045080) derived from phytozome v7.0 (chr-ID MtChr4; po s 10665008 to 10665496 reverse strand)
attttagcttggtgttgatagaaaaggaggtttttttcttccatgttagattaaatggatttggaatttgaatcagcttatttgatggtttatttgtcttctcattctttatttcgactttaaagtttctttgatgttagattaagtgattttagcttatatgaaagtttataccttgcatgttagattatattcaaatgaatttctgatttgcttattataccgaaaaaccaaatttttcacaaaaacaattgttcaaaaaatttgttgatggttaagtttatgtgtttttcatgttgttagaaaataaaggcggtttttttccatgtttttatggaaagacttgattttgtttcttcatttagaagatatgacttttatttaaaagatttatgttttatgttatacttgcataataaaatctgaaatgattatacaaaccatatatcaaaaggttgaggtagcaacttcaaagaaagtgcaaggcaa

SEQ ID NO: 34143 - DNA, 777 bp, Medicago truncatula
  Intron number 1 from transcript Medtr2g121090.1 (locus Med tr2g121090) derived from phytozome v7.0 (chr-ID MtChr2; po s 28642545 to 28643321 reverse strand)
ttctattgtttgcggtttgtgttttccttaatcttctattactagttgttgttctaacatcttccttcaatgaaagcagtcttctcctcagacacacatttgtgacgatggtcataactttcactgccacaattttatagagcacgttacataatgaaataggccggtaatctgtcatagattgaggatatcaatcttaggggtcaaagtaatgtttgtttcattgagagatgagggaaaagacccaggacctagttgttaggagttagaatagggaaaagacccaataccctccaaagagatattgataatcaataatattggttgccgtggatgtagattagagaacattgctctaattcgagctaagttaaatttcttggtgttgtttttgttttctgatctttgataatttatgtatttgcaatttcaagttctttgattctcacgcgcttgactttctggtgatttatgcttttgttacaaaatagttatatttacagcactatagtttaagttatatgttactttatatttaaaacacataatatatcactttcgaatagaattacatacaaaatttagtttctaaatcattttgaaatttaatgcatattcaagtgataaaaccgaatatgggcatgatggtttccaactaaagtttgtcctttttatgtatgatgaaataaagttacctgtgttgtacggccagctgttaaaattactaataacggcattaaacatgataaacattatcttttttcttgtcatataggg

SEQ ID NO: 34144 - DNA, 856 bp, Medicago truncatula
  Intron number 1 from transcript AC146557_2.1 (locus AC1465 57_2) derived from phytozome v7.0 (chr-ID AC146557; pos 42 44 to 5099)
cctggaaaatacaggtaagttttttttatttgtgtttttttttttcccttacagaaatgcatatattgttacttgtaaagtccacaagattcaattaagcataacatatttttttcacctaaaaagtgtttacgtggacgtttaatgttatgtttggcatgtcaaagttcatcgctctcgaaattatggttcataagtgtgttattcaatcttgatttgaaactaaattgatcggttacttgatttgtaatattgttaatgaaatatttataatttggattggattcaaaaactaaaagaagagaatgtgagtaattaatcatgtttaatgtcatatgcactacctaccacctcaatgctaaatagtccaaaagagcctccactagaagaacatccataatggagacacccattttttgtacttaaatgagcctcacatgtacgcatttatttataatttttttaatagtagtacctaataagcactcaatccctagtgtgaatctggatcatccagatctccttttcttgactttgaatgcatgtggtaaacataatcgactaccaagatctcgcttcagaaaaatgtcaaagcagaggatctatacccgtcttaagtgagatcttggtcttataaaaccctaaataattttctcaccaacttggtacctaataggtaccaagtcgtaaattgaaaattcttataagaccccaaacaattttacaattttttgtgaagttattaaaaactgaaaaatagtcttgaaagaaaaaccaaacatatattacaaatttattttacattgttctcatgttttaattttttgattgtgtagggaagagatttctattccat

SEQ ID NO: 34145 - DNA, 630 bp, Medicago truncatula
  Intron number 2 from transcript Medtr1g078890.1 (locus Med tr1g078890) derived from phytozome v7.0 (chr-ID MtChr1; po s 15646491 to 15647120)
ccaagtggaggaggaaggtcaggctaggtgtaactgtaggagtacttttgctctattgctagtaaaactgtttataccaaaaatgctgccttacaagaccatctgaattatctccaggattcaaactcattactttcgattgctgattatgataataatcataataaatttttataaaggtttaattatttgagttgtgacttccaagttttggttctagttctagttatagttcattttgcttctgcttgcataaacacatctgttgttttctcccctttttccctcattgtaaatatcttcaaacgactagtaagtgaggttcattctcaagtatctccaaatgactagtaagtgaggttcattctcacttgaagtgtttaaattgactttggcatccagcaaagtattttgacgacacaacttgcagtgtttacagtatattttgacatgacaatgggggggggggggggggggggggcactgcagtttcaattcaatggatcagaattagaataaattatatacaatacaaaaacttagtatttatttcactgttgtgctaattttcttgctgaatttatgggtaacttctggtctcttacaaatgttaatgcagtttgatttcag

SEQ ID NO: 34146 - DNA, 614 bp, Medicago truncatula
  Intron number 2 from transcript Medtr3g133060.1 (locus Med tr3g133060) derived from phytozome v7.0 (chr-ID MtChr3; po s 33609965 to 33610578)
atattgctccgaaatcccaaatccggtaactgaaatcatattccaccattcataataatcatatcttcttattataatttttttttgcagaacacgtgatttatgtttggtttggattaacatcttaattaagctctgaataacttaaacaattatcatataagtgcttatgaattagaaagaaagaaaaaaagtgctcatgtttaaaatatctatattgtaaaagatacaataaagtcattatgttttcatacaagttctaagctgttttcttaagctataatggtgagcttatgaaagaaaaaaaaacggaaaacaacttattgatatatcaaaagctgttttcataagctctgccaaacggtttcataagtgcttataccggtaaacaagctcaatatgccaatccaaacatgttcttattctaatttgtttatctttactacttaacgtgttcatcagaacttgatattgttctgttaacaatgctgtaacttgtactactttgctattagtttttcttgtggaattggtcctcattgagctttctgacctttgtcatgctttctcttcttttggatcctttacatatgttatcatttgtttggcaggaa

SEQ ID NO: 34147 - DNA, 390 bp, Medicago truncatula
  Intron number 3 from transcript Medtr3g133060.1 (locus Med tr3g133060) derived from phytozome v7.0 (chr-ID MtChr3; po s 33610643 to 33611032)
cggatcttggtttttgggagattatacaagtgaaggtagatgtttgattatctaagatgcaacgcagtgcatgcattttctattccactttatgtttttattgtaccgaggtacattatttttatcatcagcctcatgtttgatgaaatcattagcttatgcttttctttgaaataatgtctttgttcatgctcatcttatcctttgttcttgtaattctaaccaacactttgaaaaataaatattgtttcttatctttctctggatgaagcatgatgattcctcttgttaattttccaggtctttcacttgcgaccaaactatagtgaaacaatgatttttgcatatattcttctcatttttatcatcactatgttttttctttaacag

SEQ ID NO: 34148 - DNA, 897 bp, Medicago truncatula
  Intron number 7 from transcript Medtr4g097810.1 (locus Med tr4g097810) derived from phytozome v7.0 (chr-ID MtChr4; po s 21001177 to 21002073)
ttcaagttccttctcattctctttatgcagatgatataatgatcttttgcaaaggaaaactatcttcaattaatgccctcatggatttgttcaattcttatgctttgacttcaggtcaatttattaatccctctaagtctactgtgttttatggctcaatttcaaatgcaaggctggagcagataaccaatcttattggttttaacaaaggctcactcccattttcttatcttggattaccaaattttaaaggaaaaccaaagaaatctcatttgcagcctattgcagataagataaagtctaagcttagtgcgtggaaagcttttcttctctctattgcagggagggagagtgactttggttaagtatgtgattcaaggaatgatgatgcacactatataatctgtactcttggcctaattcattgccgaaggaagttgaagcttggatcaggaactttattaatttggagtggtgacatatccaaaaggaagttagtgactgtttcttggagtaaagtttgcaaaccctactctgaaggaggtttgggattgagatccttgtacactttgaatgaagctgcaaaccttaagttctgttgggatctcaaaaattcaaatgaagactgggccattcttctaagaagtaaggtgtttagaggaagcaaagtaatttcaatgaaaattgcagtgttaagtcagagattattaatatcaatgaaaagtgcagctggatcataggtaatggggaaaatatcaatttttggcttgatccgtggcttgacaacctgttgcttctattcttaacttgccaggcaacattcatagtagtttaatagatagggtttctgattttttaacagaaaccctactctttgggagaaatttggtcaatctt

SEQ ID NO: 34149 - DNA, 654 bp, Medicago truncatula
  Intron number 1 from transcript Medtr1g093850.1 (locus Med tr1g093850) derived from phytozome v7.0 (chr-ID MtChr1; po s 19245699 to 19246352 reverse strand)
ggtgtcttgatttcaatccctcgagtttgcaaattcttcaattgtatactagagatcacatgtcagatccgtagttagtaaagttagtggcccattcaactcagtccatttatcaggattaaatcctggtgaagaatcttgaaattttcaagaccagtcagtaaacaagtttagtgagactatgtgatatttgtgctctagcaaatttagagactatgtgatatttgtgctctagtcctgtatgaatagatgtaacacacatgtttatttccctagaaattctggatgacttacagtcagagtgagtggctaaaaatcttgttatacctgctttccgcctccggatgttagcgatttatttttgagttgctcttggtggatttcttatcctcttctctaattcatttctgtctcctattcttcttttatcataagagaaaaatatatgaaaacattccttttatttttttgaccattttatgggactgattattataattagacattattgcgaaagcaaataggcaacagcaaaatccatgtgggtttaccccctgtcacttctataattttccagccaacaacttgttcactcgacatcgtgctaatacaatttccttttcccagagataggagggcacaattgctcgccaa

SEQ ID NO: 34150 - DNA, 1050 bp, Medicago truncatula
  Intron number 1 from transcript Medtr7g064500.1 (locus Med tr7g064500) derived from phytozome v7.0 (chr-ID MtChr7; po s 12993588 to 12994637 reverse strand)
gaaatcccagattccttttgttgttgcgtttgtctgtaagtttctctcaccatctttcaattctatgcctttttttttttttggaacgagaaacaccctttgatatgtttttttcatcaaggttcaatttttttctccaattcttatttacaattcataagggtcatcaaagatgcctttaatttttaaaatgatggattatatatattttttcattagcttagttaatttgattggaaaaaaaatcgattttgttatttttttggatctgaagttgatattcgtgcatgtaaatgtaaatgtttgtatcttaaatttcaattgaatatccaatccactgaagataatgcaaatgtaattagaatttacaagaggaagaactcatcattggttggtttttatcaaatagagttatttattattcattaattgtttattcattttatttgcatttcaaacccaagaatgtaatgtgaatctttcttgcattttgatatttgtttttagtgttaaccctcgcgttcctaggtgaaaggtgctttggtaattcatggttcgtacgggaggtaaataaagtctagtctagaaacccacatgggttggcctcgttgtgtaagcttgagaccttggagtgtgctcctctcaaggactcaagtccgaatcctccaggtgccaatttatgtgtatgagtccatatagagcttggtgggattggtctccggattagacggtccttttaccggatatttttttttttttttttttttttattttaaagtttggccaagaattgttccacacatgaatcgaattcgggctctcacgaatgatctgtcttttggtagtcttgctggttcatatggattgcctgttaatggaaatagaaatttttattcttaagttaaaaggatgatgttggttttggacatgttggtcaatgtgtcattttaagcaaattattgagccaccttgtttctttattaaattatacttactgattttaacactactttcatcatgcagggatctattatacaagcccattgtact

SEQ ID NO: 34151 - DNA, 646 bp, Medicago truncatula
  Intron number 1 from transcript Medtr2g132300.1 (locus Med tr2g132300) derived from phytozome v7.0 (chr-ID MtChr2; po s 31932174 to 31932819 reverse strand)
agagagagagagagagagagagagagagagagaaggtgctttcataaccaccattctccctagacacccatatattatactccacaatgaggggtgtttatttaatgtggtgctaaatatgtgaagcatccatcgatgtggatggtcttaatattttttactgatataaaaacataaattatagcatataaaatgttgttggatttgtatcgataaatatttttaaaatatcaaattttcataatttttctaatatactattaaaaatatttaagatcaaaagcccaaaaataagaacccatgtgatctattttttacacatggccaattaaaaaaaatgccaaatcagcgtcacgtaagtgaatttgctgagtttgatgggggaagggtgttttccgaagaagaaaaaaaaaagttttacaaggatgcaattcaaaccgaaaatgacctatattacagagggtgcaaatcctctccattttgtgagaaaatggcaaatctcaatttccactcctaaaaataagacatgtgtaaaataaaacaatcaacggttctgatacattcaaagaattatttaatttttccattttattttaataaccaaaacatagaaaccacgcccattgcttctctctcatttggagtt

SEQ ID NO: 34152 - DNA, 981 bp, Medicago truncatula
  Intron number 1 from transcript Medtr4g136230.1 (locus Med tr4g136230) derived from phytozome v7.0 (chr-ID MtChr4; po s 33228539 to 33229519)
actgtgatgatttgagctcctcttgttggttgaattttttcatagctctcaagtagatccaaagtgtgtatatttcaaaataaaatctgagactatatatcatcttctggcaattctcttatatccaaataacaaggacaccaatgatgatagttataaaagtaataataacaatgatactaatgagaattaactggatttcatagagaggtagagtaatgtgcattcatacctgaattattgtgcaggctgattgtgataataatatttattcaaattagcacttttagtaagcaatttccaactagatatggatctattaaaaaggatcaaagagtgacaaaggctgctgctcaagtaccaaacaattgttgagaaatttattaaaactatgaatagaggcttatagatttttagaaaattctagtttactttgataataaattgagaaagcaagaaaacaaaattgatcaataattctaaacaaaagttttttgccaagatttgaacgaaccaaataatcaaaattaccgcagccgttacaaacaaaaaataattgtttcattctggagtaaataaatcaagtgcaaccatgttaattggtgaagtaatttaacacgcagcatgatctcaaggttaaacctattaaacattataattagagtttggaattgaaaccgtgaagaaattttgtagaaatcatatgcggccgagctaaaaatattgaacatgacaaaacgtagacctgctgctatttcatatcttaaacctatgagctgatttgagatttgagttataaaaaataaatagtatatgatgatcatcttggaagtggcatcgtggttgttgcacaaaatcttataagtggcatcatggtgaacgcacaaacgtgtgatttttttttctttctaacttcatttttctttgaattttttgacaactaactttatttttatgtcatttcagattcaagttgtttgc

SEQ ID NO: 34153 - DNA, 579 bp, Medicago truncatula
  Intron number 1 from transcript Medtr3g009260.1 (locus Med tr3g009260) derived from phytozome v7.0 (chr-ID MtChr3; po s 1301879 to 1302457)
catcattcatctttaccacttccaagcccttaaaggtcctttatttttttggtatttttttcattgtttttattgccaattcattcaaatgttgaaactttcttgtattttgttgtgataagacttttaggttttgaaatatttgaattttcgaagatcacggtaattaccaatggtttttatatttcaaagccactaatgatagtgataaaatactgtttagattttaaaacctaggatttgttattatccttttagggtttatgattatggttttgttcattgttaataatgtataattaagcttcattatgattgtttttttcttgatatcaaattttaaatgagatatatgaaatatgtgaaagttttgaatttgatattatactgtgctttatttgatgatgatgatgttttttttttgttatgtttttattttatttttaatttgaaatttgagatgagatatctgaaatgtgggatccataacttagggtttgatattttaatgtgtttgatgatgataatgtaacatcttgtaaattgtaatttagcaggttttcaaagttcaaaggcata

SEQ ID NO: 34154 - DNA, 885 bp, Medicago truncatula
  Intron number 1 from transcript Medtr4g011410.1 (locus Med tr4g011410) derived from phytozome v7.0 (chr-ID MtChr4; po s 1644488 to 1645372)
tctatccaggtgcttaatattgttttattttttgaatgaatgaattgccttagcataatgttacaatatatgtgaatgcgtcttttatttgagtaaaaaaatattttggtcctaaatgtgtgaggcggtgttattttagtcctaaatgcatcaaaattaaaaagacatccctgagtgtcttctattggcaatttcatgaaccaaaatgacaaaccaaagacatatctgaggaccaaactaacaaatgaaagacacacgactaccaaattgattaataaataaaatacacgttgaggtatcttttgtaattttgatacattcaacgactatagtgacaacgacttacacattcaaagaccaaagtgtctattacctctttgttgttttatgttaggacttttattttatcttttctatgatatatttgttatgcatataatttagatttattaacttatggttgctgaaggagttagataacactttgtatcactgtctagtgttatgtgctacttttttctcctacttgtttatatttttatagtggaagattttgataaagttggtgtcttctgatactgagagagagtgttattggtttctgtcatttcaactctaattaggtctagtaagcatgtccttttgcatgtgcttaatttaacaaaattacgatatggttttgtttgagagaatataaaatataaaatagcaacctgacttgaaaaagtcttctcttaatttgtctgttgattaaattatggttacttaataataatagttcataagtattcatgtaagctttgcatggtagttttaaggtattcatgtttctgtaccaggtttcaaccttatttaagttggtatatttacaggaactgccactga

SEQ ID NO: 34155 - DNA, 873 bp, Medicago truncatula
  Intron number 1 from transcript Medtr4g101370.1 (locus Med tr4g101370) derived from phytozome v7.0 (chr-ID MtChr4; po s 22013292 to 22014164)
caggaatcagatttaggaggaggtcgttatgctaatagataggggagtgatggtattataaacagttttattcagaggttgtttcgagtattgaaaatataccagagcatctttgtccaagtattgtaatcctcaaagttcgattaatgatcagagggatactttcaagtcactgtttctttattgtactctttttttaagaacgatttcatgaagctaagaaagtgattgtatttcccaaataaaccaatccaaacacacattaaatttaactttttactgtttttcacttttaaaatattaccataaagcagcaatatttcaattacaataacaagaaagtacagaaaccaactcacattgatttttgagtcgcatgctttgattaaaatttatttttccttttacgtttgtagatgaaattcaatcaaactaatatataatctgtacttataccatttttataagtactgcaagatataaaaggtttatgtaaaaattacgcctttcatctaaatatatcttttgttatagagacttacatatttcacccggacaaagctttttattataacaattcagaactttcttctatacctagctcttgttgtagtaactgatactatttcattcccttcagattatgtgagtgttagtaattgttttgttgttgatgaatccatttgatttgagttaggcatttgactcattttgttttacaagaaaatataatctgataaacaatcctctaatgagatcacctaagcttacacattttaattgatattcatgtttaggctattttttgcattgtgcacttttactcttcaaaattaatcgttttctgctaacagggaagatttacctggaaaa

SEQ ID NO: 34156 - DNA, 849 bp, Medicago truncatula
  Intron number 1 from transcript Medtr7g070730.1 (locus Med tr7g070730) derived from phytozome v7.0 (chr-ID MtChr7; po s 14361134 to 14361982)
gcccagtaaactgagcgttgttcatttcttaggcggacttttagtgattatttaggatagggattttgttttccttttctttatgatgtagttccgttgtggcggcttctcttgtaattgatttgaatgtttgaatgaaaagaagattgaatgtctttctcttacctttgtttgttatttttgttgtgccgcccgagcttttcctttctctctgcatccactcattttatttcatgccacgttttttattgtccgcgcattttatttcatgccacgcattttatatatggttactatattttattttggtaattcatttttcttgacaagtatattttgtttctcttttggagtttggcccttatatattttgaaagtctaaacataaattaaaaatacaatgcagtattatgagactaaaaatataatgattttttttatgatcaagattagtacatgaattctttacaaaagttaagtggtcaattaattattaatatatatttctttatatttaacattatcataattttataaatgacctcttgcaactcgaaagttctaaaaactatttatttaattaatgtaaagaaagcaacttttacttataaagctattaaaatggttttgtttattacattcagttcaaagtataacaatatggctcaatttttcatgtttgtttatattttgatcatttttctttcttcatttttgattgaagcaagtacaggtatgccattttcacaatattttaaattatattattttatcacctttgaataacattgttttttcttatttgacaatacagctgcgacgccctgcactagtgacaaagattgtcgt

SEQ ID NO: 34157 - DNA, 1030 bp, Medicago truncatula
  Intron number 1 from transcript Medtr1g023630.1 (locus Med tr1g023630) derived from phytozome v7.0 (chr-ID MtChr1; po s 5302539 to 5303568 reverse strand)
agaaagcgcagaaacaaaaacacagcagcaaaaacgttcacaccagaaaataacttagaattgaaatgtgactacattgttgaaatttaaagaaaaataagcatggaagatacacttatattcttatagcttgaattcgttttcagttgatgattagggttcaaaatgtaagtattcaaccttgtttacaacatacgacaagcaatcttttagtactatcttcgtcggaccataaatcttgtctgcttccatttgcagttgaatatgcgtcgtctacattctcttatcggtatcaacttccttcttgtcaattattttcaaactttgttcaatgtggtgcttagtgtaccaacttttctttcatgtctaccaactgttgaattatttcatagcaattatttgtcagggaccaggattagggacccttagacgtggttgttttttgtgctgataataaagtggatgttgatctttttgagcccgtccaaaggtaagggtggacaattggaccagggtaagggacccttaaactgaatagcagggtcttgttaacgagtgttttcggatcattcgttaagcattttactttaagaaaatattcttataaaaaagtcaaatatcacaatttccaatatattggatacggaaacttttataaaaacttaccttttaaggtcctgagtgctctaggggcactcgttggcatttcccaaataatattaatataataaaaacgagaatgtcatggccttatggcactcactgtctcaagcaatacagcttttaatagcatgtcacctatactacacaaacatcatgattcaacatcacattatctttgaaaagaaaaaaaaaatgaactggtggttagctaaagcatctggcactggcaaagcaagttatttaagcattgttctatgtttttcaatatcctctcccttttaatttttattttcaactaatgagattttactcactctcttgtgcctgtgcagattacagaattcaaggaagcaccaggaagcttcca

SEQ ID NO: 34158 - DNA, 990 bp, Medicago truncatula
  Intron number 1 from transcript Medtr3g030250.1 (locus Med tr3g030250) derived from phytozome v7.0 (chr-ID MtChr3; po s 8151102 to 8152091 reverse strand)
tcaaagaggtaagatagattatgttgatttttctttggccaatttaatttaatttttcttttgatttgtgtgattatgcagtttcttctgtttctggtgattcttgatttttttttttgttatatggggtgtttctgattgttgtttttaattcaatatatttgtattgttgatatgctatgatgaatttgttttttcttcaatcatggtgtgttttttttgcttttgattataactcagaatttttttgaagtaggaattcaattaggttgaatcataagttgaaagttgaaaattcttcaatatttaataaattgttgttatttcttcaatatatttgtattattgatatgttatgatgaatttgatatttctcctatctggcttttcttttctttttgattaggattcagaaattggaaattgaaagctgaaaatttgagtagttatttggatatagcttattgaagtaggaacacaattaggtttctagaggcttcttttgttgccttgtgaccttaaggtcagggtgttaaatcttcaatatatgcatatgtttatttgagcggtaaaaaacttgcggtgatggttaaaaaacccgctttatagcttttgaattttcacggttaaatgctgcttgaatgcacgttggcagtaaatcaccgctttcccaaacactcgctatgtctgtctatcctccccagattccacctggtgggagcccggtgcccctttttattctagagactttttaatgtggatagttctatgtaaccatgaattcattttaatcatgctttgcgttttcgtttgcggaaacatggttagaaggtttttaatggtgagcttgatttttgataatagaaacaactgttgtgccttgtgcgggtctttttcattcgttgtaaatttgcttgtgtgccgactgttcgtatttatgtaatttattgtcttttgaatctttcagggttctttgtaagttctttgctc

SEQ ID NO: 34159 - DNA, 906 bp, Medicago truncatula; identical to SEQ ID NO: 31779
  Intron number 1 from transcript Medtr4g152100.1 (locus Med tr4g152100) derived from phytozome v7.0 (chr-ID MtChr4; po s 37605762 to 37606667)

SEQ ID NO: 34160 - DNA, 586 bp, Medicago truncatula
  Intron number 2 from transcript Medtr2g127080.1 (locus Med tr2g127080) derived from phytozome v7.0 (chr-ID MtChr2; po s 30908739 to 30909324 reverse strand)
cagcctgaatcacgccaaagaattgtcaacaaaatgtaagctctagttttagtactgtatcactgatttgatgagtttttgactattaattcatatcaaaagaacaattaaatataaattgttgattgatctgctatctttgtaaacacatggtgtgtttgggtggagaatgctaccttgttgatttgaacaagaacttggggtgttctgcgtactgtttcagagttttgtatttggctcttgtgtgacgttcttctcattttgtttgcggttttatggcaaatggatgtttagcggaaaattatagtgcttttattaagattgaattttcctcatgttacaaagaatcttttttaagaagactatctaaaatgttaccaagaaaatttatagtttctgtaatccatgtctgacatccattctactatctttttttttattttttatgagaacatgtctagatgatttcaattaggtcttcttacatgtgagtcatattccatcatttgaggattgtctaatgaatataacatatcaataattcatattatttaataattgaaccattgtttttcaattttggagt

SEQ ID NO: 34161 - DNA, 745 bp, Medicago truncatula
  Intron number 1 from transcript Medtr2g127080.1 (locus Med tr2g127080) derived from phytozome v7.0 (chr-ID MtChr2; po s 30909400 to 30910144 reverse strand)
tcaccttacttttgcttttgattctgttattcttcgtaagataattcttattttgctaggtataaggttagttaattaacatgtttagttagatgataaaactaaaaccattgtttgtttcaactactacaatccatggaatcttctcaaggattttcctcatggaaatcctcaatcaattttttatgtcaaaatatcattactcatacatgatgatataataataattttttcaactgatatgcgcgcgctaatttttggcgcgcatgtcagttgaacaaatgattattatattatctatgagtaatgatattttgaatacaaattttgatataaattacggtgtcttttgtttttgtgtgtttttgaaaaacgtgcaagtttttgaaggtaaaaattacgagagatagagataaaaatgtttaaataacacaacttttacattatatatgttagaaaccgcgacaatgtttatagatttgattgccttatgtattgtgttttttagcttaaatatgattttagtccatgacatcatagcccaataagctgatgttagggactaaaagcacgattttattgatagccctttttggcgctccgacaagtcagtaaccgccatttattaccatttttaattttatatttgtgtataatctggttttatactttcctttcagagtctgatttgacaagaacattaattttcttttggctttttgtggtttcagttaatttaaattca

SEQ ID NO: 34162 - DNA, 318 bp, Medicago truncatula
  Intron number 1 from transcript Medtr6g013180.1 (locus Med tr6g013180) derived from phytozome v7.0 (chr-ID MtChr6; po s 2704204 to 2704521)
tgatttgaacaagtgcgagccttgggatttgccttgtaagtttctcttctcattacctttgtttccatttttttctcttcgaaaaaatttagtatcaaggttttaaaatcggtatgcaatcgcgatatcaaggtattttatgcttcctcaaccgtgtagcaacatcagttgcgattgtattagctgtatttgactgcatttgtttttataatataaagaatcgcaactagactaagaatcaaatttcttttttaaggattttgattttgtgtatctaaattttagtgtttttttcttaatggtgtagggagggccaat

SEQ ID NO: 34163 - DNA, 949 bp, Medicago truncatula
  Intron number 1 from transcript Medtr3g016720.1 (locus Med tr3g016720) derived from phytozome v7.0 (chr-ID MtChr3; po s 3305017 to 3305965)
tctctctctcttagttctcacattctcactttaaggtaagcaaattgattctccaatttctcttccttctccattttcttgttttagatttaaggttttaaaattcggaattggaaaattgctttgtaaataagccaaatttgaacatttacttgtgctttgtcatgtgaatgaattatgcttggtttggttaattggttttgtgcattgtggtttctttctacaattcttcttacaaactcactatgaacaaaaaatttcctgtaatctctttagaattgggaattgaaactttgttatgattggatttggatttggaattttgtttgttatgaacaggttgtatttatttagattggaattagaattttgttatcaacgcttttttgttagttagaattgaaattggaattttggaatgttaatttttacttactgaattggaatgtattaactacatagaattggaatgttaattacctagaattgaaattggaattttggaatgtttgttctttgaaattttagccacacatagactaagggtgtgtttggattgagggtttgggaggggagggtttacttttcttttctaaatcacggtctatataacatgtttttctaaaataaattaagtgtgattaaattattatatgatcgtttatcatgttattattttaacttattaaaaaacattccatagtgtccgtaatttaaaaacgattccaaatcctcttgtgatggtgtgggttttgagggaggtagctggttagaggagaatgtgtgtaagaagattggtagtgggacaactcttttttggtcggatgggtgggtaggggaggtaccgttgcaggagaggtttagcagtggcgtcgtcgtttgttggcttgggaggaggagttggtcagggagcgctagatggttatttctaacattcatctgcaggttg

SEQ ID NO: 34164 - DNA, 550 bp, Medicago truncatula
  Intron number 3 from transcript Medtr3g016720.1 (locus Med tr3g016720) derived from phytozome v7.0 (chr-ID MtChr3; po s 3306768 to 3307317)
agaaagttccattgtcggggacgctctcgtcccaaaacccggtcacgataggactgagagcagcgagagaatttgatccaggaggaaattttcctattttatgtacgacacaatgtttctgtttcaacttatgggactctggtggacacttatgctatccttcaccttgaggacaaggtgaatctttagggggggtagtattaagttatagaatactagttgtttatttaataatattataaataagtaactgttgcttgtctgcagtaattgctgtctactaaacttttatgtaactgttataggacttagtattataaataagatgcagaggaaaagaaaggcattcagggattgagataaaggataggtagggagagaccaagctctcgaattcttggaggggagagaaccgagactctcgaatttcttgggattatattgtaatattagtatattactattagtttatattttgatatcagtttctatcacatccgttccatttgaactcaggttttttttttgtttctttctcagttgcatacat

SEQ ID NO: 34165 - DNA, 360 bp, Medicago truncatula
  Intron number 1 from transcript Medtr4g129590.1 (locus Med tr4g129590) derived from phytozome v7.0 (chr-ID MtChr4; po s 30859532 to 30859891 reverse strand)
aacttgatattgttgaaactgaggtgcttgttcttgatagtgcgaaatattttttcacatgtaagaaatgtaatgtttgacataatttgattaattgggtttgttgtgaaaaaacaaaggtatggttcattatagttatagacaaatttgataatgattttcaaagaatgtctttttttatttgattataaaaagtgttgtgttgtgtgtataaaggaaccaagaataacttaaaatgagaagacactatgtagaggaaatgtaaatgtccatttaatttatgtgattatttttttgacatctaatgaagacaaagttagaaagttgtatttttgttagtcatttaaatgtaaaagagaa

SEQ ID NO: 34166 - DNA, 696 bp, Medicago truncatula
  Intron number 2 from transcript Medtr5g029780.1 (locus Med tr5g029780) derived from phytozome v7.0 (chr-ID MtChr5; po s 12444886 to 12445581 reverse strand)
atccttgcgaagaagatcagtgaaacggctgaaaggtaagggttaatcaatgacctagttgcagctagtcaagaatattgttattaaattttaatatagaatcataatgctgttagtttgtgtatatatattgaatagaaggaaatgattgcattaggcttggttaaacagttctgttttgatttgacgattttgtaggtagagatgtaaaatctactttcatgtaaaatgacaacattagagagttgggtagcacctgtagtagaaaagatggtggaaactagacttatgtggtttgggggcatgtagatagaagtagtaaggagagtagatcagatggagggtagtcctatcactagaggcagaggaagacctagaaaaactacaagataaactattaagaaagatctagagattaatgagttgaatagaaatatggtatatgatagaccattatggtgtcattttatacatgtagccgaccccaattagtgggataaagcttggttgttgttgctatcgatgttgaatgtattttatatatttttagactacgatttggattctgttttttctattggtcttgctcttcggtgacttggatagagtttccatctgatatgaatacaagcatttctatgtaaaggaaaccttttcatacattgctaattgagaaatcttgtgtttacagcgtca

SEQ ID NO: 34167 - DNA, 432 bp, Medicago truncatula
  Intron number 3 from transcript Medtr3g138220.1 (locus Med tr3g138220) derived from phytozome v7.0 (chr-ID MtChr3; po s 35307531 to 35307962 reverse strand)
gaccttgtagcgaaagggcatattcaagaaggtacaataagttcatgtacacttgcatagttttattggaatgtttggttttggattgacttatttgttcttatctacttacataaccacttatgagaatgtttgatagaattcatggaaatagaatttgacatattcataagcttttttcagttgatttccataagctctccaagatagcttaagaaaacttttaccttatacgaaaatagtttgatttcttgtagtaataacctatatacaagaacttatatgatagacacttatgttataagtgcttaattaatctgtttatccgaacatgaccgaaatgtgaaccatcagatgtgttttataaaatcaaatattttgtttttgatgtcctcagctcgaaattttttcactactttccgcgaagaccat

SEQ ID NO: 34168 - DNA, 937 bp, Medicago truncatula
  Intron number 2 from transcript AC202489_20.1 (locus AC202 489_20) derived from phytozome v7.0 (chr-ID AC202489; pos 103009 to 103945 reverse strand)
gaagaatctattcaaaggtactcaatccctttaatttaccatcacacaattctactatactatttttggtgcttttaaattcacaaaccaatatatgttaatatgaatgaataggtacatatatatatcatgctctggctctcaacaatactatacttggtattggttttcttccctacactacagacaacaactgatggtgctaacttcatggaaaaatatcagaatatcatcgtgggctcgatcttctttattgttacctattttcaactagagttattttctattgcgacaagacactcttttaaaagcatcatctttgggatcatattcataattatgatacaatatttcactccagttttagaacttagtcttttttcattcatgtattgcatcctttgggccctctcaattggtttgtttgtcatttctctctgtaaatggatccttttgtttgtcattgctctccgagaatggatctctagagtgaagatactgtattctcaaaggagagtttagaattttatttatctcaataaaattggttgtgacataaatagtttatttttttgttgtctgtccttttctaatccttctttgttttataagcattgcatttcatcccaacgtattattgcttcatcattttcacaatacatctatattccttcatcatgttaacgttttattgtgcatgttgaattgcaatcaaaaaatattgtttctacctcattgaatgaggctaattatgtaagcaaatacaacaaattggtcacttttggatggagaacattttttatcacatgtagagttgtttcaacctcttctctgaagtaatcacagaatggcatgctcaaaatatcatttctttctattgcctcatggtttactcaatgcagagttcagtcaatcttctttctaaggcacacctcat

SEQ ID NO: 34169 - DNA, 204 bp, Medicago truncatula
  Intron number 1 from transcript Medtr5g038120.1 (locus Med tr5g038120) derived from phytozome v7.0 (chr-ID MtChr5; po s 16078601 to 16078804)
agaagcagcaacctgagacgagcaaagggttcaaggtaggtgtttctagccgtttgactcattggttcttcggtggaagttgtccctcttgttttaggccagttactgttttgattttttcattttcgtttcgctttagttttagtttagtccctcaatctctttatacttttttctcttttaatatatgatatgattagggtt

SEQ ID NO: 34170 - DNA, 646 bp, Medicago truncatula
  Intron number 1 from transcript Medtr4g080290.1 (locus Med tr4g080290) derived from phytozome v7.0 (chr-ID MtChr4; po s 16444719 to 16445364)
gattcttctagtgggcaacaacaggtgaaatatttatttcatatcatatatatataattatcatgcatgtagtcatgtaatatttattaacgtgacttatttgattcttgccttccatctttgtccttcaagaatttttagtactactttgaagaatgagaaaggaacatattattttccttattttttttttcttctttgaagaacaccctttggaagaaatataattagtaaagctatgttgctctcctatgttactatactactcatggtgttttttatgaaccatatatgtatatagctggggcctagaattaatatttgatggaataaagtcagggattttttttttatttttttatcatcttcatctttgtgaggcccctcttcatcttcatcttaacattatgtttgaattaacggtgagtttgtcagaattacaaaatgtaaacttagattgtagagtttcaataatactacgacgccacacaattttgtcaaattcgcaatgatttcaaaaatcaattaactctttgttttttacttgtgtacacatatgtatgtactatgtatggatagatcacaaaaaattgtactatttggttttcttgtccactaaatttgttgtgttgtgttgttgcagcaa

SEQ ID NO: 34171 - DNA, 847 bp, Medicago truncatula
  Intron number 1 from transcript Medtr7g010330.1 (locus Med tr7g010330) derived from phytozome v7.0 (chr-ID MtChr7; po s 2212540 to 2213386 reverse strand)
ttggttgttattaatatgatttggttctaatctttgactttgagcttctaaattagggattccatggatattgaatttgttttcatatccattttctcctatttactagttttggtcttaagaaaagaaggcctgtaatcttaacgaatgtgtcacttaacaattagatacatgtatataatgaacatcaaaacatagttttggagggaggtgagggaaccctcaagtcaccatgattttgtgatgaatatgaatcttctcaataatagcaccccatataagttgaattctgtttttgcactcttccattctcatcacatagttttagcatagagattgcagcctttcatgtcatcagtggtggccttaaaactgctattagggtttcaggtttcgacttggttaggtagtgcactaaattttgactttttagcctctaaatctcagaacccatagcacgtccagccagcccgaaaccctaagtcctatcaacacttgctagagtttacttcatgttctactctggctgttcattttgagacagctttgtgaaggagcctacctatgtttagattgactattttatatgttgcgaatattgaaccctccatataatttaagatgtttaaatcataaacatttgtctctgctgctgtttgcaagtttagcttattttatttctcttgattagcttgattagtagtataagttaaaaactgccaagtgtctaagaatgtatttttcttatatttgatcatacaagaccttgtttttctgattttccaagtcagccatctgaactcaagtatacatgctttatcaggtggatcaaaatcaagcaatttca

SEQ ID NO: 34172 - DNA, 1037 bp, Medicago truncatula
  Intron number 1 from transcript Medtr5g025570.1 (locus Med tr5g025570) derived from phytozome v7.0 (chr-ID MtChr5; po s 10224853 to 10225889 reverse strand)
tcatttccaagttcatcaaactctacagtttccgggtttcaattctccccttttttctttttgtttcattattgcataccaactgtttgatcaatgttctcactcacaaaacatgccatcatttccatgctcttaagctgttttcagcttattttcacaagttctctgagatagtttatgaaaaatagcttattgttaacatgaaaacaatttaactttattttatcttttgttatagaaatagcttagcagttagcagctataagctgcaaattatactatgaccctcaatttatttgttcaagtataactccccctactaagtagtctttaatctttacatatatgataactgacccacttagtcactgatagggactaaggagatgaattttcatactccttgactagttatttttttcaaatattttagaactaggagcctatttaaattgatttatttgagctcatccatgtattgaaacaagcacttctgagtatgtttgagagaacttataaaggatgcttaaaaacaacttatgggtcggttcggattgacttatttgagcatgtctactgacataagaacaattgagtccgtttgagagaacttttgaacttttaaaaacaggttacgacacatttataagctgttttcagcttatttgcataagctcttcgaaaaaaccttatgaaaagagcatataggttatgcgaaaacaatcttttgttgtagaaacaacctatacataagctgctatacaaacaaggcctatatcttcttatatggaaagaatttgactttattttatcttttatcatataaatagattatatatacataaacacttatatgataaccacttaagctataaacacttaatgacgttgtttatccaaatgagcctaagtaggagtggctgttgtcattgaacactaaagtgaaagtttactgttttatttacttttactcatttggaaacggtatattttgctgtgcagagtcctggtattaagaaagacaagctttgggagca

SEQ ID NO: 34173 - DNA, 602 bp, Medicago truncatula
  Intron number 1 from transcript Medtr4g135800.1 (locus Med tr4g135800) derived from phytozome v7.0 (chr-ID MtChr4; po s 33097280 to 33097881)
gctgcattgctagagatttttgcttctttgatccggtaaggaaaagatgagaaggtgatgatattagtttggcatacaactacttgggaaatttggaaggcagagaacgatagaaaatcttcaacgaaaaataaaatctacaaaagtggcagaggagattgactctataaaaggtttatcttagcgttggtttttgggtaaaaattcgggagagtcatatgtttccaatagattatatgcttaggcaatagagttagaactaatttttggttgagggtgaagtactgcttgtacttattcccatggaaatttaataccacttgtacttggttactctttttatcaataaattttgttttctgttcaagaaaaagaatttgagtttatgaataaattaaattggacaacagaactattataaacgaagtttgagtggcgctaagagaagtaggattgtggaggaaacggaactgtaacggtttggaggaaattctgaggatggaatctgacattggagcctcacggaaatgtggacaagacaacaatgtttaagctctagtctagaagataaatcatttagcttaattacagggagcagccga

SEQ ID NO: 34174 - DNA, 579 bp, Medicago truncatula
  Intron number 1 from transcript Medtr5g082310.1 (locus Med tr5g082310) derived from phytozome v7.0 (chr-ID MtChr5; po s 30967582 to 30968160)
gaaggaagctggtgtcagaggtgaaattttttagaggtaattttgtttatatcttgaaatcatttgctttgtgttcatggtttattgtcgtttatattgattgttatgtggcttggaaatacgtttttcagaaaatcattttcaatgtatactagttagtttgtgtgacttgctataattaggctgtgtttttttccttctccttcctttctatattatgtgcaacttgacttattgttatgtcatgatcataatcagcgaattaaaacgaggcattgcaaagacttgcatactttttttttgcacaaccgccttaaacaaacagtaggaacctcttttcctctccttcaatatccaaaggacagctcacctttatcttcttcgacacatcaaaatagttttaatctgatgtagcaacatatgggtggtgtgtttgccataggcgccaccgcctcttctccctaaattgttggctccaccacagttgtccattaagggctgttttgaatcggcagcgccagtcgccactgtctcccctgattttgttttgagtttcttggcatgctttttcagattcaa

SEQ ID NO: 34175 - DNA, 629 bp, Medicago truncatula
  Intron number 1 from transcript Medtr1g017010.1 (locus Med tr1g017010) derived from phytozome v7.0 (chr-ID MtChr1; po s 3480624 to 3481252)
ctagtggtttctttgttcatcatcttggtcctcaggtttgtttttctattttgtatgtttaattgtaattgtactaaaattagctttgatatgctatcaacacttttttatttgataaatagaatgtttaggttagtcatgtcgaaagtctcaaggctcagagagtgcttataagtaattgcattttgctcttcaaaaaggttctcatatcggtggcttatttgagctaatgttcttgagagatatgagcttagctatcaataatttgaatcatggttttagtttttaggattggagttgagcaatttggttgatgagattgatgtaattataaaatgattcaattgaaaatctttgatcatgttaatcattttttaggtttatgaaattagttctgagattgtatagaatggactgtgattgaaggttttcaatttcatggattattgcttcaaaattttgtttagttcaaaaactaaattgttatgttccttcagattttgtggactaaattggtgattctctggaaagtttaatctttacagcagttctttcactaaattgctcttatactgtaatgtctgatgagtggaatgcttctgttgttattttaggggtcgcttggtctt

SEQ ID NO: 34176 - DNA, 640 bp, Medicago truncatula
  Intron number 1 from transcript Medtr4g023410.1 (locus Med tr4g023410) derived from phytozome v7.0 (chr-ID MtChr4; po s 5077081 to 5077720)
cttctactttagtttgaatttatgaagtcccttaattttattttatttttttcaatttttttactttagcttaggaaaatattgcgtttataaagttccattagtatagtaaagttaattaattgaactttactgggttccatgaactgttagttattgaaaaaatggaattgtgatcaagcaaattaccaatgtaatgtagcaagaaagaaagagatctgtatgtatggccaaggaaggaaaaaatagaagaaacttttaacaagtttggtgttctagttgcattttttttttttttttttggttaacactccaattttagaaaataggtctttgtaattcaaagttccaccaaaagataaatacaacttaaaaatacttcgagttttttctaaaaattcaaatcatttgaaatctattgcatattatatatgaaatatatttttccaataatgaaatttaaaattttttataaaataaatgaaatttaaactacctttgctatgagtcaaattttagtcaattagattatatctgtcgtttgattaatagttttatgcaatctttatcgtctcattgttattgattcttgtattattgtttagttatctttacatttcaattttgaagtgaagtttat

SEQ ID NO: 34177 - DNA, 207 bp, Medicago truncatula
  Intron number 2 from transcript Medtr5g006880.1 (locus Med tr5g006880) derived from phytozome v7.0 (chr-ID MtChr5; po s 884145 to 884351)
tcagatttggcacgttggaagagtttctgatactggtatgttttatttcttcaaattatccaagtttctttgcatgaagatacatgcctgaaataattttgaaaagacataaaacataaatgagggatttttattgatttcaacttctttgatgttgcttgacctgcatctatctgttcttttccccaactatagtttttcagccga

SEQ ID NO: 34178 - DNA, 606 bp, Medicago truncatula
  Intron number 1 from transcript Medtr7g040860.1 (locus Med tr7g040860) derived from phytozome v7.0 (chr-ID MtChr7; po s 10208531 to 10209136 reverse strand)
caatttcagctcttcaagagtgagtttcttgttttgtgaattaacttgcttattctctttgttacttcttacttcttgggaagctttttgattaaatgaaattgtttgttttggaatatatatcatgaaaagataattaatgtagtgctttcatattgcgcactaagaaatataattaatttaggatgtatttaaattcaagaaaatagtattatagctttcatatttgttgctgcgaaaaataaaagggactttcaggaactttaaattcaagaaaatagtattatagcttcaactttattagtgtcattgttttgtgacaatatagttattttaaattgctgtctgcaatcccttatattgctacgaaatgcggaaataaacggttaatgtagtcgaaattgcggttatgttgtcattgcggagacctcaaaatcttttgtattgagtcctaatggtcgtaacatttcttattacacctaaaaattcagctttctttcctttgtagtaacttgtaaaaagttttctaagaatcgtgtggcaaaattttatacaagcaataataacaacaacttaagcattcctcttcaaattgttgtcaggttt

SEQ ID NO: 34179 - DNA, 530 bp, Medicago truncatula
  Intron number 6 from transcript Medtr2g013990.1 (locus Med tr2g013990) derived from phytozome v7.0 (chr-ID MtChr2; po s 3414601 to 3415130)
gttgagtttggcttcgccaaaggttcaaattttctcttgcctagtaattcttgtagactcccgacttgctcaaatttgtctagaagaggatggtgttagtttggaatgtgtgtggtgtcctagaattcattttctattgggttcgacttttgttgcgcaacaaatataatgctctacagatcatctcagttctccaatttgactttgatccctaggattcttcactcttatttagggttcttgtctctttctcgctgaatccctagttttcacagttcaaggaaacattattttgtttttccgctctttttttatcctccgttgtttagttttcagctccaattcatcgttgttataacttcttttacattggcaggtatatgttttaactttttaggtatggtaatttttttcttcatatttatgaatactatcattttatcatggtttatgtattataactcttaattgttgtctttttgatatttatggaaggaaaaagatatttatagtgacaaattagacagaga

SEQ ID NO: 34180 - DNA, 892 bp, Medicago truncatula
  Intron number 1 from transcript Medtr3g101760.1 (locus Med tr3g101760) derived from phytozome v7.0 (chr-ID MtChr3; po s 24679609 to 24680500)
ataaattcgacactacctatcaggttattccccctttcatttctaatttattgttattcgaagatttcgttgatcgatttttccttttattttttcaatttctatgttacaattttaattttgtttattcttgttgatctcgtatttcattatatgttacataatatttgtgtgattttgcgaggatctgcgtgagatagaatagaagagtactattgttgttttgatcatgtagttttgcctatttagtgaatgttttattgtgcattaagaaaaaggatggaaaatttgcaatgatttcacaggcgtgtttaaaatacatgattaggacttgattaggaattaggaggatcagaggatattttattctacattgtctctggagtattatgaacagagggaatagatctaaatttaaggtgtaataataatatgttgattttgattcggtgcgaaattgtttcgattaggaattaaactagctgattgtaaattcattctcgctttactcatgcgctgaccatatcttcatgtttacgttggtgaagtgctagagtgagaagaagagcttttattagcaattgtaggaattattttcaagggatcatatttatgacatttttgccatttttgtcgacgaagcacaaacaagatatgagtatcggatgcgatacgttaaggatacttagtttgtaatgctccttgtttatgtctgttaccaacttatcatgcaaggttacttaaaatagaaacatatcttctttgccatgttgtttaggtttcaacttttgcattttcttttccccctttcctacttgctaggatcttgacaaatttgttaatcgtctacatttcaggcgacaattggtattgactttttgtcaaaaacaat

SEQ ID NO: 34181 - DNA, 855 bp, Medicago truncatula; identical to SEQ ID NO: 34115
  Intron number 2 from transcript AC233675_14.1 (locus AC233 675_14) derived from phytozome v7.0 (chr-ID AC233675; pos 72370 to 73224)

SEQ ID NO: 34182 - DNA, 999 bp, Medicago truncatula
  Intron number 2 from transcript Medtr3g100750.1 (locus Med tr3g100750) derived from phytozome v7.0 (chr-ID MtChr3; po s 24245693 to 24246691)
caagattttgccagcactcagagcttatcatttgggttgttttctcttcctattattttatctgtttataacagtttgtgtgcttgttactgtttttatgactgcataatagatagtgttttttagtttatatcattgccttatgtagttaatttgcatgtcaatttgatgttctttgagtttgtttgttgctatggtgtgattgtgttagccatactgtgcaacgtgcatcgatttaactttgtgtcgaataaggagacaattgctataaatctccatttatccatgccttccttgttcagctttaacgaaattttcctttctaaaatacgtgttcattttaacttgctcataaagaggtactagactcttcaaatgaaccattctggtggagagaagataaaatgttagttagggatgaatcatttttgaaaataacgaaaataatgaatcattgtttccaaaatatgcacacaattgttcatttatagcatctccttgtcagcaagtaaaactaacacaaattttaggaaatcaaaataaaaaatgttttcacaaagtaaacagggctggagttcagcagtaattagcctgttctttattttctatatcagtccatcagtcaatgtgggggttctatatctatcttctttctgaataccggataattcgggcatttatattgtaaactatttctcccctttaagctgataacaacacttaaacattaaagatgatacaaggatagttatatgattcctcatgtccatgtcaattttcagatgatggtttttatttttaaaggcgttgctatttattgttgttttgttccctttctgcttgcatgtgcttttgattgggaagctacatgataaaagtgaaaccagaattttggatttctgttgtttttgcaagtgtactgtaattgcaaccttaacttttctaactatatttttttgttgtttagcgtcaagccctctgtaaaactggtcttgttag

SEQ ID NO: 34183 - DNA, 784 bp, Medicago truncatula
  Intron number 1 from transcript Medtr7g022810.2 (locus Med tr7g022810) derived from phytozome v7.0 (chr-ID MtChr7; po s 5800221 to 5801004 reverse strand)
cagggtgagtagtacactatgttttctagtttactttttcttccaggtttagtaaatattgggatttggaagttgggtagatacaaaaggtgtttttttgttgtcgagtatttcggtttttgggtttgatgattttgtatcttggtttaatatattcaagtttatttatgtttttgatgtatttgaagctggatttaagttaaggagcttttgcatgcttttctagagaccagaagcgaaactttcagactatttttgttgattacttattagtttaaactctgattggaggttccgtgatttaagtgcaataagttgcatttatctgatgcattaggttttcatttgagttgaatgcatctggactattgctttatttcttgatatggagttgtttgggctttgatcttcgatcctgttactttgtatgctttctaagtttgtctatcaccttgcttgttgtgctgtaatttcatagtctgctttctgatttgtgaatcttttcatgaaatttttatggtttgtttgtgggttgttcaaatattaaagaaatgctaattcaaccagcattacggtgactttcaaataaatttttattactctgcaaatgtttgtctagttatctttttccgtgaggtttgctatattttctgaaatgtattctttgagtgatgggatctctgctatttaatcggaaaggtgatttcatgactatgttttaaatctcgttctcttttctgtttctttaggtcaagaagataatattgctgagtactatcagcag

SEQ ID NO: 34184 - DNA, 1011 bp, Medicago truncatula
  Intron number 3 from transcript Medtr3g017160.1 (locus Med tr3g017160) derived from phytozome v7.0 (chr-ID MtChr3; po s 3562551 to 3563561 reverse strand)
ttgcacacgggctacttctgtttttataccaggttggttaaattctcatattatggtgtttggacacttactcgcaattatctgatgggtagccctactttgctgtcttgttgtaaccaatcctggtaatttttttgcttaaatatgtatttgatcctggaacatgaagtcttctgaagtaagtacatttaatttttatttttttttcatttttagtccctacatttcacaaaatagtgtgttatagtgctttttttggtatgtgactctcggtatctagaaacctcattggactccgaccaatccaagtcgaggtaagtgggacaaagactatttcatggtgtaaaactctttcatcacctatttttaattctctacaaggacttaaaaacacttttaatgactaaaacactatttttgtaaaacatagtgactctggcgaataaataaatagcgaccattttgaaaaaaatattttctgggagcaaaaacatatgaagttaaattttacttatgtaatcagttgcgttaattcttggatctcattcagtagcattgttttgcttcaaattgattctaaatgaattcaattaagatgtattttagatgcataggctggtgatttaccgattgaagcctaccatgtatgtgatttgtgatattatcagaattccatgagtcctttgaaattattttattctatttggtttatttgttcaatgtgttgtttatgtcctgtcctgtcctcactaagtaatcattatatttttaggagttttgtgcaatacagtcttctggtttatctacagggggttttaccatatgaatatgatgcctaagtttccattgaattgattcatgtgatgaatttggttattgttttcgtttatatgtgttttttagaagggcttatttactttgttttttttttttgtaatgggaggagcttaggtatgcgtgtttatatatatggttatgcttatatttacttgctacttgcttagacatttg

SEQ ID NO: 34185 - DNA, 994 bp, Medicago truncatula
  Intron number 1 from transcript Medtr5g013230.1 (locus Med tr5g013230) derived from phytozome v7.0 (chr-ID MtChr5; po s 3977447 to 3978440 reverse strand)
aacttggtggtaattaagaaggaatgatgaaggagcaagtgtttagattaagtttagtattttttttgttaagtttatttctataattaagtttatttattttctatcaagatattagtgtgtgtaatgattggttaattatgaatgaaagcttgcttcatattatcaaatagttgtcccaatttttgtgaactttcctttcctagtgagaaatgtttctctcacacaagtacataggttgtacacgaatactaaggatattaaatatgtaatgtagttatatggttatgctaatgttatgatagtaaggttttgttgttgttgacatttgtgtatgtgcacacaaacattgaacatttttattgtgtacttttggaaaggagtaatggatatcattatttgcaacgacatagagtattaaatgccagtgtgttgtaaatgaaatatgtgtagtttgatcttagtttgtttttaaatatcagattctagttcaatatcactctcactatggtaccttttagacttttatcacttgcaacttgttaaaatttgtttaactaaatgcatccgatgcttaacttattgaaatcaagccatatgacagttgaaatttgatttccttttactaatatgagtattggatgacggtggaaataacttaaattgattagaccatttattaacattaattatttaggaaaagtaaagtaaattattgaagcttgtttatatattgtttaacaaactttattcaattaaacttttttctaataccatgcaaatttgttcacattattctactgttgcatatagttaatttgtttaaattaattggtcaaatctttgcaacttatgtcgtgggaagattttttggccatcatttctcaagtgtgcataagatccatttgttcagtctaagttgcattgacaatgaacaactgcagtataatattggatagccgcgataatatatataatcttccttttcttatat

SEQ ID NO: 34186 - DNA, 939 bp, Medicago truncatula
  Intron number 1 from transcript Medtr1g013470.1 (locus Med tr1g013470) derived from phytozome v7.0 (chr-ID MtChr1; po s 2483812 to 2484750 reverse strand)
ggtttaaatcgccataccttacatatactgtggaggttagttttttagtcatgtggtatacttcctttgtcctaatataaatctcatatttgcacaaataatcattgccattttcaatttataatgttaattatttttctttcttcagttttactctttatttactacttaatttataagttttcatctattttgttgtgttactacttaatttttcaaaatattagcatgtcttaaaataataataaaattttatttttcacacatttaaaagtattttgtttaaaataaaaaaagtattccacgtataaacgttttaattgaaatcacacacgtgaacactttttgtgaaagtattgcacgttttaattgtggtacgcttcatagtgaattttataatatgttaatttaaaaaaatatattctctaatataattttcttcttcttcttcttcttctcatatttatcattaattctaattatatatagatttatatgcataaatattctatagcattttcaaacaaaaatttcaagcccttcatgattttgacatttttgttatataccgtagatactcgttatttttgtggttggataatgattgatggacatctaaaatcctttgacaaattgaaaaagatatatggaaagtgatatgataaatgtgaaatattgatgtagtaagatgagagtgatggaataagatgagatgtttaatgagtatgagtatgaaaattaagggtgtataaatatcattgttttttatggtttgatcggtggcaatgaaattactatttgacaagatagctactatatggtgtttattcacgtgaataaaacttggttagttcgccataaaatataatgatactgtttgattaaactgatactgttttggtaggataattaaaaatattattgaacaaggaaagcatt

SEQ ID NO: 34187 - DNA, 958 bp, Medicago truncatula
  Intron number 1 from transcript Medtr7g008670.1 (locus Med tr7g008670) derived from phytozome v7.0 (chr-ID MtChr7; po s 1340288 to 1341245)
tagttccaaaagtggtaccacaagtgctcatagtaattttgttttcttttatgcatgtttgtttagttctggaaataatctgtttgatagtaatgttacgtagaattagaaagatttctttttagaccagtttcgattggcttatttgagcttactggtaattattagcataagcagttgtgacaacaacaactagcataggtttacatgttagtttcagcttatttccataagctctctaagatagtttatgaaagagtttgtagcttatatgaaaacaatttgacattatttaatattttggcatagaaatagcttatacataataagtgattatgctataggcacttgtatgataagcacctatgctataagcacttaattaagctttttatccaaacagagcctatgatatttactcttaggttctgtccatctattttttatctctgaactgctaattttagttttaagatacgatataggtttcgagttaattgaaaatattcaaaaaaaattattgtaattttacaactaaaggaagttggaggttttgtttgaaaacaattgagttacaaaccaatgatctgttgtgcattaccattgctagctgcataatctcttcacaagtgttagcaatagctagctgcataatctcttcacaagtgttagcaatagcaataatcgcttatagaataagcatttatcgtataaatgcttatgtataatttatttctataacaaaagataaaatcaaattgtttaactataaactataaattgtttttatcggttatcttgaagtgattatggaaataaattgaagacagttgatggacaagtcataagttgtttctagcatatgtcaggatcatctgatctaagtatatttttaatttctttagtcgcttaattgaccataataagttttttttattagtggaaaacgcatctgcgt

SEQ ID NO: 34188 - DNA, 479 bp, Medicago truncatula
  Intron number 1 from transcript Medtr7g046970.1 (locus Med tr7g046970) derived from phytozome v7.0 (chr-ID MtChr7; po s 11722069 to 11722547 reverse strand)
gagcagggaatcaaagtgtgtaaatggatttgaggatgaccaggttgcagggaacctttgtgcagtgaacattgtggaaggcatttgtattttttgtttgtttgtgagttgttttttttttcttctagaattgaatgcttcagtgttttacacaaatttaaaaatccttttagcattatggtggttgttttgcctggtaaaaccggtgctcattgtttttccatgccatgtgactcaaacccatcttaatattgccaagtgttggtaattcatgagtaacttgtggaacatttcctgtcatatggaatctttttactacatgcgttatcttgcaaggtaacataagtttgttggaaaagttttgatttattttgcaaggtaacattaacttatcagcatattttaaacattatttttcatggagaatttcttatctgctgccagatcatcaaagaattttcagcacttctttcacagtc

SEQ ID NO: 34189 - DNA, 993 bp, Medicago truncatula
  Intron number 4 from transcript AC235667_7.1 (locus AC2356 67_7) derived from phytozome v7.0 (chr-ID AC235667; pos 16 029 to 17021 reverse strand)
caaagatcttggcaggtttgtttttgtttgtttgatttcttgatatttgcttgtctatggtgaaagcttacaaataaagggtggatttaatggatgataagcaggtttctacacattatttatgtgtgaaataagctaacatattttttaaaggcccatttgttgcattttttgtgtgaaaatatcacctccttcaaagaattatatcttttacgagttttcatcccatttgttacatatttttaaaagaatgagaaactgaaaaaaaaacctaaaaactgtttcaaatgagaagttgttttaagtagcttctattgcaaatctttttcgataaacgttataaaaaatcaattttcattatgttaaccaaacaaaaacttacttctgtttgttactttttttattttatttaaaaatatctaaaatttaatccgtaaattattaaatctgaaaatcacttataatctgtaacaaatgttgttcataaaaaatctatacgtataattttaatcaaaatctaactaatttcataaaaaaatattgttcataatttacacactttagcgcaataaaaagagtggacagacgggccgtgcccgtgtgaacgctagttaatcataaagaacatgtcaatggagtgcattacaagtatgcatctttcgatgataatacaatcttagaaatgactgtttgccgaaattcgttgaagataatgatacaaaatttattcaagttatcaaacatcctaaatgcaatagtgcaaagagcgcagtgtatgaaagcacacaggcttgtattattgacatggcaaaagcttgtattccttgcatgtagcaactgtgattttaggtatatgagtagatttgacttggtttctatatgttccattgtgtagcctttatgtatctcttactctatattagtattttacaagaggaactccctttattattttctggattctatatataggaatcacctgaaggcaagaag

SEQ ID NO: 34190 - DNA, 483 bp, Medicago truncatula
  Intron number 1 from transcript Medtr2g042690.1 (locus Med tr2g042690) derived from phytozome v7.0 (chr-ID MtChr2; po s 12036092 to 12036574 reverse strand)
aggttggccttgccaaagtcaatagtgaatacaaggtaatttcatctcccattttttatgtataatatgcatgcaatacgtaagatttcaataaggatctgctaacgtgttttgaatcgtgacatcataatttttttatgtttctacgacctcaataattggttgtttcagtcacattttaccatggttttaaatagagtttgtggccacgatctgaatcatgacaccatatagtttttttttgttattacaaccgcaatgggaggttgtttgatgtgattctttcaccataactactatttaaaataatgctagtatttatgcaaatatatgtgtgttatatatatgaatctctagctaactttttaagttttttaaatttcttttcttatatttccacaaaagtttcttgaattgttttctttctttcttctttttgtttttgaaggagttggatattgccattgtgaaagctaccaatca

SEQ ID NO: 34191 - DNA, 932 bp, Medicago truncatula
  Intron number 2 from transcript Medtr7g045930.1 (locus Med tr7g045930) derived from phytozome v7.0 (chr-ID MtChr7; po s 11141211 to 11142142 reverse strand)
ggacacgtatcaatttattttagtgcttatcctttttaattagatttttttgaccacttttttctttaaaaaaaaatagatttttcttccccttaaaaataaattagttttttcgtttagctctatgcattaattttcaagatttttcagttacgtaaaaaaagatttgatttttcggttccgtaaaaaaaggtttgttcagtttatataaaatattgttttctctataaaagtaaagagatatatttgttatgtttctcatatacgaaacccttattgtaaccaaaaaaaaccttactatcaactaagagagaacaattatcctatcaactaaagaaacatttgtagaaatcattagtcaacaatggtttcatcttaaggaggaatcgaagtcaagaaatgtacagaaactacaattaggagatgctaaagggaatcgtgctctgaagaatagttttgatgttaacaattttcaaaactattcatcagagcaagatttccttgcacctcctctcgtcttgagtcatcggaaatcaaagacggcgtgtattcatcattgatgctttctttcctctcattctctctattatttttgttacctgaagttacatcttcataactgacgttttgaaatcttggaaaccaagttgtgggccttgtggcttgttggtagtattagtatatattgctacctcaattcaattattattcccacgttttgtctcttattttttttgtcccttccataacttttaatcaatagagttaagcttctcttagcatccttttcacataggatcattacccaaaatataatgtgctatccttgttttgtttccttaatttatagtttccttgttttgtttttctgcaatttttctaattttccactaactatgtatgtcactcatattatgtccagaactagcaaa

SEQ ID NO: 34192 - DNA, 744 bp, Medicago truncatula
  Intron number 1 from transcript Medtr7g045930.1 (locus Med tr7g045930) derived from phytozome v7.0 (chr-ID MtChr7; po s 11142183 to 11142926 reverse strand)
cgaaaggtctcgaaaagggcatttacttcctaattcgatttagcacacttttggtagattatgtttcatttctcttatttcaaattgtacttttatggataaaatgacgagccactttctttcgatttatgactatttatatattatgtcacatgtgatttgctgtcaaaattttacccatactctacaaaattcctggctccgccactaatgtcaacaatcatgaaccaccattcttctttctaattccttttgttgaagcaagcatgatccatctacaccaaaaaaaaactgtcatttatacaaataaagaaacaaaacacaccatcaagtatactcgttaacttgcaccaaactcatgttttgaatgtaaattccttttgttgagtatgatctatctacattatatttgaagttagagggtaatgtttgaatggaagaaaggttgcaccaaactcatgttttgaatgtaaagaagcttgttgtaagaagcaaagaaatacatgcataaaaagaaggggatgtggaggatgaaagcaaaccttataatttatgtcaaagtatagtattattaaaaacctagtcccagtaacagaggaaggataaccttaaacgttgtctatttttctttgtatagcattggtatggtatgcgcttgttttttgtttaaatactcctatttgattttgtttaaataacaattttttatccaaatttcctttttgctgattcagtaggccaaat

SEQ ID NO: 34193 - DNA, 481 bp, Medicago truncatula
  Intron number 1 from transcript Medtr1g106500.1 (locus Med tr1g106500) derived from phytozome v7.0 (chr-ID MtChr1; po s 22224719 to 22225199 reverse strand)
aagaagaagaaaagcaaaagacaaataaacagtgggtttttttcttcttctaattttctcttttttttggtgtttactcgtgaacatttttatttcagctgtgttgaagaagacaaatatttaaacattttttttttttggtggggttatggttttcttgagtttcatttcatttctctctagtgttttttttgttagtacaaataacttcaaaaaaagtgaatggttgttggaatctcacttcaaacatttataatttgaggtggtatggtataaagtacgtatgtgcttttatataatctaattagattagattaattagcaaatgaatatgttggtgcggacttgctttttgattttgttttgatcagattgattaattaaattaggatggttctaatcaagatttgatggattatgggatctggttgtatatatgtgattaggttgaaaacgaagaagacaaatctaaagagacaga

SEQ ID NO: 34194 - DNA, 772 bp, Medicago truncatula
  Intron number 1 from transcript Medtr1g043290.1 (locus Med tr1g043290) derived from phytozome v7.0 (chr-ID MtChr1; po s 10182839 to 10183610)
caatcaaccaaaaaattcactggagggtaagatatacattcaccataaagaggatatgaactcacacataatctttaagattcaagtataaatacacatatttacatttcatctcattaagtgtaaaattcaaaaataatttatttgattaagttagattgtcagaagtttctttcagttgtgatttaacattagaagtctattgtttgtgtgcttgagcatttgtaatctttagtgattatagtaaaaattccatggaaatacaacgggactagactactctcgatttttgagaggaattagtataaatttatttctctctcacacacacacaaatgttcatctcgtactcattattttttttccttttcaattttatttgattcaaaaattgtgtaattgagaataaatatttgtggggaagaacatttcactgggtcaactcttatttgcgatgtttattgccttgagaaaattgctttgacaacattttcaacttgcttccagttttacagtttccttaagtaaatgaatcccatttttagtaagctcttgagtttaacatgtcttgaataaattggcgatcgggtttctttctaaaaagtcgttcaatcatcatcgttagatctttaaaaaagtttgacttaattataactatttctaaaatcatttacatgattgatcataatttgtggacagtgactattgatatcgttggtacggttacgttccaagttttttaatatattggttttgttgtatgataaagagg

SEQ ID NO: 34195 - DNA, 921 bp, Medicago truncatula
  Intron number 2 from transcript Medtr2g025300.1 (locus Med tr2g025300) derived from phytozome v7.0 (chr-ID MtChr2; po s 6671379 to 6672299 reverse strand)
ccttatcaatccttggactatcttggtgatcttaggtgagcaatcttggtgttagttaatcatttaatttgtagttaattggaattgtattatttgacaacaatgccacaatggtataattgtgtgtttgcgagttgggttttggagggttaagtctatattttaatatatatttgatatttctgtaacaacatgatccatgagcatataatatcatattgttgttttaattttttcctaaaatatcaaatatttatcaaaatatagacttagctctccaaaaccaactcgcatacacacccgtaatgtcttcccagattttagtttttgcaggggtgttaatgcagctgttgtaagggtctattttgaaatcttgaactacggatcacctttgtcttagtcaatcataagtttcattatatagatgattttttgcaaagtatacatatatgtatatgagacgtggacctttctaatcttctaccctgcattgtcaaatcttttttcatatgtattattggtaaacatatcatcatgcaaacatttatgttgaaagcatgcttgctcaaaattctgttgggttcagctaaaatctcattctttgatgataatatttggcagttcattttagggtatctatatgggttaatgaaacctccaatcttaaagttttacacgatcttgtgatttgaaattttttgtgtatatgttgtcgttgtttaacttaactaataattttacaatatcaaatttaccattctgtttgattaccctcctgaattctcatatcacagttatttatctctaaatcttgcagtaatacaacatttaggattttgtttaagatattattttgttctagttgtatttttcttctaaacttctgtgtttggagtgtcaaccattcaggcaggctgcaga

SEQ ID NO: 34196 - DNA, 800 bp, Medicago truncatula
  Intron number 2 from transcript Medtr2g043320.1 (locus Med tr2g043320) derived from phytozome v7.0 (chr-ID MtChr2; po s 12372815 to 12373614 reverse strand)
tccgtttcctctggttttgggctgggccttctgttgtacgtttttttgcttcttttgctgcttgcaccattttctttgctatttgcacctgtggcctgctcattcttgtttacaaaatttctaaaaaaatcctagttgtttcttggtacatttttggcatttttatggtgttttcctgcatgtaaaaaatatcaaaatggcatgaacaaatttccatgtgtttttacacttttggtatactttttgctatgtttttgttcttgatactttgatatgtgttatgaataaatgataccatatcttatgatgaatatgcctctggacatgtgcttctttttgctgttttgaatatgattttatggatttcttgttttacaagcaacaaatgtttgttttagagaataaagtgtcaaatttctctatgaatttggtgtgataccttgcttgcatatgtttccattaatttcatgtcatggcttgaaaccaaatttcttgcaaaattgccatgatgtgatgattatgggttgcaagcacctttaggtatcacatcaaagtttttaggttcattgccactttattaccttttctttgccatttttatgtatttccttttgattacttcctactattgtgtgctttatgattactaaccatttcatctcatgtgccatacctttcatagcattccaccactctctccactttctttagcttagcatttatttttttttacaagttttaattcatttggtaatgtaatttgttatcattggtttgtagcttggcaaaggggccataga

SEQ ID NO: 34197 - DNA, 950 bp, Medicago truncatula
  Intron number 1 from transcript Medtr3g076610.1 (locus Med tr3g076610) derived from phytozome v7.0 (chr-ID MtChr3; po s 17742934 to 17743883 reverse strand)
ttccaccgacgcttactgtcggtgagtcattctagcctataagtttttttatatgtccaattcatatatgtaaagaatttaatattaatctttgaacaagttaaacaagtttttcacgtgcattttataaaaaaaaaaaaaaaaaaattgtttttcacgtgcatataattatcacactattatgcttcttttttgtttcctaaaaaacaaatatacctaaatgatttaatttgtgaatgtatcgtagaaacttatatgtaaattttgggcatgggacatattgtgcctactaacaatcataattctggtgattggagattagctaaaactattttgcctcattgattagaaagaaatttcataaatcaatcaacgacccacataaggatctttttaattctagcagcactttaagtgatagaaacaagaagtctcaaggtcttcggattgtcatggaggggtagaagggttggtggccggtgggagatgtcagagaagagaaaggagtaggacaacaaatttaatatagctaaagtgaaacatataactcaaaaaaggaaattatgcatgatcttttttgaccataatgatggcgtctgacaataacgaccgtcgaaatgtaagttagggggtacatgtaaatatttagacattcaagtaagtataagtgcaaaaaatgagagtttttagtttatattgtgtgtacttttgttctgtgctaaaggggctttttatatacttggttacagagtaacaaaccatgaatgtcgagctctaactgttacatgtcatgaggtgttaaggagcaaatggatttttcactttacacacatttgtattgcaccatttagatatttgtgtagttattttaggaaatggatttttcacattacacacacaaatcattatcatcttctctttgtacttttgcagaacccaatcttccttca

SEQ ID NO: 34198 - DNA, 1033 bp, Medicago truncatula
  Intron number 1 from transcript Medtr5g091780.1 (locus Med tr5g091780) derived from phytozome v7.0 (chr-ID MtChr5; po s 35930927 to 35931959)
agcattagcaaggttattgccaactaaataagattgcaatttcagaaaagtatctttttacgaggattgtgaaaaatatctatcagcgatcgttagattcgttggaatcatatatatcttcagagaagttgatcaagcaacatatgttttggttaagcatggttttattctctctttaccctttcattgttttgatgtaattcatgttttcctttgcctccttgagatgacattgcggtgatcggctttcctgcgcggttttagttagttttactgtttgggcatttggcatgtttattcatataaaaaaatcagggtaatttgtttcctacttcatcgttaattatgttatagactcaactgctctaaactgtaaagatagcttgaaatatctattaggacggtcgattttagaaactgtaaggacagcttgaaatgtctattaggacggttgattttagaagaaaaaaaccagttaaaacaaatgtatcaatgaaagcacctcaaatatatagactctcttgagtaaaacctaaacaaaggcttagagtgaaaaaaatttactataaaagtggagttatttgataatagtctcacaattttattttattttctcacaagcttattggacccgtttggtgattgtgataagggagtggattgaataattatattatatcttatttgttgacacaaccatttctcttcgggcaacttgaattctcccttgtagagaaaccgtgaacacacaaaaaccatcacaacaagacaagaacttggtgccgaggtggtgacccaaatgcattgaaactgcaaatctcaattgatttgaaataccaatccacaccacgacatgccaattcaaagtgagagaatcaaacaccccataatgttttgtggaacccagttccagatgaatctatgtgtgaaacaactcagcaagccattagagcatgttgtgacggagaaaaacaccgcttgaaaaccgacccctataggggttacattcaaaaactaccgcgactcaaggtcg

SEQ ID NO: 34199 - DNA, 719 bp, Medicago truncatula
  Intron number 1 from transcript Medtr5g034890.1 (locus Med tr5g034890) derived from phytozome v7.0 (chr-ID MtChr5; po s 14328090 to 14328808 reverse strand)
atcagatcaagtatctcttagaacagttgtataagcaagcccaaccttagttgcacacccaactctagcttgttttttacttttgttctcagtagctgtgtctttgtatccttctttctatatatatattatcattgtttctggatcttgtgctttttcaccttcaatatgttttacaagctttaactctgatgatatttactgttttcactgcttgctctgaaagattatatgtttattcttttgttttgttttgctctgatactctttcttttgtttctattcttcttgttgatgacaaaagggggagtaaatgtatagtatttttaaggcactgagccctactataaccaattctaaatttcctttaaatacttctgatttgattttataagtattttattgaaatttaattaataagaatagaacttagggggagcttacaaacctcaccttaaagatctattagactcagggggagcttacaaacctctgtcccagtagtcaacttattaattagatcaacaacaattgaacattttaaatactattgtttgtcatcatcaaaaagggggagattgttggaacaaaatgtgtttcacagtgaaccctattaagttttgatgataacaaggtattaaaaattgtcaattggttattactaataattgttcaagtgtacaggaccaaaggctactcaagttatttcaataggtctt

SEQ ID NO: 34200 - DNA, 800 bp, Medicago truncatula
  Intron number 2 from transcript Medtr5g039420.1 (locus Med tr5g039420) derived from phytozome v7.0 (chr-ID MtChr5; po s 16705872 to 16706671)
gttgcagcctcctttgttctaggtaggtttcaaatttctctctttttttttttttaactcaaatcaagaaaaatgataattttttactataaaaaaattactttttactctattattttatcggagaatcttatatattgccaagttcaagtgtggccctagtaattcaagccaagatatttgatttcataatagatcaagtgattgagctatgacactcaaaaaaaaataaaaattttgacaaaaagacactcaaaagagtttgaaaataagatacatgatctagattttagttattgatgtaatatattaataactgacatgtatttatatagaaagtagaagaatataaaatagagtttgtgtatgagatatacaaacaaaaataagcttaaatacaattttgatctttgaaatattgcaattgtgcgattttaaatctcatttctttattgagcgatttctacccattatatttatttataatttgagattcaaaatcaaaaaatcacaatacctagggttagttagttacttagggtataaaatagaaagggaaagtggaaagtaaaaacatatagtacatatatatgtagatatttgtcgatattattagtaccataaccatttattattacctctttttattaagttaacacgtgatacttttttattttttgtattgcaacacggattactctcctactagtaaatacatatacgtgtcactaattttgaggctttttttttttttgtcttgtgtagttgttgagatattggagaatctagcatatttggca

SEQ ID NO: 34201 - DNA, 961 bp, Medicago truncatula
  Intron number 1 from transcript Medtr3g029840.1 (locus Med tr3g029840) derived from phytozome v7.0 (chr-ID MtChr3; po s 7905117 to 7906077)
gatgtaaattacgaatagtagtttttataaaattttgattaaaattaatttgatttaattaaaattagtaatatataaaaatagtagtattatggtaaaatattattttatattttatttcattattttcttcatcttagtcaaaatatgatatattcttttttttttaaagaaatttttgtcaaaattgtatatattctttatataataaaatatatttttgttttttttacgttagtcaaaatagtatgtattctttatataatagaatatattattttatatagtattttcttattatttttttaaaacatataaaacaattattgttttctctatcttagtcaaaaagtatatattctttatatagtaaaatataatatagttttatatcttggttgtgtatataaagaaagacacgaactatgtaacatgtccttaccgtttctcaatattttctctctcacagacaaacttgtttactcttaaaccaaattgtaacttcaaaaacttcgcgctagagcatatttaatctctacgacacattacgttacattgcttctcactttaatttagttttgctttttttttatttttttatgatcgctgagatctcaaaggctatgaaacatcgacacaaataagataccgagaccacactttaacaccattaataatttgagaaaatgatactttaatgtaggtgtcgaacaatgacattgtcaaacacgttttcgataagaagtgtcgctctttcaaagataaaaagttaaaagcattgttgttcttgatttatttattgtttatgaattggaattagtttcttgaaattaatttgaaaatttggtatatggattttggttaatgtttagggtttactagtgtttgattttgagaaataggtactaggaattgtgatttttcaggtacattgtctgctttggaggaattcgagaaccag

SEQ ID NO: 34202 - DNA, 986 bp, Medicago truncatula
  Intron number 1 from transcript Medtr5g089440.1 (locus Med tr5g089440) derived from phytozome v7.0 (chr-ID MtChr5; po s 34765683 to 34766668 reverse strand)
caagcaggtggcatgtatagaaagttgttgctggtgagagcaatattgtagttaatgttaaaaggaattttgagttgagagtttgagtttaaagagaagtgtgcaatgtaaaaattagtaagtgggagtggttttggtgtctttggtcagtttagggtatgcaaggtataaaaagtcaattgtatttggcgccttctgacgtgagcaagccttataggtctctcacggtgaaacttgcaaatgtaccgtttatattaggtgaagccggtttttaccaattttttattaataacatttaatatatttttccatttttgtatcttcaataaatacaaaacaaattaaggtgatttaatataaaatagtcaaacagtaaatctgaaagccaaacatttaacatttgttccttaaaaaaaaaaacatttgtgaaggagtgatctaagataaaagaaaagaatccagtcgatactcaggaggcttattctgagctgaagattaaagatcagtaagatattttttggcatctaatcatgtttttttttttcaaaaacttcatctgtattagtttttcggattgtatgcaggatctagattccatcttttttttttttttttctaaatccattttggttagcatatctcatgttttgtttaaagacttcatatttattagtttttcggattggatgctgatcttccttaatgtttttttttgttctttttttcttaatccattttggtttaaacaaaaatggttgttttgttgattatagtggaggtattattagtttgatgaaaatgacaatcgatctgcccctattcatgttgtagtactactatgtttgaaattcagagacatggtttgcctttgtgttggtataattatgcaacatattaatgctggttgggtttttgtacggtacatgtttaggttttattcaagttgtcataaccctgattgatataaaatgttggtactcagatac

SEQ ID NO: 34203 - DNA, 978 bp, Medicago truncatula
  Intron number 1 from transcript Medtr6g009090.1 (locus Med tr6g009090) derived from phytozome v7.0 (chr-ID MtChr6; po s 1396069 to 1397046)
ttccattgccacacgttttggaattcgtaaaactggtaataattcaaaacatgtttggtcctttttctgtatttttggttacatagtacatgtttggttttgatgtttgcaaaatagcatgtgctgagttttgcacgttaattgtaacatattttgatccactacgagtttgacagaatcacagggaatttgtgaattattgtaacatatttggattcacacactgtttgatattgttaaaactaacaagaagaatagtttttattaagataacaacaaccaatcgtgattctgataaactcatcgtcaatacaaatatattatatcattttcaatgaatgcactttgagtgattaaaactttgaaataaacatgttaatttggacaagaaattcttccttatagttctgtctaattttttaagatggagtttcattttgatacaccgacggtgtaaagaatttttacagcgttagagaaccacgactaattacatgtttggctatggaagtagttgtggataaaaccaaatattttgagtgatttgatgattatgattaattcacagtgaagattctttttggccggcagtgtataagaatcaaatccttttaaagattattgattcagccttaaaatcttgattttgaacattatttgtggtgatgattagataaagctttttaatttagttctaatgcgcgttaattgtaacgtgtttgaattgctggtgagtttgataaaattatggtgagatgtgattttgttgaagctcaagattgtagcttctgctaaaatcgtggtagcgaccatgattccgctaaattcactgtcaattcatacatgctgtatcatttcaatgaatgacactttgagttacatttcaattcatacatgttaatttggacatgaaatcgttccgatatagctctctgataatgtttgaaacaatatgtgcaggactaaagaagctaagaa

SEQ ID NO: 34204 - DNA, 599 bp, Medicago truncatula
  Intron number 1 from transcript Medtr1g047240.1 (locus Med tr1g047240) derived from phytozome v7.0 (chr-ID MtChr1; po s 11311757 to 11312355)
gtagcagtggtaccgagggtggagtagaagatttggtcactttggtgcagagatgataaccgtttggtgacagaaaatccggagtttgccggcggaggtggcgctggaggttgaaaaattattttgttttgtggctttggtgatggttgtggtggcagatacaatggagacggtgtcggaagttgagcgaagtcattttgttcgttaacagacccctaatatggtggattttgagttgggtttaggaactcctttcactggacatggttttgttttctggaaaaggaatgaacactccttctggtggttcttctcgatattcatgaacaagtctcttttgaaaattctctctcaatgttttaaatgaatcagagagcttttgtaaggatgctttgagagcaagagaggcttgagtttcctgtatattctctggatttggaattgtttcaataggttatgaataagagtattgaggttaggtgttgcagttgttgtggtttgtgtatgtgtacgtgtatgggttagagtattggtttggttgtggaggttgttgttggaatttaatgttggggtatggatttggtgatgaaataggtgaa

SEQ ID NO: 34205 - DNA, 836 bp, Medicago truncatula
  Intron number 1 from transcript Medtr4g133030.1 (locus Med tr4g133030) derived from phytozome v7.0 (chr-ID MtChr4; po s 31739055 to 31739890 reverse strand)
gctcattttagtggccttgttgctgctcaggtataattaattgattaaaccgttatatttattagatttataatgtaagtacaaagtttgatatctgatttttaatttaatggatcttctttgtttctttttattttacttttagatctgctagtttatcatagtatctttttctgttgatttagagggtatgtttttttaatcaagtattttttttattggttacttgttttcaccattattgtgttaagatctatctgcagtattgtttttttcatttacagattatgttgttgttatctattcccatctggatccattgttaaaggttaaatgtaaaatacttatgtatttctaaagtatcaataaacttgtattttaaggtgacaattgaatgggcattataagctcctatcatggctcaatgtgtgggtaagacaatgccttacctgtcaactggtctctgataaacattgatgctaggttaagtccaaaaccccaagaacattaataataataggcccgtttggattggcttatttttgagcttatgtaaataaatcagcttttaagttaattcataagttcttctaactgacgaaaattgtatcttcataaactgttttttcataaactaccttgacaagcttatgaataatacataaaagcttatttgttttgcataagttatgttgcataagttcatttatgttgtctcaaagcttttcttacggataataatatgacttgttctgtttggtatgaatgaatgatagctctatttatttgtcgtgtgtacaggaagttaataatccctttgagtactgtgacattgt

SEQ ID NO: 34206 - DNA, 822 bp, Medicago truncatula
  Intron number 1 from transcript Medtr7g047260.1 (locus Med tr7g047260) derived from phytozome v7.0 (chr-ID MtChr7; po s 11840250 to 11841071)
ctcaaccaaatacacttaggtatgtaaactttgaataaatttgactactctgttcgatctcgaatgtaaaaaaagattttttcttttaaagttaatttaataaataatatattttgtttataacatagatcaaatgtatcatttattcaataaacatgaaaaataaatttttcgtatatttgagaccgaatgaagtagtttttttccatcatttatataaatattcaactggttatgttcttagtctatatgcactatatcacataaaagttttggtataatatgtttctatcatggttggtttgaaaaaataaaagagcttaaaaaatataatgagaattttttatataaaaatgtctctaactttcacactaaatttagagatgagagaaccaagtcaagagtttaaaaaatataatgggaattttttttatagaatatgtttctatcatgataagagaaaacaaaagtttcaaaaatataattggaaaaaatttatataaaaatgtctctaactttcacagtaaatttagagatgagagaataagagaaaaatcttcccattaaattttgattgcttatttttcttttaatagtaaaaataatggtaaaatatgccgaccaaattttatttaataatacaacagctataatttattgttgctaaaaaaaaaagctataatttattgattgatgatgtaaaaaaagttgttactaacatagacaaattaaatgtaattaataaaccaatcttaattaacttctatgaatgcttatatttttgcagatcaacaattgaacaatttgctatcatatcatcca

SEQ ID NO: 34207 - DNA, 663 bp, Medicago truncatula
  Intron number 2 from transcript Medtr1g074270.1 (locus Med tr1g074270) derived from phytozome v7.0 (chr-ID MtChr1; po s 15011198 to 15011860)
ttatcgagtcactccgactttatccacatcctcctgtaggttacttacaccaatttccagtatgaatgtctgagtttgaaaatattttttattatcttgtgtatgaaagttctaaacttatgtataggttatgcttgttaggcaaaactttcgatatgacaaacagtttcgttttctattttttaaactatgaaagtaacatttgctgatataatgatcgtgattgctggaatttctgaaatccagtcatttctgagaattattccttttttatcttctttgattacatatgttactatcttcattgaaattactggttctgtttaggagaaacatatcataggcctaagtgacagactacaatagtagacttgacacgataacttgactccaaaccttaaggaaattagtaatttagtatatgggcctttacacttatattgtttttattaaacctattattaaccaatgtcgaacttcgtcactcacttgaattttcaacagtcttacacaaaacctctctagatatagctgtacgttttagtcttctataccttattggaactgactagtgaaatatccttcactaattttatagtttctgatgattttatatgactttatgcatccttaaggtattgataagaagatctcaaattcctg

SEQ ID NO: 34208 - DNA, 529 bp, Medicago truncatula
  Intron number 3 from transcript Medtr1g037120.1 (locus Med tr1g037120) derived from phytozome v7.0 (chr-ID MtChr1; po s 8680764 to 8681292 reverse strand)
gagtgttcccaggtttgtatcgtttataccctttaaagtgatatgattcaatatgtgaaaatgaaattgatttaagttcttcaaaatagccaatttgttataacaaactcttagaagcctttttcttttgacaacattatggtaaatgtattgcagtgctatgttttttctgtgttaatgtatcatcataacttagggcctgtttgaatttgtttatttgatcttatttacctggcataagcacttgtggcactgtttggaaaagtacatggaaacaacttatttccatgagctctcgaagatatcattttattgaacaatttgatattattttatttcttgtgataaaaataatttatacattactacttatttggtatgcttttacaatacaagaacttaattaagctgtttaaattttagtaataactactctaatattatgaaataatacatttatatgtcacttactctctatgaatttgaatttgcagcttcgtgaattttttgacacctgcatctggtttgc

SEQ ID NO: 34209 - DNA, 827 bp, Medicago truncatula
  Intron number 1 from transcript Medtr1g008800.1 (locus Med tr1g008800) derived from phytozome v7.0 (chr-ID MtChr1; po s 908955 to 909781)
gaccaggtattcctataatccttcatagatcaacatgtcctggatcctagtttatattcgtgcttgtatcatcatttgttttccacactaaagcattatttgagcatgtggtaaataatgagtggggtgggaggcgtagttggctagtttgttatgctctatgaagcagagactcctcggatatgaccccgacaaatgtaattacattgaattatgtcatttttcaaattattatcattctatgtgccattgtccgtgtggtgtccggtgtttgtgttcgtgcttcataggttatgatttagtagtataaatagtgagttgggtgaattgcagcggtatgcaagaatattgttgaaaccattatgattaggcacagagagagttttctccatctccgaggagattggctcggggatagtttgggattcactctcttctgcaaggttattttcttcgtccattgaatacatttctaatattttatctcttttcttaattcggattctgaaatttttcagttcccatcaatttattagagtttatcataaccttcaaaatatcttaagcttttcaacttatgcttaatgtatgacttgtatggttaagccggcggcagaaaaccatacaagcagtagtttagtatgcgttacaacaaagacaagttgaaatttgcaacactaaagtataagtgattgtctataaactagttttgaatttttaacactgcactatttgtcacgatatggatcaagtttgttgtgctatgcacgacacttagattaacactgctaatttataacttttgttgttttatgcatttagatttg

SEQ ID NO: 34210 - DNA, 928 bp, Medicago truncatula
  Intron number 2 from transcript Medtr4g079890.1 (locus Med tr4g079890) derived from phytozome v7.0 (chr-ID MtChr4; po s 16233348 to 16234275 reverse strand)
aatagccaaatagttgcagtgtttggtactcaagggtaagctcaaacactcatcttctgtctattaattcaattttgataacattgcatttgatgtgtttgataaaatgcctaaataaaaacaatttatttcttttgttttccttgaccttagttatgattgtttattttattttttgcctgaaatattaatgatattgatggagtttgaaaatagcttctatgcttttcatcaaatgatactaatgaatattatttccattgtatgagtactttagattgagttatgttctataccatttatcactatagtttcaactttgttgacagaaggaatgttcataggtggcttttcatttttttttttttctctatcttttgtcaactctagaaaataaaggaagagctatctatggtgttcatatgtggttttataatttctttttaccaaattttctcttaaacacatgtattatatctgaagttacaagtttcgaaggataatatctaaagaatctgtcaaccttgatgatgaagaccttgaatagtttaggaccatggatcttgaaatagttgcaagaagagaaagctctcaagcacaaatgccacttattcatgtctgttatttaatatttacttttgacaaggttttagatgtttgtgtttttttagtagagaatatgtctttattttactgatgttttggttcagttttgctactattttggttctgtttttctgtatgataatataaacagtctcaataagctcttcaaatgataatgataataaagtctctctttgtttgcttcattgttttacttgaactgatagtgatttttgtttaccaatttcacctcattagataagtggttattcgaatataggtttgattcaaatagattaatatttaaccttgtttacataga

SEQ ID NO: 34211 - DNA, 370 bp, Medicago truncatula
  Intron number 2 from transcript Medtr3g009630.1 (locus Med tr3g009630) derived from phytozome v7.0 (chr-ID MtChr3; po s 1462328 to 1462697 reverse strand)
tgtcagagctgttataacaggagtcccaacaccaagtaagatataattgttttatgtttggatttactcctctagaagagctagtaaaatgtaaagtgaaaaaataatatattacgactgagatgaaaacaacaagacgaaaaccaactttttccaatgttttgggggactaaacccgaaaaaattattttgaagggactaaatccggaaaagatacatattgcaaggactaaacagttcttcattcttttctataagctgagagaaacaataaaaaatgagagtacaaggttcagcaatttgaatatgatagttcaaaatttttgtttttccagtgggagaagtgctacctctttcacaagtgcgtaat

SEQ ID NO: 34212 - DNA, 505 bp, Medicago truncatula
  Intron number 1 from transcript Medtr3g009630.1 (locus Med tr3g009630) derived from phytozome v7.0 (chr-ID MtChr3; po s 1462849 to 1463353 reverse strand)
accactgaacaagttcaaaacaagttatttcattggttagtttttaaatctgttaatatggttattagtttttttttttttttctttctttttttgtgtgtatgaatgaacatgagtacatgagcatgctaagatttgaggcaatgagtaattcaaagctgtttgatcggttagttagttatctgtgtaaattttctgtattataatcatatggctatatgtgtttctgaatctttccactctctttgttcctgtgttcacttagttcaaatttccattttaaccttgaggattttcattataaaaataaaaataaaaataaaatccttgaggatttaatgtttatttcacttcaactaattgtgacttttttttttctttttgagatcttcccacaattatgtttttgactttacttgaggatttgatctctgctactaacaaattaatagggaattatgtttttgtaggtaattaattatactttcttctcaatcataaggaa

SEQ ID NO: 34213 - DNA, 327 bp, Medicago truncatula
  Intron number 1 from transcript Medtr7g009730.1 (locus Med tr7g009730) derived from phytozome v7.0 (chr-ID MtChr7; po s 1898662 to 1898988)
gtcaaggaagttggttccagtcagatcatgttcggaagttgcatatttcaatgcatactttatttttttataaagtcaaaattcttcaagatctagatattccgatctcgatcaagatatcactgacatccttgactgtgtgaaagtgttgattgttgattttaacaaattcaaagttcagacagacatcgacatggatagatctatatcaacattttcatgaattttgagacggaatagaatagagctattctggtttgttacattagtaaaaataatctcaagacttatgattttattttatttaaatttcaggtattccggtga

SEQ ID NO: 34214 - DNA, 790 bp, Medicago truncatula
  Intron number 2 from transcript Medtr7g009730.1 (locus Med tr7g009730) derived from phytozome v7.0 (chr-ID MtChr7; po s 1899006 to 1899795)
gctctgtaggagaattcattcccctctgtatgtttttttctttctttatgagaaaatattttgatttttaaaacaaacgtggatttatagaaatatatatagaggaagtaattttttttttttttgtgaacaggggtaactctgtccgcaactacaaagactaatctctttagttgggtgggaaatctctcgctcaaaaaatttaacaatgttgcattatcaaggctgaattcaaactcgtaagtataattgtttaacacatattgtcttcaatcgcatactgttgtcaatttcttaaatctcaaaacataattttcttttcgttttcttctatttcattctcagatcattcctcaaatatagtccaaaatgagttcttcccttattcatccatatcaatcagtttgtgggtcttcttgcaatctctattgttttcctaaaacattctcaactttatttcccacatggtcaaggaagtttgttccagtcagatcgtgtttggatgttccatatttcactgcataatttttttttataaagtaaaaattcttcaagatatggatattccgatctcgatcaagatatcactaacgtctttgactacgtgaatgtgttgactataacaaattcaaagttcagacaaacatctacatggatagatctgtatcaaagttttaatcagttttgagaccgagttaaatagagttattctggttttttatattactaaaaaaagtctcaaaatatatgattttattttattttattcgaatttcaggtattccagtga

SEQ ID NO: 34215 - DNA, 1001 bp, Medicago truncatula
  Intron number 1 from transcript CU651589_8.1 (locus CU6515 89_8) derived from phytozome v7.0 (chr-ID CU651589; pos 41 190 to 42190 reverse strand)
taaaacaaccgtgtattttgaggtaacccaattttctattcatttcttttattttcagccatttttagtttttttgtgtgtgtgtacattatagcatattttaaacatgagcattcatgaataaccgagtttctgcactgatgtggtttcacttgaaaaatattgtattatgctaaattcgctaagcgatgcatcattttgcttagcgaattaatcaatttttaactaggaactttatgttttgattccctaaacgagccacatttcgtttagtaaatgcttcgaaaatatggaagttgcggattcaaagcacttaaccatttgcttaattacacttaattatcattctaccacctccactcggattgaaacggttctctggtatttgtaaccctaaaacatcgctcattccatcactctttcatatttcttcatcaaaaaattctctcaaagccacaaaacatacaagttcataattttcatcctttttcttgaaacaagtgaaacccattcaatgatttcatttttcacactcacattcatctttatttcatcatcctcaattcaaaatatatgttatccatgtttatcacattggtttgtatttattgaatattgcatgttatccatgtttatgtcattgtaaaaatatgaaagacatcatgaaatgtttgataagaaatggaaagaattacatgctatgatttgaaaattgcgttagaactcatatggtgataccatcttgaattgattgattaaatttgctaaaatgtatgaagaatagaatttataactaatttgatgcattttgatatgttcactgtggtgtaggtcttaaagataatgcttaatttatgatatcttgagaaacttctttatcataacctctaaaactacattatggaaaattttaaagcatgatccaatattttttagttaatatgctttatttgtcatgaattttagagacagaaaactgcacaaacaagcacctcaagaac

SEQ ID NO: 34216 - DNA, 797 bp, Medicago truncatula
  Intron number 1 from transcript Medtr5g021310.1 (locus Med tr5g021310) derived from phytozome v7.0 (chr-ID MtChr5; po s 8117493 to 8118289)
ctttgcgagaatcagagaggagacatagtttttttacgactagaggacaagattatttttttacgactggatgtagcaaaaaaaattcagttatttactttttgtttgaagaattttttttttgctacatccagttgtaaaaaaaaaaaaaatcttcaaataaaaagtaaataaatctgctgccacctaagcaataaatcagcactacgtattcattgtataacaggaaaaatagataggcttatttttctatgacaaaaatattttttgacatttctcaaagacgaaatttcatctgactttttagtttcgggacgaaaattattctttactctaactaatattcttaactctaattaatattgaaagacaaatgattacttgttcatcttaattttgagtataaacatgcaggtatgaggtaatttaccaaacacgacaacgacatctttcagatagattaataataatttttttttttttgaaggaagatagattaatagtatatgactcctttttcttccctattctaattagaatttgattatttgtctgtgcattgacaaacaaatagtaatgtaagtctatggttttatttccgcccacaaatttacgtaagcgaacgacttataacgtatggtactcaaaactcaaaagaaagaccaaaattaagatgtcatcaaagacaattagtgacatagaaattaaaggattgttgacagtttatatttttttatcaatatttaattttcatgcaagaatgaatgatgtcttgataagtaaaagttagttcactc

SEQ ID NO: 34217 - DNA, 916 bp, Medicago truncatula
  Intron number 1 from transcript Medtr5g009500.1 (locus Med tr5g009500) derived from phytozome v7.0 (chr-ID MtChr5; po s 2103921 to 2104836)
aaatctcttgtcgcaggtggagtcgctggtggagtgtgagtttcacttcactgtgttttcttttttcttttagtttcattattttgattgttcgttcgttcgttcgttctaaatcattgaatctaatcttcttctatattgtgattgttttctgtatttccacgtgtgaatgtaaacaaattttgatttcataagctactcaatttattgtttaataattttgtgatctttttttattaccaaacaaatctctatctaacttggacacaaatgttgacattaaacaccgtataaacatacggttttgaactttttttgttaatatttcctctctatttggatgttgatgagaaaaaaacactagttcggtgtctggaatatgatgtcaactttttgtgtccaaataacaactcttgattaccaaggttgaagagcaaaagtgatttgtatagggaaactggctggcttccaaataacaactttggtctcaaatatgtagtcgtctagtcaactttcttcatatatgcatgttgcaatttactcttttttatacaattattattattttcaataattaaatgccaaagcaatatgtgcatagatatattcaatacaatcaatataagtagttttggcatttactgatttactagatcagtatccttgagatgaatatcttttttgtgaattatgtttcgtttgaaaattccaaaagcacgtctaaaccagttcatcaatggagatagattgactcaaacgtacttccaattgattttcaaagatgcactatgtgtttttggcttttgatttttgtattttgataggttcaagcatttttatatacttaaaataatatctactttcttatacttcttttatagttcacggacagctgtggctcctctagagagattga

SEQ ID NO: 34218 - DNA, 888 bp, Medicago truncatula
  Intron number 1 from transcript Medtr5g046830.1 (locus Med tr5g046830) derived from phytozome v7.0 (chr-ID MtChr5; po s 19715934 to 19716821 reverse strand)
actacatttcagacattggtgctgttactgttcgtaagtcaaaataacataataacaactattttctctctgcctcacagtaaatgactcagttgattgtttcacatataatatttttaattatctattcataaaaattaggaggaaaatatgatcaaaatatgttatgcgaataatacatgcatcagtcagtctctttcttttctttggctatttataatttgtcaatcattaccccaaattgattttttttttttttttggtttctgactctatccagctttcaatggtactgagattattggagataaggcaagtctgttggaactatgaattgcttgttttttaacttgagatacagtgtttaatttgttttgggtaatagttattttaatcatgtgtaacgagtaaccacaataatctatcaatatattaaaattttaaaatagtttttgattgtgcattatattagtcaatataatatcttacgttaaaatgctatgttaatattatcatatcaacatcttaatatacttacatgttattatattaatctaataattgcttacttaatgttaaatcaatacctatatgaaaaagttaacgtcaacattgagaaactattttaacgttagagactattttgactatctaatgtataatcagagattgttttgaaattttgatatactaaaagaggctattgtgactactcattatacattcaaagatcaaaataactatttgcccatttgttttgtgtttatattgttttggtacgtttgttttgtgctcgtatgagcacactatattttgttagttatgacaataaaattcaaattgtgattttcaggcaaattctttctggttgtatatagttccacaagg

SEQ ID NO: 34219 - DNA, 531 bp, Medicago truncatula
  Intron number 3 from transcript Medtr4g140410.1 (locus Med tr4g140410) derived from phytozome v7.0 (chr-ID MtChr4; po s 34415758 to 34416288)
agaaaaagtttctcaggtatatgactttttttatgcaatgtgtttatataattttttttgtggtcataaacataatgtttatataatttttttattatgatatgataacaatgatatataatgttaatattagcatatttagtcaaaaacaatgttagcatatctgatttttttctttaaatgttaatattatgatattagcatatccgattttgcgccttttgtcaaacaagacgaaaattttctcatgtaatcctgtattattttggtagcttacctaacaacagtgatattttggtcattaatagaaatttttcctttttaggggtggatcaaaacggagaaaatcaaattttcttgtttgatattgaccttaaactacccttgtctttatcatagtggctgtattgtatagtatactctttcaattatagatttggttaggatatgaagacaaagtaaaccatgattttaatttattattatcaactcacagaaagggagactagccctgggattgaaggcttaaat

SEQ ID NO: 34220 - DNA, 761 bp, Medicago truncatula
  Intron number 2 from transcript Medtr1g127180.1 (locus Med tr1g127180) derived from phytozome v7.0 (chr-ID MtChr1; po s 28559140 to 28559900)
aaaagcaagattttcttcattgcgtaatgttatcttccttagttcttgcattgtttttttttcttctttctttcgtatgggtatggtgtaccacttttgatgcatgtggtgtattgatacattacggactaggatttgctgctctagtgaaacaacacagtttcacacagttttcaataatagccattggatctattggttggtactattatacttttgtcaaacctatctaacagctagctggaatagcaactgtgttatattttacagcactgaatccatatctgatacattatacgctactcttcttggatttgaatgtgatcacgcagtcagcatgttagtagtgttggatcgagatcggacaattcatatttcaatttcgacatttctattttcttaaaatcaaaatctgtattaaaatctaaaccacctgatctcaactcaacgactactaacgcagtggtgactgcattaatgtgtgaatttgcaggtttacggaaatccaaatctattattttgctttttacatttcattatatgaaattagagtcaagcagcgatctttttttgagcatacaaagacaattttaagattattaacattattagatctttacatttcttttgagaaataaaaaagttaatattagataggaaagtagctgtttattttgctattatatatacttaaaatcgttaccttgttgtttcacatactattaattaggtctccggatatatcaaaggtgagacataag

SEQ ID NO: 34221 - DNA, 806 bp, Medicago truncatula
  Intron number 1 from transcript Medtr4g041920.1 (locus Med tr4g041920) derived from phytozome v7.0 (chr-ID MtChr4; po s 10021976 to 10022781)
aagatcggtgtcctcacaggttggttttaatttatctcgcttctaattattcttatgattgattttgctttcaacttctttatgtgatcacatcccatatgtaagaattcataattgatttaaccaaagttgcatgctatgtgattaaatgaaaataacatgattattgatgcagatacagctcttctcagttaatacagattttgtagctgtatactgtgtatatacttggtgctcctaatgttcgggtttatttttctctaccatgatgtgaaatcaaactcaaggatcagaaactaatccaatgtgtttgtctgataatgagatctatattactctatttaggaataagatattggtattaataatgttagtggattgttatgttagttattaattatctctctgtaataccatatttacaatactgctactgctgagaagaggctagggtatatttaaacatttgagtatcactgaaatttatcaaaacaaatttgattcatttaatatttgtatctttcctaggacagtcactaagttcacctaatgaataatgatagtatgtaccaatttcaattacttacgaattcccctgtgctagttgttttcataggtgataatgaacattaataaatattctcacgttaaccggctaattttttcaaaattaaatcaaaccatctacatttgattggcaagtaagtataagaaattatgattttttattcctttcacaatgctggactggatcttatattttatatgattcaggttagcaaaactatctgaaggccagttgattg

SEQ ID NO: 34222 - DNA, 983 bp, Medicago truncatula
  Intron number 2 from transcript Medtr4g079420.1 (locus Med tr4g079420) derived from phytozome v7.0 (chr-ID MtChr4; po s 15966418 to 15967400)
tcggggtttcttaatgtatttcctcatgacctgaaaagcattcccttatctttgttttgaatttgtctttcggaatttatctttgtatctttcctttcactcttttgcattgttacgactaccaggctgctacattgattcatttttattgaaaacttgtgaattctgactttatatatttttatttcagttatgttaattcatcaacatttctaatcattgatgtgtttggtaaatgatttattgcatacatgcattggcttggagttttttttcagaggacgacgtggttaaaatccatcacctcggtcctcgcctcaacgtgccatttgctataagattccagtgttgcatgtttgaggctatactagttttagaatgttctgccaacattttgatgaatgagattctggagactcacaaggttcttacattttatgttttgagtgtatactggtgttaaaatgttctgccaacattttgatgaacgagaatctggagatttgaagtatgtggcaaactgtcaaaaaggaaagtaacatctatttaaacactacgtttcgtggacggagaagaatagtagaatgatcatggggtctggaggatttcactactaaactagatctctgggcctttttttttcattatcatcaactttctctggacagcttcttgtatgcttgtttaatgctgcagttgccatgattagtaaattatagattgtcaggaaattctattaattaaaaatatttaaatttgcagtctttgttgaagattttatgcctcatgcttgttggatgcacagatagaatgataatatttgtttagtaactactttatttagtattactattattttcatatttcctaagatgatgattcccatgtctaggtttattccttttaacatgttattgtgaatgagttgtaactgaattttctttgcagtcttctctgaacggatctgcttccaatcttcaaga

SEQ ID NO: 34223 - DNA, 515 bp, Medicago truncatula
  Intron number 2 from transcript Medtr3g068150.1 (locus Med tr3g068150) derived from phytozome v7.0 (chr-ID MtChr3; po s 15810154 to 15810668)
cgccttcttggtgctgaggtatgtgatcttctgagtgccttgacctgatggctatcaacagctagtgttccataaaggtgacacattttgtatcgtctcttagaatttgaaaaacatgttagaagttctcctgatgcttgatacttattgttcacgtgaattattttccaattgactgatcactgatcttagttgccatctgaggtaaacatttggcaacttaacttagtattgtagaccaactttgatgtattgaaataaaaaaataggcacgggaaaaggtttcttattgtaaatgcagggtttatcgaatgctagatgtgtacttgaaaatatttgtttagagattttaatataaactttgtttttggtagatcctaatgacattatttgacttatgtagctgaaattaaacagtgggataggacttggatgtttgtcttgcaagtgtgttaatgtatttattcattgagcttgataattacataattttgtgatgtaggtgagagctgtac

SEQ ID NO: 34224 - DNA, 1022 bp, Medicago truncatula
  Intron number 1 from transcript Medtr5g043790.1 (locus Med tr5g043790) derived from phytozome v7.0 (chr-ID MtChr5; po s 18129891 to 18130912 reverse strand)
atcggtattgttttttattttaaagaatcatttttttattcaaatgggtattcgaaagttgagtttttttaggttaattttgtgtttctagtaatttatgttaagtaagatttggtgggtcattttcctttatagcattggatttgttcattagtgttcatcttgtgttggaagctctgtagcttgatccaatatgaatatgattcacgtgtttatcatataagtgcttatgtatgagttgtttctttaacagaagataaaataaagtcaaattgttttcgtaaaagcgtagctataagttgttttcgtaagttttcctgcaaagcttatggacatgtcataagctctctcaacaagtgcttatattggtaacaaagctcaaataaatcgatcctaacagacctttcaaagtctaataattggttcatattagtgattgaaaaatgtaactgatagcaacttgttggagcataattttgtttattggaattggatagttgttagtctattctgaaccttgttttgcatttttcttcttcttcttttaggcactatttggttaaatggcttaattaagcacttctagcgtaagttgttataatgtaagtgattatgtataacttgttatcaagttgtttttcatagagactataagttgttttcataagtgatcttggacaacttatggacatgtcataagctattccattacctctcccaaatagtctcacaactcgcaaatacttatgctagtagataagctaaaataagtcaatttaaacagagctttcaaagtctaataattgctcatattagtcattgaaaagagtaactgatagcatgttgttggagcataatttcatttattggaccatgctagttgttagtttaaatcattggaaagttatcttgctttgactaaaggatttttatgattaatctcgagtggatggtgtagaagttagcctttggaatctgttaatcttttgtttatgaagttctgattatttttcaggttctat

SEQ ID NO: 34225 - DNA, 740 bp, Medicago truncatula
  Intron number 3 from transcript Medtr5g089040.1 (locus Med tr5g089040) derived from phytozome v7.0 (chr-ID MtChr5; po s 34550983 to 34551722 reverse strand)
tggaatcctcctcattcttccaatttgttactaaggtaattttataatttaagatttggattttatttctattagttgaatttttggaatttggatttcatttagtcggaaaacttaaagtcgagacggctcatgatgtatagttttgaatttgtgtttgatatttattttccatactcaaaatttagccgttcgatttgttgactgtgtagattcttgactgcgaataattcggatcccggttttgcaatattagtaaagagaattctactttcttgtgttctttatgataatacatttcactactttgaagatgtaatttcatatagaaaaatttgaagacttgtaatctgaatcttcatgaactttgtttattgtattagaagatcctctatccattatgtaccatgattctagataatgttaaatacacataaatgctaagatctaggacagctggaatgtctgtgtcttaataatattattgtacattaatcatgctataacagctcaaattattcatgattaatgtacattaatttataaggttatagcataaatactaatattgttcatgctataacagctcaaatgtaattattgtacattttttatgtagctaatccaaattgatgctaatctgcatattttgttagcagtaacttgacaaagttttctgttggtgttggattttcattgaaacagcattagcaattgtatcatcgacgcaaagtatttaa

SEQ ID NO: 34226 - DNA, 684 bp, Medicago truncatula
  Intron number 1 from transcript Medtr3g101010.1 (locus Med tr3g101010) derived from phytozome v7.0 (chr-ID MtChr3; po s 24400676 to 24401359 reverse strand)
tgccaagcttaatagtactcagcagtgcattgaaagtatccttttttctgttttttgtttcttgatttggaaatttcaggatctggcaatttacatatagttctttttcttgcattatgaacttcattgatttttttttagttgctgaatgatagttttttgttaattatttgcattgtttagctcaattggtggtatatgtggttatgtatgtatgctctaaataattaaaattaggcagtcacctagggcgtgctcttgcagattcaaatcttccaggtgcctcaattgtgccccgctagtggacggtgggattggtcacccggattagtcattcctggtccttgggccggataccgagttgccaaaaataaaataaaataaaataaagcagcaacacacagatagagagagtttgtggtatctgtgattgcatgaagagcctgcatatataacaatgctttgataggttactttggtaaacaatttaggacttgattatgtttttaggtgctcaagggaatacttatctatattaatttgtttctgtttgtcttggctgtgcctttttttagttagcttttggttgttgttgttgtatgcgtattggttgttagcagaacatggggatgcttttttaatatactagctactgaaagaggcttttgttgctgtgtttattac

SEQ ID NO: 34227 - DNA, 616 bp, Medicago truncatula
  Intron number 1 from transcript Medtr4g049830.1 (locus Med tr4g049830) derived from phytozome v7.0 (chr-ID MtChr4; po s 11548986 to 11549601 reverse strand)
aattaccaggtattttaatttggttacatactatgtatttttaagttttttttattgatatggttcaatcgtgcaggtttattaggagagtaaaagttacacgtttaaattttattttatagattcagattatattacacaatttggaataaccagtttgtttttttaaatggatttaatggatagaatcttggaactgcttccttttgcttaattaggagtagaaatattgttaaacaggtaacgtgtatagcatttaattatcttgaataaagtcatacactattgaataggttttgaagaaactcattgtgtttgcagcatgtcaatttgtgaggtataccatctttcaacttcaagtgtctgaccttggactgttttgtagtttatcattatcattattattattcattattattaataattattattgtaatagtgatgtcttatacttttttgtcgagtgagtcttttgaaatcagaattttttcttctttttttcttatactctttgttggtcgtgtccattggttttaagacatgcatgtctctttgtttgtctaagtcctatcttcattttatttatatttgtaaggtttttacaaaaacaaaagaa

SEQ ID NO: 34228 - DNA, 995 bp, Medicago truncatula
  Intron number 4 from transcript Medtr1g146690.1 (locus Med tr1g146690) derived from phytozome v7.0 (chr-ID MtChr1; po s 32495570 to 32496564)
gagcattccgtcgtctcggtgaggttagtagattttccacacgtataatctcttttagtggtttcgtttggatactttgtttttattggttgttgttttgtacatactttggtgggaatctaaagaagcatggatgtgttcttccacactagatgtttttgtacatgctgctttcctcctttaccatttcccccaaatgtgtagcatttcttcaagttcaagcaatgttgtctgtccatttatatcacagtcatttgtttgttggttataactgtcgaacattcctcgagtcttacaatgtggtttgccttattattttctttcaagtcaagtcaatgttttgagtagttataaataaaattaagtatttttgctatggttgtagaagattttcattggtttatacgcttttatactgatatgatgtgcattatggtggtcatatgctgtttgttttccttgctttattggtcttaccacaacactagcaaacgatacttatgattattattatattatatgtgcatatcttttatagtgtatcatttgagatttgtgctttattatcatattatggattttataacttagttataggttttgtggcgcctttttccgtctgagtttggttttcttgttctagcagttctagtaggtatctcgtgcattgcatggtttttaaatgtcagataaaaagcattaaaacaataaacatttgaagttgatgaggatatgcatgattaaatatgggatattgaaataaacatgttattcatgttagaaataagatatgaaactaagccaatgtctagtacaagtactcaagtttactatatacatgtggattagggtggctgagttccaaggatttcaactccgtgatttaattatttatcataaaaattgtttgttcctgagataattccatcatttcctgcgcagctttttccaaacctaatcattttgttgtttggtttcagataaggacactggga

SEQ ID NO: 34229 - DNA, 814 bp, Medicago truncatula; identical to SEQ ID NO: 31701
  Intron number 6 from transcript Medtr5g062370.1 (locus Med tr5g062370) derived from phytozome v7.0 (chr-ID MtChr5; po s 21961535 to 21962348 reverse strand)

SEQ ID NO: 34230 - DNA, 446 bp, Medicago truncatula; identical to SEQ ID NO: 30016
  Intron number 1 from transcript Medtr1g100330.2 (locus Med tr1g100330) derived from phytozome v7.0 (chr-ID MtChr1; po s 20779773 to 20780218)

SEQ ID NO: 34231 - DNA, 862 bp, Medicago truncatula
  Intron number 2 from transcript Medtr1g106520.1 (locus Med tr1g106520) derived from phytozome v7.0 (chr-ID MtChr1; po s 22251693 to 22252554 reverse strand)
ttcgaaagtatcgtagattccatcacgcattcgaggtatcgcaattttcccaccctaaattttgattcatgttttatcatatatctttagcaccgacactattgaaggtgtgtccggtgtctaacacttgttgatgtctaacacctataggacactaacatatgtgattaaattgagttgtcattttctcaaattattgtgggtgtccttgcttcataatttatcgtcacaatccacataagcaaaactaatttatgtgtaatgaaagtttttttttttttttttttgttaacaagtgaatcaacttgcttagtcgttttacttaagtaccgctcaagctgaagggacaattatatagtacagtcttaagattggcgatgttgtatgggacatagacttgagtggtaaataactaacacgagaataaaataagtgtagcagagatgaggatgttgcgtggtataagtagacaatgatagaattagaaatgacaacattagagagagttgggttagcatctatcatagaaaagattgtaaaaattcggcttaggtggtttaagcatgtagagagatgacctgtagattttgcagcaaggagggtagactagatggagtgtagtcaaatcactataggcagaggaagacctaggaaaactacaagggaaagtatcaagtaagatctaaagattaacgagttggatagggatatagtatacgatagaacattatggcgtcatttgatccatgtagccgaacccacttagtgggataaggcttggttgtggttgtaattagagatatttttaatttgtttgtgatgttttaaatttttataatgatgttttgaatggttgcagata

SEQ ID NO: 34232 - DNA, 368 bp, Medicago truncatula
  Intron number 2 from transcript Medtr6g025270.1 (locus Med tr6g025270) derived from phytozome v7.0 (chr-ID MtChr6; po s 5612397 to 5612764)
tccaccacctctattagccaacactgcttttcttggtatggtctacatttttacctcctcattggttcttttttcctgcattttctttacctgtcataaatttgatgtctttaatgatgttgtatttaacttgttatttgattcctatggtccacattatcaattttcttcttggtttttgttcctagatacccttttgtacacactttttgattttttatttatgatttttggttttttctcttaataatcagtttgttgatatgacatgaatcatgatcatatagatttaactctagagtttagtattcctatgaatttgtgtattaatgttcatgcattaatgttatgtgcagtgagttttgtta

SEQ ID NO: 34233 - DNA, 340 bp, Medicago truncatula; identical to SEQ ID NO: 33919
  Intron number 2 from transcript Medtr4g133500.1 (locus Med tr4g133500) derived from phytozome v7.0 (chr-ID MtChr4; po s 32004597 to 32004936 reverse strand)

SEQ ID NO: 34234 - DNA, 363 bp, Medicago truncatula
  Intron number 1 from transcript Medtr1g120820.2 (locus Med tr1g120820) derived from phytozome v7.0 (chr-ID MtChr1; po s 26132789 to 26133151 reverse strand)
ctttgtccttgtttactgcactgctggaatttcaggtttctttttcttcactcctttctcttcagatctccttgttccttttgagtccttagtatcactgaaactcacaatattggtataaaagtgtccgacctaacaatatcggtattgtcagttgagttagggcttacgggttcttttttttttttgttcttgcaaatatgatgaatgagaaaaaaatgtttaacttgaaagagtttttttgtttattttataaagggttactattatttgaaggtgtgatttataaagtatgaaaatttatgggtttgaaatgaatctattgtaggtggtcacattaacccagcagtgacatttgggcta

SEQ ID NO: 34235 - DNA, 870 bp, Medicago truncatula
  Intron number 1 from transcript Medtr3g093840.1 (locus Med tr3g093840) derived from phytozome v7.0 (chr-ID MtChr3; po s 22371182 to 22372051)
gtgatactaatcctcctcttttaccttccactggggtaatcctttttttcttttacttttttttttattgtgtttttttggttaattttagttgaatttatagttgttcagtttctttttggtgttattgatttgctttcaatcatttaagttattaattaaccttgttggctattaaattaaatttataaatggtagattgtgttactcatgataatattgggttatcatcatgaacttctataactggaaataacttcattagtctatgtttggttttatgtttggagcagacaaaattgatttttagacgtataaaagtgattttgacgtgtttggtttctctttggtataattgattttgactttagaaatgattctaacttgaagctaggaaagttgttgttcaactcactttagtgtatgtttggttctgctttgacaagaattgattttgtaaaattgattaggactaaaagtgagttgctgataaagtggtttgtgtttggatacattcatgtaaaagtgagttgaattataaatttgtgtgttagaatcaattctagaatcaaaagctacaaatagtagcttcgagtataattgcttttagtcctcgaaattgatttatcaaaaaatgccaaacataatttatagttagagttgcttttggcacttgaaaagcacttattaggcatctaaaagtgaaacaaaacactaaaatcaatttttgtcaccacagatccaaacatgcacataggtgttgaattattgatattatattgtatgtaatttttatgaactatgttggtgtgacaatggtgtttgtttacttaatgctgtttctttgtgagatttcaggtgcaccaagat

SEQ ID NO: 34236 - DNA, 437 bp, Medicago truncatula
  Intron number 1 from transcript Medtr1g121970.1 (locus Med tr1g121970) derived from phytozome v7.0 (chr-ID MtChr1; po s 26697255 to 26697691)
gctggaaattgaagtgcctgaaggggtattaaggtgtctatataagctcagtctctattcttgttgctgaatatgaggtattaatgattgttagaatattcgtttcttcatttttgttcattttgcaagacttcattaatactttataacagaaattcatgacatattcttttacgttttacttgacttaaagaagtggcagtagtgtggatatttttaattatttcaagaaaacgtaaaaagaaaagaagaggtggcagagcatgaggaaacaacttacattattattagtgttgttgttatgctattggttataatggtttggtatcatgacaaatattttgttaaggaaaccttggctttctttttttcatttttgttttgattgttggctttgttttttttttttctttcaggtttgcttacttcttttgaga

SEQ ID NO: 34237 - DNA, 744 bp, Medicago truncatula
  Intron number 2 from transcript Medtr2g018500.1 (locus Med tr2g018500) derived from phytozome v7.0 (chr-ID MtChr2; po s 4902922 to 4903665 reverse strand)
cttatcctggtattatagtttgattacaccatttgttccttttctgtttcgtgtttgcttttaatttattttagaatgtgatgctaggttgaaggtgatattcatttttttcttggatttcaattttaacaaatggcactagtagtatatagaaaaaggattaattttgttgatctacttattctggaagtttatgatagaacactatagcgtaatttgtcttgcactttcacttaatcatatggtgtcatgtcacatatgtattgaacaattaaaagcttttactagaagtaagaaacttagtgactataattttgtaatgcgatgggtatgtcaccttttttgtctctgtggactgtaaagtgatcaatgaccatgcatcaaatttgtacttccaattttgaaaaggaagaagctacattgtataaatgatcggactaatgttaaattacatattttttgtgattgttgtttagagcttttatccggtgttcttatggactagtgaccttttgttgatattggactttgtacagcagttagccttgaaaatgccttgactgacttcatgactatatttatcaatataacttgggagaatgccttaaacttatttggctttttccttgattttcatggttgatgatgtctttctaacttatagatttttcctctactaaacttattgtggatgaatggtaaaatttaggtggcttgcaagttggaggaggaatcaattctgat

SEQ ID NO: 34238 - DNA, 577 bp, Medicago truncatula
  Intron number 3 from transcript AC235677_21.1 (locus AC235 677_21) derived from phytozome v7.0 (chr-ID AC235677; pos 92895 to 93471 reverse strand)
tggtatgcaatcacagaaactcatacttttttgtctgttggatgtcttcttcttcttcttcttcttataattattttagagggataaatgtcaaatatatatagaaaattataaatgaatggaaggaaagcgaataacaagttgcgcttctaaccctctttagagggatcatgcttttattgaacaaaattgtgtttgttaaatgcataataaactatttttatctatttcttttgaaaaatgtattttttttttttcaattttctatctttctgtagtcatcaaattgaatccttttttaaatttaaagttatcacaaaatttcatgattaaaccaaaaatgtttgatgagaagatgacacaaatctcttttttattcaaaatgtctcatgttcatatttgaatttatacgcagaataaggttaaaactttttaaaaaaatttaccatccatttgaatctcacaaaacttgagacattcgcagttccctgtaaggaccatatactaattttttttgtttaaatttggttgtttcatcatgcacgtataatattgtctccgcagcattctactgggt

SEQ ID NO: 34239 - DNA, 804 bp, Medicago truncatula
  Intron number 1 from transcript Medtr4g022300.1 (locus Med tr4g022300) derived from phytozome v7.0 (chr-ID MtChr4; po s 4494350 to 4495153)
gttttgggtgtaggaagcaattatgcacggtgcataaggaaatggcttatgcaccataaccactcccgcgttttaactacctttatctgacctatcctaaaagagtagcaaaccaaagttcccaaagatgtgttaattattgcttaatagtgtgcatataatttgtagggagttcattttgtgtgtagattgcagctttgtggttgtgtttagagcaagcaggcattgcataagagctcagaaaatattatcttcctttagtttatcagccattttattgtagttggtttggaaattttttttacattaaaatcttcaagaaaatgttgagatagtcttttacgtttattaaaaaattccgcggtaaatctaatacatagtttgttttgtgatgaagcaatcattgcaaaggagaatgacagtaacaactatcctaccaacaaaaaacacagcgcggttaatttagtgcatgtttggatcgatagtgatattaacaaaattaacatgattttgatcaagctacacttttgagctttacaaatcacgatgctgttgtgattttgctgaacacgatgccaattcaaacatacacctaatattcctctttgctcacatcaaacccaaagaacatccaccacaacctacaaccatcccaattgaaaaattgagaatcttcatttttgctcatttttatgatctttttgtttttgtttttgtttctggttactttttcttttaattttaatgtgatttgtttggatttgttcagtatctttccatccatatccaagaagaaattgacca

SEQ ID NO: 34240 - DNA, 966 bp, Medicago truncatula
  Intron number 1 from transcript Medtr1g024080.1 (locus Med tr1g024080) derived from phytozome v7.0 (chr-ID MtChr1; po s 5572052 to 5573017 reverse strand)
aacgaagaaccaagaggagagagagaatagaaaacgtgagatgaaataaaatgtatttagtgttgttagagtatgatagaatcaaagagctttcactatccaacggctgaaaataaatatttttgctctcctacagtgagagacctatcaagctctcccaccctagccttggccacctcgttgttcataaactcatttttataacaaattaatctgcaaataatatttcaaaatgagttagtgatatttttttaatcattgaatatttagaacaaaattgtgacagtttgctaattcttaaagttgtttttacaataaagaaaaatcatcttaataatttaactagatgtggcatctttttaatgtttgaattgtccgaacacaaaatgtacatcttgatagttttaaaactaatttttacaacaaatccaatcctaatcacacaaacccaccatgactaatttttcgaagaataaagttgaaggtttgctcaccttgcagtcaatttttaaattgatatttctttaaactactttatttgttcatgctacatttttatatcgatatttgcaagttcatgtcttaatttccaggtttagtcaatttgcaatggaagacaaatttgcaacagggagtccatgcaaatgatggtgggcatgcattacacacaaatacttattctgctatttctcataataattcaaaagtatttactcgtgaacacttctaaattaatatgatgcatagtataacgtataatgagtattagtgtgaaatgcacaaccatggttatttgcaaacggagcacttgggaaaattttctctttcattacaatattgaacacctaaaatcatgatatgtaattgtagattcatgatcagagtattttatgagaaattatatcaatatatatagcatgaataaaagtagtttaaaaaagtaactttgtaaaaactagcaggata

SEQ ID NO: 34241 - DNA, 866 bp, Medicago truncatula
  Intron number 3 from transcript Medtr6g069470.1 (locus Med tr6g069470) derived from phytozome v7.0 (chr-ID MtChr6; po s 12780404 to 12781269 reverse strand)
cccgcgaagcgccagttgcaatagcggtcatagatgtaagatgccgctatactggttgagtaacaacaccatcattgccccatctcggttcaatagaatttgtgcttgttgtagggtgaccaaggttgtgaagaccggtagggaggttgcaagatcataaaatgcaagatcgcaactaggatcagaagattgttcttgaatttctgattcagtatcaatttaatttaacagaatctaaatgaaattgaataggttcttaaataactcattcattccttgagataatgaagaaaatatgagatagttcaatgttaattatgttatttcctttgtgattttgtttgctggatgcatattatatttctgcaatccttacatagaaattcaccccatgaagtgaataagtggagaattcagggttcgaatccccggccctgtatatcgcaatgtccctaccctagccccttgaggtgaataagttgtgatcattttacctgaagcaatagtgagattccacacgtgtctcatcggtttcaatctcaaactaaataaataaagaaaataaatattaattaattaactaaacattaaatatttttcttctctattttttatccacctttcacttaaaaacacacacacacacaaccaatctcactttcactccaacaaacgcaaaaatcaaaacaaaaccaaaaaccctaagtattttttctctcctttttcccttctcttcattatctttcaattatttatgaatgatttttcaattatacaaaattgtaaggtttattatcatcattattattattaattctgttattgtcgttctatttgaattttttgggggaaattggcaggtgaaa

SEQ ID NO: 34242 - DNA, 1009 bp, Medicago truncatula
  Intron number 1 from transcript Medtr1g068110.1 (locus Med tr1g068110) derived from phytozome v7.0 (chr-ID MtChr1; po s 13497552 to 13498560 reverse strand)
ggctcaacattgcacttgagcaactgtcaggtggagtaagatttaggccttctttttctgttttgtttttttaagcaaaatggtcaaaacctgtctgtatagatctctttaaggggtaatccttgacttgaaattaacatcaacagaggatgaagtttctttaagtctatttaccaatagtttaacatgtctccactagataaattgttggagtaatttgcaatcaattgcctttatatcacttggtaactatctacattagtgttattttgcttctcactttcaatcttgtcattggtgctgccactggttttctgctctgtattatttctattaggagacatagaatgctatgatttgagtggattgaataaatgtcagacatcgaattgttttctcagtatttcacatattttattttgctaagttttttggcgaggttgatatttagttctttgagcctacaaactgaacatctttctatatcatacaatagtttcaggtgttttttaagactataattgttcctacctatacctgctgaggggttggtgaagggattagggttgtgtgcagtcacacagttagccacatcggcgtctggtggatcaagatcggacagtccagaatttggttgactgcgtgattgcacacaatccaaatccgtggtgaagatcccttagagtagtgggacaggtgcatggcaataggcctgctttgataagatatattttcctcagatatttgcttccagtagtggatgttattttgggcttttagtatgcaattaggcatgccaaaattgacgtatttatggtttttcagtgaacttccatattgatgtatcttaacttaatatctctgttgtttaacttatttctgcttggattagttcataaaacaatacagatttatgattctcaaacatttcctaaaccaaaaaaattaaattcaagattttttctctacagctgcagcgagaccagcaaaacttgtcagagattgtcag

SEQ ID NO: 34243 - DNA, 393 bp, Medicago truncatula
  Intron number 1 from transcript Medtr1g147240.1 (locus Med tr1g147240) derived from phytozome v7.0 (chr-ID MtChr1; po s 32761916 to 32762308)
gttttacttcaagaactattaacgttgttgtctttgtaagtagtcaacttcatatttggtatagaaaagatatatgcaggctaatttttcacatcagttctctttttgaatttgtcttttataagataagattcgaatttcaagtacttggaataagtgcaagagcaagattaaaatattgtaaaaatggacgtaaaaaaatccatttttaattgctttaggtataagttggaactgggcatgttagaaatttatggaagatgcttctaaagaatgataaccatcacaaaaagttaatttatgtcaaatcatggagagaataaacaaagattgatagagagaagaatcatggcagtttgtgacattgatagtaatattattgtgttgtaggaa

SEQ ID NO: 34244 - DNA, 619 bp, Medicago truncatula
  Intron number 1 from transcript Medtr5g028080.1 (locus Med tr5g028080) derived from phytozome v7.0 (chr-ID MtChr5; po s 11533466 to 11534084)
gaaagaatatccatcgacgaacacaaagtgctctggtaagaaaaaaaatgatttttttttgtgtgttttgtctttctgtttttagttttatgatcattacaatatgtgttttcatatgaaagccttgttctttgtttttgtgttgttggatcaaatttggatgaaacaatttgctttgactatttgactttgattgtagttgaagaaagtcaattaagtttaatgattattgatttatgaagtgttgatgtgatttggtgatggattggaaaatttaatgtgaagtttatggaattgggtttagaaatatagctctatttggataaacagtttaattaagcgcttataatggttatgcataaactatttcaataacaaaggataaaataaagtcaagttgttttcatatgagctatacgagcttatagaaataagctgaaaaacagtttatggacatgtcataatctgtttctacaagctctcccagataggcttaccagtgcttctgctagtagataaactcaaatccaaacatgtcctgtgtttatttgtctgtttggtaagttatgtggacgagttttaattggtgacattgtgtgtcgacttcatattgtgcagg

SEQ ID NO: 34245 - DNA, 381 bp, Medicago truncatula
  Intron number 1 from transcript Medtr1g043200.1 (locus Med tr1g043200) derived from phytozome v7.0 (chr-ID MtChr1; po s 10142094 to 10142474)
aaattcccttagggtgatagaatttccttcttcaggtattttccttctccgacttgttcttgggacaaaatttccctaacttgtaatgtattcaaagccttatagaaccataataattttcattccatgtcttccaaaacttccatgaggtgtcttgtttttcgatttgcacggtttatcaataaaagactcaaaacacttatgaaactatttggtttaaggaagaaacaaaattacatgactcaattgaaaacaatacaaaaattaatgtctcttaaaccgtgataaacttctctaaaactcatatgtaatgattccaattgtctactaaagtgactcaaaaacatataatgtaaggggacctgtcatcattaaccctcc

SEQ ID NO: 34246 - DNA, 407 bp, Medicago truncatula
  Intron number 2 from transcript Medtr7g005360.1 (locus Med tr7g005360) derived from phytozome v7.0 (chr-ID MtChr7; po s 429086 to 429492)
attcgtcttcttcttcttctcaacgttccttttcggttatttctttttctaatcttgttgataattgaatctcttctgtgttgcttgaaggaattatttgaaacttgttgattgaatgtgttttgatgaaattaaacaatcaaccacactaaatattcgaatctgttgtgtgaggttggaaatattctaggattttagtttaagccggtttggggattagggtttaaaacctttgaattgggccttttttatggaattgagtttgttttcatgaaattaaaccccaaaatatgtcgagtggagatcttggatgtgggatgttatgtttttattcgatattttgattttaatttaaaaaatacaccagctaaataactcaattatcgtcattttttcaggaacattac

SEQ ID NO: 34247 - DNA, 392 bp, Medicago truncatula
  Intron number 3 from transcript Medtr7g005360.1 (locus Med tr7g005360) derived from phytozome v7.0 (chr-ID MtChr7; po s 429496 to 429887)
cctacatttggcctcccgttcttcatcggtaactcaaatccatctttttcattttataaaccagctgtattttttattttatttttatgctgtccttgtttaagattatgaaacttaaaacgaaactgagttttctcaatccattatccaccaccatctcttatgatttagattttgactttgcactaattggttatgtttttcttactattgttgccacacttgaaaaattgtgtccatttgttttaggctgtttaatgtatccatttagctgttatgctgtccttttctcttttaacttcttagccgtatattaaaatattctcacccttgggtttcttaattgatcaaaacaagatcctgaagacaaaaaagaagttgctaatcctgaa

SEQ ID NO: 34248 - DNA, 340 bp, Medicago truncatula
  Intron number 1 from transcript AC235678_11.1 (locus AC235 678_11) derived from phytozome v7.0 (chr-ID AC235678; pos 38252 to 38591 reverse strand)
aacttgttcaaaccgctgtaactactacctttctctcttctctttatttcgatgacatttatttcttaccctttttctttacttttaaattcatgctataaagttttaatcttttctgttgggtcactcaccttaactttgatttgtatattttgctctgttttttaatatttgttttcaccaattttcttataaatctctctagttggaattttgcttattatttgcacttttgttaacactgtactatgtctatattttgttttaaaagatttgttgaattttgtgttgatttgattgtatagaaatctgttgcatctcgcggtcgtggaattcttgc

SEQ ID NO: 34249 - DNA, 955 bp, Medicago truncatula
  Intron number 1 from transcript Medtr5g023610.1 (locus Med tr5g023610) derived from phytozome v7.0 (chr-ID MtChr5; po s 9295298 to 9296252 reverse strand)
aggttgttcccggcgtcgttgagagtctcaaggtattcaaattatgatcaatttttattatgcaaatattacattgtgcgtgtttcgttagtaattttatttattaagttgattaattaatggaagatacatttgatgatcaaacttactagcgaaagacataattttgtaattttgatacaattgagatgttggaaggtggtctcgaaactctagttgacgggatatgattagaaatgacaacattagagagggagttggggtagcaaatgccgtagagaagatgtggaaattcgacttaggcggtttgagtgtgtagagtgaagacctgttgattctgtggtaaggagagtgggtaagagaaattattagaggcagaggaagacctagagattaatgagttatagtgacgatacatcacacatatgaggactaacatgattttttatcccttattaactcacaacaataaacttacaatcagaataatttagaaacattatagttaagtgatttttcggttgtatttgtgttaattcaaacttgttgtaatcagtaattcacttttagaaattgtgagaacgtgtggagtttatgttttaatgagtactcagtgcatagtagttatattaattcagaatattagtttttaatttttttttctttcttttgtatgcatggtgttgtgtacttgctgctccactgttgatgtcctttaaaggttgttaattgtaatcatgctcagatagtttccgtttcttagaggactattatttaaatgtagaggttttattcctttatatttgctgtatagatagatttttgttgtaatatttaaatgttatatatctcatgatgttagcaccatgacattgtgacatatgggtttttgtttgcacctcatactcaaattttgctaggtaataacaaagttctgttcagagcgcattgctaa

SEQ ID NO: 34250 - DNA, 735 bp, Medicago truncatula
  Intron number 1 from transcript Medtr2g113840.1 (locus Med tr2g113840) derived from phytozome v7.0 (chr-ID MtChr2; po s 26767905 to 26768639 reverse strand)
tttttggtttgtttgtagaagtttgtatttgatacatgggggtttgtttgagtgttctgcatatatacgacacacttttcctttgtatgttgttttttaagtatcatagtctagcattccttgtgcttgctagggttctttgtgttttaaataaattttattttaacttcttcaaaaaaattattcactcatttattggtttaaatcattgtgtatccctactttgaaaatagagcccacaaccccacataaaatgacgagacatataatgatttcatccaataaaagaatgagtgttggataaagtgtttaataatgagtgtagttatcatttctcgttaaaaaaaattaaacttttgcaacatagattttcataatctactagcattaagtgtaaaatagtatcggtatcaatcaataacatgtcatattttcatattaatttattttaaaataaataaaaatgtcaaataaatcttacttaaaaatattggtatccaaccaaactaattccttcaacatcaaaaaaaccaaactaatgatttcttttatttgttcaaatttatttatacatatacatatccctaaataaatgaaagaaatagattagtttagatagagacaaaaacgatgacgtattatacgggacccgttattacgcacgcggttctttgtatcttgattggcttgtttgaacggtgatctacgcgttccaggttggagatcgtaacagtg

SEQ ID NO: 34251 - DNA, 782 bp, Medicago truncatula
  Intron number 3 from transcript Medtr3g133660.1 (locus Med tr3g133660) derived from phytozome v7.0 (chr-ID MtChr3; po s 33906314 to 33907095 reverse strand)
cacaccactttccttgttttcttcaatattgcattgtaagtactataacaccactacttccttattccttgttttcttcaaaatctgttgactttaatcgtaattatcttttaaaatcgcacatatgattgattataatgtaaccaaatggtttaaaagatgggtctgcttgattggttgacttgacggtgaaattcattctccatcttatgttttaaaagatggctctattttctgtcaaagcaaatttactaataatggttactgatacatcctaaatgaagaatgcatctctctgttttttaattggattaaagggggcaaagcccctggaacaagactataaatcacaagtgaaaaaacgaaacatgcatccgttacaagctgagtcacagacaaacccagagcattatcgctagtgtagatttgaattacctacagttgataaatactaagttaaactattcacactgtatgatattatgcagattttgaattttatttttaaatttaactttacaagcttaaaatatgagccgtccaattttaaatcccaatttgcattagacctttaacctcgagcaatttgcagccttgatatgaaagatacgtagttatttacatttataattcccctcccaactcgcatgtataacctgcaggtcttctaccagatttacttcgtcatatctaaatcctccaatttctactgcttttttttgtactgataacggtgtttttacttaggttttcatcgggacttgctgcaactctgctgttat

SEQ ID NO: 34252 - DNA, 892 bp, Medicago truncatula
  Intron number 1 from transcript AC235756_28.1 (locus AC235 756_28) derived from phytozome v7.0 (chr-ID AC235756; pos 179632 to 180523 reverse strand)
gttgctgctaccagtggtggtgctgaagatttggtgtgtgatttctctctctctctctcatggattttttgttcatgcacaaaaaaattcactcactacacacacgcgcttgattctgttataatatattgaaaaagtgaatagttgaaaaagtgaacaacgaaggctgcatgcacaattgttacttggttgaaggataaatgtaaatatagctaagtttatgataaaatttatcttttgattcatagtgtatttatatttaaatatgaagaatttagttgacattttttttttattattaaatctattagacatgtgattatatgattgattgaataattaaaacaatggataaaatgaaatattataagattatatagaaaaaaaataacatgtagtcaatgttattatttccaattcaaataaattattaaatcatcccctatctttgtataacaccttcaaataggtctttttattatcaataatttaaaatggtccctaactctagtaaaccaccaaatgttattatttctcaaatttcttagattattttgttttcaaccgtgtgacttgtgtgtaatatgtacttattgctagtgtacctcttatttttttcataaaaagagaagcatcccttttactccaattcataacaaaatttgtttactgtaaaaatatatgatcaagggtgttgtttaaatttaaatttgaatcatctttcagaaataatattaatattaattcataacatagaagtactatattgataaagggtattgtttaaatttaaattttagtcattttctagtaacaatatcaagttactatgatgatttgattgggatttgaataatttgtgtcccttttattctataccaggaagaggacc

SEQ ID NO: 34253 - DNA, 394 bp, Medicago truncatula
  Intron number 1 from transcript Medtr3g061440.1 (locus Med tr3g061440) derived from phytozome v7.0 (chr-ID MtChr3; po s 13636648 to 13637041)
acaaccacattaaggtatcaaatttgattttcatattcttcttgccttaatcttcaatatggaagattttcatatttttctcattaatatatagccaagagtttgttttttaggtgttgtccgggattcgaacctcagaccttacatatattatgcattacctttactaactgagttaagcttaccatgataagagtttgtctttttaatatcatgggacaaagttgaaattcttttactattgtaaattaattattagtgtcactttaattaatgataaattttccttcctcaatttttttcattaaaaagtattgtctatgaagctaacatttttttttgttgtataatatatgaagctgagtccaagacttcaatttgaaattacattaca

SEQ ID NO: 34254 - DNA, 974 bp, Medicago truncatula
  Intron number 2 from transcript Medtr3g061440.1 (locus Med tr3g061440) derived from phytozome v7.0 (chr-ID MtChr3; po s 13637116 to 13638089)
aggaaaatccaaggtggcttagaattttattctatgttcatacaatttttcaggcaagtatatttaaagtctatatattactttataattctttatcagatttaagaatttattttgtattctgctggctgctattgtttttactagacatccaattatatttaaatatttatagttctatctccaaattaataattttttaaaatagttctatcaacttttaactctacctatctaaagtgacaagacaattataaacattagtgttgaaatttaattaatacaaatttcaaagtttaatgcataagtttaaaaaatgtcatgcaattaataaagaatcagatccattctattactttgagaaagaaaaaaaataaagttagtgcagaataaactaaaggataaagtgtcttagattagatattctgtggtcattttttaacctttaattgacctatttatgtaataaagcagtggtgaaagttttggtagatggttgctctgaccccatttggatctatcaatattttataaatactttattaaaatcagttgtcacattggttaacttttaatgatggcatgaaagggaaataagatcattagagtagtaagattccacatttttagctaattcatcctaaagcttgttagttactaattagatcatgtaatggtgattacctccttttttacaaagactataattgatactttgaggacaagaaagacattttattaaataataatcttttttatgataatatgaaggttttcttcatctcatttttgaagtacagcctgtgaagacagggagaaaattattctgatgattgtattattgttgataattgaatgtaatcatatatgtcattttcgtatcagatcgttcagtgttgcatagagaataactgactttttgagtttgtgttaaaacaggtgattgctgtacttcttgcaacagcaggagcaat

SEQ ID NO: 34255 - DNA, 1031 bp, Medicago truncatula
  Intron number 1 from transcript Medtr2g043160.1 (locus Med tr2g043160) derived from phytozome v7.0 (chr-ID MtChr2; po s 12303545 to 12304575)
tttgttttctactcttgagcattccaatctttcaggtatatgtatttaaatgacttttttttaatatttttttttattaagttgttttctaagtatgagaagagtctttttgggcccgtttgttttaaatttaaaaaaaaatggatttttctttgtatttttaaaaatgatttttttttaaatttattctaaaatagtaaaagttatttcaaactcatttgatatcactataaaaaaaactcattttatatgagttaaaaaatagattttgattttcactaacattttgagattttacatagtaaaaatcacatattttctcaaaatgacaatctttcaaaaatgatttttatgaaaagctattttttttagagattttttcaaaattttagtatacaaaagaaattataaccaaatgatgaaataattataatggcattttaagttaagttattcaaacgaatttttcatttgaagatttccttgaaaatttctttgttaaaaaaattactacaacaaaaacatattacactacaaaaatctaatttaaaaaagctataacaaatgggccctttgttgctcttgaatgatactcttttacagtgatgatggtgatgatgaataagttttataaggttacaaacagtggttctattcaaggaatcacttttattcattttaaatgctgtgatgagttattttaatcattttagggtttgcatactagtaacaaataacaatgaactttgatttattaatcattttagggttacttgctatacagctatggtgttttggcgactttgctagctgcattcatccattgactacataaattttgataagaaaatatttgagatgaatagatttacgatggttatacttttgtttgcataacatatcaacaataccttacaatgaaacctcttactttattttactctatcaaatggttcaaagtctaatttggtgatttacatttatgttgaaattcagtgtaaaactggtcatattgtttgctttacctgctg

SEQ ID NO: 34256 - DNA, 772 bp, Medicago truncatula
  Intron number 1 from transcript Medtr3g080780.1 (locus Med tr3g080780) derived from phytozome v7.0 (chr-ID MtChr3; po s 19154103 to 19154874 reverse strand)
tgttggagcgtgcaaaatctgagtttaggtatgctccatttaccctatttaggtcatggatgtgagacatgtgggaaaacattaatcaaggggctgagatttaaattttaaaaacaaatacattttaattaaattaaaattgtttcctcttcctctcatcaacccactccctctctctctctctctctctctctctcgttgccttctcaagtaaaattacaaattcctttaagatttgcagcacggactgaatatgagattgatcccaaatttctttgtagatacatcattatggcatcatacagtatactattatttatttgcttttatggcatcaaataaaagcgagttgttgcataaaaaattaaaataaaatgaaagcttggtttgagttgtgatagattggttggtgacagcgagacggaagaaatatgaaaatgtgagtttccatggaaattgacagaagaagaagtgaagaagaggagaacggtaaggaagaaattgatagtagcagcaaagaagagaatgtgagggtacatgacgtctgatttgtttctttttaatcattttaaatctcaaaagattttttctttttccacatgtcttgcatctatgatggtaaatggagccttgtataatggagcatacctgaacctgcaaaatctatgctacacctctagaagccaaataggacggtgatccattcatcatgtgtcacccaaaatctttctagtagtattaagcggtcaaagccaaacacatgaagattcaa

SEQ ID NO: 34257 - DNA, 610 bp, Medicago truncatula
  Intron number 1 from transcript Medtr7g035130.1 (locus Med tr7g035130) derived from phytozome v7.0 (chr-ID MtChr7; po s 8535822 to 8536431 reverse strand)
tacaaggtttgtttgtttctatgtacttttgcagtatgtctcatgtcaatgatttcaattatatttatactttatgatatcaattttaaattatatcttgaaatttgagtggataatttatgatagaacattgtgatgtcgtttgatctatgtagtcgatcccacttaatggaataaagcttggttgcacgctcgcagagaatccaactccgtttgagaaccgaaaaattaagaaaattgtagcaataggttggataaacaaacattgaggttgtaaattgtaataatatgcatacattacacatattataggttggttgaatttcaaattttcgattgaatcataactaatcttggtaaacaaagttggcctaattgtttaagtcagaatccgaactttggttccaccgaatgaatggactctagtttaggtatcgtttgtttttggttacttaagctgatcctaagtatcaattgaagagctaataattctaatttgatgttgttccaatctctccacaatggtcaatttttgttttctatctatctgtttgaacctgttcctttatttgcagctcaagtatccagcaccaggggctccaaagttagc

SEQ ID NO: 34258 - DNA, 249 bp, Medicago truncatula; identical to SEQ ID NO: 29539
  Intron number 1 from transcript AC235669_11.1 (locus AC235 669_11) derived from phytozome v7.0 (chr-ID AC235669; pos 60189 to 60437)

SEQ ID NO: 34259 - DNA, 187 bp, Medicago truncatula
  Intron number 1 from transcript Medtr4g069590.1 (locus Med tr4g069590) derived from phytozome v7.0 (chr-ID MtChr4; po s 13315619 to 13315805)
ctcgtcttgaaactcttgtcaaagcttctgatctcgtatatattctttcttttcgattttctggttccgttttttgtttttctttttttttgaatcattttgccattattatttatttttgatgatttttgatgatgttgttttcggtttagactattaatcttgctgcgatttgcacaccggcgga

SEQ ID NO: 34260 - DNA, 637 bp, Medicago truncatula
  Intron number 1 from transcript Medtr2g037450.1 (locus Med tr2g037450) derived from phytozome v7.0 (chr-ID MtChr2; po s 10191883 to 10192519)
gaatactcttgctcgttccgctggtaattcacaactttttttcttctgctttttatggaagaataataagaactatatatattatattatggaccactatagctgtttcatgattgcaattgttgatgggaaatcatatacttccactattttcttcaacgctatgcttgatttctagctagttaatttctataattatggtgtgaaagctccttcacttctcgtcttgtttcatcacaccaatcaattttttggaaaaagccaaagtttgcggttttttcttatgaagagcaccatatgatagtgattatgttagccaggactttaatacaaggcatatacttctgtgtgtggtggggcataaacaaattaattatggaaatgaaataccatataactataggtggcccatatataattgcttggctgcatcacgtttatgaaaatagaaaagaataatgaatttgatactacaacgcaatatcatatatttcccgtattaattaaaagtacaaaaaatttgctctttatttttacttgatttgtttttcttgcattcttgaaaactttactaattgaagaaatttggttttttgttataggactcaagcgaactggcaagagttgtagattgaga

SEQ ID NO: 34261 - DNA, 487 bp, Medicago truncatula; identical to SEQ ID NO: 29552
  Intron number 2 from transcript Medtr3g142800.1 (locus Med tr3g142800) derived from phytozome v7.0 (chr-ID MtChr3; po s 36685343 to 36685829 reverse strand)

SEQ ID NO: 34262 - DNA, 786 bp, Medicago truncatula
  Intron number 2 from transcript Medtr1g120590.1 (locus Med tr1g120590) derived from phytozome v7.0 (chr-ID MtChr1; po s 25987935 to 25988720 reverse strand)
cacctctcaatcttcatctctgttgcgctgaaaaggtaacattcctcacatgcattttgatggatcccctttgagttcctgttactgaattttttggtgccatttgctgttttcatgtgaagatttccatttttgtgttatttgagaatgatgacaaaggcatctataataaaatctttatgtgtgcttcaattacatgctgcccccttttttccactttctttctatttgcaatgtattagctggatgttaagaattaaaggacaggaagttaagatacatgacattgaaacgacagttgcttaaacaactatctagaaacattgtgtttgttcttaaatatcacatattgctatacattgttctgatattgatcacttgtctattattaattgttgttgttataataaacatttgttattcatcttcttgattaatagcactttttatgaagtgcactaaattgacatggggaatgccagggacacaccctcaaacacgctctcttaaacacactctaatctattgggccatgtcatctaattcttctaaacccttaatttttaaccggataaaacttgaagtggtccaatgggtgagagtgtgtcaaagggtgcgcccttagcattacattgttgatgccttaaagataaaaagaactaaattgatatgggatacgatttgctctgtcaccatagctgccttgagtcccattacatttgttgcaatgctctaattgtaatgcttatgtttatgatagatggcatctaatgttgacaacagtga

SEQ ID NO: 34263 - DNA, 334 bp, Medicago truncatula
  Intron number 4 from transcript Medtr5g047070.1 (locus Med tr5g047070) derived from phytozome v7.0 (chr-ID MtChr5; po s 19858996 to 19859329 reverse strand)
gtgacaaagaagttgtacaacgtaagttttgttatttgagttatgtatattacttctggtgattttcctctgaaatgtctactcctctatacttcttctttatgcttgtcatacctcaacatatgttgtgttttttttatgtgttttatggtttggtcggcagttgctgactgtcgtgaaccacatttctgctgagttttgcggactattgtatatatgctgcattttttctgagtgtcttttagtgaaatctaaagggagttaaatgtatttttcccttaaattatttctaatatctttagactaaatttagaaacacaaaagagaagaacta

SEQ ID NO: 34264 - DNA, 666 bp, Medicago truncatula
  Intron number 1 from transcript Medtr3g123150.1 (locus Med tr3g123150) derived from phytozome v7.0 (chr-ID MtChr3; po s 30811789 to 30812454)
ctctccccgtgttaacaaccgagcagattcaaaaggtgccaacttttttcctttaccaatttctcttcttcattacccttttccctttacgttgaatttgaggttgtagattcatctttacgctcattttcattctgggattcgaaaaaaatgtaaactttcgcgttttttcaatcacccattttttattgtctcattcacgtttaagaaaatgtcacacacatgtgtgacagtgtgtggtgttgttttcttttgctttccttgtgccctaagctattaatttgtttttttctctttcgttaaatttttcacaatcattgaatccaatgtacgcataaacttcatttattaagttatttcaaaccgggtcatgttgttattcatcagtatatgaacttttgtgaatcaatttgattgaatgcatgatgcacttttggtgaaaagtttggaactttaattgaaataagatttaatttgtatatactgacagtgtaaaacttttttttttttttttttacatgtgcatccaatcaaattatcataatgatgccatttttttagattagtttctaagatatctctaaaaatatttacttgatgtgatttgattgaagtaattatgtgttaccttacctgagtttatccatgtgcagtgcttggaggaga

SEQ ID NO: 34265 - DNA, 273 bp, Medicago truncatula
  Intron number 1 from transcript Medtr4g125660.1 (locus Med tr4g125660) derived from phytozome v7.0 (chr-ID MtChr4; po s 29671449 to 29671721)
gaattcattgaagatacctgtgttaccggccatttaatgtcaagctgacatatatctatgaattctatctaacactaaagttcttttcatttgacttcagaatatagttttgaatctttgattggactttacataatatagtctcaaaaccattatatgtttcttcttttgcttgtttgtgattctttgtgaaccacaaggctctacacctcagatagcatgtcaggataaccaatctttgcattttgtcgtttgcaggatcaccttgccctg

SEQ ID NO: 34266 - DNA, 823 bp, Medicago truncatula
  Intron number 1 from transcript Medtr4g022730.1 (locus Med tr4g022730) derived from phytozome v7.0 (chr-ID MtChr4; po s 4732297 to 4733119 reverse strand)
tgttctttgcagaaattgaatcactgcccacccaagtatttttcatagctttctatttcggcgatatgagacgacacttatattttctctatgtctggtcatcaatgagagtgattgctttgcgcttttcttttagaattgttcttgacacctcgttcgggaaatgctaaacagggaaattagaacaatattagtctaatgcatattaacatagataagacgtatgcgaatatagttacatataatttataaaataaaggtagcataactgataagctaaagaaaatgtattatgacttctaatttattttcctattatcttcctaaaaaggctagataaatgcattcatgtgcattatatgaaccccgttgaccaattaatattgttgaaacaaatggaaattaagcatcgctctcgcatgtgcatctatatatagaataatgcaatatgtatttttaatttgtgtgtaaaaaaattcaaagcatgtttgtgcataaaaaaagcagacattgactaagtttataaattcaacaattggcctaacctgagacaaattggaaaaatcgttgtacgaatacattgagaagaagccgaactctgacttaagttcagactgatgctttgactctgagcttgagtagtgttaaggtcacgacaacaattcaagaaacatagtcaaaaaacaatcaaatcaaattgtgaaataataatttactctaacactgtattgtgaaatcataatgcaaacttactaagtcttaaacttctcaacaactggataatgtaggttgataagcagcctcgaacctaaccaattgttac

SEQ ID NO: 34267 - DNA, 549 bp, Medicago truncatula
  Intron number 2 from transcript Medtr1g125200.1 (locus Med tr1g125200) derived from phytozome v7.0 (chr-ID MtChr1; po s 27544250 to 27544798 reverse strand)
agaaccttatttatcattgaagtttggtgtttgaggtttgttatcttaccctctactctaaggtcttcttatgttcttattatacgttcttttgaatgtttctcataagggtgtgtgaggtatttcatttgattcctgttctcctaagggaagaggaaaagataaactgaaaatagagatgatagattcttttctataaagttattacaagatagaacctttgataagttgtttaattttgatttgattgttcctatgagaagttagattgactattgagaaggtttgatttcagattttaaaccagcttaaaattgtttctgacaaaagtatggtattattttaaactgctttagcttttaggtccatgtggggctttgtttgatgagaatctatttgttttgctttttttacactttgtgcttttctctatatgtgttcattctcttttatttcttgatcattaagtattgaagatggaatttaaattaaagttttgtttatctatttgcagctgttcactgttataagttgtgacttgtaactaga

SEQ ID NO: 34268 - DNA, 420 bp, Medicago truncatula
  Intron number 2 from transcript Medtr5g105560.1 (locus Med tr5g105560) derived from phytozome v7.0 (chr-ID MtChr5; po s 42384394 to 42384813)
caagagacgttccgtaaatgaaaataatttatatattttcatttcaacgttacatatatatttttcgtttgtctataggcaacaaactcggtaaatttgaaatttataacactcgcatattatgtgtaccaataacttgcgttggacctcgattttcaatgttacatataattagtaaatttgatgttctatttggcaaaataaaaagtattaatgtggtctttcagattctgaagaaccaaattgataatttttattctttagagatcaaatacttctttgtgtgttttctcaataactaatttggaaatttactctataattgattaatataccaatcaaaattaactatgtgtgctaataaaatgaatttcactgtgaacagaactttggttttaatttcctaaagctttcaattgt

SEQ ID NO: 34269 - DNA, 705 bp, Medicago truncatula
  Intron number 1 from transcript Medtr3g163060.1 (locus Med tr3g163060) derived from phytozome v7.0 (chr-ID MtChr3; po s 42775415 to 42776119)
agactgtttctcagtctaaccgcatttttgttcaggtatttttcattttactcaatcgttgggttcactcactcacggtcacggacttttcacctcttccttaatttatttttttggttgcataatttatttacggtattcattcataaatcaatttattgaaatggaaaatcatcgtgcgttcttcctagataactgtgccggtttatttacatttacaatccgcttttttttttttttaatgaaaataggtactagtaattttagtcgctactacttaccatgtttagtcgttactttaagaaaaaatgatgattttgacatttccctttatttttgtcatcacttcactacaaaggtttatgtaaaataaaagtgcattttgaacacaaaaatttccgtgtgattatgtggaccacttcgtatcctcaaagtccgtgaatttcatcggcattgcaactgtcttctaaataaatgcaatactccatttcgttactttaccatttccttaactgtgtagtatactagtacgtcacccacgcgccaaacatggcagtgttactcatcttccatccaatttttaaaatgagaattcttttcacttttgtttaatcttcaaaatattagatagatatcaaaaaatgactaattaaaaacattgtactattaggtgggtgacccaatctcagaccacaactgttggga

SEQ ID NO: 34270 - DNA, 756 bp, Medicago truncatula
  Intron number 3 from transcript Medtr4g044920.1 (locus Med tr4g044920) derived from phytozome v7.0 (chr-ID MtChr4; po s 10514211 to 10514966)
tttctggaaaccccagtggaaggtttatctttcaggtttgcttttgaatttacctttgtttttgtttgtttgtttattgtcttcttcattcaacagatttggggtccatttcaattgaatagtttaaaacttggttaaagattatttatatgatttttacttatgcacacatcttttgaaatacttgctaaagtgtagcaccgacactttagattgaaggcatgtcgatgtcagacaccgacatatgtggttacatttattgtatgtttggttttgtgagacaaaaaatgattttgaatggattgattgtataaaatttgattctgatgaaagtgagttgaacaataaattagaggcggaacgtcaattatataggtaaatgctccaaattgtagcttcaagttagaatcatttctggaggcaaaatcaattctacttgagaacatccaaacatgtcaaaataattttttacacctttagaaacaattttgactcctccaaaagtgaaatcaaacataaagtaatcactttcattttctcaaatttgtgtctgcgtttacatgttagtgtcctgttcgtgtctatgtttgcttcattggttgcatctaattgttggctaaaatatattaatattgttcgttttgtaaattttcatgacagtgtaaggaatcattcattcccttgattgaaactgtgatgtgcatattctccattttcttaggttacaggggaatccaggaaaaaagaccaatatct

SEQ ID NO: 34271 - DNA, 1012 bp, Medicago truncatula
  Intron number 1 from transcript Medtr7g043420.1 (locus Med tr7g043420) derived from phytozome v7.0 (chr-ID MtChr7; po s 10730916 to 10731927)
attccaaggttcgcctttttttctttcgaataaagatccattttggtccctcacagtttcctgacggcccaattctgacattttttaagttagtacctgaattgggtcgttaggaaattgtaaaggacctaattgttttgtttctggttttgtgtttgatttatgattagtttgttttatgttatgttgtgttgtcaatgttgtataggaagaattgggaaaagggttgattgggatacttgtcatggtcaatttcaattgttgtatttgtgtttgtgattgtgattttgtttggtggagggtcttgtttgttcttatagatcacttttatcatatgttgtttggtgagttgaaatttgaaaagttttgatttttttaggaaaaaataaaagtaattatacttttcttgtgttgtcaattgtcatgctatcaaggaattgtaaggtttttgatgcataggaaaacttttttgtttctgctttggttttttattggataactttaacggttttgctttagtttggtgtatggtcatgtagtctttgttgtttctaataacaatcattcttttattgactaataacctatgcacatggagaatagaatgattgattcaagtgttttttttatcatgtttatatcttttttgcatctgtatttattgtcatgctttgatggttatccttttgacttttgatacaatgattgaatggaatgaatttgtggcttaaatttgaatcctgttttgttctgttataattcatggttgtgatgaggttccttcatcagtttcttgtatgatggattgagttttttttgtgcctcttgctttttcatgtatcttaatggttgatgatgatttctattgtgtagcataatgtaaatagtttaccttcaaatcgcaagcgtcttatgcatcgctgttcttgtttaaaaagtgagattaagcaagtattttgtatttttttcgtacgcagggtcaatcgggaaggctccgctataaactagatca

SEQ ID NO: 34272 - DNA, 987 bp, Medicago truncatula
  Intron number 1 from transcript Medtr4g108220.1 (locus Med tr4g108220) derived from phytozome v7.0 (chr-ID MtChr4; po s 23867600 to 23868586)
tactcaagaggcctttacaatcacaccaagtgtaagtctgattttacttcaattcaatttagtttttctttcacttttgttcgtaccttttgatttatatatattaggtgaagtaccacaaaagaataaattcactttctaaatgtatacaatgttgattctgggtcacactaattctgatttgaatgctttttttgcttcaatcctgatcagaaaacacagtgattctatatggtatattagatagatagaaatattatcactaacttgtttactgatgtgatgtggtgaaaataacttcaaggcatattttgattctaatggataggacggatatcagggcatttggtctagagttatgatcttgctttggttagtaacctcttcaataatttagttaaatactaataaccttcggtttttatacttttagtgttttaagatgcaaaagctgtccagtttgacttatgtaccgtgtatagtattagtagttaaattacaattaacatcggggttgcctgtgatgaatgttggatctcttttaaaataaatctaaaattcaaaccttaagttactctacttttttatcatgcagactctctttaaggttcaaatacaagcaattattgcctacattagtgcaaaggaagtcgacacagtgctcccaattatacacactaggtataattgacgatgttctcatgcctctcgacaacgatggtatacaaagaaattgagatgtagttttcatccaagatggtatacatgcttcaatcaaatatagtaattgaaatatgaaaatgtaacacagtattttctgaacttagtttttgttttggtgtttagttttattctcaaattaacttgacctggttgctctgctctattggaatgtttaccttaactatatacgtgctcacatagatcaaaaggactatgctttgatatataggtgtttcaaaggaagaagtcaaaaggtttgctttt

SEQ ID NO: 34273 - DNA, 959 bp, Medicago truncatula
  Intron number 2 from transcript Medtr7g006170.1 (locus Med tr7g006170) derived from phytozome v7.0 (chr-ID MtChr7; po s 879810 to 880768 reverse strand)
agggaatacctgcattggtaagtgggaagttaaccatatggacttgattaataatctacatgtatatgtttaattttatattcaaatttatcacacaatcatattaggtcatggttattattttgttcttttttttttttttttttgttacatcatgatattgttttgttcgaagaaaagaactaattacggtgtttatgaaattttattcatactgatgcaataacttctgttgtatattttaggatcacgattatttattaaaattgataaagcacttatttgtttatttatttaagtatttatgtatactttatttttaaaatttgtttttcagataagtcataatctgatttcttaatttaccaagaaaagcttatataataagatcacttaaacaatttatagactgtcatatgctatttccaagcttctcaaaataaacaaatatttcacaagctcttaaaaaattcagacaaatacctttttttttttttttaagtaagacaaatacatacgtatgtgtgtgcgcgcgcgagtgtatatatatatatatatatatatatatatatattaaattggatataacaaccaccaaaaaaaaatggatataacatattcaacttatgctcttgtcaaaaaatattcaacttatgctgtcgtgaaaaagaaaacttgagcgggcccacagtattgttaattttgtgtcaactggagtcgctatcaaagaaagcaacaaaccttgcaatcatacttctaacatatacactttattcgcattgtgtctttatttattttggtatgtcatagtgtatatgtgtgtgtgaaaaaaatgcagctatatattaaatcgtgtgtgcgtgtctatatatatatatatatatatatatatataatttgtgtgaactaaattgtatataacccttttgttttcttcattttttgaatccttaattagg

SEQ ID NO: 34274 - DNA, 1042 bp, Medicago truncatula
  Intron number 1 from transcript Medtr5g012080.1 (locus Med tr5g012080) derived from phytozome v7.0 (chr-ID MtChr5; po s 3385928 to 3386969)
gtcccaaggattccatttgtccatcaccaccatctgtatgcataactacacatttcttttgttaccaagactatatttcattttacttattgctactatattatattcaagggttttacttgaaattttccggtccggtcttacatttttttgttgttttatataaagttgagatctagtattggtgtatggttgtttttctctctgatttgaatattctagttcctagtatgcatataattgatttcaaggacttaaaatgttcttttaagtaaaaaatagtggttaagatggcaatagtaaatacatgttttgttttttaagttgtgtttggattcatatagttttttgcctgtatcttttttatttttcctgctaagtttatgtatgtatttttttgttgttttgctcaaaaaaataagaccaaattgaccggttgaacttgaaacggacaaattcatcggttgatttgatcccttttttacttttttgtgattgaatttggttgaacccattgaatatgtggttggttccatttgttattattattttgtacttttttaaattgtttttgcttttttatctgtttatttgtaatctaattcgacctgatcaattgaatcaaaatctaaaaccctcaccggtatgatccccataaatggtttcaagtactctctcaactattatgaaaaagtggtgattttcaattgacatgtagctaaatcactgtgttatgtggtcatgaatttgattttggttgtgattatggtcttaaaatacatatgaagagtgatacttatcactttacaaacaaagcatcatgtacagcacaccggacgtgaggtggtgtatagggaaaaaagaacaattctgcaaatagtttataaagagtattggtatttacgttagaagtaagttttataacgactagttaaactaaaaatgtaaactttttggtttgataaacacacatagcacatatattaatgctgttttttatttgtcaggttgaggatattggatcaagaattcaagaagtggg

SEQ ID NO: 34275 - DNA, 470 bp, Medicago truncatula
  Intron number 1 from transcript Medtr3g138730.1 (locus Med tr3g138730) derived from phytozome v7.0 (chr-ID MtChr3; po s 35511472 to 35511941)
tcagttctcaatagcttcccacaggtatatgagacacatccctatttctcttttctttctacttttttcataaaaatgtggccgatgcaactgcaactgcaatgtggcccagaggttcttctatagcgattgcggttacatacctcaatttaaaactaatattttcctctgtcttatttatttataagagacatttgagttaataaaagttgatgtatctgattaaaattttgaattagatatatcaacttttgttgacccaaatgtttttttttttattattgaaaatcaaaatcaatctatgtttcaatatattaattaattcaactattatgttggccttagagtttgacattttcaaagtattaataatttttcgcttctcctatttaaaaaaattaattaattcagctatggtcatttcatattgtgcaggcagttggattgttgatagatagcaatatagacat

SEQ ID NO: 34276 - DNA, 690 bp, Medicago truncatula
  Intron number 1 from transcript Medtr4g009010.1 (locus Med tr4g009010) derived from phytozome v7.0 (chr-ID MtChr4; po s 1348224 to 1348913 reverse strand)
tcaaagaggtattgggatttagggttttttaattgtctagcataaattccttttgtctattatgcctttaattgttgattttcctttgactttgtcagttcctttgttaaatcttgttaaatctcttgaactcaattttatctatttattttgaaattaattttaaacactttttttgagtttcttgtgacttgtatatttggggatattattgtcttttgtggttaagagttttgattattgtgacttgtatatttggggatattattgagaaactcctgaaatttttttgattcgatgagactactaaaaaagtaacagcattgtgaaattattgattatatgcaatctgaccttacttttctgcatgattgaatcattcttcaactttatactgtgtaatcttgcatgttttgattttgtttttcacttttattaataccataaactaatttgcttctttggcagcttcaatttgagagtttttaacatcaagctagcggttgaaagtttgattgacatgtaaactgtagtataatcaatttaagatgactgttatatctgattcaaactcttccatgacagaaaatgtagatcttgtaatattgattttattaaaacaaattgaacatttatacaagctggctaggtgtaatatatactcaagttgttacatgtggtgcagtttac

SEQ ID NO: 34277 - DNA, 929 bp, Medicago truncatula
  Intron number 2 from transcript Medtr6g090190.1 (locus Med tr6g090190) derived from phytozome v7.0 (chr-ID MtChr6; po s 19096801 to 19097729)
tgttgtttgctgaagttacctctcttcgtggagatgtgaacaatctgcgtgaatgttttgtttcattcatgtttcaatatctgggcatgatggcacctgtttccagcggtgatcctggttcctcatccaacccacctccaaatcctctgtagcttgctctgtttcaataacttgctctttttgacgaagacaaaagggggagaaagcatgtgttacaacactgcatgaacaaatttgaaaaatgctccttttatatcttttgggtgtagactattaagcacatgggtgaactttgtttactttgcttagtatttatgtcttaatgttttttagttttttttttttgccaagtatcctaaaaatggacttttgaactttagcaatttatggctaagaatggaacttcaaggttatatgtattttagtccctttctatgattaatgcaatgttatatgtccttatctatgttcaatgaaagctaccttgttctaaatattattttgcctctttaattgaacacaagtatctatcttaagaaatgtatgactatgtttaaaagggcctcaaatcatcctcttcaaataaattatgaaaactcatcttctttgcctgggatgataaattaagggggagcctagtttaaacaagtcatctttgattgttaaaccctcaaaagacatgcatcaaattgagggggagtcaaatcagaacacatctataaaatcaaattcaaatatattttgtcatcatcaaaaagggggagaatgttgagataatattcataaatccttattttagttttaaagatgaaaaaatatatttatattttattttataaatggattctgatattattgtatttaacatctttgtatgagtatttttagctgcaggaacttaagctcaaaaggttgatataactagttcc

SEQ ID NO: 34278 - DNA, 558 bp, Medicago truncatula
  Intron number 1 from transcript Medtr3g013110.1 (locus Med tr3g013110) derived from phytozome v7.0 (chr-ID MtChr3; po s 2378279 to 2378836)
tctcttgtggtggctctaatcctgaagataatcgtgtacagagtcttcttgcatagtgctacatgtttatcacatcacattctaaaaatgtcacaattttgtaattactttaatttttattaattaaatttcaatagattaactcatttcttttaatcatcatcatagattcatttttttagtttcaactagaactttaacccgggcattgcaggggacaattatgttatcaagttatttattttaatttttaacaaataaatatatttgtaaatttaaataactaaatactatgaataaacaaaatttatttttcgaaaagccaaacaaattttattaaaactagactcttgacccgtgcgagtttgttatgccataatatcattatattttacaatcaatattgaattcattattatcatatgaaaagtataatttttgtataattataatttataggccaaacatcgtaaactgaaatagtacatcagtacataaattcactcaaacaagcatatatcaaagtgaattctcttatctctacccaagaagtttgac

SEQ ID NO: 34279 - DNA, 516 bp, Medicago truncatula
  Intron number 2 from transcript Medtr5g045640.1 (locus Med tr5g045640) derived from phytozome v7.0 (chr-ID MtChr5; po s 19126437 to 19126952)
cggtttggcttatggtcttcgaccgcctttctagtgttgttcctcgctctagtcatccaaggtagggttgtctctcatcggggaggtggttttagggtttgatgagtgtttttgtttggttttgtgatgtggtgttgttcttgttgtggttttcgtggatgtggttgagtttgatttttgtgtttgttatggtgtttttatttgattttttgttttggttttcgttgttttgtgtttttggtacctctggtacaaatcctactgctctatgttttgcagggtcctgtgtacaattttggttcctctcgtttcagacacacacacacacacttgtcatgaaaaaaaagatcaacaaaattaatacaacattcaactttcttatttcacgtgtttttcctcaaaaggatcttatatttagagacggaggtaatattatttatcattttactaatttttgaacttggttttcatgttgatgaaggtggttcttcttctaccagagataagcctaaaaga

SEQ ID NO: 34280 - DNA, 949 bp, Medicago truncatula
  Intron number 3 from transcript Medtr1g086330.1 (locus Med tr1g086330) derived from phytozome v7.0 (chr-ID MtChr1; po s 17055801 to 17056749 reverse strand)
cttgacaaaattgaggtatgcttgtaattacattgttacttttttatttaatctgtttctgctagaaaataaatattacattgtaatggttttactttgttgttctaaagttagatcaattggaattatgtgttttgattgctacttttatgtcatgatcacttttcattgcatgacttatgtatcttattatcagctttttcttctgtcatttacttcatttcacttgatttggattggtgtaagtgtttgttaaataggggctatagtagcactatagcatagcagaattcgagcaaatcgctattgttcctttatatactacttagtataaagtgttgtcaaatagcagctatagtagcgctatagcgtagcagaactcaaacaaattgctattgttctatgatatactacgtagtacaaacagttgtcaaatagcggctatagcgtagtggaattcgaacaaaccacaattttccgcaatccacaattgacaatgttgattggtttagtatttttcactattgttatcataccattgctctttaccgttactagtaaacaataataggacaaaacttaggtgcatttcgttaggtgttttttcgtgttgttattcacttaaaatttattttttgtgattataacaaattctgagaaaattacggatttgaggaaatcgcgggtagttatgaatagtttaagtgaagaacaacacaaaaatacctaaggaaatggacctatgggacatccaattgtcattacaaactgtttgcttttattgtggctcaatcgcacatacttacacaatggtagaaactgagatattgatgtaatcatcagattttaactaagtgcaaagctgaagtgaccacacatttttagttttattttttctagagaatcggtcctgtagatgagctgttttataaattataggtggaatact

SEQ ID NO: 34281 - DNA, 803 bp, Medicago truncatula
  Intron number 1 from transcript Medtr1g094210.1 (locus Med tr1g094210) derived from phytozome v7.0 (chr-ID MtChr1; po s 19429066 to 19429868 reverse strand)
ctggctaacaaggtactggaatataggtaataagagaatggttctttcctttaagtaaccagggaaatccttaatccttgagtgatacatccaccttctgtttcttcacttttgaactcattcatgcctggtatttttgtttgatttttgagttcagatggatgcctgttaaatcaagttgccttatattgtctgactctgtaaaaatcatgcatgcttgctttgtgccatttaaaggaagaaacatcatacatctttttcaacgtagatagatagatgcaatgactaggagggtgaaactgcgatcgctaaaatcaccaaaaaaattcatttgtattgagatggttttcttttgttttggtttacttatggtagaaattagagtaatcgctgaagcagctctttgccaactatgacattaaaataatgttaataatgataaaagaactctttagtgctgtaattggattcaaattttactgttggcaacatgacaactataacagttaggatcagcactattttatgtagctctatagcatgcatgtattgtaaacctatgccaattgattacaattgttctttccgacttttagagcagtgagagatggatgaacgattgaaaatgatctcgttaagaattgagctactctgaatttttgtcttctgtatttgtcatagcctgagttagctgcaagaatgtttaatagttcatacactctttacacataccaaacatatacatttgattttctgagtcttccagttcaattatctaacatgtacactgacttatccagtgg

SEQ ID NO: 34282 - DNA, 366 bp, Medicago truncatula
  Intron number 1 from transcript Medtr6g093140.1 (locus Med tr6g093140) derived from phytozome v7.0 (chr-ID MtChr6; po s 19842922 to 19843287)
aggttcaacttgtcagtcaaaggaaacttgaaaaggtaaattagtcctctgtgaacattatttgtagttcgtttgcgtattataaagaaaagttaagcacaacttactggtttttttttatctatacctaactttgataaatctaaactgagttcatgtctttgtttttttttgttggtttacttgtgcttgtagaatatctcgtgcttctgatttttttctactgattcttcactgagcatttgcgttgaatatcctcatctctcgtgaatcaggttagttcactctatcatttttattaaggttgagagataaaatcttgggcatgtaggttttgtgctggaaatcgaatacaaaatttccttc

SEQ ID NO: 34283 - DNA, 764 bp, Medicago truncatula
  Intron number 1 from transcript Medtr5g017420.1 (locus Med tr5g017420) derived from phytozome v7.0 (chr-ID MtChr5; po s 6240019 to 6240782 reverse strand)
aaaagtgatatccttgtacaatataattgtgaacggtgagtgctgaagctattttcttttcggaagtatagatagacacacatttatttatacacccttcccaccattcttacttggcaaacttttattggtccaacaaaagcaataataaaaagaaaaaaaaacaaaaaaaaaacaataagctgagtttctctctccacgccttaccttctccccctcctatcctctcctctatctgttcaccatgttcctttctctcccccactcaaaccggccgccaacaaaagctttgcacggcggtggagtacgagttttcatggcgacggtctcgtgtctttcgtctgtccagatccttctgctgagaaataaattatgttatgcaggaaaaacatcttgctagtgaaaatggagagcatttcgtgttgcaggaaaaaaaacacatagaggctctttaagatgataaaacaacgatttcttcttctttcccctctattaaattcaattacaaatttctcaaaatttctatcattttaagattttttttatttgatttaatccattggtgaacaaacaggatttgtgtggcatgagtttttgaaaggaaattttatagatacatgctttgtggatacaaatttgtggcaaattctgaaaaatggtcgtcaatgaaactgaagagggacacacacctttgtttctctctccttaaaattgttcattttttatttgatttatatctgagccgttggattaggggcaagaat

SEQ ID NO: 34284 - DNA, 939 bp, Medicago truncatula; identical to SEQ ID NO: 31066
  Intron number 1 from transcript Medtr6g036350.1 (locus Med tr6g036350) derived from phytozome v7.0 (chr-ID MtChr6; po s 7995390 to 7996328)

SEQ ID NO: 34285 - DNA, 160 bp, Medicago truncatula
  Intron number 2 from transcript Medtr6g092560.1 (locus Med tr6g092560) derived from phytozome v7.0 (chr-ID MtChr6; po s 19485995 to 19486154)
gtggggaggagttgggttagggttaggtttgttgattgggttaatgattttgcttctgatacttctattatgaatttaggttcttccatttttattttctttctcttcttcacacttttttataactattttgagttatggtgtgtgagtgtttagagaa

SEQ ID NO: 34286 - DNA, 319 bp, Medicago truncatula
  Intron number 2 from transcript Medtr6g031060.2 (locus Med tr6g031060) derived from phytozome v7.0 (chr-ID MtChr6; po s 7034819 to 7035137 reverse strand)
gctgcaactccactggttggtttccacttttctcattattcaatatattaacaataatgtatcaccaacgtttcggattgaatttgtactgacacgacactgccacatgtgctttaccttcgatcacttctattttttcaaaccggatatatatatcaagctcgtgtggtcagaagtcagaaccaaatgtttgaagaaaaaaacattgattatttcattaaaaataagataatcaaacatgcaagtgtttcgattcaattttggctttgacttctttacctcaggtcctcacttcaatccactcaagaaggatcacgga

SEQ ID NO: 34287 - DNA, 278 bp, Medicago truncatula
  Intron number 2 from transcript Medtr1g143130.1 (locus Med tr1g143130) derived from phytozome v7.0 (chr-ID MtChr1; po s 31517197 to 31517474 reverse strand)
ttgaatttggataaggaggggcttccttctttcaggtttggatatgtttgccttttcttctcatatgaatggtcttttaacagtacactatggctaggcccctgctcaatgattttcttatgaaattatgcttcctttttgattaaattgttacttttattacaatatgatgttttgaagaaaaaaaaaatgtataaaaaacaaagtaaatattattttttcgaagtcttttacaatgtacaaacattaagattaagatggagctcacctgcagaaac

SEQ ID NO: 34288 - DNA, 489 bp, Medicago truncatula
  Intron number 2 from transcript Medtr4g136880.1 (locus Med tr4g136880) derived from phytozome v7.0 (chr-ID MtChr4; po s 33557872 to 33558360)
aaatctgatcttgattatatttttcttaaacttaggtattcttttttaattacttcttatctttatttacttgaaatataacatcaaatttttataatttcattagtttttatacatattttttaggcaaaataatcattgcattttattaagaatcaaagaagcaatacaaggtgaaaattgttaataatcttggggcttaggtcagttatggacattgtcgccttattagctagactataagatacattgtttgcttgctttgtaacgaaactaacacttgagtgagttttgaaaaagcgaaggagtacagtccttgataatagctctgaaatctgaattgtattctcttggaaaattaatatgatcaaaattcaactacaagcttacattcaagctaaaaaataatacgattcagttatggactgttggtctactgacccgtcttcagtaggcgtgttgcttctcccccaagagttgggaagcagg

SEQ ID NO: 34289 - DNA, 788 bp, Medicago truncatula
  Intron number 1 from transcript Medtr5g013930.1 (locus Med tr5g013930) derived from phytozome v7.0 (chr-ID MtChr5; po s 4305184 to 4305971)
ctgaaaaaatcaggtatgtttcggagattttattatatataagggcaaatcggtcatgtactaataataatcgtaataaaataaaaggaaaaagccatttctagcgaattgagacttttatggaccataatatgctacgcttaaagataaagatacactataagttttgtcggctacattaagataaaaaaacaagtgttagttttgctggctacactactcgaaccttataggtattgttaagttttcagaagacaatcaaatactagtaactaaaagtggagaagcgaagattatggtgatcgatatggtataaaatttcaacaaagggatttgagtaccgtcaactgttattactgcgaagagtttgatcacatgcaagttatatattcaaaattaatgaagaatttatgaagcataaatgagatgacaaaaaagttgaagtgtgttccttctacaaatgtgattggctatgaagatgaagatttagtgtggagattttctccagctgctttacatcttctatttgttgaatttttaagtgtgagtgcttaaatgcatgccgcctataaataatttaaaatattaaatataaaagagataatctatatacataattgttttaagattttgaattgaaatgcgacgtcatcatatatcttgtaaatttgaagtattttttattttttttaaaaagattgtgaatttgaagtaatgatttgttattgcttccacacacctacttctaatgtattactttctcttatttatgcttatagtgacgggga

SEQ ID NO: 34290 - DNA, 487 bp, Medicago truncatula
  Intron number 3 from transcript Medtr2g052850.1 (locus Med tr2g052850) derived from phytozome v7.0 (chr-ID MtChr2; po s 14399473 to 14399959)
cttcattgtctcaaaataatcacaacttgctgctggtaagtttgacttcaaaattttgttcacactcatttttttgttctattaaatttgctttaaatattttactattatttagttatacgaaaatgatcttatgtctttggtcaacacgtcttaatattttcaatacttatagctacaattaattaattatatctcgtctagctacaaatagataaacacaaaaaattaatgattataaaaaattagaaacgtataattttttgttgtttatgtagttaacatggcatagatgctgtagtgttgtcgatcatcaataggttggacacatccaatatgataaattaaactttaattttggatttggtgaatgtggtcaattaaactttttaaacctatgttattttcaatatgttataaatataattaaatatattaatctttgtacattttttcttcataattaattagaaggaaaatacacaag

SEQ ID NO: 34291 - DNA, 687 bp, Medicago truncatula
  Intron number 3 from transcript Medtr4g160530.1 (locus Med tr4g160530) derived from phytozome v7.0 (chr-ID MtChr4; po s 40703946 to 40704632 reverse strand)
gctggtaattctctctccgtttttcatttttgttttctatgtgtaaactctatttagccaaataattatgtttatttccgatcagatatgaaaactttgagtacgataccttagttatattgtaattaacctgtatgaatgttaagtgactctgatattaatgttgtcaaccgtgctatttccttgcgatagtttcaatttcacacgtttttacatcaaatagcatatcgcatcgcagacagtcgaggtttgctctgctctagctgtccagtgctgccatagatgttatttaacaatacactgtgatttacacaacattctgataactgtgaggaggaaatatagatttgtgagacagcactttgatgtaacattgtaatgatggtggtgaagatgtttcagccgcacttacacatggcatttagatacatatcccccttttgcaactcaatgtaatgtaggttttattttgcttggatggattattttacatatttactactacatttgcatttgtctcggttttgtggtttatctgtgtgaaatgacatttctatggagaaagtttaagctgatatctggttcgcgcattgtttttttgttttaactcaaattctaataatcattttttctgtgttattatgcaaaacagcacatttaagaagaaagctcctaaagcaataaagg

SEQ ID NO: 34292 - DNA, 403 bp, Medicago truncatula
  Intron number 3 from transcript Medtr5g106810.1 (locus Med tr5g106810) derived from phytozome v7.0 (chr-ID MtChr5; po s 43034503 to 43034905)
ggtaagtaagtatcttcaacttgtttgttttgaggttttggtgtcattggtatggactatggagtaaacaaccatttggatccttgaatatgtcggacgttttcatcattgtagtcattgaatgtaccaaaattacaaaaatatcccaagtgtatcttttgcttgtcattttgatcctcaaatgtgtcttctgttagttagtttggtgcttgagtgtgttttccaattgtcagcgtggtctataaaattacttatccatggatgtttttgaaagtttgatacattcaaggaaacttcctcacccatttaagaaccaaaatgaccatttactctttttatatgtgtcttcttgcatttgtgtgttgtagtgaatttgcaatctggaggtgtttcagacctatat

SEQ ID NO: 34293 - DNA, 785 bp, Medicago truncatula
  Intron number 1 from transcript Medtr4g080430.1 (locus Med tr4g080430) derived from phytozome v7.0 (chr-ID MtChr4; po s 16517616 to 16518400 reverse strand)
cacattggagaattcagtcttttatctcaggtgagggtttgaaaattgttcttcttttacattataagcacttgattgatgttctgatgtcctgtatacctaatataccttaggattcaatccaattaactgaacttgttcagaagatccaactaaagcttgctaaggttgttgaatctgcttccgatgttgtcaaacatgtgcattttgtagtcttttttagagttaaatttagacctaattgtctgattgccaagagataaccccctcagctgctacaacttcatccaacaaaagggcatctctcaccaatgaggatgatgacatgaatgttccttttaagaagctgcttaggaggagtatcaagattgagaagatttagaagatcttctcaataaataattagttccctttaggtgttgtattttgaattcaagaactattggtctaatatatcttaagtgacaaaagtcttgatgttttttggttaagttgtaatgcttcggcactttagcaatattttattttggtattgtaatggggatgtaatattaaatatcactttgactttatctatcttaatcattcattatgtttattgttatttttcattaagttgcattttattatcattagtagggatagaaatattatttaataatgtattgctcattattttatatatatttatttggatattggacttttatacttatactaacagagattccatgttttttcagattttccaaggaactatagctggacttattgctaaaggagat

SEQ ID NO: 34294 - DNA, 388 bp, Medicago truncatula
  Intron number 1 from transcript Medtr3g039580.1 (locus Med tr3g039580) derived from phytozome v7.0 (chr-ID MtChr3; po s 10526972 to 10527359 reverse strand)
tttggaccggagtgggttccctcgctctcatttcagtagttaggtgtttcctttttttctttcctgtttgttgtttcatttttcttttctttttttgttgtttcttctatgttttttgagggttttggcctagtcatccctcttgtacttttttctcaaaccattgacaactcctctaattcacatcttatttgatttcaaatgtagagaaaagtactaaaaatgtaacaccccgatttttaatattagtttattaatattattattagataacattagtattattgtttttctaagacacattagtattattgttattattagtattggttgttagatagtattaattaaattatttgaattcattgggagaataggtaaggagaaa

SEQ ID NO: 34295 - DNA, 965 bp, Medicago truncatula
  Intron number 1 from transcript Medtr4g092510.1 (locus Med tr4g092510) derived from phytozome v7.0 (chr-ID MtChr4; po s 19348922 to 19349886 reverse strand)
accgatattaaggtaactttttttcattttcattttcattttgttgaaaattgggagaatataagatcatagaaatatatacctagaaataataatttttttgttctttacttttttgaagtacttgaattacctttttatatgataatcaaggtttttaaccacggtaaagttaagacacaatagttgataattgatattgcagaaaattgcaatccgatacttgtgatgttgcataaaattccagtgaaactctagtagaagtgacatcaaaactttgatgttgttgtggccacaaacaaattcaaacattttagtaaaaccttgatgagaatgtcaatatgtcatagatttgatttggtgaattttttccttgtcaaatgttttggttgtagatcttttacaaggtttgtaactttgttgggagcaaccaagtggaactgattttaaatattctccaccttctcaccttgctttcattagattttaaattatgatgataactttatttttatcaaatttctcacgttcctttgctatgatttaacccttttaataacatctaggctaatagaagtgttaaaatcacagcaaaagagcagggagaaaaatgaaggaaatgaatttctcatgatactttcaagcctaatgtaagcaaacaagttgagtagttggtgaggtatttaaaataagttggtggtttagtctttttcatttataagtatttataatattatatatttgttattgcttattataatctataatatcattaagggttgttaaatgaaaatgttgtctctatttcattagaatgataatactaagtccatggcgtggttttcccgttttaattcccatataacattttcttttgctgaagagctgactgttgattatgatttggaaatgagttaacttaatctttgttgtttaggaaagaagtgtgctttgtgcattgccag

SEQ ID NO: 34296 - DNA, 492 bp, Medicago truncatula
  Intron number 3 from transcript Medtr1g065960.1 (locus Med tr1g065960) derived from phytozome v7.0 (chr-ID MtChr1; po s 13289178 to 13289669 reverse strand)
ggtggtggtggagaggtttggctggaggtatgtttctttcaatggaaaagaataaaaacaaatcaacagtacaagctcttaatatggggaaaaaattgctggcatatgtattttgataaaaagcatgatgtactatgccatttgttcttcatgtacatttagtggacaaaattatgtctctctattcacatagttagaacttcacatgcgtatcctttgcattaaactgttttctctgaaaaggtcttgataattattaattaataaattctccaagggctactgtaaaatgatgtttgtttgttattcagttgacttttcttgagattagctattcactttatcattgacagtggcgactaattatgcttaatttggtgtcgatttgcttatgtgagtaatacaaggtttcctttaaatgagtattaagtagttgacttgtgtaaaataattttgaattgtaggttaaatataagacctttgaagaaattg

SEQ ID NO: 34297 - DNA, 867 bp, Medicago truncatula
  Intron number 2 from transcript Medtr1g092870.1 (locus Med tr1g092870) derived from phytozome v7.0 (chr-ID MtChr1; po s 18720246 to 18721112 reverse strand)
aggtattggaagtggacttctgttccagattcaaggtaataaataataataatcaaagtttaattacgaagagttaatcattgtattttttttttaaataagagttaatcattgatttattcttgtagttgtaggtattggttaatttcagttgtgaaattaacaaaattatgaaatgatttatgaaatttaaaatattagatcatattaatcattttcatgtattcaatcatattaaattatgtaggtatagatcaatttagttttgaaaactttttcatatgcttcacttatgtttggattgacttatttgagtttgtctaccaaaaaaagtactcagaagtatttgtgatatgatgtaggatagcttattaatttttttattttttatttttttaattttttttttatgatatatatgcccataagctgttttcagcttattttcataagttctccataataacttatgaaaacagcttataacttaaacgaaaattgtttgattctattttatatttgctttatatataagcatgtatgtttataatactataaacgtttaattaaggtgtttaggtgtttatctaaacacggcctaaattgatccatgcttattagtacattaagatcaatcaaatttgtaagaaaattgtccttcaagactaatgtgattgatgattttattctagagattacttcttagtcactaaattgaccagtgctatagtttcaataactaaatttggcgatttattctttaatttgttacctatatatttcaaattttcaatggtaattgaacaaaatctaatcgattcaaaaaattcaggttttctgaggtggctgaactcgtaagcgtgtgtt

SEQ ID NO: 34298 - DNA, 947 bp, Medicago truncatula
  Intron number 1 from transcript Medtr1g092870.1 (locus Med tr1g092870) derived from phytozome v7.0 (chr-ID MtChr1; po s 18721175 to 18722121 reverse strand)
gcaaaaaggtaatttactatctttttgtctcgggttcaaatctagtgaaggtgtctgggctagcaatatcgtcgttgtcggttgagttagtctatgggtgtgtttggtaaaaaaaagctataagctagctgataagttagctggtagctgaaaagctagcttatagctgatggttaatagctgaaaagttagctgattaaaattaaaagtgtttggtaaaattagctgttgaagtgactataaatataaaatgacataaaagtaatgcttgttttaattttttttaatatcatatatataatttttattacttaacacgtttatttttaaatatttaaatatattttaaattatttcatttccaaaataataaatgtatttataaattcaatcgaattttttatttaacaattttattttatttttatgaattttatttaactaaacttgcttcactattataaatttatataaattatatattatataaattataagcaaagtaaaaaaaaaacaaaaaagtggataagaaaatttaaaaagccatacatggtaaatgtagttagtttaagaagatagtgggtagtttttttattataataaaataaaataaaattaagaaaaggttaaaatgggaagaaagtataaaaagctataagttataagctaaaaagctacttggattagcttcttaaaaaacgctataagctattgagaaaagctttttatcaaacacatctcattttatcaaaacaaacttataagctagtccaacaagctataagctagcttttttatgttaccaaacacagcctatatagatttgtcgtttttattaccgttagtagcgaaaatatgtttaggtgtgtatgttaatgtgaattttcttagctaattcatggtttattgttttatgtggaattagagctttcaattggataaagttg

SEQ ID NO: 34299 - DNA, 425 bp, Medicago truncatula
  Intron number 2 from transcript AC202568_13.1 (locus AC202 568_13) derived from phytozome v7.0 (chr-ID AC202568; pos 65891 to 66315 reverse strand)
ttaaattgattgtcctaaaggtaatttccatttaccgagcactttccatttaattttttgcattttgctattgttctatggaagagagagaataacaattggaataaagaatgaataaactgttgtattagttgaaaaaaatgtaattggtgtctgaaagtaatcaaatgttctttgaccctcttttatagataaaacacacacatgtgtgtgcgcgcgctattagattaaaatgtgacatccctgagggactgatttacacctgccattaaaaccaattagtagtaacctaacaaatattgagggactcatttgttctcttttttgcaaaaaaatcatttcatctcagtatgaattctggctacattatgtatctgtatatgatatatgtatatgtacttttttctctctatctaaactttcag

SEQ ID NO: 34300 - DNA, 695 bp, Medicago truncatula
  Intron number 1 from transcript AC202568_13.1 (locus AC202 568_13) derived from phytozome v7.0 (chr-ID AC202568; pos 66337 to 67031 reverse strand)
taaagatgtttggcttcctacatcagaaattgattctagcgtcaaaatcgatgctaagttgaagctcccatgtgtagcttccaaaaatggcttggaattgattctgaatttcattgtaatatgatggatatcttcccacttatttctatagtaattgcatatacaaaaccacatgaagatgtgttggggcttatttttggaattgtttttcctgtaccctcttagcctttaattattgtcttgtaacatgtgctgtctagccatctatattattttggatcaacatcataaacaaataatgtttgtgatctgaaatgaatttttcaaattctgaggtagtgttgttcgacagagttcaagagaatggcctcttctcatttcactgccaaatgccactgaagagtgcatttggtttgtataagtatttttatttccttttggttttcaccaataatgacaaaaatgtcatcttgttttcgttgttttcttatttttaaatatttgtactggaaatgaaagagattttccgcaaagcaaactgaccctaacctcttccatatacctgtttgagctctttcaaaaaattattcttctatttgtgaagttctgattccattttctattctcttacttatcttggtattcttctcctgtcttcctgttataggtatctaagctactagaaatatttcacg

SEQ ID NO: 34301 - DNA, 490 bp, Medicago truncatula
  Intron number 3 from transcript Medtr3g127450.1 (locus Med tr3g127450) derived from phytozome v7.0 (chr-ID MtChr3; po s 32326855 to 32327344)
tgtatgtctatcttctcttgctttctcttgctttacttaatttgcaagacaatttgaggtgaagattcctctaatagtagtattgcttcaacctatgaaacaccgacacatatacggccatcagaaacatgtgacatatatatattattagtaatttaagaaaacacaaatggttgaaaataacatatgtcggtgttgtgtcagcaccgaacacatctttaatctaaagtgtcggtgctatatagattatagccatatgcccaacttaattactttcacatatactcatttttgcacaagcttaactttcagattcttgatgttttaaccatctatcttagtagttcaataaagtcatatttgtatgtatgtatatactttattttcacatgtttttaaaaatgtaggcgtgtagtaagcaaataacatttttgaattgtgattaacgagggcaggataaaggcaaccacattcaaagttatattggaag

SEQ ID NO: 34302 - DNA, 754 bp, Medicago truncatula
  Intron number 1 from transcript Medtr5g069400.1 (locus Med tr5g069400) derived from phytozome v7.0 (chr-ID MtChr5; po s 25076368 to 25077121 reverse strand)
gcggggtatgtaacattctcttccttaaactatgtttcattatcaaaatcactttttcttgtaaaaaaatgatagctttttttgtgttctaatttgatttctgagatgggttcgtttgtatttgcgatgtttgatgttctgtgttttaaagtttttgtttttgttcaagttggttagtttaggtttttttggtctttctgttattcagtgttctatgattgacaagaaaaattaaaatatgtgattttttattttttttggttttctttgatgctacattgaatcactaagtgtaactagttgcttggtttgaaattgacatggttggtctttgttttaacttcagaatttggacaaaaactaaatgggtgataatcttgcaaatgtgtttagtttgaatgtgtctatgaagcacggatacggacaccggacacgacacggacactgacacgccgacacagctaataatttggaaaaattacataatttagtgtaattataatgtgtttacgacacgatgtttatttgtcgagtttctgatattgattaaatgcctaaatatgaaatatggacttgataatgctcttagattttgtggatttttgtctttttcagttactaaatcatctatgtagtaataccataggaatctcttacttaatatttgttgattctcttaggttatgtgtgttgactaggattctgaatgataactgacttttacattttcttgcttttctatatgcagaccatc

SEQ ID NO: 34303 - DNA, 911 bp, Medicago truncatula
  Intron number 1 from transcript Medtr5g083950.1 (locus Med tr5g083950) derived from phytozome v7.0 (chr-ID MtChr5; po s 31908722 to 31909632 reverse strand)
gaagagaagattgagtgaggaaggaaaaacaaaaccctaattttctcttttctttacccttttatactgctgacagggttttccatctcatcaaatgataggcccacgtgtgatgccaacaatgacaaacttaacgttttttgaaaaaaactaatggacgggaccagtttcgtaaacggagagatacttaagggaccaatttgagacaatttaaagttaagggaccaaattgaaatccaaaaataagttaagggaccaaaacatgtattaagccttgtttttatttctttcgtcttccttttcccatttgccctaatgtattgctttttttcttcttttctttttctcttagatgttctcttctgttgatgtaatcttaataaaaactttatcaaaccaccaaactcaatccacattggtgtcatatataatctccctttttaacggtttaaatttagaaaataaaatacatttttttaaaataaataaaaaagctccttcaaaaaaaaaaagttacttaaacttatttttttaatattttcccttcttattattttcttctctatatcaatttttccaaaaaaataatccaataaaaatgatagtcatactaagatcatataagacacaagataaggcttaaagaaagatgaagattccctaccttaaaataaaaattgaacatacatatacagtcatattatgatagtaccaacaaataaataagataatgaggttgtcattatcaatcacttacctacttacaagttgcaataataataatctaaaaataataataaataatagtttggataatgtcatgatccaaaatgaactatagacaaggcccacttcacattttttgtaagatttgaggaacaagtcaagtgttcttgtcagcctcactcacc

SEQ ID NO: 34304 - DNA, 663 bp, Medicago truncatula
  Intron number 1 from transcript Medtr4g157710.1 (locus Med tr4g157710) derived from phytozome v7.0 (chr-ID MtChr4; po s 39373885 to 39374547 reverse strand)
gcgagggttttgtaggcaataatttttggtaaattacttcatggtcgctagcttttggtttaatatccacaatgccattatataattttataattatttttatttttattgtttttttacaataacttatatttcttttcttttgtttgtcaaataatataccaaaccaaacacatcttatgcatatcaagatccttattaaaaaatgtcggaattgttggctcatatgtggtaattcaggattaaacctcagctcttccatacatgtgtgaatattcgatgactattattcgtctagctaaaaaagtatttagtttagctttggtttttcaattttattcaacgtgcaccaaaagaactatatctaatatatgatggatttaattgttattagatgtttgtttggatcgactatatgttttgcaaaattgcaatagttttttagtgtagttttgtcaaaattgaggtagctctttcagtgtcaatgacaacaggtactatagtataaaactcttaaagaatttcgttcatggtttttatatggtattaaatgtatattgcggattttagtgaagaaattatttgacaaagaggatagtcaacgagtgtgtgattagaatttcaatttaaacattgaaagaccggaggaaaattggagaaaac

SEQ ID NO: 34305 - DNA, 859 bp, Medicago truncatula
  Intron number 1 from transcript Medtr3g137870.1 (locus Med tr3g137870) derived from phytozome v7.0 (chr-ID MtChr3; po s 35049536 to 35050394)
aaaccaaggttagtttagtacatgcaaatatatataattttttcatttatttattattatgcaaatcttcatttctttaatattatgcaattcttttttttatttttgtacaaaaaatgaatttttgaatacaattcatttttactagctagcaacaagatcaatagtttgttatattttcattagaaattaaatcactatgattaattaaagttgttgacatatatgtgatgagattcatatctatttatgtgtttaaatcgagctttaaactctgtcccttttgaggtttaaccaaatcggtcacactcatgatcaatggacaatgggtgataaaagattagtaattttaaggatacaaaacttttgataactaatgtaaatatactctattttttttttttttttaaatacttcatactttattcaattgattattgattctgttatatggagtagtcaagttgcatttttttaaataactggactacttgatttgttctcttgtttttgtcaccgtaaaagctttaatagagaattcaacactattttacaaccttggtgattagtatcaatcaataaacatatataatgagatcacagttggcttttgattgtctcccataatatgcattataaaactagaagtggaaaaatcttaactgattctgccgaaattaatagttaatacctattagacctagtaaataaattatatatatgaacgattgtgcatatcgattaacttggccttttcaattagttgactataatgtaactatactggatcacttttttggtgattgaaattctggatggtataggtacaagaagcaaactgggagctgtacaagaaaca

SEQ ID NO: 34306 - DNA, 973 bp, Medicago truncatula
  Intron number 2 from transcript Medtr4g015560.1 (locus Med tr4g015560) derived from phytozome v7.0 (chr-ID MtChr4; po s 2909346 to 2910318 reverse strand)
tggagtgcctgctgcagttcctcaagcgaatctcggtgagaacacattttcttgattaattagggttgaaaagtattttttttgggatcattttgttttaatttaggttatgtgtgggtgtgtttacttgataaggtgatgttagttatgtttttgttagggctggttaattattatacacatatgaatcacgaatacggacacgacacagacacaaacacatgtctgaacctgggacacgtctaatccgaggtgtgtatgtgcttcatcgttatagacttagggttttagattgtagctgtggtcgtgttgtggttcttgatattgcggagaattgtgatccaatgagtggttgatattgttgagaattgcaatctattgtgtcgtcattcaaggttgatgattgcagattaattcttgcaataatgtagcatttatagatataatcaattaaagatacaagatatttaaataacactgaaaaagaacaaaatcatgtgtgaatatgttattattttgatattgtgatgattgtgtctataagcattgcactcgtgcaaaaattacttcatgattatagaaaatgctgacaactgctaaaaattatggctaaattttaggtgtggctggttgcatactgtaattctaaacaaagaatgtcataaactttacatgatcaaatgaatttctctgacaatgttcaggttcaatttggtgtttttatgtatgaatcgttttgtacttaaaagttgcataacattcatactacaaggttttgttgggggttagtttaccatattttgattctgagtagtacaatggggacttctacatatcttcacttagtcacaattttcttcagtattacttctggatttgaccactttaggactaagtttcaattgaaatgaaaacttttttaacatttgacttttcaggtgctcctactactgctgctgcttcccctgcaaca

SEQ ID NO: 34307 - DNA, 708 bp, Medicago truncatula
  Intron number 1 from transcript Medtr5g080230.1 (locus Med tr5g080230) derived from phytozome v7.0 (chr-ID MtChr5; po s 30003956 to 30004663)
agagaattcttagcaaagtttttctttcttcacatgtaaatgaattagataatggttcacaatgatattatttattttttgttctattgtttataactatatattatatatacaaccatgagaagttaatcgctatgattagacaatttttgtttgtttcagcttgtttatgtatatcctattattgttaaattgtttggtttcttttggatatgtaattttcatttttaatttcttaattggtttaagacttgagagaattaaattaaatcatacacactcaagaactaatatatcaacctaatcacttctacaacaaagcgattgtgaacgagactacatcaaccatatttaaccgcgatttttttcttttcaatattagagattgtgtgcgtgtttgaattaattgtaattttgacgaaatcacgatgatgctgtaattttttagaagattcaaagtaaaacttttatcaaaatcgtagtaataaaatgggattttactaaactcacactataagtctctttactaattttaatgacatttcacatgcaagcaatgtcatgcaaatatcttctacatctaattaataatatagaatataaacaaattatgtgaataaataaacaagacaacaaaaacacttgactaatattgttatgtttctatgtgaaggaaagaagtgtggcaagaccaagagagtgtcttcc

SEQ ID NO: 34308 - DNA, 867 bp, Medicago truncatula; identical to SEQ ID NO: 28899
  Intron number 1 from transcript Medtr2g092800.1 (locus Med tr2g092800) derived from phytozome v7.0 (chr-ID MtChr2; po s 21300694 to 21301560)

SEQ ID NO: 34309 - DNA, 919 bp, Medicago truncatula
  Intron number 1 from transcript Medtr7g075720.1 (locus Med tr7g075720) derived from phytozome v7.0 (chr-ID MtChr7; po s 15243332 to 15244250)
tttgcagtttttggttgttgggttgtgggtgttaattttcagattgtttttaatcattatatgttttgtctaattgatcacatttagtcacgctgcgattgttgctggctttatatatatgcctttttccttgaaacacttatatatggttgaagacttattattaagagatgaaacactcaaacaaaatcttttttcaaagtaaagtcacaataacctgtgatgtgaaccataccatttgacagaagagttttatcttcgaaatctagtaaaggcacaactctttggcttgtcatcctcattgtttctagttccatctgagaaaaatagtttgtataaccggtctttttctgctagtgaactatagtttttacttttgtatatttagtggttcctgtgtgtgttatatttagtggtttatttgtttgcctatcactcattagttgactctaattagaattctatatgttccatagttttccattatattctgctactacagcttgatataccttaatgctaacatcattctggtctctcaaaaatgctaggaacaaaaatcattgtgaaattgaagagaaaccaagttcaagtctgaatattcttcaaaactgtctcttggaatccaagaattgtttgcggtgagtgtagtggtgtgaccatattaaggatggacttgtaaatatgatggatttgacaattcaagtgtcttttcagtctacaaaatctccatagtttgaatttgacttataataacgtcagttttgtcccaatagagattaaatctgaaacatattatgctccacgtaaacgttcatacattttccagaatcatgtgctctaagaactctagatctcaattggaatcaaatttctgtgtcgtcgttttgaaggaaagcaaactccacagtcgcattag

SEQ ID NO: 34310 - DNA, 701 bp, Medicago truncatula
  Intron number 1 from transcript Medtr5g029820.1 (locus Med tr5g029820) derived from phytozome v7.0 (chr-ID MtChr5; po s 12457385 to 12458085 reverse strand)
aaactgtttacgaacatagtgttgaaagataaaaggtattatcttctaatttgtcagcataagatgataggattttgtataagtttgataatgacttgaaagatgtctttccttatgcagtgagaatatagttgatgtaacactatgggaaaaatattccgtagctttatcatttaccatctatttaccttgagttctttgcttccattttgtagtcaatgacaacccaaatatatgtaacaattggttcgaggctgctcatcaacctgcattatccggttgttgagaagtttaagacttagtaagtttgcattatgatttcacaatacagtgttagagtaaattattatttcacaatttgatttgattgtttttgactatgtttcttgaattgttgtcgtgaccttaacacttctcaagctcagagtcaaagcatcagtctgaacttaagtcagagttcggcttcttctcaatgtattcgtacaacgatttttccaatctgtctcaggttaggtcaattgttgaatttataaacttagtcaatgtctgctttttttatgcacaaacatgctttgtatttttttacacacaaattaaaaatatatattgcattattctttatttcacgtgcataatttgtgttaggatacatattgcatcactatttggaaagtaactaaattcaatcctaaccagtttgg

SEQ ID NO: 34311 - DNA, 872 bp, Medicago truncatula
  Intron number 1 from transcript Medtr5g007790.1 (locus Med tr5g007790) derived from phytozome v7.0 (chr-ID MtChr5; po s 1296445 to 1297316)
gatccttctatttccaatcggtacctcattttctcattctttctttcaaatttctattactccgcatcgatcaattttcaacttaggttattttgattccttgtttagattattgtaatgataatgataatataatttcaatatgcatcattacgatacaaattgttcaaattattattgctttgcattttccagagttgatttatgaataactaactcattcctttgtagattttctttcaaacttttatatttctattttatttttatcctttttatatttttttgcgagggagagaacataccttgtgtgtcccgtaggttcccgacaaagattagtaactgctagtcagtggtagaaacttcgtacacgggtaacaaaaacaaaaaaaaaaacaggattatttgtctcaagtggcaatgctgagattgttaggctgaatattttccgtgattacctaggtttgtatcatggatccctatgtgtgagtttttagtggtgtcttccatctagagactcgaaaaagagaattatttgtttatttttggaaaatgttgaacgtcgggacactaattatgacactaattatgacgatagcgcatcaaggactatcattgtctatttaacaccttacccgtccggttttccgccaaattagggactaaagcggtttttgttttttccccaataaatcggcccttgcttcgtaaagatgtcgtgaacaaaatatttgtcgtatattgcattactttttatttatttgttttatttttcttaatggaacattcgaagcaagaatgtatgtttaagccagatttattgactgtagttttgattgagtagttgtgtctttaaacattgattaaatcga

SEQ ID NO: 34312 - DNA, 811 bp, Medicago truncatula
  Intron number 1 from transcript Medtr1g125100.1 (locus Med tr1g125100) derived from phytozome v7.0 (chr-ID MtChr1; po s 27502102 to 27502912 reverse strand)
ataaggaactttgtctgtattctgcagcctttattctgtttttcttttgcattatcatttgctgagtacaattgtgtttccatccctgcaatttgtgtttggagaatctgcttgctttaacaaagattttgtactggcatttggtgttaaaacttaaaatggatttgatgtaatcaaatcttaggtttcacagataagaatatactagtgtctaactcttgagccatttaccatagttactagcaagatccggattctggtagacagggaatcatgcaattgacacagtcatgccatatgaactgttggatcactatttgacaagaccaaagttggaacgtgaactgtctattttttatctagatgactgagggtgactgtgggaatacttgaatttcaaaacctgaaattgggatatcacaagctttctgttacttctgtcttatttgactagttgtttccatgttaaggtttctgtcttatgtatagctctctatctgcccttcgctgaatgtcatcactatagatttaggagcataatgaatttgagtgctaaccatgttcataaatcaattgtggagcataatgaatttagcagttattcacatagtattaatttaagagtataattgttcttttggtctcggctgcaactgtatagactaatctctcaaattgagtaatatcacaatgagtgacagaactctcacttaacataaaataattgtgatatattgatatttttattttgctaatgtgacactaagcaatactctatgtacagtgttattgatgaatcttggatgcagtc

SEQ ID NO: 34313 - DNA, 421 bp, Medicago truncatula
  Intron number 1 from transcript AC235567_30.1 (locus AC235 567_30) derived from phytozome v7.0 (chr-ID AC235567; pos 97750 to 98170)
aaggtatggttcacactttctatctttgattcttgtctattctttttacttatttattccttttatggaaaatttgactcaaaattttgattccttttttattcttcaagaactttatgcatcttctatttatttttcttttcatattctctgttttttttccctgtttctctccttatgtaaagatctagggtagtagggaagtctgaaaataaatttgatatagtatagagattttggtaggtagaaaaatattggctacaatttcatgtgtatttactcaagtaatatatatattttttattttttattttgggttggttgaaaatttgtttttattacttaaattttcttcaaatgaattagggttaaatcagtttatgattttcattgcagaagtttgtactcaagttagatttgc

SEQ ID NO: 34314 - DNA, 978 bp, Medicago truncatula; identical to SEQ ID NO: 34203
  Intron number 1 from transcript Medtr6g009290.1 (locus Med tr6g009290) derived from phytozome v7.0 (chr-ID MtChr6; po s 1503279 to 1504256)

SEQ ID NO: 34315 - DNA, 934 bp, Medicago truncatula
  Intron number 1 from transcript Medtr1g031850.1 (locus Med tr1g031850) derived from phytozome v7.0 (chr-ID MtChr1; po s 7805281 to 7806214 reverse strand)
gatcaccttccacttctcaggttttgttctattactttccctaattttcttaaaatgattttttttttcaggtatgttctctgtttactttctagagattaatgaattggatcaaaatatggtttatgaattgaaatgatagacacaccgacatgacacacatacgcttcgaaactagtaattaaaaaaaaaagttcaattgattgtagtttcgttagagtaatttgattaatataactgactccactttgtaggttaaagcttgttgttattgtattatctttgtttactttattgttttttattttttcatttgagttataaagtgattgtaagaggaatcctctctgttgtgttgctaagtccaggaatataattcttgttgatgtaaatgttgtttgtgttgaattcggtatactgagaatcctatatatggcagcatatagaggtgtattgatatgattgaacattataaacgtggatctgagagatatgataatattttataattctgtctatgtatgatttgttatgcataacacttatgctgaacccagtgttgttaatcgcggatcacagaaaatagcagtttgttaatattccgctatgcactctagctgctctatgacggtattttgtactaaatagcttattgtggaaaaatagtggtttgttcaaattctgctatgctatagggctatagtgccgctatttaacaatattacttgaaccctagttgatgatgacaaaacactatttctgtttatgggtttatatccagcattatgctatgctattgtcaaacagggtatgtctttgccaagaaggattttatataaactttagtgcggtaaatggtgagtcttatatgcttgcatgacctttctattgttttgtaggggcctataatttcacactcccctcagagacaagg

SEQ ID NO: 34316 - DNA, 854 bp, Medicago truncatula
  Intron number 1 from transcript Medtr5g102830.1 (locus Med tr5g102830) derived from phytozome v7.0 (chr-ID MtChr5; po s 41189366 to 41190219 reverse strand)
ctggacgcgcttggtacaggggtctgcggttgaggtgccttttttcctttatcagtttttgttaagcaaatctagacccttcttgccaccacaggcttgctggcataacactattcccttttcatctctttaatcacatttctccctctatggatttgccttttttttcttatgatttgagaactgaaggacatttctttgttttttttttttattctttccttctcacaatttggatgagattgtgatgttggatattatgattatggtaatggtgtttgcaatgttttcaaaaaagagtagtatataaggcatttgtgtttttggaaaggtcacaaccaagttagtaacattttttttataaaaaatgggtatggtgactgcttcttaaatgtgtataagggtgtgtattgttgttacttattgttgattttgttgggttaaaatagcgaaaactcagtcttattgttttaagattattgttcatgttgcatgagtgttatgaaattgtttttattttatttttgaatgagtatgcttgtgtgaaggggatgattattacttgatcatgcgtacttgttctaactttggatagtatggatatttcaatttgttgtcaattgtttttgtagggacaaatgacaactcaaaacaaagcaaagagaaaaaaaggtcgccgctgacaccaagaccgctattctaagtttcttgccagtaaaaagtttgtgctagaaaaaaaattctgtttggaaggggaagaattctcagatattcaagcaatagtggccagaggatgagtggaattgacatagcttgcagaagaggcttgtacaacatttgctaaagaattgtct

SEQ ID NO: 34317 - DNA, 866 bp, Medicago truncatula
  Intron number 2 from transcript Medtr5g084650.1 (locus Med tr5g084650) derived from phytozome v7.0 (chr-ID MtChr5; po s 32234789 to 32235654)
tggtggaagattgtggtaggggctgatgttgttgctcaatggattctcgttatgggatttgtttgcttgttgttttggaaatcatattgatgtactcgcttgcggatatggacaaattttattggtcttttaggttgggggatgaggccattgttaatgttcatgagagtatgtgcggttggtttggttgttttgtgcaattgtttgggtgttgttggtagctctttgttaatatcttgtttcacttgccattgttcgtcttgaacaacaattttttttttttgttggattaatcaacaacaaaactttggaataaaccttgaacaaggatttgttattaataaatttagccttaaaaaaaaaagatttttttttgtggtggccggagttcgaaccccagactttgcatatattatacattgtcataccaactgagcacgagtacaaaaaaaaaaaaatgattgggatactcatgtattaaactaaaaaaaagtatggagagttttttatttttgatggagtacggagaaatctattaaatagaataaattaattaataatcaatagaaaaacattaattaataacggataactcttggttttgttttgttttttgcgaagcccaagtgtatatgtggccatattttgcttcaaatatggtttgttacattcgacagagacattcttaaaataggcagccgccaaaagcacacatagaaacgtgattatgtctatattttcttgtttctttgtgagtattttgttttaataccttgattttattgtactagaagaacgtgattatgctttactcaaaaacttgattttgatatgtatttgtttttttaatcaccattaggcaaaag

SEQ ID NO: 34318 - DNA, 598 bp, Medicago truncatula
  Intron number 1 from transcript Medtr3g087240.1 (locus Med tr3g087240) derived from phytozome v7.0 (chr-ID MtChr3; po s 20682796 to 20683393)
cagcaacagaattcggtggaagagttggactgaaaaaaaatcttcttcggaagaatttcatgttatcaccatagtacaagtttcacttcgtctcattttttttccacactatgggatttttgttcattgttttatgtgagaatgcatcaaaacgaacatgcatacgttatctttcagtcaagagtggaagaggcacaggcctttgtttgagactagttgaagagcattagagaagacatcaaggagcttctcaggtaattttctgctattgatggtgcataactgtgtttatattagcaaatactgttgtatgaactaataatatagtgttggctgcaatatctagttcgatgaattcaatactaattttgattcagatgaaaaaacaccagaaaaacgtgattaatttgatgctcgtttagtacataagatgttaactcgttagccttcgatgactgcaccaatcttctttgctatattattggtttggcaacaaagttcgattggatttaagcatatgctacttttcgactagttcacattggttctattattgatattagcttagatttaagcgtcaatttgaaaccctatcgtc

SEQ ID NO: 34319 - DNA, 1025 bp, Medicago truncatula
  Intron number 1 from transcript Medtr1g062640.1 (locus Med tr1g062640) derived from phytozome v7.0 (chr-ID MtChr1; po s 12348074 to 12349098)
cttggcactagtggtatatactcgggtcttttaataatttggtgaagagtctgatctctgatttgaaaaaacatatgttagtggaggttaacctcctaagtagatctcactgacctaaagggattagtatctgatacttgcgggcagggataccttggtttaaaaaaattggtatttttgctccatatagatattccatccgtgtcacaagtagtgggaactttatgtttctaagatctatcagtgtcacaaatagtgggagcttcatgtttctaaggttcattaattctctgtatgcctaagggataaatgatctgctcatatgattatgaagaatgtatgatattagtcgtcctcttaccatgtgctcttttcagataaccttggtagttatgatatataatatgcagatctggtataaataagggaatgttaaacttggtttaagcttaaagtaaggagaaaccatgttatattatgtcatctatgattagtactacttgttagtttgaactttgttggagagttttgctccttgtagttggctagttatagttaacatatatatttcgtgcatgtttcatcaatgatcattagaatcatgatttagttttcccctttctggatttgatgccctggtggtggcttttgtcatgcacaatggcctgagcgaatgctcaaagtaaaatattagttggctgaatactcgtgattgtttggtgatgcttgtgctaatctttttttttggtaaagtagactagtggttagaaatgcacctcttaaggtgataaagtgggatatattatgcaatgtacataccaactgagataagctcatgggcttgtgttaactaatgagccacattaaagtcaatgtgtaataacgactctttatagtataatgagttttgtaaattatgagctgtagacacctacttcttttctcacctaataattccttaaatcatgaccaacattgaaatatgctcaggtttattttctctaagaaggaaaattgaagacacg

SEQ ID NO: 34320 - DNA, 776 bp, Medicago truncatula
  Intron number 1 from transcript Medtr5g087110.1 (locus Med tr5g087110) derived from phytozome v7.0 (chr-ID MtChr5; po s 33567547 to 33568322 reverse strand)
tagaccttggtgcgtcaatctatatatttagtgtatggaattgcaaaagtaaaaaaaaattacccgctgatatttgatatttattgtgtgtagggaattacatgctttagccattaaggacaattgatgaaatgttcggttccaaacatttctcttagctagatcttaggttatgataccatctaattctagctacggtagccttaagatagatacaaaattgtatttagaacacaccatgatcgggtgcaaatcctctccatttgtagagaaaatggccaatctcaatttccactcataaaaacatgacacgtggaagacatgatatcaatgactcacatttatttcctacacatacttctatcaattatttattttcagaaataaaaaatactccttcacccccttccttgctctgttcagcaacacacccttcctctccaacattacgccttcaccgttgcattatatgaccttcaccagcttccgtcgactgctacaccacaactttagactttgccgccaccgtctattctgtttgtttactacttaaaacttcaaaatttaatctcaatctctttcaatacacgtgttatatttcttttgcattttgtgtacatggattattaattattaatcttaaatctcataatcttccgatttttggttttttttttttcttttgcattttgtctattcttttgaatttttgggattttcaggttaaactattaataaatcataactaaattaatttgttataggttaaccttgag

SEQ ID NO: 34321 - DNA, 1011 bp, Medicago truncatula
  Intron number 1 from transcript Medtr6g043470.1 (locus Med tr6g043470) derived from phytozome v7.0 (chr-ID MtChr6; po s 9062402 to 9063412 reverse strand)
tctctcccttcatcaacaaaggttctctcttcgtcgttgctgaatgctcctttccatcactgttcagatttgctaattttgcaaagtttctctcaacgtaatcgcttttccctttctacgtattgaattgtgtttttagtctaatcaccctccacctctcagttgtttcttcaattccattcattaattttgtaaatttgcaattagattcacaacagaatcagatttgggtctctgatgagaacaggctaatagttgattgaataggctgtcaatgtttctctgttaaatgcaacggctttaagccaattttttaaagtttaggcgcaaactagattttatgaggttataaaaccaaaacttcattactaatttttcccataaaactttgttgatgaatgttttaaatttgtttaagcaatatttgattatgtgttttctggagaatttattgatttcgacgatttatagagaaaatccatttgatgtgtaagcaacttcaagttttcttttcaaatgaagtagtttccttttgtttctcaattgaaagttagtatatttagtgattgatgttggaagctcatacaccacgattcatttttcaagtttatatgttacattcaagatgaattacaaatcactattacttttatagggttagacttatattggaatttgcaaaattaggcctgatagactaatactatagtatgtattgcaggttgtttatgtttacatactgcttatagaaatcaattaactactaaggttgctgatatccctgcctcatatatgcttcatgcttttatgttaatttttttgaaacgatgcttttatgttaataaactttaaaaaccactaccataggataaaatagtagttttggaatcaagtgtggtttgtcagtaagatatctgtgtattatatttcactaagatattttttattatattatttttcttttgaattaaaacaggtgattcaatccaaattgtataagattcctccgac

SEQ ID NO: 34322 - DNA, 692 bp, Medicago truncatula
  Intron number 1 from transcript Medtr3g084070.1 (locus Med tr3g084070) derived from phytozome v7.0 (chr-ID MtChr3; po s 19928808 to 19929499)
ttgttctaggttccggaaaaggtatgctcgcgtgtttcttttacatttcatgagaagcaccgatacaaagctcattttgaaactctttattattagctgaaattcgtatgattctcactaatttatttgagtctcgtttcttatttgatgtggctcattactaaaatggtaaggtcgactttaatttcaactgttcttgaaaagaaattgttgtaaagtgtttgctagcaatcatgtgcattccattcattttttcatacaatgcaagtttcattgatgttgttaagtgggattcatatttactaataagttggcaaacgctcgagcaaagcgaatagagctaaaagcactacgagtgttgtgtatcaaaagcgacaaccatatgtttcaaccaaaagggttggggtacaggagcaaagctccctgcacaacaataatcaatatgttgtcggaaacataggcacagttggccaaactctatgattgatcattgtgttcctatgcatctatttattcgttttatttagaacccgatttgttaatcgaactgttgcaaagtaaagtgaatctgttaaccacatttgagggagttacttggcaattatagtattattttacattgaacagatttttttctttctgttttggttgtgataaaatttatgtctgcttatagctgctgatataatact

SEQ ID NO: 34323 - DNA, 855 bp, Medicago truncatula
  Intron number 2 from transcript Medtr4g143140.1 (locus Med tr4g143140) derived from phytozome v7.0 (chr-ID MtChr4; po s 35784470 to 35785324)
atttattagctggatttggaaggtatatataattctaaatttcaacagtaaattttgttgttttcggaactgaggttcttttataataattgtaattttgtgattatgctttttgtgcaagaagcaaatatatgcatgctttgtattaaaaaagtacaagatgctatcgaatcttgaggcttaattagtttgaaagtttgagaatgactcacaccatgtaaaaattaagtttagcatttttgtttcaagctcagggtggttgtattctcatcagaagtgccttcaattttactagcgttcaaatggacactctggatccgtctgtccgcactttcaatgacaacaaaaatataggctaattaatttgtttaagggaataattgaaataacaaaaaaatccagccccaaatcccatatcctctttatatattgttatagatgttaggttataatttttatttgttgagtgtttctctttctataatgtgaattcttcatttggttttgataatgtacatacagggactaccatgaagaaagaaaattatctttatcttgaggatgcttcatccattaggtgctatcatctttaacttgttctattttagaacatattttgttttcaatgaaataaaacagaaaagggaaaaagaagggagaaatctttgtttcgagctgtgtgcaccttaattttctctttctaattttaagaactaattaccacatatttatagcatgcactcacagagataaatggcataacaagattatctttgatgagcgattcatagatattgtttaactcgtcaatgtttgatgtgttgtaatcatttttacatgttgttaacaacaggc

SEQ ID NO: 34324 - DNA, 508 bp, Medicago truncatula
  Intron number 3 from transcript Medtr4g024690.1 (locus Med tr4g024690) derived from phytozome v7.0 (chr-ID MtChr4; po s 5686823 to 5687330)
atcaggtctagttcattactgcctattttcttcaaaactttgtagaatattttgttgtatctacctttttcactaaactgggaatgaaacatattgtaggataagtttcatggagaactcaaaatttatatacagctaattaacagaaaaagaaagatggatgtaagtagaaatgtgaagtgttagtaataggcctcttatcactgaggatgtatcttagagtgaagcatagatatacaattaggcctgtgcagaagttatataatgttatttaattattagaagaaaactttaaataataaacatagagattgctagaaattttaaagatctacaacaacatttcatacttcgttcgaaaaataatgtatgtgtatttgtttctatgtttgtggacaacttatgcttaatgtgcttgtgaagttgtgcatgcttcttatagttgattgtgtatctactgccttttcacttgattcactttactttctcatgaatgtgtaggttggac

SEQ ID NO: 34325 - DNA, 863 bp, Medicago truncatula
  Intron number 1 from transcript Medtr1g031780.1 (locus Med tr1g031780) derived from phytozome v7.0 (chr-ID MtChr1; po s 7760725 to 7761587 reverse strand)
aagtgtctcgaaatctttacgcagatctatctcgagtaaaatttcttgccttgttaatttcattttcaaagtttgaagaatgaaaaactctgtctttaatattctgaaaattttgctcatggtgttaacctctgcattcctaattccatgtcctgtatggtaattattcagggagctgaaaaagtttcggttcatcttataaacatgaagtagggtggtttttatttttgtttatatagaaaatgaattaggttggttttataactatgtctggtttcctgtcactcattttcaatgtttgaagtatgtaaaactatgtctgttatattctaaaaatttctcttgatgctatccactgccttgctaatttcatttcctgcttttgggtatttgtttgaatctggagatttctcttaatgttaatgtcttccccaaatatttatgtggaatcaatggacagtttaagctatttccaattgcctgatggaagtttggtttttgcatatttaaaaaccaaaagagtgaactttgtctttaaatttggttttagtttcatttagttcattataacaatcaacatttgtgtgtaattaaagatggatctatctagaaaatagtgtactgaaaatatgactaaaacaatatgaatgtgtagtgcagctccttcaagacgttaggttaggaaattgaatatttaattgaaaattgattttgcatatgccttgtatagatattatttgaatggtttttaggtagttatctaggattagaattgaatgtactatataatatgaaaatggtaactttaatattgatactgattatgtattgttttccttccgttgtctttcatttgcaggtag

SEQ ID NO: 34326 - DNA, 810 bp, Medicago truncatula
  Intron number 1 from transcript Medtr5g027380.1 (locus Med tr5g027380) derived from phytozome v7.0 (chr-ID MtChr5; po s 11137391 to 11138200 reverse strand)
gaagcttttcattttcaaaaccaatcactactatcgtaagtaaccctcttttcattttcatcatcattctttcgtttctcttttcttcacttttacaaacccattgttcatatctaaaagttcttaattattctgtaacttataaaaatcttaacttttttttccttcacacacaatctttctcaaaaaaatgtgctttatgattcacttattagtgctagattgattaaacttgttgggttctcataattcaaaattttcccaattttcatacttctcaatggatcttcttgcttctataattttcttcttcacattgatttttttgtttgttttttccttaagttttgactttttgtttttttggtctttttcttcattgtattgaagttggacttttcaacatgaagagaaatttgaagtttttattttcttctactttggaaaatgaaaaaagtagttggctgactttaggaaactgtctttttcaagtgattaattagttgattaggattgcctaattaacaactcatgattttgtttgtttcttgagaaaattcaaggattattattggtttcaattgtgaaatggaagacttttaacaatttgagttttatcagaaagtagtaaaaattgtagttttcttgcaaattagatagatctgattcagaaaaaaagcatgatttagttacttgaactttgaagtttatggcttatatacaaagattctatcaaaaaaggctgctatttgatgcttgaaattgattggtataggtttacatagaggatatcttttggagattgtgtat

SEQ ID NO: 34327 - DNA, 411 bp, Medicago truncatula
  Intron number 1 from transcript AC225611_3.1 (locus AC2256 11_3) derived from phytozome v7.0 (chr-ID AC225611; pos 52 531 to 52941)
tctcaaaacattgattggaatcaagcatctatactgtaagtttcttctttctcaagacaaggaaaagtaatagaacacgagctcgttcatgaaccaaacaagtcaaactatacacgagtcaacttcaattcatttacttaacgaaatcacttttaagcttaagttagattttttttttttgttaatgagtccaatttcacatgttaattatcaaatacaatctcacaattttttagttggtttatgctatcttagcaaaaaaattacctaaagttgcaattttattttaataaagtaggatctttctttttcttcatgctatcttagcaaaagagaataatttttgaggtaaaaagggtagaaaagtaactaattttttttgatggatttgatgctaatgatatagaagaa

SEQ ID NO: 34328 - DNA, 924 bp, Medicago truncatula
  Intron number 2 from transcript Medtr4g130130.1 (locus Med tr4g130130) derived from phytozome v7.0 (chr-ID MtChr4; po s 31136668 to 31137591 reverse strand)
cgttatctgcagaaattgaaccactgcccacccaagtaattttcgtagcttgctctatcggcggtaatgaggtgacagttatactttctctgtgtctggtcatcaatgagagtgattgttttgcgctttcctttcaaaattgttcttgacacctcgtttggaaaatgctaaataggaaaataactgcaatattagtctaatgcatatttacatggataagatgtatgcgaatatagttacatataatttataaaataaaggtagcataactgattttaagctaaagaaaatgtagcatgacttctaatttatcttcctataaagtctagataaatgcatgcatgtacattatatgtatctcgttaatcaattaacattgttgaaacaaatggagattaagcatcacttccgcatctgcataaatagctagcaccatttgacattgatttcttcgaacatttggtgcaactctcataatacaatccaaactggttaggattgaatttagttgttttcaaaatagtgatgcagtatgtttcctaacacaaattatgcacatgaaataaagaataatgtaatatgtatttttaatctgtgcgtaaaaaaactcaaagcatgtttgtgcataaaaaaagcagacattgactaaatttattaattcagcaattggcctaacctgagacagtttggaaaaatcgttgtacgaagtacgttgagaagaagtcgagctctgacttaagttctaactaaagctttgactctgagcttgagaagtgttaaggtcacgacaacaattcaagaaatatggtcaaaaaacaatcaaatcggattgtgaaataataagttactctcacactgtattgtaaaatcataatgcaaacttaccaagtcttaaacttctcaacaaccggatgatgtaggttg

SEQ ID NO: 34329 - DNA, 692 bp, Medicago truncatula
  Intron number 3 from transcript Medtr6g014270.1 (locus Med tr6g014270) derived from phytozome v7.0 (chr-ID MtChr6; po s 3251913 to 3252604)
gagagcagacaaaaaagcagcaagacctttgtgaggtttgagaacctccctttttccttttcaatttcttttgacacttagatttggaattccaacatgatattctaactgaaaatgatactttgtgtgacttttgttgtgtttaattccatcatttttctacgggtgatttttttgtttttagtttaatataggatgtttgacatatcacattaatgaagatggatgacaaagtttgtccataaactgcttgacaaacaaagtaatgaacgctaataatttgttctatatgttccgctaatagcatactgaactttggttgtaatactccgtgtttcatgacaaacaaagtgtgacaacaattaaagtatgggatctcttataatattaatactctgtgtatcatagtctcccatatctaaaaagtatttgatatgtttcatgatttatgaattttgaccaatttaatggtccattatgatcgaaagggatagcctactttatatgatcttacgtagggctgctacttactggcgtgttatatggtttgtgtatttcactgcatgctttaatttagatttgtgtgtacacctgaaagagctgaaccagttggcctccttttccaatctgggctattttattttattaccttttattccatattatataatgatcattctttcaggtttgag

SEQ ID NO: 34330 - DNA, 964 bp, Medicago truncatula
  Intron number 2 from transcript Medtr1g030970.1 (locus Med tr1g030970) derived from phytozome v7.0 (chr-ID MtChr1; po s 7403784 to 7404747)
tggcgctccttttctatctccctttcaacctaaaggtatgatacctgatacaacactgacacaaatagtatagaattgattgtttgtaattaaattggtccaaatatgcctttgaggtgaaatattgttattacatacagtctgtttggattggtttatttgagtttatctgctaacgtgagttttgtgagactgtttggaagaatttatgaaaacagcttatgacattgttccgaagctattttcaacttattttcataagttctccgaaatagcttatgaaaattagaatataattgtttgtatgtaattaaatttgtcgaaatctgtcttcaagttcaatctgaagtatcgttaattactgcatacagttcgtttggattgacttatttatctatcgacattcaagcttatttgaattttcaatgtttaagtgcttatttgagcataaatgttacgtgcttatttgttttcaaatataatatgaataggttatatgttagcgcttatcataatgatcgtttgtgctgtaaactgcaaataagttatttattcaaacagggtcatagttatttatttgcttgtttttttctgtttaaatattattactattaaatttacttttatttgttcagtctataatatatgctttccttttgcttcatttacactaaattcgtttttaactgaaatacaactgttttgcagcaagtgttttgttttcaattttccatttattagttcttaacggtattttttgtttgttgtaataaattgcgtcaacgaactatcataaccccttggcaaagcaactagtccaatcccagtagcttgtttttataatagctttgttatggcttctttgtacttcacctgcactcttcgcttttactctcattctaaccagcatggtacatctcgatctgccatataggtaatattaataacactgaagacataaaag

SEQ ID NO: 34331 - DNA, 887 bp, Medicago truncatula
  Intron number 1 from transcript Medtr1g122310.1 (locus Med tr1g122310) derived from phytozome v7.0 (chr-ID MtChr1; po s 26869204 to 26870090)
tggacttggaattggaggacaaacttctttgtttggtaaataacctattatactttttaatatggcttatagtttttttttaaactaatatatatggcttatagttgtgtggtgcttgtggaatgcaagaaataaaatcatattcaaaggcaaactctcccagaccttgaaaaaattgtttcacaggttttaacttagggttggtttataaataggatgggggaaatttgggtgtgcaattttatgattagtggtataattccattggtataattccacttttatttaatatattgtgcgtactaagaagaagaagaaaatactataggtaggagtcaaagttatatatataattgaatacctgaatgatttaattgtggaagttagttaggatgaaaataattgtttgtcaacaatagagattgattcctctaaaacaaacaatagagattgatactagtggaataaataaatttgtctttcaatttttgtggttgatagtgacaagggaggaatatactcatgaaggaacttgttgaaaacaaaaactatattatcaacttttaacaaaatcgtattacaaaattatttgttttaaaaaagtaaaattgggaccttagaacgttaaacaaatttaattttcaagacattagtttgtttgttattattgtgtatttttattaaataaatatttgttttttaatttaaaatctcaaccgttagatatttttttggcacatgtcttgcatccaaatcctaaatggagcatatccgaactcgagggatcgtgtatttgaatttactggctaagtaaaaatccaactttgatttttaattaattgttaggtgcagggaaggtgctctttttccatcgtattattttccaa

SEQ ID NO: 34332 - DNA, 583 bp, Medicago truncatula
  Intron number 1 from transcript AC225518_24.1 (locus AC225 518_24) derived from phytozome v7.0 (chr-ID AC225518; pos 100003 to 100585 reverse strand)
gggtaattttgtaataatcaaaactactgtggtgagtctctaatactattaaataaaatagttagggtgaatgtcataatctcacataaatctgcaaatcgatcataacatgtatttttatttttgtgcaccataccaaaaaagatacactttggcaggctagatgccaccaggttattatgataaaatttgtgtatagtttaccaatggcggttttctatagaacttacgtattgccctacaaaccgaagaatttcgaatttgaacaagtcatagttggtgtgatcgaaagctccatcctaactcccaattataatatatcttcatcaacttgcatttgctatttgaccggtaatcaaaccaacaaatacaaatttgattgataatattattaattaatatggaaaaacatataataatataaatgtagatgtaattatatttctataaatgaatgtaattaaagtaattattggcgttgtcaatttctttttttatttggttacaaaatttgtagggtgaagggatggtgccccaatccaaagtagggaagactttcgaactcaaaaagaacttacaaaag

SEQ ID NO: 34333 - DNA, 581 bp, Medicago truncatula
  Intron number 1 from transcript Medtr5g094520.1 (locus Med tr5g094520) derived from phytozome v7.0 (chr-ID MtChr5; po s 37403203 to 37403783 reverse strand)
tcaattcaagagtgttaaactcggttgtggtgaaggtatatatattgaatttttctgccttctttggatttggtttctgatactttaatttcaagaagcttgatagtacagacttgataattattttttatttctttgtttgactttgtattgtttttttgaagtttcagcaatttcgatactgattctaatgataatgaattattctttctttatgtttcagtatgattaatataaatactttttatgattctgtaagttgagttggtgaaataaacaaatcagaagcaaagatatatacaagagttaaatattgaaactctgattactctaatcatagtttaaggcctaaggaatgtttatatacatatcctatgatccttcaactcttatcaataatttttttgttcatattttaaagaagaaattgaatctctttcaccacaagatttcagaaaagaattagaatgtaattgctaaactcgtgatagtcctcaattttcttttcaactctggaaattcatgctttgggatggttggttgcaggtggttgtggagcttgtgtagttttaatctccaaa

SEQ ID NO: 34334 - DNA, 1015 bp, Medicago truncatula
  Intron number 1 from transcript Medtr6g022780.1 (locus Med tr6g022780) derived from phytozome v7.0 (chr-ID MtChr6; po s 5156566 to 5157580 reverse strand)
tccaaccaccattgtcatccactttccacaatcaggtatcttcactctttgcttcttcgaatcattacaatgtcgttaatctcttaaaccgcaattaaaattatgattaacaacatttttagcaatcttgcttattaattaattaatccaaccgtgttaattgttaaacacgaattcatcattgaataattcagtggaaattgaattgttatttagggttaaattaatttaatttaatccatttttagtaatattgcttttttattaatctaagcgtgttaattgataaacacgaaatcaacatagtataattgtgtagaaattgaattgctatttagggttaattgggttaattgaatttgaatttttttctatttttttgtatttatagttgaacgagtttttgtacatttttgccttttcaacaccaatagaggttacgtgtgttgaatgtgtttgaaagtttatttttttgcggctatttttgtttgtgcattcaaacgttttcatttttttgatatactttaaaggttgcttaatgaaagtttgcttctttgagtcggtgaaatttgtatgaattagtcattgttgtcataaactcagaatttgcttggaaactaggaaacttcaaaaagaagataactttgtgtgttctttatccatttatagtgtgtggaattggattttgattttaatttgataattgggtttttgattttggattgctgttgtggtaaattttgttaaggagataagtggggtattaggatttggaattttggattggttttctgctgaattttggttgggagataagtggggtgttaagatctggaatttggattggattcaagtcaatttatccagttatagtgtctgaaattggattttgaattcaattttgcagttgggtttttgagtttggattggtttttctctttctggcggattttggattaaggagatacgtggggcgttaggaattggaattgaaattgttgttttggtttttcag

SEQ ID NO: 34335 - DNA, 417 bp, Medicago truncatula
  Intron number 1 from transcript Medtr5g035450.1 (locus Med tr5g035450) derived from phytozome v7.0 (chr-ID MtChr5; po s 14646010 to 14646426)
gcgatttctgctacatcaacttttcttcttccaaggtaaattcaaatctcagatccaatctcttcattcaaaccgatcctttttctattttcttcgatctgttcagatccttctgttttttcatcgttcagttaattttcttctttttattgattttttcatttgatcttgtaattttatctgtgcgatccgatcaacagtgaaaatcgatcttgcatgttgctttcagcgtgagatctggttcagcgtgagatctggttgaatctcatgatatcgatgcactttattaatgtattagcgttttgatttaggatttaattgatttgcgtgaagaaattatgattaatgtttatgttttggagatatgttattgaaattttgattgaaaattagatttgatcaagaagtgaaggagaa

SEQ ID NO: 34336 - DNA, 755 bp, Medicago truncatula
  Intron number 1 from transcript Medtr1g099870.1 (locus Med tr1g099870) derived from phytozome v7.0 (chr-ID MtChr1; po s 20554157 to 20554911 reverse strand)
cttgtttaccaggatcttcttacaggtaaaaacctttcatctttgagttttttgttttactttaccacccaattaggtttcttttacttttctccattgtttttcataggattttgatatgctttttattttttaaccaaatattacgatgaatgttaaatatacttgttcccaatgtttagtgaatgaatttcttgttatgcttttatgcacatgtttttcataaacttcacttttggttttaaataaatcttctttagagtttatactaaccttttgtaaggtagttaaattttttctagctttagagttttttttttttttgccacgagattgatctattttttttggaaaaccttaaatttcttgggaccaaacacacactattatagatcaaacttgtggcaaaagtatgaagttttatgcttgtgttctgtggtttaacctttaggtttttcgttattatccaaaattttaatttaatagaatttgttgtctaatttaaaagttctcgtgtttgtgaccgaggattatatttacgactttaccacaaactgctaagtaatattttctacccttaaacatgattagcctaacctaatacttaattgtggattttagtttgtgagattactacctgctactaatatttaaggttatttgttttttattatgagttttacttattaaaaacaaaaattcattcaaatggttttacttatgaactttactttgttgatgaatttctctaggtg

SEQ ID NO: 34337 - DNA, 1027 bp, Medicago truncatula; identical to SEQ ID NO: 31373
  Intron number 1 from transcript Medtr4g070110.1 (locus Med tr4g070110) derived from phytozome v7.0 (chr-ID MtChr4; po s 13542721 to 13543747 reverse strand)

SEQ ID NO: 34338 - DNA, 836 bp, Medicago truncatula; identical to SEQ ID NO: 34205
  Intron number 1 from transcript Medtr4g132510.1 (locus Med tr4g132510) derived from phytozome v7.0 (chr-ID MtChr4; po s 31486705 to 31487540)

SEQ ID NO: 34339 - DNA, 655 bp, Medicago truncatula
  Intron number 1 from transcript Medtr5g020450.1 (locus Med tr5g020450) derived from phytozome v7.0 (chr-ID MtChr5; po s 7734733 to 7735387)
tatttggtggttcttcaatattaagctcaaaaaaggttacttactttcttctgaattattagcgtgtaattctaggcaattcattctccttattctaaagtttctattattttatccttaagctcaaagttcaaactgtgtttggtagcatgatgacacatatagtacaagaaaactctatactcctctccaatcaaattgttaactattggatttatcaacctttgatagcttacaatttgattggatagacttataagtgcatgtttggatagtgagtttgataaaattacggtgacaccatgattttgttgaagctataaaatgtaacttttgtcaaaattacagtggttcaccgtgattatgttaaactcaccgtcaatccaaacatgtactaagttatatggcaaattatcatataaatataatagtttttttttattttttattgtatgttgagtaataatataaaaatatattgcagaatatcatataatatttctactttcaatgatgtttgttgaaagttgacctcttctcacttctcaatttaggtgatgaaaattacttttgttttactctattgaccagagtattccaaaataaatttgtccttctctagtagattttgttctttcattacagttaaggattc

SEQ ID NO: 34340 - DNA, 684 bp, Medicago truncatula
  Intron number 1 from transcript Medtr6g043800.1 (locus Med tr6g043800) derived from phytozome v7.0 (chr-ID MtChr6; po s 9202279 to 9202962)
ctcgaagtcacagacgtgctgatgataacatataattagtagttaaaaaaacttcaacatataaatatcaaattgtcctaatttaagagattttgaacatttattgtttgagcgatttgttgtttaactttgaagaattttgatttaatggagtaagggtaaaggaaagtgcatggtatggttttatttgagtttaaattgtaccggtttgtgtttttgtgtttctatatgtccagagttgaacaactcataacccccgttcatgagcaaatgtttgttaactctcgttcagtagaaaaaggtagttaactacaggtaagggtaacccacttgagctggctctgtgaggttggcttgagacattataatgtgttcctccgtcagcggactactttgtttttttcaaaaaaataaaaaatacgattgaggtaatatcggatattcgaggttctcgtgagaagaaattttaaaaaagagaaacgaatataataacaaaataaggtcataaggacaaggcacacaaaacaaacgatccctactttcacccacaaccccagatctaatgatccatactttccccccagatctgatgatccatactttcctatccatcatccaatttaacaagattttttgttctcttgacctatctagtttatcacattgatcttcacttttcaacaa

SEQ ID NO: 34341 - DNA, 703 bp, Medicago truncatula
  Intron number 1 from transcript Medtr1g010530.1 (locus Med tr1g010530) derived from phytozome v7.0 (chr-ID MtChr1; po s 1777645 to 1778347)
tggcactcctgatcactcatctttctcatttgatagtgatggattttcttcttctgcatcaaatgtggtaagaacaagcaagtaatttgcacttttatttccagctcaataattgcattaattagaagaattatcttattaaaaaaggttggaaaaatatttcacaactttagatgcattttttcatgaaatgctatttttttaaatggtttccttaaagatgaagaaatcagtaagttattgttgtgactacatattaagtgacatttagctaacacggttacattatatagattcagagaaatgctgacaagacactctacttgacacactctttcgtgccacttttattattggtctattgtttgaaataacaataaactcctcgaaaagtgattaaattgattttttgatgaaaaaatatagttaattttaaagagtgtgtattcctagctacgtagaactgacccttcacattgaaggtgtatccagtgtccgacacacaaaatgacactggtttcaatgagttagtattgagtttgatgtccgatctatgtcagtggttcatagattactgatattttctcatagttttggccaatgataaatggttgactattgttcctgtcttatgttaaccatatatatttgtatcatcaaattattgttcctgattgtaactaacttgtgctgcaagtatagg

SEQ ID NO: 34342 - DNA, 567 bp, Medicago truncatula
  Intron number 3 from transcript Medtr5g032440.1 (locus Med tr5g032440) derived from phytozome v7.0 (chr-ID MtChr5; po s 13142066 to 13142632 reverse strand)
gaaggtatataagatttttagttttattatcttactgtgttattttcttgtatctttgcttgtaaaacatgtaatatttgttgaatatggctcatattcactgataagtaagtgggtagaggctcgagtttagcttgcctcccacagtatggtttagagataatcttgtaatctggaccatactattaaataacagatttgtatttttaatcttaagcattgcataatagaaaaattaaaacagtcactctgctatcagagacgtagacactattggtcaaaccccgtcatcaatcttttgcatcttgtgtgtgtttgcttatctgttttctttagaaccgggtttgttgttataacaatattgagctacaaaagaattctccaactgtttgattgtgtgttaaaatatttggtatagttgtgttgtgaagaagcatgatgtactatactaaatttctcatcttaaggattttttttaaaattttgcattctatcttaaagagaacttggttgttttattattttggtgaaggggctggaactgattccatcagaaaacttcacttc

SEQ ID NO: 34343 - DNA, 786 bp, Medicago truncatula
  Intron number 1 from transcript Medtr2g024430.1 (locus Med tr2g024430) derived from phytozome v7.0 (chr-ID MtChr2; po s 6180981 to 6181766 reverse strand)
acaccactcaatcaagaccaatcacttttattattgtgaaaaagaggaaaacccttgatatgaatttgtattttttatcggatgaatttgttaattttttttttatagatagataaaatgacaaataaccatttaaagtcacacacattagtggagaatgaaaattggaacaggtgaatttgttaaatttatgttattgataaaatactaatatgaaaattattcaattaattagtcaaatgaaaccgtgcatagcacttaacctaagacagaaatatagtaaacgtttttataaaatggtcgttgccgacaggttggtggtgaaaccttaaaaagaaattaaaattgaggatatactccacgaaagagatagtaagtggtaggttcctataggtggtgcatgaccatgacatctggaaatatactccaagtagttttgcgttcatttgttaaaaaaaaagtttggtgtgagtggaaatatttctcaactttgatgcaaagcaagctttgacatgtttgtttgattttgtttaaagcaagctaattggcaagtttccaagaaatttcaaactttatagttcatagactttgttactaatttgactttaatataactgcacacaatatgtgtgcatatataccaatgttcttcatgtgttatatatgtgttacatgcagtataaggtcaattatttcggttatattctttgaaagaataattaatctccttattatcaaaataattaatgtcttaatgtgaatgtcgtgcaggccaaatccatctta

SEQ ID NO: 34344 - DNA, 491 bp, Medicago truncatula
  Intron number 1 from transcript Medtr1g093840.1 (locus Med tr1g093840) derived from phytozome v7.0 (chr-ID MtChr1; po s 19231181 to 19231671)
gccacaaggtattcttcttttcttattctttctatttaaagcaacataaatattccaattttaatcatcaactcaaactagatagatagacacttttattactactgttttctttctattttggacagattgattattcaatcacaatttgtttttactgatcttattgtcattaattttggaaattctagtaattttttttgcagatattggttttacttaattttcaagcttagttcttaattttgtttcatattgatgcattaaataagtatctttattgcatattttgctgtgccaatgttttacaaacttcttactacatacatcaaaattgaatttttactatgaatgttatttcatttctttttggttattgactatcatgtcaaatgtttgtcacttaaattatgttgtttatctactatgtactaagtttgtgattgatctactcaggtggtggttttgccggtggaagaatatcccttggg

SEQ ID NO: 34345 - DNA, 968 bp, Medicago truncatula
  Intron number 1 from transcript Medtr5g081820.1 (locus Med tr5g081820) derived from phytozome v7.0 (chr-ID MtChr5; po s 30738526 to 30739493)
acaccaatcgtgccacgtttttctacaaaccttcatcaccaaattttgaattaatttagagtaatctaactataactatcattattcaaaactatatctgtgtattgcgacctctaactatgatgacaaactaaatttacctttctgtatcttgattgaacttgcgacaagtagaatacaagagctaatcatatgatgaagcttaagctcttagggtttatgtattagttctcttaataatatatgaccattttttagaaaatttgattttacaatacgttgtacttgtgcattaagatgttctctcccccaatacaacatttttttgacaaataactttaacaaggtctaaaattaaaaaatttccttcccttcaatatcatgataagttaaattaaagaaaagttaaaaaaacccaaaattgtcactttacaatcaagaatggttaaaaaaattcccctttatgttttatatcacctgcttactaggtgagctaaagagacaaacacattacattgatatttaataatgattataattttatgaagaatttttaaaacttcttaagttgtaaaagctatttaattgtttttaggaaaacatgaaatttataaactatatatagatcatatcaattttttacattcaaagaagaaataaaatatgtttgaaattttcaagtttgtctatgttgtagttatatttctttccttatatattctctcaaggtaagccaatttttcatcaatttcaacttctcttattgccttttttttacgggaccttcgttacttcttagtttttttttttttttttttgtggtggcaaagtttaaacttcagactttacatatattatgcattatctttatcaactgaattaagatacttctttatttgaatacaatcttttatcatgttttagtaatattattttattatctttgaatgttatgcagcgcttattga

SEQ ID NO: 34346 - DNA, 654 bp, Medicago truncatula
  Intron number 2 from transcript Medtr5g048880.1 (locus Med tr5g048880) derived from phytozome v7.0 (chr-ID MtChr5; po s 20740121 to 20740774)
gctcttctttcggtatcttcttttctctgtcattaaaatccattctgattttgttggcgcttatgaacaaggtttaaaatcacagttgtgttgcgttttttatattttgcaataattataatcaaattttggctgtcaaaatgtttaacaaccgcttttctaaaaccttccttgtaaagttgttttcgaaaacaagttaacggaaactggaattcttaaggtgttagatttgcgtaataatctttcatagttcatacaaccatctggatgataaggatttatagtgcatgttttggaattgacgcgcatttcttaactgtttcagagttaaaattaggcaggtgaaaataggggcagactgcagttgaaaatttggaacaaaaatttatttttctcttgcttggtgttttcaataacccccaaagtgttttcttctagctatgcttctgtagcttgaaagtaatttttactgattattttgccaattttctattttcacgatgttttggatttccttgtttgagcgtatttgcagcagtgctgctaacacttctgtgatgtattgatttccatggtaagagttagacctaatgatctttgatgtttgtacttgcaacaggctattaggtgataagtcacccttctctcaacaaa

SEQ ID NO: 34347 - DNA, 711 bp, Medicago truncatula
  Intron number 1 from transcript Medtr5g084190.1 (locus Med tr5g084190) derived from phytozome v7.0 (chr-ID MtChr5; po s 32024420 to 32025130 reverse strand)
ttctcaacgaaaatctttacaaacacaaggtttcatttacaccttttgaacactcacaatgaaaacttgtgttgaaatctttactatttttgtagattctttccaaatttatttttacggtaatttaaagattttctcgactaggggtaaatcttatttgagcaaagtgggaaatgagtattagaactgcatttcatacacttttgacccaaaaaatgttcatacgcttgtatgattatgatcttgataaaaatgctaatacgcatgccaatgtttaagatactaattatattatgttatcttttatttacacaatagcatgtaccaaaaaaaattgtgttactttgttgctatgtgaaaataattaaaattaaggaatttcttgatccataaaacatttctaaaatactttgctaatgagtgcaacaattttgtttatttttgttggtaatggttgtcttcctcatggcattaattaggtataacataaagtatggactgcatttttgacattgtaatgaacttagatataaataaaaaaagttgtcatgtatgaaatgaaaattgctctattcttctattttcatttcttctatttatttgtggatttatttttaattatactaccatctgatgttctaacttctaacattggaaaacaccttggttctcttaggttcataagataccagagacatttaagtcagcaac

SEQ ID NO: 34348 - DNA, 469 bp, Medicago truncatula
  Intron number 1 from transcript Medtr4g159210.1 (locus Med tr4g159210) derived from phytozome v7.0 (chr-ID MtChr4; po s 40120307 to 40120775 reverse strand)
ataaagttaaaggaacattacaggttaataatttgctaaagttttattcttattttccttacatttaaaaaaataacatatgagtactgcataatcatattttataggagtattacttttacacttaaaattaaaaatgttggagaggtgagggtgcactgagaataaacacaactcattaaacaaaatcacattcactaaaatcttaatacaatgaatatatgagtctcatttagtgcattactaatcaaaatgagattaattaattactcaatagttgagtatgttcctaacattagtgatcataatttgtcatttaaaacattttgaataattcttttcaagaagaaaaaaaaaaggatttcatgataatttttaaaaagaataactatttccttatataagtttgccaaacatatgcatcataaaattctcaacaggtatcaggattcaggaagagtcacttaca

SEQ ID NO: 34349 - DNA, 692 bp, Medicago truncatula
  Intron number 2 from transcript Medtr3g073440.1 (locus Med tr3g073440) derived from phytozome v7.0 (chr-ID MtChr3; po s 16985226 to 16985917)
ttgttaagactcagtttggaagacttgatatcttggtaagaatgatccttttagtatgatttaagataatgcatattagaattttggaaactttgttattcactttctatgtttgtttaattgtataaaatgattctgaattaccatttattttggtgaatctggtgaaggagttttctgtgtttcaatgattttcttgattcttcatgctcataggccttgttttgataaacaacttacttaagtgcttttgctataagtttttatcatataagtgtttatgtataagccatttttgaacgtgggataaaataaaatcaaactattttcttattagttgtaagatgttttcataagctatcccaaaaagacttctgaaaataacttttggacatgtcataatttgtttccataagttatcccgaacagtctctcaagtacttatgctagtagatcagcttaaataagtcaatatatacaaacgcttaatacttttgtagaccatataaatattttaaactacgacaattaagtggcatgtagcacaaacacttcagattaaaggagtgtgtgttgtctgctgaaaattttgaatgagttcgccataataatagcctggaattttccttctctttattatatacatgaattaatcattttaaccgcgttccaaattcatgtgcaggtgaata

SEQ ID NO: 34350 - DNA, 847 bp, Medicago truncatula
  Intron number 2 from transcript Medtr3g156160.1 (locus Med tr3g156160) derived from phytozome v7.0 (chr-ID MtChr3; po s 40927091 to 40927937 reverse strand)
ggaaagtgaactttgatgtctctctttaattctctgtggaggctttgtaagtaagtccttaaatgactgcgtaattgagtatataatttcattctttactgcatttggaacatctactctttcaaggtttagagtagggaattttattttggtacatgatttactgagcattgtagtgtgctaatatttatattggctttgtctatattattgtgagagaggcctttggttcaatttcttgtaaaatttcaacagctcatagcaatatttaggtgctgagagaaatcctgaagggtgctaatatttatgtttaaaacttcaagttatgttatacatctcattgtttttttagttattctctcgtgtaaatttacaatgagacggctgttttatggtgtgaagtagaacagagaatattaattctattgattcaatataacttgcttgtaaaagaactggttgaatagggtttagttattcttttgatttgagccaatcacgaaaataaaaaatttgtttttatcttggatctttttactgggtttaatgatctttcagtaccccctctttcttttgtttcttaaacctcatgtgaacctgatctgttacaataaactaaaacattgggttggttaatcagcctggtctgctttactatatgtggttaaaattgtgttttgttaattgaaagttggatggggtgggtatgggaggcaaagtttgtgtttgtatatgcggaattgcatagaaaagaaaggattatctgcaaatttattagaactgaaagctctctttctcatcagtatttatgatgcatttttgagttgcagatttgcactcagcgatc

SEQ ID NO: 34351 - DNA, 748 bp, Medicago truncatula
  Intron number 1 from transcript Medtr3g156160.1 (locus Med tr3g156160) derived from phytozome v7.0 (chr-ID MtChr3; po s 40927967 to 40928714 reverse strand)
tcttgagaattcgaggtttgtaattaattgagtgtctttgtcagtgactatgatgtgtttgctgactctagttttctgtaaattacttagtgtgtgtttgaaatgttggtaagtttggcaaaatcatggtgatactatcattttgttgaagcttcaaactggaatttttgtcaaccgtaattccgtcaaactcgctgctaaccgaaacatactttttgatgtttggtttttgagatggctgacatttgaaagacaagtttggactagcttaagagagcttctcgatttaaaaagtttattaacttcacttgcaacattgtccttgtaactgttcctgaagacgataaactagagacttttttaaagaattgagttgcagaatctcatcaaacttgtacggtctagaagtatgtccttgtttgtggagaagtttgtccaaacttattctaaatatgaaacacatgacttttgagcatcgagctgttgtttacttaatatggcagtagtgagataatgttattatcctgttgtgaagtatcctttctttcttctcttaattttatatgttatttgttctaaattttgatagtgtaaaagttggattgatagtgggactgtttgctgattaagatattttgtaattcatatgatggagtaaggctatggggtagttattcaaattgggatcaattcatgcatcttaatgaatgctgtgtagtgtgttctgcttggtttcggcccattttgg

SEQ ID NO: 34352 - DNA, 849 bp, Medicago truncatula
  Intron number 2 from transcript Medtr4g107850.1 (locus Med tr4g107850) derived from phytozome v7.0 (chr-ID MtChr4; po s 23664850 to 23665698 reverse strand)
ctgttcaggtcagcttcatttttctactattttatttactagctttgtactcacactccctcatatcagatttctatgtaccattgatactttagattaaagacctgaccagtgtccaacaccgaaatgagtaatcacacctagactagtggttacattcaatcacttctgttttctcaaattattatcattgtttatgtgtcatgttcgtgtctatgtcatatttggatgcatttttccatatggaaaatttctgtaatttcaccatgtttaatatactctatgttgcttttggggttgcaaggaatttttttcctgcagtctgcatatagtattgttacttattgtgaatttataatagctctctgtttctcaagcctctggttctattatgggcctctatgtgactgaaagctgattgcggtgataaagtttggtttatttcacaacttcatgggaaaacacacacttatacactatggaagacattgtaatgcttatatcttaaccctcctttttatatgaaacaaccctccaatctcttcacacattcagcaatgagaccccttaataccattagcggaagtcaaacgcaaaataagccatagaaagtactgtttctcatatcaaattaaacagaaaataaagaaatttacctttaaatatgagcatggcactccaatcatatagaacaagtaacatcttaagtaggaacatgtataaggtgatccccctcccgcataccaaagtttctaaacttaaacctagtaaacatataccaacttgtttatgaaaatttgttactacctttcaggttttgttgaatatattatccacccgtggagttct

SEQ ID NO: 34353 - DNA, 497 bp, Medicago truncatula
  Intron number 1 from transcript Medtr4g136040.1 (locus Med tr4g136040) derived from phytozome v7.0 (chr-ID MtChr4; po s 33157722 to 33158218 reverse strand)
gttgcaagatattactcacatctacaagtgtggaggttttatccaatcaaatgaaggctcataaattgattcaattatcagagacatgacatgattctcttcaaactaaagtgtttgaagcagagttgataaaaatttgaagtccaaacatgcacatcatatacaaaactaagattttgttttttctgtcaaatgcttgtgcttgaaatctatgatatgaataatatctgttattcaaattgattagttattaatttaatttctatatttagtctagtcttgtaaataacgtcatctgggagaaggaactgttttcctcacttaaacaacaccgttttcattttagcccacttgtttattcatttactaatgtaaattgaaattttgtcaaatgaagctttctcacttctcgggtatcagatctaatgaaattttatctgaacttttgatatttgattgtagactctcagcaaacaaagggcaaacagaactaagat

SEQ ID NO: 34354 - DNA, 913 bp, Medicago truncatula
  Intron number 1 from transcript Medtr1g042850.1 (locus Med tr1g042850) derived from phytozome v7.0 (chr-ID MtChr1; po s 9957948 to 9958860)
agacccagttcgtgttcttgtcactggtgccgcaggtactcctttcatcactttaaactattatttgttttcatcgcccatgttttaatcttaatgtttttacatttttattcgagatctatgatccaaccatgttcctctgatgatttttctgattttaaataatgggttcgtttcaaaatgttgtctttgttttgtttcgatcttgatctgttcatgggttcggatctgatcatgtgatgaatgacgatgatgttttgtgtttatttatttcattgttattatgctgttatttgtgtagtttttattgatcagtgttctatttttgaatctttcatatgtagctgttaattgattgattgatctatctatatatgtattttaatgaaagattcaatttggtctctcacaattttctctcgatccaatttagtccccgacacaaaataaacccaccttagtcaccttttttatatcgaggacaaattaatccacgaatcattatgacagatggacttatttgtccccggtataaatgttaggactagtttggatttaatttttttgtaggggacttaattggcctgagaaaattgcgagggatcaaattgagtctttactcatgtattttctaaattttcttaattcattttatggatcttcaatctagcctgtccaaattttatgtgtagtgggtttacattgttgaatttgtgatatggcctgaataagaaagttgcatgttcataattgaaaatgtagtgactactgaatttaatctgcggcttataatgctgttgatttactttaatctagaccgtctaattttgatctaacggcatgaagggaatctgggtcggttgatttttctgtactgatataatgttctatcaaatttcagggcaaattggtt

SEQ ID NO: 34355 - DNA, 381 bp, Medicago truncatula
  Intron number 1 from transcript Medtr4g147150.1 (locus Med tr4g147150) derived from phytozome v7.0 (chr-ID MtChr4; po s 36841642 to 36842022 reverse strand)
tcatctggtaaccatatttactttttctgtttaatctctactattactactgttttttttttatgagaatgaaagggcgttgaatttaatttgacttggtagtagttgaagtgaaccacatcacatgttgttaatagtatattctctaaccatgctttattataaaagttggaatttgggacaattgatttgttctgtattgagaagaaaatttattttaagttagtacactgtagaattctcatcaaagcagaaataggaattattcttttctgctactatgataaaaaaaaaaattgttggaaaagtgggggaaaatgataggaaggttttgacttctaattgaattatcaattataattgttgcctcaggttacgaat

SEQ ID NO: 34356 - DNA, 1011 bp, Medicago truncatula
  Intron number 1 from transcript Medtr6g028090.1 (locus Med tr6g028090) derived from phytozome v7.0 (chr-ID MtChr6; po s 6283995 to 6285005)
aactcagaacaaaggtaaagaacaaaactgaaaggaatgatctacgagagtttaagtttttttttttaactgaataagtgatgattttttgacttaatttagatttttttaagtgaataagtgatgaatttttggcttaatttaaattttagccaaaaatgtattgtgagtgtgcgattttggctctccattttttagtgatttgacctcttatattttcttctttgggattcgataatctccatattttcttcttaatttgtgatcaaaattctgctcttctcccatcaaaaattgctcgctcctaaccaaactttcgaaaatatctctacttaaatcatgcaacctacgtgagttaactcgtgcaggatttataactagtgtgacttaagtcacgcagtggtaattacgtcttttcaattgggagcttgcaaaatcagttgggagaatagcagaattcttgtgatcgagggttgtttggattgagcctggggtgtgcccatataagctctacacaaaaaagtaagtctattatttttcccatcctattagttactcacgcgtcctattttttccctttaaaattaccctttgcttgacaaatacaatctaaaccgcatttcggattctatttgtcgaactgctcttaaattcgtcatgaatccaaatgtatgtaaatatacgattcggattgtaataaccaaacttgaaggggaggaatgtttgagtttctataatctgaaatcttccaatacataggtttgccccgaacctaacaaaaggtcaccacctttttgactaaacactccttatatctccaaaaagacaccattttaaacgaaaacgtgatttgaagtggaaatctggtcatcaaaagggcgttttgcatattagttcgaattttacaagccgaactcctaacaatctagttcaacttctataatctgaattgagttagtacaaaaaaagctcagttttcctaactttgtttttgcattgtttcagttatag

SEQ ID NO: 34357 - DNA, 816 bp, Medicago truncatula
  Intron number 1 from transcript Medtr5g102980.1 (locus Med tr5g102980) derived from phytozome v7.0 (chr-ID MtChr5; po s 41250391 to 41251206)
tgtgagtttcaatagctatttgtcatttcgtctacctaaaaaaatctatatatttatctctacttctcctttaatttgtatcggttacgtgtatttcataaatacataaatcaaaccgcatggtatttttttatcaaagttttgatgtaaatatatatttaggctaatttttttatctcatgtgcaaccaaatcaaccttaaaggacttattccataagtttaatcatgattggtttcttgaatttggtaattgattggaacataatgtatcaaacgatgatatgttttgtttatatatatatatatatatatatatatatatatgttattatcttatgagattggcatttcgtggtgatgatgaatgggtgctttcaaaaagaagagatatatatttttgaaaaagacatcgagagattggtaaattgtgagaatctcaaaccagtgtaaccttgcgagcaaatcacatgttctccctatgaaatttaaatttgcacataagaacaaaaaataaagttccgattttgaatgacgccaggcaacatagtcactctattaatttgtaatgactattttttgtagtaaatataactcagggactattttatagtaaatataattcaaggactaatttttgcttaatgaggttttcatttctttttcatcacctaacattccatttctgttcgttatgtaagtgtggtaaaaaaattatttgatcttaactaagtaaaaatgctgaaaaaacaaaaatttaaagtgaaaaacaaacttttctagcaacggttgaagccttcgtagtcgtcaccggaacc

SEQ ID NO: 34358 - DNA, 820 bp, Medicago truncatula
  Intron number 1 from transcript Medtr1g093540.1 (locus Med tr1g093540) derived from phytozome v7.0 (chr-ID MtChr1; po s 19068736 to 19069555 reverse strand)
aacagtggttgtctcttcctgaaagtaatcgattggtaatgtttcattcaattttcaaactttcgtattgctacattgcgtattttatttcttagaattttttttatacatgcatgtgtgtgcatgaattgattagaaattgttggtgatgctgaaaggggtgagatattaattgtggttattaagaaatgattgtttggaatttagttaattaaggtttgtgggaaatatgcatcatttttacattaaagttaactaattgacataattgtaaggagagtgataagacgattaggttgattaggacatatgggttagggtgataactattttgtggtttccgaaaaaataactaaacaaataacatttatcggtaaaaaaatcgatagaatagtaatgtcaacgtggaatgctgttgccacatcagctcaaaatttgctaattagatatttgaggtttttatagctctcgaaaagcttcatgagaattatgactttgatgtgattctgcttttatcttaagcatatattaaatagtagttagtttcatctgttatagttcttgctcttctgaggatttctgctgccaattcttgtaaatcatgcctacttgcgagttgtgtaaatgagtgagctcctggtgatacttgaaatgtaatgctgaattgctgggttacaatgccataccatttgtgcctttttttgggtttcctttaatgtttaagttgctccttttgattactctacaaaatataacatatggatttgggatcctgttttaatgcttcctttgttcattgtgtaggtaacatcgttgctca

SEQ ID NO: 34359 - DNA, 768 bp, Medicago truncatula
  Intron number 1 from transcript Medtr1g125970.1 (locus Med tr1g125970) derived from phytozome v7.0 (chr-ID MtChr1; po s 27984553 to 27985320)
caagatactctctccgccttccgtctcctcccacagtacgttctttctccaatttttctatatatttattcaatttaaacatattattatggtttcattcataatacaaataatatgaatttatgttttcttgaagcttggattatgtaattttttttcccttttagatattttgttgattatgttatcattgttagcttgagataaataagcatataccctagcgcagcagatatgaatcatttaccattgtttagctgcaaccatataggataattttcatgtgccaatggaaggtttatgctttttattgactatgctatagatgaaaccatgaaatgtgatttatgtattttcttagtggaaacaaatgtctctgacaaattttaatcaatgttaatttgatactaaggccttgttaggatatacaacttaattaagaacttataacataatcgcttatcatataattgcgtatgtatagcttatttttatagcaaaagataaaataaagtcactgttttcaaataagttataagttgttttcataatctatcctgaagaggttgtggaaataagctgaaaaaacttatggacatgtcgtaaactgttaccataatctctctcccaaacagtctcacaagtgtttgtgttagttatagataaactcaaaagatcaatttaaacaagcactaatttagcatctaagtgcagtctttcgaggatccttttgtctaattatttttgttgattccctctaattctaga

SEQ ID NO: 34360 - DNA, 836 bp, Medicago truncatula
  Intron number 3 from transcript Medtr2g005300.1 (locus Med tr2g005300) derived from phytozome v7.0 (chr-ID MtChr2; po s 164797 to 165632)
gtcgctacttcgctggtaaacaggtattgtgttcctttctcttgtttgtgccagatgaatatcttgaatgttgccagtacaattggatgaatttcaataaaccatagttgtcaatttcttgcttatggagtggcctttggttgctgcaaacttcaataggcaatgtcatgattttcagtagcagtagttacagccagtagcatactagtattgcagaacaaattggtcattgaagccactatctttcacatgggaaaaagcccaatttactttcttgctgtgttgtttctgtctgagaaaaaacaaacatggaatttcaattaacacaaacccttgcctatttcttttccaccaatgcctgctcgtattttccctgccaactctggtggttttctacaatccactgctctccaacttcatgcatcaaagcattgcttgatctctgttcttttctctccaactgtgctgatgtcaagcccagtctgttttttagtcttcgttttgttggggtctgttgctctgtgttgtggtctggggttgatcactatgtatgagagctctaagtggaaagatgattctcgtttggaaatttgcttgggactttgtccctgccgttttagcttacttactaatttcttgattttctacttatgtcctgtgacttatgatatatctaaggaaagcatgaagaagtatttgatttttaagttggcagatagaatattttgggattttatgttcagtgtacagaatacatgaaatttagtgacattgttcaaatttttatctggctgtggtttatggcaggtgagctgtaaatttgttaatttaacaag

SEQ ID NO: 34361 - DNA, 337 bp, Medicago truncatula
  Intron number 2 from transcript Medtr4g079810.1 (locus Med tr4g079810) derived from phytozome v7.0 (chr-ID MtChr4; po s 16158817 to 16159153 reverse strand)
cttcaaacaaaacaggtttgtgaaagaaaaaataattgatattgaacattttatttatttccttgaatgtgatctttcttctgtcaatgtattgcacatttatgaaatatttaatttataaatcgaaccgaccattatattggttaaaccttaaagctatcattttcgatctggtttgaacagtttaaatttgttgatccatgactagaatgtttagtagtttgcctttttaaaactttgatttgtgtggtgataattttaagttattaacatttgctaattatgtttataatattgtttaggtcgtagctataaagcgacgtgactcaaacggtgt

SEQ ID NO: 34362 - DNA, 797 bp, Medicago truncatula
  Intron number 3 from transcript Medtr1g046110.1 (locus Med tr1g046110) derived from phytozome v7.0 (chr-ID MtChr1; po s 10667555 to 10668351)
gaaacgagagattgaaaatcagacagttgatttgaatatagatatccaattccgccaccggtttttagttatcataatcaaacaaacttaccgaatttggaaaacaacgaaatcagcctgttattttgtgctaacaaatagctagtttcttaaaattggttttagatatagtttttggttggggctgggaagtggttcacccctactagtaattcattgaatacattgtctgattcacgtggatgaaaaagaactagttgaaaagacccttgaattcagttaaaatgaaaaagacatttgaaaacttatgttgtgattgtggtgtcactatgtagactagagactgattcattgaaaattttagttcagttggcttttcatttaagtagctttcttcatgttatctctcttatttttgtagatttgtcctgcaaagacactgacccatgtatacttggtcagttcaggctttacttattgtttggttaagcaataccttctttcttgtcatttaatgtattaatagaaaatagtgaatcataccatttccgaaggaaaatgaagaagtttgagatggacttaaggtatgctattcagtcacttcacacttaaaactctaatttttccttctgaatgttgtggcctttcttctggggaagttcaatctttggggcagtttgatttttggagtgttgtttttttcttctttgccttggtagtatgttttaagttatttcttgttaagtacttgataaatttgtattaacaattagaagttcaggtactgcaaccaaaat

SEQ ID NO: 34363 - DNA, 604 bp, Medicago truncatula
  Intron number 2 from transcript Medtr3g150290.1 (locus Med tr3g150290) derived from phytozome v7.0 (chr-ID MtChr3; po s 39560567 to 39561170 reverse strand)
atttctcaggttcatatttgaacttcattttggagtgcttttgtgttgcagtatttttttttttttaattaaatgcaaataccccctttcaactattactatctggcaaatagcccagtgtggtctcaattttggcaattaatgtgtttgaactttcaattttgaacatctcacaaagtcctcatagcaaaagtgagtaaatatagaaaactttaattgaaatatggtttaccaaaattcaacagaaagttaaacaaaatgtatacttacaatttgtccaactttcacagtttctttctcatcttaattgtcggtggcttgttgaaagtttaaacatgtaaagtagaaaatttaatgctactgggggctatttgtcaaggttcaaagtttaagggaaactattttcatttttaccttttttttaactacattgcagtttaggattttaatgtttatactacagacttttcaattaattttccttttcaaaagaaaacttgaagagtgaagacgctgtcacatgaatccatttgttatcatacatgctgccactgaaatctgaatagaaaattaaaattttgttatgaatgaccagggaacaccg

SEQ ID NO: 34364 - DNA, 799 bp, Medicago truncatula
  Intron number 1 from transcript Medtr5g097100.1 (locus Med tr5g097100) derived from phytozome v7.0 (chr-ID MtChr5; po s 38678282 to 38679080 reverse strand)
gagttactgctgcaagtgcttatttactgaacaatgttcctctaatcccttcaagaatttgagtcacatgaattattcttgagattatttttttctgttctttcatgtattatactctatcagtgcaatgcattgggaataatgtgattggatagtacatgattcaaaaggataaatagtttatattttcattatcgatttgagagttagtagagatatattttccttaagtctttctatccgaaatatataaatatacgttccatttgctatttcctctaaaccttttttcttttgtaatttgattaattaaaacatgtgattaaatcttttaagggctgtccattctagtcgtacctagtttaaaaaagtagtctctagagttgcgcgtcggagggtatccaagggcggatctagtgttactgttaggcatggtgtggagatctaatagaccgaaaagataatatatatcatataattggacaatgtttcacaaatcaatgcgtggtttggtggtagatagtcctttatctaaagtcacatccgtcaccgtttttaacttttttttaagaagaaaatcatattataaggagaaaatcatcaaaaatgtagtggatgggatttgagcccaagacatagagatgtaacaaacttgctttagccactttgctatagtactttttctatttgacttttgcattatatatatatatatatatatatatatgtctagatccgcccctgagggtattcaattgaaacaaaatggattaagtatatgctaaggaagacggtgaag

SEQ ID NO: 34365 - DNA, 450 bp, Medicago truncatula
  Intron number 2 from transcript Medtr3g114960.1 (locus Med tr3g114960) derived from phytozome v7.0 (chr-ID MtChr3; po s 29206237 to 29206686)
tcgacattgaagtttcaactagccgtgaccgttcggtagattatgatgcatataatatggcatgacctcctgagttttataatttatgtttagcagaacttgttactgaagtatttatttgggtttttgttagatttggttttcttttccgatatttcttgattgaatgataatgggactattgacattgttataatttgttaaaatgaatgtccttgcttagctgctaatgaaattgaaaagaaaatttctgtgtcagtttgatatagtgcacttgtcctgatcttgataaaaagatgagcatgaagtaaccatcttagtcaaaaactaaggaaaattgaaacaagacatttctaaatatttaacataggtattgtacttgattatatttgaaatttgatatcgaaatgaatgcttcactgttcctatatcagatttgtcctgtgtgtg

SEQ ID NO: 34366 - DNA, 910 bp, Medicago truncatula
  Intron number 1 from transcript Medtr3g102750.2 (locus Med tr3g102750) derived from phytozome v7.0 (chr-ID MtChr3; po s 25151018 to 25151927 reverse strand)
tttgttttatgtaatcatcgtttccatgcttttctataatccgatctgttacgatcgtaatgccactcatcggaaacatgttcttcatatgattgtgttctgtttcccctgaattctctgtttttttttcgtttcttttttccttttttttttttttttttttctggttgcgtattcagcaagtgttcttgttgaattgaatgaattaccttaattataattctctgatctaaaaaagtcacacaaaaaaataaataaaaattattttttttcaatcctctgtttttgggtgttcaaccatgaaaatggaggatgaattttctggtttgatttatgatttttactgtgatgatgttactttgatgaatcacgatgacttcacgtgattaaagtttttaactttgatcacaaataattgaaaaattcctttctttttttggaatatccaacacgttagaagaatgaaatactatacttctcctcaaagttttcatcttttgactcatcttcaaataccctttacttttttccgttttttcatgctttttattcatctgggtcatcatctaatatctaatcatagttttttgaaacgatcggtgatgattttctaatttggctcaggtttttgttttttgttttcctgatcctttatttttctttataatcctcctatgaaattggaggtttatgatttggtgggtctaaaatctaaatgcatgcctttttgtgcttgtagttcatgattaatgatgttatgatcaaccgataaatttgatcataaaattgagttttttttttttttttttccttttgtgtaactttgtgtcacataatgagtttatgttaaatgttaagtatgtttctctttgtaggtttgagacctgagatttgctagtgaattatattt

SEQ ID NO: 34367 - DNA, 401 bp, Medicago truncatula
  Intron number 1 from transcript Medtr4g096130.1 (locus Med tr4g096130) derived from phytozome v7.0 (chr-ID MtChr4; po s 20142729 to 20143129)
ggtttgcatcattttgttacactagagtaagaggggtaaatacatttacgttgatgattaatattgaaagtttttcgctagtgatcatgatttacttttctcagtatctacattttataaaagcaggggccttttagtccctccttaggggcctacaagtaccttctttttagtccctctttgtgtttgcttcctttaatttttgtcaaataacacaatagaggactacaagtgtaggagaagaaatgaaaatttgttctaaagtttgaacttttgtgttgaaatttgtttcatatatagcaaaagagttgagtaagacaagtacaaatttgttttccatgatatcatcttgatttgaatataagatttagcatggtatcattgtttatcttttcaggttg

SEQ ID NO: 34368 - DNA, 407 bp, Medicago truncatula
  Intron number 1 from transcript Medtr2g103880.1 (locus Med tr2g103880) derived from phytozome v7.0 (chr-ID MtChr2; po s 24347387 to 24347793 reverse strand)
gctctgctacgcctaacaccatttactactatcatgtttatcttgctcaccttcatgtctattttttttttcatttttcatttgcatttcaaacatatcatttcttccttcaaaaaaaaaaaacatattatttctttaaaagtagactatccatttgtatacataattatttatacacattaattcagagttttatcgaaagataagtagagtttggtcgttaagaattgtttcatttaataatcaaacttagactctcctaaacaatttgtattttaacgaaacttactatttatttttcttatataaaaatatactgattttataaattgtaaattaaaaatataatttctatttttgaaaaaaatacagtaacttgaagggaagattaggaaggttttcattga

SEQ ID NO: 34369 - DNA, 461 bp, Medicago truncatula
  Intron number 2 from transcript Medtr2g055900.1 (locus Med tr2g055900) derived from phytozome v7.0 (chr-ID MtChr2; po s 15071641 to 15072101)
aggttgttttaatcattcattcaactttactactttgttttttcttcattttttcttttgggtcattagggaaataagggattcacgtgtttattacaacagctttaataaaaatcacttttttatcccttttaagattattacatttgtatgttaagggtttttcttcaaaaaaataaaaaatcagaaaatatagtttttttagaggtgagagaaaatagatatcaaaagaggaggtagtgaaaatgcaatatcttgcaaattttaacagtggcttaggttgtttaacaatggttagtgatgtttgtttcactttttttcttttcatatgagcatttggtgagaaaatttatacagattctatagggtagctatgcaattcatgacggttttttgtatttattgtcttgttgcacgttgacttaggaagctgttgctcacctcgaagaaatcaagaaatc

SEQ ID NO: 34370 - DNA, 703 bp, Medicago truncatula
  Intron number 2 from transcript Medtr5g049630.1 (locus Med tr5g049630) derived from phytozome v7.0 (chr-ID MtChr5; po s 21294555 to 21295257 reverse strand)
gaaatagaagccagactacaaggtgttcttttccttcaagagtctctctccttgcattccttgttctttcttattaggcttagggtcttgttaacgagtgcccatgagccccatgggcactggttaaggaagccaaaagagaaaattttaatttaaaaatgacactttttaagcttttaatgcattgattacacaactttcaatgcaaatactaccatatttgattccttaaccagtgcctgagggcaccggttaacattttccttagaattaaacacacttttgacaccttaacttttaaaaagatgcgattttggcccactaacaaaaaaacaattttggcctcgcaactttttgtaaagataaggggtcagaagagtatattttccctaaacataggggtcacttttgccattttttttaaaagggggccaaaatcgctacttttgcaaacttaggtggtcaatagcgcgtttaagccttcttattaatgccatttgctttgctcatgattcctagttttgatactactacataattgataacctgcaacacacgtttttattgtattttcttttttattattacgtgttaagtttgtatttcatttcattcttagtttcatatatatatattttttaatttgctttttggaacgatcattacagggctctcatcactctctgagctaaagataaaagga

SEQ ID NO: 34371 - DNA, 541 bp, Medicago truncatula
  Intron number 4 from transcript Medtr7g064530.1 (locus Med tr7g064530) derived from phytozome v7.0 (chr-ID MtChr7; po s 13017410 to 13017950 reverse strand)
agaagcattctgaggctgctgcatcttacattgaggtgaccttatcatgtaacatctgtatttatttcgctagagtatgtttggaggggaggacttgtttttcttttctagcttaaggaagctataaatatctttttaaaaataaattaagtgtgattgaaatgttaaatgatcatgtatcatattattctgtaaattttttcaaaatctcacatatttatacgtagtcctcaaaaaccctcccatatatatagccttagttattttaaatattggaaggcgagccttgccgcaatgctaaggtttctgcgtagtgagtggaggttatgatttcaaatattggaaacagcctctctgcttgttggggggtaaggctatgtacatctaacctctccatactccacttggcgggaacctcgtgcactgggccgattttagtttttttgaatattggttggtagcaaactggatcttatatattaatatatgaatttgtatgttggtagacacagcaaacaaaggcgagagaacaacttcaaat

SEQ ID NO: 34372 - DNA, 659 bp, Medicago truncatula
  Intron number 1 from transcript Medtr7g064530.1 (locus Med tr7g064530) derived from phytozome v7.0 (chr-ID MtChr7; po s 13018530 to 13019188 reverse strand)
actttcatcatctgcactcaaattcataaataaaggttctctttttatttcttctcttgaaattgggtcctaccctcgtagttgattttgcttaattttgtgttttcatggttttagttgtgtttttgtatcatggggtggtgatttgaggtttgatccaaggagcttcttgtatgtttttcttttttcttgtacaattgtgaaagatggtgttgattttttttttaattaattgtgaaagttgttattgtttgtataattgtgatagtttatgttaatctttgtgtaaaatttaaagttgatgataatttttgtgaaagttgatgatggtttttgtgtaattggtgaaatttgatgttagtttttgtgaaagttgacgataatttttgtataattttgaaagttaatgttaatttttgtgtaattgtgaaaggatggttagaatttaagggaatcagaggtgaaagaaacagaatttgggatttagtctatgaaaatgagaaagaaaattgtttggattttaattatttttattatggttgattttcctgtttaatggcatctacaattatgattgattttcatgtttaaagtcttataaaactaaattttatttctttgcagagaataccattataccacaaggttctttgaagttg

SEQ ID NO: 34373 - DNA, 805 bp, Medicago truncatula
  Intron number 2 from transcript Medtr1g089780.1 (locus Med tr1g089780) derived from phytozome v7.0 (chr-ID MtChr1; po s 17981476 to 17982280 reverse strand)
ttggtatgtttcatttcactttctttttttggattcttgcaatctagtatactgtcctttctttttcaatctcactgtgacaaagactatcacaaatgtttacaacacaaacaacgttgttatgctaaatgctagtagataagatgtgcttcttcaaaatgatagtctcaaaaatcaactggtgtattagtcaaaaggaagaaaaagtagtgtaggaaagtcgtaaggaaaaagtaacatataaatgtaggtggcatttcacatgggagagtataaaaccttcccaccattatatatataccatggaacaattcactttaaccattatatatacacacttttttttttgtcaaaatatataaacacatatacacatcaaaagaatcaaattgtatagatataattcaactcatttttctaacaagattaattttctgcccgaatttatttaattcgtgaaatcaagtccaacatgaatttagtctcgaactagtttaaaattggctcgtttatcatctaatgttctaccatcttcatattttgatccaattgatatttgcgaatgcaatgaggtcatgttaggagtcccatattgaatagataaaatgttcagtgtggtacttaagccatggagttcttccacttgatggattagtctttttaatttaataaatatgctcaagtcctaacaatttgtgctatcattgagagttgtgtaaggaaaatggctaccgatatgttgattaagatgctccattgaatacatataggtgagggaagtcaccataaaaaaacggctatcacc

SEQ ID NO: 34374 - DNA, 948 bp, Medicago truncatula
  Intron number 1 from transcript Medtr3g133390.1 (locus Med tr3g133390) derived from phytozome v7.0 (chr-ID MtChr3; po s 33793541 to 33794488 reverse strand)
gcctagaggagatcaaaaacgagaacgttgatctggtatatacataattacatatttttactctttcttcttttgtgtttgcattttctgtacggtttgaatatgattattcgtttcattgagcaacaaaattgagacagtaattcacagcactacttatatagtaattttcattccatttgagtaatgaacatgctaatatttcaatttaatttttttaatacctaaattttacattaacgaaaacttgatgagctaattattttcacacataatcacagcactttgttatatagattatataggtaggaagggcgtggcgtgttcttgtgttttggcgcgtcaatagaaattccttttaagttactgttacttacttactactactatactacgctaacttactttttaagttcttgttattcattattatgtgaccatgtttctatattttgctatttattaaataaaaagatacaaaaagtcaaaattattgctaaacatttttcatttattctaaataatttgtcaaaaattaacaatatcacattaaacaaggatatagaagcaatattttaaaaatcaaaccggtgctttcaatttatattataaaaaatctcacctcaccatccaattttctatttgatttttaaaatattggatgttagtttctttattggccattttttgaacttttcatttcatccctaggttgtatgtatgtccttgaaaccattctttgtccagagaaactcttgtgtgattgtaagtaagatttggacactctgacaaaagtaaataaaaaataaaaattataaataatttctgtgaaaatgtttgtttgattctttagcaacttgaattcatgattttcacaaccaaaacaaaacattgaaacagcgttgtttttcaggaacgaattccagtagaggaagtgttcgagcaact

SEQ ID NO: 34375 - DNA, 669 bp, Medicago truncatula
  Intron number 2 from transcript Medtr1g059520.1 (locus Med tr1g059520) derived from phytozome v7.0 (chr-ID MtChr1; po s 11622938 to 11623606 reverse strand)
tgttaaagagcttcctgataaggtttttgttcactgtaagaatcatttttctctttgatttgttttctagaatgatttcttgatcatagtcaaatcaatagtttgttgctgttgtttgaaattatttgatttatgtcattacttttttcatttgaaccagttgaattttggcaattgtatgtccattttttctctcattcggaatttcatacttaaaatctactttagtaatctaattttttcaatgattaagtaatctaattcatacttggtgcaattgtagtttaaggtgatgagaaatttgaaatcttgtcattgacattaataacatgtttgtcgtttactagttaaaaaaatcttacattattttgacggaattcgacagcctttgcaatagaaccttgtatttatttgttagaatgagtacaaacatcaatttttttgtggtttaatgacaacctagtttacaagctttggacttccttcttcttgaggaggcttgatttctttgcttattttttacaatatctgagttattattgaccaatagaaaggactctgttttcctatacatcacttatgaatattttatcaaggctgtacaaattgataaattttgtatgtaattttaaatttttctcatcttctttcactcaggtagcgaacgaa

SEQ ID NO: 34376 - DNA, 337 bp, Medicago truncatula
  Intron number 1 from transcript Medtr5g036700.1 (locus Med tr5g036700) derived from phytozome v7.0 (chr-ID MtChr5; po s 15355661 to 15355997 reverse strand)
tgtttgtcaatacatttgaagctttagaagcagaggtacaaattcttagcattttattactctttccgatcatatttataagcaaaaaacaagtttgtagaaacattgaataattatcgtatcgggttatatttacagatcatataaataactattcaatgtatctaaaaagttatttttttcttataaatgtgaccggttttccatccatgactaaaatatttgatatttggttaatttttatggaccaatctttctcttatgaattttagttgacgatgaattgatgattaacaattttctttttgtattgaaggttgtgaaagggctaactgag

SEQ ID NO: 34377 - DNA, 665 bp, Medicago truncatula
  Intron number 1 from transcript Medtr2g056730.1 (locus Med tr2g056730) derived from phytozome v7.0 (chr-ID MtChr2; po s 15581642 to 15582306)
gacgtggcactgtcagcctttacttcaaagctaaggtagttaaactgaaatcccaactaattaactgtttgtgcttcattctgttatgttatgttatgctatgctgggaattgactgttatgccctctgatatatttggagaagtactcttgatgtgaaaatgttatacaaatttgtcacaatttagaagatattttatttttattttgttatgtttcagatataagataatggtttgaattgcggtcatgtcgtgaatcgcgatctttgatgtttagaataaatcaagatcaaatatgactgatgcgactttaatttgaaccacttattaaccggcaaaaatcttgatattgcgatccaaattgcttgatatcaaattgctttggtggatccgactcctctaaaaaaatcacttgtgtgtttgtttagtaacgaatatcaaacattgataaataaactaatatatgctgtttgatatcatatgcacatgcataacaaattatagacatattaaaatatcaacacatgattttctatttaatggttgaaattacttatttacacttagcttactttggaagagccaaatccaaatctcctagttattgctattctaaggtttctttaatgatgttacattacaggccaatcaaagttccatataa

SEQ ID NO: 34378 - DNA, 808 bp, Medicago truncatula
  Intron number 1 from transcript Medtr1g132960.1 (locus Med tr1g132960) derived from phytozome v7.0 (chr-ID MtChr1; po s 29832106 to 29832913)
ttgataagtttgccaatcactttttactcaagtttgtcaggccttgcttcttcatgtactccacaatgtctaatattgctttagtcaaatgttgagcccttgaccctatttgattgagttttgcccatcactttcgactcaaatttctcaagtttgtcgtgcatttgattaagttggtcaattaactccaacttgaatcgatccggtttgatcttatgtttttctttagaatcgttagtcattagagatctcttatctcttttaacatcaaggtgtttaatttcaaaattaaatccgaatgtccttcaaacaatttctccatttttgatgtggcactttcttgatcaattcttagagccttgaaatcatacaatttgtatattttagatatttcaaaaaaaaaaaaaattatttttttttctaatcgatttaattaattttatttggaaactaaatttgttgacttcttcaatgttaacacgtttctcttttgcaaaatttgtgtaaacttcttttgaaataatctacctatttaataggcgatatttgttaagcttaattggttttttaatgtgctaaatgaaattgacttggtgtacacacatgtgtaattctgttgtggaaaatctgaacgtgtgctcaattttaaaaataattttctcatatttaataaatatattatattgccttttatggaggagaaacggttatccaacggaaaaatatattctttctatatattataaaaaacgttgcttttcattttaacatagaaaagaaaaatactttgctcttcctttcttcattc

SEQ ID NO: 34379 - DNA, 801 bp, Medicago truncatula
  Intron number 2 from transcript Medtr3g128300.1 (locus Med tr3g128300) derived from phytozome v7.0 (chr-ID MtChr3; po s 32831704 to 32832504)
ggagtttttgccacttggatcttgatatcgtactggtgtttgatccattcgccgaaattaaaccctaactgttcttcgcaatgttcacttttcatatttttgtaacctggtttcgtgctcgtacgccggttcactgggttacgtccgtgattagtgaattcttgttaagatagattatggttgatcactaggtctgatttatattgttgtattcttgtttgggttgtatctagtgtaatgtcacccaaatccatagttttaaaactcggctcggtcatcgactcggcaggggtattgggtcactgggttaatggtcgaaccactgggtcactggttgaaccgcatgtctgaatcggattaaaccggataactcggttagatgactcggtcttaagattaaatttttataactatttaaccagattaaatcgaattgaaccggtgactcggtcacctcaaaactaaaaatctaacatataatatgtatatttgtatatctatattttttttaaaagtataactatattttgttgacaacaaatagatgcatatcaactaatattaatataataaatagattttctacaaaaacatatgacatgtatattgtttttaggggagagatgatatgtatattactagtattagtattattgttattatatttaataatgatgtgttcttcttgaaagaaaaaaaaaactatttgttccttcaattttaataaaagatgtgttatacttaaatatatataataaattacagttgttaacatgatcaattagttgtcgcagtggttaa

SEQ ID NO: 34380 - DNA, 677 bp, Medicago truncatula
  Intron number 2 from transcript Medtr4g024770.1 (locus Med tr4g024770) derived from phytozome v7.0 (chr-ID MtChr4; po s 5721810 to 5722486)
cttgttcagaaaaaggttttttttttttttggtttaaatttattcttaatccctacaaatttactatttttttttattttatttcgtaaattttttgtacgagtgaatacccaatttggtctctcacaccaatttagtatccaacaaaaaaatattaccaaactagtgtatgctattttcaaattgcggataaattagtctttatgttataacgagttgaggactaatttgtcctctgtataaaaatgttagggactaatttaggtattattttttgtaaggggctacattgagctgcgaaagaaaattgtgatgaaattgtatcttttagtttttagtcactgcaaatacaaaatttgtttatattgaaattggtcactgttaaattcatttgagtctttattttaagggactaaaatcaaatattctacacggacaaataccaatactagtaaattttgaagggactaaaacaataaggatcaaaagaaaaaattagtctatttgcagggacaaaaaatattgaaacctattatttttaagttgttattattctaatcttctgtttggttttatttactaagagcttcaatactaacatgatcttttttttttttttaatttttattctttttatgtttgtttgtataataatgtgcagttgatttataacaaat

SEQ ID NO: 34381 - DNA, 682 bp, Medicago truncatula
  Intron number 1 from transcript Medtr5g025330.1 (locus Med tr5g025330) derived from phytozome v7.0 (chr-ID MtChr5; po s 10131111 to 10131792)
agcacctttgctgcaggttcctttttttttttttacgaaaatttggtgcatgttccttagacctttgacacgttaattagtttttcttttcttttattggggttgtcctacatgcacccaagattccttaataattttacacagttacatagctaagttacgatttcaatgcattaaaaaacacctaacaatacaatattattctccatatcattgtacggggagagaagtcaaaataattttgaaaataataaaatgttgagataaggttgtggagggtaaagattgttgattaattgaaactttttggtccgtgaacttccatttaactaggtagtaattaattaattttttttcaaatattgccgttgagtggtggaaagagttacaacagggagtgagtgttagaaaaagtgtgttaaaatgatgttgctagcattgctttgttattaataaactcactcattttgtcatctaaaaaacaacaccaaagtaatattatgttgaaaatctctgaataagtagctcaatcaaatggagggaatattattatgtagagggtttaaggcttaatatgtgctactaacaaatctttatcccttaacaaaattaatcaataataattttccttgtaaaaaaaacatgtttcacaattaatcaggtgttgtattttggagtggtg

SEQ ID NO: 34382 - DNA, 396 bp, Medicago truncatula
  Intron number 1 from transcript Medtr3g137490.1 (locus Med tr3g137490) derived from phytozome v7.0 (chr-ID MtChr3; po s 34871846 to 34872241)
ttggtctgcttcttcgacctctttcaattgtgttattgtctcatgttatcagtgttgtaactttaacgcatgtaggtaaattttgcattctatcttcgttggattgattgttaaatagtctgatgtaataatttgttgagtcaccttgctctgcataatccctaatttgatatagggggcatattaaatgagaaaacatattttatatcgaaagtgagaggagcaattttcatccatcaaatcaaattgactggtttaagaattaagatatataatcacattgtgccaatgtttcctccttatcgtgtttactttttttctctttttccatgttttttgtactatctctattctctcatagacgaagataattctgaccgacataaccaccagtat

SEQ ID NO: 34383 - DNA, 943 bp, Medicago truncatula
  Intron number 2 from transcript Medtr1g142920.1 (locus Med tr1g142920) derived from phytozome v7.0 (chr-ID MtChr1; po s 31454833 to 31455775 reverse strand)
ggggctccgccacgtaattcttctaaaatggtttatagccccacttgtcgatgaactgaattatctaattagagtagcatttgtctgtgcacaaccatattgaggaaaggaaaaaaggccagttttctttatttattgaagtagcagttatcaataactgcaaggtagtggcagtttagacgagtatttcttttgcactgcaatctgtttgagaattgaagtgatcacaagtttacaacacaatcaatggcatttgctattatcactaatgtgggaaccaagtattaacgccgatcctgtaaacatgtatatggcaataggtatatgataagacatcgaacatttattataagccaaacttatgttaaactacagctgcagagacaggaaatatttcaagcaattttattgaaggtgaaagaacttagtgaatagaatgatgtggcactaactcttctaatgttgtctcatttcacacatcagttataagtataaaaatagggaatgtgtgcattacaaatgtagggaaggtgaaagaacttaaggcacaagttaaagttaatgaatcaaatgtagaaataatttattggaatgtgtgcattacatttaatctttaactttttaatgaattgaatgcacaaaattttagaaattatttattttttgggtttcttaacatgtgccctaagggcacaagttagcagtacccatagaaataatataatattactttccgttccctctaaactaaaaacatctcaataaaaacatcttatattcatcaagttggaatttaattggcgtatctttatttgaacactactataaaaacttgaggcacaacgattgtatctcaatatgtttaatagcagttgattttatccatgattgttattatatatcaaatgcaggaggcatagcttttggtctggacagattggtt

SEQ ID NO: 34384 - DNA, 695 bp, Medicago truncatula
  Intron number 1 from transcript Medtr4g155130.1 (locus Med tr4g155130) derived from phytozome v7.0 (chr-ID MtChr4; po s 38226141 to 38226835)
ggacactgccggccaagaaaggtgtctctctctctcttaatttgttcttttaatgttgttttgatcatatataatatcttggttgttccaatgatgaacgaaatccataatttctgaataaaattataattaagtttgttgttgttgagggaatcaatactgttcttttgttttgttttgttttccaaatggtgtttgaatttcaaagtggggtttgcgtaacctggaagaatgaatattcatctttttcttgttaagttaattagatagatagggtggtgggaagaagaatattttagcatttttataactgcactgcacagttaatccgtgatgataatttgacaattatatttataagagtgaatgccaattgaattgaattacgtgctggaacactgcttatttctttcaaaaacttaaggctgaattgcttaatctctttattggaaagtggaacctcaccttaatttcctcctttgatgtgggtgcttcttgtacctttttcccaacttactacttttaagctttctttttataaataaataaattggagaatgttaatgtttcaaaattattatttttttattaaaaaaaaagctttttctttgcaatccataaaaataattgcactatttttgcgtttgtgtacaatttcctttatcttttagttttcttttccttgcactttcatc

SEQ ID NO: 34385 - DNA, 918 bp, Medicago truncatula
  Intron number 1 from transcript Medtr3g076630.1 (locus Med tr3g076630) derived from phytozome v7.0 (chr-ID MtChr3; po s 17751453 to 17752370 reverse strand)
aaaatctctattaatctcactgaaggaatcaaagggtatcaaaaccaattttaaaacttcttcactcgtaaattcaaacaaatcgtaaagacaatttcatgtgataaatgctactgtccctgccaacgtacacacaatccattcaagattcttgctaatctgagacaatgtctctgtgttttagtggatgaatgaattaatagaaaagaaagtaaaaagaatcaaaaccaagttattatttatatgacttaatctaaaatttaatggttttcaaaagaaaattaatctaggattgaatgtttaattttcgttcagttctgttttagttttagatttgttttttgaaagcagaatgcatcttccattgtcatctggattaggatttttggctatttaatggctaaagggtttgtgagagagacattgaggagagagaatggttggagaagatagtgaggaaaaatttaactattgagagagcatgataagattgtgctcattatttaatcacatggttaaaatcaactgtcctatggtcgaaaagttttaccctttcccatgttaaatgtcacctttatttggggtcattagttttttgttggttggcttgtttgctttaattattgctactactaatcattagttctatacttgtttgctttgtccctttgtttaagtagtctgagtgacttttgtctaaccatccatttgtacttcactttccattttatttttttgtttacttaaaagttatatagtttagaaaatcaaatataacttttatttttcatccctttgtttacatcgaaatcaaatatatatttagtctttgaaaagataactttcttccctcttttgaataacaaatatatatatattggagggagaagactttatttgagattgcttctggtattg

SEQ ID NO: 34386 - DNA, 501 bp, Medicago truncatula
  Intron number 1 from transcript Medtr1g126930.1 (locus Med tr1g126930) derived from phytozome v7.0 (chr-ID MtChr1; po s 28405006 to 28405506 reverse strand)
cagatgtcataaactctgtcgtgcttcaggcaagttatcaaaatctattttgtttagttgaagaatccttgtcattcctttgaatatttttgcatctagcagaatgtgatgaatgttaaattaaagcttttgctggctaatttgaaatctatcatgtgccagtgagaaacaatttatggcggattttcacgaactttactgttttacacaagacaaatattttcctgaagtttattttatgtgatagcaacctaatggaaaaatgttcgattgttgttgttttattatgagagatagtaaaggatttgttcttatgaaaagtgtgttgcttacagttattatatacatgtgctcaaaataatttaaaattttagttaatttcaactgttgaggttaagtggcatgacaaacttctgcttatactccttacacttattcaagctgacctgactcatgctgaatcttgtactttgaagttaatcgctattttccttggttagg

SEQ ID NO: 34387 - DNA, 849 bp, Medicago truncatula
  Intron number 2 from transcript Medtr4g095580.1 (locus Med tr4g095580) derived from phytozome v7.0 (chr-ID MtChr4; po s 19917832 to 19918680)
aacttcaggtagcttttctgttttttttatatcattttctaatttacgccccttttctgcaactgaagcttcagattaaatgtatgtgtttggatgaatagcggctaaagcggcactataactctattgcataacataaattgaacaaaatgctattagcaatactctatttagtagtacaaaatattgtgaactagcggtgatagtggaaagaaacgaatatcttttgtgattcgcaattgacagcacttacaattagtcactttaattttctccaagttaataatggtgtatatgtgttagagtcagtacacctatagtagaaaagatggtagaaaatagacttaggtggtttgggcacttagagagaagacatgtgggtattgtagtaaggagagtagatcggatggaggggagtcaaatcactagaggtaggggaagacctagaaaaactataagagaaactgttatgaaggatctagagattaatgagttggtggaacccacttgggtttgcctggtggcattgtcttggggaccttggagctcctccacaccacaagatctcatgttcgattctccccagtgccaatttaggtgggctagtttagcttcttcaaaacaaaacaaaaattggtgaaagacatggtttttgaaagaacactatgttgtcgtttgattcatgtaatcagccccacttagtgggataaggcttggttgttgttgtgttgtgttagagttagtattgtatctggtgtacgtgcttgtgtgcttcataggtgaaattgaatctaattgttttttattgttgcagaaaaagctgggtccttcagtcttcaagatagcttg

SEQ ID NO: 34388 - DNA, 588 bp, Medicago truncatula
  Intron number 2 from transcript Medtr2g076900.1 (locus Med tr2g076900) derived from phytozome v7.0 (chr-ID MtChr2; po s 17524516 to 17525103 reverse strand)
atcaacatgtaagtgcttttaaacttatttattgtttgtctgttttggatgaaatggcacagttcatatactacttggatcttttcctgaaagtgtcgttttataactctgcagaattcgaatttatcttttatattttataaatttagaattacatattgtaacagtactaaatgagtaggcagaaattgaaacctgcatggtccataataaatgcttatgaagaagtatgcatgtttttgggttacaaaagaagtatgcatgttatttctgaatgtcttgagaaatatttcataaatttattttaaatcgtttaaaaccattttggatataaaggtgtttgcctagaagaaaagtgttttaccaaccctctcatcggtgatcactagtctcggaggaaatacttgtatttaccatgctatcgacgctatagagtgtgaaagtcaaatttatattaatacacacacagacaagaatccttttgaaagatttcaagaaacatttgtatggaatttattactttactgtggaattgacacgcttaaaaccctttcaggggcgtgaataggtctcagcagaagaaacaag

SEQ ID NO: 34389 - DNA, 537 bp, Medicago truncatula
  Intron number 2 from transcript Medtr3g087480.1 (locus Med tr3g087480) derived from phytozome v7.0 (chr-ID MtChr3; po s 20845244 to 20845780 reverse strand)
ctgcaagtgaagaagtctggaaaaattatctgaaggtatggcttaattgaattttagatacactcgattcagattattacttatgagattgattcaattgagaaattgagttttcggttcaggtgttaatttatttgaacctttctgtttgtaccttataataattctttcacgctcaatataacgtttcaagaatcttgtttgatttcctgtttgttatgctgttatctaatgtcttataacgttgtttgaaaagttccccaaactaaatgaatatttctaagtggtttgggaaaccaatctgttttgttctataggctatattgtattgatgatatatgaatatatcatttcaggtacatcccaaagctgcacagtttcaaaagaaagggtgtgacttcgcatgtaacctcggattgttctcttaccaagtgtgtggatgctctcgatgaactagaagacatttcagatgatgcttatggaaaagccttggaaaagtttaaggatcttggagggaaatgtttatcgccatgtcta

SEQ ID NO: 34390 - DNA, 429 bp, Medicago truncatula
  Intron number 2 from transcript Medtr1g047050.1 (locus Med tr1g047050) derived from phytozome v7.0 (chr-ID MtChr1; po s 11218450 to 11218878 reverse strand)
ccttgcacttggtaatgctttgttttgttattgtttaagtgatgaatttgtttttgtttttgttctaatgtaccttaaaatctatgtattggagagctaatttcttgtaacgtcttgtgtatctcatgtaaagactcattgatagtagattggagaactgctctctcccgcagacgtaggtcaatttaagccgaatagggtaaataattttggtgtgtttgtttctctactctctttatcttcttgttggattgatgattttcatttgcattacacatatgttctaaattttttctaggttgattccctatttgcttgttgttccactcttgttgaattcaaaacagtattagtgatgaaatccgcttttgatactaaatttgcatttgtgtagttggagtttgctggaagaactgatataccagttgc

SEQ ID NO: 34391 - DNA, 179 bp, Medicago truncatula
  Intron number 1 from transcript Medtr3g163810.1 (locus Med tr3g163810) derived from phytozome v7.0 (chr-ID MtChr3; po s 43114995 to 43115173)
gaggtagggtcttgcttgcttggccatccaacagagtctcagcctcattaacacatggtaatttttagttttaagtttcttttcttttcaatttagtcttttattttaatttgtttcgaaattttcattttgatctgtgtttaggttataaacctggctgcaatttgtactacagttga

SEQ ID NO: 34392 - DNA, 291 bp, Medicago truncatula
  Intron number 2 from transcript Medtr3g163810.1 (locus Med tr3g163810) derived from phytozome v7.0 (chr-ID MtChr3; po s 43115221 to 43115511)
cacttcctgtagtaagttatttcgaataaagtttgaattttcatgtgatttgttttattggtactaattatttttagttttggagtttgaaatcatgcctcgcaaaacctccagtctcatgttctttcgcctttatcaatacatctaaatgatatgattttctacattttgctttatgaaaatatgtttgctattttgatgtgttagtttcttttgttccagtaaaagattcttcaatatacaaaaatgttaatggtctctaatgaaattgcaggaggttaagactgaaca

SEQ ID NO: 34393 - DNA, 500 bp, Medicago truncatula
  Intron number 1 from transcript Medtr3g031330.1 (locus Med tr3g031330) derived from phytozome v7.0 (chr-ID MtChr3; po s 8802537 to 8803036)
tcttgctgattgtggatgtagattttcatttctttcttgttttgcaagtaatgtgtgtttttaccaagaaataaagtgcaaaatgtctttaaaaatgtgtcatgattcttggcttgcatgtgtcctatttgttcccacattatagctcaaaatcaaacccctttaacattgctataatgaggggattataggtcatgtgcatgtctaactgtcataaccaattttaggtatattttgccattttatttcatttcattacttttttcctcttgctattctattcaattttgtttacctttctactatttttatgccttatgatactaaccatttcatctcacatttcattcatcccatagtttagacatcatttttctattcatttctatatcaaatgggtttgtaataattttagatagattagttcctttttttaattccttgcaagaccatagcatgtatttaggactcaatgtaaaggactatggacactataagtg

SEQ ID NO: 34394 - DNA, 653 bp, Medicago truncatula
  Intron number 2 from transcript Medtr3g102960.1 (locus Med tr3g102960) derived from phytozome v7.0 (chr-ID MtChr3; po s 25241697 to 25242349 reverse strand)
ctgtcaggtttggtagtttccccttatatttttctttgattgaatatcaatttagtctgtgaaattgttgggtatgactcataatttacttataaatggacaagtcgcttctccgttggacttggccagttcgtttgttacgatatgactgggaggtgcggggactttgcccctcactatatggttcatagtaattttgtaatttgtaaccctaagattgaataatagaaagtcattgcagtcactctactgtcagagatgtgagaaaaattgtcagaattctatgatcaaatcatatgtgttctttgtttgcctttttcgtgtatgttatcttttgaaccagggtttctgttctaatagttactacgattgaacatctctggttatattaatcctattggatcaatgagtttagtccctaaaattgtctaacaaaaattaatgtaattaagagttttcaaattcagagattattttgaagtttcgctaattttagaaaccaagttgtttctgttctagagttttagagactaaattggtgattccctcatttattaacatcttccgtagttttttgctcaaaaatatcaaatatttggtactgtcggcttgatttatgtatataatgtgtatcaggtatccggaggatccat

SEQ ID NO: 34395 - DNA, 559 bp, Medicago truncatula
  Intron number 1 from transcript Medtr5g048580.1 (locus Med tr5g048580) derived from phytozome v7.0 (chr-ID MtChr5; po s 20541503 to 20542061 reverse strand)
tgtcttgtagcgaggacacactcagggtcgtggaggtagtggttgtacatttgtactttgtcaactcttcaatgaaggacaagcacccagtgcttttcaaatgaacgttggcacctcccttttgatccttcgctctcttagacgaggttaacttcaagagacagctcttttgagatttcagattgaatcttctgaacaactataacttctggtgatgatatagcttctgatgaactttgcttctgatgacttctgcttctgatgacatcatcacttcagaggcacttgaaacttcagaaacacttcataacttcagatgcagttttcttcagatgctttaggttcctcttcttgatggttcctttgctctcttttgttcttccaagacatattgaattgattaactttgtctttggtcctgtacacttgaacaaatattagcaataaccaattgacaatttttaataccttgttatcatcaaaactcattagggtttattgtaaaacacattttgttccaacaggttctaggtataaaagtttggtttgtgaaggattt

SEQ ID NO: 34396 - DNA, 524 bp, Medicago truncatula
  Intron number 1 from transcript Medtr2g009050.1 (locus Med tr2g009050) derived from phytozome v7.0 (chr-ID MtChr2; po s 1898844 to 1899367 reverse strand)
tgcattcccaatagaatccatacgcgtcctcacaggtatctgctattgaaatttttttcatacaatgataatttgatgcatgtattcggttaatgtttatttatttatttcatgctttctgtttgttttaattaatgaataacataagaaagaatttaaagctgcttctgaactacaatgtgataattcatactactagaatatgtcatagaagatggatattaagtagtcaattctttgatatcaagttatatttcatcatatcttcaatttttcatgtgtgataaagatacatagaaagtgctagaaacaaatgttagtaaacatggcatcaattagaaacatggtatttttttaaatatgaattagtaacatgctataatagccaactaattcctaatctataacttcctatatctctaataacagattttgtggtaatgattaaagataagagaatgatattattgtgaaacttgtaaaatgcagaagaacagaaagatctaaatttcctaccaactaag

SEQ ID NO: 34397 - DNA, 1017 bp, Medicago truncatula
  Intron number 3 from transcript Medtr2g007290.1 (locus Med tr2g007290) derived from phytozome v7.0 (chr-ID MtChr2; po s 1054799 to 1055815)
agcagagttgggaaaattatccagacgtgtgagtggtaagtttgttaacttcaattagaaatgccattattttgctttgtgtgttttagtcattccttcgtaggaaagccccttgaaacattgggccttggacattttccttttctaactccaaataagagttatacttatgggggctggaaattttttatttactttttaaaatgcttgtttttttggaaaaccctatagaataaaggtgttagggtgccctatattcgagctatcaaggatatgtatgaggggtctcgactagtgtgaggacacaatggagacactgaagattttcccataacaacaggattgcaccaaggttcaacactaagcccttatcttttcaccttcgttttggatgtacttacggaacacatccaagagcgagcaccaagatgtatgcttagtcctactaggagagttgaaggaagaattaaatgggaggttggagacaagccttagaaacatatggctttcgcttagttagaagcaagaccgagtttatggaatgtaattttagccagaggagaagcgttcctagcatagaggtgaaagttggagatcatatcctaccacaagttacacagtttaaatatgttggatctatagtccaagataagtggtagaaatggaggagtgcctcaggcgtttaatgtgatgcgaaagcaccgcttaatgttttttttaaccttttttttttttgaataaggcaaactagcccaccgaaattggcaccggggttttaccttttttatacttttttttatctctgcttcctaataagttttataacaataaagtaatctttgaaaatattaaattggagatttcaatctgctgtcatcatgtactaatatttatattggtcaacctattattaggatttcattgaggtgctgtttcattgaaacatttgtttatatttggcttttttaataactttattttctgcaggtggtcttgctgggcaatcttttatttctc

SEQ ID NO: 34398 - DNA, 578 bp, Medicago truncatula
  Intron number 2 from transcript Medtr4g154710.3 (locus Med tr4g154710) derived from phytozome v7.0 (chr-ID MtChr4; po s 38047103 to 38047680 reverse strand)
ttttggccaaagataatcaggccgtaagtcagaagatattattttattcatcacttgttttgtacctttttatttcgcacgctacattttataaccaaagttcttgtcaaacaaatgttctctccttgcattttgttatgaactcatgataccactgctccttttcattatttgtttattggggaaatcattctttgtgctaggagtaaaaatgagttgaatatatgtccaaccttattcaaaatgttttacattttcctttgatatcaagtttaataagcttattgaaaatatctcagtgactgattgaaaattctcaaacttgaagcatctgtgccctctgtgccccatgtatcaaccctgagagactgataaacattcagatgcccaaaaaaaaaaaaaaaccttataatgaaatatttctttcccgaaggtaggtatagatgactgaagttttaaacttgggtttgcagcatgatgtgtgtttacattgtttctcatataaaatgacatagaataattttacctctattgaatctgcagaagcggttagagtccctaacagaagcagagctaca

SEQ ID NO: 34399 - DNA, 672 bp, Medicago truncatula
  Intron number 1 from transcript Medtr2g021610.1 (locus Med tr2g021610) derived from phytozome v7.0 (chr-ID MtChr2; po s 5531651 to 5532322 reverse strand)
atttctcaagtttcatcagacagcttaatacctatgtaagcgcctttaatgtacttcatttcatggatttttaaattgttttgttatttcgttaatgtataatgtttttttttattgttttaatgttgtctttttttaatcatcaatctcggtaaagttttttgattgcttaaaatgtgttatgttttttgatttgattgtggcgttagaaaaacttatcatcgtggatttgttaattgttatataagtctgttttgattgatttatttgaacttatgtattttataggcacttgtaagactaatcgagagagcttatagaaaaacaactcataacatgtccataagttgttcggtttattttatttttgttgtgagatagcttatgatataaacactttattaagttgttgatccaatcaagctttgttcttttgttgttactgtattttcatcactgccaacttaataaaaaaaaacaataacaataacaacaaaaatcatataagtgtttatgctattagcacttaattaacttgctcatcgaaacaatgctttgatcttctgtttttatttttttttgctttttatcacccattaaggtttattgattgcttgaattgtcttatggtttttggtttgatcagggctttagaaaaattgatacacaact

SEQ ID NO: 34400 - DNA, 435 bp, Medicago truncatula
  Intron number 1 from transcript Medtr2g034760.1 (locus Med tr2g034760) derived from phytozome v7.0 (chr-ID MtChr2; po s 9749842 to 9750276 reverse strand)
caggtgtcactttctttaactggaaacaccataaggtaaggtagtactgttgtatgttgacccaaatttctcttataccgaacatattttttgagtgttataagaggtctcacttatgaccctaatcttaaatttggacccacactgaaatataatgatacaaagttattgatagttgatcaatgaatcttatttaagaaatttgaaatttgtgtgagatgttgagtttgagtacttattaaaaaaattataaatgagtgatgtgtacacacttatttctataccaaaagaaaaattgatatcttcattttggttgctctaagaaaccaaaatttaagttgtttttgaatcaatgttggtaaacttataatgtttttttttttaattacattttgtctttgcagattaacataattcacacacctggtcgtgttg

SEQ ID NO: 34401 - DNA, 448 bp, Medicago truncatula
  Intron number 1 from transcript Medtr1g093480.1 (locus Med tr1g093480) derived from phytozome v7.0 (chr-ID MtChr1; po s 19004633 to 19005080 reverse strand)
acttgtccaactaacaacattacttccgaccccaagtgttttctcgacaccaacataaccaaaaaccttattgttaatcctgattttattgaattgagacaatcatgatagcttatatttacagaaaattctttaatattgaacaaaccaaaccatgtttaagtttgaactgatttactattatatgaatttatgtatttaattctgtatttaactgtttcaaacttgttttcagagttgtcaaatatcacatcagtttcagatttaaaacgagaaaagtctcatacctgaatttttttattatgatattctttatttattttggtgccatgtacctattctattcattatatatacctgaatatagtgtacctcttctttatttattttggtgccctgtacatcatttgcaggtgccgaaggtcttacttttctccagctctgcaag

SEQ ID NO: 34402 - DNA, 466 bp, Medicago truncatula
  Intron number 2 from transcript Medtr3g039860.1 (locus Med tr3g039860) derived from phytozome v7.0 (chr-ID MtChr3; po s 10678637 to 10679102 reverse strand)
tacaataagtcaagccagaaagggcctgagattatgtatgtcaactgaaatttatactgcagacgtgattctgagtcatattctttattcctttttgcttcttgcttttctttaatattacgagattcttgaatttattttgattcttttctcgcttttcatgtaattaatcttgattataatgttgaaaatactaaggaacttcatgatggcaatactgtttgaaaatctaaaattggtcatgtgctttgatgttatatttatcacgtgatatgaaaattctagcatggaattgcagtataattattcaaggttcttgatgcggtggtttgttttcatcatcaagttatttgtttgtagatatgaccgcttaatcaattatatttcgttctttattatcaagttacagtgtattgttatatgtttctcagcattagaggaaccacaggtgttgagattgcatctg

SEQ ID NO: 34403 - DNA, 1039 bp, Medicago truncatula
  Intron number 1 from transcript Medtr5g101560.1 (locus Med tr5g101560) derived from phytozome v7.0 (chr-ID MtChr5; po s 40653184 to 40654222)
agaatttgcttcaacaaaggaccttctgctaatctgtatgcttattcttccaccgaacttcattatattgttttttagcattaaccctttttaatttcttcatttatttcgattcttagattaacataatatcaattatgcactaaattggagcaactcacaatcttattttaactgaagtaaccaaatacttattggctatggtaaattgttatataattctattttatatggatggttggattggattatctcgtaatggttttattttctaaaaaaaaattcacctttacttttttttttttttttttttggatttatgtatttccagtgccaaaactaaggagcctgtttagactgatttatttgagcttatctacttgcataaacacttgtgacattgtctggcagaacttatgaaaatagcttctgacatgttcgtaatctgttttcggcttattttcataagctctcaagaatgtctaatgataacaggttatagaaatagcatatttataagctgttacatgataattatgctaagagttggaaaataagctgtttatttcaatagggtctaagacaaaaatggttggactaattgatcataattgataagataactcttcaaatgttgtctaaagactttggttacacttcatggaaggaaatgattccatagatcacattatactttttaagaatatcttacagagaatcaaaataagtgcgttcattatctgacattaactgatagattacaattttttgcagagtaagtttctgggtgccaacttttaatgtttgttaaaaggctaatgaatgtctcttttacttgatttagattttatcgacatctttctgggcaggctttgttgtttagtaccttattttgttatgaattgtttatgaaaatgccaccttgttgtgtctcggttctccctctaaagagaagctccgtctttcaaagttcttttctctaatatcttattattctgttgcagatttcaccttactttggtccttacatcaacaatat

SEQ ID NO: 34404 - DNA, 509 bp, Medicago truncatula
  Intron number 2 from transcript Medtr3g138360.1 (locus Med tr3g138360) derived from phytozome v7.0 (chr-ID MtChr3; po s 35368722 to 35369230 reverse strand)
actggaaatctctcacacaggtcattaatttcatgtcattgacatgttttatgttggctattacctttcattgtggactattaatctaactgatgtaaacattgagcctgtcttctgaaggcagtattatcagttttaggatgtttgattctattttaacaacttaattaagcttttatagcataaacacttattatgtactcgtgtttatgtataatatatttctataacaaaagttaaaataaagccaaactgtttttatacactatcttgaagagcttatgaaaaataaggcgaaaacaacttattgacatgggagttgttttctataagctcgctcgaacagtctcttaagtgttaaacccactggataagctcaaacagttcaagtcaattcaaacagtttctaaatataatctactatcttttcaaccaatgatgcttgtttcatttcttatttcttgcttgctttaggtcaaagaagttggaatttatctttctggttgtcc

SEQ ID NO: 34405 - DNA, 258 bp, Medicago truncatula
  Intron number 1 from transcript Medtr2g110210.1 (locus Med tr2g110210) derived from phytozome v7.0 (chr-ID MtChr2; po s 25839497 to 25839754 reverse strand)
cagtatgtattacgtctccttcaagtatccaatatatatccaaatcaaaagagagtttcttagaaaaggataagtggtccactgatgggtctgtctgatccattattggatttattttaggcagccttgttctaaatgtgttattttttcttttcgcctgataccattgctaatatgtttatatatctacactgattggcatgtcttctttacacagtagctttgttcttatacttatcacgctcaactttttttagg

SEQ ID NO: 34406 - DNA, 553 bp, Medicago truncatula
  Intron number 1 from transcript Medtr6g014970.1 (locus Med tr6g014970) derived from phytozome v7.0 (chr-ID MtChr6; po s 3649274 to 3649826)
gacacgatttccatcactgttgtgtggaatagtgggtttaattgattttgatcaagtgtttgttgtttcaatttttgggtaacccagcaaactcataagaattgtgattaggggataattatttgtgtttttcttgaaattgattgagggcttccttaaattgatatctaccgatcttgtattccacaattctaagtaaacggctgcatgtagatagtgatcgaatcgggtcaaaatccgggttacttaacccatttgcaaggacgaacaaagaagatgaatattttcaagtttgattttttgtctcatatgggaggtgactcaggtgagtggtgagtgagagagatatggaggagagtgaataaaatattgtggtgagtgtctataataatattatggtctatatttgatctaatggtcaaaaaaatactttcccataatggaaaagaagtctcctttctcaaattaaaagccacctactagaatatatgacattaattgaacatttataaatcaaaactacaataatagatattttcatttattgtagcaa

SEQ ID NO: 34407 - DNA, 792 bp, Medicago truncatula
  Intron number 2 from transcript Medtr3g033590.1 (locus Med tr3g033590) derived from phytozome v7.0 (chr-ID MtChr3; po s 9088671 to 9089462 reverse strand)
tacattgcagattgtgtttcagcgtttggatcgatgttagtttcgttctttttcttcgattttttagggttaaatgtgtttttaattgcaatataattcacatttaggttttttcaattttagtctctattttgtatttgttgtagggtttatatttagttggacgagatttagtcttgacatacatagggctgtttgaattggcttattcgagcttatctactgacataagttgcgtgaaactgtttgagagaacttgtgaaaatagcttatgacattgttcataaactgttttcagcttattttcattgttagttttgtgagactgtttgggagaatttgtgaaaatagttaatgacattgttcataaactgttttcagcatattttcattaattcttcaagatagctaatgaaaacaacttataactcgtacaaacacaatttaaccttagtttatcttttgctatagaaacaatttatacataagcacttatatcatgataagtttttgtgcataagttgcaaattagttgtttctccccaacaggaccatatactaaaaatactttttttttgtaatctttatttaaaatcaaaattaaacttgaataattatgttttaggattaaacttaggaaggataaatttttatgaagattagagacatgtttaacattttttttttaaaatttaattttgttttctgtttttcctttattacgctgtcttgtgtgtctggcatgtcgattaaagtttgtttgtttgtttgattagtggatttggctactga

SEQ ID NO: 34408 - DNA, 433 bp, Medicago truncatula
  Intron number 1 from transcript Medtr1g093270.1 (locus Med tr1g093270) derived from phytozome v7.0 (chr-ID MtChr1; po s 18920638 to 18921070)
ggtccaaagaaagtaagatttgctgtcttgtcatcgacgacaagccttcatactatgtcatccttggcaaatattggatacacacaagcgagtatgtctcctatacgattcacctgagactcatgctctgagtaagaaacaaagtagaaattatcgaggatgatagtaatcccttttcgaagatagtaaaaaaaaattgaagttttcttctactcaccttatctgagccctatcaatgtttctaagaagtgtgaagaaggagcatatgaatcatgtaatcccactaattaagatttccaacttaaagcacatgctgatctatatccttttgacgaagtcctctataaataagtgttctttgataattccaaagtattttgatcgtttaatggttataggacattcaaaccaggggaaacggagttaagtatca

SEQ ID NO: 34409 - DNA, 685 bp, Medicago truncatula
  Intron number 1 from transcript Medtr2g097170.1 (locus Med tr2g097170) derived from phytozome v7.0 (chr-ID MtChr2; po s 22727231 to 22727915)
ccccaaccctagtcgtcaaggtattttatatttattatctcttcatgcatgcatgcctcatttcatgtttatatatataattttcacctctattatatcatgcttgttaatgatgtctcatatgtgtattaaccactttaccattttataatggttgattaaacgaattgcatgtttatttttatttaacttttttatatgaaaaaattaccatgtttgtaagttttttccctcctattttgactattgatgatgctttctcgtatgcacaactacttctacaaattaaattgttaaaaaaaaaaaacaagtttatgtataagggtgatacaagacttggtttgattcgatggatattgtagcggatggatcctccctccccggtctctcttatcgctccaacaaaaatctcaatcgttgaattaatttaaccatggagagattaacactctcaacaattaaattaatcgtgagacttgtttggagggatgatggagatcgagaggatctaagtctaatattctgttgccgatttccatgtgcaagaagggcttcgtgaacccaacttgtgatatgttaggaacaatttctgcatatttatagaaatataaagttgtatactagcactgagaataagattttgctattgatttataatgtggattatcgtgatgcaggtacaaca

SEQ ID NO: 34410 - DNA, 368 bp, Medicago truncatula
  Intron number 1 from transcript Medtr5g007700.1 (locus Med tr5g007700) derived from phytozome v7.0 (chr-ID MtChr5; po s 1261159 to 1261526)
aaaaaccaagagcttccactatatttgatcccaaggtatctttcttcctaaagtaatagacctactatttcttcataaatttaagaaaacacagacttctatgttttgaaattgtattcacgacgatgattttgtcttcttttaaaaatactataatttatagatatttgatggaatttatgtgtttcttaagtagccaataattttcatatttatatatagcttacttttatattgttttcaatgacaatcattatgatgaatgcacatttttcgtcatatagttgtgcacgtgtttgctgttactttcacataaacgatcatacatttttcatgttttgaatgtttacagttccacaattctcttt

SEQ ID NO: 34411 - DNA, 841 bp, Medicago truncatula
  Intron number 1 from transcript AC235663_15.1 (locus AC235 663_15) derived from phytozome v7.0 (chr-ID AC235663; pos 65570 to 66410 reverse strand)
tgggaattacagtttcaaacaacatcaccgtcgtggtgagggtgtagattgaaccggcgacggtgttgtgttgtgttctgttgtgggggtaaaggttgcgccggaggaagtggtgagaagggggttcgcccgagggaggagcttacatggggtgggtcgcatctctgttaaaatgagagatgtagaggtttgcaaaaagagaaatgttatttgtacaaccatttttgtacaacttttgtacaactttctctctcatactcacattatcttcttattctctctccattgtttttaaccaataagaagagagaacaacaaggttgtaccaaaaattgtacctaaatatagttgttcaaatatcattactcttgcaaaaattaggggaagaaataagacaaacataggacagagaagagcaatttgttttttttcttttaaattttactatttaactttactgatgtgtaaagacctgattggatgtgtctaaaattgaagtgttgggtatgtgataaggaagactttttctctatacactcaaaaaactgaatttacgaacagttgtatatcatatttaatttattctaatttttgtaaaagaattcatataaaaaattcatatttaaaacttttttttttatttgtaaaagaacatttatttaaaattcatagtatccatcacgtgaataaagctatttgccaattgtttttgggctatctctcggtggtcaaaaggttttgatttggtgcaaattcatcgtttaaaacttttgttacttccagctttcgttcctttgatttggcaggaagagttttccttccaatcggccttttcagcagc

SEQ ID NO: 34412 - DNA, 952 bp, Medicago truncatula
  Intron number 1 from transcript Medtr2g129650.1 (locus Med tr2g129650) derived from phytozome v7.0 (chr-ID MtChr2; po s 31396692 to 31397643 reverse strand)
gctttcaggtgagcttttcactttcaattatattcttaaacaaaatctataccaatatataaaaagagtgcatttttttttttggactttttctcccatttttacccttcatttaaactattttatcatttttataaaatcgttcaaattatcaattaaaaaaattagttaaatctcattaaaatatgaacaatccatatataattaacaacccacgacaatagaacaatattagacactataaaaaaccgtattttgatcttatataaagagatattatattttagtataatattttttttcttcgcatgttacctttcacttgattattttttaccattttatcggtcattttcaataaaagcggaaaacgaacacgttagtgtttgtattaatagtagttgcatataaaaatgttatattgatgttttcatttaaaaaaaatattatattacatttcttatattattgatgccattgaaaaagataagttgattctgttacaacattgaagtgagagataccttataagaaaagttaccttcattcaccccagtatataaaatataattaattaattatagttgtacagtgcggggttgtatacttgtaatttaaaaaagacgataattaggaaattatgtgttttattccaaattttgactatgttttcataggttaaaggcaacttttatgaatactaccctggcgttgcacgggtttaattaaagtacatatttattttttaaaatattattattttattttagtgattgaatgttttaaaacatgacgatacgactatgcttaattttaatttatatttaaaataggcgaatcatttagaagttgttagcttgtaaatttaactggctcatttaatatggtcgacatttgtttgacctataactttgcaggaatcgaagagctttcgtatataaattgaagaaat

SEQ ID NO: 34413 - DNA, 630 bp, Medicago truncatula
  Intron number 1 from transcript Medtr3g105110.1 (locus Med tr3g105110) derived from phytozome v7.0 (chr-ID MtChr3; po s 26215606 to 26216235)
tgagtgagtgttatgctacctcttcatcccatataataaaaaatatcatcggattcctctccaaaagtttgatgctatctctttcacaagatacatttcttttatctttgttcaccaaactccaaagaggtcatttgtttatgcttgaagtaaaaaaaaaaaaaaatccttttcaattaggataaatatgcaacaacattatgtttagggataagaatagacttgatcgagctggattttgcttaataggtcaggtttggtataaaaattagagtcgagtctaacttattattaaagtttagtttaacataaagccacaaaattaacttgtcgatgatggttcctctcatttataaacatttatttaggtcatatcacttccaacaataatgttttacatctaaatatgtttaaatgtatctttgatttttctatttcaatctattttggttttcatttttaatctgcgtgctttacaaatttcatacttttttctcataatctaatttaaagctttttttgtgatgtgattcttcaataatgtgaaattcatgtgatgatgtgatattttttttttttttttttttgcactaagcctccggttctcagtcaaaaagggtcttggtaatt

SEQ ID NO: 34414 - DNA, 964 bp, Medicago truncatula
  Intron number 2 from transcript Medtr1g125010.1 (locus Med tr1g125010) derived from phytozome v7.0 (chr-ID MtChr1; po s 27445232 to 27446195 reverse strand)
aaggaaaaggtgatgtatacttgcactttccgcaattttccctataaattatcaatgagtgaattgcgattttgatcatcaaaattgtagaaattgtgctatttattatagtaaatttccgaaatggtaaaatggtctttggaattgatgatggtctgtggatttaatgaatatctctatttaaactttgttgtcggtaggatttaaagtagggttagggtgcaattatgaactaagaagagattgctgtcaatcaatttggattcctctattgatgatggtttagaaagtgatgatttttcatgacagagggacaaagttgtttggcagtttcattttaagggataattttgacatttcataaattagggactatattgtcggatgcttacgattttgaagactaaaatgatgattaattcaatccacttttttcaccagctgcttgctttttgctgcggttattgctacaaggcaaaaaattcttttggtctgtgctgaatttgaaccattcgtctgctgattaagggactaaattataaccagtgcgctcaagttgtgtttgttaacagaagtgctgaaccaatgtccattatcgaaatgctttttattttttttattaaacaacgaaatcaatgtttttgcctttgactgtgcaattagttttacgtgggtaatttccataacggcctcatagaattcagtcctaaaatctcattctatttctgtctgagccatgaagttccttttttgttctcctaacacatgctaccgtgcttgtttttatatatttggaatgtttcttggagcactgttggttacaacttctgtctctctcatgctcctccaaccctttgaattttcagatttagagtttattaatgattatgctttccccctgacatctaacagagaatattcttgtgcaggctgagaggaaaaaggagaggttcaagcaggtact

SEQ ID NO: 34415 - DNA, 971 bp, Medicago truncatula
  Intron number 1 from transcript Medtr5g104690.1 (locus Med tr5g104690) derived from phytozome v7.0 (chr-ID MtChr5; po s 42009636 to 42010606)
ttagatttccgtttgtcatctgctgctgctttcaggtaaattgctcctcccactctaccacttgtcttcttccgtttgttcgtgctatttttttttctttcaattgtcgctgcttttatgtattcatattattccattaactaactacctgattatcgtgtctcgttgttgtagtccttttaatatatctatctttgagtaaagatcaaatttggtctctcgcaaattttcttgattctcattccaaagacctatgaagcacggacacggacaccgaacacgacacggataatgacacgccgacacggataataatttgagaaaatgacatattttagtgtaatcataggtttttgtcggtgcttcatagccgaagaatcaaattaatcggacacacctaatccgaggagtatccatgcttcatagccgaagacaaattatgacccgtttggattagcttagcttattttaaaacacttatataaaacagtctatgcaaataaataagtttacttgttatttataaaggtagtttttgaaaagaaaaatgaaaaaaatatatatatatatctcaatccaaatggaacctatgcttttgactcatcataaactaggttttgaacggaactctctccttttatctaggttttggaccaactaagcatgacaagattgacatgggtagaatatttttccaatggactaatttgtccctatattaaattatcctaaattaatttgaattttgaatattatattttgtcagaactaactaaatcaggtcgtgaaaaaaagttgtgagggaccaaattgtttgtatttttagtatatgatatgataggatgatatttgtgctctttgcaatttatccaaaagtttagactccattccctttttcttttctttttattgttccagtttatctactcttgtcagtttcaacttcactacaggaatttggcatctgccta

SEQ ID NO: 34416 - DNA, 830 bp, Medicago truncatula
  Intron number 1 from transcript Medtr6g062200.1 (locus Med tr6g062200) derived from phytozome v7.0 (chr-ID MtChr6; po s 11302384 to 11303213 reverse strand)
gaggaactattacaggttagcatagtagtttttgctataagctataaatttcttgttataaaaataagggcgttgctatatatcgcgacccattttgtccggagagcttcccgaatataatattcagccaatgaaatcaggttttgcacgaaaaataagggtgttgctatatatcgcgaccccttttgatatatagcatcacaatattttcttgaaacaaaaattcgagatatcaagcatttttctaaaacttcatattcctaaatcgtaacatacaatgttatgtttatgaggaataaatgtttgtttgtttccgcgtttcaaaaccacgaccaagtagaagctaccttttgtagcttcatactaatcgcgcgtctgtgtctttccgtcgtgaaagcaaacaagttaaaatattgttgtatgaaagcctctttcccacccttgtgattcttagaaatcacttccatccaaatttactcatcctaataggaaaaacatcattttatctgaattttttcattcatattatgtttttttcatgtgttaaatggagtctcgaattcactactaaagaaagtttaattaggatcacaaaattaatgacagaaaaacattaaattcatctagaattcataatgaaactgattttatgttttttcgtctccaatttttctatcaaaatattagacaaattttattcttttcgtctcaaatttcaatcgacaattcaacttttttttagcaataatattttgttatcgtcatgcatattgatttctatatccttgtttttttttttctttacaagggagacatattggacgaaactg

SEQ ID NO: 34417 - DNA, 614 bp, Medicago truncatula
  Intron number 5 from transcript Medtr3g100710.1 (locus Med tr3g100710) derived from phytozome v7.0 (chr-ID MtChr3; po s 24168059 to 24168672 reverse strand)
caactacattagcaggtacatagttttctatgaaaccatttactgattttttatttcctttggcattttcaatttcacatctttaaggactcaatggcattttctatgaaaccataatcaccttgatgtacatggttttggcccaatgctttgatatgtttaagatcaaattttaattgatatacatctttatcattgtttaaataaattaagtttttattctagttttttttctttcttcaagtagcctagtggctagaattcacctttttaaaggtgaataagtggggtgtccggggttcaaaccccagccccggcatataacaatgcatgtccctgccaattgagctatgctcacgaggacagtttttattctagtttgattattacatactttgtttttctcatatcagcaagaaaattaaaatgtatgcacaaatatgaaatatcatgatcaatacaaaggaaaattataaagctaaagcaatacattgtatagttttttttcctactgttcttgtctgtgcttttgacgataggggacacacgtgttttatacaagattgttgttttttgtaggattatagaaccacttgcttcaaggtgtgcaaaat

SEQ ID NO: 34418 - DNA, 960 bp, Medicago truncatula
  Intron number 1 from transcript Medtr5g100470.1 (locus Med tr5g100470) derived from phytozome v7.0 (chr-ID MtChr5; po s 40179440 to 40180399)
ctgctgattttattggtatgattcacaattcaattgattcaactagcttttcaaatatatagtcatgtgttgattattacatatatgatatctttgatgatagcaatcttgttatcgttgaaattccaaaatcatcaaatcatatttactacggtctcattagcctctattagtgatcaaatagctaaaatattatatctattttttttatatacttttgaaaatataaatttatcatgttgtaacttgctaactaatctactcatttaaaactaaataacatgtacaagtatgttagtaatatccaataatatgtgtgtctatcagatattatacttgttttttaatattattcttttaatttaaaaaataatttttgcgtctattggatagatatttcatggggtcaaaataagccatatttcttttttgcaatttttttcttcaaataaactcttgtgatcgactttgatttggtatactgagagtggaaaaaacatactgtacttaattgcatgggattcagaaatagatggaattgctcaacaaacttgagaaaacttaaaaaactttatttcctattgcaaaaacataaaaagattttttttcttcttctataaaacacgatatgaccaaaataaaaacaatagaaatataagtacatgcatacatacatgtaaagttcaagtgttaatgtcattattaacttctgattaatttaagttcatttaacaaaaaatctgattattttattgaggtatggacactagtaaattattatagacacgtgtactgacaatagagtttccaattcattctattcgtctttttcttatgttaatcggttctatttgtctcaaacgaaaatatatacgattatattccaaaaagaaaaattgtatatgattaatttgttgggttgcaggtgagaaattgggtttggcaacttcaccaccttac

SEQ ID NO: 34419 - DNA, 328 bp, Medicago truncatula
  Intron number 1 from transcript Medtr7g021270.1 (locus Med tr7g021270) derived from phytozome v7.0 (chr-ID MtChr7; po s 5135256 to 5135583 reverse strand)
tcaagctgccaccaacccgcaaaacactatcttcggtaaacttttcttgtcctatctttgaacatttattgtgtgtttgctagtttgttgaattttggacggttttggagaggaatattttttagggctaaatctatattttaatatatacttgatatttaaaaaaaaaaatgaatcagcagcatgatacatgagtgtataacatcatgtttttcttgtaagttttttgaaatatcaaaatatagacgtaaccctagaaaattctcccctctaaatgaatgaacataaataattattaatgttattttttcagatgctaagaggttaa

SEQ ID NO: 34420 - DNA, 624 bp, Medicago truncatula
  Intron number 1 from transcript Medtr1g124610.1 (locus Med tr1g124610) derived from phytozome v7.0 (chr-ID MtChr1; po s 27186789 to 27187412)
tctcccaccattattcgaaacaagaaagttacaaggtagaaggagaaccaacccttgtttctaagtttttattttttcgtaaaatgctagcatgcttaacactaaatgaaactttaagccatagtgtaattagctatcatttagtacattcttgtcagcatgcaatatatgagttcattttcaatatttttcttttcatattccatcaatcaaaactaatattagttgtttcaaaagtaaaattgacctattccaagtcatcttgatgatgatagtttctattagtgactgttaataaatgtgtctatcttgtttctgttttctactctacatcccaaacatcctagttagtatttcaaatatgtgctccatgtaataaagcttcttgctcccaaattgtaatggatcttgcaaacatattggctattagttagggaaatacacccctccttataattacttctgctaaatatacctagtgttgaaattaaatttagaattcagttcctacaaatactgattaaagaccataatcttaatgctattatattttctaaagtttcgagtttgcatatatcttatttggtaggtcaagacccaaaagacctatttttacgagtgggc

SEQ ID NO: 34421 - DNA, 532 bp, Medicago truncatula
  Intron number 2 from transcript Medtr2g008330.1 (locus Med tr2g008330) derived from phytozome v7.0 (chr-ID MtChr2; po s 1511903 to 1512434 reverse strand)
gtggtcagactaagcccgtcttccacaagaaggtaactacccacttcaccccttttatatatttcatcatttgattttttaaatttcattttttttagttgattgtaagaaaaaagtacttagttgaatataattatgattattgttagctttatgaaaatgattagggaagatttagaagattaatgggaatataattatgaatcaaatatggtttatggcgtaatttgattcatgttgccaaacccacttagtgatattatgtttggttgttgttgttgaacgcaaatgtgattttgagctgaatgtgaaattgattttttttaatagaaagtaaattcgattttttagctgaacgcaaaaatttcaaatttggtttttatttattgattgattttgtatgtttcattttttgtttagtttaatgtaaatttgattttttttagtttaatggaaatttgatttaatttttgtttgtgtttgattttattgtataggcaaaaaccaccaagaaaattgttctgaggttgca

SEQ ID NO: 34422 - DNA, 797 bp, Medicago truncatula
  Intron number 2 from transcript AC233662_34.1 (locus AC233 662_34) derived from phytozome v7.0 (chr-ID AC233662; pos 165581 to 166377 reverse strand)
gcctagaagattatcagaaaaggtatgctgatctggggttgttcagtagtggcagagcttagtctagttaatgtaattttttgacttgttattctatgttgtgtttgggtgctaaaccgaattaatttgttgtagtaactagtaagtattgaaaagaagcacccgcctgtggctgttgtgcttaccaaattttatgttagatgttaactaaaaacctctttctctttgttacaagagattcaagtttttgctttttaacagaatgcagataatgtcatactagttccagtctctagaatgctagttatttccctcattttttccccttgcccatgtttaaaatccgctgattgtccctgacctcctgtattcaagttttggtggattctggatgaaggaacttgctttgtttatggtctatcttcattgctttgcctgattttcatgatgtgcatggattggttccactattcctttaaaattcatttaccttttcaagaacttaattatagaaagcctcaaattatgtccaccaatggttccagcactttcttttgcaaatcctattttcatattctaatctatttctctacatattttcattgatggtgcccaacttcttaaatagttaagccttatggtaaatgttttattgcatttggttaattgacttgaggttttgtttcacattcaaaacaaaatgttgttcttttctgtctacttggatgattcattctgaacatgctaaaaacttgattccagcttgccagaagttagagaatctgaaaggaaagctc

SEQ ID NO: 34423 - DNA, 394 bp, Medicago truncatula
  Intron number 1 from transcript AC233662_34.1 (locus AC233 662_34) derived from phytozome v7.0 (chr-ID AC233662; pos 166398 to 166791 reverse strand)
aagtcttcaaaagcattggtgagtctactttggcttttacgtttgtgtgttttctttaactgtattgatgcctctgttgtataaacaaataataataacttccattttcctcatttgagattaaatttaattgagtgtcacttgtattttagtaccttctaaatcttagagcatgtctgtgactaaatcagatttgaattgattgcaatgtttttcttttcctttgttttgtgttttgcttgtgtatctgcacctatattttccatgattctcaaacattatatgcattatgattttagtggccttcaagattgtctataactaattttcaaccaactcattaagatgttttgttacagattgaaaagttacaggaggagaatcgggagttaga

SEQ ID NO: 34424 - DNA, 931 bp, Medicago truncatula
  Intron number 1 from transcript Medtr5g009610.1 (locus Med tr5g009610) derived from phytozome v7.0 (chr-ID MtChr5; po s 2153425 to 2154355 reverse strand)
gaaggtatcacctagttatcactcttcttcaatgttgttgtttatctctcttgtatattttatcttaatatatatcatgatgattctcaatttttgtcgacaattattagtattattaatccaattagggaacaaaacaaaaatactaacaatttccttctttgctttatctgatcatgtacatgaaatcccttttcagtcgttaacctataccattttcttcaatttagtctctatggtatatgatatttgtcaactgagtccatgatatgatcataatagtatagcggttgcgaaccgctccgcaattcgtggtagtggtgtggaatcagttagcgcggccgccttcagctgctatagcggcatagcggggcgggacagatagctgtcgcttcagcagctatttgattttagttgaaattttttaacttgtcccttttttaatacactttgtatggtttccaaatttctaaattgatttttagggcattttggggttttaaaaccaaattagtttttttttttttctcctcagttttctcttgttttatggtttctcttattttatgatttattttatttgttcctctatcttttgttttttggtgttttgatttatgaatgtctcatgagatttgagttttataattttatattaaatataagtttttttgttgagaaatatataagtttgtttatactttatagcatttttcatctaatttgttcaaaaaataatcaaatatcggtgaccactatatgctatcatgctatcctattctggggtcgtacaccgccatccgagattgactactatggataagaaaatatgatgatttgatggtttttattagaaaaagaactcttacttttataattgacggtttaactaatatatttgctctgattatactatatgcagttgtcaatt

SEQ ID NO: 34425 - DNA, 738 bp, Medicago truncatula
  Intron number 1 from transcript Medtr1g083940.1 (locus Med tr1g083940) derived from phytozome v7.0 (chr-ID MtChr1; po s 16727618 to 16728355 reverse strand)
gctccaagaaaatcttacaggtaatgcctcctatctttctggccttggtagtagcgcaaatttttttttttttttgacacggttgtttttttgtgacttgacatctttacggttggaggttgagttgcatcatttattgttgttttcttatctatagtatatgggaaattaatgtttttacatttaactttgagcataatttattttgttgatgggtttagcagttactgagattgctatgatgccttaaaagttaaaagttactgtatggaagtattatttttttgctaaaagttagagtatcagaatggaaaatagaagtatatttcatcaatgtctggatggcacaatgatgtaaatatgatttaaatctgtttcagtttcactttagaatgttcttctggttatatgatgcagtaaagttgagactttattattctgttatattgatttttatagaagcatttttttacttatatttctgaatcatcttcgttattttgtatcttgctcaaaattcttttccttttataattgtagatgttgaagcgtgtgatgacatgatttatttggttttagaaaatttcagttgtttcctttagggacattctacatgcacttctagtttgtattatatgagttattggcttaattaccgagaacgatatgacaatatttattattttgtgataatccatcctctgagctaatcacaatgatatttcatgatgcacagac

SEQ ID NO: 34426 - DNA, 764 bp, Medicago truncatula
  Intron number 2 from transcript Medtr5g023510.1 (locus Med tr5g023510) derived from phytozome v7.0 (chr-ID MtChr5; po s 9255772 to 9256535 reverse strand)
tcaaggtttctattctatttcatataatgttcataaatttctgtttttgatttcttgttgaaaatttgatgttttagggtttatttctttgatttcatgttggcaactgtgtttttatgttattttgtttgattttatgttgaaaattttcttctttagggtttattcatatgatttcgtgttgaaaattgggttttagtgtttatttcttttattgcatgttggaaattctgtttctattttatttatgttgaaattatttttttattttttttatggttcattggtttgaatttcatgttgaaaactgtgttttatggttcatttctttgatttggtgatggaaattatgttttttattttttgattcatgttgaaattttggttctaggttcctttcttttgatttaatgttgaaaattgtgtttttggattcatttctttgatttggtgttggaaattatgttttgtattctttgatttcatgttgaaaatttggttttaggttccttttatttgataccatgttgaaaactgtgttttaggattcatttctttgatttggtgttggagattatgttttgtattttttgatttcatgttgaaaatttggttttaggattcatttctttgatttcatgctaaatactgtgttgtctgggtttattgatttggtactattttttactagagttttgattttactgtgtttgtttgttgattgtttagggggaggaaggaaaagaggattacatcgctacgat

SEQ ID NO: 34427 - DNA, 575 bp, Medicago truncatula
  Intron number 1 from transcript Medtr2g090660.1 (locus Med tr2g090660) derived from phytozome v7.0 (chr-ID MtChr2; po s 20263162 to 20263736 reverse strand)
acatgtaagtttggtgttataaatactaaaacaagacattgaagtttgaatttagatatcctttccatttcactagcatgtgatgaatctgattttactaatcatgcacttgttctattcctttgatgattctctcagagaggagtttcatgtttgagatttgaatgtcctaaacgtgagtttcttcatgcttactttcctatagatagctaagatttcacgatgtttttactttatttataaaaataaaaaaataaaaacatagatacaacaggagaggggacgacagacaacgatgcttatttttttactttgggtacactacattaatgaaatcatgacttttgtttgactagagttatgcaaccgcccatgattccctccttttatcttcatctgcagtgggaaaaaaaaaatagctagagagagagagagataacaagtttatgaaaataaaatttcaaggaaattatttttctttattgtttttataatttccttattatttccaaagttgctgacatgatctgcttaacccagcctcatacaccctttatataaattgtggtggaaag

SEQ ID NO: 34428 - DNA, 781 bp, Medicago truncatula
  Intron number 1 from transcript Medtr5g019760.1 (locus Med tr5g019760) derived from phytozome v7.0 (chr-ID MtChr5; po s 7404592 to 7405372)
attccgttcatcgtcctgtcagagattcctcaattgtaagaacacatacatgtttttttttttgtgtacaaatttattagcaattgttatgttgttgtttttgttattctcttgttagagaagcatataaggaatattatcttcacatatcatacttctctaacaagatatgtgtaattaaaaaggatagcaattgtatgatatgtgaagataatattccaaatatatatgttaaaaaatgtgattaaattttttatcctttttaatctttgagtctcatgtgtaattaaattgtgattgctatccttgatattcatttccacatatatatgtttaaaaaaaaaaaaaattaagctgtggatttaatatgtctattttgtgtgaagatctaaagaaattacgtactacttatgcattaatgtgtctgaattaatagttttgatttgcttttgacaactacatcgattgaaagtagtttatctccaatgaattttatcaagaatcaaatgtccaccgtatgaaatgaattgttaattttgttgatcagatttgtagagaaatagacatttgtatattttttagtttttttactcacttatatagttttcataacctccagtttttgtctattcattgatgtatattgatctaataatttatagtaaatgctctttgccaccaatagtcaaaaaaattattttgatttattttgattatgactaaaatgatggttgattgtatggtaggaagcatcaacggccaagtatatagtgcaacaata

SEQ ID NO: 34429 - DNA, 724 bp, Medicago truncatula
  Intron number 1 from transcript Medtr2g095460.1 (locus Med tr2g095460) derived from phytozome v7.0 (chr-ID MtChr2; po s 21820255 to 21820978 reverse strand)
attgacttgaattgtcggggtcctagtacttcaaggttttaatattgtgcacttttaaataatgatatttcaatgaataatgttattgtaatgtgatgtaataatccgttactcaaacattatgcttttgcatctaatttatccaaaattttttgttcatgaaatgattatgtgatcaagaaaaatgagatttgatttgagatctagtttcataatttattcaattgtttgtttcaactttatgtttttgattattccttgtattgagatctagttaacttgaatcactattgggtggaggacgcaatgagaatgttgaattgtaaaatgagccatctccattttaaatatttgggtttacccatcggtgataacccgaaaagattgtcctaaggagatgtagtgattgataagattctagcaaaattgtcgggatgaaagagccccaatttatccatgcaaggcaatctcttccttctcaaattcgtttatcttcgttaccaatgtgcttcctttccttctttaaggctccatctaagaattgagtctctttttaaatctgttttatggggagggtgtaaggggatctcaaaaaattcatttgatttattgagataaggtttgttagatgagggagttaggtgggttgcttgttcgtaacttgcatttgtttggttatgctttattaggaaaacggtgttggaggtgattgtgcaattacttt

SEQ ID NO: 34430 - DNA, 495 bp, Medicago truncatula
  Intron number 1 from transcript Medtr5g079250.1 (locus Med tr5g079250) derived from phytozome v7.0 (chr-ID MtChr5; po s 29487854 to 29488348 reverse strand)
ttgagaaattgagagaactgagagaaagaagaagagtaattgattgttgtaaaattgtattctcattaagttgtgaaaaaatatttacaacatgcttataaagagcttatttacatagcttgcttagtaagcaatcaaaacaaactgaactgattttgctaactaatagccaagtcttccaacaaacattctaaccatgatttaatctcaactaacttgagttttttttttttctttctaaagatcaactaacttgagttaaaaccatctaacttgaattaaaactaacatgatctgtcctagtgtttttcctgtcatttgggcgagttttagttattcctcgaaaaaaagtttgagattcttcgttgccatttgaatattatttgattttagagcttagtatacaaattagcttatgtggggcaccgagtcaggattttttttattataaaaagtgcagtctggtgcactaaagcttccgcatacgcaaagtca

SEQ ID NO: 34431 - DNA, 759 bp, Medicago truncatula
  Intron number 1 from transcript Medtr1g143950.1 (locus Med tr1g143950) derived from phytozome v7.0 (chr-ID MtChr1; po s 31997912 to 31998670 reverse strand)
aaaatatcgataattggttgatatcaaaaatatacgttgagagtttgatatcacctttttcaaaaagttaggaggtagaggatgacttgagcttgagacttaactacactctaaatagtaatttctatttttgttatttattttatcaaactatgtgacttgagctggagttggtctatgaaatattcggctcaaaatttgctatgtaattttcattgatttgttagttagagttgtctgtttttttgtcaacatgaaatttcattttatatagttagctaatcattcaaatcttcctacatagattataaatttctcttattattgactctactagtctctattttttttccttctataacattggttgaattctgctttctgctgcagtatttactcacaataaacagtttctatgaaaccattgacctcaaacaaagctaattaattaactaaatatcagatagagatggaatattttaatgttgatgtgacaaaatgaattccttgcagtttttgtttctaggcaatgagatattattgttctattactgttgtctattaattagtctgtaccttgcagattttattggctgtctcatttatgtgtgcgactaactttgcaaaacagttttaccttaccagaacaattttcaataggattgatcacttttgcatacgtttttgcaacctgcgataaattattaaacttaggtgggtggtttcttcagttttggcaggcaggagctgtaacaactt

SEQ ID NO: 34432 - DNA, 983 bp, Medicago truncatula
  Intron number 1 from transcript Medtr5g015870.1 (locus Med tr5g015870) derived from phytozome v7.0 (chr-ID MtChr5; po s 5390572 to 5391554)
aaaggagcaacaaagtggcgcctgtcagaattggcgtgcattgcattacatggcaatgaatagtcagtcatatatagtggacggaggtggtgtgagaaaaggtaaaaggtaaaaggaggatccaaagtttttcttagttttaacctcaaaaatctcaaatcaaattaaagttcatcattcacttttttataatcaaccatcatggagcagtgattcacttctcaattaaattttctttaccaagtagtatgtttttatagacacttatactctcatacactcacgatcgttaatttgattgagtagttagttatcgttaatttgattgagtagttagttgattcagtttacattgaaaattatggttagtttatatagtttgaattaaccatgattttgactgtgaaaacaattaaccatttacttaactaaattaatcatattttttcacgtgattaaccaaatgttgtttgatatttgtcaaaagtgtctaaaggtgtacgagttgcttgacactctaaacctatgtttgttttagtggtacaattaagtagatgtacgtttggactaactctacaattagtagcttttcaaaaaccacgacaaatatatatatttcctttgttgcctctaaaccaaacacactctaattaagtttgttattttatcatcaatccattatttgcattcaattcaaacatgcactaatataaagtccaaaaaacatagccctaaatttttatttcttcccctaaactaaataaacaagactattgtctcctttgtccatgttttgtaaaaaaggttaatgagaaacaaagaaagggaaaaaggaaaagttagggggtggtgggggcatagagagtgctactactgattcaaaagccataagttgagagagagagagagagaaagtgggaacattctgaaattggttggctttttgtgtttgtgtagctagctgtggtggctgtcatcaaaag

SEQ ID NO: 34433 - DNA, 785 bp, Medicago truncatula
  Intron number 1 from transcript Medtr1g039930.1 (locus Med tr1g039930) derived from phytozome v7.0 (chr-ID MtChr1; po s 9275242 to 9276026 reverse strand)
ttggtatgcatgtctcatgcaattttttatttctaactgtaccatagtttgttaaattaccacataagctttatgatcttcaggaagcatcaatatgattagtataaatggcttcttttttctgatgaaagaattcaattctaaaaacaaagcatgttgtatacagtatgaacagaaaagtgaccgctatgcctgtgattgattttgccaattgcaacataggacaggtcgtggatgcatatgtacacctatctattcatcaaatttctctcttaagtgccatgctatgttatcataagcttgtggctgtttatttactatttaaaatgtgctgttgaatctcttttggcggcatgaatttcaattccgggttggataggaaagcatgtctttgtcttacgaattttcaactacttttgccattctaatttatttttttatctagttggtttttctcaattatcaattgaggtgcagtttgtatgttccattcaaaagagcaacaagagaatattaatgatttgcattaataccaaatgttactttggtaaattctattagtatgtcaatctgctagtgcagctttgaaatttgtttgacgtgtatatatttgaatcattgtagctttgtatcacaatctctttgatactttcaacattgctttagcaagcctcttttcttaaagctctgtttgttgcctagttatccagtaagcttgaaacctgattttatttttggttagtgcattaggctgcaatactgattctgcaattgaaacacatatc

SEQ ID NO: 34434 - DNA, 470 bp, Medicago truncatula
  Intron number 1 from transcript AC233572_19.1 (locus AC233 572_19) derived from phytozome v7.0 (chr-ID AC233572; pos 83642 to 84111)
aattgaagcagggaagacacaacaagatataggtttattatagagtaggaggagtccatttgttctgtagacatatgcaagcccttcaatattggcagatacatgttattattctttttatcaaattttaatacaaattctaaattcattttgatctgtttttagcagattgtttcttctgttgacggctttttgtatctgcgctcgttttggaagggatgtttttgggtgagttctttcggtgcttcggtgatcactttgcagtgcagctgagagaagttttctttgttctgattggtctttttcttttattgaattagcctttgcaaacacatttcttataggatatttaaacatttaacattcaaatgtctacctaatatgaaaataaatgattaatcacacatttctttgatgagtatagtttgtactaagacatcaatgcaacacattttgattttacagaagat

SEQ ID NO: 34435 - DNA, 816 bp, Medicago truncatula
  Intron number 2 from transcript Medtr5g090270.1 (locus Med tr5g090270) derived from phytozome v7.0 (chr-ID MtChr5; po s 35181905 to 35182720 reverse strand)
aaattgggtctgaagaagttctgacagtaagcttcataacataatagctacttgatactgatgttttattagttataataataattaaagacatcatgtcatctatgataatattaacatttacaggagattacacaaaaatgagaacaaatttcctcagttttggtcataacataataatgagagccacaaatctaaactgtcataaaatattgccacaacaggccatcttctgaatgtttaagaggaaatttagataaagaggaaatcagccagaggcagaagtcttcttttcagtgagataaaaatgctaatgtgaaaattttgtgtaaggtggcttctttgtattagaaaagtttttttcctggaggttgaagatgatagatgaaatatggtcctagatgagttctatagaatcagtatttggtctgtacttcatcttcattctcttggtgctttgattgtgttatatacactaggtatacatcctgatcctggcatccaaatgaagttgtattttgacttgtgaggaaagaagaaaactaatcatatgaactagtcgagcaaacattgtaaatcctctgtgcattattaattagttatgatttttattgaaaaataaataatttgttgtaactgttagggccacaattagttttcacttttctatataagatattaaaattacagtgtcaatggtcttggtaagttttcattacgtcaactcaggtagataaataatgtgtcgctataatgtgttttttttccttcctgtttacaggttttgagcattgaccggtcttgtgggatagaaag

SEQ ID NO: 34436 - DNA, 803 bp, Medicago truncatula
  Intron number 1 from transcript Medtr5g090270.1 (locus Med tr5g090270) derived from phytozome v7.0 (chr-ID MtChr5; po s 35183138 to 35183940 reverse strand)
tatccaactcagtggggtcgaaaaaggatcatgtttgaaaatttgattggatattcttttgaattctgaccttcaaatttttgtctttaacgggttaagatcctctctatttatgtgtttctccgtttcttcaatttggagagataaagacacataaaatcttgaaaaaagtaaaatataattaatgatggtgggacccacttagtggtaggacccaccatctattttttgtgtctatctctctccaacttgcaaaactccatttattttgccaaatggagaggatcttcacccgtctttaacaccatacagataaacccagctatctggcccttagattgttgacatgctaacatgtgaattaaaccatccaatccaatgtctatttttgttctattgttgattatactaaacagttacagttaaaacattgaaaacatgtaaaattaatttatgactagtttaatatctaagatgcactattatacttattatgtaaatacaatgttttaataaccatagttgttctaagggcgtgcttgttttcaattttaattaaaggaaatatctcttgttttcattttatttcacactttcaaagttttttacaacaaacagtaaacattatacaaactttgaaaataggaaacaaagtaacaacaggattatatttttgtggattaaaaatgaaaacaataattttttgaaacatgtagtttctgagctcttcgtataatatgtgctgttgttactgttttagttgatttaattgaaatcattattttgcagactgttggtcgcat

SEQ ID NO: 34437 - DNA, 857 bp, Medicago truncatula
  Intron number 3 from transcript Medtr4g110800.1 (locus Med tr4g110800) derived from phytozome v7.0 (chr-ID MtChr4; po s 25224840 to 25225696)
gtgactttttgcgcatcgatttcaatttcaggtaataatggaaataggtatttgtttaaatatgttgtttctggaaggccgttaaagttcgcgtgttaactattagtattaattagtaatatatgcaagttattggcggggtttatggttttccgagttttgactttcaacagaaaatgcaagcttctgtcacttgtatttacaaattgatgctattgttttcaagaatacagaaatgttcaataaggatttgtaaagactagcttgttagaagatcaatgagttatttgttacagtattggttaattgaattcattaaacaacatgctttgtagtttggcattttagatgcttgaaatactcttgtaggaggaagagaggttaagagttttcacacctttcacgctcgttttcaaactgagtatggctaggccttttgttgacacatgatcattttttgatcggatcgttgttgaaattgggagtggggtggggatgtaagctaacaatataatcattaaaaggctgggggttaattttgatacttgacgtgtagtgatggtttttgaaattgacatgaagtccaaacattgccaaggctgtgccttcatctattacacttcatctgtttttctaaaagttccaaacattgccaaggctatgccttcatctattacccttcatttgtttttctaaaagttccatctcactcccaacttattcagaacttgtagctaatcctagtaatattatcagcatgttgattttatattgaagttctttataaactttatattcctctatttcttttttctggctgatagtgtcaacttatcttgcagttttcctgcactctc

SEQ ID NO: 34438 - DNA, 651 bp, Medicago truncatula
  Intron number 1 from transcript Medtr3g121910.1 (locus Med tr3g121910) derived from phytozome v7.0 (chr-ID MtChr3; po s 30258411 to 30259061 reverse strand)
tgtcttgtcaagaaaccaatttcaaaagcttaagagtgaaaagaaggatcatgagtgagttttcctatggctaataatggcattgaggggtattttagctacgataggcaaacatgaggctcaaaataatatagtagtaggttgatacagcgtgcgttatgatataaagcacataaaattatcttataccaagagttaggtcaggtattgttgttactactggtacaagcccaagcccactgatagaagattgctgcgactactgatcttcccatagagaaaatgtagtcttcccccacataaaattagaggaaaggacaaaagaaattatatgcctttgaaatgaatcacacttctatacatgagtagcattgaccccaatcttggcatacgaccattttgaagcaattgtaacaaatttttgttgagcttttaggaagttataggaattgtatttccacgacatatggtttccgatcatttccactcaacataaaaaaaataaaaaatcaaaacatgggaaaaaaatttgtttcgtcagactttcaacaatcaagtctgctgtataaacaccttgttcaatggttcaatatacagataaaattctgttttgcaggttgggttgtgggattgtaaagatcgccaaagttt

SEQ ID NO: 34439 - DNA, 882 bp, Medicago truncatula
  Intron number 1 from transcript Medtr5g104550.1 (locus Med tr5g104550) derived from phytozome v7.0 (chr-ID MtChr5; po s 41938190 to 41939071)
ttttcgtgtaaagatcacaactttacatctgggtggtaagaaaaactcgattaccctctgttaattatgtgtttatgtttgtgtaatttaatctaatattctaatctgtgcttacagttatttcatgtcacacccatgattaatttattcccaaatttgaattctttgcattgaaagttccaaaatttctctttacatttaatatttttttatagtatttggaagctctgtgtgtttgatttgtgttaggaaatgagaagaactagctaagattggaaaattgagttttttttttcgttttgctgaattgaacttctgcttttttttttttttttttttaaaaataaatacagttattttatgccatacatatgattgatgaattcccaaattggaattcattgcattttctcaaatttctgtttacatttcatgttttttttagtgaagacccaatttactcacttctaatttagtcactcaaaaaataatactcaaattagttgcgaacatcgactctttgatttattatgacagagggactaatgtcagtggactagtttgagtgttatttttttgtcggggactaaattgagcggcgaggaatttctgaggaccaaattggattttactcttatttttttgttctttaatagtaattgaatataggaaaatatttcgatatcttttattgatcatcaacaatatatacaggaattacaattgcataatgggaaaactaattatgcccagttatgcttaatcaatgtaaatattcttttgacttttatctcattagtgtacaatatttgttccaaatatagagtatatgctgttatgttctgtcattaaaagcttttcctgtttgatttgtgaagggaa

SEQ ID NO: 34440 - DNA, 340 bp, Medicago truncatula
  Intron number 3 from transcript Medtr5g075710.1 (locus Med tr5g075710) derived from phytozome v7.0 (chr-ID MtChr5; po s 27631870 to 27632209 reverse strand)
tctctgaattacaggtaaggaacttcatcaaaaactttctattagttttccaatgtaatcatcaaatttgttaagaagaaaatggtatataaactagtttacactaacatcaaaaataaaaattcaatattttacgattacttctaaaatacggttataagataagtttatacgaacccacttaagttgacccgatgatattgatttggaatttggaagtgtgcttttcttaaaggtctcggattcgacctgattatacgaacccacattgttaaatgtatcacttttcttctctctcatctcactattttgtttattttgaatttaaaggttagagtga

SEQ ID NO: 34441 - DNA, 686 bp, Medicago truncatula
  Intron number 2 from transcript Medtr3g097390.1 (locus Med tr3g097390) derived from phytozome v7.0 (chr-ID MtChr3; po s 23284767 to 23285452 reverse strand)
aaggtagatttatgcgcctaattgtttgttatactttcgttgataatcttatgtattcgtattagaatttgggttgaggttgactaaacctccgggttgtaaggggggacggtctctaattataaacacattgtcaggtcatatgttgtctgagactcataacgatctgtgattttagaacatccaaatttagtgattggtgtttgtaaataaattattgaacattttttagtagttagtgttctgaatttgcttacactttcaaccaaaacgaagtacttgaatagactctgtgctaacatgtgcaatgggaatgtgttgctctatcgaaaagaaattgcgattggtattagcagatgtttgtctaattcattatgtttttcactgtgtgaaactaagaatggctggagaaatgttgaacattttctgaaacttatctccattttagaacagtttcaacatttttacatcatgaattcagttcaaatatttgtttgaattgtcgcgttctgtgtatggtttggtttcctatacttatcctgtttaaatgccactaaacatcaaattggttttgtacttcataaataagcttgatgagttattttgtttactgaaaggagatctgatttttcaaacttcattgttaaccagagttaccaaatcatctgcgaaaaatatccgtcatt

SEQ ID NO: 34442 - DNA, 319 bp, Medicago truncatula
  Intron number 3 from transcript Medtr5g098800.1 (locus Med tr5g098800) derived from phytozome v7.0 (chr-ID MtChr5; po s 39454013 to 39454331 reverse strand)
agaaagacactgctgcgcatttaagggtaagtagatattcttatgtaatttagggcctaaattaaaccaagctctaattgcactgaatttgtagaacggaattatgcaggagaggttgaagaaagactgggaagtaaaaaaaactcaaaaataaagaaaaggaagatgctcaactctacactattataaaggtgttctaagcttgcttcactataaattagtattgtttgtctttagaaacatgctgttaattgctcaatcatattgtatttatatttatatatactgataacacataatacttcttaggtgatacgag

SEQ ID NO: 34443 - DNA, 488 bp, Medicago truncatula
  Intron number 2 from transcript Medtr5g098430.1 (locus Med tr5g098430) derived from phytozome v7.0 (chr-ID MtChr5; po s 39235431 to 39235918 reverse strand)
ggagcaatttacatctacaagctcatcagtcattggtatgcaagttgacttcttctctttaaatcagaatcaatgaaaatgtttagcagagaaaaacaaattgttcaatggttttgcaaagtgattatgttgctatcatatcattgaaaatttaagtgatataagaaatgtggaatgataatatataccagagaaggaatcctggtttcaaaactttacattaccttcacatgaaactggcatatgttatagcccaaaattaatgccatgcctatgaagagatagacacgttcatatcaaatagttaatttcctatttcttcatctctatgttcatgtgtcactactgatatgatatcgcacagactgatatgcatgtatgtctcaaagatttatctgaatgtctccgtaacctatttcttagatttggtttaacttctttctttgattttggataacaactatgggagcatttctggtttctaggtt

SEQ ID NO: 34444 - DNA, 541 bp, Medicago truncatula
  Intron number 3 from transcript Medtr5g067380.1 (locus Med tr5g067380) derived from phytozome v7.0 (chr-ID MtChr5; po s 23901486 to 23902026 reverse strand)
cagaactatccctcaaattcattggtcctctaagagtaagtcacgccaaattcgttggtaatttttatttgtaaggaataatgcacgaagagtatgttttttttagatgatgtttgaggttcaaatctcatatatgttatctttattattcattagcgttcagacggacacccgtgcccgtctgtccactttttctattgcgctaaagtatgtatgtatttatttgagtttctttatataaattaatatacaccatgtgtcatacacaaatataattatttaacaccatgtagaaagagtaatatataatacttctctaaaaaaaaagagtaatatataatacttataataaaaaataaaaatctgataaatagagatatcttggtttgatactaagaaaggttggcttttaattttatttattttttaacaatggaatagaaatgaaaaacagaaaattgtgtgcttattttgcaactactctattcaaatttgaatctatatagaggtacactcttttgtcaaagctctcccttaagaa

SEQ ID NO: 34445 - DNA, 939 bp, Medicago truncatula
  Intron number 1 from transcript Medtr2g029230.1 (locus Med tr2g029230) derived from phytozome v7.0 (chr-ID MtChr2; po s 7746516 to 7747454)
gcggtaagtttttacacagatacacacacacatcttataacaggaaatcgaacatgaagtttggttttagtgcatgtttgtaatgacggcgagtttgactaattttgttgaagttctaaggtgtagctttgatcagagtagctcaatacaccgtggttttgccaaactcattgttaatccaaacatatacttaatcaaataaccgttcccttcttttgatggtggctacaatcatctcctatttacttcatgttggatgtatcttcacattttgctagtgaaataataggcatcagtcattattagtcatgaaaattttattgtgaatcattttatatatatgatggtatcgtatatggttcgaaaacttaaccatgctagtcaaatttcctagactcactgtgtcaatgtcaccataactagaatgatttttcattattttcattatataatccagtagtaagatttaatttaactgtagttcatgaaatattagatatgatcatccatatattgatcaaattacctagactcattgtgccactgtcaccttaactatgtgatcaatcgttgtgttcttgtgtattaatttgtacgtttactttagaatcagatttactattctgacagacatataaggaatattttttataatttatcagcatgttggccttcaagttggatggcaaaccaatcaattctaaaattttcagagaaaatatacgtttattttgcctaaataacttttatttgattaaaaaaactcatttattaaggtattctagacatcttagtaagtgttcattcataaacagttatgcggatcttgttaaaataagctgatatttcaagcttatatcaaatcatgtttgacaaatctttccacaatgaatcattttagcagcattctcacgttccaaagtttggcaactgggaagc

SEQ ID NO: 34446 - DNA, 732 bp, Medicago truncatula
  Intron number 1 from transcript Medtr2g055980.1 (locus Med tr2g055980) derived from phytozome v7.0 (chr-ID MtChr2; po s 15126709 to 15127440 reverse strand)
atactggtaaaaaaaatttaattataccaccttctctgtttcttcataaatttttatgatctcatgtatcaatccctttgttttttcaaaaagaaaatatagtcaaagtactcttttactcttttttgcatcatttatgaaatcatatagtatcatgattttcaaagaatttttcttaacttcaattatggcgcgatattaattttgtttacatctcaaaataatgacaattagtgtctgcaatatgtttggcataacgttggctgcgtcagagttatgatgattctggcatgtccagagtcatgtcaaacatacattaaaagatttgaaaatttgattcagttatcggaatttcatgcatttacgcaatcaaccagaactgttagatcgaaatttgacgccttatatttcataaaatcaataattttgaccacaatgcatgcaactgtgattttaatcttgagtcaaaggatatttgtcagaaaaaaataaataaataaatgttgagtcaaaaaatcagaattcaaactttgatgaaaaagaaaatattcataacaatttattatatttccctaaaaaaaaattataaaaatgttttatttttctttttgcatgaaaataattttttttataagaaaagctattattattattattattatttgactagattattattgtttttattattgtgcaggagttatatctggagctcttttgtatataagagat

SEQ ID NO: 34447 - DNA, 535 bp, Medicago truncatula
  Intron number 1 from transcript Medtr5g082640.1 (locus Med tr5g082640) derived from phytozome v7.0 (chr-ID MtChr5; po s 31136821 to 31137355)
caattctgttgaaggtaaagtattaagataagtactccatagaaaatactctaatgttaagaatatgtttgtgtttaagccatgttatcaccagatagtaaggtttaatggaaatccaaaaaaaaataaaaatgatttgaaatccatagaagaaaacgatcaactaattattttttaggggttagatcaattcattttttttgagagttagatcaattcatattaaatgttttttttttgtaatgtggaggtgtatcaaattcacacagttaattttataggtaaatgtggttaatttctaatagaaagagaaaatgttaataacaaagatcaaatcctagatctccaacattttttagacgcttataattggttttgtatacatagtttacggataatatatttttgccacattttgatactggcccttcatgttctccttattttatcttcatttaactttagtttattctcttttgcttatctttctttcataactcaaacaaagtcttaatgaaattgtagtggatattgc

SEQ ID NO: 34448 - DNA, 904 bp, Medicago truncatula
  Intron number 1 from transcript Medtr4g115180.1 (locus Med tr4g115180) derived from phytozome v7.0 (chr-ID MtChr4; po s 26588349 to 26589252)
cttgacactaaggtattaaactttaatttctctgttgattttatttttattttactttttttaatcttatgatttttgataggatggtatagaatttgcatcttacgtgtgattaatgcgtgatttaatgtgcatttgatcgtttacatgtagatcaaacctaaatattactagatctctcatttatgtttatctttccattataatacataatgacggatccagaaatttgaagtgatagaaatttgaagtcatagagttaacggtaatgtatatataatatgtatcagtgttgtcaaataatagcatctattgtggtgttgtagtgctatggtgtagcagaatttgaacaaaccattattgttccgcaatatgctaattagtacaaagtgttaatagtggctataacggtgctatagcactgtcacatggcagaatttgaacaaactactattttcattgattaacaacattgatatgatatgtatataaatttgtattggcaactctcatggaaatccgagtggggatgaatgccctgaatgtctccaacggggatatgtctgtgaagtgaacatacacaaaaattatatatgtatgtataatcatgattcatgaagaacaatttacaagttcattcataacctgagaatttgtgtgcattgtgttagatatcctgaatgttgaattggtgtgaattcatggtatacaagttcattcataacctgataatttgtttgtatcatgttacatatctttgtattgaatgctgaatgggtgtgaattcaaggcattgccattgttggacttaatgaatgtgaaattatttccttatctgtcttttatcttatgtatctatttgcattgttataggggccggagattcgaaccggatttctcaagg

SEQ ID NO: 34449 - DNA, 777 bp, Medicago truncatula
  Intron number 3 from transcript Medtr4g154980.1 (locus Med tr4g154980) derived from phytozome v7.0 (chr-ID MtChr4; po s 38155259 to 38156035)
caaattccagtaccagtactcttcatcttgcagaggtctattctctctctaatatttataataatatcttactttgctttcattcatcatcatgcatgtatgtactaaaccagacaaataccatctctttttcctttacaactttgggttgggacattcctcccttaatcaatcaccaaaaagtcttttaaggaataataatcataaggatctttatccacccactaagcactgattatatgcatagagagagagattagataactagtaaaaagtagtaacttatatgcagcaatgcacaaagtaactaggtataggggaaagtaagaaaggaccatagtaggtaagaaaagaaaaggtttcgttgtagtagtaatttgttgggaaatgaaaagggtcctaaaagctgcattccttcctttctgtcggggctgctgttatgaaacttagctgggcttttggggcttgtgcatattcattcaagtcaagtcagtagcttttgggcactcccccattccattattcttctttctatgaaatgaaatttagagaccaccaaaacaagacaaccctcaccttcacacctttgctttaatttgacttcacatagaccaacatccacctttttttttttttttttttttttttacttttttgagtgcatgctcatttgaaattcgtgcatgccctatgttttagtttttgagttgaggttaattaaattctttctttgtttctacaggaatctgtttcaattcaaaggtcagcagcagcagc

SEQ ID NO: 34450 - DNA, 1003 bp, Medicago truncatula
  Intron number 1 from transcript Medtr2g008250.1 (locus Med tr2g008250) derived from phytozome v7.0 (chr-ID MtChr2; po s 1484093 to 1485095 reverse strand)
ttttgccactgttctcttccaaatctcattcttctgtaagtttctttcagatctctatcatcttcctgcattttcattatgcttatctgatttttatatatactttaatgcatttttattgaatttattgtgtttcgatacaatatatgaatgtaattgattctaattgattttgcatgctagctataaattgtagcttttaattctataattcatttttacactctatttagatttgcctaaatcagatttacattatcaattcaaacataatcagtttttgttacagtggaaccaaacatacaagttgaacaataaacttgactgtaaaaatcaattcaataatcaaaagctacgaatttttactttcaattatagaatcagaagctgcaatttctagcttcaagtagaggcaaaactagttctaatccagagtaatcaaacatgtcaaaatctcctccaaaagtggaaccaaagatgcacttgaacatacttacagttattatgaatttaaaggagatttacgtagattttgtgtgatgtattgtttcacttccttttatgtgttcttgcttgcatttatgcatttttatgtcatgttcttcttaacacaatgaatagaaatggctaggttttatggccttgatagtcaataatttagagggttaaaaaaaaagataagtgtttttgtgtttatttattaaaatgaaaatcactttttaaaaaataaagtcaggtataaaaaaattgattttcagaaaaatcgattttttgaaaataggtaacaaacggatgaaattttttataattgattattttgtttgaaaaaagttgttacaaacaggctctatatatagtggaagtgaaacattttccttttgctgacgttttgggattcattagtatctttaaacaaaattggatttggttcccattttttatgatttacccttaattgtgtaatccaatttttgtcagctgttcctctgttgtggataacaaa

SEQ ID NO: 34451 - DNA, 395 bp, Medicago truncatula
  Intron number 1 from transcript Medtr5g083290.1 (locus Med tr5g083290) derived from phytozome v7.0 (chr-ID MtChr5; po s 31581865 to 31582259)
gtctttgtaaaaagtaattaattcatttttgtgttatgtttgggtattttttggtataataacttatctctcaaaaaaaaaaaagtgtaactcactttgtatggttttttttttttgaccgaactcactttgtaaggatttaacacccattaattttgaatattcattcaacaacatctaattttatctagagattaaatagttcaaccggtctgaattaagataaaagagttgaatgttttgaattcaaatccggcacaaatgaataaatattaatctaataaactaactattaacacacttttcttcttcaagacccgtacaagtataacttcatgtaatgatctctgcaagatgtgggattttaatattgcattgttagaaaaatagtgttg

SEQ ID NO: 34452 - DNA, 454 bp, Medicago truncatula
  Intron number 4 from transcript Medtr3g162320.1 (locus Med tr3g162320) derived from phytozome v7.0 (chr-ID MtChr3; po s 42375643 to 42376096)
tactctttttggagagtatgttgaagagctgaactctttcctatcttccggtgaatctcaaaatgttgttgtagccattatgttgacaaaagttaaattgtttcaaggtaataatttatgactagcaattgtgattgtttgtttatacgaatatatatacttgattcatatacttttgaatcttaatgataggaaaaccaaattactattctcctacatcgggattgaatattataactaaagtatacttgattcatatacttttgtatcaatcaataatattataatatttttttttcttaagttataatattattgattgatactttttattatagctttcttagtgcaatacaaattctcctatatcgggattgatccagttaccaaattcatctcgcatacctgtaaatgagtagtttctcttacttactcctaggaccactattgagga

SEQ ID NO: 34453 - DNA, 966 bp, Medicago truncatula
  Intron number 1 from transcript Medtr4g125000.1 (locus Med tr4g125000) derived from phytozome v7.0 (chr-ID MtChr4; po s 29379943 to 29380908)
gtattagtcggtcggtaagtgccctgccctcggatgacatttccacttgctcatttttgtttcattttctttttcaaatagttttttttttgccaattaatgagcatagtttggtggcataggctacggtgggcgagtgaatatctcctacggtgcgtcaatgacctaaattagattccaaaataatactggctgcgtgatttaagttatttcaatcaatcggttatcaagtgtggaatgggcttataatgttatcatggattttccacaccaaagcattttttttaaataattaaataagatgattttttgaaccgacactatacattgttcgaggtttgattgtagttttgttcaagttcaagaggtttctaacaattgcattgctaccgaaggtttcaccaatttgatgtccgattcaatttttaaacattagtttcaagacactcttagaataggaatccagaaaaataaggagccaaaacactattgaatgaggtggaagaatagctgtctagtagttacccacaatcacatgtgtttgttatgctagtgatgttacatgaactaggttgatcacttattgcacgagtgagaagaggaactgaggtgatttttgccctatcaaatttttgtacattaggagacgaatacctcaagaactaggcaatttggtcgaaattgcttaacctaattctgaaacgggttaaatgaaaaactctcttccagccaagtccttaacataaaagacatgtgtatagcttttaacgtagtaaatgtatgagagtaatgtgtacctgtaatggaacttaaaaacctttgtggcataaaaaaaaatattaatatggtacaattaaacaacttcaagaaccacataatgtatttttgcctaatttgtgagtgatttccataataatgtaatcacaaaatgcaatagtaaaatatatgtgcagggggctccgcata

SEQ ID NO: 34454 - DNA, 758 bp, Medicago truncatula
  Intron number 1 from transcript Medtr2g037650.1 (locus Med tr2g037650) derived from phytozome v7.0 (chr-ID MtChr2; po s 10380910 to 10381667)
ccggcttcttccctgaatctgttcttcttaaaaaggttgtttttttacacataccctttatttgatttttgtttattattcatttttgtgtatttttcttcaatttttatttgttttgttttcacaattagatacccttttgaagatttatttagtttatacttataagctggtagaatttgcaataccctcaaatttgttttggtatactatacattttagtataatttctgctagttttcattggttttgtttaagtataagatacccttttcatgattcattagaatttgcacttgtaatgttactactaaggagttttcttagaaccattttttcaatattacaaaatcttatcttgttatgttttggttagatgggagagtaactcactatttagggtaaggaaatatacatatttgctcattgtttggtgtatgacttattagctatgaaacacagacaccggacacgacacggacacgctgacatggataataatttgagaaaatgacatagttcagtgtaatcataggtgttgtgtcggacaccgggacatgcctaatttgaggagtgtctgtgcttcatagcttattagcatttgacatcagagaagtgtatgattgagactagtcaatattggttttcaactgaaatgaattttttatgagatgaatttgttctttatgagatgaattttttcattgatattcaatttggattttcaacttgtcattttcagaagacagttgaggagg

SEQ ID NO: 34455 - DNA, 988 bp, Medicago truncatula
  Intron number 1 from transcript Medtr4g092800.1 (locus Med tr4g092800) derived from phytozome v7.0 (chr-ID MtChr4; po s 19490397 to 19491384)
ttagtggccaagttttcaagtttcagcttttcaaggtttttcatactttctctcttctttgctttattttcaactaagatgcgtatataggttttgcatttttttttttttaactcatttgcatcttggttttattcttaacttgttggatcagttcttctgagatctacttggttttagttttggtttctttaatgaaacaacgattattcagtgatctaaagcaagctattccttctcaagatgaaaacttttgagaaagatgaagaaaatataacatctacatcccaaacctaaaaaatgtcttgagaatccaaagagtgaagaagaaaattttcaaggttactagagtttgacataatgaattttagaattctgtataacatatatatcatatagttatatacaactttcatatttttaagatctactttctgtttatagttttacatttaaaatttattttgatgctttttgtttatatttttaactatcctatagttttatttacatattaaaatttattttgtcacccctaactattttatttaagctaagcaaaaataatcataatagcatcaaaaacagaaacccaaattgttacaaggaaacaagtgatgattagtactcactcgtactggctcataagggtttggtcttatttattaagtatatgttttgcttgattttattaattttttatgctgcttattgtcatattaattcatcactctgattaattattctctgtattgcaatggtattttgccgtatgcgaaaactcaagagtagtttggaatttagatgaatttgagtgttggtaaaataatttgttaatttaaatgtctgagatggtgttgtgttctgtttttatggttttcttcttgttaattttctgtttataattcaaaacttttgcacttttagtgatcatgttattctatataatgaagtttatctttgcttatataaacggaaaaagaaaaag

SEQ ID NO: 34456 - DNA, 597 bp, Medicago truncatula
  Intron number 3 from transcript Medtr2g021360.1 (locus Med tr2g021360) derived from phytozome v7.0 (chr-ID MtChr2; po s 5419436 to 5420032)
ctcaaacaaactggaaggtattttgtttttcagaattttattacgtgttctttgttttttgcttagacttgtgaatgtagggttggtatagtgaacttatttatgacatgttcgtaaacagttttcagcttattttcacaagtcctccagaatagcttgtgaaaacagtttgaatttattttaacttttgttaaagaagacctcctctgtcctatcttaactgatccttttgttcatttcacacgtattaagaaaaagtgtataagtgaaagagagagagaataatagttttgagtgtattgtcaagtattggtgtatttctccctgtcataaatgcgaagcagaatatattgaattgggaatgatgaaattagtattagttagatttataattggaaaaaagttattaatattgtattgaaaagtgaaatgagacagttttcttgggacaatatttttttgcaaatggctcacttattatgggacggagggagtagcttatacatacacacttgtatatgataagggcttaaagttgtttatcaaaacattgccttattcatatttgttgttgtttgattgtgttgcagacctgag

SEQ ID NO: 34457 - DNA, 656 bp, Medicago truncatula
  Intron number 1 from transcript Medtr2g025190.1 (locus Med tr2g025190) derived from phytozome v7.0 (chr-ID MtChr2; po s 6640032 to 6640687 reverse strand)
gaagggagtgagaacaaaggaatcagaaagaagttgtaatttgcttctaattaggctttgtgctttgtttctaacacttcgcatgttcctgttactgctaagtgacattacttgtctgcctttgtgcatgttcctattatatatttggaatattcaaggtttttttattaacaaaattttgttttttgaatggaaaaattgtgaagattttttttttttttaggggagtaacattgtgaagttaaaattgattaacagatttatatcataacagtataaagaaaattttaaattcatagttgaagtatatatgttgattaaggaagttggaataagttttattttgcactacaattattaaaacaaaaattgtgtacaaaaaatatatgggagaaagataaagcatcaaatttattagaaatagagagtgtgtgcaaaaaaaaaaatgaatcactacaagaaatcctgcaattagccagggaattatgccaggagcatgaacccctgggaaatttgccaggagtaaagccagggaaacgtggtgggaaattacacaggacatggccctcgcataacccctggcatcattttaggcgggaagataaattttaaattggtctgcaaaaactgaattttatcaggtaaagacaggagca

SEQ ID NO: 34458 - DNA, 366 bp, Medicago truncatula
  Intron number 1 from transcript Medtr2g015040.1 (locus Med tr2g015040) derived from phytozome v7.0 (chr-ID MtChr2; po s 4000587 to 4000952)
ttatcactccaaatattgcttctaatcaatttcaggtaccgtgatttataaaagttttggtgctttgtttatgcatatttgtatttgttgaacagtagatagtaatttgtgttaatacccttgtggacccagtgcttgtgtttaaagaaaacgagtaagatcttcttgttgattgacaaagaggatttcaagcagcggttggagaaaacttagatgcagtaccacatgtgatgttggtgctgttctcctattagaacttgacacgtgtatattttttaaatagaaaaacttgtttgatttttttgttgtatacgccgattaaaacctacaggcaaccgctgcttgaaatcctctttgccaatcaac

SEQ ID NO: 34459 - DNA, 780 bp, Medicago truncatula
  Intron number 2 from transcript Medtr2g015040.1 (locus Med tr2g015040) derived from phytozome v7.0 (chr-ID MtChr2; po s 4001763 to 4002542)
ctaaggagaatactgatccgaagcaggtttcaattcttctaacttttgttactatcgcgcatatgttagaatttcttctaatattttgtgggctgcaagttgttgactgatgtgatacttagccctaacaaaagtgatcaataaataatagtttttcctttaaaaattaaataaaataaaaaaataattggccacttaatctgatttgtgtagaaacatatggtaggcccaaacactaggtccatgatgggtggtgcctaagttataaatagagaggctaggtcctcttttgccatcactccgacaatacgctcactagtggtttgcttccatcgacaacccgaaaaccggagcgtgtgaaaggcaaaggaagactcagccatgacatcggtaccaacaagcataacctttgattcatttgattttcgttgttcatagattggaggaaattgattttaaattaaattgataggtgctattcaaatttaattctgaatgtttgtgtttgttgaatcaatattttagtgaaattagggtgtttgaactttaattaagcgcgttttagtgaatattatactgattttttttttttatctctgcccctatcaccaaaaaaattgatcatagagtgtttaggaaattgttcatctaagtagataatggttttcataattggtgaaattgaaatatctctgctagcattttgatttactaagcatacttgtgtaataatttttttgcttattcatttttaggtttttgaacaagttgaaattgagt

SEQ ID NO: 34460 - DNA, 628 bp, Medicago truncatula
  Intron number 1 from transcript Medtr2g017360.1 (locus Med tr2g017360) derived from phytozome v7.0 (chr-ID MtChr2; po s 4243395 to 4244022)
aatacaaggtaatgtcaaacagatacctatatatgtattccctccgttgctttttaattgtcattccatttgaatcaacgacacaaacaccacacacaacactgaaactgacagtaatttttgaaaatgacataactaaatgtaatcacatatataagtatcgcattgacacatgttgtacactagatatatcttcaattagaagcgtagcggtgaaactactattttgtcaataatactcatttattataaagagagaaatagttggatcatgaaatgaagtaacaaatagttaaaatattgtagaaaaatgagaaataatttcatcataagtaacaatgtttcatgatgtttttgatatatgtaaagaaaaaacaaaaaaggacgaaagtatgttccattaaatatttgcaagcactcaaacagacacgacaccgacattgacaataatacatatttgagagaatggaagtaattgaatgtagtcatatatatatatataggtgtctagctgaacagaccttcaatatgaagtgtatgtgtagtgctgtataagtttgcacatatctgatgagatgagactatttgtacaggtttctagggcagaattcattgagttagccaaaag

SEQ ID NO: 34461 - DNA, 745 bp, Medicago truncatula
  Intron number 1 from transcript Medtr5g008090.1 (locus Med tr5g008090) derived from phytozome v7.0 (chr-ID MtChr5; po s 1448165 to 1448909 reverse strand)
ccagcgtgtaaatgcccttttcttcaaattcagtatttttttgtttttgttttgggttttcagtttttagttcaatttacatttttttagattgttagtgcgcttaagcttttctgcatagtagatgtttgtgaaaaagaagttatttttgtgttatgaaattatgaacccatgttaatttttggttaatttctcaatccgccacactaaaattcggctttatattggaattgtgcttcatgtagtgtattttgattgatttgagcatactaggggcggattgagaaactttctacatatccaatgaaatgattgttgacttttatcagtggcgtttatgttgatttgcccttgtttgtgttctttatgttgagttacccttgtttatgtttgtatattttattgattttcccttgtttatgttgattggcccttgtttgtgttgtctattatgttgattttcacttgtttgcgttggtctattttgttgatttgtccttgtttgtgtctgtatattttgttgattttcccttgtttgtgtttgttgaattgcccttagttgtgttgtttatatgtttgatttgcccttgtttgtgttggttcattttgttgatttgcacttgtctgtgttgtttatgttgatttgcccttgtttgtgtcagtctattttgttaatttgccctcgtttgcgttggtatattttttaacagagattggtataatttggagaagtccaagcgagtga

SEQ ID NO: 34462 - DNA, 801 bp, Medicago truncatula; identical to SEQ ID NO: 32007
  Intron number 2 from transcript Medtr4g108290.1 (locus Med tr4g108290) derived from phytozome v7.0 (chr-ID MtChr4; po s 23912401 to 23913201 reverse strand)

SEQ ID NO: 34463 - DNA, 384 bp, Medicago truncatula
  Intron number 3 from transcript Medtr4g140710.1 (locus Med tr4g140710) derived from phytozome v7.0 (chr-ID MtChr4; po s 34579771 to 34580154 reverse strand)
gacccccgttttgatattactgagattgccaaaccgtgagtgttgtcttcatactttgtaaacttttaaaacttgaatttttttatttcttttcaatcaaacctatgacaaagggaaattgtgcaccaaccacatggttaatatgagtttgaattatgagattggttaaaaggattgcatgcagtatgatcccatctgaattctagcttatgtaattcgaacatattttacccagaggagctagtgctcgtgcatagttttgttttcctgctttgtttctgttcttggcttttcaggtctccaatatatatactaagataaaattgaagtattcaaattatttgtgttgcatatctaacacaactacttcctagccttgtagtt

SEQ ID NO: 34464 - DNA, 1012 bp, Medicago truncatula
  Intron number 1 from transcript Medtr3g144270.1 (locus Med tr3g144270) derived from phytozome v7.0 (chr-ID MtChr3; po s 37363075 to 37364086)
tttcactggcattcatctcactcacattcccagtttgtttcaattcccttttctgtttctcataatttgcttcatttcttgttaatttaaacctagatcgttgatttctttgcattgtgtttaatttcttacattttgtcactaatgtttgaatattgtgtatatgttcgcttgaaagcatcagagctttgtatactttggtaaaaaaataataaaaattggggaaatttgatatctgtcgaaaaatctgactaatctgggccgtccaatagtgaagctggagtaaattcatgtatggactgactcaacgctgaaattgttagcattgaagggattaaaccttgaacttgagacgtgcacagtctgaggtctcaagcgtactttggtaaaaaaaaattgtccactcattgttttggttattgaatttttttttgtcacacctttgattattttattttttgaggtctagcgcagaaattggtgcgcagggtttatgagtgttgtaaacccttagatatcgagtttaatgagtactaataaaaaggggaaatttgaacgagaaagacttgccatatgctgcattcggttactagtatgttatagaaataaagtcgtaacctgtcttttataacttgcccagttttggcaaaaactatatagtaatttgtattttgtaatgcttatgggaattcgagggaatgaagcactagctttggaaaatatgtgacttaacggaaataatttagtaattcttgcgctgatgtttatgtgagtaaaaactcggagggagtgaagtgtagtttatcctttttttgtgacaaacagttccatgtcgtttaatatttgagatggagatgtagctgataaatcatggcggtctattagtattttgtccatattgtcaaagactttcagagatgtttcattcatctacatttttgtgttttcaaattataatgtcatgcactttattgcaggtggaaagaatagtgctgatagatctcttcttatt

SEQ ID NO: 34465 - DNA, 518 bp, Medicago truncatula
  Intron number 1 from transcript Medtr1g016350.1 (locus Med tr1g016350) derived from phytozome v7.0 (chr-ID MtChr1; po s 3145039 to 3145556)
gtaaatttctcaaagtattcttttgtgtaatattacattaatcaatcaatttgtgattttcatttgtgcaataaccgaattcaagaatacacattgacttcactttctttctctctataatttctatttgactgttttcaattataaaagtaaaaacacacaaatttacccttacggtttcctcttagcatttaaggaaaaaatttcaatcctttatttttttttatttttttttgaaggaaaacattttcaatgctaacacaccattttagtaaaaacacacaaataactttgcactttattatttaataaagtttacatatatacactaataacctagtttgtttactaattaatctatcctttgtttaaatatgaattctcgatcttaagggaagaaaacgttcaaagtctacctgcctgatagtgaaagatgcctatttggatagaattagttgcttaccagatcacgtaatagaccagatcttgtcatacttgccaatcaaggaagcagtgag

SEQ ID NO: 34466 - DNA, 261 bp, Medicago truncatula; identical to SEQ ID NO: 28561
  Intron number 1 from transcript Medtr4g041980.1 (locus Med tr4g041980) derived from phytozome v7.0 (chr-ID MtChr4; po s 10040616 to 10040876)

SEQ ID NO: 34467 - DNA, 1057 bp, Medicago truncatula
  Intron number 1 from transcript Medtr2g125870.1 (locus Med tr2g125870) derived from phytozome v7.0 (chr-ID MtChr2; po s 30406188 to 30407244)
caacataaactcaacaatataatacaacaacagtaattgcaacaatataattaaagacaaaaaagaccatggatgaggatgagacaatctaattccttgttcgtgttcatccatgcatttcttcgtatattctctgtcgaataacatgaacatgcctcaccaacatagcgtcaaactcgattggtatttttaaactatactaactatagaaaacatggtccttatgcataaattgttcgaaaacttacatttagaccattcaaatatggtgattttttttttcatgcatacttcatacatccaaactgatgttaggggttcaaagatccatccatggacattatgtttcatctgcatatgattctaaccaagagtgtgaaagatgtactaggtcagtgtagaacagttaattaaagttcaatatttgatcattctttttttttaaacttggtatctagtttaaggaactattattaatttgagggttcaattttattgtccactagcggaagttctatttaaagtaaaaacaaaactttatatagactagttcatgaaaattgacatcagaaaatcaaacccaagatctcaacatttttttttgaattggttctttaattttttctttttttctttctcaaattgatcttttgtgttagattattgcactgttagtcttaataaattttgttaaaagaaaacacacataacattttaatattattttgaaataaatttaaattttgtatacatagtagtgagtagtgacacattccaaattattatttaaaaatttaccttggttattcagttttggcttttgggatgagtatcaaactaaaacaattaatataaacagattctaatgaatggaccgaaccaacaattagtcgtgacttgtgatctttcatttatgcaaaggtattagtgattacatttccatgaagccatacaaagttttagaagacatacaatttattaatatattttttaaaagagtatatagtatagtgttagcatttcatggtttagttaaatattgctcctggcctttcta

SEQ ID NO: 34468 - DNA, 435 bp, Medicago truncatula
  Intron number 1 from transcript Medtr7g062040.1 (locus Med tr7g062040) derived from phytozome v7.0 (chr-ID MtChr7; po s 12596238 to 12596672 reverse strand)
gctccattcctcttctcaccactctcgtttctcaggtaaatcttttcttcaccatcgctttatcttctcttcgcgtttttcgttcccatttccgtttttagtaaaaaaacaaaacttttactttactttcttactcaaatcaatgtttgttagttcttattcttgattttaccgattttgttgaagttagggtttttctttatgtaatgtgaaattttagtgttactatggtatttgttagatcaataatgtatatagacgtagaacagttaaatataccttttttttcgtttttattaaaaagggtattttttgattttgggaataatgaagttttactcttgttactaggttatagttttgatttttaggttttttttagagtattgatgatgtgaagttggtggtttgattttgcagttgattgaaaggatt

SEQ ID NO: 34469 - DNA, 340 bp, Medicago truncatula
  Intron number 1 from transcript Medtr5g048460.1 (locus Med tr5g048460) derived from phytozome v7.0 (chr-ID MtChr5; po s 20485345 to 20485684)
tccagtatctctgtgttactaattctcgggtataatatatgatagtcatgcatcctcttttattatcgatatcatattattgcactaaatcaccattctagtcattaaaatcggaagggttatagtcactttagtccttcatttaaatgttttaggtttattttgatgcaaaaataccaagatgttttcttgaatagtctcttttagaagactaaatttgaaggactaaattaaccaatcattacaactcttcttatatcatgtttgtggttcgatttagtttgtttttgcaatcttcatgtctcttattgtgtcatgcagttggggaaaactatctccg

SEQ ID NO: 34470 - DNA, 976 bp, Medicago truncatula
  Intron number 1 from transcript Medtr4g062420.1 (locus Med tr4g062420) derived from phytozome v7.0 (chr-ID MtChr4; po s 12098931 to 12099906 reverse strand)
cctccaagaataacggtaatacatttttttttttgctttcgcaccggttttcgatccatcaaaggtgtgcgactaatccggctcatgcgtagaggcatgcgcactggccaagcgttgttccccatgggaacggtaatatattttgttgaactacaaatgttagtagttagttgttacattaatatttactcatttgtcgggtttatgataaatgaaataattgaaagggagtaatgatattttaacaagtgacaacttttgggctattcttattggtcaaaaataatagagagagaaaaaagaagagagacaataagaatacagcgtgagtaagtgagagaaaagttgttcaaaatttgtcactgttgtataaatattatttctcttgaagggggagagccatgtgactgagagggttcaagtcttggaaacaatatcttgtgtataaaacagggtaaggctgcatacaatacgctaaatggtgggaccctttcctggacagttagcgggagctttagtgcaacaagctaaaaaaaggagaaatgaataattgaagtagtttaatttaatccagtttaaactagatacaacactacaaagacaatagattttgtggtgttttctgaaattttgatttagttagaccaattgaattttaaatttgaagggatgagatttagttgaaaattagcacagaacacagaaagttagaactagaactagatgttgagaatatggttagttaggattattgttagttagtatataagtccgatagttgactcgtttgtactatctttcattagtatctcatttctactatcatcaatacaataagtttttcagtttttctctcctatttcaatggatgctacgtttcttaacaaatttgttgtttatgtttatttttaactcttcgtgatctgctgcattgtcttcagttaagattttaaattgtgaagatcaagctgagtca

SEQ ID NO: 34471 - DNA, 933 bp, Medicago truncatula
  Intron number 3 from transcript Medtr3g169340.4 (locus Med tr3g169340) derived from phytozome v7.0 (chr-ID MtChr3; po s 44183065 to 44183997)
ttgaagctacttaggtatggttctctcttcacttctctgtaatgttgtatatgtgtcgtttctctttcagaaattgcatcagtttttatattttgaggtttcttgatcatttacgaattatctaacatagtatgttctattatccataaatatataatttaactacttaccacaatctaatttacttcattttctagaggggcttggatgaagctatgtcgacgtagaaattatggatggtccatgttagattgtggtggcattgacgatgttacccttataatcctgtgattcgaaccttgaagatattgagttgaatgattgttattattatttaccttttttctttcaaatctttttgttagctacacatgtttgacatggctttgctagtggcagtccaaagagagatccaaaagccatcataattgattagtataaaatgatatgaagtgagaattgtggtgtttaagttaggcacctagaccgaacttaacttcaagattttttgtttgttttgttgtggatgattgaagtaacacatttttaattgtgtttatattttttattttcccttttcaataatagtctcacaactaaagtattgtagtatctaacaatcaaatgtctaagccacaactaaaaagtctcacaacggaatatagtctttattctttaatctatgtgtatatgatatgtttcagattttcttcattctagttctctttctacgataagggtgtgctttgtaacttttttatatgtttgtattgatttatagtttctcgtgaatctgtggtatgtagttctttttccgtatctattttgtcttatctctttgtttagggatttgattttctgatttaatgctatgttgattctattttgcggtatgcagttccttttccttattaacttgtcttgctgattttg

SEQ ID NO: 34472 - DNA, 877 bp, Medicago truncatula
  Intron number 5 from transcript Medtr3g169340.4 (locus Med tr3g169340) derived from phytozome v7.0 (chr-ID MtChr3; po s 44184247 to 44185123)
aaaaggcaagttatttgttctttatttcgaaatctcttcaatgtttgccagtccttatactttaactagttttctactacaagttggttagttggagatagtatcattttaagtatatgagattataaattggttggattgtcaggtgtttatttgtttaggggctgattggttcttggtcggattgtttttccgtatctattttgccgtatctctatatagggatttgattttctgctttgatgttaatttaattcttaattttgcttactaattttaagttgattcttaattttgatatttataggttaatttagatacatttgatttgattttaagttgtttattaacttttcttgttgatttttagttgtttcatcatcttcaagtgttgattggtgtatcagttcttgttggaggagatattggaggtcctttggtgctggagtggtatgtgagggtcggtttaggctagtattgctggatgtttgtagtagatgtgtgttacttttgtacatatgttttggtcaagaaacctttgctctgaagtagttgtaataattttaacctcattgttgatgttgttattttattgctaataaatttaagttgattcttaacttttcttaagcaattgtcattttctaggttaagttgattctgatttgattttaagttgaatgattttttttcctttttctaccttttttcttgattagtacaccatgctatgatatgagaataagcattgtgatatttaagtttggctaaatgaaaatgagaattctaaactaactttgaactttctcgtggaatctcttacgcttcagatttctctgcagattcttcactaaacatttggatcgactccgcatct

SEQ ID NO: 34473 - DNA, 673 bp, Medicago truncatula
  Intron number 1 from transcript Medtr5g105360.1 (locus Med tr5g105360) derived from phytozome v7.0 (chr-ID MtChr5; po s 42321988 to 42322660 reverse strand)
gtaaaaatagtagaagttatgaaatatcatttgattatgaaattgatttgtaaagtaagataatgttataaaacaagtttaagtaaaaggtaaaatttttgttcaaaaaaagtaaaaggtaaaattgaaataaaaactaattatactaaaacttgatctttttgtagtataagtatttaaaagatttaattatttattttttttgaaagaaagagatttaataatttaattaaaaatgattaaattgtaaataatatatatatagctcagttggcagggacatgcattgttatatgcagggttcggggttcgaaccccggaagaattctagccactaggctacctgacaaaaaaaaaaatatatatatatatatatatacacacacacacaaacacactcgcgtgcacataaagggtcaaattggaaaagaaaatatcacaccaaaattatgtatttgtttatttatttttttgacaaaaataaacgatatttatttattcaaattgatagagtgcatcgatacaatacaaattcaaagtcgctaaaaataaaaaggatgaatttgttaacaaactcacaacatccatgttaatagcataaaacgacacaattatttcttctgatctctttgttttgcttagaccaagtggtgtcctgctcctggttgtgaac

SEQ ID NO: 34474 - DNA, 940 bp, Medicago truncatula
  Intron number 2 from transcript Medtr4g129200.1 (locus Med tr4g129200) derived from phytozome v7.0 (chr-ID MtChr4; po s 30675671 to 30676610 reverse strand)
cccaaaagtgctcagaatttcctgtggagatctcagtttagctgaatatatccttccaacaagaagaaacttaggaaaaaatggcattaacttggatgagctgcactctttgcaacacatcatagtaaccagatgtagaactaaattacaggatttgtaaatgtgtatgtaatgcctgttgtcttttagatgaggagtactaatgtactaacattagatttgaattaaatgtttcagacaaatttaactgaactctaatggcagagcttcatttttttgccatttgggttctttttacatcattttccccttgtcgagattaactggtttgcagaaatttcagacagaaaatagttctgcaagattttgcttgtgttattttgattacaaaataaatttgcaaactcatgtttcatagtttgcttttaattgtctggaaaagtttatagcagcattaatactcggtagattgctgcctgaatgtcaagctgttctaatgtatgttaacttggttttagcttcgttttggctgcacagtgctcaagcagataacaatataccgaagttactggtgtttggttgtgatgcaaagttattgaacttttgcaacatattttgaaagtcaattcagcatggaattgctcaaggtggcaagatcagaatgaaatattctcagggttaaaaacaaattatagaaaggggagcacaaatttagaatcacgtgcaatttagttcctctttaagctgcaccttatgtatttatcctctttcattgtatttttactccgcagcaaattatcaatatctctatttttgagacgtcacgaggatatgcttatttggcattggaagaaggatggaaatcattattttagacaccgtgtttctgtctctgaattgtcaaatggtaactgtattggtttatagaagaggatttgga

SEQ ID NO: 34475 - DNA, 629 bp, Medicago truncatula
  Intron number 1 from transcript Medtr4g129200.1 (locus Med tr4g129200) derived from phytozome v7.0 (chr-ID MtChr4; po s 30676769 to 30677397 reverse strand)
aggagaactattgtactaacattagatttgaatgagatgtttcggacaagtttaacttaactctattggcagagcttaatcattatgccattcagtttcttttacatcctttttccgttgtcaagattaatcagtttgctgaagtattagacagaaaatagttttacgaagattttacttgagttattttgactgcaaaatatattcacaagctcatgttttaatagttagtttgcttttaatctatgatgaaatttataacagcattaatactcagtagattgctccctgaatgtcaagctgttctaatgtattgttaacatggttttagcttcgtgttggctgacataatggtcaagcagataacaatataacgaacatgtttggttgtgatgcaaagttattgaagttgcacggcattttttgaaagtcagttcagccaatggaattgctgaaggtggcgagatcagaatgcaatattctcagggttaagaaagttatagaaaggggatcataaatttagaatcacgtacaattctgttgctctttaagctgcaccttaagtgtttatcctctttcattgcatattatgatttatagcaaattatcaatatccctctttctgtgag

SEQ ID NO: 34476 - DNA, 942 bp, Medicago truncatula
  Intron number 1 from transcript Medtr1g087230.1 (locus Med tr1g087230) derived from phytozome v7.0 (chr-ID MtChr1; po s 17508778 to 17509719)
tcttgttaggttttcttactgattcgagactgaaggtaacaattcgtgaatttcaaattttctatctgatagggttttacttgtaaactaagtttgaagtttaacttgttatactctcgctgtaaaaagctttgcattgtcaacaaatcacaatgatatttgtcactttagaagtagttatgattaaagtcaaacgtttaataatctgatggttactatcgggagctaaacagatgtgaaactggggatcaggctcctctaaagtgagcaactcactttagagtgtactataaataatattagctgttaatcaacaaatcaatggtgggcattgtaggtacatcataacagatcatgactcatgagcttgtttgaataacaacttgattttctcactttagaacatccaaatcctgaaatagagatgcaatattgataattactttagtgcatatactacagtttataggatattattagattgatgtctttatttttgtaagactatcaaacttaggtgatgctatcctaacacaagttttacactgcttttgtttttgtttggtccggtctagtatacaatcttcagcttcaaccatcatggtcggttggttacaatttttttgatgaaaaagctctgacatatataattgttatttaaaacgagatggtctaggatttgtcttatttgcccttttcatttcaaacattccgccgagttagagcacaagacgggttgtaatagttgggagtgggacatgttgcacttttttaatttgccaagcttgtgtgttcgtgtattattatattgtgtaaaaattattactattgtgaactgtgggggcaaggggcagctgtagcaaggttacatgacttttggttagtttaatagactggttctcttccaacaggtaagaaggcaatctcatttgtgtctccgca

SEQ ID NO: 34477 - DNA, 417 bp, Medicago truncatula
  Intron number 1 from transcript Medtr5g028780.1 (locus Med tr5g028780) derived from phytozome v7.0 (chr-ID MtChr5; po s 11914064 to 11914480)
caaggtctttgggacgttgtggacactggtcaccggtgataatactgatcacctggtcaccggtctttttcttcctgaagtattattcaattaaattttaacaatacttgataattttgtaaaaaaaaacaatacttaataattctaaaaatattcataacatttccaaaagatagtagcaatagagtaccaaaataattcatatttcttagttcatggttacgatgatatatttatgtagatagtgattgtttgaatcctgatgaagaaaaggaacaaaaatgaagaagaaattattttgtgtgaagggtctcccctaaaaaaattgtttaagggccttattattcgttttatgatttagtgtttccacctacgaattaaaaggtttttttttttttttttttttaggactaggcg

SEQ ID NO: 34478 - DNA, 863 bp, Medicago truncatula
  Intron number 2 from transcript Medtr5g096400.2 (locus Med tr5g096400) derived from phytozome v7.0 (chr-ID MtChr5; po s 38300445 to 38301307)
atatgtaagtgatttttatgaaattagggttcttcgatgttttagggtttttaagaaattaactttgtaaaattatgaatggatacttcattttgtaatgagataaatcgtgattattgttactttagtgctttatatttgaatttgtcactatagatgatttggtttgagattaagggttgtttggattgaattattttagtttatagctaatgcaaacaacttattttcggtattctttaggatagcttgtgaaaacatattatgtcttatgtgcatgttggatcgacttatttcagcttatccaatgaataagtacttataacactgttttggagaatttatgagaacaacttataatatgttggttgtgaaattatggttttcgagaaatttagggtttcttttgctgtttaagggttttcgagaaattcagtgtaaaacaatggttggatgattgatttgatattgaatagtgttatttatatattaagatagttcatgatgcatgttactttttctgctgtgctgttgaattggccactaaaatatgatttggtttgagattaagggccttctggattgaataatttgagtttatgtactaacatggaacttatgaaaacagatatgtgtgcagtgtgtttgttgcttgatcaaaacagatatgtgtgtttgtagtgttaagcccttacaagtgttttaagacttttgtaatttaaaacactagaacagtgtttgggtttctcctctctcaatttgtctcactcctgctgtcattttgcagtcaccgctgaaaatccactgttgaatgttgatataatgcagagttgagtattttcaagagtagaagaaagtttaca

SEQ ID NO: 34479 - DNA, 622 bp, Medicago truncatula
  Intron number 1 from transcript Medtr3g039440.1 (locus Med tr3g039440) derived from phytozome v7.0 (chr-ID MtChr3; po s 10438766 to 10439387 reverse strand)
tggaaagtttgtgagaggcagactgagaaatttgggttgttttgcgtttagagcaatattatttgggatttagtttgatatatgtttcttttatttttattttattttaatataaaatattttataaatggggttaacccttaacccatttaatatgtattgcagttaaaatcattcttccggttgtagtttttaagtcaggtggataacatcccatttaaaatctctgagctaataagtgttttttgtattagtgaatatagtttgagctaccttcaccgaaataatgttggtggattgcaaggcttataaactttgaagcagtcttgaattttttttgttttgttttgaaaggacggtcatttttaaatctttatactttttcaaccaaatcattgttattatggaagggaaaaaaaaaatgcaagactgcttcaatgttggacgtattaactttcattctcgtaaaattttagctatttgttcaatttattagttctgtttcaaactaattttcttttaggatgactctttgtctaaaaccatttttaatatgtaagatggcttcaaaattatttcctataatatcccttaaatattttagcttgtaaaggttttgtcg

SEQ ID NO: 34480 - DNA, 828 bp, Medicago truncatula
  Intron number 1 from transcript Medtr3g005020.1 (locus Med tr3g005020) derived from phytozome v7.0 (chr-ID MtChr3; po s 85969 to 86796)
aggaaaaaaggtattatacattgtttcaattttttcttataaacatatattatgaagcacgaatacatccacgaacaccggacacgacacagacactgacacgccaacacagttaataatttaaaaaaataacataactcagtgtaattaccagtgtcgttgtccgtatcggtgtcggacacggacacgcctaatctgagtagtgtctgtgcttaatattagtagttagttaattttgttaggaggagaaatcgaactctcaacctccttcttaatacttattcagcgtctcaactcatatcatcgattgactgaactacaaattgttttaactttattagttctaagtaggtttgtataatatcttcatgtaaataaatcaaaacctcaagtatctgtatataagaaaatgtgtttactttaaattttaaaattatataccacatttgcattgtttgatttgtgttttcaaagatttctatataaaataagtgtaataatacaagttatttcacttatttatatacaatcaataaaaattaaaaattaaaaaaattattgaaaacaatgtgacaactttataataaggtgataatgaaaaatgatgtaaactgaacataccagaatttatctagagtacctatcctatcaaattcttcaagaatcctatcaaaaatgtctcaaattataaattgttttacaatatcaaaaaattattaaaataatgtgaagcaactatttatttgacatgatcttcttgagtttaacattctatgttgcctcttgctttcacttgcaggttgagaaacctaaagctccagtaaccaa

SEQ ID NO: 34481 - DNA, 599 bp, Medicago truncatula
  Intron number 1 from transcript Medtr1g071320.1 (locus Med tr1g071320) derived from phytozome v7.0 (chr-ID MtChr1; po s 14248470 to 14249068)
ccgttgacaaggccttgtgtgacttaggagctagtgtaagtttgttgcctttatccctctttaaaaggatgggaataggagagcttaaaccgaccgagatgatcttaaaactagcagaccgttctactatccccctagctggctacatcgaggacatacccgttaaaatagaagggatatatatcccgactgattttgtagtggtcgacatagaagaggaccttgatgtcccgataatcttaggacgacccttcctagctactgtaggtgctataatagatgttcagagtggaaggatagtttttcaagcaagtgatgcaatgattgggttcgagctggaaaatgttatgaaaggtcccgctctttattcttgtaacatgattgaagtacataatgtgaaagaacgctttctagcgtcaactacacaatatgacctctttgatcctttctaaggacactttcctaacgtcaagctaatgacaataaacgagcgcttcgtgggaggcaacccacgcatttaactgcttttgtttttgttttttgtttcttttaattattttgtaggttattgtccgagaaaaattcaagaaaacagaaaa

SEQ ID NO: 34482 - DNA, 942 bp, Medicago truncatula
  Intron number 1 from transcript Medtr7g018210.1 (locus Med tr7g018210) derived from phytozome v7.0 (chr-ID MtChr7; po s 4451843 to 4452784)
ggaggcccctctttaaagctaggtgttgaaattttatacccaattttcacaagagttcaaagcttgaataggacattatcttctttttctcactagatttctttctttttaatctctaaacctccttttgttgttttttaaaaatataaataaaaatcttaaaagattcattcccgtataagataagtttagttgtcttattttggacaatgaaattaattttgtcttactcactttaattttaaataaaaatactcacgcatattattggaacaacttttgtttagataaactagggaatggatcctttcattctctctctctctctctctcatctcatgttttccaactgtatgatcaatcacaccattatatgaaaaatgtgagattaatatttttttttttattataaattaacagcataatgagatcaaagaggctagaagatatcttaactatgtttgcatccattgtagcctctaatcctatatgagatttgctaatatacaccatttgtgaccatttagttggatagtacatctttatcgatttctcgacctcttataattaccgatatttttttggcggatatttctggtgggcctcaaagttgtatgttcagcttacttagcccattcaaaagtcgtgattcaatccaaggtaaggtcagagttagctagtaactctctaaatctggtttggcattgttgggctccttataaagttcaggtgtttcctaggaaacttatcatttataggggccctatcgcgcccaaatctctttaaacttaaggtgatatctgactcagtaaacacttcgtgctagctttgtgatgggagtgtggaatcggtggatcatatgtttgtcacatgtggagttgcctttaggtttggtaccgagtatataggttgttagggtgagagtgggttttgccgtgtaat

SEQ ID NO: 34483 - DNA, 847 bp, Medicago truncatula
  Intron number 1 from transcript Medtr1g135040.1 (locus Med tr1g135040) derived from phytozome v7.0 (chr-ID MtChr1; po s 30078412 to 30079258 reverse strand)
ttaggtaatattatacattttcttttagtatagacattattcttaattgttagtttgctgaaatttttgttgtcatgagaattacatttgttgatatgttactgtttcaactttctttgttcctaatataaagaaatttgcataagaatgatattcattctcccaacagtttcttttaattcactattggtgataactgaaaattttaaaaattcgtactagttttgatttccagttttctactttatgtaatgcattcttttaggtgatttttggtgttgaagaaaatggtttctgttcacttcctttttcctcttccttttttttggttggcgataacaaaattaatctttcatgactgttattgttgctgacctgactaggacttgtacattcatattgaaaattagttatgtttatattttgtccttctatttatacatcaattttccgtcaatgcttaaattactgttttttttaactgatttatcacaacacactagtgtttatacattatttgttgaaaatattactatgctcgtgtacgaccgatgtgaaagaacttaacaacattcacttgcattttttctctgaagctgtctttattggttagcgactatatatcacaatgtccattattacttttcaattagactgtttcaaatcccttttcaaatatagaagattgggaaagaaatttaattaagaatagctatgcatttatttctcagtcattcttgatctagccaccattctagggttctactctttttttatgtctgttattcattttatgcaccctctttttagatagtttgttctaacaagatgcctttcatgcgcaggt

SEQ ID NO: 34484 - DNA, 688 bp, Medicago truncatula
  Intron number 1 from transcript Medtr6g036550.1 (locus Med tr6g036550) derived from phytozome v7.0 (chr-ID MtChr6; po s 8117732 to 8118419 reverse strand)
gagctcaccgtcgccgccgcacacaatgttggaacgacttttcttccaattttcttctagtttgacgtaacattgaaaattgattccatcttccactctcttgcgattcgacgtcgattgcagttatattgtatgatgaatgattgcagtcagaaattatgaaaaagatgatgaatgatttgagtggaattatagagaagttatattgtgtgatttgattaatggaacctggaagtgctgcaattcttgttccatgaattcacgttttttttttctttcttttattattttccttttttttttctttcaatttttgtggtttttttaatttttcgatttcttttttattttattaattcagaaaataattatgtgatttttttattttttttaaaatttaataattacacacgtggcgtgccacgtaggcattgaccggtcaaaattgaccaaaagaattaaggttgcaacggttctaaatcttagggggccaaaattgtagtttctgtacttaaggggctaaaattgcaagttttttaaaattaagggggaaaaaagtgcactttagcctattttatattgtaattacgttaggattaattagcttttatatgtaattattttctttgtctcctatcctataatataaataggagctcttcattgtatttgatatacacataaaata

SEQ ID NO: 34485 - DNA, 636 bp, Medicago truncatula
  Intron number 1 from transcript Medtr2g025790.1 (locus Med tr2g025790) derived from phytozome v7.0 (chr-ID MtChr2; po s 6908689 to 6909324)
gtccaggggtaaacccttttggtccagacgcacattatttttattcttattagttgcttttattttgatactaatagtaattatgttctcgtttcatggtcaaatttgctgtagaacattgtggtaggcaaggtgttacattgaaaattgttttactagattgttatattgtttgcttaacatgggattttctcattctttgtttgttctcatttcatatattacttttcaagttgtatgtatcacgggaagcaagtagataccgaatgatcttatttgtcttcttattgttttggatctacaatataacaaatcaatcctcctctattaattatatagtacgcgagccattgttatggcctaattatcattaatgctttcaaggtcaacacaatacttaacgttattattatgatgattaatctccttaattatatattaaacattattattccaaatattcattttgttttgcgtttccgatcgttaaatattttcatctgttaagagtaacaaataacacacggataaatatttcctccaaaaaattatgctgaagcattctatctaagttaataatttgatttttgattttatgtagcattttcctaatcaaatatccaaaagggtcttgaa

SEQ ID NO: 34486 - DNA, 627 bp, Medicago truncatula
  Intron number 1 from transcript Medtr4g106950.1 (locus Med tr4g106950) derived from phytozome v7.0 (chr-ID MtChr4; po s 23208016 to 23208642)
aacaatcaaatccactaattcttccaactaggtcagttttcttcttaagtttccaattcaaacttagtgatttgctttgacgataatcagaaatggcgattcaaatttggggtttcagggattcggtagcaattggatttgtagtaaacttgatgagttcaattttcctcatttcattaattcaatcatcattttacaattcccagtagatttaatcatcaaaatatggtaaattcaattgatagaagttacagtaaaaataggacctacaatgtgactttttttcttcacataaggtaggtaaaggtatgcacacacatgtatatacaatacatacgtataaatgaatgagttttatagatcactaatgtttgtatatgtatatgtgtataagctatggtggattgtgtactactactacaatatagcttgttaaagtattatctgtttacaggattttaggctcgtgttaacttgctactaaaatactcaatggatgtagaatttacataatagtttgaagttcagttgaagaagctcactgagatttatttctcatcccgtttagtttctttatatttcagataagcaggttgggaaaggtaaaggcaaaatagtgtagctttt

SEQ ID NO: 34487 - DNA, 746 bp, Medicago truncatula
  Intron number 1 from transcript AC233682_31.1 (locus AC233 682_31) derived from phytozome v7.0 (chr-ID AC233682; pos 123351 to 124096 reverse strand)
tggctcctattgctctgcattgtggaggtggttatgtgagttttgtgggttagggagctgtttttttttcttcagttgtttgcctccgagaagtggttagatgttcgtgctctttgtggcttaaacggccgtttttttctcagttgtttgtctcacgttttttttgtgttggagtacttcttgcacccaccttatcttgtatactgatgtactttctttctcttctcttatcttttgccttcaaaaaaataataataataattagacacacaagcattcacacagaacttattagtgaatttaacagaaaaaaaaaactacattagacgaacgaggcatcacaacagcttcttccacaaggcccacactgtctacacacacctaaccttaaactaaatatatataatgtatcatgatataaaatagtaaagttagcggtaatgttagtttttgggatcaaacccaagacctcctccttgtaactctttcaacgtccattagctcaccaaccgagctgcttatgcgggacttttatggatcatattaccaatgaatcatgtgcatggtattttgatcagaccctgctgctccagttctccattatcttttagacttacatttcaattttggttttagtgagtgtttatgcatgtctggcactagcaattacctaattaatattatataataattcttctgtatcccatttaggttcctgttggtagggttacccttggccgtgttat

SEQ ID NO: 34488 - DNA, 944 bp, Medicago truncatula
  Intron number 1 from transcript Medtr5g093370.1 (locus Med tr5g093370) derived from phytozome v7.0 (chr-ID MtChr5; po s 36724259 to 36725202)
caaaggaagtggtcttgtttttattccagggaaaggttagttttttaatttttctgtcatggtttaattgatttcaactctatatggggattttgtactttctgtaaagtgggtttatgaaatagcacattagtacacattgttgcttattctgattttagattttgtcaataagtatatctaggactgaatgtgttatattccatagatgaagttgagagaaagttagaaaacttttgtattgatggtaatgagtaatattgcaaatgagaaaattgacctttttatgaggtgattacatctatatataggcaccaccactaagtaccaaaaactactatctctaatagtagcaaagcggacggagtgagtaaagcaagagcccctgccctttgggcttggtccatttgttagttgtgatacaactaggaggggatagagggtgcggggggcgacagattaaggtagacctgtaatcttgactacaataattaaacaaagttttgtactatgtaatcgtaaccattgcataatagaaaactacaatagacaacagtcactctgcgactgcagtccaaggtgtagcacatgctaggatagttagagttttgttattgttagtcaatttggaattagttaggagttagttactcaattagttgtgcagctgggttctattaataacactaacattattgtgtacaaaattcaatatcttttatcaatctataatatatgattccttaatgagcttttatctcaatgtgtattcctatgctctctttctctcctgtgagtatgatctatggccctatcatcccatgattcttcacagcaatcgaccgaactctgtaatcaatctttgtgttcttgtgcgtttatttatttgattactttagagtcgggtttgcctcaattttcgtcctttcactttacagatcaaa

SEQ ID NO: 34489 - DNA, 857 bp, Medicago truncatula
  Intron number 2 from transcript Medtr3g136680.1 (locus Med tr3g136680) derived from phytozome v7.0 (chr-ID MtChr3; po s 34557058 to 34557914 reverse strand)
aagcttctgcagtaaccgatcttcaacgcttggaggttagatcattgcattcaaattccattcttgttctgtatttagaatctgtttggattagtttatttgagtttatcttctagcataagtacttgtgagagtgtttgagagagttcatggaaacaacttatgacatgtctaatagtttttttttttttctttctttttccagattgtttccataagttcttcatgattgcttatgaaaatgacttatagttgttatagcttactccctctggtcattattataaacaaaatttcagttttcaagttcgctgaataacttttctcgatatataagttattcaataaatctgaaaagtgaatttttgcttataatgtgaccgaaaagagtatatttgatttgataaacgcttatagcacaagcgcttaattaagtattttgttcaaacatggttggttgtgattttttttttaaacaatttcctttgaaatggctcatgtatgttgaacacccacatagcaactgattattggatttcaagttttacttgcataagccattttttcaaggaaggtataatataaatcttacagcaattagaataggctgttgataaattaaaggaacaaaaattcctaaaactcgcataaaatatgctcactagttgtttttgtctatttgcattttggtataccttcatctgccttgtaacaagtccctttggatatttcagctattttcattgcagcacatattctatctccatcaggtctatgctgacacttttcagctaacctggatatttttcaatgatttatcaggtccttgcaggaagctacttcgcagtagcaggagc

SEQ ID NO: 34490 - DNA, 881 bp, Medicago truncatula
  Intron number 1 from transcript Medtr3g059190.1 (locus Med tr3g059190) derived from phytozome v7.0 (chr-ID MtChr3; po s 13285093 to 13285973 reverse strand)
atacaaggacgagttggtggcgtccttttggaagtgtgagttgactcggtgagtcaagtaggccgagtgtgtacgttagtttgggtttggaatgagtgaggtgactcggtgaaccaagcaggccgagtgtgtttgttgttttgggaggtgtggatacgggtggcacaactctaccaacaacattatatggttttagatgcaaaattaacatttgtgtcttaggaagggatgaattaactacggtaaaagcatgaaaaattacaagtacttgggccattcatgaaggctacatgtaaaaataagtgattggtgattttacctgagtgataggagttgaaggaaccaagtaagctttccaacaggaaccaaatcatcagagagtaaaatgaaatggtgacaaagtagtagtgtgaaaatgaggaggtaaaaagttagtatatatagggaggaaaataataaagggtgtggtgggggccgttgaataattatgaaggtaaagaagcattaatgaggtgggtataatgatgggacaagacatgataaaggacaaataagtttgaatcaaattagtgtttacaactcggtcacgaactagttatttgatggacggcgaatcggtatgagtcgtttgagcaaagaacaaacgtttacgccttaacaggcttcacgtttggtggactatggactggtacggatcgaccggattaaagaacaaacgtctacgccttaacagacttcacgcttggtggactgtggactggtacggatcgaccatattaaagaacaaacgtctacaccttaacaagcttgacgcttggtggactgtgaactggcatgggtagaccatttccatttgattgttcaagtcaagccagctcagc

SEQ ID NO: 34491 - DNA, 928 bp, Medicago truncatula
  Intron number 1 from transcript AC235665_10.1 (locus AC235 665_10) derived from phytozome v7.0 (chr-ID AC235665; pos 39426 to 40353)
atatcaccaggtaagggtttttacgttttacatgttggtatcttacgtttgttgtaattgactccaaattttagtcttagcaaacaaatgttagtcgttggtaaattgttagagagaaaaataaaatgttgaatttcgaaaatctaacccataatctccattttaactctcctttaatgttcatagttcgccaactgagctacaaacgcaggataatttgtgattcatacaagattcgtgtctttgttcctttctattccaaacattaaagaataatcattagtcccatcaaaacctctatgccacttaatactcaccaattacctctttacatttgaatatcatatgttcttagtttattgcaagtgataaagaatttggattgtcactttctttgatgactctcaaccctaccactcgtgtagtataagttgattagcactcaacaatagatgactctatatatcatatgtctagggacccaagtgatacttgagatgacattcatttgaacgttttgttaggataaaatgtgatcattagttgctttgagaaagaaaaaaaaatgcatgatgatgagagagaatagatttatctttgtattcgaggcaaaacttgagcataagagagagcttaatcatttagaccggtgtccctttcatttatcaatttaaaaaaataaaaaaactttttcaatttttctgtttcctccacggctgtgatcgtttaatttgtcttataattttgcatttagataaactcgatggttttggacttttggtaaaaaaaaatgaaattcttttgtgtaattttttgattaaatatttttggtttgcttttataattggtataaaagttttagataaaagttgtagataaaagctgaagaatgatgaaaaaaaattgtaaataacagagtttatataaa

SEQ ID NO: 34492 - DNA, 886 bp, Medicago truncatula
  Intron number 1 from transcript Medtr1g028480.1 (locus Med tr1g028480) derived from phytozome v7.0 (chr-ID MtChr1; po s 6925500 to 6926385)
aatcttccattctcactgaaatccctttcgacaaagtaagctttcaatttcattcaattcaattcacatttgagttttgcttcattaaaaaatgattaattgtgttaattgcaatgataatatgagtttcatttactaaaacacttttattagtggagtagtgtagttagaagtataagatacaaaaaattagtttaagacaatgttttgcaaaaacagtgaatagttgataagcagcttatagtggatgagcttatggaagataagctagatgattgaatttgtagtgtttgtaaacttagcggttaaactagcttatatatatgaaatgacatgaaaaatatatatatttaattaatatataatttttttcaatttagattataagggtaaaattgagagagaaaatggtaagttataaactacttgagttagcttataaagaaactttaagctagtaaaactaagttataagctcgcgacaaaatgacaattgtctttttcaatcagacataagctataaactcagaaatgtgtcttggcaaacataccttgagtgtcacatttgagctccgcttcaaaagaaaatgatttattgtgtgtgttgatttcaatgataaaatgagtttcattcactaaacaatccttattaatgtggagtatctagaagaaataagatacaattaataaggttaaattagtggggaaaaaatagttaatgtttcattagtgttctaaagtgactattattttgggatagaaaaatattgcaaatgagacaattataacgagacagagcgactatttgttaatgttaatgcaatgattctttttatttttgtgttttgtaggttcctggagctctgtgcgtgttgcaagaagctgg

SEQ ID NO: 34493 - DNA, 543 bp, Medicago truncatula
  Intron number 1 from transcript Medtr2g120990.1 (locus Med tr2g120990) derived from phytozome v7.0 (chr-ID MtChr2; po s 28612714 to 28613256)
tcaaaggttaacacattgaaacttaaatgactaaattgaaaaggaaaaagagaaaaaaagatgactagatattacaattcgtatgaaatgtaccaattatcagatctctattattttcattgaactgaaacagaactcctttcatgtacccaaaaaaaaatataactcatttcatacattgaacttagtcacaaacatacaacaattcaatccaatatcaacaaaaatcaatcagattgatgttatcatgctcaaaaatgaaaactacttgtgtcactatatattaacatcacaaggccacaacacttggtatctagaatgatgtcttcaaactccttatcctcttcatagtaccattgagcaaatagacaacaacaacattaatctaattggggcacaatacaatttaatgcaggcataccaatcaaattatttgattcaatttccaaatgtacaaaagaaaaaaacctcaaaaggggaaattaaaccaaataatttgactagtatgcctgcattaaattatattgcaccccaattagatta

SEQ ID NO: 34494 - DNA, 972 bp, Medicago truncatula
  Intron number 2 from transcript Medtr5g077140.1 (locus Med tr5g077140) derived from phytozome v7.0 (chr-ID MtChr5; po s 28401734 to 28402705)
gttgttggttgttttcattcgacagcatttacaaggtataatcacttctgttctgattcatcgattatactatattttgtttgtgatgttgagcctggcttcaaacttgtgttagtccaatatgatcatagccattttgaattttcctttatttacttttccattgttagtagttcttccatttcccaaatatcaagaaaatacaaagttgtttcttataacttggctacctgttgtgttacaagcaccgacttgcttgtcctgaggtaatttgcttggtagaatagtggttggatagagaaaggttgcctgcatttgggaatgatggaaactatgaaagtagtattaactaacatctttatttctcatcatgtataagtttgtttggtctttcgctctcgttaccttgttaaatgtttttcattgatcccaaatccaactgaaaaatgcttgtgtggcttacaatactggctgttgtttccgaaaaaagggcttagagataaagaaaatatcatgtgagaagttttttgaggatcacaagggtcgcaccacacctttgttttatttactgattatgtacaacagtttttttttactggttctcccccttggtggtgtcctaccttggtaagaaaattgcagctttgctaattgtaaggcaaaaatgaatctcgtggagtaaactagttggtgatgttattgtcatgtgtttctgtagtgatcctctgttaacaatatgaaagctttacttatgaagataagtacatgatgatatgctttctacctttctcgtaagttacaattgtgtgttttcttatttacaatctcttcctctgaaggtgcacaatccattgttcacacttatagcttgagtgttgtcttattttgtaagttattattttctccacattttctggtagtcatttctgcgaacttgcaggtttctttgtcacaatttggatagcggctgtg

SEQ ID NO: 34495 - DNA, 577 bp, Medicago truncatula
  Intron number 1 from transcript Medtr4g041500.1 (locus Med tr4g041500) derived from phytozome v7.0 (chr-ID MtChr4; po s 9838982 to 9839558)
atcggtgactttcttcaaactaccgatttgtgactgattacacaattttgttttgtgatcgcatcttcatcattttggtattttatggtttcattcctttttttttttgttgcttttgtgtcttctggtttcttaaaactctgacttgtgatttttttaatcatttgtgctaagttttcgatttctatcttgatggattttcttttattctggatatgtttcatgttgattccatttagttctttggtcctcgtgtttctaatttcttgtttccagatttgatttttgtttcctattgattcaaaatgttttatccagaaggcacttttcaatccatttcagccaaaataatagaaatttaaatagaaatgtcttattacacgctactcaatctagtagttttttttcttctttcaattcaacattgttttcgggttttttttatgacaaaaacattgttttcggtttcgatgtgctactggtgttgcagtttgcttgaattgctcgtaatggaggcagccacttatcccaaatacgattcagaaaaaaaccctaaaaaataaaaactggcagcagc

SEQ ID NO: 34496 - DNA, 946 bp, Medicago truncatula
  Intron number 1 from transcript Medtr1g100580.1 (locus Med tr1g100580) derived from phytozome v7.0 (chr-ID MtChr1; po s 20937621 to 20938566)
aattgtcgccgccatcgttgctcttagtatcacaggtattttattcatttctgattcaggggaggtttaccacttgagtgatgatttttctgattttcgtattcaattcctcttacgctaattaagcttattagtcatttcatatttctgcttgtgatctggagcggagaagatactccacagttttagatagatcgtaaacattgctatatgtagtgtagcctaatcttattagtgatttcatatttctgcattttttttaagttctttcttttattgctaagccatgcttcagtgttgaattcaattttgtcattcaaggtttgcttggaaattaacagcctgatgtttgtactaaaaggtgtagggctactgccgaacaataatatgattgttcaaatttcgctgtgccataagccgctatttgacagcactgattgaatttagaattctgttggtttgacttagatccgaacactgtattttaagagtttaataacaatatgatatgatgacaactttttaaattttttatgtccagagtcgtatgtgactattttgttcactccgagcaaatggagaaatataattggacatgcatagaatttgaatgaaataaaatgaaattgaatggagttaaatgtaaatatatgtctacattgatgaaagatatcattatatcattcatgtttttattctggaatgcagattacagatctcatattcctcccttattggaatgaaatgaaaatggccgattccatcttttttgtatttttatgttttccttattgagtgttcctcggcaacaaaagactttatgattcttacaaaatgttcatgtttaaattctaattatgttcatctttgactgttgaagaccgtcaactacactgtctggtagtgtttgcttgtgctaacataagtttctgctttcagctgaaaa

SEQ ID NO: 34497 - DNA, 657 bp, Medicago truncatula
  Intron number 1 from transcript Medtr3g076320.1 (locus Med tr3g076320) derived from phytozome v7.0 (chr-ID MtChr3; po s 17635768 to 17636424)
tgtcttgtagcgaggacacactcagggtcgtggaggtagtggttgtacacttgtactttgtcaactcttcaatgagggacaagcacccagtgcttttcaaatgaacgttggcacttcccttttgatccttcgctctcttagacgaggttaacttaaagaaacagctcttttgagattctagattgaatcttctgatcaactgtagcttctggtgatgatatagcttctgatgaaatcttgcttctgatgaactttgcttctgatgaacttctgcttctgatgacgtcattacttcagaggcacttgtaacttcagaaacacttcatagcttcagacgcagttttcttcagatgctttaggttcctttgctctttattgttcttccaagacctattgaaattgattaactttgcctatggtcctgtacacttgaacaaatattagcaataaccaattgacaatttttaataccttgttatcatcaaaactcattacggtttattgtaaaacacattttgttccaacaaggggatatggggcggttgggatgggatggagagggaatggcatgggtgtggaggcgccggttgtttgcttgggaggaggagagtgtgagggagtgttctaccctgttatgtaacattgttttgcagggta

SEQ ID NO: 34498 - DNA, 406 bp, Medicago truncatula
  Intron number 2 from transcript Medtr2g113900.1 (locus Med tr2g113900) derived from phytozome v7.0 (chr-ID MtChr2; po s 26791171 to 26791576)
tagctgtaaagtgaaacaaagtaatatttgttgtatttttcttgtaaatggatcttcgttgattaatattctcatgcatattttaccctggataatatttacccttcgattttttttttcttttaaattcttgatgtgggtggctcgaccaataaatcaacagccgataaaagcgcaaaatgacataccccactttttcttattgttttttttttttgaaaaaaagaagcggagtttgtcattttgcgcttttatcaacttttgaattttgattttttacaattttttttgtctccttcgaattgtttgatacatgcgccatttcatttgatttctattcctcatgtgttctttattttgtacgggtattttcttctagataaagtcaaagttaatttgaatttga

SEQ ID NO: 34499 - DNA, 710 bp, Medicago truncatula
  Intron number 2 from transcript Medtr2g026510.1 (locus Med tr2g026510) derived from phytozome v7.0 (chr-ID MtChr2; po s 7258328 to 7259037)
cttaaatcgcagattagcaggccagattatcaaaagtaaggttaaatttatgtaatttataaaaataaatacttttttgcatctcaattatatgatgttctttgaaaatctgtgatgtttttttttactacatttatgattgattgttgaaatctgttttgtaattgatggtcatgactttggccttgtttggataaataatttaattaagtgtttatgtataagctatttttataagaaaagaaaaaatgaagtcaaactgttttcataagctatgtgggagagcttatggatataagatgaaaacaacttatggacatatcataagttgtttccaaaagctaatccaaatagtctcacaagtgtttatgtcaaataagtcaatccaaatgacacatggtcatcttcaatgcatttttctatgactgaatgcgattgctaaatgaagtttataattttgaggatagtacgacacctgacaccctttttttatgtctgtattttgtgatattttttatttgagattacattgcagatgaaaagtttttggtatgagatttttctctcttctattgttcaatgttgattttgcaatttcttttagtgattaattgagacaaacatgatctattgataatattaagtgattttatcttagtgacgcgctttggttccttgttaactcttttggttatgcaatggacagggac

SEQ ID NO: 34500 - DNA, 295 bp, Medicago truncatula
  Intron number 1 from transcript AC235488_8.1 (locus AC2354 88_8) derived from phytozome v7.0 (chr-ID AC235488; pos 29 758 to 30052)
ttgtgaccagatcttcgatctcgcactcggacaaggttgtgcggacgattttagacgaagatgaaaggttgtgaaaggggttgaaattgaagatggaggtcgatggggttcatgtcatgtttaggttgatgggtgtcttgtgtttgactatgttcaaattttgcagaaatccaactaatccccaaatttgtagatctgagttttactttttcttttgagtgttgttattattcagtctttttttttcttttgtttttgatgttgttaatgacttactgttgttggtagtgaggaa

SEQ ID NO: 34501 - DNA, 433 bp, Medicago truncatula
  Intron number 4 from transcript Medtr2g114640.1 (locus Med tr2g114640) derived from phytozome v7.0 (chr-ID MtChr2; po s 27139343 to 27139775 reverse strand)
gattggtcatccgagatttgagctaattcgccacggtataatttcttcaaatttgaaattgatgttaagatttgtgtcatttggttgcacgttgcttcctctggtctcaaatatatgcaaaaattggtcaaagaaccaaatacatcaacttctttgaccaattttttcttataagtattaagtatttgggctgttaaatatagctttttagtggtcttaaaaactatgaagcatgcaacagaagcttgttggttataaaataagatattaaactgactacaaatcactcaccattgtaaatcagctggccctttgatattgtacttgtacaacactaatgatgatgcttcttcatgagcaccaaaattgtgtttcccattgtttttaataaactatggacctcaacattcatttctgttttttccccgagtag

SEQ ID NO: 34502 - DNA, 1004 bp, Medicago truncatula
  Intron number 2 from transcript Medtr3g147380.1 (locus Med tr3g147380) derived from phytozome v7.0 (chr-ID MtChr3; po s 38126578 to 38127581 reverse strand)
aaggatattggaggtaaacaaatgttaaatttatttatttatttatttattttttggtacaaatttttatttatttattattttattttaaagtatattattatatttaatgacaatgattgtttagcaaagtacataattgtttaaggttacataacttttccaaatatcaacaaaccgtttaattcttttcggatttcaatgcatatccttttattaaaataatttatttacttagatagaataatttgttgttttattacatgtggctggatttttttctttttttctttttacaaatcatgaggctggacattgtaattggaattttgtcattgacaactaaaaccatggacatcttgtgatagtcttacctttgataatatatttttcttataaaaaaaagaagaagaacaatttatttaatattgaaaacagtttcattactttgatatgctaatattacagtcatacagtccatgtaagatggatggaaaaggagattgattgttgtgctagaagagtgtggtaaataatttaattaaggttatgactggattccgtaaaaaattaaattgtttttagagttaactttatattaaatgacagtgaaagttgaaaattaaatgatttttagagttaagtttatagttaatgacaatgaaattgagatcagaataattagatcgaaatccccagtatcatggggtttaagttattgcttttggcagccactaatgaaatgttttcccacactttattttaaaaacacctacaatatcaaattcaaatcaattcacatgaaaggtgtacccatctataactaaggaagactaattggagactgcttctatttttagatcacataataggaattcttttacgatttacttgtatatagttaagtttatattaagattgtcgataaatggataaatatttatttggtgtttttcattgaattttatgaatgtgaattacagatacttggttttgggggaagc

SEQ ID NO: 34503 - DNA, 428 bp, Medicago truncatula
  Intron number 1 from transcript Medtr2g046250.1 (locus Med tr2g046250) derived from phytozome v7.0 (chr-ID MtChr2; po s 12939562 to 12939989 reverse strand)
tcctcaaccttttcagggtgtaatttggaatctgggtaaggccctataaaggcgtaaacagtaccagagacagagtatggaatgagtacctgagatttctaaatcttggtcttttctgcgtctaagtcgggctctggggcgtgaatttggttgtttcttcttgggaaagcctcaacactaactacaagggggggatctcttggccgttaattgtcatgttagtcaagtcgttaccagaagccatctttaggtcaggattgacgaaattgaagcaggttaaagaaaaattgaacaatgttttgacgaatggtgctaagaaaatctggaatcttttgaatttttttgaaaaggaaacaatgttggtgaataagtaaaaaaattcggaaagggaaggtttcaagaaagagggcttcaggttgaaggtaaag

SEQ ID NO: 34504 - DNA, 575 bp, Medicago truncatula
  Intron number 1 from transcript Medtr6g009510.1 (locus Med tr6g009510) derived from phytozome v7.0 (chr-ID MtChr6; po s 1596658 to 1597232)
gacctgaggtatcaaaaaattaattattttccattttgcttatttttttttattttatttgccacattttaaactaattggttgatagcttatataaacatcaaataaaacagttaatctcatatttagacggtgggtctttggatttaccagaacaaagaaatatgtgagacttagatcccagacaaaattacttatatattaaccacttgcggtatcctcatactgaagatgggtttcatactcacatattttctagatctgaaatgaattcttttcaagtggactattttttgttggtaatattcatttatagccatatatgatcaaaatagatcctttgtcatcaactttatggtacattcgactgcagatagttcaactatgagatatatatgtttatctcttttaatcaaacaacctcatgacaacatcataaagttgactccgtcaaatccaagtcgataaatgagttgtcaattttaaaaaattgttgagaattaatatcgattgtttagttagaaataattcatctcatgcaatgttcttaattacttttgtagttggtgaggcag

SEQ ID NO: 34505 - DNA, 552 bp, Medicago truncatula
  Intron number 1 from transcript Medtr1g028540.1 (locus Med tr1g028540) derived from phytozome v7.0 (chr-ID MtChr1; po s 6967924 to 6968475)
tctaacttgtactccagtacctatcactaccacaggtatatatagaaatataaaattttgaacgatatacatcaaatttctttgactcgtttttatttagttacataagagtcgttgaaagagagagtatataaaatgaaaaaatattaggagggtttgaattttagtgtttagttttttgatatatagctaggtcagtgacgaattttcaaactatatagcttagtgatagagatctcgaggagaaactatatagtttctatgaatctatgataaataggatacctaattggtctatatattctatatatccattcctttcatactctatcaacttagttttttttctctctctcttttttctctttcttttcttgtgaaggatgaaaaaattgttaggtaagtggttctttctttcttttaaatttgaaaatgatagctatatagaaatgattgaggtttctctttatgaattttttgatttggatttaattttttttaattgttttgaaattagggttggagttgggaaattttccaccggagctgaat

SEQ ID NO: 34506 - DNA, 692 bp, Medicago truncatula
  Intron number 1 from transcript Medtr5g037270.1 (locus Med tr5g037270) derived from phytozome v7.0 (chr-ID MtChr5; po s 15687800 to 15688491 reverse strand)
gtaatcatagttatataccatatagcaaattataaagtagttaaacaaatgataaaaagatctaaattcaaggaggtgctgatttcattttggtatagtgctcttggagtctcttgcaattccaattgaatttttgttctttcttttcaaggagagaagttttctcaaggatttttaaagtattggatgatagagtttttgatttctttcagaatgtcgaccattttttcttgacatttcgaacaagtatctttcaagacagacttttcttgatgaagcttatttacttgctccttaagtaattgaatttgtttctttgaagattttagtgaactaagtaagacccaaaacttgtttctcagatagttcatcaaccctatctccgattttgaataataaatgttttaacttttctctacagtttgtgtgatttggaagatatttcaaaaggttacttgaaaaaactatatgtcttaagtcatcaagcagtgtatttattgattccctctcgacttgagtagcttctgctcggtttgcatctctgcagcttgttatacttttctctagcaaggaagcgaaaatggtttcactttacacttctatgtttttgtaggaaacagaacctgtaaatgacttggctttgaagtttgcaaagcatttaacttttcgtcagtactgattctttaaaaagg

SEQ ID NO: 34507 - DNA, 474 bp, Medicago truncatula
  Intron number 2 from transcript Medtr5g072200.1 (locus Med tr5g072200) derived from phytozome v7.0 (chr-ID MtChr5; po s 25707855 to 25708328 reverse strand)
ctccttacaatttgttttgaggtattacgagacatgtatgtctcaattgcgtcatttcttgtaatctgatatgtttgagatttttactccttgtgtaattaatgtgtagctttcttctttgggcttaggtcttctttgtaattaatgtgtgtttcgggttatataatccgaaccttttctatatatataactcgaaatagaaaatttccttcatttcaacggtttctattgtgccctaaaactcctctctcacatacccaaaatccaaaaatccaacattgggttattttttaggttttttctcaaaagcatcacatttcaagcctttttcaaacaccaaacacaaggtaaagtctcattgctacgatttatagttgttatgttgtttttgctatgatttacattttatgttgattttggttattttctgaacttttttattaccatgcacatgtgaatttacatgttctagat

SEQ ID NO: 34508 - DNA, 866 bp, Medicago truncatula
  Intron number 1 from transcript Medtr5g072200.1 (locus Med tr5g072200) derived from phytozome v7.0 (chr-ID MtChr5; po s 25708359 to 25709224 reverse strand)
aggcgaggggaatatcaaagaagaggacaaggtgagaggatttggtgacatgtgagtgtttgcctaaatggaatcatagtggcccatgccagagaataatcttgtgtctagcaatcatgatatacccctcatccaatttccttctctgtagtgtttactctgtttctctcagttttcagtgtcatgttgagtaatagtgagtgagtgagtgacattgcaatcaatacatgctaaatgacttttgattgcattttccatctccttttccagccatttccatatctatatgcttcttctttagacataagttggcatatacgttctttctctttttatttaatttgtcctctttgtctctctctatttatgttcaaagtgaacaacatatcgtgctagcttcagattatattcttttatttttgttatttattcttcttcaagcatttttttatgattattgtccttttagacttttagaccagttattattatacagtgaaaagtagtttgggaactggttcacattttttttttctcatgaagtaattattaccacttattacatcattttaatataacttcttttaccgtctctacctgataaaaaatgattaattgcaaagatttatcgcaaaatgtgtttcacatacaaaaaatatatattttatgaacatttactttaagtctagggacattacataagaaaataaaaatataaaaaggtaagttttacaccgaagagaacatcttttacactttttaatacattgattatacaagtttcaagaagttattatatacacgtatgacataagttagtattttccttaatttaatatctaccaattttattgtgaagctaacca

SEQ ID NO: 34509 - DNA, 775 bp, Medicago truncatula
  Intron number 1 from transcript Medtr5g011150.1 (locus Med tr5g011150) derived from phytozome v7.0 (chr-ID MtChr5; po s 2961075 to 2961849)
tgtcttctctcctaaacattgtgtatctataaaaggtaataaatttttttttttgaaggaatagtaatatattttgtttacctctattttgctcggtaactagctaattgcagctaaataagattgtcaaattggtaacaatgttgtaataactaatgtggattataattattgagtatgattgaatctgcgtgcattataacaaagggaaccacttcgaaatatcctacttataattaatgagaaaaatctctcaaaaaaaaaaattaatgagaaaaaaagaagaagcaaagtagcatggttatattatatttatatctagggtcgatccaaacataagacggtccaaattctaaagatcttttaggcctccaaacgaattttactgtacaaatattaaatatgaaagttgaaaattctatacgatgacaatgtagctcaactggtccagcaactatctcttcttgactaggttgcaagatcaaatttgactatttgagtgacaacttcttttttgtacagaaaaacttcattttaatattcaatttaaaccttaaaatttgctagatccctagctcaaaccatttgatatctaatgactaatcctcaatttctcaatttggacaaaccaaacatatattaatcaacctatagaacattacctagggttttattttatttaccaataaataaatgttgctagcaattggaaaaggtgtaaaactaataaaaaaaatcatgattatatacagatacaggtagaaaatacagtttt

SEQ ID NO: 34510 - DNA, 859 bp, Medicago truncatula
  Intron number 2 from transcript Medtr3g068490.1 (locus Med tr3g068490) derived from phytozome v7.0 (chr-ID MtChr3; po s 16018791 to 16019649 reverse strand)
gggctaaacacgatcctaccacactgaaccgacaggtacatataaagtttgttttttggtctataacccttatattgtttgattatttaattgaatcgatctggtttctaatttatataatttctatctgtttcactgttatcgaactctgaactattcgaccaagccattcaactgatatataccgttacacctacaattcttctttttacatattattacaagattgctcaacgtgttgctttgtgtgaattcattgcaagtgctagcttttcctttttctttagattgcagtatagaactagttgctaaactagatagtactcatcatagatatacttcataacattgttatcaatacaaacctctagtttgtaccgattttgaacatatatgaatctcatcttgagtcccgatacattatgtgatgaaccatgattcactatcatgacccctaaatcattttaatgaatcactatcgaaacttggcgtagagagccactctttttgtcaattttgtttagccgaacacttgtgttttgtcatttgatttcagacttgactcttgaattatcgaggttggctagacctccaataaaatttgtgaacgtctaggctaactagttcgatatggaatcatggatatcttttattgcatttctgtcttctcttttgtctcttcatcagagtcatttttatctccaattcttcccttaaagcacaccgcttttgccgattcttttctatattcaaatgcatccatgtatgaacttcgaatatacgatgaaaactcacatgcctcattcactctttgctttaagtgataagtaaccttttgatctttctatgcaacagggga

SEQ ID NO: 34511 - DNA, 558 bp, Medicago truncatula
  Intron number 1 from transcript Medtr4g029000.1 (locus Med tr4g029000) derived from phytozome v7.0 (chr-ID MtChr4; po s 6803745 to 6804302 reverse strand)
gatcattgctagtgagagggccatcaaagttccaggtattataatacttattattaatatacttgataaatcaaacatgtcgtaaatccgagcataatcatattcaatgttctgtttgcttcgactattcattcataatcattgaacatgtttttatataaaatctgttttcatttctaacattaggaggccataatcacattcaaaatgtatttcgaaaatgaaatgcataattctccatgttttcttagtttatatattgatttatattactatgctggcctttgaacatgatcttgttgaaatacattaattttcttttctatttaagcaagttatttgggaatgtcacccatataagctgattgaagttgatagattcatgtcattaatttacattctgaaaaataacttcttcacaaaccccatgtccctatagaccttatcttcatgtatcgaacattatcgaaaagatttgaattgtgaaatattatagctcattttttatttcttgttattttaggcaaagccaaatatttcagagttaatcgcagagag

SEQ ID NO: 34512 - DNA, 951 bp, Medicago truncatula
  Intron number 1 from transcript Medtr2g014480.1 (locus Med tr2g014480) derived from phytozome v7.0 (chr-ID MtChr2; po s 3733864 to 3734814)
acgaattttgtaactcccttaaaagaagcggttacgtaaccgaaagttggttacttttttttttttaacaacaaataatacttgaattttttttaagacattgatatatactccctccattttttttatgttctttttagaaaattaacatcaaaacaacgatgtgtatttttgcacattttcttcctattataccctcattttaattcatcaataaattcctactttttgcacacattttatattttcaatcaatttaatatgttatctttctctcttaacaaacaattgtcaattttctaaatattgtgcacatctttttgattattttaagtcaatataaaaattattccaacttcacattaatcaaaagttaagaaaaaattaactttcttccaactcctttaatcaaagttaaggcttcaactatggcttcaaccaatgctagagtcacacttgaaatttttaataattgttacttatcttatttttagaatttaaactcttattggaaccattgtttggaacaaaatttgtttaaatttgaagataatgagaaacaaactttagtttttcaaatagatagcaataattagttttattgaaaaaataaaagtaattgacaaattctataattgacaaatcttaccctgaaaatatcaaaaagacagttaaatagaaacgaaaaattcactataaagagacgcttaaaaaggaacgaaaggagtataaaactgtgtttaaaccgaaaattctatgtttctcgacatttaaaatgtgcaagatcatttgcaaaatcttcttgaaaaaacaaaacatcaccgcaactaattaacatttttcctattttttctcagcaattagcaattttctattttttaaggatgtaagcttctgtcgacatttatcattaaagttggttgagtgtgtttaccattcatccaaccgata

SEQ ID NO: 34513 - DNA, 859 bp, Medicago truncatula
  Intron number 2 from transcript Medtr6g076470.1 (locus Med tr6g076470) derived from phytozome v7.0 (chr-ID MtChr6; po s 14709888 to 14710746 reverse strand)
ctcctgttaaacaatatatacagagacttcttaaggtaaaaataatactagagttacttttttttttttttttaagaagccaaacaatactagagttaactgaaatgtatatatgtttaaacaaattacaattatacgtgttgagtatggctcaaattcacggataagtggccagacactcgagcatagtgagtagatctgtaagcgcagcgtagtggattaagaagtcatacctttgagcttggctcattcctagggttatgactacggtctaggagggttgagagtgcgggggaaaacccccccatggtacagtttaggggtaaacttgtaatttagagtgtagtatttaaattttaaacacagctttgtgctctgtaccttccagcattgcattattggaaaactacaacagtcattctgttgtttgagatgtaggcacaattggctgaattccattgtctgttcttgtctgcgtttatttatctgtttgtgtagagttgggtttcctgtatagtcatgagtcatgagagatatttatcatttttccctatttggtttgtgctctgttccaaaaattcaccttcattgtaacttgtaagagaaagaagaatcagacaattagttaatcaaagcttttaattttgtttttatcatgagggcgagtattggcccaatagcaaggtttttgccttgaaacctcgtggatcacactttgccgccttatttttgtttatactatcataaatcagaacagctgttcccttttttatgttaatgatatgcccgtgttagcttattcattgaaatgggtgggctgacaaaaaaaaacttatcttgtctaaatctacagcttaac

SEQ ID NO: 34514 - DNA, 1030 bp, Medicago truncatula
  Intron number 1 from transcript Medtr1g083680.1 (locus Med tr1g083680) derived from phytozome v7.0 (chr-ID MtChr1; po s 16576496 to 16577525 reverse strand)
tcagcttcgcaaagctcttcttcatctcccaacaggtttatatttatctatttttgcttttattttcctatttttaacttgattttcctctttatttttatgcgattgaggttttagcgatggaattttgtgatgatttgagtatgcattggctttgatttgtgaaagattaatagaataagttgcaattgtaatttttgttatttcaatccagaaaatgatgaaatagattttgattagggcaaatgtagacttgtctgcagttcaatgatcctttgctagtttccatttgctgatatttttcttccaagctaggtttagttaacgaaagggcggaaaaatcccggtagttgaatttggagtgcttgctctgtatgcatgcggattttatgtgttttttttaccgtgttatgcacaattcgcggtgcatttgtcttccgttctagtattttagttgcgaactagattaacaaccccataacttggtcatatgtttagttggatttttcgattttgtcggattctccaactgcatttctttgaatgcgtttttcgctttactaaatatactgctaatatggtagttacattccattttggaactggtgccttgtgcacatatagtagttatttgtcggttatggaagcgtaactgcaaggtaagtaatcgttgcatcatgggtgcgtcaatcagggaatcgggttttgaattttggatcatttgcttggatccttctttgtttttattcttttatgacgccataatggtcaggtttattgattagaagatttaaattacaaaatgttttgaatgatgaaaataaatcacttatttctttcacacatccattcatcagtcaacatgcaagctgctgtataattgttaattattttattgcaacatggcatgattgatggattgtagaaaatgtcttgccttggtttactgattggtctatttactctatgctaaaatccttttacctgttcatcttatctcaagttattttgctttaaatcagggacagac

SEQ ID NO: 34515 - DNA, 451 bp, Medicago truncatula
  Intron number 1 from transcript Medtr3g148250.1 (locus Med tr3g148250) derived from phytozome v7.0 (chr-ID MtChr3; po s 38559192 to 38559642 reverse strand)
tgttcaatcctcatactagatacacaactaaacaggtatattagaacctcttgtttgtttctagtttaaacttgtttttgttaactgttattgcaatgagttttcaaagttggttgttgttattcaattttattccacttctgtacgtggacttgattttcaaattggttatgtcacatattttgcattaaattggaccatacaattttgcattaaactggctttggcacttgttgtatcttcgatttatatagcaaatttcccccaaggtctttttctcgcacctatatatgccttttccttattattttgcacttgttttaaatgatttcaactttgattgttttggctcgttttttcttggtacttgcgaactccaagagaagtcgatcataatcaaaggtgatacagagtagaccaaaacaaggaagtgcttgttcgagaaggtttt

SEQ ID NO: 34516 - DNA, 848 bp, Medicago truncatula
  Intron number 1 from transcript Medtr5g072880.1 (locus Med tr5g072880) derived from phytozome v7.0 (chr-ID MtChr5; po s 26035933 to 26036780)
atttcattcatgtaagtttgtttcttatttataaatttcatacaagtctttgattcttcttactgaatatgataaaatcaagagttaaagtatatgtaaagcgtaggtcaactgacaatgccgatattgtttgattaaacacctttatcattgttctaactcaggacctcgtagttgtgtgtggggtgttgccactttgtctacatagaaagaaaaaaaaatcaagaaagcaacaaaaatgttggtgtaaattagttttaccttgatataataaggcagaacaatgagtttcaattgacattagagtattaaaatttaatgtagatttctcaactcaacatataatgattcaattttatttttgaaagaaaaatataatgattcaattgttttttattttagtcaaatgcagttttatgagctaacatgattataggaaaataatcatgattatgttttgtaaaatcatgtttagggagtatgcttctccaaactcagactttaggatataaacctgagccaaaggtaacttggtcaattttagctactttagctagttagcatcatgtcactatctgtattgttcagtaatatattttagttcttaaactgaatctggataaacttgtaattgacttgattcttttctcatattgcttcattttacatgaaacagttgaatttgtctaccatagtatcctgaagcatgtttgttggttaaaaagaatgtgttgtgtctatgttatggttgaataagatatgtttcagctgcaacttttaataactaaactatggtgttgaaaataaagaggccacattgtgctaaaactgatgaatttgagtagaca

SEQ ID NO: 34517 - DNA, 552 bp, Medicago truncatula; identical to SEQ ID NO: 31399
  Intron number 1 from transcript Medtr7g045560.1 (locus Med tr7g045560) derived from phytozome v7.0 (chr-ID MtChr7; po s 10922900 to 10923451)

SEQ ID NO: 34518 - DNA, 566 bp, Medicago truncatula
  Intron number 1 from transcript Medtr5g012880.1 (locus Med tr5g012880) derived from phytozome v7.0 (chr-ID MtChr5; po s 3794771 to 3795336 reverse strand)
cctaacccgccatcatccaccgaatcttcccaaaggtatggtttcgttatttgagttgatctctttatttcttctctttttagtttttacaatttcagattctgttttctgtttattttcttcatcgtttgtatcttgcaaattaaaccggcaatttatcatatgttgttaatcacaaaattgcaaatgcttgttttttaattggttttagggtctgtttggataaacgcagcatatagcacaaacacttatcatgataatcaccacttatgtataagaattacataagctatttttatagcaaaagataaaatgaagtttaattgtttttgtatatatgttataagctctttttataagctataagctagactggagaacttacgaaaataagctgtaaaaagcttatgaaaattatcataagctgtttttgcaagttttctcaaacagtctcacaaagcttatgttgttagataagctcaaattagtcaatccaaacagtccctaactctataactagtatctctatagatattgctggcaaaggtatacgcagacagtattgt

SEQ ID NO: 34519 - DNA, 979 bp, Medicago truncatula
  Intron number 1 from transcript Medtr3g107140.1 (locus Med tr3g107140) derived from phytozome v7.0 (chr-ID MtChr3; po s 27172317 to 27173295 reverse strand)
ggtggagaaagagtcccattttcgtatgtatccttgagaaagtccaatagcatgaatgctaaaacaagttaattaatccgcttgttttcggtagttgtttctttcatagctactcgaaattaaaaccatttgatttttttttattattaaaaagtttatgtgagttagatcttgaattaactagaactgatatagactttaaggttcaaaaaattgttgataaaatattagagattatccaccaacaaggtcattacaagaattgaagatttacccttgttttttgaagtgcgtattcaaattgaataaattatttaaaagcactagagcacgtaaattttctaattttcacagacatgtatggcataagtgataaacacttgagcccattaaccatttgtttttggcttcagttcctaactcggatgcatggaaaaacatacgtctgcacgcgcgagaatatcttggtttaccaaaatatactactacttttctgtgtgaaatgactatatttgaaccgattcctaatcacctaagattgagcacataaaatgccgttaaaaaaaattaagtacatataaatatgaccatagatctatctcatatagttctttgagtgcatagcaagcaaaacgaaagtgcatgtccaagcaagaatatattcctcacaaaataattgatgaactctattttatacgtactaatagtatccaaattccaaagaaatgcaatgcaccacttaacctttatccttttagaaaattgttagcttataattaacatatcacaaagtgacagcaacaaattaaagcgacagcagaatcaactttagtttatatattcatgctttctcactttacggctaccaactaactatttatattacagtccatttctcttactctccatcagcaaaatctgtgaggatattttcaaatttcaacctctaattttgtgcattagtgttaatccaattcca

SEQ ID NO: 34520 - DNA, 663 bp, Medicago truncatula
  Intron number 2 from transcript Medtr4g103860.1 (locus Med tr4g103860) derived from phytozome v7.0 (chr-ID MtChr4; po s 22486939 to 22487601 reverse strand)
ctacgagagaggaggaggaaagagtgtagtgtcaggtgcaattcggtgcaaaccataatattgaggggattcaacacataaaacacaataaaaattttaagtgtaaatattaaaattgaggggttcacgtgcacaccctcaatgcaacgcggaggctcggctccattcatgacgaaaggtaatgctaaatcgaaaagaacacttttgggtcgtattctcttatgatgatgtagagttcgaagacttaaaaatctactataatgttctaacctaataatgtcataaaacaaagttgtaaattatcgtgagatgctctatttctattttctttcctttcctttgcttttgacaaacataggatatttgtttttcttgtttgtctttcatggacgctaaaccactaaaagtgcatttgatatcaagtatggcagaatcacggtggcgcacccaccatgatgccaaacataggctaagtatttgatttacctttgtagcagccaaccccctcgtctagcgggataaaataggcgcgcatatacttctctttaccttgttaaatttttttttatttttttatttttttagtaactgctcatttattatatcttgttttgattttcctccacagcaggtgctatttcaaaccgtgtggctgaagataga

SEQ ID NO: 34521 - DNA, 996 bp, Medicago truncatula
  Intron number 1 from transcript Medtr4g134580.1 (locus Med tr4g134580) derived from phytozome v7.0 (chr-ID MtChr4; po s 32479714 to 32480709 reverse strand)
aactttggcagaggcaaataaagtatctaagggtaagggttgagtgcttgcaaattatttaataaatgcattactttctctttttttggtttgaactcttaacctcaaagtccttaatctttaacccaaaccaattgagctatccaaccctccatgagattaaggttatatccggttatttaatatgaatagttctagtactagaaaagctttactatttttttgcacaatcagctagtttgatagaatgactttgacaaatattactctatataggtttgtggaaagtcaattcatatatggtgtgtgattgctacaattattttaatttttttgagagtgtctctttgatttattggatcgattaactttgaagtggttttttattttattttaacctacctttttgttttctcaaactttagtttaaagaattgaacactgtacacacatcaaaagttcgagcatgctaataagatctgattgccctagcttatatattttgcaccatatgctgacctgttaaaggttaattgcagtaagctggttattcacaatgcaaataattaaaacttatccttaatccaactatcaattcattgttctttgaaacgttgaatcccgttctttatcttgcaatatccatgggatggcactatactcatgtaaaaactctttacgtatacccaagagactacatatttatagttatttactttttttgtttctattagtgctcttgaactttttccgttgctttttgtttaaattatttgcattctaagtttggatatttcaaaagcttattcaacacttatatatcaagatttctcatttattgaacactaattttcttgtgacttgtaatgtgattttccattttaattatgtacattagttaagctacatatgtggaagtctctttttattatactgcaagaagattttactctcaccatttggttatttatctctttgtaggtgcaattagtgtat

SEQ ID NO: 34522 - DNA, 859 bp, Medicago truncatula
  Intron number 2 from transcript Medtr5g065790.1 (locus Med tr5g065790) derived from phytozome v7.0 (chr-ID MtChr5; po s 23047982 to 23048840)
aaattggacattcttcctcattgaataatcaaaaggtattaacttctcttgaacactacacaaacatcatcaatgttataagattgtcaatgttgatcctattggcaaggattcaacacatacatcataattaagtgagttcttttgtcaatatgagaatctcattagtacttcagtgtttgtgactttttaaattctctgcgagccttagagttttctcttatctggatgcgactttgcgttttctccaattcaaatgatacatgatataaatatatctaaattctttttttgaataaaatataatttattgcacacattgattgttttttcttcaaaaagtttgacaacaaaattcacagacattagacatgaagaaaacgacattgtatgtttgaactcacacaacaacatatcaaagttcatagatgtttttaccatataagttacatttgtaggaaattacctaatttattattgttgatattttatggatttcccatttcaaatagtaattgtttttattttaaatttttcatttattaaggtagatgttaattaaagtgaatatgacaacatattatttttatttatattcattggataatctcaataaaataatgaataggattaactattttttataaataaattatgataagataatatatcttctttatgtcaaaattattttttggtgttaactttatttttactgtaggtgtctatttgaaaaatcaatacctaatgtaaattcaaattacttcaaaataatttttataaaagcagacatgccctaagattatttgctcaattgatttaatttttctttcttttggatggttgtagaaggactcac

SEQ ID NO: 34523 - DNA, 242 bp, Medicago truncatula
  Intron number 2 from transcript Medtr5g067520.1 (locus Med tr5g067520) derived from phytozome v7.0 (chr-ID MtChr5; po s 23958688 to 23958929)
tttgcacttacaaggacaaaagtaacatcctttctcattcttcttctatatataatgattcttgttttacagtgacaatgtacaaccatcaaactctatttatatcatgaccagaataatagcatcacgtagtatttgtatatagtttctcaaaatttgaaaaaacatcttgctatagtactgacctgttgttttttaaacattcaggggattgtatagatcataaaactggaacaaagggg

SEQ ID NO: 34524 - DNA, 758 bp, Medicago truncatula
  Intron number 3 from transcript Medtr5g019610.3 (locus Med tr5g019610) derived from phytozome v7.0 (chr-ID MtChr5; po s 7339111 to 7339868 reverse strand)
ctcaacaaaggtgtcttgtctactgggcaggtttgaatttcattaacccttatcggccccgaaatagagattgatatatagatgaaaaagaatgaaactttgctaatgacttaatgctatgaagcacggacacatacactggacatgacaatgacactcacaaggtgacaaacataaagcaattggggagctgtttcatgaaaatcttgcttaggctagaataacgttgatgcttttattttagtgggacttgatcaaattagtaatctctacacaatgttgtcaaatagagggctatggcatagtggaattttaataaatcactattgttccgcgatttactatttagtacaaagtgttgtcaaataatcgctacagtgcattagcattagtggaatttgaatgaaacactattttccatggtctgcaattgacaacactgtctctacatttttttgactgttcattatttcttcgttctagatgtttcattttatgcaaagagattaataggaatttatattccctccatttttatgcattattctgttctccatagtggagattgcatgtcattagacttgctgttgataaacatttattccttagcatctttcagttgtaattgaagtatgaaggaaccaaatgtgtctaataaagtcattgatttatcaaataatgaaaatcacatcacaaaactgagctgcaatttctatccttcaggataactgttttctggaaccaacaacacgttctat

SEQ ID NO: 34525 - DNA, 791 bp, Medicago truncatula
  Intron number 1 from transcript AC233682_11.1 (locus AC233 682_11) derived from phytozome v7.0 (chr-ID AC233682; pos 33610 to 34400 reverse strand)
aaccttaatttaccgcttgtaaaaaagtttgagatcagtaactgccattagtcgaatggaaaatatgttattgtacaagcctccctacttgaaactgtttccataggacaagacactgatttctttaaggtgaaaacgcacgatccatgtgcccaatcaatcaaattcaatgctttgaatcttaaagaatttaattactgtggttatggtctgtcacataaaattcatcttcctgcttgtgattctgtaaaaatcacattttttagaagttagcaaagtagaatcagaggtttgacgcattccttttacccttctccttttccagcaattccttttacccttttatattatttttttctactacatggaactgtgtatgtttggttatcttgattaacagttgcacacttcagtttacttttacaaaattaagcgtttctttatgtcatgctcatgcagggtctaccactaggccatttacctgtattttcagtgttgagtcatttggagcttggcctagttactagtattgaagttattataggctttctttaaaactcaccagttctgaaaaccttagatctgaagaaggttagtaacagtaattgatatttttaaaagaaagtagcaatgcaacttttgctgtactgttttcatacaagttttgtgactacttgcttaatgattttcttttcgttctattttctttgatcttgacgagtcttatttgtacttggtttgatcgttaattaacagggagtacccaaattcacaaaagagatcctgaaatc

SEQ ID NO: 34526 - DNA, 947 bp, Medicago truncatula
  Intron number 2 from transcript Medtr6g071380.1 (locus Med tr6g071380) derived from phytozome v7.0 (chr-ID MtChr6; po s 13734541 to 13735487 reverse strand)
gaacaaggttcactttctatttgtgcttgtgctgggtacttggtttcgattatcttgtcaaattacatcaaactctgtactggtgtgtttagtagtacttctgctcaacatctcaataaattattgtgtgttcttgattaagatcttagatttcaatatagtattattgaatttctccttacctcaatataaaatagttttaagtaattaagactaatagcacagtctaatgagaattaggataattaattaagtgggaagttgctgaaccagaatctgtctcaagggacacattaacgctagcatgagttcagtcaaggtaagggggaagattgtcactcaaagggagctcgtgaatgtcgagaacccatctcgattgttgcttgaaatgtgaggggttcgttactttaattctagccttctagggcgccttatctcaagatatttatttggtcataaccgacatctgagcatagaaattaaggtctaatgttattttctggatgctgaacttttgcattggtttctggtgtttaaatttttctcggaatcataaagaaatgaacaaataataaggatttgaatagtgaaattattagaattcagaaaacactttgtcaataagtaaaacactgtaaaaatgatgtcttgttcttttattgcatgaaatctgaaagttaatgttagaatctgttatatcacgctctatgtgaattctctgtatacatcacttttcagaaaagatatatttgagcatgagaatagaatggtcagacgtgcgtttggtgcagtatgtggtaaggaataatatgatatgagttctgtttctgctggataattgattttctgcatattgaatgaattcaccaagtaggattcatcaaattagcctgaaaattatgtgctgtcattcggaaaagatcttttggtcaaaggctacattctag

SEQ ID NO: 34527 - DNA, 786 bp, Medicago truncatula
  Intron number 1 from transcript Medtr6g071380.1 (locus Med tr6g071380) derived from phytozome v7.0 (chr-ID MtChr6; po s 13735452 to 13736237 reverse strand)
gtttttgtatgttgattcttcattattacttctattttgtattttaaactactgttttattttccattttttggatttgtatagattcctgttacctcgttaatatgtacataatgttaaatattgttatccttgtatgcaacttttttatacttaaaaaaaaaaacgggatatcagaagttggtttccattactataattaattacaataattttcataatcacaatgtagctttgagttcgtttccaccaaaatctctgctaactgcttgagtaatactacaattttagtaaactagattgtaaaattgactctgttggatagagttcctctttttcatcaggattgttgatcccttgaatgcagtacattttgaaaatgggttttcttttgaacttttcctgttttcaaattcagaaatataatttattttattctctgcattatccttattaaagaagtaacctgttatggcttggcttatgtgtgtaatacttgaaacaattatttgtgtatgtatattatgaactttatcataaaaactcgtggctctggatattgattgcatcccagaaatctgactttacaagtacttatattttgtcctatatcatggaaccaagtgtcatggtcatgtaaaagtacgaaccaaaagtacttgtctatccatctacaaatggttgctcaaatccgattcttgttatggttgaggctataacataatttctttgtcttgcattggaagtgtagaacaaggttcactttctatttgtgcttgtgctggg

SEQ ID NO: 34528 - DNA, 778 bp, Medicago truncatula
  Intron number 1 from transcript Medtr1g031810.1 (locus Med tr1g031810) derived from phytozome v7.0 (chr-ID MtChr1; po s 7789681 to 7790458 reverse strand)
agcattagcagtagattgctgcaagaatttttattgtaagataatttacattttaatgcatgttagtgttggtattgttctgttagtacttagtacactgttttggttctgatttacatgccataccatattcatgttctataagtttacacactaaattcaaccattgatctctcttttgactagaaatcatgtagctgtttccagttttttccccataggaaacaaaaatggccaacgtgtgaaacatacaagtgcaaagtaagggaaacaatttgaccacaattgaaagcatataacaagaagcacatgtttccaagtgttaaaataatcctctgccattacaaaaaatattttatgtttctattttaacatctaatgaatgaaaaaccactattttttgtttgtcatcatcttatcgtagtttagaatataatgtatggaatcattctctcactcaccactttgtttgttaatcttatgacccttgtactattttttttttcattcaaccaagttaaacaaaaaaatcaaaccaagattaataattgatatgatttgattaggagaaagacgttcgttgcgatgagcttgctggagggatgtacatgcatgcactcatcgacactcaagtaattatattgagcaacgctgagggttaaggctaaaataattcgtaccttagaagaccgagaaagtccttttatatactaaagatacaaatttccagtaatgacaactaggtagccattggtcgacgattacagacggtgtggta

SEQ ID NO: 34529 - DNA, 268 bp, Medicago truncatula
  Intron number 1 from transcript AC233655_17.1 (locus AC233 655_17) derived from phytozome v7.0 (chr-ID AC233655; pos 121267 to 121534 reverse strand)
acttttgtcccagtaattaaaataaaataatatttctgagaagtaaaataaaataaataaaaagaagaaagctgaagagaagacaactcgccggaaaacgcagtcgcagttgatcgtcgtcgttcgtcttccagaaacaaacaaacagtgagaagattctattgattaatttaaatttaaatccgtataaattaggttataatctctaattttgattgatccgatccttacagtgattattttcgtagcggcagcgggagcaacaatt

SEQ ID NO: 34530 - DNA, 413 bp, Medicago truncatula
  Intron number 1 from transcript Medtr1g135140.1 (locus Med tr1g135140) derived from phytozome v7.0 (chr-ID MtChr1; po s 30118135 to 30118547)
agcgctatcgtttttttagcgtcgggtaaacacaactatgtaattattgttatgtgagaggagagttttgtaatctggcaagattacaacatactcaaaaacattatgtttgtcttttttgacaccatcaatgactagtttgcaatccatttccaatataacattgttgtgttacaatgcatcaagtcattctagtgttcttttcatcccctaacattatgtctttgtagctatcatgacggcacttcaaacatctgatatagctcccaagatttttcgtgttgcatttcataggcattcgcccatacctacgttttgataaccctgcggatgccacgttccatgaccgtaaccatcttacatcttttgtgtgttgtgttagagactcccgtggtcaatttattcgggctcaa

SEQ ID NO: 34531 - DNA, 952 bp, Medicago truncatula
  Intron number 4 from transcript Medtr4g137170.1 (locus Med tr4g137170) derived from phytozome v7.0 (chr-ID MtChr4; po s 33712351 to 33713302)
tcgtagacatctcggaacattccgtgacgattgaggtcattgctgctcatatttgtttggatgtttttttagtagttaatcatcgtgttttggtgcatctttttcatttgtatgcattatgcaacctgtaaaataaaactaattgtaattgaaaggtatgctctgtaaacatttcatgtaactgcttccatgagttgaatactatcatactcatcaatctcttttgcctgtttgttttgcaaaagccaacaacttatgtgtggtagtaagttatgtgcgggtatagaaagttgcgaatttttgctcattgagattctaatatcggtgtaaaaatttatttttagaatctagatatgtatgaataggatccaaagtcattatgttaccatcatcaaagttttgggatctagctgttgggtctttatttttgtggttgtgattgggcttcacaatcgatcaaattgagtgacatttggagaaggggaaaattatcattgttgtttgttaaggtaattattgatattggaggagtatattgcattactagagtgtggtacagtgccttttgaatgactcatcttgggaagattctacacgtgttaatgcggtcatcctttcatcgcatatataaaaattgtatcgttaagattttaactactgagctaggagtttgactgtattgttgctagattggctgtttttatgatatccttttattcatgatttcttgtccttaaattacattgggaatagcaaatgtgctgatacgagtcgggtgtatattcatccatatctgctcatgtgttttgtttcatgttttgattgtttttctttctatctaacaattatccaaacatcatcatcaccattttgcaatttggtgatacaatcacgtggtaatttcaggcgagtcattctgtgcatgttacaggttactggagacccagggaag

SEQ ID NO: 34532 - DNA, 941 bp, Medicago truncatula
  Intron number 6 from transcript Medtr2g071070.1 (locus Med tr2g071070) derived from phytozome v7.0 (chr-ID MtChr2; po s 16200358 to 16201298 reverse strand)
tccgtttcaggtgatctttaactcattggaaagcttacgaaattctctacatttcatctgtttgatccaagagcaaattcggaatatttaatggttcagaatgagctgtaattagaagacgtggttaaagtatgttagctgaagaattaaaggtggtgtttgtggaattgtaacggctaggccataataagccttcaaaaatcaatgtgcaaatgaatatgtaaccttctcatgcattgatccgccaccaactttaaagatccaattaaattgtaacctcttttgtaataactagccacctaggagttataacactaattatgctatgattgtaagcttttcagcatccaagccgatttcctatataaagggggcgaaaataatgaaggggacaagtagaattttgataaaaaaaatacactttgtgtgttgtgaagctttgcttctttttggttctggattgaaccatgcattgatcttatcaagaaaccacgtttcttgtggcgatcctctaccaaattaaacatcttccttggattgggaatttgtttggttaccattttctgcctatttccatcattctttaatcttaatatccaaatatccttcattattcacaaatataataaattcaaaattacaaccatttttgtcattcatcaaatggtattcagagcacggttttgtttgggaaaaaaattgtttccatttggaaatcccttttcattgttaccatttttttctctcttcattttaatctctctgattctaggaaaaaatggaaagatatagtgacaaaaaaatcaaagttccattttttcgagggcaaagagacccggatgcatatttagagtgggagacaaagattgaacaattttttcaatgtaaaacttactctaatgttcaaaaagtgcaggttgcagctcttgaatttaaagagt

SEQ ID NO: 34533 - DNA, 927 bp, Medicago truncatula
  Intron number 2 from transcript Medtr5g006360.1 (locus Med tr5g006360) derived from phytozome v7.0 (chr-ID MtChr5; po s 673734 to 674660 reverse strand)
ggcataaataggggtagcaactgcggctatcatatgtatgtagcaccattttatcacctttagactttagggagtgtttagaatagcttattttgaatttttatctcatggtataagcacttatattttttgttagttttgtaaactaacttatgacatgtctgtacattgttttcacttatatctataaatatatctttaagtatagctaatgaatgtaattctttacttatattttgcggagttgctcattgaacagacacttaattaagctatttagccgaaatgagcctttagccgtcctgaaaaattctcaaacgcttaactgcaacattatttccaaacacttaatgaatgcatgtccctaaagagagtgaaggaggagccaagatcagaagccctctccttccctcagagtaaaaatgttgatgatcatgtcaaagttggcttcatcatttgaaaattctatgtatggagctttgatttatatgattatattaatttgattttcaattctattatcatctaaccttaaatctattttttttccattaaaaatatggtaatcattttatagaaattagtttttaataattatttgcccaaagaaataatttacattgcttacaatctttctcacagtcaataaattattttgtatgtcataccaagtgatgtaagcgtacctgttaaaaattgttctatttatttcaaatgacgaaggattatcatcctaagcaatgaagagacgatgatgatttcatttcctcgaaatttgaaatgaccctcttatgatttatactatttttctttttgctaaggtttattcagtagtcattaccacagaaatttttgtccgttgctgtttgtgtaattagtaattccctttcagtgtttactcaggcactgtagctggagctcgagagg

SEQ ID NO: 34534 - DNA, 831 bp, Medicago truncatula
  Intron number 1 from transcript Medtr6g036220.1 (locus Med tr6g036220) derived from phytozome v7.0 (chr-ID MtChr6; po s 7934501 to 7935331 reverse strand)
ttacgtgtagtttatttctatttgaactttctaattttttatatttaacctcatggttttttataatgcgtctagtcaaaagattttgcacctatagcccatatgaatgacacgacccaatttaattacttgcgtttgatacttccttttttagtttttcctatcttaagtcatcttctaccatcaaaaaatactcacgcatgggtattttggaaagttgggttggaagtgagcattttttgttgggagaagagcatttttctacttgcgtctcaaatcataagcaaaaaagacaagcttttaccctatttaatcatgttgtttacggacaaatcatcttttccaaaataaatttgtacttatttttatgaaattaattacaaattgtacttaattaactcttcctcctatttcactacctaaaaaaaaagtctccctcctattttctccataatcaataaccaatgaaaattatttttactttttcttgtgaaacttatttcaagtagaacaaaaaaaaaatattcaccaaattattatgttttatcttatttattaagcgtattgattttttttcttatattttatgacgtagggaatatgtctttctccatcttttttttcctttcctttttcaccataatcaaccgagactattaccataatcactttgactcaaggacttatttttacttatttcaagtagggaatgtgttaattttgggaatggattggttgttaatgtatcattatttgtttatcttagctatgtttgatgccttaaggacttatttttacttatttcaagatacacaataaggacttggatac

SEQ ID NO: 34535 - DNA, 908 bp, Medicago truncatula
  Intron number 1 from transcript Medtr3g104210.1 (locus Med tr3g104210) derived from phytozome v7.0 (chr-ID MtChr3; po s 25828167 to 25829074 reverse strand)
ctgtttcagggctctccgattctcacgaggtactattttttgtaccatttgcttcttgacacatgtgatgtgatttttgtggaaaatatactggtgtgtttattttagatagacaattttaggcaaatacattcatgttttgattacgagagtttgattgtggaaatatagggttgattctgtctctagagttgattttaatttgaaactgcaatctctggatgttcattcgaattcgcggtgagtttggtagaatcacaacttaatttcaatgaagcttttgcttctacaattgatatttagatttgttcaactcagttttaaatgaatgtatccatccaaacataaattactttcatttcaactcaattttacaaatccaattcagaaccatatatacacccaaactgcaatttgactagaggtaataaaaagtggtttttgcattaagttgaaaaagttatgatgggttttacatttaacttgttttgaaagtgaagaattcaaatataaatcattttactttaaaatcaattgaaacagaatcaattttccaaatagggtttattaaaagcttaccaagacacagaatagttctgccactcttttctcttggcaactgctgagcttagagacaggtcctgtctcttatacaaagcggtgactcatttttttttttttttaatacaagggcttgacattatcatgaaggtttttgctttgcaggcgtagttacacatcctctagcacagttcatatgcagatctttgctttttcttttagcagtatccattgtttagtagttagttgtctatatatcattcgtgaacttagctattcaaaagctacattagtcattgtctcattgattcatgaatgacccttgttatgttactccgcaggtggta

SEQ ID NO: 34536 - DNA, 569 bp, Medicago truncatula
  Intron number 1 from transcript Medtr2g010420.1 (locus Med tr2g010420) derived from phytozome v7.0 (chr-ID MtChr2; po s 2532632 to 2533200 reverse strand)
ggactttgaagcagggggtacattctatgcgatggaagccgatacccaaatgaattctctatcatttgagattacctggcatgccttttatttttattttttacttctttccctttattgttgtataataatccatgtaactgaatgtatttcaaactattttcacaatttacatctactgtttgagcttagtggatcaggtatatatgttccaactgattttttgtttttgtttttgttttagtgcactaatctgacaatgcatcatgtctctctataatgcattagctccaacattcaattgaataggttgttgcaatgccaaataataatataccattggtgagaattattgatagaagaatatgtatgaatgttattgtgtacttctacctttttcttctaattttagacaacagtttgttgtttttgtaattgctttcatgcacaaatttgttgtgttggattcactttatttccctaataatcatccctgatgcacagggaaattcactggatttaatctgttgtacttttttgaaattgatatggaaatatttctctttcag

SEQ ID NO: 34537 - DNA, 653 bp, Medicago truncatula
  Intron number 1 from transcript AC225507_5.1 (locus AC2255 07_5) derived from phytozome v7.0 (chr-ID AC225507; pos 23 134 to 23786 reverse strand)
catcccgcaaacgtgacagctgctactcgatcgtaaattttaatctcaacaatcaatttttagctctagattattcgctctgttaaattgatcggatctgtgaaatataatattcattgatctattgcttcatgcgtaaatggaccatgtataatcgatgaatatgcgagttttatgtctaaaatttgattagatagctatgaaaaacttacaccaggcacaacacacgtcgacagtgataataattgagaaaatgatataattgaatgtaatcagtttgtatcggtgtcagatatcgacacgtctttgtttagatctggttagaagtgttggtgctacatagttaaacagtgaggagcaaagcggaatgatggccgtgacctttaaatcttcttcaattgtgtaaatttacttaagaaaatagtgtaattttttaatttttactttttttttttattattttttttaattttgaattttggaccaaattcatctaggaaaatcatcatgttgtcttgatccataatgaatcagtcttaatgtagtattgttcattagttaaggtgctaatgaatgtttttgaatatttgatcctaattactattgtgtttcccgattttactaggttctgttacagttagatccgtttctca

SEQ ID NO: 34538 - DNA, 673 bp, Medicago truncatula
  Intron number 1 from transcript Medtr2g077810.1 (locus Med tr2g077810) derived from phytozome v7.0 (chr-ID MtChr2; po s 18024178 to 18024850)
gagataaagttgaggataaaattgaatagaatagttattatgatatgtttttcttatgaaacagaattatggtttttttccccaatgttgaaattatgaattgaaattacaaatgttacctttgccctaataatacaatttgggtttgtttttagttttagtgcgttggtggttcttgtttattcataatacttgatattatttgatattatttcatctgcatatgtagtgtttcttttattcttcttcttatttgattgttttattaagcatgtttatagttatttcaactgatttattttgtagtaatctaacgcggattttgtaaatcctgattcttgttaattctatttaaacgttacaatctagtttgatgatctttctttttacattgaagttgtttctggcatagggattcgaagtgttttttttttttttttgtgtgtgttgattttgtatcatcacctttccttttacattgattgttttcttcagaaattaattttataaagatcatgaactagattttgcattttgatggatcgaaagatttgaaatgggtgattactatgtaattatttcactcgttatcaactcagttacatgatcatttatttatttttttcattatgtataatcacctattttgttcatcatttgatagtacttcatt

SEQ ID NO: 34539 - DNA, 532 bp, Medicago truncatula
  Intron number 1 from transcript Medtr6g009690.1 (locus Med tr6g009690) derived from phytozome v7.0 (chr-ID MtChr6; po s 1704126 to 1704657)
aggttttctctctgtccctctctccctctcctcctcttaataaaatctcaattgttcgattaatctaatcggatccctctccgagtagagactatatatctttttcgtttctcaaaagaaatagaagacttttttttgacaataaatagaagactattattatcaaatattttagtgtataaaattgtatacttacaaatctagtgacatatacttgtcttttataaatctaattataggaacaaatgccttcatttttaaaataaaataaaactgagaagatgttaactcaacttaattttagcaaaatctcaacttttagataatacaacgaccaatcatggcatggccctaaagtttgttgtcttttccccaatgtgcatactgcatatgtttggtgagaaaaatctcagcaattgatttaaataaatctgattaatcctaaagtttataacagtttattcatgagagaacattaaagaaaacaatagtagcttattttaatttgactttatcaactttgtgatgcaga

SEQ ID NO: 34540 - DNA, 1025 bp, Medicago truncatula
  Intron number 1 from transcript Medtr3g013040.1 (locus Med tr3g013040) derived from phytozome v7.0 (chr-ID MtChr3; po s 2339648 to 2340672)
tttgttttggctgccgtgttcagtttgcttttgttgtgttgattgcaaagttgaatgataagaattagggcttgcttggattgacttgtttttgatcttatgtaaaaatagcttatgcaaataaataaacttttatgtttattcatttgataagcttatgaaaagtgtttgttatcatcttagtttatttgctgctctgtttgaaattatgctcttatgattataatgattgttattgctgctgttgtgtttggttgtgatttactgtttgctttgattgtgttgtatttttggttttgattgcttcaagtgggagtaggacttgattgtgattttgcttttaggttgttgttgttgtaatgagaatgaagattgaactaatgtggtgtttcactgtcctgagaattgtttttgttttcttcatcagtacatgtcagttgtcaagtttagcttcaactcaattgtttatttatgtttatcatttgtagtggtacacattctacaattagactctgatgatagagagacactgtcaattcaatactctatgtttacacaattttaattgagtttaaatgcaaacatactaatacacagcgtcgttaaatagttttgctatatagcagaatttcatcaagctgttgttttctgcaatttgcgattgacaacattactacatatctttttattaccactcaaaagcattaaatctgtataataacagacttgaattggcactggatcatccaaattatgcgactgaggaagcagttaacttaatacaaatatgcagatgtatatatttgtcgattcaagagcattgctcagatgtgtgtatagacttaacagttgacttaaatgtgtgtgtagttcgtactactggtcagccttttcatactttgctccctttttaagcatagtgcaacctagaataaattttattagtgaaattccgaggatctgattgctactagaggattaaggttccagggtgggtttctgcaacttgtcctaagttttgtgaa

SEQ ID NO: 34541 - DNA, 756 bp, Medicago truncatula
  Intron number 2 from transcript Medtr1g092830.1 (locus Med tr1g092830) derived from phytozome v7.0 (chr-ID MtChr1; po s 18694691 to 18695446 reverse strand)
gaatttcgatcctttctctgtctctcagttgttaggtatttttttttttctttctatttttgaatggagatgcttttgaatgttaatctttgtgtagtgcattgcagtgatttgaatacttatttatctgattgtatcgtgattctttgttcgattgttgtattttgctgaatttggtttattagggtttagtgcttgtgacgactttgtgcttattacaactcaaatttttcgtatacagtatgatctgcttatgtaatttatattttttagggcccgtttggatggagcttattttgaactttgcaaaacagcttatgcaaataaataagcgtttatttattatttataaacatgttaaggtagtttatgaaaaaacaacttatgaagataaaattttaattagtgaaaacttatgaattaatataaaagtctatttatttgcataagcttaaaataagctcaatccaaacgggttaatcaactttgaaactgagttaatccatttcatagtttttttaagaagttaaattagaccatctaaattgacaccaagaaattgaacctaagaccttgatgaggagcacactctaaggtactaaaccaacaaaatggaagaagaaaaaagcacgatagaggctttgccagagggatgcattgccaagatattgtcgcatacaactccagttgattcatgtaggctctcacttgtttccaacagcttttgttccgccgctgaatcagatattgtttggg

SEQ ID NO: 34542 - DNA, 508 bp, Medicago truncatula
  Intron number 3 from transcript Medtr2g103340.1 (locus Med tr2g103340) derived from phytozome v7.0 (chr-ID MtChr2; po s 24039361 to 24039868 reverse strand)
tcattacaccaaagagaattaacagaaatctgcaggtgactttatgctcaagattacactataataaaaaattgaattaagtgtgtattgaatggattggttgcattgcatcctcgtatcagtgaccagtgattgtttgatcaaggtcatctgacagtatttgagatttaaaaattaaatttgcttgatttctacaccgtccgacctttatccaatggtcaccaatgtgctgaatgtagaaatgcaagaaatttgtgactgcaccaaatttgaatccgtattgaatactatatcacactaccaaaaagttgaattagaaaaagattcttaaataagaaacaattgatttttaattttgctttttcctagtagttctaccttgttttttcaaattcaaatgatgtatgccaagaatgcaacaatttcccttagaaatgctacattttgtaactaatttattggattttgtttaggtggtcgaaagagttgggacttattgaaagactaa

SEQ ID NO: 34543 - DNA, 376 bp, Medicago truncatula
  Intron number 1 from transcript Medtr6g010060.1 (locus Med tr6g010060) derived from phytozome v7.0 (chr-ID MtChr6; po s 1902926 to 1903301)
taattctgctttacaagcttctaatcgtgcttcaggtacttaattacttcaattttccaattttttattcaattagtaattttttttttgttaatgtttgatccaatgatattttattatttttattttagtttattaatgagtgctgttgtatttgattcagttataatttttttttctgagttgaaatttatgatttttgaagaaaatgatgatttaatgcgtatttgattgatttgagattgatctgctatatttgatttgattgtaatttttattttctgagttgaaatttatgatttttgaggaaaattaaaatttaatgtgtatttgattgatttgagattgaagtggaactaattttctgtttttccag

SEQ ID NO: 34544 - DNA, 386 bp, Medicago truncatula
  Intron number 1 from transcript Medtr4g118520.1 (locus Med tr4g118520) derived from phytozome v7.0 (chr-ID MtChr4; po s 27758890 to 27759275)
agtaagtgattaacttggatctcactcactatattcttcatctatttttttcaactatcttggcttgtgtgcatttatgtttagtttatttactcaaaaatcaaagttcttctgatttatgtatatttatttgacattttctttgactacttatgcaaattaagaatcacattgttgagtcattttagaaaagtctgatgtttgagttgtacaatgacattacataaataaattattcaatattcaatgcttaggaaccgtttcacacatttactcatcaaacatttatgtgagagacatttagatttagatttatatatctaaaaaccatgccatggttcaatatttcagatcaaagatattgaagttgacccttttgatcatat

SEQ ID NO: 34545 - DNA, 955 bp, Medicago truncatula
  Intron number 3 from transcript Medtr4g118520.1 (locus Med tr4g118520) derived from phytozome v7.0 (chr-ID MtChr4; po s 27759688 to 27760642)
ccatcaaaattcaaactgcttttaggggttaccttgtgagtttcttcaacctgttttcttcagcctaaatcctctttttgcataatctttagtgctaaatttataactcattgatttatattagtttgttataacatagtacaattaatgatagaaaaattgaaatatgagtgttttttttttttaagaaacgaaattaacccacccaaattagccccggagagaatcgaacctgagacttgaggaggagcatactcccagttcctaagccaatagcatcagactaacccaagtgggttctgaaatatgaactttattagaagaaggttttaaatcagaaatataggatccccagactaaatcttagtaataaagttgatagtcatgttgaattttttaacaattgatattgttttacaaatttaccaataagtttatgttttcggtataatatttgttacaaattgcaaaaaaaaagacatatcataactaggagtatgctgataaagaaataatcaagagagttgaaatgtcttatagaaatggacaaagaaaaatctcggaaaggggtgagatagttatggatgaaggttagtatattatggagaacatgtggcagatacggcctcaattagtatcgaggatgtagagacgtcaaaaacctttttgatgccgtcacctaaatcttggtggcagaatcttttttgaagcagaagcttgttaaaaagtcaggctgctaccaatttactagatttcctttaccatccagtagtacctcaaattgattctgatgaaaaaaaaagtagtagctcaaattcaactctagggaaggtaaaaacaaatacagaaaattgaatgagaaagttgaagggacaccttattataagctttagttatagcattttcttgttcatggacaggcaaagaaggcgttgagggcattgaagggaatagt

SEQ ID NO: 34546 - DNA, 812 bp, Medicago truncatula
  Intron number 1 from transcript Medtr3g122900.1 (locus Med tr3g122900) derived from phytozome v7.0 (chr-ID MtChr3; po s 30687144 to 30687955 reverse strand)
gatcactcgttggtcggatgtgattttttttgtgtgtgtagaatttggtgtttggtttcaaattggttaggctttgatacaatgactcagcgtactcttttggaccacattgtgcatttttgtggtcttggcggttttttgaaataggttcgattgtcaatgaatattatttgcctttctattgcgtttgttatctgcaaagaaagaaatgggtgtatatttatgcaaaagggggaacaactgcaaacgttttttgaaaaaattaattctctctattgtaccggtaatcaaaatcaaaagtaatgtatcttgatttcaacaagcaaaatatatcaagatacattacttttgattttgattaccggtgttggagacttaattctctctattgtttgtctttttatggtggtgttcggagtttgaaccccgaaccttgcatattttatacattatccttagcaattgagctaagttcacagaaatactttattgtttgtctgttattacataacttgtttctctagtctttttttgaatttgtaatgcatcttgtactctccataagtcttttgtgatacatctagtggtgaaaaaacttatttttagtttggttaatacattgtattttagtcttttaaaaaaatctagaccaatgaatatctgtatccgtaataaatactgtacaattttatattttgaatatggatcatgtgtttttcattccaatactttaatctcacggaatgagaaatctgacaagacatatttgttttgtagcgtggttttggaaaatacgtctcgcaaagaaaggt

SEQ ID NO: 34547 - DNA, 1001 bp, Medicago truncatula
  Intron number 1 from transcript Medtr1g100560.1 (locus Med tr1g100560) derived from phytozome v7.0 (chr-ID MtChr1; po s 20927382 to 20928382 reverse strand)
tctccacctatcccagacccgaagattacctcactgttggtttccgaatttattatgtgtttttattatctttatttgctgaatttttcaatgtttgtttctttctcgattctgaatgtcacgttttaatttgattggaaaatggggcgctgaaattttgattcaatgaagaaatttaatttaataattacaactgcaagtgaaatttgtgtttcttattatagatataggtgttgtagtgttgtttgggttgtaaattgtaatatgtgaaatgtagcaaaaactgctagttgatcattgtctcaagtctgaatttaacattgtagtggaaactgctagtttcttatttttcatgaagttgcaggcttctgcaatgacaattttattgcttgagccagatggggtttttatcctacaactaagtatttattattcttgtggttttttgttcgacgttgctttgatgcaatcttgttcgaggatgattttcctttaaatttgtttcttatccaatgagaatagtagaatctatgttatcgtagttttctgtccggatagttggttagttttgttggttcactatattatatacgatgcattataattcttacacattttcacaaacttctccttttgtctttctctccgaactcttacatcgacatactcaccatctaaatggagttgagttcaagcatagacatattgttgaacttgatataacacttttaaatcgtgctgttttgcctttgttttgggatcaggcattcttgacctctgattatattatcaatagactcctccctattgctgccctaaactttgtcatgtcctatactaacctctttcatcaacctccttattataattttatcgaagagtttggttcgtcatttcttgttttttttttctttacagtttgcttgattacttaatgattattttttctcctttttgttggatcaggttttggctttgccgttgcaacatagacctctttt

SEQ ID NO: 34548 - DNA, 846 bp, Medicago truncatula
  Intron number 1 from transcript Medtr5g095210.1 (locus Med tr5g095210) derived from phytozome v7.0 (chr-ID MtChr5; po s 37718243 to 37719088 reverse strand)
gctatgtaagtttttttttctttctttctcttatttcattatttcatttattttttcttcttcgtcatttttctagttattccgttgttcatgcttatcgtgaggctaatcgggtcgcatataacttacccaaatttggttggatttcagtgtttgagatgactcttgtttttatttctttgggtttatcggctgaactcagagctgtattttttttttttttttttttttagagattttagttgcttgtcttttatttccacaacaaaacaaagttaagatgagaatccaaaatgcaaattaatccatacattccaatctattcaattttgaataacctttgaccttttttattctttccctttcattagtttctcaaatttttgattttgtgtgctttcatgaacctgaaaccctaatcttggtattcttgccatggtgttgtatattcttactaacaggcgaatcatccgtatgatgaaatgttgaattaaacaatttagtttgggctaacaaaattttaatactatctcaaaaattgaaaattgttgaaccaataaatgaactacccaaaaaactaatgtgattgacgatctaaatatcataatataatgaaattttgtaattttcaaagatcgaatttctatgagtgattggtcagtaatataacaagtacctcttcaaattaattattttattgaacataaacacaaaatttcaatgaaggcatgtaaaaccctgatgaaaatgcatcagtttacaactatgtggactactaacactttctacacatcatggactattcaatacttattttcttatgctttgctttgcaagtctttggat

SEQ ID NO: 34549 - DNA, 984 bp, Medicago truncatula
  Intron number 1 from transcript Medtr5g094670.1 (locus Med tr5g094670) derived from phytozome v7.0 (chr-ID MtChr5; po s 37471507 to 37472490)
ttgaattctgatacattggctgttgttttcaacaggtttgcttctttattttgaattttgattctgattagtattttcatataaattataagttgttttcataagttatatcagagaatttgtcataagttgttttcataagttcttctaaacagtgttaatatcagttgattagctcaaataaggtaactcaaattggcctttattattggtatatgaaagggatagctttgtagggttgggttgtactgtcatgtcatgtcattttctttgaattatgaaaatcttgcatgttcaatgtttctaatagtgaagtgaaattattggtatttgaaaggtattggttagtttctaaaaacacatgtactgacaattagtgttttaaattttttgccgcgtagcaatgtattgtgaagaattgtggtatatgcagcctcagttgtgaccacaatgtggagatatttaaagcatttgaaaaagtaaaagcgttgttttaacttgttgtcgcgacttgggatttgaattccataaagattcatttcgcgcgttctgatatattgcaaagaatcattgtcaaatatgaaacctcagttgcaactacaacatggagacagtaaaaacttcgatgtcgtggcataaatttgcagacattttcttttatgaaaatcctatcaacaataataggcgaagatgcggttaatttgattattaactctcttaatttatctcatttattttgtttgttgatttgtgtttttattttctttttttcattttgcaaagtttgacatcaatgtgttttttggtggttaaatttattatttgtttttgtagatttgagtgaagaaaatagaggattagattttgaaattgaatatggtttatcgggtttttatacaaaaaataataatttatggtgagttttggtgtttgattgctgtggtttcaggtcgagtagatttgccaggctgctaggtattcagt

SEQ ID NO: 34550 - DNA, 431 bp, Medicago truncatula; identical to SEQ ID NO: 32251
  Intron number 1 from transcript AC235094_17.1 (locus AC235 094_17) derived from phytozome v7.0 (chr-ID AC235094; pos 90533 to 90963)

SEQ ID NO: 34551 - DNA, 425 bp, Medicago truncatula; identical to SEQ ID NO: 32250
  Intron number 2 from transcript AC235094_17.1 (locus AC235 094_17) derived from phytozome v7.0 (chr-ID AC235094; pos 90967 to 91391)

SEQ ID NO: 34552 - DNA, 971 bp, Medicago truncatula
  Intron number 1 from transcript Medtr4g141390.1 (locus Med tr4g141390) derived from phytozome v7.0 (chr-ID MtChr4; po s 34910765 to 34911735 reverse strand)
aagacaggggtaatttggtctttttgcgcatgtcctggttcattaagggtaaaaatgtcattgcatttgccttctgcttacatgtcctgacaaaaacccagtcaccatttgccacttatctaattaccatccacctcagcatatttttttaattaggacgaattttcaaatgattaatatttgcaggggcaaaatgagaggattagtaagttcagggatgaaaaatcaaatggcctataattgcagggatgaaatgcatatttaagccttgatgtttttattgtcttcctgttttggtttctgttgttgcatttggaagtaaaaagttgtagggtaacattacagccacttgctaaaacattttgaaaggttagtacattgaaaatggtcagcaattatttataaatttaggaatttggctatagtatgggatgacttgggttccagaagctgaggataaatgtcaaatttgatttagttctatgtttgacatttgttattatgggtattgagcattgaccggttgatagatttaatgatgataatggtgaaatgtataaatcataaggtcacaacattagttgacaagacttattgttgcctgcaggttactaaaatgactaaattttatcacacataaatattccaaacatgcaaaccatgttactaatgaccccatagtgtgctttgtggttggtctagtctgcagcctgtgtgaagcatatgacatccatgtcaaaaacttttcttttatcgtgataggctgctgattacacaattcttgataaaagttttgtttaacataattatttattttggtttttgatgataatatctactttcattatttttaatgtgattctgatgatgtttccttttaccagtttttttttcttttttaaatatcttttaactttatatttgttcgttttgcagatctcaaataaatttgaaaattttgattgtttgcc

SEQ ID NO: 34553 - DNA, 980 bp, Medicago truncatula
  Intron number 1 from transcript Medtr1g025370.1 (locus Med tr1g025370) derived from phytozome v7.0 (chr-ID MtChr1; po s 6262616 to 6263595)
agtttctccactccactgattttgaacagcaacttgtaagtattatttttcaactttttctttacttccatgttcttgatgaaacaaaaatgaaatctttataaagttttcatatgtgggtggtgttaagtacatgtacttcatgttcatgttcatgctactttcaagttcttttattttgttctttttcttcattattttaacttgcccatcttttaaattctgcatctttttacaattcttgtaattgcagtgagttcttttgaagaaagctttgagcttttgacatatacatattgatattgttatgcttgtttttaaattaggaataggcatgacaatggggcggataccgtttttgtctttcccccttaaacccgatgggattcgggtttaggtatgcctttgccatccacgatttcaacatgtgaaagaaaaaaaatctcaggtcggtacctgatagggtttaagtatccccaccccatctccaccctgacatgaacttggagcacattttggtacttttttcttataaaaggtccaaaactacgccgtttcaacaatctggttttattaaattcatgcttttctagcttaaaggaaatgaataaggagattgtagtgtagtttttaaataacggattaattttatttttacatgttctgcaaacactatctataacatatttgatccatgtcataaaaaattcgacaaagttttacgttggttgttgactgtctaacacaaccctctccttttatcgagtttagggtttaggcttgtgatgatgcagtcatgaacataggcaggatagctgttgttgttgcaaacactatcgatgtaaatcatgtacctgtgatgattaatagcggtttttcaagcaaataattatgttgagttcaatgtatcataatctcaaatggaaatttatcattttattgcaggcacttcctagaacattctcagacaatttgaagaa

SEQ ID NO: 34554 - DNA, 933 bp, Medicago truncatula
  Intron number 2 from transcript Medtr4g022010.1 (locus Med tr4g022010) derived from phytozome v7.0 (chr-ID MtChr4; po s 4335184 to 4336116 reverse strand)
ttttaggacttagagtctctcccaaacacaggttctattttcaactcttagttagtgttgtttattatttcttttttgaatgttaaatttgcatgagttttatttttatgagataaaaaatatcaaaagcatgagtcaaagtattttttttctctctctatcctaatccacacaagtcatttcaaaacttttgcttctattctgtttgtcaagttgttatgtgcattcttggctctaaaaaaatgtgattgtaaaccttataaaaactaagggatattaaaacaatagaaagaagtggtgggggattagattctttgtaagaaaaataaaagggttaatgtttctcgtatcaatggaaagatgaaaaaagtatagttaagcatgctagctactctgtcattgacacatgtatatcatgtatccactatgattactttactaagaaactatagtaattggataggatgtcttattcttattttcaactttctcatacttcatttggtaccaagttcttcatctagacaataaggtccacaaaaaaccttactttaggcatatttgattttttattttatttttaaaaactatgtatccacttttatgaataaataaatgtttttttctttcttaaactctagtttatatagatgcaggtcttgcaaatcctaagttcgaccgtaagataagtaaagtcttgatcgaaaattattttaatcaggactcgaacttaaattctctcatactatgaataaatgttttgatatatttttatagacaaatattagttgtcagcatgttaggttaatagatagagtttggactctaaacctcctttttaaacaactttggaggcaagattaaactaataactaaaagattgtcttggcatatacaggagatttggcattggcacaaaattagttgaacatt

SEQ ID NO: 34555 - DNA, 840 bp, Medicago truncatula
  Intron number 2 from transcript Medtr3g139820.1 (locus Med tr3g139820) derived from phytozome v7.0 (chr-ID MtChr3; po s 36082869 to 36083708 reverse strand)
ttgttactgttagcagctgcaaccgtgtggttttggttgttagctagctaggaggctgtttggtttttgttggtggtagctttagtggttgttgactgttttagttcctgttttatattgctaagtaggaacataggggtttttttttattgagtttttctttggtggagagatgccggcattttaaggctctcttatgttgtactcttttttctcctatgcgggtaaagtacggcttgcgcttgccttgcttaataaaatttgcagattaaaaaaaaaaaaactaaaatttatgtagtaaatattcatgacttttttttgtttatagaggaatgtctgacaaaagaattgtctagagcaacaacatgcaacatagatgataaatctgaagatggtacatctgaaaccaccaaattcttagaaatcctaacttgtaacttagtgaaacaattaactgtgaagtcgtttttttaaaagatagtataaagcaacttaacataacaatgtcgattagataatttcttaatcaaactgccaaacttaggtgatgtttagggtgggagaccttcttaggtctcctaccgtaggagacctctttttttttttttttacaactaatatgatttttttattttagaataatatgggtgcttattgacccttagataagaattaaatgattgagattaaaaaccctcttttaaacaacacatgttccttgctacatgatatcttgtttgtatggattattcatcttctccatatcaaaagtgcagattctaaatcaaaaatatcatgttgaaagtgtatgcatcttgcagggaacacacgaaaatatac

SEQ ID NO: 34556 - DNA, 828 bp, Medicago truncatula
  Intron number 5 from transcript Medtr7g005100.1 (locus Med tr7g005100) derived from phytozome v7.0 (chr-ID MtChr7; po s 180134 to 180961)
aacttcgaattgttgaggtcagttttttaacctgcctttgatattcaaatttaatgtcattatcaaatttatactttctgtttttatccctgttcattgtccatgcgcaattgaattccttattcgaatcagtttgtatttaagcttttagacaatattatgtttctgtaaattaggctattgtgcctgagacatcctgattataggaaacctgaaaaggctagtatggctccaatttgataaatggataaggcaatattgtcaatcaaggatagcagaaaatagcgtattgttaaaattccgctacgcaatagtgctatagcgctactatagccgctgtttgacaatagcgatttgtccaaattccgctatattatagccgtagcgccacctatagatactgtttaacaacactgggagaaagtgatgaatgacagatcagtgaaggatttaagtacaaaatgcaacatcttctaagatatttatacaatctcttttaacttattcatctagatgtcccagaaataggatatgtgccgaaagaaagcagtactgggccacttactagtttcccaacattcatgaaggttttcaaacataggattcttccagaatcttgaaggcttttttaagttcttataaatataaagttacccaactctttgtccgcgctataacctaataatataattatttaattctgaaatttaggtagtgtagtgaatgtggtcattaaaatttactatatcttgctatgctattctatgtggaagatcttttgtaattttgatcagttttttattttctgtcttaatactggagcaggag

SEQ ID NO: 34557 - DNA, 301 bp, Medicago truncatula
  Intron number 2 from transcript Medtr3g163460.1 (locus Med tr3g163460) derived from phytozome v7.0 (chr-ID MtChr3; po s 42964977 to 42965277 reverse strand)
gaggaaactggttgcagatacggtgaagaagaaaggtaaatgtgagagaagaaatatggtcatttcatttccgatccaatttactcactatttctgaatttggtaaaaaacttattttgcttttgaattcccctcactgtttctggtttattgtaaattgaacatttcctataatccaattaatttacggaaaaaaaaaagaagcattattttttatttatcttcaattaaaatactatgattttgatatgactatggtgatgaagagggacgtgaacaatctggaaagcaacaacaaagg

SEQ ID NO: 34558 - DNA, 745 bp, Medicago truncatula
  Intron number 4 from transcript Medtr5g068200.1 (locus Med tr5g068200) derived from phytozome v7.0 (chr-ID MtChr5; po s 24366434 to 24367178)
acttgcccgtcgagtatttagacttctattcaaaggttcgaagctcgcattttccccttttatttttaagcatgcgtatgatagaatcatagattttaggcccatgctgaaagaatcccttaatgacagggaccttgtatggaaggtgtatagaattagaaagggagaccacaatttggtctttgaaagtgtaactcagtcacattgatccctgaatgtatcgaaattgcaaacaagtgtctcttttaatagttattttgatcattgaatctgttattaggtaataggtagtcaatttagtcctcaaatgtattaggtaataggttgtctatttagctcataaaattactaacaaaagagacacaaatgtgtttgcaatatcgatacatttagtgactatagtgacaatgcctcatatattcaaggaccaaaatggcggtttgtccgaattagaaatttgcagaccttgcagttaattacgatattccagtaattagagggtagttggattggcaaccatttgttgttgggagtcttgcagagttgcggttaggcagagagagtgtgtttctcttctctgatgagcttggctctgctgagggcttagtcacttatggataaccaatataataattttctggttttttttttccattcatcatttctctgctctatcacaacaatttatagtcatttgattgattttgttttctcttttgttgaacagaaatacgtaaatttgaaa

SEQ ID NO: 34559 - DNA, 238 bp, Medicago truncatula
  Intron number 1 from transcript Medtr4g115740.1 (locus Med tr4g115740) derived from phytozome v7.0 (chr-ID MtChr4; po s 26854813 to 26855050 reverse strand)
ctggtttaaagaaaggaagaagatactactataaggttttcttctgtttattcagtttaatctattagcataagtatttcgctttctttgttatgtgcttttaggttttgttttgataaacttttttacttgtgtgtttgcttgtaaaacaagctaatcaaaattagatcggacattgaacatatgttgataactgtttaaagtttaaaggtttgaccggaattggattagaggaatt

SEQ ID NO: 34560 - DNA, 1019 bp, Medicago truncatula
  Intron number 1 from transcript Medtr3g073990.1 (locus Med tr3g073990) derived from phytozome v7.0 (chr-ID MtChr3; po s 17269221 to 17270239)
gacacagatctgcaaatgttcttttgtggaactctttaccctcttttattacggaagacttttttagaaacagatttgatgccgtcctctgctcaagcagatttgatgtctaaagaatatacattggtttttatattttggtcacaagtattttgttatcttcaattactatgtattttggtcacatacagtgaacacaccttaagctctctttttgtacaggaacatagacaccttagcatacaagaacataaacttaagacatacagatgcacttggaagtcgtcacgtgttttattctctcctttgaggcctttcttttagcttcttattactcacagaaattgtttttttttttggtctgaaaaatgaatttgaataaaatcttacaaaagtgtaaaatattgtccataatcaaagtataagttccagttctatattcctttatagaggaaaaaaaaaacaagaagaaacaaccatcaaataaatggttcaaaagacaatagttttttaagagttaaaaagttacagcaactcaatttctgctaatgtatttacagcaacccaaccaaagagctcaagagataacaattccaaatcaatcattaactcaaccatcttttggcgtcaattccaaatcaatcctcttggttcagagagagggaatggcttccaattttcaaacatcacaagtttgtatgtagagtcatactccatttaattcaacctaccagggtaacacaattcattgagacggagggaggtgaaacaggttgttgtgttgtttttctgtttctcatttattccgactttattgttttttttttctttaaattaaggatgtcaaagaaaaatgtagtgaagcaatcgcgttaaagtttgaagaaaacattatcgagtaggttgcgaatgttagtgatgattagaaggttgtgaattttttttttatttcactaatgttaattgttcctaatgatatctcaataaaggaggtatggatcaggtttgagctgatagga

SEQ ID NO: 34561 - DNA, 1040 bp, Medicago truncatula
  Intron number 2 from transcript Medtr3g149280.1 (locus Med tr3g149280) derived from phytozome v7.0 (chr-ID MtChr3; po s 39005080 to 39006119)
tattttgtctagaagacatccagtcctatcaagaggtaagcgttatgattaacatcttgtctctattgtttgattctttctgtcattcggtttttggacggtaaaaatgttaaaagaaaatgagtaaatataccataacaaatatctatacaaatagctatagttaaaataaagttggcttaaatgcagttttgatatcttatattggtctcatttttgttttttttggcacaaatggttctatatgtctaattgcgcagttttggtccataatttcaaagaagttgatcaacccatgattttgatcatcctatttaatagcgggacaataaattagattatccaacatgaaaaatgaagagtctaattgcttagagtcttaaaaaataaggtgttaaattgatttatgaacaaatatataaactcaaattcaaaataagatcagttgaaatcatataagaggttatgagtgaaatcataggttggtcaaactttgtgaaatgaaaccaaaattgtgcaatttaaaatagcgatcaaagctgtgatttgaccaaattaaaagatcaaaacatatttaagactatacgaactattttccgaaaaaatcagtaatgctatttgctgaaattggttgaaattttttaaacaacactaagaaaatctattgatgaaattcatcattggggtaactcattaagactgttggatataaacctattgaaaagcacttattaaaaaataaaaataaagaatctttcttgtaagaaagataaataaagaatctttcaaaaactaaatttttagaaacaatggtttctcatatacgttgaaataaataaacttgtgcattttttttcttcaaaattgtcttatttaacttctctataaactgttgtaaaaaaaaaaaaaaaaaaaactactctttaaacattcgttattaccaatttttttttttaataaacattatagtttgtttatattgaatttttcctaagtgggctattgcctattgttgtttcctcagactatatcaggagtct

SEQ ID NO: 34562 - DNA, 820 bp, Medicago truncatula
  Intron number 3 from transcript Medtr2g017430.1 (locus Med tr2g017430) derived from phytozome v7.0 (chr-ID MtChr2; po s 4323063 to 4323882)
aagattctgttttccattcaatacactgccaggtaaatcataaattgttacttctaattgatctttatttcctttaatatgaaatcaagtgcaagaaggcctttaacacatggcctcaaagttagggggactcaaatttgcaaaaaataaacttctacctgcggacaaaatcattcactagatgtcatttgtctataggtaaaatcatgtaagacaacaattttgttgtcaattgtctataagtaaatgtctatgtgtgcttaggtaaaacttaagtttgaaccctaactcatatatttaattacgattagttgttcatcattataagtggtgttgaaatacttttaaatttcttttcaaaatgaaaggctaagcatcaaatttgattcaatttattttatgattattgttataattgtcgaatattattagcatcaaaagacatctatttatttaataaatataataaaggagttgatttcatttttttaagggatatagagaaactggtttttaataatctgttggataatgctaatgaaattgctatttgattgtatatcgactgaataattcgaagaaaaatacattttcaagagaatatgaataccccattaatttgaaggttttgactacaaaatggctctttctatggtattgatgttatttacaggttattgataaaaatatgactacttggtatgagttgcgtcaaaggatgaaattttttcaaaataatgatatttgaatagggtctccaatctgtaattagttaactctagctaattgcattgttttgtttaggtaggagaatttggca

SEQ ID NO: 34563 - DNA, 888 bp, Medicago truncatula
  Intron number 1 from transcript AC146568_1.2 (locus AC1465 68_1) derived from phytozome v7.0 (chr-ID AC146568; pos 13 20 to 2207)
ttcatcattgttttgtttctcacacaataattaaggttgtctttttttctttttctctttctttcactcttcaaatctcagatccattgcttaaccccatttccatatcatctttaatagatctcatctttcactccatcatctaaattttcaacctttccaatttttttcaatgtttttctgaatttgcttaaattttattatttggtatttctgatccaaggttgagtttttatgcttcattttttaccttaacttgatttttatctaattggctttaatgggttttcattaattactcttaatttggttttttgtaaaattcccatttttatagtttaagctggtttcattcacatatttggttagtttagttcgtgtgttttgtttttttgcttgttttatatctcttttgtgtttttgtgtgaagtacatatatgaatgtttgtgtttttggtttagttttagttcagatgttttgtttttttgtttgttttatttaacttttgtgtttttgtgtgtagtacatatatgaatgtttgtgtttttattgtttgatcaataagagaaacatgttttgtatttatatgtagtttaagcttgttactgttatgtagatctgaagctactgtaacacttttcttttaatagtatgtattatatatacaaatagtatgtattaaatatggaaagtgattctgtgatctatagttggataagttgtttatgtacatcataagctgatttgatgaaagtatgtttgatttgacttgctggagatttttgtgctagatcttgatctgatgttatggatcataatgttcgagctttttagttttttataagtgacgtacttctaaataagattcggtattttttaggttctag

SEQ ID NO: 34564 - DNA, 1004 bp, Medicago truncatula
  Intron number 1 from transcript AC225519_6.1 (locus AC2255 19_6) derived from phytozome v7.0 (chr-ID AC225519; pos 35 432 to 36435)
gccaggttcattacttctttcctttggttactggttttggctttgataaaggtttatttaatgttttatttttttaaaattaaattattaaatgtttatacaaatgagttatgaatatgttcgaactgttgaaaaatcatctgtagtgttattcttttaatttttaaaataaaatataaatttaactctttaaaaatcctcccaacaaacataccttctggttttccttcatgggataaggattggttaaaatttaaaccttaatttgttgtcttacctggtgtaaggtccgctcaattttgtttctttgtccaaagtaggttggtttttattttattttattttattgaatttgtatttactttttatccaaaatcaggtaacttatgtaggaagcttcaaagctctttattagtatctatctttgggaggctttgttactttcatctagtgataaaaatatagattttagatctgaaggttctgggtttgagtctcgttaatgtccttgaagggaagtaaatataaatattttgtaagtgttctctaaatcataagtggtcaatcgttgacccgtagttaaattcatcagaaattctaacaacggttgacgatactattccattgatgttagttcaatatttactactaagacaatgacttagttgactagtacttaaaaacccatgatccttctcatatttacgactaagatgacgacttaattgatgtttgttcaatacgagttacatatttattttccacatttttgatcaaaccaatatcatttaagtgactatttgaattgtaaaaatgaggaggaccagaccactaatatctactacaaagggacgatgtatgtcgtcattggagtcttaaacatttttaagtactagtccacgatagatcatttatgaagatggtccatattagaatttatctaacaactaaattattatgaagagatagtatatttctaatgtgtggtctttggacggtgtagg

SEQ ID NO: 34565 - DNA, 797 bp, Medicago truncatula
  Intron number 1 from transcript Medtr5g083540.1 (locus Med tr5g083540) derived from phytozome v7.0 (chr-ID MtChr5; po s 31726784 to 31727580 reverse strand)
tccgatctaaaacgtgtggctaagaatgtttagaatgattttgtacctgcattaatctgtaccgttctatccttaattaatggtcagatcttgtacagcgtaaaaactgtgtactttattacagcacgaaatcccgatccacacctttcagccggttttaaaaagataaattaaaccatatataaaaaccaacagccatcaaccaaaaaaataggctatcaactaaaaaaatatcatatcgaaagtcaaggtaatagtagaggaacatgagttaaatatctccttaaggaatttattttcacccacacacatgttatgttatatcattatttcaatcttattagccaaccaatggactgtcaaactcaaagtcacgatcgatcttgatgtgtgcttttctatatcatcaaaatagaatggtagttttcatatacgttttgatggttttaaacttgtgaaacttcaagcattgtcgaaaaaactcatttttttttcttgtatttcttaatcttcaacaaatttaagtcacatagatcacattttctctaaaacacaacaagtacgtgtcttaatctttcaatttatcatatttgaatattcaagttgtgtatgttgttgattaatttgatattgttcagggtttgttgatggtacatgaatgattaattgtttgtttctttgtttgtgttgcatgaattgtattattcatatttaacgttgttgattgtgctctaagtattttatgaaaggcttgaatgataatatttttttcttattctttgttgtagatatcactg

SEQ ID NO: 34566 - DNA, 448 bp, Medicago truncatula
  Intron number 2 from transcript Medtr5g081740.1 (locus Med tr5g081740) derived from phytozome v7.0 (chr-ID MtChr5; po s 30711610 to 30712057)
tattcagcttgatagtgttgttaacactaattcaggttagtttactacattcctatgttctgtgttttctttatgcttcttgttctctgtttttgcatgttactaaactatattgttctttatggaggaaaaaaaactattatctgttttcttttgtttctttcgaataagaaaaacacaagtaaatcatgacctctaatttagttatttttatatagtgatatttttatgtgttcggtagagactaggagaatatttttgtgtacagtgtttgttctctctagtttttttattaatatttcttgttgcttgttgtgattctgcttgtagagtttggtgtacattgttgatgcttgttgattctgcttgtagattttggtgtacttttgattaatttattcttctgcttgtagattttggtaagcttttttatcacactactaagaag

SEQ ID NO: 34567 - DNA, 858 bp, Medicago truncatula
  Intron number 1 from transcript Medtr3g113630.1 (locus Med tr3g113630) derived from phytozome v7.0 (chr-ID MtChr3; po s 28579858 to 28580715)
tgcttctgaggttgcgtcatccaaatattcttactgtaagtccttgtgctttcttcaatcatccctctgttagtttcattgtactgttcctgcattttcattcatctttgtttttgggtcttttttactgctgctaaaacaagatgtatggccaccaccaaaaaagaagatgtatgctattggtaacttcattgttgttgtgatcaccttgtcataataatcaggtgtaaatgaaattcctgaaaaactatgaagaatcaaaatggggaacagttgtatttaaaaagaagttgtggattaagtgagaatttactacaaatagattagttggaaaaagcttgtgccttagggtgctaatcctaatgtgtattgtttcattctttagcatgtcaacatctctctctcattccaattaggacttgaatgatattagtgcatgtacggttctacttttgagaggtaaaattgattttacatgtgtaaaattaatttttgacatgtttggatgttatcaattagaattgattttttctcgagaaagattcttgcttgaagctacaatttggaatacgtctataattgacttttagcctcaaattccaatgttcaactcacttttacatgagtatatctaaaacataaatcactttacatttaactcactttagttagaatcaatttaataaaatcaaatcattcattgatcctggtattgctgcctaatacacaaaaaagttgcttatgctgagagttgattgcaatatagaaaatagaatgttctgcgagtaaaattgttttctgttgacttttattgatcatgcagttcattgctgcttgcaagaaaccaccagtgttctg

SEQ ID NO: 34568 - DNA, 845 bp, Medicago truncatula
  Intron number 1 from transcript Medtr7g046520.1 (locus Med tr7g046520) derived from phytozome v7.0 (chr-ID MtChr7; po s 11487937 to 11488781)
tttgtgccaagcccacttatcagtaaactacgagttatatatatacaacaccgatattgaaacgatttttgaaaattattgtttcttcaaaatcatggcaatcacatagacctagagaaaccattttgtagcagcaggaggcaacaccagccatgtctaaatctgtttcaaggcagaatatagcactgttaacatgggcagcacaagaaagtattaaacacaaaatgtactctatattagccggtagatacacaagaggttgttaagggtaattttaagtagtgaaattgacacaaataaggaatctatgcaaatgtatatcatattattggaggcaaatatttcatattaaagacaagtgatatttcttacatatatttcaaatattttgatgttaatttcaggtcaaaatttgaatctatcaataaaataggacactgtagttttattaacaagacacaaatttggttcaaatgtaacaatttaacctaaaaatatccaacttgatctaaattctatcaaattaggaatagtcgacccaacatgaacaactcccagggtgatgaaaccagaaccattgaaatgtttgtgctgctgattagtattaaaattttgacaatgcctctcatgaattattatttttctagaatttgtatttcaatattttctctatatgtaaacatctatcactgaaagtagtttaaaattgaatgccaaaaatttcaagctagaaataatgtaatttgtctgaaatttcaagttgtgtacaaatgttgtacatatttacagtcaaccgcctatccttttgtcttaaacagggaaaacatatcgcatacgggttcaca

SEQ ID NO: 34569 - DNA, 297 bp, Medicago truncatula
  Intron number 2 from transcript Medtr4g089770.2 (locus Med tr4g089770) derived from phytozome v7.0 (chr-ID MtChr4; po s 18782951 to 18783247)
gagcaagaacgctacgagtctcttcgtcattgcaagttcggtttttttctttttcctttcttctttggttaaattatgaatcattattgctgatattttaacttttgatgtgtacttcagttagaaagcttctgttttgcatagaatagtagatagtagacgtatcaggtcatgtttagattgaagtttgattaatctgtgtttgaaatttacttgcttttctttccgcgagcttgtggaatcaactaattgttgtataattaataaaaaattgaagagtttgtgcgggtccaagca

SEQ ID NO: 34570 - DNA, 733 bp, Medicago truncatula
  Intron number 3 from transcript Medtr6g043490.1 (locus Med tr6g043490) derived from phytozome v7.0 (chr-ID MtChr6; po s 9076918 to 9077650 reverse strand)
gtgatatatttcttacacaagaagatctaacagttcgtgatgattgtcaaaagccactactagaaaaagcaaaattagcgagggaaattagtgacggaaaaaatgaaattcctcacaaattccttaatcgcaaaatttaatgacggaattagagagggattttacgttttccctcactaaatttagtttttttagtagtgagctaaagtgttgtcccataacttttacatcacaatttattgattttgatttgttcttttgacaggagaagatattgatgcatatgactagtcaggagaaggcatgttgcaacattttacatcaattgataatgatatgccttaaactattattgaatatttataaaattataatgtttcttggacacacccaactttgcttacacctatgacacatgattaatcacatagtggttaaattcacttgcgtgtatggttaatttagatcatatccaaaattgtgaaattgcagtatacaatgtaattgatcaattaccataacttttactgtaaatcaaattaacattctattcaattgaattaaccatgttttttatgtgattaagatagtgttatcggtggaattctccatattattagggactaacaaaaacattaatttatttttttatataacactgtttatgtctccttattttaaatctcacacaatgcctccatattttagactgttgaggaagaaaggtcgattg

SEQ ID NO: 34571 - DNA, 374 bp, Medicago truncatula
  Intron number 1 from transcript Medtr6g043490.1 (locus Med tr6g043490) derived from phytozome v7.0 (chr-ID MtChr6; po s 9078104 to 9078477 reverse strand)
tatgttatgttatcatattatgttcgactagtttttacattagatattatattttgttgaaaattaatgttactcatgccccaattcaattaaaaaaaacatctatgtgaagagttaaagtaggagtatgataagaataaaagatagatttattcattaaatatgtttatcattcaaatcggcatgcatatctatcttaatgaaactcttaattcaaaagagaatatcttccttccaaaagatacatttatttaactatacataacaaaaaaaactaaatatgttgttgcatgcatgaatgctagttagtctgctgatatagattttcctttataatgttcagattaagccctacgcttgcctaaacactgcag

SEQ ID NO: 34572 - DNA, 579 bp, Medicago truncatula
  Intron number 2 from transcript AC233683_10.1 (locus AC233 683_10) derived from phytozome v7.0 (chr-ID AC233683; pos 66183 to 66761)
ttgtatgtgttttttgcgaaatatacctattcttaattatttgcattctatttttatcaatgtttgtgatgtttttgtttgttatttttttagggttgagtatgcttgcttaacatgtttggcggtgatttcggagatcaatttgggcgctatgcaatattgactgatcctaagtccaacaaggtgtgaagatcagagggggtgctccgatggttgagtcacatgataccatctaccttgatgttatttacaattagtccatgtttagataaattgtgcaagaccttttcgatttgaattttaagttttagtttcttagagttttggaagcatctattttttttgtctttgaatttagcaaatgtcccttgaatttcataaataattcagccttgcttgctttgttttttgatttatatatttgtgtttgtttttgtgttgctgaatcaatttagtagcatggctgtgttactgaagcattttagtaacatggcttttagtaacattattagtaacaattactagaatcaatttagtagcatagctgtgtaacgtctcctcttaacattattactaaca

SEQ ID NO: 34573 - DNA, 765 bp, Medicago truncatula
  Intron number 1 from transcript Medtr3g166400.1 (locus Med tr3g166400) derived from phytozome v7.0 (chr-ID MtChr3; po s 43561940 to 43562704 reverse strand)
aacgtaagtaaactagaatatgtagtagtaagtatcatctgataagaatgaaaccaattcaatgttgtgaaaatatgaacagttgcaccaaaatctgtacttgactacctctatttgttcttcaagaaaatacatgagttttaccttcaatctacttcacaacaccagttcctttgacactatcttgatagacctgcttccgtgcaaataagcatctaacttgtgcaaatttgttttctgcagcaggtccatcaaaatcctgcattctccactagtgaggcatgttcggctcttccatcttcatcattctcttcaactggtacctctttgtcaaagtgattgctagtttgctactctccattttcccatcacagtcttcttcaccaaagacattattcacactttacaagttaatgaagctatctttcatttaaattaataataaaacaaaatgttgaaattaaaagcaaatgcgtgcttgtttgatgtattagtataattttgtggattttattttaattttgatgcctggagaagatctctagaaaaagtactattttgatgccaatacctattatatactttatttgatttgattggaatgtatatgtatatactgcttgatattattctttcccattaggtaaaggatggagtgcatttgccaaacatgaattggtcccataatttatgagactcaaaaagtggagtatagtaacggatgtttattcctttttcgtctgatgtataattggcaggagagtg

SEQ ID NO: 34574 - DNA, 971 bp, Medicago truncatula
  Intron number 1 from transcript Medtr5g019470.2 (locus Med tr5g019470) derived from phytozome v7.0 (chr-ID MtChr5; po s 7256376 to 7257346)
tgctgctaagatctattcaggtttacgagctcaaggtaattttaagcttcctaaacactgtgataataatgaagtcttgaaagctctttgttctgaagctggttggatcgttgaagaagatggtactacttatcgaaaggttcagatctcgtttcaattttttaactaacttgctttttatcttgatctgcttcaatttcactgaattccttcaagttgaaggtttacatctatcttataagaaacttggttttgtgatctaagtggtgaagcttatttctgcatgatatagtgtattttttgctctaattttgaataagtgaaattgactttgtaggagtagaattaattttgacatgtttggatattctctagtgaaattgatttaacttcgagtaaaatcttaacttattgttcaatatatttttacattgaatgtgtgtcaacttaaattaatttacatttaagttgcatctagttgtaatcaattttatgaaattaattttcctcaatattgaaccagacacacatacgcactactaacttgaaaaaagttaataatgctgaagaattgttgaagtcattttacataaataaatgtatacaaacataagtcattttatgtttaagtcacattaagtcggaatcaattttacaaaatcaatttttcttaccgttgaactaaacacacatgaactactaaattgaaatgagttaatattgtgttaaagacttgtttaagtcattttacttgaatgtatactaaggaaaagtcattttatgtttaagttgtatttagtcagaatcaatttttgtcagaggtgaaccaaacaccataaactattaaattcgaagaaattaataatgagttgaagaattgttgatataaagtgttgtagatgattttgattgttgcctagactaatatgagtgaatgaatttgaaacagggaagtaagagaccattaccaa

SEQ ID NO: 34575 - DNA, 806 bp, Medicago truncatula
  Intron number 1 from transcript Medtr1g008090.1 (locus Med tr1g008090) derived from phytozome v7.0 (chr-ID MtChr1; po s 576730 to 577535 reverse strand)
ataaaggtatacatgttcgctagggttaacaatgttttaccccctgtaatatatatcatttctgggtttaccccctgtaaattttatttatttaccccccccccccccccccccccgtaattttcttcttcttcagaatacctccgctaatgggtcattcaaaaaccaaattttttttttcttcagaaattttcttttatagcctattagggggtaattttttttttttttacaagggggtaaatcatttttttttacagggggtaaacctggatatgacctatattatagggggtaaaacatcattaaccctatttgttttcataatcacaaaatcttatatgttataattatcataaattgtttatttcctaataattatcacatgtgcgaaatttcacctcgcttaaaattataaatatttaattacttagaataattttacgattattatatttacttaatttcctcttttcatagattaattaataatgttgtttatcatgagtatcttaggacatggagaaatattattgttttcattataggaagatacaataatataattagaagattctaatagctaactatatactatgagaacccacccgagttggtctaatggcattaacttgaggtcttggagtgtgcttctatcaaggtctcatgttcgactcttaccaatgccaatttaggtgagatagtttagcttcttaatatatatacacaatgagcttattaattcgattattcatttttataatttactaggtcttggtccaatcccaaaaaagtggaggggagtt

SEQ ID NO: 34576 - DNA, 775 bp, Medicago truncatula
  Intron number 1 from transcript Medtr5g089190.1 (locus Med tr5g089190) derived from phytozome v7.0 (chr-ID MtChr5; po s 34613171 to 34613945)
aagaaaggtgttccttggactgaagaggaacataggtgagtttcatcaacctagaatcttcaattgtctttttgtttttgttcttttactcctttctctatggaagttttttcttagattatggaggaagaaaatatatactactaaaaaaggttgaagtaagacagaagttagagacggaaaaaataaaattggtcactaaattagcgtctgtaacacttaacgatggaactagagacaaatttctctttttttccgtctcaagatttctgccgctgtttcaatttttctagtagtattgatattgaaattttgctaatgaatcaaattcatggatatactgaaatagcaactcaatttttcatttcattttcctagattttaggtttttaatttctcataaaattctaatcgacttttataacagctgatttgttaatctagtgaaatattttgattttagtcgcagtcacgttgtgatctttgagattgcgaaaaatcacaatcacatgcagatgatgcagcctcaattgtatctgtgctacatttttaaagacggaaaaaaaaattatatttcggactctttttaaacggaataacttgatcattagtttggataagtatattaaattttgaacttcatgcaaaggcacaaatcaattgacatgttaaattgagttggtttaagagtttgcctttaccccttttaaaagttacttgttattgaatttactctttgtgcatgtttggaattacggcgtacagacgttttctg

SEQ ID NO: 34577 - DNA, 400 bp, Medicago truncatula
  Intron number 1 from transcript Medtr6g071240.1 (locus Med tr6g071240) derived from phytozome v7.0 (chr-ID MtChr6; po s 13669315 to 13669714)
aggattttgtgttctatattcctaaggattttgttgtaattgttggtttcaatgatattgttgatatgggagaagctgtctaggacatttgagttgttactcgtctaaaagttgttgaactggtgctgattagagtaatggtcttttctttgtctgtattggtttgttacaaaattaatatgaccttcaagagaacaaatacatgtagaaggagggtctgaacgtagctccccattgcatcacctacttcatattctcctcatttaagcttttgatctgttgctgaaacttgaacacctggttctcttatatattttgacaagcaagatggtttttaaagttacaaaagtttataagtctaggttaacatgaagatttcgacagctagtgatttcgacag

SEQ ID NO: 34578 - DNA, 785 bp, Medicago truncatula
  Intron number 1 from transcript AC235567_4.1 (locus AC2355 67_4) derived from phytozome v7.0 (chr-ID AC235567; pos 24 690 to 25474 reverse strand)
tgcagaagaaagagaatagaaggaaacgtgttgaggtttgtgattaagcgtttggaaaagctgtttttggggaaaaacatattctgcataagctgtttttggttctgtataagatgatttgttacaggatgcaaagcatttgcaaaaaaaaaagaagaagcacggttgcagcaagctactatagttgaaagacgtttcagaacctcaaaattcaataacttcatcagatatccatcagaacatggcttctcccactttgtgcttgggtctctacattgctggattatcatttgctagttttactacccaattttacttagttacttcagtataaacaaattgtaatttccattttatttcaaactcaaaattggtgaatttccccactttgagtttgagggggctattagtctagtttactattaactaaccatcatttattcactgcactctaataattagcactgttcaaagatgaagttgaataagccatagaccttaccttgttagaattgatacactaagaagttaggaactttgaacatgtgtaagaattttcaaccaatcattttttttttgtgagaatggtttataagtggccagagagagtggaatttgaaatgagggaagaaagaatttgaaatgactaatttacccttaaaaattatgatgtgtcatttttacaaatgatttgtatggtatttttgacactattttccttccttcttcttcttagtacyttgattgatttcgtctctctataggtaatctccaacttggagatc

SEQ ID NO: 34579 - DNA, 424 bp, Medicago truncatula
  Intron number 2 from transcript Medtr1g043690.1 (locus Med tr1g043690) derived from phytozome v7.0 (chr-ID MtChr1; po s 10326293 to 10326716)
ctacaggctgctgcacttccagtccactaagcccggtgagcctagcctttgaaccatcactttttagtggtcattttttgctcgttaaggaaagaaaaacattaacggccactcgattattaagtctatgatctctattggatccatttatttgtgaaaaatttaattaaatagcaagcacggttgttacggttgcgataatatatgtgttcataatattctattttgattataaaaaaacaattgatgatatgtatggcagctcgatgaagtttttttatcaagaggtagatccggtagaaggtctaagaaagatgatgggtcaaaggttatgaaataactattcaattgattccattaacaatgtatttatgtatcaaaaacatttcttctatttttgatgtacctgtctttcctttggcag

SEQ ID NO: 34580 - DNA, 826 bp, Medicago truncatula
  Intron number 1 from transcript Medtr1g105950.1 (locus Med tr1g105950) derived from phytozome v7.0 (chr-ID MtChr1; po s 21963989 to 21964814)
ttaagggtcagttatgggttaaccacacaatgatgtttatattatgatatcttaaggagtgaatggtaactattgatacaaatcaactctgcacttataataataataagtccaaaaaaaattgcacactttatcaaaaataaaaaattgcactttatttatttattgttaaataaaaaaaaatgcactttattatgaggtgcaccaatgcattgcaaattatttttgtccaccttggccttggttgatatctcctaaattagttttttatttctttttttttttttataaatttattatttcatactctgtatgttgttttgtcaatatatctaattttagtttctctttaaagtgtattaatccttaaatctaaattttaatagggttaaagttatagggcattttaaatttaattaagatgctttaatttgctaacgaatgactcaaattttcaccgaagcctgatatgattagacgatgaagaaaattagcatttactcctccggttctatatataagaagcatttgacttttttgattcatttcataaataatgtatttggtctatattctataccagatacatcaattactcaatgaatctaaaaagttaattttttttcttataaatagaaccgagggattagatgagaaagacaatatcattagaatccaaaaatcatatgcaagtgtggaaatgtgattcgacaatatcatatacactgatgagatgtagaaggggcttgcaaaaaatacataaaataactcaacttcaattattattttttatattggttctagatattctttgctaacatatatt

SEQ ID NO: 34581 - DNA, 569 bp, Medicago truncatula
  Intron number 1 from transcript Medtr2g007300.1 (locus Med tr2g007300) derived from phytozome v7.0 (chr-ID MtChr2; po s 1057196 to 1057764)
aagcaaaatcttgttgggtaatactctcttactttcatttcactagtaatactttgagaatttccatttaaagtttgcatcattatcttctaagttttttgactcatctatagtgctacattatggaaaaacgtgtttttggctggtggttaattttcaccctttcatcgtttactgaactagtgtttctttataatacaaatttacatgtaccacttgtgatatttctgagcatagtttctcactatatgtcttttgccttaccatttctcctccacctaatttcgaagttccctttgtaatatttatttaattttttatgcttaatagcattatgttaaaatgtccttattctgtttcaagtgttatctctattctgcaagcaatttttagtaaaatttaatattagggcaagtgattgattggaaattgcttcaaggggcaaatattatgttgacttttgagatgttagtttacatgtcaactgagatttgactatttattttccttgtatttcacttcttcaaatggaagggcgagtgtagcccaagtaaagaaaattgtggagg

SEQ ID NO: 34582 - DNA, 863 bp, Medicago truncatula
  Intron number 2 from transcript Medtr2g007300.1 (locus Med tr2g007300) derived from phytozome v7.0 (chr-ID MtChr2; po s 1057909 to 1058771)
taaccttaattctttcggtatggatattttgattgcattcgttgttttcgtatgaatattttcatctggtcatgatcttttaagttttaatcgcaactcactccattttcctaagtaaatgatttttttatgggtcttactaacaagtgtcctaagggcattgtttaagcaaaccataaatagaaatattcttttgaaaacataagtcaaacatatgaaaaagtaataatcacacatatttctatgcaaaagttactattattgattgcttaaacaataccccaagggcacttattagcatttcccttttttatatctgttgtaatgctctgctcatggtctctttaaaggtatttttgttgtcacacgtgaagaaatattggccaggttacatgactcgatatgataggttctaggtgttttttttttggtatttattacttgtgaggatgccatatcctcttcctttttacattccattattttttttctctataaaagaagatagctgtaattttttcagtcagagttttttcttttattatgataatatgcagataccagatatcccaatctcttttttgtatttattgtatgtttacatgcattgctcaatagaggtccattgtatttcccgtatctctttcccacttttcaaatattttattgcttaatagaggtccattgtatttcccatatctctttcccacttttcaaatattttaggttgagttattgattttacacataaccttctggtgtattcgtttcagtcactgttaaaatcagcaaaaagctttttttttttttacttaagcttcatcttcaacttctctcccaggctaaccgatcgcaaaagcttg

SEQ ID NO: 34583 - DNA, 346 bp, Medicago truncatula
  Intron number 1 from transcript Medtr7g027520.1 (locus Med tr7g027520) derived from phytozome v7.0 (chr-ID MtChr7; po s 7311328 to 7311673)
gtctctcaaaggatgttttcgtttgagatgtgcatataaattgggctgtgcaactttagttttcgtgactttgtttgatggttcttaggaattttctctttttgtagttttcttttcaaggatatcctctccttgcttcgtatatctcttgctcagtttcttctcccatacaacaaataatttttctatactatttcatttcattgctttctctcaccctcccacccattctccttctttatatatacttatctcatttccgttacagcctgttcaagatccaaaaacgatgacataaataattgttgaagcactggaaaccacgggacagaggggcatcatcagt

SEQ ID NO: 34584 - DNA, 423 bp, Medicago truncatula
  Intron number 2 from transcript Medtr5g097280.1 (locus Med tr5g097280) derived from phytozome v7.0 (chr-ID MtChr5; po s 38777737 to 38778159)
agaatcaattgagttcaatttttcgtcattgtggggtaagggttttgatttgaattttttgttttttctgattttctttgattccattgtgggataaggtgtttggtaaaatgcctacgagaaaaatctggtgtttagcatcacatgttttttggtaagaattagaagacaaatgttttacaacatgtgttgctcatattatgatagatacaataatatgtcatggacatagttttgaaagtgtttgataaaatgcccatgagaaaaatctaccgtttactaattttatttcgattgttcagagaacaaacatccatcacatgatatatttggaaaaatctttatatattatacaccggccaatctgatttcacttccaacgtagcagtcatcggcataggtagagtgcacgagtatctgctt

SEQ ID NO: 34585 - DNA, 673 bp, Medicago truncatula
  Intron number 2 from transcript Medtr3g009710.1 (locus Med tr3g009710) derived from phytozome v7.0 (chr-ID MtChr3; po s 1543628 to 1544300 reverse strand)
gattgatttcaagctaatttttattgacagtctaggtaatatatttctgctcagtactaatagaaactaggagtaaaatcaaaagagaagatttaggcgaagaagtagcagaatttggtgaagcagaatctgtgaaccttgtgtgattttactctttttctggaaaaaaaaaatagataacataaatagataacattgttttgatctaccctcaaatacttggggtctgtttggttcaacggaggagaggagaggaaaggaggtagaatattttaactaaatattttgggaaatgttaaccgggggcactctttaagacctttaaaaggtaactttttttgaaaattaatgtaatcaatgcattggaaattgaaatctttgacatttttgatggaataatttcttcttttggcatgcttaaagagtgccccggggtgggttggtaattccaccttaaaattgattgtagttttttttgcttcttagcatatatgctgagatttgttttagttgagtttggtcatagttggccttcatgcctactcctgctttgcattttaatttttctagctttgataaaaaaaaagtatacactagatttatttaactgtgctggcattgataattttattatgtaggtttggagtttctcactgaaagccttcttagttct

SEQ ID NO: 34586 - DNA, 599 bp, Medicago truncatula
  Intron number 1 from transcript Medtr3g162450.1 (locus Med tr3g162450) derived from phytozome v7.0 (chr-ID MtChr3; po s 42429790 to 42430388)
ggtataatttcttttcttgacaccgttaatttaaggtttatcatctagctcttgggtcattgattcaggagcaataaaatttatgtatgtagtagagtgtcttcaagactctactgattttgagtcttcaagaccaagaacaagaaaaataatttaaaaggaaagggggtgtgcagaacagtaaacagcgggtacagtagagcaaaatttagaaaaagaaagaaaggaagttgagccggtttattttcaacaaaagggtcggtttaatttaaaaagtgtctctctaccttctttcttttcttttttttgtgtggagtgtttgtggttgatttgagggttgtaatatgtggttgtggctggcttgtggggtaatttgtgtttatgtgttcggtattatgaattggtgatgatatttgtgttgctgggtttggttttgtggtttatgtgtattgtgttgagaaatgttgccgcttaagaattagggtttttatctttgtagaattttctgcctcctcaaaggatttgttactgttgttatatagtgtgattttctggacctgttttgttatcatggttctgggttttttagggttaaagga

SEQ ID NO: 34587 - DNA, 895 bp, Medicago truncatula
  Intron number 2 from transcript Medtr4g111250.1 (locus Med tr4g111250) derived from phytozome v7.0 (chr-ID MtChr4; po s 25401440 to 25402334)
atatacgaaactccttatcaactgggccaacctctgtttgcccgtacagtccaaacatgaatataagtactgctagtcagggacattgataaaatagaggccatgttattcacattaaatctaattaattcccactatacctatccatatctaattatattagtttgcacttttaggcaaaattttggtggcatgatagaagagaacggtcttacttatatgtttatcttctgaataactattttcacgtgaaaaaatggtgtagacgggattgagtactagagttgttatttttcctgtactttccatcatgacattgagttctgatactaaactgtgccatcctctttttggcattctttctgtatgttcccagctattagttgcagaacctaattttctgggtatcttaacgatcaccactcaccagagatcttatatttgcgaagtttagttttattttataatgctatttgattgcttgagtatatgcaagacaatctgccagtaattaattttttacatgtgctatattgacatgggaaacacatgaactcaatgaagaaatatgatactataatctatgaatacatctaaagcttctgcttcaaccagattgcgctctgaaattctcttacctctcacatgattagcacgaacttttatttttatttagcaagataaacttataacttttcttatgtaattattgccacggtcatttgacactaagttacacatcattgactgttcctggtcatttgtcgtacttgagcgaacataaagtttagcattatgtgctccattgtttcaatcaatgaattcataaactctaaaagttgcaagtttcatgactgcaggcaaaggtatttaggaccacttgctgtgaagattt

SEQ ID NO: 34588 - DNA, 647 bp, Medicago truncatula
  Intron number 1 from transcript Medtr4g120710.1 (locus Med tr4g120710) derived from phytozome v7.0 (chr-ID MtChr4; po s 28107766 to 28108412)
gacaacttccctaccattatatcaataacgagttgagatcatcttcatttcttaaaataaatggtaactatagaataccgcattagatctaatgaaataaatctttcattaaatctaacgatctccacaatacaaagattctaaatccatttaaggtaatgtaacatgttgaaatgactgtccacgagattataggtgctctgtgtgaataataaatgagtgtatgcgcttacgtgtacgcacgcgtgcatgtttgcaaaaatgttaaaaaaaaattagttatttaatttctatactacctcaaatgaaccagaacattatagaaaaatagttaaagataacatcaatattgaaaagttcaaccacgtcaacagaacaatggaattataaaaaacatagttacaaggaataagacaaatttagttgccccttaaaatttaggtcctactacggtcgttcctgcacatctttcagatgtaccgcccctgaatgcatatatttaaactcatcatttttttataaccctctcgatatattctatcttttggtgattcatagaaagagttcagacataatttaaaaccttgtttatgtttgatttcacttttagaggggtcaaaatttattctagaggtataaaaattcta

SEQ ID NO: 34589 - DNA, 1058 bp, Medicago truncatula
  Intron number 3 from transcript Medtr3g017000.1 (locus Med tr3g017000) derived from phytozome v7.0 (chr-ID MtChr3; po s 3455786 to 3456843)
tttttatcgcttttcattgatcacaggaaatcgaagttgtaatgtttcaattaagatggaaatcggtagaaggagataggtgctggtatagtgacgttcttgaagcataagtttactggtaaagtgaagcttcttatgaggcaatcgaaaacccttaagatttgtgctaatcatctcagtatttgttgtgattttgatatttgtgattgattttagtgattttgtgcgtctgttttgattttggtattaaacctatccattcccaatcttatggtttacctgttgttccttccatttgttgtgaattgagtcgtgatcaagtatctggaagattgtgtttgagtcttaaagccaatggaaaacttcgttgaaaaattggtacttgatttctgatcgttacatgtttaatgttaattgtgattctatagtggcttttggaattggacccactctgaatgtgcctcctctgaattcaaaacagggtgctttgtgttctaccacaatttaaacatagattaagcatgataatattgctaagtactcttcatatatctcataaagttatataagctctttttaagtttttatttttattttttatattggttggtttttgtattttatggccagccactgtatgtgattttgtaaataaaatatatgaatgataatatataggaccaaaagttacttacaacttgggagtgaaaatgaaaaaagaatgcttattagatacttttatgataaagaaagaatatttttatagatggttggttaatcttatcactttggtttttagtgtcatattgtgtgtccaaattggtttggttttgtgtatgataaatggagtaaaaagaaaagaaggtgatgaatggatttcatggtctcataccttttatgagtggatgaatgagtagatttttggtcaaatttgtttctttgttggtgtatacaaatgaaaaaactatttgattaaatgaagttaattaaagcttattatatattactatttgatttgccgagcttattgagaaggaagaggaggattttgaacaatt

SEQ ID NO: 34590 - DNA, 465 bp, Medicago truncatula
  Intron number 1 from transcript Medtr3g106350.1 (locus Med tr3g106350) derived from phytozome v7.0 (chr-ID MtChr3; po s 26757670 to 26758134)
catgtatgtatatttgtgatctgttgtttgttttttgttagaatctgtgatctatttttgttattagaatgaggtaattttgtgattatgatttattattacttacgatggttttaaagtggtttttgagtcattcattaattgatttttaaattggtttaactcggtgaagaggattttgggtttgccattgaagctgttagactcatgggatcagagagcttttgcttaaatttactgttttctcctggcctgtgatgttatgttagtttttttggtggtgattttgtgggattgtgattgactgcagtcataaaaatgacacacagtcttacagtcaaacaaaatacaagtcagcatttaattaaatacttacgatggttttaaagttgttttgaatttcaagtcagtatttaattaaatgattatatgctaatcactgtatttattttttaatcagaaaaa

SEQ ID NO: 34591 - DNA, 840 bp, Medicago truncatula
  Intron number 2 from transcript Medtr5g101500.1 (locus Med tr5g101500) derived from phytozome v7.0 (chr-ID MtChr5; po s 40621632 to 40622471)
ctagttgtgtgtaatctgcatattttgaggcatctgcggttaatattttaggtaatttattttgtataatctgcatatataagacagctgcttctattttatattatggtggagtatgataagtaggggggttatgtcgtttcttgacaggaaatggcattttaaccaatcaaaatcatagcatatcccttaccaatatggttctactcatgcctaatgttaaaactaactttagattggtctttcattatctatggtggcttaggcaattgagacctttgttatgtcatattgtcttgctcaggattggtagaaataagtgattggagctgcaagattcatggaacctcaatgtgcaagaatgagaattttctttgacgcgtaaaagatttggttttggaactgcattggtgtttgtattttctgattcatggcagtcttgcttgcattagtgtatactttaatctattccttgcacaagagatcttgcgcttggtttagtttttatttaatatgttttgcttattaaaaaaaatgagatatgtgctttaattgtgatatactttaattgattctatatttacatatatatgccacatacatgtatatgtactgaccccatttatgtgttgaatttttcatgtttgtagctatgaatgtcatgaagaattgaagactgcgaggagacgtcccttagagatttgctaacttagagacttatttattagtttatgcttagataagttggaatttaatattgacttttttttataggtttaatggattggtgtatgacattggttagtttgacatcgctggaattgttgctgttattagttt

SEQ ID NO: 34592 - DNA, 466 bp, Medicago truncatula; identical to SEQ ID NO: 29009
  Intron number 2 from transcript Medtr3g148160.3 (locus Med tr3g148160) derived from phytozome v7.0 (chr-ID MtChr3; po s 38509530 to 38509995)

SEQ ID NO: 34593 - DNA, 963 bp, Medicago truncatula
  Intron number 1 from transcript Medtr4g134390.1 (locus Med tr4g134390) derived from phytozome v7.0 (chr-ID MtChr4; po s 32407951 to 32408913)
ctctctaccaaaccaaaagaacactactgtgacaggtttgtacaatacattgccgtcaattttttttgtagatatttattttttcgtacatttgttttattttatagatatatgcttctaattagtaatattgatttgacaagaaacttgccaatttgtttgtgacctaataaccaaaagaaaaagaaaaaacgaagaagcaacgcatgtaccaatttagtttgtgatgatgggttaaagttaacgtgataaagagaaaaacatcacgaaacttagatttattgttctgatgcattttccaaaggccaaatatgaaacctgtcgttttatgtcttctcttgcgggtaaagcaaagtaaactcaaccaacaatcataccaaatagaatagccgtgtgggttagggttgtttatcgccgctcgtgggtttgggtcgtttatggccgctcgtgtaagtcacgaggcatgtgttgcgttaaagtttgagttcggctagtgccctaaaagctaaaccctaaatgtaaatattttataagtgctctttgagcccttggatctttccagctttggactaaagcaccaccccaccctagattttctctatcaaaaaattgctaatattcaatttcactagtttctaatcacttttattttaaagaggttctaattactttcttctcgaaaaccctccttcccaattttattttcattccttcctattctattctatgcctaggtaaggataataataacattaaggatatgctatattatttctttgtgagtacattatgatgtaatatgattattgttttaaagccttggatgtatgatctatccatgtcctcagttttttctttttcctgttttgataaaaaaaaaaaaaaaagtaatttgataagattagatttgaattcatacattttgcagagcttttacttgaagctacatcacctgagggattc

SEQ ID NO: 34594 - DNA, 430 bp, Medicago truncatula
  Intron number 1 from transcript Medtr5g023790.1 (locus Med tr5g023790) derived from phytozome v7.0 (chr-ID MtChr5; po s 9388051 to 9388480)
agggtaaaactaaaacctaatttcctaactcaaaactatttattgtcatgtttatttttcacactataatttttaggtcaacactccaatgacctagggttttattggttatttattatctccaagattcaattatttaatgttatgtcatttttttttttttacatttaattactttgatttcaaagtacttgtgtatagaacattcataaaagattgcaccatacacacagacatatatatgttcacttggagtgttgcttaattttatgagatcaaattcatgtaggcatctagatatatctttaattttttttttttaactcatcggtttttaatttgacgatttgctttttcttcaaactaatgtttttacaatatgaagcaattataattataattttgaatgtttttcttttgttactaggtg

SEQ ID NO: 34595 - DNA, 445 bp, Medicago truncatula
  Intron number 1 from transcript Medtr4g098630.1 (locus Med tr4g098630) derived from phytozome v7.0 (chr-ID MtChr4; po s 21320762 to 21321206 reverse strand)
gatttagctgagcaggttgttttcttttctagttcatgaatgttatttgattagtgaaaactgcattgagaatttggtacatgtgttattttagctgaattaaagagacgtctaattgtttttagcactgttattcatgaccattctgtggttagtgaaaattgcattgagaatttggaacaatgattacatattttatgcagaattaagatgtttaattgttgttaggactattatgaaatttgaggttccttggtcatattttatgttgttataggatatatgccttttgaggttccttggtcatatcttattttgttataggatatatgcatttgtttattggtgaatatggataatgcaaatgagatttttaattgtttcattgcggtggttgttaatataaacagtcccttcaagctctaaagaagatatcccaggagca

SEQ ID NO: 34596 - DNA, 916 bp, Medicago truncatula
  Intron number 1 from transcript Medtr5g104010.1 (locus Med tr5g104010) derived from phytozome v7.0 (chr-ID MtChr5; po s 41700121 to 41701036)
aatctcttttttctcactgatcctttaacttcaaggtaagttttttcaccatacccactttttattttcctcaaaaatcttataattgagcatgattatcgttaattctgatctggggttgttgaattttgcttaaatgtcatgtcttttttgtttcttcgtgtttatttatgtctgttttggatagatcgatgaattttctatgcatgtggattggtgtgtgaattgggttgaattcagaatctaacaaccttgaatgttttcaaattttgaatcttttgaatattggggtattgaattcattatctttgaatggttttaacgcgattctgagatgttttctaggtgatgctgaatgtttgatcatggatcttaggtgctagagagagattgaattgtttgttgtggttatatgaataattaggtatcaattttttagtgaattggttaaactacttcactacaacgagtaattaagtgaggttatttgtttgttgtattaaggttttgttatgaatttggccaaacttaggaatcattgatgggaataacgcgatacataatttgttgtgtttgatttttgagtgcttttagtttgatgtaatatgtttggaattacagtaagtttgacaaaatcatagtggcactgtgattttgtggaagctccatggtgtagtttttgattgatttaaccacgaatttaaacatgcagtaagtaaattgcagttaagttctgatgctggttagagcatggcatttgttcatttgtatttccgttttgattattttacgttctttgtttctttagtagactgtgattgatattttacttcagttctataattagactcttttgttgatggtgccttcaaattttgcagatcttagcatttgggagttggccaactgaaattgg

SEQ ID NO: 34597 - DNA, 673 bp, Medicago truncatula
  Intron number 5 from transcript Medtr5g104010.1 (locus Med tr5g104010) derived from phytozome v7.0 (chr-ID MtChr5; po s 41701903 to 41702575)
agacaaataaaaaagagagtttatttgccgatcgggtatggtatttctgtcttttctattgatcattgtttgacttttctctgaactatgaaattttgttttaggccaaggccatcaaatacaacaataacgaagtcttatctcaacctaatatgacatacaaaataaactttgtcttcatctaattctaaacaactgaaattttgattcccgtcttctttgtattaccacaaagttaaactgaaatgagtttttttattacctcaaagctaaaccgaaatgaggtttttaacatcgatgtcttcatatgacaatttttttttggggggaatcatacgacatttaaaataacttcttcgtacatgttattcttaatgtttcaccacgtaggttacctctcttgttttcatgatcactcactcctgtgaaactttatattgaattatttaaattatttacctttgattacaagttttcccacacgttcccttttttgtttcaacatttaaaaaaatgcactttccataccatattaattaccattgtaaatgctattccttcttacttgcaacatgtgcatgtactggttcatatcgtatattgcttcaaattgttaatatctcatatgagcttatttctgggtaggtatttgatttgtttgatacaaagcaca

SEQ ID NO: 34598 - DNA, 644 bp, Medicago truncatula
  Intron number 5 from transcript Medtr1g093720.1 (locus Med tr1g093720) derived from phytozome v7.0 (chr-ID MtChr1; po s 19164117 to 19164760)
agaaaaaaggtattgtatgttggtgcttttggtattgaaattgtaatgaccaactttatgtgacttttaaatcggaaccgttgattttctgtttccaaaaaaccttacttttttcataaatcttgaaatagtgaagttagatagagatgtttcaatcagtaatgaaattgaatttactgataaataatcagaaaaaagaaccatctttaaaatgaccaattttgctactactttagatttgtatgtgattaagttttcctaatggagatgagcaattgaggaacattttctaagaacaggttacataccgagcaaaacaacttgagaatgaaaataatctctgtgtaaatagttttggctttaacattttaagtgaacgtgtcacatcttacttgtttcttggagagttaacattttcttctctggatgtttgttccattcctatgaatgcttgatcgaccaaatataatagtgaagctctacaatttgattgcttgcaatctagtctgcttttgcagagatctaaggatcatcccctttttgctaaagcaggagtagagtcaacattttagctttctaaaattgtttcccctattttatggtttgcagtgttaccttcacaaattgcttttggtgctggaggc

SEQ ID NO: 34599 - DNA, 812 bp, Medicago truncatula
  Intron number 3 from transcript Medtr7g047300.1 (locus Med tr7g047300) derived from phytozome v7.0 (chr-ID MtChr7; po s 11849747 to 11850558 reverse strand)
ttgtccagttttgggataccactgctgaaagagtaaattattgtaatttcttttaaaagtatatactccataaaattccatgtccttatctagttttatatcagcgtaaactgatccctactttatgtgcatcggtgtgtgttaatggatgtggcctatctaggaagagtaattatttaactcatcagttttgcctcgatccactcttgtctcaatattatttaacattagaccatattcattcactgtcttacatctaaaaaattcaccatgacaacaactacttagaaaaacattgtttgataatttgtcaatgcatgatttagtgagtgtttaaattaatttttttaccaagactgtggttaaaaaactatctcacttgatggttttcgtaatacttttatgtatttacctagcagttatatttcacaatgcacaatatattggttacttttacagttttttagactagagattacggttttagcttcaataattatcttgaattttgttgtacctaatatctaagcatgcagtattgtagtttgtaaggctaagaagggattttagggattaaaaccaaatcaaaaaaactaagtttataggaattgaaaccatttatatttatctgtgatacacaatcgtcaaaatcaagttaatcaacattcaacagtaaacaaacatactatccttttaaccattctttgcgttgttttccaacttgaaattgttcttaattctaatgtttctgtgatttcaaattggtgactgctgcaggtaagaacattgaggggtggacacagagaaagagt

SEQ ID NO: 34600 - DNA, 568 bp, Medicago truncatula
  Intron number 1 from transcript Medtr4g137590.1 (locus Med tr4g137590) derived from phytozome v7.0 (chr-ID MtChr4; po s 33917956 to 33918523 reverse strand)
caagggactaaggaaggtaggatgaaacttattaagtctaaacaatgttgttgacttcaatgactttgaaacgggaatacgggatatttttgtgttaccaattacattaagtaataagaagaataaacgacaactattgtgatataaaatgagtccaaatcttttatatacaccacaaatcatttaaaaactatagtaatattggaagaaaatagagaggatataagtcatgggtgtgtgcttcttttgtaacatttaacacaacatgcatagagacaagtttttgtacttttttaataaactgtaaggaagtacgtcttcttttataaataataatacgtattaatcagtaaggattcacttaataatttttctaaagaatataataatcagtgttaaatagataaacatgtacatatttgttaacattaattgaagttaaaaagtaccggattatgtgttaaaaagtacaaatctttaactgaagtttttcacttttgtatttttaaccttttgcttttaggtctaagtctaatgttaaggcacaggaactcctataagtagtggt

SEQ ID NO: 34601 - DNA, 711 bp, Medicago truncatula
  Intron number 1 from transcript Medtr6g077190.1 (locus Med tr6g077190) derived from phytozome v7.0 (chr-ID MtChr6; po s 15181326 to 15182036 reverse strand)
ttcttgtttctcaaattcttctgatccttctactggtaatgctaattcctctcttactcagtagtgtgtgtgaagaatttcaattacttcatttcactaatcaaatcttaaatagagagtggatttagaaaattaatgtaatgtcttaattattattgttttttgtttttttttgtttttttaatttaatgtgtcattttctttgttttttcttgctcttttatcatcaaggcttgagtgtaataatttttatgacttatcctcatttgcttagggatgattttgttttttctttctttctagatgtatgtctgatcttttacagaaaaattattatattattttatatggtattaaaaaataagaaaaagctttaggctacactaaattttggattaaaaaataaataatcaaactattgataagatgaacaactgttgagagatgtaactgaaatctaacctcatttatgctaaagagatcttagtttagtagtaaaagaccgacttgttacttcaaatgataggtaagatagagttccaattctccttgagataatttcttttttaataaaccttgagataataattatagtatgattaataataatattctcattttctaatatcttaatttggaaattcggatattttgtattttgtttttttttacaaaggatattttggagttactccggcaatcaatcaattg

SEQ ID NO: 34602 - DNA, 489 bp, Medicago truncatula
  Intron number 1 from transcript Medtr6g014580.1 (locus Med tr6g014580) derived from phytozome v7.0 (chr-ID MtChr6; po s 3417906 to 3418394 reverse strand)
ttcctttgtagaaagaggcatcataccattcaaaggtactaagtttgttttcttcatagttaatagtattttgtaaatgcacattatatatatatatatattagttggcttgaaaccttggagcgttctaaggtctcaggttcaattctccctagtgtcaattttgatgggttagttcagcttcttgaatatatatatatatatatatatgatccctaaaggatttgaactctctgcacattgagattactgaatcaaactcttaccagagagctaactcataaattaattaataaagttaataacaatccaaacctcaaattaaaagctctcattgtcattgagaagatgacctgcacaaatttctataaaacttcaaaactaaaatttgttatactacaaataactttcattgaatgtatagtaactttataaatatgtgtgtgtatgaatcttcaagatattaacttctgtgcttatgatatgcag

SEQ ID NO: 34603 - DNA, 167 bp, Medicago truncatula
  Intron number 1 from transcript Medtr1g065940.1 (locus Med tr1g065940) derived from phytozome v7.0 (chr-ID MtChr1; po s 13275827 to 13275993)
cactgcttgaagggtacaaataacacaaaaaaaatctaaccatgtttcatcttctttcttgatctcttattttttgtttcgtttatatttttcaacttgcactaatttatttgaatctttgatctttttcagctccattagatccaaatcctataactgatttggac

SEQ ID NO: 34604 - DNA, 589 bp, Medicago truncatula
  Intron number 3 from transcript Medtr1g065940.1 (locus Med tr1g065940) derived from phytozome v7.0 (chr-ID MtChr1; po s 13276398 to 13276986)
gagttcagtttttagggtttatgtagttggatccattttgatttgatggagttcattttttagggtttatgtagttgaatccattttgatgtttacgaattatcttttttgttttaataaaatttatgttattgtcttcccagtttaatgtgctctccttttgaattacaatctaatttatgattgatagactacaataatatgagttataaagactccatcaagtagtgtcattgtgcaatataagagtactgtcattatcagcttaagttatattagatgacatttcagcttatggttgtaaaaatgcaatcaattatgttgacatgatccgaacaaattaaggagatatgttgtaaagaaaattctatacatgctaataattaactaaaaaacttcatcttcctcatgcaagttatttattgattcgcatggcccatcatcacttttgacatgtccatatctactatacttcagtaaagggcattcttggaaaaatacatttaatttttcaatatgcaccaattttctaccatacttttgggtcatatattcgaataagaattgcttttaattgcttttatgcagt

SEQ ID NO: 34605 - DNA, 1027 bp, Medicago truncatula
  Intron number 2 from transcript Medtr5g034910.1 (locus Med tr5g034910) derived from phytozome v7.0 (chr-ID MtChr5; po s 14346993 to 14348019 reverse strand)
gatttgggtgtcacaaccaccagtatctacgataggtgagtttttaaccagtttcttttctttgaacatgaaaaataatttccttgatataaattaatttaatttttgttgttttgtttgggaaaatagttgttcaatttttttttggtgaactgccaatattttttggtgaaaaaatagttgtaccattttattttttgagacgaaatagttgtactattatgactttgaattcttgaatttcatattgaaatgtatacactaaaattttctttgtgacaagatatactagtttttttatttttatttttaaatatccagtcaaaaaaataaaaatttaaaagatggccaagtcgattacggtgaagaaaacaggacaacttttggaaacttgcagtttggacaaatctatgaaagtggttggcagattttcatgttatttcttatgataatgataaaatataatcttgttaatgttagttactaagttaggacttgttcgttagttaatctaatagttagtgtagttgggttctataaataggactaatgtgtacacatttcatctatggtttatcaaataacatgctttcttataagttttttatttcatgagtattcttatgctttcttatgagtattattatgtatggcactatgatcccaaaattcttcacgtttctgccctcttttcttttagctgcaaaattttacaaacatgatctatatatattaagggtttgtctaacatgtgcaatattgcacatgttaatataaaaaacacaagttctaagttaaagtagtaacttattgattaaaagctacatatttaatataaaaaacacaagtttcaagttaaagttactactttaaacttcttaacatgtctaaatttgcacatgatagaaaaatccatatattaattcagggtaatttggttgcttctattgagctgaaatagttttgacttttgagcattgaccaaattataatatttaatgaaacaggtactacaagtttgtagaag

SEQ ID NO: 34606 - DNA, 691 bp, Medicago truncatula
  Intron number 1 from transcript Medtr1g013480.1 (locus Med tr1g013480) derived from phytozome v7.0 (chr-ID MtChr1; po s 2485178 to 2485868 reverse strand)
gctctgaggtaatcaatttttttcaggtttattgcagttctctgaaggaatatgtgaacttttgtgtagattttgcagtctttactgctttcccccctctctgaatgattttgtttatgtctgtgttcttttagtttttaaaactaaatagtctctttagaggttaatgattccaggcttgaatacacttctagtttttttaatcattggtatctattatctccaattaaagaagagcacagtacatgtattttgtttgcacttggcacattcaatcttataaatctaataatgcttcaatgatctagtttgtttacggccctttgcatgcatcatgccaggaattttttttaacgaaattagcattgatcagttgtatactgcatatttctgcagaagataggtgctgcaagtgcaattagatatctctaacaaaaaaatccccccatttttctgcttatcaagttttactttgttttttcaatcaagattgctaataaaatgtgagtcctaatattacatcatatcatggactcaaagttaagggcatctcttttgaagcatgggatatcttttgaaggaagacaaatcagcaataatttagctttcaacaaaaaaaaaaaaaacgataacaacaacaacaccaccaccaacagcaacaacaaacaacaataataaaagcaacaagaac

SEQ ID NO: 34607 - DNA, 924 bp, Medicago truncatula
  Intron number 4 from transcript Medtr1g146540.1 (locus Med tr1g146540) derived from phytozome v7.0 (chr-ID MtChr1; po s 32431132 to 32432055)
ttctcgaaggattcttgaaatttgaggttagttagttgcactcatcatgttattttttcattttttaccgtgctgtttttttatctgggctttctaggttgtactgcattgtggttatgatgggttttggatcttataataatgtaatctaggattgcataagctgcagttttatttggttttgtttgattgaatctaagctaaacctttttgttcacattctagtgttcttctggtcaagctagaaagcgctaaccgtgtttaatgtcacagcttgtgaactgttctccttccacatgtcttatgttgcatgtagtgtgataactcaagtttggctagctagaaatcctattacagctggagttatgtcaaaatgctgtagttttctttggttgggttaattatgattttgagaattgttgaggtgaaatgttgcaatctgagacttttgaaatttcaaattagatattgaggaagcagtgatatatagaaacagatgaagtgatgttttttgtaaatttgaaatatcatcttgacaatttagagtatagatgacatgaaattaagaccgctgccttgcttgagtgacctatacggcgcaacctgatttttctgctgacttagggatctttgactgagttgtactgcgattgtgtatactcacttgacgacaaaataatataaacagaaaaacaagaaatcattttggggatcttttcatctgtacaggaatttctaccttctgttgatgatagtacaattggggattttttttcatctgacctgtgcaataaaaataatgaaacgatttgaaaaccagatattagaatagttgcaaatgtgtactgactgtttattgattgtttgcatggtgattatgatttgatagaacttatcccaagcaagagctagcggtaggaggct

SEQ ID NO: 34608 - DNA, 808 bp, Medicago truncatula
  Intron number 1 from transcript Medtr5g096460.1 (locus Med tr5g096460) derived from phytozome v7.0 (chr-ID MtChr5; po s 38327112 to 38327919 reverse strand)
tatcctttcttccttgcacagctttccactttcgggtacttcattcacttttctttcttttctttttgtaatgtcacctcggtgtcggacaccggatacatctttcaccagaaatgtcggtgctatagagttgctaacactttatttatttttttagagagtacagatatcattatttagtggaattttgtggatttgatcaaaagtttgaattgctgttagagaaggttcgaatcccagctaagaggtgtttacatttagtgtttgatagtaactcagaacataactacctccgatggagggaacttataggaaacaaaaagaaaatatagttgttagagtaacgaccctaccatgatccttatattgtggagaatcaaggtcaaatgtggacgatatagactcagatcatttcatcggtaatcaacttaattacgcgcatagatcataagcacatatcatatcatatgaatggttatatataagctatttctgttataaaagataaaataaagtcaaactgttttcgtataaatgataagttgttttttaagctatcatagatagctgatggaaataagctgttctcataagctctcttaaacagtcttacacgtgtttatatgctggtagacaaggtcaaataagaaaatccaaacaagccctcaataggagttacggtgatataagaacaataatttcacaattttgatcgcggtcgcaaatctttattttaatccttgaatatgataaaatttggggagttgaaatgagggagtgatgtgttttatgtttttttttctcagat

SEQ ID NO: 34609 - DNA, 899 bp, Medicago truncatula
  Intron number 3 from transcript Medtr3g020930.1 (locus Med tr3g020930) derived from phytozome v7.0 (chr-ID MtChr3; po s 4875723 to 4876621 reverse strand)
tgtgagtgattggaccattagaaagctgacatgtggcattggacttaaaatgaactttggaccttcctgcaattttgtaaaatatgggaccggactgcaattttaaaaacagaactaaaaaaaatataaaaattggacagtttggacttaaatgcaatttttaaaaagttgaaggattaaaatgcaaagtaaaaataaaaaatgaattaaaatatgtaatttgactaaacgtaaagcgaaataaaaaataaaatcgacaaaacggactaaaacgaaccaatggcctaaatgaggtacttcaaagtaacctctctatgccaaaatttcgtgtgaaatgaccaaaatgcccctagggctaaaaatgacctaaacagaatcaaattaactcgacactgactcagatgcaagtttgaaatgaacttaacaaggtttactgatgaaatgtaaaaaaaacaatctgaaaagactccgagacagtcacaaggatgaaaatgggtcccactgcaggaaatgaccaaaatacccttctgtatgacttctttgcaaattttgaaataaactgtagaaaaagcaatgtaatgattcagagacacttttgaatgacttacaagacaagtaaagacatttcgaaaggttttatgcaagaaaaacataggtaaaattgtgattgaaaatactgcgaggcagagacaatttgaactgtgcagttgaaatttgataattgacaaagtttgaaatgaaattgggcccagtatttttaggtccaaaaacagggtataacacacttttaaaaggttgtcttgtaattttagtcaacatgcaagtagtacatgaatcaaaaaatttatcaaaattaggaattagatttgatttcatcatatcctccaattttctaaaat

SEQ ID NO: 34610 - DNA, 502 bp, Medicago truncatula; identical to SEQ ID NO: 27878
  Intron number 3 from transcript AC233662_27.1 (locus AC233 662_27) derived from phytozome v7.0 (chr-ID AC233662; pos 132721 to 133222)

SEQ ID NO: 34611 - DNA, 990 bp, Medicago truncatula
  Intron number 1 from transcript Medtr3g005100.1 (locus Med tr3g005100) derived from phytozome v7.0 (chr-ID MtChr3; po s 139786 to 140775 reverse strand)
gtgtgataccactttactttaaatatatttagttttattttttatgagatgatccatcttttagtttttttttagtataacttgatcctttcagacggatgaagtttgggtgaaataaatatattttattcttgacacaatttgttgtcattaatctaaatctagttttgttgcatgatttgtgcttctctttactttaccatcatttcattttcaatcactttcgttggatttgttttttgaaccatagattgtgcaaaataataatattactcacaaaatttccagagaataaaattggtggtagcataataatagtctaagaaactagtgggaaaagcattcttcatttatatataattataatgatcaaaattaacaaaaaagtaatatttgatcaaaacacaatgtgaattttggtataaatcataattcattttcatctctatttatgatatcaacaaaaatatcattaaaaaactcaacaaattttgtctaatattcactaattaaatctcttatctctcactaccatcatccataaaaaaatgacatgtaagctcgatttatcaagatagtagttcaaattctaatgtcatcttgaattgaatgatgtaaatctccatcaaattctcacaagcttgaatcatttttttttttttatgaccatcatctttctaggatacacatttgtgtgtatccctgaagaattatctaataatcaagtaaaatatttttaaaaagagaagtgttaactagtgtcttcggggcactaattaagaaaaattaatacagaaactttacattgggaagtggtgaaaagtagaatgttcaactttatatgaaagtcaaaagttgtcgctttttatgaaaaatttctatttttacttccttgactagtgcctcgggggcactagttatcggttaacaagaccctttaaaaaaacaattgtgatatttttagggcacctatttgcggagtattaatat

SEQ ID NO: 34612 - DNA, 842 bp, Medicago truncatula
  Intron number 1 from transcript Medtr2g126590.1 (locus Med tr2g126590) derived from phytozome v7.0 (chr-ID MtChr2; po s 30684492 to 30685333 reverse strand)
gttaggtaatgtaattgtctacttatcctctttcatttgtattgttcagttttattatcttgtatggatatgatgttgtttcttaattctttcaagtgtttgttactaatatttttcactacaactctaagaattccaactcaatacacatgaaggccacacagaaaataaataggaaatcaaagtagaatgcatttagatttgtaccaaaataatctcatgatcaggtaatgtaattttctacttcttctaaattgaattgagtgacgacaacttatattagtcttaacacaaatcgttgcatgtggatttgtcatgtaatgtaattttctacttattatgatctaagttgagtgatggcaacttatattagtctaacataaatcgttacatgcagattttttttatttatatatattatgccttctacaagaggaatcacatgttgttgtactgtttatcgaactttgggataagttttgttcgaaagcaaacaaacgacgtgactcatttactagctagagtgacattgtcttacgttagtcgccaaatcttttattatgtttcttcccacgtatgaaacgagttaattttgttggcataatttttttgtgtaaggttacatgtttctcacgtatgatattgaaaagtgtaggaaattaagtagtctaaaattttatataccatgttttttctttgttccttatttattaccttccctatacccatgttttgtcgaaatgatatgattctttcattttcttctgcaagaattgctaaaatactcataagagatacacatgatgaaatttaaataagggctacacaagcacattgaaatc

SEQ ID NO: 34613 - DNA, 395 bp, Medicago truncatula
  Intron number 1 from transcript Medtr2g037220.1 (locus Med tr2g037220) derived from phytozome v7.0 (chr-ID MtChr2; po s 10053093 to 10053487 reverse strand)
tggcttctcagcatcttcaaaaactttcacttacggttagttattcaactctttatattttcacttgatcattttaaaatagtaccatttaacttcttttatagacaataattctcagattcttaagggaagaggcctagtcatcgagataagtagataaattcattaataaatagacaatacaacgtcgaaagcatcaaaagtaagctataagttatccgttttagtctagcagtttgaccttatcaaaaacataggtttaatcataataaataacctattatttcaactaaagtattgaataagtcatgcacaagtgttatatgtccgatggaattttcttatatcaatattgtgatctttattttttgaattttcagataagaaattcacat

SEQ ID NO: 34614 - DNA, 854 bp, Medicago truncatula
  Intron number 4 from transcript Medtr1g081160.1 (locus Med tr1g081160) derived from phytozome v7.0 (chr-ID MtChr1; po s 16017247 to 16018100 reverse strand)
agcaagctgctttacattacattggaaaattctgagtgagtgcttttggacctaagagcaagctgcttgacattacattggaagattatgagtgagtgctctttgaaatatacattatttggttcctgcagattattttttatgctaatctcgaactatttatgctaatgttgctagatcacagagaattacccaaaaaaaaagaatcagtaagagatttaccaaaaaaaaaaaatcagtatcatttataatttatatatgttgtgtctatagggatcatgaaaaactatgtagggcaaagatattgcaggctacctcttttttatattagatattggattattttggagctttgtataccagacttttttacaagatcctctggactaagtcttcaacattgtgttttcgaagtattgtttgttttgggtttcgttttgtgtgaggggttgttataaactacctttagtcttgattttgaaacaatatagaactttttggtgcattggaacagttatagtttcttataaaacatggttttgtttttgtagttatttaatttgattcatagatagtcacgggttaggatttatttttcaactgcaaatcatttcaaattctcaattccttcaaatattgtgtcaggagcttgcaatatgttttcgatgcgttttaatctcgataataaacttatttttataatatattttgtccttttgaaaacagtttgtgtgttttcatccaaaattgtaatactgattacaatggagcaagtaattatacagtttgcttacagtttgcacactttttggagatgcaaattttatagaaaattatgtttttgtttcaggtaa

SEQ ID NO: 34615 - DNA, 887 bp, Medicago truncatula
  Intron number 1 from transcript Medtr1g023830.1 (locus Med tr1g023830) derived from phytozome v7.0 (chr-ID MtChr1; po s 5411165 to 5412051 reverse strand)
ccatttttcacatttcgaccattttgttgttgctaattgacaattgctctttaggcaccctaaaaaaaagactaaacaataaataattgttgtttgaacatgtttttaattggttaaatcaatttttaaaatatttttaatcgatttaataagttttcgaacaattaactattgttcgatgtgttttagatgcctaaagagcaatcttgtttctacagttgtgtgttcaagttgagtgttttcaatttgagtgttgctaaagttgtctccgcaagttagaaccatcctatcttgagtgttttcattaattgtctatacaaagttgttttgaaccgattgtccaccgcatttaaactcaaaatactattgtatttcttttatgtacacatttttcaagtaaatgttttttttttgtgcgtgtgagactgtattttgatttgtgtatggattggagtagccggccattttattttcgttaataaaactatctaaccgagaataaaaataaaaaaatataagtcggtaagaaacaattaattttgacatgagtaaaaaacagtttatcaaaatctaacataaaacaaacatatcataaatcattttcctaccaaacatgtcacgatggctttgtacatggaatcagaatctcttgtctccccaagatagataccatgggtagcataacaaaagcagtgccgttttcagaatcgtacgtttaggtccaacaaattgtggcgtgtttcatccacatgcgtatcatgagtgataagaactgcgtgatacactgcttctattatatatctatatttatatgtatatatttgtaatagtctttgttttttgttgccatagttggtattcttcttaaagattcagatatttggaac

SEQ ID NO: 34616 - DNA, 636 bp, Medicago truncatula
  Intron number 1 from transcript Medtr5g091250.1 (locus Med tr5g091250) derived from phytozome v7.0 (chr-ID MtChr5; po s 35681315 to 35681950 reverse strand)
ctgtaaatattccctgcattttctatctcttatctttcttttctttccattggatttctctccatcaatatattctcaatgaaatcacccaattctataaaagaatattcacacctctgctatactttttcctgattttgggtccatttttattattggaattaatgttttcaagtttgctatttttttattagttttttgaatttgaatctttcaagttctatatatatttactttgttaattccttgttaattttttttttgcatcgtccaccgtctatacttttatgctctcatatgcatatctaggttcaaaatttcaagatattgattataaaaaaaaaaagtaactatatatatatatatatatgttgtagttttttttgaaggaatatatgttgtagttatgaattgatattgaaaatatatagtgatagatttttcatcgataaaaaatagtagtgattgatataagtctctaatttgatatcatttatcttgttaattaactaacccatagtagtgtatccttatcctatatttttataagctatgtggagcttatttgatattgtattctaataattttctaataccacttcttatggtttttatgcatggtatggttgcagctaa

SEQ ID NO: 34617 - DNA, 395 bp, Medicago truncatula
  Intron number 1 from transcript Medtr4g118250.1 (locus Med tr4g118250) derived from phytozome v7.0 (chr-ID MtChr4; po s 27428923 to 27429317 reverse strand)
tttcaggtttaatactcttgttccaattatttatttattttttctttcgcaccgatttccgacccaccaaaggcgagcgactaatccggctcgtgcgtagaggcatgcgcactggccaaacatggtttccactgggaattccccgggtacgtccttggaatgagctccttgccactggagcccaagcaacttggtttcttccaattatatatttgttgttaagacttttacgtacatttatgattgcatggtaattaattacgattgaaatcaataaattatgacatgcatatatccatttggagttaagtttattatttgattatgtaatttaattaatttgtttatttgtattggtaggcattggatttcgtgataggtgaagcaaagaagaa

SEQ ID NO: 34618 - DNA, 575 bp, Medicago truncatula
  Intron number 1 from transcript Medtr4g110880.1 (locus Med tr4g110880) derived from phytozome v7.0 (chr-ID MtChr4; po s 25252305 to 25252879 reverse strand)
tgtgttttagattggagtttaagtgttgaagattggaaatagcatcaacgattatttactaggaggtgaattatctaccgtgttttaaaggatgagtttattggttgttggcagtagaatctatcgcttgaaaaagggtctgcgatgcctattaactattaatgacatcagaaccacttcaatatgacgactatcaagaaataatttagaatgaatatgttcctttaaaagttttcttatttttgcttggagacgctttcataatcacattctcaccaggggtaactaggttaggcatgaaattatttaactatatttgaaagtatgcattggtgggtgcattaatgaggagaatgttgatcatctgtttttgggtatatttttttgtttgttttttaaatctatggatttatatcagaggctaggtatatcatcagtgtcccattttcagttggttggtaatttttgcactttaactctgttgatttaccacacaaaaataggacttcaatgcatattgtttggatggtgtcagtttaggttctatcgagagagcgaaactctcgctattttca

SEQ ID NO: 34619 - DNA, 459 bp, Medicago truncatula
  Intron number 1 from transcript Medtr5g021910.1 (locus Med tr5g021910) derived from phytozome v7.0 (chr-ID MtChr5; po s 8459254 to 8459712)
ttgaatctggtacctaccttactcttcttaatatatttaatattattttctgttttcatttttgaatttctatctccatttcgtcaatttttagttccaggtatttatagaaaaatactgagaatgttgttcaaattgattttgtgctattattagcttatagtgccgttgccttactagcttttgattttgtatttaattcggggtttgacattgtatttcatagactggagggtggtatagttgtattagtttattatcctctcttttttttgttgttttcgcagttcttttcactttttggagttattttttgttgtctcttaatctcttttcggtcaacaactgaagagaaagatttaagttttggtgactgattaaattcttctagctttcttatgttgtgcctttccattggatccaggtggaaccaatttttgagaaaggggttgatcagca

SEQ ID NO: 34620 - DNA, 601 bp, Medicago truncatula
  Intron number 2 from transcript Medtr3g128140.1 (locus Med tr3g128140) derived from phytozome v7.0 (chr-ID MtChr3; po s 32716533 to 32717133 reverse strand)
agaccggttctactgcttttttgttgtaaggagttgtttctcaattttgtccttggtcgaattgatggggcaatcttggttacttattttaatttattcaacaggtggttttgtaaacaagtgatacacacacaaaacaatctcatctaaacagtctcatttgtttatgccttccgtgtttatgccttgctgcacttagcacccacatctaaacagtctcatttgttaatgttttactttacttgctgccttggatcaagtaccattcgtctggagattttgttttttaatgttcttctttgtcaataaggctcgtggaccaactattctttactttatttttattttttttttgtcactattatagtctattgaagaaatttttcttaacaaattctagaatagattatcagttagtttctgttttttttttttttttgtgaataatcatgtaagaaagaatttacttctctatgttaagctctattgacttcaaccaagacacaagtatttcctcatttctatgtagttgtttgctcattattattttgaactattttatgaaggcaaagtggcataaaggccactaggattagattgt

SEQ ID NO: 34621 - DNA, 735 bp, Medicago truncatula
  Intron number 1 from transcript Medtr3g128140.1 (locus Med tr3g128140) derived from phytozome v7.0 (chr-ID MtChr3; po s 32717160 to 32717894 reverse strand)
ggtaattgtgataggttttgttttgttcttcctttaacacttaatttcaatattattttttttgtaaacgcatctcatcttttctgctattcatataatcttcatcgtctcaaatttttttcaactaactattcatctattttttattatatttctcaaaaaatttaagtgagtttttctgtttttaattttgcaattttctcctctccaactgcaaggtgagtattttttcctttccttttcagtttactaggtttcatgttctacaagctcactcagttgcgtattcatgcccaaccattttgagattttgactactaccaattttgacacattctttatttacatgattactgttttttgttatagcttttctatttacagagttctatgccaaaatactgccattgatcaatttttttatttatttaattttttataattaaaatgactttaatatggcagtttaatttttttttttatgccaatgatagatatgtttatttttcttagatcaccccaattgatctagagcaggtgtgcaataggtatcttccacttatcatgttatgttggatgaacaacgtgtggaatatacatgaacactttagtcaaacttcaagaggggaaatgcttacttttgttactttaatatttaatttgcaacttccttattttgaattccaaattgctagacaaaattcaatagtagtgtttatttaatataggttcaag

SEQ ID NO: 34622 - DNA, 799 bp, Medicago truncatula
  Intron number 1 from transcript Medtr7g026940.1 (locus Med tr7g026940) derived from phytozome v7.0 (chr-ID MtChr7; po s 6985060 to 6985858 reverse strand)
aaggtaaagacactgccggagggacttaccttcgagtagaagatgctttcctttaaatattgaattttgttcatcaataactcgtgcgaggtttgaggaaatcaatatggacctttttacaaagtgtatggagacagtgaatatgtgaatacgggcctttttacaaatggtgcagcaactacaatgggaaggatctgtgtaagagcatcattgttgcttcatagcttcataagcatgattgaagaatctgagaaatacaaggctgaagacgaaaagtactagaaaaaagttaaagcagtgaatgctctggattattttgtttacaagttaaacaaggctttggagggtattggttcttagcttcacaaacaagatgaattaaagatcaattttgcagtttcaaatgccaaaattctactttattctagccaacaaaataagaaagaggtgttcaaggactgtttggataagttcaaaagtatctaaaagccactgtcgagattgatttacgtgtgtgaattttgaaataattatgaaccatactatctaaatatagtttaatgtttgtttatttccagttattgaattgatctttgtactaagttttatatctctggtccaactttttctaatcaaaatcagaaatgtgtgcattgtattttccactgatgctattgtgaacgcaagggccataaggaggttgggaacggtgtgcgatggagacgaaatgacaatattttttttcttttgtcaccactattaaggtagattctttgtttcagcgcttaaacttcttttt

SEQ ID NO: 34623 - DNA, 651 bp, Medicago truncatula
  Intron number 1 from transcript AC146565_11.1 (locus AC146 565_11) derived from phytozome v7.0 (chr-ID AC146565; pos 70602 to 71252)
tcagccgcaactgtctcttatctcgacgcaacactgtcttcttcctctgattcaaatggtaaacactcattagtgttgatttgatgaattacaaaaagtaagtttccatgtatatgatggtaattcattcaaaaccaatatgtttcccatgctttatcttttggtctctctttcatctgagactcatctcccaactcaatttgaaatcttgagaagatcataggttcttatgtagtttttttgtttttgttttaattttatttatggttttctttgaaagaagtgagaatgtgtttgttgaaatttcttttcatttttgtggctcctttcacgctctctctgtattataatttgaggcagaagaagtgaacgcaaaatgagtgagtgtacaattacaaaactattttcggttggattccttagttagagttcttcgatgctaagagtatcattatggtaatgggttttattaagttgtttattcaaacatgtcctatacatctttatattactgttattttactatctcggtatattcatccatgtaaattccaaaagtttaaacatattgatggatgcaaaatgtaaattattataaagtataatctaggatgcgttcaagttgatgtgaaagatgagtcaggcactagg

SEQ ID NO: 34624 - DNA, 853 bp, Medicago truncatula
  Intron number 1 from transcript Medtr3g151370.1 (locus Med tr3g151370) derived from phytozome v7.0 (chr-ID MtChr3; po s 40129172 to 40130024 reverse strand)
tcaacataccattggagcacttccacttgttgaaggttgctttcaactcaacaccattggacatggtctaagaacagttgaatttctgtttcttgcccttgatttactttgcttagaaaaatgcaagttggagagagatagaaagagtgagaaggatacttattgaaattaaccgacagcaatcaaaagcttgacatatccacacaattgacacatatatgatcattggtgacaactctctttgatactttattctctctcttcatctctctctctctctctctctctatatatatatatatatattgttattgtccaattagaagggaggaaaaatgttgttacccaaaatcatttaaaattgattgtcaaaatatcattcatctttaatcaataagtcttccattgaggatcaagtagtttttgacactcgctcttctatgcctacttcctcaaatcattgagatacgtataattggattgaatcaaaccaagtataatgttggatgagattgttcttctaaacctaatctaaactacactataaacactccattgtatctgacattgacacatataattccattgaattataaaaaaaaatcaagttattaacaatatcgacgtgtcattgtttgtatcttgtgcttcatatatggtaaccagcgaggtgacaccatgcaccctccacctcacttcacctctattaatggtttatggtagctcatgtgttggcatgggttggaaattggaagcaatggtcttcgaaagtacacacacatcatgaattaatcagcctttttttttcaactttacagtgtttgctttaagaccaactggaacaacctgcaac

SEQ ID NO: 34625 - DNA, 474 bp, Medicago truncatula
  Intron number 1 from transcript Medtr3g010070.1 (locus Med tr3g010070) derived from phytozome v7.0 (chr-ID MtChr3; po s 1639982 to 1640455 reverse strand)
catttcctgaaacatagcaaaggtactaacaatgattttatatttttctatttaaaatttaagtattgtgctgctaaaaagttattcaataactttatttaggaagaattaaatgaaagataaattatggaatgtttattttgtgacatacatagagtaatataaatatgatagggttgaaaatgggaagataaaaatgaattttaaaataacaagacacaaagagcaattataatttgtagatgttcaagtatcttcaatattttaggtatataatgttttaattttttcttaaaaaaaatgttaaaattttgtaatctccagatttaaatttgattcatatgataatattgatgtcataacactatcgcttatgtactttttatatgaatatatatatagtcatactaatcaaaatttctggattcgtcacttgcagaaacagaagaagggtcatttccaaattggttttct

SEQ ID NO: 34626 - DNA, 655 bp, Medicago truncatula
  Intron number 1 from transcript Medtr5g095290.1 (locus Med tr5g095290) derived from phytozome v7.0 (chr-ID MtChr5; po s 37754738 to 37755392)
ttattgggtttcagatcctatttcttctccttcaggtcataattactcgttcctcttcttttttatgttcatggatttctgtgtaatttttaatttttttcacacaatgaatgattttgattaatggggttgatcatgatttgtggtatttcctaaaaaggttaaaacttggtggaaaaaaatgtacaaaaatggaaaatttgtattcaattgttcaatgtgagtagtttttgtcatgattttgcccagctgatgtaacacaacatggggcttgcaataaggttgtattgagtgttaggtttgttggaaaaagtatgtgaatttgtttaagaaaaaaaaagaaaaaagaatctaggctttggacttggaagtgtggtgctttgcaagtcttaggttcgaatccccaggtgccaacaattcttgtgttgggccattccatacagagctattggccccggctagggaacgatgggatttgtcccccggattagtcggtctttgggcgggatacttagtttccaaacaaaaaaaaaatctagtcaatgattttttttttttttttttttgggaaagtaagttgttctagggcttgtggtttggttggtgatgattttgataaagcactgactgtgatgatgacaggtttcgtgttgaa

SEQ ID NO: 34627 - DNA, 800 bp, Medicago truncatula
  Intron number 1 from transcript Medtr1g019570.1 (locus Med tr1g019570) derived from phytozome v7.0 (chr-ID MtChr1; po s 4022777 to 4023576)
ataaggcttggttgtttggtgttgttgtgaattgtgtatgtgcattgttacgagagaaggttgttttgttgagaaatgaagtgaaaagtggctaattttactgagtttgactgcgacgattgattaaataaaacttgtcttgtgaactatgatgttgatgtttgattgtgatgatttatgttttttttgagtgattttttttatataacaaaaattcattttttgtgtgaactatgatagagcattattatttgacgtcgaatgttccacatagcccacaccacctagtgggacaaggcttgattgttgttgatattaattgtgtacgtgctttggtatgagaaaaggttgttttgttgagaactgaagtgaaaagtggtcaattttacgagtttgattttgacaattgattaagtaaaacttgttttgtgaactatgatgatgatgtttgatgagtttgattgtgatgatttatgttttttttagtgaatttttttatttttttatttataacaaaaatgcattttttgtgtaaattatgatagagcattttgatctatgactccgtttgatccgtgtagccgacaccacttagtgggattaggcgtgattgatgttgttgtgaattttgtatgtgctttgttgtgaaaaaatattgttttgttgagaaatgaagtgaaaagtggctaatttttctgagtttgattgtgacgactgattaagaaaaacttttttgtgaaccatgaagatgatgatgtttgacgagtttgattgcgttttttgcagtgagtgtaactttg

SEQ ID NO: 34628 - DNA, 522 bp, Medicago truncatula
  Intron number 1 from transcript Medtr1g065060.1 (locus Med tr1g065060) derived from phytozome v7.0 (chr-ID MtChr1; po s 12801903 to 12802424)
gccctcttcaggttatgtttgttcttttctcttccatttcattttaaacaatgaggttggtttctccttgttaattctgtttgtgttgtttacaaaaaaaaaaaaaaaaaacgagctttatttattgcaactgaatttatatattaataaaaccatgttcttgccaacatggtattgaaaaagttggtaacacaagtttttcctacaaaaaagaaactgaatttgattcagaaaattgcattgtttgagaggcaatccagccccataaaaaaatggatgtcatgttgtgggttcaagaattactctcatagcataccaaattggcttataccatggggataccctatgatgcctactgagggggtcaaaaactatggtgggttagactgaaaaaatatcaaattctaataatgcatatataaaataatccccgtatatattcattttcatatttttaatctttgacacatttattttgtttttgtaggttggatcctactctaaagaggggaaatctctatt

SEQ ID NO: 34629 - DNA, 608 bp, Medicago truncatula
  Intron number 2 from transcript Medtr2g121130.1 (locus Med tr2g121130) derived from phytozome v7.0 (chr-ID MtChr2; po s 28659344 to 28659951 reverse strand)
cagaccccagttagtttaatcctcttctcttgaattttacacacaaacacaaatagtttccttcaaacactcccaatttttttataccacttcaattacccatttgttaaatatcaatgctatagaggaatttatctatattatatagttttttttagcaaacctctattatatatttaaaatgattggaatggtcaaatctaacatcctgattttgtatagtagggacaaaaatcatgagagaaaatgagtgtttgattaagaagtttcttttccatttttgtctatttacagattaaaagcattcatatttatagataaaatagatttaaaattaagcaattgtccctagactatttaaggaattttagttaggcgtctaaactaaaaaattataattaaatttctaaaaatatttgttttcaaatcattgaaccatttggcaattttcatatatatatatatatatattcacatacatacacttatagttatacaaattacaagtagatatgttttgtttttttggtccttttctacactttttggatgaaaaaagttagcaatgtccttttatattaaagtgaatttttgtttttgtaggacca

SEQ ID NO: 34630 - DNA, 769 bp, Medicago truncatula
  Intron number 1 from transcript Medtr3g140320.1 (locus Med tr3g140320) derived from phytozome v7.0 (chr-ID MtChr3; po s 36283297 to 36284065)
cgattacgtcgccattgctgtagctacttcaacaggttcaaacttgttcatttcatcgctttttttttgctctttttttttaaaatttttttttttctatcgagttttaagttataagcaaatgatttctagtttcaagtttttattttgtttctctgtttccaacatataggattatcattcataacagctaaatgttttaattgttaattgagaatttgttcatagtttcatactttgtttgagttctgtaatgcattttatctatgagttctttgtcatgtgtatatttagaaagatgagggaaaatattaaaatttctgttgaatttttgcaatatatatttcaaatttcctatatgtccatatgcaaagcttatgaacgtttattatagtatttacatcacaatttggttgttattgttgtgagttatacttctgattttaagtctttaggctttttgtcggggtctgagaagataaagtaggcacaattctgcgtgctctatggttctgtttgtttgctgagtgtatcttattgtagtattgtgaaattatgttaatttgatagtattgtgattttttttttgggttttctaaggtatggtatgaattttttgaaattgttcaatagaatctgtgtcacttggttcaatttcaactagtggctcactgatttgcaattttgtcgcccctagttctttaaatgttactaatcctatctttgtgtctcagtctccattgcaaagtgaaaactgaaaaccttatct

SEQ ID NO: 34631 - DNA, 308 bp, Medicago truncatula
  Intron number 2 from transcript Medtr3g140320.1 (locus Med tr3g140320) derived from phytozome v7.0 (chr-ID MtChr3; po s 36284129 to 36284436)
ctactcacactcacattaaaggcctaggtcttgaggtttgttctcttcctcaatttaataagttttttttctctgttttctgtgtgtgaaaataatagctaaatttgaaccttaacaatagatccaaatgagcacagattttatgtgttacacatgcctgtttgttgcgggtgaaaccaaacccttttgcttatttcttgccatgctcaaatgttttgaatgcttcaattttaagttaacaactacttgttttttggtttggttattgttcaggtcagtggaaaagcagtgccttttgcttctgggtt

SEQ ID NO: 34632 - DNA, 670 bp, Medicago truncatula
  Intron number 1 from transcript Medtr6g014390.1 (locus Med tr6g014390) derived from phytozome v7.0 (chr-ID MtChr6; po s 3308534 to 3309203 reverse strand)
gtagtgagctcctgccactagtctacttgacaaaaaataataataatgtatagaacatgattatgatttagatttaaaatggctgttattaattaaaatttatttagacggttatattgcgttcataaattctgtccaatttatacaacgttttacttatttgatttgaaatattaattgtgaggtgagatattgtgtgcacttatgataggcttattgttagacattaattccatttaagccttgcaagaaacaccttctttctccttaccattcaaggaaaactgacatgacaaattcattaacaatcacttgagtaacttgcaaaaaatatctatctcatgcatcggtttcaaattcttcacatctatttccaaatatttatctcaattaattgctgtttaatattgatattattatatcatcactgcatatttgtacatatagcatgtaatttgcaaacaagttatagaacgatatatattggcattttctctttattaaaggaaagactaacattgcataagaaaaatagaaacattagtaactttgcagaaaaccacatgcagtgttgattccatttccagctcaaggtcatatcaatgcaatgctgaaactgctgaatacaatcacagatagaggccttagaggctttgacaccgaatacaat

SEQ ID NO: 34633 - DNA, 614 bp, Medicago truncatula
  Intron number 2 from transcript Medtr4g087300.1 (locus Med tr4g087300) derived from phytozome v7.0 (chr-ID MtChr4; po s 18351742 to 18352355 reverse strand)
aaggtaatgtgtttgatcatattagtaagtttaatgagttggtatctagacttatgaatgcaagggacaatatcaaaggtgaagagtaaatgttacttttattagcttcactaccataatcttgtactccctccgtcctgaaatataagcaaaaaaagaccattttttttgtcccaaaatataagcaaaaaaaaattaaagttgatcaattttaatctagtgttccaaaattacccttttacatttatggagcatgaacattgaagttcaattacctaagcgtgtttaaggagtattggaattggaatgccactaatattaagtacctgcaataattaagtgtattggaatcatggtttacggtattgaaatcaacaggattacaactatttagtgtattgaaatcaaatggtacacgtgattaataatgtgccactgatgaagtgtttttgttttcaatgtgtgtaagggtaaattaggaatattgaatttttatttgataaaatttagagtagtcaatgaataatgattgattttcttaataagtgtgtttttttttttttttgtcttatatttcaggacggaaggagtatatattaacgaacccttcaaaa

SEQ ID NO: 34634 - DNA, 825 bp, Medicago truncatula
  Intron number 1 from transcript Medtr4g087300.1 (locus Med tr4g087300) derived from phytozome v7.0 (chr-ID MtChr4; po s 18357694 to 18358518 reverse strand)
tcctgtgcaatctgagttttggtgttgggctttgggtttgggcttaattttctgcacatttcttgcttttttcttgctgttcacacccctattttttgctacctgcacctatgtcttgattaaaattgtgataaaattcctagaaaaattcatacttgtttcttgatattttcttagtgttttatgacatttttgcacattaaggatctatgaaatttttgtataattaattcatagcattttaattctctttgaattatttgttatggattcttcttcacacatttgtccttgatgtgagaatatgtgataaaagctacttgatgtgttaatatgagagatttgtgcctataatttcatgttgatttgctgttttgatttggttcataagttcttgattttatgaacaatatatgcatattttgaaagatataaaatgccaagtttattctagaaaatatggcatgaaaccatgcttgcatgtttccaataattccatgctataacttgagataaagaaaacgctttcaaaatttgttaaagcatgagaattagaggccaagaatgctttaggtttcatacctaagtttttagggtttaatgtcattttgttaactttttgtgccatcttgcatgcttttatttcttagtacttgttatgttttttcttttcactaactatttcatctcatgtgacatacatttcgtagcattccaccacctccttcactttctttagcttagcatttattttttgcaaatcttgattcatttagtgatgtaattcgttatcattggtttgtagcttggcaaaggggccataga

SEQ ID NO: 34635 - DNA, 636 bp, Medicago truncatula
  Intron number 1 from transcript Medtr5g073960.1 (locus Med tr5g073960) derived from phytozome v7.0 (chr-ID MtChr5; po s 26630939 to 26631574)
gttgcacctttctgcacctttgttctacctgtgttgtactcttttatatattttggtttttttgtagtttcgatcgtgtcttttcatgtaatatgaactatgaagtgcttttcaagtcttcatatctacgtgtaccgtaatgaatgttgatttatctatgctaatgtgtttgtttatatcttcctgttttatcagtttaatataaatcgcatattattaaatttaattagttgccaaagatttccttctactttggatgaaggaatcatgtttgctctaaatgtagatattatataacctgttcaaatgctaccacaaaatacaatgcttttcaagttggatctaaatctaatttttgtgaaacattaaaaattcgtaactattgggttgtgtggaagaatgagttacatgttcaaaatagtaactaaatataccttattataatggtcttgattgcagtatgtacgtggaaaaccttttgtccatctcatagaataaactccatacacattgcttcaaaatgcatgcaagtattcaactagaaagtgtacttcactcacatggtttactatcattgtactttccattttttttctctcaggtggaatactacacaaaggcaatttagttcatatc

SEQ ID NO: 34636 - DNA, 692 bp, Medicago truncatula
  Intron number 1 from transcript AC235487_18.1 (locus AC235 487_18) derived from phytozome v7.0 (chr-ID AC235487; pos 99496 to 100187 reverse strand)
ctcaatatcacttttctccatagatccaggtatgtcccttgtcatttcctctttatcttctttctatttcttaccattcttattcattggttttcattcaagttggtgctttttttggggtttgtgttggtttttcagctcaacttagtagtaaaacaaacaagaatcttcatttttctcagtatttttgtttatttattttctatatggttagtgtgaaagaggtgtataaatgaataatactagtagtttggtttgtgaaagaggtgtataaggtatagttgattgaaagcaagggatgtttaaatggaaaaggaaatcttgtgtacaagatttgatttttcggttatttttccattttttttttttaatagaaaacaaatatgggttttgtgtaagacatgtaccaaacccttgataccccttttacttgtttaggtcttttttatttatttttacatttttttttaatgtttatgcttttttgcatttttaatgatcattattagaagttagtgttaccttgtatacatgcattttgaacattgacattgtgtagtctgttttttgtttcatgtatgagatttagatgaaattttgttacttggccttaaatattgtcccttttccattttatttttttttaaattttgatctgtgatttgcactgcagggtgttgatagagagtgaa

SEQ ID NO: 34637 - DNA, 656 bp, Medicago truncatula
  Intron number 2 from transcript Medtr6g020340.1 (locus Med tr6g020340) derived from phytozome v7.0 (chr-ID MtChr6; po s 4766532 to 4767187 reverse strand)
agtttcggggatagggttttgttcttggggttggggtcagtggtgaatgcaagcttctaaataatgttatgaaattaacatctaaagcactaaaacttttttcagaattactacaatttaatccttcacaacataagttcatgactcccttaatctctcctttatctgtggtgtataatataccttcctaaagctgcatgattatgttgctctgaattgatgtttaggctgattgtgtataatttttgtttcatgtctttggtttacttgatattatatctccatataaggaattgattgaaaaatagaaaattgattgacattgatatacaataaattgattgaagaattttcacagtttcattgaaatctgaagctgagtcaaacacatacaatccaatcatcatcttatggtttggttttgttcacgctcaaacattaacatctagagccctctcttctttgtcttgcatttggcgagttaaccttcttgttcttgatgagtttcttatttatcatggcgggacgtagagtgccgccatactaaagtaaaggtattgtagcccttgtctttaaccattattattgaattgtgacaatctttgtttatttgtttttgagctggggattcgagccatattgtactcgaggcggcg

SEQ ID NO: 34638 - DNA, 803 bp, Medicago truncatula
  Intron number 2 from transcript Medtr2g114490.1 (locus Med tr2g114490) derived from phytozome v7.0 (chr-ID MtChr2; po s 27086772 to 27087574 reverse strand)
tttacgtcagtttctagtatgtctctttagtcagtagcaagaggaacatagtggtatataaaaaaaggataaatttggtttataagattctaggatgctaatagtttttcttaatcattcaactgtttctttacaataagccaaatataaattgtttttctgctagatcatgttatcgtgcagtgttttctttagtatatatatgatggaaattgcattcattcttgatatgaattaatgaaattatcactgcaaaagtaaataacaaaagtcaattagaaactactgtctgagattctgttacttcgactcatagttatacttgttactagagatgaaaaataggactcccatttatgctataagctagcttattaatggctaggctttagaagttctctactttctctggatgaactactctttcctctctttaatactggaggctctcacatcttaatatctgaattttaaggtctctgcattttttcgatttgagtttgggatatgggtgaaatatagagcatttgctatatatctagacagatatcatcccgagctgatcacaaacagtttttagccaattaaatttgtttttttttgctggaaatcaagggaggacaggtgtatatattaggaaaggtatctaggaaatagacagtcgtgaaatcctcgcgaagatatgctttgctataactatcatcaaaatgacttggtttctaatttactagtctttcaatgacttgagctgtgctatattttctgcagactttcatcaagtctagaaaaaggcaaaaatttcg

SEQ ID NO: 34639 - DNA, 348 bp, Medicago truncatula
  Intron number 4 from transcript Medtr7g011130.1 (locus Med tr7g011130) derived from phytozome v7.0 (chr-ID MtChr7; po s 2618721 to 2619068)
tcgttgttagcttcaagccccctaaagtggacaccgtaagctttttcatgagttttgcttcttatgtttttctagttttctatgtaaaaggcaatgttatcaccaatttttttaactgtttttaaaatctaacaatgatttcttcagtttacagctttccattctaatatttcttttatcttctgattttaacacattcatgtgcaacattttgtggcattcatcttttgagattcatcttctggtttttaatcctatactattttgttttattacttttctcccaacaattttggtttgtgggatgcctcaggtaaaatctaccagtgttcctcctaacatcataag

SEQ ID NO: 34640 - DNA, 977 bp, Medicago truncatula
  Intron number 1 from transcript Medtr4g080450.1 (locus Med tr4g080450) derived from phytozome v7.0 (chr-ID MtChr4; po s 16524683 to 16525659)
tgtcattttgttcgtttctttacttgctttctcaggttaatttcaatgacccatgtttctttttttgggtgtttatagttaaatatcataaaaatttaatctttttactttttttcaagttgtggattcttaatttatgttataattgagttcaatttgcatttcttgatgatgggtttttgtgttaggaataggttaatgtatgtatggttttaaattgtggttgttgttatgctgcatatcttgatattgtcacaaaatggggttgcgattgcggttgcgttgtggctgcaattgcagactgtagtgtagaactaagaatgtaggttataaattgacgtcgtaatcgtattcctatgtttaacttcaatgccacacatgtttcctttttagaggggtttatgaataaatttcataaaaaattaatcttttaatttttttaaagttgtggatttgtaattaatgttatgcttgaattcaatttacctaccctgatgttgagggattgtactaggaataggtcaatgtaggcatggttctaaattgcggccgtggttgcaattatgctgcaaattagagcaaaatgcagataaatgaggcccaaattgtagttgtgatgccgtagtgaagacctccaaaaaatttatattgcagccacagttgcagtcgcagactgtaatttaaaactgtgaatgtacgttttaaattgaggctgccccgcccctgtctgactttagtggttgatctagcttcaattgcattcacgttgtggtcgtggagacattacaaatagagtcagtctaggttgtcgtagaccattttctgaaagcctaactctcagtgttttatgctggaatgctagaaagatttcttgtattgtagtttttaggtggtttgatcgtttatgttgtatgtgttatagttggtctgctcaatacctggttgatatgatttgattgatttatttgcagctttgt

SEQ ID NO: 34641 - DNA, 826 bp, Medicago truncatula
  Intron number 2 from transcript Medtr5g065490.1 (locus Med tr5g065490) derived from phytozome v7.0 (chr-ID MtChr5; po s 22910866 to 22911691)
gtcttggttcttaccattttaggtgagtttcttttttttcttcttgttctccagtttttatttatattgggcaaaactatgaagtacggatacagacacgctcggacacataattcagtgtctttgttaatgttggacacgacacgtgtccaacactgggacatgcataatcctaggagtgtccgtgcttcattgggcacatattagtctttgactcagtacgagacgaactaatttgttcccgatatgaaaatgttatgaactaaagcatgaaaattgtgaaaaaccaaaatgagtcttcacttgtatttttacttttaattttgcaatttcaatcttgtttgttcattttttttttctcactatttgactgtttgttttcttttgggtatgcagtttttgaatcttaatgatagatatagtatagtagattctattgttgatttttagaattttttcttttgtttctacaggttgtctgttaataaattattgttgtgtattgaaagtcctcaaagtttgttgcaagtgttgaatatttatttatgatttttgttcaattcaactttacattgtttgacaagttaaaagggaaagtattatatttgtcaagactttttcttgaagaaaatatttgtcaagaccttgttaatgtcatttgacaatttgcaaaagcaatagtagtaggttgttgtgttgtaaagttttgacttaaccattattattatataggaagctatgataatagaccttagactataattggttatgtaatttaagttttattttactaaataaactccctctgttacattttgatgtagga

SEQ ID NO: 34642 - DNA, 898 bp, Medicago truncatula
  Intron number 1 from transcript Medtr5g005950.1 (locus Med tr5g005950) derived from phytozome v7.0 (chr-ID MtChr5; po s 446084 to 446981 reverse strand)
ctgcaatagatccgcacatctaagttcaaatcccggttcgtgttcatctcagttctgctcatttcaatccctttatatcgttctgaagttcttgtggttgaggttagtttcttaaaaatttcactcaatttcttttcatcgattatccctatttttatatgattttcattcatataacctagataatcatttcagcaatcaagcttgaggagtcccttttgtgggttttgaggaaaagaaaccctaagcttaactagattgttgactaattgttaactagattggtgactaagaacaaatggatcttgtttgttattgattgattgtcaaagtctatctctctaaatcaactagatctcatattctgtttcgtctcacgacacatggtttcaccattctcatattctgttatctggtttacatttatttgatttgttgttggttgaacacaaactgtttgataaatgttctctaagtgattatttgatttgttgtttgttgaacacagatcgattgatagatatacccctttaggatgaatctttgttattgcaagattagaactataattcgtagtttgaacaaacctacatttatgcagtgaaaatgattcatatttgattgcggaagttggtcaatgattgttaattcaaagttttctatacttgcttattgtaaaagagtaaatgcgtcttgtgacttaaattggtgaacaagagaagagtggatacatggctgaactaggcattcataccacctcttaagatttagtttaatcattattcttttgtaattattatgcattgttataatttaatttcatacttaattccaatcttttttatattgcaaattacatatattgattacttgccttttacatgaagcgggtaaggga

SEQ ID NO: 34643 - DNA, 840 bp, Medicago truncatula
  Intron number 1 from transcript Medtr5g068010.1 (locus Med tr5g068010) derived from phytozome v7.0 (chr-ID MtChr5; po s 24251711 to 24252550)
gtaggagaattcccagtaaggttagtcaatttattcttcaattgcttttttttttttttttatcttgatatggttaacttaagaatgaaaattgtcattatgaagattaagattgcttagtagaaaatcaaaccattagattagatattaaactattgtgtaataacagtaattgcaacaaatttctatgttagctgagttctagtcagatcagagatgtttaggaactatgaatacaactggaagttatcaccacattcacttgttcgacatagacaccgataaagaacatgacacatgcgtgttgacacttataaaaacttgaaatttttttatgaaaccacacaagtgtgccttcaatatgaagtgtcggtgttacttggattggattacaaaattgcgagtcttgtgacataaacgcatccaacagccaagaataaaactgtgggagaatttacagcacgaaatccttgtccatttttaacaatgtgataaatcatagtttgaatctctctcttttttttattttttatttttttatttttttaagtcatagccttcaaataggtaggtcatgatcatgaagacccaaattaaggcaccatattaagtgataataggtagccgttgaaagtttggtgaaatgttactaataaattcattatttgatatttgataaatagttatcaatggaatatgctctatctaaattcctaccacctattcatgaaattcttgtatgtgggatagaggatacataatcatgtgcctaccactcttcaaaatgtatcaaaatgtatcataactttcatctgatatgcaaataatgcagaaagtaga

SEQ ID NO: 34644 - DNA, 486 bp, Medicago truncatula
  Intron number 1 from transcript AC235567_77.1 (locus AC235 567_77) derived from phytozome v7.0 (chr-ID AC235567; pos 280316 to 280801 reverse strand)
aagaaaaacgtggacgtgtgaaggtgaaaacgatgggtaattttctttcaatttccattttcagtttttttgaattttttgaatctcttacgatgctgattgaaattcttacgatgctactttagatgagttccattttatttgtaaatgaaatacaaatttttttatttttcacataaattttattaattttatggtattttgtttgtttattcattattcagattgtttttttagccgtgtagatactgtcttccctaaatcatcaatatgtggttcctaaagtttctgaatattttatccttttaaaatggaatttaaataaccatagaaaaggtttctccattggatttgtctatgcctttttaacatgaattcaaatcccctcaaaattagtaatttgtccacaatttaggtttaaaggtaacttaacttaatatataagctgagtttaattatgcctttttaatgcaggtgtcaattaca

SEQ ID NO: 34645 - DNA, 922 bp, Medicago truncatula
  Intron number 1 from transcript Medtr1g019470.1 (locus Med tr1g019470) derived from phytozome v7.0 (chr-ID MtChr1; po s 3944769 to 3945690 reverse strand)
tcattcaaagtaagtttgttttaatatattaggggaggatgttatagttctttctttgtctttactaataaaaatgaaatattagtttttttctttttagtctgacgttatgagaattcttcgtgtatattaaaatgaaaaaaattatgtcattataatttatatgtataaattcaaattcctttttctttgttttctatactttcttattccttatgtaatattctcttattccatgttgtttatagtatattataatatctcataataagggaataaataatcaatatttggaggctcattttaaaaccgcaaagaatattgatagcaacactcaatttaacatcttttattgtaaccattttttttttttaacatcttttatttattgaataaaatccgtataaaccatccctgtgaatttagctcagttggtagggatattgcatatttatatgcaggggttggggttcgaattccggacaccccacttctctacaattaaattgtatgagctttgaaaaaaaaaaattgtacaaaccacaccatcttatattgggcatatgtatacaatgatgggatccacattaattttatatccaataaaagtgtctcgatagtaattggatatttttacaaatgaaaaaattttagtaaagtatttttcgtgtgattcttaactaaatactcatgattttcttaaatccacaattttcttaaagtttgtcaaaaccacaaataatgtatttttagtcaagaatcatacgaaaatacacctaaattttatccttttacaaattaataccatgcatgccattatgcctttgtatatacttgattgtgattttgtttgatgaaaccttggactaatatgaagaggcatgtgtggtaatatattggcagccccaagacagtgtttata

SEQ ID NO: 34646 - DNA, 356 bp, Medicago truncatula
  Intron number 1 from transcript Medtr6g010670.1 (locus Med tr6g010670) derived from phytozome v7.0 (chr-ID MtChr6; po s 2163837 to 2164192 reverse strand)
tcacaagtggctttcttctattcttttacaaggtttttttttttttgttgctttttttgtacaccatataattgttatgttttggaaagaataaaattacatgactcaaaaagaaaacattacaaaatatcccaaaaagcatatgcaattgttctaatactcatctattttagaataatgtaaaatgatctgtcatcaaaaccacataaattttattcgataaaaagtaaatgttaaaaatagtgttcaaaatataatgtttctagcctttctcattgctacatttacttccatccaccttccttacattacatctattagataacttacatttgcttcaacctaccttatatatt

SEQ ID NO: 34647 - DNA, 655 bp, Medicago truncatula
  Intron number 2 from transcript Medtr2g077170.1 (locus Med tr2g077170) derived from phytozome v7.0 (chr-ID MtChr2; po s 17651325 to 17651979 reverse strand)
ctggttatcttggcagtgttttagtggtgctttttttcctgttctgtttttgaattaggaattataggaggttttttatcgagtggtttggtggtgatgtgtccgctattttggcgctcatttgtactctttttcctccttgcgggttaagtgcatcctatgctagcctagcttaataatatttgctgtttcaaaaaaaatacaaaccacctttggtgggtcggaaaccggtgcgaaagccaaaaaaaaaaacaatacaaaccatgaaaaacaagccagaaaactgttacaatttgatgcagcaggctctgactcggtataaaaagttgaaaaccactaaatatgactgcgtgtctgaattatttcatcaaccactaaatgtgctgaaaatttaattttgcaaaaagatttgacgaagcaacatattcttggcactttttaatctttacccaattcactgaattccaattcaaagctcgaacacattgtactgcatatctgtttacctttgttgtcaatttgtaaaaatttgaaaaacagattgaatccattttacttcagatttggcgcctctaaaatgagtagagtgaggaaatcaatgattgatatttgaaatgtatattgtgtcaattcctaacacaggtcatagtcgcta

SEQ ID NO: 34648 - DNA, 363 bp, Medicago truncatula; identical to SEQ ID NO: 28891
  Intron number 1 from transcript Medtr2g052700.1 (locus Med tr2g052700) derived from phytozome v7.0 (chr-ID MtChr2; po s 14329295 to 14329657)

SEQ ID NO: 34649 - DNA, 838 bp, Medicago truncatula
  Intron number 1 from transcript Medtr5g099420.1 (locus Med tr5g099420) derived from phytozome v7.0 (chr-ID MtChr5; po s 39751467 to 39752304 reverse strand)
tgttgggtctgtttcaaatctgcaatttctaacatgtgagtaagatacccaaaatctattttaatctttttctttatggatctataatgtgtttggttttagtattatatgaatgtgaagggtaattctgttgaattcaaagttaattcctttttccatcttgaatgtggatagtgttttggatttgattctgtttcatgatgtgtggttttgctgagatatcatgattcacagtttaatggttaaacttaaactatttgacctgcattgattttactaatgagatcaatttgaaccaagttttggtcattcttgagaagaaatgtttctttgtttgtattcctaaaatttctcgaagctaattggggatttactattttggactacttttcaaaattggtgttattctgttgttcaattgaacttgaagctatgtttcttatgttgttcaactaaactaccaattagttttttaagaaaattattactttacatttcaaaacattgcgtgtcttaggtgtggctcatagtttactcatacgcgggtaagtcgctcgagctgacgagtatttatacacaagctgtaatatgtaaaccctaagcttgaataatagaaagatattgtaaccactctgcggttggagacataggcacaatcgaccgaactctctgatcaatcatgtgtgtttttcatgtatgtttgcttttgaactagaattgctattctaactgggtgacacttatgtgcaacagatagttgattaaatctgcaaggagtttccatctcaaagactagaatatttggaccattaattggagaaaataggatcataggaac

SEQ ID NO: 34650 - DNA, 929 bp, Medicago truncatula
  Intron number 1 from transcript Medtr3g114520.1 (locus Med tr3g114520) derived from phytozome v7.0 (chr-ID MtChr3; po s 28998466 to 28999394)
aaacggttttcacttctcccccttttctatttatgatatgaaagttgcaatgcatgttcagttctaaaatgcttgattggatttggtttatgaattaatttgagaaaaaaagggaaaagtattgttggaagattcctctaacctaatttgcaaggttgaaggaactcaacagttgcatttggaaaacggcttacattgcatcaattaatgttttgatgtgaattgaataaataagtagacgaaacaaaacctttatttttttagactaaaaaacttgacctgtattaagttttaaaaaactaataatatcatttcctcttggatagataaattattttgaatctcaaagttttaagaggatgacatttttattttcattaacgtgaaaagttgaaatattggaatttcctcttggatagataaattattttgaatctcaaagttttaagaggatgacatttttattttcattaacgtgaaaattcattaacgtgaaaagatgaaatattggaatatcttatgtcttctaatttgttatgttattttattcttttaaatttttaataggactggagaatttaatgtcctagattgattgaaattatggaatttaaccgccctccgcttaaattttaaattaattgtaatgtattttaagaatgatatgatatcattatgtacctaatgttatatagaatttgcttatattttggaccatcaaaatttaaaaatttgttgattatattcaaggttggagggagtataaacatgtaacatcccatcccaatagcatgtttgtgtgctttgtatcagtggtttaccatgcatgattgtgttctaaagatctgacaccaaacaccattttgaaattaataactaaccaactatattgtgaaaaccctacttatggattttttctgcaggttctt

SEQ ID NO: 34651 - DNA, 684 bp, Medicago truncatula
  Intron number 1 from transcript Medtr5g079740.1 (locus Med tr5g079740) derived from phytozome v7.0 (chr-ID MtChr5; po s 29758861 to 29759544)
gtttagtatgttttagttatctcgagtcctcattttacatttattatgaattcaaattcaaatttgaataataatgtgtagaataattataaaatatttcatttattcactttaatttgacattttcttcgatcgtataaattataatgagtgttcttaatatacgacgtgtttagacaaatgggttctagttaataagccgttcaagcgaggtcgccggtataaatgagcatattagaattgcctatataatttctccatcgttttttagaagcacctctaattttttttcgcatgtattaaaaaaattggtttgtaaatttaatgtgtacatttcatacgtaaaatttaataataccctttgtattatttttaaaggaaaatacccattgtatctttaactttcatattttatttgggtaatgaattcttgcattatttatgttcagaaaaaaaaaaaaaaaagggacagctttgatgaaaaaaaaaagcacctagttttttgcaaatgagctcataattatatttagagtaaaaaaattattcaagtagaacttattattaaagagggattaagtttcacccaaacattgaatcgcatatattctaaaataacatctgtttaatacattaaattccattttgataggtacaaatcctgtgcaacaaattcagatatcagat

SEQ ID NO: 34652 - DNA, 964 bp, Medicago truncatula
  Intron number 1 from transcript AC146568_12.1 (locus AC146 568_12) derived from phytozome v7.0 (chr-ID AC146568; pos 68022 to 68985)
aagaacagcatgtgagtgcctcatcactttcttcaatttttatcttgttttagagaaaacaaacaaatggtgttgtagatattcatgtatacagtcaaaaaaatgttgtataaatgtgtggtataaaaactacatatcttgttttaaaacctattaataacatgtatacggtataccataaatcagtaaacaagaaatgtatatcaagaaatttgaaattttagaacagcaactagtagcagaagattaaagtaaatgaaagtaaaaaacaatggacacaatagatatttgttgatgtagttcggccaatgatgcatacctctacgattatagaacaacgatagttctgtttgaatttctatgatgaatacaggtttcagtgttacaagcaacatatacagtactactgttacgattcagattacaaaattacctttgaactatccacgcatttctttggtgtcatttatatatgagccatactcaacaattgtgtataccggaaatttcaagtttatggtagtagactaattcaaatgtgatgtatacttttgtttgtaaaacaaatgtaattataagcttcaaattcacattatgctttatggtattggtgtttggaaaattctgtattgtaaatatactaaaaatgacttttatgtttgtcatattttaatagtagtaatggaaaagtcattttacaatttatatttttcttcaacataaaattttctttacgaataaacaaaggaatattgggaaaaacaattcatcaaaataaaaatttatgagctcaaaaaaaatttgagagcagtattcttggaataacattaaactttaggagtgaaatcttaattataatgtatatctatcagtttttaaaactcaatagttaaggtccatcatactgcacaaattcatgcctttttcttgatctgctagatgattttattgtgtcaggtggagg

SEQ ID NO: 34653 - DNA, 335 bp, Medicago truncatula; identical to SEQ ID NO: 28767
  Intron number 3 from transcript Medtr3g105220.1 (locus Med tr3g105220) derived from phytozome v7.0 (chr-ID MtChr3; po s 26260985 to 26261319)

SEQ ID NO: 34654 - DNA, 757 bp, Medicago truncatula
  Intron number 1 from transcript Medtr1g111830.1 (locus Med tr1g111830) derived from phytozome v7.0 (chr-ID MtChr1; po s 23935726 to 23936482)
ttcgtttctggtcaaaattcatcgaggaaaaggtaagaaatttgctaagccttctgtgtgtggctagttttccctttgcataattaaatttaaatgcctatacatacctgagggtaaaactatttaatatgccgacataatgagacgcaactgataaatagttgaatctcttaagtattacgagtttgatatttagccaggaaatatggaagaacatttgttgatagaggtcaaccccttaaatagatctttgtatcttaaaagataattagtctttagaatccgactgaaggatatatttgataaaaaaaaaaaattatacaatgattcaatcaatttttcctattctttattttacttttgttccaaatgttcttttttgttttgtgcaaaagagagccaaaggctcacaagaatggaaaaaaaaaactaagaagctaatcgcatactcttaggcatgcacgttccagaaatatcatcaaacatgaagctttggagctcattaagatttaggaagagactccaaaactatcagattccaagaattcaaaaataaactaaaatgttctattatgaaacccacacacaccaaaaatagagaaaaaaggtattgcgagttaaaacttacattccaacatatcaaatgttaatgtagttttttttaccatcagagtaatactttatgagattaaattttactactattctgttatatatccctacaatgacattggaatgattttcattttcacagtca

SEQ ID NO: 34655 - DNA, 964 bp, Medicago truncatula
  Intron number 1 from transcript AC235664_15.1 (locus AC235 664_15) derived from phytozome v7.0 (chr-ID AC235664; pos 53011 to 53974)
cagatctgatctgaaatctatctctccgataacaggtttcattcaatctcaattcattcatttcgaatttccctattatcgtctacaatgtcatatgaaccttaggatttcaaattcgcggtgattttattcctatggatcgatgttgatttccaatttcagatacattttgcttgttatctaagcattgccgtaaaatcacgtgactctaagaattgcgttagaaatttttgtaactgaagttttttcagttctcaggtccctgatttttttgctagaagttggtacttgttttgttgtggactgtggaataatgctataatttatgcatactactatatgattttttttgttacatagttaatttactattgagtcttcattttcatgatatttttgattaaattcttaaaattagatccagtgccttggacttttatatttactcttgcggaaggacgaagtttcaactgacatcagcttattgggtcagctggtgtttttttgtttttttaagccaaagggattataaccaaaaaccactaaaattgcagggactaaaatcatatttaaaccattatataattataaactatactaatacaaataggaatacattattattaaatataaatgttgttttagaataattaccaatgctaattttttaaaatgtcgattctctcttttaatttaagatttatgatttttttgttgattttatttgttggtatcatggatgtgctttatcatataaagttgaacatttgttgcattcttgtgtccatgattgtatatgactttctaagatttatttctttggatctttttacatgtgtacttaaatttgtcttttgagatactttgcttctttttgtcagttatcttatatcctgaagtgacaatcaaattgatccctactgtaacagttattcctggactggactaaaggagaatcagagag

SEQ ID NO: 34656 - DNA, 482 bp, Medicago truncatula
  Intron number 1 from transcript Medtr3g127660.2 (locus Med tr3g127660) derived from phytozome v7.0 (chr-ID MtChr3; po s 32435560 to 32436041 reverse strand)
tgctcttgagctcctcaaaacttctgcagctgatagtaagtcaatgcttcatttccctgaattgaattcgtctttgatattatctacttttcctttgtttcattaaacattttataccctttctttcttaatttgttgtaatcctctaaacatatggattaaggtaataattatttgtttactgttgaaaatgctgattaatttcttacctgttactgcactttatctctgaaagtttatgatcttttggatgattcaactgtttctccagatggtatattgtatccaaccgtcgaattttaaatcattgcagcaccctatttaccaggaaacatgtttttttttcttcatagtattcacaaaataaaggatgaagtttttttgcatgttaacattttctatttttttgcactagtcattctgagtctgtttaattcactctaggagatcaatttctgtttgttatatttcttaagcggttg

SEQ ID NO: 34657 - DNA, 815 bp, Medicago truncatula
  Intron number 2 from transcript Medtr2g009670.1 (locus Med tr2g009670) derived from phytozome v7.0 (chr-ID MtChr2; po s 2172571 to 2173385 reverse strand)
atatagttatgtgctttaatttatttctttgttttctccgattataatattattatagatgtaatattttttttaagaaatcatcgggcttcttcatgagattgtcaagacaacaccaattgggactagaaagaaaccgtttacgaacattgtgttgaaagataaaaggtattattttctaatttgtcaacatcagatgatagaattttgtataagtttgataatgacctgaaagatgtctttccttatgcagtgagaatatagttgatgtaacactatgggaaaaatactccggagcttgatcatttaccatctatttaccttgagttcttccattttgtagtcattggcaacccaaatataagtaacaattggtcaggttcgaggctgctcatcaacctacattatccggttgttgagaagtttaagacttagtaagtttgcattatgatttcaaaatatagtattagagtaacttattatttcacaatctgatttgattgttttttgaccatgtttcttgaattgttgtcgtgaccttaacacttctcaagctcagagtcaaagtatcagtcataacttaagttagagttcggcttcttctcaacgtactttgtacaacgattttttcaatctgcctcaggttaggccaattactgaatttataaacttagtcatggtctgctttttttatgcacgaacatgctttgagttttttgatgcacaagttaaaaatacatattgcattattctttatttcatgtgcataatttggattaggatacatacttcatcactatttggaaaacaactaa

SEQ ID NO: 34658 - DNA, 549 bp, Medicago truncatula
  Intron number 1 from transcript Medtr4g032270.1 (locus Med tr4g032270) derived from phytozome v7.0 (chr-ID MtChr4; po s 7670656 to 7671204)
acttggaaaaactgtttgtaagtgagaggtatccttcatcttacaagttaattttgaggttgagttgagtccaattcaagttatgagatgagtttagacagatctcacatacggaaataagtaataagtgtatgcttcttcatcccttacgaataggtaagatgagaagttaaagaagataacttctgaaaaacttttaagatgcacatgaactaattttttaatttagacaagaagctgcaatttgaaaaactcagttattgtaaggttatcttgataattttttgttgtattagtgtttcttgaggagtttatcctaacagactttaatgagaaattaaacaagagagcttctgagaacattaagacagaaaagaagcaaattttaacttacacgagaaagtgcaatttcttaagaatttatccaaagatacttcagtgcatcaacatgctatccacattctttagtttttacttttaaataacgatggacgagatttaatgtatttcttctaattctttgacatggccagattaaacccaaagatt

SEQ ID NO: 34659 - DNA, 925 bp, Medicago truncatula
  Intron number 2 from transcript Medtr4g032270.1 (locus Med tr4g032270) derived from phytozome v7.0 (chr-ID MtChr4; po s 7671328 to 7672252)
attgccttgcattgaatccggtaaaggacacttatgtttttcttctctagtgatatgatttgcattctttatgaattcattctaattttaatagctgaaatgcatgtggttttaattcatgtttgttggcaagacttcgagctgcagtaaatatagtaatgattttgaaaatgttgtcatcataagcttcttgactttctatcgtggtattcaagaagtactctcgtgtctagactgtttggcatgccttggattggattgatagattatttatatgtcaagtgacacaatccaaagatgatgtagttatctcatataagaagtatgctatgtgcattcatggagaaaatttgttgaatgcagattttatattccttttgatcctaatgctaaacatcaatcaaattaagggaagttaaagaagattggtcggacgctaaactgcttcagctatccattcaaatccagacatgtgtttttgaataacgtggattgtcagtttttaagctcaccatgacggtcattggatgttgttgataaccttattttgaaatatattaaaggatctatgagaaataataggtattgagagtgttggtgttaggtcactgattagaattgtgggcagaaaggataacgtggattgaaataatatttcttgttttattatcgaaaaaattgtgtaaggaaagatatgtgtaaaaatcaccactcttattcatgccagtgttgtgtcattaaactctaagcttaatattgtagtatcagcttcatattggatatttagttctgttctcattcaatttttttgcgttgtatttaatataatatcctttctttcatcgagcactattaactaattcattgtaatttggtctctcaaaccttaggctgttggatcagtctttggtgccatcgttggagg

SEQ ID NO: 34660 - DNA, 630 bp, Medicago truncatula
  Intron number 2 from transcript Medtr5g025130.1 (locus Med tr5g025130) derived from phytozome v7.0 (chr-ID MtChr5; po s 10057250 to 10057879 reverse strand)
tcaggtatataatcatatctctctctcttcttatctcaaatcaaatggcataatttttaggtagtttacataataagaatgttcatattctcaatgaaggtgggttctatattttatacggtgtaaccatacttaaaaatcacttgaaagttgaaactctatcgaccaacggtgctcctcgatcgaaagtagatgttcacaatcttcatcgttcttatagttgagatagtgacatgatctgtgtctgttacttttgttattttcgactcgagaccaattatcacggtctcagtcataaaaaccgagttaaccatagtttctacttagaaatagtgatgttcttgtcgtttatatttcaaacgattttcaagcatataggtttacgatggaacgtctatcaaagcagttcaccgtacaatttgctcttaaaaaatttgttgagtataactcatatcttcaccaataagtggtcatgtgcttgaacccatcgtagaaattcagacataaatttgtaataatcttaaaccatatttaaacacaatttgaactatataatatatatgttagcgatgatcactttttttttttaatgtaggtgtgaaggaagtagaggtgaatagagagcaaagc

SEQ ID NO: 34661 - DNA, 796 bp, Medicago truncatula
  Intron number 1 from transcript Medtr1g028390.1 (locus Med tr1g028390) derived from phytozome v7.0 (chr-ID MtChr1; po s 6893267 to 6894062 reverse strand)
gagggggaaagaggctcgggtaagatttgttttctctctcatcccgagaagaagggagaggaggggtaaaactaaacatgtcataagaaggagactttgatgaacaaccttacacctagataaagcaaacttacaccaatacaaagggtgccaatttgcaaagtgagacatttttatttgaccattcattctgttcctagataaaaataaaagaaactattctatgaaaggccaacagggaacattatataagaaaagagaaggagagaatctgagatggaatgagaatttatgaaggattgatgagtatttataggggagaatttgtgaaggatgatgtatagagtgtaatagtctattaattagggtcaaaaaaggtggtcaaactggtctgaattgccaaaaaacccaaagaaaaatgtgttgaatgagcaagtcttgatgagcaaaccaccatccatactttgaactggtttggattatataatctgaaactatctcataaatgttcggattatataatatccgaactagtttaagaatgtgttaaaactcgtactttgtagggtgagagatatttcataatttataatcggaaccattcaagtacaagatttttatatgatcaacattgcaccggcaatttatatggtctacgacgcacaaaaacttctataaattggtgtgcttgttcatttgttgtaaactacactaaataatgatggacacttcagtcattgacctgaacatcaaactagttgatgtttagtacaacagggaaaaatttaatttgttc

SEQ ID NO: 34662 - DNA, 935 bp, Medicago truncatula
  Intron number 2 from transcript Medtr3g147130.1 (locus Med tr3g147130) derived from phytozome v7.0 (chr-ID MtChr3; po s 37983068 to 37984002 reverse strand)
gtgccccttgtgcaaaaccaagtgtaacataaaaggtacaccctttttttattcctgttcaaaataatctatcattgtgtttgttttttctttgatttgattattacatgcttctatcttatcacgatcattgcttaaatggtttactaattagggaatagtgagtcaaaatttcgattggtacttatacaacttaagtgaaagtgtgaaaggaaaatttggtgtgtaggtgatcaaataactaatggaaatgaaacaaaacactgttctgattttgaaaaagcaaggtgcaaaaatcgtttaggctacataatatagaggaacaatgccaactacacacatatatggaaataacattaggtgacagctctgatggtgaaagggtgcagacacatttaatatgctgggacgcgagtttgtacccgcaattccccccttctcagcactcagtgtgtgtgagtttggccgctaggctctctagaacaaaaaataacacattaggtgactttttagtttgcgaagggctatttgatttgtcttgatttgatatattgatggaggagtcttcatgattctataaggtacttactttttaacataacgtgtgcccctgttaagttgtaataaatgtctcatcttgttaatgcttatgctttcacaaagtatctgtgtgatgtttttatgcgtatgatatacatcaaatctaattttatgtatttatctatctactgctagatactccttaggtgtagtggtacacgtctgttagactgttactgtccttgcatatttagatataatttgctgtgaataagttcatattgtgctcaagtgaactaatatattgtgtgtttaggagtcccattatgcgtcctaactgaatgtccttgtaattttcagatattaaaggaaaggaaataagttacacaatttct

SEQ ID NO: 34663 - DNA, 952 bp, Medicago truncatula
  Intron number 1 from transcript Medtr2g032750.1 (locus Med tr2g032750) derived from phytozome v7.0 (chr-ID MtChr2; po s 8756149 to 8757100)
gaagaactcatttctttgtcatcgaactggtataaagattttctcttcaattcacatatgagaggaatatttgctttacctttgattacgttgaagttgaaactcttcaacttgatcatagatttagcaatattcaccatgtcaatgatttactacacacattttgaagggttcttaaaaaaagatctcttcgttattagttcattagtattattttagtgtcaattcagtgttcaaatttttatttcaaaaattcaaattttctttatattttagtccttcaaaaaatttcatcaccatttttttgtctatgcattcaagtcaatttatgtgtatatttaaaaacttgatttttaaacatattaacaatctatataataatattataacatattaacaatctctttcaacagtaattataatttttttaacaaaaaaagaattaactattgtttttgaattaactttaaaaaaaaacatgaattagatatgaattatacaaatgaaatgacttaagtgagaccaaaagtgtggacacaattttgtttaccacgtaatgacattgaaatgtaattagataataaaatatttcaacaatctcttatctagtatatatatcttaataattacataaaaatttttttaagcgcacattcgaatactatttatctttatattcctcctttatagtatgatccacatctgatatatagcatgactaaatcctgacgactattatatcaatatatttgatgacatatatcaatatgaattgcgtaacatgaaaattttacacaacgtgatatctaaatgatgcatattttcaactagtccagtccaaccaaaattttgttaagatatatcaaactaaaatttacaaatttaatatttgcacactgtgtgaccaatgtcaaaagcaaccattaaacggtggaaagacaggtgaaacata

SEQ ID NO: 34664 - DNA, 381 bp, Medicago truncatula
  Intron number 1 from transcript Medtr2g055590.1 (locus Med tr2g055590) derived from phytozome v7.0 (chr-ID MtChr2; po s 14927588 to 14927968 reverse strand)
tttctcctttgtctttgaagtcatttgattatctggtttttggatcaaattacctttgcttttattcttttttaggctaatttaaattcaaaaggttacagtcgtatatattatggctcaatttatggtagttgactggtatttttcgataaagtgactagttagcttctatctatcccttagttagggtggcaattgttttgatcattatatttgtttcttttgatcaaaggaaaatatttatttactttattttggtagtgagtgaaaagaaaaaaaaacaagaggatgcattacatttagcacgaatgtccttttctcattgttcaaatgtcatataatgtaggaggagggaattaccaaattggagtttgagaggaa

SEQ ID NO: 34665 - DNA, 629 bp, Medicago truncatula
  Intron number 1 from transcript Medtr3g043500.1 (locus Med tr3g043500) derived from phytozome v7.0 (chr-ID MtChr3; po s 11865037 to 11865665)
tttgcttctaatataatcactgtaagtacctaccgaccatctctttgattaagtttatgaaaatattgctttcttggcttcatactgtctattgtttatgttccaattttaaattgatttagattttgagcaatattttttgtcttcttaaatatggatatttgtgttatttccaaattatcatcctgaaggattgtttaaagaataaatatctttttatgattgtttataaagattgtttaaagaataaatattttttttatgattgtttatttagtcttcatctagaattctttgatattattcaagtattctcttatactattgaatcttcatgacaacatggatttcacattttacactattgaatcgattcaagactttgataattcgattgaaacccattttttcagtgtcattttgggccaaacttaatcctatctcactcgcctattgttagctttcattttcgacagactatattaaatgcactcaatagagtttgactttgtgttttgaagaaaagttattatgttcgacatcataattagtgaaaatttaatttttacttggtcgaagatatggatttagcaggattttgttttacaaggattccggttcgacaagag

SEQ ID NO: 34666 - DNA, 434 bp, Medicago truncatula
  Intron number 1 from transcript Medtr6g022430.1 (locus Med tr6g022430) derived from phytozome v7.0 (chr-ID MtChr6; po s 4986625 to 4987058)
acatttctattgaagccacttccacttttggtaagtctaatcccaccccactaccactttcatttgcaaatgactttagttttggttactaacctcaacttttaagagtgatgttgttctcacgtcctttgtttcttagaaatatatgaaatgatcaaaaaatttaacggtagttaactatcattggttttctgttttgaagtcaacggtagcttttttttcgtgaattagtataaaattacaaattataaataatcttccaagtttgtatttaacaaaaattgtgaataatggttaagttggagttgttaatgagtattcaatttatcaaccaaaaaagtactattacttttatgcattattaaagaactataaaaataacccttgaatatgtatttgacaaaatttatgaatgaatttcaggggaattgaaa

SEQ ID NO: 34667 - DNA, 453 bp, Medicago truncatula
  Intron number 1 from transcript Medtr1g076860.1 (locus Med tr1g076860) derived from phytozome v7.0 (chr-ID MtChr1; po s 15479135 to 15479587 reverse strand)
aattggtatatattaatattaatgattttcccttacattatgattttttttcttcttttttgagagaaaaaaaaaaatcttatttgttttttgtggatggagtggaaatggttaaactttatgatatgacatgttgaatattctaattcctttctaaatttcagttgggtcagttccttgtgtttataacatgtttgttactttgtaacttgaaactatgtctctctatttgatgcaaaatataatttttttttgttttttggatcattacttaatcacatgttcttaagtttaaactatcctaaagtttttttcatattttttttatacctatggtctttgacctttctcagctttttaaagtatccatttttcatttcaaactttatattatgacttatcacaatcaatcataatggtttgtgaaggtgtcaagaaatattgatctagttt

SEQ ID NO: 34668 - DNA, 539 bp, Medicago truncatula
  Intron number 1 from transcript Medtr2g049990.1 (locus Med tr2g049990) derived from phytozome v7.0 (chr-ID MtChr2; po s 13772930 to 13773468 reverse strand)
atctgattcctgaatccaataagttcgttaaggtaagcttctttcactttggatctgatcctgtttcagattaatgttttctttatatatgcctaactgttttttaatttgatgtggtgtgtgaatcaaatttagctccagaaattatgaacgtggtgttcctttttaaagtccgttaagaaacatggcatccataaagcttaaaacttactgtattcatgatagtagaaatgagtcaatatagaagtttaaaagaaacgaaaaaattgcatgacaatgagacacaatctttgtccacgcagttcggctaatggtgcattcctcagcaagtataaagtagctatagttccgtttcatttttctgataaaatggggtttatgatgttacaaccaatatatatatagtaccgcagttcgcaacgctccacaagctcaatttcttccccgccccttgcgcctcttttgtgtatataagccatacttaacactaaccacgtcttcaatagtctaagccttttttttggtatataggttttgag

SEQ ID NO: 34669 - DNA, 465 bp, Medicago truncatula; identical to SEQ ID NO: 33679
  Intron number 1 from transcript Medtr1g107260.1 (locus Med tr1g107260) derived from phytozome v7.0 (chr-ID MtChr1; po s 22595861 to 22596325 reverse strand)

SEQ ID NO: 34670 - DNA, 981 bp, Medicago truncatula
  Intron number 2 from transcript Medtr3g062120.1 (locus Med tr3g062120) derived from phytozome v7.0 (chr-ID MtChr3; po s 14243658 to 14244638)
tctgaggtatccagggaacattcttctatacaccctttagttttgtgattttattttgcacgtcttaatttctagcaacataatagaactaactcttcatttgttggaattgtcatcttgtttcggttttgctttgtagtaatatttttttcgtttttgtatggattgctattgacacttgtattttgaaatatgaaaacaaaaaacttagggcttgtttgattaagttctaaaaaacagtttttcagtttttaaaatttaaaattgaacaacttgtttggtaacttaattttacataactattttttaaaacactcttctatttaccagttttgagaactaaaaaactaaaacagattttagaggttttgcttttcagttttttagttttgcatttggtatgagaagaaaaaaacacagaagcccttagtacgaaacaactttcttaccatgtgcactatctcttttaaattggtaagtgattttattatcctactaatattctcctattggtgtatgacattgatatctcagttacttttgaaatttgcacaaacccatgcagagaaatttgtgttgagaaaatgtacatatatgagaacttgaaattttatacattcatgaacaaatagccgaagacaaagtacacaacaatacctgcatgtaggcaaatctattatcgtttattaatttttttttttttttttttttttgcatgtacttgtatatacccacatgtcttgtccatgaagtgtcaagtgccatactgtgattgctgtttcaacattaaaactatatataatccgttgtcttatcttcatgcatatatgaaatggctaatgaatgagttaacagtgagaacacttgtatcatttatgaggcctaacggtggcaatgatcactgccctcgtctaagttattgataaattggacgtaattattagtgtcattgttcttgacggttgttgaaccatgcaggac

SEQ ID NO: 34671 - DNA, 305 bp, Medicago truncatula
  Intron number 2 from transcript Medtr4g079080.1 (locus Med tr4g079080) derived from phytozome v7.0 (chr-ID MtChr4; po s 15660364 to 15660668 reverse strand)
ctttcgatcttacatcacaacttattttgtaagttatcattatgtgaatattaaggataacttgctttagtgttttggagttcattctgattttgcctctgaaatgaattttgttggtgataatttttttcttcttctgagaaacaatcaattaatgaaccttgatttttctgattgatgacagttgatgcattatcttcatttacttttatttgtcaaatgtttattcagctttacaaatttgattggatcctttgcatgtgattccagactaaagttctgacagcaataatatcagtctccca

SEQ ID NO: 34672 - DNA, 597 bp, Medicago truncatula
  Intron number 2 from transcript Medtr4g165580.1 (locus Med tr4g165580) derived from phytozome v7.0 (chr-ID MtChr4; po s 41728538 to 41729134)
ttgcctcagttgtcactgccgcagaaaaggttcttcacttcactcattctacattacttttgtttattctcagctccgatgattagtgctctagtatttgacaactaaaaaataagatttagtatctatgtaatttatttatttttttgtatctgaaagcagatagcttaaaagaactgagtgatatatatgatttgaaattagttaaatctagaattatttagagttgtcaatgactcaattcaaaaatcttgaagtgctttaaatttggaaaaatgtagaaaatatctagaagcaaatttcaatcaggaatatcctaaagtctccttttctcttcctaagaggcatagctgataggtgataactgatatgatatgaattgacatttggaatcatcttctgtttgggactcctcctgaatcttcatgatattttaataagtctttgaccaaattttaactgatgttctctgatggtttcttttatttttcttaaaagtatttcacattacaaactaacatacaactgtgaactgtaaatgagtcttttcttgtcaatgtcgtgcttgcagggaggagcaactcacgtcgatatagc

SEQ ID NO: 34673 - DNA, 1048 bp, Medicago truncatula
  Intron number 1 from transcript Medtr1g020430.1 (locus Med tr1g020430) derived from phytozome v7.0 (chr-ID MtChr1; po s 4460359 to 4461406)
agtctcagttgtcttgttctgacaactcttcagaggtatttttttttttgttgcaatttggtgatttattttattgaacacggtttttttttcttcttgaaggttgtttggttggaatagacaatatgaacaaggtcatgtttggataaacagcttaactatataagcgcttatcatataactgtttatatataagtcgtttctgcaacaaacgataaaattaagtcaaaatcttttcatttgagctctaagttgttttaaaaagctatcacaagtgcttttagaaataagcttatttatatgtcataagctctttccatatgctctccctaacggtgtcacaagtgtttatgtcaaaactcaatccaaacatgtccaaggtgtatatacaaattacaacagaggaggagagtacacttgtatcaccttatttgattttttttataagtgaattgatgttttttaatcagtaattcactattgatgcatctagattcattactaagcctatggagaaagaaattcatcttagattccaaatttatttttataattgaattgtttttggttgcatgtttttctcttcttaagcttacttggatcagcttctagcttgttaaagcttctcaattacattaaatttatgtttcttcccttaaaaaaaagcctctataagcttctgaagtatagttatttatggagaaatttacgaaagttataaaaaatggaaatgcagaaactaacttcaacttattgttttgcacagttattgtttagattttattcgtatgtttttacaagtgattattgagaatttatccaaattacaaattggcttttaacttaggttagtgtatgttttgttagttacttttatatgttcttttaacttttagttttaacaacaattttctcaaacttagggtaaaagcttctttctgtctcacttttgttttttctgaatgctgattcccattttttctctccatactgtccttttgcgatatgatcagagtgacattgttgccaaatttaaagccgaggcatc

SEQ ID NO: 34674 - DNA, 643 bp, Medicago truncatula
  Intron number 2 from transcript Medtr5g035470.1 (locus Med tr5g035470) derived from phytozome v7.0 (chr-ID MtChr5; po s 14656471 to 14657113 reverse strand)
aactaaatatttatcaggttttttatttttttcttctcgtattaaatttcaaaactgtggattgtttattatcccagtatataatagtctgacaccttgtagattgaatacaagtttgttcacaacgtgtttagctatgctcaaaaaaccggtaaactatagccattttgaaaaatccggtgaacttatttaaaaaatccaaactattttgctaaaaaaacggaaacttattcgttataaaaatagaaacccagtattcacctttaaaaaccagttaatcatgtcactttcgctctgctgctttaatcacacgtatctctactattttgtaccaatctcctaaaaaaattaaaataagtaaaaagtaaagttcacaaaagaaatgcagagcgagaatgagaaattgcaagagtgttcaagaaagagaaaaacaattgtgtgttgtttaaaagaagaaaataggagaaagtgaccaggaaaataaaaaaagaggagcactgtacatggagaaaacaacgatgcaagtggtctctctgcagctatcacgtttttcgttgagataatatcagccaaatatgctgaattcgcttttgattgaacaagaacaggtacatttgagaaaatctctcccaaattgatttac

SEQ ID NO: 34675 - DNA, 622 bp, Medicago truncatula
  Intron number 1 from transcript Medtr6g062390.1 (locus Med tr6g062390) derived from phytozome v7.0 (chr-ID MtChr6; po s 11354643 to 11355264)
tggttggtgggtaaattacccaccattcttcaaaggtaatctagaaaatagagggcatatcaagtgagaggagtaacttaaataagatatgagaggagctaatatcatctgttggatcaaaataaacggttatgatcaaattccactaaacaaggattgacacacttgaataaaaaaaaaacacgtatcctctgctcaagaaacgtgtcgcttcctcttctatatttttcctggttttccatacgttttcctcttcaattttttaaatctgcaattagacttgagggttatgcacaccatgattcaacttcctatgtattattaagttctatgtatcaacttctcacccacccaatttctttgtcgtactggaattcttcaatttcatcttttttgcatgatgtgcatcaacttcctgtgtatttttaagttctaattggatatttgaactttatcatgattacttaacagaaaaattaaattctaattggttcttcaaacatttttataattactctggtagaaaaaattcaatttttatattttgaaaaacacatgtagatgtagtggctgagctgagatcgttggtagtgaaggttataatgatttagatttaaggtgg

SEQ ID NO: 34676 - DNA, 280 bp, Medicago truncatula
  Intron number 2 from transcript AC233576_33.1 (locus AC233 576_33) derived from phytozome v7.0 (chr-ID AC233576; pos 107918 to 108197 reverse strand)
aagagaaggaagttcaggttttcaagcacatagtacaattggtaaaactctacccaatttgttttcttctttgatttttgttgttgtgtgtttcatactttaatctcttaccaggttcataattgattgcatgttatctgagattatttcaatgtgacttttgatattttttatagtgaaattggaattttcttacatgtttagtatgtagttgcatatatttattaaaggttactatttcattcattcatgtaaattatgcaggttattcaaacaaggc

SEQ ID NO: 34677 - DNA, 523 bp, Medicago truncatula
  Intron number 1 from transcript Medtr2g014820.1 (locus Med tr2g014820) derived from phytozome v7.0 (chr-ID MtChr2; po s 3906310 to 3906832)
caaagggccatagggttgacaacaacccacccccttttcttacaacacatatccttgaaatttgataagtaaagtaatatgcctaatacctctatttctgttgaaatccttgttgactgcctgttacgtggttgtccttttgaccttgtgtcggattattgtgaacgggtagggcagaagatgaatacctgtccgaactccaaatcattgattttcttccttattcgaaatatttgggtgtgatctgtaatccccccaaaccaccactgtattatacatagggggtaattgccgccgcgaatccaatcaatttgaaccccatttttcacccatacaatttgacttttcaatgtaatgagctggagaaattgctttctgcatattgtttcggataacatcagtcacaccattaatgaaatagcccagagcttgcctgtccattatgttttagaaaactaaaaactgatgtttttcttgtgatatctcagggtgttgctgtgagagttcgtaggcctactgacta

SEQ ID NO: 34678 - DNA, 530 bp, Medicago truncatula
  Intron number 3 from transcript Medtr3g092040.3 (locus Med tr3g092040) derived from phytozome v7.0 (chr-ID MtChr3; po s 21562716 to 21563245)
gacaggtgattagtgatacatacttatggagcgttttctctacttgcatattctatctggcagtgtaaattattttcagttatctgcatattccctatcttatgtggtaacctaactaaggatattgttacccagcattacacatgcagagtttgcctatttagcaagtttcggttgtaaataaaattccctggtgtgctcttacctgtggtagtttgcttggatcttaattttagaaagcagattgcagtgctgaatttctcttaaggaagaccatacagttcaccttactggtctccatgtgttttcttgatacgagatgtatcagccgttgctctatattggtgttaactttattgcttaatttgcatgtcaccaacatctttttgatttcgctgtctaatacttccttggcactgtgtatttacaaaaggcacctacattcatgggttttttatttgtttacaacaacacttcctgttttcaatttttaaccattctctagggatcaacatgtaggtaagtagaat

SEQ ID NO: 34679 - DNA, 858 bp, Medicago truncatula
  Intron number 2 from transcript Medtr2g080760.1 (locus Med tr2g080760) derived from phytozome v7.0 (chr-ID MtChr2; po s 18724234 to 18725091 reverse strand)
tatctggacaggacttgcctattaagtctgcacaagtaagtactcttttatagttcttgttttttatggtttagctctgaatttcattctttagcttaagttttgttgggtttgattactcattcacattgatgtttgtaccttataagataaaatacatgatgtgattatttttgttaccatcttatgatgtgcaatgtatacaagttatcaattaccaatttgagcatggggactagagtttgatccttgactagtgagtgtcgaaaaacatcgagagtcccttaattggatctctgtacctagggatattagtcttactttcagataaaggatgctcacagtaaccaaaataatgtatacaggtttgtgcttcaaacgatagtcaaaagtgattcaaatatgtgcatgtttggtttcactttttggatagtcaaaagtgattttgaagacttaaaattgatttttgtatgtttctggttctcgattagaattgattctagctagaaactaggatttgtagcttttccgcaaacataaattttacactcaaatctatttttcaactcactcacatcaacatatccaattgtaaatcattttattgtaaactcgcttttaactaaaatcaattcagtcataatcaatttatgtcacggtagaaccaaacacacatagtctatattaaatatgacaactaattttgtattttgatctgtactgttatatgatgatgtatgcaacagtggtttgtgagaagttgcaacttttcaaattgaaaaggttgaatcttgaaatgatctaaagttgttgtatgttcttgatttattcttcaggttaccgaatcaaccgatatca

SEQ ID NO: 34680 - DNA, 828 bp, Medicago truncatula
  Intron number 3 from transcript Medtr3g137890.1 (locus Med tr3g137890) derived from phytozome v7.0 (chr-ID MtChr3; po s 35062651 to 35063478 reverse strand)
tccacccggtatgatgttgttcttttattttctttcacattacttaacttatgctaattttcccctctcactttttatgatttcacctatattaaaagggacttattcagccaacttaattacctcgattgcattatatataggtggttgttggtttaaacattgtcactattgattaatgtttaaattgaaggttaaccatgaactactactttcaaattattattactagtactattattttctttatttttgttaaaatattgttattgttgtgcatttattttcctgaccctgtattaagggttgcatttatgccaaaccaaaactgtgtgaaggagaaagagtgttgacaaccgtatcagggattgcattcattttgtattttggttaaaattgttatattttgtttttggttcaaaattctctctctttatcaagctgactagtcgtgttagattatgtgcttgcttttgccctatgatcaggttatatcccataccctgtttgtgggacagattttaaaaaaatggataaaattcagttatttattttcatatgctgggtgaaaaatttaaacttctctattaaacctttataatgcacacatttgttgctactacagtaaaattattagttacattacaggccttctctttcgttgttgacacttgacatcttccaatgtatgaaaaaagtgtggcccacacatttatacgttagttttatgtacggaagtctttcgtttttactgttttgaggaagtgacatttctttattatttttgtcaaatatcgtatttagatctggctcatctgtccttgaaga

SEQ ID NO: 34681 - DNA, 445 bp, Medicago truncatula
  Intron number 1 from transcript AC229702_10.1 (locus AC229 702_10) derived from phytozome v7.0 (chr-ID AC229702; pos 91789 to 92233 reverse strand)
caggtaaaatatcaattatcttcgacttaaatatgaatttaatccctataattattggggttttcattttagtcatggcatatgttttttcttaaattcaaacttgatatttttacgacgttttttgtttttgttttatggtacggaattggaaattgcggattaaaatacgttccctaccatatcatttgtacttgcatgcttttaccgtacgaattgtactaatggcttttcatcccaggaattttatttttctttttgaaatgactataacagaaagctcaatatttatttgtagagtttaaaatatatttaagcatttgtttttctttataatgtagttatttattttattaattaacttctaaaccctaacaattatgcaatgatccatgatccacacaaaacaggactttataggtacagagttggtgacatactccgt

SEQ ID NO: 34682 - DNA, 371 bp, Medicago truncatula
  Intron number 1 from transcript Medtr4g157450.1 (locus Med tr4g157450) derived from phytozome v7.0 (chr-ID MtChr4; po s 39250485 to 39250855)
atcttcactttttgcttcccctcctttgagaaaaggtaaactcactagcaatgtacctttgctagtgtctagtgaaatccatcttctatgtttatatcatagattttaattaaattgtagattaattgtgatctttgaaattatagagaattataaaaattgttagggttagaatttgatcgatatttttgaggggacctcttctatttataactcaaagttcttttttgtttgtgcgtgtcacttaatttatagatattttagaagaagaaaaatttgggagtcttctccagtaaaagatttctactgcgtaatctaaactattgtcttttttgtactacatgcagtttcaagtacaaaaaaagatttgg

SEQ ID NO: 34683 - DNA, 712 bp, Medicago truncatula
  Intron number 1 from transcript AC145328_13.1 (locus AC145 328_13) derived from phytozome v7.0 (chr-ID AC145328; pos 83972 to 84683 reverse strand)
ttcttcggtgagttcatgggtgtatagtatgggcaagccttttttagcgatatagtactctgtaacttgggcgagccctttttggcgctatagtactctgcaacttcattgttgatgttatttaccggggcgagtttttcatggcgtcctaagtacttgtgatttttattttggatgtaacttaaagcgggtgagtccttcttggtactttgtatattagtatttcttcgtctccaatttgtgttgcaattttattttatttttgttccttgtagtgttgcactcttttttgcttcgatttattgattgtttgtcaatggtatctgcaattttcatttgggccagcacaatgttttttttggttatttattgtttccttcgaagtctgtcctttatttagctccgtggtgcgtttaagcgatgcttgttttttttttgctggggaaatatggttgtttttctgactatagtttctgtcattttctggcgattgttggcgtttatcttttgataattgttggctttttatggtgttgtggagcatatgttgacgagttgaacttttccatggcgttgcgtcgaatttcgtagcatagtttgtcctttatattttacggttgtatctttgtaggcgaacatggtgtgtagaatttttgtaagttgctcgtttttttcagagcctcgttgggttgacgtaaaaactattcagagc

SEQ ID NO: 34684 - DNA, 816 bp, Medicago truncatula
  Intron number 1 from transcript Medtr5g090730.1 (locus Med tr5g090730) derived from phytozome v7.0 (chr-ID MtChr5; po s 35441937 to 35442752)
ttgcaggtacttcttacttttttttttttagtgtttcatttactttctttgatgattaatgggattatataaacaactttttgcagtagttgattaatcatttgcataaaacaactttttgcatttgttattctcttttgttctcatgtttttattcaaggttcaccttgtaggttgaatagtctgtgaataaaatatatgggttttttcaaacaataaaaagccaagaatgtagagattttttgtaggcttattttaggttgcaagtctaaaacatgttgaagtaataagaaacataaaaaagagaaactttatgaatagttatttaatactctttaccttgtttaattgtgtactattatagttattatcattagtgttttaaaaatagctaaaaaagttacgaggagttgaagactttgtgatgcgaagcaatcacgattgaggttgcatcatccacgtttgactgtgatttttgtttttgcgatcttaaggagtgcaatacgagaggactacgattttaaacctttcgaatgaatattatttttttagtctaactcatatttgcttataagtgtgcattattgttcaaagataaatttctaaattgcatttgtaatatatgaacaaagtttttactctctaaccctaattttcgacatattggcctaactgcgtgatcaattgttatgttcttgtgcgtttatctttttcttgagaatcgaacttgttattcggacaaattattattagtagtatcactaaatgattttttatttggtacgaatcaggagcttccagttcaccaaagagcag

SEQ ID NO: 34685 - DNA, 882 bp, Medicago truncatula; identical to SEQ ID NO: 31113
  Intron number 3 from transcript Medtr4g103870.1 (locus Med tr4g103870) derived from phytozome v7.0 (chr-ID MtChr4; po s 22494095 to 22494976 reverse strand)

SEQ ID NO: 34686 - DNA, 868 bp, Medicago truncatula
  Intron number 1 from transcript Medtr1g124750.1 (locus Med tr1g124750) derived from phytozome v7.0 (chr-ID MtChr1; po s 27269191 to 27270058)
tccacgcgccgccgacctgcgcttctgattctccggtactgtttactcgcctcttcttgttcttcttcgatctaagatttgttcttaatttttcgataaagtaaatgaaaattgaaaaccgacacttccaaatctctatttgctttctttgatttcagtgtttatgatttctatctcatgcatttgcaagtaacttcaaaactttgctgttttttttttttctcatttaattttgtttttatttttattttatatttggaattatgattgtttttgagatatttcttgctagcatttgtatgtgtgatgtgttgttgttgcattaaagtagagatctttggtgcgatttttcgtaaggattcgaactttgtcccttgaggttataaggtctaattcttatcactgagccgacacctcttggatatttttgttaatttttacaagagcataaataaattactttatggctcctttttagctgtttttttgggtggttgttacatattcaacatgtttttggatcatttagaaatttgaagaagtcttaaagtgttttttgtttggttgtccttgtcttagtttcaaaggctttgttaatttgtataatcattgttaaatgtgcttttgttatcttacttttttttttaataattattttgttatcttatggatattgaacttgttcaactgagcatattctgtgtttaattttttaagagtgcaagtgcataggaaaatattgttaaaaaaattaaaatataaaagatatgaaaatgaaggattttgaaactaaggaaaatcaatctgattattgatttcttttggttgaaaaggttgtagcatttgttcttctaaaaggaggaagtga

SEQ ID NO: 34687 - DNA, 901 bp, Medicago truncatula
  Intron number 1 from transcript Medtr5g014460.1 (locus Med tr5g014460) derived from phytozome v7.0 (chr-ID MtChr5; po s 4630628 to 4631528 reverse strand)
gacttccgttcgtcaggttgatcatctttttttgcgcaatttttgcttgggatatcaattttttgatgtatgtttagagtttgattgtatgtttggctcagaggtagagtataaaaatttgtgattttcgatgaacttgattggagttcaattgagtttgaagttaagtatgaatttattgtttatgcgaatgaaaatgttatgttagaatagtaaacttgagctctataggaaagagataaattaatggacataagaatacaaacattgatcatgaagtttggtgctaattgtgcatatgacagagaagctgcattgttgtttttcgattatgcaattcttagtgttatagggtacaatgctgtggttaaatactacaattcgattgattgatcgactgtcaacttatcagtgaatacgagtcgtacacagcaggtcactactggaatcatttgcaaaacaatttatcttttagtacctgatagaagtatttccatcatttgtcattaggtttctatcacaatatcacactactacttatattgcctttataatctatatcaagtattgacttcaaaaaagttattttctattgagcttgactatttaatggaaaaaaatttcatatggacttttgatgaagaagataatggctaaccatacgcagaggaatagaaatgcaaatgattactagtgaggatagaaaagtaattgtataaaaataacctctataattgcattttgtgtgctgtttgttttgtagcagttagcattttgctatactattttttagaagttatgcaagggtggatatgtagaagaaacttgacatgattggtttgtgattctttggtaattgtttgcaggaatcatctagtacatacgagcttacagaggtaag

SEQ ID NO: 34688 - DNA, 829 bp, Medicago truncatula
  Intron number 1 from transcript Medtr3g076110.1 (locus Med tr3g076110) derived from phytozome v7.0 (chr-ID MtChr3; po s 17542355 to 17543183 reverse strand)
gttgcatatcttggagctcgttcgtcgttttcaaggtcctatatcgtctttctttcttacttaatggaatcattttctaccattttaaagacatataaaatttgttggaatcatagaaagttagagttgttcacggtctgtttacatatgtatatatatctctttcatctgtttgcattaatgttattgttatagcaactcatctcaacaacttcccttgcttacactatcaatttgattggtaaaaaataaggctccttatttattaagagactgaagtgtgcttaaaatggatagatttgcttaaaaactcaatttagtcatttattataagcttatgtgttgactgttgagtactttatgttgtcgtgtttttatttttcccaatattgtgtaatacatgttaaaaactcaatttttcttccttttttcttgtttttacaatgaagattaccgtctttcattttttcacttttttttatctcaatcttggtgttatctactttccatgattgaaagtattggtataaatgttcctctgataattattctgtttcttatattaatattagacctaaagatgatctataattgaaattacttgagagcacttattatgcctttcatccacaagtcgtgaatagactacaccgccgctggctgctttcatccaccagcatcgcttcgtgactctgtcaagtttgagtaatcctccaactaattcaagtgctcaacccaacgcagagtttccggtaagcctctcttacgaccttatcgccgaaatcctttccttttccaatgtgaaatctcttatgcgaatgcgatgagt

SEQ ID NO: 34689 - DNA, 472 bp, Medicago truncatula
  Intron number 4 from transcript Medtr4g076220.1 (locus Med tr4g076220) derived from phytozome v7.0 (chr-ID MtChr4; po s 15090371 to 15090842)
ctggttgggcatcgcgacgaaaaccgtgagtttttatttaacctgtattactagatgttggatacttggtgcatatattattcccttagatttgagttcatatgaacttgttgccataacttttaataggtcagtcatggaagcatgtttgcgcataaaaaaaaaaaatagttttatttgtatatatatttgagttttgtctagtagagtccgtgaaaatatgcggaaaatcacacactcctcaacaagcctagggttgtcattacatgcacatcgttgcaatcaaagactagttatatttatacattggattttatcttcatctaattatattgtttttttttcctcaagttcaatgttttagctcttatttgtttatgccacgaagaattctagtatggtgttttgggaatcaacaatttttttctttattgtagttactttcacatacgcacaactgacggagtctcat

SEQ ID NO: 34690 - DNA, 968 bp, Medicago truncatula
  Intron number 1 from transcript Medtr5g075280.2 (locus Med tr5g075280) derived from phytozome v7.0 (chr-ID MtChr5; po s 27394443 to 27395410)
cctaacctccacttgtttctcataacaatccaacggtatctgcaatacgtatacaaattgcattgcaaactctctttcattctctcttcttcatcttattcactttatacaaaccttcttaagttctaattggattatatttttagaaactttctcaggtttttttgtactttttaaggtacacacaattgttattctatgttctttgtttttgtttttgttttatttcttgaaatagaagtttatgaattgttgaattttattcaaaatttattgcttttatgacatattttatcattttagcttctgggtttgattcagttcaacttgtttttatctgatttgtgaaaaaaataattaaagatttgtttttttatttttggtgtgtaaattgaagctttttgttgataaattgttagcttaagatgtgatttggttaccttggtaggtgaggatttttgtttgtgttggctattttaaggtttggtttttgtttgcctattttaaggttgttctttattttttccttaattatgtttttgtattgatcatgtgtcaaattgggtttttagttctctgaattgtggttgtgttgaaaatgagtgtctatgttcaatgtacttagaactaatgttttgggtttggttttgggtgtatatacattcaatgtatattgcacaattttcaggacatgtgtgtttgataagattttgttttggtctcttttttatgaaaagctataaaactcatttctactacctttttgtgctctagttcaagtttatcaccaaacttttctgattttaatcttcaaaacaaaacaacccctttttgtcgaggtgcagcatcgaaaagttcaatttcctgattttctgtcttcaacattgttttttcactttaattgagtttgtgttgattcattgttactaacttttgttcttcttaataggtaaagttttcaagaataa

SEQ ID NO: 34691 - DNA, 816 bp, Medicago truncatula
  Intron number 1 from transcript Medtr1g008230.1 (locus Med tr1g008230) derived from phytozome v7.0 (chr-ID MtChr1; po s 634476 to 635291 reverse strand)
gcaaagccaaaagaactggtatgtaccttcttcctttctattttaattctctgaatcagaatctgattctttttattctcaactttactggtatttcctacttatatggtatcaatcttttattcaattaattaaaacagctttaatatgtctatgtcagtttacaatattctgctgtgaccaaaattgattgattttgtaaacttatgtttagtttagagtcgttgaatgtaaagtaatttatattcgagaaaatctacttataggtaaaagttgaacaatattcaataatggttagagatttggacacgtaggcaatttgtaggtttgaattccgactcctgtgtatgaagaaagttaccgtgataaaataactactgtatatgaatagttgagcttcttttgatttatgtttgaataaaactaacacacttcaataacggttggagttttggacacttcaagttgtaagtttgatctccgactcttgagtgtgaagaaaatttaattagaaggagagaacttagtccaacaaattttccaatagaaattagtcaccatgataaaataactactgtatacgaatagtaaaacttttttttcatggaaaaagaccaaaattaagccagaattccatacaaatacccgaaagttttaaaagcaactatgcatcaactatttaacacatccgtctaatgatgtgtgttactgtataaattcatttaataagtatgaatgaaaaaacatgtttatgattaatatttggtgcgcaatattgcagggaacgtgtggacggcaacaacacacatcataaca

SEQ ID NO: 34692 - DNA, 1005 bp, Medicago truncatula
  Intron number 1 from transcript Medtr5g007290.1 (locus Med tr5g007290) derived from phytozome v7.0 (chr-ID MtChr5; po s 1038120 to 1039124 reverse strand)
aagattagggatcgttcagtgagagctgagtgagggactttatgcctaattgaactctatctagtatctactctttcgtaacaaaaataaccatactctttcaaaagtgtaaacataacttaataccattgagttcacctagttaaactgagtttgtatctttatactaacaatctagagttcttagaaatagcctaattcaaattcctttcctctaaggatgtccacctcatcaaaaacctacttggcatatgttcctaaatttcctcctaatttttaatacaagtttaatagttttaattattattaaaaaccgttttttatttaacattaaattgtacataaagtaaatagttggttacaatcagataatgattaatataattactgtttcgattaaaatttatattttacaataaaaatttgaacgttacaaatcaaataattattaatctaattagtattcaattaacatttatatgtaacattcaaaatttggttggttacaaaattataataaataaactgaataaattatattttgaattttgggacgttacactaaggcatttacttactaattaaaaaattcattgtattaattagtttttaagattatataattaatttttgtttgttacaaaactatattacataattatttataagatattattaaatattaaattaaatttcaaatgttatgaagttaattttttgtacgttacatgaaatataatttaatcatttaatgcacgttttataatattaaagacgttgataatattaattttaaaacggttaaattgataattaatttatattaaccgttatgatactatttttctatataaatagtagagattttgggtatgagtacacaacaatcacaaaatatagttcttcgttttctgttctttggtgctctgatatctatattctaaactatttctataatttttctattgcaaaggaaaatctcaacgaaacacaacttcatctcta

SEQ ID NO: 34693 - DNA, 738 bp, Medicago truncatula
  Intron number 2 from transcript Medtr1g020730.1 (locus Med tr1g020730) derived from phytozome v7.0 (chr-ID MtChr1; po s 4632128 to 4632865 reverse strand)
ttggggtttctgcgttaagcgatatcgtcaaagaggtattggaaccttatacttccttgcaatgttgtctaaatttgagtgtgatggggttgctttatgattgtccaaactgcataaaattgtgactgcaaatgcagttgtagaccacaatttgaaacaacttatgaaattttgtatgaaatatcatagccatttagaatgtctgaaaataaatttaaaaaacagcttgaccagttttatcaaatggaaaggaaccacctaattattagtgcattatatggatagtattgatgatatatagccgaaaaatttattcatatgaaacctgatatgttagtaattgaagaaattatctactctaattgtctacaacccagtccccttgattttgcttcgtcaaaagttgcccaagtaatagtctgacattcaaatgtgcgagtttttattacctatgcatcctgttttacttgtaggttctcctttttacactggtttcataattctgaatcctcgatgttcttttgactgtgtattgctaagacgtattgatatttgggtgtgagtttgaggtatgcacagctgatttcataattcttgtcatacttccagtacttgtctattctccttatattgattttataattctaattcttcttattcttttaattctatcgaggcttctatcaataggaaagatacatatttgttggtgtaagtttgaagtatatgcagctgatt

SEQ ID NO: 34694 - DNA, 1040 bp, Medicago truncatula
  Intron number 1 from transcript Medtr5g082580.1 (locus Med tr5g082580) derived from phytozome v7.0 (chr-ID MtChr5; po s 31104960 to 31105999)
aagaaattcctccaacagacgccattttgttgaaggtaaaatgttacaccattcatttaaatatatatcacttggaatggtttggtggtgttgcctcgaaaccttgaaatgtgctccttctcaaggtttcaggtttgattatcaccgtgccaattaatttggctgagctaataatttaacttcttcaaaaaaaaagtaatattattaaatttgaatgagctaatttaactttttcaaaaaaaaattattaatataatttaataatatatatacataaaataaacacattaactacgttaccaatgtaaaattgatagagaggttgatatatactataataagggacagatggagtaattggtagtacatgacgctaatatagtttggggacaatttgtttttattgtccattttgtgatactaataactgggccgattaattatttttttaatcctataaatataccaacttttcgttttagtccctttaaaatttttcttcaacttttaatcccttaaaatttttccatcttcacttttggtccctcttttaaagtaaactcatatatagaattaatattttttaatgacattttccagaaaaattcataatattataagaacctctcccaaaaaaatttagaattttttaacaaaacatgaatttaatatgaatttttatatttttaaaggttaaaaattcatatttaatttgtgttttgttaaaaaattctagtttttttttagaattttttttacaatattctacacatttctgcacaatttcatttaaaaacacaaaaagtaacttaaaaatagggacctagtgatagaaaattttatagggactaaaagttgaaggaaaattttagagagattaaaacgaaaagtttgtatatttataaggactaaaaacatatttaaccctataatataatactctccttattttgtcttaatttcactttacttattttcttttatctatatgtttctttagtaactcaatcgaagtctaataaaattgcagtggatattgc

SEQ ID NO: 34695 - DNA, 830 bp, Medicago truncatula
  Intron number 2 from transcript Medtr6g077090.1 (locus Med tr6g077090) derived from phytozome v7.0 (chr-ID MtChr6; po s 15150608 to 15151437)
aatcgtgtggctcctgtgcaatctgagttttgagtgtgggctttgggtttgggcctagtttgctttcacgtttttttgcttttcttgctacttgcaccgtatttccttgctatctgcacctgttgcttgctcattttttttatgaaaattcctaaaaaaatcctagtggtttcttgatacatttttggtatttctgtggtatttttgcatgtaaaaaatgttaaaatggcatgaactaattccatgtgtttttacacttttggtatgcattttgctatgttttgttcttgacactttgatattatgacatggataaatgatgcctaatatggtgatgaatatgcctctggaaatgtgcttttgtttgatgtttttgaatatgattttatggatttcttgttgcacaagcaacaagtgttcgttttaaagaataaagtgtcaaatttctctatgaatttggtgtgataccttgcttgcatgtgtctccattaatttcatgtcatggcttgaaacaaaatttctttcaaaattgccatgatgtgatgattatgggttacaagcacctttaggtatcatatcaaaattttttaggtttattaccactttattattttttctttgccattcttatgcatttccttttgattatttcctactattttgtgctttatgattactaaccatttcatctcatgtgtcatacatttcatagcattccaccaccctctccactttctttagcctagcatttatttttttttgcaagttttaattcatttggtggtgtaatttgttatcattggtttgtagcttggcaaaggggccataga

SEQ ID NO: 34696 - DNA, 412 bp, Medicago truncatula
  Intron number 1 from transcript Medtr2g126850.2 (locus Med tr2g126850) derived from phytozome v7.0 (chr-ID MtChr2; po s 30818405 to 30818816 reverse strand)
tttgaagcttttacctttggatttcaaggtgagaagaaagaaccttcttcaaaaccatttctcttttttttttttgcagaatctcttacttttaaactttgaagcttttcttttaagtgattaaagttttaagcttttttctctattttgcatcttggattctttttaaggggttaaagctgctttttttttttcatatgcctttgataattttttatggttgattttttgggggttttttctactttttttagggtttcagtgtttttattgcatgatgaattgttgtgtttttgctgattttttttttttttgtgttatggaagttttttcttccataagtgcttttgctagttaaattatttgattatttttcgcagatctagtttagtgtttgctcattttgattttc

SEQ ID NO: 34697 - DNA, 633 bp, Medicago truncatula
  Intron number 1 from transcript Medtr6g096360.1 (locus Med tr6g096360) derived from phytozome v7.0 (chr-ID MtChr6; po s 21006444 to 21007076)
atgtttgattaaaactaggtattaagtgtgttgatgatgtttattgtttacatgttcatagtaattactaacgatctttacatgtgcatagtaattagtatatattaaagcatctagccatccatgatcttaagtttcttcaaagtgtcttgtgtgtcaagtttcattttgtgtttcagtttgtggcaaaactcatttctctgaacctttgaatcatatcacaaattgatgatttatatcatgctcgaatcgaatcacaatttgttggttcgtatcatttgagttctctagtcttgtgatttgcctgaacaaatcgtatcaaatactctttatttgtatcaatctttatatgaaaaaaatttaattgtattaaatattatttattcgtatcaatctttatagcttcatagttatccttggctgaatgaatcatatcgaatattcttgattcgtatatgttgggtttttatttgtgttggccgcattatgttaaaataagatattctagcaagatgttgggacagttgtcctagacatgttagtacaacaacttaacttaaggtgaagtattatgtttcgcaatcttggaagatttggtttatgtgtgagatcacagaagatttgatagaagag

SEQ ID NO: 34698 - DNA, 551 bp, Medicago truncatula; identical to SEQ ID NO: 29457
  Intron number 2 from transcript Medtr5g082140.1 (locus Med tr5g082140) derived from phytozome v7.0 (chr-ID MtChr5; po s 30894165 to 30894715 reverse strand)

SEQ ID NO: 34699 - DNA, 284 bp, Medicago truncatula
  Intron number 1 from transcript Medtr1g083410.1 (locus Med tr1g083410) derived from phytozome v7.0 (chr-ID MtChr1; po s 16395133 to 16395416)
ctccaccttcaaagtaagcaaaatcaaaacatttattttgttttcttcaatttctttagaaaaaaatattagaaaaagttgattaacaacaaaaaattaaatagaaaaaacatttaatttttttttagtagatgctatagaaatttgttcgcaatagagatcaaactccttcagcgtcctaactcatactactgatgtacctgaaaaaaagaatatgtatatgatatggatatgaatgttgattaaagttatgtattattattatgcagggcacaagtagttgg

SEQ ID NO: 34700 - DNA, 1030 bp, Medicago truncatula
  Intron number 1 from transcript Medtr6g046890.1 (locus Med tr6g046890) derived from phytozome v7.0 (chr-ID MtChr6; po s 10147247 to 10148276)
acaaattttccttctcgtgcatccttgccagaccggttgaaatccttggcatctcttcagacattaaaaattagtcagtttccttctcttgcatccctgccagacttgttaagggccatgacatctcttcacacattagaaatttcagattttcctgagttaacttcattaccagctcattttcaacgacacttaaacttgaagaaattgcatatttataaatgtcctgggctaatgaaccgactcactagaagaacaggtgaagattggtataagacagctcatgttcctaaatttaaattggaatctgatgttcccctttctcaacaaacctagttttcgcataaaatgcatgatgttttttaacatcttgaattgttgtgtgcagataagataatgtcattagctatatcgaggagtattaacgattaagacgaggaatctaacatggagtttgattagctatgcgtgaagactgaagagcaagtatatgatttattggatatttgttgttcgtttcaatttagtttattagtgtgagtattttgctcttttcttattgagtgttttttcatttggttcggtttgatatatccatattaagagattgcattgaattttgtactgaggaatctaattaattattgtttggtttcttaaacaaaacaaaaaggatttatagataacactcatgtctgctacaccacgaaaccatttgtctaggttttttcatttcatttcaattttattattgttaaaagtatgccgaaaaaccacatcagaataatttctattattatccatacagatgctttcatatacaacatatttgagatttgaaatgattcccactccagaatcaatctcatgtgcattgtttgtttcggtggctcttgcattattatccattgatcagaataaagtttgactcgaattctcatccttttattttaagttgatctaaaggctcaaattgattcacttaattctcacaggcattgtttgtttcggtggctcttgcgttgttcca

SEQ ID NO: 34701 - DNA, 1024 bp, Medicago truncatula
  Intron number 2 from transcript Medtr1g060320.1 (locus Med tr1g060320) derived from phytozome v7.0 (chr-ID MtChr1; po s 11934270 to 11935293 reverse strand)
ccaggtactttctgacaatggtcatgttatatttttatggttaaatattaggttaaagttgttttgatttcatataaaattaccgtttttttaagtttagtctctacataaatcaattatagtccctatttttatttactcttacaaaaaaatagtgcttttagtctttgcatttgtccctataaaatcaaaatcaggactaaaattggaccaaatttatgtaggggctatcataaattttatagggtctaaaaatatatcgagctcttaagtaaatatagagaaagatgccattttgatccttgaaagaagccttgtttaaccgttaatttctacagagtccttttaagtttaaagtttatatctaattggtctcatcatccacatttatggtgaaaaagcaagaactacaaaatgtgtatggattgtgcacaagtgcggccaagttgatgagatgaacagaaatatttataaataaacaaattcagaaaaataatttggctttgtagaactttatttatattttaaggcacttggcatttgaggacgttcaatgcattactattgcttgtgtatgtacttgccaaccatgtttttccgatggaatttttttagaatccaaaaggcttgataatatctactgactttcgtgaaacctttgaagtattgaagacttgtctatcttctatattgaatgatcctagcaacaatagaaagttcttagtttttgatgactgatttaatcatttatcttatagtactctacagttagtgttggatctgagatgctactcattgtccaattctttcttcatttattttataaattaattttagttgaaaatcatatttctttcatatgagtttatcatgttcatattattatactggtttcattgtgtcttaaacctatgcatcttttaactgaatacatttgaaaaagaaaattgattacacagaaaaacttatggcatcatatttttcttcaggtgacacatttattgacgtggttggcagcccatat

SEQ ID NO: 34702 - DNA, 517 bp, Medicago truncatula
  Intron number 1 from transcript Medtr1g060320.1 (locus Med tr1g060320) derived from phytozome v7.0 (chr-ID MtChr1; po s 11936143 to 11936659 reverse strand)
tttcatcaacttcaactgacttggtaaactcaaaggttggttgtttggtccaacctctttcccttcttcagttctttcaacttcttcattttttatctattattttcttcaatctgtatactttattgctctttttaattcctgatttatgttcttttgatgcatttatccaaaagggtacctttaaaattcaataaagtttgattttttcttaattttaccaactgggttgttcattgtttttttgatattttttttttaaactttagcatttaccttttctttttgtcaatatcaatcatcagcaattaatctttttatataaaactagttctgctttatagttcagtataccactttttgttgatgctattgaatctttggatttgtttgtttataataaattattgatataatatacgaggtttgacttagatagttagatgcatgctattaaggatttgattttgaagtttgtatattctgaatttcagatcttgtgtttttgttttaggag

SEQ ID NO: 34703 - DNA, 670 bp, Medicago truncatula
  Intron number 2 from transcript Medtr1g073930.1 (locus Med tr1g073930) derived from phytozome v7.0 (chr-ID MtChr1; po s 14853582 to 14854251 reverse strand)
agaagtaagtccctctcttctccctaatttttttctgtcttgtgtagtaatacttcaacttagttcatgttgtttacccgaagaaataaaattttcagatatgtattggtaactcatgcagtatgcatgcctatactatgtagttcaaagaaactttatttttgtggagagggtagtggtaggcactaccgcactaggtagttatggagtttaaatgtgagtatatgtgtaaatataaatatagtacttctgaaaaacaagttaattaatggttgagattcctccctattgttggttgctgaataagtttatttcggtggactgttgaccaagaaaaaaattgaataaccttggaatgagtattaatcattgaaatttttgatgattggttactactaagcttttagttttttcgtttggagggtgggattaatatttagctttagcagcagttgttcttagataatgtccttttcatttttttctgttttatttggttccgctaagcttgcaaatttattgacattgttattttctagaagcggtgacaagcttgtctgtatagaaattaatgtattattgtattagtagttgagtgatgcttaccttcgtcatcttatttacgaacatgctatttgtaggtttgtttggcgtaagaagattgagcgtg

SEQ ID NO: 34704 - DNA, 993 bp, Medicago truncatula
  Intron number 2 from transcript Medtr2g104270.1 (locus Med tr2g104270) derived from phytozome v7.0 (chr-ID MtChr2; po s 24522951 to 24523943)
ctgctttaagcaagtcgtaattcgtcccttttctctttatatattccgttctttttttatattgctgtataaaggttaataggtctttaccccactgtaatataggtcatttctggttttcatccctgtaaaaaatttattttgattcaccttctgtaaaatatttttgttttgatttacctccctaataggccaaacaaaaaccaattttattttatttttcaagaatttttcgtttttgtttggcctattaggggggtaaatcaaaacaaaaatattttataagggggtgaatcaaaataaaaattttgcagggggaaaaccggaaatgacctatattacagggggtaaagacctattaacccgctatataatgctagagtcagcccatatcaagttgctctccatttctaaaaataatggggtttttcattcgaagaactagaaagtagacacacagaaaatattagtgagtcctactaaacatgtgatccaccaaactcttctacatttctttctctctcataagtgaactcttcatttattcggagaaataaagaggatcctaagaccatccttaatgattgtcttttacatttaagacctggtgcctgagagtacctccattgaggaacaatgattttgagtacttaataagatcaaggtttacactttacatatggaacaaatagatacaatgaagagttattgatgagacttatttaaaacttttgttagatgtatatacttgtgactcatttaagtactacaaatattgatgcttcccgtggatgctctgactccaaaacccaatcgacccaacataaaaagaaatacaaaatacacgatcaatttatatatggatagtgagattcaaacccgcggtcactaaaattaaaattagctaccctaattgattaatatatattttagtttttcaaaattaagttaatattctgatattttcactagaattttgcaggtatttccctg

SEQ ID NO: 34705 - DNA, 1010 bp, Medicago truncatula
  Intron number 3 from transcript Medtr5g078220.1 (locus Med tr5g078220) derived from phytozome v7.0 (chr-ID MtChr5; po s 28966714 to 28967723 reverse strand)
aagttattggtgagcttcaggagaagggttttgatgtagatcaatgagtgcgttgaattgaatccttaatgttgaggactaaaatactacatttgtgttggtaaataataaatattgaatgttatgtttttaataaattacagtagacttaaaagactaatatatttgttgttctcggatatgaggtattaggtattatttgtatgtgacttattttttcttatcggatttggcttttttgtgaatatttccatttactatctgaagttttgaatgaaatgcctactggcatctatcatgattttgagattcaatggagtttgggacctgagtctttcttttctgtggtgcatgaaaaaaagattcaggtttaagtgcttaagtattgatagctaagagtacctctggtcaacttggtaacatgtcttgcatgaatgatcaaggaatgtatattgtctttgaagcataaaacacacaaaaaatcacctgaccatacaacaaaaagtttgaaagcaaaaaaatcaatagaaaatgtggtttttttagctggtttactttctttttttttcccgaataacaaatgtttgtataccttagtatttatgttggggtgggtgggagccggtttactatataggaggaacttcttttttctttcatagcagtctgagtatgcacacaccagctgctacccaaaaatgtgatgcatatgagggtgatgggattgtttagagggtgattgttgctttgtctgtaaagatcaagagcacattagccaactgtgtttatgtatgtgttttggagtagtttatttgtgtgattaagaattaaaacagttacttattgttttgtcaaggattcaaacagctactatggttgaaaactgtttttgctaactaaatatatagtaaaattaagcttaagtaaatgtgtacagtcttaaaatttaatgtcaattacagaaaagctgcattatttttttacccaatgcagggtgctgcaggaaagat

SEQ ID NO: 34706 - DNA, 659 bp, Medicago truncatula
  Intron number 1 from transcript Medtr2g085580.1 (locus Med tr2g085580) derived from phytozome v7.0 (chr-ID MtChr2; po s 19310009 to 19310667 reverse strand)
gacttgctttggtttggtttcatagaagaaaatggaaatatttcccattacaattgatattatgttcagatttaaaaaaaatgctgttcaattgatattatgttcagatttaaaaaaatgctgttatcatgcttatcaatcaataacttaaggacccatttggcagtcaagatagggtatagacagatatgataagatagtttaataaggatatggatattgctcaaatatacaaatttaaatcatcaagtactgctttgcctttaggtgtggattgctaaaagaaattagcgcatcaattaatcatccaaagtttaaaatacaaaagaagcctaagggtgtctataattcaaagataataaaatcttaaactaaaatttttatataaaccttagtcttagtaaaatttcaattttcttaaactggatatccgatttaggtaaaaaccttagaaggaaggaaatgtttcaatttcgtaaataatataatcatcaattttatcaagaaatcctaaatttattttgcacatacaatcatgcatacacatttgcaaagggatcagatgttttcctttctgcaattgtttcttatctataatttctattgtttacaagaatgttaaaatttataatagggctcctgctgggatatatcattat

SEQ ID NO: 34707 - DNA, 821 bp, Medicago truncatula
  Intron number 2 from transcript Medtr5g045010.1 (locus Med tr5g045010) derived from phytozome v7.0 (chr-ID MtChr5; po s 18738890 to 18739710 reverse strand)
tcctgtgcaatctgagttttgagtgtgggctttgggtttgggcttaattttctgcacatttcttgcttttttcttgctgttcacacccctattttttgctacctgcacctatgtcttgattaaaattgtgataaaatccctagaaaatttcatacatgtttcttgatattttcttagtgtttttatgacatttttgcacattaaggacctatgaaattttggtataattaatccatagcattttaattctctttgaattatttgttatggattcttcttcacacatttgtccttgatgtgagaatatgtgataaaagctacttgatatgttaatatgagagatttgtgcctgtaattttgtgtttgatttgctgttttgatttggttcataagttcttgattttatgaacaatatatgcatattttgaaagatataaaatgccaagtttattctagaaaatatggcatgaaaccatgcttgcatgtttccaataattccatgctataactttagataaagaaaacactctcaaaatttgttaaagcatgagaattagaggccaagaatgctttaggtttcatacctaagtttttagggtttaatgtcattttgttaactttttgtgccatcttgcatgcttttatttcttagcacttgttatgttttttcttttcactaacaagtttatttccatgtttcatgcatctcatttagtattccctccaccttctttagcctagcatttatttttgcaagttttaattcatttggtaatgtaatttgttatcattggtttgtagcttggcaaaggggccataga

SEQ ID NO: 34708 - DNA, 1028 bp, Medicago truncatula
  Intron number 3 from transcript AC151525_13.1 (locus AC151 525_13) derived from phytozome v7.0 (chr-ID AC151525; pos 59031 to 60058)
gcaggtatatatgttatgcctatttctgttgctattgctaccttcatttaatttacccattcatttatttagtatgaagcccaactatgtatcagtcccgcacacgcatcaaaattatattttaatttaggcaaaattgcacaattagttacttaacttttttaggtaacactttcgtcctttatcttttttctgtaacgatttagtcctttatgttataaaatgacactattttatcatttttgtatgagattttttcaatgaaatttgattttctaggctagtatgatgaagatttgtgtttgtctatgagtttgatgaattttttttttggaatttttgattatttttttcataaaaaggataactatgttgttattttataacataaaggactaaatcgttaaaaaaaaaaaaagataaaggacgaaaatgttacctaaaattaaattaagggattaattgtgtaattttacctttaatttattttgttaaaatatatttttattgagacctcacatatgtaattaagatagtcgatagaattgtttttgatgaactagacttatatgttatgtgttttttttttttttttatgtaagagagtaataagaaagaagatattatataagcgaggctgtttcaaattcatcgctatgaagtatggacactccttagattaggcatgtttcggtgtcactgatacgacgcttgtaattacacttaattatatgtgattttttcaaattattagctgtgttcggtgtccatatccgtgcttcatagcttcattgcaattatatattaatgaagtatatcaatgcatcttttctttacaagtattatatacattcatatttgtgtctagatcatattactatatcctaattttcacatatatatattgtgaatttccggctttcataatagatagattctccgatactattgttcaagttttgatagtgcattattcctatatctttgtctgtctggttggcagacacgcaggtgaagtgaaactcata

SEQ ID NO: 34709 - DNA, 547 bp, Medicago truncatula
  Intron number 1 from transcript Medtr5g090520.1 (locus Med tr5g090520) derived from phytozome v7.0 (chr-ID MtChr5; po s 35346933 to 35347479 reverse strand)
tttatacccgccctgcatccaccgtcacgtctgcacccgctttttgaaatttactttattaaattttataattttatttccattttctgtcaaataagtaccaacctgttttaatatattattactctttagaaacatgtttattaaaattattttctcttttgaaaaaaatttattagatctttaattataaatataattattgttttttgttgctatgaaaaaaaaatgaaaaatatgcatttttaaatattttatataaaatagagtttttgcaggtggaggttgggttggaggcggggttggtttgaggacggggcgggtgcatgaaagtgggggcgaaacgggggcgataatgctttaacacacctcgttgccatgcataatttgcaggaatcaaatttgtttctcgtcggagataagaaagtttcccctatttgaaatactattatgaaagctaaggttttggaggatgggtgaaatcagcatattcttggttaaatcatgaagaggcggtcacacgtctttagtggtcaaaatcaaagct

SEQ ID NO: 34710 - DNA, 580 bp, Medicago truncatula
  Intron number 1 from transcript Medtr4g097060.1 (locus Med tr4g097060) derived from phytozome v7.0 (chr-ID MtChr4; po s 20628939 to 20629518 reverse strand)
gacctgaggtatcaaaaaattaattattttccatttttgtcttattttttttttatttttattttgccacattttaaactaattggttgatagcttatataaacatcaaataaaacagttaatctcatatttagacggtgggtctttggatttaccagaacaaagaaatatgtgagacttagatcccagacaaaattacttatatattaaccacttgcggtatcctcatactgaagatgggtttcatactcacatattttctagatctgaaatgaattcttttcaagtggactattttttgttggtaatattcatttatagccatatatgatcaaaatagatcctttgtcatcaactttatggtacattcgactgcagatagttcaactatgagatatatatgtttatctcttttaatcaaacaacctcatgacaacatcataaagttgactccgtcaaatccaagtcgataaatgagttgtcaattttaaaaaattgttgagaattaatatcgattgtttagttagaaataattcatctcatgcaatgttcttaattacttttgtagttggtgaggcag

SEQ ID NO: 34711 - DNA, 940 bp, Medicago truncatula
  Intron number 2 from transcript Medtr2g111610.1 (locus Med tr2g111610) derived from phytozome v7.0 (chr-ID MtChr2; po s 26552897 to 26553836)
ctcagaattaactgttggaactcgtgtcgggatcggtaacttttaattctcacagttatcataatgagaagtaatttgcacatagtgtgactagatataatgttcatagcatgtgtcgctaaatttttggtagtttaacatttgctgttgaattgtagagatgattttgaatcacagtttcaggtgaaaccacatgacaccaacattcggatgggggtgaatttcaacatttgcatgctagattgagacaaacctatatacatttatgtgtcaggtctgacaatgtaataaggatgttaattgcacaccttccctccccaccaaaaaaactccaatttcgggggaagcaataaatgagcttaagaggggttttgctccgctccccttctaaaaattgaaccaaacatatcaaattaaaaatattacttcccctccccttcaaaaaccttcaaccaaacagacccttaaagttagctttaaactgttattttacattgctgaaatgttgatattgattctaataagatttgttagtatcctttaggttcatgataggatctcattcctacttagattacatctctcatgtataaaatacttgtacaaaccttttcatcgtgagtaagaatattcatgttcaagttacgtttcaaagagatacaaaaggggaatatcttgaggtgatttgcatttttagaaagtagtttagttattagttggagtatatatttgtgccatgtgcaattctaagcagaacagctattcagcttttaaaaaatatatgttatcattttggtgggtttatggtaaatggccaattgctaattcaagatttttttcttgagggatgatgtagtaatgtgatgcgatagttaaccattgcttgaccatttatgtgatttttcttttcaggcttctttggagaagtcttccgtggcat

SEQ ID NO: 34712 - DNA, 429 bp, Medicago truncatula
  Intron number 1 from transcript Medtr2g126270.1 (locus Med tr2g126270) derived from phytozome v7.0 (chr-ID MtChr2; po s 30562910 to 30563338)
caaattttcttgtttcaatatgtaatagcatctataattaaacaatagtgcacaatcaaatttaaggatcactgtgttttcttagttgtcgaaaggaatctttgttgggaagtataggatgtttgtaggatcttataccttctttgcttgtattgcaagtatctcaattggaacaaattattaaaaccctacttcttgttattatttttcatgcttttgttatatagatttccatgcctttgtcaagaaaaatcaatgcctcgcaatcttagacttaaaaaatgtgtatatttatatgttgtattgcttatatctgtttacgttgtccttgttctttgtgtgtattactcgatgattgacttaaaaactgtgtatatttatatgttttttcttctcatgtttttttttttccctttcagatttcagaag

SEQ ID NO: 34713 - DNA, 1025 bp, Medicago truncatula; identical to SEQ ID NO: 32127
  Intron number 3 from transcript Medtr4g141010.2 (locus Med tr4g141010) derived from phytozome v7.0 (chr-ID MtChr4; po s 34703816 to 34704840)

SEQ ID NO: 34714 - DNA, 405 bp, Medicago truncatula
  Intron number 1 from transcript Medtr5g010550.1 (locus Med tr5g010550) derived from phytozome v7.0 (chr-ID MtChr5; po s 2664307 to 2664711)
cgcgagttaacttgcgcaagttggccggtggtaaaaactgaagcacaaatattttttggacggtagtcaatgattttgattgaattttacacgtttttggacctcattaagtgtcatataccttataccacctataaaaaccctcacatacttcctcttttcctcacattttctcctcccactctctccccctctttctcttcttctttacttctttagtttctaggcttttttatacccctttaggtaaataccggtggcttttggggaaataatggtatgttaagttggggaaaaagacatcatcccttgagataaaattaggtttgtttccttttactcctaaaatctttttaccgtgggtaaaaagaatcaatattggggtataaaaggaaccaaatttaa

SEQ ID NO: 34715 - DNA, 622 bp, Medicago truncatula
  Intron number 1 from transcript Medtr6g099450.1 (locus Med tr6g099450) derived from phytozome v7.0 (chr-ID MtChr6; po s 21964845 to 21965466)
tgtaggacttttttgtgtactattcattttcttacttattgaaactatttgcatgtcaacaaacttcagtttcccttttaaaattatatgttatgttaaagtaacataaactgcgtcttagaattatggaacaataacaaagtctatcgtaattgacattatgctttgattcacgacaatttttacattcaagcgcactacattgttttatttttacagtgaatatttacttcttaaaatgaaccgtgtgttagcatgggtcaatggtctagtaaatgttaacccgtctccttatacttaacctaatttttccctccacacttttgcatttaatgtttatctaaagtaaaataaaattatgttcctaattagatgctatttttttagaaaagaataaccgttaacccatctcgctatatctcttacttatcttacttataaatggtaacacgtcccgctatactttaacctaagtaagagattatgttaattatacttaacctaactattttgttaccgtcaaatattaccatccatatgacccgtgctttagcacacaggtcgatggtctagttaaattgcgtactttggttgttcagagattagggttttggagttcaac

SEQ ID NO: 34716 - DNA, 945 bp, Medicago truncatula
  Intron number 1 from transcript Medtr4g134570.1 (locus Med tr4g134570) derived from phytozome v7.0 (chr-ID MtChr4; po s 32472224 to 32473168)
agttttagtataccctttcccgcccccgcttcattgtacccagcccccaaactcgtcgggatagaaaattcacacccaaacctgccctcagtggggacggggttccccagccccaccccaacccccacctgcaactgtggtaaaatatatatatatatatatatatatttttttttttcttttctttttttcacagcaacaaaatatatctaataacaaaagcttcaaaaatcattacagcacagagcatcttctacatatcataatgtcacatttaaaaaaattctgctcagttgcaagattattaaaacaaaagaacggtataagagtaatatgattaccaaatataagggtaaaaaataatttaaaacaaacggggcgggttttttcaaatgccatccctaagtaatgggtaaatataagggattaattagtgtatgggaacggaattttatttactagctgattggtggattacctaattgtctctcccccacaacgtagatatgctgtcagtaagctagattcgtgtatattataggtattatgatatgtatttagtaagccaaaattgctagaactatttgattagaagttttttaatagaaaaaatatactagttcaaaccaataccattttgtgtaaggttgaatgagttgaaatattcatgcaggctgaggtgttcaactaaacaaaaaatatatcttaactttatggcggcttaatttatatcctctttctggagctcaatgttccaatttttattaaatgagtctttcacctttttttatacgcttttgtttcattagtgctcttgcaatttgtctcttgaactttgtttgatgctctgtttcattctacctgctttccatgagttcttcctttactagaccctaatttgctattggatattttgttcaggtgcaatttttgtatctattattt

SEQ ID NO: 34717 - DNA, 380 bp, Medicago truncatula
  Intron number 2 from transcript Medtr3g026370.1 (locus Med tr3g026370) derived from phytozome v7.0 (chr-ID MtChr3; po s 7068508 to 7068887 reverse strand)
caaggtctgaatcgttgtagatctgaagttttatgttacggttttgaaaatctttttggatttgaaactttcttggatcaaatcttttttatccttcttgatctgtaacgattcacttacgttgatgctttttgagaagagaaaagtgaaatttacgtgtttacggttatgatttcatcttgatgattctggaagtttagatctgtttattcacgtgattttgcaggtttaaactatgatattattttttgaagagaaattttgagttttacctgaacttttatggagattctgttgagtttcttcggaaacacttggatttggctttctgtgttgttgattcagttgctggaccggaaataaaccggtgatttcactgg

SEQ ID NO: 34718 - DNA, 1030 bp, Medicago truncatula
  Intron number 1 from transcript Medtr3g026370.1 (locus Med tr3g026370) derived from phytozome v7.0 (chr-ID MtChr3; po s 7069319 to 7070348 reverse strand)
ttgcctacgtaccgttttacgggatcaaaaccggcgtagttcttgctaaaaagacttgttgttttttgttttaattgtttgattttaaattttgaaaatgatttgaagaaggggattgagaggcttcatgagcattagagtatgaaaaagtgggggtttgtttagtgattttgcaaaaaaagtctaaatgattagatttatttgagaattttattaagaaaataaaaggtgaaaaattgttggagttttgactccattttttttatgaaaaatatttgaagtgaatttgtttgcatattttttggaaaaaattggattgtctctaagtgtttaaacctaagcattcatctaatcatgcaatcctaggcatacatctagggtgagtgtgtgcgtgccggtgcgtcacagtgtccatagtccatattacaaaaattgcctaaatacattctatggcctctttgccaagctacaaaccaatgataacaaattacatcaccgaatgaattaaaatttgcaaaaataactgctaagctaaagaaagtggaggagatagtgaaatgctatgagtgaagtcacatgagaaacaaaatgttagtgaaacaaggaaaaatataatgggaatgatgaaagatgcaccaaacgaatatgcaataaaaaggagtaaaaacatgagaatttatcaagcacaatgtgtaacaaagtcaagatttaaggaatcaatccaaaacagcaagatcaacatatgattataggcataaacatctcacaccaacatatcaaaagacttttatcacatactaacacattaatgataaaaatatgatgaaaaactcatggcaaataatccaaaagggattaaagtgctatggattaatcatgcaatatttttatcaaactcaacatgcaaaaaaaatgtcatagaaacaatgagaaatcaacaaaaagtatgcctaaaatttctagaaatttttatcaaagttttggtcaaggcacaggttcaactagcacaaaaaggggtgtaagtagcaca

SEQ ID NO: 34719 - DNA, 678 bp, Medicago truncatula
  Intron number 1 from transcript Medtr4g011630.1 (locus Med tr4g011630) derived from phytozome v7.0 (chr-ID MtChr4; po s 1729629 to 1730306)
ttcattccaaactcgcaatagtcgcaactcgcaaggtatgtgttctttttctcagattcattttttttttctttccagtaaaactcgatctcaagttttctcatttctaaaatactcgccgtaaaattgctcactctatgtttggttccaatttttgaaaagtcaaaattgattttgatgtatttgattactttctagttcaattgatgattttgcagaagttaggatttgtggtttacactaaaatttagggtgagtttgtcttggttttttaaaaaatagattttgtgttaaaaaatttagagattattttttttaaggttttaaaaaaaaaaatctgaagttctttttgtttgcctactacccataaaaatctatttttagaaaacaattgagttttgacttgtgcatgggttacctccttgtttttgaattttttttttttttttttgagaaaatgaatttttttcctaatagcttttcatgttaggcttaaaatagttttttttcctaatagattttgaactcactttttcatgtacttaacacaaatcactttacatcgataaaatcaattttacttgtagccgcaaaaccaagaaaacactcaatcacttctattgtagaaaaataattggtttttttcttcttgtcttctatttaggtttacttatcgga

SEQ ID NO: 34720 - DNA, 1031 bp, Medicago truncatula
  Intron number 1 from transcript Medtr2g085190.1 (locus Med tr2g085190) derived from phytozome v7.0 (chr-ID MtChr2; po s 19130217 to 19131247 reverse strand)
gagatcgaagagattggattaaaggtgtttttggatctgtgtgcaacacagttttgagaatatcataattaaaaaataaaacgttagaaaattcattactttttcagccggtaaccggttcaagagattgaaaagtaaatgacgtgtcacctatgcaagggagagtgacagaccgcgactgttagagcaactgctcctagcattgctctattatataatataaattaaatttcttttacaaatatatcaatgatcatttggttcatgaaccaaattcaacgagttaattatcgaatcaagttccgaaatatgttcgagtgtgttcggttcattgccaaccttacatataaactatagcgtaaacacagcagccacggtgcaactgtagggatgattatgatcacacttgcggtgtgttgccgttgcagacgctaccacaacaatattttgtactttatttaaaactatccacatgtattataatcacatttcacaccactaagattcttacaacaaactttttcaatactttttaaaaacgtaacaatggttcgtcacacatggaggttaatcatagtcgtgttctggtttcaatcacaaaaaccaagcttaggcggagaagttagagatttgtgaagaaaagggggagaaaacatggatctgggagggactgatttattttttaaataaaatttcaatcaccttcaccccaacccgtttacagctccgttgcttccccctgaactgctatgtgaccacctgtttatgcttcccctcattgtgctctgacggtgaaatcaattccttcacgactcattgaagtgttcctcagaaggacaattcaccacctcctacgtatctcgttgttagggttgttatctcaattgaaaagttgtataagcagcccactcgaatgccaccatgggctactccatctcaccgggtttgagatttaacgtcttcgtggttgttttatttgtttcattattctgtttcttttttctgtttttagtactacttaattggctata

SEQ ID NO: 34721 - DNA, 586 bp, Medicago truncatula
  Intron number 1 from transcript Medtr2g120840.1 (locus Med tr2g120840) derived from phytozome v7.0 (chr-ID MtChr2; po s 28535409 to 28535994 reverse strand)
tcgccgtccttcatatccacgatcacgcgtttcaggtttgtttttttccttctatttattgtttttctcagtaatgcattatcttgccgaattcgttgttttcgtaagaatcgttttttcgtaatgcattcatgtttttccttgatttagctctttttttgtgtttctttgtttacctaattcaaatttgaaatttcttgaagctgctttgaattcttaggtatgacatgattttaacgattttttgttcatgattttcaaaactaaacattggatcacgatttgcaagatctctgttcagctttaatttgatatgaattttgattttttttaatgaaaatgaaaatttattagtattatataataacatgcgttgaatttgaattattttttctgattgcatgttttttctctttctgtttttgttgtacaaggagtatgaattttgatttcttggctttttgttgaatctgacatttcacagattcagtgttaattaatagtatgcattaaatgatcactgtgtttaatgatttctgtttttgtgtttttgttgttgtcaggttttaggaaaatcaaattgggg

SEQ ID NO: 34722 - DNA, 430 bp, Medicago truncatula
  Intron number 2 from transcript Medtr5g035730.1 (locus Med tr5g035730) derived from phytozome v7.0 (chr-ID MtChr5; po s 14797272 to 14797701 reverse strand)
ttgataggtaaaataattgacaacacttttctgatggacgagatctatcaattcaagtggtcattagatccgacagagaagaagatgcaggcgggtcttttctttacagttgaacggtagaaataaaccaaataatactatttgatacaatagtaatatgtaatgttggtgatgctttaaacttccatgtatgatgccgacttgacttgctcttaatcctcgacatcgtcttgcaaatttaccatatatgtttgcaattacataagcttgatacaattgttggaaaaaacaacaaagcataggaaaaaaacattttcctgtggatacaaatgggaaagtgaaaatgttgataggtaaaaaaattgacaacactttcctgatggatgagatctatcaattcaggtggtcattagatccgacagagaagaag

SEQ ID NO: 34723 - DNA, 701 bp, Medicago truncatula
  Intron number 1 from transcript Medtr4g012510.1 (locus Med tr4g012510) derived from phytozome v7.0 (chr-ID MtChr4; po s 2127496 to 2128196)
ggggaggtggccggtgcattgacggtgaccagatgaatatagatggtggctgagtttgatggagaagggaaataagttatgaagtatgaacatctctggcattaaaaagtgtgcaagtgtccaaaatacgacagtgtctgtaaatatgacatttgtgcgacacttttacgcacattaaacacttctatgtagcttaaaatataaccaaaggattgaagaaattaaattcaataatgatatttttaactttcaagtatagcactgtagatagatgaattaagtgaaagtttatcatattttgtttatgaacttttttgtagtgtatcaaattgctcaatttagatgtatgcgtgtgtatatatcggtgttgctatcctatatttttaaatacaacagtgtcaacatgttcgtgtctgtatcatgtccgactgtcagttgtccgtgtcggagtcatgcttcatataaaacgagcctcgatgagataaaggcatctcagactctcatctttctttcttcttgcttacattctacattttctcctctttttttttttttttggttccttcttgttcagccttcccttttcgtttgattttttaactaaattgacgaatctatgtgaccatgagataagattgaatgttggcaaaataatttgatttgcagaaaatacggaccgtacttttcattgcttgcattat

SEQ ID NO: 34724 - DNA, 833 bp, Medicago truncatula
  Intron number 2 from transcript AC229695_20.1 (locus AC229 695_20) derived from phytozome v7.0 (chr-ID AC229695; pos 84461 to 85293)
cgtaaatttttgtaatcctaatgtcagttgaaatatcataatttgttctgttacaattcttccatgacacatatatttagtctcttgcaggtaactttaattgtatctttgtcaaaaaatatttgtgtttggaatctcatagcagaaagaaaacgttgattttccgtcatagcaaacgtgatttcagttaaaaatgtaaatgaaaaaatttgaacagaactgtttacagagaaactcttctatatacacaactacaaatgataaatatttaagacacactcacatcaaatgtaaaataaaattaaacgatgttgattgatgtgatttaattatttttgattaattttttccattttatgtgagtgtgcctaaatatttatcatttgtgattgtgtctatagaagagtttctcctctttacaaccttgtctagcaaacttcttagtcctgaatgacataggatataggaaggccaagaagaaactctgagttgttctccctttacatataatgtggtaagcatttcaacgcgatattagcattacgttggaggtgacgatcaaattctcgcatttcttatcactcgactcttagtcttaaaatctccactccaaccatgaagtcaactttatacacaaaaatgtggtaagcatttaagtgcaatatttcttcggatgtttaaaagaaattggaatgctgacaattttgagactgtcaactatttctaaccaccttttaaggattcgaagcctataaaattaagaagaatatgattttaaccagacttacttatgaaatatctctgaaaattggttttgtttatagtagtagtag

SEQ ID NO: 34725 - DNA, 477 bp, Medicago truncatula
  Intron number 1 from transcript Medtr4g086800.1 (locus Med tr4g086800) derived from phytozome v7.0 (chr-ID MtChr4; po s 18097648 to 18098124)
attccagcaacaacattcatccctcttctctctcggttcctctcttctcttcctcctcttctcctctttcttctattctttctcttctttcttctctaatccattttttcatctcttcaattgaaaaaaaaatactcaaacttaatcctcaacattcattcccaaatcttcatcctccaactcacacaaatacaagatcaaaaagtaggaaaaaaaatctcaaaatactcggaacaaaaatgaaatcgcattttcagatccaaaaatacgagtgtgttgttgcttgattgagttatcaaatttaaaactgaaactattgtggggttgttgcttgattttttttgtgggtgtgttttagtgggttttattttgataaaaatgataaactagtgtgttttttggtttgagaattatatgtgtggatgaggtttattgttggtttttgttgaataaaagagaaaagagaagagaagaagg

SEQ ID NO: 34726 - DNA, 921 bp, Medicago truncatula
  Intron number 1 from transcript Medtr3g148460.1 (locus Med tr3g148460) derived from phytozome v7.0 (chr-ID MtChr3; po s 38648849 to 38649769 reverse strand)
aagatttatctggtacaatacactttgttgggcaagtgcataatcctcttgctggatgatcttaactactcaagcaagaattaattaatccaatgggtatcccatcaattagatatgatctatatatgtgttagttttgcttcatgttttgaacggttactggctgtatgctttatgcatatagttttgattttaaatggttattggttgtatacttcatgtttatgttttgattcttcgtccatgacgctgaaatattagtgaaactgaaagttatctctaatgtttagtcatgttatcattgcaatttgcaacagttggatatagtgtcaagaataaatattggtgtttaagttggtagcctttttttttcctataaaatactgctgcagattttggggttgtagataaagagggcgtgtagatatagctttggagttttgatgtcttattgcatggcgttaagctagtttggttataaattctctttgatgcagtagtgatcgaatttgactataccagttttttttttctttccaacaacacattccaagcataaatatgtgctgaatgctttaaatttgattttgaaaattccattactattcgaattcatggtgtttattgcattatcagatactagctttgttatcccttgattctcgttcaatttgttaatatccttataaactttcccctgcatccactaccattttttgttgataatattcctacttactctttcatatttttaccgcctttgtatgatgttgcattgacttgattagctagttagagataatttcatatataaataaaaaatattcataggaaatttttacagcctttttatgattttgcattgagttgatctgctagctagagataatttcatatataaaataaaaaatatgcagaatt

SEQ ID NO: 34727 - DNA, 968 bp, Medicago truncatula
  Intron number 1 from transcript Medtr6g036110.1 (locus Med tr6g036110) derived from phytozome v7.0 (chr-ID MtChr6; po s 7878707 to 7879674 reverse strand)
tctctccacaaaccctagttcttgtaaattgtaaggtaaattagttaatgtgaaattgaagtttgattttgttgatggtagttttacaaatttggtttttgtctttgctaattgcttttgattatcactttgaagctctacccctagttcttggctgagttttaaacttagaatatttgaatttgttaataatcaaatttgaaaatggggtgttctaaattatgttaatcagacagcttattagtttgtaagctggggttatgtgaattgggaatttggattttgtgtacttacgattataatttctttttaatgatatttattgtttgttgttgaatacttgggggacatagaaggtagcctctaatgaaaaagaaattgttttgtagtacaatcttgcaagtaggttatctagacttagacttgtaaactgtagttaccatataatttgtatttttagtactagtagatattgaggccaagtttagataagcttctaccctatggaaacttttcaactacaataagtatttaggttttacctcatgatgaaaagggcttgtttttatgtttttaggtgtgtttataaagaagttaaatgagggagcttatgagaaaatgtgagtcaaagttgattcagaaatgatattttcacagcataaatgttgtccgacactgtataatgagttttaacattatttgtttatatattttgaaatcatagttcagggttaatcttaatcccctaaatatagttttaatgttacaaatttctattttctaaatgctaaggctaagctgctttgtattacagaagtttgattttgttgatggtagttttacaaatttgtttttagaatatattcatgtgctattatatatggcagaagatgttaatattgtaggcgtaatagttttgtaacccttttgtagatagaaaaatcaattgtttcttagattaactttaa

SEQ ID NO: 34728 - DNA, 508 bp, Medicago truncatula
  Intron number 2 from transcript Medtr6g035710.1 (locus Med tr6g035710) derived from phytozome v7.0 (chr-ID MtChr6; po s 7681326 to 7681833 reverse strand)
caaacgatctgtgttgggttcctcttctcctgaaggtttattctaaaatttgattcaactcattggggttttcttcaaaaatattttatgcttctatgataattatgttttatggttctcttcatatgatttccctcgtgactctgataggaccttggtaactatctgtattctatgttaagagatatatcacgtacatctcggttcaaaattcgtacatgttttatagacacaatccatatggttgaacttgcgaatttgggaaccttatacatgttcatataaacagatttcagaccttgttttctctccagcatgctctacacttgtttatcatattcatcaactttggctttcattcagtgtgcaattgtttatatttttagaataatgtactataatataaatcttcaaaagaattgtgtgtatatttttacgataatgttctatagaataatctttttccacggtttctcatttttttgatttagtctgcgttgtagaaagc

SEQ ID NO: 34729 - DNA, 409 bp, Medicago truncatula
  Intron number 1 from transcript Medtr5g103590.1 (locus Med tr5g103590) derived from phytozome v7.0 (chr-ID MtChr5; po s 41506839 to 41507247)
ttcaagccttattccttgtcttctctcttctcctggtaagtttttcttgccgaagttcaattcattttatcaagtatgtgtttgattatgcggtgaaaaaaaattgaatttgaattagttgattttgtaaaattgttttttactaaaaatgagttatgacttgaatcaatgtgaattgaagaaacaataaatttgatgttaaaattcaattgaagaagcaaaaactttaaattttgtgtttgagctataatcagttcttgaggtaaattcaattatacgcaaacatatttaaatatatcaaaattaattctacatcaattttgtcgtctctaaaagtgaaactaaatatacaccaactctattaactttatctctgttgaaattattatataggttgctaacctgagct

SEQ ID NO: 34730 - DNA, 849 bp, Medicago truncatula
  Intron number 1 from transcript Medtr2g025820.1 (locus Med tr2g025820) derived from phytozome v7.0 (chr-ID MtChr2; po s 6933224 to 6934072)
ttttgaagctcaatagatcagagtttctattagaggttagcaaaactaaccaaattgaaaaagtttccttaattcactttttctttcttctttttgtggttttcattgtgaattattgatgctttgacttcaaatctgttactcattacaagcaatcacagttcaaaaaacatatacgaaaaacggaaataaagaaaagttggattaatggacaggccaaattggaacactttagttcataatatcaatccaaaagttcaaaccaatggactggaatgctccaacacttataaacactttagtttttcttattcgtctaacaaaacgcacaagatttgattacgagtttctattattaaagcataggattttcagattataacttatgtttagatactacggttcaatttacaagattagtccatcgccccttatcaaaaactattgagtcataccaaattaaacaaattgcattaattttttatatgttcctttttgagcaaatcttactggtggggattgagttattgaaaactgtttctattggcttaatcaagaaaccaacatagtgaataaaaagggtgtacttttttcctttttttaaataaagggtgtgtttttaaaagttgtcaatagtattatactatttgtctcaaaatgtgttgtaaaaaccagacaatttgtatcttctgatgttgacaatgaaatttggcttgattatgttttgcattttattattattattattattgttattattattattattattattattattattattattattattattatattttgtgttgcttttgagcatggtgtagggagtgactctgagtgcaa

SEQ ID NO: 34731 - DNA, 390 bp, Medicago truncatula
  Intron number 1 from transcript Medtr4g144500.1 (locus Med tr4g144500) derived from phytozome v7.0 (chr-ID MtChr4; po s 36404422 to 36404811 reverse strand)
aaatacattgaacgtggccaaaaggtttattctctctttcaagtttttttacttttttttttgtatgttttatctgttttttgttcatattttttttgagatttatcagtatcatgttttgtatttggggaaatacttataaagttggaattttgattggtgaaaagtggaaaataggtgttaagatatgcatttgtgcaaattaatgaaattgagcaggggatagaaaaattcaatcaaaagttatagctttcacacatgaagctccccctgattttgagaagttattatttgttgaaaagaaggggaaaaaaaaagctattattttgacatctaggattataagtttcttcttcttcttattctttctgctacttcatttccagattg

SEQ ID NO: 34732 - DNA, 972 bp, Medicago truncatula
  Intron number 1 from transcript Medtr3g021320.1 (locus Med tr3g021320) derived from phytozome v7.0 (chr-ID MtChr3; po s 5275099 to 5276070 reverse strand)
tgatttatcagattggtctagttcgtgtgtactgtgtaaggagaatgaagttaaattgtctcaatacctcatcattctaattgagatacgtgttttgtatcttttttcttctttctggaatgaagtatttcaagtgctgtttgttgctcaaactcattgacgtatccgagtttgtctattgtacatgcttcattattggaggtagaaacaaattttggtatttgtattcttaattcttaaaatattttcttacttatgtgtgtatatctaaatgttctggggaattaacaatggcaccataacatttttatggttcttgttgatttttcaaggttattttggagtgctgatgcattgccatctgacatttcagtcatatctgcatgctttgtttgaaaaattactcgcctttagcagattcattgacactaccaaggacaattgtattgcacagtagttcactaactgttttgtgtaaatcatcaagagttagtttccaacgaaatgagggaagattttttccagtaccatcaatgaagtaaaatactcctaaggaacctttttctgactctctattctcaaatctagaagaagagaacttcaagaacttgtcttccaaagctataactattggaagagtctacgattttgagagtctacctaagattctgcacaatttgtgtcttcattttctacttacaagacgaggaagctttgaaaatgtaacatatgttgatttgcgtctcatcatccactacctcatcaaaaagatgcctctcaatctcaactatatggttttacagaatatgattgaagccactcaaaagaagaatatttctattgcaccatatggattggtcctcacacttatctttaaaattcaaatactttgaggtttctttgaaagatgaagtttctgagttggactatcaagtatttgacaaaccggaggttgataagaactgagggaca

SEQ ID NO: 34733 - DNA, 835 bp, Medicago truncatula
  Intron number 4 from transcript Medtr3g149650.1 (locus Med tr3g149650) derived from phytozome v7.0 (chr-ID MtChr3; po s 39191405 to 39192239)
aattttagtaattactctgcgtggcataataggaggtatgctaaaaacttactctttcgacagatcattatggtgatggttgaaattgttatatgtgtttcttcgatgaaattgcgctcattttaatatatttgttgtaaactgttttgcttgtctttgaaaaagcattaaatttcaatgctcagaaagatgttctatgatacatagttttaccacatatcttgtttacatattggcatacacaagattgatttgtccacatatgtttgcttttttacttatgttctggaaacaaacattgacatatatctaggatatgtactggtatttatgcgtgataagttgtggccgacaacagtggtttgattgcatgcctacacccatctaggtatttgaaaaaaaatattcttttagtatggttaataatcaattggctgctacctttggagcattctagaagattctcataaacaatctcattgtatatcagttgcttgtatttaaaagtttaacccttctggtgcttccaagatcttgaatgatcatgatgcaatgcattttatcatttgaatatgagagatgtttcaacagtgcaaggaagtttatggtctgtgtcatgtgtgtactacaaccaggccatatgtactatgcttttatagtagcagaatcttttttttcgttttgcattcagtatattttttttctagccaacaaattacattctttgagattttgtttaatgtggctcttgattaaccaattctattaatacatattccattccattgataatttttcagcgtgcttttatctactttatttaaaagaaaggccg

SEQ ID NO: 34734 - DNA, 956 bp, Medicago truncatula
  Intron number 2 from transcript Medtr4g140510.1 (locus Med tr4g140510) derived from phytozome v7.0 (chr-ID MtChr4; po s 34490525 to 34491480 reverse strand)
cctttagaacaaaccccagatattttagtaatcaggtgcctgatttctactttttttttttttttttgcaattcatgaaaataattcaactagcatatagttttatatgaaattgttgcaactggtattattataatgtgaccattgaaaaagggcaaaaagagtgtatattattcctcactttcaatggtttcgcaatccatcttaatttagtcaccaactattgaaagttaaaaacccttaaatgtctcttctgaagttcttatatgcaacaatagaatagtaaatagactataggaatatactaggagagttcaaggttgattcagaattgagggtagtagcaattatgttatttatttgattatttcacttgggcatagcacaatgatcagtggcttcaaataccgatatactgcaaggcgaaagttggggtaacacctattgtcgaaatgatgtggaaactcaactgtggtttgggaattgggtatatggaaagaagacctgtagattttgtagtaaggagagtagatcagatggaggatagtcaaatcgctagaggtagaggaagacctagaaaaactataagagaaactattaacaaagacctagacattaatgagttggatagagatatgatatatgacaaaaccttagggcattatctgatccatgtagctgacagtacttagcaggataaggcttggttgttgttgattaccagaatgtagggaaggaaaggtgttaatgttgaaacacttgttcttgctatacaaatacattccgtaatttactacttatgtttgtgatacaaactacttaggttgttggtttagtagtactcatttccaaattttcgtcagtttcacatgtcacccttttctaatttattacccttcatttctgcattacatatttcagaagataccttcacatctatcttctcaaaagaaatt

SEQ ID NO: 34735 - DNA, 979 bp, Medicago truncatula
  Intron number 1 from transcript Medtr7g015210.1 (locus Med tr7g015210) derived from phytozome v7.0 (chr-ID MtChr7; po s 3783314 to 3784292)
taggaaacagtcttttggtgattgatttaaattcttcttacgtgaaattgttcccactgtagttaattatataaatctaatggcattaataatcaaaagtgttttctagcgcagtggttaattgatgtgtttttttctacaatgtcttgggttcgtctcttgttgggccattttttacacaattttcagaaattctaaggcttagcttttcgacctggtttgctgcaccggttcaacgaccggttcgatgacgtggcactgggttaataacatggtcgatcaaataactggctcggaccggggatgggtccggtttccggttgaaccggtcggccggtccgagccggtttttaaaactatgaataagagtgtgtttggataacaatttggaaacgttgttttgatcccttgagaacaactttgttttgcttttacataagtaatgatgttaaactcaaaatcctctaaaaaaaatataagctaacatgattttgacaaacatgtttgttgatgaaacccaatttacacaccccacactggggtttgagagtcacaaagacatgcgctagattgtgtttgattcatcatgatctggaaagttcaacatgcaattgtctttttgttcttatttagcgatagttaagtaaatactcaatagttttcttggtatgtagtttaatgctattaatgagtcaaaattaatcttttataattgcatgtttcatttccagaatactaaaatatatccattctaaaatggttacatgagatgagaggtgaattctgtttcacatgtcatatcatatgacgctgttccgaacaatttcattttgttacgatatcatcactgcaataatgtcagctgctttgatgatgtttgcctgtctttcacgtgatttgataaagcatttttgtttccctaatttctttatgcatttcaacagatatccgtcttcaactcaaaccctgatattgtcat

SEQ ID NO: 34736 - DNA, 857 bp, Medicago truncatula
  Intron number 2 from transcript Medtr2g022160.1 (locus Med tr2g022160) derived from phytozome v7.0 (chr-ID MtChr2; po s 5841724 to 5842580)
cttgaaattggtaattccaactttgctttccaaatttttcacttttggataatcttacaataagcatttgaaattgttgttagtaaaaaaatggatagggaaatgtttgtgagaatttttctgtccatgtgtcaattcgatatgtaccgatatatttggcaaaagttaatttttgaaaaaaaataatattttctatcatataaaaagttaaattaactaaatattatttatcaaaagtttgaggaaataaaatttaattttttacaatttaattttttttgacagaattttttcccaatttgttgcctaataatagttaatattgaatattttttacgataaaatgtaaaaaattagtataatgattatatataatgaaatgattttcttcttcttgtaaaataatctttctttaaatacaaaagtcgataaataaacttgttattaataaaaataatattggtttaaagagtaaatatactaaattcttcaatttacgattgtaccgtacaagcttcaagtcttagtggattacgttagtttctagagtttgatcattcttgttatataatgctctcgctgatcctcagctcaccaaacaaactacatattgggataattaattaagaaacaaattgaaaacaaggtgatagttttataataaacattgactacagaaaatgaaaacagaaacattttctcaaagtaaagggtaattcttgatattttctcaatattgttcatagatttcgtggtgtttgattttgtctaggccttctgacactccttgtgctaaaatgatactaattgaagtgtgaatgttacaggtccacttgagtttaaaaaggaggaataca

SEQ ID NO: 34737 - DNA, 399 bp, Medicago truncatula
  Intron number 1 from transcript Medtr4g141600.1 (locus Med tr4g141600) derived from phytozome v7.0 (chr-ID MtChr4; po s 34988836 to 34989234)
attcataacggggaagaattgttgtatcctgggaggatatgctccttccttttttcaaaaatcctcccctccaaactcgcaaacaaagccttaggatttccttgatctcagctgtctgataccacattaggaagtttctgttaactgtaattttacaatcaaattctagactaacgcctatcactttttcgtatgtgatgcatcttctaccgccaatgcttaagcttgcttattgatttgaatctcattagttttaactcatttcccatggatagaatatgttttcagttttttttttaataatgttttcgatcaattaaacctgtcattttcacatgttctcttggttgaaatgaaaaaacatttgcaggcgactgaaacctgacggtggaggtgtta

SEQ ID NO: 34738 - DNA, 368 bp, Medicago truncatula
  Intron number 3 from transcript AC145023_1.1 (locus AC1450 23_1) derived from phytozome v7.0 (chr-ID AC145023; pos 11 83 to 1550)
accttggcaaaggaggatttggagaggtttacaaggtgagaacataagagaaggcttagtgtctgtttacttgtatgattatatgatatttcttgtttttttattttcaccaataaagataaacaagacatcactaaagttttttaaaaataaatattaaaagtagatcaaacattttgttagaaattttaaatattattttttgtattgctcaaaatgcattttttcttgtactttactttcatcttcacttagtggtaattgaaaagaaaaatccacccaaatgtaacatacagactaaattgaaaatattgttcaaaggtaaaggaatccttattttttaatatatgattagggtatcctttctg

SEQ ID NO: 34739 - DNA, 583 bp, Medicago truncatula
  Intron number 1 from transcript Medtr5g027100.1 (locus Med tr5g027100) derived from phytozome v7.0 (chr-ID MtChr5; po s 10999500 to 11000082)
taaaagtgagtttaaggatgataattttgagtgtaaatatcaattctacaataaaaagctacaatttgtagcttcaagttagaatcaattttgacgccaaaataaattctactagagagcaaccaaacatgtcaaagtcaatttgctttggttcctccaaaagtggaatcgaacatgtggacaacttttttgtaatttgtttaatttagaagatagtgattgagacattatgtttttgttcaatttgacaaattacacatgtaattggtgcaatttttttgttcaatttgagagaatggacacattatgttttatactatagtctactcaatctcttccttttgaagtttttactacctatgtagtagctttgttgatgctaaatatgttgcttttcaatttcattcaattttaggttccttatttatcttaatcttatatttcattgtatattattgtttaacgtaatgttggttccttgcgaaagagtgtagttgatatggtatctaatgtgattggtttcatgtgatttgtagatttttttcattgttgctagaagaagttgtttcaaaaaaaggaggaa

SEQ ID NO: 34740 - DNA, 809 bp, Medicago truncatula
  Intron number 3 from transcript Medtr5g027100.1 (locus Med tr5g027100) derived from phytozome v7.0 (chr-ID MtChr5; po s 11000569 to 11001377)
ctgaatcatcaaacaaaaaggaatattcgtctcaggtaaaatcagtttcttgatgccagcttttccatttttttgatattaacacatgcttaggagtttgtttagcaaaagggaaatccattgtgaaatttaacgcctctgcatgcaattagttcctggtaggatacatgtaatgtggttatgaacctaatatattctagtcgtcttcattttgatttacacccaaagtcccaaacaattagcaataattttgctgtcactgttgtggatcacagggcaggtttgaatatacttaacgttttttcttttctgctgcctattaattatttaaacctttgaaacatatttagtttcattcaatatgctcagtgtatgttaggtcatttggttccacgtttgtaggagaggcaaaattgataccggaggtgtggaattgatttgacatgtttggattttctcgagtagaattaattatgcctccaaaatcgagtgcatgtttggtatcacggtgggtttgctagaatcttggttgagccactgtgatacaaataaacactgattctaaattgaagtaagagctatttcctctaatattagcctaaatttcttcttcaattcacttttattgaacgtatgtagacacaaatcattttacgttcaactcactttcattcaaaatcaattgtcattgcagaaccaaacatatgttttatttcttgctacctatttattattttgaacatttgaaacttgacatatattgatttttctttcttttgtctatcatgcttcaattccaggaaggagaa

SEQ ID NO: 34741 - DNA, 1063 bp, Medicago truncatula
  Intron number 2 from transcript Medtr4g125560.1 (locus Med tr4g125560) derived from phytozome v7.0 (chr-ID MtChr4; po s 29628444 to 29629506 reverse strand)
aagcgcgtcttgacggaagaatcaatttgtaagtggaacatagctagctactatttatgccttttgatttcgtatttgttgttgttgattgaagttatttttttgcatccaaatagctatggagtaatgatatgcatgaatatttttagaagaatatacatttagatttagatttgaaatatatttaagataagatatcattaggaagtaatatagattcaaaattttgtttaagataattttaggatttgtttcttattttaatttttttttattatgccttttttgttaagaatatggttagcagaattgataataatagttatatgatctcattaaaaaacaaatatcaaaagaagtatctctggtgttttttgtcagaagctaaatgtaacgcctccgcttggtgggcatgtaacgcccgaggctgatgagggcggggagtggtccggctcctggcatgcttctaggcaaaactgaatcacatcggaatgagagggatcctgaggccgtacaggtatgggacttcatggttgaaggaaggcttatatgaattgtttggtaccacctatatcaacaagatgcatttcttttcggtagctcattccataagaactccacagttaagcgtgcttgacttggagcaattttgggatgggtgacctatcggaaagtttcccggtaaacgtgcgagtgaggacaaaacacgctgaaaagactcgtgttggtttgtgggatcagtcggcaatcctgaaagcaatcctgaaagacttaggaaagctatttcataaagtacttttgttaagcttaaacaaatctaaatattgattttcaaactccttctagttggttctttcttggtagtcaagtaaaaattggtgtggcttatctttttttatgtttcatctgttcgtccatcaatcaatctaaactaatcaatggtctgtaattctgattatttcgagaagcctattgcctttatttttgtgtcttattctcttgagaatttatgctgtacatgttttcagtgaagaaatcacctctaacatacttcttggagaaa

SEQ ID NO: 34742 - DNA, 569 bp, Medicago truncatula
  Intron number 1 from transcript Medtr4g125560.1 (locus Med tr4g125560) derived from phytozome v7.0 (chr-ID MtChr4; po s 29629806 to 29630374 reverse strand)
attttggtcataaggtatcaactctttctcttatgcttgctaaaattgagattagggtgcaatggcgactaaaattaaagtctaaatagtttgattaggacttgcattaatggtgaaacaaccccttaaaatatatcggctatggttatccaaatttgtgataatgtattttcaatttttattaacggttggaagtaggttgtttggtttatctgtattgagtgaatttatatttctgatcgtgtttgttcatgtaactattgtgtaactcttattcttggtgttttttccgcacaccttgtattagagtatttttgttacagttttaaggaaaataatatattgtgaaaaaaaaaaaacaaataaatgtaaagaaaacttttagagattaaaaatgaaagtatatatatttagagaggaaaaagaatcattcataagaagtttatttttgacaagacgtttttaagaagttggataacttagttttgtcttcacactgtctcaataacttagttcaacaaattttcaaactagaaaagtaaaagaagacaccgtagcgctttattcgc

SEQ ID NO: 34743 - DNA, 412 bp, Medicago truncatula
  Intron number 2 from transcript Medtr4g092820.1 (locus Med tr4g092820) derived from phytozome v7.0 (chr-ID MtChr4; po s 19499999 to 19500410)
ggtcgggtccttatcttccacaaaaatttaaggtaatttctctaccaatccccgcacgtctcaaaaaagttgatttatctaaattttaaaattcgaacatgcaaacaaaaactctttcttacacgtccggaatataaaatatggagaaatgaaagaactttaagaagtgcggaagttggaagagaaacaatcacattttgatcctcctattgtagatgattcacgtttttagtctccattagggttttttaaaatatttaaaatgaatctagccactaaacttgaggcttatttatatggatatgttaattttgaatattgagctgacaaatcataaagtggtgtgacaatgcatgttaatttaatcttataatttcattttcaatattagggttctgattttcctctgaaa

SEQ ID NO: 34744 - DNA, 827 bp, Medicago truncatula
  Intron number 2 from transcript Medtr3g087440.1 (locus Med tr3g087440) derived from phytozome v7.0 (chr-ID MtChr3; po s 20801932 to 20802758)
ccagatcgtctccgaggtaatgaatttagcttaattcaactttttattgagtaattattcttctgtttagtttgttaggttttaggtaagaaaattgattttagttgaaaatgagtttaagtttaaatgatttatgttttgatacgtttatgtcaaactgagttgaacaaaaaatttgagtgttaaaatcacgtttgagacgaactacaaatcctagttttaagttagactcaattatgaaggcaaaatcagttattgttgagaatttaaacatggcaaaatcaagtttaagtcttcataatcacttttagatttaaatactgaatttaaacgttgcaataagtgtgatgtgcaaattaatgtgtagatagatctggctgtagtgcgaaagttagaactgcagttagtttctccaattaatgtgtttattaattgttgattttgaaagaaatcaagtttgatagagtagtatgttttggaaagattgtggaaaataggcttaggtaggtggtttgagcatgtaaagagaagatctgtaaattctgtagcatggagacggaggatagttggatcactagaggcagaggaagacctagaaaagctataagaaactattaagaaagatctagagattaatgagttggattgaaatattgtttatgatagaaaactatggcgtaatttgacccatctagccaactccagttagtgggataaggtttggttgttgttgtatttattttatttattatttattattcattcactattttggttatgatttggtcgaaattcgttgattttgtagataatattgaggttaccgg

SEQ ID NO: 34745 - DNA, 852 bp, Medicago truncatula
  Intron number 1 from transcript AC159090_19.1 (locus AC159 090_19) derived from phytozome v7.0 (chr-ID AC159090; pos 95947 to 96798 reverse strand)
ttcgttagttttatcatatttatgcctttaaacttttgaaaatatatcgttttctatgcctttgaaatattgagtaaggttagttataaaaagttgtttgaaaaatagataacatgaaaaaacaaaacaagaaatacaaattccatgaaatatttgagtatgacgtatgttttatgcatgaaatacaaatttgtgagaatatgaattttttttaatagtattttcaaataaaccgatcaaccgaaccgatccaaaccgattcgtttgctttggttccttttttaaaaaagagtgaaaaccgaaccaaaccaaaccgatgaagatttcatcggtttgaacatttttttgactgagagccgatccaaaccaaactgttacaaccttaatgataatgtttaaattttaaattttttattctaatatttctttataaggatttctatatattgccaactgtaaacacgtgaatagatagctaaaccaaaacacatgaaaaccaaacatcgtccaacgtaaaaataaatatccaacggttgaaaagcattcgtgatattccacaaaagacaaattcgttgtatgttttttttttgacaaattgttttttttatttagctctttacctttttattttatctttaaatttaatttttttttttttttttaaatgtcaaatattgttcaatcctatttatcacatgacatgaagtatgtgttagctctgcaagcaaaaaaaaaaaaaaggaaaaaagtggtcgtctagtttattgtccctcgagaaataaccatcttaataacattgtttcttatccattttcaggtacgattcccgaggagattggctatcttgataaa

SEQ ID NO: 34746 - DNA, 375 bp, Medicago truncatula
  Intron number 2 from transcript Medtr5g079100.1 (locus Med tr5g079100) derived from phytozome v7.0 (chr-ID MtChr5; po s 29356034 to 29356408 reverse strand)
agtttctaagagtgctctctgatttgtatttcaaggtatgtggaatatctactgctacataaaatataattctatccatcaactatatatataaaatataaatgaaacataaaaattacttagggtgcttcatgaagaccaaaaaatccgttgtccgactttggattactaccaggtaaggactttttccgtgaaaaaatcggattgtcaagaccaaaaaacaatgtaatgtgttgtagtaaatcggattggtttacatgagaagaagagacttggttattccaagttcagcctctacgaaacttttttacagcgacacaatgtatcaaaattaaattattgattaatttgaattataattattgcaggaacgat

SEQ ID NO: 34747 - DNA, 834 bp, Medicago truncatula
  Intron number 1 from transcript Medtr1g012910.1 (locus Med tr1g012910) derived from phytozome v7.0 (chr-ID MtChr1; po s 2151174 to 2152007)
tctacgagttgattattactggcgaatttttaaaggtataatgctcgagcagctgaatgtttaattttactatggaaagtgactcacctgatattatttagtttcccaaatccttttacaatcagtaagtatttaaaacattatattctgatctaagagcaatttttctgttgtacaatatttagctgcaggtgttgttccagtaaagcttcctacaccttgtattaatctaacatatctttggtttagtataaacttctatgactttaaggaaatttcaactgctctatgtgtgttcagaagctcgcctaatcttaaaaaactagaaataattgtgagtactcatttactttgacttgacttttctttactttaacttgacttttatttgctgggaaggaaatcgcaaacctttttctgcgttaagtatttgtttagtacatttaaagttcccagtttagtattggaagttagtttctaaaacttgtacacttgagttacgattgcctgcagaagttatgcgttgggttcaatataggtatagttacgatttattgcattagagtcctatataaatcagactcatgtatcttcctattcatgttgtatcaatcaatacaatatgatttatggatttggcacaatttcatgtaggcagcacaggaggagaatacggtcgttttagcacctgcctcctattgttgggaaaatgtctttttggagccatccatacccatccaagtgtgacatgtgtgtattgaaggcatctctggtatgaaagctgaattagattttttgagatttctacttctctattcgcctatgctagaaaag

SEQ ID NO: 34748 - DNA, 764 bp, Medicago truncatula
  Intron number 1 from transcript Medtr4g067120.1 (locus Med tr4g067120) derived from phytozome v7.0 (chr-ID MtChr4; po s 12956664 to 12957427 reverse strand)
tgtttgctgttttgctttgctttgctaccttacaggtaatcaatcatcaattcattattttattcaatatcatggcacatactttgtatttttcctactttgtgttttccaaaatcatacatgcacgttacccaactcttcctagtaacttgaaatttttttccttttccacacttatctcacactcaaatctggatcctctacaataagttaggtttagagaagaaattttcttctctttatctaatgtatatatatagtcacttaaactatatagaggttgtagagtaaccaagtttattaaaaaataaaaaatttcaagtgtttttaatttattttttattattattagtatatgccgctttgaactcaactataaacaaaaaaaaaaaaaactatttatatacatgcaaaaaatattagttaatttgatgtaatatttttaagtaatttatataaaaattaatctattctttaagttactctcaatgatatttatttataaagtatcctggcattttacttttttcatgaattaaatgagaagtatttttgaaataattatattaaataagataagttagtaaaaatttgctaataatttaagataataaactaaaacaaaaattgcttttattttagccaaaaataataatagtgatatattgctccttttggattttgttattattttggtgtttagtgttcaaaatattgatgagttattgtattgtatatgcagataagtgcaatttgtatcgaac

SEQ ID NO: 34749 - DNA, 916 bp, Medicago truncatula
  Intron number 1 from transcript Medtr7g010830.1 (locus Med tr7g010830) derived from phytozome v7.0 (chr-ID MtChr7; po s 2435509 to 2436424 reverse strand)
ccttgcatattccaagtggtgacagaaacaagcttgtaaagttaaaccgtcgaattctacaagttataaaggtgcactttcgcccttcagaaaaaaacagaaaaaaagaaaaagaaaggcgcgatttcaaaagtagtaagtcagttttgaccgttagtgcctcgagttatcccaagtcagttttgactgttggtgttaggagttgccctaacaagtttgaaattctatcagtttgatacctagaggtatagtataatcaacgtgctttggattatttttctaagacttcatacataaacattttttttggattatttcacgaaagactgtgtttgtttcttgtagcgtatgtaggtgtgcatcttctttatataacatgagtattgtatttgaacttgagaaatttatggtttttgcaatctaatatcggacgccttttttttcttattccttttgggttatctgtaaacaaaactagtatatatgatatacaaataaagtagcagtgctgggatccgatcgattgtttgaagaggtggggaggtccacctgttttggcggggggtagctgttggtttttgcagtgctgctgatcagactcgactgttctgtttgtttgggtttttagtggctggttttctgttgcggcttttgctgtgctgctgcctggcaatttgagcatttgctgctgcagtgctgagctgttgcggccaggcagcttttctgtagtgcacgtctgttgttacagcactgtgtgtgttcttgcagcgtgttttagtgtttttggggttcctccaagtttttgctcccaacattatcatcgaaattatcattagttttcttgcatttactaggtgcttccgtctttaaatacaatgtttatgttattctgatggcagcatcattgcagatatta

SEQ ID NO: 34750 - DNA, 600 bp, Medicago truncatula
  Intron number 1 from transcript CU179634_35.1 (locus CU179 634_35) derived from phytozome v7.0 (chr-ID CU179634; pos 122231 to 122830)
aatcagaatcaaccttcgaattcgctagatccgttgtgagtgcatctaagcgagcatttattgcttcctgcctctctatattggctgcatgatcttcttgcaataaattcactaattgtgccagttgatgttgaatttgatctcccataacacccgtctctgtgaaagatttcacaaatgttttcttcctacgacttatggcgctggttcgttagagagaacctgcaatctcttgagtttgaagtactcaaagacttagtaattttctgcttttcatttcctcaggttcacaatagtttaatgcaatacttataaactaagaccccctagaaactaggacatgacttacttaactgaaatgaaaaattgcactgttacttgtattacagaaaattaactattactaaaaagatattactgctgtatctcttggataactaaggagtgataacattctcccaacaagtcaatccaatcgttgatttatcagaaaattcatgacgtggtttcttttcagttgtttttgttctatttggaggttcttacagtgcatgtctctgaatagcttgcagaattccaaacaggtctagttaagcttgc

SEQ ID NO: 34751 - DNA, 339 bp, Medicago truncatula
  Intron number 3 from transcript Medtr5g013690.1 (locus Med tr5g013690) derived from phytozome v7.0 (chr-ID MtChr5; po s 4173864 to 4174202)
tcacttcatcggttcttggagaaaaggaaggataggtaagcctgccagtttgatctttgtcaatagacttcaccttttaggaaaaaacttcaatttttaaggtagtgtgtttgattcttcgattacaaaaattgattgatctggttatttaaaagtgattttgctaaaagtgaatggattgtgacacggtgactttggtgaaggaaaagtaattatgactttagtgtaatattatggctgacccttttctataatgatgtttggaattatccatattgactgatatgtttgtctttttttgcagaattgctgcaaaggcaccttatcaaacaagtaatc

SEQ ID NO: 34752 - DNA, 408 bp, Medicago truncatula
  Intron number 1 from transcript Medtr3g039210.1 (locus Med tr3g039210) derived from phytozome v7.0 (chr-ID MtChr3; po s 10292424 to 10292831)
ataaggttcaaatccccattttcgtcaaagatcgggtaagacaacgaataagtgtatgagatttggggacctaggcgaggaaggtgaaattcttaccttgctcaattgtcatgcctaaataaaatccggagtagttttgacgtttttataacaggtcaccaactagtacttgactttgagttttttatttttttatttttattttatttcaaaggctaaatttacccgtaaacaaattgtgaagcactaaattggatctccattattattattattattattattattattattattattattagtatatttttttgggtagagtattgataaggttacactgctttgaacaagaagatctttaatgttttgaacaagaagatctttaatgttttgaattagcacgac

SEQ ID NO: 34753 - DNA, 538 bp, Medicago truncatula
  Intron number 1 from transcript Medtr6g093420.1 (locus Med tr6g093420) derived from phytozome v7.0 (chr-ID MtChr6; po s 20029211 to 20029748)
ctgcttctctccttctttccaccgccaccaaaaaggtaaaaactaaaaacctttttattttttattgaattttctttgttaaattcatggaatttgaatgttattaggtattatgtttacttttatctttgtttgtaaattggaattggatgaaaagtttgatttcattattaatctttcttttttgtgatatatgtttgtaaagtttgagtttttaagtgttcaagtttgatataacagaaaggtgtttaaagggtatatgagattcagttctgtaactttgtttaataaaaaaaattacaatttaagctaagattgttgttttcttttcagattcattgaataactcatctataacataaaccagatacattaactatttaatgaatttaaaacaagaatctttgcttatatacgagaccggacggagtagtttttttggacttgtgttgaaagttattcagctaatcttttgttttttcctcatttgtttcataatgcagttaaagtgatcagttagttagtcttctcaagctgt

SEQ ID NO: 34754 - DNA, 305 bp, Medicago truncatula
  Intron number 1 from transcript Medtr5g010500.1 (locus Med tr5g010500) derived from phytozome v7.0 (chr-ID MtChr5; po s 2598615 to 2598919)
cagcacaagaattcaatctgatcctcgttggttcggttagtccaatttgacctcataaaaattcaatgtgtccaagtacatctatattattactatccttttgcttatatttcatttaggagggtgttattaattatgaatcttcaaattcaacacgtgagtttcattgtttctattttggtttggtgatttgtatatggaatactcgtgttgtggatcaggaaaaacttgagtttttgagagaagaaatggagaaacataggtcaaataattataatgttattatcaaggggaagaatttgccg

SEQ ID NO: 34755 - DNA, 429 bp, Medicago truncatula
  Intron number 1 from transcript Medtr4g023460.1 (locus Med tr4g023460) derived from phytozome v7.0 (chr-ID MtChr4; po s 5114865 to 5115293 reverse strand)
atcttttttctatctcacccaagctacgtatcctggtagatgtcgtctcttttgattctgctattcttccatgttttcgagccaagcttcaaaccctttctccagccactatatacttgcttccatgcaggtattcaccatcacgaattttatcagaaatgatgtcaaattagtttattaaaataaaaacggagaaaaactaccccaactacataggttgtttcagaactttgaggctactaatgatgttatctagatactaaagaaaactaaagttttagattcttattagatcattctcatttaacttcctgaagttttttttatcttaataaacgctgtaatttcaccaacataaatttttgtttattttgctgactttttaccatataccttcttgtttcagatctcttacatatattttcattc

SEQ ID NO: 34756 - DNA, 978 bp, Medicago truncatula
  Intron number 2 from transcript Medtr1g024270.1 (locus Med tr1g024270) derived from phytozome v7.0 (chr-ID MtChr1; po s 5704413 to 5705390 reverse strand)
aggtacttatagttatacttatacaaattaaactgttttcctgatattatgatttagtgtatgtttggattgccgcgctgagtttcacagaattacgatgtggcaatgtggttttagcaaacactacattttgaaacttcaacaaaatcatgatgtcatcgtgatttcgtctaattcacagtgattccaaacatgcactacatatactggctccaattgggctactctgagctcactagctgtcagcttggtaacgagctcaattagtctttgctgcccaaaaacttaggtagtgagccaggcttggattagtgtctcaatattttttacatatttaattaaagaaaccagtttatttgttacaaaaataaaaccaaatgcatattttattcaagtgattcattcagtagacaagtgaaccaagctattactagctcacaaatgagcttagctattcgcctgccctagttttgattaagaaaatattcgaagtccacaatctgataataaaaaatactaaggtttgattgttgataatttagctttgcaataaattcaataatatttataggtcttgtttatacagtgattgtctaaattattactataaagggggtgtttgggcaaacaacttaattaagcacttgtgtataggttgtttctataagcaattttagggagattatgagcataacctgaaaacaatttataggcttattatacctcaggttatttttataagcttttccaagcacatacacaaatgaatacgtcatataagataagctcatataagttattcaaaacacatcgaaaagccatagttttagttttataatagcaaatattgtcttttctcttgttgaatgagcatcaacaccctttctcttctatcattcatgccctgctctttgtatatataagattattactttaagacgtgctatcaatcatatgttggtctatcttgtcatagaa

SEQ ID NO: 34757 - DNA, 727 bp, Medicago truncatula
  Intron number 1 from transcript Medtr6g046960.2 (locus Med tr6g046960) derived from phytozome v7.0 (chr-ID MtChr6; po s 10174437 to 10175163 reverse strand)
aagagcttgcaacctgggctgttgtcttcatcaaggtcaagttctttacatattttgtttccattacatgcaacaacaacaatacaaatatgaaattggatgtgattttgttttatgtctagagatgtaaatttttttttgtacatgaatcttttttagttccgatgctactgataaaaaagtctgttttttcaatgaatctttgatagaacagaacatataatatacatatcttatctaaacaaaacataatcttataaggttgaatccttgaaagtgaagaaaccaatgagcaagctaataatagaaaaatgaatcttgtttttgttcatgatgaaatgggtgtgtttgatttgatgtgtttacatagattaatcattgatttgttcttttagagatgagtttgagcaatgctttgaaattaatcaagtatcacattattaaaacaattggatcattctgaaaagtgaaaaaaaataaatcatttttctatgttttttctgtcatgatcaaatgggtgtgtttgatttgatgtgtctgcatagattaatcattaatttgttgtttttttctttttcttacagagatgagtttgagcaatggtaaaaaccagtcaccattaccaactagtaatggtgatggtaatggaataggtgcacccttcaagatctttgtgggttatgatccacgtgaagacattgcatttcaggtatgtcgtcattcaatc

SEQ ID NO: 34758 - DNA, 855 bp, Medicago truncatula
  Intron number 1 from transcript Medtr4g092170.1 (locus Med tr4g092170) derived from phytozome v7.0 (chr-ID MtChr4; po s 19134962 to 19135816)
gtcccttggtcttcaggtacaatattttacttgttagattttttccataatgatttatttttcttggctattaattaatgaaatactgatttgaaatttgtgattgattcaactgatttcatgtctcttttgacaatgaattatccaatttattgattaaatgtgttattatgtgctttctttttcacattgggtgtaaacacatgacattgttggtattaatttttttttttttacaaatgttggtattaatctattgtcatctgaaaaattaatattttgattattacttttagaaaaatgctaacaaatattcctgaaatacttgttaagaaaacaaatggttaaattacatcagatgtcctttaagttatctagttataacagtttaagttttttttatatcacttacgtcatttaagttatttaattgtaacaagttagtcttttaaatatttttcgtaatacataagtcttttgagttatttaattgtaacgtttagtctccgaataacttacatttttaagatctgaaatcccccaaattattacgattaaataacttaaagtacataattggtacggaaaaaattgaggactaacttgttacaattagttaaatgaaaggatttaattagtacggaattacatttaaataacttaaagtatctctggtttaatttagccaaaacaaatatagcatgtcttgaatttatgtcttcaaaatcttaaagataaattctttcaatttttgttttcttgaggcaccgattagtatgactcttgtttcgttcttttaagctgttggttttgtttgttgacatgtgatagtctcgagcccaacctcgtgaaata

SEQ ID NO: 34759 - DNA, 666 bp, Medicago truncatula
  Intron number 3 from transcript Medtr4g073130.1 (locus Med tr4g073130) derived from phytozome v7.0 (chr-ID MtChr4; po s 14361476 to 14362141 reverse strand)
aactggccaaatgtatgcttttctcaattttaaactgataagtccctgtgattttaaattttttgatttatacaaagtaagaaacaatgatagaatttattgctgtttattatattttctatgttagagaaatagagggaaagtggagactgaagtctatcaatttgagtatatatttgatttaatttcttttgcattctaaagattcttgacataatttgtcttagatattataatcattagacttgtgttccgcatccttaataattaagctttgaaccactgaaaactatttcatatcgttagttttgttttgttttgttgattggcttcaaggtttttatattttaaactgtcttatacctatctaactggagaataaggatagtccgtctttttaaagagagaaaggaggcggtggttgggaagttatatggaagatagcaaatctttttaccctcaaattgttgttacttttcctctcaataatagcttgcatcctcactttcaatagttgatatttaatttctcatgttaacattctcctatcctaatgtttttatcttaatattttctgttcattgtttagctaataacaagtttcacctttattgttgatcatttctgtcagataatctcggagaagactgtcctgtgtttgacaac

SEQ ID NO: 34760 - DNA, 350 bp, Medicago truncatula
  Intron number 1 from transcript Medtr5g096570.1 (locus Med tr5g096570) derived from phytozome v7.0 (chr-ID MtChr5; po s 38375078 to 38375427 reverse strand)
acaacaactttaccagttgcgccaaggttacccctcacttgctttcctcttattgaagaataaagatatagttcggcaagtgcatgaataaaacaggtttcatttaattatataataggttacatatcgtttaatacgtttctttttctacttgtctcacttgccaatttgtttgttaagtttatattttatagtcttccgccttcctaacatgtaaccccctcccatcttaagtcaaatgtatttgatacaaatacaattttggaccaaatacatttgacgtaatgattactaagcatacgtttatttctgcagcgcattcaccaaaatcaaggtgaaaaaatacattg

SEQ ID NO: 34761 - DNA, 815 bp, Medicago truncatula
  Intron number 2 from transcript Medtr1g089880.1 (locus Med tr1g089880) derived from phytozome v7.0 (chr-ID MtChr1; po s 18038424 to 18039238 reverse strand)
gttggatccagtgttagaaaaaaaatattgtaataatgtgtacattatgaaaagataatttctttaaaccaaccacttagtatatgtttcttcttctccttgcttatgcttaattattaatttactaatctatttgtttttgtctagtgtatgataccttgtcggataatcatattgttgagttgttaattttgaattattagagttttaatcattgattgaagatgcttgccaaccaatttgattactttccttttctgtgttttagtttttcttaacttagttaggtagacaatttggttttaaattttatatgttaaataattcacatatgctaacaacttcaatacttttggaatttgtcctgctcattacttaggttttttaatcaatctttggccccatggttccactttttagttgaaagcaactattatgatttctaaagaatattctcttatcttctagggtttattaaataattgaatttatatacacgtttgggcatgcttggtgcaagagtgtttatatatctatgatagtgttgtatatgtaatgttccatttctgaaagattatttcaacaatagaacttatacagtccatttcataaaatcacttgagtaaaaccctttggaagctttctttgatttctatttcaaccttgaatctgtacctatgtaagataattgattttgtttttctatagaaagattttgtgaaacaatttaactatatagcttttatgtgaaagattgtacattcagttaacaattcaatttcttttgttctgacatttctttgttatatagtgca

SEQ ID NO: 34762 - DNA, 765 bp, Medicago truncatula; identical to SEQ ID NO: 33136
  Intron number 1 from transcript AC235673_4.1 (locus AC2356 73_4) derived from phytozome v7.0 (chr-ID AC235673; pos 19 027 to 19791 reverse strand)

SEQ ID NO: 34763 - DNA, 971 bp, Medicago truncatula
  Intron number 1 from transcript Medtr2g080420.1 (locus Med tr2g080420) derived from phytozome v7.0 (chr-ID MtChr2; po s 18511502 to 18512472 reverse strand)
gtcctcctaagccaaataaaccaggtccatgcataggttgctccataattcatcctttagatttcaccatctctaacaccatcaatacctacccaccaccacaaccaccatcaacctaatctccatgcaacccatgctccacaattcatcctttacatccatgactctcttgttgtcattcacgttatttttttttctttccaaagttaaattaagctatgttattttgcacctttggtttaattgttgagtatattatggaggatgatgcaataaagttatagtatgttattttgtacttcaattaccaacaataaaattaataaatgcatggattgtcttcgatatcttttttaattctaattttgtgaatgactaattattgtcttcaagtaatttatcttgtataacgtacgattgcttatggaagagattttgttcatcgctaaatgttgttaaacacggtctaaaagctttctgaaatacaataattagtatctcgacgatattcttaactcaaaactacttcttcactcataaaaatatattgtaagtaataatatatcgagattgatttacaattgatcctttcaaaaaaatattgtgttcaattgatattcgtcgacagtcattttggcctagttgattgaacgctcatttattaatgattttggcataatgagtaatgctagcatcaggcgctttgacactctcgttaagcactccctcttttagtggtccacgtcatactattcttttaacttttgacttggttaccggttcaccaaaatcaacacatttaattgtttttttttttttaatggatatcccaaacaacaaggcattttcccgcgcctaagaatatctctttccttatctcacacatcgttgtttcaactatcagaagctctgccattctgccactgtttcatgcagaaagtccccaaaggataagcaccaccactctgtca

SEQ ID NO: 34764 - DNA, 837 bp, Medicago truncatula
  Intron number 1 from transcript Medtr5g011330.1 (locus Med tr5g011330) derived from phytozome v7.0 (chr-ID MtChr5; po s 3053147 to 3053983)
caaaagtctacgttgagagtttgctgttaccttaatttgaatatcaggacttggatatagatgctctgctatgttatttgagttaggttcaatcctgacttttatgttagtttctgtttgtattatatattttgttttatgcttattttgattgctggcgacttcgagaatcattgttaattaatgaatgatgaaatttgcacatcgagaatttgctgtgttattttcttttgtttgttggtgacagttgtttgttcttcttaattgtgcattacgtttttacgctgttcaaaattacacgttgcattacatagtcctggtttgttaattcaacacggctcttttgcaaaagtgattgtttgctttcattcattcacagtggtgtgcttgttggaggttgaacctgtatgtagctgttaggttagatgatgtagtctaataatctatgctgattatttcaaacttacatatttatgactctatattaggtttcactataattttaaaccacagatttccaaaaccagtattttaattgtctgcaccaacacccaagagtgtagcagatatacatgctaagaatgagttcatacgtgtaataatgttaatttcgttgcttaatttccatgctaatccttaaactctttattctggacttggtgtccaggatttctggcattgggattctgtattgtgtattctgacattacatttaagcaatcaacagataatccctacaatgcactagaactaattatgcttgttacttttattatgactcccctattacttggtagatatgcattgaaattattttttgtcttgtagagttgcaag

SEQ ID NO: 34765 - DNA, 1021 bp, Medicago truncatula
  Intron number 2 from transcript Medtr5g097380.1 (locus Med tr5g097380) derived from phytozome v7.0 (chr-ID MtChr5; po s 38799297 to 38800317)
tgtctgtttcaggaagtacacaagaccaaacagttagtttcactgatgaattgttttcacttgtatataatgttttatttgtttttgctactttctatccactcccgtcaaaagcatgcacatacacaaacacacatgagctaggattgtgaattctatttttgaaataagcatcatgatcttatctttagaagccgatggctcactctggcatacttacatgattaaggtataggactagccatctatgtcatgcattagtgattgtgaagttggttgtgttgtaaattactggaccttttgggtttataaacatattagcagtaaaactgaaaggttattttgccttggttaaatggtaatcttaaggatcttctgaaagcaatgaacaatcactccctccggttttgaatatatgccacaaaaaatcatgttttgtagtctcaattataagcaagatttaacttactctatcatattcaatgttataattcctaaaataccctttaattaagtaaagttttatttttcaataatgaaacaatttccatgaggggtattttagataacacaattaaatcttttattacctttaaaaaattaatgaagttaactacttttcttaaagtgtgtaaggtagttttttttgcttttatatgaaaccaggtgcttatatatcatatcagcactatatcgttcagctgttaacttgttataggatacgtggcttcagttttttctttttaggggaaaaataattcttgtatgtgaaagcctatacgatgttactgctccttgtcttcctgcaataaatcagctgcatactgaattttgcacaaatgatagttgccaattattagaaggcgctgaatccatagatgcaattgcatgctttctcttggaagagataaagaactgttggctccaagggataaaccaaattgatttgtcagattctggattaatgccaggcaattacggtctaatgaagaagtgggtcaacataccacggacaagaata

SEQ ID NO: 34766 - DNA, 1011 bp, Medicago truncatula
  Intron number 3 from transcript Medtr5g100490.1 (locus Med tr5g100490) derived from phytozome v7.0 (chr-ID MtChr5; po s 40188563 to 40189573 reverse strand)
ctaacttttctgggaagagtatctatataaaacaggtgtttagttattattctttatattcctagaatatgtattctcttctctatggcatttgtatttattgtttcgaatagcaataatgttgaagaggcaggccatcttctttttaacctctatttgtaatgttcaaataatgtttcagaactattgtttttagtgttacgtgtatcaatgctggttgttgttattcatctgatctgacaactctaaaagctacatttgcaaacagtttatgaatcttggaacagaaaagtccattgcagtctgaaattactgatcctatataaatctcatagtatgatagataaaatcccagaagaattactggctcctatataccaatttaacaagtgataaatacaaattaaagaattttttactggtttgcaggtcacacatctctctgttttatcataagtgttatgtatttttacctatgattttgaaatattattacaccaattggacgcagtccttcggatcatttggtgaatatgctagctggatttgtccattgggcacgggacattttcgcatgcaataaagaagtttgagtagtaataagggcaattttatttggacaattacaattttattttggatttacaaatttaaaataactttatttacttggcctgtctatggtgctttgccaatgggtactcaaaggggtttaattctgatggtggataggcagagattggcaagcttgtctgttttggttgtcgattttgcttttttacttgttttcctttaataacacattctattctctgtttatgtacttcactctaacaatttttatgtcttgtagttgaacacagaatctattctccatgtattttttggatacttgatccttactatatgatgctatggtccttgcccctgattatctatggataaaaaacaataaccaagtgttttcctttgccaggtggctattattgttttcctggcccacattggtag

SEQ ID NO: 34767 - DNA, 409 bp, Medicago truncatula
  Intron number 2 from transcript Medtr4g144720.1 (locus Med tr4g144720) derived from phytozome v7.0 (chr-ID MtChr4; po s 36509741 to 36510149 reverse strand)
tgcttgttaaagaaagcctaaaattggggtgagtttctactttctacatgcagcttgacataacaatgcatgaactcaagagtacgcttggacatgaatatcttctcaaaacaaaaccattttttttcaaaagaagtaaaaataagaatcaacagctagtgcttttgaacagatgctgccagaaatagcaaccgactctttttgtttagaatgaacattttactacaagatctgagaattcttgcatataattttcttgaagataaaagatgacttgatattttgattcaagactgcctttttttggttcttagtctaaatgcaacattgttgcaaatttagtctattattcgaacattcaaagatttatatatttattaatgatgtttgtaggtcagtatttcccaaa

SEQ ID NO: 34768 - DNA, 661 bp, Medicago truncatula
  Intron number 1 from transcript Medtr4g144720.1 (locus Med tr4g144720) derived from phytozome v7.0 (chr-ID MtChr4; po s 36510195 to 36510855 reverse strand)
ttgaagccggagtactggtgaatctgaagtccaaggtttccttgtaccttttactattggcagaaaatccagtatatggatatcatgatcaatgtccccaacataatatcaaattggtttttgtgatgcgattttctcctcctaactcttctcaatcagtctcccaaaggctgcacagttttctatgccatccttgtcttaaagttaaagactatgatccttatactctcctttgccatattctttgtgaaccttatactctccttaagaatctgtgagctatcttatggctttctctcctagccttttaatacattattttatcctgtccaaccatcttactactaacatttgtgtgtttgctcccgagtgaagtaacaatcatgggtatcattaagggtcagtttggttaagttcagcttggcaggcgttgtagtcgatgagttgtagaattatgttattatatgtgcggataagtggaccatggaattatggactgtccaaacatctcaattactggaagaattaattcacagacatctgcagactaaactatagattttgaattcaaattgaatcacttaattcaaaaacttgaataagttccttatttttttgagtattgaagccaaaatttgcttgcagattgatctaacagact

SEQ ID NO: 34769 - DNA, 414 bp, Medicago truncatula; identical to SEQ ID NO: 28475
  Intron number 2 from transcript Medtr1g083480.1 (locus Med tr1g083480) derived from phytozome v7.0 (chr-ID MtChr1; po s 16426416 to 16426829)

SEQ ID NO: 34770 - DNA, 650 bp, Medicago truncatula; identical to SEQ ID NO: 28476
  Intron number 3 from transcript Medtr1g083480.1 (locus Med tr1g083480) derived from phytozome v7.0 (chr-ID MtChr1; po s 16426876 to 16427525)

SEQ ID NO: 34771 - DNA, 1040 bp, Medicago truncatula
  Intron number 1 from transcript Medtr3g061870.1 (locus Med tr3g061870) derived from phytozome v7.0 (chr-ID MtChr3; po s 14153707 to 14154746)
aggctactttagattctgttgattttcagaacaaggtatgtattgtatatctatgcccttttttaaacaatttattttattttatttcataacctataatttggaggacatgttgttttataacctttgtttcttccaagtatttgctttgtattatgataacaacacagctttaacacgctttaaaatccatgtatgtggtgaacctttgtgttattcaaacgcattaccctatacatgttaatctgttcttctagaaggatatcaatcaataaagagtgtaaaaaagtaggttataaaaataaaaataaaaagggttaaataagtttttcgtctcaataaatatagcgaattttgattttaatccctaaaaaattaaactgaatgttttcatcttcacaaaaaaatgattttatttttagtccttaatggtcattttaattttttgtgaatctcaaaattataacacttttatgttcaaattgtatcatattgtgtatcaaattgtatcatattatgttcggccttcatatattcatactatgtttaaaacatgtcaaagttatattcattagagaccaaaaataaaataaaaaaatatgtgaggatgaaaacatctcattttattttttagggactaaaatcaaaatttgatatatttatagggacgaataacttatttaaccctaaaaaaaattgaatagacacctcttcaaattttatagttctaaaaagaaaacaactttaatgatcctttagcatacggctataacaaaaagttcaattcttctatttgcatagtttaagaaaattgaatagaaacctcttcaaattttatagttctaaaaagaaaacaactttaatgatcctttagcatacggctatactaacaaaaagttcaattcttctatttgcatagtttaagaaaattatagagcaacttatagagcaattttactgatccgtttctacttgcatagtttatgttaagattcgatgaagtataatttatttttaattttaggcagttgaagtgacaa

SEQ ID NO: 34772 - DNA, 989 bp, Medicago truncatula
  Intron number 1 from transcript Medtr6g015180.1 (locus Med tr6g015180) derived from phytozome v7.0 (chr-ID MtChr6; po s 3746118 to 3747106)
actgcatttatcgcactccaatctctacctcccaggttagccttagctaatactctcgcactcttcgtaattctctttcaatttttgcgtgttgttgtttttcatgatcaaactcgttctttcgttaatcaaaacggtgatactgtctacgaacaattacgttgtctttatgtcgtgtttttattggctttgaaaattaggtttttttatattgaaacatgttcgaaaagtttttttttgtgggtgtatgttttttttgtttctgcaaattctgtttcttgcgttggtagttaaaaattgtatttttaagaattttatgttgttgattcctccttataactgttgttagaagatttaagaaaaacggtttagtttttgggttatttctgtgcaatagcataatagatattacaggaaagagtaatggagtcctatcagttatgcaacaaatcatttgtattaattgtttttgatcccattgaatatgattgtcttgaccttttagagagccttggatttctctgtattcatctatgttgtcaaccgcagcgctgtagtggaatagcttagcgatggtagggtttggcatgatgcttttggctcgcgagccacggtgaacaatagtggttgtagtggccgctaattgcggccccaaatcactatcaagtccgctattagggttttggggcgaaattcttctaattttttgtttagccctattaagagtataaatgtcaattcaaactcttttaagggtattgttctgtttttcattctgttatggtcttgttgacaaacaaccgacatgtttctgtatttatgttatcttactagcaaaatagtgaaggctgatagctatcatattgttttcatactatttcttctattgcatggctaccaggtctgaagctttagttttttcatcacttaatctcttttttttattggttgtagattttgttttaagtggtaacatcaagtctcaaaaa

SEQ ID NO: 34773 - DNA, 523 bp, Medicago truncatula
  Intron number 1 from transcript Medtr3g094780.1 (locus Med tr3g094780) derived from phytozome v7.0 (chr-ID MtChr3; po s 22803834 to 22804356)
ctccaggtaccattcacactttctatgctcccttgaaagaaaaagaaaaaacttcatagtttacatgagagcgttattttaggttaatttttattatttttctgacttaattgtacttttgttcttattttatcatgttcacgaaaatagtccacattttaaaatcgaagtgtttgtcttcaaatatcaaacttgttgaagttttggttgcaacctagatttctgcttcaatggtggtgtggctagtttaaaatttcaactatttgtaatttatttttgttatgtcaccatgtttaatgtaatatcatttaaaaattggtcacaccacatttgaaacaaatatcttcgtttagaccaaaattcaagtttgaaaaagatgattatttttgtgaacatgataaaatagaaagatcaaaaatgcaatttacttattatagggtttcgagattttacggttttgtgtgtaaaaggttactgacttattgtacaatcctataggaacttcctattcaacaaagagctg

SEQ ID NO: 34774 - DNA, 517 bp, Medicago truncatula
  Intron number 1 from transcript Medtr5g072840.1 (locus Med tr5g072840) derived from phytozome v7.0 (chr-ID MtChr5; po s 26016013 to 26016529 reverse strand)
ctcactttcccaacgttcaccttcctcttttttatgtgcggctggctttcttatatataggaatgtaacctagttcctttttttctccacaagcaagtcacgcttttcttttatttgattttctcaagcccgatcttttatatgaatattaaaaccattgcttttggcacttcttgttttgctcttgtttgatcacataacaaataattatgataataacccataaattccaatatttccttgcttgacttaatagaccaaaaaacattactttatttaaattgactctaaattaaatactaaactaataaaaatagattgaaaatttatttaaaaagactttaaaaatgtgatatgacggactgtcatcacattgcaattattaatttatgttccctcatgcatgttagaatgtaaattaggccttgatgtaaataatttatttactttttcttgtcatttattttttttgcagaccttagaatgtaaataggtttttttgtaatagtttaggtgc

SEQ ID NO: 34775 - DNA, 633 bp, Medicago truncatula
  Intron number 2 from transcript Medtr5g026900.1 (locus Med tr5g026900) derived from phytozome v7.0 (chr-ID MtChr5; po s 10907592 to 10908224 reverse strand)
ttgacaccggtaagcgataatttcgagcttgagttcactctgtcaccttcctacaataaggggttgtgtggtcaggaccgacataagcttcaagagaaacaagccgtcacttactttagtctttaggttcctcaacctacccaactcagctatctgcctagcccatagcctcgactttattttgatcctgacaaaaatattatgtatgatgcctcctcatatatttgttcattgttagatctcacctatcttaaagcctcactttgccttttggctgcccgaggaattcttttctctctaaaagtcaaccctccttttgttctataggcctatctgtattaatttatgtgagcttatctactaatgacataactataagcacttgtgagattgttaagagtttatggaatcaacttacaacatgtctatataagttgtttttcgcatatttccataagctccatgatagtttataaaatagtttgactttattttatcgtttgttatagaaatgggttatccataacacttgcatgataagaatttatgctataggcgcttaattaagttgtttatccaaagatggcttatgattgttcatgtatctgtgtatgatttacagcacgtcctgga

SEQ ID NO: 34776 - DNA, 783 bp, Medicago truncatula
  Intron number 1 from transcript Medtr5g026900.1 (locus Med tr5g026900) derived from phytozome v7.0 (chr-ID MtChr5; po s 10908318 to 10909100 reverse strand)
ggtttgcaggtttatctccttaatccatattatgtttcaatttcaacctctgtttttctttaattacgctctctatagtcacttgtatcatatcaagcaatttaatttagctcagattattttctgttagcaattacatcttatctcgactgtatttctttctgtgatgctttctcagatctgtgacactgtttattactgggatttaatttttggtgtaaaactaatttacacatgcattcaatcaatttattattttaaattgttatcagagtcagtgttgtgtatcaggtgtctgtgttagtgcggttaagattggtggatgttttgttggaaatttgaattatgagtcccaaattcaatacttcacacgttgttttcttagattagacggttttgtctttgttttgaattaagaaaaagtaacagtctgctgtaatttcactatgcatttggttgttcttttgagggttattgattgtaggaagaatcacatgctttcagattggtaatatgtaaaggggaattttatttggttatattatcaaagaaccctgttgttcaaatgagtgcttggttaatcttatgcaggactgttaaattttatctttgtagtgaatatggaagtttgtatcaaaactttctgcgtgtttatgttctcaatttgaacttgttatatatactcagctagatgcttgattttgtgcttatgagtaaaagtaaatggtacttcaagcatcacacgtttgttggttaatgtgatgcaggaggattttgagcagc

SEQ ID NO: 34777 - DNA, 640 bp, Medicago truncatula
  Intron number 1 from transcript Medtr4g029270.1 (locus Med tr4g029270) derived from phytozome v7.0 (chr-ID MtChr4; po s 6940920 to 6941559 reverse strand)
cttctgggtcacgcaaaagaaaggtttgtttgtaatgtagtttacattttttcaataatgtgttttgtgtttttagttcgaaatgtttcatttttttttcaatcaatttggtttattttggtacaatgaggcaggtagtttggttggtgaacccttgaaaattacataaattactagaaatgttttagttttagtgaaatttgtgttgtgagctgaattaattttgagtctactctgtaatttcggtacaaggaggtagtttggttctatgaagcacggacacctctaggactaggtgtgttgctgtgtccaatatgcgtcagtgtcctacactcctatgacacgtgtcaaacaagtttcctaaatataattgtttttcctttacttcggcactcattggaccagtgtctgacacctatataacactcacggacaactctggtcggtgaacatgatgaagtttcaaactctgacaactttggtagttactagcttactaacatttgcatgtgaaaagaaaaaaaagttgtttttgatctggtgtaaaccaaattgatgtatattcaatcaaagtatgtatacaagaagttctccggtgattatagagtagactcaatagcagagccggtggaaaagtggt

SEQ ID NO: 34778 - DNA, 652 bp, Medicago truncatula
  Intron number 4 from transcript Medtr2g118190.1 (locus Med tr2g118190) derived from phytozome v7.0 (chr-ID MtChr2; po s 28000586 to 28001237 reverse strand)
ctgatattcatcctcctaaggtctaaatctatatgctatttatattgacttcgcgcatggtgaaagaaattaagcactaaccttttggcttatgtctttaatgtgattataaagttaagttatttcttggacagtttaattgtgtttggttaaaatgatacataattatcggtgaatgatatgagatagaatgaaaggaattaaccataccattgttttggtgatttatgaaatattgaaggtaattttcgttgtttagtaaatgatatgatggttccattccatctcatatccctaattggggaagagaaatagaggttcaaacaatgacaaccaatgtctgtttattccattctgttccatcaatccaaacatagctttagtcatttatcaaccaatacatgcgttacaaattctcaccaaactaatatttctcttctgtgcaatctcttatcagtcattaatagttagaaacctttaataataaactaaatttatattagctattagctattgactatcgggccaatattttattttgatttcaataacagtgtgaaccttaatgtgcataactttactgtcataataaactaaattcttatgcatataattaggacagaagatttgctgtcctggcatcttctctttt

SEQ ID NO: 34779 - DNA, 654 bp, Medicago truncatula
  Intron number 2 from transcript Medtr5g015470.1 (locus Med tr5g015470) derived from phytozome v7.0 (chr-ID MtChr5; po s 5146533 to 5147186)
tgcaaattgacaacattctcaaagataaaggtttgtttggatcagcttattcaaacttatgtactgacataaacacttaatactgtttgggagagcttatgaaattggaatcgattttttttttatttttttttggaaacaattgaaaacaactttatgacatgtccataagcttttttcagcttattttcattagctcttcatgatagcctatgaaaacaacttatactccatccgtccctaaatataaacacctttggcgtatttgacgcttattaagaaaagttgatgatgtagttaatgtatcaattttgacatttcatattctaaggcacgtagtggtattaattacggtttatttggaaaagaagcaataaatgcatctagtaacttgaaaatggcttatagttggggacaattttttttgtcaaacaagtgattatatttagggacagagctagtataaaatagttgactttattttatcttttgttacaaaaatagcatatacataaacacgtgcacaataagcgcttaattaagctgtttatccacctatgctgaaaaatgagggcttttcaatcgtaacatggcgttacttgcaaaacctcatcattgaccatgttgctgcgtttacagggagcaagcctaagt

SEQ ID NO: 34780 - DNA, 723 bp, Medicago truncatula
  Intron number 1 from transcript CU633465_3.1 (locus CU6334 65_3) derived from phytozome v7.0 (chr-ID CU633465; pos 12 588 to 13310)
ggtcaataagtaaatataaatatcctctatatactcgtaatcatagaaaatttatatataatatcacctaggggaaaaaaaaggtcaaattttgaccaaaaaaaaaggtcaaatattgaatagaatgggaccacttttttttaattttacagagaaaacaaatctaccgttttttttacaacaaaaatatcgacgcatagcagtattatatagttttttttttttttttttacaagagcagtattatatagttgtttgtgttgctttggtgttatataaataaaatcttattaaagaaaagggaagtaaaataatacagaatatacaaattagttacttattatttattccctccgtcctaagttcgagtatgctccatttacatcttgctctatctaattcatttagggtcttggatgagaggcatgtcgtaaaaaatattcaaggactgagatttaaaaataaataaaacaaaattttccatgttccgaattgaaacaattgatttatgttttttttttttttttaagttaagtttcttttcttttgttggaaaaacaatcaaacaaaatagggaaggagacgatgataagggagggagaagaagagtcttatgggggaagctgaaatgagggaacgtttatgactattaatcttttttaattaaaaaaatacatgttttatttatttttaaatctcagcccttgaatatttttttgccag

SEQ ID NO: 34781 - DNA, 697 bp, Medicago truncatula
  Intron number 1 from transcript Medtr3g123800.1 (locus Med tr3g123800) derived from phytozome v7.0 (chr-ID MtChr3; po s 31237629 to 31238325 reverse strand)
cttgactcctcactctgcctctgcctctgcctctggtatctattcctttccttttcattccctattttctaaattcttactatcttcatatgcattattaccatcttctacttcaaattcttttgctaggcttattcaattcccctattcaatatccaagttttattatgttaatgttttctcctgctcttttaagtgtatgtttgtatgtgaggtaggtttcccaaccatcatttttgttcaaccttcaaactatagcttttaccaaacttgttgtggctcactatgattcccgacaatatcaccgtgaattcaaacatgccctagtttattttcttggtgagaaattctccaaacgcacagcgcaactactcaatagataggatttttagctttagtaagtcactgagtatattgcattgggagacaagaaacatcagtgaaatgcgtgttaaaaaaggctaactccttcaacttcttatatccttagttcaaaccggttgagttacccaatcctaagatgatgttattgttataggagtgataaggtggtttatggaaggaacttagattggagacataaggtattgaggattatcattaacactaatatttctaataactaattactaacatttaccatttaaaaaaaataattacactgttgttatgatttttgacttgtcatgaagatttt

SEQ ID NO: 34782 - DNA, 849 bp, Medicago truncatula
  Intron number 1 from transcript Medtr2g026410.1 (locus Med tr2g026410) derived from phytozome v7.0 (chr-ID MtChr2; po s 7209399 to 7210247)
ggttttatttgttgtcttgcctctttttctatgctctgcatgttttcattgcggaatcaatctaacaatattgcttctgtcacatctttggttagtatatttcaaagtagtagagaacacttcaaaatttgtgcatttgacagtaagtacaatactataatgttgtttccttgagaagtagcttgagaatacataaagcacggatgaagtagaatatggatcgagtaagtagcttgtaggcagaatatggatttttttatttaaaccctcttgtttaaactagtgagctactaaaacattaacttgtttaaacttttgtgtttaaatgcttcgtattcaattgttcctgtgcaataaacacttcttgttcaaagtttgctgcatatcaacatttttgttatggtttttttatctgttgtagactagttaccatagtttttacttttaatcttttggatatgttttttttccaatttgtgggttaagtacactttgtaattctctcgttatgtatgaaattttgatgtcaaaaacaaataaataaaccaagttttgaaacttcagcactaacaaataaatcgtcatactacttcagtccttcacggacaatgacctaaagattaaaaacagatgcacattaaaacagaatataaagataggagaaaaagaataactatgtgacgttattacatatcgaatctctaaaaactgaaatataaaatctgcagttagaaacagcagataaagatgacttacatgcttcttcacgagatttccaaacaataaagatgactcacatgcttcttcacacaagattttcatacccaagaatacagaatcctctttagt

SEQ ID NO: 34783 - DNA, 755 bp, Medicago truncatula
  Intron number 2 from transcript Medtr5g074540.1 (locus Med tr5g074540) derived from phytozome v7.0 (chr-ID MtChr5; po s 26929475 to 26930229 reverse strand)
gacaggaccgccagtgccggtgtcgaaatcttcgcctcccaatcaaatggcatgactaaaacgtgtaacaatcagtcaggaaacagaacttagagaatggcatagagcagtagcgaaacaatggtgcaagatcgctcactagccttttagattttatcaaataatattctcgtaacaatatagtgtactttctctcaccaaaatcaagaagaaaattgcaacacgttatggcttaattagggagagcaatgatgcacataggacaaaataaggcatacaatcaattgtgtattgaatgggatgaatcgatgaagcaagaggaggactaagtgattcatgttgtagctatggaaattgggtgaaatggtgcttatgttaaaccctagtagagcgcttcaatatgtgaatttaattgttttcatttgatcatatccattttcaataattaaaaaaagtaattgtttgtttaaagaaactcaaaatctcttaagggaaaactataaagaaattaatcgctatgtatttatcactaagatctatctcaattgaaaatactgatattagattgaacttctttattcggttcgaattcaaaatctcatggttgtatgtttgattttcaattttattttatcacttcgcctacaaattcaaaaatatctatatttcttcattggtgacaactaggctacccatgaaagaatgatgagtaatttaccccaaccaatacacattagccacataagcacatattc

SEQ ID NO: 34784 - DNA, 848 bp, Medicago truncatula
  Intron number 1 from transcript Medtr2g077480.1 (locus Med tr2g077480) derived from phytozome v7.0 (chr-ID MtChr2; po s 17862630 to 17863477 reverse strand)
gcgctaaagtcatcctttccagtcacctggtataacatctgtctctatccgatccgtttcgcgtgtttttggttttagattgtgttaatttgctgtaataatatataaaagcttatttatttgcataagctgtcttgcataatctcaacaagccaatccaaatgggtcctaagtgtgataacacggctactcttttaagtatttatatttcttattcttttattattctttttttaaaggaaatatataagacagaagtatcggtgtcagagtataacttagctgtatcggagtataagttagccatatccgacacgtatcggtatcggatacgtgtcagacacgattcttcaccatttttggagtatcggggctcacaggtgactagtgagtggttgtagtagcctgaagtttgttcaatatgagtattgttagtggtaagttacttgttcccatgatccactgatatttgatatttgatgtttgttcaaaaagaataataatagtaaccgtgaaaacaatgtcatatatgtaattgtggattttaattgactgattttgatcctggttgtggtgaaatgtatttttgtttgttttactttgctgtgatttatttatctagtatttgaatgagattcgtaaaacatatcaatctgaaggaatattatgtggctatggggttgccattttagttttgtatgttttgatttactgatgaagagtttaagaaactatgagtgttagagaagtgtgatatagtgactatttagtgatggtggtaacttgatgttttttcttgaatcttgttttcagggacgtccaaagggtgtaacacctaagtacagttt

SEQ ID NO: 34785 - DNA, 852 bp, Medicago truncatula
  Intron number 1 from transcript Medtr3g147930.1 (locus Med tr3g147930) derived from phytozome v7.0 (chr-ID MtChr3; po s 38429037 to 38429888 reverse strand)
aagaattgtccaggatcaggcttgcatcaaatcgtgtcgcgagactccaaagggaatgcaactagaatagcctcatcatgactcccctcacgagattaatgctcgtgtcgcaggctcaacttttctccaaaatcttggaaaacgcacaagtatatatataacccctaggttaaagaagacgaaggcagacacatgatttatgaatgatttgtgcgattaaagctatttgggaaccaaggaatcatcaaccaatgattctttacacatgctttcttattcatattcattaatacatgtttaggaacaatgggtagctaattctttctaggttagataatgaaagatgaacttctcttgtaattgtttgatcatgtaattgtaaataattatatgaatttcagttgattatttttgctattttattcaattatacatgtgtttaatactttttgtgggtttacgaatgtccatgaattgatccaatttgaataaatactaaccctagctttgatagttgaactagtataattgttcaattgtttcttattatagacatattttaaggatattgtgtacaaaatttatcgttcttaaaccttcaaaagttatgggttcacttaagacattatggagtagtaacatttgaagagagttggtgacaaagacattaatatagttattttgatcaaatgtcttaaaatcaagtattcaattcacactaggttcatagtttgtagttatccaaacaattcagaaaagggactaatcatcgtcgcgttaatttagttattgttgcattcacaaaactgaatttaaagtttgtaagacatatttcttctaatcataggttgg

SEQ ID NO: 34786 - DNA, 430 bp, Medicago truncatula
  Intron number 1 from transcript AC235675_3.1 (locus AC2356 75_3) derived from phytozome v7.0 (chr-ID AC235675; pos 85 84 to 9013 reverse strand)
ttttcacattggatcgcatcattgctgctttcatagtgagtcatcatcgcacacacacttcttgcactttgctgcataacattgttaaaaacgtgtgtttgattttcttgtcgttgttgtttttgttatttatactatattcgtatacccttttacttgcttactcaaaaatttgcttttttaagtaatggggtttcagatttctgattacccttttcattggatatgcttttcttttgcttcttttacttctcttttgattttcctttgataccaagtggggtataactccaaaattaaatctttattgtttaatctctattgggtctgttttgttttgttttgttactttataatgttatatatgttgtgttcttacctttgatgttttttattctgaaggtgatacaagaggtggaaaattttcaac

SEQ ID NO: 34787 - DNA, 937 bp, Medicago truncatula
  Intron number 2 from transcript Medtr7g062140.1 (locus Med tr7g062140) derived from phytozome v7.0 (chr-ID MtChr7; po s 12664987 to 12665923 reverse strand)
gattttcactttccttcttctccacccactcccaggtatgtatcatcactgcttatttattcttcttgtttcaatgaagattcttcttgggtgaaattccgagttataaaataggggggcaaaattccgtttgagtcaaaataggagggcaaaactgcacttaagcctctattatatttgtaattgttggtaaatttgtgcaatattttaaggttttttggcactggcttttatattctttgtttggataaacttctgatgctgaacaagcacttatgaaaaaaaatatagtaattattaatagaatcttactataattaacaattttttaactaaaatttcttgtagttgtagtataacttgaaattagcttttgcttctgaacaagcacttatggacttttcctcaacttatggcttgcttggttatgcggcacatcaaggaaaatcacgttaaaaaatcacatcaaagcaaaagctcatatttgtagcttcataatttccaagttgaaattgcattaggaacctatttttattgcgaagctcccttaagcaacaagctagtctaaacttggccttagtatatatatgtttggaaccatgttgatgttggttttcctatcaaatacacgaaaatcaggcgcttcaatttgtagcttcaggattttgctgtggaaacgcatcgaaagcgtgagtctgtggatagcaaatgggaaacgtaagagaaacttagtgttgatataatgcagagcatttagacttttaagagaaattatgtgaaacttgttttgtaggttcagtgcttttaaggttctagagttgaagttgaatcctttatttcttgatcctattgttgacaatagcattccaacagtgacttgatgatgatttataatgtttcagggatagtcgaggtttgcaggataaagacaatagtg

SEQ ID NO: 34788 - DNA, 702 bp, Medicago truncatula
  Intron number 5 from transcript Medtr3g102600.1 (locus Med tr3g102600) derived from phytozome v7.0 (chr-ID MtChr3; po s 25034758 to 25035459 reverse strand)
gataaaaagtttgatactcaatatcagcgccaaatgtaagactccattgtcttgtcctgctcctttatcttttcttttcaaggcaacatgattccttcattctacaacttatttatcttgtcaggcttaaaagtaagcattgactatgaattacaggctcctataaaattgtctacattcttaatgtgctttatgagaggttcaaataatgggtttttttgcatgacagtgattttgttgttgcaccactacctgtagagatccattaagcatttttttaccatttgtttgagcgaggcaggggcattatatgtttcacaattctctcaataaatattggtgaaaggatacatgactgatctgtttatactttataggaggaagactggaagacaattcattatgatgcacattaatttaaagtcgaggaatctaattttattttataaattcacttgtatgaatattgggcttcactgtgtgatttgatgttgattctatattctatttctcctgttgataactaatattttacatatgcagcatattttctactaaacctgctcttatatcacccaaaatactatttctcttgttagatatttgctgtgtttgaactagttgaaaacaaagaaactaattattgacatctccaaactttttgtagtgcagaagcacttgataatcagttgacagctgttc

SEQ ID NO: 34789 - DNA, 274 bp, Medicago truncatula
  Intron number 1 from transcript Medtr3g076170.2 (locus Med tr3g076170) derived from phytozome v7.0 (chr-ID MtChr3; po s 17557785 to 17558058 reverse strand)
ggttggtaccaaactcatctttaattttttgcctggtaagtataccttctctctctaggtcacggccctcgctgggattttgattgcatcgcctgttttttaaatgccctaaaacatcgttgtaaaataatcattaatgtcatttatgttaatagcgatttacttctttcgaatttttcttttgaaaagaatataatataaatattttaattaatcaaattattatatcttaggtatagccccagtaaattatcaaagggaggtgatcactgag

SEQ ID NO: 34790 - DNA, 746 bp, Medicago truncatula
  Intron number 1 from transcript Medtr3g030950.1 (locus Med tr3g030950) derived from phytozome v7.0 (chr-ID MtChr3; po s 8561009 to 8561754 reverse strand)
agcaagcaccacgaatctgaagcaaacattgaaaggtttgaacttgcttctccatctcttatatgatttgattttgttttaatcttctgctattgaatgcattgtttgttcatgttaaaaaattaggttttgtcctttgattaggttgttcattctatgctattgagaaaatagaagttaaatatgtccaacttcttcatgaatgtggccaattgtttgcttgcttataaggttgtacaattctttcataaaaaaaaaggttggacaattgttagtacatttcaaaattcaaagaagtaagcttctatgagtagtctaggtttgaatgtgtgttgcagatttttctttaattggtttatcttattgtcatatgtccttcaatatatagtagcaaactaaaagaagaatgtattgcaacacttttgaaagaagcatttaggtagtttatcaaaatggcattgttttcacttattataaatgtttttggattaatatatagatttaataaaagatatgaatttactaatcattcagtaaattaatatttatttgtgtaaaatatgaaaatattattctctatcttcgtatattcatactccacttgagtgtatgtaaccaaaaaaaaaatactccacttgagtgttcccgctctttatgttaacagtctatattccgacgactattattactgctgctttttgttgatataacctttgagtaaatttctatttttgatgtacttgcag

SEQ ID NO: 34791 - DNA, 466 bp, Medicago truncatula
  Intron number 2 from transcript Medtr2g030420.1 (locus Med tr2g030420) derived from phytozome v7.0 (chr-ID MtChr2; po s 8462238 to 8462703 reverse strand)
ctacattatccggttgttgagaagtttaagacttagtaagtttgcattatgatttcacaatatagtgttagagtaaattattatttcacaatctaatttgatttttttttaccatgtttcttgaattgttgtcgcgacgaccttaacacttctcaagcttagagtcaaagtatcagtcagaacttaagtcagagttcaacttcttctcaatgtacttcatacaaccattttttcaatctgtctcaagttaggccaattgttgaatttataaacttagtcaagatctgcttttttttttttatgcacaaatatgctttgaattttttacgcacaaattaaaattacatattgcattattctttatttcatgtgcatatttgtgttaggatacatattgcatcactatttggaaaacaactaaattcaatcttaaccagtttggataatattacgagagtttcaccaa

SEQ ID NO: 34792 - DNA, 758 bp, Medicago truncatula; identical to SEQ ID NO: 27904
  Intron number 1 from transcript Medtr3g166930.1 (locus Med tr3g166930) derived from phytozome v7.0 (chr-ID MtChr3; po s 43797112 to 43797869)

SEQ ID NO: 34793 - DNA, 430 bp, Medicago truncatula
  Intron number 1 from transcript Medtr1g116820.1 (locus Med tr1g116820) derived from phytozome v7.0 (chr-ID MtChr1; po s 24784211 to 24784640)
atttgtaacaatagcaaagaggaacaaatcaaaaggttagttccatgtatcatttcatcgtaatttgcatttaaattatagtatttgatatcatattttttctttagcgataggatttttttgggtgacatattttgttgcttagaaattctcgacaacccttaaataagaggtcatagtaaatggttgctcaaaagtaagcattgcatgaagattgtggagggtcatttatttggtgaaatttttggcaattgattatgaagattaatcaatttatatggacaaacaaaaaagaaatctcgccaaagtactgtatgagatattccgaaagtgtgattactattttttatatttattgtttttgctgtgtttttttcgtcttctgttaaccaaagagcgacattgttggccgccggaggcaagcacaata

SEQ ID NO: 34794 - DNA, 563 bp, Medicago truncatula; identical to SEQ ID NO: 29786
  Intron number 3 from transcript Medtr3g142780.1 (locus Med tr3g142780) derived from phytozome v7.0 (chr-ID MtChr3; po s 36669235 to 36669797)

SEQ ID NO: 34795 - DNA, 850 bp, Medicago truncatula
  Intron number 2 from transcript Medtr3g110230.1 (locus Med tr3g110230) derived from phytozome v7.0 (chr-ID MtChr3; po s 27741455 to 27742304 reverse strand)
aacaagtgcagatctaaggtactggttaaatttgtctgtatagtttaaaagtatttttggcatggatttcctgtactaatataatgtaatgtgcatgtctttgtttcattccttgttgcaatcatagtaccaataataccttctaaggcttattttctataagaagcaaggaattgattctagatatattataccaaatacacttattgaccatctaattaatttgacacttcttaaaatggctatgttatgatctacaaaagctgccatttaggtttaaaatctcagcaatacagacattttttaatcaaatttctaaaacattacttaggaaggttggtttgtttgtaatttttcatccgtattgttgtggaataggaagcctggataattagggaagcaataaagggaaaatctgaacttataaagagaagatattttgtagaaaagagagaaagttttgcaggagaaagattggttcccttgttcctgcaatcatatgtctttgaccagactttcacttcactcctgataaatttgaaattgatttccctgactttacctgaattagtcatctatggaactagatatgatttctttagtattgttgaatatctttaacttcctagagttagatacttattgcatatacaattcttttgacttaagatttagtttagacgtaatgcctagaatatgattgtatttgtccacctatataatggtcatcttctgagtcgactctcaagcaattaaggcgcaatcagttttccatgttattttcaaatttcaattgatctcatatcatttttccctttaccccatgttctctttgaattttcagaaaatc

SEQ ID NO: 34796 - DNA, 373 bp, Medicago truncatula
  Intron number 1 from transcript Medtr3g110230.1 (locus Med tr3g110230) derived from phytozome v7.0 (chr-ID MtChr3; po s 27742385 to 27742757 reverse strand)
agtcatagtaacgttttacgagagagtggggaagaagaagctaaagggaacaaagtcagaaaaccattggaaaaaacaaaaagaaagagaaagccacgtgaccttttgagtgtgtttttaatctcagccatttaactaatccaatggtcaatgtttaatcctctcaccctctcatttaaaaaatcatctcatttgaaatgccctatatatatatatatattaatcaaggaactccatctttcacttgtaataatactgacctctttgtgtgatttaaggttgtttacgtagcgtaataaatgtctacctgcaaataagctgtcctagttcctaaacacttcctgcatgtttttataatttgcagagcaacctt

SEQ ID NO: 34797 - DNA, 547 bp, Medicago truncatula; identical to SEQ ID NO: 30180
  Intron number 1 from transcript Medtr4g032630.1 (locus Med tr4g032630) derived from phytozome v7.0 (chr-ID MtChr4; po s 7921173 to 7921719 reverse strand)

SEQ ID NO: 34798 - DNA, 935 bp, Medicago truncatula
  Intron number 1 from transcript AC235753_17.1 (locus AC235 753_17) derived from phytozome v7.0 (chr-ID AC235753; pos 102175 to 103109 reverse strand)
gttgccaatctattatcctctcaaaaatccaactggtaagtgttttcttgaaacgtaatcaatgatgcaatgtggcaatgtttttgtttgattttcgtttttttttttttgtaatctccaaatgttaattagaattgggtatgtaggtttacacacattgcaattaagttaagttaatgtttacattcattttatgactgttctatagttcaaaaaaaatagagattaggatttgtgatacgttgaagtgttgaagtagtgattgggaaggatactaggtcaagttccattctagttataatatttattgtattgaccgtttggataaacaacttaattgagtgcataagcgcttatcatataagtgctgatatatatagtataagctatttctgtagcaaatgataaaataaagtcaaactgttttttatattagctataaactattttcataagctattctggagaacttatgtaaataagctgaaagtagcttatggatatgtcataaactgttttcataagcttttccaaacagttttggaaatgcttatggcagtagtagtgagctcaaataagtcattccaaacagagtctaagttcaagttccctctagtatctcttatattgactgaatagtaccttggttaatagtagttgttgaccacaaacctcaagtagcagtgagttgcactgaaagctctcgctgagagaactttaatttcagttcaagatgatatataaatactacatatgaggtagacaaaaaaaaattgggtcatgaaggatagttgcctgtatactaagggaaattaattccatgcagtcacaaaaacacaccgtcatttgtcgaaactgtgagatgaagatcaagcagttgacattttgagttattgttttgaatctaatttgagaagtcgccgtatcttcttccg

SEQ ID NO: 34799 - DNA, 508 bp, Medicago truncatula
  Intron number 1 from transcript CU013523_16.1 (locus CU013 523_16) derived from phytozome v7.0 (chr-ID CU013523; pos 58848 to 59355 reverse strand)
ctcagcccttaagagcaccaactgctcttccagatgtcctgagttaaattcctagcaacaacatggtggcttataaccatctgtaatgagatttgatgccctcttctggtgtgtctgaagagagcaatggtgtacccatatacataaaataaataaataaatctttacaaaaccaaaccaaaacaacagcaacataaaacaaagtggtaaaaaatggtcctggtctacctgtagaatgaaaattgatccatatttatttatttatttatttatttatttatttatttatttggggggttttttgagacagggtttctctgtgtagccttggatgtcctggaacacactttgtttatcaggcaaacgtggaactcagaaatctgcctacccctgcctcccaagtgctgtgattaaaggcatgtgtcaccacgccccagctctgattgatatttataactctgcacaaaatttaaattcaagtggatcaaggacctgaacataaaacagg

SEQ ID NO: 34800 - DNA, 917 bp, Medicago truncatula
  Intron number 1 from transcript Medtr5g044160.1 (locus Med tr5g044160) derived from phytozome v7.0 (chr-ID MtChr5; po s 18296869 to 18297785 reverse strand)
gggtggatttggttgtgattgtaagcaagtccaaggtatgaggacgggtttgtggcgatggatggggttgaaatggtgattgtgttggtagttggtggaggatggtagggataaggtgtttaatactagataatcaccacctaagcacatgtttttcttttacagtgttttagtaaaaaaaatcaaaattaagttatataatggataagtaatgatgccatgggaaacaaattaagtgaaggtaaacttggaagaaaaaaatgaagaaatatcaaatttaacatattttatgattaaatattttggacagataaattaaaagaagccatgtttttagtgtccaaaatcattcctattgtagggagttgttcctattttaatgtaatctacctcttttattacgtaataatttaaataatattataaaaagaatataatagtaaataaaatattttaaatgaagggtaaaaatggaagaaaaaatcaaacccaaagtgatgtatccttttaatatatttgtatgggatatattatatatcaaaagaggaataactaccaaataaaaccaataagaattgcctgaccaaaaaaaaaaaacaataagaattatgtctatacaaaatattatcttaaaatagtccattttttagcagattcgcaggacatgttcttgtatgcattctagccctctaaaatgcttgtaaccaaccagatatcatctacacaaaaagataatgtggaatgtactagaaaagtggagtgaactaatatttatcatgtgtatctttgatattatcgttcacttatcacttcacattgttcacttcaccttttagatatatgcataataaacgttgtaaatctatgaaatatcgaaataagagaaacaatacatacccatacatatacctctcttc

SEQ ID NO: 34801 - DNA, 668 bp, Medicago truncatula
  Intron number 2 from transcript Medtr5g097890.1 (locus Med tr5g097890) derived from phytozome v7.0 (chr-ID MtChr5; po s 39009224 to 39009891)
aaagagctcgctttagtttttcaggtataaatactataattccttaagcatcattttcttgtactttctcctttatttttattgctcatattttgtgtagaagagaggaaatctgacaagtttaggatccatcttgtgaaatggaccgtaaaatgtaaatcctaagcttgaataatagaaaggtactgcagctgctctgtagtcgggagacctaggcattttggctgaattctgtgatcaaatcttgtttgttctctgtttgcgtttttcgtatctgtttgcttttgatctagggttgttgctctaacaaaagacctacaaaactacgtaaagcattcactatttgagtagttccaaagcttagcttagactaataagcaacagcagattggcattttatttatacattttgagtagttcatcacctcattttatttatacatttttcagtcagcaattcccctcattcacacagcttgacaatccaaatatgttttcctgtgttttggtgtatctatcaagacttgatactataattttcaaaagaaatctctttcttttcctttgtgctacatggaataggccagaagaaaaagaaaaacttgagtcttttttgaactaatctaatgtaaatatctctttactgatgcagaggtgtctcctaaatt

SEQ ID NO: 34802 - DNA, 563 bp, Medicago truncatula
  Intron number 2 from transcript Medtr3g124610.1 (locus Med tr3g124610) derived from phytozome v7.0 (chr-ID MtChr3; po s 31642610 to 31643172 reverse strand)
aaggtgagcagcttattactataatttcatcactggaccacactttctttggttttactcttcttatagtagtttagatcttttcattgctgagaagcaagaaagctttcaacttaatggtttaaaacccgatggcttaagttggcaagtcaaggttcataaatatttctttggttttactccctccgaggtctgaacttgaaggacaaatcaagcaaaggtcttataatctatgctgaaattcatgcatataataagaatgagggcgtcaagaatccacatcttgaccatattggtcattcattttttcttttttatttttttttcatattgttaatgatggcacttggaacttgtaagttgtaacctcctgaaaacctaaaaccctcacaattagtccacttctagcgacttgatgaacaaggcattcaaggctttttgataccatgtcaataatatttccaatatagtggtcaatgatgttaggcaaaaactcagaatttgattttatttctgatattaagatatatttgtcaattttcaggcacttcttcaagtgaaag

SEQ ID NO: 34803 - DNA, 718 bp, Medicago truncatula
  Intron number 1 from transcript Medtr3g124610.1 (locus Med tr3g124610) derived from phytozome v7.0 (chr-ID MtChr3; po s 31643897 to 31644614 reverse strand)
ttctttgtctagattcttccattcagagatcaaaggtacaattctatttttcattgtttttctttcaatatgtgtttctttaagttgatcatttgattttgattactttaatttgatttattttcactgattattagtgaatagagaaaaatggtagcttaattcaatggtgttgtttgtgaaacttgtaatttgaaataagcaattgatagtagaagatatcaaatcaataaattattgagtaagcaatcgataatttgaatttgaaagtaagctatggattatagattaattatttttcctttctaatttggtctagtgtttgcatgtgcattgtttaggtgctaccagttactatatatagaaggaaacactgaaatgaatattgttataaaaatactagataactatgaatttaaaatgtaaatttcttatttggttagggagattgttgatctctcctacaaaattgtatgtgataggggtttgaacattgaagaatcttactgatgcatgaatggtatttgtgcctagctagtaaagtaatatattaacttgttctccatatattattgttttggtattaatatttgaagctaaattgaatgattaatcaagggattgaatggcaatagttatgtacttgagttatttggtaattgaatggcattgtgctgttgcaggaacttggcattgagaaactgtcatttgaatttct

SEQ ID NO: 34804 - DNA, 586 bp, Medicago truncatula
  Intron number 1 from transcript Medtr2g010550.1 (locus Med tr2g010550) derived from phytozome v7.0 (chr-ID MtChr2; po s 2595680 to 2596265)
ttttctcactgctaccgtacgtggggtacaacaaggttcttccttactggctaattttagatagagtttggttattattgctctatatccctatgttttatgggtgtgctttcgatgaaggtttatcgttgtatggaaactggaaatattcttaatagatttaatcagtctgtttctttgtcgttgttctttgaaagttttatcattatatgagaaatggaaaatatattttatagatctgtcttttgatctatttggtgaaagctaggtatgccctttgagtttcaaacagttcttatagtgtatccatggcttattcaagagaatcaaatattttgatatattaaagagagattcataggacgtatgggcttgtttttttttttttttttttttttttttttgcttatgtatagagatcattattcacttctttttggttttgtgccaaaaatcaagggttggtctgagttatttttaagcggacattcttctcattagtgtctttttttaagagatttctctttagtgtctttacacgcagtcatgcactaatgtgtgggtcaagttttaacaggtatcgtat

SEQ ID NO: 34805 - DNA, 546 bp, Medicago truncatula
  Intron number 4 from transcript Medtr4g079920.1 (locus Med tr4g079920) derived from phytozome v7.0 (chr-ID MtChr4; po s 16242647 to 16243192 reverse strand)
ccatagtgtgagttgctttacatttctgtctcaggcatgtgataagacaaatttgaatgttgtttcccagctcatttggaacaaagggtacatgattttgagtttatgaatgggtgtccaaatataccaatagttccaacagcatcatgttttattttgtgggtcttttctttgaacaacttgaatattcaattatccagttcagtcttcaaatattaatatcattcctttattcatgtaaggatcaattagggaattagcaaaagattattactccattacttcctttctagtaaatttcgaagttatagatcaaattaatcttatgaatcaattagggaattagcaaaagataattactccattacttccttagtgaaataatatagccaatctaatttttgtagcatgatatttatcttatgaatcatttcattgacaaacttagatatcaaattaactcatcaacaatcaatggcattccttaacatgaattaatatactttctcagtctagtgatagtgggagtgaaagtggaacaaacac

SEQ ID NO: 34806 - DNA, 961 bp, Medicago truncatula
  Intron number 2 from transcript Medtr2g096950.1 (locus Med tr2g096950) derived from phytozome v7.0 (chr-ID MtChr2; po s 22557691 to 22558651)
cgcggtggttctcgtcgacaagcgggagcaacgtaagttcctgttgtcagctgatagaacttttgtatggttgtgtagcatatgtgatagcacatgtttagttttccagttaattgtggcagctgtatgcattctgttagagctgtttgtaagtagttgataactgttccttttctctgtattctttaaacacagagttgtgtactattctatcgtggataatgaagatttaattaaatatacttttaatcccccaaagtaaaataaaatattattacactcggtccgtcaaaaaaaaaaaatttgtcagcttttggcacttcttttctgaaaataattacaattggtttctctttgtactcttttggtcagcctttagtccctccttttttgacagagaggagcaaattgtgatcattttcagaaaagagaaaccaaaaggtgacaatttatttcaagggaccaaaaacattgattacttacttgagggactaaaaaatatttaagcctataatggattacaaaattatggattttatgcaattttcaatttcgctacatctatcacccgaactcctaaatttgatttcttcaatttttttaatgcactaccaacactgccaactattatgaatctccacaaattgaatttggttttagcatattattctctgcttggtgggaccccttcccggaccctgcgtatgcgggagctttagtgcaacgggtttcccttttttattctctgcttgagttgcagtatctaactacaacttgtaaattgtaatgaaataaaaaatacaataggtaattctgtagggtaactttaagcataaatacgaggagtgatgactgatgagttttactttggttttagctcaaagatatgctataagttttatcttgaattttatatatataagcatctccattcattatctctggctgcagggcaccgcct

SEQ ID NO: 34807 - DNA, 655 bp, Medicago truncatula
  Intron number 4 from transcript Medtr7g067740.1 (locus Med tr7g067740) derived from phytozome v7.0 (chr-ID MtChr7; po s 13755227 to 13755881)
gggataagcttggtgtgcattcaattcaaagacattgatagactattttcaggtgatgacattacaatttattactaatattattattgttattatcaccataatcactacttttaactcattgatcatatgattattcgtacaccaaggtgcaaacttaacaaatgaaacttaagatcacaccatctttttatagtaaacaaagaaagtgacaccatttagtgctgcatgctgcgaataatttactccctagtgtctttcctaattgtctgtcgtctacaactgcatgaaaacatcctattttttcttcataactaattttgttctccggcttctttctattttacgaaatattaggcttgaataacgaaattattcttttctagaggttagattcttctcggcatttctagcttttactaaaaggatccatgatcagagtagttctacatggatttggatcctcccccacaacttttctgcatccctctcccacaacatttttctatatatctcttaattacttcttcatttgtatttctttttctgaaacaaatgtcagaatacaagtgcgctttcctacgattatatttttgtttgttttcctatctgctctgcagggaatcactggtgtccccctattccaagtggctac

SEQ ID NO: 34808 - DNA, 592 bp, Medicago truncatula
  Intron number 1 from transcript Medtr2g005440.1 (locus Med tr2g005440) derived from phytozome v7.0 (chr-ID MtChr2; po s 237597 to 238188 reverse strand)
agggttcttcagcatccaagacaatcgcacaagaggtatgtacgccataaccttaattctcgactttgttgtttattattgttattgttattctcttcgtattcgtatgttatgttatgttatctattcgataaacacacaattgttattctctcgactttggacataaaataaaatacatgtcaagccatacgcaccctctcatcgagattgtacagatcataatatcaagttgaattttgatcttcatttgagtatttcggtgattggatgacccgatttgatgaaaaaatggtgcacaaatttggaaattaatttgatagactgaagcaaggacactaatttattgctatcaacacttttattcgatctacttaatattgacccacttacctcgtattaacctcttaacattgttttagaagttaagtctttttagagcatgttttaagggtattttggttttgttgttgttctatgtgattaccctacgatcaatgggataaaatttggctgttgacatgttgtgttgttctctatgatttttgtggttgtaggttttttgttgccgattgtattgctactgtccttt

SEQ ID NO: 34809 - DNA, 809 bp, Medicago truncatula
  Intron number 2 from transcript Medtr7g070560.1 (locus Med tr7g070560) derived from phytozome v7.0 (chr-ID MtChr7; po s 14266694 to 14267502)
cttatatttggcagcatagcttcacttctggtaaatacaaataaattagaatgaatagttttattcatgttttcttctttgccatttcatgatattttgttaaaaatgaaatttctgaaaatccaatcaataaacattcaaaattttataaattctattctcctgtatataaattttgggtcatgctcacaaatgtcttaaaggtattgtgtaaggaatccattgtatattgaaaatataagccaaacatgtgtaaaattaaaattattcaactttttaagcaaaagttaccattttagttcttgggcatttgttagcatttcctcataatttttttaagtcaatatacataaataaaaaagagcgcattattgtgatcacattttaagtcaaatataaggattttagaggtttcttcaaagatatcataatagaaaattatgattgcatttgtttgtatttcgccgcaatttcaaggtttttaaaaaagttgcaacctcaagagcattttagaaccatagttaagagtaattaataaataatagcagcttttatttgctcttaaccatggttctaaaatgcttttgcgatcacaattttgtttataactttaatattgcggtaaaatacaaacaaatgcgatcacacaatttgccgttataatgtctttgaagaaacgtctaaaattcttatatcatggttgcaattgcattttcagaccgcaattaagaactatgttctctactttaattgttcctacttattatgaatgaaaatttaaagacataagcttcaatatgtgacagggt

SEQ ID NO: 34810 - DNA, 916 bp, Medicago truncatula
  Intron number 1 from transcript Medtr2g030560.1 (locus Med tr2g030560) derived from phytozome v7.0 (chr-ID MtChr2; po s 8522512 to 8523427 reverse strand)
attgagaataagaataaagaggtatatattttgtgttcttgttgttttgaatctgatttgcaattatgggtctttatatttttcacttaattaatgttaagttaattaattattgattattgatttttcaatgtttatgatctgatggattataattgttttacctcagaaatgatgttttttgattgaaattgtttgtgattttactgcaaagatattaagaaatagttttggtgaccttttgatttataagaattacagtgtatgaatagttttagatgtgtgtgtttggttctgactgttaacagaaattgatttgtgagttgcatacgaagtgatttatgtttggatacatttaaataaaagtgacttgattatgaaatgatgtatgtatagatacatttatgtaaaagtgagttgaacaataaatttgtgcaaaagtcaagtttggagtaaaaaactacatgtcctagcttgttagaactcccacttgtgaaaatcaatttcaattgacatcatccaaacatgtcaaagttaattttatgtgtgttgaatcacttctatcacttgctaccatgaaaccaatcaatcacattctaagtatccattgagaagttaaaaattgagatactggagctaatttcaaatttgaaaaagttcgttgtttttattttgaagaaattgttataagcatatattgatacaagtttagatttgaacaatttgagatgcagaagctaatttaactcatacaataagttattgtctaactaaacagttcttcgttgttgcaagcttttattgtaatttctttgttcctgaagggtttcatgaaactgtccaaattaactcttaagtcacatttgctttggtgaatttaggtagagaagttgaaggatttgtgcttgaaccaaag

SEQ ID NO: 34811 - DNA, 713 bp, Medicago truncatula
  Intron number 1 from transcript Medtr1g124380.1 (locus Med tr1g124380) derived from phytozome v7.0 (chr-ID MtChr1; po s 27106128 to 27106840)
aattaaaatccaagttacaatttctgttggtgaaggtgaagcaagaagtttaattagttagtagtgggtatacgtttgttattgggttttgtttgacgtgatacattgtgggttaatttgtttacagcagtgaatgctatgctttttaataaactgcttagtttttcttaactgatattcttttccttcaattactttaatgtactatgtttgtgtgttactaattgtttatgacatactttatattgtttttcttaacttagtttatactttatttaacaaaacgttaaaaaaacaaatatgagcaaaacaaacaaattatagttcttgtttgttacaatattgaatggaggttcgggtaaaagaaacaaaacacctaaaagtcccctaagttgcagtagttttgacttttgattaaaggaaacatcaaacattgttatctggctgtcatggattcaagaacacttcgtaacgtgtttctgtgagatagagaactaattagttgttaaaagcaatgtgtttcaaaaacacttttggacgatcatcatagtacttttgggatttattagttgtataagtattagggatttatattgttgcagcctttcaggccatgatttttgtctctttctctctagttgcactcataagattatagtatgtctccttgttagttattatctatctgattttcatgagcaacattccagaac

SEQ ID NO: 34812 - DNA, 376 bp, Medicago truncatula
  Intron number 1 from transcript Medtr3g005940.1 (locus Med tr3g005940) derived from phytozome v7.0 (chr-ID MtChr3; po s 570061 to 570436)
tcattctgctgctgctcaaaatcaatcccacaaaggttatttctgtttgttcttgtttattaccactttatatctgatacactagttacttacttgtctttatatactatgaaagatgaaaggatagttagctttgaagcactcatacttttgatcaaaccatgtccgacaccgacacaatattgacacatgtaattacaatcattgattaggactgagaaatctaaatcattgattttgattcctcaaagaatccccattcacgctttctgagttatcaaaaatagttgtttgcttttaagaacttttaatcacatttgtttttcttcttctcatattagagtctccgatagaagtcgacaaagacattggaagg

SEQ ID NO: 34813 - DNA, 742 bp, Medicago truncatula
  Intron number 1 from transcript Medtr4g143010.1 (locus Med tr4g143010) derived from phytozome v7.0 (chr-ID MtChr4; po s 35737984 to 35738725 reverse strand)
gtatcacataccttcaggtttgtattcctttatgcaaatttcttgtaggtttggaaacaatttatgctttgttttaactattcttgcaacaactagaattaaagctgcttagagagtagataatttttttattttttattttttatagattaggaagatcttacttttaatatataaggaacaaaaatgaaaaacttatcagtgagacatacattggtaatttacccctaatgacaagtagattttaattcttgaacgaatgagatgtatatcaagtagggaagtgctatttattacaaatcgaacatacacaaaacacaagaatgcatgtattttcataatagtcactggcttctcagtttggtagtttacacaatacaagtataataggaaaccggagatgaaaatggtaactgattttaagaataaagatgaagaaaaggggatttttctttgataggggtaaattatccccaatttattggtatgtcaatgactcgataaatgttcctaatgcaacctctcatttaggatttgatttttacagttcaatcggtttataattgattgattgattattacttgttgattttgaaactatttcatgtttgtgttttcttattacgttttcattaacctgatattttttcatcattaactatgctgaggatttttttttaattttttctgtcaatgcatctgcttagaatttcctgcggaggtcccaatagattcagtggga

SEQ ID NO: 34814 - DNA, 481 bp, Medicago truncatula
  Intron number 1 from transcript Medtr5g085650.1 (locus Med tr5g085650) derived from phytozome v7.0 (chr-ID MtChr5; po s 32724986 to 32725466)
tctgaagatttgcactacatttcaatttcaaagtatgatttaagtgttatttattgaaaatactgagtttattccctatttacgatattcagtatattgcaatacttctgaacacttagttgcacatttgcaggcgcatccattatataaaaaaaaaatcgggattgaaactactcattatgtttgatgcaacagaggcaaatataatcttgggttaattgcagcagtgcaccccactgtaccttgaaaattgctttacctcaagaataattttgattctccagatatttattgaaggcatccacacgtgtttcaggccggaaatgattttgcgaatagtcaatggtctgttaaaattatgtttcaacttcaatatatcacgtaagtttggttatatatataatattagtcctcaactgatttatgggcacatatttgacactaatttttttcttcttgacatattttagcgataagccta

SEQ ID NO: 34815 - DNA, 718 bp, Medicago truncatula
  Intron number 1 from transcript Medtr5g097210.1 (locus Med tr5g097210) derived from phytozome v7.0 (chr-ID MtChr5; po s 38749218 to 38749935)
accatctctgcaagaactgtcaccttcttgaagaggtcatcattaacatgaaagtattctccattccattcgatatagttgtagtagttttttaattgattttgttgaattagaatttgtttctcaattcggttgtttgttcctgcaaagaaaattattgacttagatcttattatttatcacactttgagttttttcttttattaataactgaaatctatctaatactcttctgcacattaatttctatttttttgaattaagcgtagattgttatttgacaaactaataaaaattgattaaaattaagactaagttgaggctggttttcactatgtcagtcagttaagctgtaaataaaccagaaacgttgcattatttttgtctgatgcatatgattttacagtctcatcaaatctttcaatgtatatatagtcattcatttcattggttgtgtgaactggctatctaatatattttattccatatattaatacaaagtaaaatgatgtaaccttgttgcagaacaaaaatatagacccctcttaggtgatacatacatgtgtggacataacttgtataagcattgacagggagtgtagaatgaatagagaatagtcttcttatggttataggtgggagggaaaccaaggaaaatcacaatcccaaaccattctcctcatatgagatgatacatacaacgtgattcttgttagag

SEQ ID NO: 34816 - DNA, 439 bp, Medicago truncatula
  Intron number 2 from transcript Medtr3g022120.1 (locus Med tr3g022120) derived from phytozome v7.0 (chr-ID MtChr3; po s 5670628 to 5671066)
gtgctgcttttggaccacctgcttttgctgttaaggtttggggaggggttttctgggagttttttttactgatatgagctctttcccctcaattaggaggttttgtgctgttgggtgttaggtggttttgggaagggcgttttggacgttccttttatatatggtttgggtggtcaccgttgggtgttccacatatttacggcaccttgtatttatcgcttttctgtccaagtttgtggtttctttacacattctttggcttaataaatttggttgtttcaaaaaaaaaaattgacaactgaagcagggaaattgcattttacagattaatccaaagttagcaaactcaaagatgtcaaattcaaaaacttgtctgtgaagacagaatatggggttgtaattacttttgttcttcagctgcattctctactcaccactg

SEQ ID NO: 34817 - DNA, 619 bp, Medicago truncatula
  Intron number 3 from transcript Medtr2g038600.1 (locus Med tr2g038600) derived from phytozome v7.0 (chr-ID MtChr2; po s 10807156 to 10807774)
tcttcgtcactggtagctctgataatcttgccagggtatatacataaatatagtgtttcttcatcgttatagagatgcattagtatattctgtggtctttattattgaaaacaaatgtaggttctatgaattgccatctatttttacatttagttatttccattttcctcttttgattttctggcatgtgcatgaaaaaataacctctcaagggactgcagatggattactcttctccaaagcaaaatctttcatccctgttcaagctttttataagaaaccaatgtccatattcaatcaacttcaaccatttgttgtttagtacttgttgatttctggtgtcttcatcagttaatggttatctcctgccagttagttacaaccttctaggttttaaccattttctgaccaccctgagatggtcaatgaccatttttgtatggttgtcaaatgctaacaatacattttctgtgattttggaacctgaaaacttgctctgtaaacagtttctaagattttagaacctttttgacatataaggcattgctagcttctaaatcaaatttattaatagcatgctatagtggcggagcagagtggctggtgcctgctatttgaa

SEQ ID NO: 34818 - DNA, 650 bp, Medicago truncatula
  Intron number 1 from transcript Medtr7g010410.1 (locus Med tr7g010410) derived from phytozome v7.0 (chr-ID MtChr7; po s 2246516 to 2247165)
ggatttaccaggtgaatttaatgtttttcatagggaaatattagttgttattatataatattatagggttaatagtactttaccccctgtaatatagaccatttccgggtttcaaaataccccctaggtcatctaactatacaaaatcaatgatatggcagggggtaagccaaaatttgctaaaattacaaggggataaactgaaccaaagaagacgacaaacaacgtcgtactaagacgactaaatcataaaaacataccaaagaagacttaaatcatgtggaaatcacttatttaaccaaaaaaagaaagaaaaacaatttggagtggtgatttcggaacaaaattaaacctaaaccacccttcatttgtaaggagaaaagggagttgtttaattacactttagatatattgtcgttatcttacattgatgcttatatgttttctcttaattactatgtaccaccgacacatcataatgtgtcaggtatctgcaccaacatgacgctaatagacgtggttaaatttaattattttattttttaaagtgattatgagtgtcaatttttcaagtgtcatgtctaatgtatgtatgtctttcaacatttcctaacttaattatgctctcttattttttggtttattcagag

SEQ ID NO: 34819 - DNA, 921 bp, Medicago truncatula
  Intron number 1 from transcript Medtr5g091180.1 (locus Med tr5g091180) derived from phytozome v7.0 (chr-ID MtChr5; po s 35655238 to 35656158)
tcttggtgttcttatcgtctatttcattattcttggtacgtttttcttcgactttagtctaaattaaattagcataaagtttgtcatcattcttcatttgtttatatagttttttcatataattgtaaagtacatgaatatatgttagtttaagttttgcaccttaattttaactggttaggattttccaattatatatactttgagtaaaccactaaactactctaaacatggtagaacattctcaaatgggttgttaattatattaaactattaaatacttaacttgattctcatatttaactactaatcaattaagtcctatattttaaggacaccggattcactgtcataggtagttcacacaatttcatgttgtaatgaatctcagccgttgatttgagaaccaatgattcagattttaaatttgatgttacgcagtaatacgatcccagccaccgatttaagaacaaacagtcctaatcttttacaacgttcttctgttttcaattcaataatttaaccatttactatcaatttagtaccaatatttaaggacgtactaccaatttagcccatgtcatcaaaaatatttttttttttaggggttctagatcatcaattatataagttatttatatgcttgttgatgttatagacaaacatgtgattataatgtaaaatatgacaaatggattcttggcattagttgtcaggataggctgggccaatctattcttgttcaaaaaaaataattggtacaagtccattattgtacctgttattatagacttattttaagtacaatatgacatttttaaagtttggtaaaacatatattggattagttaaaggtctattctgtatttatatttttaatataatatttggactgaaccagtgactttgctttaataggag

SEQ ID NO: 34820 - DNA, 580 bp, Medicago truncatula
  Intron number 3 from transcript Medtr4g098470.1 (locus Med tr4g098470) derived from phytozome v7.0 (chr-ID MtChr4; po s 21182717 to 21183296)
aaagggaggtaatgatgttacttcataatctttgtgtaggctaggctattcttcatcaatcatgtagtatagtatggtagaattgcatgttgtctatcaattagaatttcctttatttattagattatgaacaaccaattttggttttggatgctatagttttgctaaaagctgcaattaatttggaccatgatggtattatacatggtgtttgatgatgattgctgtttaggaccctcaagttgctcaaccggagacatttttagcaaaagaaaatgcctattggaaacatgcgttccgagagtaactcaccatcggaacttaaattccgataaatggggggcttttcctgcaaaaatgggggtcaatagagaagttaccttgtttgattatgttttcagtttttgtagattttcactgctttctttagtttagctgaaacagtgaaacatactcatgagtcgtgactgatgtctgtttgtatttttgctggaatatcatttgtcactcacagtgtaatgttgtatgctcatttttgtttcgaacaggtgaactttgtttctttcagtccttatagtga

SEQ ID NO: 34821 - DNA, 361 bp, Medicago truncatula
  Intron number 2 from transcript Medtr5g021870.1 (locus Med tr5g021870) derived from phytozome v7.0 (chr-ID MtChr5; po s 8443011 to 8443371)
actattgcattttttctgggtaggaaggctagtgagtaagttctgatttttatttttctcagtgttttttggattattgtttttagattgaagaccctatttggtccctcgcaattttctcgcagctcaatttggtctccgcaaaaaattagtccggggacaagtctctgactcattataacagatgttttaatttatctccattatgaaaatgtctaggactggtttgattattattggaaattaaattgggtcacgagaaaattatgagggaccaaattgagtctttactgttgattttattttttgttgaaattaattgtatttagtcatttgatgttactaggtctcaatctcataa

SEQ ID NO: 34822 - DNA, 652 bp, Medicago truncatula; identical to SEQ ID NO: 31708
  Intron number 1 from transcript Medtr4g108850.1 (locus Med tr4g108850) derived from phytozome v7.0 (chr-ID MtChr4; po s 24203401 to 24204052)

SEQ ID NO: 34823 - DNA, 430 bp, Medicago truncatula
  Intron number 1 from transcript Medtr4g104080.1 (locus Med tr4g104080) derived from phytozome v7.0 (chr-ID MtChr4; po s 22599719 to 22600148 reverse strand)
gtttattgtgttggtctccaaccccttcattcgaggtagcttcttgttcttcatcccattcaatatggtttcagttctttcatgcttttctttcggattaattttgttttcataattggtaatttagcacatgcatgagcttgtgtgtagtttatttttcaacttggattgaaatggggaatctgatgtttactgccagaaactcttgatcttcctgcggataatggtgaaaatccaaggcaaaactgtttcctgcggatttttctaaagatttaggttccatattcaatatcaaaagaataaaaataaagaaattcataatcttacaattttaaaatttaaagaagaaaagaatctaaagaaatgcagctgtaaatccgcaggaatatctgtaggtaaatctgcaggtcaaacgaaaatctgcaggtaa

SEQ ID NO: 34824 - DNA, 115 bp, Medicago truncatula
  Intron number 1 from transcript Medtr5g047920.1 (locus Med tr5g047920) derived from phytozome v7.0 (chr-ID MtChr5; po s 20230378 to 20230492 reverse strand)
attgcagttctttgggtaatacaatatttctttatacgtttttaatatatttgttttcttatgttttttcatgtttggtttttaatgttgtttgatttttgtcttcttttaggaa

SEQ ID NO: 34825 - DNA, 320 bp, Medicago truncatula
  Intron number 1 from transcript Medtr1g064940.1 (locus Med tr1g064940) derived from phytozome v7.0 (chr-ID MtChr1; po s 12745053 to 12745372)
tatcctcactacaggtactatccttatcaaataattaaaaaaaattaaaggggctaaaccggaattcaaagaagaaaattaatgaattaatatcaagaattcaaaacgccttgttcttgatttaaaaccaagatatttatgagttggcatgttagagaaacatttttcttcttttcctagaaaatccttataatttcatcctagtgaatatccagaatcttcaacttgttactaatttgtattattttatggaatattaatttgtttacagataccatgataaagagttcagaagacgtgttaacttctagagaattgtt

SEQ ID NO: 34826 - DNA, 794 bp, Medicago truncatula
  Intron number 1 from transcript Medtr2g116810.1 (locus Med tr2g116810) derived from phytozome v7.0 (chr-ID MtChr2; po s 27349351 to 27350144)
tagccctaacttcagtgattatagtttcagcagtggtaggactagctactttgaacttgatccaattatcccttactctaaatgcttattaggtcatgctatcattaaccctaatttttccctctaataacctgtcattaattgctaatcccacataatccaaatatttttccctcctattccattgcctatttgaatttgaattttgttgttgtttgttttaccttcatctgcatgcgctactgatttaatgcaatgatgccatcaagttaaacctttggtataacccatgcaaatatgagtggttatctgatttaatatgtcggtttccaatgcaaggctctctacatccagagttaaatatatacgtttccatacatgctgcacttttacaaagacattccaattttttaaggtggtctttccaattctactaaactctttgaccttttcaattctacaactcacaaaaatttctcctctcatgtgttgcggcccagcagaagcattctcagtggaattatttttatctcatgcatcaatttacccttttatcaattgagttcctgttcctgtgatcaaaatgcttccaaacaaaacaaccattcctccaacaatcgataatgattcctttaatttttcacagtagacaatgtttcctttcctttccttttaatttttttttttgtagaattatttttcttcttttccgtcaagcttgttgtcttggctccatcatggctgactctgttttttcaggaaagctgtttttccctcttcctctttgcaataat

SEQ ID NO: 34827 - DNA, 1052 bp, Medicago truncatula
  Intron number 1 from transcript Medtr3g016270.1 (locus Med tr3g016270) derived from phytozome v7.0 (chr-ID MtChr3; po s 3105644 to 3106695 reverse strand)
gctcgtgcacaagagggcatattaaggtagttttttttttaaaatttgaaaagagaaaaattattattaattaaagtgacattaattgttattttacttttttttttaatttgaaaagagaaaaattattattaattaaagtgacattaattgttattttacaaccgttttaaagaatattttcaggggtgaatccttttgatagaatggggtagcattggctaccctaaattttttatttctattgaatcactaggtatattaatatagttagctacctcaaacaaattcatttgtaaaaaattagcataaattaaaaggttaaaaaattattacttgattaataaacttatttatcttgacatttcggtctctacaacaacaataaagaaattatttttagcaataaaaattatcaatagtcaaacataatgtttaatgcaaatagcttatttgtctacgttgaaaaagaaattattagtttatttaaaaaatatttaattatgaataaatttgacttctcgaagcctagttttatagagattaaacatatataacatttaaatttaatatgtaatattttaaaatatataacttttctttacctaaaaaaatatttgtatttggacctcgtaaaaatttctctaacttcgccgctggatattttaattctatctattgctaaaatcgcaagttaaagtccagggatcattttcaagtttaattggctataaactcatattttagttagtgaactagggtaaacttgcaggaaatcttcaatagaattttatcctttttttcatcttagtctttcagtttagatttctttttttctttgttcatgtattttttttaagttttttaattgtatcatatagtatacatgtcatgtatatataattttaatatgaagtaaattatagtttataagttgagtttatgaattgatttcacatagacaacaattttgcttaaattcccaattttgagaactttgtcttcagattaacaaagtcaaattctcgccgttgagctcacacgtagtctgg

SEQ ID NO: 34828 - DNA, 748 bp, Medicago truncatula
  Intron number 2 from transcript Medtr3g061800.1 (locus Med tr3g061800) derived from phytozome v7.0 (chr-ID MtChr3; po s 14124439 to 14125186 reverse strand)
tagcagattgtggagagtggattttggtacttttgtagcttactttcacaaaccaaggtgattgttgttcgtattttgatttattgtgagtttggtttgttggttttgtagtttgtgaatttacaaataggtgttctgacttattttgatttggtttttttttttattttttttatttgtgtaggtttctattgtaatttcttgaaatcatgaaggtaagtgtgataacaataaagtattgattctctttaatttcaagactcctatttcttactctcctgtagacaaatgtctgttcttaatgtctgttctattgctactgatattaatgggacataaacacaacacaaatctcacatacacatatgcagcgagagagagagagagagagaattgttgtcaacactgtacttgattctcacaaattgatttttagcataatacaagaatgcattatttgtaggcctccatacttaacatataagaaaactaattcttatgaactaagagatcataaacgttgttgttaagagataaggtggagtgatgcctcttatcttcatgtggtccagtcataacatttaacggtaaccaagtatcatctactatacttgcttctcaattcttctacttgctactttatttatctacttccaacatctattgttcctgttgcatacataattgaagtttctttgtttattaattggttcgatgtatgggtatcagttacgcatcattccctttg

SEQ ID NO: 34829 - DNA, 794 bp, Medicago truncatula
  Intron number 1 from transcript AC202568_9.1 (locus AC2025 68_9) derived from phytozome v7.0 (chr-ID AC202568; pos 47 639 to 48432)
atactttgcaagagcaattgttgtctaattctgtattttgtttagttttggtttctatggagcatttgatttatttgaagatgttacccaaaaaaacttttatcttgtagtgaaaagacgaaaaaaaaaaaaaaacgaaatgaagcgctaataaaatcataaacaaaaaactaaaaaaagttttcgatgtaatttgtaagggacgcttttctcaaactatgcctaagacccctaaaatgttaggagcggccctgccttgagattgattttaagatgggtatttatagctttcttggaattatgattttatgacttgaattctgctctttactcaacagaagtactgtttttgtacaaaacccggcagtccatattcaccgcaccatttttctttccctccacctctaaaacccaaaaagtacaattttttgggtcaaaatcttcatttgaaatcattgcaaatcgttaggaagcaagttcttacgctcgtcaaacatcaaagaacaggtaatgtatcatcaaaactcatccgtttttgctagtttttctgcctggttcgtcatttttttgaggtagatgatagggcttagcgtgagttaactcacgcagttgtgtaggctgcgtgacttaactcacgtaggaaattaacactggcgtggcttaagtcacgcagaagtgatgcccagtttttgaatatttgcgccatttttcttcctttcttagcttgctgcacaatttatttatttatttttttccttgtttattttttttattcaatatagacatagggtgat

SEQ ID NO: 34830 - DNA, 1055 bp, Medicago truncatula
  Intron number 1 from transcript Medtr5g092810.1 (locus Med tr5g092810) derived from phytozome v7.0 (chr-ID MtChr5; po s 36419605 to 36420659)
tgttcttcacactgctatccagggagaacatttcggtaaattaattaataatctatatatgtgttagaaattatatataattaatggccgttaatttacactcacctaaaaacattaaggtgtatgttagcaacctacactcatttgataatacacactcatttttataaattttatcaaattgtttacaccctcctcactaatttacatccactttcatcattctaaatattgttttcttaaaagtttgtctttattacatgttttgtatcttaagcatgttattgtcttttttgtttctttttttaaggatcttttttaagctggttacaaaattgcacttctattttaaattaattagaatataaacaaaagggtgttttagtaaattataagtgggagcagcttgctaacttgcaaattatgtttttaggtggtgtaagttagcagcttccatttttgtgaagatgtattttagcattaaacacattctttatttggacaaaaccctccaacttttctttttgatacaagtcaaacctgaaggacaaatatgtcatttaaaatttgttattaatatttttttattccatctttttcttccaagtcaacatcacgaacctctctctttccttggtcaacaacatccattcaactcttccaaccgcaccaccaccgccatcaccacttctgcatcttcctctgctagaattcctcaactcgatccttcatcaacctccgtcaacaacgtagcttgcaacgtgttcctgcatatgcccgtgctttcataactacatatcggacatctttcataaatctattcaatgcttccaatttgatgttcaactcttcaacgttaaccagtgccccggggcaccggttagcatttccctatatatatatataaaagcccttgcttgaattaatttatagttatgaatactactttttagctgaaataattagttagtattgtattttttgtttttttgctaataaattatttgtgtgtgtgttttggagcagatttagctgtgataatagcaaattactat

SEQ ID NO: 34831 - DNA, 564 bp, Medicago truncatula
  Intron number 1 from transcript Medtr7g026170.1 (locus Med tr7g026170) derived from phytozome v7.0 (chr-ID MtChr7; po s 6638853 to 6639416 reverse strand)
cagggataagtacacacattatatacatttatttttattaaattactaataataataatcaattagtttccttggaaaagggaaaccactagctgtaatgttaaaaccgtcaactttctctcttggtttgataatgtaccattattgctattaaaaaaattaaatggtcaataactctattttattttcatttcttctttcctttgaaagctttttttggctttgaatctctactctagcagcaaaccaaaaatcatggtctcttcttgtttaatggattacgctgccaacaaccatgatttcgttttcactctatctctttcttcgtttcctctgtgtagaacaaccatgcaagaaccgccccttcttcttattcttcttctcaaagctcatgttttttttttcttctgtttttttgttgttggttgaagcttgatgatatagatctatatatgagatagttgatttgattttggttttttctggaggtgaaaacaatttttgttggtgtctgagtacttacccgcagtaaccgatccgtgcaacccgcaacccgtgtaaccc

SEQ ID NO: 34832 - DNA, 424 bp, Medicago truncatula
  Intron number 1 from transcript Medtr6g089220.1 (locus Med tr6g089220) derived from phytozome v7.0 (chr-ID MtChr6; po s 18196876 to 18197299)
ctaacattgtgttacactcgggatgttgaagtaagtatatcattcattttacccagatagtcataaaattttctctctagtgttgtaggatgttaatttgttacaagttttggcagaaatatttaatttttgtatgtctaactcaccaaatattgaatttttggattaatcagtgaaagaaacttcagatttcaactgtgagaagattctccacatagttgataaatcaattgtatgtcttactccaaagaagactgaaccattattacccatcaatttcaagaatccactcacccagcttccaaattaaattaaccattatgaacccaaaattaaattaacattttttcaatgtttatagaaaaacaatcgaatttgaagttttttttttttgaatgttttgtatttattttgatacaggtac

SEQ ID NO: 34833 - DNA, 405 bp, Medicago truncatula
  Intron number 4 from transcript Medtr1g083230.1 (locus Med tr1g083230) derived from phytozome v7.0 (chr-ID MtChr1; po s 16293697 to 16294101 reverse strand)
gcgccagcgcaagttattcaagaaaaaacaatctggtaccactcagtttccttttttctgttaacacttgtcttcctgaacttggggaagaagggttaagtggactgaacgagtgactgtccttttccgcttttcctttccctttcccttcattcatagtttgtaccaattgtcattataactaacatataccttggatcataataaaccttcactatttacttatttatacgatattattataaatcatgaatatgctccttaagatggctaatcgatacaataaatatctgtttcaggctatgagatactgctatgctatcttgtatcacattattctgctcactttctaatggtttgaattttgtttttcttggcccttttccatgcatgaagataagggtg

SEQ ID NO: 34834 - DNA, 453 bp, Medicago truncatula
  Intron number 1 from transcript Medtr1g126800.1 (locus Med tr1g126800) derived from phytozome v7.0 (chr-ID MtChr1; po s 28342037 to 28342489 reverse strand)
tgcactctggtcattaaacctaaaaatatgacattttctcctcaattctgatgggaacttattcagaagaactaaactacacatttatgtacagtctgtctagggatcatgttgagcattttaaaagtttaagaacgaaagtgcacacatcactaagttggagggggaagtttagccatttttcttgtatatagacaactaaatatgttgtaccaaaaaaaaaaagacaactaaatatgttgtagcaaaaacaaaggcaactaaatatatataacaacaaaagtggtaactaccttctccaaagatgtcagggaacctcaaatttgaattaaattacagtttaaattatttgttgccctctttagtaactatttcttgaagaggtctagactttgtttacatcacacagcatatttgtgtaggtacaggcctctaaattgttgattgagaagg

SEQ ID NO: 34835 - DNA, 988 bp, Medicago truncatula
  Intron number 1 from transcript Medtr3g010000.1 (locus Med tr3g010000) derived from phytozome v7.0 (chr-ID MtChr3; po s 1623725 to 1624712)
ccaccactgtttctcctcttggtgttcctcaaaaggttccttctttgctcttctgattccatttcgttcttttaagcctgttttttcatctgggtcgttttcttttggcataaaaatcattccttttttcttttcagaaaagttttttttttgggttttgttcataaaccgtaaaaatgattcctttttttgtttgtttctgtagaaagtggagtaattgttttctttgtttttgtttttgttttaatcattcattcttatcatgcagttgtaatagtatagttttttttgttaacctctgtttcactttgttatatggtttgtttcactttgttatatggtttttttccattgtaatgatcaattttttgtgttggtgtttcatgaatgttgagattgtatgtgtaaatggcttaattctgaggttgaaaaagggtctaatcaaatgttttttttattttattttgtttcatttatgtatatattcaattttgcatgttcattcaatttttgttgtgtttcttatggtttgttttctatgaaacagtccctttcaaatatgtttaaaaagtgtaaatttgaaaaaggtatcaactttttaaagtttctgctttaaactatctgattgtgattttgtgactgatggtggacttggccctcgtgtgatttcaatggagattattgagatttttcatttgttaattttttaccccaattttattgtttgtgccctaattttttaattagctaacatttctcatatatgattaacaattaatattaatattaataattattattaattaataagtataattataagattataaattttaaaagttctatagttttgccacctactgtggtatgaatctgaattagtctatgtagttgcgtgcgtttccactaaaaaatgttctaagaatttattgttgattatgataatactctattatggttaaattctgattgcaggttataactatca

SEQ ID NO: 34836 - DNA, 1024 bp, Medicago truncatula
  Intron number 1 from transcript Medtr1g112030.1 (locus Med tr1g112030) derived from phytozome v7.0 (chr-ID MtChr1; po s 24004894 to 24005917 reverse strand)
ttccacacctcaccaatttccttcccaatctgccggtactgttttttctccttttacatttctttcttttcacattatttttcaatgacactaacaccaagacacaatataaatttgaaaaaatgaatgtgttggtgtcattgagacatgtcgtcggacacaccgtcggaggtgttagagagctattttcccaataatgatactccctcggtctcattaggtgtcatgtttgaattttatacgttattaaggaaattattaggagtgctaattttaatggtaaaatgcgttacaatataagcaaaattgaccacatacatcattaaattaaatgaatgaaccaaaaaagtcaattttacttatatttagaaacggaggaagtactagaacacttttattaattatagctagtggagtattgaaatgcaataaataaaacttgaaacaaataataataaatgttctattggtagtaaagaggccacttaatttgagacggtgttattgtgtgaactactagcaaggattcatatcatatcatataaaatcaatgcattttcaagtcattaagatgatgtatgtattactgaggttcatcaagcttgcagcagttattctcaatttgctcctccttaaatcaattttgtttcttaacgactcactcataattttcataaattatgctccatatgaggtgaattttgattgcaaaagtattaagttggtgtgtattttgattaacgagcctcgttgcataagttaacaagtaatggactaaattgaaggacaaatatagagtttttgacaacctgttttggccaatttgttaaggggttcggtagttcgttaatattgtgtgtttgattatactgtttttttctttttagtcgagacaagcagatgttttgtcctcatgtatgtatatctattcctttttctaaccatattggtgatttctgatagtttccgttttaattcctcctttgcagtcgtatccaaacccactacaaaccagtcaagctta

SEQ ID NO: 34837 - DNA, 798 bp, Medicago truncatula
  Intron number 1 from transcript Medtr5g092370.1 (locus Med tr5g092370) derived from phytozome v7.0 (chr-ID MtChr5; po s 36202969 to 36203766 reverse strand)
gaaattcaagcaaccattctcctaacagtaaaactgtaatttttttttttgttattaattgttgtttaatcttgttctgttattgattaatcatgttatgaattgggttattgattatattgtttttaattttggtgttagtatgatttttagagctgattggttgtgtttttagttcactgtgagttgaatttttggtaaaaatttgatttttgaaagaaggggtgaggtgggggtggttgtttggttttgcttaggtaagcgcttatagtgtaagtgcttatcatataagtaaaactattttcatataaaatatagttagtttttataagacactgatgagcttatgaaaatatgctgaaaattttgatatttaaaacaaggtggtggtggtggtgtgtgtgtgtgtgtggggggggggggggggggctgtttgattctgcttagtgctcactaaatagagttttgtttggataaataacttaattaacctcttgtataaatggttattatataagtcaaactgtttttcatataacttaattttgatattttatggacatattgttagctgtttctgtaagttctttcaaatggtttttgtaagtgtttatgctagaagataagtttaaataagtcgatccaaacagactttagggatgtgaagagtagaaaggatacattatgttattatgtatgctacttgttacgtgcttaatatttttgaaaggagaggttttttcatgtcaatgaaaatcctttatttgtaaaacatgtttttttgaaacaggaaaagat

SEQ ID NO: 34838 - DNA, 440 bp, Medicago truncatula
  Intron number 2 from transcript Medtr5g048160.1 (locus Med tr5g048160) derived from phytozome v7.0 (chr-ID MtChr5; po s 20348626 to 20349065 reverse strand)
cgccaaatttcttaactcaacttgctcaggttcggctattcgttgtattcttcacttgtttgttatcataagaaaatagtaaaaagttactttatcaagacgtgtatccatgttaatcatagattaacgaaggcctcacttgtagaatgataatttggaaaagtatttatgtttcgaagacatgaattaatgaatatttttcattgtaatggttcaaatactaacactgaaatgatactaacactgatatgtagacaccgagaataaattggttttgaaatattgggaaaatttgttagtaatacatagggaaggtttgagtattttattcaatatctaactatagtaatatcatatgtcctgagtttaattattattatctttgaattggtttaacaatcttcataaattgttacttgcaggataattggccctcagta

SEQ ID NO: 34839 - DNA, 296 bp, Medicago truncatula
  Intron number 1 from transcript Medtr2g014010.1 (locus Med tr2g014010) derived from phytozome v7.0 (chr-ID MtChr2; po s 3427628 to 3427923)
cgggttagttttagtttagttacttcttttcattaatttttttttttttttaatattattatattatatattcttttattttattttataaataaatgttttgttttttgttttttcggaattttcattttggactaatttacacgtggcgtttgctttcatggttgtgtatttttatttttcctgcaaatttggataaagtttattgctttactttcttgtcttaaatatttttgttttgtttgagtttattattacatgcttctgcattattcaataggtggtgtgtgctgtga

SEQ ID NO: 34840 - DNA, 575 bp, Medicago truncatula
  Intron number 1 from transcript Medtr5g100030.1 (locus Med tr5g100030) derived from phytozome v7.0 (chr-ID MtChr5; po s 40041164 to 40041738 reverse strand)
ttgtcttcctaggaacaacgtgggatctcaaaagggtaagtaaccttaaaattcattcattaactatgttctgtcacacgcaaaacctttcaaaatccaaaattttaaaattctttttatttttcgaaatattttttttaagattctaatgttgttacataatattttggattagattctaattctcgtattaatcttaatcttttctccaacgtcaagaatatctctttgcttcttctgcttccttattattccaatttccaacccaattcctcttcctatagatctgcatcctttttgctcaaccaaaaatatatttgcatattttacccttagtttgaagttgggttcctgtaagaattcaaaccttattttttctattgaattctaggtttttcttctttctgttgttaattaccaagtttaaaatcacgggcttgcttcatatcgaattattggattaagatgttacataaagttcaaattttttaatagattaatacctcaattgaattttgaacaatgattgagtttttgattgattttcaggctagtagctatatacaatctaaatc

SEQ ID NO: 34841 - DNA, 761 bp, Medicago truncatula
  Intron number 6 from transcript AC149807_5.1 (locus AC1498 07_5) derived from phytozome v7.0 (chr-ID AC149807; pos 28 104 to 28864 reverse strand)
agagaggaagcagatcggaatccgaggtaaaaaaggtagtattttattttcgtttgtttgattgtagatctagaacgtgttattgcttttctttgaaatctaagtccggatctatcatctacatgaaaaaggatgtttaaaaaggtagtttgttttgaaaaaagagtggtttgaaaactccggcacggtggtgcaccaccggccaccgcgccggaaaactcataaaaaaagaaaaggaaaagagagagaacggagaagaaggagaaagaagagagagaaatgaatggaaaaatgtgagaaaatgggtcatacaccctatttatataacttcgaaccgggcgggtctaaccgacccgcccacgacccgtttctgcccaagcccagttgttctttttttattttcactacagttttattatttgcacctctgtttttgctttctgcaccctttggctaaaagaaaattatctaaaaaacttacaaaaatattgtatttgtttttttatttttatttactgtttttattttataattgccatttttattttatttagaatcatctcatgcatattttaatttcttgtcattttattgtcgttaattgtttttttttttagcgtttataattaggaaattgatgtaatttatcttgcgcattttttatttctcattattatatttctcttgagaccatagaatgtatctaggaatgatgtaataatgtaggtaacacaagcaccgacacttgcaccgacacctca

SEQ ID NO: 34842 - DNA, 843 bp, Medicago truncatula
  Intron number 1 from transcript AC149807_5.1 (locus AC1498 07_5) derived from phytozome v7.0 (chr-ID AC149807; pos 45 116 to 45958 reverse strand)
tcctgtgcaatctgagttttggtgttgggctttgggtttgggcttaatgttctgcacatttcttgcttttttcttgctgttcacacccctattttttgctacctgcacctatgtcttgattaaaattgtggtaaaattcctagaaaaattcatacatgtttcttgatattttcttagtgtttttatgacatttttgcacattaaggatctatgaaattttggtataattaattcatagcattttaattctctttgaattatttgttatggattcttcttcacacatttgtccttgatgtgagaatatgtaataaaagctacttgatgtgttaatatgagagatttgtgcctataatttcatgttgatttgctgttttgatttggttcataagttcttaattttatgaacaatatatgcatattttgaaagatataaaatgccaagtttattctagaaaatatggcatgaaaccatgcttgcatgtttccaataattccatgctataacttgagataaagaaaactctttcaaaatttgttaaagcatgagaattagaggccaagaatgctttaggtttcataccaaagtttttagggttaaatgtcattttgttaactttttgtgccatcttgcatgcttttatttcttagtacttgttattttttttttttactaacaagtttactttggtacttcatacatatcgtttagcattccatttccatccttttacatagtttagtttctttgcattcattttttacttttatttggaattgtaatatttaggtaggtgttatttcttatatttcatgcaaagactatagaatgtatctaggaca

SEQ ID NO: 34843 - DNA, 463 bp, Medicago truncatula
  Intron number 2 from transcript Medtr5g023660.1 (locus Med tr5g023660) derived from phytozome v7.0 (chr-ID MtChr5; po s 9324290 to 9324752)
cagaaggtatgtatgtatggctcgctaagcgatcatttctgttatgacaagcaaggtgactgatgttgctttaagcgcgagccattttggtcgaaagtttatgatgtgaacgtgactgatgctttcttttcttctacattacattagactttcacttattctgaattcaaaagtcatctgcagcttcatgaaactttattatcaatttatgtaattctgttattactttttgttgttgtgccgatttgaaaactcgatgagattttctgtcatcatagagataaataacagagcatcgtatttgtttgagtgatttccatttgttgaatgaattttgagttctaatattatatttggaaattcatatattttatttcatttaaatataattgttatggcatatttaaatatctgtttgtttctgaaaggtgctatattgtgtaatacgtcgaaaagagaatta

SEQ ID NO: 34844 - DNA, 487 bp, Medicago truncatula
  Intron number 1 from transcript Medtr3g092680.1 (locus Med tr3g092680) derived from phytozome v7.0 (chr-ID MtChr3; po s 21876381 to 21876867 reverse strand)
aactcatcactcccagcattaaagaccaacgtattgtaagtaacattttccaaaaaaaaacactctttttcttggtttaaatatatacatttatacaaaatatatagaagaatgttaaccagggtcccaaagacattgctcatttagtcctttgaattttttttgttttgttcttaatctcagcaaatataccactttttatgtttgatctttgttgttttgttttagtcttcacaaaatttgtttgtgttggaagtgatcgttgtgatacgtaaaatatttgattttagtcatataaaataaacactaaaaaaaatattacatggatcaattccaatatgagcaagttttgtaagtactgaatcaaaacatcaatgaccaaaaccaaaaagtggtaaaatttgcaaatactaaaaacaaaataaaaatttctaagtttaaatagaaattaatcataacaatgtttatgattatgcaggaagtttca

SEQ ID NO: 34845 - DNA, 324 bp, Medicago truncatula
  Intron number 2 from transcript Medtr3g156170.1 (locus Med tr3g156170) derived from phytozome v7.0 (chr-ID MtChr3; po s 40929101 to 40929424 reverse strand)
aggtggtgttgcattattaatattcctgtatcaattgtgttactaacaaacccaattataggttttgtgatgcttataggaatgatgattgttgtttgtaatggtatgtatatactcatttttgaactgtcatttgtataacaggatgatacctctcaatttcggtctcagttggatgctctagactttcccaaattttgtgacaaaaccactaaactctttgattttcttcatttcagtttacttgagtaacacatttcactatctaccaccaaaacacactatctaaatccaattagaaatcaaacaagtttcgtaaccagt

SEQ ID NO: 34846 - DNA, 417 bp, Medicago truncatula
  Intron number 1 from transcript Medtr5g101700.1 (locus Med tr5g101700) derived from phytozome v7.0 (chr-ID MtChr5; po s 40707162 to 40707578)
ggtgttggtgctgttgttagaagaagcataggaaggtaattaattcaaagttcagtccaacaaaatatgtcttattattattattaaatatatttataagttataactttttattttgtccttattatgttttacaaaatgtgttatttttgtttttattttacaaaacgtgacttaatacgttcatactttttatatatactataggagtgtgtcacgtaaatgaaaataaataaattttaaaaatcttgtatagttttttttttctttcaatcatgaacattgaggcaaaggtgttaaatttacatataaactgcattaaatgttttggatttgatccttttgaattgattggttttcttcatcatctgggtttgtttagatttgagctcaagtactttgatcctttccttgtct

SEQ ID NO: 34847 - DNA, 637 bp, Medicago truncatula
  Intron number 1 from transcript Medtr3g100470.1 (locus Med tr3g100470) derived from phytozome v7.0 (chr-ID MtChr3; po s 24045668 to 24046304)
aggtaatattttttctattatttgtttgattttatatcatttagttattagtataaaagaaaaatctaacaactgcctctagtgtacttgttaaggaactaaatatagtgaaattatcttcgaatttgtgtagtcaatctcttacaaatttaagaaattttttttaatgtacaatttactttttttttcataacaagtgtaacagcccgattttcgctaaatttaattttgattgttttaatatgtatttatgtgtgcttgtgtgttattatttatcattggttgcattttaatgggttttaatacaaaaagggtaatttgatcattttgtgagttagggtaaattagtaattttatggtgagagttattttgtagtgtttcaagtgagaaccattattttactaagttactagtgtggtaattagttttgagccggtaagtgatcgttgttataattttaccgttaagtgcggagaaacatttttgaaatagcgaatgagttagttaagcccactaaggcaataagggttaagcccatttgagaggaacctatataagttctagtctttagagaaaaataggttttcattcatttcataaaaatgtgagagaggtagagagagaaggttcaagaga

SEQ ID NO: 34848 - DNA, 376 bp, Medicago truncatula
  Intron number 2 from transcript Medtr7g046830.1 (locus Med tr7g046830) derived from phytozome v7.0 (chr-ID MtChr7; po s 11642950 to 11643325)
tttggcttgtgcaacttttcttgtttgctttcttggtaagtctttgcaacttattttgaatgaatgttctcatatcctagagttttgttgagtatattaactaacataaaattatttgatgttacatcttttatttatgtttaattatttttaagtgaatttaaatttaaattattttttttcctatgagtatatatgtacacacttttttttaatggatataaaaaaatcttcttgattttatcatatgatttgattttttttactatttttttcatttacaacatgcaaaattattaatatagtttatttttcttttgtttttggacattattttcaagagggatattgttggacaaggacaagtggaagacaa

SEQ ID NO: 34849 - DNA, 617 bp, Medicago truncatula
  Intron number 1 from transcript Medtr3g083260.1 (locus Med tr3g083260) derived from phytozome v7.0 (chr-ID MtChr3; po s 19541024 to 19541640)
ccaagagaagaacgacatccttacaggtgagtttattttatttaacaatgccttcatattaacttggtctttttattatgattcaatggccatggaattggatttgtaagaatcaagccttaaactaatttcgatatatcgagaagaaaaaatcgaaatctacagcttttgaattttgaaaaagttggatttatgggtgatgatttgtccattctgttcactattttctccttccgaatctttcgtccttttcgatttggctacagatattaaaaaagtacaaagtttgacaggtttagtccattttaatacttcattcaatgcatgcttttggttttttgtaactgtacaaaagaagaagaaaaaacatcattcattttatattggtttcctaaaagaaccaatgttttgggagaaaaataaaaagctaaaggaccaaagatcaataacggatggagtaatatgtattgaggcaaatccagaaaaaatattaagacttcgtgatgatatcatttgtgtgtttgaacttgaatttttgtaggaatatggtgacggcgaaatggccatatcttttcctccaatttccataacaaggcctcttaccactcaagaagttc

SEQ ID NO: 34850 - DNA, 466 bp, Medicago truncatula; identical to SEQ ID NO: 27816
  Intron number 4 from transcript AC202568_12.1 (locus AC202 568_12) derived from phytozome v7.0 (chr-ID AC202568; pos 63423 to 63888 reverse strand)

SEQ ID NO: 34851 - DNA, 929 bp, Medicago truncatula
  Intron number 1 from transcript Medtr4g143220.1 (locus Med tr4g143220) derived from phytozome v7.0 (chr-ID MtChr4; po s 35823618 to 35824546)
ctggttttttcttgcagatttgttgctttctagctggactgtttgattcacatttaattagaagggtgttgattgtggtcccaaaaacactattgccgcattggatcaaagagttatcacttgttggtctatctgatatcactaaacagtggggctacctgattttattcatcacattgtttatttaaaatgctaaattgaagtgtttttatctttaaggtttctagtttttcttttttaaccaaatccttaaccaatttccaatttccaatttaccaaagatctctcatttcttttctattaaatgtagggattaagttgaatttatgatttccaactgggtttctatttgtctcaaaattaacttttagtccttatatttcgatccttattttacaacttgtgagatttatttgacccctttcatttttttgatgttgcatcatcattaatgacgtgttagtgatatggcacaacttacttggatacaaatgaattcaaatttaggtcactttttggaacaaaggtgtgaaaatttatgtcaatagaggtgctaagttggcctaaatttaaataaaatgctgatgtggattcatttttatccaagtcagctgtgtcaacccacttccacgtcattaatgcaacatcataaaaaatggaggggataaaagaaaagaaatcttactagtcgcgaaatggggacccaaaacttgattttagaaatgagggaacaaaaagttaattttgactaaaagtgtatttaatccaatttagaaatattagagaaaattttgatagagaagaagacaaatacaacacaaaaaagtaaaatgttaccacttccagatagcacataactgtaacataaccatcttaaactacattttcttttgcctccctttaggacaaaggtattctcctcaccactt

SEQ ID NO: 34852 - DNA, 370 bp, Medicago truncatula
  Intron number 3 from transcript AC233663_8.1 (locus AC2336 63_8) derived from phytozome v7.0 (chr-ID AC233663; pos 80 095 to 80464)
aaaggccctccttcaagacattgcaatattgacaggtatgttaaatttagatgtgttcattgttttttggatactgcaagcatcataatacatgtgatgtccagtcatgtacaatgtaggtttttactgtttaatcatgttaaataatggttaattctgttcaaaaatttagtttatgtaaaagaagatatagtcattgtttagttacttttgatatttgtttcaactgtttaagtttttctgccatgatacaacaaagaaccgatgactaggaaacacgagttgtgaaattatcatatacatttctttgacaattttgtgcatttaactgctaggtgctgagttccaggccagtgatctgggccttctt

SEQ ID NO: 34853 - DNA, 780 bp, Medicago truncatula
  Intron number 2 from transcript Medtr5g082610.1 (locus Med tr5g082610) derived from phytozome v7.0 (chr-ID MtChr5; po s 31120936 to 31121715 reverse strand)
accacaagttatccagtaagaccatttttctttactacgaatcaatttttatcatttgacagtgtaaaacgtttttacacgggcatccaatcaaatcatgccaaatagatattttagggactaactttaaaaagtggcattataaagtgattttattgtatgcatgtgtaaacaagttttacaccaaattcttgttttaattttcatgttctatgtttttaaatttaaattgttaaaaaaattgaattgttaaagggaaaatttgtatagattatctttgagaatgcattgtttgcgtaaaactttgtacattgtcaaccaatcataaaccaccgtttgtatgacttttaagctagatatgacgaaagtcaaacttttttttagctattaagggttgtgattgactgagagtgttatgaagctttacattgtaaattcttatctatttgataatggtaaaaaaatcaccagtttgagttttagttggtaaatgagtttcaatttttcaaaggattaaaatgggtatgagaatatgtactttttgggcaaattgaaccgactgatgtttggaatttggattcacctaattgaaattttaatgtgtttgttatttcagtttattcggtttttttttctttgtatgaacaaagtttaatttaaacatttaccactcaccagaaattaaattagcttaccttgtttgaatggaatgttgctaaagcatttgagttttgacatgatgtagctattgagaaagaacttgaaactgctattttcaag

SEQ ID NO: 34854 - DNA, 689 bp, Medicago truncatula
  Intron number 1 from transcript Medtr4g098540.1 (locus Med tr4g098540) derived from phytozome v7.0 (chr-ID MtChr4; po s 21245056 to 21245744 reverse strand)
tgcttatctcctacaccagcaacactttccctacggttagtaattctctttgtttcttcataaaggttcaatttttatgtgctattcaagttctatgttgctgatttttgaaattaagtgaaaaataagaaatgggttggcttttttatttatcaaaattcaatttttggtttctttttttggtttctatgattttcttgattcattgtttgatcctttgatttggtgtcttgattcattttttgggatatttgttggatttgggtgaaaagtggaaaagggaaatattctgattgaatttttaatgttgattttgatttgattctcaattgctgcatttctgttttgctatgactttatggaggtatcataattcctccaagtaaaatgttatgatgatattgctatattttaggatattaggactttgatccttttttgtttctgaattgatgcaatgatcttcaaaaagattactgctgtttgacttgacaattgactgaaagatgatgatgacttaacattaggactttggtccttttgttgtttttgaattgatgcaataatcttcaaaaagattaatgctgtttgacttacaattgattgatatatgaggatgattttggatttagtaatctgtaattgtaacatgttttatttctctgcaatgattcattgtcaacaggact

SEQ ID NO: 34855 - DNA, 644 bp, Medicago truncatula
  Intron number 1 from transcript Medtr1g017060.1 (locus Med tr1g017060) derived from phytozome v7.0 (chr-ID MtChr1; po s 3502677 to 3503320 reverse strand)
cgaaatccttatagccctgctcagtttctctacaggtctgccattgttctttatgtcattacatttccttatagctttttgtctcatgatagtagtggctaatatttatcaaagggatccaatcttcctctgttgtgttgtgttttaaatgatcatgataagagaaattgcttcatttgtgaaattacttaacttcgagtgattctgattgtgatattcaatgagctggagatgaattggtttgagtaagtattgaaaacaggaaacttgttgcttcatcgagcgaattgattatcatgaaaatatgccttttggtatgaccgaagtgacaaaattagcgttttttgatgaagcttttggtaaccaagcacatttgttgtcgactctagcttgatgcttttcgtgaaaagtttgaagttgctgatttgtttatatgaaattgtagctagttggctggaacaacttcaattgaaacctaactttttaatgagattggatttaaacccaaaatttgtatggctttggattaggaccttactatgttgctttgctttggtcctcgaattcctgtttcttttaaatggtgaaactttttgtttttgtttcaagctggtggcagcattcagcaaatttagcgagttacg

SEQ ID NO: 34856 - DNA, 879 bp, Medicago truncatula
  Intron number 1 from transcript Medtr3g106470.1 (locus Med tr3g106470) derived from phytozome v7.0 (chr-ID MtChr3; po s 26810146 to 26811024 reverse strand)
ttcgtctgctccgtagcttcatttcggaccctaaggtaatttcattcaattcgatgctgttaattcaactagagctgatttttttttttatttcgaatggtccttttcttatatctgtttgtggttcaaggatgtttcacaattaaggattgtcacatggctttttctctaatttccagaaattggtcgtggtagttgagatatattattttttttgctcatgatcactttcattttttcataaggttcacttttgacgaatttgatcgtatatgtgatggtatagagttgttaatcgttcttgattacggattatggttgaattttagatgattttattgtgtttggatttttcagttttaatttcttattttccaactcttggcacccaagactttggccctgttaggataaataaacaacttatttgcaacttatcatgataagcacttatgtataagctatttatatataacaaaagattaaataaaggaaaatagttcgcctataagctatcttggagtacttatgagaataagctaaaagcagcatttgaacaatgtcataagttgttttcataagttctcccgaagagtctcacaaaacttatgtctgtagataataagctcaaagaatccaattcagacaggccctaggttgtttgaatgaatgaaagaatattgaaaaggggaagggggaaaatgctaaagcttttgattggagttaacttgcatgtaaagttttccataaggggtcaaccgacacacacatacactcatacatttgatttcgcttagtatttctttaagggaactttttgtgtcaaccataatataatcagtgattaatgactggacgtgtttgttgtatagattacat

SEQ ID NO: 34857 - DNA, 685 bp, Medicago truncatula
  Intron number 1 from transcript Medtr2g033280.1 (locus Med tr2g033280) derived from phytozome v7.0 (chr-ID MtChr2; po s 9025342 to 9026026 reverse strand)
caaaacctttggttcggtcttcttattttttttctcttatatggtgtgactgaaattgaatgaatgctagattggattggtgtgaggaaaaggattattaatcaatagtttaaggatggcaatggtagcatcataccatagcactaaaacataacatatggtagaatatatgaaatcatcatggagccggggaaactactattatttctcaaattcctaatttttctctttttttttggacaaatttataattttcttaaaatttgctgtcagaaaaggtgtgtaaaattgcattttttagttgagaatcatatcaaaactatatttaagtttagttctttttttaattaatttaaatttatgttataaggacgttgttccgataatttaaactaataatttttttaagggaaataatttaaatataataatctattatatttatatcaatattaattttacctattgatgaatgagatatttttcttttttattgatactcacaatctttttttaatctttgtgtttgttcatcgttgttcaactagcttttaatttggtctttgttgatcttcctagattttattgtttttgtgtttgggttttggttctcctgtgttgttgggttgcttcgacagtttggttgatgacattgtcagtctgtgtttcactcagtcgttgtggc

SEQ ID NO: 34858 - DNA, 838 bp, Medicago truncatula
  Intron number 2 from transcript Medtr4g132740.1 (locus Med tr4g132740) derived from phytozome v7.0 (chr-ID MtChr4; po s 31622961 to 31623798 reverse strand)
aagctagtaagtcgacttttttctcttcaaactcgggttatattatacttaagaattgtcgatcaatactatttgaaaatttaataatatatggtcccccaccttcttgagaattcaacaatatatggtcctctcaaatgaaaaattgtccttgttgcaagttgtaacatttcttttattatccagaaaatattattctataacaaaaacagtagacagatcagaaattgaattaagttcgaaaatattagcattaatttgataattaatcgtaacttgctacctaatctgtcagaattaattgtcgagaacggtttgagcttctcagctaaacacctttgccaagtaaaataaaagtaaacaggcaatcacatcttttgttttttggagtagtgccaaacatttcttccttgttgagcaagtatgagttttcaaacatatgtgacaaaagggcaacccggtgcactaaagcttccgcatacacagcgtccgggaaggggtcccaccatttaaatgataaagcttggtggaagtttttaaattgttgtcgattgttcaaatgatagtcctgttgaaaaatacatttagccgatgctttgaactttagataaggagcaatcaaattcctcaaagaagcagtaatctgtttcttcagcgaatgctttgtttcatatcttttaccaaactgtttctttgagatttaatatttttttaccattacctatggtgtttccatttcttcaagacaatatttctcctaatcatctaaagaagcagtaatcagtgctttgctacttttctacccagctactttctacattgattgcaggtcaacggt

SEQ ID NO: 34859 - DNA, 480 bp, Medicago truncatula
  Intron number 1 from transcript Medtr5g019870.1 (locus Med tr5g019870) derived from phytozome v7.0 (chr-ID MtChr5; po s 7437427 to 7437906 reverse strand)
aagagaacacaacatgtattttgtcaaatcaactatataggttctcacatcgaattccttcgcataagatgagcgtgttgaacgggaatgcatttttaagatgttgttttgtgcttgatcatgctcctctgtcaattgaaacttgtcagttggcagggcagtatgattaagttcaaaagaatatattggtatacactcctttttgtcaccactcatcttatatgagggaattcgatgctagaaaatgtatagttggtttggtagaatacatgtgttgtgttctcattcttttgagttttgaaagagacttgcaaatttctacactaagtataacacactttaatgtcaacatcttcatatccccttcagccaggttacaattagattgtaggttttaaaaaaaattacgtttatatatgcttctgtacattttaaaatgactaatattcgtttgtttcttcataaaggctgacaagattc

SEQ ID NO: 34860 - DNA, 716 bp, Medicago truncatula
  Intron number 1 from transcript Medtr6g059210.1 (locus Med tr6g059210) derived from phytozome v7.0 (chr-ID MtChr6; po s 10621471 to 10622186)
cggtagattcattactttatgtgttttgttatctctgtgttctcaagggcgataattagattgtctaaattagaatgcaacttatcacaattatgcttttttacgcctttcgatagattcatctaaaataaatctggtgtacaaactgcataatattactccaattacatcactcaataatgatatttattgcaatcctccaagagaaatgtaatgatattcatatcagcggtgttaaaggaatgcatgttatctgtcgcacaagaggaacataagaatgtaagtgaattcaaacttatatctcttttgaaattgagcaatagaagtatttttagtaatcaagtggtgcaatgcaaaaaacatgagtttcataaattcaagtgatgagaaataatgtcttggtataagaacaataccttttaattcaagtattaaattttgtatatgtggtgtaagcctacataaaacttgaacactttatcaaagaactaacacaaatgattaatagtagaactaatattataaatctataatctataataactatttataaagacaaaacattgttttggtgtggccttttttactttcaagtaacgccctacattttcttcaattttaaatttcatttagacaatttggtgatttacaccgataataaccgcttctattgaaatgcaggataactcatctgaggccctcaatcaaacaaaaac

SEQ ID NO: 34861 - DNA, 966 bp, Medicago truncatula
  Intron number 1 from transcript Medtr3g039310.1 (locus Med tr3g039310) derived from phytozome v7.0 (chr-ID MtChr3; po s 10337271 to 10338236)
ttatctctcattaagcctacttctcaagtcactacgtaattgtagcataatctccatcacgtgaaacgatcacgtcgtagtgacacttttttatttcaatgtattttatatgacatgaacactatataaatatttaaatattttatgtatgtataatactgagatttggttaatccatttttaaattttcgctgctcatgagcaagatccgccactggttgttagaatattattctgtttcatccaaaaagacaggtcatataacctttttgacaaatattcatctaaatttgtttaagaaatcttcagggttaattgttgtcatgtaacatttttaagaaagcttcattttatgttagatcattaaaacagatgattgatgtataaagtgaaagatttactcgcaacgtctcaacaaaatcaattccttaactcagattttcttgtttggaataaacagggacatagatgaaaactcggaatacaaaacaattgagatgaatgaatagctttgggaaagattaatgtaggcaattttcttgtttaaattcacatatggcaatttctcttcgggaaagattggcgcacataaactaatttattgaatagctttttctgtgtaaatagttaagaatgaaatctcttttgaattgcaatctcccaattatattgtaaatgtttaatgtcacggtataaaacaatatgaaatttattgacacaatatttcaagtactaccagaaaattcccccctttttttttctttctttttctagaccacaaaaaggccttgtattttttcggtacatcaatcaatacttcactaaatatgataaaaccaaaaatattctatttatgaaaacttaatagagaatttcatatctgatataacttgacattgcaaataaattacacatcatcaatgaatcttaggcctaatacgaaaaggtatccttattgtgaacgct

SEQ ID NO: 34862 - DNA, 366 bp, Medicago truncatula; identical to SEQ ID NO: 27746
  Intron number 2 from transcript AC235488_29.1 (locus AC235 488_29) derived from phytozome v7.0 (chr-ID AC235488; pos 130352 to 130717 reverse strand)

SEQ ID NO: 34863 - DNA, 673 bp, Medicago truncatula
  Intron number 1 from transcript Medtr7g010140.1 (locus Med tr7g010140) derived from phytozome v7.0 (chr-ID MtChr7; po s 2134278 to 2134950 reverse strand)
ctgcgatattttcaacatttaccgaagattttgtggtaacaatttttctttcttccaattctttaatttatcatgcaccaattcttgtttttcttttggatcgtttaattcaactttgtttttcttagttttatgatattatattgtttaattttaatatcatgttattatgaatatgattaatttgtttaacttgaaggttgaagcaataatttatgttttttagtaatgtttataaattattttgttatttgtgttgttatttaggattaattatgtttaacttaatgcatgtagtttatagttttcagtgattgaaatctggatacaggaaaccaagtgattggactcggtggttaatgagctcgatttctggttggaacaatttaacttatcttctgaccgaactctgaattatctgggtcggtccctttcgtaaggaccaattgttcggtagaacacgagttcatttcctggttacctcccgatcgaactttaggttatcagggttcctttcccccggaacctggagggttaacacaaaaattaaaatctggatacaagacctagaaaaaatttaaattttattggattaaaattatatttaaccctgatatcaatgtatttattgtttattattttgagtttgtttgtgcagatataaaatcaggac

SEQ ID NO: 34864 - DNA, 947 bp, Medicago truncatula
  Intron number 1 from transcript Medtr5g026560.1 (locus Med tr5g026560) derived from phytozome v7.0 (chr-ID MtChr5; po s 10725430 to 10726376)
aggtcttgttctcaccttgactttggacttcggtaatcagttgtagagtttgtttcatctaatgtaaagattgattcttatgtttccttctcttctgaatcctggtgagggtcataacttgtgttgctctctccttggccttccaatttacgaccaattatccctcatgaaaattggttagggatttaatcatatgttgggacatgaactcctcattgtacttgacagtgatctctagggatggcatcccttcttccacggtggccttgtccaccttatttttaccagttgtttgaaacaaatgtttgatcttgccccccaatttttctatgagaaccttgagacattttaggactttacatggagatttaccattgcactaagtctagggtaagccgtcccaccttaggaggtttactattaccaaaatcactaaaatttggatgtttgtggtggctagtctgccaaacattgcagttttatctatatgattgactttttgtatgaactcgtttgatctaaactttggccttcaaaccttattaatcaccttattctatttcccacacgttctgaacaaagtaggctaagagaatgataccattaccatcttcataacttggaaaggattgttattaatggctatctcttccatccttttgtgggatagttcaaacttttcttccttaataagattttgaatggccttatgagacaaaatgtaattgttcgttgagtgattttaagagttgtgctatttgcagaacattttgcctttgatctcctcggctggagggttttgtgatcatttaaaacctttgagcagataatcaaagatttcgttagcttttgtgttataaaaggcatattccgatgtatctccagatgaatgaatgtctttccttttggcagacctcaaggaaggataaaaatagttttcctctttc

SEQ ID NO: 34865 - DNA, 294 bp, Medicago truncatula
  Intron number 1 from transcript Medtr1g135060.1 (locus Med tr1g135060) derived from phytozome v7.0 (chr-ID MtChr1; po s 30093794 to 30094087 reverse strand)
aaggtaggacaacacatatcacgtttttctttgtaaattactccctccggtattatgtataggcaaaaaggtgcgtgtgttagtctaaatttagaccaaatacatgtttctatttgtttacatttaagaccggagggagtaagtcacttcctgcttttttatagtcctggtgatattgtgacaagcatttggttttctagaagaattgattcaatgtgtttaattttgtctggctctcatcatgatttgatagttttgatttaatgattcgataggtacaaaagaacaagagaa

SEQ ID NO: 34866 - DNA, 859 bp, Medicago truncatula
  Intron number 1 from transcript Medtr4g032090.1 (locus Med tr4g032090) derived from phytozome v7.0 (chr-ID MtChr4; po s 7575019 to 7575877 reverse strand)
atttcaaagaaaattcgaagcaaatcaggttagcaagtgttgttcttcaatcgattgtgttttccttgttctgtaaactcagtttaagtaggttcatgtaaactcagtttaagtaggttcatgtaaacttaatttaagtaggttcatgtaaactcagtttaagtaggtttacatgaacctacttaaactgaatttaagttaaccttacgaatgtaaattaaaaccgtaatcgtacagtgcatcagtgcagttgaaggaaaaaaattgaaacttgcaaatagaagaagaaattcaattacttatatccaattgagtatggatgaaaaatattttgattcactctttaattttcatggagattgatattgaacatcaaattgtttgctcgtgatcgcttgtggggtgaaagagggtgaaactcagtgacaatgaataaaattagggttttaagaaaatttatataaaaagggcaattttggtattataaaaaacttttaagaaaatttgggtgtaaccagaaaaacatggggtgtaaatagaaaaattcaagcatattttacatttttacatttctaaagaaaagttgttaatgcaattaatgtatatattttgtgtattaatattaccaaattatcctttgtttaaatgtgtattaaatttgactttttatatgtcaagatatgttagtagtattaattagggatatgtttaggaaaaaataataaatgaatctaataatttaaaaatgagtttatatttaaagataaatttttaatcaaaagagtgtgttttttttttgctttcgcaccggtttccgatccatcaaaggtggcgattaatctggctcgtgcgtagaggc

SEQ ID NO: 34867 - DNA, 520 bp, Medicago truncatula
  Intron number 3 from transcript Medtr7g047060.1 (locus Med tr7g047060) derived from phytozome v7.0 (chr-ID MtChr7; po s 11757687 to 11758206 reverse strand)
ttatacaggtagtaaatgattagttatattaatcatatgagaaatgctctttcaagtttcaatttataaatgtaacaaaattttcagcactttcgccacaattgagagaaattcatgtgggttccgccactttagaatgagtgtctctaaataggagattatgatactggcataatttaatgtgatccacacaaatttatctcaatcatggagagtgttgaaaagagagtctgaaagagtgtgttactactagtactctttttagttatatttgatattatcgtacactttttgctgcgctgtcttgaattgaatgttttaacttgcgaccatctgctaagaataatcacacagtgcttcaatagaaagcttgcattgtttcatgattggcttgataactatttttcataaaaacacaagttgaatttaatgttggaaaactttggaactatgcgttgacttatttcaatggttattgttggtagggggatattctagttgctgtcctttcaaactacat

SEQ ID NO: 34868 - DNA, 301 bp, Medicago truncatula
  Intron number 1 from transcript Medtr4g023580.1 (locus Med tr4g023580) derived from phytozome v7.0 (chr-ID MtChr4; po s 5186933 to 5187233)
cagccaactggcagcaacaggtaaatataattagaaagggtttcaatttaatttggttcttgcttttgtttctttgtccaaaaggcaaaataattcaaaagataaaaaggaaaaacaatattcttgatacttttatttatacctcttcatgaatataccaaatatttgatttcttaaattcttattacttttcttcctttatgctcaattcatatattcttttttctaattttcttcctttttgtctatgttgtttgttattgcagcaacagaaccatcatcaacaaccaggaaacggcgg

SEQ ID NO: 34869 - DNA, 799 bp, Medicago truncatula
  Intron number 1 from transcript Medtr2g117990.1 (locus Med tr2g117990) derived from phytozome v7.0 (chr-ID MtChr2; po s 27870703 to 27871501 reverse strand)
gaagaaattgggtatgtatcaaaacttctattatcattttgtttttattgtttgaaaattcaatattctgctaagaccaactaaatcagggaccatatatccatcagaaaccctaaatgttctgtctcaacacaacacatgaattgttgacaccttgcgaatgtggattaaaatgtcatatggtccttcaccaccatgtcaaccctagggtttctatttttttgtctgtttgttgaagaacctatgatttctattagtattattatttatttatattgacatgattagtattattattactacgagtctaccataacttcaacttagttttttgtttttggatttatatgtaacatatttcgtgattctatgttatttgtctttttaaaagatttttctgtgggtttgtcttttttttttgttcaatgatttatttcatttttgaataattgtttgtagcttagcttcctgaattttattggtttttattagttcatgacttagttggaatatgtctatatgttgttttgatattcaccctatagaaatttacaattgtttaatttgtaactatgttttcaatttgattcatgatatacaaaccactttgctataattgtaacccttctgtttgtaactaaatataagttaaatgagccaaatacatcaatttttttttactcatttttgcttatattttgttatggaggcaatagtatataatgaacgacaagattagaaatataatttagttggtatggacattgcaatattagatatcacaatatactggagatag

SEQ ID NO: 34870 - DNA, 684 bp, Medicago truncatula
  Intron number 5 from transcript Medtr5g102650.1 (locus Med tr5g102650) derived from phytozome v7.0 (chr-ID MtChr5; po s 41099150 to 41099833)
catccatctgtctttttgggtgagtcatcagaatttcgcaacatgatggatcatatggatactaacactcttttagtatagttgatcttgtattgattttcaatagctaattatgactgtcatgaattatctctgtagcaccgacacttctgatctatgaagcactgacactcttcaaattaggcgtatcctggtgtcggtcacgcatctgtgtccgacacgacactgacacatttaattacattgaattatgtcattttctcaaatttactttgaattatgtcattttctcaaattattatttgtgtcaatgtgtcagtgtccgtgtcgtatccggtgtccgtgtgtttgtgcttcatggcttctgatagaagttgtgtctggcaaatgtcggtgttggacattgacgtgtgtgataaaattcaattcattcactttttaataaagaattattcataagcctttgtataaacttactaagattcttcattgtactcaggtttagtttgcgtcaatcttatagatgagattgtttaaatgctagtatcatgactgctatattgctaattcttaaaatatttatttgtagggtaaaggtctatctccccacccttgacatatactgacttctttttcgtgtattttttgtttcttttcacattgcagaccagtcagttgtggacc

SEQ ID NO: 34871 - DNA, 1025 bp, Medicago truncatula
  Intron number 1 from transcript AC233576_10.1 (locus AC233 576_10) derived from phytozome v7.0 (chr-ID AC233576; pos 44711 to 45735)
ataggactttggcttacttgttgcctcttattcaggttcatgaaattctcttttcttacataaggttttgagccttttcaatttttaaggttttttatttagtgaatgtttgattctgatgtgaaaaaattggttttgaatgaactggttttagttaaaagtgagttgaatgtatagcagtgtatgtttggttctgcggttacaacaattgattttaaatgcattgatgttgtgaaattgattttatccaaacataatgtttgttgtgaaataaataattgactgtaattaaaaccaatactagattatgtttgggtaaaaaactgcatacaataaaccaaaatggtgggaccctttctcagactctgtgtatgcgggagctgtagttcactagactacccccttttaagttgaacagtgttaagtatgaaacttaacactgttttaagttagaattgattctaatgcaaaatcaaatctaatagtcatagcccgaacctgtcaaacttaactataagtctctagattcaattttgtctcctccaaaagtggaactccttgtgagattggcgttgattataaagtgctaataaggagatagaagacttgtttgatgaatatttgtgatagaggcaagatacaatgctagctagggacaactgtgttttgtcattttaaaaatttcttaaaatgctgaatatgtttcgaaaggttgtaaaagagaatagcgaaggaaatattgaatttatattgtatcatgttttttagttgaagtgaaaatgaaaccagaaaacatggaaaacagatcctaaattaaggtttttgccaatgttttaaataatggtccgtgaccacgatttggactgtgacatagaggtgtttgatatgtccaaaacagcagccacatttgaccgtggttctccgaaatattaagcatcacgacaccatcacaactgttatcacaaccactatcttggtttacattttgaaaaaaaaatggttttgatttcatttatttcaggttg

SEQ ID NO: 34872 - DNA, 460 bp, Medicago truncatula
  Intron number 1 from transcript Medtr1g090050.1 (locus Med tr1g090050) derived from phytozome v7.0 (chr-ID MtChr1; po s 18117170 to 18117629 reverse strand)
aggttctctcttatccgtgcggcttaaatcacaattgtttacgtccacttttctctctcttaaacattgctttttatttatttatttattcttgatgttcttccggctattggattagttgcaacaaagatagcataacacatcagcaagagataatccaaatcaaacattgtatcaagtaggggagttcaaaatcattaaactcaatagatttgcgttttttattgtatcaacggaaccaaaatgtaacatgaaagaaacattaacaaaacttatgtcacacaagctaatattccttggaaacgaaatgacaattttcataaaatgatctattttctcttctattaagtttcttcattgctttttaattcaaaaatgtatttatgtgctttaatttgattctatttgcactttcctatatatgctaatcttatgttaattttatttgttatttttaaga

SEQ ID NO: 34873 - DNA, 902 bp, Medicago truncatula
  Intron number 3 from transcript Medtr2g046220.1 (locus Med tr2g046220) derived from phytozome v7.0 (chr-ID MtChr2; po s 12927932 to 12928833 reverse strand)
taaggaagcgtgttgaggttctcagagagattcaggtatattccctaaattttggagtattgaatgtgtgttgtttcatgcttaattggattatttatcctcctatgtgtattgtttattggatattgctgctttataaagtgtgaagtgagacgttcaagggttgttaattcaacaaacccttgatttgttttgtttcacttacgatgtccatcttttatttgttaattgattgtacataatactcactttattactctctaaaaagtaaattgatcactttagaggattgatccctctgttacatggattggagatttagtggaatcatgataagataatttggtgttataaatctcttgttgtatctgtgtcagtgaagggttggatttgtcttttacgatacctgtaaaaggctgatatcatgacctgaactgtgatcctctattcagtcacatggggtcgcctccaattgtaaccctgaggctctcctgcaagttatacataattaacattcaatagggtgaactgattactgaacttcatatttcttttgttcgttacttttatttgagtgtttggggatctatttggactgaagcaagctattctattattttcattttattaatatactattttatgatttttgaaaacttgaccctgactttatatcttgtaggtaaaattttattcttacgttgaatttttgttttttcatctgtgaatagacattttcacccttatataatgtttaatgagtctgtcaattgctctaatagtttgtacctgatcttctcttatatttttctgtttttgattttttattagctacccagcaaagataaggtttccgcgtgatatagtcttctgaaattgttttatgactgtgcagggtgaac

SEQ ID NO: 34874 - DNA, 340 bp, Medicago truncatula
  Intron number 2 from transcript Medtr2g046220.1 (locus Med tr2g046220) derived from phytozome v7.0 (chr-ID MtChr2; po s 12928860 to 12929199 reverse strand)
aagaggatcgtgctgacctagttaacgctctcaaggttcgtgctttttcttcaattttttagacccttttgtttgttttgttgtaaagtttcgtgcttttttagtctaaccctaattttgataaaacccctaattttgattaaaccctaattttgaataaaccctaatttttataaaacccctaattttgataaacccctaattttgattgattaaaccctaattttgttttgggtttgagttttgatgattttttggattattgtttattaagggtttttatttttgattgaatttgtgtgcagagtaagattcagagtcttgctggacagcactctga

SEQ ID NO: 34875 - DNA, 1006 bp, Medicago truncatula
  Intron number 1 from transcript Medtr5g106170.1 (locus Med tr5g106170) derived from phytozome v7.0 (chr-ID MtChr5; po s 42694907 to 42695912 reverse strand)
cctcctcgtggaacaaatttcgtcaagttcaattggtattttagacatctaccgtctcaagttgattattctctagttgagtaacttgtgatctttgtgttttgacctatttcctttttgcttgtgatctttgtgttttgatctattctctagttcaattataagttcaattggtattagtcaatgttacttgtgatctttgtgttttgacctatttcctttttgcttgccaataatttaactagagtaggattttttttttaatagtttatagtttacttattgactaatattcctctaacaatatactattatttttgggaaatacctgattctctacttgtggtcgagtttatctggcaaaatatattatgttagtagagtcaatttaatttatctcccaaaattactctttagaaattagacttcaccgttgatcaatcattccaaatcttaacttgtatatggatgaacaaataaaatggtctcataaaattgaagttttaaattaagaggcaaaccatgaacagaagatcttagaaaaacacacatttttaggctaattttagtttgcctaatagattgattagtgaaaatacaattggtaagttacaatgagtttgctgttttaaaacttttcacgcgttgttgaaattttaacttccttttttaattaaatgattaaaaaagctagttgactgacttgggatattgtcccccaatcaaagtcatcaaaattgtgagagacattttccaagtaatttctgtggtcccacacattccttttcacacctcctacctttcacaatatatagcagcaagacatgtcatagatagcagcatatatattcaaaggtttatttaaggttcaaagaacacaagacaagacatgtattctttcaagctgtttcaatctcacaatctcaagtttctgctctctttttctttgttatgtgttctcttttcttttcttcctttactctctcagtccttgaatccattcctt

SEQ ID NO: 34876 - DNA, 973 bp, Medicago truncatula
  Intron number 1 from transcript Medtr3g149830.1 (locus Med tr3g149830) derived from phytozome v7.0 (chr-ID MtChr3; po s 39299846 to 39300818)
aataagtggaatgtccagtgttcgaaccacgacccctacatatattatgcttttcaggtataatcaataaattatatccttacacttttaaaacgacagttaaatagaaacatataatctgtactcacacgcagggatggccctgagcatgggtcgtaggggcggtagcccaaaacaccatattttcaattttgcctatatatatattaaaggataatttatattatttaaactatgtaaaatacttgttaaaaaaagttagaggggcactacaaaagtcaaaattaataaatgcatgtgattaaataaaacagttaactacactgacactaaaatttgaataatgatatagagtatcaataattgaagagttcgagtttttgctcgtatatattaacactcaaaaatcatattattttacccgagtttatgtgtttcctttcttttctaattctcaatttataatctctcaatctcaattctgttaacactaagaatataagttactaatacaaactttaaattcttcaaaaaaaaaaaaatacaaacttaacacacttgaaattgattttcaaacgtagcctatacctttatgatctggaagtctctttttctagaatgacatcaataaaaaaagagtgtagacaatacctcaactaagttctccaaagattcaatagtaagcctcttcaaattttctagttaaagagaaaacaactttcagatcctgatactttagcatacgaatattagactaaatgattctagagcaataagattcaactcctagaagaacaattgatgaaaaacaactttcacgatgagtaaaaattagactgacaaaaagtgaaaaccttctattgcaatactttgcgaaaagaattcaacttatctatttgcataagttatttttaaatttgatgatgcttgatttaattttaaatatgatatttgtaggcggttgaagtgacca

SEQ ID NO: 34877 - DNA, 546 bp, Medicago truncatula
  Intron number 2 from transcript Medtr3g128280.1 (locus Med tr3g128280) derived from phytozome v7.0 (chr-ID MtChr3; po s 32826279 to 32826824 reverse strand)
tcttcataattgtgcaccttctaggagcatttcaggttagttggttaacatcaacacattataaaattgtctttaaattcatcatatatgtctgcccaaattctatttaaattttttcaaatatatcactttttcatgtttttaagattagcatgagaaacggtctaataacatttttagttatgagaaacggtctaaactagttggttctacgattgaaatgaaaattgatcggtttatcagttggtccccaatcacgctcactttttaatcaatcagaactcatcaatcgaaccacggttggttcaaccgattcttttttattttgtttcttttttgtaagaaaatgtatttttaatacatatttttctattagtcaaagttcaaccatggttcaatcaaaccaattgaaccatgatttggtagtctcgctagttcgacatctacatttttaaaatattccattgattaattattgtatttgtttcttatctaaatgatttatggacaggtaatagttcaacctttatttcgtatagtggaaat

SEQ ID NO: 34878 - DNA, 887 bp, Medicago truncatula
  Intron number 1 from transcript Medtr3g016820.2 (locus Med tr3g016820) derived from phytozome v7.0 (chr-ID MtChr3; po s 3371672 to 3372558)
acttactggtcgccatcttcttcaagctaaaaaaggttcttcattttctctctctctctctctctctcttttttcttctatgcttttggatctacctacttatttgttttttttattgttttttttctcaaatatataatattaagttctagtttttttgttttttttgttttttggtttattttgcatttttttgttgttggttattagtattattgctaattttttttgaaacattattattgctatttattattattattgtttgtagctgtggattttctgtttatatagtttattatattgtgattgcagaaaataaagtttattagcattaatttcttgtctaaagattcatgatgacaaattagtttttcaaatatatgaaatgagactaaaatggttcttccattaagctttctgtgagatcaactttgaccattttttatgttacttcaaatctttggattcggaagactgatttgatgttacaaatttttgaagcaccaaattgaggtctaaagtataggatcaaaatgataacttagggcttatttgggttgacttatttgagtttattttacttgtgagattgtttgagagagtttatggaaacaacttattacatgcccattaagttgttttcagttaatttccataggctctctataggatagcttatgaaaaacaagatctagtttatatgaaaatagtttgactttatttatcttttgttattgaattagcttatacgtaagcacatatatgagaagctcttaattaagtttgtgtgtgtctaaacaccaaaagagaagagtttgctgatgacattgtttcacattgcacctgcaggctgttctgtgaattttgagtttctaaactacaca

SEQ ID NO: 34879 - DNA, 1026 bp, Medicago truncatula; identical to SEQ ID NO: 29817
  Intron number 4 from transcript Medtr1g121410.1 (locus Med tr1g121410) derived from phytozome v7.0 (chr-ID MtChr1; po s 26447658 to 26448683)

SEQ ID NO: 34880 - DNA, 960 bp, Medicago truncatula
  Intron number 1 from transcript Medtr3g067660.1 (locus Med tr3g067660) derived from phytozome v7.0 (chr-ID MtChr3; po s 15577073 to 15578032 reverse strand)
actcttgtttctctgaatccaccaggtcctaattcctaagtacaaggtcaaaacaaattcttcaatatttctcctgttaatcaggacactcctacattctttaaattacttggagactttggagaaaatcatgatcatcatcaggcaagatcatacatgatccctttgtttttttacttttttttgttgataaattaataaactctttacttttctcaatatattattattatttttatcatagcttattaccaattctctatactttatattttataattacacttatactaaacttattgtttgaatgaaaaaaagagagcccctttttatttttatttttattttttatatatagatgttataattaatatatgatctatatatatccaccatagtaattgtgttgttttgaaagaggacaacgtttggtggtgatgatcatgataattgaacatcgattcatgttttaattgtatatagatttgatgaattaatttgatctttatataatgatataatatggcctatgatctgattgttaatctattttttatgatatacaagtatgccctttctctgtgctcgtgagattaactcagttggtaagaacaatgcataatatatgaaaggtctggggttcgaacgccggctatcataaaaaaaaaaaaagagtatgcttttctcttctctataatttatttttaaatcatataatataactgctttgatttttttgattaaaataaactttttttttttatgtgtattttttttaacaacctttgatgtgtatatatatatttttttttgacaagatcctttgatgtgtatgttattatttgatctttttttctttgacaaaaaacaaataaatgaaaattcttaattaaagtctaatgcatatggttttgatatctttgatttgattactttaggatcataagctagtatttcatc

SEQ ID NO: 34881 - DNA, 755 bp, Medicago truncatula
  Intron number 2 from transcript Medtr3g103440.1 (locus Med tr3g103440) derived from phytozome v7.0 (chr-ID MtChr3; po s 25448161 to 25448915)
gctatcattgtatgagtttttgttctcattattcaatttatgaagtttttgatatatatttttgttttggatttgtttgatttgatcacgtagaaatgtagaaggactagacatatattttagtcgcaatcgatgttactcaactctttgttttgtagtttgttaagcaacaaaattttgtcttaactctcatttttatgtttgtttgtccagtcccatctcatggttcttttgttgttgtaaccctgctgatcttaggggaaatgggacctagtaatgcagaaaataagtaaaccaaatattgtttgagttgtggttcaaactcgggtgttcttgattgattcttcttttctaaagtttattaaccactttagcctgatcgcttgattgtccggtgtccattttaaaaataaaacagggaacgttgtttcttattcaaccggtctcgttttaaaagtgtagtaacatggaatttttgtatccaattagtctcttattttcaagaaaatctaacttatcctttattactatagtatgatgtgatgaaggattcaatctacattttttttatatttagttgcacttgcatgagtactacaatagacatgtttttacgttatgtaactattaagaaaaactcatgtccctcattaaaaacaactaggttacacaatgaggatagagaaacaaatgctaatgactggctttataaggttgggagagtttctgatattagatattgctgcttgcaggtg

SEQ ID NO: 34882 - DNA, 483 bp, Medicago truncatula
  Intron number 2 from transcript AC233663_7.1 (locus AC2336 63_7) derived from phytozome v7.0 (chr-ID AC233663; pos 74 484 to 74966)
aggtagatttttggttttatgttggttaaattgtttacctagatgaaatgtctgtatgtatgcgatgaaatgtctgtatcgatgtgataaaacttgccggatagaagaatttcaacttccatctttgggtttcctttcctattcctcttgctagcaatggtaataggaagtgacaattgacaatgttctcttttcccgtgacgttgggttatcaattgggaatgaattgatgccaagctaagttttgagtagtacctatgaagcaccacagactctagacaacactgataataatttgagaatatgaaatcaactcaatgtaaactagagtatcggtggtgtgtcggtcggtgtcagacatttgacacattttcaatctgaaagtatcgatgctacacatagtagtacttttaactaattttgagtccttttgtattttgcgctccaggttggatctgtagacgaggaatcaacgaagtctga

SEQ ID NO: 34883 - DNA, 637 bp, Medicago truncatula
  Intron number 1 from transcript Medtr4g098010.1 (locus Med tr4g098010) derived from phytozome v7.0 (chr-ID MtChr4; po s 21043793 to 21044429 reverse strand)
agaagattttttcgtagatatcacttctcgcttgagtaggtgctaacatcttatgaagataactcagattagattgacatagatagttgaccaaattttgtaacagttgatcttatcatggaaatattctcttttgtttttatcaaccgtttttgtagacaagttcatctgaatgaggaatttatgaatatatcttcttaaattttcccctcaacgatctttttgatagtcaatggctccaataagataaattttcagtatagaatctctagacgatcattaaatgaaaaaaaaaaaaaaaaaaatctctcttgaaaagaaattgtctaatgttaagatttcactacaagtgctctctaacaaaattttaatttcagtctgttaatgcctaaaatagttataatcgtctgggtcatctgatctgcatgttgctccaaataacacttcaaaggtgatatcaaaatcgcttgaatagtacacacttgttctttgaatcatattctttttccttattcttccatgttaatttggtggtaattcctttcccttttatctaactgaggtgctctaaatttcttccatatgggataatttcttccaagaattgttgaaccaagctgaggaacaatttgaatat

SEQ ID NO: 34884 - DNA, 439 bp, Medicago truncatula
  Intron number 2 from transcript Medtr4g122260.1 (locus Med tr4g122260) derived from phytozome v7.0 (chr-ID MtChr4; po s 28890465 to 28890903)
cacctcccaaacttcatttctattgcgctgaaaaggtaacagtcatcacattcattttgatggatccgcttgactttctgtttctaagattttgcatgccctttgctgttttaatgtggactttttccatttttgctatatttcaaaatgagaagataattgtaggaaccctttctgcgatttactcaagtacaagttgttcaagaatgacgaccgtggtatctgtaatgaaattagttttgaatttttcatattcagttattgttcgtttgttttttttatacctattgtaaacttttttcatatgattaattttgcaatgatgattttatttttttgaaaactcgatatccggcccaaggaccgactgattttgtgaagctttgtaaaaactagccttgcagtgataattgacagtgttattttttctgcctttagg

SEQ ID NO: 34885 - DNA, 441 bp, Medicago truncatula
  Intron number 1 from transcript Medtr6g080980.1 (locus Med tr6g080980) derived from phytozome v7.0 (chr-ID MtChr6; po s 16373481 to 16373921)
atacaaggaagtctttcttctacttggaggaatcagtaactagttgtttttcttgtcttcaccaagaggtatatgaatttcgttttttgaatattaccttatatacaaagtggcttatcaattgttcatatcataattcaatattgattttttaatctctttatttgcaaacttatctggtttatatatcaatgaatgatattttatctttaccgaatgtacagtgttttgttactactcttggaactgtgtaataagcatgcacattttggatatgtttgtaaagatattttctagtaaatgtgagcttcttatttaatcattttgatcttctaggataattttgccatagagagcacatgttgcaaaccgatagtcttttggtacaaactttaatcatttcaagaaacaacattccgatcaagtgaccaacaaggagag

SEQ ID NO: 34886 - DNA, 690 bp, Medicago truncatula
  Intron number 1 from transcript Medtr5g009340.1 (locus Med tr5g009340) derived from phytozome v7.0 (chr-ID MtChr5; po s 2009683 to 2010372)
gttttcgtcctctcttcttaacacggccaggccaggtacaactaactaactacaacttccataaactctttctttttcctctctttattactttttcattgctatttcaatttttaagttgattaatgaagtttagggctgatcaatggatatttaattggattttaacctaaccaattaataactgatccactgtttcgtagaggtgattgattgtctctgtaaatgtgctttatttgagtttcgttaaagagtaattacttgatgagcaagtgttaatgttatcctccagtactattgattttgattaacttgatgaacaagcgttatcttcattttaaatagtttttcgggactgctagttttgggaccgctagttttggtcggtctaacttatcatgttgttatttcaattttttaaataacattttataatgtccgtaatttaaagaggaaaaataagccctcttctatcttcccctcttaaaccctccatccaaacacaccctaaaaggatttttggactttaaattttgcgagattggtttgcaatatggtagtacttagctaagggaactgatgccaagttgtcaatagtattatcactagaggagacttgattcatgtccaacttcttgcgttgttgatgtttcaggattatttatcggttgcacttatcgccattgtctt

SEQ ID NO: 34887 - DNA, 391 bp, Medicago truncatula
  Intron number 1 from transcript AC235757_45.1 (locus AC235 757_45) derived from phytozome v7.0 (chr-ID AC235757; pos 177808 to 178198 reverse strand)
ggaagaaatcaacattaaacaacacaacaataattgtaagctataaaacataaacaatgttgtttgtttcttattcttctttgttgttttatatcttgttttcaaatataaaaaatgaatataataaaaaaaatgcataaaaggtttgatttttttggatcttatgcttattttagccaaccccttttttcctctttttgttttctagtctccaatgatgtatttgaccttcatcatcattattttcattatatcataattatacatgtttttgcacatgtatgtattgttatgtaatgtgcatttacctaactttgtaacattattacattttctgtaatatatttttgtaatatagtttgatttggaactgtgcagggtggaaaatttg

SEQ ID NO: 34888 - DNA, 1001 bp, Medicago truncatula
  Intron number 2 from transcript Medtr3g034410.1 (locus Med tr3g034410) derived from phytozome v7.0 (chr-ID MtChr3; po s 9459896 to 9460896)
ttgaagcttgtgctattgatatctggcctcaactggtaacaatttctttgcccctttaacagttgaattgtgttatctgaatatcaaaatacggacaacgtatgtgacactggattaccagcaatagtgaaaactatgaaatagattaacccgaaattaacattcatctttctttctttttgtacttttttaacatgttagtatgttaattgttatgttagtattttctccgttgtcaactaaagtgagctacccatcccccgttttctcaattatttgaagggaattttctttaattagaatgaggactactatgataattagtaaaaaaaaaaattgttttttgaaaagtcggtatctggcccaaagaccgaccaatctgaggggtccaatcccaccgtccacttgtggggcgccatttaaagccagaattaagctctgtatggtaccggagaatcgaacttgagaacacactcccaagccccaattagttgaaaaaattaaacaagagcagctgcttggtaatttattatttccatggtaattatagacttatgaattgtgtggattgacttatttgagtttacctactgacacatgtacttctgagattgtttgacaaagcttatgacatatccataagctgatttcagcttattttcatatcaggataacttataccttatatgaaaactatttgactttattttatcttttgttaaagcttatacataagcactcatatgataaatgttatgccattaacgcttaattaaattgattattgaataggtcattgttcattcaattttcgtgaacatgataaaaacgagaccaaagtaacaattaagcctttttaatgttgcagatatttcttaatcagatttttcgtttggttcattataacgtatctcattattatagccgtataggtattttatttatatgactttttcctttttgcaggaaaagcatttctctttcatctattgtgttgagga

SEQ ID NO: 34889 - DNA, 794 bp, Medicago truncatula
  Intron number 1 from transcript Medtr5g047030.1 (locus Med tr5g047030) derived from phytozome v7.0 (chr-ID MtChr5; po s 19820848 to 19821641 reverse strand)
cgttatctgccgaaattgaaccactgcccacccaagtaattttgatagcttgctctatcggcggtaatgaggtggcagttatactgtctctgtgtcgggtcatcaatgagagtgattgtgttttgcgctttcctttcagaattgttcttgacatctcatttgagaaatgctaaacaggaaaataactacaatattagtctaatgcatatttacatggataagatgtatacgaatatagttatatataatttataaaataaaggtagcataatacaatccaaactggttaggataaggtagcatatatagctagcaccatttgacattgatgtcttcgaacatttggtgcaactcacataatacaatccaaactggttaggattgaatttagttgttttccaaatagtgatgcagtatgtttcctaacacaaattatgcacatgaaataaagaataatgcaatatgcatttttaatttgtgcgtaaaaaaattcaaagcatgtttgtgcataaaaaaagcagacattgactaagtttataaattcagcaattggcctaacctgagacagtttggaaaaatcgttgtacggagtacgttgagaagaagtcgaactctgacttaagttctaactgaatctttgactctgagctggagaagtgttaaggtcacgacaacaattctagaaacatggtcaaaaaataatcaaatcggattgtgaaataataagttattctaacactgtaatgcaaacttactaagtcttaaacttctcaacaaccggatgatgtaggttg

SEQ ID NO: 34890 - DNA, 529 bp, Medicago truncatula
  Intron number 1 from transcript Medtr3g022220.1 (locus Med tr3g022220) derived from phytozome v7.0 (chr-ID MtChr3; po s 5713660 to 5714188)
gtaaaacctttgcagatattattggtaagttttagttaggttcaccagttattcttgcttcatctaactcactcaacacaataaaaaaacattgagttcatttttttgagttgactgtatgagaagcaatcaaatcctagtataaaaaaaataagatgtctcatcgatgattcgaaaattagtctcataacacactctctaagggtctatgttgtcgggataactacgtacaatttgtcaattgatgtctcatttagctcttcaagtgtaaaaagccggggaattggatatgttgtggcgcgtgttcaaacttgtaatacatttctttgtgtttttgagttaagtttctctgttcgactctttgatgaaaaaagaggattaaaagtataatatttaatcagaatcataaatattattatttttttgacaaaattactattaatataagatatataacttgaatgattttcaaatattttatgatctatttatgaaattattttttgcagctcttaaattgggtttacca

SEQ ID NO: 34891 - DNA, 613 bp, Medicago truncatula
  Intron number 2 from transcript Medtr5g082250.1 (locus Med tr5g082250) derived from phytozome v7.0 (chr-ID MtChr5; po s 30931032 to 30931644 reverse strand)
ttcaaagtagacttctaattttcattaaggtaaacttgattagaattcttttcttttttggcatcataaagtagaattaattcattaaatatcttaattatatatacttataaaagagtttaataactatatatccatcaatagtataactaatttttatacaaaccttcaatcattaggtgttcatgccccctttattatagatctctgtgttgtaatgttttgctccttcttcttgttttgatgtaagcacttttgttgttaagggttctggctctctccaggtcttttatagattttctttgcttgataaaaaaaaaaaatcataattatcattttttttaaatattgaaatatctctattgtaagaattgattaaatgtatgtatgcatacattcaacaaaaaatttgatgtttaaatacattttttttattccgacggtctatactaattaaactcattataaaaataaattgtaatgtttatttatttcttaaaaactttccaacaaaaattcacataaatattactataaattcctttcaacatatgatttttatcttgatttaaaataaatttcttaaaaaattgtaggaactgtacgagctcgg

SEQ ID NO: 34892 - DNA, 926 bp, Medicago truncatula
  Intron number 2 from transcript Medtr3g122450.2 (locus Med tr3g122450) derived from phytozome v7.0 (chr-ID MtChr3; po s 30461494 to 30462419 reverse strand)
acgaatcccctcaaggtagaaccgctattcctttttagtatcttatagtattattaacatcgtttattgtcattctaaaaaattgattaaggtcaaagttaccaattaccatgtagaacaaatataattactgacaatgttgttgttccatttgtactatcttacaattttaaattttgagccttttgtatagtgtacgtgtaaaacttagttcttgtaaagtcggtgacgtacctgtaccacatatatacctgctactggtacgtgtatggtactttgggttatttgcgtttctattggaagtgaaatttgtgactttattaatataataataataatatatgatattatttgtgcatttgagtttctttgttattgcaaccaaccttagaattttttttacatttttaatctctttgatacttttttttgtgaatttaactctttcatgttatattatatattgacgtactggtaccttaattttttaagaattgttgcattcttgttatgggtatcgtacccgtacctatgcaacatagattatagttgaacatattatttttatagataatggactcatgttaactccttgcagcaccaacatttctgatagaaaacgtgtcctgtccgacacgtgttaatgcccgacactgatataaatattctatttcaatgatataaaacaaagttcactgcagtgctaattttggcaaaatcagtaagtgtcacaaatttcagggtcatagttataacctataggactttttgacttagagaaatcacaatgtgcatttcctttttattatgtatcttcaattgcaattaccatatacatgtgtgccctctgatgttatctgctgatttatttatttggacttcgagatgtaggtggtactgaaggttcaaagcaaagcagaagtgag

SEQ ID NO: 34893 - DNA, 814 bp, Medicago truncatula
  Intron number 1 from transcript Medtr3g150700.1 (locus Med tr3g150700) derived from phytozome v7.0 (chr-ID MtChr3; po s 39758103 to 39758916 reverse strand)
ggacctcgtaaatcaatttccttagcacgccctatgtatgcttctgttgtttcttatggattttactgtttaattaaatgcttgatttgattcctaatcattattttttatgtttcatattctttcttgatttttattcaaaattttgatttttgatatattatactagaattgattatgaatattgtaatttacactttttgggtatacttgtttggtgccataattgtagaactccgtatttttaaagtgtcaatgtcaaactaacgtggctttctaaaatttcagcttaattggttggtttacacttacagtagtatttatgaagaaattattttattggtgtactggtttggggtcagtttcaaggtttttttcgatcaattaatgagattgagacatttttttagttctttacatataatttttcctacgaatttaaacaattataaagcatagtaaagtaaatatcaagtatggactatgtgcatgcaataatttatcttcttcctccttatatttttaactgagttgtcagttgcggaggtatatgatcaggccatagccatctatacaagaaactgtattcttgattcacaaagaactagaggagcttgaatgctttactttagttgttaattgcattctgtagaattattattttttgcataactctgatagctcttgcttaagtatcgaagaagaaaagataagtgagtgagggttttatcaatttaaattacggaataggatcttagaatctacatggaattggacaggggattaacaggagagcggacagtgaagtcattgc

SEQ ID NO: 34894 - DNA, 868 bp, Medicago truncatula
  Intron number 2 from transcript Medtr5g084690.1 (locus Med tr5g084690) derived from phytozome v7.0 (chr-ID MtChr5; po s 32249850 to 32250717)
atcttttttactcgggatatttttcagtagttaaggtaacatatttacttttcaacactagctcaaatcgcacaataattctttttgttttgtcttgagtatgattcaattgaaaagaaagtggtgaaagcatttaaataacctaagtagtgaaaaggaaattgttagtgatagtacatgaagagagaaagtctgattctagtgtttgattgtatttaaattaggtgagtggaatgaaataccctgcagcatgtgaatgaagaaatattttgattgttttgattttattttctataaaaaaatattcaaattagtggttttagtttacatgaattgatgtttctcactcttggatattttcatgattcttaattttcctgaaagatctacctgaaaagcctgagaaagttgtgtaccttgactatctcttggccttaaataaagcgtagataacaaattagagaaagaattttatattattagccttatgttactgattatatgttcatggttagctactattagtttcttgtatatattcaaagaattcgattttgcataaaatcatggcagcttttattatttataatacttctttcgaatgttggaccaactttttttttggattggccaagagacaaacccaaatctgcagcaaccgtccaaactgaatagatgtatcacaaaacctcaaactcagtcacggcggcacgatttgagtgaacccaaatcgtcggcactacctgaaggtgagaaaaacataagaaggggggttgaattgtgttttctttttctctaaaaattcttcttctgataacacttcagaagctggttaggaatgcttctgatgtgatgttcagaatcagat

SEQ ID NO: 34895 - DNA, 785 bp, Medicago truncatula
  Intron number 2 from transcript Medtr3g136110.1 (locus Med tr3g136110) derived from phytozome v7.0 (chr-ID MtChr3; po s 34238293 to 34239077 reverse strand)
cttgagcttccctctaaaaaatttgtcttcaagtatgtatacagtatatatgcatgcctgccattttattttattttcgttttctttaacttgaaaattcaactaataagaaggcctgtagattctgtaagtaaggacaaggacagtagattagatggaggatattcagatcactagagaaaaagaaactcttaagaaagatttaaagattaatgagctggtggtttatgatagaaatttatggcataatttgatcaatgtagccgccgactaagacttgattgattttttgttgtttacctgttttgttttcataggttagtacatgaaatagtgaaaataatgtatctttcgctcttgacttaaatattcacccaattttttttttttttttgaaactggaaacaaattgaaaacataaaaagttaaaacataaaaatcaaagagaccctgatttctttatttataattgttatgatatgccacactatgttagtccaattgagaaaagaagttcattaaacatgttattgatattgttgaatgggttattatgagtatgtcgaccatataactagccattaacacatctccaaattattagcacgagtaaataatgctttggccatggatgtggggtcactagtgccaacaaaactataattaaactagttggtatacaacccctcctgttgcctgtaatttttcattgattgttgaaggaaactaactctttccatatatttaaagggtagaatcccgaaagccagaacgatattcatcgg

SEQ ID NO: 34896 - DNA, 499 bp, Medicago truncatula
  Intron number 1 from transcript Medtr3g138340.1 (locus Med tr3g138340) derived from phytozome v7.0 (chr-ID MtChr3; po s 35358139 to 35358637)
ttcacatccaggttagggattttttttttactcctttacaaagttttcatttttaaatgttggttagcttgatttggaatttttgttcttatttcgtgtttttatgttatgagataatgcttttttgacttaaaatttacttgggtgtcctttgatttgcgtgtgtgttttttaaatgttgtgtaaatagtagaagagctaaaataaacacatagtgtgtgcttgttttttggtgttcaaataacgcaaactgcatgtgtgtgttaattacaaggtgtattttaatgttcattttgaaatgtgggttagtatgatttgaaatttttagttcctatttgatggttttgttaacaagaaatgatttttgacatcaaaattgttagcgtcctttgatttttgtgtgtgtagaagattaaaaagtatgagatatagagataaacacatagtgtttgtattttgatgttcagataacagaactgtgtgtgttaatttcaggtat

SEQ ID NO: 34897 - DNA, 479 bp, Medicago truncatula
  Intron number 2 from transcript Medtr4g081430.1 (locus Med tr4g081430) derived from phytozome v7.0 (chr-ID MtChr4; po s 16987069 to 16987547)
gagtaagaattaagtttaaaaatcattatcttacctctaaacatacaattttatttgtatgtcataatgtttgcatttttataatttactttaaaatttgatttatgtttctctagcatttcaatttttatgacaaacacaaaaacttccttgcatatctctatttttctctctcttctttccttctcaaaccgtagcgtagcccctttcttcttcttgtctaccgaacaagggtgatttagggttaattttgacccaaaatcaccctttcgaattgtttttccttctatcctaattgaataagtgatttccacatattttcagttttctttcatttatttttatggtttcgttgtctctgcacaactgtgtttgttttgatttctcgcctttgtccggtgtgttttttatttcacgtcttagtgcggtgtttattttatttaggattgaagattaactttaagcaagtgcagatccga

SEQ ID NO: 34898 - DNA, 938 bp, Medicago truncatula
  Intron number 1 from transcript Medtr4g140880.1 (locus Med tr4g140880) derived from phytozome v7.0 (chr-ID MtChr4; po s 34651143 to 34652080 reverse strand)
gaactaatgtatgcactttttgctagtttggttttattttttttatgccactatttttttgatgcacatggtttatgataattttattataaatgtaatatttatcaaagaaataatcttattgcttgctatattgtcaatggcggaacttagcgatacaatcacggcaaagtagtgcggaattgagttgtgaccatcccgacgctgatgtagcgccatgcacgttttgcctttctgaacgttcgttttcgtccagttgtttttatttgtgtatttgctatttgtgttaatgttcagaaattctgcaagagagggaaagggaaatgcacaggaaagaaaaaccagtgtagtaatgagaatacataaatgaaaattatgccaattcttgcttgagatgttatttccttccactccttccagaagtctctcatactctatgtaatgtagtagagggataagagacaatattctaaatttactatcctttctatgtgataggacgttatgcctttcctaacataaccctacctagcaaataatgacgattatagttgccaaccctttccctcctgatttatagactaaggatatatttgattaagggcccgtttggattagcttattttagagcttatataaaacagcttatgcaaataaataagtttttaaatattatttataagtttttaaggtagtttatgaaaaaatagtttatgaagatatgattttcgttagtgagaacttataaattaaaataaaaacttatttatttacataagctatttttcataatctcaaactaaacggggccttatccatgcatttttagctttttgaagtctaatgtttcttatcccataattgaccttgctaattttcaaaactcttgttatctgaatgcaggaaaaggttgcaacagctgagcaggaccacataga

SEQ ID NO: 34899 - DNA, 956 bp, Medicago truncatula
  Intron number 1 from transcript Medtr2g088240.1 (locus Med tr2g088240) derived from phytozome v7.0 (chr-ID MtChr2; po s 19909957 to 19910912 reverse strand)
agagagaaagttgtcgcaaaagttgtcaccaaatggatgttcaaatattatttctctttcagagtaatgatatttgaacaactcttttggtacaacttttgggacaaccttgttgtattctcttcttattggtaaaaaagatagagagaaaaaaaagaagagagagaataagaagataatatgagtatgagagagaatgttgtacaaaagttgtacaaaaatgattgtacaaatatcatttatctatacaaattaacggcattgtgctcttgtcttatcaagaataatatacaaattaaaccgttctaaaattacgttttaatatcatatatgaaatgtcaggtaaaattattttctttttgtttgttatcattataatatgaaattttcactcccttttattcttatcaaaagaaacaattcactttttaaatttattagataacttatattttacatccgttctaaattataagaaaaaacttttttttttcttccttaattataagtaaaaaagacaaattttatcacatttaattatgttattttaaaaataaaatttttcaaaaggaaattacatacaaactatatttaatttgctcctcctttcattttctctataatcaataaccaataaaaatgtttttacatttttctataacacttattcaaaaaataacacaagaaaccaatatattataaactagtactactatattttagtttttttaataaatatgaaaatttttcattcttataatttaggacgtagtgagtatatatatttttgattggtatgaaagggatcattgaaaaaggagaaaatgacccgtcatcattctttggtacgtactacgtgagagtgtgttactggtgcaataataataaacattaaagtaatcaatgacgattatatattaggccaacgcattatcgtatacaacacagtgacacca

SEQ ID NO: 34900 - DNA, 852 bp, Medicago truncatula; identical to SEQ ID NO: 31177
  Intron number 2 from transcript Medtr4g159170.1 (locus Med tr4g159170) derived from phytozome v7.0 (chr-ID MtChr4; po s 40102235 to 40103086)

SEQ ID NO: 34901 - DNA, 810 bp, Medicago truncatula
  Intron number 1 from transcript Medtr3g093160.1 (locus Med tr3g093160) derived from phytozome v7.0 (chr-ID MtChr3; po s 22071819 to 22072628 reverse strand)
acaaaaggtcttggatatattggtcgcttttgcaggtataaaaagttattttaatcatgaaagttttgttcggtagttctttattactactttgttttgttcttttgagatttcaatgcttaatttgaacgccaagtgttcttatttggtttggtattcttgtagttcaattttttttatgttattgctcaataaatctagttgtttttgtttatgggtgcgtcatgtgacagatttgactattggattatatcattatagatttatagtactaccaatatgtggtaattgtttttgttatatctctaatgggtttccaaaatatttgatggttaaccttacattgatttcgcttgtttttttcttgttttagaaatttgtccttttcaaattcatagaattttttagtgattgatcattttggagcatgtttaaagaagatacatctactgactaaaactttgtgaccaatttgtttggacttagtagtgattagtgaggaacatagtcacagaagtctttgtaatttttccttatgataataaataaaataattcccatttcccatatttaaaacctaaaactttatcctttcatcatcctttcaccgtgttttttgaataaaattccgcagggttatcaatggtcttacggtgaacaaattgttatgtagtatgattatttcaagtacaatgatccgagacattgtttcatgtaagtttatgccagcagttatcggttattgtgactaattgtaaattttgggttttggcaggagtttaagagttttgcttttggaggaaagcacaa

SEQ ID NO: 34902 - DNA, 771 bp, Medicago truncatula
  Intron number 2 from transcript Medtr5g033960.1 (locus Med tr5g033960) derived from phytozome v7.0 (chr-ID MtChr5; po s 13858062 to 13858832)
acagcagggtgagaacttttaaacatatattttttgtgtctgaaggtctcttttccctcctcccccctaaaatgagattatacaagtgatgatgttgttcaacttgttcaatttttggttttcatacatgcatgtcttcttatcctcagcctataacctaaacttagttcattaagaatcaatttggggagggtcctgttttgttcttagaagcttgtgtaaattgtaattcagaagtggtttgaatagaaaattggtcctgagtcctcgttttaagtttgtccaaagaggaaggagaacatttgatgaaacttgagaaaaaaaattactttatcagtgccttctacaattctacttataaacaggcaaaagtttaaaatttaagtatatctagtatatgttacaaggttgtaagggtttgatcaattcctagaaatttgtttacccttcaaaagtagtttgtagttttgtactttctaggcttaagaagctatggcattatagagatgctttgaaagctacttgtgcctcttgtttttcaaatttaaaggaatatcaaagccttctaaagaaattgcaatccattattctaagtttatttattgcaacttgtgtcgttgatttttaagacaccttttgaaaaggactggcaaatgacaacattgaaaatacatacttcatttatgagatgaatttctgtatgtaaattgaggatggcatttgtgcttctcttcaggtagaacctgtcgaattgtcaagagtcttatcaga

SEQ ID NO: 34903 - DNA, 846 bp, Medicago truncatula
  Intron number 2 from transcript AC231342_21.1 (locus AC231 342_21) derived from phytozome v7.0 (chr-ID AC231342; pos 100271 to 101116)
ctcaagttgcacgtgattgccgaagtaaaacaaaggtatattccctgcagggtcttctgaaatctcaggacctataatatgtttgcacttttttttatccttctgttttcaatgtttctgtacaaagtttcatatagaaacagtgagaacaaattttgattgttatgttttgattacacaatttggaaaacatgaagagtgacaattttgaaattaaaataaaaaaatgcaaaataaataaaaaattctaccaggctcttagtattcttgtgattaattaataggattctttggtacaccaagtaccaaccctgatttcagagaaatttgttcattgggtcatttagtatgtttggttttgtgaggctttcacgtcaatcacgataaaaaaccatgttgacgtggaagcttggatttggagctttgatgaaattgcggcaaaaaaagtacaagactcacaattgaagactgaaacatcaaaccaaacatatatttgtcaaaattgattttcttagatcaatgctcctaagaactgctatatggtaggataaatgtgataagaacaggtgtcaactgtcaagtttgaaccaaggttaggtctagccgaaatggctagtcttccagacctaaagtttgaatcctagttgggagagctatccacatttagtgctcgacagttcctcgaacatgattacctccagtggaggtaatctgtaggaagaaaagaagagatgtcaagtgttgtggcctgggtcatttcatatatgttaaactgcataacatctaaatgccctttttttttcttttgtttagtactaacaataaactttgtaacaggtttttgca

SEQ ID NO: 34904 - DNA, 402 bp, Medicago truncatula
  Intron number 3 from transcript Medtr4g025770.1 (locus Med tr4g025770) derived from phytozome v7.0 (chr-ID MtChr4; po s 6211323 to 6211724 reverse strand)
gtcgtcaccggttcgaattctccgattctacaaaggtgagatttgttgttgtttcagtgtttccaaaatgcctcgaaaatcgtttattaaataagttgtttcagtgtttcttcacttgtcggtcgtcagaaaatggtattttgttttttgaaatgggtttttgttgttgtttgtgagcctctaatttgttgtaatgtgagattgctgagttttctgatttgggtttctaagattgcagttgtttgtgaatgtttaacaattgatttttgtaaatgtgagaatgttttgttttcttagttttttgtttgattcttgttttgttttcttatactgtttaatcattctgttgttgattttgaagtgaaagttggctggatttttgtactgattaaggtaaaaaca

SEQ ID NO: 34905 - DNA, 715 bp, Medicago truncatula
  Intron number 3 from transcript Medtr5g012850.1 (locus Med tr5g012850) derived from phytozome v7.0 (chr-ID MtChr5; po s 3781269 to 3781983 reverse strand)
cttcttcaaatcatagagcatccttggaacaagatgtaagctacatatattcatttatagattcctaactgcaatattacctctgaactattccgttcaactttccatagaccgagataacataagttcaaatttatacttccaacaaacttgctatgaaatcaagttcatcttatattttctatattttaaggcataacacaagttcaatttaaaaggggtaaaagccaatggtggttggctctcgcagaaagagtcaatcccccacaatgcgatgaatcaccgtttgaatggccttaacaagggaaagaaattagttatatctacctgcaacttattgatatcatgtgtttcactaaatcaatttggcatactcttttcactatattgtgggatcaaagagaaaatttctgaaacagcctatatcaataaagcaaaccttagaagcgtcttaagtgaaatcaccatggaaaaaaatagaaagtaatggttataaaaccatattccttgttaatttcggagatgtgtattgtgtatttaggttctgaaacatctgggaagaaaaacgttgagctttaattctgaaaagataactaaagatagtataggttcttgttttctgtacgatgaccatggcatagtattttactgattcctggagttcctatgttgatatgcaggttgagcagctacagctacacctacagaaggagaa

SEQ ID NO: 34906 - DNA, 551 bp, Medicago truncatula; identical to SEQ ID NO: 28628
  Intron number 1 from transcript Medtr4g006130.1 (locus Med tr4g006130) derived from phytozome v7.0 (chr-ID MtChr4; po s 653971 to 654521)

SEQ ID NO: 34907 - DNA, 538 bp, Medicago truncatula
  Intron number 1 from transcript Medtr2g096190.1 (locus Med tr2g096190) derived from phytozome v7.0 (chr-ID MtChr2; po s 22216806 to 22217343)
ggttagaaaagggtactggttagcattctttgtatgtaagttatgctttaatatgcagtgccatggctgttaaactttttgtatgattctttgtcattttagaattctttcttactacataacacatttgataaatgtcacctgaagttttgatgtgaggcaggaccataaatatcatcaagataatggggatcgtatgaggagggtttatgtacctttgattaagataagttccctccactaaacttaacttatggtgttaactgatggtgatgtcattggcaagatgtacattcttgtcataattttgatgtatatgtttttatagtatatatagtctcttactctattagatttttccatttcttgtgtaagcaattaagcttttaaaaattgcttttggagattaaatagaagggtattcaatttttctcacaggcagagataagggattggttgacatacttctctcgaacttgattgtggaactttgttttgtgtcaatcttataaacatgatttggatatattgaatgcag

SEQ ID NO: 34908 - DNA, 878 bp, Medicago truncatula
  Intron number 3 from transcript Medtr2g071130.1 (locus Med tr2g071130) derived from phytozome v7.0 (chr-ID MtChr2; po s 16259379 to 16260256 reverse strand)
tggaaggttaaagaatgtgtaaagtttgtgttagcgtctatttatgatttatgttagtttgtacatactatcaaatagggttgagtatagaggatatggacctttgatctggattttatcatttcactttcacccttactaggtgatttttattagacttggttttgtagagacagtgaaaagaagaagaaataggaaaggagggagggagggagatttgaatattgttgttaaatactattcttatcatgtttcaaccacctgctacttttatttttctctttcatttatgtacattgagagtgtggtgtcaattgagacgatgaacacgtcttacattttgatggtgaactttatatttaactatttttatttatgtattgaagaacgataggtctcttgaatcaaagaaggaagtaatagtataagcaatacttgaaaaaggaggcaccaaatagttcaaagaacaaaaagaaggtgcaaacaatatgagaacaaagccaaatagtgggatgaaaaggccaagtagtgtggaatagtcccaaaattatagttaccatttttgtttgtttatgtcacttgagaaatttgtggcctatggtttttgtttggtgttgttgtagtcatcactacatccttttgtttttacttatatacgagagggattagaacacattgaaagtcccgtttcactgcatatatgtagttaatttcaggaatatttagataatcttttgcttattttctccaaatttatatgttaccatcactctctcaacatggtaattaactttgtacatttactactttctattttaccttacaactgttacattattttaggttggagatacagcctgaaagagtagaaattggtg

SEQ ID NO: 34909 - DNA, 855 bp, Medicago truncatula
  Intron number 1 from transcript Medtr5g101270.1 (locus Med tr5g101270) derived from phytozome v7.0 (chr-ID MtChr5; po s 40527021 to 40527875 reverse strand)
ccgtaccaagtaattttactgctgagattcagattcctcaagggtcgatagatgaatgaaagtatacctaaattgagtttagagaaaagaccaataaaaataataataattgaccaatcagatatcatatgtctcataaccccattgacatagaaataaatctcaataacttccatattaatgaaaagtagacactccagacagattttatgattttcattcaagtcatgtttactgaatttcttcttaatacgaattagttttgtatcatttgaactgaattagactttttgaatttttatttatttttttaataaattgttattagcgttcataaatatatatgaacatagatagagttggatgcagggaaggctcttgcttgcagcctccaccccatgtcgttcctagttttaggttttaaaatttaaatgcatcaattgtttaaggtgcatgttttgtaacgcagggcggtgggtctaaaagtttggatgctgtttgtgtatcacggttgtgggatctatgtttgtattgtggtaataatggatagtgggtgaaagctttaatgctttgaagtgtttttggttaactaacctaaggtttattttgttttttgtaaaaaaaattattgaagttttatttggttcataaaagcttcagatttattaatttcagctgttgagtaagacattattttcatacctttcaaccggattctgatattatgaagagcaagctgtacctcctgagtcttgtgtgtttggattcttaagttgttttctatgcggcatgtacgtttactttttcacaaaatctccaggtcttggtaggtgaagccctaggtttgttatcctc

SEQ ID NO: 34910 - DNA, 552 bp, Medicago truncatula
  Intron number 1 from transcript Medtr3g154100.1 (locus Med tr3g154100) derived from phytozome v7.0 (chr-ID MtChr3; po s 40687278 to 40687829)
ttgcaggtacctctttcttttattattagtgtttcttttaatctttttatgattaattggattataaaaataactagctgatcaatcatttgcataatcaaataagttaagattagttatttgtctttaatatcttgagtgaaagatcagaaaaaaaaaatatataaattttgaagtgcaaggatattttgcacataaatgcaaaacttcaggaggatatttgctcgtaccgtaaagaaaatctaaattctggaagaaaaaataaaatatcacctgcaagacatatcagatatgtggtagtgccaacagtcaaatgtcaccgttgactaagatgagaaatttgaccgatgggataaattgattaagtgcaatttcaagaggataattgaagttttgttaatgtcaagttaatggttaattgaggacgacgaaaaatataatttgggggtaattgtttactcttaaatttattatccttaaatttagtataaattgctaattaactttttaattcaagcttttacgatctattatttcttcctcgccgtcgtt

SEQ ID NO: 34911 - DNA, 872 bp, Medicago truncatula
  Intron number 2 from transcript Medtr3g028600.1 (locus Med tr3g028600) derived from phytozome v7.0 (chr-ID MtChr3; po s 7397662 to 7398533)
caaggtatcatcaatttgtgtaatcaacttattgacccttatttcttggaggagcagggtcagcatgattagaattatataacatgattttaattatattgcaaaagataccatgatgtattgttatagtgcaaaagatatcatgttgtattgttacattgcaaaatttatattgtaaaagataacatgattttatattatattgcatgtcataatatattttaatctccttagactctctaaagtttaagggcattcatgtaattttaccaaagtttaaataacattttagtccctataatatacatctattctggttttagtccctatagaaggtagtgtttttttccaccatattttgtatataaaaataaaataaaaaaataaaaacaaatatccgaaagtatatttcagaagtttttgtccaaaaacataccttggaatgtaataaaaatgtattttttttcattcagaaatatactttcgatgcgactctgaaggtggaaaaagaaactctcaaaatagaaatattttcttttcaacctctgattatagtccgtacaatattagatttatgtcgagttagtccttgcaacatgtgaactatattcattaactttagtctctaaaatatgacatctacttaattttgttgagactaattcaacataaacctaatattatagggactaaaatgaaagaacgaggaccgaaaacataaagtttttattttagggactaaaatcaacaaataattgttcaggtacaaaatcaaaaaacactattattgttgggactaaaaaggttattaaagtcttttacaaaatgctaatagcatgttctattaatttgaatgtagccttgtattcaag

SEQ ID NO: 34912 - DNA, 257 bp, Medicago truncatula
  Intron number 1 from transcript Medtr6g038930.1 (locus Med tr6g038930) derived from phytozome v7.0 (chr-ID MtChr6; po s 8505508 to 8505764)
gtgggtaatatctctggctgggatctacgtgataagtaagcaatcttccttattgttattgtatttattgatgcaattacttgtgcaaattttaaagctttgactcataaatttaattaattacaaagccctcgacaaactattttaattaatcaaaaggaagaaacttcgttatttggttatattttttttctttggttttggtatgtgatgatttcgtgttgatggttaattgttataaatatgcaggccacatc

SEQ ID NO: 34913 - DNA, 589 bp, Medicago truncatula
  Intron number 2 from transcript Medtr6g008660.1 (locus Med tr6g008660) derived from phytozome v7.0 (chr-ID MtChr6; po s 1208657 to 1209245)
ggagggtaagtaagttataatttctatgtctttgataaaacaaggcttgtatggtcacaaataatttggatttaattagcgacacatacatgataaaaaaaatagaaaattaaatattattatatcaataataataatttaatcatttcttgttctactttttatcacttgtgacttgaaatatagtttcttgaaatatgaatggatatatgaatacaaaaaagaaacaataataatgatttgatatttagtatatataaacttatttttaggaaagtgtatataaaacttcttataccatatttccattttattatgtttatatgttaagtatatatcttgaagtataaagacaaagctatatcttaatttcgctgcgttaactatttggtaattgctcttctcccatctatttttgcttatttccgtcaaatagcagagcgtgagtgaactcacgcatgtgtaatttcaacgtgagttaacttacgtaggtgtgtttttcaacgtgaattaactcacgtagatgtggtgaaattattgattattgatactcttgtgtatttattttgtgggcagattgcattccact

SEQ ID NO: 34914 - DNA, 1053 bp, Medicago truncatula
  Intron number 2 from transcript Medtr6g076610.1 (locus Med tr6g076610) derived from phytozome v7.0 (chr-ID MtChr6; po s 14779626 to 14780678 reverse strand)
aaaatccttaactgaaaggacaaagtatcatttaggtttgacaatgcttgctctcttgatccttttactttgctgattacattacatggatgtcattgttgtatctgggggtattgtaggtgctagttctggatatagaagaaaatagtgtttactcataggaaatatttattaaaacttaagtattcatgttcattctaacgagccaattacaagccctaaaaaaaaaataccctgcacaaaagagaccaaacaagcaacgcatcacagtagacagttgcaacaccgtaggcaatataggattgtgcaaacctgatttgcactactaacagcaaatgcaatgccctgaagaaggtttgtgacaaacggtttggtttggtttggtttatcaaaaccgaattataaagtggtttggttcacttgatttggttaaccatgtacacccttaagaagcttttagtgaatgaacatcatgtagaatcctgtttttttatttttatattttggagattttgacatgaggagttcttattattttttcagtaaatggacccataaccattttggtggggtattccattcttgttctttatttcccttgatcattctatttcaaatctttattcccatattaggaagtaagctcaattgtgtctgtaggaaatgacagcttaagttctagataactcaacgggttactttctgttcgtaaagggagttacagttttcattgttaattagaattctgtaaaatctgtcagaaataggatattaagatgtaggaactaggaagacagggtaaagtagtgtattgtatggttggaaattggtcttagggggagtgataccaggttagtcattgatctagagctaagaaagatcttattgataaaatcatcttgtttctttcattctttctcaagtgtatgggctatgaaccagagtctatcagattatttgttcttttattaccaagtattatggcttatcctggaggtgaatagcacctcattttacttaggaaaaaaagtaaatatagttttgatattttcc

SEQ ID NO: 34915 - DNA, 991 bp, Medicago truncatula
  Intron number 1 from transcript Medtr6g076610.1 (locus Med tr6g076610) derived from phytozome v7.0 (chr-ID MtChr6; po s 14780972 to 14781962 reverse strand)
ttttgccactgttctcttccaaatctcattcttctgtaagtttctttcagatctctatcatcttcttgcattttcattatgcttatctgatttttatatatactttaatgcatttttattgaatttattgtgtttcgatacaatatatgaatgtaattgattctaattgattttgcatgctagctataaattgtagcttttaattctataattcatttttacactctatttagatttgcctaaatcagatttacattatcaattcaaacataatcagtttttgttacagtggaaccaaacatacaagttgaacaataaacttgactgtaaaaatcaattcaataatcagaagctacgaatttttacttacaattatagaatcagaagcagcaatttctagcttcaagtagaggcaaaactagttctaatccagagtaatcaaacatgtcaaaatctcctccaaaaggggaaccaaagatgcacttgaacatacttacagttattatgaatttaaaggagatttacgtagattttgtgtgatgtattgtttcacttccttttatgtgttcttgcttgcatttatgcatttttatgtcatgttcttcttaacacaatgaatagaaatggctaggtttttgtgtttatttataaaaatgaaaatcactttttaaaaaataaagtcaggtataaaaaaattgattttcagaaaaatcgatcaaaacagcttcttgtttgaagcaatttttagattttttttccccaattttttgaaaatacgtaacaaatggatggaattttttataattgattattttgtttgaaaaaagttgttacaaacaggctctatatatagtggaagtgaaacattttccttttgctgacgttttgggatatctttaaaaaaaattggatttggttcccattttttatgatttacccttaattgtgtaatccaatttttgtcagctgttcctctgttgtggataacaaa

SEQ ID NO: 34916 - DNA, 931 bp, Medicago truncatula
  Intron number 1 from transcript AC235677_20.1 (locus AC235 677_20) derived from phytozome v7.0 (chr-ID AC235677; pos 91582 to 92512 reverse strand)
gtaaaagccttgaaggtaaatactagctacctattggaagctaaaggcatatttaacgttcatctaaaagtagacgctatttagcgtttgggatattttgacgcttaaaatttagatttaaaagccgttatgagtttaagcgacttaaaagatatattattttttataaaaaaatctgttttcctccatacacttatgcgtaaccaaaattttctaaatagcaataatttaatacaaacatacttcacgaccaaaatataacaccttataaccaaaatttaatagatacatgtaacatcagaaatgatctaacgataaattatttttgaagctaaattgcatttttcttgtagtgatttcacttttgaggaatgacccaactacaatctgcaaaatcccatttcaacactataatctcaccatgccctttgatatgtcaatatttcaaattttctttcatgaattacctcacatcacatgccctagtatttccaaaattactacagtctacaactttctctatagtctaatcacatatagatataccttatgttacttctatagaccagttatatgaaaacaaggtttaactcatataaattgttacctcagttatcatcagtaacttaatgtagcaaattgtaactaaaaattctttaattacttattaaacttgcaagtgctacatcacttatgtttgtaccagatttgagagacacttaaaaactcgtaatgtataaaaattaaacatttatttacttttctttcaaaaatatctaaatctaaatgcattgagaagacgatgagcatgtcaacgatatctacctcttatttccgcaatgtacttaattttgtattttagccaataaagctaagatcaagtaatttttatgcaggtgagccaccagatctacggggattatctccctag

SEQ ID NO: 34917 - DNA, 766 bp, Medicago truncatula
  Intron number 1 from transcript Medtr4g142540.1 (locus Med tr4g142540) derived from phytozome v7.0 (chr-ID MtChr4; po s 35500758 to 35501523 reverse strand)
actacttacaactctgccaccgtaggtaactatatttttatttttatttttatttttatttttatttctatttcaaatcatacttatttaaaattaaaatatttatcaaagagtgattgattagagaaagtcttgcataggcacaaatataaatgaaaaatggttagacacacatgtataaattgatacagttaaaagaaaaaataattgaatgatgagacttgattttttctgctttatttttctctatttgtgtctaggtaagactttctcaattgaaccttcactttcaaaaatagtcttctagtctaccaagtgtagtactgtagtcccttccgaagcttagtatgtatatgtatgtatttatatgtgattcagacagaaaaataaaaggttgatttatttgttgaaagattgaatttatatattagaaggaccagttttgaatactttcaatgtaacctttgtatgcttgctaggcgtggggttttgtgtgacgtgttagcttctgaattcaacttatctaaacttctaatttttttaaaaaattgattaagacttcatcgtaagaattttgtgcaaaaatatcattattttgattttgatttgtctgattttaagtttaatctgttatttacatgttgagtgaaccttcactttcacatgccataagtatatgtatgcatgaaagcatggttgttaatttgttattgtagtattgttaatattgggtttattttatatatgttggcagcggttcttggcg

SEQ ID NO: 34918 - DNA, 977 bp, Medicago truncatula
  Intron number 1 from transcript Medtr6g080740.1 (locus Med tr6g080740) derived from phytozome v7.0 (chr-ID MtChr6; po s 16274991 to 16275967)
cattataattttttctgatttaagagagaagggaggtgtaagtgtcatttcaagttaataatacagtcaatattatgcaggtccgaggaagataatgatctaagatttggttcttataaaaaaaataaaaataaaaataatgatctaactctaagtataggttaggtggattgtagaatattatttttagagtcacatttcttcaagttggtcatggtaataatcttcataatttactcgaacaatgttaaatatgtttcatagtataaatttcctttcagtgatatttattagtacacctccattagttcgaactcacgtaaagaagtggttaaattagtaaacaaaatcagttattaataataataatatatttgttaacggtgtgttttaacttcaaaattgaactttatgtaagaataaagaaggtaaataagattcttatatattatgaatatcaactattttaaaattaaaatatatgccacacaaccccataaactaaactaaactaaatcctcttacaacacacaagcatgcgcgcgtacacacatgcctgtgactaattacatttacttcacaattcatacatcttttgaattcatagaatatcatttaagaatgactaatctactttcattgttctttgtcacaagaatgatattgatttgtttcaaaattgagaatagtaaacggcttgagcatgaactactataatgggcctatttttttttcttccagcatgatatgatctcttttgggcctatttttttcttgtttatttagagcactcttaattttttttttgttgcatatacttgttgtataaaataacaaagttctacccacaaacattataattattctctaaaaaaataaaataaaaaaacattataatttttttttctcttctaaataatggggcctaattttactaagagagccgggtctccgatttcatagggacggccctacct

SEQ ID NO: 34919 - DNA, 768 bp, Medicago truncatula
  Intron number 2 from transcript Medtr6g062500.1 (locus Med tr6g062500) derived from phytozome v7.0 (chr-ID MtChr6; po s 11409185 to 11409952 reverse strand)
acacgagttctaaagacaagagcaagatccacaaggtattattgaaaccagtcaattccaaagacatgtttagcttcttagcattagagaccgtcaaatttttacttaaaattcaatggatcatcgaaagaggtttagcggcacaatttgttgtctgcttccgtcgcagttatgtgtgtgtgtatatatgttccttttgaaattggtttgaatagagacaaactggatttttaatcaaaaccttagtatttttgggtggatgtaaattagtagtcctcgtatatatataaaagatgaaaaaaaattctatcattttctgatcttattatttacgtaacaacctttttcttattatttactaaggtaaattgcattagtttgccttgagttttacaaaacccatgcaactaccaataatttgatttcccttttccatggaaaacatatccctaactaacctgatttgatctaggtacatacgccgtctggtttaactaggcactaaaatgctttaaagaaacattttcaataataaggcaaaattcttgttttatcatttaacagcatgaatatcaaagacttataatctactgtgatgatgttagagtagggaagagagaatcatttttcacattaggaactgcttgttaataacctggaacaagatcatgtatgtgttacaagtgttgttttgttgcatgttatcgcatgagtattgataaattttatttcctttgcagttctttccatctagaactccgacaaaga

SEQ ID NO: 34920 - DNA, 590 bp, Medicago truncatula
  Intron number 1 from transcript Medtr6g062500.1 (locus Med tr6g062500) derived from phytozome v7.0 (chr-ID MtChr6; po s 11409982 to 11410571 reverse strand)
ggtgaaggtaaatctgtagacgaggcagaagatattcatcaaattaaattgacataaatctcacaatcaaatagacgaaataccaaaggtatccattaataatataagttaatcgcattcatactatatgaatatatctgaatcgtttaattttttttatgtccactaaggatgcatgattatataccctttaatacttattttgctttaccttcactattaattataaggttggtttgagtaaagttattggatctaacattgttgatttattaatcataaaattatttaaataaaatagtttattgatcatcaaactattaattaccttcactattatttaaataaaattgtttacgagtaaagttattggatctaacatcgttgatttattgatcatcaaattatatattttttccatgagaacaagattctgattttaatttatcccttattttgggtacatgcttttgatttcataaaaaaaaaaaaaaaaaaaaacgactatccacatcaatcttctctttttcacctttgaaattatgtgcgttaattgattcaatcttgtttactgcgatagcagattcatc

SEQ ID NO: 34921 - DNA, 535 bp, Medicago truncatula
  Intron number 1 from transcript Medtr3g021620.1 (locus Med tr3g021620) derived from phytozome v7.0 (chr-ID MtChr3; po s 5443181 to 5443715 reverse strand)
gattaactagagaaaatatcaaggccttcatcgtaatttataattattttaattgttcaaattttctgtttattaattattcaaatttcttactccctcggttcctttttatttatcatttttgtatgtggaagattttattttatttatttgttgttcttaaagatcagtataatatgtctccacaagtataactcagttgacacaaacaatacattgttaaatgcatgggtcggggttcctactcaggatacaccacttattcactctaaaataaaaaaagaattcaaaccactatgctaaatgctatttgataaaacaaatcagtataatattaatgttttgtcaataatatctataacaaatgtttatgatattataggaaataaagaaataattatataaagcataacaaaatttattgatttcttggtaataacatttaaacgtgaaagaaaaagagagtgtttgatattaattattagtgatgtaatttgcagaacatttttggtgctggaactgagtcatcagcatc

SEQ ID NO: 34922 - DNA, 459 bp, Medicago truncatula
  Intron number 3 from transcript Medtr3g013290.1 (locus Med tr3g013290) derived from phytozome v7.0 (chr-ID MtChr3; po s 2504062 to 2504520)
actatacaggtgtaactacattctcagcttgcaaaaaggaacaaatgacagttgaacctacaattgctgaagctcttggcatccgctggtgtatgcagcacgcgaaggatcaaagaattaaagaaaagaaatcattgtgcagtcagatgtgttggttgtagtggaatgcattagggcagattgtaaagctcttatgaatgcctttagtaaggtatctgttaactttattggtagagatttgaatgttttagcgcatagacttgtaggttatgatatgcaagtagggaacaagtcttggtttggatatccccttcctttgaatgatgttattgtctcttgtaatgcctctgttatataacgaagttgttagaatatcaaacagaaagaaaaaaaaaaaaaaagagattgactaatgcttttgaccatcttgtttctatgaccatgtagactgtaattacc

SEQ ID NO: 34923 - DNA, 734 bp, Medicago truncatula
  Intron number 1 from transcript Medtr5g076700.1 (locus Med tr5g076700) derived from phytozome v7.0 (chr-ID MtChr5; po s 28097662 to 28098395)
gagcccttgaacttgttccgatataagcttgtatgtctatgtttttttttccttttttttttaatagaaggttatatatgtatatacctattaaaaccacttatttaattccctaaatagtttttagtgcattttttttatcttatcataaagagaaagaaaaaaatcattaaaataagataaaaattgtattaccatcttgtttaccattcaaatcttttgtctatttacaatttaaatatatatctatctaaagtaaattaataatcattcgatatcgaaacaattcatttttctccccattttgctcattttctatatttaaaatttaggatgtaggttatgtacttaccatgtaaaaaatatccgattgtcaatgacttttgaccagataatatctttctcttttataatccattttcgaatgtattaatatgcttatatatcaaaagagaaaaacaattaatcataaatataaattaaaaagtatttatatattaccatctattttgtttgccattcaacacttttgcctatagatccactttaaaaaaaaaaaaaaaactcttttcctatagatatttcgaaaatataggtaggtaaaagaaagttgattcaatatcttaaattttttcttcccaattttttttttttcaatttctttttcttcaaaatgttgggtgtattatttaccttatatcaatttttttcatgctgcgagtagggtggatcaa

SEQ ID NO: 34924 - DNA, 710 bp, Medicago truncatula
  Intron number 1 from transcript Medtr2g008490.1 (locus Med tr2g008490) derived from phytozome v7.0 (chr-ID MtChr2; po s 1610751 to 1611460)
tggaaagtgagcggttacttttgtctttactctatcatcacacagttatttttttattttttttgaataagcactttatgaatcttttaattgttcatcacacacaaaactctctggaccagagttcgaacccggctgaaggtgtctagtctaataatattggtattgtcagttgagctaggccttagcatccactggttgccctttagctttatccgtattaggcatatgtttgattgaaaaataaacttcacattaaacttggagtagtagcttttgtaatattcaatcttgctaaataagataggatcatatgattgaagtattttagtgatattcatatacgatgttgatgttgtgtgcatcactagattaggttgtttcttgattgttaagtgcttaatctcaaacgtcaccgattgaacagaattggtgatgataatactttgtgattgtgtaagacttcataattatattagagaatggcttttcaatatggttttttcttgttactttttttttttttttcttctcacatttgctttgatgtatagtattatagttagcctagtatttaggtgtatgctactaaggctgtctaatgaaagtcgaggttcaagttactgaatattattaaggatgtttgaaactgaatattgcttccttttagcacaggtgatacccttattgcattgaagagcaacttaaat

SEQ ID NO: 34925 - DNA, 477 bp, Medicago truncatula
  Intron number 1 from transcript Medtr3g105790.1 (locus Med tr3g105790) derived from phytozome v7.0 (chr-ID MtChr3; po s 26558220 to 26558696)
atcggcggtctctctccctcttggttctcctcttctcttgttttctcccttgtttctccaaaactgatcgtccgtgaaaataattctaaacctagtttctcctatttatctctcctcaatccactttatcctatttcctctatttccactaaactcttctaaattccaaaacagccccacatctctatatttatttaatttcaaatcctattctattcaataatataaaacataaaatatttctataacaaattatatatatttctacaacaaataaaatatatacatattatactaataaataccaatatataacataacaaaatatcactcatcaaaataaattatataaatcacacaaatcatataattatattctaaactcattaaaataatcaaataattaaagagggcgttacagtatccttattaatggtcaattcccaggacctgaaatcaacagcactagcaataaca

SEQ ID NO: 34926 - DNA, 774 bp, Medicago truncatula
  Intron number 3 from transcript Medtr7g062090.1 (locus Med tr7g062090) derived from phytozome v7.0 (chr-ID MtChr7; po s 12627213 to 12627986)
tccaattgtatgtatgctcactttttatatatctatatgcatatcttcaatttcgatgtttggatagagggttttggagggtgaaatttatatatttgaattaagcgatttcattttttattttactttttttattagtgtagtaagtagtaatgctcgtgtaaaattgtgtactttctgttgcgaaaaaaatgtccggggtgaaagtgtaacgccacgtggctgtacataggaagtcaatatttgtcaaatatcgcacacggtggattgcgctggtagatttttttgacaactgacatggtaaatttgtgaaggatgacattatggcgtttaatggcggtttattggcttctgccatgggctgccatttgcaatcgatgataatgtaatatctcgcatagcaggacgagtatcatttgcaatcaataacactgcaaaatctcccaaagcgggtcacgtgtcatttaaaaactgttttttcttattacgattggatgcacttgtgacatctcactgtgtatccagctctgatagcagactgcattagctcttatgaggccgcaacaggccatgggaattttttatacttttcttttcttattcttgcgtctggacttagaaattcaaaacttcatgaaagtaaatcactagggaatctagtattgatgtctttcatttgccataaagtgattcatagtatttaactttgctgagttccctctttttcttgcttgtgcagatattttgaaattggctcaacaagtaaaagtgagg

SEQ ID NO: 34927 - DNA, 646 bp, Medicago truncatula
  Intron number 4 from transcript Medtr7g062090.1 (locus Med tr7g062090) derived from phytozome v7.0 (chr-ID MtChr7; po s 12627957 to 12628602)
ttgaaattggctcaacaagtaaaagtgaggcaaaggtgtgaattgtatttcttgaatatgtgaaactttgttcctttgtgtttgtaatctatcatatcctaatattggggagttacaaaatatacatttggttactagagaaagatttgtatattggtttgactgttttggcttaaaatgtatgtcgtcacaatgcctgaattgcagtctttgagactaaaagtccttcgagaaacggaatatgaagttatttgtagaattcaggcttttatctatgtttatcggaagttggttatttatgtaacattgggatattatattgattcttgcaaatttgactagatgaaactcattagatttaaatgacaatcattcaaatttgtaaaggaactataacattcatatcgtcgttaataataatggttaaggaacttaagaaatatttttgtcccctatagataagcatatatgaacgtgtaaaagagttgaacttttttttcttaaatttttctgttaaaaaagtgatatatattttcatcatcttgccaaaactttaagataatcttcggtctattacattaattgttatggcaccatctaatatgttggtcaatcttttagggttgttgctactgcagttacatac

SEQ ID NO: 34928 - DNA, 1044 bp, Medicago truncatula
  Intron number 1 from transcript Medtr5g080590.1 (locus Med tr5g080590) derived from phytozome v7.0 (chr-ID MtChr5; po s 30157876 to 30158919 reverse strand)
ttcctattaggagagactttttcagggctgctacggtttgcctaattactgtttccttactacttctttttctttgtttttttcttattcttttcgcatatcttggagtttttgcatggcaacatctctttttattacgtacactctcaatcaagtaattgaaaattgataatggtaaataatgtcttaatgcctattatttgagaaccattaaggtttgacaactcaaattacgtatacaatagtagaaatatgatacatttatcgtaacccaatgtcacataagagagaaccatatcccgaaataatagattgagttatttaaggaaatcattttcttcacaacaataatggatgagtgtgagtgtatattttctcttaggtggtgttttgatgtaatgtcaaaactagaatatatttagaatttgatgtttagaatgtgtctatctatttcgttacacacacaatgacgtacaatttcaaatcaaacaaacaaattttttctcatattggttttgaaacaaagtagatatatttcgaaacaaaccatgttgttttgtttgaagaatatatgaaaccaatatgaatgttttcaaaacacacgtggcaaaattacagtattcgtgcaagagtctattatttgattactgaaataaaatatcttgtttttaccctttataaaaatcatctataaatcaatcaacaaacgattgatgcaagtagtaagggatttgggttccataagcacgtggttaggggattgattcttgactcatgcatatagaaaaaaatctacttggaggggtgaacccaccttgtgtttcccacaagtttccgagggaaattagtcacgtgtcgatgtcaatttcatagtaaaaaaaaaatcatctataaatacatccattcattaacttcttccttttaaagaaaaataaattctttgccacattgtttctcttcattcattcttcaagataacgattagatatatgagtgtttgagttattttgtagtaatattaattcaatttctaggaattaatcc

SEQ ID NO: 34929 - DNA, 756 bp, Medicago truncatula
  Intron number 1 from transcript Medtr4g111480.1 (locus Med tr4g111480) derived from phytozome v7.0 (chr-ID MtChr4; po s 25561033 to 25561788 reverse strand)
tgttgaatttaactcattcatcaagtttgtttgtggtatgcatgattcgtgtttttttcctttttcttctgacaacgataattccaaggtttcactttcacattacatgcaatgttgaaattttgtgattccttacgagttagtcattcattcaaagtttttttttttttgaataagtcattcatttaaagttaaaattctaggagaaatatataccctgtggcaccgacatttctgatagaaggtgtgtctggtgtaagagacatcggacacgacaatgacaaatgtgattacattcaattatgtaattttctataattatatatatggatgtgtgtcgtgttcgtgtatgtacctgataatctgatatgtaagtacgtctctctctctctcctccccctgagtctctttcaatacaattggtttgggtgagtgaagttttctagaaacaaaaaaccacaggctgtttaaactctaaatttccattgatatttttaattttgtggtgtagtatgaacctatcataatatccaagtctacgatttttaagttagtcattcttaattaattgttatgatattaacatatgtgttctctcttagtctttatcaagaaaattaattaggatgagtgaaaattccatgattctcttaatttctgcatatggacagtgactgtaaagtttaaacctattataacattaaactctttgacatttcagcaactcagattgcagaacccataaacaaaggtaag

SEQ ID NO: 34930 - DNA, 851 bp, Medicago truncatula
  Intron number 1 from transcript Medtr6g086450.1 (locus Med tr6g086450) derived from phytozome v7.0 (chr-ID MtChr6; po s 17664813 to 17665663 reverse strand)
gttcatcatttgctcaaccgacagtatgtatatacttaatcattttcaatattttgttcatttaggatgcgattctagggaagagtctttttttgcttcatctgatttggttggctatgaatttaacctatgatgagatggcttcttatatcttcaacgtatctaattcaatttctttgcgttttctcatttggttgataatcacctttactttgtttatgctgttggcttcggttagtacagatttgtctttgttcacctttgaaattaacacactaaaaatggacaaaatcatgcatgcacagtaatgtttagaaattagtacacttttcttagatgaagctaaatgtcttggaattcctttgattcttgcaataacagactcctgtcaattttgttaggttgcctttcttgaaaagggagatgtttcttcaagttgaaggaaatcaaattgtacttcatagtcatggagagtctttatttcaaatgaaaaaaaaaaaaaaaaaaaaacttaagttcattgttgtgaaagacacggcccaacccaagtccccaatatccgtctgacacacgaaaagacactgccgaaagaagatgaagaagacgatgaagaaactcttgtaatggtttctacggtaactcaaattgggcttagcttaaagcccattatattaacctcgtttatatttatgttgtgaatttactttatacaccccctctgtgctacatgtgggtttaggtggctttgaagtaattaacaaagctaagctaagacacaaatagaggccgcatgtcctaaaactgtcttgtgtgcagacattctttttttcaagctcgagacagtactcgca

SEQ ID NO: 34931 - DNA, 803 bp, Medicago truncatula
  Intron number 1 from transcript Medtr1g107340.1 (locus Med tr1g107340) derived from phytozome v7.0 (chr-ID MtChr1; po s 22623459 to 22624261)
acgtagcgcaccctaaacggagccgtttcttcgaggtaagaagatccaacccacactgctctttctttcattcgttcgattcagttacttgaaacatgcaaattttgctgtgtaatgctaggttaattgtagtccctgttttgttcattgttgaagcaaaatcatcataacccataataactcaatacgaaaacagggtaataagttctcaaattagggcttgatttggtagaacaataattgaagataatggagaaatgcatattttagttgttacaattctgtgaaactaatggggtgcagaaaaataaccccttttgtttgttttcttgttaaacatgtttgttcgcaaggtgtttgtcaaaatgcctcaataaggttaatacctgaattggaaattttatcataaataaataagtttagttgtattgcatgaaatactgacacatacacagacacgatcttgacactgacacatacacagacatgatcttgacactgacacatcaacactagtgataaaaaaagtgaattaattgaatgtaatcacatttgtagttttcagacacccgacacgccttcaatcagaggtgtcagtgatacgatggttgtatttgtattcattttgatgactataagtgtagtcatcattccagtttttattctataggattatgtgtgcacaggaagcatagcagaacctgcacacatttatcaaaaaattcaagttttatgtattttcagtttcctctttcctctaactatagttactaaaatgacagtggaagcattaaccaacaaca

SEQ ID NO: 34932 - DNA, 617 bp, Medicago truncatula; identical to SEQ ID NO: 34849
  Intron number 1 from transcript Medtr3g083310.1 (locus Med tr3g083310) derived from phytozome v7.0 (chr-ID MtChr3; po s 19551449 to 19552065)

SEQ ID NO: 34933 - DNA, 810 bp, Medicago truncatula
  Intron number 1 from transcript Medtr2g010590.1 (locus Med tr2g010590) derived from phytozome v7.0 (chr-ID MtChr2; po s 2611209 to 2612018)
atttgacaatcaacaacattaaagctgttattcaggttaaagatatttttttgggtacacaacatgatttattttattttatttttgttaagtaaagcacacataaatttattacctaaactaattttcactgtaaagtaaattcttttgactaaattagtctaacatactttagattagtcttacaccatgcacatgtttgtttttcatctttcgatcaattagtcacaccaatctcatttgatctaatgataatccattagcgaaaacaaacttgtgcatgatacaagacttgtctaacttatgcatcatatacttgaccaaaatatccttctaactactagaaaatattgaagtaatataaaaattaaagtgattattaaattttttgtctctaagatttaagaatgaaattagagacaaactttgtctttttccgaccctaaattttggtcgctctcatttttttttagtattatttattatcaaccaacttgtagttgccacaccttcaataagtgtaatattgaagaaaaaaaacagaagaatttttttgttggtactttaaaatggtaaataatgtgaaactatgaaatattctaaataacaaagaaaaaagaaacttatccaactaggtggggttggcatgaaatattttaaatgtgacacttaatttaaaactaaagaaatgtgtattctcaaagaattttgaatttctaatcctagtagaacaatattatttttctcttcaaaagatctcactcacttggtacaggatatcatttttgctggaagtgaaacaacatcttc

SEQ ID NO: 34934 - DNA, 709 bp, Medicago truncatula
  Intron number 1 from transcript Medtr6g009150.1 (locus Med tr6g009150) derived from phytozome v7.0 (chr-ID MtChr6; po s 1429619 to 1430327 reverse strand)
gaagcagtggttcacccagttggtattcaatataggtatttacattattttaagtttttcatttgattttaggtttaattaaccttttaatctctgtatcacactttttttactttacttcttacatcatgtgatatcaatttatttttcggttcctatcatcatgtgatatcaatttatttttttacaaagaattaattttatttttacaaagatcaaaactaaaattcactcatttttataggtattaaaataatgctattaatttttcaaataaaggtattcaaattttaaaataattaatatcaaagaaataattttccataatcttccttaaaaaaaaatccacaaaccgaaacaaggaaattgatagttttacaaggaccaaataaaataaacggattgtatatatgaatatgtttggattgtcttatttaaacttctctattgtcataaacacttaagaaactgtttgagagaacttatgaaaacaacatatgacatgttcatagcgtgttttcaacttctttctataaggtctcgaagatagcttataaaaaatgacttatagaatatacgaaaacggattgactttataattttatcttatcttatagaagtttactattatttttaagttgcaaaatgagtagattatcgaatcattgcctatctctaataaattcttcaatatgtagttttccaaaca

SEQ ID NO: 34935 - DNA, 736 bp, Medicago truncatula; identical to SEQ ID NO: 31476
  Intron number 1 from transcript Medtr4g137730.2 (locus Med tr4g137730) derived from phytozome v7.0 (chr-ID MtChr4; po s 33992598 to 33993333)

SEQ ID NO: 34936 - DNA, 819 bp, Medicago truncatula
  Intron number 1 from transcript Medtr4g163390.1 (locus Med tr4g163390) derived from phytozome v7.0 (chr-ID MtChr4; po s 41435389 to 41436207 reverse strand)
ttcttcaaatatttctattctggtcgcggtgaaatgttcatcaacaacattattttcaagtctctttcattttctctcatattttgtttttcatcaattttctttttctataacatgcacacttgctttacatttcattgaaatgaaaataacaagtattgaaaaatgaattttacaacattttttaagacacatttaggagacatttctaacatttttataaatttggaaaattctgtaatgaattaagatggttccattagaatatatatatgtataatagcccaaattatattcgatgatgagtcatttttttagaaggatctaaaataatgagttattggttaagttgtttagatttaaagctataaataagtgtgtttggtcattgaaatgattatcaaatgaatgaatgaagaaatttagttaggttagaatagtcttagttgtagtttttaatctcttttacaatattatctctggtgctttcattgtcattaattctcctccctaccatcactataatcaaaacattcatgatcctacaatcatcaatgttcataccttgttcaacccttcttcaaaggggatcacatgttcccttcaatcatcaacactattttcaatatattaaaaaatgaactctcctttattggtctttcattttctttatcacaattgttaaatacattaatcttccattcatggcatgatgataataggaagaattaaaataattttagaaaacaaacgaatccttaatatgttgttggtgatgtttcagatttggacgaactggtatttacaagactcatttgt

SEQ ID NO: 34937 - DNA, 949 bp, Medicago truncatula
  Intron number 1 from transcript Medtr5g101070.1 (locus Med tr5g101070) derived from phytozome v7.0 (chr-ID MtChr5; po s 40435003 to 40435951 reverse strand)
caattcccaaaaaaagaaatacatattatttgcatgtattttttttcttaaaataattcatgttgttttattccctttgttctgctttacgttacacttttttcgtttctccattcgtgttaccatcctgagattttctaaatatatgtcctaactatgtttacatttggaagttctaaacttttcatgaaaattcaaagtacaagaaaatcaagagtttgcataacctgctctgtatgctcgtattatgtcaaaccaccagggacaacatttttgaaaattaatgtgtatattgcatttgctcgaatgtgatacatcacaaagtgtcggagttaaagaaaacgatacagtctgtgggtaacaaaatccaattcagctcatgaacttgacaagagtttctttgcaccaaataatgtcactgacaacttcgtcgattcaagttcttactactttaatataattatattactccaatataatgtggtgcatcgaataatttacaacttgagcaattgagtctgagtttgttcaccacaattgctacttgttgtacgtgttttcttacattgttctctatacaagggcattcattatgtcgaagggatggaaagcacaagaccgctaaattaactctgtcaggaccatgcttgaaaattgaatttgcagaaaactagagaactaaagaatggagaaaaatatgaagtaaaagtgtttatattcttcctccaagccttttatacattaataatcaactgttggcaactgatcagaggcaagaaacaatcctgccattaatttcttccttaaattgaaagtaaatcacttgctcaattcctgctattaataatagattgttcctttcctcaaatacacaaaatagtctagagtttggaaatggactgttggaatatcaggtggtaaagaaaagagttcagagagtgtggctgaa

SEQ ID NO: 34938 - DNA, 666 bp, Medicago truncatula
  Intron number 2 from transcript Medtr4g111730.1 (locus Med tr4g111730) derived from phytozome v7.0 (chr-ID MtChr4; po s 25643106 to 25643771)
ctcaatttcttagttttccggcagcaactatggtggtgtgtggtggtcaaagtggttgttgaatttgtgatttagtagtggtgatatgggtgtgtggggacatgaaagagagagtgtgaaagatagtataaaaagataatctagtggttgagagagtatgataggaatatgttcctcgtttaatctaatggacataatcaactttcctatggtgggaaagaactatactttttcaaattaaatggcaccatagcatgggtgatattacagagttatttcaacaattaaccctaaacaaatcaatttcagtttcaaagataggctaaaaacattttgccgagaatcgcggttcgtatgtcactttcaacataaaatttcaaaaatagcttacccctttcgatatgcagatcttattcacagaatcaaattccagctgtctatggattatactagtaactactggtgctacgtagaaaaacacataaccgatagacataacacacacacacatatgggtatgtatagttttggtagggtgtttcataaatgcagaggaaaatcttctctgattttagatatctcttttaaatgcaaagaattataaattaatggaagtatatgtacttgaagctaaaaaagtatagcaagaattttcaacggaagtat

SEQ ID NO: 34939 - DNA, 775 bp, Medicago truncatula
  Intron number 1 from transcript Medtr5g083640.1 (locus Med tr5g083640) derived from phytozome v7.0 (chr-ID MtChr5; po s 31751176 to 31751950)
cattcacattaatcgtgttcaattcattcacaacggttggcatctttttccttcttgttactaatgtgctttgtcaattttctgaaaaagcatgttgtgaatgagtgagtcttaaatgaatgagaattccataaaaagagggatcagtaaatattttagtcgaagaacacgtaacttttgattttattttgttatacgtttattcttttattaggtaaactttcattccttgtttttctattaacatattcattatagattttaatttccctgcatcattacttttatgggtggtaatttttgtgttactaccttattccttaaattggattaaaaagaaaggtataacaaacttgaagaaataatgtatcttgacactaacaaatatattgggttttctgtattattatttttaccatgatataaaataaatttacgaagaattctcatttggtcaagtaataggtgaaaatgtatattgatgataagattgaggaagtattacattattgactagccaatataggagtacaatgtttatttccactgactaaagttttgatttggatactcgtaatcaaactaggaaaaaaagtcactttttattttgtttttcagttagattaaatattttgtttccatttatttccccttaaaaatttgacttcctttcatcatttctttataggtaatttgtagaggggcttgagattcttaagaagggaaattgaaaatttcagaacatcttagtacaaaaactccaagtcaagttggt

SEQ ID NO: 34940 - DNA, 837 bp, Medicago truncatula
  Intron number 1 from transcript Medtr3g125280.1 (locus Med tr3g125280) derived from phytozome v7.0 (chr-ID MtChr3; po s 32105799 to 32106635 reverse strand)
caaaggtatgagccctgaattcattggatcaaatttcaatttgtatttaactctcttttagattatagattatatacattaattatttaatatatttaaaaaataaagttttgcttgtaatagtgttaaacacagttcatgaaaaaatattagttgaattgacttcaattgtaaaattagtatttttttttgatgaaaattgtaaaattaatattatttacttaaatatctttattaaatatagttaaaagaagtaaaattcaataaataacgtatactattagtgcaaaaaaaaaaaaaaaaaaatttataaaggaagacggtgtaagaatattagtagaaacaaaaaggaaaaaggaataagactaaagagagtcgaaaaccaggtggtatagtttgtggcttggtggtaaagtcaaagcctaaaggcgcagctggtaaaatatttcttgtacaaaaattaaaattaaatactatgttttgaaaatcattcggttttttcactactataaataaaggtcactgacagtagttggttccacacacaactcactcgttatcatcttttgttaattaaccatgtccaacactactgttcaggtcatcaagtgcagaggtaccatctctttttttctttgttacaaacatgttatgttgtacaaattgtgtttttgcttttttatggatcttcctaagggtccatttggattgtgttactttctttctttattaatagtagttttttttctttctttctttctttcttgcgtctattctgatctttttatgagtgctacatgaattcattgaatgtatcatacctgcagctgcggttgc

SEQ ID NO: 34941 - DNA, 303 bp, Medicago truncatula
  Intron number 1 from transcript Medtr5g021270.1 (locus Med tr5g021270) derived from phytozome v7.0 (chr-ID MtChr5; po s 8096670 to 8096972)
ggttgttgacaggttctgaaggtgagagtagggagtgatgcaacgttgtcaattaattaattaattgcagcagcttcttgatcttccgaaaatttgttcatagatgcaaatatagttttcttttttcatcaattctttgatattgttattgctttttcggatcctatcaatcagtgatagtcaaatgaaacaaaaagagaagggtgttagttttaaagcaaacagattacaaaagaggaatgtggagttgtcatgataataatccatcattgttatacaaagagattgagttaaacttgagtt

SEQ ID NO: 34942 - DNA, 790 bp, Medicago truncatula
  Intron number 1 from transcript Medtr5g007540.1 (locus Med tr5g007540) derived from phytozome v7.0 (chr-ID MtChr5; po s 1182133 to 1182922)
ggtaagatggaaattaatgaggaggattgaattttggctcagctagatgttaacaacttttttttacatctcctatttttatatcaactttctttcacacgatctattttcataatgccgttagtggaataggagaataaaatgaaaatcaaccttaagtaaaatgaattaattaagattgttatgtgttagttagtttgttatctttaactaatcaatgcatgagtcaaatgcagacaatgatactatcttgatgctaaaagttcaaattaattaattcatgacaatgcacatgaaaatcacatttttcctttgtgccttttgtatttgcttgtaatagtttaattttctaccttattattgaaagatacgaatattgttaggagaaagagaacggtgttcttgttgctcataatcttctgaaccatgacaacacatctttcctcagttctcttttcaaaactatataatttccttttctcaaactctcactcattcacaaacttggcattatgttgctgctagttatgttatggttattggtgtctttacagtttacaccatctccatctccagatgtcaactacaatgatccgccatttccaaagttttctccacctccacctaccccacttcaacttctcctcctgctgagatcctacaatcccataaccataccttttttttaacataaacatcaaccttttcattacccaaaatgttgttgtaggaagtggaataattgcttcaattaggtgaagcggaaaaaagcgtcgaaaggagaagtgga

SEQ ID NO: 34943 - DNA, 956 bp, Medicago truncatula
  Intron number 1 from transcript Medtr6g071550.1 (locus Med tr6g071550) derived from phytozome v7.0 (chr-ID MtChr6; po s 13855129 to 13856084 reverse strand)
agataaagtgtcgctgctcttggtttcggaggccggttttcatttgttctctgctctttttttcctgcctcttctgggttttgtttcatgcttgtgttgttggctggtctgttgttttttagtcatgtgttttgacaggtttttgtttgatttttgttgtgctagttttggtttgggtgtagtaactgtctttgagactttgtttgggagtttggaggtgagaggaagagaagactttggagggttgaaaatatagggaaaaatagtaaaatctttcatattttttttagaataataaattaatacttatgatttatatattttttaattttaaaaatattataactacatacattaaatttcaagaattcgtgtaaaccctccttcaatacaatttttgagtttctctaaatgaggagggttttgtattttgaagaaaaatgaaacaccaaagtcttcccctctcaatgtcatctatttcttccacctgtctcttccttttttatttctttctaaaacactctcctccactccttccccttcaaactcgcaaacaaaatcttagtaaatatcaagattactcatgccggatcacaatcaaagttttcttgaacaatctatcaattgacggagcttataaaattaggaatcttataattaatttatttgtcttttatttttgtattcaataacacttgtattaaattaaatgctagtattttgaagcttaaattgcattccaaaaacctgtccaatacccaaaaactaaattagttctggaaaaatcgatcacaaaacattgggtggatgctcactgttttattttaagttgtagtgactttaattaactacctatgttgttatgatttattttaagaacattatgagctaaacttcttccccgcttgtttgacttagcagaaaacaaaaccattacggtagcctctttgttctct

SEQ ID NO: 34944 - DNA, 738 bp, Medicago truncatula
  Intron number 1 from transcript Medtr2g052380.1 (locus Med tr2g052380) derived from phytozome v7.0 (chr-ID MtChr2; po s 14205341 to 14206078)
tctgtacttccctgcgttttggctttgggctttgggtttgggcttagttctttttacgttttttgttatttttcttgctatttgcaccatatttccttgctatctgcacctgttgcttgctcacatttttttatgaaaattcctaaaaaatcctggtgatttcttggtatatttttggtatttctatggtgtttcttgcataacaaaaaatgttaaaatgacatgaactaattccatgtatttttacacttttggtatgcattttgctatgttttgttcttgacactttgatattatgacatggatgaatgatgcctaatatggtgatgaatatgcctctggaaatgtgcttttgtttgctgtttttgaatatgattttatggatttcttgttttacaagcaacaagtgtttgttttagaaaataaagtgtcaaatttctctatgaatttggtgtgataccttgcttgcatgtgtttccattaatttcatgtcatggcttgaaacaaaatttctttcaaaattgccatgatgtgatgattatgggttacaagcacctttaggtatcacatcaaaatttttaggtttattgccactttattaccttttctttgccatttttatgcatttccttttgattatctcctactattttgtgctttatgatcactaaccatttcatctcatgtgccatacatttcatagcattccaccaccctctccactctccacttccttta

SEQ ID NO: 34945 - DNA, 748 bp, Medicago truncatula; identical to SEQ ID NO: 28335
  Intron number 2 from transcript CU013523_8.1 (locus CU0135 23_8) derived from phytozome v7.0 (chr-ID CU013523; pos 37 526 to 38273 reverse strand)

SEQ ID NO: 34946 - DNA, 746 bp, Medicago truncatula
  Intron number 1 from transcript Medtr5g100260.1 (locus Med tr5g100260) derived from phytozome v7.0 (chr-ID MtChr5; po s 40116639 to 40117384)
ttggtactttgtttctgctttttgccaattttggaattgaattattgaagtcaatctggtgtatatcaacacttgagctgaagcatgagctaggttgatcggcaatacccttcttatatcaactttttcacgaatattgaaaagtcttcctctaaatgctgtatcatctcattccttggtgcatgaagaaaagtaagaaaattcaagtgaaagttaccttgaaagtcatatttaattagtctgtgaaaggtagacaaattgtcagccattaagggttgttatatcaatgtcttctccgcactttttagtgggttaaatatatttttagtccatataaaatctcaaaatatcgtttattatctaccattcctggtatgattacgtgcaaatgttaagtagatcaatcgatcttattaaccatgttaaacacgacataagaagttccaatgagaaaaaaaaaaaaaaaacaattacattaataactttctccttaagcacgaagttgattagcaataacgttctaatgccaaccttttcactaagattaaagtcatcctctaattgctccaaatgtggatatatgtgttcggtttgaaaccactcacctctatctcgatcaattgcgaaaagatttttgtagaatattttcaccaaattacgaatctgctcattgttttctatccattgaccttgtttattccaaaccattagaacattgttcttgctgcgtctattcactgtcttca

SEQ ID NO: 34947 - DNA, 640 bp, Medicago truncatula
  Intron number 2 from transcript Medtr5g100260.1 (locus Med tr5g100260) derived from phytozome v7.0 (chr-ID MtChr5; po s 40117423 to 40118062)
accagcggacacgttccaacattgtttggtcggaggtgtatctatcaaatttggtgttctaggcacatttggtcggaggtgtatctattaaagtccgaaaatttgggttgttacagttgcagtgaagcaacttgacagaaatggaattcaagggaacatggtattttgattttgagtcttttgcaccaccttaacttgtcaacttagtagaattatagatagcaagtttggtgatagttaaaaacacaattgtactagttatgctatatgacaagaatgttaaaaatgaagcattaacttttataatcctattgttggaaaaaagatgtaacattaagctacattgagacaaaaatctctcctttgcccggtggccgttggccacagtttttggattaattgtcatctctctgttctttttatataatgcttccttggtttgtgctttgaaatttagataagttcccaagttgaagattcttatactgaatttggctaccggatggtggcatttgattccaggctgcttatcaacattacattttattattatagtgcttcttttttgtatttctgaaatgattaacctatggttttaaatggaggcacacggccgcaattgcatcacactgcaattgcg

SEQ ID NO: 34948 - DNA, 679 bp, Medicago truncatula
  Intron number 1 from transcript Medtr7g025930.1 (locus Med tr7g025930) derived from phytozome v7.0 (chr-ID MtChr7; po s 6509147 to 6509825)
cttatcggttagtatttgccattggtatagcaaatcaaagtcgatggaagaaaacgtccattggtataggttttatgacctataccaacggtgtttagacctttgccaacggatttttaccgttggtaaatgggaaattttctgtagtggttatagtggcttaaattaattaattaatctagaaaaatcatgcatagttttgtttttccttctatattttcttttgtcaaatgcatctttttcaaagtggtctttaagtttcaaaagtctcaaacaagttattttagtttttgaattgtttcaaacaagtcctattgtagatagcatagttggtaattgcttccctgaactcatctttggtatcaaatctggctcctaacacccacttaaaattagtcatctttttaggcatgacaaattgtggataatgctctttgttgctatcatctgaatcatcaccatcatcctctaaaaggatttgtttgaaaagatttaaaaactaaaaggacttgtttgcaacttttgaaacttaaaagacttgtttggggcttttgaaacttaaaagaccactttgaataaaaccgaaaacttaaagaacctttagatgcatttaattttttttattttttatttttcatttttctatactaactagctacaattttgggaatgtagatac

SEQ ID NO: 34949 - DNA, 751 bp, Medicago truncatula
  Intron number 2 from transcript Medtr5g013270.1 (locus Med tr5g013270) derived from phytozome v7.0 (chr-ID MtChr5; po s 3995192 to 3995942 reverse strand)
tttgattaaggtgactattttactcaatttttttttttttttttttttgaatctgatacattaaaagaatcttatgataattatagattttttttttaaaaaaagatctgctttaggctttagctatatgttgagactagttacatcatctaaaattttcaaaagctcttttatttaatttcttcatgttgaactgcaggcttataaagagtaaagacacaagctttgtgtaagggttcataagcttattttgattaaaaatatttcataaatcacagaagcaaatctaaactagactaaaggaagtagatttttttttcaagttatagtgttaattgattgatcatagttactttcagggtcatcaaatttcaggacccagctcctttgcggtcaattttccctgcattgacacattcgggacatcagtggtcgttctatttgattgaactgtctagattcaacctcaatatttaaaattatataatcaaaatttaaatttttaatttcttcatgtaggcttataagggttcatagtttattttgattaaatatgtttcataaactatagaagctaatctacactaagctaaaaaaagatgaaaaaataattcaggttatggttggtcaaattttctatcagagccatcaaagttttgctgatagagatatttagattttctagtttaatgtctgattttgttgttgtcgtgcttttatttttcttgcagaatctggattcttgcagctc

SEQ ID NO: 34950 - DNA, 163 bp, Medicago truncatula
  Intron number 1 from transcript Medtr5g013270.1 (locus Med tr5g013270) derived from phytozome v7.0 (chr-ID MtChr5; po s 3996166 to 3996328 reverse strand)
cccttctggtttgtatccataccttacaataataaaacatggaaattgcaattaaaaatcaataattttgagggttctaatttttaaacaataaaacctaaaaagttatttccttttgatttttctgttttgtgttttttttctttcttctcagagcttcctg

SEQ ID NO: 34951 - DNA, 753 bp, Medicago truncatula
  Intron number 3 from transcript Medtr1g121150.1 (locus Med tr1g121150) derived from phytozome v7.0 (chr-ID MtChr1; po s 26336284 to 26337036)
tgagaataggtttcaagccgacatcgactattacagtaagtccaatatcctctctctctctctctctcacacacacacacacacacacacaatcacacatcatatcaaaaaccaatgtcaggggagtaaatgagttgcactcaagttctaacttggcaaatttaagtgttaatgttgtgtatgggggcagacacctcaacctcctcatcaatctactcttcaactccttcaccccaaccactaaatcaaccttatatcccctcaatattaatcaatgtatacttacattaaaaaaagcactcacgcccccacaccgttttcaccattgaggtgaggtgtgtttgccaaaacaagatcagctgtgtaggaaataagatgccaaaacaagatcagctgtgtaggaaataagatagcaactactgaagctgcttattgatttccattttctctatttgaatgagacaattgcatagttatatgaagtagtaaacatcatctgattccaattgagggtaccaattgagtagtaaacattatcccgagttttcagggtaccaattgaggaagccttttgtttgcgtaatcttgctgcctccagttccttggcatgcagatcttcacattccccccatttttagctgatttaggtggtttgttgcacatgacaatgacttttctctatttgatatgaattgaacataatgttatccctgtgcagaagaagcaatctacagtgactcgggataagaaaga

SEQ ID NO: 34952 - DNA, 653 bp, Medicago truncatula
  Intron number 1 from transcript Medtr7g040450.1 (locus Med tr7g040450) derived from phytozome v7.0 (chr-ID MtChr7; po s 9848385 to 9849037)
actttcctataatcacatttttcaggtaagcaattgtaaacggttaatttcttgctcacactttcatcttcgtcactctattctcacgcctccataaatgaaaatcgatttacccttcaattttcctatgaaagttgatttttatgtttatctctgtaaaaaaataactttgttctttgaatatcaaatactcaattacaaatttgtatatcaaaaaactacgtagattcaattgaatatcttcgcacttcaacgatatccttctattattatatgagtttcagaaaattttaggagcaattaattacttatttttgtaatttctgatttagcttagatattcaacaccattttttttttatttgcaaccgttggcaggctttgttatggtagatgtccttaagcaacttttttctcaactgtttgtcccatactcatctctgctctcacattatcatctttgttgactaataaaactattccattagtttaacttttgattcttctcttaacttattcactaatgtatttagtttatgtattttgattttgtgctattgatgcactttattttctaattttaccattcaattttttatattcattttatttttgattgtactatatcagcataaaagctttggcaagggtaa

SEQ ID NO: 34953 - DNA, 922 bp, Medicago truncatula
  Intron number 1 from transcript Medtr1g016920.1 (locus Med tr1g016920) derived from phytozome v7.0 (chr-ID MtChr1; po s 3442152 to 3443073 reverse strand)
cacaccatctccaatctcgtttttcttcaaatcgagtaagtttttcaatttttcttctctcattcttcgatttcctctattggtagaaaccaatttttagtttctttaagaatttgtaatttttggggatttttgcgcaaaagcgaattttgttggtgaatcttgtatgatgtctttctgtgttgttatcttttaaaatgattaaatttaatgtaatgactttggatgtattatttcgtttattgggttgcctactaggtgtttgataaatgtcctaagtggcgttctttgaattttgttgcttctttatttgattgaaaattttacaatggtgaattttaaactttcagattcttttaagaattttccattttttgtgctcaaatggtatttttgttgatgaatcttgtttttgagtttggatcttgatgtgatgtctctgtgttgttatttgttaaaaggatttaggttgtatttttcagcataatgggttgccttctaggtgtttgttaaatgttctaagtggtgttctttgaatttttgttgtcttatttatttgactgaaaattttacactgatgttttgtggctttgaagaaaaaaatgcaatggtgtgggaattgagggtttaatctaagtacttgaaaatttacttggtgcaattaagttgagatcaatttttggtactaatgtaatttgatggaaagattatctaaccatcattttttgtactaatcatgttttgctttggtactaatgtaatttgatggaaagattatctaaccatcattttttgtactaatcatattttgcaccagtgactgcaccatatatgataaaatttaactcattttataattcaagctcagcaagagggtacattattagttttctcacattgtttgtttggttcaggaaaatca

SEQ ID NO: 34954 - DNA, 1030 bp, Medicago truncatula
  Intron number 1 from transcript Medtr3g009850.1 (locus Med tr3g009850) derived from phytozome v7.0 (chr-ID MtChr3; po s 1574367 to 1575396 reverse strand)
aagagggaagaaaacgtaaatgtgtctctcgtccgtaagcccgccacacaaaaaccaccaattatagcttgctttgcatagtcgatagtaccacgatggtggtaaattcatacaacacctaactatacatcaaaatcaaattccctacaatcacgttgttgtcgtaatcacatgcattgatagtcgttcaattttgatcggatgatccaaataaaaataaatatttagtttttatattttaaaatacctaagcttaaatttggatcgtagatcaatagtttaaaatgatggcttattgttttttttttttttttttattgtttattctttatctttttaacttgaagtcatttccccacatatttttttgagtgaataggttacttagacctcaaatttgtacgcatcgatcaatttgatccttaaatattttgaaatagtcaatacgtccctaaattttatgaatgtcagtcaatttagtccttctattaagtctttccgttaacaatgttggtgtgtcactgtcaggatagacgctaatgtgaagttccaagtcagcttccacgtgtacatggacgaatttgatcgaaattttttgatattttttttctttttaaatgaaaatcattacaaattgttacaatatcaaatcaatccctgaattatgtcactcaatatcaaatcgatttgacaatgtaacaatttgtaacgactttcgtttcaaaaataaaattcaaaaattttcgatcaaatttttccttatacacgtggaagctgacttggaacatcatatcaggacttaatgtgacacgtcaacacattaacatctatacttaattgagagatcaatttgatcgacgtctgtaaaattcaaagacatattggttatttcaaaaaaattggggacgataaaatcaatgcatacaaatttagggacaaaataggccgttgagtccatatttttttatacttcatcttcttgctcgtgctttaagtctcattcactcaaagatttgtcgaaacaactcga

SEQ ID NO: 34955 - DNA, 338 bp, Medicago truncatula
  Intron number 1 from transcript Medtr2g008200.1 (locus Med tr2g008200) derived from phytozome v7.0 (chr-ID MtChr2; po s 1457140 to 1457477)
aagaagtaggatggtttgacccgaaatagagaaaccggatcgaacccgaatagaataagggagagagactatagttgagttgataccaaattacgattctgcaaaatagcaccacaacgaaacacaccaattccaactctctgcaacctctcttcgctcgcgcaccaccatgtatgtctcaaaacttatctctatttctttcatttttcatctctccattccaatacaaacacatcttataattttaaatcttggattttgatttggactgtccgatctcaaatcaaggattgagattaactaatgttttgattttattgtgaatgaattcagggctg

SEQ ID NO: 34956 - DNA, 668 bp, Medicago truncatula
  Intron number 1 from transcript Medtr2g041370.1 (locus Med tr2g041370) derived from phytozome v7.0 (chr-ID MtChr2; po s 11344445 to 11345112)
gctgtaagtatgaagaacaactaatccttttgatgtacgtttggagtataattaataagctttagatatttttttaattaggacatgttttgattaacttgagtttaactactaacataatcacttgcaatattatttagaaaagctattagaaacattgattatttcttgtactagaatattgtgatttttgttgtagcttgtacttggattatctgtttagttcatgtttttcatatatatattatcaccggtggccgagctaggaattaaaatttacggagattatatattattgtttttgatatatatattatcactctaattgtaaaagtgatcttttgaagcttggacgaaatcacggtaaatccaccatgattccaaacatacatcaagtatttgtttggtatcacggtgagtttggcaaaatcacgctgtaattttgtaaaaaaactacatgttatcttttgaagttacaaagtcagattcataccactgatatgcaaaattataccaaatttcctcagatgaaatgtcttgtgttattaattctcatcatcctgccaaacaaatgttcagggtctgaatgtaaaaataaaaattaacttgttgcactatttcaattttttgcagcatatataattgtggcaatatttggaattgtggca

SEQ ID NO: 34957 - DNA, 665 bp, Medicago truncatula
  Intron number 1 from transcript Medtr5g027390.1 (locus Med tr5g027390) derived from phytozome v7.0 (chr-ID MtChr5; po s 11138935 to 11139599)
ttttgtaagttgtgactaaaacaaacaatctcttcattttaagaattttacccttctccctttgttcattctcatcccaaactttcaaaattaacatcaatacaaataacttatgtttgatattcaaggtgagttaacttgcgctgatagtcaacggcagttaactatcgttgcaatcattttctatatttagaccaacactagtagatcacactttaaacgcacatttctttctctcttcacctccaataactcaaaaagtgctaaaatttggtggaaaagcttagtctcatgaaaaaggttaggaagcaaatttttacacgcatcaaacgtcaaaaacaggtaatgcatcatctaacctctttacattctgccatttttttttctcctagctatgtcagtttagaactctagacgtagcggatgttaaattctgctaaggtgccagcgtgagttaacttccgctgagggccagcgtgagttaacttatgttcggggtgcaagtttgaattttggcggttttttttttcttcccttaggcttatgaaacataagttatctataatctttttctttgtcattttttattcgtttacatagcggtggttgaaatacggtggatgatggtgttgaacccaaatcgcacgtcattgaagtttctgttg

SEQ ID NO: 34958 - DNA, 448 bp, Medicago truncatula
  Intron number 2 from transcript Medtr3g138610.1 (locus Med tr3g138610) derived from phytozome v7.0 (chr-ID MtChr3; po s 35459230 to 35459677)
tagagagactggtgggcgattccagttgccttcaaatacgtagatactagtgggctattttatgagggcttattcttctatgtcattgtacttggttttctcttaacttgaaaaaatcatcaattcatatgtacttaccattaacacacacacaatgtacacgcaacaatttgtgtttgtcattcaattttaggcttttaatagttcaacaactcaccagctgcctggtgacatctatataacagtgatgtaatatttgccttgctttattacttctctgtgctgagcttgaaagcgtcaaaattatttgctaagataatatttcattgatccattcctcataatgtctttaacattagccgtttgtttttatatctatttaaagcacaatttcagggtatcatggcgcttttttaaagttcattttttctttgaatttcagggagtc

SEQ ID NO: 34959 - DNA, 867 bp, Medicago truncatula
  Intron number 1 from transcript Medtr3g144730.1 (locus Med tr3g144730) derived from phytozome v7.0 (chr-ID MtChr3; po s 37607315 to 37608181)
gagcaaaataaagaggtaaagttcctcgttctcgctcactcttacctatatgctttcgttttttggttgttacaaaatttcctgattttactttttgcttgtaattcatgtttctgtgttaggttacaattcacctccgtctgaatcgcaagcttcgattcctttaaacttatgtaattcaacagagaaaacagagtcttgtattttatttcattctcaacctaatttatcaatctaatctcgctctcttcaatttaatttgtcgaattcttttgtattcaaacttttgaaacgtgattattctgcaattaatcagttgcctaattttatttgttatttttttccattacttttcacagtaggtatatttttaacttgaatttgagtcttttgttaaaataaaatatatatatatatatatatatatatatataaaatcgcctctgcttgtaatggttcttctggtttaatgctaacaagtgtctgattgcaccggttaaggaaacaaatactccatccgtttctaaatataagcaaaactaacttgttaggttcattcaattaatgatgtatttggtccataatacatcgttaattgaataaacataagaagttatttttgcttatattttgaaacggatgaactatattaaaagtatagtgtaatcaaactcataaaagtgtaaaacatgttatttactgattagattcatcggaatttattatgaagaatgcaattattgcaattaacaatttactttcatattgtaatgtgaaatactgcacctattatgatgatcggtattctaacttattaatcttttcaatgcagaaaatcgccccttggctatcggtgccacagtttgg

SEQ ID NO: 34960 - DNA, 707 bp, Medicago truncatula
  Intron number 1 from transcript AC146711_2.1 (locus AC1467 11_2) derived from phytozome v7.0 (chr-ID AC146711; pos 19 141 to 19847)
taaaacagtattccataaagaaagcattcttccgattgaggaataaatagttgaattaatttttttcttctcgttttcactcatgagttatgccttcttgttaccgactatgccaaattaagaaaccatttgataatatgaatgctcttttgccaaattttaagtagaaataccttatacttgagaagcttgattgtctgattagcaatatatctttgtttaaagctggatttaacagttaacagtattccatcaatgacattgcttcgatttctacttgtgatcaatttatttcctcttctccaaaaagcactttttttctgttttactttttgaaataacagcagtatatgtcattggatggaactcaaaagccaaaagagagcaatctgaagatatggacatgactgacgtttagtgccaattgatgttgctaatgatatttcttttagtgctgttgaatcattttatatagatgtgatcaatttatgcattgaacaaatgagaaaaatatgtgatttgatgggacatcttaaggcattcttagaagtatatggttggtataggctgcttaaagatgatgactcacctgaaaaaaatgctatcaaaatgtctgcattaaaatgttagaatataatttgtgatttcgattgcatttaagcatttatctataacttatagcaatccttataatttctgcaacgatc

SEQ ID NO: 34961 - DNA, 406 bp, Medicago truncatula
  Intron number 1 from transcript Medtr3g020450.1 (locus Med tr3g020450) derived from phytozome v7.0 (chr-ID MtChr3; po s 4661484 to 4661889)
tatacatttgtcttaatatgtatgatttgagcaaatggctcagttaatctgggacggagggagtattttaattatttttttaggattaattgttcaaattaaccttgtaatatgcacgaaatctgaaaaataatcatataacataaaaaaacacatatttcacccatgtaatttgagattcttccaatttttgatccgttaatatacgcaaagttcaaaataataatgacatagtggctgaaatatgtcttccaattaacgataaatagttcaagaaaactcaaatttcaagtcggattgagataaattttagtcggtctttactttatctcttaccaaactccaatataccaaaaaaccagttaagattcttgctcgtgtgttatttctttgcagaaattgtccg

SEQ ID NO: 34962 - DNA, 221 bp, Medicago truncatula
  Intron number 2 from transcript Medtr3g020450.1 (locus Med tr3g020450) derived from phytozome v7.0 (chr-ID MtChr3; po s 4661965 to 4662185)
aaaaggtgagatttagaaagaaaaacaaacatattcatttttgaaaccaaattgactaatcttaaaaagactcatatagtaagagattcataattttgaagacttttttcaaatataaataattttggaattaaattaacgacactatacaatttcaaggaacaaattgataattgactcataattcttactctgaatctattatatgtaggttttacgca

SEQ ID NO: 34963 - DNA, 432 bp, Medicago truncatula
  Intron number 1 from transcript Medtr2g010360.1 (locus Med tr2g010360) derived from phytozome v7.0 (chr-ID MtChr2; po s 2510945 to 2511376 reverse strand)
agtatgtatctttacttctttaggatactttgtaagtattaaaaaaatagaaactatcatatcaaatgtgaaattgttcaagttctcaatgtgttgagtgtcatagttctttttagtagacttgtaagatatgactaagaaaaaatgaacttaagtaggacttgtagagagtagaagaaacacaaattactatttcaaatagaactaatagatggttgatgcggtaattgatgatgattaattcaagttgacaaactaactctacatctatgaatattgttattgagaaaaatcagcaaccaccattttactatggccataattactcagatttgtccactctattctttgcatcatttctgcactcaaaattacaaattacaaccctgaaattaagaccacagattggagttccaagaagcaaccaaaacc

SEQ ID NO: 34964 - DNA, 935 bp, Medicago truncatula
  Intron number 2 from transcript Medtr1g008380.1 (locus Med tr1g008380) derived from phytozome v7.0 (chr-ID MtChr1; po s 699620 to 700554 reverse strand)
cacattgctcaggtaattattctcaatagtataattatttatatataattaaatgtgtttgaatgactgttacaccgacactggacatgacacttactcgttgacaccaataataatttgaaaaaaaaaaaagaagaagacataattgaatataattacatgtgtctgtgtcagatatgctagtgtttaataaatgtgattttggattaactcttgattttggaaaattctaaaaatgattttgtaagaatatgtttagattgacttatttctgtttatattacttatggaactgtttgggagagtacaacttataacatgactataagttgttttatgcttattttcaaatgatttatggatagtttatagcttatatgataacattttttttttatcttttgctacataagcacttatataatagtgtttatgctttaagtgattaattaagttctttatgccacaatttgtgtagaggcatttgtttgggtgagttttcaacaaatacaattttggataaccttgattttttaaaattgatttgaaggcaattttaaacaaatttgacttatgcactttgactacaatttgactttattttatcttttgctacaaaaatagcttatacttaagcacttatatggtagcgattatgctaagcacttaattaagttgttatccaaacatcacctaattgtaggatcttcaactttagtcaaaccaagatttggaggcaaagtcaattttataatcaatcatgtaattttatttcactacaatcacatttgaaaaataatttttgttatttaaccaaacatacatttggttgattatttgatttatgtggtgaaggaaatcttttgaaggtggagtttgttaatgtagttacattcttctacttatgtgtttatagggtattttgaaagcaatta

SEQ ID NO: 34965 - DNA, 1008 bp, Medicago truncatula
  Intron number 5 from transcript AC151525_25.1 (locus AC151 525_25) derived from phytozome v7.0 (chr-ID AC151525; pos 131623 to 132630 reverse strand)
gaaatatctcgttgacacttggtcagtttaaaaaggtacattttgctaatcattacttgttattttgatgtctttctttgtccacacttcttgttctcagtggttctatttattgatagtaaacagtgattcaagagaacattaatttgagaaacaatagttaatttacgagagttaggtttttattaacaaaaaatgatctctatatgataagttaggtccatccaatccattaaatggactaatagatggattggatatctatccattaaaatgggtaatgaatgagctggatttttttttataaaattaatggatccaaattcataaatgattgatggtttatttttttatccctccctccattattatctagttcaaaattcatctattccatccattgccactttggagtataaaagcaaactacttcaatattggactatattttgttcaaaactaagtcaaagtagattataaatattcaaaattttgacagattctaagtattcgaaaaaattctacaataaacattttccttctctagaaatagcaagttgacccagtcctcaagagccatgattgcataacttccctgttcatcctctaattccttacagaaagtgactgtgattcagaaaacatcaatcctcactatcttgagagccatatatggcttaaaacaggcaccaaaagttggtttaagaggctaagggtttaaggcaagttggtgtgtatccttcgcttctcatttaactaatcatcctcacattgtttatttactaggtcatgtagatcatattttattataatcacatgcaattcatctcaggtttttcagtagccaatgacaagctacacttatcaaccaactatatacacctccgttatatgatgttgtttgattagtgtcgatctgtttctatatattaaagaaatatgtaaaattgcctccccgtctttcttcatgaagggggttgaacaatttcaacaagctttggagatttt

SEQ ID NO: 34966 - DNA, 442 bp, Medicago truncatula
  Intron number 1 from transcript AC225517_2.1 (locus AC2255 17_2) derived from phytozome v7.0 (chr-ID AC225517; pos 48 81 to 5322)
gtgtgtctcattctataattttccgccttttcttttccatgcttatggtttagattacattttgattacaacatgtgacgtaatgtactagacctggtctttttctttggaatatacaccaatcaatattgattacatattcttctacatatgatcaaatctaccaaacaatggaatggaaatatacatattctcctacataaaaaatttcacttgcatcaatcattagaaatttgaaaagaaaaaaggtcacttgtaactaaacatatgtggttataagtgaaataaacttttagtggccaagaaggtcaaaaaacaataaaaatagaaaaatcatttttcatgattagaataggaaaaatttagagaatgttttctaatttgtatagtgattgtgttttaaatgtcttgccttttcactttgcaggtaaatctttccttg

SEQ ID NO: 34967 - DNA, 913 bp, Medicago truncatula
  Intron number 1 from transcript Medtr1g042530.1 (locus Med tr1g042530) derived from phytozome v7.0 (chr-ID MtChr1; po s 9771058 to 9771970 reverse strand)
cccacccatttcctttggtccaattccaatccaaggtttccctttaattcaattcattttgattcccaattttattttattttttgcaattttctttggtaattaacatgattgattgttcattgtagttgttgtagtaattcaagttcatgattcatgattgttgttgattttgtttttaattgaatttttgtttatatatatgatgattaaagggtagtaattcaagtttgattgttgcatggttgaatttgtatgttttttcatatacccttttctgaatttcaatttaaatgttaatttttgttgtcagattttgttttattactttgagttggaggaagagtgaagaattttttttttttttttagctttcaccattttccctattgcccttttgttgatgactatgtagcaccgcgatcggaggcatatctggtgtccggcacctgttagtgtccaacaccaacacaattatgtcttttttttttttttttttctctcttcatataattatcggttttggcgtgtctggtgtttgtgtatgtgtcattgcttcatagattgatggtaattaataggattgattgttagtttgaattgttgtagttcataatttgttgtgaattattacctgaatttgttgttgcttttcttcctagtaatgaatggaattttagtgtgtgatatttgagaaaactttttttttttgttttcattttctgtttttactttgaattacaaaactataggattgatgttttttagcagaattcacatggtggattaagataagacacatttgtagttagttgtttgttacttatgttgtgtggcaaatatggctgatacgatttcatttcgtctgaatttgcaagtgtgagcacggaatttgacatttcaagtaacgtgg

SEQ ID NO: 34968 - DNA, 881 bp, Medicago truncatula
  Intron number 1 from transcript Medtr3g022000.1 (locus Med tr3g022000) derived from phytozome v7.0 (chr-ID MtChr3; po s 5589528 to 5590408 reverse strand)
agaagccacaaaagcgtacgaggaagcctctactggtgagtataaacccaacccccgagactgatgatgttgcatcaacactagtttttagctatgtttatgtcgtttttatgacatttagagagacaactgcttgtaaatcatggttaaatcagaccaaaacaggaacaagagctcaaagagaagaaactgagaaaaagattaaaaattcctaagagtgaagcatcgtgccatgatgaagcttgttcgtggcacggcatttgaacgtgggacaaaggattcagcgctggaaatttcgtgttatgaagcaatatgcaatgtgccataatgctaggttttgtctgctgccacgtaggattaatgaagctatcgtgccacgattggatcgtatcgtggcacgatgatgggctttttggaaccctaaaattctttctatataaggccagctgcggccaaggattagggattgattgggaagtgcgattttgagcatagaagacaccaggagaccgaagaacaagccctgaatctcataccaactcatagttggtccagatttatgtatgttcactcttatttatgtttataatcgtaaagccatgagtagctaaactcttggtatgattaagccatgatgaacctttgtaatatatgatttagtagttgatactctcttatttaataatattattcagtctttattcagaatcacttgtgttcattgctttcatttaattgtttgtatgactattaaccctagcttcttgaaattacatgaattgatattaggaattgaatgaccactaaccctagattttaatcctgaattagtaatcatgtttgattcaacataggaacctagagataggaaattgagaatc

SEQ ID NO: 34969 - DNA, 721 bp, Medicago truncatula
  Intron number 1 from transcript Medtr3g020860.1 (locus Med tr3g020860) derived from phytozome v7.0 (chr-ID MtChr3; po s 4845325 to 4846045)
tctgaaaatttcttagcttcagagtttctttgcaggttctattcatcttccttctgaatttgtttttatatgtttttatttgttatatttaattatttgcaattttataaattgaagataaatgattaaagctttgctcaaattctaatatctctcaattaattaaggtttttgttcttttcagttgaaacagtatcatttttttgatttattttcatcacagtttaccttgattggttgttagttattttagttaattttgtatttgaattttgataattttagttaatttttgtattttcattgttatcagtttagttagttttaggttgttttgcataggaacaacatagttataaacaagtaattgagctcatgtgattaatgagttctggttaaacatgaatcgtttgggagaatcaaagtttgaattctaaccggaaatccagaatagtgttttgtcagactttccttgccttatggtcgtactccgacttacgaggcctcctttatgtaggaaccagagggttaagacaaaaaataacaacttagttatgtcaagttgaaatgttttaatcatatgttatatgtatttgttttttgttctgtattaatttcttattagtacttttctctagttatatgttagtgttcacttgagcatattttcttctttaattgacgactgattcttgtttttatctgaacaaatgaagttttc

SEQ ID NO: 34970 - DNA, 969 bp, Medicago truncatula
  Intron number 2 from transcript Medtr6g074230.1 (locus Med tr6g074230) derived from phytozome v7.0 (chr-ID MtChr6; po s 14412545 to 14413513)
acttgttggggtcttcaactatatttgattccaaggtgaacactttattcttaatatatacttaatttctatgtttagaaattgacttcacgatgatgattttctctttaaaaaaaaaaaggcttaatagcagttttagtccataggtttcccaaagtagcgattttggtagttttacagttgttgcagttttggccccctaaggcccgtgttatttttttatttttatttttttgccttgtggggccaaaactgctacagttgcaaaacttaaggggcggttttgtagttttttctcttagggacaaaatcgcaacttcgtgaaagttagggggtgaaaactgctattaaggctaaaaaaaactataatttatggatatttggaggaatttatctcttcataaatataagattatctacaaaattctagatgtatttattactatttattcaactatactcattttaatactatcaattactatcttgtaatttgaaaaatcaacattaaatatatgggaaaagctaacttgtatcctcaaggcggcacaagttaatgaatcaaatatagtaacttttgttgaaatgtgtgcatttaatttaatttttgaatttgtaataaataaaattcaaaaaattttaggaaatatttctacttttatttaagggcacaagttatcatgaccctaaatatatttgtataaaaataacaatttcgtaataacttgtcaaaaaaaaaaaacaatttcgtaataataacacatttttcaaacaaatttattacaccaacaacttttcataatactcatgatgtctacacagtagtcttataaaaatggatgaaagtagtatagcttaacttttatattgctttcagagccacacattatgatgaatgcacttttttgtcattacaaatcatacatttttcatgttttgaatgattataacagttccgaaattctctgt

SEQ ID NO: 34971 - DNA, 893 bp, Medicago truncatula
  Intron number 2 from transcript Medtr3g103350.1 (locus Med tr3g103350) derived from phytozome v7.0 (chr-ID MtChr3; po s 25421079 to 25421971 reverse strand)
gaaagtggatcgtcattgactccggtacatcatgattttttttatccattcattttgttgaatttcaataatccacttaatgtgaacagtagaaccctatggctgcaaaactatagttgccatgatggtctgtaatgtgtatatcatcgttaattagcttctaaggtgacagcgagaaatgttttcactcatttttccaacaataaaccatagtgcagatacttatgcaccttaggtgtccgagggatgctgcttttctatatcctaaataatttcttagccgttagttagtagtagtgcctatgtatgcagctacacattagttaggttgctgactctggtcgagtataaccttgtgcgtttaagcacattctacatggttaggccatggaattaggggtttccaaacctatttttgaccttaatctcaacaaatgtcctgcactatttttgggtgtgcgttgtgttcaaggccctcttattgaataataaactgaaatgtttggattctacaactactttggcattgttgcttgatccttggtatccggtgtgggaatgctgcaatataacaatcctatcacgggccacttacaagttcactcttttcattgctcagagcatcctgtggcttgacaagtcatcaaggaaaaggatctctatattatttgattttaggttttaatagcctttttccttgccattattagctagagcgaatactaaactttctaacaaactcttgtcgaagataatgtatgatattttgtgttagtgactgtttctgtttttttcgttataaaaaaattgaaattagttatttaatatttggttctatccatgcctttttccagtactgattcatttcttttgttcaggtaaagtaatagttc

SEQ ID NO: 34972 - DNA, 976 bp, Medicago truncatula
  Intron number 1 from transcript Medtr1g099240.1 (locus Med tr1g099240) derived from phytozome v7.0 (chr-ID MtChr1; po s 20228976 to 20229951 reverse strand)
ggactctcccatacacaaaacaccttcacaagagggtaactctgatgaaggctcgaaacgatgagatggtacaccttctcgacgtcaaaacaacataagtcacacaccacttcagcggtgtaaaattcgaagacctacaccatattgcgtaatcaagatggagacacaaataagaaaactcaaagaaagagtagtagaggcccataaaaataagaggaatcaacctcgtatgcctaacaaagaaaacaactatgaaagctatgatgacacttccaactcggaagcataaagttgtttatgctatcaattgatttggtttatttttagggatagatttctaacaagcttaaaacttcgtaatttttagtttgaggggcagtgttttgagtttataccatgatatgtttttcgtttttttgtttgagtttataccatgatatgtttttcgttttttgtttgaaaaactctcgatgttcccgttgttgtgtattattgggtcttttaaacttaagtttagtctaacccttttttattatttcatatgtaaagccattgtcattctaaaaaaaaaaaaactaaccgtctttattgtgttattttctcttttcctctagaatctatattgttaacaatgatttcatgcaatgagatatgtatattgaataagatggcattgatttgaggtataatatattgaggattctttttttttttttacaggaatatattagggatgcttgatatttatgtttgcttgtgtttgacattttttttttggtacaaacttgtgtttgaaatactatttatgtattttaaaatcttttttttttttttttgaaaaaatgtattttaaaatcttatatcccgcttatgttgtaaatataattttagcccctatgtgtttttgtcttttattttagcatgtttttttatcccatcattaataattttgattacggaatgcagtggtggttag

SEQ ID NO: 34973 - DNA, 835 bp, Medicago truncatula
  Intron number 1 from transcript Medtr6g093900.1 (locus Med tr6g093900) derived from phytozome v7.0 (chr-ID MtChr6; po s 20494764 to 20495598)
tcgtaacgtacgtaccgaaccggtgcagcaaaaatgtacggcggtggaaaaataaccaaaatggtttttcttttcttttttaattgtatttcaattcactctcttgtttttgaagaaaatagcaaagggagtgcacaaaaaaagtaaaactctaaagcaacataatgatataagtgctgttaaacacgtgatcaaaatatgactagtattattattattattttattataattgatattttttctaagcatgtttttacaacaacaatagtaattcaattgaaaaatcaactttttgatatttatatcaacgtacctataccaaaatttggtattatgtaccacattacctgtatctgtacacgtacctgtaccgttaccaggtatcgtttctctacctacgcatcatagacaagcttccatctagctataaacatatcaggcctgattttagatcaaaacaaatccacacaatgatgttcttatttcctttcccttagccgcattacattttccataactctagcgccctgcgtttcaggaagcaacctcaccagttttggtgacatctccaacatgagattttaaggcacaacgcaacattatgtaattaaaaccttaaactaataaatttttgagataaacctatgtcatttatagattgcaatatcactttaatgtagtttgttggatgttgattcacctgaaacaattagtattgtagaactgtacttaggaggaagttaagcatttgtatacacaagggtcgctatatttgttttcttagtagaactcattgcttgcatgtttggaatcatggtaggtccaacacaatc

SEQ ID NO: 34974 - DNA, 903 bp, Medicago truncatula
  Intron number 1 from transcript Medtr5g079130.1 (locus Med tr5g079130) derived from phytozome v7.0 (chr-ID MtChr5; po s 29366849 to 29367751)
ccaattatcgtggtatatgtgtatgaattacttgtagccttgtaggggaattttctccccccatcactatccaaatttagaagtggcaaaacagatttatcctttgaattggtccgtttaacccaccattttaagcaaattgagttgacgttttaagttcattctctaatttgtccgtcccatctagcctgatgaaaaagtgggttttgagctgcaggcttatgaaaaattgtttctttatttttattgtactatagtcaataagaaagtggccaaatttttaaagattgtttttacccttaaaaatagtcggaggatttttgttttattcatacaagagaatttaagacaagaagcatattttatctaattatgctcctttagtttatagttaaatatttacatattttcttaaataactaagaagtttttttttgaaggattaaataactaagaagttagagatttcacgtacttaaaaaaaaaaaaagtttgagatttcattctttgacaaaaattctaactcaatttaagttcgaaagaacaccaagtcaccaactgtacatgatttattaaaaataaaataaaaagaggcgacataatattcctatcgtagatgcataattttttttagatgtaatgtaattgaataactactatttctctaatgtttctttggagggaactaaatcgtcaatatctttggagcggagttatttgcatcgaatggaatgtgtacttttttttgcagcacaatatttgtttttgtcaaaacaacaataataaaagaatatttaaaccaaaaatacaattatttttttcttatgtgttttcaataattgatactattaatgtaactctctgttagggattaacacgagcctgcaagaaaacaagtaaatc

SEQ ID NO: 34975 - DNA, 269 bp, Medicago truncatula
  Intron number 1 from transcript Medtr1g124460.1 (locus Med tr1g124460) derived from phytozome v7.0 (chr-ID MtChr1; po s 27129856 to 27130124)
gtttcaacttcttttcaacgatttgtttcgaagaagtaattaggattcatatgttgttatgtttttcggctttgtttaacgtggtacatcctggcttaatttgtctactgctgtgaatgctattgctttttcataaagtactttagtataatgaatggttcattttgtacccaaaaaaataatggttcattttgattgatttatttatgtgctttcaagaatatatcttctatgctacaatatgaccaattaagtgtgtggagaacgga

SEQ ID NO: 34976 - DNA, 651 bp, Medicago truncatula
  Intron number 2 from transcript Medtr5g026970.1 (locus Med tr5g026970) derived from phytozome v7.0 (chr-ID MtChr5; po s 10939527 to 10940177 reverse strand)
aacattaacaaacaacaacaacaacaacaacataggttaacttctttcatccaatgctgatcacaaccaagtgtcccttagatcttgtttgatttcactcttgcatctctcaccattgctccgtgcccacgttgctttggtcagtcgttaaatcatgtctttttttttttttttttgtagtctctgttcttccatttccaagatctgctaattttttctacccaatgattttttgtttgcaattttgaattttgtttttaaagtttgattctttttgtgttacaatggaaccccatttcatgaataatgtattttgttggatatttgaaattcttttagacattgtttggatccgttaccgtgtgggaaatggagatttttttttgttgtgattttgaaacttccaagtttatggaattttgttttgcgcttgtttggaatcacggtgagtttggtaagatcatggtggcaacgtgattttgttgaaattctaaaatgtagcttttgtcggaatcacggtaacacaatgtgattaagtcaaacactgtcaattcaaacatgcacttggcttttttgaaatgtgaatgatgaatttgcagtggcgttgaagggtcaaagggacaaagaaagtgtgaaacttatgtgaaaagt

SEQ ID NO: 34977 - DNA, 504 bp, Medicago truncatula
  Intron number 1 from transcript Medtr4g008720.1 (locus Med tr4g008720) derived from phytozome v7.0 (chr-ID MtChr4; po s 1167048 to 1167551 reverse strand)
ggtttacttattatgtttcattccttatgtatcatttttggattattgctgatgtagcctattgatattggattttatgatgttaaggctttcatgccaagaatttattatggaggttaaaacagttattgttgttgtttgatgagaatattccgctgcagatttaatgacaatttcgaaggatgtttaattaaatagatttttatattctatttaaattgattttgaaaatgtgatgtgacatgcccgtttgggttttactctgatgttgaattattattatttaattgattttgggaaacggggtgttacagaggctctatgatgtttccccatacttagttagtcgctacccgaaaaaaacatgttaagctctcttttgccattcatgatgtatatattaatattggccatgattttcatttcaagaatcgtttgatgttatgtgcattgtttagatgtcgtttaggggttataaagttggaaatcatcgtaagaaaagct

SEQ ID NO: 34978 - DNA, 608 bp, Medicago truncatula
  Intron number 1 from transcript Medtr5g043840.1 (locus Med tr5g043840) derived from phytozome v7.0 (chr-ID MtChr5; po s 18156113 to 18156720)
aagttcgtttttgggccaactactttgatcagaaagtacacatcattcattactttctttctacttttcttctatatttgcgatgatgttttcgacttaaagtgttttacaaataatttgttattgagtaaataaatattttgatcattaaaagtgaagagttgtcattgtaatatctcatctcatgtatcaaaattctaaaaactttctcttggtagtcaatttggttcctaaaattattaagagaagacacaagattaaaaatatcatcttgcttttagtatattcatgactatagtgaaaagaccttagtcgttaaaataattgttagaacaccaaatttaagtaactttctaatattttgggaggtaaaataggttgagcccagaaagtttaacctattacttaagtatgatggattaaggtccgcacctacgactcaaatccgtctggctcattaaaacggagcggatttactcgttttgtcacatttaaacctatgttttaagttttaaccactcaaactgtcggcttgtttgatacataacgtacgtttattttgaaaatgtttagatcattcctagtagctaccgcatattccaatcacg

SEQ ID NO: 34979 - DNA, 526 bp, Medicago truncatula
  Intron number 1 from transcript Medtr5g078200.1 (locus Med tr5g078200) derived from phytozome v7.0 (chr-ID MtChr5; po s 28958710 to 28959235)
aaagacaaggagaagaactcgaaactcaaatccaggtaggtttcctcttcttcgtcacgaatcgcaagttcaaaaatgaatgtttgttttgattagggttttgaacatttcaacgatttttttaccttttaaggttctgtatgcatggatttggattaaggcaatttttgtctgtatgttagtcaaactagggttttatactgttgtgttgtctatgagccttttttttttcgaatattgtgcatatatttgattaaggtttattcctttcttaaattaatggtttaaaatagatggaccaacgatttgagtgtgttatccatgggagtttggtagttttctcaaccctaggaaagttaaaagaattaggttaccaatgtcatccaagtattttcctttggcaggtcgtcaaggttttattttgtattttcgttttttattatttaactataaattatatttcattttttgttttattttcttttaagccgttttattttagtcttagtctttgatctcattcttt

SEQ ID NO: 34980 - DNA, 563 bp, Medicago truncatula
  Intron number 2 from transcript AC233682_34.1 (locus AC233 682_34) derived from phytozome v7.0 (chr-ID AC233682; pos 130180 to 130742)
cggggtcgagttcttcagaggtggaggagactgatgtaggagggttttattaataatttagtagtatttattatttatccaaatcttagtaattttctagaactttctattattatttcgttttattttattttggcccacgggtttgttatttctatcactatcactatataagcagaacttatgtagcctaagaggcacactttttgattcaataaaattattcgagattttctctcaattctggtggattccggaaacccttattttcaaaggtttgtcgcttgcaaccctattttcacaagtttgtcgcttgcaaacttgttcttttctatctaggtttagcgcttgctaaccctacgcttccgtactgcgtcaatgtcaatatttgtaaaatattttacaatgtctattacctatctattgtcaatatgcattaaagctacaaatgtgtatatccttatattggaaactactacaaatttttatctattttctatgcttgaagtgaaacttatatttgttgcaagtggatgtgttgcaggaacatcaggaggaagctc

SEQ ID NO: 34981 - DNA, 839 bp, Medicago truncatula
  Intron number 1 from transcript Medtr1g100140.1 (locus Med tr1g100140) derived from phytozome v7.0 (chr-ID MtChr1; po s 20681565 to 20682403 reverse strand)
gttcaagaggtttgtatattcttctaaaaaaaaaaaaaaaatcgaaatatatgtctatcgtaatcattaatatgcgcatttatatgtataaattgcctatcacatgttatgcggtttatgcattgtactattatggttataatataccgtacgtccttagctatcatatatttatttgtttttggtgaaactagctatcaaatttttatttagggcttcgtgctttttaaagtgctagtatatatagggattgattgattgaattagaaaaagaatattggagttttaaggatttgtatcaagaaaggtggtctagtagactagtgataaaaatatgtcttttatgtagacattatgggttcgagtatgttaattattttggaagaagaagtaaattagaatcttttgcaagtgctctttgaatcctaatatctatttctatctttaactggggcactttgtaaatatttttacaccatcaactaatcataaactatcatttacatgacttttaaggtagatatatgctcaaaatcatgtacatatttttaatggatttcatatgggtgtgttgatgcgtgcttaagatatcaaagtacaaatatactattattttggattatattttctatagtcaacaatcctcatttaaagtgaacgagagcttttaaaaagcatgacatcaattattccaatatagtttacatgcatgtgtttgtatatatatatatatatatatatatatatatatatatatatatatatatatatatatattgtctcatatacttattttgtatttgtttcatatttgtgttagttgcctggaagaactgata

SEQ ID NO: 34982 - DNA, 888 bp, Medicago truncatula
  Intron number 1 from transcript Medtr1g031170.1 (locus Med tr1g031170) derived from phytozome v7.0 (chr-ID MtChr1; po s 7498497 to 7499384)
tagaaaagcaaggagccaatagtggaatgtaagaaaaggattgttgaagccaaccttcacagctgtttgtggcgtcccagctgtatttttaaaccattattttaaaaaaaaaaaatttaaaccaaaaaaatcaccgaaaaataaaaataaacttgtggtctaaaatataaagatttaaatatattttttttatcccatatctagtcctcctatttttaaaatttttgggaaaaaaaaagtgttgacattgagttttatgttttttttaagtaagttttatgcttgttttgatgaagtgtcatgttgaataatatgttagtaaatcatttagtaatgtgagaatgtatatgttttaggtttttttttatggttttaacttcttaacttttcactttaagttttttttttttttttttaaatgacaattgttagtacgttaattgttatgttagtttttactccttgtcacgacttgaacttttacgtttcatttatttaaacaacaatttgataattctaaaattgactacccattgggtccattaggatagagttttggaggtgaggtagattcgggagtttaattttttctttattagaaaaatggtgttggaggcataagattgatcaagaggaatcgtagtttagagtgttgtctcgtgagtatgtgctagaatgtggtgtggtgtcataagagtgtctgaatgatggataaatttccatcttgttgaggaagaggtgggtgtgagtaggtcgaagtgctttgatggttatttgttttgaatagggaagagggaatgttgttttggtgtgacccttggttagaggagtattttgatagagtatttctatggactatttgagttttctttacataaagagacttct

SEQ ID NO: 34983 - DNA, 523 bp, Medicago truncatula
  Intron number 1 from transcript Medtr7g043370.1 (locus Med tr7g043370) derived from phytozome v7.0 (chr-ID MtChr7; po s 10709509 to 10710031 reverse strand)
gtcttggggtcccttatttcgtttcacaaatcgtaataatatttcttatgcatttcacacttctttttttctatagctagtttgagatgtaaattgaaaacgtataaacacaattttcatggcatagctctttagggaagttcatttgaatgaatatcaaaactaatgaaaacaactttttcttctttgtttttttaaaaaatatgatagtattaattttttcaatctatgtacttatttaaaaggttggagtagcaatgaaaacaaattaaagacatagaaacatgaaattcatctataatttcgttaccaaggttttttttttttttttttaggaaacgttgctaagtattcttctctatttttcgttgttaattcaactttttctaaaagaaatgatttgatgagatacttgttacgttttagtttttatttaaaaatatatttgttttcatggcgtcaaaattactgatacataaattttgcaggctggtttagttctaggaccatctttgaagttttc

SEQ ID NO: 34984 - DNA, 757 bp, Medicago truncatula
  Intron number 6 from transcript Medtr5g088560.1 (locus Med tr5g088560) derived from phytozome v7.0 (chr-ID MtChr5; po s 34339131 to 34339887 reverse strand)
catacattgcttcctaaaggaaaatctcaagctaagtgagtcacattttctttaatttgttattttcaatttcaactttattttaggtaatttttaacatgtttatggttttgaactagggatataattaaataagttaagcagaataggaacttgtttaatagtatggaactttggatagttaaatacgttaagcagaataggatttgtttgtgatttgaaacttcggttcggatatagttaaataagttactaaaacatgaaatttgtcacacaaacgatttgtcactgccaaagaataaagaaaagaataagtgtgattatcacgagaacaatttgtcgctgtcattatagtcttctcattcgaattaattcttctgtcaaacctttaatcgtttgcatatatgaatgaaagtttagatatcctaattgaactattgatcaagtttttgactcccctgtatctgattggtattatggctacagcttgatttgtcttttccctatatttacaaacataggattgtttttccttatttgattataatgtcatcagtaagttccactctctatgatatagaaaagtcattaggcttgtctgcatggcttgaaactttggatagtttaagttagggcctttaagttattaccaagttagtcacatttacattttctttttctgaatttgatttccctttgctatgtgtttaactttttgacaggagagcggcaatcactttgccgggtaaagaacaga

SEQ ID NO: 34985 - DNA, 565 bp, Medicago truncatula
  Intron number 1 from transcript Medtr5g090850.1 (locus Med tr5g090850) derived from phytozome v7.0 (chr-ID MtChr5; po s 35501924 to 35502488 reverse strand)
tcgttcttttcttcacaaattcaactattgttaaggttagttacatttctcaccgatcttctctctctgatttgttagctttcacttatttttctcatttttttttgtttttttctaggttaaataaaatttctctctgtgattacaattgttagggaagttttgattttgatttttgtttttgggtttgcttgattttgtagtgagaaaaacaaaaaatgaataaatgttttgtttttacttgaaaattaattaattataacttgcccaccaagtgtttgattttttgtttcaatcagtgtctattacttggtggctaaggaattggaatttttggtttgatttatttattatttagttttattaattattataataaggttatattgtgaaatccaatttgaacttttccactatttgggttttgatttgcttggagtttttgtacttttcctagtttgggtctgatttacaaggagttttctgaagattgttcctgacttggttcttttgttgttgtagcagattgttgactgttactgttgatttacttggaaattgaaag

SEQ ID NO: 34986 - DNA, 867 bp, Medicago truncatula
  Intron number 1 from transcript Medtr4g096640.1 (locus Med tr4g096640) derived from phytozome v7.0 (chr-ID MtChr4; po s 20401744 to 20402610 reverse strand)
ttacagatgtagagcacaacgccttcttcatgttgtgttagttcaacaagttttttagttagtattggttatatggttatcgttaagtagttgccttgttttaagtcgaaaagaacatagctttgggttctttatttcttctctttatggtttcttatacaccattatggatcaactaaagaaaggtatagacataaagcacattagtggactcatttagttcctccaatttcggtggaaggttcgtttgtctcaaaggtgtggttgtcctattgtcaacgtcgtagttagttgttttttgtgggcgtgtgttataattgtgaggatgaattctatacgtccggttgaattatatgtccttgtcgtatggtctttatgcaagtgttttgttcatttgaaagaaaaaatttattctgagtttgatctccaatggagtcactagtgatcatgtcagacttgaaacatgtggtctaaaaggtgaggatgcctccacaaaaatcaaattagtttggtaaagaaaaaacaagttagcacgacatttttttaagaaacaagttagtgaaggcaagtgcgctatattctatagctatatacccatagagttagagttttcaagtttatttttgagtaaatggtcattttgatcattgattttgcacatcgctgtcataaacgtctctgactcatgattaaatgattaaatacaaaataatcattgaatatgtagctatgttatcaatttaacctgagactaaacttattaggtgacagcgaagtaaagagggacatgaagttaccaatttactcaatttattttttgttggtataaataataaaaataaaaatttatagtgagagttttattgt

SEQ ID NO: 34987 - DNA, 730 bp, Medicago truncatula
  Intron number 2 from transcript Medtr2g077860.1 (locus Med tr2g077860) derived from phytozome v7.0 (chr-ID MtChr2; po s 18045821 to 18046550)
cttcagccaaccaagatcagtctccagcctccgtatgtaaaaaaataatatcaattaatattttaaataaattttcgaatgatcttgaatctaccactgcaatacatctatgtcacacgtagcatctgaatcttggtttaaatatactgtaatgtcaaatggtagatattctgaatcattgatggacatgatttaaattttgaaatccagtttaaatatattgaaagtgagtaaatatgaataaattttgctatgttcgtgggaagtcatgtaatctatcctcttgaagtcgtgggaaattgatcagctgtgaaggttgctgttgtatttgctattaaatatgaatcaactttatgacatgcttccatttttgttctgtgtttagtatattctactttttctttacatagccttaagcttgttttacttgaagtttgctcctgacaatgaattgatgagctctcgatgcccctaaaaatttaataaacttgaagtcaaacaattgggcaattcgaattgataaaaagagcaacgaacaagcaaaacaagcagttattgatagaagtcttctttatatatatcaagtacttcttagccagtttttatttttaattctagatcttttataatcctttttggaattttttaatgtcaattctaactccttaagctgtgtttcttatgtcattaacagaattgaagggtgaaagaggcatcatcatttgcctgc

SEQ ID NO: 34988 - DNA, 864 bp, Medicago truncatula
  Intron number 1 from transcript Medtr4g109000.1 (locus Med tr4g109000) derived from phytozome v7.0 (chr-ID MtChr4; po s 24287961 to 24288824 reverse strand)
ccaccattcgtgaagacagtactttttcttattcctctttattgttgtgttagatttcaactagaaattgagccatatagttatgaaattcttgtggcgtgtggagaaaactgcataatttggctgagttgatgttaaagtttacttttttcgacaacccatttgattgaaatgacatttaggttatgttgtatattgactttgatatttcactctgtttagacattttggttcttcaagcgggatatgtaattatttggtttgtttgtcaataactaaggctctgtttggataaaaaaaacttattttgcagcttatatatcatgaggtcttatcatgtaagcgcttaatttttataataaataaaagataaaatgaagtcaaactattttcgtataagctataagctgttttaataagttatcttggagagtttatggaaataagatgttttcataaggtatattggagggcttatggaaataagttgattttgtaagttctccaacgccttggcgcaacgctaaagttgttgtcacatcactaaaaggtcaagggttcaagtcgtggaaacaacctcttgtgtaaaaaaacagggtaagggtgtgtacaatacaccaaaatggtgggaccccttcccggaccctgcatatgtaggagctttagtgattataagttctcccaacctgtctcagaagtgcttatacgatcagacgaactcaaataagccaatcaaaatagaccctaaatggtggttgtattgtatccttttgaatggaaaatgcaataagttgatagtatatggtagagaatgcgagtaatgatacaattgcattgtgtgatgtaggtgtgttttacctttac

SEQ ID NO: 34989 - DNA, 1002 bp, Medicago truncatula
  Intron number 2 from transcript AC233572_7.1 (locus AC2335 72_7) derived from phytozome v7.0 (chr-ID AC233572; pos 36 493 to 37494 reverse strand)
actaatcttctgtggtggatacatagtagaggttgaagtgtttagacattgaatggtttatgatattttgaaagtaattgagaaaaatgttacaatgattttgtcccttgcaattaataacttgacttattattatttaagagctttgcagtcatttttaattggtacgactagtccagtgcttgtgtctgatgtcttagaattttgatgaaataatgttttgaaggattagtgcatttaatatggtaatgttttacaataattatcatcatgctaatttgtttttcgattgcttagcagccatatgaaaatggaaaggatcccaactaaacaaaaaaatattgaaaaataataaataaaggatgatgtatatatgaagcaaaaaatgaacttaaatagtttaggaaagagggttataattactagtaaatccctttactttaagccaacaaagaaatgttactaactactcaacacaaaaatagaacattaaataatcatctaagtgttatgaattagtttctcttggagagactagtctcagattgatgagatgaagtcatgacacaaatccaaaatatcacaaaggggttgagcatttggatcaatttggaggactaatctctttgaacatcgagcaacaactgtttggttcgcaaatattaaataaacatcgagcatttggtttgtttgattaataactggtaaagtttggaagtatcaggttggttttggttgcaggcttggtagggtatgagactgtgagtaaattgaactaaattttgttgcaaatgtaaataatatgcaattgcatttgaaatctatttctatctggaagattagctttgttagtttcaattcaacagaggcaagtaaatataattttgaagacaatttctcaactgatgttgggctgcagattaaggcttgtgtactgtcatattctgtcttgtgcatggtttcacaggctacgaagatttaagtcgtaatcggaatcgtttt

SEQ ID NO: 34990 - DNA, 939 bp, Medicago truncatula
  Intron number 1 from transcript Medtr5g083160.1 (locus Med tr5g083160) derived from phytozome v7.0 (chr-ID MtChr5; po s 31506854 to 31507792)
caggtcactcactacttcaatacattttcttttcttttttctttcttgaatttgatcatccaataagagttagtgacttggtattacaatttctttcatcaacgaccatgtctaatgagtagggtctgttctgttttgataaacaacttatttgcatcttatagcacaagcgcttctttataagctcatatgacatgtttttatagaaaaacataaaatgaagttgaattgttcttgtatatgctataaattgtttttataagctatattggagaacttatgaaaacaagttcaaaaaagctttatgaaaattgtcacaagctgttttcataagtttttccaaatagtctcacaaaacttaggtcaacagatagactcaaatatgtcaatccaaacaaaccctgtatatggcctatttcgataaatagcttatttgcagcttatagtaagagctgttatcatgatatgcgattatgcataagcttacgtaagctatttttatagaaaaaagataaaataattgtttttataagctgtattgaagaacttatgaaaataggccaaaaaaagcttgtgttttcataagttctctcaaacagtctgaagaaacttatgtgagtagataaactcaaataagtcaatccaaacagggccatagtggaattgactattaaatagtatcaattgtttcggtatcatattacttttctgtagagtttaatcttttgcgtaatttttgaatatttttggtttactgatcaggcaggcatgttatctcgacatttaggtactggtatcatgattgaactgcaaatttattttttatatgtttctaatttctatctctgcactgtatattgtattccttttatttgtcatatcatcttataagttatttttgcaggttgaaaggcgtcaatctgaatttcggaagttcaa

SEQ ID NO: 34991 - DNA, 639 bp, Medicago truncatula
  Intron number 2 from transcript Medtr1g092660.1 (locus Med tr1g092660) derived from phytozome v7.0 (chr-ID MtChr1; po s 18638246 to 18638884 reverse strand)
cgttttatcaagatattggctttgaacttgctagagtacgtgttacttttttttcccttttatttagtaatgtgggagttatgagtcttaaaagaagagtggctatattaaaataaaatttcaaagggaatttgtagatgtattgtacaagttattcttcttcaagaaagtagtggacaagttacgggtcttaatcacttctaaatataatttttttaagaagctaaataatcactcatatatatgatcacataagaaactacttgtataaattaaaaacaaatgacttttttttaaataataatacaatttttaaaccacttgtgcatgtatcaaaaatatttttgtactatgtatttatgtgatttcttgtatataataataatactgatgacgatgatgatcacaaatggcttttgatttttaattccaggtttctagttacgataatgctttgttctattttggttgcatttacatttgagcatgtattagaatatgggctactttcatgttaaatgcatagtttgagcggtcctacaagaatatttgaattgacttatttgaatttatatacaataatatttgcgagattaattgtcaggccggttatagatcaaattggaagcaaaactagtt

SEQ ID NO: 34992 - DNA, 637 bp, Medicago truncatula
  Intron number 1 from transcript Medtr5g097920.1 (locus Med tr5g097920) derived from phytozome v7.0 (chr-ID MtChr5; po s 39021362 to 39021998 reverse strand)
ccaagactttttacctaggtatttttcttttattctcatttctctatgccacaatattcaattgaattgaatttaatccatttttggtaagtttcattgtgggctgaatcatccacacataggcaagaatgaagaatcattatctcatttctgttttattttacaaaagaaattgtttctatttacatgttgttttaaaaattaatattgcactaattaatttttaaaaaatatactcaaaagagcttctcatttaaagaaatttttagattttttttttcaattctcatttttatatatttttaacaaacatataaatatttaaaaaatattttttttgttaaaaaaccgttttttttcacacaaaaaacgtaacaaacaaaagagccgcagtgagttggattgaaaaaagaagttagtaatatcacgacgattacttttctcacattcattgtttcttaaaaatacatgaaaatgatcaaaaacattccatcgatagttaggttcatatatttattgttgatttgactcatctttcgaattggacggatttgggtttagaattgtctaatgataagtactatatttattgttgatttgactcatctttcaattttacaatttaggtacacaattg

SEQ ID NO: 34993 - DNA, 956 bp, Medicago truncatula
  Intron number 1 from transcript Medtr5g081100.1 (locus Med tr5g081100) derived from phytozome v7.0 (chr-ID MtChr5; po s 30430358 to 30431313)
ttttgtttctgctcctggtcgcactattctcgctggtttgtctttttcctgttccatatttttgttattcttcttgtttcatacgctcacgatgtttttctcttttttattttatttttaatgtgtattggatttgccatagttattattagtcatacttaatttttggttagtgattgaattatatttatttgcatgattagaaagaacaagtattttaattgtgtcttaattctgcgtgtcgtcctgattcttgatattgcgaaaaattgtgattgaatgcttttgatatagtggaatataaatcttgatatcgcgcattaagcagttttttatattgcgaaaaaatgtgatcatatactcttgatattctcacaattgtggtggaatacaaccttgatattgtgcatagtcgctatttgtagaccttttgatgagaatgtggatcaaatggagaatggctgaatatttttttttgtgaagaaaacgtataaatgccgcttgatagctctcggctcggggttcaagttgaactgaagtacattgttgatcacttattttttgatgtataaactataagtttgtgtttcagctcggttttttagaattatacaatctgtttgagagtctagtattttgtgctggatatatggaactgaaaatgcaattctttacttattagtattagctgttaactgtttttgtggacttctgtaacctccatgagtaatctatttttatagtcttagactttacaacttcaatttaaattctgaagtaaaagtgattaaaatttctgtggacataatagtgtcctgtgattttaatacactaatatgatgatgttctttctgatagcgttatctgaatcgttttgatttttattgcaagttgtctctcttttacttatttaactgaagctgattttttcttcttctgagtagttggagatttac

SEQ ID NO: 34994 - DNA, 879 bp, Medicago truncatula
  Intron number 2 from transcript Medtr5g075220.1 (locus Med tr5g075220) derived from phytozome v7.0 (chr-ID MtChr5; po s 27352634 to 27353512)
tgcaaattatcagttgcaggagtctcccagttttggtaagatgaattttcacacaaatttccattgcccaaaaattttattttttgttttgttcttgattccgtgttagtttttgaattttttttcttctctttttttgtaatgatcaacgtagcataaagtttagatcgagaagataaagtttttgctgtcaattttaaatttttatatcaatctagaattcaaaatgtgtctgagttgataaaatttaatggatccttgaaaaaattgtgagcttgatgaagattcaaataagaggaattgagagttaattagaatgaaacccctagcattgtatttatttggaatcatcattaaaaagaatcgattggaatttgatggatatttttaaattttaaagtatggattttttaaaaccctaagcaagagatgtcaatgtaacattagatttggatccatgaaaacaaaagtgagcttggcggagatgtaagaggaattgtgtttggaatcattaaaataattgattggacaagatttgtgttgatttctttatataattaactaaaatcagaaggatttcaaagccaaatcaatttgtcatttttaactttcctaattgaagatttcagtttgaaaagaaatgaattagtgactagtggttgatatctttcaacatatagaaatctatctcttaacaaaatcaaatgtgatttcatgtgtggatacaaaaataaatgcacattcaattctcagtttgagtgtccacttgatatttattgtcgaggatatacttcagatttgtcatgtagacgtagtccacgttttagtacttccaattcattgtgcaattgttttcttgtcatgcagacaaggtcgttg

SEQ ID NO: 34995 - DNA, 885 bp, Medicago truncatula; identical to SEQ ID NO: 32040
  Intron number 1 from transcript Medtr4g101530.1 (locus Med tr4g101530) derived from phytozome v7.0 (chr-ID MtChr4; po s 22101947 to 22102831)

SEQ ID NO: 34996 - DNA, 699 bp, Medicago truncatula
  Intron number 1 from transcript Medtr4g100870.1 (locus Med tr4g100870) derived from phytozome v7.0 (chr-ID MtChr4; po s 21682574 to 21683272 reverse strand)
aggagggattgcagccaagggaaagtcttaaaaaggtaacaaaaaatgtgttggttctattgagcttggctttaactactttgaagattaccatcctcataagttaagccaaaaaatggagatgacccatattatacaccgagtaatgcaaaaaaggagctcacttttaactaactgtctctttgattcatagcagcgacacttcttaccaaaagtttgtctggtgtcagacacctacaccaacatatgtgattatattcgacttattacttgtttccaattattattggtattcaccccggcgtcgtgttttatagtcatgtgaataagaaattgttggttggcacagaaaccactgaccatgatattgggagtcattacttcagctaagagaaaaccattgaccatgattttggcacagaatgttttctttatggttcttgagatattgagatgaagtgacatttctcagtatagattatcttccattttgattttcttctactttgataggaacaaggattaatcaaaacaaatgtaaatcttagtcgtcaccaatcttgtatttttttttttcaattaaaatgtgaagtgattatttctattgtttctttcgtttcattgattttactggtctcttatgttattatcattattttatcaggtgagtcaatcatcttcagctcaaactatctacag

SEQ ID NO: 34997 - DNA, 528 bp, Medicago truncatula
  Intron number 3 from transcript Medtr5g017470.1 (locus Med tr5g017470) derived from phytozome v7.0 (chr-ID MtChr5; po s 6254443 to 6254970)
tttctcctcttcctttcatttcctcttctgctttggtactattcatcatccctttctcatttaccgtgttgaattttatttcgattgacttatttgagtttatctactaatataagcacttttgtgaccaaataaaaatacacacttgagactgtttgggagagcttattggggatcgcttctcaaaattagttttagcttatatcaaatcaggtcttaacttgttcacatacatatctgtgtttttaattttaagtatcataatcataataactagtcattagtggaaaattgcgccactgatttggggaaatttaacagaaaataaaggtgttaaattgctttacatgtaattagtggaagactttccttagaatggatagatagatagataaatgtcactggtgattaggtttctttatctgtgttttgagttatgtttctgtgttcttccttgctgacttttctgttcttcactcaacgttgttttcttttccatgtactgtcagtacagtgaccttgctgaag

SEQ ID NO: 34998 - DNA, 761 bp, Medicago truncatula
  Intron number 1 from transcript Medtr2g091610.1 (locus Med tr2g091610) derived from phytozome v7.0 (chr-ID MtChr2; po s 20678103 to 20678863)
ggaggagaagattctcaaggtatcagaaaaggccagtaattgaaaaaacacctacacaattttcataacttcgcaacaatttttatgaatcaaactttagagtgtgtttgaatgaggtaattggaaaattttagataatttagaattctagtcaattcaaatgattcaattaaattgtctttatatctaaatgtttttgtgtggatggaattataaaaagtctcattgctaacattttttgtcgatacaacacgaggcaccatccgtgtttattcaatgccatccctgccttgcggcttccaactattaatcatctcaacttcggcgctcatataattagtaacttcttgattgattattcgggaggaatatagctcttacatccatcgaatctctagtatcatcatataaattaacatcagatataactgttgtgaataagagaggaataagaaaaaagtaatagaaaaccaaacacaattaccaaactgtgtgtatatacattgttggaaaatctttttgttgtcaaataacattttctgtggcaaaaaatggagaagatagcaatcttttgctatatgcagtagtaaccttaactattcttttttcacttacggtgatttagaaatgttggtgatggtattgaatacattttttcactaattgcagaagcttgaattggtcaatggagttctcttgaattggaattttacatatgaaattaatattgcattttttcatgctgaaagccttaccgaaaa

SEQ ID NO: 34999 - DNA, 451 bp, Medicago truncatula
  Intron number 2 from transcript Medtr2g010220.1 (locus Med tr2g010220) derived from phytozome v7.0 (chr-ID MtChr2; po s 2431488 to 2431938)
ttgaagaaggaaaataaaattgatcaggtttgtgtcactcattgagttagtgtgtttgaatttttctgttgcttaaattgttactcgtgtttgcgcattttactttgaagaagttttttcttcagttgtgtcgttataatattttgagtaggttgtgaactacaccaacatctaagttatataactgacacttcaaattgaaagcgtatttgagtgtctgacacatgtcgatgtccaaagctgatatgacattgacaccttacaagcacttttaatttttaaaaccatttttagtgcctagctatcggtgtcatgtctgatgtttgtgtcaatgcttcgtagagtgacattggtgactggttttatattatgtctgcttgttttacttttaattatccggttttgatgatgaacagttattgcggaacactgtgtttcccgaggaacccat

SEQ ID NO: 35000 - DNA, 649 bp, Medicago truncatula
  Intron number 1 from transcript Medtr5g033520.1 (locus Med tr5g033520) derived from phytozome v7.0 (chr-ID MtChr5; po s 13668316 to 13668964 reverse strand)
acttgaagtcaaaagaacatttcttagcaatcctcgtaatctttttcaataaatgaatcatctacaattttaaataataattagtaaacaaaacatatttacatttcgtttccggtggtgacaagtgaaaaacatgtctaactttcctttttgttaaccctaacttttttcaacaagttgagtttctctcaatcttgttttattttcaaaattacctttgctattgtcactaaatttgtttgttttttttcttgtattggattaggttctctgtttgatgattttattggattttatcactgattgagttctctgttactagatttgtttgttgtttttcttgtattgattaggttctctattactaagtatgaatcataaggaatgagttggaatctttggattttcaaccagaattttgtaaatatcgttggttggaatcttaaactctgcatcatggtgtacaaacataaatgttttgtagaaagaaaacatttattttataaacatatttcatagcatcagaagtcttatccttgaagacaatttaacaattaaacttttaacagaagtcttatctttgttcgattcaaacatataagccccaaaagtcactgcttcccacagactgcacctgagaccagaagag

SEQ ID NO: 35001 - DNA, 967 bp, Medicago truncatula
  Intron number 2 from transcript Medtr2g111500.1 (locus Med tr2g111500) derived from phytozome v7.0 (chr-ID MtChr2; po s 26468865 to 26469831)
cggctaccaggtttgattttatttctatgttctttttattaggcattaatctgaaggtttttatataatctgttggatgctgtgtttttttgaggttacttaaatttctttagcaattgtgtcacttggttttttggtctctgattttttttttatatctattgattgatgttttaaaatttggcattcttcaatgctcactattgtttgcgggctcaaaatcaaaagatattattgtctgtcaaaccgattggtcataggatcctagaggtggtccagttcaagccttggagttagccaagcgcaagccgcctggattcatataacccaatttcattgtggttcaataatcgtttggatattttgggggtaactttgttgtgaaacaattagtggtgggatctatcatgtgtcctgggttatagtttatggctttgctgttttttaagttgggtgagtgcaattatcttaacaaaaatgttgggtaagtgtgatgttttttatttcttgctgtttcaggcaggacaacattctctcttttttgttgcccgtttttgaggcttccttgttaaaatatttttgtgacggaataaattttttagcttataaaaacactttttatcccttgctggcaatttttattcttagtctattttatgtagcatgtagtcatgcaaggttggctttattattgaatcaaataaacattgttttattgattattaccactgaaatgaattttgtggttacactgtacactgtttggtatgagttagaatttttactgattagaataaaatgccactcccttcattttgtcgtaaaccaatatgtatttaagatacaggtgccgttgtttgtgttttgtttcctgagacatgcttattttctatattcatgaacaatgaggaatgccgattgtatctgtaattggttgcagatttgtgtctggtgttggcatcacata

SEQ ID NO: 35002 - DNA, 563 bp, Medicago truncatula
  Intron number 3 from transcript AC233571_19.1 (locus AC233 571_19) derived from phytozome v7.0 (chr-ID AC233571; pos 92471 to 93033)
tgagaggcaaaaaaggatttctcctgaacttcttagtaaggaatttttttaaacatttaaccttcacttggtcatcacaatcatgtttataatccttgaatcttaatgtgcacatctattgagtaattggtttatagttgtccaattctttcgagagtaattggttggtctataaatatgtcataattcaatgagtttaattaaaaggagaatgttaatgagtgtcattggaattgaaaattaggcgacccaacctagccttaaatgcaccaaattggtatatgtcatgcccactcttctaacaactaaattgtagttggacaaaaaaaaagagcaatgttatttgaacaatctttcttgtgacaacttaaaattaggtacattgtacattgaatatcttattaaagggtttgatcttttttaagggacgataatctattataatattatcctcacatgaataatcagtaaatccaaactaatttactactttttaaatttaaatggtttgtaacaactactttatgtttgttttttatctttgatttatataggaagaaaca

SEQ ID NO: 35003 - DNA, 623 bp, Medicago truncatula
  Intron number 2 from transcript Medtr4g018480.1 (locus Med tr4g018480) derived from phytozome v7.0 (chr-ID MtChr4; po s 3519317 to 3519939 reverse strand)
ttcaagagtgatcaacaaaccaacttggacaaaggactacattcttaagtaataatgaaggggtccctttagtcttatttaccttatggttttcttttgttaggtccagacccatcatatgtattaggtctagtgacctagaactatttaaagaacactattccccttagaggagataagaattaatttgccgttattttattctttctttttttgttttttctgctcctgtcattggtataactctgatttcattgattcccataagtaaaatccatcacatatagtcaagctatatatatactccaccgctaaacctcgattaccaaaacaaattatcgcccattttcagactgcatccttctggtcttgtggttgtgaaatgcctagaaaccaagttgtgttttgctgctatgaactcactctttccaccccttaggcacataacaaccaacgatgtagcacctttgatccttaaaaatcgctgcatctatattacatttaacctcacgcaaagctggttttctccgtctaatcatttttttttttacaaaatctaatcacattgttgttgttgttatgtgttagtacggtgttgttgcccgagcctggaacattactca

SEQ ID NO: 35004 - DNA, 408 bp, Medicago truncatula
  Intron number 1 from transcript Medtr4g106990.1 (locus Med tr4g106990) derived from phytozome v7.0 (chr-ID MtChr4; po s 23256121 to 23256528)
aagcaggcttcggtttcgatcttcttttcttttgagtaagacctacttcttccttttttcccttctcaaatagtttgtgacattgttaattttactatggaaaattctctacatgatttctggacggatagtaatgctttacttttaattctgttctgctacaaatgaaactagtacatgttaatatattaaaaactccatagttgaaagttatacgcagaaagttgaacttatacacagtttcacatgtatatgctgtctgatttgatgctttctgtggtatccataagttaatcatttttgtcaatttataacaattctctttataatgttataggaggtttggttttaatatagtttacccttcgctgttgttttgatataaatacatgtttctatcccaggtac

SEQ ID NO: 35005 - DNA, 984 bp, Medicago truncatula; identical to SEQ ID NO: 30740
  Intron number 2 from transcript Medtr4g114390.1 (locus Med tr4g114390) derived from phytozome v7.0 (chr-ID MtChr4; po s 26125922 to 26126905)

SEQ ID NO: 35006 - DNA, 613 bp, Medicago truncatula
  Intron number 1 from transcript Medtr2g013790.1 (locus Med tr2g013790) derived from phytozome v7.0 (chr-ID MtChr2; po s 3232197 to 3232809 reverse strand)
gcaaaacgtggctacaaaattcgtatccttttttattttcttataaatgtattatgcttgatgaaattgcttatctggaactgattcaacttttattttatttttttgttaagaaataatttaaatcaaataaagttaggtactttgtattgaagtctattttttaaatttttttaagcttttggttttctgatttgagaggacaagttttgatgtaatctgtttgttttctgggaaaatcagtgaagcaaatttttttgaagttgctgtgaaaagtttaatttttttttaatattttaatttctgaaaattgttgcaaaagttaatgggagcttgaagattttgcctttgatttctggttttatctgttcttttttatttcaatcatttgaaaacattcagcttttttcatcttaatgaaagtcataattttttttatatgatgatgtgaattttgttggttaagcttaaaaaaggtgatttttaatttattggtggtgttgaatctttgttttttatgttcatctgattttgtaagttgttgagtgtatttgttgataatgtgatttcctgagccaattaacttcagaggaatttgtagctcattcaagca

SEQ ID NO: 35007 - DNA, 723 bp, Medicago truncatula
  Intron number 1 from transcript Medtr2g045980.1 (locus Med tr2g045980) derived from phytozome v7.0 (chr-ID MtChr2; po s 12788747 to 12789469)
caagactgactttgttgaaaaattttcattacaaagtgcatagaactacaagaaaatataggatatgctaccaaaattgcactacggattgtgttcctagtaaatactcttatttaacaggaaaataaaaaacttctattaattcacagagaaatttttgcatgcaaacgcacctaacacataaggttttacgaacaaccactaataacttgacaccttaaattttatttatttatgttaaaaaaataaaataaaaaaaagttagaaatattgaagcgcgcttttgatctgtagtggaaaacagttttttcttcttttgttttctcttctatataactattgtattttctttttctttttcaaaacaaactatttccataatttcttcctccctcatatcatatcatatcaccaaagaatgaattgggatccttgctctcatctttaaaagaatctatttccctgtttctttcttgtggatacaagactttgttttattttacaaatagttccaacaaagagttcaagtaagttaactatcttctcaattatgtttcattttctattgataatgcattacctattgtccttagcaatgttataggaatttaggttgtttaactgtcgatattgttaattttctagtggcatgtgtgttattaatttatcacatggctactggttttatttattgattcaagcatatactgtttgtaggaaaaa

SEQ ID NO: 35008 - DNA, 848 bp, Medicago truncatula
  Intron number 1 from transcript Medtr3g005130.1 (locus Med tr3g005130) derived from phytozome v7.0 (chr-ID MtChr3; po s 170641 to 171488)
aagcttactctgctcatctcaaaagatctggcaaggttaatcaatccacccaaaatttctttcaatttttcattttgattttctattttgattgttgatgatttgatttgttttgatttgcttcatggtttcgtgaaattttggtgaattaatctgttttagtagctttttttttattgttatttatttgtaattgtcgtgatttattgtttagatttgtgtttttaatgttatgttttatgtttggtttggttaaagtttataactttgatcttctttgttgttgtgtctcgttgaatgtagttgtttttatctaatcctaacaaaaaaaaacgtttttgatttgattgaatgagtaaatagacaaaatggttgttgtgatggaatggtttgtaatgtttatgtgattcagagtaagcatttgtcagaaatctatcgatgtgatagatttgtgatttttatcttacccttgtttttgattagtttagtgaaaacattcaacttgattatgatttttggtaattaaattaggactgattttctgtattatatggttttgatgtcactttaatgctatgaataaaatggcctatgtaattggaatgtccattgaactttcaaaatttgttgttgaattcttattctaaattacattgatttcgtggtttcaactcatttgttggcttagttctagaaataactttcatgatgcttttgatttgtgtattgtactgtgtaattgtaaagtcattttttgaagttgtttatctagtattttaagttgaaaattagaatattattctaattctagtttatgttttttttttttgttattttgttatgaacag

SEQ ID NO: 35009 - DNA, 938 bp, Medicago truncatula
  Intron number 1 from transcript Medtr4g087130.1 (locus Med tr4g087130) derived from phytozome v7.0 (chr-ID MtChr4; po s 18253391 to 18254328)
tgtcttatcaaggtcatcaagagtcttatcaactagcctggttagtgtctattgttgcaagagctgctaagatgctgcagaatttggggttatgttttggtgcatcagttttggtcccttagccttgttccagccctgcgtcctaaggtactaagcgagtaagctttaggttaagcttggtattgctcaaatatacgcttaatcatatttattttttctagtttagatcatgtcttctgaacttgtcccctggtgtttgattcttggctacactcctgcctttgagcaactaagcttttcattgtttaattctatatacaacttcataatccaatgtcgacctcttacaaaatacagttgggatatagttgcatgcatttcctactcacggaatggttggttacgctttagctatatttcttttgtttttgatcaacactttagttactcttgattacacctatttattaagtattaagcaacaagttattttcagagaaaaaaaaagatagtttaattttaattcattcttagttttccttcaaaagagttataaaaaaaagtagttttaagtgtctttctctaaagtgacggatttaaatccattttttttttcagacaacatagaatctcccattactacttattcaatatctcaacactatttgatagcgctgctaaaaaaattagtcatccttacgctctgtgactaagaattttgtctggactagtggttgtaatttgtgactagaacacatcgaggcacaaactacgtaaaaagctacaatgttgaaggaaacatgcatgtaacatctttcaacagggtaatcctccaataactaatttgaaagtcttgtgatttaagtcaaatatgcttggagttttataaccatgttgagttgtcacatattttccttgataagtccttgcaggtagat

SEQ ID NO: 35010 - DNA, 531 bp, Medicago truncatula
  Intron number 2 from transcript Medtr1g031260.1 (locus Med tr1g031260) derived from phytozome v7.0 (chr-ID MtChr1; po s 7542241 to 7542771 reverse strand)
ataatcacttaatctataagctgcagataagttgtttatccaaacatgccgaaaatctttgtaccctggaaactatagaattcgaattctgtcgaaaagccaattatgctaatttttattgacctttcattcaaatgttttagtgtgctttgcttttcctttagtcttttgattatttgtattcacatcctctatagtgagtaatatcaaccattaatgcaggtacatcatagccatcatgagttttttacaatcgcgacccttggttttctcactttagaggatcgaaattctgattatttatttaattagatatagtgaattcttataatgcaataccatatttcaatatagatgttctgcctgaaacaataaaataaaacatggccttcaattcttggtaaacaaaaatgctcatatgttgttcattgatcgtgtattcttatcatgcatctctgtgtataatctggtacgtctctatctctcttaccatcttcaatggatacttgatcatgttgtttaactacagta

SEQ ID NO: 35011 - DNA, 963 bp, Medicago truncatula
  Intron number 2 from transcript Medtr1g068950.1 (locus Med tr1g068950) derived from phytozome v7.0 (chr-ID MtChr1; po s 13925787 to 13926749)
cgcactccagcaaaattcgtactgcaattgaagaggtaatcatgtatatgatttttgttgtatttaggttttgattcaaatttcggattttgttaattgttttctgttcttaggatcaatttagtgataaaatacatctaacatcaatttaggatcaatttctggctcttgtgtgttcttaatacatcttatattcgtactgcaattgttttctgttctaatggtaaaccattttcacatcacaatggttttgacatagttttgagagtttaacaaagttctaacaaagtgcattgtggcttctaaatctctatttctatattacttgttattttcacttatatttctggctcttgtgtgttttttcctaactcaagcacaagaagaacatgagacatatcaatgtcggcatcaacacacgtgattatattcaaataattcacacacacatacaataaaaccgaatatcgcaaaaccattgaaagaaaactactgttggcagagcaattagtgcatcggccgaaaattaacaattgtgatatgtggtcaaaattcaatgtcacagatacaacaatatatttgtatattacttgttattctcacttatatttctagctcttatgtgtttttttccgaactcaagcacaagaggaacatgagacatatcaatgtcggcaccaacacacatgattatattcaaataattcacacacacaaccacatttttaatagcatcaaaatatattagaatttagagccaaatatatgctagaatcagtatctcacaaggataacaatgaaaacctagtatgtatttggtacaaagaatcatcaacaaatcccaaaaattctaaattctcagcatttggtggtgtcataataaagcataagtttcaatgaaaacctagtagttctgacactaatatatttgtttgttcttaatagtgtttgttgctgttttca

SEQ ID NO: 35012 - DNA, 937 bp, Medicago truncatula
  Intron number 1 from transcript Medtr5g090540.1 (locus Med tr5g090540) derived from phytozome v7.0 (chr-ID MtChr5; po s 35357147 to 35358083 reverse strand)
ttgttgagtcggagagtaagcttactggtggatttggtgtttatgtgaaaccatcggtaactttcttattttatctcttttttgtaatgtgttgatttaatatgagaaatggtattgagaaaattatttaattgaatgtaatcacatttgttagtgtcagatagtgcagacactagatatgcattttataagatgtgttggtgctatagaggttatattcctatgattttagacattgtattggaatattttaaaaacccaatatttataagatgtgttgaaccatgaagcgacattgtctacgcttcaatatttgaatattgagtggtttaaagcagctgtaccatgatttggaagtctctctcgttggttcgattcagattttaaaacatttttacattgtatagaagaaacaagcaatgctgttcacttttagctatgaagcacaaacacaactcaacattgacatgtgaacaccaataataatataagaaaaggaaacaattcaatagaatcacgtgtcagtatcagacattgacacatgttggacaccagacacgcctacaatcacaagtgtcggtataaagatttttatgccctggctgtgtacaacacatgcatccaattaaatcatgcaaagtagatatttaaggaactagcctaaaaaagtggcatcatgaagtaatttgattgaatgcatgtgtaaaaatgtgttacactgtcggtgttaccaattaactccttgtgtatatataggaaagagatgaatcaagtgggagattgagggatgggagatttaaggatgaaagattaatgtgtgtgtgtatgtacaatagtttttccattaggtatggggtatgaatgaacaagagcaaaagaacctaatgcatgtttttttttgtgtggaaattatatgttgctttttgtaggttaaggc

SEQ ID NO: 35013 - DNA, 1045 bp, Medicago truncatula
  Intron number 1 from transcript Medtr5g078750.1 (locus Med tr5g078750) derived from phytozome v7.0 (chr-ID MtChr5; po s 29176822 to 29177866 reverse strand)
ggatcatcttttcttggattgtcccttttcaattggtttaacatgttactttattgataatgatgattaacttatctaagttattttaacatgttgttttattaacttattcttatgctaaaaagatggataaatttaataataattggaaaaaaatattataactctgtctatactagtaatgattagtacataaacaaaaggttagtataaagcaagatgaagattagaatttttaatctcacaacaaagttttagcaaatatatttataggtgaaggttagaattaaaaataacataacaattaactaataatacctctagtaactatctaagctaagatatttgtattgttgatatatacctaaacaaatttatcgatctgacatgggttgattgaaaatcgttgtgatgacaagaacaattcattgtctactagttttagccaccttaatatatagacttttcttttaatcgttgtaatctttcttttatatcccaatttccaaaatgtttttcagaaatgtatagctttttaaaaattcattgcttgaaattaaaatattctaattggagggatggtgaaaaaatgttttgaaatttttttctttattttaaagcttaacatttcaaacaattaacttaagttccatttgtaaaaaataattcacaggtttactataacaatatcaatgaggatttaactcatgtattttttgagtgcccttttgctgttcaggtctggtctatggcaagtttatggcgagaggttcaaggtgcggtgacatcgtcgccttcggccattgaggccatttttgctttgctacaatctttatctgttacgctctcccaacggctggcagcaattttttggagcctttggaagcataggaacataaaggtgtgggaagacattacggagacttgtgcaacagttgtcgatagagcgcggtccttgactgatgaatggcatcttgcgaatggccctgcggctggaaacttgactgcagtccctgctggtacgcatatagccgctgttaacact

SEQ ID NO: 35014 - DNA, 585 bp, Medicago truncatula
  Intron number 1 from transcript Medtr4g106940.1 (locus Med tr4g106940) derived from phytozome v7.0 (chr-ID MtChr4; po s 23204947 to 23205531 reverse strand)
cgggtaatcaaattttttttattttttttttatgttttaatttttatcataataacaataaatgctgattttgtgcttcattattaactcatatctatgattagtgtgcgttttaatgtctgtttgggatgccaaaaattgatcatggctaagctaaaagtgagttgaagacaaagtgatttatgtttgaatatattattatgtaaaagttagctggtaaattaacttcattgtaaaaatcaattcttgaatcaaaagcttcaatttttaacttcaagttataatcaattctactcgagagcaaccaaacttgtcaaaatcaattttggatcctctaaaagtggaaccaatcatacacgaaatttgttaatgtagctttctttgttatcagcaatagtttgattatgaggggggttgggtagctcaactggtttgagctaagggttaaggagttggagattcagggttcaagtcctattaaggagaaaaaaaactaacataacaattaacatactaacacttgtcattaaaaaaaaagcaatattttgattataattcttcaaatttggtgtggtttaggttgtc

SEQ ID NO: 35015 - DNA, 1029 bp, Medicago truncatula
  Intron number 1 from transcript Medtr4g138020.1 (locus Med tr4g138020) derived from phytozome v7.0 (chr-ID MtChr4; po s 34132469 to 34133497)
ggaataagagaaggtgagaaacatgaataatttaattactctttcagaacccatggtacatcggttttacagatcacgattgctcgtaattggttatctgttgcattcacataatcttgtgtctttggccgttcgatcatgtatggacacagtctagatttaaaatcagttataaataaaattaaatccttttttaaactatcttattaatgtaataacgaatctttcgagaaaatgttagttccattttagggtgaaataattattgatgaaacgttacttatcttttcgataaatttcaaattacttgtgctctcttcttcaagaaccaggaggttaacaccaattttttttttgccaattttataaactttaaactttaaaaaaattatcgtctattctattgaaaatctcatttgttttgatgcaataagagatttagaaaaaaaatgacaaagggattctatttggtttgtcacattgtaaaagtatatcttctctcgctataatcaactctgttagtgcgtgacttttttaatataaatatatatacatatcacatgaaaatgagcatcttatgtgagaatgatagaaataaataggaaccatcagattaaaaatagatgaaaaagattaaaatactcctattaaataacacatgtaccacacacactatatccatcagtctcttgtttctcaggtttcatcttctccaatttgtttcacacccaaaatctatcaataatcatattcagattaaaaacatatgcttgttatttttgaacctttaaatcgcgtttaaaagaaaaacctttaaatcacaattttagttttaattttaattttaattttagtatgaatctgggcataattctttttaattcagatctgccttgactaacatgaagattggaacgtgttggaagaaggtttaactaacataaatttaaagtctgtgtattcttcagatctgtatttgttcatgatgagagagacacggagagagacgtcgtgagggtgccgacgtga

SEQ ID NO: 35016 - DNA, 522 bp, Medicago truncatula
  Intron number 1 from transcript Medtr2g005030.1 (locus Med tr2g005030) derived from phytozome v7.0 (chr-ID MtChr2; po s 29503 to 30024 reverse strand)
gtgattctctttttcttcaagggtgagtgttcttttattaattgttctgtttaagcgttgtctctgttaaattactttaaagagttgatttttatgcccaacctagtgggtaaagccatttaacaatcgcttaatttcaattcaaattattagagagaattattctgtattgaaattgtgaaactgcttataaaattaatcaggttttaggagcggaactgaattataaattagtgagaaagtttggattttgaaccataaacacagtagtgagaaagtcccagcttttcttatttttggggattccttcttctcaaagtactaatttttttttttatctttcattccaaaaggatttcttattttgctttgattgcattcgaaagctaaattttcttcgattgagatgtttggatagtctgaaactacactgtttcttaatcgcttgttttctatgtttcattctatcctattgttatttttgtagaattgtgaaccaattagcttaaagctattggagag

SEQ ID NO: 35017 - DNA, 617 bp, Medicago truncatula
  Intron number 1 from transcript Medtr2g091960.1 (locus Med tr2g091960) derived from phytozome v7.0 (chr-ID MtChr2; po s 20903448 to 20904064)
acggcaaaataactttcccttcttgtcttaaacaggtcctgcaacataatgaattcattttatttttctctcttgaataatttatggatcatgaaaaatttggatgtaataatacattatttttcttcataatgtagactaacattttgttcaattagagttggagtttgacaatcttgttatgttttgataaaggttgttaaaatcacgagttaactcgtaggatcgtatgtttaggtatcaattttgagttgactcgactataaactccaattaagttaacttgaaaatgaaaccaagcttactcggatggactcgtagtgaatttgttaactcttaaactatcagaaattttttgaagaacttttttatctcttcttttttcatctcaatttttaaactcaattccttttcttctttaatagtttgattttgaattattgatgcatttattaagtatataggtcatatattattttaatattaggtaaactcatacaagtctacgagttaatttcacgtaggcaaattgagtttacttaaactatcgattttgacaaccttggttttgatggcttccagccagggccacgcgaccttccccaccactgtgttgt

SEQ ID NO: 35018 - DNA, 677 bp, Medicago truncatula
  Intron number 1 from transcript Medtr4g072410.1 (locus Med tr4g072410) derived from phytozome v7.0 (chr-ID MtChr4; po s 13891354 to 13892030 reverse strand)
gaaacacgtttttccataaactttccattctctatgctttctttccttcatctatccattgtaccaaacacagcctaaagatacgttagcttgaagctcacatttgaagcttctgcggcaacctaactcatatctactcttttattaaacaattattttatataatatccctgtttgtccattatgcccttgttttttatatgtaaaccatgctcctgattttcttttctttctcacgcgagcattctttttttttttgttcctgatatcatgcccaacaattgttttatgctaccatttttctatattttttacttgttcaatcatgcttataatatgtattttattttagtcgttaaaaaaaataatgtattttattttacaagttcgtataatctatacagaactcggattgataacataacataaatttaaataattacccaaaataaaatataaatatagttttaaatacaattaaaatccattttggtaattatacttccaaaagcaattttgattctaaataccaaacaacataaattgataagaatcaattttaagtaattgcatccaaacataaatcaattacattcaactcacttttattcaaaatcaattctctcaaactcaattctatcaaattgttgcttcccctctgccttctttagtagcaa

SEQ ID NO: 35019 - DNA, 947 bp, Medicago truncatula
  Intron number 1 from transcript Medtr4g109810.1 (locus Med tr4g109810) derived from phytozome v7.0 (chr-ID MtChr4; po s 24701562 to 24702508)
tcattcgccgattttcattcttgacttctcacaaggtatgtatgtatattcattacactttttttctttgaatttgttttgcggtgattaacttgctttttttttttttttggattaaagtatattatacccactttttaagcatgctccatcattattgtctctcgtccgaacaacaacaaccatggctagcaacaaggtcgtcaataagttggtcaatggtcgtctataaggataatgcaaagaaaagttgttaaaaattgaaaggaaaagtaataatcaaagagggatccaagtttccattattttgcaaacttgaagctttcaatattcgttttatgtttttatagccttcaatttaaatatgatgttgtgattttagatgttgtagaagatgaaaggggaattatgagatattcgcaagcttgctataagtttaagaaatagcagttagataactacataaataccatcgagttgaatcataagtattggccaatcgttgtaagttaattgtttatttaatgttaaagtttatgtttttatttcgattttttgtttgtgtccgagaatcgttatattacagttgtgtatgcatcgtttattctattgggtatctttatgtagattttgaagcattgacaactttaaagatatatctttgttaaaaaaaactttaagaaatatcttttgagagattttacctttaaaatgtattttggacgttgttttcttttagatttcttctagattatgcatttgtagaacatatttttcatttatctactacaacaatctatattagatttttgtgtaaatcttcactttatattgtataacggtgagataattaaaaaaggtatatagctaaatgctccattattttctttattcgtattcattactctaatttttattgttagatcttttaatgatagttgattaaa

SEQ ID NO: 35020 - DNA, 1006 bp, Medicago truncatula
  Intron number 3 from transcript Medtr7g026510.1 (locus Med tr7g026510) derived from phytozome v7.0 (chr-ID MtChr7; po s 6821672 to 6822677)
gacacaatttcgaacattcttcgctcaaaggtaataattttgaatcttggatacacgtgtttaaaattgaacttagctttgtaagtgttgatgtttacatatgatgtgtttatctgtgaaggatgatggcctgttgttacttgtacaaaattgtacccataaaactaataataacaatcgtatcatatgctaaacaatttaattaatttttcttgcaggtcgagaatatgttgttttaaataatattgatgagaatgtgaaaagtaagaaaataataatgcatatatgcaaaaaccccagttgtgtgaccgtacacacacacacaaggcaacaaacttcagaacgtcgtatatatgatagtatctgtttagttatatatacaaaaacgccactgaaattcaaaacatgattgactatgcacacacacaacacatgccactctctctcactcacctctccatctctgttgttaaaaacaaacttgaaatctctttctttccactctctcactcacctttccatcttccattgttttcccatctctctctctctctctcttccattgttcatcactatactcttttcaaaattataccttttcattttgttcttgtgtttttttttttttttttacacaaaatagatatgcacgcgccacaggatatatagatacatacacacacctatcgaacaaaagtgaaagaagctagctctaaacccaaagtttcaaaaccagtttcatatcctcttccattcttctttttctttcataacacttttaacttcattaaggtatactaccaacatcttaaacctttcattcttcttcgtttttcttcttttaagtaattctttttttcatttttttcttcttcttcttcttcttctctccttctttccttctcctcctcctcgtcttcttcttcttcttctctttagatctcatattgttgttgatcttgtttttgtaggtaccgaaaacactcgaccttttctctatctggta

SEQ ID NO: 35021 - DNA, 830 bp, Medicago truncatula
  Intron number 2 from transcript Medtr1g065630.1 (locus Med tr1g065630) derived from phytozome v7.0 (chr-ID MtChr1; po s 13094839 to 13095668)
tgattcggctaaaattcgagtatcttgattttgttgtaagttagttacttacataatatcttttacttttgtcttctctctgtgttagtttagagtactcatttgagatttgctcttttgctcttagagtcaccaaaatagatgataatttgattttttttttttttttttttttgtcatatacgatgtgctggataagatccatggtttttattctatatgtctagtaatttaaatgttcagattctacaagagagaaatttatttaaagcttccgtatatttttctgttcactcttgttccaacaagtctttattcttttggctcattatttaaaataaacaatagtcaatatatatatatatatatatatcatatacaaatgtttttagtgtagaaggtgtcaacgtatagctgggattccctgcactatatttttttatttatttataattaattaaaaatatatacatatattaacaaggtttgctttacatgtacaatatacacatgttaaaggaactaaaataacaacttttcattaggaaacaacaatcatctttttaatatgtgcaaatttacctaggataaaaaaaaactattaaaaatttgcatacttctagcattcacaaagtatgcatatgtctttaccaaaaaaaaaaaaaaacacacacacatatgtgaatctagttatcagggaaattgtcaaaggtttgacttaccacccgtcaacgtcaagtgatctatgaagagtaatagtatatattacattaataaatttagttgactatacataattaatctgtttttttttttttctttaaggaaga

SEQ ID NO: 35022 - DNA, 754 bp, Medicago truncatula
  Intron number 1 from transcript Medtr4g129910.1 (locus Med tr4g129910) derived from phytozome v7.0 (chr-ID MtChr4; po s 31033366 to 31034119 reverse strand)
tatcctctggaattggaataacttcattagcccttgtcattccaccacgatttatttgtgttgaatattcaggatattcaccaacattctgaaaattgtcattcaccattgacatataaccattaaatgggggtgtttgagatggatatcccatcatagatctatgatatggattaaagttgttttgaacagaggatgactgattgaaatttgatgcaaaaccaaaattaggaatgttttgaggatgttgattgggaatttgatttggattttgaggatgttggttgggaaagtgatttgggttttgaagatgttggttgggaaattgatttaggtgttgataattgttgggattttggtagctaaatgggtaatcagaagaattttgggtgttgaattgattattattgagatccatttcactaaacaaagactaaaacttcaaaagaaatgcttttaataagattaagatagtgaaaaacttgtttttttttctgtgtccaaatcaaatgatcaaagtctctatttatagagagaaaaaaatcacgaattttggtaaaaaaaaaaaaaaaaaggtttaaatatgtaaaaggtctctgtaagttcgcgtgtttttggttttcgtccttgtatcttttttttttctaaaacaaaccctgtaagttgtaaacattttggttttagtccctaacgttaacatctgttagaaaaacgcttagctggcaaacggagtcacacgtggcaatcgctaaca

SEQ ID NO: 35023 - DNA, 176 bp, Medicago truncatula
  Intron number 2 from transcript Medtr1g087300.1 (locus Med tr1g087300) derived from phytozome v7.0 (chr-ID MtChr1; po s 17546475 to 17546650)
gcgtgtcaaggcgcacgcgagaaaggaatcaatgaaatgattctttctttcatcgttgacccaacacaaaaccatcatcatcattttattattttcatcactatcatcaaatcaaaccttgttttttttcttcttcctcagaagtcagaagaacaacatcatcggactctgtttac

SEQ ID NO: 35024 - DNA, 619 bp, Medicago truncatula
  Intron number 1 from transcript Medtr5g034000.1 (locus Med tr5g034000) derived from phytozome v7.0 (chr-ID MtChr5; po s 13877749 to 13878367 reverse strand)
aggtttgtaatttttttcttagttggctcatatgattcacactttaatcgtagctacttctaaagtcgttcatataattgattttgatttgttgacgttgtaaaattgtttaagatgtatcaaaatttaactctttttgttatttacgtaattcatatatactttagtgctcatgattcacacacaccacaatttcttgcaatttgattccgtggtatgtggttgtatgttccgtatttggaacctttccttaggttgtttgtaacgcacactttttagtgttgtttgctttttgctctcacagttcaggttttatgtccctcaattgtgatcttccttatattttaatctatttagagtgttttagatggtgccatttgtaccctatttgcctaaaaaaatatatatactttagtttaaaaaaataacacggtcaatcaattgtaattgtcaattcaattgaaatgtttgactttcatcgcgactattattaagttacatgtacatgattgattgtgatttgttgatgtttggaaagaaaaaaaaatactagtggtgaatgaaaattaaacacttttgtttttgtgtgatgacagggctcctataactagagactttc

SEQ ID NO: 35025 - DNA, 480 bp, Medicago truncatula
  Intron number 1 from transcript Medtr2g017820.1 (locus Med tr2g017820) derived from phytozome v7.0 (chr-ID MtChr2; po s 4543812 to 4544291 reverse strand)
acaacgacaaacaacaacatcgacaacgacgagaggtagacggagaacaactaatgaaagaaagaccaacactattctttttcttttcccactactttttttattattttgatttttcacgttaaaaaaacaaaaaccaaagtgttgttgatgttagcgtgtgggtaataatgtaagaaagaacagcgtgacgtctctgctgccgacagattctttggtgatggggctactcatcagaatcacgccacgttataatctaccctaagtgggtcccacaaaattggactataaccaaggtaccgcccccaattaaataatataaaattgcgtgaaaactgagaatgagagggaccacagggaagaagggtcaaatcagtgagtgatggcagagcagaagtgtgaaatgacggccggcaggtggagcagcagcagctgcactctattgtctgtgctcgtgacagattgattattagtagtgtg

SEQ ID NO: 35026 - DNA, 962 bp, Medicago truncatula
  Intron number 1 from transcript Medtr5g093890.1 (locus Med tr5g093890) derived from phytozome v7.0 (chr-ID MtChr5; po s 36967449 to 36968410 reverse strand)
ctgccattgctctttctctcttccttggcttcagggtaactacaaactatatatatttcttctattatttgtcttctgtttttgtttccataataatgtatttgttgttcttgctaattagtatttgttaaatgtaagttatgcaatggcaacacttgtgttatatagttagagtttttcgaaaccactagctcggatgatcagaatagaattgtctcatgaagttataatgttttttcactatcttatatcattttctgagacgctacttctagtggttgagcttatagcgtatcatttttattctatctaattatcttagtttttaaaaaaataataattaaaaaatatatattttttgtcatttttacattttataattgtcaattattcaaccattaattctattaaacagttcaaatttaatttgttagttatctgttataagttagtttatatgccatccgatacttttgtaccaaaacagaaccttaggcgtttatagtaatcaaaaagaaccttaggcagaaatgtgtttattttagtgggtccaaatggactaattctgtatattcatgagtttgattttgatatacaatgtcttttgcaaattttttacacagtcaatcaatctgacaatcttattcatgattttgtggtttttaagatatgtgaaactttattaaaccagttattgataataagtttgtattcaattctgagtttctgtcggttttgatcaaaaaacctttttcggggtgggggtttgtggtttgaatggaacttcagatatctattataggattcagatgcattgcatacatgactgcaatcagtttaacttccagaatatgttatttcgtttggtaacaataaacttgtgggtcaatgttgatactttgttttggacttttggtaacgagtgatgggattttgcagggtgatccggtgtcctgtgagcg

SEQ ID NO: 35027 - DNA, 517 bp, Medicago truncatula
  Intron number 2 from transcript Medtr3g132980.1 (locus Med tr3g132980) derived from phytozome v7.0 (chr-ID MtChr3; po s 33573692 to 33574208)
tctacgtctgtcgctctggatcggtatttttcttaattagggtttaacttttttttagggttcgtaattgttgtttctaaaggtggtgatagttaactgcaaaaatggtttagatttgagcttttggttgttttgtgattgtgaatttgtaattcattttttggttgttctagccatgtagctacagtttatacacttggaaaatctgattcaaggttttgttttcgatgcaaaccaaaaacatttttctccaatgagtttaatcaatttttcgcatttaaatttttcaaaaaccctcccattgggcataaataaaatacctatacacatatagggactttttcacaaatgaagaaccataaacttaagttaattaagaaacttcttcaaattagaaacaaatctaatccgggcttcgaagtatcaatgaaggcaatacaaagatgagatttttgtttgtggatgatatcaaactatttctttttgcaggctgcagattctcaggttgtctctgact

SEQ ID NO: 35028 - DNA, 900 bp, Medicago truncatula
  Intron number 1 from transcript Medtr2g117740.1 (locus Med tr2g117740) derived from phytozome v7.0 (chr-ID MtChr2; po s 27738375 to 27739274)
gagtttgcaaagagagtgacgtgggccaataaataagcaagtgtcaaaaggagagtgtttgagaggttgtccatagcattactcatattattaattcaagctacaattttttcccatttaatttgtatgagagtatttttagaataacaactttcaatataatgattcgtaaaaaaaaacactcaatgtaatgaaattagttaggttttatttatatttaggaccatcggataattattattttgattgtagtatagaagttatgaccaaggatggtcaataattttattttttatttttatttttatttttatataagattggagtagtataaaagttgtaactgaggatggtcaatataatattttctcgtgttgttttagtccatgcatatttcttaagttaagaaaatggttagttaatcgttatattgatttttatagtaaaacacactatttgttttaaaataagtgtcatttttcttcaaagattaaaatatggaagccacggatacaacataagaaccaatgaaaatcatcaggaaaaaaactgccaaaaaaagcatcttgatggcatgaccacaggatatttttatttttttgacatcagaatcatccaatatggtccccaaaatagttaaacatgtgatcattattccggatgctcctttaaagaaccattatatccttgcactcagatagttttgacagaatcgtgctatatgccgtttgaaaaactcaagtgtcatctgacaattaaaaaaccaaaccaactaaaaattaagtcataaaaaacaatattaatgtttcaaaatacaacattaatatttgatctaatattagtacaatattaatatttaatagacttatttcttaattggtttggttttttaactttcag

SEQ ID NO: 35029 - DNA, 968 bp, Medicago truncatula
  Intron number 1 from transcript Medtr1g118100.1 (locus Med tr1g118100) derived from phytozome v7.0 (chr-ID MtChr1; po s 25587349 to 25588316 reverse strand)
aataatcaaaatttgaacaaggatacatcgaagtgcgtgctctctctctctctctctctgttgcttcaaattatcaggattagagttttgtttttccgattcatgtttctgttgtggtgtttgattttgaagttaacctattatcaatttgatattgttactgaaaattacatcatttatcaatttaccccttttcacgatttagggatcaaattgatgtatgatacgatacattctacaacgactgtattaatgtttaattctttattctgttatggttatttcgttttggttgatgatgttatgttggttgttgtgggtggagtaaatagtgcagtgtgtaattcgaatatgtgtggtcttctgttaatctgttatagtattgtgtcataggaatttaggaatgaaaatggatatagaaaaaaaaaaaaaaaaaaaaaaaaactaatactggagtatgacaatttgttacaagttatatggcgacacaggtagggtgttgtatacattttttcggtagaaaggaaattgtttagggtgttgcatattaatttgtatattagattttaacatgatgtttcaaaagtatgcataaattgttattggcaccaatgatactgttagtcacctgtggtatccaattccaaactaaaatggaagtataaagttgaaggatttggggtggccgggtggcagtttacttcggagtatatcactttatgttgaagctttagtgcttccttgaatgaaattgatacacacactcatggcggaaactggtcattttaatagatttcaaatgtctaggtggtgttgggggaggggatagtatattcttaagtgcaaactctggataatgttttggtcacgtctcctgaaacattgatatgctcaaattagatgtattaaacatgtacataactctaaatccttttttgaaacaggaaaaaattgtctttggttcttca

SEQ ID NO: 35030 - DNA, 501 bp, Medicago truncatula
  Intron number 1 from transcript Medtr2g103170.1 (locus Med tr2g103170) derived from phytozome v7.0 (chr-ID MtChr2; po s 23909152 to 23909652)
aacacaaaggtttaatcttttaacttttttaactctaacttttaaacttgcaacgcaagcattataatttgatattttttcatgaaatgatgaatatttagtgtagtgaatattttctattggatggttacaatagtagagtatgttgtagttatttttaaaagatggttacaaagtaagcctacatgagaagatgatgaatttctattcgatgacggtgtaaaattattttacactgtcagtacatagtgatagtcatttaactcttactagttgaaatgaaaatgaaaacagtaaagtaaacaggcacttaacttttccttgttattaatttggcatggagtggattgtcatgttttggatttttggaattatatgggttgggtgagggtcattttgctttctttgtgttttgtttttggattgcgtttttcattttgcaatttgagttgagcttggcgttttgctatgatggtgatcatatgtttaggttgaagagga

SEQ ID NO: 35031 - DNA, 891 bp, Medicago truncatula
  Intron number 1 from transcript Medtr5g074930.1 (locus Med tr5g074930) derived from phytozome v7.0 (chr-ID MtChr5; po s 27141894 to 27142784 reverse strand)
gatattgcaacttgaagagagaacaaacgctggttttttagatgttctcagtttttaagtgtttagtaatccatgatgcaatgatattgatattcttaatttggttttgttttgaactgcaatgacaatcacattaaagaatacactaattataattttttatggacggttgatttactattgaaaaattaaatacataaggggaaattacactcaccactctgagttaattgtgaaagtcagcaacacccattctattttcttacttagcactaacccccctgccgtttcacaccgtctaacttctgtcaaattattttgaaaaaataaatagaaaactcatgctgcctcggtcataattttacattgggtttcattttctccaagtttttaagtgttttcagttttccttcgttctcgttcactgggttatttccatcacgcgtaaatgagcaaataactcgtgagagtgagactgctcatttgacggttttgaaaaagagggaaaccttgaagggacaatttttcgggttctgctttagtttatgttgatgaaatgctttcgagagataatttaatttataggtttttgggatcatggtgctttgtgttgcaagagaaactgaatacaagaagtcgtttgaaaagttgaatatttgtccaggacgacggtggggatcggtgtcctttctgcagtagtgcagaaacaattagccatttattccttcattgtacgttcacttggcgaacttggatgggagtgctccaatggtggaacgttgagatgtattacgcgacgaccgggtgattggtttgattgttaggtaggattatttgaggggagcttcaggaagaatttatggatttccttgtgttattgatgcagttagt

SEQ ID NO: 35032 - DNA, 939 bp, Medicago truncatula
  Intron number 1 from transcript Medtr2g041740.1 (locus Med tr2g041740) derived from phytozome v7.0 (chr-ID MtChr2; po s 11565904 to 11566842)
ccacttggattatcatcttaactaccctgattctggtaataccctaatctttatctcttttatatatatgctagaaacaaaacattaattgattatatgtttttcatttttcacaatagccctttttaattttttagtgttttaatttcaaatttttatcctttatatcatttgattgtgattgagccttctgggtcatcttacattcttgcccatttgatgaaattttgttcttttttatgttttggttctttttgtgcaagtggttttttttttttttttttttttttgagttgattttaggtttaatatgatgttgctttcagtctatataaaaattgattttgaatgaattagttttggaaaattgattccggcagaaattgagttgaagggtaaagggatttatgtttggatacattcgtgtaaactgtaaagtgagttgaccaataaatttgagtgtaaaaatcatttctagaattagaagttacaatttctggcttttaagtagagtcaattatggaggcttaatcaattctacaatagagaaacgaaacatgttaaaatcaattctacacctctagaataaattttggctcctccaaaagtagaaccatatattcacttagtctccgtaaaatttgttcatgttggagttagttcttgtgctatgtgtgtaatatatattttagacattgtgtagtcagtagtattatagggaccaaaaatctaaaatcaaatgatctagatatcacacagatcaaacctgaactaacagaatattttagggacgaaaagtaaaaagtggtttatttgttgggataaaagcatacttgaagattgattttatattttcaatgattgtaatttcgttttttgtttggtggtggtttatggtgcatagatcaaattccttactttgaggctggtgattctgcg

SEQ ID NO: 35033 - DNA, 1031 bp, Medicago truncatula
  Intron number 1 from transcript Medtr2g029330.1 (locus Med tr2g029330) derived from phytozome v7.0 (chr-ID MtChr2; po s 7792076 to 7793106)
caaaaccgtatttttgtctataaaagacaatcaaggtagcttatatcatctctcttcttctgctatttcatctgcgtattagaggtaatctgaacagagtcatgttgtgcacacttatatgttgcagtacttgaaatttaaataagaattcaataaaaagtatattttgacagtacaatccatgaactttgcgtgaccttcattcttttgtccgttatacataagtatatagcagagtgtgcatactttgagtttatgattacagtgaagtttatcatattacatgttgtgctatccttgaatactacaagttctattagactaatcagacatatggtcatttctaattagttgtaaatgatctcatttggatcacatatactttcaaagaaaatttgcagtcatctcattgaaatcaaattagtcgatcattataataatggtcttttaaactctatagttttgattccaatttactgttagacaaatggacattttcattgtgaataggatactgttaaattatgttctgctatagtttctttagcaagttatttcattattatgttctttgaggtaaatgagctattagttatgtttgagctgaattaagagttgatacttgattgcaaaacctctcaatctctcaattgtttcttgataaagttatgaagattgcactatttaagttgtttcacatgtgttttcgtctataaactatttctgactttaagattttgaatatcttataatttgtgaactcctcatgtcatattgacagttttgggtaatgttggtccagagattaacagatccattagaaaggctttaattaacttgaaaatgtttcacatggagtatgacatttacagtatttcttgcttaaagtgtttaaatgctcatcacttttatgagcttcctgaaaatattattatttttagtaagggtatgattgcatatgattagaggactcgtttatttatgatactgattactttggaagtttggaagaattgttatatttcagataa

SEQ ID NO: 35034 - DNA, 933 bp, Medicago truncatula
  Intron number 2 from transcript Medtr4g026030.1 (locus Med tr4g026030) derived from phytozome v7.0 (chr-ID MtChr4; po s 6309222 to 6310154 reverse strand)
tggcagaagaagctcactcgcaagtgatagatcaggtacaacactcctatcttaaatgttaatatatccctgattgagcagacaatttatatccgaagatattttggtcacatactaatctaattgtgcgaacttcgagtctttgtatgaggtgaccttatgcatgttttgtcacacatctattcttgtcaccttatgcaagttatgtttatatattcctttttttttaatgaaaaatgttagcaattactacctccgttcctttataaccgtcacttttacagaattttttttgtttcttattaagtgtcactttcaaagttcaatgtaacattaaagggtgttcttcttataatgcccttagtaatttattgcagagagagaaatatatgaaatatgatattaaataattaaggatattataggcaaaacataagttattgtatcaaaagtagtgaaatacatttagtgtcttggtttgtgtagaaagtcaaaatgtgacaattaaaaaggaacggagggagtagttgttagattagcttttgtcctttgtccgggtttgaacccaggacatccaactccttatcccttagctcaaaccagttgagctacccaagcccccgttatgtttatatatctgtattccatgttcgtaagtattgcatataacttataagcacttcgatgctatccatcttactagtgcttgtctaagtttctgatccaattcctttaaacagaacctggtggcatactattgatttttgagttactttaggcgataatggttgttgagtgccactaggttctccaacagatttctaatatggcttcctataccgttttctatctcactttctcttcacccccctggttttattgagttattgacacgtgcatagtttttttacttttaattataggttgtgcaag

SEQ ID NO: 35035 - DNA, 957 bp, Medicago truncatula
  Intron number 3 from transcript Medtr5g019610.1 (locus Med tr5g019610) derived from phytozome v7.0 (chr-ID MtChr5; po s 7338912 to 7339868 reverse strand)
ctcaacaaaggtgtcttgtctactgggcaggtttgaatttcattaacccttatcggccccgaaatagagattgatatatagatgaaaaagaatgaaactttgctaatgacttaatgctatgaagcacggacacatacactggacatgacaatgacactcacaaggtgacaaacataaagcaattggggagctgtttcatgaaaatcttgcttaggctagaataacgttgatgcttttattttagtgggacttgatcaaattagtaatctctacacaatgttgtcaaatagagggctatggcatagtggaattttaataaatcactattgttccgcgatttactatttagtacaaagtgttgtcaaataatcgctacagtgcattagcattagtggaatttgaatgaaacactattttccatggtctgcaattgacaacactgtctctacatttttttgactgttcattatttcttcgttctagatgtttcattttatgcaaagagattaataggaatttatattccctccatttttatgcattattctgttctccatagtggagattgcatgtcattagacttgctgttgataaacatttattccttagcatctttcagttgtaattgaagtatgaaggaaccaaatgtgtctaataaagtcattgatttatcaaataatgaaaatcacatcacaaaactgagctgcaatttctatccttcaggataactgttttctggaaccaacaacacgttctattctgatatctgatataaagatcccagagttatcagttctaacacgttcacacctaccaatgtgataatttaattcaacctctgttactgtgtgtaaatacaacccttattctattatatttatcatgatcatgatatatttttctccacttctgatatttacagccttcggctcattcagcctcattgaagtattcacg

SEQ ID NO: 35036 - DNA, 947 bp, Medicago truncatula
  Intron number 1 from transcript Medtr2g118160.2 (locus Med tr2g118160) derived from phytozome v7.0 (chr-ID MtChr2; po s 27984436 to 27985382)
tttcatcaccaaaacctaactctctctgaattcaggtattctcttctttttcttcttctttcaattcctcaatttttgttttttatttattcatttgttattattttctttgatcatgtataattagcctttttctcgtgtgaattttacttccaatttcatatattctttgatttttaagctccatgttaattgaatacaaaaaaagtaatttttttttctttttccccaaaattttgatcttttttgtttttttcatctattttgaggttaaacgtgaaggaatttttgttaatctgtgtttgaacttttttagagaaagggataagaattactgtttgtgataatgatgtttttattttatgtgcatggttttgttttttgatgtatgactctatatatagttcatcaaattgatagagtagttgttaaaaaaattgcaattttatactatttttatttgatttaattctaagtgttatgatcaactaacacttgaactggatcatttatttttatacttatactaataatttttgttagaatgtgaaattgatgaattgaattgttgaattaaaagtttttacggaagtatatcaatcaagtttattaaaattcataatacttcattatactactttgttttaatatatatagtgttattgaaaatagggttgttaaatgtcactatttggtaaaccagaataattaatagtacgatacagttatatgactaataaaaacaaatacttccttttggacaatcatccacgaatttcgccaaataccgaccaaatcattatcggtttgctttagatattgccgtgtgtcaattcttgcgattctttcgcagtatccttcgtaataaatagcgaagtttttaggaaacatacatacaatgttgaatacatgatcatgatttcatgaagacaacatcacacgagtta

SEQ ID NO: 35037 - DNA, 717 bp, Medicago truncatula
  Intron number 1 from transcript Medtr4g118130.1 (locus Med tr4g118130) derived from phytozome v7.0 (chr-ID MtChr4; po s 27337425 to 27338141 reverse strand)
cttggtattttttggtgcctctggataggatttcggtgacgatttgatttcaaccattgagttaatgcatctgtttctcttatgttttctcttatggtatccgatcatttattgggaaattatgtgaatacatgattcgaacattttttttttttgttcaaaaatgaatcgaaggacaaataatagcttgcttcgtatataaacattgttgtctgtgagagttatatgttgttcatgtatcaatcggacataaataattagaatgtttttttcaacaatctaatatcgttcaagaatgccgcaatatagagtttttttttttttttttttttttgtttatcgtttgttttttctgtttattgtttgttgtttgatatcagtaatgtagttgagtagagttctcaataatcataatgttacaaaataaaagtactgattttggtcttcattcaagaatgccgcaatttagaatatttttttttctttttatgaatattgattgttatttatagttctcaatattcataatgttacagaataaaaggactgaatttggtcttcattcaagaatgccacaatttagagtttctttttctttttctttatctaaatacttatcgttatttagtgttaaataatatatgattgggccgtttttttataaacagcgataaaatgtgattgtacttgcaacaatttgcggtatcgagtccaagt

SEQ ID NO: 35038 - DNA, 255 bp, Medicago truncatula
  Intron number 1 from transcript Medtr5g036430.1 (locus Med tr5g036430) derived from phytozome v7.0 (chr-ID MtChr5; po s 15180959 to 15181213)
cacgtgtcagattttggttggccctttgcaaacatgtttggtttttttcttttgactattgggatttttgtttttatttattttttaatattgggttggagttggcaagttagtttgggccttagcatgactagctaattacacccccttccttttatcatttcgatctttcttcttaattcaatattaaatttaatttctttattttttctatttgcaggtaggtccgtcagctgcttttgcaagtaaaaccgt

SEQ ID NO: 35039 - DNA, 418 bp, Medicago truncatula
  Intron number 2 from transcript Medtr1g008450.1 (locus Med tr1g008450) derived from phytozome v7.0 (chr-ID MtChr1; po s 759066 to 759483)
aaggtgatttttcataattatgctctaagtctatattactcaggttcttgaggaaaatgtgtaatgtattttctttttccgtggttattgctttcagtagaaactttgaaatcattatgtttgatgttctaaggtattatttggatttttagcatattttattactggcttttaggcttaagcttttatctatacaattaatcgtttgttttagattgtgaaattttattggaatttatttggtgtcgatacactttattgtatgagttcttctgtcatatggatgatatgttgtgctgaaaaatgggtttcatcattgttgtattatttcctaaacaatttccctttgctgaatatgtctaaaatgtgtcatatttgtccaatagtgtgttttgtaataccttcagtaggtcgatag

SEQ ID NO: 35040 - DNA, 738 bp, Medicago truncatula
  Intron number 3 from transcript Medtr1g078960.1 (locus Med tr1g078960) derived from phytozome v7.0 (chr-ID MtChr1; po s 15677880 to 15678617 reverse strand)
aagttcctaagttgcagaggttggctctcaaaaaggttgttttttttttgtttttgaaatttgatttaatttaggttggaaatttgagatattttaattgtgaaatgtgaattataaacaattttgtgattagagttttttttatctgtaatgaagaatggatagatctgataatttgttgataatttaaggaattaataagttgttagtagctaagataatttgttgattcttttacgaggtttgaaatttgagaagagatgagaaattaattcaatttctctgttgtaagtagagtagtcagatcactagaggcagagaaagacctagaaaaactattagagaaattactaggaaagacttggagattaatgagttggaccaaaacatggtttatgatagaacattatggcgtaatttgatcaatgtagccgaccccacttagtgggatacataagacttggttgttgttgttgtttctattgtaagacacccattttagttttttttttttctacgagtgcaactatctatctttaaaaggggtagacttgtaatttctgcatataaatctttatttttttagtctattaccaagttatttgtgtcgtttgttttgatctaagtagcttaatagcatgcaatgcttctaagttagttaaggcgtacattttgtgtgatgcatgattcaatgtatgcacaggtaaaaggccttgagtcgcaagaatttgctgcccg

SEQ ID NO: 35041 - DNA, 579 bp, Medicago truncatula
  Intron number 1 from transcript Medtr1g078960.1 (locus Med tr1g078960) derived from phytozome v7.0 (chr-ID MtChr1; po s 15679058 to 15679636 reverse strand)
ttattccagagcacaagtggatctttcacagtgaggtattcattcttaagtgcttcattaatatggtgacgaaggaatatcaatgcttttgctttttgttgttcggatgccttatttccttcttttatggcatctgcatttccttcagcagctaagtacatttcagcatctacggcccaagtcaaatagttgtgtccagaaatttttagggcctcaaaatggatttttgacagatttgacattcttactttttagtgattagagcgtgctgataacgtgttatgaatataagtaaatagagacagtaatagagagaaggagaagaagagagaaatattcttattcactagtgtgtctcaatgttacaaatgagctctatttatagggaaatagagtagcttatgaactaagcccaaaacctagtagtatggcccactaacacatttgctttggacatccaatattaatatttataacacttttgattattatcatattattaaaaaagaaaaaaaaaaaccggttcatgtttgtattgctacagctgtgtcgtgtccctgatatctctctctctctttt

SEQ ID NO: 35042 - DNA, 752 bp, Medicago truncatula
  Intron number 1 from transcript Medtr3g142950.1 (locus Med tr3g142950) derived from phytozome v7.0 (chr-ID MtChr3; po s 36760115 to 36760866)
ctcaacccatcgccaacaccaaaagcttgccgaaggtttggggatttactagtccttatacagataacccaccagttggtgagggatctccttctcaacaccctcacatctaggtttgggcatttagggtgtgaagtttgaaagagcagatatatagttgtggctgaattcatctgggataggctatgattggttgaaatgaatgcaacctagggttggccgcaatttttcttcgtgtgtgaactgtcgttcgaatgattggactttgtatgaggcctgcttcgagtgatacaatgtgtgtcttttttattctttggattttggcttcaaaccaccttaccttaaggcgttcacttctagttatttgctttaaagtcatctactttatttacatttcggctttctgacacttaggcatgggacaaattattttcccttgattccttcttccctaactcaaagttgatcccaagttaacataaggatttaggtgaaaatagtttgtcattagacgtggacgtggtgcacaattgaattttgcattgtggtctgattcatgcaactgacctaacctagtaggaaaatgattttgttgtataatgcttaattagcatactttagtaagaaagggtccttagtttgtgtttaattccaacatgtgatttcacattttctgctttcctcctatggctacatctcagtattcactgttccacacaagcactttctttacctagtcacttggttaagag

SEQ ID NO: 35043 - DNA, 766 bp, Medicago truncatula
  Intron number 2 from transcript Medtr3g142950.1 (locus Med tr3g142950) derived from phytozome v7.0 (chr-ID MtChr3; po s 36761002 to 36761767)
aaaacttgtttcttagatgtatgcctctatttcattcttcttagtaattatttgatattggcgatcaaggtttggttctgctgtcaattttattattgcatcttgtgaacccttaattaaaaatattcatttacttttgcttttgggatgacaactttagttttcttgctcatattaatgacatgcgaaggtaataactaatacgaatttcttatatcttgtaaaaagttcccttttaatatcccaatctcctttatatgcatattctattcacatgctctcttttcttgttgaaatttggtttataaatatcattcctctttaaccttcattaattatatgcatctgatccttttccaattattattactcccgtaggacgtttttggtaggaaaggatgcgttgtgagttcatttgactttttttggtaagggaagaccaactgttttggtgctttctgcaataaactgggttgtggcttttctccacaagtcttggcatttagaccggagagattttgagcaaaaaaaaaaaaaaatcaaatacattttttttattttattcacaacattatttttggtgagaaaatgcaaactagaagaaacttataggtactaatttaatattcatttaggtaggttttccatgccatctgccctatatgattgttttcttttctgattatggacaatgcgaccttcaataattgataacttgtgaatgtatgcaggcaagattaaataaagttaaacttttagaagctat

SEQ ID NO: 35044 - DNA, 611 bp, Medicago truncatula
  Intron number 2 from transcript Medtr5g048220.1 (locus Med tr5g048220) derived from phytozome v7.0 (chr-ID MtChr5; po s 20373921 to 20374531)
ctcaggtattaattgaccagaaactttactttttggggagtcctccacatttttgtattgaatctgtgatagttcattttctacattatgtttacattaaaattggcagcactgagtttatctgcttggttattttgattaaattatgtagttctttattagctcaatttcattaaacatcctatggtttttcctgcaatttcagacaactcacaaaacagtgtatacgcttaacagactgcctgcaatattttacatttttcactttgaagaaaatgaaggctgctaaactctctaggattagttttgtagcactcaagatatgtagggagagaatataatgtttagggaaaatctgaaactgtaagataaaattcaagatatcattgtagcataacataacctgatgtctttttaatataattcaatctctccaaacttaatatcagtgtttgaatttaggtaattgtatattttcatgtatcagagttctacattatatagttggctaaatacataataagtcattgtttaagctttagccatatttgcgcaagaaatcaatcatctcaaatatgttatattaagaaggatcttaatttgacaggtaa

SEQ ID NO: 35045 - DNA, 399 bp, Medicago truncatula
  Intron number 2 from transcript Medtr3g139750.1 (locus Med tr3g139750) derived from phytozome v7.0 (chr-ID MtChr3; po s 36054464 to 36054862)
ttattagaatccaaaccactttccgcgccttcttggtattcaattttttcaaccttcaactcaagcttttgtttttattaaatttgtgtttttgttcctaagcattaaacttttattcaaaatcaacatacccatttaattttttttttgtttagattggaaaattttggacattgatctattttagggtttacatgatagtttttttttttggtagaaggtttacatgatagttgttaatgctgttcttatggtgaatatgaagagttgtttttgaaactttaaatgtgttgtgatgttagtgtattgaactatttgttcaaaggaactgtgtttgtaatgagtgtgagggttgtgagtgcaggcaagaagggctttgagggcattgaaggcagtggt

SEQ ID NO: 35046 - DNA, 717 bp, Medicago truncatula
  Intron number 3 from transcript Medtr5g047170.1 (locus Med tr5g047170) derived from phytozome v7.0 (chr-ID MtChr5; po s 19902411 to 19903127)
atacaaagttgtgtttactagacgttaggaaagtagcacccatcctcttgcatgggcagctttatcttatttttatcacaatgttttttatttaatttcacattgtattgctaatattatcatttatgaactgccttaaatttgtttgtgtaaaaaaactatcttatcttataaattataataatgtatttcgtcatcagtattttttattgttattattattattattgacgttaatacggacactaaattgttccatttttacacttttattgcacttaattgaatgtttatttcattctatttggttttaaattttgtacgatcgaataaatgtttgacttgtattttttctattgtggtgaaaatgttcttattttaaggagatttaacattcttttgtcattaatatttaaataatattatacacaaaagataaatttttaatcaaaatagtttaaatgaagagtattattgaaagataaaacatcagctcaaaatctttttttttttttcttctcaaaagaacagtacaaactctaactcatatatcacacttatatatatatatgagtaaatttcattttttttttgaagccatataggtatagattattattattattagatgagaactacgttacccattgttctaaaaactactacattgtgcatcaacaactaatgatgtttttcattctattctagaccaagcaa

SEQ ID NO: 35047 - DNA, 529 bp, Medicago truncatula
  Intron number 4 from transcript Medtr5g018270.1 (locus Med tr5g018270) derived from phytozome v7.0 (chr-ID MtChr5; po s 6658960 to 6659488)
tactcattggtgattggtacaaggccagccacaaggtaagtaacatatttcttttccttccttataaacatcctatattaaatatcattcatacagctaggctgttaaagatttgtgagaattaggatcaattgttagttacatattataaaaaaagtgattttgacattaaaagtttatgtattattaagaaaagtaaaagctgatttatgtttgtttaccataatcaaaatcatctatggaaaatgattttcaagaactgctcaaaagagcttctcatttgagacatttttagattttgttaaaattctaattttttttttttaaagtaataacaaacagataaaaacttctgatatattttttaaaaacaagtaagtttttataaaattttgttttctagcaaacgaacctttaaaattggtggccccaaaatatgagattagatttgcttgtttcctgtcatgttaacttacatttattatgtcttgtaggtattgagacaatctttagatttaggaaaatctcc

SEQ ID NO: 35048 - DNA, 406 bp, Medicago truncatula
  Intron number 2 from transcript Medtr5g017650.1 (locus Med tr5g017650) derived from phytozome v7.0 (chr-ID MtChr5; po s 6335150 to 6335555)
cacatttatacaacaaaggtgaatataggtatttgtttttccattcctatctcttacttagatcgtgatgctgtgagatattggagtacacatttttttgtttttttgcaaaggcatttagagtaaatgcttctgaaatgctattttagcggtggctcatctgtgctttatttctcccttgatatgctattttcaagcaaactccgaagctctattttgctctttcgttaatttctcttctattttgtttgcatttgtttctatgtgaaaacattttcatatcatggcgcttaaatgtactgcgaacttttgatttgactgccaatttaatgtagttgtgcagtttatttgttgtgaactgatgatatgatatattgtgtttgaactcttttgtgtacagtgcttc

SEQ ID NO: 35049 - DNA, 741 bp, Medicago truncatula
  Intron number 2 from transcript Medtr6g046320.1 (locus Med tr6g046320) derived from phytozome v7.0 (chr-ID MtChr6; po s 9635386 to 9636126)
gaaaaaagggtaattcttcaattctatctgctgtcatttttgcaccgtgcttgtattgcatgacagagttatgcaggagcgttttttattattcgtctagcattttgtaaacgctctcccttaaatgataggttcaataaaagtagaaactaaaatgaaaagtattattattaaatatcttgaacatccaaaaacctttaaatgcttttttcttcaaataattaacaagattaatagatgtgttttttctaaactttaaaagttgttatgagaagattgcacctaactgccaatcattcttaattctgatgcacatgcattatttttggattttaaaggaagtagggattgagattatgctgaaattactgatcacaatttttttggttttgttaattgaattcaagtttgttctgcgccttctctttgagattatgctatgtacaaaatttatcaaatagagccactacagcagctatttgttaacgttttgcactgcatagcatatcccagaacaatagcgttttgtccaaattctgttgaagctatagtggtatagtgccgctatagctgctatttaacaacactgttgtggatattggcagcagctatataagatcactttttatagggcatatctattggtcaggttgaacttttatgaactcattaccaaaacaatgaaaaagaactgataagtttgcagcattttgttattgccatactgtgcaaatagtgcac

SEQ ID NO: 35050 - DNA, 897 bp, Medicago truncatula
  Intron number 1 from transcript Medtr4g157960.1 (locus Med tr4g157960) derived from phytozome v7.0 (chr-ID MtChr4; po s 39506760 to 39507656 reverse strand)
ttcagcagtattcacaaagttcctctaactatcatgtaagttgatatttttaatcgatatattttaattgattatcataatatgacgtatacatcattaatatccgaaaaatacgattgacgaaaagctaaagacgtcaattcatggtttaatagttgaattttggttcaataaaaaacgttaaatatatattttaataatatactctatcctccccaaattataagtcgctttgtgaaaaatattatctcaagttataagtcgttttacaatatcaatgaaacattaatgttattttttctattatatcactaactatttattattatcttttcgttcaattctttaatttatctttctcataccatttattgaggataatgttgtaaaacaactcataatatttctttttcatgcaaaattaatttcattttttgatacctgtgaaatgaccaaaacgttgtataatttagaatgggtcaagtgtatattatattaaatttaaatttcaagttgtaatcaaattctaaattaacatgactaaaaaaaatcaacaaaatccaaaaacaaaccttgtgcgtgtctgttttgattggccgtgaaaaataagattaaactttatcaacctttgttccaaaacataaaaaaaaaataataataaatagttatttgtgtgaaacattgcattatcaattttttttaaaaacaccatagttttctatatctttcacatcttgtttgttcaacaattaattaattttcttctttaagataaagatcaattgtataacaaatcactctaatattataaattttataaaatacgaaatagttcatatgttaaatatcgtatgtttttgtattttttagactgttacccttgatacaacccaaaac

SEQ ID NO: 35051 - DNA, 841 bp, Medicago truncatula
  Intron number 1 from transcript Medtr3g064640.1 (locus Med tr3g064640) derived from phytozome v7.0 (chr-ID MtChr3; po s 14810515 to 14811355 reverse strand)
taacattggtaaagttgaatagcttttgctgaagttgagcttctgctagtaaaggttagtgaacctaatttaagttgaattgatcatgatagagtatttttctttattttgtaattctatgcataacttatatccaatttgtttgcttcatattttgtcaagtgattatgtatgtggaagatcctacactgctatgcaaatcgttgatataatttttcaaacagagccaagtgttaatatacaagaattgtaatgtttttatatagagtatcacttgttgtaatgtttttgttgaattgtaagtttttatacaagttagttaatggtttcattcaggctgtcaactggtcaatgcatccatgtcattaagttttttgttaaataaagtgattttggataatgttctcagtttatgggttttatgtagatgattatggaatattgagtttatgtagaaactttgattgcattagaaaagaaaaaagtaatattgttgtactgtgtttgctttcttttgttctagaggtattagtttggtctctcttctaatttttaaaaactaattgtcctgaaaagtaacatcaataaaactattttcagaattttcagaaagtgatatatgataaagaattcatttttcacttggtgttaagtttttgctcattgaacagttttatatcttgtatgtgaaggttctgccagttttcttaataatttaatgtccatttgattttcctcgagttcaaatatctataccactcatatatttcatagattgacttctgcatcaatgcatttttaaatagtcctttttttttttaataacagggtacatttgtgc

SEQ ID NO: 35052 - DNA, 813 bp, Medicago truncatula
  Intron number 1 from transcript Medtr3g151820.1 (locus Med tr3g151820) derived from phytozome v7.0 (chr-ID MtChr3; po s 40332281 to 40333093)
aacatacctccacgtttactcgttcgtatcctacactattcatcatcttctttttgttttttaccaatattaactaattaattcgcagaattcaagtaaatacttgcacggtggtgctataactactctggttagggatggcaatgggtacccaatgggtagggtactacaatgcccgtccccatacccgcatttataaaaaatacccgtatccgtgcccgtaccctcgtgggcaacaactttagtccccttccccataccctatgggtacttaagtacccatacccgcacccattacccgcactttaactatggaaaaacaaaaaaaaaaaaacatcacaaatgaaataaaactacgatcccaattttttaaaattaactcataaaataatatgaaccgtggtatttagtcaaatagaaaacatctgaaatatgcctaaaaaattatacaccagcatgatggagttgttattgtattaagtagttgtttgttttaagtttaggtttaggcttaaacagctaaataaattaattaattatacataaaaaataaataaataatttatgatattatataaatatgtatatgcgggtctgcgggtctgggcagtatagtacccttacccgtgcccatacccatttaattttgtgggtattacccgtacccgtgcccagacctagaaaagcggggttttaccctacccattgtgggtattttttgcgggtatccattgggtctgggtccaattgccatccctaactctggtggatatagtaggcgcagccgcaattcccgcagctggatttccgtgg

SEQ ID NO: 35053 - DNA, 320 bp, Medicago truncatula
  Intron number 2 from transcript Medtr7g020900.1 (locus Med tr7g020900) derived from phytozome v7.0 (chr-ID MtChr7; po s 4968633 to 4968952 reverse strand)
cattggcatcacagtcagcatcatcacaaacatctgtatgtatttcttgtttttatgatctgaaaatatttcttagaattctattatggaagatagtattaaggacctttcatattttttctttgggattcctttattgttgtcgaatgcttttgtcagatatttccttgcataacgtttagtttaccccattcacttatactatgaaggttatggttattgctattagtaaattcacaattttcataattagttggtcattttaacaaagagatgttttgatttgttcatttgtgtttctctgccagcctaaggattaa

SEQ ID NO: 35054 - DNA, 614 bp, Medicago truncatula
  Intron number 1 from transcript Medtr4g149840.1 (locus Med tr4g149840) derived from phytozome v7.0 (chr-ID MtChr4; po s 37305005 to 37305618)
gagaggagaggaggacagcatctccggccgaagcagtaagtttcgtgtctttcgtaggttctgatatattcttatcagttattgtacctatttgttttcttttaactactttggccatacgagtttactctgtccaattttaagtctttttttttttgtcttttaagagaattttcagcttttaattaagtgattataacttaagatgaaaataagttgttttcgaaaactatctgagaaaacgtatgaatataagctgaaattaatttatcaacttgtcctaagttgtttcaataataataagttatctcaatcaatcttacaagtgtgtaagtgttcatggctctccagatgtaaacttaaaacaagtcaatcaaaaaataggctatgaattgtctatttatctacgagaaggggcactacactagtaattcgatgttcggctgagagacatttaaaagaccgactaaaaaattgttctacacagaaatcaaactcgggaatagggagggagggagggagggaggttattatattttagttgataaataatgtaatgttataattctttcaaatatgtataaaaaggatggggcacattccaaaagtgtctt

SEQ ID NO: 35055 - DNA, 581 bp, Medicago truncatula
  Intron number 5 from transcript Medtr4g149840.1 (locus Med tr4g149840) derived from phytozome v7.0 (chr-ID MtChr4; po s 37306345 to 37306925)
ggcgcatactgaggtacactgttgaatgttgaatcgttgattattgtttaattgttttttgactaaatgccccatcattgaactctttctgaggataatcatggggtggaatcattattttcttagcggtacaccaatctgatcatctagtgtgtaagtggagcttaaaactctttagacatagtttgggtaaacaacttaattaagcgcttacatgtaagtgcttatgtataagctatttctgtaaaataaaaaaaaaaataaaagtcgaattgttttcatataagctatggacaagtgaaacaggttgaaaaataattatggacaagtgataagctgttttcataaaactcctaaacagtctcacaaatgctcgtgtcagtagatacgtgctattattgctgagatatatgatcatgatcttcaacatcatgtcactttttgttttattctacttcaaaaacatgacatataacatagatatatgctatatgtaatggtgatttgtaatccaatgctctttgacatgtttgtttgatcttgcagtggccagggtaccatatccttggagcttctggaac

SEQ ID NO: 35056 - DNA, 696 bp, Medicago truncatula
  Intron number 1 from transcript Medtr7g005370.1 (locus Med tr7g005370) derived from phytozome v7.0 (chr-ID MtChr7; po s 433251 to 433946 reverse strand)
ggtctcctacggtaggagaccttataaaaaactgatttttttaatataacaaaaatgacaagtgttaccattagattggcgaagaacaccgatattattataatccctccacacaagaattttttttcacactttcttcaacctatcaaccaaaacaaccccagcaaaaaaaaaaaaaaaaaaaaaaaaaaacactttcttcctcttttctctcttccgccgccggcaacattctcttttcgttctctcctctcttagttgcagatgtgttattttgcatatgtaatcttttcattttaatggttatgaaagtgtgaatcctgtttgatttattcctcattatatgtcaaagatttgttcttttaccattaatgaaatgaaagtgaatctgaggattaatttactgagacatatgggcaataatttgaatttgaatataagaacacagaatggtgaaggaacaaattggattctatatgattgaggaattgcaccgaaaagcgtggatagcttgatattgtgaaagaaagaaaacaagtgtagaggaatgagattgcaagagggaagggattggaaacatagacgtggtgattgttgatttaaatagctaattgatggtattgattggttgaatttctgctctaaatattacatttgagaggttgttgttgttggtggtggtggtgggagtaagca

SEQ ID NO: 35057 - DNA, 591 bp, Medicago truncatula
  Intron number 3 from transcript Medtr6g025140.1 (locus Med tr6g025140) derived from phytozome v7.0 (chr-ID MtChr6; po s 5532123 to 5532713 reverse strand)
gcctcgcgagggcatcctgtgtttcgtggtagtcatcctctgctaacattatcggttggcacacaaacaagttacttagcttgcagtgcacgtcaccttctagatagcttaattacatttgtaatttcagtttcatttagcatacatgtagttagttataacagttaagggtatataagctcatctcatgtacaattttgttacaatgaatcataactgatttttcatctttgagttcatcttcttcttcttctgcttctttctttcatagtttaatttttctctgatatgtgttacaaagtgatcaataatatttatcgtgcatgttttatcttaaaagaatcctgattttttttctagaatatgattttctgaaaggaattgctcaatagaagtatttcctctttcttctaaggccattttctaggccataatccaggattcatcacacgatgaatttgtattttgctcttactgctctatgtcaccatcaaatattcaaagtttcaaactgaattccgtataattttctatattaatattaataatgattaagttaataaattttactactttttaacgagcagtttt

SEQ ID NO: 35058 - DNA, 811 bp, Medicago truncatula
  Intron number 3 from transcript Medtr4g160720.1 (locus Med tr4g160720) derived from phytozome v7.0 (chr-ID MtChr4; po s 40779799 to 40780609)
ggctaaagaattcacaagagccaagaataaaaggggtacgtaccaaaacctttttttaaagaatataagtgggagtgggacgcatagaccctgtttctatagcaaaagatgaaattaaattattattttttatgtttgtttccatatattatttcggagaacttatgaaaataagctgaaaaaagacttattaagcgcatcataagctgtttttataagttctcccaaacactagcacaaaaattatgccggtagataaactcaaataagttaatccaaacagagcccatagtgtatccctccttatgacttgcacttgtgttaatttggagaatataaatgtgtactttgctcaaaatcaatccagccttcattgaagagaaacttgggtagcaccaactgtagaaaagagggtaaagtttcttcataggtgattggtttggcaatctttggagatgacctatagaagcagttaaggacggcagatcaggtagttcggtaggtttagggtgcctactacgacatcactttataaaatagtgagctgatagaaaaggaaagactagagtgaaagtgggagtgactgggtgagcaatgagcatatacaagctttacctgatcattctattgtacattttaccaaatttctatagataagttttacctggacattttatgctaaaaatatctcaacacacagacgcacccctctttagaaattcattattagtggagcaggttcacgagtcaaatatattaatctctagtaaagttttctttttgaatttctatctattgcagcggcgataca

SEQ ID NO: 35059 - DNA, 1020 bp, Medicago truncatula
  Intron number 1 from transcript AC235567_85.1 (locus AC235 567_85) derived from phytozome v7.0 (chr-ID AC235567; pos 313993 to 315012 reverse strand)
tcgttgattaataaggtcagttcggagtttctttctttaattttgtctttgatttgttgcactcgaagttttgtttgttttatcttattgaattcattgtttggtttctattgtttttgcataagatttatagtgataagaaagtattgaatctcaattttgtatgtgatgttgaaacagatagagtagtttatgcttgggcggaaaaatatctcactgttagtgttttaacgttaccattagcaacaatagctacacttgttgaacaaccttgttaagaagactcttttattggcaatgtaagaattggtggttttaatagcttactagactctttgaacacaatttcccctgattactgattacctgtgaaaagatcattctgaaacgatgttgtcatgttcggaaaatacttaagaaagccactttaaaatctcaaactcaatcttgcaaatattccattatttccacttttgaaggtaaatgcgtgtgtggtggaactctcaatcacaaagtaaagttgacacatagtggaaattgttttgttaggaatacagttatgaacgatagtatcagcgaatgttggtcacgattttgtcgaacacttgcttacattcagggagcgttgtaagaaagctcgctcaactgatgaaggcattaaatattgccaatacacatgaaaggatacatattgttgtcatgagtcgatgtctcgatgacttgtttcaaacagtcacttagaagaggtatgagtcaatggttttgtttaagtggttgttacttgctattgtgacaaattgacgtgcttttgaccaaatttcaactataaatggtttgcacctttaggtgtgaatgtctgtctattagtgttttttttccctcctctaatgatctcagtagggtgggtgaatagtgaaagtatagttattgatgtcatccgtattattgaattcggtaacatgagatacactaacttttttgttttgacatatttactaggctggggtggaccttgtgggt

SEQ ID NO: 35060 - DNA, 872 bp, Medicago truncatula
  Intron number 1 from transcript Medtr4g128250.1 (locus Med tr4g128250) derived from phytozome v7.0 (chr-ID MtChr4; po s 30111390 to 30112261)
gcgtttgtacccttccatattatcctctttcaattttgttcaattgttcgtgaatcgatctattttcatttcctaattgctgttatatgagtttgtgtttggttttatgctcttaattttggggattaaagcataaattctttggattaaggtcctgtttggttaaacaacttatttgcagcttatatcatggtaagcgcttgtgtataagctatttatatagcagaatataaaataaagttaatttttttttattttttataagctgtttttaaaagccatcttggagaatttatgaaaatagctttataaacaatgtcttaagctgtttttataagttcttccgaacagttgcacaaaacttatgctagtaaataagctcaaataagtcattctgatcaagatgtaagtatccttgataacttgggaaaccgtaaagcgagaatcatcaagtaacaaaaacaacttgtataatgatattaaaacaacttgtattagtgatattttacaagccctgtgcttgaatatcaattttctgttttttattacatttgtttttgggtaatatttcaatggcagtgaaccttttcacacctgcttgaataataacgaattgaaagttactatacatggatacacttttatacaagaatgttaaatgtaatttttattgattttcttctggtgtctgggttgatatggtcttgtggagaatttcataattgaggtatatgagccatgttatttgttattcttgtcttactggatgtgtgtatatattgtattataggattgttttgctttataatgctcgaatgttggatcttgctttcttttcctgtaccgttattgatgaggactgtcgcaggtgg

SEQ ID NO: 35061 - DNA, 812 bp, Medicago truncatula
  Intron number 1 from transcript Medtr2g034030.1 (locus Med tr2g034030) derived from phytozome v7.0 (chr-ID MtChr2; po s 9440743 to 9441554)
tacaacaacacactcttcttcttttcttcttcctggtaagtttcataatttctatcgaacttttattttattttatttttatttaattttctttgctaaataattttatataattttggttttgtttcattaattaaaggcattgaatattggacacgactatgaaattaattttgaactaggtaaagttaattcacgtgatatatagcgttgcggtgatttaatgttcattaatttagttcaattttggaaacaaactttacctttcatccccttgaagaaaaactttacctttcatattttgtagctactcattagaatggtactaaattccattttccccaattttttgttgtgtttatatgaattgtttggttgttgaaattgaaagttatgaatgtgggtgaagatttttaccttgggttttcggatgaaagggtagtttctgaacttttctgcatttttactttcctctattatggtattaaatatgtttttgagggtttttgttaagtatgaaaacaagtatctgtgcaaaaatggatggatgcagtcattgaaattaccaaatcattgttaacttttgggcttttaaccatccggttcataggggaaaggggcactgataatttggagtttggtcaggaggtaagtaaagtctggtcaaggattgttccagccaatgaccatgaaaccatggtcatagtctttatgataaactattttttgattgtggcatctcattgttatgtttgatgtgtgtttgtagaatcatatatacaccttgaattttgaaccgtagtctcagtttc

SEQ ID NO: 35062 - DNA, 732 bp, Medicago truncatula
  Intron number 2 from transcript Medtr2g034030.1 (locus Med tr2g034030) derived from phytozome v7.0 (chr-ID MtChr2; po s 9441834 to 9442565)
gggagtaccctttgcttttgaaaaggtacttcctcttacttcataattgttctgcttgcacgggagttgcttttcttgttctatctttatcggtgatttgggctttgcaactcttattcagaaattaatcaatacagtgctgtttggctctcatggtttattttatattgataaaatcatgaaatacacgtgtctatttcactctaatttcttgaaccccaatatttcattatcacaaaaggatttgaagtttggtaatatgttccttcgtgtcagatttctatgtaattggctactatttttaaagcgctgttagttatgtgctctctcccacttcaaataaattacaaagcatccacgaacagtttactatgctttaatcattgaagaaggttaggggaactgaattgatatctgcttttatctcatattgtcaacattagttggacataatttcaattatgagaagtgcttggactttggaatgatgacagtactggtttgttgtttggctgagaaaatcaactctgtaatgtaatgagttaaggactattttcctgccagtcagtaggaattgttgcttcctcagtctctcattcttttttcttgtttgcacgcatcttaaagtccttttgaatatcgtatctagaaattttgtttgttaaataaacttgaagaggctggtgacttatgtaaacattgacatttttattgtaggttctttatccagtg

SEQ ID NO: 35063 - DNA, 344 bp, Medicago truncatula
  Intron number 3 from transcript Medtr2g088490.1 (locus Med tr2g088490) derived from phytozome v7.0 (chr-ID MtChr2; po s 20029056 to 20029399)
tcgaccacggtatggtacacctagatcttttgtaaataaaatttcagacagtattgtagttcgaaaagtgaaattttatctgaaattttgcttcaaattcgaaaaatttcagacagtattgcagttaaaaaaataagctgtttgataattaacactcgagagtgttattgagcaataaatgtttgataaattttgtttcaattattctctcttagaaactaaaaacgaaaaatcttctcaaattctgtttcattcaattggattattttgtagatactacagtattttgatttagtttcttgaatgcaggaaaatcaactctaactgattctcttgtggctgct

SEQ ID NO: 35064 - DNA, 527 bp, Medicago truncatula
  Intron number 1 from transcript Medtr7g005170.1 (locus Med tr7g005170) derived from phytozome v7.0 (chr-ID MtChr7; po s 220361 to 220887)
ccttgacctaaaggttcttccactattctcttattcttatctcttcttctttcaaaatttactcactttgctagttgcatgatgctggatcttttttgttctatctctttggtctttttaatttaattaatatgttttctaattccaataataagaacagcattccaggcacgctagctacagtaactgacaaaaaaaaccctagaaaaataaagtagtagtagtatagtggtgttttgctttttacattctcaaatattctcacttcttttcatttaacttttcctttatagggtaaggtgcaatgcaacttttcttggtttctgttgttgaatttgcaaattaaactgatccgtgaatgtcaatataaaatatataaagtgtgtgttgtgttctggccttgttttagttttatttgtttcaccatattttagtttgaactttgaatctgataattagtaattgagtgtgaacaattaattggttactcagacgggagaaatttattacataaattggaggaacgg

SEQ ID NO: 35065 - DNA, 467 bp, Medicago truncatula
  Intron number 1 from transcript Medtr5g023770.1 (locus Med tr5g023770) derived from phytozome v7.0 (chr-ID MtChr5; po s 9379268 to 9379734)
aaggtaaaattaaaacctatattcctaactcaaaactatttattgtcatgtttttttctcacactagaatttttaggtcaacactccaatgacctagggttttattggctatatatcatgtccaagatttaattatttaatgttatgtaatttttttttcatttaattattttgatttcaaaatacttgtgtatagaacattcataaaagattgcaccatacacacaaacatatatatgttcaatttgagtgttgctgaatttcatgagatctaattcatattggcatctaaatatatctttaatttttttttttttataacttattggtttttaatttaccaatatttgttttttcttcaaacaaatgattttacaatgaagcaattataattataattttgaatgtttttcttttgttactaggtgatgatgaaagctagccaatggagatagaggactcctctg

SEQ ID NO: 35066 - DNA, 981 bp, Medicago truncatula
  Intron number 1 from transcript Medtr2g123340.1 (locus Med tr2g123340) derived from phytozome v7.0 (chr-ID MtChr2; po s 29899120 to 29900100)
ctcctaaagaggccaacctcttcaaactcattgttgtaagcttcctttctcttcgccagatccaatttcttcttcttccttccctttttcataaaccctagatttttttttatgcttactttttacttcttcataatccactaaattaatcgaattggtgatattcagtgttaattcaatttcaaccgctctctctgagattatgaatttcatagttttatttaaattaataatatttatcactttatcaatgtgtttgtagtttacatgaattaattacttggctatgaatgaattacttagctatgctatcaaatttatgaaattttttatttttttttatttttattttttattgaaattggaagggaatagaatgaaaataagatgtttgaatttattggtcattgttttttttcttcctgtttctatggttctgtacttctgtttggataagcattttatttgcagcttacaacacaaacacttatcttatgtataagttatttttatagtaaaagataaaataaagttaattttttttccgtagttataagctgttttcgtaatctatcttggagaacgtataaaaataagctcaaatttttttatgaacaatgtcataagctgcttatgtaaattctctcaaacagtttcacaaaacttatgtcagcatgtaagctcaaataagccaatccaaacaggtgcaatgtctcatttgaagaatggggtttagttttagagttaaatagctaccgtgttatatgatttaactccagggttatccgtgttttctaatagacatgtgttaggctggggttcggttttccccataggaaaagaaaaatcaaatgaatgcttataattttgtgattaatttaataatcattgttattgggaatttaggagtggtgaaatgctattgttagtggggctctaagttccctttttttttttttttggtgttgttgcagaaatcct

SEQ ID NO: 35067 - DNA, 555 bp, Medicago truncatula
  Intron number 1 from transcript Medtr2g033880.1 (locus Med tr2g033880) derived from phytozome v7.0 (chr-ID MtChr2; po s 9375205 to 9375759 reverse strand)
agccgggagcaaatccgtggcaagttgtaattcgggtaaacttacttaggattaatggattggaggtcatcatagatgattattatgttattaatcccagatagcaagcggcctgtagcgccgaacttcaaaaatgctatagcggtatagtagatagcgagaaagccactattgtcaatctaggatagtggagcagagttgagctgttgtttctattttgttttatacatctcaatcgcgatgcttcacaatgctattgatatcatgtgttttctagttttattgctagttgaacaattttgtttatttcataaagagagttagagaacttctgtaacattatcttctgtgagtttgtctatattctatgcagagcttctaacttcagttcagatttagaaacgtgtaacatttaatttttattgaccttgggcatttttataattatttctcagttttacttataattcaaattcatattgttgttcttatccgtagaacattttgatttatttttcaggcaagatccaagctcccgcatcatagtgctgccct

SEQ ID NO: 35068 - DNA, 705 bp, Medicago truncatula
  Intron number 2 from transcript Medtr7g015430.1 (locus Med tr7g015430) derived from phytozome v7.0 (chr-ID MtChr7; po s 3884916 to 3885620 reverse strand)
aagttgctgaaattacagccatatcatcacaaaaggtaattcttctagattaaatatataagtaaacctaattaaatctagtaaatatagtgctattacttctaaagtatcttttgattaatttattttccattaacttttttttattcttatgaaacaagtttgtacaatgggaaatttatagtgtaatttcttacttcgagaaaattaaaaaagattaaataattttcttaaagatatgaaataatttatttttgcttataaataaaatcagaagtccacattatagtgtaatggtttgactgtgaaaatattttatgtgggatcccaagtttgattccgggtcttcacaatcttcgtgtttttgtttttattttgataaaaaaaaaatgtatgtatgtttatttgagtatgtatcggtcactagaaaataaaaataaaaaatcagagaaattgtttatttatatagtcatgacccaatagtaaacctcatggatatacatgatataataaatttccttggtgtttgtagtttgcaataatattaattttccttagtaaaaaagaagattaatatgctataccaagttaacttcaacgatttacacttaaattattttctaaaaattgttaattttattcttgttttgatgattgtatctatgatcaggaaccttttcagagaatcactggattttttcatat

SEQ ID NO: 35069 - DNA, 525 bp, Medicago truncatula
  Intron number 2 from transcript Medtr1g068310.1 (locus Med tr1g068310) derived from phytozome v7.0 (chr-ID MtChr1; po s 13562662 to 13563186 reverse strand)
gctgtgtgttgtccaaagcttaagctgtgacaattttgctaactattgaaattgatagctatcaaatgaatactaatgataactatgcgcattttgtttaatttttttggttttttgttttttttgtttgtttatgtgttgtgttgcatttttccttcacactttattactttaatgtttgtatttctctaatttatctgtttacatatataatgtgttctattcttacctatgacatctattatatagtctattttatgttcaaattcctattaattgtgtactagtctttaattttgagaaatatttttattttctcatttataaaatgttttgtacaaataatttatattcttcggcacagcagccatcttgctctagcaattttgggattgttaactccactctaagcaatctatttgtcatgtttatcattgcatgatgatgaatctcactattgtcctgaaggttttggtgcatggatcggctgaagctacagaccatttgaagcagcactgtctaaag

SEQ ID NO: 35070 - DNA, 597 bp, Medicago truncatula
  Intron number 1 from transcript AC235671_3.1 (locus AC2356 71_3) derived from phytozome v7.0 (chr-ID AC235671; pos 17 305 to 17901 reverse strand)
ttgatctcgaagcttctcataagtttggttctcaggtttttcggtcacagcaaatcctctcattttattgcattgaactttcttatgtttttatagtcttaaagtattaaaggttgatattttttttttattttttttgttttgttttgtttgttgaatatctgttttgttagttacattgcttacttgttcttgcttaagaatgtgacaatagataccgagttttcaaaataaaaataaaaataatgtgaccatagttatcaatatattaccatacatgcgagttgtattttgattcaatacatgattaaactgaatctatacgaatctctagtatgtatttattttggaggtaaatctcgattcatcattatgaggaattccgatttgttcttgtgaatcactacctaaacttagtgtagtcagatatgtttttttatcaactttaaatagccgacttcttttatttcttcatttgatttaggacttggttcttgaattattttgagattcatgtatgatatatcaacttataatttggctacatcacttgtttttacagggtttcttcaactttacagccaggaggccaagcca

SEQ ID NO: 35071 - DNA, 981 bp, Medicago truncatula
  Intron number 1 from transcript Medtr6g005560.1 (locus Med tr6g005560) derived from phytozome v7.0 (chr-ID MtChr6; po s 383531 to 384511 reverse strand)
ctgctgtctctgtcattctccataacctccagaaggttggcattacttttttacttttattttatggttactttggcaatgtcgatattattaggctgaacaccttcaccctgttttgaacttgggacgtagcagttgtgaggtggcaactaccacgacccaattaaaaaagattgatttttttgatcataagagttgaaagattgaatgtgtaaataatgcatcaaaattaaacttagaaattcgatatttgatattgctaggttgaagaccttcgcttgggagctaagttgtctgtgtgagtttcaggtggtggttgccacttcgtctacaaacgaagaaagaaaattgattgattttgatcatagccattaaccacttcatagtttaaatatttttactaggacaatatttttactaggaccttgcaattgtgtgtgtgagtttcagggtggtggttgttacttcggctacggaccctgaaaaaaaatgatagattttgatcataaccactcgatagattaaattatttttatacgaatagtgtatcaaaattaaacttagaaattagacattcaagcttgatattgctatctgatgggtcctaagttgtgtgtgtgtgtttcaggtggtggtcgttgccataacccaaaaaataaatgattgattttgatcataatcacttgatagatttttttttacatcgacaacagtgtatcaagattagactctgtatgtttggttctgcagtgaaatttttttgagtttgagtgaattgattctagttaaaattgagttgaaggtaaaatgatttatgtttggatacattcatgcaaaagtgagttaaacaataaatttgaatgtaaaaatcaatttttgaatcagaacctagactgtttagcttcaagtagaatcagttctagaggccaaatcaatagtattatagagaaacggatcgtcagctgaatctatagcagcact

SEQ ID NO: 35072 - DNA, 791 bp, Medicago truncatula
  Intron number 3 from transcript Medtr1g137900.1 (locus Med tr1g137900) derived from phytozome v7.0 (chr-ID MtChr1; po s 30640705 to 30641495 reverse strand)
gcgtgttcttaacaccggttctcccatcagtgtaaatatctattcaatttttttgattcaattttcatttctgaattttttgacttagttggagtttttactgtttgtgagatctgattttgaaatcattgcggtttgaattttaagttgcgtttcatggatctagatgtgtttttcctcattatgtaattacgtaattcattaagatttgattctcttgaagaaaatttgattttgtttttattgtttttgatcgtggatgctgagtttgatgctttataattattggaagaaatggatttagtgttatgagctattggttgtctgcatcctgctatcaattggatgaataatgatgtcaatcctcgaaaaatggggtctttgtagtcaattttcaatgtcatattgttttatattcgttgaaattaagattagggcctgtctggcttgggcaatttatctgtttaatttactgtaatcacttttaaatacaaagttgtactctgtacatatttgaaatgggatctttttgcaattaaaagtataaaatgaaaccacatgtgtctgtgttactgtgtcagtgctacatagctatatagttatattgctctcgtgaatgtgatgtgatccatttgctccaatttgactttcttttggactttaattttgcaaccacggaattgtccccccattggtgtttacttttgattactgtgtctgtcagtatcgtttaacatatgtgtgtattgcatttaggttcccgttggcagggctacccttggacgtatcat

SEQ ID NO: 35073 - DNA, 937 bp, Medicago truncatula
  Intron number 1 from transcript Medtr3g061820.1 (locus Med tr3g061820) derived from phytozome v7.0 (chr-ID MtChr3; po s 14128911 to 14129847)
ctcgattacgtttgccctactatcgtgattcgaaagtacgtacgtaatttctatgtattatgattgcttctatttcaattttcttgcatttgtaaaaatgaaatgtgatagttgattcagtttcttcaagtgttgtatttcttgattaattgattgattgtactcttattatgattatactcttattttgttgcatttcaaaagtacgttatttatgtgattaattgattatactcttgttatgattgtttctatttcaattttgttgcatttgtaaaaatgaaatgtgatagttgattcagttttcaagtgttgtaattctttacttcttgaaatccatgttgtaatttttaatcgtcttttcttgtcatagtttattatgattgttgcgatttgaattttatatgcatttaagttttgtgtccttttgatgattattttacagaagttttaaattttggtaatcgattatgtaatctttcttttactgttgaatcttgataataacacagattacaagaaattaaaacttaagttttatatgatgcacggacactccttggattaggcgtgtcccggtgtcggacacgtgtcgtgtacgtgtccgacaccgacacttgtagttacactgaattatgttatttttttaaattattagttgtgtcggcgtgtcagtgtctgtgtcgtgttcggtgtccgtgtccgtatccgtgcttcataaatttgaagttaaaacttaactttggttatggactataatgatacttgagttttagtttctttgtatcccttggtttaatttttagtgtgaaaattgggaaataaagcataataattgatagaatctaagttcttagcatgtggatgttgaagagtcaaaagatttatgtgcttctgagtttgtttttccttgtacaggattattatagtgcataaa

SEQ ID NO: 35074 - DNA, 502 bp, Medicago truncatula
  Intron number 1 from transcript Medtr7g076020.1 (locus Med tr7g076020) derived from phytozome v7.0 (chr-ID MtChr7; po s 15382490 to 15382991)
acattgtttctcatttaccaggtaaaaactacaaaatgtcaaaaactaaagggtcattttgcaaagttttatactacatcttaattttaggttattttacaaaacccctcaatttcaactatggtaaaaaaaattatcacccttccccagcattattttttgacttcttccccaaacatggaagaatttttctttggccttgaattgaattagtttgttagttttttcttgtatatttttgttagagaaaataatttagtttctttttatcaagttgtttaatgatcaaaaaattgacctattaaggtgaataagacaaatatacggagttcgacaaatgtacagagttcaaaccccgattcttataatataatgtaattttctaccaacttaattaagttcgtggagacaataatttaccgcttttattagatatactttgatgagggttagtttgtattttttttgtactatttgattgacactgccttgtttggaccag

SEQ ID NO: 35075 - DNA, 633 bp, Medicago truncatula
  Intron number 2 from transcript Medtr7g006210.1 (locus Med tr7g006210) derived from phytozome v7.0 (chr-ID MtChr7; po s 921294 to 921926 reverse strand)
agggaatacctgtattggtaagtcggaactatccatatggacatataattaattcataatcacacatcacttccttactcaatgttcatgcttaagtttaaacttgatcttcaaattaaccaaaatcatattaggtcatgatattcataaaaaaaaaaaaaaaaatagtaggacttggaattgttttcttcaaaggcatgtacgtgtactagttatggttcttatgaaaatttacttacattgatgcattaatttatcttgtatcttttacggtcaaagttatgtaattttttttgtatcaagcacttatttatttatttactatgtaggagtacgtgtttatatataatttattttcatgattaaaatatttgttaaattgtttccaacacactatgtttatgtaagactataacaagaaaaacttattgatataagactaaaataatttacagaatgcaatatgctatttccaaggttctcaagtttactattttcataagcttttaaaaaaatcaaacaaatttgtcaaaaaaaataataaaaaaataaaacaaattcttatgtaagtagctaaatttaaattagtcattcataaactaatccaacatccttaagtcctttagttagtgg

SEQ ID NO: 35076 - DNA, 593 bp, Medicago truncatula
  Intron number 1 from transcript Medtr7g006210.1 (locus Med tr7g006210) derived from phytozome v7.0 (chr-ID MtChr7; po s 921969 to 922561 reverse strand)
acctcaggaccctgtatactctggttggtatacacattctttctttaattaagtgtatataacaatctttctctaattttcttaaacaaagaaatgaagaattaccatatataaatggatccccaaagagataagaaagctaccccttaagagaaaattagggttaacacaccagttatagaataagccattccttctttgtccaagccaaaaactatttgatcaactatatattaaatttcttacccccaaattttaaaataaattttctagctgcccaaatcgccaaaatgatacagtttgtaaaattagttaattttttttttgggaaagaagattgtaaaattaaccacctccaacacccttagaaataaaaaccaaacagttaggaaaattcacatctaataaacaaatttaattctgtttcctgaacaatgggtttcatttacatcactaataaccttaccttacctccatacaaattaaacttagttgggatcattcttaataacaattgccacgtaaaatctttaattgattatttaagctattttttctagggtttttgagtttgtggcactaattttcaggtg

SEQ ID NO: 35077 - DNA, 394 bp, Medicago truncatula
  Intron number 1 from transcript Medtr7g022620.1 (locus Med tr7g022620) derived from phytozome v7.0 (chr-ID MtChr7; po s 5692986 to 5693379)
tgaaggtattagataagtgacgttaaaaaattcgccggaaccaccacctccaacgactgattccgccgtaaacgtccatcatttcccgtcgactctgccgttgcataaaaaaagcaacaatctcatttcgattgttcttcatttcgattttgaatttcttcctgatgattttcaatctcacttctacaacttgaagaatcttgaatctccaatttgtaaaaaattgaaaataatttttcctcttctggaacaatttctctcttgattagaaacaacttccttgggcaaagaatttgtgtatgcttataaagcaaatataagttagatgtagatagtaatatcgacagataatatcaacatttgtagataaaagaagaaactacactaatatcct

SEQ ID NO: 35078 - DNA, 633 bp, Medicago truncatula
  Intron number 1 from transcript Medtr4g155290.1 (locus Med tr4g155290) derived from phytozome v7.0 (chr-ID MtChr4; po s 38306233 to 38306865 reverse strand)
tcttgtatctttctaatactgagctagcgactggggtttcttaaatgaaatatcttttatttcagtcaattctgattgagttctattctatcatagtatcactttcctcctcgtcataatttcagcttataagtatagactgcatgcctgccatttatttccatgcaattggcttttgtctttatatttgacatgtatacataatgcaggcaagaagttcaattgcgaagaataatttctgtgttgttcaatcacttagctttatttctctcaagggtttcaaataagtggcccctccatcgacaaagagtcctgcgttttacactttgtttgtctgtctgtctacaaagttttctgtacataggtgccaatgagctaataactgcttaagtggttttataatgaacaaatgtgatcataacaagttgttttatcataaacaaatatgaccatgataacaaaacattgacaaataaactaggaaggcttgatgtgtccataatacaattgtttgatctatacaatataatagtgtgccttttgactcttttctacatgtaacgtcattccgcttagtcttcctctattcatatttcaggttggcgttcttttggcttgcagtcatactggctt

SEQ ID NO: 35079 - DNA, 469 bp, Medicago truncatula; identical to SEQ ID NO: 34348
  Intron number 1 from transcript Medtr4g158930.1 (locus Med tr4g158930) derived from phytozome v7.0 (chr-ID MtChr4; po s 40011045 to 40011513 reverse strand)

SEQ ID NO: 35080 - DNA, 889 bp, Medicago truncatula
  Intron number 1 from transcript Medtr5g104290.1 (locus Med tr5g104290) derived from phytozome v7.0 (chr-ID MtChr5; po s 41808896 to 41809784)
caaggtgtcgtgctctatttgtacgtactttgaaggtgttgagcttggatgatattttagtcatattgtgttttccattttttgggaggttattatgatggggtggtatagggagtttattttgttgtcttttgatgcagttgaagtttacttttgaggaaatttattctctttggaggtacttgtggtggtattagcagcttagagattatcttgttgtgttttcaattttcgggaggtgactgtattgggaggtaattgtgttggatccgactcatatagacttgtccatttcgttgttttgtggagctctctactgtgtattcattgagtgtttttgtttgttttgtctcgtctggctcatcttgagttaacggtgatgcgagtggtggctgatgttagtaacataaggtgacgactgttggttttttgagttaacgatgatgtgggtggttattggtgttggttacatattgtttttgttgttgggttgggagttgaaacgtaaatggtgtcttttttgcgtggtggtgatattttggtgttaatgattagaaacttgtgagttgggtttgtttttgggaatttttttccatttgttgtgtttcgtgctggtttacattgtggtgttgatattgggtattttgtggtgctcatggtggtgatgctcgtggtggctggtgttggttttcgtggtgatgctcgtggtggctggttctgatttttggtgaggattaatggtggtttttgtggtggtggtcttgctggtgcttgtggtgatttttggtggtggttatgtcttttgcgggttttcttctatgagtttgttgttaattgggttttcaaataattaggtggtgattttacttgtgcttaactacgctcaact

SEQ ID NO: 35081 - DNA, 974 bp, Medicago truncatula
  Intron number 1 from transcript Medtr2g055930.1 (locus Med tr2g055930) derived from phytozome v7.0 (chr-ID MtChr2; po s 15087322 to 15088295)
ataaaggactaccaaccaatgtattcactaagagtgatttggtttagtatggttctgtatttatgctgtagtaggatgtggtttagcagctaatggcttttgttttgtttgtttcctagtttgttagttgtttttgtttaggctccctgctaatacagtggttttgtactataaatgccttttagatgtgccttagttgctattaataatattttccgttcaaaaatttaaaatttattcacttaaaatttgtttgttatcaagttgaccaggcttttgattttcttgctattagttaaaacttcgaatatattttgttgattttggacacatggtgtaattcaccttgtgtctctgtttatttctgttatgatatctcgcatcataatttttttttatggacacagatgttcataacatgtaattaattggctgtgatgattttatgtaacacatgtttgaaattgaggaatgcaagctattcttttctaggtctttttctttttggagaaccttttgagcattaaagtattaggagtggattaagaggatttccctgatgcttcttatgcttggcttggcattctggttttgccgtgaccttcatataacttcagtaaaataccagtggtcatataggtggtttgcttgaactaccgatagatttgacaaagagcaaagaaggagaggttttggtattgttatgaaggagtcatcagcaccacatgttccaaaactggcgtggcagtgaaaaaattgaacaattttttggtctcactcgtcacaagaatttggtttgagtacctgacttattgcactttggcaagttttcttttcggtggcggtggtgagaaagagaaccaaattggaaactaagacttgaaaatgcaatagggatagctagagtactggtattttacatgaagagtccatcaataggatcatctattgacttgtgacataaagcctcaaaa

SEQ ID NO: 35082 - DNA, 950 bp, Medicago truncatula
  Intron number 1 from transcript Medtr1g028120.1 (locus Med tr1g028120) derived from phytozome v7.0 (chr-ID MtChr1; po s 6757281 to 6758230)
aagcttaatattagtggtatattagcttcttctttttctatttttttttagagaaatggtatattggtttttttttttttaaagaaggagtgttatattagcttcttagtctatataaaaatatatcatattacttatttaaatacgttcttattaaatagcttttaagtagactatcatatcatatcaaacattttaaaagatcgtatattaattaagtctattgcacgttgtaggctaggtctaaatcttgaacctttttgactaagtcaagtttaaacatcgtaaattctaacttgatctagtctattggatcataaaaagacattttaggcgtattagactaatctagttaaaaaaaatgaatgaaatactaatattatgatagattatgtaatttggtttaaattttaatttgttaatattttcaataatatgagcttataagtctacaaaaaagtctacattagtttttaaaaaggaaattatattattgtaaagtagaattgaaatatgatatcatatatagttaaatccctcaaatgccatgctaaatatcacaatggagctcaatattagtggtatattagtttgttctcttttttcttagagacgtggtatattagtttttttttttttttttaaaagagggggtgttatattagcttcttagtctatataaaaatagatcatattacttacttaaatacattcatattaaatagtttttaagtaggctatgatatcatatcaagcttttaaaaagatcatatactaattaagcctattgcacgttgtaggttaggtctaaatcttgaacctttttgactaagtcaagtttagacatagtaaattctaactcggtctagtctattcataaacccctatgtagggccattaatttaagagatttgagaaataataatttgagttcttagaagagataagtc

SEQ ID NO: 35083 - DNA, 985 bp, Medicago truncatula
  Intron number 1 from transcript Medtr2g113930.1 (locus Med tr2g113930) derived from phytozome v7.0 (chr-ID MtChr2; po s 26808072 to 26809056)
gcttgcgcaccaatccctttctcaacaagtaccatgttaacatgtcaaagccctttattttcctttttttttttttttgtaataattgtgattgcattgaatctgttcaaaatttcatccacattaaatgtttgcacaattgtttcctagtttataaacagcacaattatgctcctatatatttccttgtattcattcttcacttttttttttggttcatttcattttgtttctcatattttactttaccaaaatgaatttgttgaggtggatgtgtcatagatcgatcaaaggttgtttttatttttattgatgagcttgtttattcttcatgatgcaaattgttgaatgcttctgtttttttcttgtgcaagttattgatgcaactgatttatattgcaatttttttcatggtttaggtttagagtttaatgtttagtgtttgttattgttcctgttatatcaaaggtttttttttagagggggtttgttcttcatgatgaatgcttctgtttttatttcttcttcttcttcttcttcttcttcttcttcttcttcttcttcttcttgtgtcatgtgaaatttttattgtaactgtttctgttttattttgcactttttttatggtttagggtttagagtttgtgaccattcatgttttaaacggcgaaacaatttattggtcgaaaaaacatttctatatagtagattttctttctctctctgatgaattttgagtattgatggagtattttgaagttcatattctaattgtttatttatattctatatatttttttcttctattgaatgcttgcgtggtcggaatggttcaatcaataaatcatagcggggctgtcattttgcgcttttatcagtttttgatgatgtgcacttttgttgatttctatccctcacatgttctttgttttgtaaggttttgttttctttgttttgtatgtcttttttttttttttttttgtag

SEQ ID NO: 35084 - DNA, 170 bp, Medicago truncatula
  Intron number 1 from transcript Medtr2g123510.1 (locus Med tr2g123510) derived from phytozome v7.0 (chr-ID MtChr2; po s 29994885 to 29995054 reverse strand)
gggtttctgttgaaggtcaaggaaagagttgataggtaattattatagaaaatgtactttttttgcttctttttttcttttgatcttatttctctcataactcaacatgctttgtgtttcttcttcttattatagagttggacttgatattccaacaattgaagttcgat

SEQ ID NO: 35085 - DNA, 579 bp, Medicago truncatula
  Intron number 2 from transcript Medtr3g122040.1 (locus Med tr3g122040) derived from phytozome v7.0 (chr-ID MtChr3; po s 30303743 to 30304321 reverse strand)
tagttactaatctcaaggtctttggaggaaaaaaaaatgtataattttcatagtttatttaacattcatttgtttctgaatatttgtttctgtgtttatttaacattatgcatgcttacccctttgctaaacgtctgtctctatagattataggaagtaatgttaatggctatggcacactgataaattaaagtatcagtggaaaaaagtgatagaattttgatagttttttttttttttgaaagaattttgatagtttattaaacactcatttgtttctaaaaaaataaatttaagtttttattttatgatttaacatgggaaaggggtaaacatgcctctatgttaatgttaaatgggagcggattgtctcccgtgaagtttctctccggtcttctcctgtgcaatcctagcctttcctttttaaagacatgtcaacggctacgattaaaaccaattaaatcacagatttttgtgtctttcacaaaccattttctgctccatcctgcataggattgattctaataagttgattatcaatttaatttcagatttacttacttagaataacactcccac

SEQ ID NO: 35086 - DNA, 750 bp, Medicago truncatula
  Intron number 1 from transcript Medtr3g122040.1 (locus Med tr3g122040) derived from phytozome v7.0 (chr-ID MtChr3; po s 30304349 to 30305098 reverse strand)
tattgaaacccttttgtcataccactgcctcactggtaaacctgttctctctgtttttattttcagtttcagtattttgattaagccaaaatgtaataagatttgtctaagctcatcggattggttttcaataaaatagttgcagtattttatatattagccattttatgtctgcttttagttatattaggtccagtattggccatacttcttttcttaaaacagtttatgtaagtgaataaatattatagttcatcaaattcccaacaaagataatagatttgtttgttaagatgaacaaaaaatgcctaatcaataatgcttggatgaataaaggttaacagcaaaagatattcaaggttcttacttaatattgtagttaccctatttacaattgataaaaaattagcaataatcaactctgaaagtttacaatgcaactagaggacttagaataaaacagtgtcgaagctaccactcttttttttatttttttgtgtactctatatgtcaactctgctgttcctacgtagcccagcaatgaagtaatgtaaataacgggattttttattattgatcacgaatgattttaagttttgatgcaattctatagttagataaatgtagattgtatctggacattgctggcaatacttatttagttaataactataactaaaattcgatgatttcataataatattttgaaaaattataactatttcttaatcgtaaaagtaggtgctggga

SEQ ID NO: 35087 - DNA, 970 bp, Medicago truncatula
  Intron number 1 from transcript Medtr1g093130.1 (locus Med tr1g093130) derived from phytozome v7.0 (chr-ID MtChr1; po s 18858718 to 18859687 reverse strand)
aacaagccgcggtaatgtttcaattcacttgttttcagcttatttacagaagtaaatacttttgagactctttggattaacttatagaaacatcttattacattttcataaacagtttttagcttatttttataagctctataggattgtttatgaaaatggacttatagccaatataagatatgtttaacacttggactttatttatattttgcgtttgtttgaattgacttatttgaacttatctagtaccgtaggtacttttgagactatttggatgaacttatagaaacatcttatggtattccctaaaaaaaataaaaaatcttatggtatgtttataagttgttttcagcttatttttgtaagctctctaggatagtttatgaagacaacttatagctaatgtaagaaaagtttgactttatttctattttgggtatgtgtggattgacttatttgaacttatctagtagcgaaagctcatccaagattgtttgggataagaacttgaggaaacaacttatgtggtgtccatgctgttttcagcttatttacataagttatttagtatagcttgtgaaaaacaacctatagctaatattgaaacaatttgaatttatttatattttgggtctgtttggattgacttatttgaccttatctagtagttatctagtatcgtacacactcgtgagactatttggaagaactcgaggaaacaacttatgacatgtccataagctgttttcagctagcttatttacataagctctttaggatagcttatgaaaacacaacttatagctagtactaaaacaagttgtatcataaatgttacaatttattgtattttgttatagaaatagcttataaataagaacttgtatgataaatgtttgtgctatatgcgtttaattatgttgtttatccaaacaaggcgtagttattgattaataatattatacag

SEQ ID NO: 35088 - DNA, 672 bp, Medicago truncatula
  Intron number 1 from transcript Medtr7g009200.1 (locus Med tr7g009200) derived from phytozome v7.0 (chr-ID MtChr7; po s 1582738 to 1583409 reverse strand)
gtctccccattgaaactaggtgaagaaggtaagttaggatttggttttcattctctctcttgtgatatgttaaattctgaatcagttaaatttattccaattttcctgaattctcattttttatttttgaattttgtatgtgtatgttgatttaggtttggatacgatctgaaactgaagtctatgaagagaatattaagattgaaatttaaaataagagaatatggtgctgattgacattttacaagatatgatgctgaagtttttttagagacaatgttatctcaaagagaaaagagcaagtaaatgctaatttcactaggtaagattgattttgattcccttctagtagctattgaaataacttgtaacatgacttggtattaaagctttcacatcaacttgttttgattatgtgaaccatgctgaattttgtcttgcttgattttattggtagtcaaagaatgttgaataaattcttaattttgatagaaggcgtgttgtcatctgagactgagacactaatgattacattcaattatgtcatttttgtttgtcaaagtattattgattacattcaacttattagatgcaaattgctactttcttattttgatcaatgatgtttgctattcagggggccatagtgctcacattgtgtgcacgcctttt

SEQ ID NO: 35089 - DNA, 572 bp, Medicago truncatula
  Intron number 2 from transcript Medtr3g005150.1 (locus Med tr3g005150) derived from phytozome v7.0 (chr-ID MtChr3; po s 175918 to 176489)
atcaaggaatagaggagaaccaaaagctggaaaaagtgaatagcaaacataattaagaaggatcttggatattcaagagtcaagaccacagtctcctgttaaattatatgacaagtgtacctttcgatgtatagcttcttatttatcaaatttttctgtgtggaaattagaacatttccttcatttcaaataaactccggctggttttactatccgtgcatatgcattcattgtctacttgaaagacttctggctagtcatgcttgcacttcttttacagaatcgatatttccattggttcattattccggcttataaattatgtatttttattcctgattatgtatttttttttcctgttattcaggaaaaggcaggaaaattcatatcgcttaaagaaaataatttcataatatgatgactttggaggtaaaggaagaacagtggtgccattgctcatcagtcatcaaatttgcgaccacaaattcctgagcgtttgatgtggctaatgagactcaaaataatctttaaaaaaagatcattaaagttgctctaaagacaaagaaactcaa

SEQ ID NO: 35090 - DNA, 511 bp, Medicago truncatula
  Intron number 2 from transcript Medtr4g022680.1 (locus Med tr4g022680) derived from phytozome v7.0 (chr-ID MtChr4; po s 4704029 to 4704539 reverse strand)
attcaaagattaaaattttcagcaaaactttccaggtttgaaatactctcattttatccactctatgattgaagatgaaaatactggtaacagccaactgatcctgaaaatgatgaaaatgacggttgctaaaagtgcttattttagcaatttggatgttttgttctttttaagataattgttggatttgtggtttgttaaagcaggcaattattgatcatcatacaaaacaaatgagatggtaggaagtattatcatgtgataacaccatttaaatatatttttatgttgccaattgaatttcctaaatagaaattttttgtaataagaacctgggataactcttttaaaaaataaaaaaaattcaaagcctgacttggatctcaaaacagatttcattgaatagccgtctgcttactgaaataagtcttctctaggaagttttaattgaagtcatttttttgtttgtatttcaggaaaagagtgtccatccaactttttcagcagaaaa

SEQ ID NO: 35091 - DNA, 601 bp, Medicago truncatula
  Intron number 2 from transcript Medtr4g124670.1 (locus Med tr4g124670) derived from phytozome v7.0 (chr-ID MtChr4; po s 29226698 to 29227298)
aaggagtttttctgctttgattgcataagagatcggtttgttattcttacattcatttactgtgttttgtctatgtagatgtttacacttgttttgaagttttatgttgtgctgaatttgttactttgttggaatttcatcatgcattgtaggctatttagccctatttgaaagcttgctgattttgattctatagtgatgtatgtgctttgttattcttttggggcaatgcagaaacttgaattttaaaaagcacaatttcatatggtaaaaacatagttagaggttaggccccttttgattttctcaagagagatgcgttgcgtgattatctttgtcgacagaagttaagaagaaaatcatgaaatttaaaaatgaaaacagaaaaccttgctagtgaatcattatcttttattctcttcgtaatttgcagaaatagtaataccagatggatcaatgatgatttgtgctaagataaaatttataaatgtgatttatgtagtccgttgctcttgaattgagaattaaaacacgaaaagttattaaaaactttttgacacaaataggtatcttgacactagaaaagaagttaagaaggcgt

SEQ ID NO: 35092 - DNA, 923 bp, Medicago truncatula
  Intron number 1 from transcript AC233673_1.1 (locus AC2336 73_1) derived from phytozome v7.0 (chr-ID AC233673; pos 81 6 to 1738)
caatctctcagacgtatcattagcgcttaccttaagtaaaatcactctttcgttctccactctctaattcaatttttttacattcaacgattcgtcatgttatttttgcacctttttcttttcaattttttttttgaattttattttgattttatgcatttagatcaatttaatgtatgctaatgttgatgttatgaattcaatcaaagtgatgaatactcacagagtatgtaaatagttcaaacagatatcgaattgttatgatccttcaaaaagcgcttatcatgataagtgtttatgtataaagctatttctataccaaaagataaaataaagtaaaattgttttcatataaactattagctgttttcataagctatattggagcaattatgaatataagctgaaaacagcttatgaacattaagttctcccaaacagtctcacaaaacttatattaatagataaactcaaataagtcgaaattggccttagtgtcatatagtcagttggtcatgtgtcagttacagttagttagttgaaatagagtgggttctgctaagtgctgctaatccataattatctgtttgtaaagctataaatacatattcacattgtgctaatccatatgcacagtcaccaaagctgtagcctagtgattaatgggttgggtcgctgaaggagtttaagaaggagggccagggttcgatccctgctgctaacatttccctcctcccctgtaacaatatactagtaacaattaacatttgcttataaaaaaagttaatacagattgcacttttcagatcagtttttcctctcttgctttcatgcagtttttctcatgcttctctatattatcgattcctaatattacgtaaaacttaagccttttttcgctgtcttctgatgtagctatcctg

SEQ ID NO: 35093 - DNA, 1019 bp, Medicago truncatula
  Intron number 1 from transcript Medtr4g097290.1 (locus Med tr4g097290) derived from phytozome v7.0 (chr-ID MtChr4; po s 20788010 to 20789028)
actttcggttacacgcgaagctttgatttttagtggtatgaattttactttctcttccttattattaacttttgtctatcctcatgtttttcatttttgcattatacatgcgaatacgattataaccctcttaacgcaaatatagagcatgaaatgttgtctataattgtaaaatcattgtttatgaagtgattttagaatgatagaatcctatagtatatgattaggtctttatgctctatgatgtcagttttgatatttgattcataatgtatcttttggcctttaggtcattattttgtgttagcatcgaatatgttagcattcttatctcagattcattgattttatttgcaaatatattattttactttatcaatagagatgggatgattctgctttgcagaacacaccatatatatctttgtattttcatttatgcatttgctcttgaaagttaggagagaattgattgattatgctttatattctcaacaaaataactcatcttttactccagcacatatacgtagagatgtgaaaataggttgataaaatggatttggtttattaaatctaatgtgtaaaatgtcggaatgacatgtcaacaacctcaatccttaactctattattttctatttaagaatttttttaacattcctcacctctcactatgtgagtttgaacttacttgtagacttttattaatatcaacctatatttcatattgttatcttcaatttcatatattgggaagaactttactccatgaataatcagaagttatttattcttttaacgttttcacaaactaaatattcaagatattagcgcaatgcgcaagcttatatctacatgtctgtcgcatttcaattgtgtttagttgtatatctatttaatcgcatttgttgtgtgcatattgccattacatattgttatagatatagatgtctatgatgatttgactttgcacttaggcttacactttgtgttcactcttgtttttgtagagtacgcc

SEQ ID NO: 35094 - DNA, 871 bp, Medicago truncatula
  Intron number 2 from transcript Medtr3g064660.1 (locus Med tr3g064660) derived from phytozome v7.0 (chr-ID MtChr3; po s 14819749 to 14820619)
gctctttttatttgacagtagtagcccctctctctgtaagttatttctattgtagtggtttgattggtgggagtcttggtgatttattttagttcttgttgttcctgcatggtgtcccattttcataatattatttagaatacaacatataatagaaatggaaaataaaaggaaacaatttcatcaataacctgtaattattggcacaagcaaggaaatcactaattgaaacaatgggcattcttgaaaccatgtatagatgaaatgaggtgattggtaactatgtatgttgaaaagagaatgcatggagaaggagtttgaagaggtttactgtgaggaaatgtagcgggcgcagcagttcaacatcgagtcatttttgggttatggaaatattttactgaaaatggtatagtgaaaataagaaacgtttcactattgaatttgatattgtaattgacatgatgatgatcagaaacggtgagttttgcaagccgaccaaaatcaaacttgtgacattgagaggagcacactcctatgtcccaagtcaacacgacattattatctttgacaggatatcaaaaaattatattgaagttatagttgatctcttttttttttactaaagaaaactcagctcatacaattaataaaaaaagattgattacaatgaggtaaaacctcaaaatttggaaattaattagtccaaaaaatatccaccattacaattgggcatgagcaatcaaattaataaaacaattaacagcattttaatatcggagactgtagaaacgaattcactagcatcacatttgttgcaaatcaattcatatgacatcttcacataacatattgtagatttggaggaagcaaa

SEQ ID NO: 35095 - DNA, 664 bp, Medicago truncatula
  Intron number 1 from transcript Medtr5g012390.1 (locus Med tr5g012390) derived from phytozome v7.0 (chr-ID MtChr5; po s 3518833 to 3519496 reverse strand)
tactacacttgatcttagccaaaaggccgagaaaggtatgaatttaaagtaagtctcgcttctgtttttatatcccacatccactcactttctctcataactcctcgatgtgggactcagcatcagcttgcttggtagtctcttcctaactctttcttcttcctttatttttcggttcttttcttccaatttgttgcactcctatgcttgagtagtatccatcatttagagtgcatcaatattcacaagctcgtaatctttttcacatctgtatcttctgctcattttcacttgttgaactcttaacatgacggatagttgagccgtctagaaacatccctcatggattgtaagttcgcttagtaacttgcgagttttgattcttatacaccgcaaatttcttctttattcctgtaacattatcatcaatcaaagaaaataaatacacacataggccgtcatgaaaccaataacaacttatgaattgccaaatattaaattcatgatattcatgattattatatcattcatctttgggttcattcattccttttgagtcccactgttgtgtctcttagaattatatgccgacatactcttaagaattcaatctctgatgtagtagttagttgcactacaatcaactcttattttgagtcccact

SEQ ID NO: 35096 - DNA, 559 bp, Medicago truncatula
  Intron number 2 from transcript Medtr4g141300.1 (locus Med tr4g141300) derived from phytozome v7.0 (chr-ID MtChr4; po s 34873903 to 34874461)
aaccacaggttggatttcctttttgatcaaatgattttagtttagatgtttgtgaagatgatttatttccaaaggttatacattgtcatatacatgctgatcatcaaaagtcaaattagtaaattatttatttcttttagttattgttgattaaaagtttcacaaaacgttatcgaatttgtggctcatacttacaaatataaggttatgtttggataaacagcttaactaaccacatacaacattagcgcttattatataagtgtctatatataagttatttatataacaaaagataaaataaagtcaaactatttttatctatactataagttgttttcataaactattatagagagttcatgaaaataaacggaaaacagcttgtaaatatgtcataagttgtttcaaatagtctccgtagtctatttttaaggtgtgcatatttgatatttggttctacattttctatttttaaggtgtaaatatttgatatttagttcagtattttttgaaaatgtgataatggtgtagtttggttgtactttgtacagataaa

SEQ ID NO: 35097 - DNA, 986 bp, Medicago truncatula
  Intron number 1 from transcript Medtr5g016190.1 (locus Med tr5g016190) derived from phytozome v7.0 (chr-ID MtChr5; po s 5626666 to 5627651)
gttgcaggagagagggacaaggggaggaagatacagttttttttttttattgatttgaaggaaaaaaaacatttttagcattttatcaattaacattgttactacaagtaaagaggtttgacaaaattatcttcaggtacgatttgacttttataggttttgttagcagatttagattaattttatttgtcaatgttgctaatgtattgatggtatgctgatactactttagacacattataaagcttctctgattcaaatgaaaggttgtggccattccaaggcgttggaaataattttcaacaaaaataatgcaactgggattatttcatcattcgtctgcccaagaatttgagcgcatcaatgccttaatactcagagtgtgagtcatgtacgtgttgatgatgatatacaagattggagcgcctcgcttgtaatgtaaagcgaaaaactcaattaagatcccaagaaaaatgctacatcacgtcagatgggagatgcacttgcaccccgggttcaagtatttttggcaaaagttgagagatatgggggataagagtggcaatgctacttcacgtgtaaaataacagggctttccaagtgtcaagtgagcccttgatgacattgtaaattgtaaagagagggaaaaaatgttcttaggtggtttgctcacttgtaccatcattaattgttttatatacggtgtttgacactacaaaaaaaaatacatacggtgtttgagatacaaggcttcttttttgtcaatttttttttcatatatgtacttgtgttcgtcctttgtataattgattaaatttctcatatttaatcataggttagaaactgagaataagagaatatagaaatgaaatcatttaaggatcttggcttatctgattcactggtggaagcttgtgaaatctgtactaacccttttcttagtctagacagcttgctgttcaaataaccggacggtttgaagctct

SEQ ID NO: 35098 - DNA, 724 bp, Medicago truncatula
  Intron number 1 from transcript Medtr5g097110.1 (locus Med tr5g097110) derived from phytozome v7.0 (chr-ID MtChr5; po s 38685749 to 38686472 reverse strand)
cttccgccgccacttacctacactcattttctcatgtacttattttgtacacaaaagaaatatcacgtgttatttgatatatatgcatgtattttatgttttgttttgtcatgcatttgtgtctatgtaattctcatttcattatcatcttattcgctttccaatagaaaatgttttggaattgaaaaattcaagttttgaggatatatgtagatgatgatcttgtttataaatcacactgttaccacttttaatcattgtaaacaaaaagttacattggtaccgatttttgtttgtaacaatattagggtcaaagctgcgatccccagattaaagaatccaagtttattgtgaaacataggtagatattttatgtgacatgtagacttagagatagtttattaagaaccaaaattgaattttacaattggagatttatttagtagcaagtccatataacacatgaaattgtgacatgtcatagtagctattctaggttgttctaaccacaatttttttttctttctttctttttgtaaaaatttgagctttcttcaacaaagaattttagttttggaaatcataaaatcgttcttatatataaagcgattaatgatatcaaggatcattgtaattaatatgataaatatttatttttaatggattttatattttggttgaattgaaatagtttgaagattgagatttgaagcatagaaggaag

SEQ ID NO: 35099 - DNA, 876 bp, Medicago truncatula
  Intron number 2 from transcript Medtr4g042800.1 (locus Med tr4g042800) derived from phytozome v7.0 (chr-ID MtChr4; po s 10299130 to 10300005 reverse strand)
ccagcgctccaagacacccgttagacttggggtaagttttttgttgttttatattttattttttataggcttaattactcttttggtcccttaacttatttttggtttcgttttggtaccttaactattaaaagtttcgttttggtcctttaacttactttttggtcccttaactcatcctctgtcaaccactttggtcctttatgttaggatgaatgtattagagttaagggaccaaaatgaaaccaaaaaataagttaagggaccaaaacgaaaccaaaaagtaagttaaaggaccaaaacgaaacttttaatagttaagggaccaaaatgaaaccaaaaaataagttatgggaccgaaacgaaacttttaatagttaaggaaccaaaacgaaaccaaaaaataagttaagggatcaaaagagtaattaagccttttttatatcatgttataggcattgatttttcaccatcatttaacatcgactaatattcgtcacaaaatctgtcagaacataaggtggattcctatcttctaactaaatttccaccatatgtaaaaagagttatgaattgaacatcatatcacttgctcaaaaaactcattttcatgcaaattgtatgcatatataattttctttatatcctaaccgaaccgttgttcccaactaattttcgtctataattttgcaattacttttttttgcatgattttgttatagctacaattttatttcgctatctaggtttaagaatgatttggcattaatgtatgaaactttgacggagattagtcacctctaaatagcaagcggtgaaaactttataccgataacaaaatatttatgcaggcaacagcaggtttaaggcttttga

SEQ ID NO: 35100 - DNA, 733 bp, Medicago truncatula
  Intron number 1 from transcript Medtr4g062410.1 (locus Med tr4g062410) derived from phytozome v7.0 (chr-ID MtChr4; po s 12095085 to 12095817 reverse strand)
ttgtaagtattgattataattttaaattttcagtctttgacaagcttttatatgattgcttctatttttggttgattaacttaatttaaatatggttatattatatgattgtttctatagaagatattttttagaaaatgaatttttatggatttagtactaattttggaatctacttgtcatttggagaatgaatatgaaaatgatgtataaaacttgtttaatttctgagtttgtgatgcatatgatttggatttggttacaagaatttaaatttttgaagaagcttactagactttattattagagaaggttaacatttgagcagatttttaacttgagcatgttctttacttttcaatatggtttaatctctagtaaggtttgagcatcaagtgtagaaagagttcattgcttcgaaaaaatatgggctggttactattgcattttgttaacttttttgctgattgtggttggaattgttgagagaattcaaagtcaaaaaatattcaaggatttaagtatttaagtgtttacactgacattactttgtacttcttagtaacttattgtttcttgaagagcatggcaatgcactggaagcctacctgttgccattatttgacccaaatatatctcccaaaaatgtggttataattgcaaaattttgaccggttatggtttttttgtgttcgcaggttctgtttgctgttttggtgggtgctgccttctg

SEQ ID NO: 35101 - DNA, 819 bp, Medicago truncatula
  Intron number 1 from transcript Medtr2g033490.1 (locus Med tr2g033490) derived from phytozome v7.0 (chr-ID MtChr2; po s 9136220 to 9137038)
ccttcatcatcatcagtggtttcagtgattaagaggtcctttaatgattagcagtgaaccgggccggatcttggggtgtgcaaagagctcaacgtagttggaccttccccaaggtatgggcctaaaataaaaattatagcctagtagtactactaagtactactactaccccactaaaaaataaattctttattctctttctctaaaataccatgtgtttcatcaccatcactccatcagattttccttttcttcttccctgttgtcttgttttaggcctattagaattgggtcatcttgcttttggtgtttaggtgggtgttttttttggagggtggtttgaggttcctcatgtatatgatatgatagtggttttcacctttgggtgtgtagtatatatacgacgacaccttgtatttatcttttaaaaaatttaaattgaacatttttctttaaaaaaaaatatgtttttattttattacacgcctcttttcacttaccgtgccgagcctcctgattcgtaagaaaggccctggtagtgaaatagaaattaaaacaacggttaattctttttacatctgctaatggaaatgtttgtacttcagtattagtgtttctcttcatatttaagtgtggaaactgtgctacatacatccttaaattttattctcccaccaagcggaaacgtttgccatttttctgctattttatccttaacttagatgcacaatcaaactaaacagaatagtgttgatcatttctaattttcaaacttttggctcaggtctttaaatacactcattgacaaggccttggtta

SEQ ID NO: 35102 - DNA, 693 bp, Medicago truncatula
  Intron number 2 from transcript Medtr4g098530.1 (locus Med tr4g098530) derived from phytozome v7.0 (chr-ID MtChr4; po s 21240731 to 21241423 reverse strand)
attttcctcctgattatcccttcaaacctcccaaggtatacaccaaagtacttttaaaacactgtgatacttgttttcttgatttcagatgcaacttgttaataagtgactctagataggcgaaaagtctcttcctttttgcgtataatagccgaataagatatgtttgtcttcaactttatatattgtatgatttgttatgtataacaggaatttggatttggtgcaataactgtcacacgggttttcaatctccaccatcaaatctcactataactgtcgaggttgttttgaactgaccgatctcagattaacaactgagatagaaaactgtgtgtaactgtgtcatttttttactgcagtagatcctgatccatataacaggttttatttttaagaaaaaagtgtgttgttgcgatttaggccggtctgtataacagggttttttttttaactaaaaggtctgttgaaaggatttaggtcttgacatcacaatttttgatgtctctgtaaccataacttgacggcggttgaggctgcatcagctgtatttggctgcagctttctgtaatatcaaggatcatgatgctacgtaaccaagatttaaaatcttggtattcattatcattgatggttagtataaaaaatgattttgcaggttgcattcagaaccaaggtattccatcccaacat

SEQ ID NO: 35103 - DNA, 1037 bp, Medicago truncatula
  Intron number 2 from transcript Medtr4g089950.1 (locus Med tr4g089950) derived from phytozome v7.0 (chr-ID MtChr4; po s 18875232 to 18876268 reverse strand)
aagaaacagcttctcaggtaaaaacccattttgcaccttgtttgtttatttataggttgaaagtaacaactaggactaaggaatgttaaattagtttatatatgcaaaagaatgttaccttttttgggtgcatatgagacctttttgttggtgggcataaagggagtgttttagtagtcttacccttaagccggccctggaatgtgttaaaacaacagctcggtttaagaaaataaagatacgaaaaatgcaaaaatggaacatgatgtttggtaacaaagttcggtcaattgtgcctatgtctacataaagaagagcggctgcgattcctttctgtgagtttagagtatacaacttgtactcaaagactacggtccagattataatgttaccccagttgctcttgtttcgctcgagcaacctattcacttatcattaactatgagttatgcccaacaggttgattgagttgagtgagtgaatgttgtttccaaggttttgaataaaggttcttaattgatattgcaactgcaatgtgaaagttttagagacctttgttactgcatttgcggccccatcaatgatatttgtctatgaaggactgaaacatgacattatacagatatcgacatgtagacacctataattttagacgatgaaagtgattgtatataaacacacatgtcaatgtcgtgtcagtgtcggacactcggacatgccttaaatttaaagtctcactgctacatgattgctcagagttttctgcaatttcaaagattgcaacaaaacgttgactgtgattgcaatttaaaatgttggatggttcaataatttgatgtgcttttgtgtgtataatagagtaaagttaattttgagatgcagtatcttcattcctataaggccagtttttggatgaattctttaaagggtcgtctgtttttatgaaattgggatattgagttgtgatattgtttctttgtgttaatttatttgttcctgtagttggagcctgtagatcctgatttctacaagatagg

SEQ ID NO: 35104 - DNA, 485 bp, Medicago truncatula
  Intron number 1 from transcript Medtr2g007310.1 (locus Med tr2g007310) derived from phytozome v7.0 (chr-ID MtChr2; po s 1063115 to 1063599)
gtggtgtggctgttgcatattcttgtccaatacgtcacagtttgatgttagaggccaaggtgtcacagttgcttttcgtccaactaatcaatagagaggggtagtaacatggtcaattagtcttaaccaaatcaatctttaaacttgtatgaacctaaaattggaagtatatgaaggacaaattggaacctgtgcttatgatattccaaaatcaatattatgttatgcaaactgaattttgaattagttatgcgaacaaatggtaagaactatactatgatataacagtgtatagcttaagacgacagctgactaaaacctatgtgtgatatgtgctactgttcgtttagaattttatttcggacaatgtatctcattaatattttgttgtggtttgtgtccttgtgcagtcttttgttgacattcatccatcttgttggtaattctttatgtttcctggttgtaggagctatcgtcggaaatat

SEQ ID NO: 35105 - DNA, 883 bp, Medicago truncatula
  Intron number 1 from transcript Medtr3g036760.1 (locus Med tr3g036760) derived from phytozome v7.0 (chr-ID MtChr3; po s 9796672 to 9797554)
actaccaaagttttcctcggcagttaactgtcgaggtttcccatgacagagtactacgtaactgacgtagatacccataacaaaactaaaaaatgaacggattaaaatgctcaatacctgtttttttacttcaaaagtgtgttgatacctcctatgcttgatgcttgaatgattttggatcaagatttgatgaaaaaaatattgaatttggagattgaatggaggtggtattgaagttgatgatgaaaatagtatgtagggggagcaggtgactgtttcatctgatgaaacatattcctcagcagttaactaccgaagattttctgggtagttaactgcagccggtttttgaaatcctctcggcagtttaactgtcgagggggaaaaaacttaaattacttgtgtgtctcagccttatgcaatgtgtcaacaacaattctcttaaaatgatcatatgaaatggtaaaactcattaaatgatcatatgacacatatgatcatatgaaatggtctcattttaccttttagaagttgaacttttcagattatgtcatttttattggaagcatatcattcattaaatgatcatatagacacggattgaatgtataaattcaattggtcatctcttaactccttacattagtttatttctcttattttcagatgtcattatgcacctaagcatttacattcagttcaatcaaataacaacaaattcaaggaatgtcttgttgaatcgcaagcaacttttgaggtacttcttcaaggatatctgggaagagattatgtttctattctattgacaacatttactcattggtcaaacctaatgcatctattactttcactttgcagtatatttttgccaaataaatcaaat

SEQ ID NO: 35106 - DNA, 686 bp, Medicago truncatula
  Intron number 2 from transcript Medtr3g036760.1 (locus Med tr3g036760) derived from phytozome v7.0 (chr-ID MtChr3; po s 9797621 to 9798306)
actgtttgtgatactccttttacattaatatttgttgatgtatggagtcctaacccattgtttacttcatgtgattttcccttaaaggccaaatttgatgcatgtatatctcaccttcacacacttaattgtcactatagtagaaagaaaatgttgtcccaaaaattattctaaacaatatacttgtacaaaatgtcatttctcttattttaaattagatctcgtctacgataaccatcacactcgtgtccatctgccaaatcaatctcaacaaccttaacatcaaaaacaatcttaaattccttgtttggacttttgtttcccagttcaatagcattctgaacaatatgtggttctatatacgcagccaaaccagaacttatgggtaatttttccaatttttgagacacacaaaaggaaaaaattgttgggtttttttgtgagaaagagaataggaaactttaacttgtaaccatactttggtgacttaataaaactattctccattgttaaaggtggaatacctttaaatccttgaacatgaagatctattgttgctactttttcactagtgatgtttgttgacatttctggggttcctatgctcatagtgtggctatagtttttgcttggtatcttatggtttgattcagaaaagtaaaatgggaaaaggtttgtagggttgg

SEQ ID NO: 35107 - DNA, 974 bp, Medicago truncatula
  Intron number 1 from transcript Medtr2g042140.1 (locus Med tr2g042140) derived from phytozome v7.0 (chr-ID MtChr2; po s 11766851 to 11767824)
tatcttcgtatcttcttatatattaaagttaacatgtaagtcttaattttaatctaaattatattgcataattttactgttttaactctaatgctcacacctaatcttctattttcatgaacaaccctaatgctcacacctaatctcctattttcatgaacaaaggaaatcgacatcgctttatttcccctatttcttcaaaacaaatcgccctattttttcaacaaaacaaatcgccctattggaataaaagggttttgaaagattatagcaacattttttttgttgttaatattacacttttcatccaaattagaactgaactctctttgttaaatatctacatcaaaatgcaccagaattttgcaatctatataaacaggtggaagaaacatttcaacaaacagttaaagggtatcatttacggtaaaggccaaatatttgataaaaggaaaattatttaaataaaacattttacatgttgatgttaagaataaactatttttaggtacataatataacattaacatataatttttacaaaagaatgaagtaacattttgtcaaaaaaaaaaaaaaaagatgaagtaacataccaataatgtaacactgacatataattttaacaaaagaatgaagtaacacacgattaataaaaattaatatttttaaggtgaataagtgtggtgttagaggttcgaattcctacatttgcatatattttggaccacatatttcattctctttgatatgcattgagatttatttttgtctactacatctacaccgcacgggtggaaagtctagttaatatggatttaaccatcaatgatgagttctcttgttatgtaagactttgtttgtccttaaaaaaaaaatgtaagactttgtttgtccttcaaaaaaaaaatgtaagacttgtttgtatttatgcttttatgtccacaagttttttttttttttttttaggaatt

SEQ ID NO: 35108 - DNA, 412 bp, Medicago truncatula
  Intron number 2 from transcript Medtr5g015520.1 (locus Med tr5g015520) derived from phytozome v7.0 (chr-ID MtChr5; po s 5191524 to 5191935)
ttcgaaacaaacattacttagctgtgagttactttccaaatccaaatctctatttcccaaatattactccatgcgtcccataataattgttgcattttccatgtttcacatcggttaataaaaaaattataaatcatttctaaacatgcttctcatattttctttctactacatgatcttttagaccatcaaattatgttatattagttataattgcaaaagagtggtacattttataaatcttcaataaattaatacataaaatgcactataatatgttaatggaattaatttgatctattaagacaagataattaacactaattttgtggaggcatatagaattgaaaaaatgagattgattgagtattggtttctgatccttttcagtctgcggcatttacaggagttc

SEQ ID NO: 35109 - DNA, 834 bp, Medicago truncatula
  Intron number 1 from transcript Medtr5g103650.1 (locus Med tr5g103650) derived from phytozome v7.0 (chr-ID MtChr5; po s 41515114 to 41515947 reverse strand)
gaacatcaaaactgcaaggcaggtccatagctgtggttgttttcctagttttttttttttttttggctccaacttggccctatttacaaaattaacaatttcgatattcttttatagattctacataaaatgtccacacggtcaaaccactagaaagacgcttctataaatttatataacaccgtcgatattgttttctcatcatcatatgttgaatgtgtatttagtagtacaaaacgaaccttatatgtaaatgactggtgttgaattttaattatttttaaattagtcagtacacaatgtatttttaaagggaaatgttaacgagtgcctccatttttaaattaggtttttcgtctataaaaaattatcgaattttgctttaatatgcttaatataatctcgtaaaaaattcgtattattagtgttttcttcgttctgcttttctgatttggattggcagctttgttcctggcttctatggatgttttgtctgtcttaatataacattgtgattcgtgacaaggttttttctttcgtggctgctatctttgtggtgtgtctgtctggctttggcttccgtgtgttgtttggctgttattttggatgttttagcttagctggtaatactgaatatatacaatttagtgctaggcctatttaatatccaattgccggttattatagaattactcggttgaaattttgttcttcaaccatggtgatctaagtttcatgcttttacacccaaaaaaatgcattcagtttttcttcaaataaaaaacaaaaaagggttccgtctagaactgagaatgacgacagtgaggaaaggag

SEQ ID NO: 35110 - DNA, 789 bp, Medicago truncatula
  Intron number 2 from transcript Medtr5g025080.1 (locus Med tr5g025080) derived from phytozome v7.0 (chr-ID MtChr5; po s 10023522 to 10024310 reverse strand)
gctccaatttcgcaccaccgtgagtattacctgatctttttgagttacactctaatgtttataactctttgtttgtgtggaaaaggaacatttttttaatttgggatgttagcaagcaaatgttgaaagcaaaatttataagtcacattagctaattttacttttgaagctagtaatattattttcttcttccatattgtttctctgagggtatgtttggttcaaccaatgggaggggagatattttaaaatcgtttgtgtttggttcatcggggagaggggagagattttattgaagggaaagtgtacacaagcttaattcttgcattatcttcttattgtctgatccagccataattctaagaatgtactattatgctttttgcatgtttggttttgcggtgggaaggattgattctacaaatttgattatggctgaaagtcagtaaaatataaagtgtgggttgaacaataattttatggctaagtatcaattgtagaggcaaaaactctaaattgtagctgcatgttagaatcaattctagaggcaaagtcaattctattcgagaacaatcaaacatgtcaagatcaattctacacatctagaatcaattttacttccccagaaagtggaaccaaacatactcaaatcttgaattgaatgaccagctaacaacaatgcaaaatgaattgtttgtttgctcgtatgcagtattcttcagtttttgacattgtattttatttttacttgcagcacaccaacaactctatcaacagctattccagcag

SEQ ID NO: 35111 - DNA, 455 bp, Medicago truncatula
  Intron number 1 from transcript Medtr5g025080.1 (locus Med tr5g025080) derived from phytozome v7.0 (chr-ID MtChr5; po s 10024518 to 10024972 reverse strand)
tgcacaccattgtttgttccattgctgctacaaaggttgtttttttcccttcatcttaagctcattcttcatgttttggatcctcatgtgttttttagtggaaatgcaaaagtttcttagttttgttaaccttgtacttgctagtttaatgttgtagcattttggtttctgggtctgtttctttctttgtccttcataattgttatgttttattttttgttcatgaaattcatgaattgttaaaaaaattgtatttttgttaatttgatgtatttttgtttgtttgtttctgttctgttctatttatgatatggttttgaatttatacctgacttgtgttttatgcggcaatttacaaactaacatttttatttaagtcaacatagctcaaattgtgtgtgtgtgtgtgtgttgtattgtttgaacttatgtttaggtttttggtgatgcagtgg

SEQ ID NO: 35112 - DNA, 359 bp, Medicago truncatula
  Intron number 3 from transcript Medtr1g107810.1 (locus Med tr1g107810) derived from phytozome v7.0 (chr-ID MtChr1; po s 22848437 to 22848795 reverse strand)
attttgtttgtgccactatttgggggttgaaacgggttcgattcctcctataggtagttagtggggggccttttgaggtattttgacgttgtgggtaagtatgagttttgcaaatgttctgataattgaagcatgttttgtaacaacatgtttctaatttttatgcattgtatgacttgagtggaagacaatatttgtggttacgtttggacgctcagattaataataataacgggattaataggttaagtatttgttgcgatttcaatgttattagatcacatgatgagcgtgtgaatggggtgacactgacagacccaaggcatgatgattttctcactttaaccagttcattgaca

SEQ ID NO: 35113 - DNA, 425 bp, Medicago truncatula
  Intron number 1 from transcript Medtr3g151060.1 (locus Med tr3g151060) derived from phytozome v7.0 (chr-ID MtChr3; po s 39920245 to 39920669)
ccagaggcagttaactaccgttgtgaataatttgatcattttcttatatcaataggaagtattgaatgtcaaaaaagcaattttcaacaataaacatgaagtcaatgttaatcatcttctaacgttgtgcaactatcttgctcatcaaatttctctagagctgtatgtggattttgctaaagtaattgaacatttaattccataactttttttctattttgaggaaatttcattcagcaattttcttaatgttatttctttctcaaagtttgttgttttacctaaaattagtcacaaagaaaaagatctctaaacaaaaaaaaatacaccaagcactcactaccacttctattattactactactactactactaaaaagtgaaaagtagcaacgaaacgggtttttattcttagcttcttctgt

SEQ ID NO: 35114 - DNA, 814 bp, Medicago truncatula
  Intron number 2 from transcript Medtr4g073790.1 (locus Med tr4g073790) derived from phytozome v7.0 (chr-ID MtChr4; po s 14716256 to 14717069 reverse strand)
ttgtaaaagaaatatatatcttgaaatatatcatgttgtaaataaatccaacatttattttaactgaactgttcatcttcaagatagaaaaaaaaaaacgtaatgatatggcttgatttctcttttctttgatgacattaaatcaatggtatttgattgcaacaaccaacaatataaaataagaaaagcataagtcgattggtcagtagacagaaatctgatgcttgcatataggggcggttttacctgccggcggtcctgggcatatgcccgggttcaaccgatacttttttctatcactacaagaaatttgatttataatgacggccaaaatctgttactaagaggcaaatttccgtagaaaaatccatcacactgcatgttttccacttttacctaaggacaaaaccgtaggtaatttctaaggagaccattttaaaaacattatggacctctacctacggttacgactgtcactaaaacttatcattgttatatttgattttttattattttctattctattataaattctaaaaataaataattcataaaattaccactaaaattagtttaatcaatataataaaatattataatcaatatcattggaattagaaattgattactataatcaattatagaataaattcttgaagtgacttaactagaataattttccctaactataaactattataccattcatccaaaccaatactcaatactcacagaaatcaaaatttatatatactccattgctctttaatttatggtaaccaaatttgaatcactaaatagcttattagacaaa

SEQ ID NO: 35115 - DNA, 619 bp, Medicago truncatula
  Intron number 1 from transcript Medtr4g073790.1 (locus Med tr4g073790) derived from phytozome v7.0 (chr-ID MtChr4; po s 14717099 to 14717717 reverse strand)
ggtaaatcaatttttttttctatcatctctcctgccttattctcttgttgttgttgctgtgagatttctttatcgcatcatctctttgtcaaaatcattgttagaaagcataatcaatcccaatttcacctaccatggaggaattaacaactgggttttagcaggattgtatttttttcttttaaaattatttaattttgaatagaaaagcataacatccaaaataacaattcaccatttttgcatttgaaaagccattgaaagaggggaatcatgatttcacctatgcccaacttgtttctcatctattgttcttttcctttactatttttgttgatagaaaaaagggttcagatgttgttttgatgttttgtctgaaagtggtaaagattgattcaattaatttgtattttgggttactaaaatacaacactctcactgtaaaaaaatcccaagagaaaaacgacatcaatgaagaagaaaacccagaaaaatgaagaaatgtgatattttctctctcctttaattatgtcatttttttctatttaatcaaaaaaatacattggattaatccaacggctcaggattgcgcaggaggggctgcagataatagaaggca

SEQ ID NO: 35116 - DNA, 379 bp, Medicago truncatula; identical to SEQ ID NO: 32072
  Intron number 2 from transcript Medtr4g069620.1 (locus Med tr4g069620) derived from phytozome v7.0 (chr-ID MtChr4; po s 13328300 to 13328678 reverse strand)

SEQ ID NO: 35117 - DNA, 640 bp, Medicago truncatula
  Intron number 1 from transcript Medtr5g039470.1 (locus Med tr5g039470) derived from phytozome v7.0 (chr-ID MtChr5; po s 16744959 to 16745598)
ggtaaccgttgcatttccgtcataggcaaggccaggtacctctttcttctccttcatctgattactaactctactcctatagcaattttattctttgactttctttccctccaatttggcgtaagaaccctaaaaccaaattcaatggtttgttctgtttcgatctatgcagaataattcatataagtgcttatgcgtaagctatttttataacaaaagattaaataaactcaactggtttcatacaagttataagctgttttcatcagttatcatggttaacttgtgaaaataagctgaaaacaacttaagaacatgttataagctctctcaaacagtctcatgttcacgttaatagtctcgtgtttacgttaatagatacgttcaaataagtcaatctaaacaggccatgaatgtaaggttaagtctcaaactactccagagctatgaagcacatacttagacacggacacggtcacagacacgttgacattgataataatgcgagaaaatgacataattcaatgtactcatgtatcggtgtcatgttggcatcagacacgatacatatctgacactggaacacgcctaatccgagaagtatatgtgcttcatagctctagagtgagtggcttgaaat

SEQ ID NO: 35118 - DNA, 804 bp, Medicago truncatula
  Intron number 1 from transcript Medtr3g086980.1 (locus Med tr3g086980) derived from phytozome v7.0 (chr-ID MtChr3; po s 20555092 to 20555895)
attggaccacccctatctgtttactcccttctttggtccccaatattatctttatagtagtttggtttaaaaaaaagttgtgaataaaaaaacatatctatttttattgattcatctatttattcaaatttttactacactatattttttgtctctttaattactattttttttttcaattttgatctcttaatttataaatcatttgctggctagctgcaacactaggaaagatatagcattttacttcaatagcgtttataatgtgcaaactcgaatgaaaaactacatataggaggacataacacacattatcatgtaggaaatgctactctctcaataccttggcctatgtgtgtcgtgagaaacaaaacaagatagccaagtctaatacaatatgtactattgttcaaaataaacccacttggttgttctgatgatattggtttgagatgtgagagtgtgctcctcctcaccttctcaagttcgatactctccagtgccaattttagtgggctaatttagcttctaaaaaaaaaaaataaacatgagaaaaaaaaggctagttttaagttttaacaataaattcttaacatttttttttccttcttttcttgacctggtgagtctccaaggtccaactcgtcttaactatgattaataaataaataatttaattcaaatataatttaaaaaaggtaatatttcttgtaaaaatatacttatataacatagaaattgttccattaattgaataagtttggtttagaaaaagggtgggtagagaagagtcattatcaagag

SEQ ID NO: 35119 - DNA, 480 bp, Medicago truncatula
  Intron number 1 from transcript Medtr5g039490.1 (locus Med tr5g039490) derived from phytozome v7.0 (chr-ID MtChr5; po s 16768216 to 16768695)
tccacttccccaaccaacctttttcatccttcaaggttttccatttccccttatttctctttttagtatttcaatttattcattctgatctatttccttttctttttcacttttcatttctgggttttcttagttaccatgttctaagctgattttctgtgtaaagttttgatttttagcttttattttcgaatttttcatctggggttgtgattttgaggttgtaggaagatatggcattgaagggttgtgttgtagtaatgtttggaattctgggtagttttgaattttcatgatatttaagttttgatttttagcttttatgttggaacttttcatctgggttgtgattttgaggtagtgcgagggtatgtcattgaagggttgttgtaatgttttgaattttgatgatattaatgtgtttttttccttttttaatttatagacgtacgcagaaactcacacacggacgctgaaact

SEQ ID NO: 35120 - DNA, 843 bp, Medicago truncatula
  Intron number 2 from transcript Medtr5g039490.1 (locus Med tr5g039490) derived from phytozome v7.0 (chr-ID MtChr5; po s 16769022 to 16769864)
ctcagtcagtggcagtggcacaagtacacattgtaattactgtttcctcggaaatgtgttattgttgattgattgttcttgtgatgtgtttggactttggagattctatgtttgcaaaatgtgtttgtgatatgactttgtttatctataaatagtactcaggttggtatgctttttccgttgctttagcgtttggtttgcttttgaaatttctttgagcacttttttctgcaatctacttgaaagtcaccatgctaattaatgtaaaatgatgctcaaatgatatttcaaaaacaagggtttttgattgtgtgtgatgtggtcgccgtaccagaccatacttacctaacggccgaactctagattaccaggcccccttcccctaagaaccggagggttaacaaaaaaaaagttgaaatacttgagtttctcataatcctgcttattccgaaagcagaattgaagagggtttctgtgttaatccttgagaatattctgaatatgtaggctttgttgtgaaatatgtttctttaatatgtaggctgcctttcaagttaacagaatgacacggtgcattttggattggttaagaaatacataattgtcaaataaaagtagatattagaaaagaaattaatcccaggttattatttgcaaataacttaatttcaagcataagctaaaagggtgaaataattgagttatgaaattactcttgtggtggtgtctattttcacatatattctttgcctataccgcaagatgttattttaaattttattgcttgttctaatactttttgcgtatcctttggcttcttattagctgaaagtaaatcaacta

SEQ ID NO: 35121 - DNA, 665 bp, Medicago truncatula
  Intron number 1 from transcript Medtr1g106540.1 (locus Med tr1g106540) derived from phytozome v7.0 (chr-ID MtChr1; po s 22264869 to 22265533)
gctcatccaccattgtccccttatctttccagtaagccattacactcttttgcaataaaaagaaaattatgggtctgtttactttctataaatattttcaattttcattctcaaaaatactaatttgttttagggttaaatacggatctgccgtgtcagcttccgttaatgggagttaattagttgggattaattttgaaggcggaaaagtttatagggatcatcattcaatgaaattttttagagggactaaaaatgaaaattgatgtatttagaaggatcaaaaagatatttaaccgtttattttaaattgctaacaataagatgatggactccgttgtgagttgtgacatagaaaagatggaagcctttgtaggaagactgcatttttggaaataatggaaacttttgaaaatggttagcattttcttttacaattttttatttggtaaaagaaaatgctgggaaaaatactgaatcttgttttttgtaatctttttttaagtttaagtgaaaatgaaaaatcaaagaatgctagtaaagggattttttttttcccgatttctaatgctgctttccattaattagaatatgttgttgtaaatttgttttgctatatgacttagtatgatttttttattcgaccagattgttgtcaaaaagac

SEQ ID NO: 35122 - DNA, 1066 bp, Medicago truncatula
  Intron number 1 from transcript Medtr4g155480.1 (locus Med tr4g155480) derived from phytozome v7.0 (chr-ID MtChr4; po s 38379902 to 38380967 reverse strand)
cagctattggtggtgacaccaccaccaagaagaaggtataattttcttaattcacttataattcctttgctgttgatacattgttgtttttgttgttgattggtagttaggaattagaaattatttacaatcatattacactctttgtttattatttgtggttttgtttaactcttatgcttactgaaatatgtgctttgttttgatgttataatggtttattcttgtattgagctgaagaattttgtgtttaactaaatggtttctgttcaattttgttggtttaactgacaagtaacgttgttaaccattgaatagagtgatttgtgctaatgtttgtgttgaattttatgtgggtgacattgaaataaatattttctttctgtttgattttccttggttaactctgatcattggcttgattagtaaaaggaaaatgataacaagtgccctaagggcattgtttaagcatctaaatgtagaaagtttttgacatgtattttcaagacataatgtctttttgtgggttccttaaacaatgaccttggcgcacttgttagtaaaatagcaaataccttcctttacattcatgtcattttgtgagattaatccatttgaattactttcattagttaatcaaatagcaaaaaccatctcatttttgaaatcaacttcaagttaatgttctagcatatgatcttatacatcaaataattgtgtaggatcaaacgcctttcttgcattatgtcattttctgaggttaatcccagatttttttaggtctgtctccatgattatatttatcattcatggtttcaatttaatgtttccaagtcatccatttacttgctaggccaccatcctgttattcatataaacatatttttgattaatccaattcatttccaaagtgtgctatactgtgttgcaaaactttcttattggtttgaattaatttttgcaccttacaaattacaaatgtaactgtttgcaactcatccatttatttggtgtattttatggtatttcaggttatctactgtactagtttgaactggagtgcaga

SEQ ID NO: 35123 - DNA, 977 bp, Medicago truncatula
  Intron number 1 from transcript Medtr5g067850.1 (locus Med tr5g067850) derived from phytozome v7.0 (chr-ID MtChr5; po s 24179396 to 24180372 reverse strand)
gttgtgtgttctttatattaccaatgctatatttaagttaccatatgagtagttggtgtactgataaactattttagaagctgatagaaagtgattatggaggattagggcaagggcagaagtggataaattgtaattaggctgctgattgggatacaagataggaataagctgtttttggaagaagtttggtgaaacccgtatttgggatagggcttctctatttacactctattgggtttaccaaaatatccctaataagggtaaaattgtaaaaaaaaacagacattgatttttctaaatagtatagtagattagaaagagtgtatggttttgcctgtcaaccatttcttttattaactcatggttgttaattgaaccaataattatgttttatgcatatttttggtattcactttcctagtttgaaatggaacaatacctttttacaaattaagcttattctgtagaagatgggcacagaaaaataaattaaatttctatctaacaccgcgacttaacgccgcaatctacctttgcttgatgtgctattctatctgataacaagtctgacataatattcacaaagagagaaagaatatgactgctgatataatttggtttgaaattttaacgatttgagaagaaatgtaactgatgtattcattccaccattgatgccgtgatttgatgcagtactctacctttaacttgatgtgcaggctctccttttttatttgatgaaatcattgtaacttggtctgttatatgcttcaactctttttcaatcttttttacttgattcttcagcaatattaattgattcaaatgtactgttcgatatagattctctattagactggtattgttctcttggtatgttttttttccttcttttaaattgaacttggtagtgctcaaatcttcattttttactcttttacattcacatattttgcaggctggtctttttgtat

SEQ ID NO: 35124 - DNA, 966 bp, Medicago truncatula
  Intron number 1 from transcript Medtr2g009420.1 (locus Med tr2g009420) derived from phytozome v7.0 (chr-ID MtChr2; po s 2071470 to 2072435 reverse strand)
cgcacttcctcactctctctctttccattccatctgtaagtcttttcataactcattcatcttttttttttcgctttctcaatttttcaaattgcaaggtaatagaagatgatttcatgttattatttttattcttttatcttttttattgtttggtttccatggaatttcacaattctagattaatttaatattaattacaaaatattaggaatttcaggaactaaattaagaaactgagcaataatcttactgggtttatgtcctgtttggataaactgcttaatctgcagcttatagcttgataagtgcttatatataagctattttgatagcaaaagttaaattatttcgtaaaagctataagctgttttcggaagctatcttggagaacttgtgaaaataagctgaaaataacttatgtacatgtcataagttttctcaaacagtctacaagtgcttatgataaactcaaatatgccaatccaaacaggccctatgtgagctttctctttagatatcttacagtggcccttgttaagccaaaatgagcttctcttcaatttgaataagaaaattagaaaaaaggtgaggcttcttctgcaggtttttttggaagaaaaaaaaaatgaatggttgtgttggatgctgcaatgagtttttgtattgtcaccaaggttttaaaatttggtctgcagctgcgatgttttttgtttccgcgaccacaattgtggctgcagttgtatttgactgcaattttacgcaattgcggatttaaagccttgtttgttacattagttattagtattttcttattcaaaatgttttactttaattttgagggattttggtttctattagcattacactttctttatcattattatctgcagaaatgaattttcatttggattatttaatcttgtttcagaaaaacttgtggagggcataacataagtgattctg

SEQ ID NO: 35125 - DNA, 581 bp, Medicago truncatula
  Intron number 2 from transcript Medtr3g083900.1 (locus Med tr3g083900) derived from phytozome v7.0 (chr-ID MtChr3; po s 19865171 to 19865751)
gaatactcccaaatcaataagggaattggtctgtcaattcagtaacaaataaatatttatttataaccgtacgtaccttgtgaaaaaaaaaaaattatttttttgtggaattaattatttcatctcttttttttttaagaacttaaattaagttcaaagaataaaatataatatatcatgattgccgaagtctatctatcgcatataggcttaaagacatcgtggcataaccgtcgaggtgacgtcttgacctaaaagatcaaatggtatgatacatagacaaagaaatctcttatgaattcgaggatattccttttttttattaaaaagtatattttaaaggattcttcgttcgaagggaggtagactactcaagaattttacattgaatttctgtcgtaatttcgaattgcataaagaattcagaaacaaagaagaatgtatcaatgaaatgttgcttcgtctgtattgataacttgagtaaagagtaaaccttttttattttagatttagaggttttcaaaaatttgaaaacggaaaccactttctttatctttattgtgtgtaaatactttagccgg

SEQ ID NO: 35126 - DNA, 907 bp, Medicago truncatula
  Intron number 3 from transcript Medtr4g115150.1 (locus Med tr4g115150) derived from phytozome v7.0 (chr-ID MtChr4; po s 26576923 to 26577829)
gaatttgcggtgagattaatgtgtttttgtcaattgcatgtatagttagactttagtgcttcaaacagggttttacatagataatggttgccatcacatcgcaatccctggtattgtggacaagtagggtcaaatgtggcctcaatcacagttttgacaacttaagatactatcatatcgcagaacagattgcggctgcggacctttatttaaaaacctgactttagccacgaatgtaaaactagggacagaggggaaagtaagttgcaggaagaagaaaaaattggtattggataggatagatatgcataggcgagatcctatacatatagattttgaagtacatgtatgaacactgaatatgcttatattggttactttttgacattaattttggtgtagaaagtgaacatttttggatccggtgtactttattttttgcaaacgcaaattaaggatctggtgcaatggatgtgaacttacattgttactttgttattttctctggcaatattagagtcttctataatgtagatgcctagatatatggcatagagattgtttctacattgcaaaagttatttctatattgtattatttcaatccgagattgttttagcagtatgtatagaattttcatatattttgagtcatgttgcagtgcaacaagacgagtatggcaagcaccttatgttgttatccatcccttacactgttcatctgcttaacagctcttaaagcgttattatttcactatgatctaaaagtattgtgagcgtcgtagttaaaaaccatcgatacccaattaactgctagcctgtagtttgtgcagtttctagacttttttgtttcattagctatgaagttatttacttcactttcctgctgatatgtctagattgctgtg

SEQ ID NO: 35127 - DNA, 865 bp, Medicago truncatula
  Intron number 1 from transcript Medtr1g076650.1 (locus Med tr1g076650) derived from phytozome v7.0 (chr-ID MtChr1; po s 15338341 to 15339205 reverse strand)
ggaaacttatattcccaggtaatataagcaattatgtgtaaaagtactggcttgccccactacttacacacgattacaattaattatttccctatcgtcttgttttttcccaagtaatatttccagtaaatataattgttgtccccttctctatcatgttgttttttcctctaaaatctatcatataattttttttcttacaatattggcaatacctgcattctagattgctacaacttattgtcattgtttcttataataaaataatgattggatttcatagattatatattgtataataatttcacacatgcagtataacaaaagctctatttctgcattattccaatctttagcctatttcacgattcataaaatcacaaataataatgataatgatatactcatggattatcttactggaccgaatgaaacaaaatcaagttacatcatatgggtattttgggaattgtaaatttttaaaataaaagattcctgggaactaaaaatactatccaaacactttttgtttaaaaatattccttcgaaagttatgcccggaaaagtcattcctaggattaaattttgataccatgaaacaaacgcctccttattataaaaagtggtcaattctacaaaagtcccaagtatcttccaagtactttgagagtattgatatggggaagacatctttcgaagcctctatcatctagttttttgaacaaggcaagtgaaataagttcattttccaattgtgtatatttttgaattcaccattagattatagtgttctatttttatttttttgtttcttctttgtgtttatgcagaagttcgagaatacgaaagtcttgacattgaactt

SEQ ID NO: 35128 - DNA, 449 bp, Medicago truncatula
  Intron number 1 from transcript Medtr4g118110.1 (locus Med tr4g118110) derived from phytozome v7.0 (chr-ID MtChr4; po s 27332036 to 27332484)
aaatcccaactgttcacaccagatcttcgattcatgtaactcttcttcattctacttcttatttttttgtttttttagttcaggttttggttgattatagtttgatttgaatgtatttgatttagttttattgtttgtaatgttttgggaattttttttttcatgtatttgtagaccctttttgtgtttttttttttttttttgtcgtgtgggttattgattaatatgtatgaaatgattttaggttatagattttaatgtagtttttattattttatttagtttatatgatttgaacaaatagcttaaatttgtccattcttgattgttagacatgtatttgtatctatagaagaatttaatcactttttttggtagtatattttaatttatttgtccattcttgtagttgagtaaaatactatctactagcagcaccattttcgaca

SEQ ID NO: 35129 - DNA, 508 bp, Medicago truncatula
  Intron number 2 from transcript Medtr2g121920.1 (locus Med tr2g121920) derived from phytozome v7.0 (chr-ID MtChr2; po s 29037947 to 29038454 reverse strand)
gagcaacattcagtacttccaacactgtttcagaggtagtttttcccttcattttatagtattaactgtttggtttgtatttcaaaatcgaactggcttgtttgataaaaatactggatttatattggtgaattggttttggactggttttgagctagtgtatgtatagaaccagtctcaaatttggttttggtttaagtcaatatatgatgaatcttcgattcaaaacttgttttgattttggtttgatttggtttggttaaactggtttatatatacagatcatgctatttgaaaataagaaaaataatctaaggagttgaggtaactttcagggatagccaaccgaattctactattcagaccttctcctatatgatatttgagctaaagatacttttgtggaaaaataaaaatgcgtagctttttcttcatattaagatgcactttttttcaagcaatgaaactaaattaggactattgattttcctatataacaggaagaaac

SEQ ID NO: 35130 - DNA, 671 bp, Medicago truncatula
  Intron number 1 from transcript Medtr3g012910.1 (locus Med tr3g012910) derived from phytozome v7.0 (chr-ID MtChr3; po s 2287546 to 2288216 reverse strand)
ccatactaccccctcctgatcacaccaaagagatagtaagtttcatttgtataactctttaactttgaggatataatgctgtaaagtactccctccatttcataatagttgtccattttagaaaataattttgtttcacaatatttgtcattttcaagtttcaatgcaacattaattattgttttgtcaataatacccttgcatatttattgtagagagagaaaaaaataaaatgaaataataaatgattaagggtattatagaaaacacacatatattttcatcaaaaataacaaaatttatttggtttcttggtcagtgcaatttctccaaaatggacatgtattttgaaacggagggagtaataaactgtgtgtattaccttgttttatacctttatgcttcatctaaatcaaatattgttgctgttgttgtgtttggttctaagtttgtaaaatatgattttgaatctgaacacaaactaagagtgagttgagtcgaaagtgatttatatttgcttcatagtgatttttgagcataaaaacaatgtttgatggcagaaaactttgagtcacggcaacaagttagaatctattcttagaatcttttgaagattgattgatcatatagtggtataactgatgagctattaacgctgcagcgaattccaa

SEQ ID NO: 35131 - DNA, 429 bp, Medicago truncatula
  Intron number 1 from transcript Medtr4g012280.2 (locus Med tr4g012280) derived from phytozome v7.0 (chr-ID MtChr4; po s 2063297 to 2063725)
tgtgtaataaattttatatatattttttattaattgacagcatagaatagataaataaatagttatctaagttctctagatatacacctggtcttcaatgaaaaaataaaaggcacaagattgaatgctctattcttgggttgtatccataaatgactagaatattggtgagatttcaaaattgttgagagggccagtgaagtattttatttaagctaaattcattcaatcatctttatactttgaatttggctctgtttttgttaatccggtttttgaaaagtttttgatgcattaggatttttactataataatatacatagctcagtgaaatatgatttttgacaattatgggttttcttaacaaatgagtatttgtcaatttagcggtctggtggtaattagcaatgtttaagctgacaggtatt

SEQ ID NO: 35132 - DNA, 1049 bp, Medicago truncatula
  Intron number 2 from transcript Medtr3g122810.1 (locus Med tr3g122810) derived from phytozome v7.0 (chr-ID MtChr3; po s 30642842 to 30643890)
cagcagcagccgaacctgccgccgtggaaaagaaggtatcaattttaattctttcttttttgattctgatttttgtatgaaattgtgtaaagatgatttactgaatggtgaaatgaaccaataggattgaaattagatacggttttgatagtattgcaatattccttactataaaaactaataggatttatctgtattgtagtgttaaatgaattcctctagttctgaaaaagaggttgtataatagtatttgaatattccttagtataaaaacttgaattgatttgattgacattgtttgttctgttgaatttctttatctatgcttctgtcttgtaaagcatattgaaggttttttgattgtctatagtgttgtgatcaagttggtgttatacctattttgtaaaacttgtatctgggtttaaaagatataatttttctagctattttattcctcattttgctttgaggtgaatctgtatcagataaatactgtcatttagctgcaattactctaagaaaatatgttgcatcaatacttttgttataagttgcacgaaaacatggagttaatttgatttctgaagtagtacaacgttttttctcatcgttgggatttgacaatcggtctatccttttcgaggcaactctgaatataattatttgactctttggatttgcaactttgtacagcttatttttgtagcgcttttcttgataagccctcaagataagataaaataaatttaacttgttagcctgtgcaaattgtcttaagttgatttcatgaattctcccaaacagtctcacaaaacttatgcaaacttaagtaggccaattataacaggccctgtatcctcattttttacatttaggtcttttcgattgtttaatgttgtattatagctttgttatagtaacttgtaaattatgagctcttcgtagacatgccttattacttcaatttgttttgattataatgttgtatatattgaacttaatgcatttcatactgtgtttgtaggaggaagccaaggaagaaagtgacg

SEQ ID NO: 35133 - DNA, 482 bp, Medicago truncatula
  Intron number 1 from transcript Medtr2g008520.1 (locus Med tr2g008520) derived from phytozome v7.0 (chr-ID MtChr2; po s 1623448 to 1623929)
aaagtaagtggttattttaattgtttcataaatgtttctatctgttaaattggtgaaaattcacctattttgatatgctaggttgtcctttagctttttagtgttgctctgatcatatgttatgtttgtttggttccacaatgggaacttcagaacatgagtttgcaacggtcaaacgtggttttgagcttaagaaactatttgcagctttcacattttatcactttgcaacttttggtaattatacacacaaaatcaattttgaatgatctaaactatccaaacaaaatgaattcgcaaaaatcacttttgcgcatccaaacacaaaccacttttcatttaactcacttttaactaaaatcaaggatgtttgacagcctatactgtatagaagacttcataatagaagaattcacctcctcccactcatgttaatattaacgatgtttgcaactaaagattgtttctttttagaacaggtg

SEQ ID NO: 35134 - DNA, 949 bp, Medicago truncatula
  Intron number 1 from transcript Medtr6g073810.1 (locus Med tr6g073810) derived from phytozome v7.0 (chr-ID MtChr6; po s 14243504 to 14244452 reverse strand)
tgatagtatgttctcaggaatttaatccttgtatataagttgtaactattgttcataggtaatgaaaagtgaggttaatttcatctttgagtcgttgatatagtttactaattgttggagcttgtttactaacttaattccttggtagttcatgctatgtctatagcaaaggaattatgcattgctctcctttattttgattatgtacctactattttatatagtatctttaaatgttcgaaagccttaaattttaattttgtatgcttttaaagagcgtttgatgttaggcatttagcaaacgtttgataaatgggcttgtagaataatgaatcaagttgcattagttggataaaaaccaactttcgtatgttttcaatgaaatcatgtagatttttataatggttttatgagctctttccttccatgttccataattgaaacattttgtcttaatatttgttagtaaaataatgttttgtattgttaatttctcactagaatcactatgaagtcaattattgtttttataaaggaaacgaaataatcactatgtgaatttaaataattcaatcattcaatctgtctttattgttgtgaagtttcctctgttttagaggcataatattgtattcttatgagtactacgaatgatgtgaccggtgcttgtatgttgatatattttgttgtgtttttgattgtggagttggccttattttattaaaacaatatgatctcacaaaatgttgaccagatgtcctagacatataatacaacatcttacataaggtgatgtaccgtatttagaattcatggagtgatgcattttcgcgtgtgatctaagaagatttgattgaagaattgaattatgttacttgtgctccaagaagcgtgtggttctagaaattatgcaggttttgatagggaggcaaatctttttggtcacgat

SEQ ID NO: 35135 - DNA, 364 bp, Medicago truncatula
  Intron number 1 from transcript Medtr1g106390.1 (locus Med tr1g106390) derived from phytozome v7.0 (chr-ID MtChr1; po s 22183533 to 22183896 reverse strand)
tttcaacaataacatcgtttctagggttctaccctttgacttaaggtacctccttgaccctcctttttttcttcatcttcttttcaatttttatttgttatcttgattatgttcttaatttttgaaagcattgtttttgagctatttgtttaagcttttcattattaaaaattgaatctttggcatgattgtgaaatgggttttgtttttgagtaattggttcaagcttttcattattaaaaatcatatctttagcatgattattagatgggttttgttttaattgttgattgaaattgatttaattagatgggtcgtgctattcaaagagaaaaggaaaaagaggttgaatttgacattgaaa

SEQ ID NO: 35136 - DNA, 877 bp, Medicago truncatula
  Intron number 1 from transcript Medtr5g100200.1 (locus Med tr5g100200) derived from phytozome v7.0 (chr-ID MtChr5; po s 40099596 to 40100472)
gagttgcaatctagaggtaaagagatggactttggatcatgagattcgaagtttgagtctctgttggtaaccttggagaaagattaacgtaaattctcttgttattgttttttgaactctaaagttttcattgctttagaccgaggtatcatcccctcaccttaaattttttacataaaaaaaagtaattaatcacagttccttcatatataactctaatgatatgtatattatatgaatacatgtctttcattgattagtttgatcataatatgtgtcttttattagttagtttgatatgaaaattctcaaagatatttttgtaattttagaatattttagaactataataatctcatctcatgtcctacatttaaagatgattgattcaccttttgataaagtaaaaataaagtttgagagttacgccacaatatttcatgatttcatctccccccctataaatgcttttccgagtcaccttttattgattcatgatcacactcgtttttggccatatctaatatttcaaacaaaaacccaaaataggagttgttcaacactttggtgactgaacctacagataaagattaagtaggaaaacaacaaaggactacgtcaagtagagtagagtactgatgggaaccaaggatgtgttgcagtgaaataactaagaaagtatatatatagtacatatcactaagaaagtaaaagcaaaatatcattgcttaacaaagtgaagctaatgtattatgtatacattaatctcatatatcttcttgttctgcaacacaacatagcaatacaaaggaactatttgcgctccttcatattgtccatttaaaagcaaagcacatagctttagacaaaccccttg

SEQ ID NO: 35137 - DNA, 832 bp, Medicago truncatula
  Intron number 1 from transcript Medtr7g012150.1 (locus Med tr7g012150) derived from phytozome v7.0 (chr-ID MtChr7; po s 3074626 to 3075457)
aggttgtaagttaacttaaaaagcataggtagagtagattagattcatgaaaaggagacatgatgtaaattatcttcaaaattattttttcattcttttagtcaacaaaaaaaaaaaaaaagacatggtggtaaaaaaagcttataaaaaaatcttagtttccccttgtttcatgttcttttgttgaacaaatttttaattttggcacaaatgctttatgataaacgcttattcagtaagtgtttaccaacttgtttacctgaatgtactcaaaattgagcgtagatacattttaattttttctttttatagtcaagctcaaattaaaagagccttatctatttctgatgattctcacatagttgttaaaacttcatattatcgttttctttcgcctttgtgtttagaactgagttaataaccttatcatatgtaactatgtcttaactagtaacaaagactaattatcatggtgcacgatttttatcatctctataacctgatcatattgaacaaaagtgattgaaaacaaactaagtggggctgactttctggtctgctaaaccttggaaaatttaagcaaacatctttaattgattaggattagatccatttttataggacagaacttgttatgataagaaaagcacgcagaattttaaaaggacagagatacctaatatactgttgctatagcatgaacactatgaaaaggtacatgttaaattgtttctgcagcatattttttcaattttctagtacctttttgtattcattgaccccatgatcttgatataatttcactctttcatgattggaatcgttgcaggtt

SEQ ID NO: 35138 - DNA, 777 bp, Medicago truncatula
  Intron number 4 from transcript Medtr3g034270.1 (locus Med tr3g034270) derived from phytozome v7.0 (chr-ID MtChr3; po s 9415953 to 9416729 reverse strand)
gaacttttcactggcatcgattacttcacgttctggtatatcttcattcgtttgcattgaacattcaaatgctgtttattgcactggcaagcatgtttaagtttaactacatcacgtacacatcattttcacaatatgctattcgaaatttgaagagaatagtttctaattcatgatttgatctaagatttacttggaatctatgtagcaccgacacttcagattgaaggtttgtccggtgtctgatagcgacacggcaccaataaatgtggttacattcaattattctattttcttaaattattaccagtatcgacgtgtcagtgtcctgtgtccgtgtctatattcgtgtttcgtaggttgcaacaaggtgtcaaaattcaatgggagtgtgtcctttttgcttttattatggtgttgtatttggttagaccagaaatccctggcttgaccttcaaagcatcttttcttagattatgctatgtaattgtaatctgtttatagcttctatctttaactctttatgtgtgcctgtgaaaggccatatagtgtgaataatattttttttttttgggtattatgcggagatattgtactaattgtcatattttcctccttagtgactaactttatggacatttacattttatctttaaggttgactttcattttctatcaagaattgggtttgtgctttataaatattcattgcttaactacaaatgatgttttgatacatcagttcaagtgcaagcaacagagtacctagagaggaaa

SEQ ID NO: 35139 - DNA, 964 bp, Medicago truncatula
  Intron number 1 from transcript Medtr6g069680.1 (locus Med tr6g069680) derived from phytozome v7.0 (chr-ID MtChr6; po s 12927393 to 12928356 reverse strand)
attgttgtgttgttgtatccttcaattgctttgtggtacaattctttaccaatgcttttcaataatttttttcatttatgtttgttattggtgctttactctagcttgattgtttttactttgattcgatcgaaagtgtcacaaaattcacatggatgatttcatatacatatcaatatttgtatactagggacataaaatatatgcttacactttgatagtattttaatatcatgctgagaaattaattttttttttgggtagattcatggtgagaagttatacatctggtgtaaatgctagagttgtaattttatttcatttatttttctcctttgaaagatttgtttatgaatttttctcaaaaaaaaattgggcaaattttaactatagtgtatatcattaatgcaggccttctttataaacttgcaagaggagtttagattctaatcagcttctgaatccaaaatatatgtaagtgtaatgtctcttaattttttttttttgttaacaattcgattttgagaagaaagagtctgataatctatagttcgtcagaatttgtcataaagaagttcattaaccccgagatcaatcatttgatcttctatacatatatatatatatatacacggatgttttgagttattattaaattttaggttaaaattgactttttgtcgccattattttatgctattgcgatttaattttctctgtttttttttaaatatgtaattttttttttgtgtggagaaatatgtgctgttttcactattttaaatttacttgtaaaaaaataaaaccagtgaaaataattagagaaaaaaatatttctctaattctgtagcagttaagtactggcaaattttatatctctctcaattttattaaatatttggataatagcctccaaatttgatgtaattttgacagaaggttttttatttcatatacagaagaa

SEQ ID NO: 35140 - DNA, 625 bp, Medicago truncatula
  Intron number 1 from transcript Medtr3g150510.1 (locus Med tr3g150510) derived from phytozome v7.0 (chr-ID MtChr3; po s 39673875 to 39674499)
atctttctgtcaagatctgtgtttttttagagacggtgatagtgtggtgacttgtggccggtgttattagagagagaactcagatgataggtatgaagaggagaaaagttgcagagaagatgaaagagaaagagaaagagagaaattgagaaaagagtaaagaattgtgattttgaattgagagaagagggaagaattgttgatgaagagggaagaaacaaagaatcctggttgaacaaatgtataacgtattcttgttggttttctcaatatcatagaggattagacacgacacaattcagaccaaagttatgtttttcttaagaaacaaaagttgttcatttttttttgaaaggagaagttgttcattgtacaggatgaagataagcttaatgctgctaatattgattgatgcatatatctaagcagtgaaccaaaaatcttttctattgagtgaaaaaatttgattggaattaataactgataaaacaatcttgacgtggagaaaagattttgattttaatgagtttgactagaattaaggttttatggatttaattgaatggtttaatttgagttttttttttaattttattattttttctggatttttatgatgaaggtg

SEQ ID NO: 35141 - DNA, 343 bp, Medicago truncatula
  Intron number 1 from transcript Medtr3g016220.1 (locus Med tr3g016220) derived from phytozome v7.0 (chr-ID MtChr3; po s 3084902 to 3085244 reverse strand)
atatttcttatcaagaggtaccatttctacttaataaagttagtttatgcatatttaatagatgttattttgacttttcttctataaagcacggacacaaacacaaacacggacatgacactgacacattgacactaataatattttgagaaaagaaattaactgaatgtaatctcatgtgatggtatcatgtcaatctcgggaacgctttctatctgaagtgtcgatgctacaagcttttccttcgttgatgtcttgttctaactaacttgcagcagaactgatattttatattataggctataagtaaacatcattctacttcttgataggtcttctcatt

SEQ ID NO: 35142 - DNA, 518 bp, Medicago truncatula; identical to SEQ ID NO: 34465
  Intron number 1 from transcript Medtr1g016460.1 (locus Med tr1g016460) derived from phytozome v7.0 (chr-ID MtChr1; po s 3177105 to 3177622 reverse strand)

SEQ ID NO: 35143 - DNA, 933 bp, Medicago truncatula
  Intron number 1 from transcript AC233673_4.1 (locus AC2336 73_4) derived from phytozome v7.0 (chr-ID AC233673; pos 56 56 to 6588)
ccttcttttaagattttatgtaagcttttgacaaccttttctgctaattattttttttaatactcttgggtttcctacattacgttgtgattaacatacattggtttgttttcagttattgctagtagtttgctgcaacaaaataggaaaattatagctattatagctattttttatttattagggaacattctgcaacatgaatgaatttgtatggaatatgaactttgcttttttcatcaattacttcgttggaaagtgcacattatgtgaccaaatggtatatcttttatccgtgcttttaatttgaaagaaatcgtagatagtgtttggttcatattttattttttattatccttgcttcataacttcccaattaaatctaacaaacaactatcattttgattccaatacttaaaaaagagtatataactttcggggcaaagttcctttcttaactttgtaacattgctttaatatttactaaatatatgtttgttctaagttaaccttcaaagctattttagagatatggagtttgtagtcatacactcttgtgtatggcttttaatacaataatacttacataaagtggagtgaagcatgttgtgtttgttttcttcttgttgataggaaccatcttgtctaagattaagaaaagaaataattctatattaaattgagtaaatgatacacttcacgttgttatgagaaccttaactccattatccaaatttaaattactcgctcaatgactctttccctccctctatttctatttatagacagtcaaccaattacaattaagtaactcttgctaaaaggcatactaacataagagagtttatgtgttcttctctaacttgctttcaaattttgacattttttttatgcttgttcttttgtctgtttacgacaaagttccagaagagc

SEQ ID NO: 35144 - DNA, 590 bp, Medicago truncatula
  Intron number 1 from transcript AC233571_26.1 (locus AC233 571_26) derived from phytozome v7.0 (chr-ID AC233571; pos 109500 to 110089 reverse strand)
ggtttatacaaacccatttaatccttatttctctcaatttgtttcatactttagtatttcacttttaatttttggaaaattcatactttaggtttcaaatgtttgatttgaattaatatttccattaaatggtagtattatggctctattcggtagaaaataacgaatagccgataagttagtttataggggatgagtttgtagcggataacaagttaacttgtagggtgataggggataagttatctggttgaagtaacttataaatatgaaatgacataaaagtgatatattttatgaatatgtattttttttttttcaattgaggttagaggggtaaaattgagatgtataatgataagctcgtgagaaactgatggttatgaaacatgtatttttttagtcaaatgagcatataagacataagctataagctcaaaattatgtcttacggcttagatgagaagaaaatttgaccaaagggactcaatcaaatttttgtttttggaatggcaaaggggacttaatccccttttgtttgatttattttaatttttattgagtttttttttgtacctcagtgtgtggct

SEQ ID NO: 35145 - DNA, 374 bp, Medicago truncatula
  Intron number 1 from transcript Medtr2g025490.1 (locus Med tr2g025490) derived from phytozome v7.0 (chr-ID MtChr2; po s 6768049 to 6768422)
tcgattcttctctcatccactccaaaccctaccaggttcattcaaatctctttccattttcaactcttttctcttttaacccgtttaatttttcactcttaccgaatttgagggttttaatacaaaaataattcacccataatctgtatcttcaagttttttgaaaatcgaacttctccctttgatttgaagaggaatacgttttttctttagttgtaaagtcagttttttttttttttatatgggtttttgttaaaatgaaagtgttgtatttgtctgttgttaatttcataataaattagggttttgcatgtaacttcaattttttctttctttcaggttttggaatttgaacactgcttgtttggttttgt

SEQ ID NO: 35146 - DNA, 728 bp, Medicago truncatula
  Intron number 2 from transcript Medtr5g088450.1 (locus Med tr5g088450) derived from phytozome v7.0 (chr-ID MtChr5; po s 34267796 to 34268523 reverse strand)
tcttggcgtgctccatctagagctttggtaaacaccaccactcaattcagttttcttcaataatatatagttattattcttgtttgttatgaatagaagaaattgcactattgttcttaaatgacacaaacacttcatctgttgacattgacctccccttagttacacatatatttccaacattcaataagttccaacatgtgtgtgatttttttgaaacatggtggaaaaagaagctctcttattactttgtttaaagcgaaaaattatacttatgtactaaatccacggtaatcctcttacaaatcaccaaatgactacttattacatatatttaggagagggagaagcactagttcatacattctcgatggagattcgaactctatcgattttgattacaaaactgagaagtcaccactgcgctaatgttcacgacatcatcgcaacctcataaactttagaaagtatacttttttgacttatttttggttgattatatagcctattgatctcatcaagatgaagtgagacttagtattatttgggctaatatttggtttaccagtagtttgtattccattcccttgactaagatggaagaggaaataatattttaactatatattcaattattatcatgataagtatgattaaggataagatgtgtttttctttttttggctcaaggataagatgtgttgaacaatactattgatgtaattagg

SEQ ID NO: 35147 - DNA, 422 bp, Medicago truncatula
  Intron number 1 from transcript Medtr5g088450.1 (locus Med tr5g088450) derived from phytozome v7.0 (chr-ID MtChr5; po s 34268646 to 34269067 reverse strand)
tatatgtactttcttttctctttttctattcatcaaaattttaaccttataaacttcgatattcaaagttattccctttacacaattttactccaaccacttaacaaaaatttgatttttacaaaaaatttaactagcccatgaagctattatttgaacttcaaattctttcgtttgatttcattaaaaaggtattctcaaagtacacgcacactaaacatggacactgacacatcgatatcagtaataatttcataaaacaaaagtgattgaatataatcacatatgtcagtagtgtcatacacctttacgtgtctgacatcaaacacgccttcatttgggtttgtgatcactattcaagaggtcctaatttaagtatttaacttattgaatcatgaaaatttggtggtaagcaggggatt

SEQ ID NO: 35148 - DNA, 818 bp, Medicago truncatula
  Intron number 1 from transcript Medtr3g137260.1 (locus Med tr3g137260) derived from phytozome v7.0 (chr-ID MtChr3; po s 34776820 to 34777637 reverse strand)
tttcaaggaagaggtattctgcaagaaagaaccaggttaccatttaactaatatttcaatatcactttgttcatgcatcttccctctcatgctatgagtactgattggagttgactcatgggaattggtcctttggtaaaataaccaataaacatattgtcatattgaaattgcttacgcttttctatacaacattaacaataaaatgactcacaattactctttcgacggagggtgtaattaggagtcaaaaacaataaaattggagggttttttttttttttgggcaaaagacatcgtaaaaaattacgcccatatcacaatacaacactcaacgtagaacttctttttggtgcaatatcattcgtacgtaccaaaatatacacattgcaatttgcattcaccatcaccttctttttgtaaaacttgtctattacgcacctctataaatatcatgctatcaattacgttttgctccaattctcaccaggatcgcatctcgattgtcaattgtagatcaaacggttgaaattaataaagttaaaagattgatataaacgatctcggtcgctgacttgagatcgaaaggcgtataactcttaaagcgtctggtgttacatcaaagaaaatcaaaatccaagtaagttagcctactataggatcgaaaacactttaaactgtgaaattagggttaggttaacctactacacaccttctttttgtgttatcaaggccgataattcgacaaaaggtaaataaagtggtgtcaaaaaattgttgcaggtgaaactaagattttgttacaacacatatttggt

SEQ ID NO: 35149 - DNA, 1038 bp, Medicago truncatula
  Intron number 4 from transcript Medtr4g136630.1 (locus Med tr4g136630) derived from phytozome v7.0 (chr-ID MtChr4; po s 33430253 to 33431290)
ggcacttctcgtccgtctcttctttcatattccaggtatattctcttatacatcatatgcacatgaaatttaggaatcttgaaggggtaacaatggacacaatagacctcaagaacaccatctggcctttattgaaagtggagaaaatcaacattttgttttaggaacctcaaggcacatattgattctatttttctcttagtgaaaagtaaaaactgcaaagtgataatagcagaagccttttttgctaggcggggataaatcaaacttttccgatcatttgtaaaggcaaactatttaaaatctaaatcttctcaatggtttcatctattgttacctctaactattggattccatctgatgcactcttttcactagagcttgcacaagttttctcattacatgtctaaactaaactatctaagacaaaattctactctcttttccacaataggtgggtcaccttacatttctttctaagaaattatttttaatcgtattaagtcttgtgagtccaataatccataatcatattctcatatttacaagattaagcttattttcgtgtttgttctttacaaccaaacattttttctcatacaaaaaattcggagctgtagagtaaacaaattcttaaaattggatgtttttcgtatcacataaaacacttgaaacactcctggttcatccatctcacttgattcccatggtttgcacctccgtttatttccttttcattttgtacaatggatccaaaatacccaaactatgtgttactagccaactgttgagtgttttaatataagggcaacccggggcactaaagctcctgcatacgcaaggtccgggaagaggtcccaccatacgtggagtgtattaatataaggggcaattgtggagtgtattaatataataaaaataaattgtgtattttgttctttattctttttgaatattaattggaaaaaagataaaatttatgccggatattctttgatttcaggtgaacttgagttgccatttatagcgtttctcttg

SEQ ID NO: 35150 - DNA, 809 bp, Medicago truncatula
  Intron number 3 from transcript Medtr1g013190.1 (locus Med tr1g013190) derived from phytozome v7.0 (chr-ID MtChr1; po s 2307981 to 2308789)
aaacggtctcgtcccttcttaggaaattaaaacttgttggtatttttaagtactaaatcactggtcatataaaactttttaatgacaatttttgagacaaccttctttctctcttttatttatcaaaaaccattgagagagagaaaaggaagataggataagaatatcatacgagcatgcgagagaaagttgttcaaatcttgtcacaaaatgattggacaaatatcatttctcgtaaaaaaaaagtacctaatattggtgtttattcatttataaataaaacaaatgtgaattaactcaaagagcttggtccgggggtaaggtgacgggtcttccggtttgcgcccgccccaccagagtctttgaaagagataaatataaataggtcagatatctcatagagtcctttaaatttaaagttaggatcatattaatttttaagtttttttagttttgaattgatcctttataagttatacaacgtttactactttgccaatttcaatccatgtcggtaaagcaatgatgacgtggtcgttaaatgctgacgtgacacgtcaaactcataaaaaaaatattgtatgggtttcactatcacattgagaaagcaaagattggtggacatgaagtttcagtgacagaacttgtacagcaatagcagcaccgtatgactctttaactaatgtgataaccattgctgagtcagttaaggaaacttttgattggaatcaaaagtgaatcggttgttgttattgaagctattgattctttgcttgatcttacaggttaaaggaagacaggttctgaga

SEQ ID NO: 35151 - DNA, 844 bp, Medicago truncatula
  Intron number 3 from transcript AC225517_26.1 (locus AC225 517_26) derived from phytozome v7.0 (chr-ID AC225517; pos 113334 to 114177)
ggattgacattgcccttggaaaatgtatgatgtctaacctttttctgtttggtatcttttcacgcagaatgatactacatgctatctagttttagttgtactgccgaaaagttatattgtaattttttaatttatcataaaaaatatattgacattggaatgtgacattaattttcagggttcttcttgttaccatgattattttctattccttttttggtactcagtttggttatttgaaatttgtatttcttttgaaaatatatttgtttggatttcttctactaacatgtttgacgaagagcaagttattgaccaaaatataacaaatatatgtgatatatttcctcataaatacagtcttcctgttgttgcattctctgttgcaattctcatatgagattgcaaatgaagatgttgtggttttagatctaaaactttggtgaatcaatctgatgctcgtctcagtctcactctaattgcataaagatatcaaagagtaaacatctttctcataaaagagtaaagttagcctgagattcactccacctcgtctccactttcaagtgtctattgtccaaatatcttatttggctatctgtatctcgtaaagcaatgatattccccgcgtttgttgtctccttgtttcaaatatataatatagtaagttaaaggatgtcatgcactagtaaaaagacttaacagtgatttttcattaatttgtcatttcttctgtgctctctttaatactttgttggagtgaattattttatgcatcaagatttatttcaattttagcatatattagtgattgagttcacaaatgtgtttttaaatgttgcag

SEQ ID NO: 35152 - DNA, 764 bp, Medicago truncatula
  Intron number 1 from transcript Medtr5g028390.1 (locus Med tr5g028390) derived from phytozome v7.0 (chr-ID MtChr5; po s 11706830 to 11707593 reverse strand)
tcaacaatcatacgaaaaaggaaaggagcaagcaggtaacactgcttgaggtctctttgaatattgagctcttacactgagcatccattagtaaccattgatagattacccattgattacatgtgtttttgacacttctcttctctcaatacatgtgtccctttatgtctaacactattaagtttggtgtgtagatataaaacttatgggtggctctgaatgaatagactctaatataccaacttaaaattgtatattataactaatgagtaactcatctctacaaaatcgacttgtagatgaataatctaactctttataaactattttttgaatacaattaatcatgaattggcactccattgaccattattttaaggtggtcatgtgtgtttgtttatgtatccattaaccaaccagaatgcgtttaaatacatataaatttaatataatcaaatatacgtgatattctttaaccataatttgaatttaaatatatacttgaaaatcgaggttaataacatttaacattagagttaactttgttgattaaattatcaatgacatttgacacagtgtatattcatttttggtgttaacgctcagtttcttaaggaaaagtggcatacatgttatatttcttaaccatctaacaaacattattaacaactattttaattgtattaaatttattttctcattaaataggactatcttcttatataaatgtttgtagccacattgtacccatcttttatagagtt

SEQ ID NO: 35153 - DNA, 524 bp, Medicago truncatula
  Intron number 1 from transcript Medtr7g045510.1 (locus Med tr7g045510) derived from phytozome v7.0 (chr-ID MtChr7; po s 10879065 to 10879588 reverse strand)
gtcttggggtcccttatttcgtttcacaaatcgtaataatatttcttatgcatttcacacttctttttttctctagctagtttgagatgtaaattgaaaacatataaacacaattttcatggcatagctctttagggaagttcatttgaatgaatatcaaaactaatgaaaacaactttttcttctttgtttttttaaaaaatatgatagtattaattttttcaatctatgtacttatttaaaaggttggagtagcaatgaaaacaaattaaagacatagaaacatgaaattcatctataatttcgttaccaaggtttttttttatttttttttaggaaacgttgctaagtattcttctctattttttgttgttaattcaactttttctaaaagaaatgatttgatgagatacttgttacgttttagtttttatttaaaaatatatttgtttccatggcgtcaaaattaatgatacataaattttgcaggctggtttagttctaggaccatctttgaagttttc

SEQ ID NO: 35154 - DNA, 509 bp, Medicago truncatula
  Intron number 1 from transcript Medtr7g011630.1 (locus Med tr7g011630) derived from phytozome v7.0 (chr-ID MtChr7; po s 2868802 to 2869310)
aagctactgataagttcattcagcggcaacccaaggtgatccatttgttacatttgaacaagtttgaattgaaataggagcacttgcagtcttgtattttgctgatttgttgactttagctttactactaatgtactcattagcagattagggtctgtttggatgaataactcaattcagcactcatgtataagcatttacaatagaagtgtttatgtatgaagtactagtatgacaaaaggtaaaataaagtcaaactgattttatagaaactataagctgttttcagcttttggaaatgagctgaaaacagtttatagatatgtcataagcttttcataagttcttctgaacaatctcagaagcacttatgctagtacacaagctcaaataagtcaatccaaataggctggaaatatttgttccggtttctttattctgtaccgaaaaagctaatttgtttgactcgctttcaattatgttaggttataggggaatcagctggttca

SEQ ID NO: 35155 - DNA, 1039 bp, Medicago truncatula
  Intron number 4 from transcript Medtr2g097080.1 (locus Med tr2g097080) derived from phytozome v7.0 (chr-ID MtChr2; po s 22646575 to 22647613 reverse strand)
tcctctgtgatcggtgctggagtttctcgcctccggtgagaaattcgtaccttgaattgcaggggaatcaattcaatgatgaagattcatcggtgaatctctgagaattggtgaatttgttgctgaatctggttctggaaacagttagggtttttctttgttcttgagactttttctgttttgatctgtaactgaatggaaagagaaaaagaatctgtttgtggtgatttcaatgattgtgtatctgatcctgagaatctgacactgtgttgtttttatagctgacatgtgtgagtgattggaccattagaaagctgacatgtggcattggactgagaaaggggcgctgccctgtaattttgacttgagggacctgtttgcaattttaaaaaaatagggactaaactgcaattgacaaaaaggactgaaatgtaaaaaaaagaaaattctggactgacacgcaattttggacctcttggggaccaaaatgtaaaataaaaataaaattggaataaaattggcaatctgacaaaacgtaaagtgaaactaaaataaaattgacaaaacggactaaaacgaaccaatggcctaaatgaggtacttcaaagtaacctccccatgccaaaattttatgtgaaatgaccaaaatgcccctagggctaaaaaatgacctaaacagactcaaattgacttgacactgactcagacacaagtttgaaatgaaattagcagggtttactgatgaaatgttaaaaatcaatctgaaaagactcagagacagtcacaaggatgaaaatgggtcccactgcaggaaatgaccaaaatacccttctgtatgactttttgcaaattttgaaataaactgtagaaaaagcaatgtaatgattcagagacacttttgaatgacttacaagacaagtaaagacatttcaaaaggttttatgcaagaaaaacataggtaaaattgtgattgaaaatactgcgaggcagagacaatttgaactgtgcagttgaaatttgatttttgacaaagtttgaa

SEQ ID NO: 35156 - DNA, 936 bp, Medicago truncatula
  Intron number 3 from transcript Medtr2g097080.1 (locus Med tr2g097080) derived from phytozome v7.0 (chr-ID MtChr2; po s 22648500 to 22649435 reverse strand)
ttgcctacgtaccgttttacgggatcaaaaccggcgtagttcttgctaaaaaaacttgttttttgttttaattgtttgattttaagttttgaaaaaaggttttgaagaaggagattgggaggcttcatgagcgttagatttagcaaaaaagtaaggtttgattagtgattagaaagaaagtctaaatggttaagatggattgaatttttcttaagaaaaaagaaaggaaaaaaaatgaagtgttgacttcatatttattatgaaaatttttgaagtgaagttcaattgttttttttggaaaaaggatggattttctctaagtgtttaaaacctaaacgcttatttaaccatacaatcctatgcatacatctaaggtgagtgtgtgcgtgtcggtgcgtcatagtgtccatagtccatattacaaaaattgcctaaatacattctatggcccctttgccaagctacaaaccaatgataacaaattacatcaccaaatgaattaaaatttgcaaaaaataaatgctaaactaaggaaagtgggggaggtggtgaaatgctatgaatgaagtcacataaggaacaagatgttagtgaaacaaggcaaaatataatgggaatgatgaaaaatgcaccaaatgaatatgcaataaaaaggggtaaaaacatgagaatttatcaatcacaatatgtaaaaaatgcatcaagaacatatatggaattttaatgagcaaaaattaaagaacaaagtaaaggaaataaatgcaaaaataagcgaataaattctaatacttagaggaaaaattaaaatgatagggaaatattttttttagaaatttttagaagcataaaacaccaagaaagtgtaaaaaaagcatttaaaacacaattaaaaagcaatttaaaaaaaactcagcaggatttaatctggaccgttgg

SEQ ID NO: 35157 - DNA, 342 bp, Medicago truncatula
  Intron number 1 from transcript Medtr6g074200.1 (locus Med tr6g074200) derived from phytozome v7.0 (chr-ID MtChr6; po s 14396929 to 14397270)
gaaaaccaagagcttccactatatttgatcccaaggtatctgtcttcctaaagtaatggactattatttcttcatgaattaaagaaaacaccgacttctatgttttgaaattctcttcacagcgatgattctgtcttcttttaaaaaatataatttatagatatttgatgattttcatatttatatataactttacgtttgttttcaatggcaataattatgatgaattcgcctttttcgtcatatagttatgcacgttttgttcgtctttgctgtgactttcatgtaaccaatcatacatttttcatgttttgaatgatttacagttccacaattctcttt

SEQ ID NO: 35158 - DNA, 955 bp, Medicago truncatula
  Intron number 4 from transcript Medtr1g143410.1 (locus Med tr1g143410) derived from phytozome v7.0 (chr-ID MtChr1; po s 31645522 to 31646476)
cgataaaccacagatccaccaaggacagcttggaggtctgttatactactaatcttgattctatcctcctgtttatatgtgttgatatattgcatttcctattttggcattagttgctttcaaatggatttagttttagactgtagcttaatagttgttctatcctaaacctactagaacaagtcgtctttattgggagctttaggtctccaaatgtgtggtactgttgttatacaacgattatccaaattgaaacactgatatctgctaactgatcctgacatattgtttaaattttttgaattggacatttcttaccactgagactgtagattataaactacaatgttataattagtttactctataaattgtaatttaacatattaattatataaaaattgattgggaaaataaaaaatgctttgttttttttattgtccgtagacaatctgtactttcttagcaggataaggtttggttgttgtagacaatttgtactttcaattgctatttttctttgaaaatcactaaaagctctagtaaagacataaaggtttcttgttgattttgtatttttatttctttattgtattatctagtattgttcaaaatatgcaaacaactctaatttaggattgcaatcatgtgttggagtcaggtcttggaggatggtactgcttatgttaaagttatgggttttagataaagaacggagagaaagaataaagaccattgtataattatgattcatgatacaaaaaattaagcactaaatcagcgagcagcgactggtatttataaggatacaaaactcttaatcctaatagaatagagaaacaaatcgtgagaatagcaaagtaatatgtaaactaatccgtgtcaacagttgcttattgggatttatgtattcttttcctgattgttgctgtttctttggtaacaggtgaagaaa

SEQ ID NO: 35159 - DNA, 285 bp, Medicago truncatula
  Intron number 2 from transcript Medtr1g009720.1 (locus Med tr1g009720) derived from phytozome v7.0 (chr-ID MtChr1; po s 1399286 to 1399570 reverse strand)
gaaagaaaggcatttcaaagctttacaattggcaggtacagataaatattacgcgaagatgctttttacatcattatattgatattactgtgcattattttctatctatatgattgatttaattaaatttttaatcccgattcctatttttttcaaccaatttacctttcttttttcagaagttgacgtgatttaggcctctatttgattttatgtttggggtttttttttttttttttatatataattttcccttgactttttaggttgactgccttcgtgtgg

SEQ ID NO: 35160 - DNA, 642 bp, Medicago truncatula
  Intron number 1 from transcript Medtr4g110830.1 (locus Med tr4g110830) derived from phytozome v7.0 (chr-ID MtChr4; po s 25236834 to 25237475)
ttcccaagtctagatttaggatcaaggtatgttttaaatcatatgcatcatatatatgttaagagtttcacatttgataagatatagtttgataacgtgtttggtggacggttttctattgataaaatatacttacatgcaagtatagtaatatgtttgcatgtatatattggattgaagaaaatatatattttttatgtaagccaaagatatctatgttgtgatatatatctttggcttggaaatatctatgttgtgctatatatctttggcttgaaatgagttttgaattgattaatgaatgccattgagttttacatttgatcactgaagccaatttatgcatacaagaatccactattagaagttacaatatataaacacaaccatacaagtttgtgatagaacttgataaatataattcttgtcatagttatatcttatgcaaaagtaaaaaccatatcacatacactaataagtttctgtaccttaatgcagaaattgtatgcatttagctgaaaaatttgatgttcctttagatttgaggtctttgtaacattaatatataatgttcgttaaatttgaactagtttttgttgttctgcaggctggtaaaactctaagtgaaagaaggtggcgtgc

SEQ ID NO: 35161 - DNA, 703 bp, Medicago truncatula
  Intron number 1 from transcript Medtr2g114180.1 (locus Med tr2g114180) derived from phytozome v7.0 (chr-ID MtChr2; po s 26943746 to 26944448 reverse strand)
tgttgtgtcaccgtttgtatatatctattgtttctgtagactttttatttttacaagttgttctatacacttatttaatacgtttacaaacaaaatactctaatttccatgcaaactcggctatgtatagcaaaccctaaaccgcgtttctctataaaaaaataaaaactaaaccgtggtaaattacacagacaacagaagaatcatatattttgatatttgcaaatggaaggacgtgatcttacgaccttcctgtcataccactgcttaactagtattctaatttaacatgcattttatcgatatgcatatttttttgagaattaaaatatcatttttgcgatttttgtttttagtttgagatgtttacaccaattttggcagttttcctatttagttttgtcgcaacttcttggtctattatctaaggatttagactgtgtcgtgtaatgtcatgttttttgaacacaataaaaatgagattttctatgttgacactctcaatcatcacttagtttgattgtttctatgactttgaatgtaactctaaagttaataatatagtcagtttgatacttatatatgaaattctacaaaacccatacatcatataggttagagtctagttatgaaattatacttaatctcctaagggaatcatcttgcaggctgttgccagggtctggaagtctttggctccatc

SEQ ID NO: 35162 - DNA, 934 bp, Medicago truncatula
  Intron number 1 from transcript Medtr6g092670.1 (locus Med tr6g092670) derived from phytozome v7.0 (chr-ID MtChr6; po s 19521661 to 19522594)
cgttatctgcagaaattgaaccactgcccacccaagtaattttcatagcttgctctatcggcggtaatgagatgacagttatactgtctttgtgtctggtcatcaatgagagtgattgttttgcgctttcctttcagaattgttcttgacacctcgtttgggaaatgctaaacaggaaaataactgcaatattagtctaatgcatatttacatggataagatgtatgcgaatatagttacatataatttataaaataaaggtagcataactgattttaagctaaagaaaatgtaacatgacttctaatttatcatcctattatcttcatataaagtctagataaatgcatgcatgtacattatatgcaccctgttgaccaattaacattgttgaaacaaatggaaattaagcatcacttccgcatgtgcatatatagctagcatcatttgacattgatgtattcgaacatttggtgcaactctcataatacaatccaaactggttatgattgaatttagttgttttccaaatagtgatgcaatatgtttcctaacacaaattatgcacatgaaataaagaataatgcaatatgtatttttaatttgtgcgtaaaaaaactcaaagcatgtttgtgcataaaaaaagcagacattgactaagtttataaatttagcaattggcctaacatgtgacagtttggaaaaatcgttgtacgaagtacgttgagaagaagtcgaattctgacttaagttctaactgaagtttgactctaagcttgagaagtgttaaagtcacgacaacaatttaagaaacatggtcaaaaaacaatcaaatcggattgtgaaataataagttactctaacactgtattgtgaaatcataatgcaaacttactaagtcttaaacttctcaacaaccggatgatggaggttg

SEQ ID NO: 35163 - DNA, 588 bp, Medicago truncatula
  Intron number 1 from transcript Medtr2g009720.1 (locus Med tr2g009720) derived from phytozome v7.0 (chr-ID MtChr2; po s 2194896 to 2195483 reverse strand)
gttgccaaggtatcatatatttcttttctcttcttatttggatcatattttgagacatttatatgatacttctcaagggacatataatgcttttattggagaacatgagaaaaaagtgacttcattgatccatacattatgttatatatagtgctatatcatcaatgattataaatggtgacacattgagtacatcttatacatgtatcataaatctttactgaatgtgacattgtatcaatagtaatagtaatttttaaacataaaaaaataaggggcgtcaaatgggcacctatatgcatcctatagaaagatagaaacaattagtcttatgatcataagtccgtctctgtacttacatatgaccaagaaattacttcaggttaatcttcttccttctctcttctttaatcacttcaggttcacttgtttagttttctagttttgttttgtttattgtttttgtgtgtcgatttcatttgattgcaggttactgtaatccataacagtaactattgttcttagaaaactaaatttgtccattgtgaaaacagaaatcaaaactaacaaattatcctttagatatta

SEQ ID NO: 35164 - DNA, 557 bp, Medicago truncatula
  Intron number 2 from transcript Medtr7g012460.1 (locus Med tr7g012460) derived from phytozome v7.0 (chr-ID MtChr7; po s 3223643 to 3224199)
ggaaaaatattccgtagctttatcatttaccatctatttaccttgagttctttgcttccattttgtagtcaatgacaactcaaatatatgtaacaattggttcgaggctgctcatcaacctacattatctggttgttgagaagtttaagacttagtaagtttgcattatgatttcacaatacagtgttagagtaaattattatttcacaatttgatttgattgtttttgactatgtttcttgaattgttgtcgtgaccttaacacttctccagctcagagtcaaagcatcagtctgaacttaagtcagagttcggcttcttctcaatgtattcgtacaacgattttttcaatctgtctcaggttaggccaattgttgaatttataaacttagtcaaggtctgcttttttttttatgcacaaacatgctttgaatttttttacacacaaattaaaaatatatattgcattattctttatttcacgtgcataatttgtgttaggatacatattgcatcactatttggaaagcaactaaattcaatcctaaccagtttgg

SEQ ID NO: 35165 - DNA, 594 bp, Medicago truncatula
  Intron number 1 from transcript Medtr6g104380.1 (locus Med tr6g104380) derived from phytozome v7.0 (chr-ID MtChr6; po s 23031201 to 23031794)
ccaatattagctctaagtgctactgcagttcctaagtgagttttcttaatttctagaaaaagtgttttttttttttttttttttttttttctttctttttctttcctttttcgtacatgaacaaatttcatatccaatcctaaatttatgcatttctatttaatcttgaaaataatcttccaatttttgtggatatttgaattgtttattctcctattggtggtatgcatgtagttatgtctctttgtatataatatcatgataggttttcatttgtattatggaccattcaaattattttatgataatgtgggagtagacctattcatatacaaagagtatgatatgtttattgcaatcatcattgctaattatgagtagtatttttgaggtaggcgatctcttttatcttcattttatatgtttattgcaatcatcgttgcaaattatgagtagtatttttgaggtaggcgttctcttttatcttcattttttctcctggtattgaggtgtgatgtgaatcacatcgtcatataaattccttgcttatttgttttcttcagggttgagacggatatagtggagtctttgcaa

SEQ ID NO: 35166 - DNA, 356 bp, Medicago truncatula
  Intron number 1 from transcript Medtr4g155040.1 (locus Med tr4g155040) derived from phytozome v7.0 (chr-ID MtChr4; po s 38179068 to 38179423 reverse strand)
caggaagttcaagccataagtatggaagatgttttgtaataatcagggttatgaaaattagaccttaatgaggctagagcatgtgatttttcttaactcaccaagggtcgtttggttctatcaaaacaaaaacaaaataagcaattgaaaagaaagggtgggattggttttaatttatttaactacatcacttcttctacaagatctagatccaaatccgtcaatggccatcaacaacaacgaagtcagcaacctctctaccgacaatattatcgaacaccacactctcgtttactgtttctcttcaatttattataaccgttattgtaggaatcgtcggttccgggtattgaaga

SEQ ID NO: 35167 - DNA, 674 bp, Medicago truncatula
  Intron number 2 from transcript Medtr3g144000.1 (locus Med tr3g144000) derived from phytozome v7.0 (chr-ID MtChr3; po s 37255804 to 37256477 reverse strand)
ctgctcttctcgattacatcagttctgtaagttccacttagcactcttgtgctcactttttaattctatagagaacaatgaacattaacagtgagactcaaataatgaacatcaacagttacacttatgcagagaaatttacaccaaagtttcatgttagacttgctttttgagcaaaataaaacatactttatttcactacaaagtttaaactttgttttattcacattacttttatcgccaacatgagttggtccgacttgaaggggctcggatcccttgagcaagaggtataggattcaaaatttagtttttgtgaatcaagcaaattctgttgggagaggcctacattgtgtttgatagtatctcgagggattagtctttcaattgcatgcctggaatactttgggtttaccaaaaaaaaaacaattttataaacttatgtttatctaaaaccacctttatcgaacacttgcccaaatgcacactttttttcgtattgataatgaattacttttgttgttcaaccatctacattgaggaatcaaaatactagttgagtttgtcttgtgagattcttatcttgtgattggtccatcatatctcataagtactataacattcttgtggtgatgctaggttttaggtgtaaaacgaagacaagtatctctagg

SEQ ID NO: 35168 - DNA, 556 bp, Medicago truncatula
  Intron number 1 from transcript Medtr2g097720.1 (locus Med tr2g097720) derived from phytozome v7.0 (chr-ID MtChr2; po s 22951268 to 22951823 reverse strand)
ttagttacagtttatatttgtttgagttagttatattgctcacggtttatatttgtggactttgactcgattttgtggttgtttgtggaatcgatttggatttatgagggttgttgggttcggacagttttttttatgttgtttgaacgactttctcgattcttttctccattttttttatgtcccttcctgatgatttttgctgtgatttaaaggctctttgattttcgaaaatggaaaaactaattaaaagacttgacggtgattgaaggggatttgggaaagttgactctatgatttagccacgaatggtagcgcttgccggaatcggcttcgaaccccttggacatatttttttaattttttttaaagctaatctaaataagaataaataataataataataataataataataataataataataataataataataataaatagataaaaataaaaataataaaatgtaaaaagtttttttgccaactaaataaaataaatgtagaaagattgagcaaaatctgtccaacctgtaaaaaggcctaagaaa

SEQ ID NO: 35169 - DNA, 805 bp, Medicago truncatula
  Intron number 1 from transcript Medtr4g005130.1 (locus Med tr4g005130) derived from phytozome v7.0 (chr-ID MtChr4; po s 88067 to 88871)
tcaaagtgattgactatcttccatactggaagagggtatcatatagatttcaataaagccatgatagaattatagttgaattataatttttgattctcaatttggttgttcattaaaagcacatttatccaactttcagtttttctctattatttgttgcaacattttgttttgcaagttcaattaaagttgtaaatacattccttcttttatgcattcatactgaatgaattttgataatgaagctagcttctatttaatctattattattaataacatagtggcttaaagcctctaactatatacaagaatattgtattataaatgaaaggtgtatggctgctgaaagaacttctgttgacatcaatattgtttgttatggtttctttatcaatattcattcaataactttcactatcatagttttcaatacagccagacattaggcagcataattcatttattatttatttacgcttgaagagcataaaaaagtaaaaatgctgcaagagtctttaaagcgtgctccgtagatgtaaaacagaattcaagtacaacgctataacaaacaagaacacgttggcatgtatattgtaattggacatcatctgaatgcatttgatgaagataagtttattttggttaaacggttcgtagaagtttgtttgagtttcactcctggatcgaatccaatgggaaaatacttcagctgttaataatgtcatcggtgaaggagattgtgatgagaaaatggacggtagcaaacacgaaattgttctgaaaaagaggtaccagttgcaagga

SEQ ID NO: 35170 - DNA, 1017 bp, Medicago truncatula
  Intron number 1 from transcript Medtr3g109730.1 (locus Med tr3g109730) derived from phytozome v7.0 (chr-ID MtChr3; po s 27545643 to 27546659)
tctctcttcactaattctttcgaacaaaacacaaagtaagaaaaccttaaactgaaatgaaaaaaaaaaaaaagaagcattaaccatcttttaaatttgtatatttattgtgcatgtaacactaaaaccttataggctccttataaaaataaaaaataaaaactaaacccttacaaatacaagtgtcataaattatttatatagtcatgtcgctatgttcaacaaatttttggcacaccaaacttgtattacatatgctaaattagttcaagatgtaagatttataaactaattagaggttgcgcaacctctaattagaaaaatcactttagaaaaatccaacagaaaaaatgatgtaaaatgttgtagtattttatttatacaaattattatttatatttatgtcaaaaaaatgtattagtatttataatttaaaatgttatcctaatctatttataacatttttttttataggtgtatggcatttgtttgtttattatatcacacgttttgtttgtttagtatgttattttaaaaaggaaaaacacttataggaattttttaaagaaaattttgcatgagaacatttaatgcaaaaatttgaatcttttatttgtcacagtgaatgagaaagatataataatatctgactagctaattatatagaatagttttttatatgaacgaaaatgtggttgcagctacccttcgtataatgatttcattgcttgacaattgcatttgaaaacacagttggtcctcgaggtgagttatagcagtggcacttaatgttgtaggcgaccggtcatcattcttcaattgtacattttgtgacactatatgtagagagtggtcgtcaattataccacaattgtgcgatttttggaacgatcaacttcatcttcaacctactttgattcaatgcgaggatgtcgagtcaaggactaaagaactttgtgatagcagatcattgcaaaacttgaatggttcttcagaactgctcaatcatctgatcag

SEQ ID NO: 35171 - DNA, 737 bp, Medicago truncatula
  Intron number 1 from transcript Medtr4g005480.1 (locus Med tr4g005480) derived from phytozome v7.0 (chr-ID MtChr4; po s 245691 to 246427 reverse strand)
ctattttccaaatcaggtaattaaaaagctaccaccgtcctcatacctattcaagctaaacaaaactgtttcaattgtctgttgagaattatttgtagaaatccaaatagttattttcattcatagttatttcttttctctatcctttgttttaaaatccaaacttttctttcttactattattctattattaattgtcaactcattaattctcaaaaaaaaaaaaaatgtcaactcctattttggtttgtatatactaaaaagaaattgaattagtgaataaaacacataaaatttgtctttaagtctgtttgaatcgtcttatttttgagcttatgaaaaacaacctatgcagataaataaacttttattttatttcataagttctcacaaatgaaaattgtatcttcatacgttgcttttacataaactacattgacaaatataatacatataaatttatttacttaagctaaaaaataagtcaatccaagcgggccctaggtcaataagtgacacattttgtaaaaaaactgaaataaatgatggttttaactttaatgtaattttaattatttattttcttgagcaagtatatcatcttgtttttaatgtgtgtgaaatggtaaaatgcaaaaattattctaaaatattggaagtagttaatagcattatgatcttaaatctttcttctcatgtatatggttgagcaggtggatcattggtgttggagagaa

SEQ ID NO: 35172 - DNA, 919 bp, Medicago truncatula
  Intron number 1 from transcript Medtr5g013700.1 (locus Med tr5g013700) derived from phytozome v7.0 (chr-ID MtChr5; po s 4177649 to 4178567 reverse strand)
ggaatcgggaggcttgtggatccaaattcggcgaggtactttgcccgttcctgtccatagagacactgacgcatgtggttacattcaatcatttctaattttagtgtttaattgtcaatatagtgtcgtgtcttgtgtctgtgtcaatcgttccaccttccatttgggtctatccttttggaattggtgttgtttttttcttgtttctttcctttgtatagagtttctgagctgagtcatggactagaccaagatcacactataatttcaaatcacttcagagatagatgtatagatttaccatttaaaatcatgcagtatgaaatgttacaataaaaaatttgtttccggttaaaacaataagttcatttaatgtgtgcattttaggaacttgcctgtttaggcttggattagcaaagtgtgtgcagtacacttatgagatgtttattgtttgttgtgtgaatttggtatcctctgccagagacttatctcacgaactaggtatgaccgcaaagagctttgccgctcattccggtcctacccggctccagggatcagtctctgcagttgcatgcagagatacccggttcacaaacacaaaaaatcaaaacaatagtattgaatataataaaattagttggttttgcttatatttaggaattaggaccactaaatcaagttggagatgttagcaaattaaactaatgggaatgatttcactgtattggtttctgttatgtcttcttgcaaattcttttggagtgaatttatgctgcatagagttcatttgagttcacgattatcattttttttttttttttgcaatttaaattttaatcttctaataaaaagttgacctagagcattgaatttttttgttgcagtgttggttaaagaaacaaaaggacagcttagcccc

SEQ ID NO: 35173 - DNA, 804 bp, Medicago truncatula
  Intron number 1 from transcript Medtr1g039640.1 (locus Med tr1g039640) derived from phytozome v7.0 (chr-ID MtChr1; po s 9072643 to 9073446 reverse strand)
ggttatttaaatacaatatttgaaacgcaatcaaatgtgaatgattagataagtgtatatgccgatttttgttataatttgtcaagccgagtttttttaaaaaaaaaagattgctgctttggaaatatattgatttcttcattgcaaaatatgagcaagactagacgttttaaatcactttaatcatttttagatacataaatttttaagttatgttttcctgatattgaattatcgttagttagttgtattgttggtcagtaagatgggaagtggacagaattgtccttgcaagatgcaaaagagtttctataattaggtcactttttggtcttgtgaatatagtcaattcaatcttgtttgtttttcaacactaaattctttcttgctcaatttagtttcataaacatagcatgcctgacaaaaaacattatttcaactagattttgattaccattggcacttttatatcccattccctctccaccactacagttgaaccagtcaatcatggggcatgttctttagtaaagtagattgggctagtccgacaaaataacatgcttttggaaagttggctaggccaagtgaaattattgggccgaacttttccgtaaccgtaaggacacactggattgtccttaaccttttttcatgtttgaagttgggaagatgtaccaaaatggacagtctgagcccaactgacagatcttattgttattgtggtttttttgtgtaattcacccccacaagaagttttcacatactttgttcttttggaattgattgttctgcagactagga

SEQ ID NO: 35174 - DNA, 702 bp, Medicago truncatula
  Intron number 1 from transcript Medtr7g070930.1 (locus Med tr7g070930) derived from phytozome v7.0 (chr-ID MtChr7; po s 14485663 to 14486364 reverse strand)
cttactgcaagaatcataagtacgtaaaccatgctaagattcctagttaaaaaaaaaatgtaggaattgatcctatttataggaatgttgtgggaatgatgagagccacaacgagccaaatcattaggatgaccattagactttgacacaacattcttattcaaaactttaaggtgttgaatatataaatcaccttgcttatatattttaatattaaactctttcataatcgatgtgagactaccattcacacttaaataccaacgcaatgattaataagtcattaattatactaaccttttttaaaatgtcaatttcagtcattgatggttttaaattatcaaaagagcagtgttatttaaagggaaagaaattgtcccgaactcaagaagaataaagtattgaccaattaaaatgcttgtttttgcacaatacacggagaagagtgaaattttaacatgatagagaaattgaaaatgcatgttcaggacaaattcgtgatcctgcgactcgcgagatccagcattatgcttttcaaaatgattattaggttatcttagtttcaaagatcaaaatgtataacctctacaaaaaatttaagacttgattgatgattataacttgaaaagaaacttatcttacttatatagtttttttttttttacagtttatcttacttatataatcaaaaagcttctacaa

SEQ ID NO: 35175 - DNA, 641 bp, Medicago truncatula
  Intron number 1 from transcript Medtr3g080660.1 (locus Med tr3g080660) derived from phytozome v7.0 (chr-ID MtChr3; po s 19083746 to 19084386)
ccgcaccagatccctccaccgacgttcctcctagggtttctctctctccttctttctctctctagggtttccaattcttttccaattcccaattttccatcaccaatttctacacccaatgtattttcttctcaaattcttagatcgaaatttcaatttcatttttttgttgcatttttagcgtgtttttatttcagtattttgcttattggagctttgatgcaacaaaattataagcatgttttgcattaatcatgataaaaaaagcaattttttgtgtgataatcttgttttgagcttgtttttacacacccttttgcaattctagattgggttttcgataaagattatttttttaagctgctttttaaattgggtaacttgaaattgtattatattataatcctaattaacatggcatttgatctgttatgtttgtgtttgtgtgtttttagatgtaaaattgtaaattatttaggatttattaaaatttatgattttcttaaacctttacattcccattgcacatgatcattttgtgggttgattcaattttatttgacatgcaaaagttgtttgtgttatattgtgactgtgttgttatgatgtttttggttttcagaaacaagctgtgaagaagg

SEQ ID NO: 35176 - DNA, 685 bp, Medicago truncatula
  Intron number 2 from transcript Medtr3g080660.1 (locus Med tr3g080660) derived from phytozome v7.0 (chr-ID MtChr3; po s 19084648 to 19085332)
tgtctacttggcctgctcatttagaaattttccctgtaagtaatttttcttgctgcaatcgttgtgttgcaaagtaatgagtgtgttagaagtttaacatatatgtgtttgcatgtggatctgtcaatgtttcagtatatttcttgcgttttgtagttattcctctgttcaaaggttaagcaaattaaaatggaaaattttccatgttcgaaatttatggtcactaccattggtctttgcagttattcctctgcctgacatgggtccatgtgccatggtgagaaaaaatgacctgttgatccaatgaacaacattattggccacttttttgtgtgtggccgtcttattcttttggttttatcttgtgtaggtatgtttgcatcaatgagtgtctgtttcttgaattcaaattgataattcgttttcctacttttgtgatatctgtgcactctgcaccatattgtatatgagaagattgtatttctgcactatgaaaattgtttttgcactcaatgatagttttactcttgaataagaataaggaaaacatctgtatagtttgctctatgataatatcagcacactctttttttgacgctgcggtagtttaaatgattagtttcgtctttttgtttgaatctaacacaatctgattatctttgttaggaacaagcattttccgaaa

SEQ ID NO: 35177 - DNA, 954 bp, Medicago truncatula
  Intron number 1 from transcript Medtr1g010680.1 (locus Med tr1g010680) derived from phytozome v7.0 (chr-ID MtChr1; po s 1855965 to 1856918)
cctaacgcatttcatttgtgtttggttttgttgtggtttgtttctaacttgacttccaactcattctcctattggttttggctataactggatgacgtgggtcatgctaagttgctaacttttcatgaatcccattcacataaaaacacctataatagaatactgtccattcaaattcatgcaattatagctgtgggccattgatctattatatcctctatcataaagtgtatgaaattattggtccttatatcgactgtgtatctgaaacaattgatataaaaaatccaatttgccaattcaatcatgctttgttgctaatataatatgattcgccaattatgcatcaaacattatctaagagtaacttatttaaatggttggaaattaaatgagagctgtcggtctaacattgactagcaaagatgtgattgtataataccttaatgaagatatatttcgcataccttttggaagttttattaatcaattgctgctttggatgctctcttagactcaccatcagattacaccatctgcggaaattaggaaggatttctaattttgtaccatgactccatgagtactaaatttaacatcgagaaattcttataagatttcctcaacattttttttataaataattaagattgaattagatatgtataattgattcgcactagacgtcaatcaattatgcatatttatcttcttaagtttcctaaatatccagttaccttttttttaagtttttttttttttgaaggaaccttttttttaagtttgttttcacttgaacttttttacgcaatattattttcatttatttaccaaaatgtgatggtaatgttgtttttacttgaacttggtttgttttttactccctcttcgacatattttcacctttcgggtgacgaagggagcaacgagagaggtgataagaaattgatagcc

SEQ ID NO: 35178 - DNA, 301 bp, Medicago truncatula; identical to SEQ ID NO: 34868
  Intron number 1 from transcript Medtr4g023450.1 (locus Med tr4g023450) derived from phytozome v7.0 (chr-ID MtChr4; po s 5105300 to 5105600 reverse strand)

SEQ ID NO: 35179 - DNA, 852 bp, Medicago truncatula
  Intron number 3 from transcript Medtr4g049850.1 (locus Med tr4g049850) derived from phytozome v7.0 (chr-ID MtChr4; po s 11562159 to 11563010 reverse strand)
atgtatactttatcctaaattcataaacttgggtccataacttttctgaatgtactaatcttttatctaattacgtggtgagtttctcttggtgattactttgtaaattttattcttcatttctttatttagtcttatgtttcatctttgaaatattgtaaactattccttcttcaattgtccaagatacagtgctgaaatccttggatattgttcttttgatattcatcaacattggggttacttgtgagtgtagtttgggttctgaggtggatgataagtttatagagcttgattgaaatgaatattcaaagttgtccaatgtacctgtttgtaaagatgttacctttacctttgatcctcaagttgagtgtttgtttgcagaagtaactgttttttccatccagtgaaataggtacatttttattattattgcaaaattaaagaattaaattcaataaaattttgttttgtcaataatatttaaatatttgttttctaatgcatttaatgtttgaaattttcaggattttggtggtgactggattaaatagaagtgtttggtgtctctgtagttgaacattattttctaattgtcttatccctttgttgggatttatggttagtatgttatttagatttgtaagttttttaagtgttttgtaccattgactctatgttaaagactctggcaattaattattcagttttatgtacctagctttgtaatttgaactatgttttgccattatttttttttctcatatggattgtattgtgttgtgttcgtttttagtatttaaaaatgtaatattatggtaggttcttacgtttggcaaaaatcgttggtct

SEQ ID NO: 35180 - DNA, 974 bp, Medicago truncatula
  Intron number 1 from transcript Medtr7g005150.1 (locus Med tr7g005150) derived from phytozome v7.0 (chr-ID MtChr7; po s 211781 to 212754)
gctattcttgtttcttctgttgttgtggtttatatttcaactgctatttatgcctttacacactagatttggaattgaaatcatgtttgattgttatgttttttgatatatgaaatggattgaattggatttaggaaagaagaaattatgggtgtttttttaagaagaaattcatgtgccattccttttttatggaaagaattatggaaagaagaagaatcgtttattccttttttattttccttttctattttttttttaaaataattctgatttttttttttaatttttcaatttcttttttcatttttttaatttaataaatgattatgtggcttttaaaaaaaaagaaaataaaaaaatacatgtggcatgccaaatcagcattgactaggtcaaaattggttaaaagggtcaaagttgcaatggggctgaatcttaggggggctaaattgtggttttggtacttagggggtcaaaattgcaaatttttgaaagttatggtgggaaaagtgcactttaaccttttctaaaaattaaaatttcctaaaaattaaaattaaaatagaaataaaaaaaattattttccctttgttcccttcttcctcttctcttgtttattctcctccctctttattcatgtttttttcttccaatctttgcaacaatatcattttcatccccaattctgctaaaaaccataaaattttcatccccaattatgcaaaaccataaaagtttcatccccaattttgcaaaatcaaaaaaagagttcaaagtgtaggattcaatcaatcaatttgcaacaacataagtttcatccccaatttgtaacaacatcactttcatcaatttgcaaccataaccataacttttatcattcactccaccgccatatctcaatcaaacaattcaaaaggatgataatgaacttgttgtggagcttcatgagaatttggatttgatggttgaag

SEQ ID NO: 35181 - DNA, 483 bp, Medicago truncatula; identical to SEQ ID NO: 29466
  Intron number 2 from transcript Medtr2g014310.1 (locus Med tr2g014310) derived from phytozome v7.0 (chr-ID MtChr2; po s 3609240 to 3609722 reverse strand)

SEQ ID NO: 35182 - DNA, 987 bp, Medicago truncatula; identical to SEQ ID NO: 32018
  Intron number 1 from transcript Medtr4g121600.1 (locus Med tr4g121600) derived from phytozome v7.0 (chr-ID MtChr4; po s 28571407 to 28572393 reverse strand)

SEQ ID NO: 35183 - DNA, 595 bp, Medicago truncatula
  Intron number 1 from transcript Medtr4g158750.1 (locus Med tr4g158750) derived from phytozome v7.0 (chr-ID MtChr4; po s 39953310 to 39953904)
ggagtacccctgtacagtacaaggccggccctagggtttattagggttatttatagtacacatcaaggttcaaagaatgcaaacattcaattactttttttttttatttttttattttaagaaattcaattacttgttatatgtaatacttatgatttataataatatggggcttaatacatacgcatgtcccttaatttattttttcttctcacttcagtcccttaacttttaaatgtgtcaatttggtcctgtaagttctcttccgtttacccagttgatcctttctgttaactttttgaaaaaaaacgttaactctgcataagtggctgtccacgttggccaatcacttgaggacatggcaaatcactatcagcaatataaaaggggatgaaatgtcaaaaattagggttttattgatctcattcctccttctctcttcttctccatcgtgagtctatctatcatagccaaaaccttcactcttgttcttcttctttcatgacccagaatccagaaaaggcttaaccaagcatcaccttcacctgaatgtcgaaccagacatcaaaaacacagtgggttcacgagtagtctt

SEQ ID NO: 35184 - DNA, 956 bp, Medicago truncatula; identical to SEQ ID NO: 30496
  Intron number 3 from transcript Medtr4g144780.1 (locus Med tr4g144780) derived from phytozome v7.0 (chr-ID MtChr4; po s 36545795 to 36546750 reverse strand)

SEQ ID NO: 35185 - DNA, 470 bp, Medicago truncatula
  Intron number 3 from transcript Medtr4g128640.1 (locus Med tr4g128640) derived from phytozome v7.0 (chr-ID MtChr4; po s 30335479 to 30335948)
ctgtgcaattgatcagtaaatttggtgaggtttcattaactctctcattcttttcacaagtaaataatgttctggcatcatgagaagttaactttcagcaagtactttgattttatttccagagtcaactactaagagtagtctgtcttcgtatctaataagcaggtttttttctttgctcaaagtgagcatctaaggaaacttggtatgggaaaagaaaacgagtgtgttagtaaatttattatgcaccccttatattggtccaccgggggaatgtttagcagggaagagacaatgctcactgtgcttataactgaatgttgatgtggcaagaggagagaggttaggctagaatttggtagggtttgcgccggaggttgtagactgaagtcctagcctatctgtgcatactcttttctttctgttttttgtttctgtgatagttagaggttctacactgtattttctgt

SEQ ID NO: 35186 - DNA, 977 bp, Medicago truncatula
  Intron number 1 from transcript Medtr5g086900.1 (locus Med tr5g086900) derived from phytozome v7.0 (chr-ID MtChr5; po s 33459147 to 33460123)
aggtatcctacaactcgatctctcctagacttagtcaaaaccctatgtgtttcatgtgggaaggctttagttaaagtatgatttgttctagcctagtgggcggtgtcgccccttattttaaggaagccacgtggttcctagatagcataattctcatggctatttaggaaccacgaagggacaaagtgcttgagtaacatgtcttcaacattcttatttaattgtcaattccaaggctgattgtacagttctaataacatttctctgactattaagattttttaactaaggacaaaattgtgagggtttatacaagacccaaaggaggcaataacttgcaaaaacggtggaggagcacacttgaggtcaaaacagtcataaatgcgggcatctttaaaagtcataaaatgaattacaagtcgaattatcaacttggttatctatctctttttattaactaaaaaacttggttatctttttttatttattattttaataagcaacttggttatctttaatatttttgtgctactatgtcatattttgaatttattttagagatcatggttaggctgagttaaatatccctacgaatagcatataagaagctcaaagttcttcattcatatacttgggagtctgaaagaatagcatagtaaagtctatcacgcttctatggatctttcaaaatcgatgaggaaaaatgtggtttgaagaaaaaaagaaggacaaaaacaagaaatgatgaggtaatgactccttcagaagagggtgtactcatacatgagaatggaaaagacctacaaaagaaaaaaccaaaaccaaatgaatgccatattttttatagtgagataatgaaactatgaagaacctagcattaatgaaattatgaatgccatattttttaaagtgagataatgaaactatcaattccaacttgagagatactttatccatattggtgacaatcaaagaac

SEQ ID NO: 35187 - DNA, 464 bp, Medicago truncatula
  Intron number 2 from transcript Medtr7g012530.1 (locus Med tr7g012530) derived from phytozome v7.0 (chr-ID MtChr7; po s 3276744 to 3277207 reverse strand)
aaaacactgtgaggctgtcatttcccagtgttatccatgcatcctctggtaaagttatggatccaattcttacagctttggtgacttctgtttctatcgagggtggccaattcagtactgctaaaaaatctgaaaatgtatttctgaccttaaatcagcctacctctgatgcagccatagattaaagtgttaaagttttgaaaatgatttgggagattatgagtatgattctgaagatcctacttctgatgatatcaaaactgtggaccatggtcctagaaaatattgcaaggacccttaagatacggagaaacctcttaaaactaaaggaaggaagaagaaataaaagaaaaaaaatccaatctagcacccaatgtttctgctaagagcatcagaactcgctccaaaacaggttcttctatcagccctgagttataaaggtgttatactggaatattagaggc

SEQ ID NO: 35188 - DNA, 699 bp, Medicago truncatula
  Intron number 1 from transcript Medtr2g111180.1 (locus Med tr2g111180) derived from phytozome v7.0 (chr-ID MtChr2; po s 26313948 to 26314646)
ttacgcgacaatcattcacccccgcttcgtgtcttgttcagccctcactagatcgcatctcatctccctgtccaaaccaaatcgtgtaccaaacctcatccatatcattttgttctctttgaaactgtaagaatatgcttactcccgctactttgtttatgttattgatgaatgattgcaatcatgttttggttgaaatttataacataatcgtatgagttatgatattgatccttaagatcagtatgtcagttgatggttaattttatggcattttcttgtgatggtgaatatcataaacaatatgctaataatcgtgatcatgaatcatagacaacatgcattgtagatcaaaatgagcacataatgtgaacctctagattcagcaactcttaaaagttgaagcatctatcattcagttcatttgtattttcctataaatatataagactcacattgtaatagaaattctatgagaaaagaataatataaataatgtctcatcttctctatctctattctcttgctccatttttagcaaatgcaaaattattagttttcacatcaagcacccataaacccttgtgtatatgaatcattattcattaagatttctttgtggttcaaagaaattaggaattttattgtccagcttgtaatgcaggtgcaacccttggggcaggtactataacagactca

SEQ ID NO: 35189 - DNA, 336 bp, Medicago truncatula
  Intron number 1 from transcript Medtr3g103960.1 (locus Med tr3g103960) derived from phytozome v7.0 (chr-ID MtChr3; po s 25704754 to 25705089)
tctcaggtaattcccttcgattcatcgtcttcttcagcttcgcttttgaaccctaattcaatcgatctcgcttctcccacctcaattagggttttgtcaattatctcaatcgcaactttgataatgacccaattcgatccaattaagctttttctgaatgtttttttttattcaattcattataattaagccaatttgattaatgtcgaagtttttgtgctgttcgtatatgctcctttttgcttaattaacccccctgatgaaaaaattggaatcttatctatctgttttaccattgcagcttgataacaggaattcttctgcttccaagcgtgc

SEQ ID NO: 35190 - DNA, 462 bp, Medicago truncatula
  Intron number 2 from transcript Medtr3g103960.1 (locus Med tr3g103960) derived from phytozome v7.0 (chr-ID MtChr3; po s 25705069 to 25705530)
gaattcttctgcttccaagcgtgccaggactggtgcgttactatttgttttaaggaatcttatccataagttttgacggattttacattctttaggcactacttattattgaattaatatagtttaaggattaaatttaagagagtgatagtttaggcctttagggattaaattgatagttcattattcttttatgtatctgttgtctatggatagttcaacatatcttgtgttacttggaattactttgtgcagttttacatactgtaatcaatttatgcacatttgcttattttcaccctcaccgctattttactttccacgatacaaactcttgctacgtagtattgcactacatcttgatgatatttaagatacgattcttcggtgcattgatgatatttaatatatgattctccggtgcatttaaatttgatttgtttgtaggtagccgcagggaag

SEQ ID NO: 35191 - DNA, 680 bp, Medicago truncatula
  Intron number 2 from transcript Medtr3g109550.1 (locus Med tr3g109550) derived from phytozome v7.0 (chr-ID MtChr3; po s 27470667 to 27471346)
cctttgcttttcataggtaagattttatgaaatatatcacgagaaataaggattttattactcatcaaaggtcagattgagttagtgccacttaggtaacatagcaaagtttttttttttttttttaaaaaaaaagttaaactaaatactaggagaatcgaacctgcaacctagggagaacgtaacaaagttgttattgaagttgtattagattgttagacgtgtatatggagttggtcatcctcatcttgtgagctaactttagtgagattcaaattcatttaacatagtaattgagcagtgtaaaatatgataatgtgagaatttaacccaagtttcacgtgagtattaaaaatagtttcttagcatggaatgcgcccatttaacatttgtgttctcacattcacaccttcatcttctgagctaatttttgagatgaaattggagcctatttaatatgctatcatacccagattaagaatttcatatattaaaggtgagggttgatattgatgttgtggaaattggatgtacatatgtggttgagatcaaaccgtatttaagagttttaacctcttacattttttttgaaggaagttttaacctcttacatgtcatgctatattttttcattcttttgaattgtttttacataatgatgatataggagttaccaatta

SEQ ID NO: 35192 - DNA, 600 bp, Medicago truncatula
  Intron number 4 from transcript AC235488_22.2 (locus AC235 488_22) derived from phytozome v7.0 (chr-ID AC235488; pos 97363 to 97962 reverse strand)
tcttctcacacacttaatacagtttgcttatctgggtaattcatttttttatgcttgtgaaattggcttctgcatcgtaattttttgagaaattatcttatttaactctttagacatctacaggttcataaatagttttccgtaagtgaataacgacaaatttattttaattgaaaagtttccatggacctaagcctaggcatttcagatattttttattctaataattttgttagagtttagagcgagcgagttttgagttgtgttcttaaagctgcttgcttatagtggggttgttgttgggttgttagttatgtactctgaccaaataattgattaggtgtgcatgccttacaatccaagttacatgatttagcttcatatttcttatctattttccgggccaactaagaaggattggaaaattaaataagtaaaaacatggtaatgcatttgcgatcatatattttatgtttctccgatcatcagcttaaattgattagaaatgagaaagatgaaacatttgctttcaattctctgtgtttatcattaatatatgtttttccttggaatggatgtttatcagctaccttttgcact

SEQ ID NO: 35193 - DNA, 887 bp, Medicago truncatula
  Intron number 1 from transcript Medtr3g025330.1 (locus Med tr3g025330) derived from phytozome v7.0 (chr-ID MtChr3; po s 6527965 to 6528851)
aagaggaaattctcaagccttacaaacaagtattggtaagtatgttttttgaagaatattggtacgtatgtttattacttttactgcatctgaatctcactttttaacaatttttcatcgttttgttttatatatattcaatattagatcggtacctatatagtggaggtaacaatctggaaaaacaaatagaagtatgtgattacattttaatagatttttggggaggtgaatgcaattttttctatttttaatccaatcagataagagaagagtagaaaaaaaatgttctttgattttgttcttctatcaaacaactaccaagaatctcacattctactctttaattatctttcttcccactttcttatcggaccaaaggctaccaaacatagggtctgtttggcaagtaacatatttgagttcttaaaaaaataaaaggtaatatatttgagcttatagtttatagtttatgtcttataagtttatttgattaaaaaggtatgtttgataatcgtcactttttgacgagcttataacctatttttactagtttatcgtgttttttaataagcggattcaagtagcttatagtttaaaacttataacttatcatctattatgtcaattttacctttgttgctttaattgaaagaaaaaaaatcaatatatttgtttacgtcatttcatacttataagctatttcaaccaccctcttattttaacaaacactacaaagttaatcagctaatttgtcacctatcaactataacctagtttatcagtcatacgctataagttcatccgctatttgtttgccaaagagagccatgatgttagtatgaaagttgatgttttatttacaggtcctgcacctcggctgcctt

SEQ ID NO: 35194 - DNA, 768 bp, Medicago truncatula
  Intron number 1 from transcript Medtr3g028940.1 (locus Med tr3g028940) derived from phytozome v7.0 (chr-ID MtChr3; po s 7531061 to 7531828)
atcccctcgaacttttggtagaaaaaaaaaactatactattatgataatttttcggtttcaatatttattttttgtggactttatacgatgttttatactgacatggccttaaacaaccaagttcctgggctttattacactactctttaactaaaatcattaattaacaccgaaaaataaagaatatgtttttctcccatttatagaagaatcttaatccttaactagaattctaatttatgattcttcactgcaatttgtagtgttttgatctaggtaaaagtaaatttatcgtagttattatatatcaactatatatagacgatctttttgtagtctatacttttatcatccacggatttagtgacgaagttgaacttgtcaaacaatcatctggttttacctacataactttgattgtagatatagagcttagttacaattttcaacttttaatctacaactattttatgtgactatacaatatggatttcaagggttttcgtgtgcgtggtagtcattcccttcacccgtggaggaaggtgggatgataaaaagcttagacttgggtctaacaaattcgggcacgcgatgatctaatttgtgtacatgcaaaaagtgaatgttcaatacctaattaactaccttcttgtgtacacaatcactcgattctagtttatataagtgcatggactatctgtgtataaattcatgccaaactttattgtttaggtatttgaacactaaaaccgcgggagataagcaga

SEQ ID NO: 35195 - DNA, 806 bp, Medicago truncatula; identical to SEQ ID NO: 34221
  Intron number 1 from transcript Medtr3g138540.1 (locus Med tr3g138540) derived from phytozome v7.0 (chr-ID MtChr3; po s 35427466 to 35428271 reverse strand)

SEQ ID NO: 35196 - DNA, 965 bp, Medicago truncatula
  Intron number 3 from transcript Medtr6g046370.1 (locus Med tr6g046370) derived from phytozome v7.0 (chr-ID MtChr6; po s 9684245 to 9685209)
caatcctgtggctcctgtgcatccggatcttttaggtttgggcttgggcttgttttctttggttttctgcgtttttgtctttcctgtgctattcacacccccttttttgctacctgcacctatgtcttgattaaaattgtgatgaaattcctagaaaattcatacatgtttcttggtattttcttagtgtttttatgacatttttgcacattaaggatctatgaaatttctgtataattaattcatagcattttaattctctttgaattatttgttatggattcttcttcacacatttgtccttgatgtgagaatatgtgataaaaactacttgctgtgttaatatgagagatttgtgcctttaatttcatgttgattcgctgttttgatttggttcataagttcttgattttatgaacaatatatgcatattttgaaagatataaaataccaaggttattctagaaaatatggcatgaaaccatgcttgcatgttcccaacaattccatgctataacttgagataaagaaaactctttcaaaattggttaaagcatgagaattagaggccaagaatgctttaggtttcatacctaattttttagggtttaatgtcattttgttaactttttgtgccatcttacatgcttttatttcttagtacttgttatgctttttttcttttcactaacaaatttatttccatgtttcatgcatctcatttagcattccctccaccttctttagcctagcatttatttttgcaagttttaattcctttagagatgtaatttgtcatcattattttgtagcttggcaaaggggccatagaatgtatttaggcaatttttgtaatatggactatggacactatgacgcaccgacacgcacacactcaccttagatgcatgcataggattgtatggttagataagcgcttaggttttaaacacttagagaaaatc

SEQ ID NO: 35197 - DNA, 370 bp, Medicago truncatula
  Intron number 1 from transcript Medtr1g103140.1 (locus Med tr1g103140) derived from phytozome v7.0 (chr-ID MtChr1; po s 21375128 to 21375497)
gcaaggtttagctttcaataatctttgtgtgtagaagatcttctttgattttattttattttttatctagcaataatcttataaattttgtttgtatgttgttcaataagtcatgtcaatttggtttttttttttttttcatgcaccttccatttgtacatcctattttctaatatggaaactctattgccttaatttactgttttaaccttaatgcttattttatttgttctatttttttgtttcaacagaccttaatacttattttatttgttctatttatttgtttcaacaaatcggcttattctatttgttctatttttttgtttcaacagatctgccaaatcacactcataaccaaatctcctat

SEQ ID NO: 35198 - DNA, 841 bp, Medicago truncatula
  Intron number 1 from transcript Medtr3g080390.1 (locus Med tr3g080390) derived from phytozome v7.0 (chr-ID MtChr3; po s 18884225 to 18885065)
atttcttccaccagaaaataacgaagtccttccaggtaccactttttcttaattttcggtttttacttcccctctcccgaagatgcgattccacccccaattacgtcgcatgccaaagctgcgcgattgatgaggcatatgaatatgataattatgattgtttttgaaaatttgcataccacctgtttgatgaaaagccctaaccaattaattacgaatgctttgaatttcaaccttgtttgttttaatttttatgttcattttgttctgaattttatgttagcttggatgcatacatcacccttatattgtgaagaatttcaatatgcgagtttctttgagtttccaagtgcgtgtatcatgttattttcctatataatttgtaacctagttcgcgagtttctgattaaagaggctcttttggttcctgaatgtgttaaaattataaaagcatccctgaatgcatatttgatttgatggactaaactaatggaaaacacattcaagagcactgaagagagtggctgatttgatactgaaataatagaggtgaaaatgtttcaaaaattatgaatgggatgaagtgtattatttggtacgttggcataagatttaaattattgaactttgcaatgtgttacatatccgaggtgttaggatcaacatgctagtagtagtaggaatgtttgtttactataaccatacaatgttccatgaacttctttgttgatatctagaactatttaggtagtaggttttgcttattaaatttgcattttttatgttgcatctcttatgtttttttaatcaactcttttcgtgttctttaaacagttgcaca

SEQ ID NO: 35199 - DNA, 479 bp, Medicago truncatula
  Intron number 2 from transcript Medtr4g143930.1 (locus Med tr4g143930) derived from phytozome v7.0 (chr-ID MtChr4; po s 36068788 to 36069266)
gtggtgattgcctaacattcaccagactttgttacctaagaaggtttctggaaagaagggagaaattggatccgttagtcaagaattttagggtttttatgtggtatttggttttttagatttagtagattcagttttattgttattttgttatgttatcgtgttcttattatgagattaggtaggattaatgttggatgatgtatagatcttcattctgattaatatgatattagatttcgccagattttgtcttccacttatgcatatttctattgtttggtattgttaataaaaaaaatgatgatgatgatgaaagaaagaaaaaaagggttgaatttgaattgctattgttgttggttcattgttgttgctgttgttgtggttgatttgttgctgatgttttcgtggatgatgattagagaattagaagaaattctttttttttttttttttaatttaagataaggaacttaaaa

SEQ ID NO: 35200 - DNA, 957 bp, Medicago truncatula
  Intron number 1 from transcript Medtr2g045780.1 (locus Med tr2g045780) derived from phytozome v7.0 (chr-ID MtChr2; po s 12709368 to 12710324)
tcacaattcaccacaagtgagacataacaaatgaagtcattcatactccacgtgataatgcccacccttgatcgaaaagttgtcaaacaaagatttttgtggttggtcgttattttgtggttatatttattgcactctcggggaaactacatgtgtagcttcgttaaaaactattaaaaaatagtcaaataaatgagtaggtgaaataaggggatgagagagagggcatagtgaatgagtgacactctgtgtaaaaaaaatagagaaaaaattgatatagtagagtaggtccgtgagggtgaagaggacctcggagggaggagagattgatgaatgatcgaaataaatttatgcatatgtttatcataagtgatgaaaatgaccgatgaagaataatatgttctttcaagacaatgactattgtggttctaaaatatcgagaaaaatatttaagatcttaaagaaattatcaaacatcttaattacttgtcatcgtgtgaaaaaccttcttacctggttagataaacatgtcccaatttaactcttcaatttttcaataggtgttcatgacctattatgttcacaatcaaccaaatgatatatattttatttttattgtataatatatattatctgatcaatctaattttatgattattttatatattttgtctgataatctctataaatagacattgattgaattcatatttgacgacagtatactcttagttgaacaatgatgaaaacacatcattttatcttgatatttttttgagtgcagaaatcattatctatgttgttggaattaaatcatccagagatggaaatcaatgtatataaataaattataagtgtcattacattcttcttttactatatttgataaaaataaaaataaaaattgtttcttgacttgcagttggtgcagcaaaagaatccaaaacaaaaatttgg

SEQ ID NO: 35201 - DNA, 935 bp, Medicago truncatula
  Intron number 1 from transcript Medtr3g150170.1 (locus Med tr3g150170) derived from phytozome v7.0 (chr-ID MtChr3; po s 39512997 to 39513931)
ttcaaagggtcagtttcaatcacaatttaactaattattttgtttctttttaattaattatttgttatcaatcaattcaaaataatgagcatgacataacatgatatgacatgagatgagttctcaactaatcacattttcatttttttaaatttacttaattatggcccgttaactttctaattacattttcatttttttcccttcaattttcattttgaatgtatgtgggtaggttaaatgatatttatttgtttatagtttgttttacttatgatagaggaaagatggaagctaacaaaaagaattgtgggctatttagctaacactcaataaaaattggacatataaatgcaaatctatggaagtgtcatttttgggtgaactttaggttgtttggaagtactcacaaattaatttttactctatctgcttatttatttatatggttcatttttattgattgttggtaaattatctataatttttcaaagacagcctaatttttttaagagcttaaatgtgaaattatgacactggtacataaaaagggatagtatgagttcgtgtctaattacatcaaatatctccataaccttttatcataacaagtgcatataaaaaatgcatgcatatttagaaaaatgaaaaactatatttttacaatattttatttcttttgcaatggaccattttcaaaattttaaaaaaatattcaatctatttttgtaatgcattttaaaagaatctttttttttttccttcaaaaaaaagaaaagaatctacaatgtcttctccaatactaattttgtgcaaacaatagttgttacgtgacttaaaatggtaactatagtgaaaatgacaatacaaaattcgatgtgtatttgattgaaaaaacagggtgaccaagcttctattattggaggagcaataaa

SEQ ID NO: 35202 - DNA, 1052 bp, Medicago truncatula
  Intron number 3 from transcript Medtr3g009440.1 (locus Med tr3g009440) derived from phytozome v7.0 (chr-ID MtChr3; po s 1369615 to 1370666)
aagagatagaacaaacattcaccccaaagagacaagtaagaagtatttcaacctcttttccttcatctttacaatttcataactattattattagaccaaaactattcctttctagagaacctaccttttctaccatcaaattaaatcttggtttttgttgagaaaacattgatttattctaagtgtagatttcttttctttcgtttgaaatgttggttttggaaacttgaattttgttcaattagaattatgactttgaagatactatgatatttagcaaacaaactgtatagaatttctatcaattcaaggcatcacgtacataacatgtttatagaaaagaaagaataatgatattttgaattaagtagtgttgaaatagttttgctattgaaaatatgttactggtatattcctgaacttattatagatagtatatttatatttataatacttaattctgaaactttcaagaggtaaattaaatatatttttcaattagtattaagattttttgttgatttattttaagatgaatttagaaaatgtattttggaaataaaagtaaaggagatgtaattgtaatccttgggtgaaaacatagagtttgttcgtagaacactactagaaaaagcaaaattagcaaggaaaattagtgacggaaaaaatgaaaatcctcacaaattccttggtcgcaaaatttagtgacggaattagagagggattttacgttttccatcactaaatttccctcactattagtttttttagtagtgagaataccattgaagttggggactcaaatttgttcaatttagcactctttgattgaacggcttggtctaatagattttaaaattctagatattatttataagaaaatagggtgttttacttcgacaacataatgattaatagtagtgaatcatatacttcaaccaaacccaagtcttgagtagccataattagcaatatgtagtagtatttgaaactaatatagtaaataattaattgtgaaggtatagaggtagtagagccaagaccgttgctt

SEQ ID NO: 35203 - DNA, 758 bp, Medicago truncatula
  Intron number 1 from transcript Medtr4g141860.1 (locus Med tr4g141860) derived from phytozome v7.0 (chr-ID MtChr4; po s 35120558 to 35121315 reverse strand)
tgcagggaagtttgatttgttagagtataagtgtcgtaagaatttgtatatgcagggaattaccaaaaggctttaagggactcagaacagaattgacacaatgatggagagggtgataagggagcatcaagaggaaaggaggaataaggaaggaaagtggtgaaggtgcttgtgttagggatctgcttgatattttggttggaaatactataggatgagagcactagataaaattaaccagagagaatgtcaagtatttcatctttgtaagcattttttctaacttccattcccttcctactttattttgatctacatgcatgtatacctgagttattgaggagcagaaaaaacatccactacttactactatggattcttttcaaaagttcatgcacttcaaaagtgctggttagtgtttagatataagaattatagtatctacagagtaaatacataaaataatctctgactttggtcactttgtttcaattcagttagctccttcgcattatagaacgttaatcaagtcagttcctttgtcagtttctgtcgattaatagatttcaacttgctagtggctgatattatcattatgcgcctcattggcacgcctgtcaatggacacataggtgccatgcactacttcgttgatgtaaatgttagagaccattttgcaaaattacctatacgatttttaattttagacttcgatttatgcaggacatctttttagcaggaacagacacatcaattct

SEQ ID NO: 35204 - DNA, 674 bp, Medicago truncatula
  Intron number 3 from transcript AC233676_14.1 (locus AC233 676_14) derived from phytozome v7.0 (chr-ID AC233676; pos 61226 to 61899 reverse strand)
ggctgcacaggataatacctccacagccatcggtatggtttggcaaagggttgtttagtgaaaaattccttgcttaaattgaatcattataatttgaattccctatatcacttatctgtcttgatattcaaaattgtgacttatgtttgacatatttgcgtatctgaaatgctgttactaggatagaagagagaaacacttatgagataacatttatgagatactaggatagaggagagaaacactgttactgaaattgtattttgtattgaatgaatctgccgattcttatcctaatctatcagggacttaacctacacaaactctgctgagttgttacagccgtcactagtaaggacagctgtcgtggcgccactaaccatattctgattattactaagcttcttctgttatacactcatagcacagccttatattttaaaattcttcgttattgtttctattgtgtatggaagcaatttaatcattttacgcagatgattatcattttctaagcattaaattcagcaagcatctgaatggaaactgaagtgttattacattgatttatggttactaggatatgctgcttccatttaatctatgtgaattacattctatttttagtggttagttgtgcctaaaagaaatactggccttttttattacaggga

SEQ ID NO: 35205 - DNA, 908 bp, Medicago truncatula
  Intron number 1 from transcript AC233676_14.1 (locus AC233 676_14) derived from phytozome v7.0 (chr-ID AC233676; pos 63769 to 64676 reverse strand)
gtcttcttcaagtatctcatgactctttcgatagcttgtcaatgctccatgtttggcctgctcgtaaacttgcataatagtcccacggcgtagccgatgtcgggtctagtacaatcagtggcatatctgagactgccaatgatgctcgcatattcagtttgtctaacactatctccagtgttcttaaatagcttcacacttgggtcacaaggtgtgctcgcaggtttacaattgaagtaattatatttccttaagatcttctcaacgtagtgagattgattcaaggaaattccattatcagttctagtaatcttgattccaagaattacatctgcttctcctaggtctttcatatcaaagttgtggcacaacaatgatttcacatctttaatggcattaaggtttgaaccaaatatgagtaagtcgtctacgtagagacatatgatcgtgcaagtgttattttcgtacttgtaataaatacacttgtcgctttcattcaccttatactcattctcaatcattagattgtcgaatttctcatgccattgtttcggtgcttgttttagaccatacaaagatttgtctaacttacaaactttgttcttttgtccattgattacgaaaccttcaggttggtccatgtagatttcttcttctaattcaccgtttaaaaaagcagtttttacatccatttggtgtactatcaaattgtggatggccgccaaagagattagtaccctaatggacgtgattctagttacaggcgaatatgtgtcaaagaaatctacattttctctttgtctaaaacctttggctacaaggcgtgccttgtatttgtcgattgacccatcatgttttagtttctttttcaagatccatttacaacctatagtcttgcatccaggagg

SEQ ID NO: 35206 - DNA, 732 bp, Medicago truncatula
  Intron number 1 from transcript Medtr3g142620.1 (locus Med tr3g142620) derived from phytozome v7.0 (chr-ID MtChr3; po s 36599909 to 36600640)
tttaccctgttgggtacgtaaaaggaacttccttttttttacattctctttgtttttcattttttttgtttccttctgtttcactttatgcctttctttcttctatgttgtttttataccttttcctatttgggcctccatgttttgttctgttattttattcctccaaaagtaatttgaataataaaacatctttatattattcccattcccatgtcatgtttttctttgtctcattcatacacaaactcataacttttttttaatatatagtatatataatagatggatttatgcatataaaagcaaataaagtgattttgtgttcccagtcccatttatatgtatgtttggttccatattttaaggtgacacaattgatttaggagtataaaattgattttgacatgtttgtatgttcttaagtataatttattctgtttggaaaatttattctaccataacctaaagctagaagctggtgcatgtttgaaattgtggtgaatttagcgaaattaagctttcgcaaaatcatgatgactcgccatgatttcgagaaactcatgcgatttcgagcatgcaccaattggtttttacaattgatttttagccttaaatttattgttcaatcacttttacataattaattaattcaaaatcaatttttgttaggcggagaaccaaagacactaatacaaatctcccatacttttaacatatacaggttttata

SEQ ID NO: 35207 - DNA, 354 bp, Medicago truncatula
  Intron number 2 from transcript Medtr1g140720.1 (locus Med tr1g140720) derived from phytozome v7.0 (chr-ID MtChr1; po s 31208474 to 31208827 reverse strand)
ttgatccttgaacttcattccaagtggggtaacaggtaataatatctccataatatatttattattattcataattaaccaacatggtgacccaaaaatgtatttggtcatcaatccacacattcacacgttcaatacaatacattagttgaagagacaaaaaacaaatatattttgatttttctctctaaatagatattatttaattaatgaaattcgtctttatatttgcgcacaaagatcctatagtttacaaaaacataattagacttatgcaacctcaatgaattgaacatttttatggtttatttgaaaataggtggtcaaaaattgctcagcatttaccaggaagaa

SEQ ID NO: 35208 - DNA, 611 bp, Medicago truncatula
  Intron number 1 from transcript Medtr7g064450.1 (locus Med tr7g064450) derived from phytozome v7.0 (chr-ID MtChr7; po s 12964913 to 12965523)
tgtgggtgcttggtccaaggttcacatacctggtggtgcgtatttttagtgattttagtcaaaaaaattaaattatgcttttagtgtttgtttatccctgtcggtgcacatttttagtgatttttgtcaattttttaaaattatgcttttgattagtcaatttttttaaattatgcttttagtgttccaatttataaatttgaaacggggccttcaaatcgtctaagacggccctgtctgcagatgatggagttaccttgtagcattgataataaccattagaccttatgtatacctccttcagctccatgtctagcaaagactttgaagttaccattaatgatcttcctagaattagcgggcagtcttgagcattgttgaccttcaagactataacatctatcccaaatttgaatccatcaatgtttatcttcataactctcaccatgcccaaatgctttgatgtagtaccatctgcaagacaaacattcataaagcatgtccttagcaccaatcctctgattttcttgacggtggcatatggcatgagaatcgcataaatcttctcctgcatagacgtttcccacattcacagtttccaggaaatcacg

SEQ ID NO: 35209 - DNA, 910 bp, Medicago truncatula
  Intron number 2 from transcript Medtr2g038670.1 (locus Med tr2g038670) derived from phytozome v7.0 (chr-ID MtChr2; po s 10845652 to 10846561 reverse strand)
atcagttgcgacttacagaacttatattaactgatgtaagctaaacttgatttctagtttatatgcttgcgatgtgttcatagagtatactggttcccctcattctgcatgatttgatgatttctcacaatcaatggagatcagccgtgaattgaagtattaattcaatcaacaaaaaaataaaatccattaatcaagtttttatcatttcattccaagcaatcccatttggtactttttgtattgacaatttcaataacttcaattttgtttgtggcggtttttagtatgactatggtggaatattgtgtaagctggaaccaggaatttcttgtcccaaatatatgtcaaaatatttattcatattgttggttgtggacattaggcagcctttacaaaacttgtattcatctgtaataagcaatcatggaccaaaaggataaaatgactagaaatttatatgaagtcatgtatgacttttcatttatgcgatgtgtttagattgataaaaatacggaatattatttcagattcaaatgttcataaagtcatagacataggttacaatatatagattaaggtacataaatactattgatgaccattctaaaattaagtgaatagtaaaaataagaggaaatacaaacagcaaatttaacatggaccaccaccatgaatcacctacctattatagttaaccatgaaaagaattcacctaatacaatagcccatcttgtttgcaaacttagagtgttcttgtgctcattttgttcattttttaattgcattgttcatctgtatgccagagtgcgttagaatctttcataaatttctttttcatcctgtgcttcctctcatttatgtttgtaatgcagcaagagttttttccgaagctcgttgaagtattcag

SEQ ID NO: 35210 - DNA, 664 bp, Medicago truncatula
  Intron number 2 from transcript AC229699_5.1 (locus AC2296 99_5) derived from phytozome v7.0 (chr-ID AC229699; pos 15 841 to 16504)
gtcgagacctgacgataggattgataaggtatgtggttaaacttaaaatacacaattttagtcatatttttcatgtatttgtttaaatctgaagatgactaattaatgaaaataaaagcatgcatttaaaataaacctatttataggttctagctagctaattagttattatagtaaataagaattctattcatttttttgttaaaaaaaaaatctatttattttccttgaaaaaagaattctatttatctgcttgaattataatctaaaggacatccgcaattagagttttacgtacaaaataaatgttttgagcgattggttgtacaatagttacaaaatttatcttccttttaaaaggttaaacaaataagtattaaataaaaggtttaaatttgattttaattccttaaatataccattttttactttcaatccccataaaaaattttagtccttgcaaaaataccataattgtaattttggtccttgatttttgttttagatgtccctcagatatagcttcatatcaaattttgttcttataatattcattttagtccttgattttagggtgagaaaatccacctttaatttatttgaatttgagaaaatgacatatgcaaactaacttcagacattcagacattcgacatcaaattga

SEQ ID NO: 35211 - DNA, 570 bp, Medicago truncatula
  Intron number 2 from transcript Medtr4g144340.1 (locus Med tr4g144340) derived from phytozome v7.0 (chr-ID MtChr4; po s 36321359 to 36321928 reverse strand)
gagaattgctgtaagtatctatctgctctttttactttttatagatatttatagacatatagttatcttcgctttccatttatgggcaggattgtgtttacatatagtattttaagtgtggatttaaagtatactcataggcatagtacggatgtccacacgaaaaattgatttgataattgcttaaatgcaaaatgtacgcttgctcaaatttttagaaaagtgtatactattttgcatttaggttgactgattagtagaaaaatgttgactgattagtagaaaagctagcaagtatcctgttctcattctcaatatttagggctcaaatttttactgcgattcaggtttttaagaacgtaacatccatcagggtaaaaataattattacgttatagttctacaacatgattcagatcacttcctcatgaaagaaattaaggggtaaaactcctttcttgttctgattagaatttaaccccaaaaggcattagacaaaaattaagcttgtacattgctttgaatcttattacaattcaatcggtttgtaggtttgaagtgtcaaaagtg

SEQ ID NO: 35212 - DNA, 148 bp, Medicago truncatula
  Intron number 1 from transcript Medtr4g144340.1 (locus Med tr4g144340) derived from phytozome v7.0 (chr-ID MtChr4; po s 36321997 to 36322144 reverse strand)
cattcttgcaggttagttaatcaatcatcactctcatctcttcatttcactcactattattatcaccatacgtttattcttttgaggtcatttgttcattatactagcaattttgttttctcattaatttacagactcaaacgagaat

SEQ ID NO: 35213 - DNA, 555 bp, Medicago truncatula
  Intron number 1 from transcript Medtr6g080780.1 (locus Med tr6g080780) derived from phytozome v7.0 (chr-ID MtChr6; po s 16289823 to 16290377)
gaatcctctgaaaagattattgctgaatacatgtaaggttttaaggatcttttcttgttacataaaccttatgaaaacaggggatactctgtttttaaacaggggactctgtttttgtgttctgtttatgaaaatcttttgataaagaataaacacaaaaaataatgtaacaactttgttgctatgttattcattatgattcttggtatattttaaaagggttgattcttttagaacttttattcaaattagatgttgttcttcaatgttcctcctttactatggtttatttgtagatcaaagagtttatatatatttttttattgtatagttttcttatggataaatcctaaaacccttgtttttggtagaattaaaccctctatggtttatttgtaatattattttcttgtattgttttcttattgctaattcctaaaacccttttctttggttgatctattatgttatgtggaatagtcaatcgcaatctataatattaaataaaaatttaattttttatatgttattataaacagggttggtggatctggt

SEQ ID NO: 35214 - DNA, 386 bp, Medicago truncatula
  Intron number 1 from transcript Medtr4g160810.1 (locus Med tr4g160810) derived from phytozome v7.0 (chr-ID MtChr4; po s 40900145 to 40900530 reverse strand)
aacagaacgaaggtttctagatctatcttctgtacttgcatttttcaatttctcttgtttaatttcgtttctgaaactctcttccacaatgccgattaatttgaatttctttccaattttggatacctttgcaattttctgatttgttctatgagattgacgcggatgtggataatgaaaataaaaataaaaaaattgatagctgaatttcactccatgttattggcgtttatgattggaaacaaataaatgctattgagttcgaagtgctttttgtggatattttgttatggcattgatgcgtttttatgaattacttagcatttggaaagttatattcaaattagtgcatttgatgagttatcgccattcttttacaggtaccg

SEQ ID NO: 35215 - DNA, 389 bp, Medicago truncatula
  Intron number 1 from transcript Medtr5g048320.1 (locus Med tr5g048320) derived from phytozome v7.0 (chr-ID MtChr5; po s 20421741 to 20422129 reverse strand)
tcaaactcagtggacgaaagccttgttttgggaaggtaatcctttagttgctacgcttttcctatgtgttgtttatggtctaattgcagtcctgcgggcgttgttctcatgttttcttccccaatttattcttgattggttctgtgaatgtaaaaaattcttctctttacctctcctccaaagtcactctcgtaaacaaagtgacggagtctcctcgtttccctccatcccctttcctcagaaagcatgcctctcccttactctcataactcccaaccaaaacacaatcagagatcaatcttaatgctagttcaaatcaaatgaagaaacataaagtttttcaaccatcatgttgtgtctaatattaagttattacatgaaaaatacag

SEQ ID NO: 35216 - DNA, 1015 bp, Medicago truncatula
  Intron number 1 from transcript Medtr4g006000.1 (locus Med tr4g006000) derived from phytozome v7.0 (chr-ID MtChr4; po s 587085 to 588099 reverse strand)
gaactgttagagagcctggtactatttctcatctcatcattcttattgattttcaattttttttagaatgaatgagaaatatcttagttattattgaaaaatattctaatacattcattagttgctaatgttatacatgtattgtataagtttattttaataagcaaagaatttcatttctatatatggaaagaaacaaggcataaggacatgtaattttgatgctgtaagaaatcatgctctaaacaacttgtgatgaccttcaattttagggactaaaatggcgattcaatccaaaagctaattgtttaaatgaaagtcaaccaatacgtagcaacttgcaagcaaattaacaatatagttcctccatttatgacaatcataggactctgacacggacaaatcaacactgataatgtcaaaaacataggacactgacaccgataaatatatatttaatccatgtatatatatttgagatgtgtccaagaagtgtctaacgtgtgtcaatacaaagaataaaaagttttttttcgtacgagtgtcagacacagactcgtgtcgaatacagagaggtgtctatccttcatagatcataagagtcgagaagtgagaaccctttgtgttctgttttcaaccaactccatgacctgtatatgacctttccaaatagtccaagcctctatactagaataacaagaagttggtggacctacaaattgtagtaaacatgttataattgtaaatgtaatataaattgttgatttttcatcattagttaatacttcatattatttactttgtcttataaggtgaattactcatttcagagtactgcataccatatttctatattacctactatttagcataatttcaaattacttagtatactattttgtatacaattgtcgaagaggatgttgttatgcatcttttctctcttgttttgaggtataagtgttgttgcgattcatttcaagcgtatgtctgacaactgcaggtagtccaaaat

SEQ ID NO: 35217 - DNA, 1050 bp, Medicago truncatula
  Intron number 2 from transcript Medtr3g136650.1 (locus Med tr3g136650) derived from phytozome v7.0 (chr-ID MtChr3; po s 34545053 to 34546102 reverse strand)
accgtttcagagctattgttaagaaaatccgcgaagtagcttaatggtctttataaaatgttgcacatttgaatttctgttctcattactctattctatgtgatctttaaaaaatgtagctttatgtttttgagtgatgcttggcttaaattgaaggctactctcaggcatgatttttgcactagttggcaacagctgcttctgttgctggaattttactacttattctctttacttcaatcagtttattctgtcttgcgagttatgaagcaatataatgactcctagtgagttcaatcattgtcggattcataactattgtaataattattaccgatttatgttgcttcaatggtatctttgttttgtttgttgttttagattgaaactgcaatttcatgtacagtgattttgcatgaagtacttgtggaatctcaataattaatcagtcacatcttcactctaatattcactgtctcaaccaagatgcatacaccccaaactcatttccactggcccctttcaccaccgtcaccacccccaccttcaaaacatggaacatctccaacgtgctgagagaagtttgaacacgttgttctgctacatagattccatcttatctcatttcaatcactcttattccaaaaccctacaatttactcatgatgaatttgttaagttaatcttaattgattccgggttcataattgagcttttctggagatcctattgtgatcattggtcctaagataatgggtttctcttaaaacctttgttagatagtcttgtaagattagatttattgtttacttcaaaatcagcttccctatttcgttattgaaaatatttacattctttcattgacttatatcactacgtctaagatcccttcttttcttaaacttactttttattatttttattattttgattattaataaatcaaaattggattttgatgacggtgatattagtataaggcacttcactgatctgattaggatatttcatttggaacatcctattgaaaggcagccgggtagaatcatc

SEQ ID NO: 35218 - DNA, 334 bp, Medicago truncatula
  Intron number 2 from transcript Medtr4g011400.1 (locus Med tr4g011400) derived from phytozome v7.0 (chr-ID MtChr4; po s 1641632 to 1641965)
acaccaaggcaagtgtataagcttctaaattgttctgaaaagaagggtcgttgccctggactcttttcttattgcattcttcgtttttgtttaggcgcatcagagtcaagaacatgcacagtgtttgcatgctttacatcagcaatagatcatgtaaattaatccttactgttcaaaactgttagttagccccttttaagatgtaattagtaattttatcttcttgacatcaagtcaccttttccagtgtctacttttgtgcacagtaaatggttgcttctgcttcttttgcttatacttctgctttgattgttttgcagggttccaactttgg

SEQ ID NO: 35219 - DNA, 897 bp, Medicago truncatula
  Intron number 2 from transcript Medtr6g005660.1 (locus Med tr6g005660) derived from phytozome v7.0 (chr-ID MtChr6; po s 423793 to 424689 reverse strand)
aaagcacaattggagactgtaagttttgtccagaaattcttatgttgtcagtttcgtaagtagagctcaaattgcagagacatttgatatgtcgaggcgaagattgtgtgtaaaatagcatgtttgtatgtgaaataggtattttttcgtctgagtaatgatatttgtactaaccattttctgacaactttcgggacaaattttttttaattggtcaaaaaaaacaatagagagagtaagaacttgatgagagtatgagagagagttgtccaaatggttgtaaaattgtattatgtcagcttcgtaagtagaactcaaaagatggtaaatgactgcagagacaattgatatgctgggttgcgaatttaatgtaaacttgcattttagtagtgtgtataagttgatcgctttgaaaccagattttttttttagcagtaatcgcatgttatcggtcccgtaattagaactcagatgataaagattgcagagacatttaatataatcaggtgcagatttcatgtaaaattgcattttagtagtgtgtgtgagtttgcgctttgaaaccagtatttttttttagtagtaatcgcatgttatcgttcccgtaattagaactcagatgataaagattgcagagacatttaatatgatcaggtgcagatttcatgtaaaattgcattttagtagtgtgtgcgtgtgagtttcggcgctaggctctttgaaaccaaaaataaattagcaccttttttttttattttttacattattaattctactctatttagtattcattatcatacacatgttgcttgggaatgttcttttgtaaactaagtttttttttattttacaataatcaagtttgtttcagagaagatagaatttgagagacaatct

SEQ ID NO: 35220 - DNA, 945 bp, Medicago truncatula
  Intron number 1 from transcript Medtr3g094960.1 (locus Med tr3g094960) derived from phytozome v7.0 (chr-ID MtChr3; po s 22874104 to 22875048)
cctccacctcttctactacatatttagctttaggtgtaattattttttttttgtaataattagtgttatgttaatgtattataatcatatttaattaataaaatgtgacgactattaaattttgccatccattttaaattatgtcacttacaattatgtcattttaataaattaatttgaatttgatcaaaaccggttaaacacaattgggattgtaaaattgaaagcgcataaacacgctatggattatgaaatctcgatggaggataaaatggtcaattcagagcacgagtgagaagttggtagagacagaaaaaaaattctcgtagtgaaattaaaatgtgggccgaggtggagacattgaagttggcccattttgaggatactcaccccttgagaattttttttttttttcttctgaattctgctcttctcccagcacattttgctcgcacctagttgatttaccaattatactcctgcgtgacttaagtcatgctccagtggccggtgcgctagttaactcatgcatggtggccggttggccagagctcaaaaacacatgttttttggactttggtcagcttttcaacattcaatctacatgtttttttacacgctttacacgtttttttgactacatttatggtagttataacctatactaccattcccatctatacccctcaaaacttccccatttcttcacactatctcacattctctcctctcactctcaccccctattttttttctcaatagtctctagtctctttttacccctttgaggtttaaagtgatcagttttgagatatatagtgagtagccgacttggggaagtgatcaacacttgggataaaattaaatttgcttctttttaccccaaaaactttttaccgttggtaaaaagaatcttcttcggggtataaaaagaaccagatttag

SEQ ID NO: 35221 - DNA, 712 bp, Medicago truncatula
  Intron number 1 from transcript Medtr3g150880.1 (locus Med tr3g150880) derived from phytozome v7.0 (chr-ID MtChr3; po s 39842505 to 39843216 reverse strand)
gtcacaccagacaatacacagagcttgtaaattacctttttgttattatttattattattttttctatgagagaattgtgttatgttattgcctgttggtgtagtgtagttgttgttgctcttttttcctttttgttgttgttggcttggcttggcttgaccctgagacgacgcttctgatttccctaccacccacctttgctatacgtatgcattgtcagaatatctgaattgccttatgctttgtgtttttcagactataaaattgaaaatgaaggagggttttgttttagtcttttagatttggggggttggatttaaccatggttagttagaggaaccgcacgtggggagttttaagttttaactgtggccgtgtgatgtgatatgatgaatgaatgaatgaatattagtatcattcacattctctttggttaatgatgagctaccaaagcaaatgcgccttttttgtttcttcatctctcaggtgttgtttggggtccatttcaatcatcaattttttaacttgtgtgtgtcacaaaattttcttattctgtcgcattcattcattcgtaaattgttaggctaaatattaaataaactgatattgttcaattttgaatcttgagtagtacagtattttattttatagtataaataaaaaaaatgaaaaataggtgaaacggaggagagtggagctcacgcggtccaa

SEQ ID NO: 35222 - DNA, 805 bp, Medicago truncatula
  Intron number 1 from transcript Medtr5g064980.1 (locus Med tr5g064980) derived from phytozome v7.0 (chr-ID MtChr5; po s 22654656 to 22655460 reverse strand)
taacgtattttaggctgttcaagttgttactgtcagtgcctcctgttttcagccttcggtatgcttctgctgtgcggctgttattgcttttggaggtgttttctttgctttagggagtttttattctctgttacttggttgtaaggggctgccaattttggctcttggttattttgggtgttttgtttgtgcagcttgtgtttagtgcagctgctgttcttgtattgtttcgtttccctgcgcgcttttagtgcatcttgcacgagctcgtcatcaataatatttgcagtttcaaaaaaaaaaaaaaaaaactaactactaacaaatcttaactactttaactactctagttagccattattacatatcctaacaaattatgtggcaaaagcacttataatacatagatgaaacagattgcttttcaaggcttttgatcctcatagttttttatgtttcagccagataactttgtttatcaatcatacttgagctttagacattgttttaattgtttctatgatgtacaaagggtttacttggttggatgttaaattttttgcagcattcatgcctaaaatcaaggttggtagattgaaatagaactgtaagaaggtatctatacaataagctgccacaaagagctctgcagggactcctcacttcacccaagaaaatcaagccatcaagaggcaggaaaaactagacaggtaattgttaaaaggtctctttgttttctggtattggtcaagatagattcttatacatttttttaactattgattgaacttctatgtgaaggttt

SEQ ID NO: 35223 - DNA, 550 bp, Medicago truncatula
  Intron number 1 from transcript Medtr2g046140.1 (locus Med tr2g046140) derived from phytozome v7.0 (chr-ID MtChr2; po s 12871892 to 12872441)
atccgaggaggatctgtaaagaaaaaaagttgttggtaagattcatgcttttatacatttgcaattaaaaatttctggtggttaacttaactcaaatttaatatcattagtgattcagcatattgcgtatgagttactaaacttcgtattttaaacctagccacactcctcattgattaattataagctcttgctgactttctgtcctatttcctatctttttatgccattagttaagttgttctttttcatcctaattttagagatgctaagaaatgaaagattaacagataattcaatcagaagtgtcggtgcaatagactaacataatttaaaatatgtcattgattagttttgtcctgtaaatcttttctgcaaaattggttgttgaagaagtctttctttgatttggatgccgtacacaaaaatatatcattacatggaactattgatcttgctttgtatggaacttttccttgcactctttatagtttcttcaattggtcaagttgcagcaaactttgcacggtgagtgaaaagctgttattat

SEQ ID NO: 35224 - DNA, 736 bp, Medicago truncatula
  Intron number 1 from transcript Medtr3g026410.1 (locus Med tr3g026410) derived from phytozome v7.0 (chr-ID MtChr3; po s 7120819 to 7121554)
ttgaatcattggcaatatcttcaactactcttcaggtataaccttgatagagtatcgattatgatagataatattagttaagtgtccttcaaagtgttatggtttgacttatttgaggcttagtttttgcttttcttcttaagttgattgatagatttatatttctacttatttctatattttctaatgaatatatgaattcattaaattaatcatgattcgatgtcgttcattattgcttaggttctctccttagttcctgatttattgaaggttaagctaccttccttgtgtaacttgaagtcattaagagtaaaaatgaaacgaatttcatattcattattcaaggagcagctgccaaccaggtcgaaggaagaatttgccaagttaaaagaatcatttaaaaagggtagttcgtccatacctgatggaatagtcgactttttgcttcaaaactcaccttcagctgaagttcttatcattaattagattcaaaaggtgaaatgtgcttcaaatagtatttgctttttattttctctattttctgatcatgtagttgtttgtaaaatgtaaatgatctacttttccaagttcatgtgttatactcgtaatttcaatttgctcaaatgttagtgcaagttcatactcttaatggtgtcctttttttttcagttgaaacccgaaccaagttcacacaagagtagaagttatacatgttgagttttgcagaaaaggc

SEQ ID NO: 35225 - DNA, 1039 bp, Medicago truncatula
  Intron number 1 from transcript Medtr3g020590.1 (locus Med tr3g020590) derived from phytozome v7.0 (chr-ID MtChr3; po s 4730179 to 4731217 reverse strand)
ctcttgtcatcattaggctcttcaaatttgggttagttaactttcactctcattcttccaaatcttaatagctagctagctagcttatttctttgtttgtatttatagtttaattcatatatagagtttttggtagataagttttatcatgtttggataaataacttataaagtaagtgcttatcataggctataagagaatttttgtataaattaatggttttgtctatatacaagtaaaattgtcttgcaccatgcagagtatgcctcttgcatggtgcaagacagttttactataagtggacgtgacaagtgtgttttgtctaatatacatgtaaaattgtcttacactaaatgcgcaagtcacacttatatttggttatccttgaccacacacgtaactaaatttggttacgggtgtgacaagtgtgtcttttataattggatcaataagtcacatcatatctcatttgattcaatggtaagacataatgtaagacatgttgcatgacgcacttgtgcactatagaattaacctaaatgataggttgttttccaaaactaacttggattgttgatggaaataaactgataaaaactaattacatgtcgtacggagttttcataaactcttccaaatagtctcaagtattcgtgttgttgatagactcaaacaagtaacaaatataaacaagttcttagtttatacatattctctgtttttatttgagttgtttttaggtaggtctttaaactataacaagttcataattagatcatatacttataattaggttttggaatatggttgtaatctataacggttatttaattttgaataataaaacgtgccagccgcagtcctcccaaggcctcgggcacaatttttcgaagctgtttaaaagccattgtttcgttagttacatttcggccttttactatattgcaatttcggttctgagtgatggtattttgttcatttactttttgttttcaatttgtagcattaagttttttgcagtgtgttctctcgttgggt

SEQ ID NO: 35226 - DNA, 925 bp, Medicago truncatula
  Intron number 2 from transcript Medtr5g011580.1 (locus Med tr5g011580) derived from phytozome v7.0 (chr-ID MtChr5; po s 3151386 to 3152310)
atcccacaccgaatcactcttctcaccccaccaaggtacgactacgtatcactcaactaacaccgacatgattattgattgaatcaagttcaaagtaattcttttatttcgtgggaaaaagctagaaaactatttattagtaatttagtacggcataacttcctaatccctcttgtcccatatataagttaaatttggatcaataaaattctcatgtacttggtctaaatttttaactagatacatcaattttgtttgatccaactttctcttatatatctaagggggagaaactatcttgaatgtatgcaataaaattcacaattgtgtgtcagtgtaaattactagtataagtaaaggggcagcacttactaattttaatgatattattcgtaaaatacttttaaattaatttagattttactttttaattacttcttttattagtatgaattattgcctgtttggattgacttatttaaacttatctactgatttaagcacttatgaaaacagcttatgacatcttcataagctctttttagtttattttcataaagttctcaaagatagcttatgaaaactgcttatacaaaataatttaacttcaaattattttgttgtaaaaatagcttatacataagctgcaaattacactgtttatccaagaagagccttaacaagatttattttttattgcctatatttgaaattagagagagtaaatacttatgtcttcaggtaaggtcaaacaaactctttaaaatggtcatgcagacttcttttctatggtcaagtttgtttgtttttgaaaattatgctatgtacaaaatctacaaccaagtaacgcaggacatgatcgtttttggttgtttcatttctttcctcagccggtgaagcaaagttttctatctatattagacat

SEQ ID NO: 35227 - DNA, 1015 bp, Medicago truncatula
  Intron number 1 from transcript Medtr5g016510.1 (locus Med tr5g016510) derived from phytozome v7.0 (chr-ID MtChr5; po s 5820022 to 5821036)
gtggggtcgcaggaactccacgtggcggctgggtgtgaattatgtattttattgttcttcgtaaattatatagaaagaaaaagaaaattacacttattttttgacttgaatcttgtgcatttatattaaatatgtaaatttttaataattaattgttgattttcaatgaaaaattactacttttagtttctttaacatgtgtaatattgcacatgttagacaaaccctttttcttatggtccattaaaatcacacggacactctcattcataatctctatcattcatgtttctatcatactctttcagagttctcggacgaatgaaccaaatctaaatccttataaagaacatcttatttttgtgacgggtccgtgatttgatcttatcgttcatcttgaatgtgacgaacattctttccacttctcatctaattttgttttgtatgttttctttctattcctaatttggttaactttgttgggttctattagattttcatctattatccttcatattcaatctcaattaaagaaattcacacaaccggcaaaaatccttgtatcgtgaatccttattggattcacatcattatatttttttttgtttacaatcaagattgttattcttttggggggttgggtaactcaactcgtttgagcaaatggttaaggagctagaggaggtccaaaatttaagtcccgacaaagagagaaaaaaaaaactaaaataatagttaatattctaatatttgtccttcagttttttttttgttttttttatttttacgttgattattttgctgagagagcatttttcattaacatttaattgggattcttgaattactagtgggatggagaaaaaaaaaataggcaaatccattgttgagtcctcggttgataatgtcattaatcaaatccaaatatgagcatgggtctggatcaaaatttggtggtttctctctatttttgatcaattttaatttggtttgtgtgtgattaattaagggagga

SEQ ID NO: 35228 - DNA, 806 bp, Medicago truncatula
  Intron number 2 from transcript Medtr3g012660.1 (locus Med tr3g012660) derived from phytozome v7.0 (chr-ID MtChr3; po s 2151920 to 2152725)
ttgtcacaagatcaaaaatttaacttcccacacaggttggtagaaaaccgacaaaattttgcattctaaattaaaacttatttgtttgttttgaattctgtttgtgtttgggtgttttgatggaaatgggttttgttttaattgtatttgtgttattcggctttgaaatactgtaatagctatttatatataatgtggatgacatagactacatttttttcctattaattaattagtggtttacttttgtgattactgattagttattgcttaaccctttgaactgtaaaattaacaaatatgaggttggaagcgaacgtaacaaatatgcagtcaaaccacctttgactgacacaaacatgatttaggaggtcaagacgtagaaccaaaacagaggctagtcttactacctacctccctttccccattttcaatagaaaaagaatatttattagtgaagagtactacaaggagggaggtttagttatttcccaaaacagagaaatgaaatagtcaagaatgtaggaaggttgtctaatctctttgtatgtcagaggtgaaaaattccatgaaacagccacagacctaaacacgggatccatagggtaatcttactacttcctttatacttttataatatgtttatttaatcgtatcttatttgttctagattttgaaattgtgacatacggattgtagagatttgatactttcagtctatcatgctttgtatatttctctgattgatgtactaaattggactgccttttaaattcaaacagagtctgtaagtcaaggatcagacc

SEQ ID NO: 35229 - DNA, 880 bp, Medicago truncatula
  Intron number 1 from transcript AC146568_7.1 (locus AC1465 68_7) derived from phytozome v7.0 (chr-ID AC146568; pos 38 609 to 39488)
ttctgcattggtaagttctcttctttttttttttttttattcattcaatttaacctttttctctgtctttatcattctgtttttatttttatctaatgtgagggaatgaatgttatttttttatttttaaatgtgatgttttattttattttataatttcaatgtataatccagtgattcttgcggaatggattaaaatttgtgtgtattaatgaaaaaaatggaatttttgtgatagttattgcaaaagtttcattttttaatttggttttgatatgatgtttttaatttcatgccattgttacctgctttgaagggctagaaggatcatgatagttgttggttgagaaattttgagcttgatagatacattgattgtattgtagagctctcattgtattgttagaagggtaggtgtcaaataccaacacctatcaagcactaacacagacaaaaacatcggacacgacactgacacgtgacccatgaagcatggacactcttcaaattagacgttattcggtgccggacacgtgtcgtgtccggacaccgacacgacattgacacatataattacactgaattatgtgattctctcaaattattagcggtgtcggcgtgtcggtgtctgtgtcgtatccggtgtccgtatccgtatctgtgcttcatagcacgtgacacaagtaaaaatttgaaaaaatgaattaattgaatgtaatcacatttgaagtgtcggtgctacatagttttgtgttgttgtatgagttcagtatatactgattatggatggtcaacatgggtgattgattgtttgttatcatctttttgttgaaactttaagcttttttgttgtttgcttgtttcacagatattttggcct

SEQ ID NO: 35230 - DNA, 903 bp, Medicago truncatula
  Intron number 1 from transcript Medtr2g071700.1 (locus Med tr2g071700) derived from phytozome v7.0 (chr-ID MtChr2; po s 16582498 to 16583400 reverse strand)
tgggaccataaaagatcgagaatctgtttttgtactcataatatactatattgaattcttatttgttatcattgctttcattatagtgctttactattctgtcggcatcctttctcaaaatggcaatatatagttaattgaaatctgagcaatagtgtaaatattgagccttgaaacatttaagattttttattttcatttttttaagaagatatgagggtaagagtgatttttaggatttgagagagagggaggaagaagaaaatgttgtgttttgtgatttttggagcaagacatcctatttataaacagtggtggatcttaagttattttcttaggggtgtcaaaattatatgaaattataagcaaaattgacaacttatttaacgatatattttactaacctttgaatactagtgctaacctttgaagagttttctaatatatagaaaacttggggggcgccatgactcccatgggtcctaaccaagattcgccactgtttataaagttggtttgattttgaaataaaccgaacccatttatttcagtgttaagtaggtgccctaattgagctctaatccaactctcgtgactaaaaaataaaaattcttcgtacattttaaactactttgctaccgataaaattcacgggctcgtgataattattttttcaacggagttttcattttagaaagttcataatttcaaacttcaatactttttaaatagaaaacaatttatataggctttgtttggcaagacaaacaaggtagcttatagccgatagtttatatgtaaattattttctgttcaaaatgtattgaagtttagattactcttaagaaataaacatttagtcataattataggttcatctcacaccaaggaaaccatcttccc

SEQ ID NO: 35231 - DNA, 671 bp, Medicago truncatula
  Intron number 1 from transcript Medtr7g046760.1 (locus Med tr7g046760) derived from phytozome v7.0 (chr-ID MtChr7; po s 11609960 to 11610630)
cgcttcttcactcaaaagctcttcctcctttcacagtaagttactctgcttttcttttttgcacaaccaaatctcaatgtaaatacatacacgagttttgcttaattttgcatactttaaggactaaattgttggatttaatgactattattgtatttagttaagagactaagtgcgtgttttattttgtggtgaccaacattgattttgattaaattgattttggttaaaattgagttgaattttgagtataaaagtcacttttggaatcaaagccacaaatcctagcttcatgttagaatcaattctagagacaaaatcaattttatacctctgcattaaattgaaaccaaacataaactcaattggtagtttattcgtataggattgtaaggtgattgcatctttggatatgatgatgatgataatgaagtatgagattcagacatgaaaaaggggttggaggatttagtaatttgtggtagataagtttatatgttaaaatacaacaaattttgaagaatgagtgttcaaaagttaaaggattctgttatgttttcccttttttctgttttgcttttttggttctgtgtatagaaagtctcatatcttccaatttccttgtgatttggatagccgttttattagagtttatctcaaattgctgctgg

SEQ ID NO: 35232 - DNA, 806 bp, Medicago truncatula
  Intron number 1 from transcript Medtr1g100500.1 (locus Med tr1g100500) derived from phytozome v7.0 (chr-ID MtChr1; po s 20892867 to 20893672 reverse strand)
ccattgattggaaggtacgtactcttctccctccaatttcgccgctaaccttctcttttatttctatctatttccttttttttagtgctttatccattatcgagtttaattgaatgtggttttttcgattttctatttattttggtgtgtgagaaattaaatgaactaagcttgaagtgcagctactgtcttgttttgtgcttgtttggactgtttgtaattcattgattatcacttctcagcattgtaagatacatgcgagctgtatcttgaacttatggtctgtttggattgacttatttttgagctcatgaaaaataacttatgcgaataaataagcttttttgttaattcataagttttcactgtatttacataagctgttttttcataaactactcacaaagcttatttatttgcacaagctcaaaaataagccaatccaaacgagcccctaattaatacaaatccgcggtgtgtatctttttggacatgaatctcatcttgaatgaatcactgcctaaacttgtgtaccaaccactgtgatgtcaaatggcggcactgaagcgctgtagcatggagagtttatgtttgtttttttatatttggatatcacttgtagaaaaataatatggttttatggatcatattagttttggtgttttgaattatcatattcaatctctaccattttatcgttttagaaatttctggttatttgaatcctgcaaacttcctaatattgccttgattttctttttttgttttgtttcaggaaccctggctactgggattgttatcattct

SEQ ID NO: 35233 - DNA, 915 bp, Medicago truncatula
  Intron number 1 from transcript Medtr4g032510.1 (locus Med tr4g032510) derived from phytozome v7.0 (chr-ID MtChr4; po s 7839916 to 7840830)
agctgctggatcagcttagaactaaatgtgtgtcatctcactctgctatgctgaaaaagcttttggatgatatgcatgaagcagctaaggagaaagagctgaattttgtgcctctgctggacatcactcctttctatccagaagaagagtacatcactagggctgctagaattcaggctggatttaaacgaagaatgagggaaaaggatgagctacttcagaagaaggatgatcagatcaagtatctcttagaacagttgtctaagcaagcccaaccttagttgcacacccaactctagcttgttttttacttttgttcttcgtagctgtgtccttgtatcttaatcttctttatatatattatcattgtttctggatcttgtgctttttcaccttcaatatgttttacaagctttaactctgatgatatttactgtttaatgctgcttgctctgatactctttcttttgtttctattctttttgttgatgacaaaagggggagtaaaatgtatagtatttgttaaggcactgagccctactataaccacttctaaatttcttttaaatacttctgatttgattttataagtattttattgaaatttaattaataagaatagaacttagggggagcttacaaacctcaccttaaagaactattagactcagggggagcttacaaacctctgtcccagtagtcaacttattaattagatcaacaacaattgaacattttaaatactattgtttgtcatcatcaaaaagggggagattgttggaacaaaatgtgtttcacaatgaaccttattaagttttgatgataacaaggtattaaaaattgtcaattggttattactaataattgttcaagtgtacaggaccaaaggctactcaagttatttcaataggtctt

SEQ ID NO: 35234 - DNA, 538 bp, Medicago truncatula
  Intron number 3 from transcript Medtr4g114600.1 (locus Med tr4g114600) derived from phytozome v7.0 (chr-ID MtChr4; po s 26256926 to 26257463)
attttcgtcaaagcaataggtaactaactaattctaaacaaaacagtttagtgatagtgatttgatctaacttgaaaaatgagtcaattcccttctcattactaacccaacccaagttaatgagcgtagtaaattttcagacactacactcttcagatttgtacattttatgagattatttcttttcaccattctgcaggaaaaagtagattctgtctaatctcattttaataatagactttgttgttagtaatatttgtctttgtgtatatttgtctttgtgattattttgacgaaatgaacagttttctctggaagccattatgtgaaaaataagcattgcctaaagtaactcaactgtgaaaataatttaatctgaattgctgtctccgaattgtatatttttttgctgttagcatcccattgatatgatttctcacaatccaaaagataaaggtctcaaaccaatttttgctcttcagcaaagttgattttctgagaaatgttctgtttattttcattcaggttgcaggaaaca

SEQ ID NO: 35235 - DNA, 485 bp, Medicago truncatula
  Intron number 1 from transcript Medtr3g154120.1 (locus Med tr3g154120) derived from phytozome v7.0 (chr-ID MtChr3; po s 40697619 to 40698103)
catttcctatagtatggtctttgccaaattacagaaagtttctcaagggtttgttataaatgtctatgctttttatcgttaacgctgtttcatgttggctagtggggacccttgctttccgtccaactccgtcttatatgccgttaactatctctctccctccatccacacaccgatttttttttttttacctagttggggtttgtcgatctatttgtgatgcttctgctttaaggattcctataaggaaattactgaagaaaaaaagtttatttgtttggtttaagcatatgagtggtcacaaatatatcaatttcaggttttgatccctataattttttagtcactttgaatttgattctcgcaaaataagaaaccatcgctttttgtcccttaaggatacttttttgttacaaaaataatatgatttggcaaacggaatctgatgtggcaaacaatagttgatgtagcatttcttaatcaac

SEQ ID NO: 35236 - DNA, 696 bp, Medicago truncatula; identical to SEQ ID NO: 30085
  Intron number 1 from transcript Medtr4g114540.1 (locus Med tr4g114540) derived from phytozome v7.0 (chr-ID MtChr4; po s 26212625 to 26213320)

SEQ ID NO: 35237 - DNA, 594 bp, Medicago truncatula
  Intron number 1 from transcript Medtr3g040110.1 (locus Med tr3g040110) derived from phytozome v7.0 (chr-ID MtChr3; po s 10904468 to 10905061)
aggtcaagttgtgtttccgtttcaggtacgtttttcttttacctctctactcctaaataatttttctacatgtccatttgtgttcacaatctagacatatctaaagattttgcatatcattctcaacacaaagccagtaatcaatttctgctacatatgttttcggtgtccaaactcgtaacatattctttatctttgttaaaaaaaaaaaaactaagtaacgattgaacgtgaataaaatcttgtgcgcaattgttgaataaagttcaatcaatattttagttatactttgaataatatatctgggaaatttaagtgaggtacttactttttgatagaaatggttatcttttttgagacatggttattcactatctgggaataactcactatgtatttctatgaaatgttcttgcttgtgaataaaacttgaatgaattgtttctgtaaactgcaatatgaatggaattgtctgaagaacatatttttacagaaattaaaatttgacaatcaagcttcggatctaatcaaagaaaatatgtttatttggtttttgcaggagaaacctaataagtggaaaaattcgactcggtc

SEQ ID NO: 35238 - DNA, 399 bp, Medicago truncatula
  Intron number 1 from transcript Medtr5g069240.1 (locus Med tr5g069240) derived from phytozome v7.0 (chr-ID MtChr5; po s 25017021 to 25017419)
cacaaacatacaagtaggagaacctgcattacaaggtaatataatcttcacaagagatgtacattcttcattttatgttatgcatatccacttattttcaattgtaatttgtttctttatttagtaaaattttaaggatgttataaatctctgtcaatgtttgtgttgaagttatgttcttttttttgttttcatcttttcaaattgtgttggtttatgtttcatatctataaacaacttcaaatttcctaccaacatatactgtattacacatttaacattataaacaaaatttatttcttataaaattaaattctcttatgtttaatttccttcatttattttaaaccatatagtcaaataataatcacataattactattttttatagctaaataa

SEQ ID NO: 35239 - DNA, 788 bp, Medicago truncatula
  Intron number 3 from transcript Medtr4g159820.2 (locus Med tr4g159820) derived from phytozome v7.0 (chr-ID MtChr4; po s 40397961 to 40398748 reverse strand)
actgataagcttttggaaaaactgtaagttcactttttgaagttcaaagtttaaacatatttgatttcagtaattaatattgttttcataattatggttactgctatatgtcataattattcacgttttccatctttcttttgacataatttattgtttagtgttgttccatgacacccccaaatctatctgtgcttctgtttttttcatttgaactgaattgatgtagatatgacactaagaactttggttaacttaattcaattacaaatatagttgaaaattatatacaagttgcagggtggtttttgtaaccattcatgacataaatattgaatacaggtgaccgaatgacactaagaactttggttaacttaattcaattacaaatatagttgtaaattatatacaagttgcagggtggtttttgtaaccattcatgacataaatattgaatacaggtgaccgaatggaatctaatgaagataggtgaactgactgcaatggttcttcgtttctctcgtcacggggaccatagttttgttatataacttacaagtttgtctaggattttttagaatgataaattagacctgccatttcaaaaaggatgattgttctggtttagtgcctgctttctttttgcttcttattggtagctgatattagtttgaaaaagaagataaaagtaaattttgagatactcgcacgtatctgtttcattcattcttttatttttatgacagttataatatgggtgtgatttcaaccaggcaaagcatcacact

SEQ ID NO: 35240 - DNA, 667 bp, Medicago truncatula
  Intron number 1 from transcript Medtr2g085180.1 (locus Med tr2g085180) derived from phytozome v7.0 (chr-ID MtChr2; po s 19128416 to 19129082 reverse strand)
aacaagcccttaatatcaacatcagcaagaaagaggtatatatgttttctttgtatgacatatttttgttgattattattgtctctctcactaattcttaaatctctgatttgaataggtagttgatcttctcaaattgtctttggtctcaaaactcctctgtccgactttatatttaaaaagcaacaatctgttgaaattgtagtcccaagtaaccgaatggaggttaataatggtaaagaaaaggaagaatctgatgaaatagttgtgaaagtagtgagaagaaaatcaaataagcagatcttgtttattgaagcagaggaagattttgctgattttgtttttagttttctcacatttcccttgggaggagtgttacttatgcacgaaggattctcttccttaagctgcattgataatttatataagagtgtgactgaattgagctcagaaaaatggttaaggtcacagtatttcaaaaacctactaactaatccaagcatttccatgcagtctgaactcacgaaccagatattaccgataccttataacaattataaggaaaaatatatatttccatgcagtcttttataaggaaaaatatatataaggaaaaatatatttccatgcagtcttttgtaagctgcattgataatttatacaagag

SEQ ID NO: 35241 - DNA, 1015 bp, Medicago truncatula
  Intron number 1 from transcript Medtr3g040190.1 (locus Med tr3g040190) derived from phytozome v7.0 (chr-ID MtChr3; po s 10950647 to 10951661)
ctagaactaggttaagcatttattaggtttaggtgatgtgagcttccaatttgtatttattttgtttgtttctgaatgtgaggctcaaaattgcatataattaatttttacttctttagcattagttttgatcatgatgactttttgtttaatatttacttgaagagacatgatatatgttgaggaatcatgacttaaataggtaataaaaaattgactttttttagtttgatgtggcaagaattaggttagagcttgacctttgtgattttttcataaacatgctttgcaattgtatattattaagattaagattaggattctttgtttggaggataatattcaattgggttttcagggttttgaggtggagaagttgaaaaaaggtggaataatctgacctatatatagagagaagatgaacaaatgcgtgagtcagagattgaacgttagatttgaattttgaattttaattgtaattttttttgtcttctacatacagttggaacaaaggcaaggaggcagggaagcgttgttttcacattgtgcttatgcttctggcttttgatggcttctcacaaaattttattttttgatgtgtaagaagtgagcagatgctacaaataagaaagtatttattgggcctaggagatgtgggcttccaatttattttgtttttgtttgtattttaatgagtgtcctaaaattgtatataaattgtttttacttctttagcattagttttgataatgatcaactttttgaatactttcttgaaaagatatgatgatatatgttaattaatcaagacttaattaggtaaagaaaaaatttacatttttagtatgacgttgcaagaattagtttagagcttgacatgtgtgttttttttttctttctaaaacatgctttgcatttgtggtctattaagattaagattaacattaacattaagattaagattgcaattgtgaattttgtcttctacatacagtctgaacaaaggcacggaggc

SEQ ID NO: 35242 - DNA, 672 bp, Medicago truncatula; identical to SEQ ID NO: 33268
  Intron number 3 from transcript Medtr6g015390.1 (locus Med tr6g015390) derived from phytozome v7.0 (chr-ID MtChr6; po s 3831835 to 3832506 reverse strand)

SEQ ID NO: 35243 - DNA, 928 bp, Medicago truncatula
  Intron number 1 from transcript Medtr4g134940.1 (locus Med tr4g134940) derived from phytozome v7.0 (chr-ID MtChr4; po s 32628319 to 32629246)
ggtgagttttgttgttttataaatcatatgtatcaacgttaggctccatttctatattaatttcaatcatttgaaaaataatctttgttcatgttaagagttccacatcgacgaaataagatttgtaaacatgtttaaaagtgatggacatttatctctttgttcaactcctttaatctcttaattcaaatcaattgagctactcaatcccccttcaacaaatttaactagttagctcaaattacacatgtttcttaaaccgaaagccccaatgtgatacatttttaaccgagggatacatcacttagcttgcaggaaccttgaaccattttcttatatcaaaagatgactcattgctcttggatgcctataatgtttggttgtgcacttcttctatatgagagaaggaggctagagatcgtggtgtggttttagctgtgagacttcactagatagatctttgtacgtgaaagagattatatgattcggatataattatacattagtcaatttaaaacaataatgtgacccataaaataactatttgaattcgtggtatctataggaatttaaaatggatttttagtagtataaacaaacccatagcaatttctactccacgtattacttatttattttgtttttttaatccatcataaccaacatgtgattggtgggaattgtaagagatttagacatcttaaataagttaacactagacaacggtggatatatttttattttttttgtcaaatagtctcatctcatgactctaaatttatctttctttttttttaatggtataaatttaccttttaaaaataaataaataaggtgtttgagattcaaactctaactcgtatatataatgcattgtctctattaaccgagttaaatgtgacaattttatttttagggagcccctaat

SEQ ID NO: 35244 - DNA, 467 bp, Medicago truncatula
  Intron number 1 from transcript Medtr4g108750.1 (locus Med tr4g108750) derived from phytozome v7.0 (chr-ID MtChr4; po s 24171571 to 24172037)
aggctattcctcctacccattcaattttactcaaggtagtaagttaattatgttgttagtgttaaagccacaaaaataaaacaccaatttaatttatcttttagtctttgaattttgttgttgtttatatttgacttttttttatagcttgtcacataaaattacaatcttcaaccataaatataagactctcttgagatttttctttctttgtttttatgggacaaactttcaaatttatggaatatgtaataaatattatgatagaaataaaaactaattctcactcataaacttaaaaaaaataccaattttcaacaaatttaatagtgctattaactttcatattctcataacttagtcaatgaaatcttatatttagggacttctaaatggaaaatcaagactaattaagttattgtttgatatgtatttatttatatgatatgatatgaagggtgtattac

SEQ ID NO: 35245 - DNA, 715 bp, Medicago truncatula
  Intron number 1 from transcript Medtr3g124760.1 (locus Med tr3g124760) derived from phytozome v7.0 (chr-ID MtChr3; po s 31760412 to 31761126 reverse strand)
gctaatcaattttgctgtggtctcttggagcatttgtaagaaaagaaatgttcatctatgacaagtcttgcagcaagcaaaggctgtattccatgcgtggcagcaacatcaaattccagctccaacactataaggttgttttttcaaattcgagttgacatacaattttatcaaaaatatattattgaataatcatgaaaataaatatttatgaaaactaatattatattaattttttgaccaacaatattatattacttattgaacaaacaaatattatattttagtaatttaaaatgtaatatatttttactaaaattgtatgtatatacttaaaataaaaataatatattagcaccatcaatatatattaattgagtcaaacctatactattaactaataataatttatatattgcctctgaaaaatattactattgattagaacaatatctttctaatcaccaaaaaaaaaaaaaaaaacaatatctttcaaacaaattgattagaacaatagtatagtagtaacataatatattcattaaaactaataaacacaataacgagttaacatattttcttcagttatatatggaagaatgtattgaactattgaccaaaaatatggaagaatgtgtaaaaaaaattacatcattttataaaatcaaagattggaaatcatcattgaagtttgtgcacttggattgcaggtatc

SEQ ID NO: 35246 - DNA, 287 bp, Medicago truncatula
  Intron number 2 from transcript Medtr3g101860.1 (locus Med tr3g101860) derived from phytozome v7.0 (chr-ID MtChr3; po s 24725147 to 24725433)
ctctctctttcacagtttctgtttctatatacgcagtccttcttcttttactttcctcaatgttttagcttcataattttttaggtttcctcttaaaattttgattttgatttgtttttttagtgatttataataatttgaagctatgtgtgttgtttgtgatatgtcgatgtcaattgttgaaactttaattacattttttcttcagttgtttgttggatatgtattttcgaagatttttaatcattaaagtttgtctttattttcaatttttaggccattaatcc

SEQ ID NO: 35247 - DNA, 619 bp, Medicago truncatula
  Intron number 1 from transcript Medtr5g084460.1 (locus Med tr5g084460) derived from phytozome v7.0 (chr-ID MtChr5; po s 32158011 to 32158629 reverse strand)
acaaacgaggtctggaaataaagagagtgagcatgatgatgctgaattagtggttagagatggtgattctatttaaggaatcacttttgtttgttataaatgattagatgagttcttttaagtcttggaagttcagacttatttgctttacattgggtttggatattagcaacattgaaattggattaataattgtgaatttctatttttgagcttttatatgtgtatggtatgaacttcttgtattgtttccccaagttttgatatagcggccatacttctacttctaccagctatactgctatagcattttggcttccggacacaatctgtcattgagtacatagattttgagaagaataaattgtgactaatttgatgagtttcttattatattttattctagcaaatggttcaacgtctaatttgatgagtttcttttttgttgcaattcagtgtgataacggttgtagtgttttctttctgttgcttttaccattgattaatgtgttggcaattgcgatgcagatgcaaattttcataatgaccatgactagaaagaatatccccttgagggttaatagttcatacacaatataatcagtgtgaaggagaagat

SEQ ID NO: 35248 - DNA, 986 bp, Medicago truncatula
  Intron number 1 from transcript Medtr3g167220.1 (locus Med tr3g167220) derived from phytozome v7.0 (chr-ID MtChr3; po s 43970236 to 43971221)
tgagaggttaacggtcacgtcagccccgttaacgctccgtttgaactgaaggactaacttgattgacatttaacaaattcagggactattttgatatttcgttaaatttagggatgaatttggccgacccctaaaaattcagggacgaaattgatggttcactctaaaataaagtagtaggaatgtggaattgagaagttaaaaaattgtaattaatcataatggcttagggacatgtaggagcaagacttcgaaaattgagagatttaccaaagaccgactcttcatattattttttggtgtaaaacggttgatgcttggatttctgaaataggagtaaaaatcaaatataaatcacacaaattcatccaagattccaatgcatttcaatattctacaactctacaacttgctgccatggcctatcagcaagagtctgaaacgattcccctcaaagtaggggtggcaaaaatatccatgcccatgggtacccgcgggtaaaatccatcacgggcacggacgggtagctaaacgggtatccatgggtataattaacgggtatttgactacccattattatatgaatacggacacggatttgatggtacccatacccacgggtacccatacccaataataaattaacttaattactaaaatatccttatatatcttattattaacctatttttaattttttttaatttatattattaagttgggaagtcaaatgaagttattgaagtttggaatgcatgcaaaatttagatgtttatttggatattttgatgtttttattttacttcatgaatttgtatgaattatgtaagaattatgaattttctatggattatgatttatgaaattttgaatagattatgtatggatgtttaaaagtagttgaagttttttgttaattaaaaaaagttattctttattccaaaaactaaataaattcaaaaatccataggtacccacgaataccc

SEQ ID NO: 35249 - DNA, 253 bp, Medicago truncatula
  Intron number 2 from transcript Medtr3g167220.1 (locus Med tr3g167220) derived from phytozome v7.0 (chr-ID MtChr3; po s 43971970 to 43972222)
aggtaattgctgtgtgtgttgtcttttgtttgatgtcactattcccgttttttctttttcttatcaagatatagatcgacttacttgcataacttaaatgtctcatttctcaaaaatgcaattcgattgatgggatttggtataatccttatgagatcgatgggattaagaaacatgatttttggtataggaataaacaaaccatggataaatctaagctactattaaatctaaacaatcttttcgtaggagt

SEQ ID NO: 35250 - DNA, 820 bp, Medicago truncatula
  Intron number 1 from transcript Medtr6g013160.1 (locus Med tr6g013160) derived from phytozome v7.0 (chr-ID MtChr6; po s 2687844 to 2688663)
tcacaagtaagtttgccaaacgtgaagtttgggcttgggactgtgttgggcctaaataaatggacctaaagtccttttggccggtccagaacagttatgattagctacacatgtaatcgcctatgttgtggtgtacatattttaccatatacggccactttccatgcttttacagttagtttcgttgagatcctctatggagctccaatcaccatattctgtcatgccaccacatgttgttttgccacttttatatttacctatcaaccggtgctttcatttttaatacctcgaatgacatagtctgattgtggaatctttgatacaaacatcaatttggaggagtggagtagtgatgacattaaccaagataaagcaacaacggataacaaaagaggttaaagtgaagagaacaaataaaaaaggatgtttaagtaaaaagacttgttactaatgacaattgagataacaaaatttgctatgatatagattcttgatacttttgaaataactatttaatatatcatgacgctctagagagcaatggtggttcttcttaaaaccaatttttcatcttacattcatgtcaatgaaaaattcttacacgattcttgttttaccatgatcaaaaagaccacaactggttaagtttgacggaacatgctcaggtcaatcaaataatccactttgttgaaaaatcatttgttcttcccgattcgttcgatacaagttaccttgcttggcggcttcgatgcaataatttatttcttttattgatttgttgcttcgtttcattttcaattgcatagagcttgttgtt

SEQ ID NO: 35251 - DNA, 811 bp, Medicago truncatula
  Intron number 1 from transcript Medtr3g153910.1 (locus Med tr3g153910) derived from phytozome v7.0 (chr-ID MtChr3; po s 40591501 to 40592311)
ggttttaagttggtaagttcacaatgattgagtctttttttaagggacaatgattgagtcttgatgggatgtgatgttttgaaaatcagactcatcaatgaatcgttttggattgagctagctcacaagtcacaacttattgagatttgctgtccaatagaagccttaaaattatttatttgattgaaaaaaattgatccatagttataaaaataatcgactgtaagttacaacccaatcgaaaacaaatttgaggtgtgtgttgcacaattttcactcgttgatggctctggtcatgcaaatgtgggattgaaatatagttagttgtcagataatcttaatttcaattgttaaacgttaggtctaacactttgaaatgactttaacactttttttggagacataaatattgtctaacaaataaagtaatcaaagatgcactctcatatattcttgtgtttgtgaagtgcatttgccattacaaaaggctgccttagttctctctctttcaaagatagccattagccacactgtaaagggaaataactcgctactttcttcactaattttggtcaaggcatcttgtttttggaatatgaataatgcaaccagtctgaaatgaaatgtgactctcttaattttttttatgcatgaaaagcaaagtagttgagcattattttagatatttgcttttttcttactcgttttcccgaaaaagaaaacgcatttcatttttgtttattttaattttaataagcattttttttttttttgaggtaataagcatttcttttgttaatcagaagctttc

SEQ ID NO: 35252 - DNA, 567 bp, Medicago truncatula
  Intron number 2 from transcript AC235005_8.1 (locus AC2350 05_8) derived from phytozome v7.0 (chr-ID AC235005; pos 25 835 to 26401 reverse strand)
ttagggccatttgcagaaggctcaccaagcaccaggtattaaacccttttattcatacttaattgcgtataatttttgttaaagttcattgttgtaaacatatactccaatgtatctttgtggtttttgcttttggctggatcaatgcatttcattgtttttttcatcatattttgttgtgaccataaatcggtgtatatcagctttaatgagatctctaacatgatgctttagaataatctgattatgtcatttgtgaaatacagggcttgtgtccttgaattataaacacggtatccgttgtttattattgcttcatgatagcattgtaattctgcttaaatagttgtatataacatatgcattaactgcacgtgtgaattgctgcaaattacctcagtcaaattagttgttgctaaggaattactgcccccaggtggaaaccattgtcttcctcaaacaggttcctatgtcaaatgaatcaaatgaaatttcaaactaaatcgtttttattttttattttctttttaatttaggagagaatcaccattggtggtatacagattg

SEQ ID NO: 35253 - DNA, 728 bp, Medicago truncatula
  Intron number 4 from transcript AC235094_12.1 (locus AC235 094_12) derived from phytozome v7.0 (chr-ID AC235094; pos 58103 to 58830)
tactcggggcagacttcgcggcagaattatcaaaggtattgtttattcattctgtacaaacctaggttcataataggtttatttttctaggcagaagagagagggtgatcgagaataagagtttattataggctgttgtcatcttcaaatttatcttggttactttttggttcttaattagaaaaactcatcatatattttattcttgttttgtattctagtgtatatacaactgttgaatgataaataattgtcacaaagatcttgcttgccaatttttattcttgttttccattgttgaattcaaagtatattacattatggagttttttacgtacacagtaagtgaaacacttttacagtctcatctaatcggagctcacatttttaccatgtcatattaaaataatttaattaaaaaggaaaaactaaaacaatttgaattattccttgcaagtcgttcaacaactctcctctcacataactctctactcgttgttctcacactgctggatgaacaaccgttgggaagtgatagacaagaaaaaatcatttgaattgacaattttgtaatttgaaaaatcctcgttgttcctcctttacttgtctataacaacaaccaagccttatcccactaagcagggtcggtttcctccttcgtttgtctagttgaacaaaatttgaaattcatctgttgctgtgttgtttcttttaacaggctactctcc

SEQ ID NO: 35254 - DNA, 882 bp, Medicago truncatula
  Intron number 2 from transcript Medtr1g065930.1 (locus Med tr1g065930) derived from phytozome v7.0 (chr-ID MtChr1; po s 13268938 to 13269819 reverse strand)
caggtaactactctattctattctttattcattcattcactataacacaaaatattatccaaggtcgttagcttaattatcattcaactatacatgaatatgtcaaggttttatatttcaatttattgatagtactatttgctagttgcactctcaatgtattgataacaacctaccaaaaagtacttttgattatataaattttgagaaaaatattacgttttcagcaacaaactagttacgacttaatggtaaaaacaccattcaacttatataatgttatgagtaaaaataagttgaaattagttcaacagtttatacagcacgattctttctcgaacaaaaagattatgaaacaggaaacagtcaattatggagataagagagatatatagtgatgaattaggtaggagtagattgatcacaaggtacaaaattgtttcttgctaatttgtgtaattgatttcataacaagtattttccaaattactttctgcatctcaactttatctgaagctccttgattagcttctctgtaaacacaaccgaatctatttagttataggaattttttttgcaagtgtgaagtcataaagctaattcaaattgagttgtagttttgaagatgtattttctactactttgtgattacagtaacagtcacacttttacgatttatctgtaatttttcacaatttcatggatgtgatgtgatgaaaccacaaacaccaccacagttttaaagcctggattgatattatcatatcattcatagtgtttgtttctgtcaacatcatcatatgccaattcctgattttaagttaacataggctggtactcccgtttgatgtggtgttctattttgttttgttatgtgtcaag

SEQ ID NO: 35255 - DNA, 876 bp, Medicago truncatula
  Intron number 1 from transcript Medtr1g065930.1 (locus Med tr1g065930) derived from phytozome v7.0 (chr-ID MtChr1; po s 13269935 to 13270810 reverse strand)
aatctgcgtttttcgtttcagcaccatcaatcattgtaagtactccacttctattttttttcgactaatccataaagccttaatttttatccaaaccctacttttcctcttcaaatcaaatccaaaattgacaattgttaagatgaattgatgcctttgatgttgtttaatttcattatttggctcagttttttttgtatctatagcaaaaaacctcaattttaattgaaaccctaattttcatttttcaattttgttgctactgtttgatgttgttttaaaccttgtttgttatgttggttattagcttttcaatggtataggatttgaatttcatgattctgtttagatttagttgatatttatgagattttgttgtgtttagaaatgattttagaatttccttgaagttttgttgttaaattcgggttgattttgtaccctaggttttggtatgaatttgtgggaattgagagtgtttaattgtatgttgaaggagattatcaaattaatgttagaaatcatgttatgttattgagaatagaattaaattgaagtgtttgatggaatagtttgtaaattaatattcttaaaagtgtattatgagttttttatattggtaattaaagtcataatattcagtcctcgtgagcttagctcagttggtatggacaatgctaatacatgcaaggtctgcggtttgaaccccgaccaccaccaaaaaaaaaaagtcataatattcaatgatagatttgcttatccgctacactaatttgttgttcttgaatgttgagactggagaccctaattaagaaaagtgattttgtgttgtttggaacagaaagtagaggggagataacgaagagcaagaaagat

SEQ ID NO: 35256 - DNA, 409 bp, Medicago truncatula
  Intron number 1 from transcript Medtr3g030780.1 (locus Med tr3g030780) derived from phytozome v7.0 (chr-ID MtChr3; po s 8423335 to 8423743)
acttccagacaagtgtgctacaagctttgatccttgtgtgtttcttgtttctctctatcccctctcttctatatttgtttactttgaaaaatggttcttttaaatgttaacactaaattgtgaattgtgaatataacaagttttaaactttttttccatatacaacaaatattggaaaataaaacgacttataataaaatacggaaggagtagcttctagtgtcccaacttaaatgtgtaaaatacgacttataataaatttctggacttcatgattatgacatgacatatatagtaatgtatttgtgtgtgaatcaaaaaagtttcctaacatgaatatgaaatttgtaattattagcaagtgaaagtaagattaattttctttatctctttatatgcaggtgaaatc

SEQ ID NO: 35257 - DNA, 700 bp, Medicago truncatula
  Intron number 2 from transcript Medtr5g035830.1 (locus Med tr5g035830) derived from phytozome v7.0 (chr-ID MtChr5; po s 14858581 to 14859280)
gtgtccttacacctgctctttcaggtgatgattatgttgatgatgattttgttatgtttatttctttagaaaatgtttctgtttttagggtaaactaaacagtcatcttggtctttaaatttgtgagacactgtcgcaatagtgcgacagtctttggatgtattgaaattaccacaagcatgcctaaatctgtctttttgttgttatttgttttttttttcttttcggaaactcggtatctggtccaaggaccgattaatccgtgaaccaatcccaccatccactagcaggcccaattgatgcctgggaaaagtcctgtatggactggccctacataggaattctgaacatctagaggattagaaccgaagacctggtgatgagcacactcctgggtcctaagcctacaccactaggccgacccctgggggtttgtctcttgttatttgtaatttcgatacattcaaagactatagtaacaacacctaataaatatatttagggactaaaatgattgtttactgctcttgtatccatttcatgtttttacttttaattaaaaaattgaaacttgttttcaatttctttcctgtttctaagatttgtataggaatttatttgctttagtccctttaagtcactgagtaagttattttgaatgagtgcagttttctcagccatatcaggatttgagctttca

SEQ ID NO: 35258 - DNA, 851 bp, Medicago truncatula
  Intron number 1 from transcript Medtr3g029230.1 (locus Med tr3g029230) derived from phytozome v7.0 (chr-ID MtChr3; po s 7691139 to 7691989)
agtagctaaatctcctttgttgggattagaggtacttgatcatagcttaaacatgtaatcctttgatttataaatatatggttctagcatttgatttgatattgaggttattcttgcacttaatctttatctttgatttaattgtgattgagaaatacttttgaatcttggtttagaataatcatctatcaaaacaagagattctagacatggaatcgatgttttgataatcaccttttgtatccaaatttaacgctttcttatcattcaatagattgagaaatcatcgattaaatgataagaccgactcttgaatcattcaatagtttgagacatcgacgattgaatgatataagtgatctcacaatattgtttggacacgaatggtattgttgagggatacgtgataatatcaaagaaaagctagaatccatgtatgatcattaggttacgtgtgacgctcgatcaaggaattctaatcctaacaagttttacgccctattaatctcaattttatcatctgcaatttagttactaaaacaaacaaacaacttatcttttaaacttagaataataattggtgtcgaacggtctgcaatatcgcactagtccctgaggagacgatataaatacttacaattgtttgatgcaaaaatactacatcaataacaattcttcattaaacacttcattgaaaacatacaacttaacaactcatggacacaacttatcaacttaacaacttgactcgacaatgtgacttcgacttgactatgcaacttaatcctcttaatcatgcatgtggtaccaatccagggcatcaagccctcaacttatttgagcaaaggctt

SEQ ID NO: 35259 - DNA, 922 bp, Medicago truncatula
  Intron number 1 from transcript AC202568_7.1 (locus AC2025 68_7) derived from phytozome v7.0 (chr-ID AC202568; pos 34 708 to 35629)
actcttcatcttcaagggtgagttttcttccttccataatttcttagtttaaattatttctagtacaaaatccttcacccacattttacaaaagactctaacttatttctgaaaatcactcattattgacatcataaattaagttttattgtttaaaattcagtttggactcacttctaacctctttgtgtattctgttatgtgttgttgttgctggaaatcccctgtcctacttgtgccggctgtaacaatgatttggactatgtcagtttgtttgcgcattggagctttcaaccttctgtagtttctgcgtgtatcggtaaatattaaggtgggggatgatgttgcatttggtgtagatttggcattcatttattgattgtaattgtgcttttttatttatatgtctctcaactgtgaattttgaatctctagattttcgtattgcttgtaattgtacagtaggaactaggaagttgctttgaggatagtcctttttttttttttttagctcttatcatttgaatcttccttgagaaactgtttttcaaatattgttgtgattgttggagtttcctttgtttgagaatattggctagatatcaatgaagacatcaaattatgcaaacatagttatgtcgtataaaattatggctatgtagtaaattttggttatggatattagtgggtagaaacacagattattttctttattaaattaaaatatatattttaaagtctgttaaattcatagccgattttaaaataagtttttagcgccaacatattccaaacgctaagtagtgtctacttttagatgatgcactttaaataggcctttagcttcaattttagtgtccacttttgtaaatgctattttggggttttgctagagggactccgactgtcaagttgattgtgg

SEQ ID NO: 35260 - DNA, 393 bp, Medicago truncatula
  Intron number 3 from transcript Medtr7g025510.1 (locus Med tr7g025510) derived from phytozome v7.0 (chr-ID MtChr7; po s 6258389 to 6258781)
agaatcttgctgctcgtagctgtttggtaagtatattcaattagcgtcaatagtaaatactatttctgatgatgacaaccccatatcaatctgatttctgaatcttattttggaagtgttttttatttttatttttttccttttatgttctcttttgagttaaatcaaagccattattgcaattttaaggtatgacatgtacccaaacaccaaactcacccctaacaccaatgctacgcccatataatgatcttcatcgaagatatgtttgcctcaccctgtctttttttagaaccttttttttgggtaaaatatgctttgtttttttgtcattcagataatatgagaaactgaaatctcttgtcttccttttacagctgttgttttcgaaaa

SEQ ID NO: 35261 - DNA, 403 bp, Medicago truncatula
  Intron number 2 from transcript Medtr5g044620.1 (locus Med tr5g044620) derived from phytozome v7.0 (chr-ID MtChr5; po s 18558500 to 18558902)
tctcaagttagtaaggataaattgccggatattaggtatatatgaaaggtaagcactaatcatgcattatattttgtcatgtgatcttgtcatgggttgtattatttctctttgtggtctcttaagtgtgtcgggtttgaagtatcgattaacaaatgctcatcgccccctgccataaattattattcgatagttttcgtaatttagagggttaaagcttggaaagtggcaggtcccgttctcacattttacgcataccatgcatgtcaaacttagatgatgtaggtgcacaatttcaaatcaaacttagacgttgttctgttttttttcgttcagatatttttctgtaatttgctgttatggtctgctcaatttcttctggttttgtgcaggtttattttct

SEQ ID NO: 35262 - DNA, 715 bp, Medicago truncatula
  Intron number 2 from transcript Medtr5g086340.1 (locus Med tr5g086340) derived from phytozome v7.0 (chr-ID MtChr5; po s 33102212 to 33102926)
ccgttttttggtagttttttcttctccttctctcagttggttcttcggcggccatttacacatctagaaatgcttgcatccaaccttgttttctcctttttttttattgtattgttttcttcttgcacttttttgagtttttcttctttcaaactcagaagaatacctagaaatgttgtcttattaaaatgcttccaataatcaatagtaatagtcaatccattgttatccttcatatatctgagccaggatcaatttaatattgcatagtttaaatcaaagagtgagttactttgagttgattttcaattacatgtttttctcctaggagttttacagtatggtaggtatttgatttaacacaaataacttcagggagaaacaataaattttctctttcgggttagacatcaacatttagattatactatttctgtagaaaatttatagcaaagattttcaccctccaaaatatggctttagatttatataaaattgaaaacatgctgtccatataatagaagtgttgcaccactgtatcctatcagaatttgaacaaaacactgttttctggtatctgcgactgacaacactttttagcactcaaatttccattggttgcggtcaacatgatctctgctatctttttaatttattattagtgttaattattaacctatttattctaccttccagtttataatattctgacagg

SEQ ID NO: 35263 - DNA, 841 bp, Medicago truncatula
  Intron number 1 from transcript AC202489_30.1 (locus AC202 489_30) derived from phytozome v7.0 (chr-ID AC202489; pos 128144 to 128984 reverse strand)
ctaattctgcgaaaagtaagatttttttattttaattattgaagttacatcgaaaagttaacttttttaattgaatttatgaaattacggtgaaaattacgatttttttaattgaattattgaaattatggcgtaacatgagattttttaattgaattattgatttttttttttatttggggttgtttaaattgtttatggattattgggggttttttgaaatttttaaggggtttgaatatggtaattgtgattatttggggcgtagttattgttatgtgatagtttatattgttttgttgtacgaaaaggtatgattcattatattgtttttgaaagcatagttttttgatagatctacaattcttcattcatgaaggaaagttatagctagaaatcctttttgtaaggttatatcgcttcttttattacgcttgttgcaatttgaataggttgcataggctttgaagaatatatagctgtttattcttcaatttgtttttgtatcaattatttttcggttcagttgtgtgtttgtgttatgtttggtgatatcaatcatgaagtggttttaaatgggaaatcatgtggatcgatgttgtcaaatattggctgtggcagatttcggtggtagtttctttgacaaccgccgtggtgtttttttgacggacatagcaaaaaaaggattttaggctttccaccattgataacattgatgtacattcattgtgcaatgattgaatatggaaaatactaatttaacaaatattgaaaagatgtttgaaagttaagtctgttttgactgggaccaattgaaacctgtattatttttttacagaag

SEQ ID NO: 35264 - DNA, 827 bp, Medicago truncatula
  Intron number 2 from transcript Medtr5g015660.1 (locus Med tr5g015660) derived from phytozome v7.0 (chr-ID MtChr5; po s 5263388 to 5264214 reverse strand)
tacgtgtagaaggaacctgttttcgtctccataaggtttgctgattcaccattgatgtcactaattagttatttgttttttattagtagtaatttgctattaccatttagcacaatgccctttggtctttttaccttggttctaaattgcggataggtttacgcggtgaatctttctttatattacggtgaaatgtggacaaatgcgaccacagttgcaattgtgattgaaatcttctaaaactgttacgttgtagtcacaattagatgcgaagattgcaatttaaaaccacatccttccgtgttttcaatcaaaatagtcaaattcattgtataactagatttttttttacaagtccttatacatctagatgcagtttcaatatttggatcaaattaattgcttacctaatccgctacaattagactttttttggtgcactaatttttatctaaggaaatatttgaaaggatatgacaattgatttcaagggaacatcaatgccggaaaccaggagttataatttcacagaaacgaaattatagtaaaatttgctaattttgggcttggtatgaaatcgtgagttaaattattggggtagtgtctgtttgaaattatatgatatgatatgattgattaagcattgtactgcaacttagattccaattaaaagtggtacatgtcctaccaaacatgctttttatgaatcaactgaacctagggaaaatatcacactaacaatagaagacactactagtactctctaactataactagcagtaggtcctaataattttggcatgcaggtgttagtactcaacaacctc

SEQ ID NO: 35265 - DNA, 356 bp, Medicago truncatula
  Intron number 1 from transcript Medtr7g022760.1 (locus Med tr7g022760) derived from phytozome v7.0 (chr-ID MtChr7; po s 5776460 to 5776815 reverse strand)
ctcgttcctcaggtaacgcttcttctccgtttcgttgctgagaaaatgatagaaaaatgtttccattttcgtttttttttttcctttcaatagtttatttagcatgtacacacttctgatcaaagatgtattaggtaaaaaaaaaaatttgttttttctgattcattaaataactgatgtatctggtctatattgtaaaccaaatacataaattattcactgaatttagacaaaaaagttttgcatgtatatgaaactgggggagtctgtaaattactctggtgtcaagtgtcgtgtccggtgttggtgtttgcacttcattgtgctaagcaagttattttttgtttatgcagtcg

SEQ ID NO: 35266 - DNA, 397 bp, Medicago truncatula
  Intron number 1 from transcript AC233677_16.1 (locus AC233 677_16) derived from phytozome v7.0 (chr-ID AC233677; pos 104953 to 105349)
cgtggcaggttcaatcttcaatccttttcaacctttctcgatttgttttttgatttatcttttcacacactactctacgatttgtttttcactgtgtactttcatatctagatgcttgattttcctttaattaaatttgattatcgtttttcattctggagctttgaacttctctgtaacttaattcatctatcggtgaattttgtggagcgtttctatttctgtgtttttttggatttcatggattcttagggttcttattttcttctttgcatatcgaattcagtaattcagtatagaaacattgatttgaatatgctcattctacggtatatatattaattactttttttttttgtgtttttttattaactgcaggtggctgataatttgcttc

SEQ ID NO: 35267 - DNA, 741 bp, Medicago truncatula
  Intron number 2 from transcript Medtr5g033050.1 (locus Med tr5g033050) derived from phytozome v7.0 (chr-ID MtChr5; po s 13453392 to 13454132)
ggctgatattgtggatgtgtcgtttttaagaacttagtttgttctgttttccttttcttgcttacttttttttattttttgcttcttttttttaagtttgtcaagccttttttttcttcttttctcaccaaaataaacaaaaataaaactgatcatgagtttgatttctaattcttacgtgcagaaaaaatttagttagaaggaaagaactcatcttatgtgcttcacatgttcgctcaatagcaattagtcattgttaaactacgatgactactaacaacatgataaagacaaaaaaaaaatctcgtcaaactatacacgatacatgtataaaatggtctttcccattgcattctagttaaataaccactctaaaatatataaaaaggatggagaacgaaaaaattgatattaattaaaaatgacactaattaccattttacaattgtatcaaagaaaatttaaataaacaaattgggcataaatatagtcctgattccctacatatataataaagactgcaagaaatagaggatatgatatttgtaaattgatctaagttgatagtagtttatagaacaaagtaattccatcagctgcacggtgcaacacatgtatgtgctgcagccatatcaattctccacacaccatttcgttagagttagatataatataactttattgtgtttttggcgtagctcctctcatttgataatcattaggttgattttgaaaaaattt

SEQ ID NO: 35268 - DNA, 897 bp, Medicago truncatula
  Intron number 1 from transcript Medtr5g005810.1 (locus Med tr5g005810) derived from phytozome v7.0 (chr-ID MtChr5; po s 342324 to 343220)
gatttaagtgcccccgaccaagtgtccgtagtgagtatttttcttcttcaaagcatcattattattatcatacttttttttttttttttgaagaagaagcattattattatcatactatcatgtcatattccatgttgatccctctaattctagagttcgaacttcgacctctatatataccatgtgatgttcctaccaactgagttaaatctaaattaattgattgacttcttcctaacttatgcatttgagattgaatacgatcttatttgacaattcaaaaggttacatgtcattatttaggatgattaatacttaacaattaatttacattccatcaaaatattcacttttcaagtcattgtcacataagtattcacttctcaaatcatcaaaaaccaatcccatatgcatatttgaaaaaataattagacatcttgaaaactaagagactaattaatttgtgaatataaaaataaggaatcaaaatcataaacgtgacaacaaaaaccaatcccaaatgcatatttgaaagaaagaaaaaaaattaaacattttgaaaactaagagactagatttgtaaattaatatatatatatatatatatatatatatatacatatatatggaccaaatgttcatgaatttaattcagttggtagggatatgacattatacgtaagggttaggggagcctcgaactcccacttattcatcttaaaagttgaattttcattcattaaactacttaacaaaaaaacgaaaatcataaatgtaacaaaatagagagattaaaactgcatttatgtcttataattatttcagtagttttaacacaattttgttgattttattatcccattaagtaattctaactatatttgatagagagttcc

SEQ ID NO: 35269 - DNA, 475 bp, Medicago truncatula
  Intron number 1 from transcript Medtr2g018910.1 (locus Med tr2g018910) derived from phytozome v7.0 (chr-ID MtChr2; po s 5079450 to 5079924 reverse strand)
gatcaagaaccacatctacaaagttcaggttagtttctcaatcaaactcacttttttttaaaggaaaataacaagggagatatttggaacttcggtgcaagttagcatataataaaaagttgaattattgatggaaatatgctatttttcccctccaatagggtttgtaatgcttaaaaacagaattaaatttcatgtttataaacaactttttctaatcaacaaatgatatttgaacacttcaaattttcatacactcatttgacacatcattttatcttcatctatatttttctatcacataatcaatttataacatccatcctatctctccaatccctcaacatccttttatcacatgcacaatattttattgtttccattgttaacaccaaatacaaaattataaaattaatctcaattttcttgaatatttgtagataacataaaagtgcccaactcagacataaatata

SEQ ID NO: 35270 - DNA, 734 bp, Medicago truncatula
  Intron number 5 from transcript Medtr5g088090.1 (locus Med tr5g088090) derived from phytozome v7.0 (chr-ID MtChr5; po s 34153271 to 34154004)
gccaatactgtgacgaccgtgctaggagagtgcaggtaatctttgataattatgtcacattttaggccttaatgttattattctgtacatgtaatgtttatgtgtcaaagagcaaatttgcaataatgaaagagcattttgattactctgttccttataatgagaatattttgtcacattgtgtgttttattttcttggtagacccggaagaatgtgcttatgatatgtgtgactcctgttcaattttaagttttgtaactgaaacttgtggctttcactaactcttaccttttgggtggggtcttatactttgctagttattattggaaatacataaatagctcttccaatatcgtcattcagggacattgaacatggttacacgaaagaaagaatgaaactaagcatcaaatatatggtggttatttcatgctaactccggttttgtgtttcattttccacctttttttttcataggttttgtccctctaatgcatcataggttttttccattacagacctctttgtcttgctctattgttgatgatgatacttctagttattgtttaatgttgatttactggactataaagcataaactaggtgtgaatgatgcatacacattgaatactctccagttgtgtccttaattattttgttattatttgaacaggatgagtatgaccggctgcttgcagaggctatttctgaagggtcaactgttgatcactct

SEQ ID NO: 35271 - DNA, 961 bp, Medicago truncatula
  Intron number 1 from transcript Medtr5g085520.1 (locus Med tr5g085520) derived from phytozome v7.0 (chr-ID MtChr5; po s 32672877 to 32673837 reverse strand)
tggttggtatgtaagttattttaaagagtgtttgagaaatataattttaaaaattgtgtgtttaatatttggaaaacttaaattcggtcttctaaatttaaaacttattgtaagatgcttaaagaatgtttggacgaccgttgttaacatttttcattctttttggaatgaaaattcattttgttccctgaatttgtctctcataataaaaaatgctcttacaatataacttatagtaagatgcttaaacaatgtcctgatttcagttctttcaaaagaaaaatttccagatttttgtctctcgtaataaaaatatacaacttttagtcattcacataaataaattgggacagtttagtccttaattgaacttccattatgtgaatttttataatttattttttatttttaaagtctttttattattttgttgacatgtaatgttttcatctaacgtgttagtccatcatgtcatgatattgcctatatattatgtgattgaatcaatagactattatatagtccccaacaataattgaagaatataagtcgatccttatgcatcatctaaatctctaaattgtatctttttctgaaaacacacaaacctcaattttaagtatatctttccttagtcaaaaagaataaaaaactttgagaccgattgaaatttgtgttatatataaccttctccattatgtgaaatttttctctattggccattgcaaagttggtcaaatcaacatcaacaactttgagattgaaatctcatcaaagttttcatattctaggaatatatttcaagtgatctattccatatgtattaaaaaatgagtgcaatcaagtttcttttaattagttaatgtatgcttattatagtgttaagcgtttttaatttttaatggtgttctacgggtattaaagatatcaattgtgatgttttttttaaggtggtgataag

SEQ ID NO: 35272 - DNA, 374 bp, Medicago truncatula; identical to SEQ ID NO: 28870
  Intron number 1 from transcript Medtr1g042270.1 (locus Med tr1g042270) derived from phytozome v7.0 (chr-ID MtChr1; po s 9640985 to 9641358)

SEQ ID NO: 35273 - DNA, 484 bp, Medicago truncatula; identical to SEQ ID NO: 28113
  Intron number 2 from transcript AC233109_26.1 (locus AC233 109_26) derived from phytozome v7.0 (chr-ID AC233109; pos 110269 to 110752 reverse strand)

SEQ ID NO: 35274 - DNA, 715 bp, Medicago truncatula
  Intron number 2 from transcript Medtr1g024770.1 (locus Med tr1g024770) derived from phytozome v7.0 (chr-ID MtChr1; po s 5916096 to 5916810 reverse strand)
gggtctatacatattccgtctacggggtatgtttaatgtttctcttgtcgtggttttccagtttcgatgactgtttttgttatttggacttgattggttacaggttttaatttgatgcattttgcacatgttctgatataagcttttcaattaaaggaaatctatgttttttcactagcaaataaatatttatcttgatgacaatcttatagttgtaattatttatagagaatttaaacctgtggtggtatacacaaaatttgagatgtagaagctaaatttgatttatacgagcaatttttgtttaaaatgtgtgtagtaattcatcattattgtttggaaaatttatctgaactggttattattaccattctattttatggcttgacttgatgaacgagagaaaaaaacgagattaggtatcattgcaaggatggaaaatgctattgatttcatcttgtggagttgttacttttgatagatttattgacgatacatggaaatcttgaatttatgactcttattgctctattgatgtgaagtgtgaacagttccctaattgttatggttttgtttatttgcactcatcttggttggatgacaagaaagtttttagccatttatgcactgaatgaattgttgttatttttcctagtatttgtgtgttttccctggtttcattttctcatatggaagttttacttacagctatttg

SEQ ID NO: 35275 - DNA, 773 bp, Medicago truncatula
  Intron number 1 from transcript Medtr5g006670.1 (locus Med tr5g006670) derived from phytozome v7.0 (chr-ID MtChr5; po s 785428 to 786200 reverse strand)
ggaaccagatcaacaccaccctctctaagttcgaggtcagttccttccttcgctaatttcttctattcacaccctcccttttcctttttcttcgattttttcatttttcatttattttccggcttcaaggtttctttctcttcttttttttttttaacctttttatgttaattgcttcttcttctcaccatcttactcagtactttatttcttctacgttttagaaattttttgaattttttgctttcaagcatacttcgctcttctagatctctgctcaaattcgttttaatactttatttcacttttgactttctgtttcttctctcttacacttcacattttccccccttttcctttaatttcggatacactgttcttacaagtttaatttagttcattttcttggtttttgcttaattaaccatctaattatgaggatttaagtgatttaaagttttttacacattgttttcgggttaatgttaattgattttgctcttgagtaggtgattattgtcaaccttttctctctgtaatcatgcatgcatttttaatttcattatttatattgttcaattaacaatttttctctgatctgttctgtttacatttttttatttataaaattatcattactgtctttgaaatgattattacacttaatttatgtgtgtatatgtaaggttatcttttaaatcccaatttaattatacttttaccttgttatatatgcaggattcaccagtattcaactatatcaacaatttatc

SEQ ID NO: 35276 - DNA, 739 bp, Medicago truncatula
  Intron number 2 from transcript Medtr5g044790.1 (locus Med tr5g044790) derived from phytozome v7.0 (chr-ID MtChr5; po s 18644690 to 18645428)
aactccaagcccacgctgaaaaagtttttggagtgagtttaatccaacatatatgtaattcaacgtcaattcactttcttttttttagtctacattcagtgtcaatattattatttttaaaattaataactatgaaatattactttaaatcattgtccttcatatatgtttattatagtaattgcattgcaatgtatatttaattaatatatgtaacattgtatagtgttatatatatatatatatatatatatatatatatatatatatgtgtgtgtgtgtgagagagctaaaaaagataactaaaaaacttactccaatggtagttaattgccgatatttcttgttctgcggcaattaactatcgaagtgagttaactaccaatgaaggtaaatgtgtaatttccagatgttttacaacaaaggctaaaatgggaacaataagtttcaatttttaactccaagattcggatatattgcccgtcacatttgacacatttacttttattaattcaatcctttatttttaattttacgtgttggtaagattgtttatttctatccctagatattttatcttcttcataatttataatcacagtccagtaatataggaatataataccaaatttaattttttttttttaattttatttaacatgcacattatctatctgaagatgtttatattttttgaattataggtacgcgactcggctgttcaactccgagtaaaagg

SEQ ID NO: 35277 - DNA, 1047 bp, Medicago truncatula
  Intron number 1 from transcript Medtr1g013660.1 (locus Med tr1g013660) derived from phytozome v7.0 (chr-ID MtChr1; po s 2598533 to 2599579)
aacttgagaaagagaagcaaaagttagctaacttgcatcaggagatagaaaaggggaaaaatctttagccaatactgaggcatgtggaattaagtacgtatgataactattgtttattcccctttctgtaattgaattcacttgaccattataataaaattctccattcctttctttactatttttctgctatattttactgttctcttttctggtacgcatcaccggacatgcataggcacctaaaaaagacggatacttcagtttgaccttccgaatagtcaatttttatttttctttttatatttacatatacatggttgacaattttaaccgtgtactgcaaacataggtgagatgggcggttaactcttgctatttgaaggatgttcctttagtctcactgttaaaaagtacaaatcataaattaactcaaaacgttgcttgttgcttctaaaccaactaaaatgaactcatctagggatttgcactcccttagattttccatagggcagatgctggtatatgcataactttacattttaaatttcttgacaagtttattggtttacatggtaaaaactagaatctgattgagccaaagtataggaacatgggtgagatgagaggctatctcttgctatctgaaagatgttccttcagtctcaccgttaaaaagtactattatcatactataaaactgaggtagaattctcattaagattttccttcagtctcaccgttaaaatgaattgttgttgttgttgaagacttattgttttgagaaaaatcattttaaacaatttcataacttgtacaaatgtcatgaaacgagcgagttcgatgtgttagagcctcgggttatgcctcggatcacttttgatgattgggaactttaaccattcgatttttggtcgaaattggcgaaaacccgcggccgaaacacgtgaaaacgcacgtttacggagcgctgcgcctgcataagggcgctaggcgcccacaagtcagggagtcagcgttgggcgcctcccctctagcgccaggcgc

SEQ ID NO: 35278 - DNA, 1039 bp, Medicago truncatula
  Intron number 1 from transcript Medtr6g017490.1 (locus Med tr6g017490) derived from phytozome v7.0 (chr-ID MtChr6; po s 4106000 to 4107038)
tcaagtgagtacgaatcaatgttagaagtattcaatccaattggtcttacttcttttcatgtgacactttaacatcacttcacatttctgttgcttttcctcaacgaacattatttccaaattctttgaattttccatgattaacctacttgtttttagggtcctttgactttggtgtggacgataatggccgtgttgagcctttttcagcatttaagaggttgaatagcttgattgttcaaaattgttgcgttcttgataaataaaacctttgcatatcgagtgccacgctcaccaatttaacaatagactatggctcctggcagttaggctattacaagttcgagttatgcactccaaatctctgtaccttcgtgtataagggtattccctctgtccagcaactctgtgggagcaagagcaatctatcttctgttaaacatgcaactatagttgtaataagtttgttccaatctgcaaagactgcattgattatatataactggttggttgagcttgctaacttcgaatcattgacaatcaactcaactactcttcaggtactttatggcatgtttggttggtttcgttttttactacagacaactttttttcttaatatgctttttttttttttcagttataatttttgtcgaagtgtatgacttgttttaaattgattctcattcataatcatccctcattgcttagattctcgactcagttcctaccacgttgaaggctgagtttcctttccttgtgtaacttgaagtcactgaaagtacaaacgcacaaatcatccatacctaatgaatatctgaattttttgcttcaaaacgcactgtcagcaaaggttgacctcatacgtcgattaaggtaaaagtgcattcaatttgcctcttaattcttaaagatgttgacataaagattggacggcttcctattttattgatttcttgatgttgcacttatttggtaacgtgaaaatggtgttattttttcagctgaaacctggaaccaacttcacacctcaacagaa

SEQ ID NO: 35279 - DNA, 799 bp, Medicago truncatula
  Intron number 1 from transcript Medtr5g019780.1 (locus Med tr5g019780) derived from phytozome v7.0 (chr-ID MtChr5; po s 7411151 to 7411949)
ttcttgtaagttccattttcctttaatctctctttttctgactgaatttggtgatgtgatttaattttagggaaattatattttcatatcaaaattttgatgccgtttgaattagatggaatagttagttatggtaattagttacactagttagttgccataatttcatctttatttttctgcttatctgtgaaatgtgtctaagttttagaagatgaaaaagacaagtaaatgtaacattcagattttgatcaagatgaaattttgatccaagacattacttaaaatttatacttttgtttagaaaagaattgttttacaagataaaaagtaagtgtaccattttgatactccttcggtcactattataaacagctcgaaaaatcacttttttggttgattgaataactgatgtatggactataatatagacatgataaaaagtgatttcttgagctgtttataatagtgacggaagagagtacttaaatatttacttatttagaaacaaattgttgtagaagataaaaagtaagtgtaacattttgattttgatacatcacttaaaataacttacttatattgaaatagattgttgtagcaagtgcagcatcccagattttgatcaagatgaaaaatgactgtaacatcttagattttgatccaaatattatttattaaaaatatttacttcttttgaaatgattcgtatccaataggtcacagttagagagatataaataaatatatatgatgttacactaaatttaacatgaatgtttgtttctgtgtgtaggaa

SEQ ID NO: 35280 - DNA, 699 bp, Medicago truncatula
  Intron number 2 from transcript Medtr3g025420.1 (locus Med tr3g025420) derived from phytozome v7.0 (chr-ID MtChr3; po s 6555506 to 6556204 reverse strand)
aaagtaagctataattttttgggttaaatatatttttggtattttataaatatatcaatttttttgttttatttcctctaaaattttccttccaacttttaatttatgtaaaatttttaatccttatttttgaagttaatttttgtattttttaatggaattgtgtagaatattgtaaaaatctctccaagtaaaagattatatttttttttaacaaaacataaattaaatattaatttttaaccgtcaaaaatataaaaattcatatttaatttatgttttgttaaaaagttataatttttttggaaaaggttcttataatattttaaatttttattcaaaaatataagttctacatatgatttactttaaaggaaggagagaccaaaagtaaagatggaaaacttgtggggactaaaagttgaagacattttttagaaggacaaaaataaaaagttgacatatttataaggacaaaaaacatatgtatcccctttttttcttttttctctcttaaacatttatgtcattctaaaagtattgagttgttcttagctatgaagattgggaaatgataataaattacgaatattaattatatattttttaaagaattataagatgcctcgtgtttaaggaagtaattattttcagattattaacagaattggtttgcattttttgtatagagtaaacaag

SEQ ID NO: 35281 - DNA, 845 bp, Medicago truncatula
  Intron number 1 from transcript Medtr7g011610.1 (locus Med tr7g011610) derived from phytozome v7.0 (chr-ID MtChr7; po s 2865188 to 2866032)
tggccaaccgtgtcaaaggaaaacctcaggtttgtaacagaaatattatttttatctcttccaaatactaataagattaacatagatagtttaaaaaaacatgtgaatttattttagagtaaattcataaattagtttaacattggatactacttatttctaacaattttttttcttttcattttaagctattatggtcataaacaaccccttatacttccttaataaatatagaaagtgctctttttaacaagatataggtgtcactaaattttagttacattatttagcatctaaaaaaaaaaaatagtaaaccgtcaatatattcctaaggatctaggagtcctccaaaagggcaattagacccttccagaggccttagcgccctctagaagggatctaaggcctaagccgcgtccttcccagggcgccgcctcagccagtttctagaagcctctagagctcgacctaaatacctaaaatatcccactacttatgtcttaagtaaccacaaatcaggctcataaagggctataaatacaacccttgagagtcttctcaagacatgaccaatacaacacaaaccataatacgattattgtacttttgcaagtacaatcagttttttaagttataattatttttactaaataatccctcaaatcttaaagggattttatcaaacatcctaaatttatgttatagaaaaatgttaagtatcctaaattattattgtataaacattccaagagtacgagctaaatccattattttatttattaaaataaaaaaactacttttttaatgtttgagttttaaatagattgtggcagtagggttgagaa

SEQ ID NO: 35282 - DNA, 409 bp, Medicago truncatula
  Intron number 1 from transcript Medtr4g073490.3 (locus Med tr4g073490) derived from phytozome v7.0 (chr-ID MtChr4; po s 14573954 to 14574362 reverse strand)
ggatgtaatgaaagcaccattaattgtaccatttttgaatgcttgtgtttacatttcattagcaatggcacttatgctttttatggaaagagtttatatgggttttgttatcattttggttaagcttttttggaaaaaacctgaacaacgttataagtatgagcctcttcaagatgatgaagaacttggtggcgagaattttcctgttgttcttgttcaaattccaatgttcaatgaaagagaggtcagagaaagattctcttatgttctttgtttttgttcttttggattcttttggtaacttttttttttttttacagtataaactagtaaaagacctgtgcattctgattaatgttgtttttctattacaggtttataaggtttcaattggagcggcttgcgggct

SEQ ID NO: 35283 - DNA, 716 bp, Medicago truncatula
  Intron number 1 from transcript Medtr5g033900.1 (locus Med tr5g033900) derived from phytozome v7.0 (chr-ID MtChr5; po s 13822462 to 13823177)
cactcttatctcgtacgttcttcaatctttaccaaaaactagggttttcattttttcatttcgttttctttatcgttttttatattaattttgtttaaatgcatacccttttgcttgtttttcttgttggtaactctaaatgtttgagatttaagcttatgttaatgttttatttaatttttttttttttatgtgataaggtggtgaaaatttgatgcaatactttgaattttcttgttaattaagctttttgagcaaacgggttgttgtgtttattgtcaaaattgcatttttaacttcatagaattgaagggaaagtgttgagttttaaatttttgcgttatatgttgtttattataaaatattcatgtgatgtggtgtggaatattgatgcaatacgttgattcttaatcctgctaattaagcttgttgttgtgtttattgtcaaaaattcaaaattacatttttgattggatataattatgggaaagtgttgagttttaatttgtgtttttatggtacaataataaaaaattcatctgcaatgatgtggaaaattgatgcaatactttgattcttattttgttacttttgtagcttatgggttatcgtgtttattgtcaaaattgaaactttaactgcctaaaaatgtaggggaagaagtgttgagttttaatttgtgttttatgttatttcaggctcagctttccttagaa

SEQ ID NO: 35284 - DNA, 836 bp, Medicago truncatula
  Intron number 1 from transcript Medtr3g103540.1 (locus Med tr3g103540) derived from phytozome v7.0 (chr-ID MtChr3; po s 25497160 to 25497995 reverse strand)
gtaggtttctaatattcattcatcacattcatgaatttgaatatatagctgtctgtccacaatctgttgtggggtcccataaatttggctgatcatcctctccttacgtgtcttgtcttgcctttgaaagaacaaaagccactgtttcatatacctccctggacaaaatcctacatgatataggtttctgacttttatattgttttttctctctcattggtcccgacaccacacacattcgaattgtatttacacatgttgattatgtccgactttgtgtctaaataacgcacctcatacattctctcgttgcaaaacttgtttaacaagcaacttacgcccataacctcacaattgaagttatacctgaaaactcagtaaaaaaacttaaaaagaaaaaaccatgaaaatttgttctattgatatatgaaacagtttataactttgacaaattgaaaggctataaagaaaagttaaaaaaaaaaaagcatctgattctattattgagtgctgaagctcacggcaacacaccaaaagaaaagatgaaaagttagaaggaagtgtgatgcaggatttatagttgatcaaaaagtgtttctcttttatgtgataaatagaacaagagtattctttttacttaaaaattataaatttcataagaatctatccatgacttaaaaagtaataaatatcttatgaactatggtctgaagacgagcaatatactggttattcttcttctgaattaatgttgtgcttgatttgtgtttgcttttgcggttcaagtgatgctacaatcagaaagatcactacgtagcaaccttccaataattcgt

SEQ ID NO: 35285 - DNA, 417 bp, Medicago truncatula
  Intron number 2 from transcript Medtr8g015710.1 (locus Med tr8g015710) derived from phytozome v7.0 (chr-ID MtChr8; po s 2842231 to 2842647)
tatagggtcaagctagtatcatttgtgaaggtaaataaataatttgattcaatgttgattattaaaaagattgtctaacctaaattgaaattcttagacgtaaataagattgttgtttttgccatcctcctagtttggttaatttacaaagctatttttcttggcacagtaaagagctaaatacttgaccgtgttttgagggctcttgtagtttaagtttttttttttcttcctttttttctttctttcaattggttagcataattaaaggttacactttccaatgaaccttttttcaaattttttcgatgtttattttatcctctttctgttttctgacttccgtctatcaaaatactttctctttgcatttatacgttggttcaatttttgctttaggaaaaggattttcaggac

SEQ ID NO: 35286 - DNA, 706 bp, Medicago truncatula
  Intron number 1 from transcript Medtr8g089490.1 (locus Med tr8g089490) derived from phytozome v7.0 (chr-ID MtChr8; po s 19246223 to 19246928 reverse strand)
ctttgccaattcaggtaaaacaaataacacatgttgcaaaaacttcactcatgtttggaatcacggtgggtttgatcaagtaccaccgtgattttgttgaatcacgagagtatagttttcgccaaaatcactatggcaaacattgtgatttttccaaactcaccgtcaattcgaacgtcgagtgacatgatgttgcatgcaagttgatctttgtaaaaaaaaaaaaaaaaaaaaaaaactggagaagaaattgaaaaggaattcgacaaagtagttcaattaagttaacattcgtctgaagtagatgtgtacaatttttattaaggaaagttgtatttaaatgtcaacttaagatacagtaccagaattcgaccaaaaaaaaaaaagatacagtaccagaagtttcagcttttttctattaatgttgtagtaaaataaaatcagctaattgtttttcactagttgtacaatgtttttttatctagtatggtatccatgattctaaattgcggtctgcaattgcatttggggtcttggtattaaggatttttaggtctccacaacgacatcgcaaccgcaattaatgccagtaattgttcgtttgattgaaattagtatcccttgcattgttaacaataaatatagcacaatatgtttgttcatgtcaacaggaattggttgattgggatcataaaagcaaagtaga

SEQ ID NO: 35287 - DNA, 1003 bp, Medicago truncatula
  Intron number 2 from transcript Medtr8g102090.1 (locus Med tr8g102090) derived from phytozome v7.0 (chr-ID MtChr8; po s 22333096 to 22334098)
acttactccattctttggaatcatcaccatattgtgtaagtaaataaagacaagcaagaacaaaaagtgtgataaaatgaaccaaaaaaaagttaagcataatggtttaaatcacaaagttgcactcctatattttattttgcagcgttgttatttaaacattgattgtaaacaactttagcaataacctttttaagtaattgatgttgttcaaaattcaaatagatggatgatttggttcgatagaaatagttatggatataacatatgtcaaaacctattaatcataacttcattgactacaatttgagtgtgattaaccacaactttcaagtgttcaaacctacatgcagttaaatacttgaaaattatggtaaccatctccaaatttgaggttagattatggtaactatgtccaaatttgaggttagtagagttatattgatagttaataaatttagacatctaatgtatttactaaacatatactgaaggtagttagccactatttgaaccgagttagttgtcaaagttgtttgaatttaattgttaaaaaaacatttctcttgataatgcaaaaccataaaaaaaaaaaaaaaataagcgatgacagaaatttatacattagaaatatgtaaaatccgaatatctttaatttaaaaaaaaaaaaatctaattttggtgacttactatatttttaatacaagacatgacaacaattacctttttttgtatggagactacaattacttacatagattgtgatatatgtccatgtggttcttaaatatacaaaaaactcgcatttattgtctttcacatggggatggtacaatgtgtgtatgaagaaaagggtatctatgaaacattatccattatttatagtcacaatattgtcacagaatcataaaaaatataaaaaataaaaaactttagattttgtggccaaaattgcattctaagacgtgagactaacgtaagaccttacacacatgcagcttct

SEQ ID NO: 35288 - DNA, 798 bp, Medicago truncatula
  Intron number 1 from transcript Medtr8g040150.1 (locus Med tr8g040150) derived from phytozome v7.0 (chr-ID MtChr8; po s 8545271 to 8546068)
atccttcaggtttgtgagtacaactttcattttgatattgacatgtaaatgtacaaatatatatatatagtagtagtacatattcatagatatagggttattttttgattactcttggtatagtacatttatatttcccttatttggtaaaaaagagagagaaatttatggtgttaaaaatgacttgaaaaatgaaaatagcattgttcatgaattgttgtcacttggtagtagtatttttttatgaagcatttcaactcctcaaagtcatgtttaaatggtcttttttttaacttcattttttccttgtgtgatgatgatgatagtaaagtaaaataaaatttaagtttaaaagcatgtttaattaaaagttaaaatatattgtttttgtattgagcagaaaattttgaataaaattttatttgaaggtgatatttcttttattgtaattctccttttatttaaaactcaattatttataaaagaagaaaataattaataagtgttcattcaaaccaatatatgcacaccagcattatattggttcaagtagaattgaactcagatctcttaaataagtcgagcattgtgaatgaaagaatatgattgagagagaaaactcgatgatcagtcaaatttcctaacagagattagtcataaaaaagtttatagatatttcgcacaaacaagattgttacaaaaacaaaacaagcacacacttggccattgagctaggcacctagagtttataacttgagtaattttgcttttcttgtgcaggaaaccaagtgaacacag

SEQ ID NO: 35289 - DNA, 827 bp, Medicago truncatula
  Intron number 1 from transcript Medtr8g068120.1 (locus Med tr8g068120) derived from phytozome v7.0 (chr-ID MtChr8; po s 12983323 to 12984149 reverse strand)
tgttggttgcttagggtctgttaactttctaacaacattttcaattttttctttgaatgtaggtggctggaatgccatttgtttatgaatttttctttctaattgtgatagacagaatatagaagctaactagagagaatgcatttccgaaaacaacgaatttttaaaaacttccataatgcatcagtagaaatggaaatagaaaactcaagaagtaaatgagctcttagttctccaaacacaaagatgaaaaaggaagaagaaaatgaagagaaaaaaaaaagaggaggaactcataagcttcattgtactttatttatttatgtatgcaaatagcagcatgcgagcagcatcagttgcagttaacgaaacagatatttggacttagcaattaattcccacttttatttcgttatattattgcagatagtagagaaagattagtggctgggtcatttctgggccgaacaggtcatgtggacggaaagctaagtgatgctcgttttcattatccgaaaggcatagccctggatgataaagggaatgtttatgttgctgatactcagaatatggccatcagaaaaattggagatgctggtacgtgttaaccaagttaaaagaatacatgttttcaggatctagtgaggaataatatggtctactagtatctgacaacatcaaagttgagtttgaaaataaattttcttattcaaattcaatagataagtgttctgttactatgtgaactgtgaaaacaaatgatgactcattgtagctgatctttttattttttttaggtgtgacaaccattgctggaggaaagtcaa

SEQ ID NO: 35290 - DNA, 613 bp, Medicago truncatula
  Intron number 2 from transcript fpc265_27.1 (locus fpc265_ 27) derived from phytozome v7.0 (chr-ID fpc265; pos 128984 to 129596)
ccgtgtcaatattacaggcttttcaaatatctctggtcagaatatttcttgcatatcaccccttctctctcacatccttctttctaatatagtttatgctttcttaaataaatttggacttctgtttgtttattcttgattgtttccatagtatgtgtcatatgtgactcttgcacaatttggctaccttttcctttcatgcagtagtattttctgaatttgatttcgctgtatcctatttagccttcctaattttgtgtattttgtgctttattttatttatttatttttgggaaaatctaataattaatttgtttatttttcacacatttgacatttttctgttcagagccacccatcaaagccattttttgtttgtacttgatctgactactcaactgcatgcatgccttgaaatttttgtttctgctgagattcttgtctgtgcatgtaaaataggcttgtgaagtattacatgaatttgtttcctacctcatgcaggtgcacatattcaataattgcatttagcatttctaagcatgactgatattcccctccttgtattgtgcaaatttcagatttggactgctgcttctttgctaaggcacaaagt

SEQ ID NO: 35291 - DNA, 362 bp, Medicago truncatula
  Intron number 1 from transcript Medtr7g130390.1 (locus Med tr7g130390) derived from phytozome v7.0 (chr-ID MtChr7; po s 30461372 to 30461733 reverse strand)
ccatttcagaaacgttgttcaaaattcaaatcgtaagcttccctctctcatgattttctttctttttcttttcattaaataattataatatattcatcgttgcgttgcttgcgttctctcatgggaattcccaatttcaatattcaaccaattagggtttccaaaatctgaaaatgtgctcgttaagcctcgtaaatctttaccatgctcaaaatttcgaactttttagtttccattttgaagttttcatggttttattagagattttctggataatcaaaatattaaatgttgcatcgttatataccatttgttatgtttttattcatcatatggttccttttttctcttttgatgatagg

SEQ ID NO: 35292 - DNA, 760 bp, Medicago truncatula
  Intron number 1 from transcript Medtr8g089210.1 (locus Med tr8g089210) derived from phytozome v7.0 (chr-ID MtChr8; po s 19116683 to 19117442)
tccgtcgtttgttcgacatgtatataatttggctagcttcgatatacgtgttttcggttttatcatatgttcgatttttgatttatctgagtggaattcagttttggcagactaaagcaagccgacataatattgttctctgtgatgcgattcggtttgatatatatagagatttgtgtctttagttatttgattcttgttaaaatccataacagtaagaaccgtgctattacttgtttctaacttctatttcccaacatatggatattgccgtattcatattagactttcttatccctctattggagtaaaattcttaattgacaaacattgtgttctctggcatttatttgactatgtgcatatacagatgctttcgtaatttattcatcgcatgcttgggtttttaactgcacatgtatcataagtttaagttacgctattagtttttaactcactcaactaaagcaagattattgtttacgtgatatacaatgcccaatatttaatctactactagttttcatatccgcattggtttttcggtggatatatatatatatatatatatatatatatatatgcactgtgctgcaattggcttatagtttttttggcaataatctagtatgataattgatattttggagacaataggttggaccttcatccctgatttcattaatactacagcaagggtgttgtacttcctaagtaattttcagggcctcaagattcaacaaacgaactcaatttctca

SEQ ID NO: 35293 - DNA, 468 bp, Medicago truncatula
  Intron number 1 from transcript Medtr8g039650.1 (locus Med tr8g039650) derived from phytozome v7.0 (chr-ID MtChr8; po s 8350930 to 8351397)
gaatatacattagaggtactcttttctttacaagcctatatttattgaaaatgtgtctttcatgtgaaattttgattgacaaaaaatagaccaacattatgcttctacacaaaccaatgcaaatacataacacataaattaacatgcatcaaatagaccacattccatgttattgtttcttgtattattgatcagttagctatacgttccaacttcgaggtgaattttaccaatcaccatgtttttgagttttctcctacttgcattgaacaatttcttattaatgatatcagttaattttgctcctataaacgtgcatcaaatagaccacacggctttatgaagaaaaaaaaaacaccaccctattgatttctttagacataacggtataaagaaaaactctgaccccaagcatatgttatgtataggttcgttggttaggtaagcgtcctggtaagaggagtagtt

SEQ ID NO: 35294 - DNA, 976 bp, Medicago truncatula
  Intron number 2 from transcript Medtr8g065730.1 (locus Med tr8g065730) derived from phytozome v7.0 (chr-ID MtChr8; po s 12452166 to 12453141 reverse strand)
aggggcctgatactgacattgaaactggtattatttcaattttgatattttttttatgatatagtgttctatgcattttgcttctaattttggaatattttatgttaattataattttttagtgaaaaaatgtgtttcttagatttagaatgtgcatgctgtgaatgtgcttgttagaattagtatgtgcatgttgtgaatgtgcttatttagtctctgtttggtaaaaataaaatagagaataatgagctagcttatagcctataggtgattgtggattagctagccgattgaattttgtatgtttgaacggttgaagtatcttgtaaatatgaaatgacataaaaaatatatatttaattaatatttatttattttttaattaagattacatgggtgaaattgagagaatataaaatgttaagatataagctacttgaattagcttatcagaaagcgctataagctagtaaatataagttggaagctcgtgtgaaaatgacggttacgaaacaggtcttttttagtcgtttgatcttatgttctacaatctaaaaaatgcgacttgccaaatagacacttactttgtcaaaaaaaacagacacttactggaatggcactgactgcaagtctttaggttctggagggtgcatgctgtgaatgtggttattaatttaataagaaattttggtttcattttatttgtcgttttttaagtttatagtattatgaacaaaatgtattgcatagagagatataagttgaatgagatgataaatagttagggtattataggaaaaagagaaataattacattgaaaggagatttttttattgatttttttggcatgtgtaaataacgttgaagaggtaattagtaagaaacagagatagtaatgattagtgattgtagccgttttattttattttaatttttaaacttttgggtaaaaaactttaatggtgttatgcagaa

SEQ ID NO: 35295 - DNA, 589 bp, Medicago truncatula
  Intron number 5 from transcript Medtr7g081150.1 (locus Med tr7g081150) derived from phytozome v7.0 (chr-ID MtChr7; po s 17494242 to 17494830 reverse strand)
gagagcaaccaaacgaaccaagaaagagagtagaggtaactttttgctctttttttctttgaatcttgcactctagatctaggtttgtgtgtggtttgttttgaaaatcttagtccggatttgaatagaggaagaaaaaggaattccaaatatgtaaaaaaattttgaaaagggtgagttttgaaactccggcgcggtggtgccaccaccggccaccgcgccggaaaattgttgtccgccggagaagagagaggagggaggcgctgcatttttttttctagagagaagggagagcaaatgtttttagagagagggaggaaggagaaaaatgaggaaaaaaccggtccctatgcttttataaacatgtgcagaccggtctggttcatctgaaccggaccggtccatttgattcctttctcctttctttctaaacctttagatcctgtctttttttttaatctaacggtcatgaatgtgcaatttatggtgttctttagtacaccttcagatctagactgtttgatttttaatctaacggtcagggatgattctgttaaatcacacgcatgtcctttgcttgcagtgttcc

SEQ ID NO: 35296 - DNA, 799 bp, Medicago truncatula
  Intron number 1 from transcript Medtr7g081150.1 (locus Med tr7g081150) derived from phytozome v7.0 (chr-ID MtChr7; po s 17503485 to 17504283 reverse strand)
gagagcaaccaaacgaaccaagaaagagagtagaggtaactttttgctctttttttctttgaatcttgcactctagatctaggtttgtgtgtggtttgttttgaaaatcttagtccggatttgaatagaggaagaaaaaggaattccaaatatgtaaaaaaattttgaaaagggtgagttttgaaactccggcgcggtggtgccaccaccggccaccgcgccggaaaattgttgtccgccggagaagagagaggagggaggcgctgcatttttttttctagagagaagggagagcaaatgtttttagagagagggaggaaggagaaaaatgaggaaaaaaccggtccctatgcttttataaacatgtgcagaccggtctggttcatctgaaccggaccggtccatttgattcctttctcctttctttctaaacctttagatcctgtctttttttttaatctaacggtcatgaatgtgcaatttatggtgttctttagtacaccttcagatctagactgtttgatttttaatctaacggtcagggatgattctgttaaatcacacgcatgtcctttgcttgcagtgttccatgttcttttttatccaactgttggatcttagatcctatggctgtgatgagatcttgggattcagatctggacctctggactaatccaatggtccagaattaatcctgctgagccatttgtttattatttttatttgttattatttttactttttaaatgttgttttttattctttttgacatttttatgttcagaaaaaattccaaaaa

SEQ ID NO: 35297 - DNA, 1022 bp, Medicago truncatula
  Intron number 1 from transcript Medtr8g105800.2 (locus Med tr8g105800) derived from phytozome v7.0 (chr-ID MtChr8; po s 23455794 to 23456815 reverse strand)
agagatatcgcatcgcacaccactctcaaacctaggtaagttttttcccccaatttttttgctaattgaaccttttatctatgtaataccatgcacgattcgaatttatctgtgcttgcttatcatgttatgggtaattaaaattaattggtttgtgttgattatgttaagtcaatttgatcttaaggtatagttactgtaatttctgttcataagttagttttttcattgaaatttttctctggtgatgtattgtcatatggattaggctacacaattgatgcatgaagttattgtaatgatgatatgatatatatttatcttattgaaaacctgtacttgagtaactggatacaaaatgttatcattttaatttgctccctgaaattgtttgcgttgggcattcacccccttgaaaattgtgaataagcaaaaagacgttgattttgaattatgtcgagcaacttggttcttctattaacttgtatctaatttactgtcaaattagcccccaaattatattacttactagcaaattagtccctccctgaattatatcaattactagcaaatcagtccatgaattatatcaattactagcaaattatatcacttaatgtcaaactagttcctacaagaacagaaggaccaagttacccagtgtcattcgaaataagggtcttttttttgcctattcgcaaatttcaagcgggtaaatgctctgacccctgcaatttcaggtgacgaattggtgattttctctcacttttcttcccccacccccctcaattgcaaagggtaaacaaccattttagtcccttaatgtgtgaggtgatgccactatagtcattgaaatggtttctttacagttccctttttgtaaccctccgctctcttttaaatgattaagaagctacactgttttttacatgttgtcagttttccatgttatcatgttagtatgaggttttggtgatgttgcatttataccttttataggaaagacgggcaggatacacagg

SEQ ID NO: 35298 - DNA, 300 bp, Medicago truncatula
  Intron number 1 from transcript Medtr8g144810.1 (locus Med tr8g144810) derived from phytozome v7.0 (chr-ID MtChr8; po s 35073555 to 35073854)
gtcctcccaacaagcgttgcaaagtttgtcatctctcaaaacaaatatcgtttctattcttattgttaactcttgctttactattttaatttttcttgaatatgttcggtgcatatttggttctttgaggagtcaaaattgattctaaagttgtgaaatttggttttgatatgtatgagtagaatttatttttattaatcttcacttttgtttatgtgacttcttttcttattgttcgtgtttttttgcgaatcgtttagcagcggagtgaccatgtatctttactaagtaatatacttg

SEQ ID NO: 35299 - DNA, 1003 bp, Medicago truncatula
  Intron number 4 from transcript Medtr8g144810.1 (locus Med tr8g144810) derived from phytozome v7.0 (chr-ID MtChr8; po s 35074534 to 35075536)
tgtgctcaacatgtacatgcatattcttttaaaagtacaaatggttttgttggtttgtcataaactaagtaggagaaccgatatttaacacctttataaaatattagaacctgatttccaaatgggacattcagagaatgctctgatataagagcaatacaccttgttgtttatagtacttgtgggctttagattactcctttttgcccataagtgtttcctaattattgtattaaaatatatttggttaaacttgtttttttttttactttgcattgtcatggtattgtatgtttatgtcctagtccatcttgtttggctcatgtttagcatagagaaacgtatttcgaaagtgatactggtttctatctgctttgctcttcctaggaaaaaccgggtgaaaatttgttttcaaagaaattagcatgatttgattttagtaatgacattcatttccataaatttgtcgactctgccctgatttcaagtcaacaagatggtggatttaattgataatagtttgaatgtggtgacaagcttgattatctaacagttcctcataaaattgaaagatactaggaaaattttactcaaatttatgcttaattggttgtgtgtcgtgtgattatttgtgtatttgcctatacggttgagttagagatcttcaaaatactttttgcaatacagtggtttggagatacccctagcgcaaaagcaaacaaactatttgttgctaaatagttgagtttagtctatcagattggattcacagaagagctttgatctttttatttatagtttaatagggctatatctgttcaaatcaatctaattgttgtaccaaatattcttccctgctgctggctgtatcattaatttagcttgcttattttgattatcaagtttctaggtgaatgaatgcatgcacacttttaatgtttttatgtttatgtcctattccatcttctgatcttgtaatttgtagctaggtggcattttttga

SEQ ID NO: 35300 - DNA, 1011 bp, Medicago truncatula
  Intron number 1 from transcript Medtr8g025270.1 (locus Med tr8g025270) derived from phytozome v7.0 (chr-ID MtChr8; po s 5019843 to 5020853 reverse strand)
cctgatatcaaaagtataatctgagatatcttttaaatttgataatttctgttggaaagtaagttagatataggtatgcttatattaaatgtcacaacagagtaaaaattaaaatactggttgttgccttcagagttggtgtttcttctaatacatttatcctattaacattttgattaatagggtatgaactttccattaagttgtgtaagtaatacaattatgttgctgaataagtgaatgtttgtttgcatgtactattcatttaaaagaatgttctttcacctcaacaatgtcttccgtaaataaaactgggataggaggtattcatatcagtttaacaagcttttttgaattaccttgtttaagtaagaaatagttagattaaaaaatatatatgcaagttaaaccacgaggcctctttttagttatttttgaactcttgatttttgcagcagaaaaattgcaattttattacgtgatatgtgaagtagccaaataccaaactcagtgatttctagttgttacttgtcgattatgtgtaatgtgctctctgtttccccaacaatcttcagatcattctttaagacattgtcagttgtcatctaccctttttaagagaatgttttctgcaacttatgcttacctttgttaattcctagcattatcatgctatagaactatcataatgtgtagaattttttttattccatttttatcgtatatgtatattaacagaaactgattgtcatatcatattcttccatgtcacttgttacctcccttgagtaacatttaaataaagataatgcattgagctctgtcgcatgctaatagcacaaactactgatctgatgcagtgcatttttctttctaaattatcatacataatatcagttgaagcgaaccgagttttttagtttttggaatttgatatgttgataacttctttgtccatgcgttgtacttcctacaggccggagaaaagcgaaaagaggaagagttgataga

SEQ ID NO: 35301 - DNA, 434 bp, Medicago truncatula
  Intron number 2 from transcript Medtr7g096490.1 (locus Med tr7g096490) derived from phytozome v7.0 (chr-ID MtChr7; po s 21567897 to 21568330 reverse strand)
ttcaggtatatttcaattctttcatctttctttcacaataatttcatttttttaaaaaatataaatcattatccgaaaaatacgaatattattagattagatttagaagcacgaacgtatgtcctttttccagtttcggtcgccgcgtatctgatctgaaatcaagccgctttttctgggtttcctattttgcccctatggtatttttcgtaaataagtttggggtttaagggtttttctaaggtttggttttctcatttgaatcaatactgatttgttacttttttttttctttctttccttttgggtttggaatatttttaaaaaataaagaaaaaatagtttttggattaaaaagtttgaaggtgaatgaagacagaacaaaaaagttaaaagcaaaagtgcatcgtgtggttttttgtaggtgaccaaag

SEQ ID NO: 35302 - DNA, 950 bp, Medicago truncatula
  Intron number 4 from transcript Medtr8g078670.1 (locus Med tr8g078670) derived from phytozome v7.0 (chr-ID MtChr8; po s 16113135 to 16114084 reverse strand)
gcaggggtcaatcaacaaagggtaactataagtattctttgcgagactgctatttctattgaaatctgaagaatccatcagtatgtttgctgctcttatttttaactgcaagccaaatataaaataagttgaaggttatgtctttcatgtagtgtttgagtatgagactatgattacataggagtaggaaaaggatatctacttttgactattgacattgattctgatccacagttagcaatgtacgtagtggcagttgcattgcaaatgctgcaaagacttaaatcataaatgcagacacttgtggtggtctcaaggtaggctctctcgtctcccaaatttggtggtcaattgtagctgcttgtgtttgggtgggttgtgttggttgtagttgatttctggtttgttctgttttggtgattaataaattgtttgctgattgaaacaaaatgacagtgttagtgatagtattagttatggttcaatattgtctctttacaacaaaaagttctgcacatactcactcaaacattatacgttgcttctaaccattgtatttcgagaatttattatttagagtaagcgtagaagatagacatcttgtacaaacaagcaatatatttaatttgtcttctttgaagatctatgaataatgtgcttacaatgaaaatattaggccatcatttaagtacattgattgaatattttttttgtttttatttacgatcgaagttgtttcacatgaactgtacagttgcatgctttgtggtagaaattaaagaactcattaagtgtataatcatgtgttgttacaatactgttaccattcttgcgtgtatggcgttattaagaacatgctaaagtatcaggaacaaatatatgatgtttcatgattatgtgccttgattggaagaggatttgaaggattggagctcttgtccatcgattgg

SEQ ID NO: 35303 - DNA, 766 bp, Medicago truncatula
  Intron number 2 from transcript Medtr8g078670.1 (locus Med tr8g078670) derived from phytozome v7.0 (chr-ID MtChr8; po s 16114293 to 16115058 reverse strand)
aagaggtacgtgaaagttaccatatgatcttattttcacaataaatatccacatattcatagattttttgctttaagttggtggcatataattcagtgtacatgcttattagttaagtctataactagcttacatgaagccttgttcataagattttataactatcttcaaggaagcctattgttcatatgcttattagatcaatatataactagcttccaagggagccttagtttaatataaaattattagtaatttgggatttgtgacgtgttattcaattatatttgattgaatgtttggattggggtgagtttgatgaaattagttgtgtgttgaaaccatataggtggcactggtgttggtgtgttgttgtttatgttcctgattgtgtgagagccatttcatgtatataactaagaaaactagaaaatactagtataaagcagagcatatttgatattatatatgtatatgaacttggtgtcgatattatttttttttttccaattcccaatttaattatcctataatggcagggatgctttgaaacaattgtaggaggtacaattttctaatccaaggtattaagttcatccttctaaccttttcattgttgtttcttaaagaggagtcatgcatgtgtttgacaaattgaatactcatgcacaaatataggtgtcaacttctttcacatggtcatgaatgtctctttgttacttcttaagtagtgtttttgtcaatttgattaatattgtgacccaaa

SEQ ID NO: 35304 - DNA, 303 bp, Medicago truncatula
  Intron number 1 from transcript Medtr8g078670.1 (locus Med tr8g078670) derived from phytozome v7.0 (chr-ID MtChr8; po s 16115083 to 16115385 reverse strand)
tgatattgcttaattggaacaaaagaaagaagaaggtaaagaccgtgtatttttttttctctactcttttatgtgtttttggataggaagaaaaaataataagatttttgtgatttattttttgaataatgatgggtaattttatttaaatgtaaatatgtgagatgggtctttgattaagcttaattttgtagatatatgttacgtggacaactattaaattttcttactttttgtgagtaagttataacttttttgttatgtaatttgtgattctctataattgcaggggactactttttt

SEQ ID NO: 35305 - DNA, 580 bp, Medicago truncatula
  Intron number 1 from transcript Medtr7g093640.1 (locus Med tr7g093640) derived from phytozome v7.0 (chr-ID MtChr7; po s 21053306 to 21053885 reverse strand)
tgcttcacaaaaagtcttaacctcaatcaatagtatgtatattttacttcctcaaactcatatatatgtttgtttctaactaagttgtaaattgcaacataccttctaaattaatgtgcctaatatgagtagagttcagtagttagacatcatgttttggtctttataagtacgctgaatcatatgtttgctataggttgtgcattttttcaaaggccgcagtctttcttctctgttttccccatcaaaatcaacatgaatgtatagttcaacattattttatcccaagaaaaatccaaaattattattcatcaaagtctatataggagcctgtagaaaattttcagaggccatttctcttcattgctgctacaaaatacaaggaaataagaagttaacgaccagttctcttagagacaatgcatgagcatgattattaattatggtaagttttatctaatttgatttttgaattgtaggtacgaaacgaaactggagtcttattgtgataggtaagaatgatgaacaatatcactttctatgagaagtgtttccaatcccacaattagaggtagaatca

SEQ ID NO: 35306 - DNA, 416 bp, Medicago truncatula
  Intron number 1 from transcript Medtr8g040310.1 (locus Med tr8g040310) derived from phytozome v7.0 (chr-ID MtChr8; po s 8619371 to 8619786)
catttctggttcacttttgacaacttcttttgcaggttagttttttttttttaaggtttttttgcagccttttatcttattgtgtcagatatatgttcttatagtgtttcatatatattaaattaagtttattataacactaataaaagttattgatattgtttagctttgtttaagagtgtaattatatatggtaataatattaatttagatttgattccatgatcttctgaagtgggaagcatgtgatcaacttgataacttttaatctttgaaattaaatttttcatgttgttcaattatgtgtattagagataaagtatataagctatgaaaatgttagatgaaagaaaaagttacctagtgtgtgcttaatacatatgcaggtcgagcatcaaatttcatcagaatttcaa

SEQ ID NO: 35307 - DNA, 855 bp, Medicago truncatula
  Intron number 2 from transcript Medtr7g100260.1 (locus Med tr7g100260) derived from phytozome v7.0 (chr-ID MtChr7; po s 22560759 to 22561613)
cttggattcaatccagtgagatcaaggataagaaggtatttgtgaataattgttgaattacgcaaccaaaatggtgaatttttgtcttatttggtttatttgtaatcttaagctgttttgaacttgaaataagttaattgaaacacacacatttagggtttgttcatgattgttaaatcactcaaccaaaatgatgaaattttatttgattttatgttcactcttaagctgttttgaacgtaaaataagttaattgaaacacacagttagggtttgatcacgattgttgaattacgcaaccaaaatgatgaaactatatttgattttattttcattcttaagccattatgaacttaaaataagttaattgaaacaaatatttagggtttgatcatgattgttgaactacgcaacctaaatgatgaaattctatttgatttgatttgtactcttaagctgttttgaacttaaaataacttgactttaacacacgctttttgggtttgatcatgattgttgagttacacagccaaaatattgaaatttgatctgattttattttatttgtactcttaagctgttttgaacttaaaataagctaattgaaatacatgcatttagggtttatagagggatatgttttgggcatataagtgatgaatcctagtttgaatgtgaattgatttaattttgttaactttatttgttgagtgatgctaggtaagtgttgttctgtctgatttgattgtgatgacgtttgagttggcttttgttgcgtgatgatctaaatgataaattttttttttttttttacaatgcttttttttttcttcttgatacaggtgagtgcatcgt

SEQ ID NO: 35308 - DNA, 1016 bp, Medicago truncatula
  Intron number 5 from transcript Medtr8g074490.4 (locus Med tr8g074490) derived from phytozome v7.0 (chr-ID MtChr8; po s 14812142 to 14813157 reverse strand)
ggggtaagtctattccttttttgttgttttaagtatttattcattttaaattttgtgcttgtttactgtcataaccgagagaagatcagactgagagtagatcaaatcaatagaggcagaggaagaactagaaaaaactattgggggtgggggagggttgggtatttcaactggtttgtgataagggataaggagttggaggtcatgggttcaaacttgaatgaaagagtaaatattaatctaataactaattactaacatttaccattcaaaaaaaataaattagtgaaattattaaggatctagagattaatgagatggataggggtatgatatatgattgaacattatgatggcgtttgatccatgtagccgatcccacttagtgggataaggcttggttgttgaatggcataaccaatagttctgtgtgatggcacatttgaagtgtaggcatgggtgatggtatatagcatcggccctttcagattgaaaacgtgtttcagtgttaatggtgtgtctagtgtttgcatctgtgttagtgtttcagaggtaatggacatcagtttcatcatttatagcgtatatgagaaatataagaagttacccaatatgcaaattaattgttctattgaatgggccaacaccaccttaataccttttattagagccctgtttggatcaacaacttaattacgcgcttatagcataagcttttttattataagtgtttatgtataagctaattctaaaacaaaagataaaatatagccaaactgttctcaaataagctattaactatttttataagctatcatggaaaacttgtgggaataagctaaaaacagcttatgaaacatgtcattaactgcttccattagttcttccaaaaatctcacaagtacttatgccagataagctcaaatataatctaaacagaccctaggtatttgtgtcttactgtattcatattctgaagtttcacttgtgttgtacaagcaggtcttgtatactgt

SEQ ID NO: 35309 - DNA, 1062 bp, Medicago truncatula
  Intron number 1 from transcript Medtr8g074490.4 (locus Med tr8g074490) derived from phytozome v7.0 (chr-ID MtChr8; po s 14816330 to 14817391 reverse strand)
gaaaccctccttcattgtgaatctccccttttcaggtaacgaacgattcaatgattctcctttcaattacctttcgatttttcttgattcgattatctccctttaccatttcttatttatttaattcatctatgtttgttaatcctaaaatctagtgttgaacttgaatgagcttgtgggttgtgactaatttttcttaaagataaataaaaacttcaactttgatttaaccttttttgtgactaagctatgcatttgattggatttagtgttcaatttcatgttagagaagtgacagtgcttattatttgatttggatttatgaattgttgattggttcattttagcaccgacgtctataacatgtttttataatcatttgcaatttttaaaatgaaccttgtatgaagaaagaaagtgtttttgagacatgaagctacatttacactttcattctcataaattgtcactggtgtttaggcgtcagtgccgtgttcgtgattctgattatggttatgatgcatctaaattgttttctagagttttcgtttttattcaattattagtgattagtgaatgcatatcacacacctaggaggaatgcaaattctaccattttaaaataccttcattatttgtatagggataagccaagatactaaggattttttctatgagctgtttatagaccataattttgatggtattgttgatcattcattgttctgttattaacacgctggtgtaatctggtatgcaatggtaaatgtgtattctttcaaatgttgatcatattttccgggctgtggaatcattattttaaagacagtttactaactgaaccaaactgttgttaaccgtaattaattgttatgaaccgaaccgaaccatttctaaaccctaatttcatttcaaattcaatcaaattcaccatcttcaatcttcacctcttcaatcgaagctcactgatggcgagtctacctcttcacctcatctttctgtgacagtgagctcacttcaatcgaagctcattcttctgcgactctaacttccacctcttct

SEQ ID NO: 35310 - DNA, 575 bp, Medicago truncatula
  Intron number 1 from transcript Medtr8g026490.1 (locus Med tr8g026490) derived from phytozome v7.0 (chr-ID MtChr8; po s 5696258 to 5696832)
aacacatcttacactttggtgaactctatatttaacaattttgattcatgtattgaataatgctaggttttttgaatcaaagagggaagtagtagtataagcaagcttgaaaaagagggcacaagaaatatcaaagtaccaagagatggtgcaaaaaatatagaaacaaagccacatagtgggatgaaaagaccaagtagtacgaggataaatatcatgcttaagtattatgacacacgatttggaacagtccataaattatggttaccatttttgtttgtttaagtcacttgagaaatttgtggcattcatggtttttgtatggtgttgttgtaatatataaagaattgtaatatattattcagaaatgatagatgaacacacatatttagacacaaatacgacagcagttacttttttttgtaatttttattaaagtacaagggcaaaatcgagttttcagctgaataattctctctctgtacgtcagtctccctcttctctctgctatctctcttccctgactttggtggtggttaggtcgagaagaaggaagaggcaattgtgaccggggt

SEQ ID NO: 35311 - DNA, 935 bp, Medicago truncatula
  Intron number 1 from transcript Medtr8g037300.1 (locus Med tr8g037300) derived from phytozome v7.0 (chr-ID MtChr8; po s 8043426 to 8044360 reverse strand)
aaattcttgttgtacgtgttcattcacattatctttaagattcttgattggttttgttataatgtttagtgttgcatagatgagtttcatttttatacatgattattagggtaaatttttctacattaccaacctatgaatcacaaacacggaccctggttccgacactgacactaacatgttgacaccgataataatttgaaatgtcgtaattgaatgtaattacacgtgttagacaccggagatgcctttgttcagaagtgccggtgctaaaagtaattgtgattaaagtcaaacattttttatgatttgatgattattttttattggtagtgaaaaaaactttacactgacggtgtatatggattaagtccttcataggttgcatataggagctatatatggatcatggttctatgaatttcactaattgttgaaacaaatttcttcccctatagtaacatgtttttttttttgttggtgagagtgactaaggagatgaactgaagtcactacaaccatgtttggatttgagtgtagttaattcttctgcttttgatatgattgataaataagtaagcaagttgccagagaaggttgttttagatgaactaggtgtctgtttgattttgaatttgattctctattttgtttgtttttaaccttcaattacaaaaatatcatattacaaccttctctttattctttttatttaatttttggtacatgtcagacttagttgaatgagtatgacatttctcctgtttgtttaattttttaatattatacatgtggtatttgtaattggttagctaaagggaatttactgtgggatattatgattcccatacgatggatctttactttattgatgtaaagtatttgttattacaaatgagaattgaagttcacttacctaatgcactggcagaatt

SEQ ID NO: 35312 - DNA, 577 bp, Medicago truncatula
  Intron number 1 from transcript Medtr8g096450.1 (locus Med tr8g096450) derived from phytozome v7.0 (chr-ID MtChr8; po s 21183038 to 21183614 reverse strand)
ggtcaatcagataaaaagtcaattgctaaatcaaggtaatgaatatttcataagtagagacatgcttttgtttatgtgcatgagaatttgttggtttatgttgagtctacatttgaacactggaatcatggtactgttactgttgataaatgagacttctttttctgtctttctttaatttgttttgtttgtggatgaattgatcttgtgaaatatgaaggattagacatgtcagtggtgctggttcttagttgaaatcaatgaacagaaaatgcatttgtggtttaagttttagcaatatactcttttcatagatagcgaaagtgataaaagtttatgcgcaaaaacctggaaaaatgaaactgaaaactgattgtaatagagtttgattgctttcactttgattttggtttccgtccaaattttgtttcttcttgcattgtaagagatcatagaaactttttgtggtcactgctatctctctttatgcagatatatttttctcagattttgtttgcacaaagaagtaaccatatctcattttcttttgtcattagatacgttggtgaagatagtg

SEQ ID NO: 35313 - DNA, 603 bp, Medicago truncatula
  Intron number 2 from transcript Medtr8g136700.1 (locus Med tr8g136700) derived from phytozome v7.0 (chr-ID MtChr8; po s 32644554 to 32645156 reverse strand)
aggtgacaggctgaggttccaccatatcacccgtccattctttacttagtaactaacatatcaccctttccctcagaaaacacattccagagaagtgatactttagtagttcatttatcactatttattattctattaggtaagtgcacagtcaatagtgggctaaaacctgtggtaggacaaattttacagacttgtttatcttccacccattacattactatttgtgttactctaaaattgttgctcggtcgttttcgttttatgcaaaagtttttggtttgtgtagaacttttattaatatgcatttttatcacaccttcttatatagatattttctgaaatattttaaaaatcaactagtaaagcggccttgtgatgcgatttggttgattgtattttcatgttgatgtgagtttcataacttgcattgcaagaaaccaatgtgccaaataatggacatcaagagcttagttttcaaatcgagagattgtaaggggaaatagcaattttccagcgagtgagtttgagtgatctcagataattgcttgccagtagtcatgagcggaaatatcaatttcccaacaaatcttctaattctag

SEQ ID NO: 35314 - DNA, 609 bp, Medicago truncatula
  Intron number 1 from transcript Medtr7g121460.1 (locus Med tr7g121460) derived from phytozome v7.0 (chr-ID MtChr7; po s 28603109 to 28603717)
ctgtatgtttaactttccttttattctggcattttagagataattacataatgagtaaattatcattttggtccttgaatgtgagtttctgtcactatattcactgaattaaatgcatcaaaattacaaaaataccttaacgtcttttgttagtcaggtttgtcgtcatatgcgtcttctgttggttagtttagtcctcggatatgttttcatttgtcagcttgattcatgaaattactagaagaatatacactgcctcactcttatagaaaccaaaatgactctttcctcttaatgctggcaaacatctttctagaacatctaggatgataatgggcctgttaggtttggagtggcgtttatttattgctcacttttacatagaaattggatgtactgttcacttatacagatgctggtgttaatttatgaaaaacctattatacctcattctagaaaactggactactttttggattagttttgtggttctgcatgaataaaaagttctataaacatccgtttaatattcctttaacttcgtcattaaaagctaacttagcaaaaatttgatgtctcaggttatgaggttttttgcaacagctgaac

SEQ ID NO: 35315 - DNA, 200 bp, Medicago truncatula
  Intron number 1 from transcript Medtr8g053210.1 (locus Med tr8g053210) derived from phytozome v7.0 (chr-ID MtChr8; po s 11903088 to 11903287 reverse strand)
gaaggagtttgttctacaaaatctgatgtctatagctttggagtgttgctgcttgaaattgtttgtggaagaaaaaacaatagcttttatgatggtgatcgtccactaaatctaatcggacatgtatgttaattactttcattgagtttttttaataaatattacctattcttcgtaatttgattagattattaataggc

SEQ ID NO: 35316 - DNA, 727 bp, Medicago truncatula
  Intron number 1 from transcript Medtr7g083360.1 (locus Med tr7g083360) derived from phytozome v7.0 (chr-ID MtChr7; po s 17768916 to 17769642 reverse strand)
aaatttctgagacttcaacttagcaaggtatgtgatctttcttgcatcattctgtgtcctttataattaaacacatgttacgaaaaaagcttatgacatatccaaaagctgtttgctgtttgtctatcttatcatatgtacagaagtttctgtttgttatgatggtgtataaatgcgttcggatagatgctacaagttgtagcctctgtattttcacgttccaaggctcttaaacacacaatggcggttgtcaaatgctgaaactttcagtttatatgatgagcgtttatactatataagctgcaaaacgattttcagcttatttctataagacttttagtatagcttatttatacaacttttagattatacgaaaaccatttgactttattttatcttttgttactgaaatagcttattcttaatcgcttatatgattagtgtttatgctacaaaataagttgtaatagcttactattaagcgcttatacgatgagcgtttatgctatataaattgcaaagtaagctgtttatccagagtccagacaacacttatctgggagaacttagaaaagaaagggattatgacatttttataagtttttttcaacttatttttataagcccttcattttagtctatatctagatttatttagttggtttttgacaattgtacatattttatctcaggtatatcaccctctgccttctgaattcccagtttt

SEQ ID NO: 35317 - DNA, 428 bp, Medicago truncatula
  Intron number 2 from transcript Medtr7g127700.1 (locus Med tr7g127700) derived from phytozome v7.0 (chr-ID MtChr7; po s 30001024 to 30001451 reverse strand)
ctgaaaaaagggactagaaaattgattgcgtcaatgtattcagtctctgttagtgtcattaaacgtatttggaagagagcaaaactcacaggagatgtgtctcataggaaaacaacaaattgtgggcgaaaaaggattgaactggatcatgatcaatttcttcaagttccattatcaaaaaggtccaatacttcaactcttagctttacattggttgtgggggtatgatgatcttgatgccatgccacaaagtaactttgtttttatgaaaatcattaactttcagttagctttatcattttttttaaaattactacgtcaatgtttaccatttatgcttaacattgcttgcactttatcttctgtgtattaatgctggaaattgttggataggtccactttgcgagatttagctgaagctttgaaaa

SEQ ID NO: 35318 - DNA, 311 bp, Medicago truncatula
  Intron number 2 from transcript Medtr7g105070.1 (locus Med tr7g105070) derived from phytozome v7.0 (chr-ID MtChr7; po s 23992702 to 23993012 reverse strand)
ggttcaagccaaggaaaacttgaattctggtaccggtaagttttcttattccaactctacaatttcctttaacgtggattagtttttaattttaatttagaggatatgtagcttagtcaagtgtttgttcttactttttattaccgtgataaaatttacataaaattcggttttgatgtgattcttgttgttcaatttcaggggaagataaaataagtgctctacctgattcacttctttattatattctttcctttgtttcgattaaagatgcagccaccacaagtatcctctcaaagaggtggagacca

SEQ ID NO: 35319 - DNA, 601 bp, Medicago truncatula
  Intron number 1 from transcript Medtr7g105070.1 (locus Med tr7g105070) derived from phytozome v7.0 (chr-ID MtChr7; po s 23993061 to 23993661 reverse strand)
gagacgactttgaactgtgcgatcgcatgtgagaattgatactgactgctattgccaacattagatttgtaaatttttgtgtttcaataagtttctttcattagggctgagttttttatttttgctgtaatatttcttttagttgcacgttatagtttttttagacttacgggttcgtttttacctattcttaactggttttattttactttgatggcagttttgtaagcgttgggaggtttcttcgtgcactagtttagtttggataggacttgtaatcggtttagactcaatctaatttggtttagctttgtaattttgttgatgtgttaatgttttttcaagagattgtatttatgtttttgaagttttttgtatttggaattaaagactctttaaaaccctaatttacctacccagaaagtctataaatcgtaccttaaatttataaaattaggattggcatatattaattagtcatcaattttatgtttaaaatttgtcacagaatatattcgagatacaaactgtttgtatggactacaattggtatttactattttgaaaattcattgttttttctttttgtgtttttcagggg

SEQ ID NO: 35320 - DNA, 767 bp, Medicago truncatula
  Intron number 1 from transcript Medtr7g111840.1 (locus Med tr7g111840) derived from phytozome v7.0 (chr-ID MtChr7; po s 26355379 to 26356145)
ggggattcaagaaatccagacgttcgtttttttttaatctttttttctctaattacttttactttgttgcttcgctttcggttttacgataatttgtatgatttttaggtttaagtaaattttgatacttgtttcaatcttattcgtttgtttttgcttgtttgtattattattgttattcgtgtgtttctgtgtaattggaagttgttcttccgatttttatcggtgaaaatttcacttaaaagccttataattgtcaataatttcagattctttgaattttcagtagttggtgttaattgaaaaatctaaaaaatactaaactctgttactgcccaattttttaaaatttgttgtgtttgataatgaactcaaaacatgtaaaccctaaaagttttaaaattgtcactctaaaaattaaggaccctgtttggataaacaacttatttgcttaaaagaggagcgcttatcgtggtaaaagctattatgtataagcaatttctatattgaaagataaaatgaagttaaattattttcgtttaagttatttcttggataatttaagaaaataacatgaaaacaacttatgaacaataagttgttttcgtaagttcttctcgaacagtctcacaaaacttatgtcaatccaaacgggccctaagtctgtgtatattttaaaaattgttaatagattatgagtatagtgtaagagattaataaatgagaggatgttaactgagaataagtaataatgttttgtaacagaa

SEQ ID NO: 35321 - DNA, 498 bp, Medicago truncatula
  Intron number 1 from transcript Medtr7g132890.2 (locus Med tr7g132890) derived from phytozome v7.0 (chr-ID MtChr7; po s 30906713 to 30907210)
tctccaggtatgtatgtatgtatgatgattaataacgttgttttcattttctgttttagtaagttgtgatcaaacttgattttaattcttcttaatattatatttattgctaataattttttttaattaaaaatagaaagaaaaaataaaaagggagaaagagttatctgtgaggacacgtattttgctgtcgttaggaattatgttgtgacgtaaattggatgggcttcccaatctaattttgacttatataaaacgatcataattttctttcttcttttgtttattacttagtttttgtcttttgcttagttcagctaattaattatggccctatcgttgttctatcttcatgatattgtaatttgtaggaattaggaaataatttttcttatgcatacaatgaacataatttaattaatattacactgcatgataaatataaaagatgggtttgtaatttgctaagcttatattgataattgtttttgcagcaat

SEQ ID NO: 35322 - DNA, 708 bp, Medicago truncatula
  Intron number 3 from transcript Medtr7g132890.2 (locus Med tr7g132890) derived from phytozome v7.0 (chr-ID MtChr7; po s 30907659 to 30908366)
gaaccgcgtttcactgtcgatcattggcaatagctgtaagcactatgtgtattttcttataataaataattatacgtaattcctaatcaaatagcatatcgttacaacatgcttattattgtataaaaacaaaataacgttgcatgaacttataggaaatgtactcgggttgaatgccaattgccccaacacaaagggcttttggaagagtttatataacaatttttctcttctgtgaaatacatttgttgaccttgtgaaagcattttcctggtacatgactctcccaaaaacgtgtattgttttctaaaaatgaaaatatacattgaattatttgaaatacgtacatgaatgaatcatttcaataatatacggttacttgcaaacttttggcatcaacttgatactatcttagttgaaccgactatgtactagttcaaaacagaaagttaatcccgtcgcaatttggaatagttgaaaaacgtagataatcatcccacgaacactctgcttttatgtctaaaaaaagtaacagactactttaatttaacctgcagttaggggatttcccaacagatattgaagctggtcaaattaagactggtttaaatttacatgctatcatttagtctattggaatcccgaataataacttacagtttttcttctgcagtttacactagtgttactagtaagacattgtttggt

SEQ ID NO: 35323 - DNA, 826 bp, Medicago truncatula
  Intron number 1 from transcript Medtr7g104640.1 (locus Med tr7g104640) derived from phytozome v7.0 (chr-ID MtChr7; po s 23790384 to 23791209)
aaggaaactttgtcagctgtgttcttcaaacggggtataagggaccgcaaattgaagcaaaatttattctttaacaaaacattggaaccagcgtttttattttttatccttttataaaaatgctaacctgtgtacacaaaggaacctaaagtaaaaattctgccttgaaaattctcccaatgttcaaaaagtttaaaattaatgtttttcattaaatatttaccatttatgttagcatgaccctttcttttatttatttttaaccatctataatcaagaaaatcaaacagtgtacctcgagtttgaagaattacttttgggtttagagataaatatggagttgaaggacgatttttgggtttgtgaatattatttcaataattaaatattgcataaaatagtattatgaaataaacaaattagttctgacatagatattaaatgtatctacgtaagtgctgccacatcattattgacaaggtacatacacaactttgataatcaatatctttagttgtctttggtaaaaaaattattaaaattagatatgtttataaatattcattgagataagctgaacaaaatcttatatattaacattagtgtttatataatagttaaaaaatatacttaaaataagtcttgtgaataatacatattatcaacgttaaaaaagaaagaaagaatagtacacattatcaacttgtgacatgtatcttataagttaacagtttgacgttgtcaacataatctctatcgtaataaatatcttatttcaattgttttcaattttcagattaaaaatctatatcctgaacattcacat

SEQ ID NO: 35324 - DNA, 959 bp, Medicago truncatula
  Intron number 2 from transcript Medtr8g119820.1 (locus Med tr8g119820) derived from phytozome v7.0 (chr-ID MtChr8; po s 27264056 to 27265014)
atataatttggaaatctgacgtaagcctgtgtactttagttttgctcttttcaatcctcttttttccttacattttttttaaatcttatactattacgtaccccatggaatctaaaacaataatcagatagacatggaagcttattggggtatcaagttcgtgtttaattgtgttatgtttctgcattctgaaataaagaaagccatgaattataaaaagcattttcttagagtcaatttgcatttacattttttgatgggcatgtaagacttgaagtgacgatattttgcccagagagagagagagatgtgtttggtaaaaatataaatataattgtatgttaactaaaaaactaaacatgaaaactaaatactatattttaagttataaatattttacagccactaatatgtttatatatgctgttataaattaagatagaacgaagatatgactgcaataagtgttttgtagacaagggggtaaatcatatacgagataagatgcatttaaaatcgtcttctctaaaaaaaatattgggaatttcattttggataacatagctcgattttgatctaatatattacacaacatttacttttatatttcatttgaattgaaaacttttttatctaacaaattcaattgtgagattataagaggaggttacaacttattcttattttattgttcatggttctgtggtatctatctatctattttttttttttatataaatcatatttaaattttaaaatttggtaacaattgtatgttgtattaaaatacgatgatgttggtattatgagattaatttctaaaaattgtttgtaaaacattttttattttaagaataatttctacatattgatggtataacattttttgcacataattcaataaaatgtggtttctttgtcttactttgctgacataaattaattcaacatagggttaa

SEQ ID NO: 35325 - DNA, 801 bp, Medicago truncatula
  Intron number 1 from transcript Medtr8g081880.1 (locus Med tr8g081880) derived from phytozome v7.0 (chr-ID MtChr8; po s 16946367 to 16947167 reverse strand)
aatctttatactaacaatttagagtttttagaaataatttattccaaaatcctctcctccaaagatgttcacatcatcctaatcctacttggaatttgttccaaaaatttctcctaattgttaatacaagcttaataattataattattattaaaaaccgtttttttaactattaaattgtacataaaatgcatagttggttacaatcaaataattattaatataactattatttgattgtatgttacaatcaaataattattaatataattagtattcgattaacatttttacggtacattaaaaatttggtaggttacaaaattataataaataactttaataaattatattttgaattttggtccgttacactatgacaggaacctactaattaaaaaatttaattgtagtaattagtttttaaggttatataattaatttttattctttacaaaattatattacttaatattaataagatattattaaatttcaaatcttatgaagtttaatttttttgtacgttacatgaaatataatctaatcatttaatgtacattttataatattaattacgttgataatattaattttaaaacggtcaaattagcaattaatatatatatattaatcgttatagtactattttctatataaatagtagcacttttgggtatgagtacacaacaatcacaaaatatagtttttctttttctttttctgttctctgattctttgatatctatattctaaattatttctataactttttattgcaaagaaaaaggtctacgaaac

SEQ ID NO: 35326 - DNA, 489 bp, Medicago truncatula
  Intron number 1 from transcript Medtr8g088520.1 (locus Med tr8g088520) derived from phytozome v7.0 (chr-ID MtChr8; po s 18778251 to 18778739 reverse strand)
gaacaagtaagtttgataggattatagaattagcaccaccaaatttgtgaatttttcactttgaagcttttattttatgatataattaattttcatttaatttaacaaaaaccaaatttaaattgttacttcttctccttcatggcggttcttcttcttcatctttttcattgcaataatttgagcattttcatcaagttttatttgaacgttgccaaacgataaaaatcttttatttttctggtctccaagagaggtattataatgaaggaatgctactaatatggactaatttgcttatatgtgggaaactacaaaaactaatttgacagatttaattaaactttgcagttattttttattgcaaaaaagggatagctaccaaaaatactcacaaccaaaaaaggggaacaacaagaaaaaataacacaaatttgcggttaatgatttgcagcaagaaaaagggatcactcaggcactcacgaccta

SEQ ID NO: 35327 - DNA, 992 bp, Medicago truncatula
  Intron number 1 from transcript Medtr7g083740.1 (locus Med tr7g083740) derived from phytozome v7.0 (chr-ID MtChr7; po s 17949031 to 17950022)
gttttattttggacacgttaattcatgctcacttacaactattattgtttcatttacgattatcttatttattaatcaatgtcatatctaacttcccgtacatcgaacggatctaaatactagtaaaaaaaataaaactaaataagaaattgcaatctttttaagttttaacaaccgtaagccgaaagaattaatttactttggaagaggcccatcattaacatattattaacaattgattaattaaatccctaaaacgagtagcaaaacactgacgcagcgaactattcaagtatcaaggcttcttccaaaggtatcaatcatgtttctctcttttcttgttatcatctaaatctcccactaaaatggttgctttttagttttctctgttttgcatctaaatctctcatcgtaaggtctgaattaattttgctgcttataatgctattttgaaaacagtaatacttatatataattagctatgacgcccggatactccaaaatatcagatatcatacccatacataagttttattagtcttatcgaatatctttgatatcaaaacatatttctttcaagttttttatatgcttttatgaaaaatttgttgtcgtaccatagtcttatcttatccttctaaaaagtattgtattgcacctgcaccgtaatacatatgtggacttcatagatcattaattatagaaacaaataaaataatgcatgataacatatctatattttcatgatattatgtacaatatatgtatgagagtatcttttatatcacatgatcatatatgaatcatgaccatatttaaaatggtcatatggctaggtttctttttcctgtaaattgtaaattgagttttacttgatgatgaagggaaagctctttgtggtggagagttctcaaataaacaacactcttaggcttttagcaatgaggaaggtggcagactcaggctaacttagaagaacttcctcttagttt

SEQ ID NO: 35328 - DNA, 560 bp, Medicago truncatula
  Intron number 1 from transcript Medtr7g107070.1 (locus Med tr7g107070) derived from phytozome v7.0 (chr-ID MtChr7; po s 24966609 to 24967168)
attctagcttctcccgctggaaggttcatatcaattatctatatatcttttctgttgttaataataatgtgtcgtgtttcttatgttaatgtttctacgaatctgtggtaaatagagtcttgtatttataaaatatgtgccggtgatgcctaaagcctagtgctttcattcttttagtgattattcttagtgttaattctccttccatttagatcattttctgggctgccactttttatagctttcagtttatactttgaagaaaaaactattgattgtatgatggcgtagtgcttaaagcggatgtaatgtggcagactaaaaaatctcaagaacaagatatttttttttatttggttattggcccagcggccaacacatgctcaaataaacacacatacacgagagggggaagtgtggtgacccgggatcaaacctggggattccacttaaaatgtcctcaaagccaaactactagactgtaataacaaggatgaaaagaattcatctccaagtcattgaattgatgacaaaaaattaattgaatggataagttttat

SEQ ID NO: 35329 - DNA, 591 bp, Medicago truncatula
  Intron number 2 from transcript Medtr8g005760.1 (locus Med tr8g005760) derived from phytozome v7.0 (chr-ID MtChr8; po s 431007 to 431597 reverse strand)
cagcaggttgtgatctttaaatgacatgattacccctttaacaactcaatcattgcttatttttgtgcctcacttcaagggcattttcgtctatttctatttatgtctatacttcttcttacaccataaacaaacagcaattgtgttaatttgagttaggttttaattaaacggaagcattaattatttttatcaaaaaggtccttccattccatgattaagatgtgtatgagagaagcatgcattaaagcaaaacagcggtgttgggggataggggagaaaggttagattcaaaaaagacggaaatacccttgaggagagagttgacaatgattgagttgaccgtacatggggaaatcccgagggtatttgtgtcccttaaaacatatacttagtttgtttggttttcagttttactacttacgtactgcattgttttgctgcttttagttagtacttccattcaaagttcaaacaaaacaatacattacattgtgtctcaaacaaatattatccactattatttgattttgacatacataaataaataaataaatatatgcaggttccatcttctatctgagtttgata

SEQ ID NO: 35330 - DNA, 358 bp, Medicago truncatula
  Intron number 1 from transcript Medtr8g021010.1 (locus Med tr8g021010) derived from phytozome v7.0 (chr-ID MtChr8; po s 3739701 to 3740058 reverse strand)
tcctgtgcatccggaccttgtagttttgggctttggtttgggcttagttcttttctacgtttttgcttattttctgctatttgcactgtttgtttttgctatttgaaccaatgccttgattaaaaattttgataaatttcctagaaaatccatgcttacttcttgacattttcttgatgttttatggtatttttgcacgttggaattggcaaaattcttgtatgattaatccatggcattttaattctttcttggattatttcttatgattattttgtcaattctatcattgatttgtggatatgtgataaaaggccatttgacatgttaatgtgaggtgctcatacctacaatacta

SEQ ID NO: 35331 - DNA, 369 bp, Medicago truncatula
  Intron number 1 from transcript Medtr8g024500.1 (locus Med tr8g024500) derived from phytozome v7.0 (chr-ID MtChr8; po s 4596265 to 4596633 reverse strand)
gcaaatatttctggatttgattcatcacaattttcgtaagtgttcttttaccatatttttttaatatttttccactatttgattcatattttatgattgaacaaattaaaaaagttaatgtgtctcttcatctctttttctgcttctccaaagttctacaatatcgaaactaaacaaggatgttgtttgtttgaccgatctaagttgttattaaactaccttattagtgatttatgagagattatattatggagatctaagtttgtttgaccggtctaagttctacctattttattgagagtttatatttttttaaccgatccatatcaatattgttagtatttgttgttaaccaggtatctgatctaa

SEQ ID NO: 35332 - DNA, 660 bp, Medicago truncatula
  Intron number 1 from transcript Medtr8g145500.1 (locus Med tr8g145500) derived from phytozome v7.0 (chr-ID MtChr8; po s 35382585 to 35383244 reverse strand)
tcttcaaaagtaatctagaaaaaaccatatcggttgtatgcgtatatatataagagaatatatagaggtgagaaaattacatgaggaagagttgagaagaataatattaaaccgtacagatagatttgatatcataatatgcattatacaaaatatataatcaaatattaattatacaaatattcctcttaattttacacaaatattaattattattacatggaagagggacgtgtgattaatcgtaacccaagttatcaaaataaggaatgtgggcccaatattagttatataacaggagaagagagagggaaaaaaaaacattggctttttctgctagggcttaacagcagcagcaaattaaccgaaacccttcttcgattgagatgggagaaaaaaacagtatctagtctattgagtgcggcagtgtagggttttcggttcagattgagaggaaggaagaagatggcaaaaacaagtgttaaccaatatatggatatggactaagacgtggtagacgtaagtgtgatgtgtctttgttggaggtgaactattatgtttcttattctcaactcgttaactgttccacttctactgatgctgatgcttctgttaagacggccaggccaaggctcgaaggaaaagaggaactacgttagg

SEQ ID NO: 35333 - DNA, 738 bp, Medicago truncatula
  Intron number 1 from transcript Medtr8g102300.1 (locus Med tr8g102300) derived from phytozome v7.0 (chr-ID MtChr8; po s 22415065 to 22415802)
ttgccaacaattgtgttgttacataataatgaattggttggttgacctaaagcatgatagaacattattgatctaaccttagtttttcacttcttttgttaagtctggttaaacatttctgaagtgagaacttacatagaaccataagaaacttcaatgtggttgttgattaacatgaattaagggataatgatgcttactagttctgcttattaagcacaaaagatattttaatttatttgcatctacattgttgtctttgttcaatggcagagtctaatgtcgatctcgatcacttcatacaaaaaaaaagagcaatgattgtgtattgctagtaagcaggattttctacataactttttcagcatatgacttgaatcatctagagttatatcgaatcattggcattgttattacttgtttgagtttttagcattgttatgcagaagttcaatttctgggagaaattcaatttctcaccctaaatttgagtttttagttatgcaggccaaacgggctagtccgaatgagtgacgggttattttaggcagggcaaaaataccgggcatctttgggataaggcttggtttgattcatgtagctgactagtgggataaggtttggttgttgttgtaactcttttttccattgaacttaattgtttttgtttttttgtcttctaatcttaaatgatcatgtccagagttcatcaaaatctttcgaaaactgtgtgaacat

SEQ ID NO: 35334 - DNA, 903 bp, Medicago truncatula
  Intron number 1 from transcript Medtr7g139050.1 (locus Med tr7g139050) derived from phytozome v7.0 (chr-ID MtChr7; po s 33161271 to 33162173 reverse strand)
tttgtcataataacgtagatatactttcaatatttcgcgattaattgtttacactatttgctttgtaaagtagtacatgtgtttaatctttgttttgttcgtgcttctttcttatattttacattccattcgccggtacacttttttgttgcttttgttgttttttatgtaccacacttttgatcgttaacttgtatgcaactggatctggcttcattatcgtgtctgtttgctttttttttttttttttacttttaatgttttcccttcctcattgtattgaatctgtgtcaagagatatctttatcaaaaaatgtttacatattttggtttaatgacttatattggagaccgacaccaataataatttgaaaaaattatataatttagtgtaatcatctatgttgttgttgcgtcaatgtcgcacaccgacgcgtacctgggacacacctgatatgtggagtgtccgtgcttcataatagtttttatgtgagttgtttaggtaaccatgttgaagtaagggttttcatttttcagatcatattgccaatttttgtattctgatatcctgagttcatcgatagttgttaatgtgaaaacatttgagatctaatattttgttagataattaataggcaaagggttgtaaagttagaaagaaaacatggtatcagttccttggcatagttggatactcatagttttgaaatctgagttgcttcattaagtatgaataagtagtgagtaatactgtttattattacttttatgcttggttacaactcaagcttgaagtatgttcttgatgatgttatctaatctacatttcctttataacatttcttcttaagccatcatttgagtgtttagttatctggtttgttttcctatttttcttggcag

SEQ ID NO: 35335 - DNA, 658 bp, Medicago truncatula
  Intron number 1 from transcript Medtr8g112520.1 (locus Med tr8g112520) derived from phytozome v7.0 (chr-ID MtChr8; po s 25279901 to 25280558)
gtttcggcacccctcaaacagtccaggatagagaggtgggagcaaatttaaggcactcacataaaggatttagttgggggaagacagtttgatttctccatgcatgtttttactatgcaattctgatttgtacgatgaaggtaacaatctgaacatttgatttgatgtgaaaaatgttggtgaaatgaaactagacaaaacggaaatcataacttcgtggaagctaaattggacttcgatagtggatgatttcaaaatgtccttgaaagctcgctgatgatttagaattatattggaaatccatgtgaaggagaagcaaatatattgttcgggaaagtatggccgggacaaaactacaatttttggttagaagtattatacatgctactaatctgagccctttattattttagatggtatattcatcgtggttcactgtagaccatatataattagtagtccactctagacgccaccagagaacaatgattgacaatgttaatttggtgcaaggactatatgacttcaagccccgcccaaacaaacaactttcaagtttctatattttaaaaatgtgatgctgacctattctgttcttttttctatcttctggcagcctgtagccctctagtaagttatattcatattcaacagcaaa

SEQ ID NO: 35336 - DNA, 702 bp, Medicago truncatula
  Intron number 1 from transcript Medtr8g032080.1 (locus Med tr8g032080) derived from phytozome v7.0 (chr-ID MtChr8; po s 7065028 to 7065729)
cggtaaatttcaatgctagttttttttcttccttaattgtaattttgttttaattcttaaaatttagcaagtatttattgtttgatctactatcctatatataatttattgtgacaaaaaaaaaatcacattgttgatccatgccataaagattcaacaaggacttgtgttaaatatgtattttgaaattctcagtccaaatcctgctactgtaacaggagtttgttgtgtacttgcatttgtaatattgttaaaagtatcattttcacagtttgtactttgtttggtactccctttttataagcacctatcatatatttcacatatattaagaaatttttctgtgcaattaatgtatagtgttgtgtataactattaccaaagtaccctttgtgtatatatgtattcaacattgacgtttcatactttaagacaaattagtagtattaattagggttatatttggaaaaaataataaatgcatctagtaatttgaaagtgggcatacatttagggacatttttttttttttttcccttaaaggatgcttatagttagctagggagggagtagttagtaatgaagtgatagatataattttttattgcgttaaatcagaaatctgatgctgttaatcgttttcaaccctatggttttgtttttgcaggcgacagccacagttaaacataaatccatacaagt

SEQ ID NO: 35337 - DNA, 589 bp, Medicago truncatula
  Intron number 1 from transcript Medtr8g138180.1 (locus Med tr8g138180) derived from phytozome v7.0 (chr-ID MtChr8; po s 33241575 to 33242163)
gtgactcttttgattattgcgtttttggcaatacttccatctttttctctttatattgagtttgactgtgttgtttggaattatgcaaaattagcaatttttctctcaaatttgatgattgttctgttaacaaatgagatttatttgatcttattgtgttgatattacgttctccctatttctggcaatcatgtgttgaagaagtaatgttgttggcatcttaccctgtttttttttctttcaatttcccaccttcatatctataagtgatgattgacactttgccgacttgttgcattgtgttgttgttacccacatgaaaaacaatttatttttgttaaactaatggcttaaacatgttttgattcagtaaaaatatgtctttgaaaatgagaagaaaatttggaagtagagtgaacaaggcagggtgagtgtggctacgaaagagaaggcagagtgaagaagatacaagatcttttacagtttttagatgttttacttcaatttatgttgtatcctatatcacaaccgtttgattgaatccaacggcttataatggtgctgcagagactctggagagagaggggaa

SEQ ID NO: 35338 - DNA, 751 bp, Medicago truncatula
  Intron number 2 from transcript Medtr8g138180.1 (locus Med tr8g138180) derived from phytozome v7.0 (chr-ID MtChr8; po s 33242207 to 33242957)
gcagtgtgtgattggataatgaagggtgtatgtaaagtggtatgaaaaagggtgttcatggataattatcctaaatatgcaagatagtagttaacaatttcgtgggatttcacctgcactttagcatttttttcatttggataaaaacaactatatatatgtataatacatatccggtactatgcaccggaggtgaaacaatcttttatttattaaagttaatcgaatgataattgttgccctaattttaacctaaattcagtacttgcttaccctttttaaaatatcaaattgcataaatctctttttttttttaaaaaaaatcatttcctactaaacagataaacataaaaaataaaaaatcactcctgttaacaaattgttcctattttgttgcagaaatctcctattttttgaacaaaacaaatcactttctttaaaataaaattttgctaatttcgaatttgacattagggtatgaatattgtgtaaattatagttgattttgatatgtgattgtgtgaattacaactttttcttcattgttagaatagtttttgttctttttttcattgttagtttttgtaatagttattttatctgtgtttcagtctcaattcaataccttgcaaccatgctacttctctgtttatgttcttctacttgaattatggatgaatttatgaacttttttttttaattcttaccttttaatgttcttaactttttttattttattttgtaggttcta

SEQ ID NO: 35339 - DNA, 819 bp, Medicago truncatula
  Intron number 2 from transcript Medtr8g024370.1 (locus Med tr8g024370) derived from phytozome v7.0 (chr-ID MtChr8; po s 4562560 to 4563378 reverse strand)
ttcgtgctattggaatttggggtatgtgtaagatcccggtattttatcatatttttattttaaattattttatcttaatttgactttaaaataatttacctttgtgatttattgagtgataatatattattttgtttttttttctttcaaagtatatagccaaaattcattatattaattattaaatagtgtaccctataactatttattcctactatttttatgtgtgcacgtgtagaatttctcatctttatctcatgttagtattaatttaattaagtataatgatcagccaatagtatagaacaagaaatggggacgtgtatttacagagaaaacaataatgtaacctcctttcctagttacattggtcaatttcacttcacactccttaagcatagtgccactcttttaggaagggagttagtgggagggttatttcacaattaataacaatcggttaccttctttattccattcattcaccactttactacactctgaagaaaatagagagaaatttggagagagagggatagaaacatagagagtcttgcaggagaaagaaatgagaacaaagatcaactctaaaactagcatttagacctatcacaagtgtagattcgatagagtaaagactgttggtggaaatcttaagagctgctattgttaaggtaagggaaagggcgctccatttttttattttatatatgtatttacttgttttttttaaaaggatgatgtttttaacatgtttatgcattgtatcatgcttacatactaggtgaacttgattttgtattgcttggttgtgagtat

SEQ ID NO: 35340 - DNA, 525 bp, Medicago truncatula
  Intron number 1 from transcript Medtr8g024370.1 (locus Med tr8g024370) derived from phytozome v7.0 (chr-ID MtChr8; po s 4563523 to 4564047 reverse strand)
aaggcgttaaaaaattgacctggtgcaatgttggaacctaaggtacacgcataacttgatctaaccttcattcgtatacccttatcaaccggatttacctggaacttattggcaatagtgagttattatttttttgtttgttttcatgacaaattgataatcttgcttagaatttatatttgcaagttttgtataagtcttattgggctcaaatggggttttcccgcatgatttctgaccatgttatcaactttgattgatagttatagactttgttttttttattgtaattgactcttttgctggctttggtcttgtcatgtcttgtgctaattcttctctaatgacaagttcagtgaagatatcatttgtaatttatgcttaaaattcctatgcttataattggcatcaaatgtgctcttaatttgggtttcaaataggttatttttttaaactgattttgctgttgctgtaaattattgtccaacacctcttgataaattttactttttttattccataggt

SEQ ID NO: 35341 - DNA, 1062 bp, Medicago truncatula
  Intron number 1 from transcript Medtr7g120690.1 (locus Med tr7g120690) derived from phytozome v7.0 (chr-ID MtChr7; po s 28234586 to 28235647 reverse strand)
tgacagtggacctacgacggaacatcgtaaatcttgtatgtgttatagtttactgttttttcattccgattttatgttattttctttcatagttttttcattccgatttttgaaatatgcttgcatatgcctattcgctgctgatttagtgtgagtgttatatatggttatgtacacgtctctggttttactttatgcaaatttgatttaaccctatgaagtaattatcaatcaacatattctaagttgtaaaaccccttccacttccaatctgaacaatattgatgctctcataattgatgaggacttcttgttgtgagcaaagtgatgtggatgttatttttcacacttacttcttcttagtgttaagctagggttttgagtcaaatttgggccaaaagacaaaaatattcagtttatataacatataactttgtcaaaaaatataacatgacaagttacttacatgcgtctccctagaccttggtgttctgggttatataacacgacaccaccaatataacattcttatggacaaatttatttaagagtatagttgaaagttaaaagaatggtccaaaaccatgtactactatagtattcattattttttatacttgtatgattactaggttttgaggtatcgacatagttggaattccttctcttatatagtgatgtcaagacacttcaattaggcttttatatcacaatcaaaataaacctacctatactttttattgcactaatatttgcaagttgcaatgattctgcagtagctcaatgaaataaaaaattatgagatggaaggaaaaacacacattgacaaatctaccagtcgatgtgtttgagttgattctgaagcgtttgccccttagagattgccttggtttaagagcaatatgtcgttcttgcaggaaaactgtttctaatgtcattgaaaacaaacattactgccatttacctgaactgccactagttttccttcggtccaaaaattcaaggttttattacaacttgagtacagaaagtgtacatcaccgtaacacactactgtggcag

SEQ ID NO: 35342 - DNA, 740 bp, Medicago truncatula
  Intron number 2 from transcript Medtr8g089110.1 (locus Med tr8g089110) derived from phytozome v7.0 (chr-ID MtChr8; po s 19068921 to 19069660)
tcttttatacttggtgagtcacatggttttgtttagaagagatacaatgtctacaagaaataaaccttcaacaataaactctaatttcaaaaaaaaaaatcgagaatttgggttgggaacctagagagaatattccaaaaatactaaattcttagcctttgatcgcttaaaattcttccttttgataaaccctagtttgtctcactcttcttcctcaaaattgtgttgaaatagcctatattatagaactagacacagacctacgcctagtgcatagtgctcaaacgcctagtgcagcacccagagacacaacctcctgaaacaccaaacaagttgcgcctagcgcatgggacagaatgcaacaaaaaatttccaacttccaatatgagatttcaagacatatctcgacgtaatgttcgataaaattaatagttgataaatatgaaacaacataaaaacatatttttaattaagataacaagggtaaaattgagataaaaattataatattgaaagtggcttattaaaaaatgttacaagtccgtgaaaaaatttgttatcaaagaggtctgttttggtaatacgagcgtataacgaagcaaactcgaaaacttatctagtcaaacagagccattagtagtgcccttttcactagcatgttgtgtgttctgataatgatttttgtgtttactgtataatatgcagattgatattattgctagcctagtgagtgggagact

SEQ ID NO: 35343 - DNA, 630 bp, Medicago truncatula
  Intron number 2 from transcript Medtr8g125270.1 (locus Med tr8g125270) derived from phytozome v7.0 (chr-ID MtChr8; po s 29159165 to 29159794 reverse strand)
aaacagctaataggtctgaacctaaagataacaaggtaaatctcaacttaaattatgatttttactgtttctacttccaaatacaagttgattgaatctgcaagaacattaatatcttgagtagtgcttgatgtaatagtttaatttgcttattgtcaaacaactccttcttatgagtggtatgaagcacgaacactcttcagattagacatgtctcagtgtcgaacacgtgtcgtgtttgatatgacacggcactgacacatataattacattaaattatatgattttttcaaattattaacgatatcggtgtgtcagtgtccttgtcgtgtccgatgttcgtgtccgtatcggtgcttcatagagtcaataagcatattttgcaaaaggattaattttagttttacacattgattcaagttcatttacattaattaatcaaatcaaggcttggttataaattttattggcagttcataattttcattttcttgacccattgactttctagtagcaaggaaatagacaagagaattattttcaagaaaataagagagagatttgttgaatggtaattaataataatttatgattggttcattattttcaggaaacaaaatctgaaagac

SEQ ID NO: 35344 - DNA, 272 bp, Medicago truncatula
  Intron number 1 from transcript Medtr7g134470.1 (locus Med tr7g134470) derived from phytozome v7.0 (chr-ID MtChr7; po s 31780711 to 31780982)
cgacccgtatgcaaaatggcatttgtcaggattgcgtctatcatttagctatgactagttatgcccctgctttttgtccatgattatctagtgatattggtttaatggaagcacattgtttgagtaaaaggaacagactcgtgattgtttctttttagatcaattagtcttctctatcttatcaattttgaagtttttgttttaatcataatcaaagtattacattatgcactacagggtttgataaacaacctaatcacgcttggcttggg

SEQ ID NO: 35345 - DNA, 491 bp, Medicago truncatula
  Intron number 1 from transcript Medtr7g096770.1 (locus Med tr7g096770) derived from phytozome v7.0 (chr-ID MtChr7; po s 21732312 to 21732802)
tccgaatcttgagcatctacaagtggtagatatacgtttcatttatgaggaagaagattctcttaccatacacgagtttaaaagtttgagtttacccaaattgattagtgttgatatcactggattggagtcttcatggtttctaattcaaagtatcttcgcacagatacattcatgttaatcacgaaagaccacaaagtctacgaggtcctgtttattttgaataccatgcatacttccttaatttatataatattgaactgtttccaacataacattaacacatttgattacattaggtaattctattttctcaaattattattgtgtctgcacctcatgttgatcaattgaataccatacactaatggaattttatggaaacaaatgtgtttcatctgcatttttttccccttcctttttgtgaatttgccccaatttgatagtgtgtatctacataattcaggcgaatcaacttcaacacccttacg

SEQ ID NO: 35346 - DNA, 518 bp, Medicago truncatula
  Intron number 3 from transcript Medtr7g140700.1 (locus Med tr7g140700) derived from phytozome v7.0 (chr-ID MtChr7; po s 33923912 to 33924429)
ctctttctccggattccgataaatcccatcgaacggttagcacgagtcttccaacttctgtgttctatgttagatttgggagagacatatgatatggtacctatatcaattagtaacattgatattaggttaaattctaggaaccagggtttatcatcaagaccatggatttggaatgcatatgataaagtatctctatcagtgagaactctgatattaggtcaaagtctaggtagggattagggtgtctcaccataatgggtttatgttttcattaccgataatgtgcattttatatcaagaaactgagtgtcaaattgaatcctcttgatttgcagttcatttgtttaggttattttttagttcagcattatttgtttttacatttagttgagatgagtaatatgacactgatttgactcttctatagaggcaagcataatgaattcattttgtagttttgccccccaattcaaaatatcattaattgtatgcttcttaaatctatcaggcagtgc

SEQ ID NO: 35347 - DNA, 969 bp, Medicago truncatula
  Intron number 1 from transcript Medtr8g029150.1 (locus Med tr8g029150) derived from phytozome v7.0 (chr-ID MtChr8; po s 6269416 to 6270384 reverse strand)
cagcctgaggttcctacaagggtacctagtgccaggtcaattttttatatctctattgttcttagaacatgaaatttatgtaatttggttcaattttgtttagattctttaatttatgttttgtttagattttttgatttatgttttgttcaattttgtttagaatttttggatgagtatgtgtggtgtgtcaatttttttagtataattagatgcaatgcagatctctctctctctctctcaagagaaagttttcagtaatttttttccaataaaatatttgaaaaaaagaaaggaaaaaaaaaaaactaatcatgtatgtttagtgtttgtttgtgtctctggtatagaagattctcatttatcttctcagtgttaattgtcacagcaaatttatttaactttatgaatgaatgatttctttgaaattatataaagtggttgattgataccatagtttattgtacttacagtaaaatggtagaatggttaagctgatgtagatattaacagggttaaatttatgtaattgaaagtatattactatgcatgcatttctttcgacaagttcatctgagtggtaaggaactcaaacaacttaagatagtggttagaggtgaaaatcctgactcttatttatagaaaacactgttaaacggagatcagacgctgttaagcggcagtagatagtttgtacctggaatctggttactgaaaaacaatgtttgcaattccaacttaaaatacaatgcaaggttttcattacatgcattttgcaacataagaagaaacaaaattagtttgtcagatgcgtggctgcaatgacagattgtccttgattgatcatgaggttttgcttgtgaatcttttcttttatttgtattctttcgtcttgtctttctttgattttgttctaaaaccgtctttaaatgatgcagtgtgaaggtatttggagtttctgcaaagtca

SEQ ID NO: 35348 - DNA, 838 bp, Medicago truncatula
  Intron number 1 from transcript Medtr8g084060.1 (locus Med tr8g084060) derived from phytozome v7.0 (chr-ID MtChr8; po s 17236284 to 17237121 reverse strand)
cggtgtctctttgattctttgagtgttggttgattgtattgttttattttcttttctaatcaatgccctattctttaatgtgtgttggtcaattttttttttatttgaaatcttagggtgtgtttgaattgagggtttaagatggaaagatggaggagagatcatttttattttttaaatttatgaacaatgtcaaatgtttttctaaaatagattaagtattatatgatcatttatcatgttgttaattcaattttctaaaaatcattttataatgtccataattttaaaaagaaaagtatgttcttcccttccctccactcttaaaccctccatccaaacacatccttagttttttttttcgacacaccttctgatggggaggtggcttttcttggtgtttaatatatttcattttaatttgtttaaaaaaatattatttaactcttttttttaaaggaaaatacagtaacattttaaaaaaaaaatagtcgaccttagttttatgtgagagaaactccaatttctctttaaactttctttctacttcgttcattgaggatgggtggttttagatcatttttgacctagaatcacccctctacatcttttttcgccttttctttcaacctaaataagtggttttcatatatatcaagtttggccccgtttggattggcttattttgagcttatgtgggcttatatactcccataagcctttttaaaggtgtttgggtaaataagtaaaaatagcttatcatagtttcataagctgcttatgccatattttaataagcctaaattttcagcttaccctccggtttaacaaggagctt

SEQ ID NO: 35349 - DNA, 702 bp, Medicago truncatula
  Intron number 2 from transcript Medtr7g099400.1 (locus Med tr7g099400) derived from phytozome v7.0 (chr-ID MtChr7; po s 22158514 to 22159215)
ccaatgtatgttatgccgtgcttcacttattattaattcttgcatatttgtttatttccacgaagcacacataaagacacggacgtcaacaccgataataatctaacaaaattatataatttaatgtaatcttatttatcggtgttagacacgtgtcctacacctaattcgttgagtgtttgtgcttcattggtttatttcattaatttgtctttttttatgaagcaccgactcagacacggacatcatactcatatgtcaacacctgtagtaatttaagaaaatgaattaattgttgaatgtaatcacatgtgtcggtgatactgacacatgtcagacatccaacatgcaccttcgattggaggtgtccgtgttacagtgctcttttttatttttcacgaataactttgaattttgattacagacaattgattatatcattacttataaaatataagaaaagaatttggccctagtttgtctttggaaaattccaaaccataagaaaccagtggattatagcaaattgatgataccttctatgttgtttttctactcttgtaattgagcttttggttttagctatgtgtttgtgttttgtggtccaacttgctgttttgttttcatgattgaaaattaagattgctagctaaacttgaatttgttgtgctttgtttaagcaggcaaataagaaaattgaag

SEQ ID NO: 35350 - DNA, 324 bp, Medicago truncatula
  Intron number 3 from transcript Medtr7g104730.1 (locus Med tr7g104730) derived from phytozome v7.0 (chr-ID MtChr7; po s 23844635 to 23844958)
tgggggattgtgggcagaacttgtggataatagaggtatatattgattgtcacttattaaaaaaaaatcttcagtaattaactcaccaacactaattttggtgaccgaattagagatatgtttcttacatttcctttgtaaattagtttatctcactaattttgtgccactttttatgtatgagatattacctgctttgagtctttttctcctttactcaaaaagtctctttgatgggttgaggtctaatcaaggacaaattcgtgatttaattatttttattattctaaattaatgtttgaggttttgaagcaggaggttcca

SEQ ID NO: 35351 - DNA, 387 bp, Medicago truncatula
  Intron number 1 from transcript Medtr8g121280.1 (locus Med tr8g121280) derived from phytozome v7.0 (chr-ID MtChr8; po s 28027065 to 28027451)
tccacaaacacacatctcgtgtaacaaccactaaggtaattatttaggtatattggatttgagattttattattactatttttttttgtataacttacattacatgattcatcatgcatgcatttgggtaaggtattatatttctgtttttgaaattcactttttgatacgttcaaaatttagggattttgggtagttcttcaattcaaaattgggttatgtttcttgatgaatagggttttagtaatgggtttaattttaataatcgatatttgttctttcttacctgttaataattagtgaaccaagaatcgtatgtgtgtgttagtcaactaaaagattttcattcaataacacaagttttttttttcctttgatcaagcatcg

SEQ ID NO: 35352 - DNA, 829 bp, Medicago truncatula
  Intron number 1 from transcript Medtr7g135870.1 (locus Med tr7g135870) derived from phytozome v7.0 (chr-ID MtChr7; po s 32432242 to 32433070 reverse strand)
tatcgtcaagatagacttgggttacccaattttaggtttgttaatttttaggaggttttggttatatgtccccctcctttgtgtttttctcactatctataatattttgaggtagcagtcctttgctgcacctcttttttggttaaaaataaaagtcttgaatgtctcaacaaagataattttttttgttttcgttacatgacaaagatttcttatttgtttttaaagaattgtcttcaaacaaagattaaatgaattgaatttattgtcaattgaaaaataaatgttaaatgaaatcaattatgatgatctgatatatcattttgcatctaaaattttttgtaaattaaaacttaaataaaaataaaatgttatcaacattttcttaactaaaaaagtctcactttaaaattcgcttccaatatgcattacaattacaattacaagtgttgggtcgaccctaccctcttctcccttccaatacacattacagttacacttttatgtcattccgaacgtgtaaatatttattttaaattttgaaggtataaaaaaaaaatttatgatgaattttgtgtttgctgttgattacaacataaattttttgtctatatattcaagtttattttttgttaatccatacgaagttttcttttcttggctccaccactgtctagtggtagtggatagtaatattttatgtttaggttatttattttggtgtttctattttcttcaacaaaaaaagttttttctattgtatagtgtaagcaaatttctatttaaggcttaaggttgattccacttgctcatattatcccttgcttgt

SEQ ID NO: 35353 - DNA, 970 bp, Medicago truncatula
  Intron number 1 from transcript Medtr8g116230.1 (locus Med tr8g116230) derived from phytozome v7.0 (chr-ID MtChr8; po s 26291406 to 26292375)
gggaattgcttggctaaggtaagaatatttggatacgtcaaacatgctatttactgttattcatcattaaaagttaaagtttgaggcctttcatctgttctctccgataaattgtacatataagatcactctataagcaaaggtcatgattttttccttaagtgtgtattgtattgctcctttggtagaatcaacgcataaggaaagacatctgctgtgactttgaactgatagtcttttaccgcgccttctttttgtgtcaaaaacttacttatttgctagccaaattgagattaacttttacatctacagctagcctttgtgtattgtgttgtatgcgaccagtagcagataaattaaacagttatagtaaaagcaagaatagagaaacaaatataacagaatgcagaaactaatgaaaactatataggaattagaaaggagagattattttaggtctgtcaattgttctaattcatctaagtattggtcaataacttacagttcaaattacactgcctaggtaactggtgaaaagagttcttaattgcatctgataagtagctatctgtaagataaagatcatgttcgagaaagaaaaaagaaaacgcgaaacattcaaactaatttgctgtagttttctcattttcttcacttattccccctcacccctaaacctcatccccttcatcttttaacggtgataaacggctaatcatcgacttacagatagtatgatgcaacaatccctaatctgtaactagaagtaatttcttctgtcagcatctatccgtgatttttgtgttcctaaccacttttagtttacggaaaggaagacaaggaataatggaaaaagcgtgtaggtgtattgtagctcttaattgcttccatctatcttcgtcattcattgatgaatcaattgacagaaaagtttcatgtttttaatgcttgtagtctcgggatagggata

SEQ ID NO: 35354 - DNA, 897 bp, Medicago truncatula
  Intron number 1 from transcript Medtr8g031700.1 (locus Med tr8g031700) derived from phytozome v7.0 (chr-ID MtChr8; po s 6810466 to 6811362)
aaactcaggtgaagatatcaaaactaacaatatcggtattttattttattttatttttgaaatcttacattatgtgggcgtaactgtaagaactaatctctaaggatattatattttaaatttatagggactaattcaactcatatttgtatttttaatttcttaaggacaaattaggtctttgactttatctttttcattgtatgtagacgtgtacaactatgaaagtcccgggtttgaacttgagtaaaggtgtcaagtctaatcataccgatattagttagtttatttttgtttgagccataaatcatgtgtgtgtgaccacaacgatcaatctaagaatatgttattctaataaaaaatgatatttgtttcctatattagggtcttccactcatattttatatattgttttagctgaaactcgtattttacatttccaagaaccatatttgtgtttttaatttcttaaggactaatcatgtcattgactttttgttttttcattgcatgtagacgttcataactgtgaggttccaaattcgaactcatgtgaaggtgtcaagtctaacaatatcattataagccagttttttgttgttgtttgaggtgtcaagtctaacagtatcggttttagttttttgttgttgtgtgaatcagatattctctttgcgtaactgcatatattaatatctaagaatattttattctgtattaatactagggactaattcgacaaatattttacatattttttaaaataaaaatctattttggttctaggttttgaaattttaaaaaacttaaaccaatgttttttgtacattggctaaaaaaacagagagataaaaactaagcgcagggtgcaacacccttttcgaggggtgctgagtcaag

SEQ ID NO: 35355 - DNA, 738 bp, Medicago truncatula
  Intron number 2 from transcript Medtr8g073680.1 (locus Med tr8g073680) derived from phytozome v7.0 (chr-ID MtChr8; po s 14458895 to 14459632)
gatcggtttttggattctcgacctttaccggtgagctcttgcttgttttttactcctagtatttatgatttcaacaacgaaagtcttgcaagtaataaattagataaatcatcttgttttctcggtactagttgtattcaatgcacgcttgacatattcgagaaaatgatggtctcaatgtgtcttttgacacttcaaacatgaggcacatgagaaggaataaattaattaaatatgtcaattatttcaactcatgacccttcggtatcattcactattattatgccaaggtttttgatcattttctattcaattcaatctggttgatttgtttgatgaatgctcactcttccacgttttgaatttggtagtaagaatttaatttaatactgtattattactcttaaaaaatatcaattgcttaatactccattgacaaattcgatgaatgatacttctgaaaatgtacttaattttttatgatacgtttgcgaggaataatgataaaaattaaaatcatctatttatacaaatacttttttaaggaaaaaagtgtacaagtacctatactacaaaaatactgtatatatacaaatatggatgttgtatgtcacgtgagtgtatttatggcataaagtttgaaaaggataataatgttagtggatcactgctattaatttattgaacaactatattatggtgatgctaattacattaccacgttaatacaggaatcaa

SEQ ID NO: 35356 - DNA, 570 bp, Medicago truncatula
  Intron number 1 from transcript Medtr7g104370.1 (locus Med tr7g104370) derived from phytozome v7.0 (chr-ID MtChr7; po s 23633029 to 23633598 reverse strand)
atttttctcaacaacaggtcatttttttttattttttttcagtttagtttacagaaatttaatgcaaaattcatatattacaaacactcacatgttgacacagtaataatcatgaacatgattttttttatatttttgtaagttaaacaattactaaaaaaatctacacaggtgattttcaatattttagcttagctttgttaatctttggatatgcattgtcaacctcattttattctcagggctagtttagattagtttctgactttagaaacctctcaattaaagaagtttatggggtgttcgcttacgaatgaatcctttataggtgttcatagagaagttaaatgagagtttctagaaataaaattagatgtatgagctaatttctacttgtatgaaaaactcaactgttgcaaggttcttttagtatttcttatcctataagtatttttggacaagtttgagttattcaaactgattcataatagatggagttggacagtattattcttctcttgcccactctcaatctcatctttttcttttatgtatttaggatttgttgca

SEQ ID NO: 35357 - DNA, 842 bp, Medicago truncatula
  Intron number 2 from transcript Medtr8g119470.1 (locus Med tr8g119470) derived from phytozome v7.0 (chr-ID MtChr8; po s 27087788 to 27088629 reverse strand)
aaaaacgaaaacatcgtcttctccatcggaataaggtcactcatttttcttcatgcttctcattttcactttctcttaattattattcaattatcatcatcatcatcatcatcatcattttaatcattattttttaattaatcaatgagctttttattttcaacttcagcatcataattcattgctctgtgtttcattgatgatgataattgttaaaacaggttaataattctattatcaggttctgttatttattatattttagtatttatgaggtttttttcccttattaaacaatgaaaaaaaaaaaaaaaaaagaatgaaccttcaaactttggaaaataactgaattaaagcaaagtggatcggattctgcattgaaatttgatgaaatctgtttaatcacatttcactgattggtttgtttgttatgtttgattttgaattttagtgttttttttattcatcgcttattttgaacaaaagttttgtttggttttctgttatttttttgtttctgcataatcaaaattttcaactttattattgtattaaaaaaaagttttttttttctttctttttctggtcttacaagtcaagatctaaagcaattcaaagtaaaagttttggaatgatgtttttctatttattgattgctatgattgttaattcaattagttctatatgttgattgtgattagaggttaaattttaatcattttccttttttaaatttctaaattctaagtagttggtgactattattgttgaaattttaatcaactagttctatatcttgttttgattttgttttgaaattttgcagaaatatattagctatc

SEQ ID NO: 35358 - DNA, 712 bp, Medicago truncatula
  Intron number 1 from transcript Medtr7g120990.1 (locus Med tr7g120990) derived from phytozome v7.0 (chr-ID MtChr7; po s 28392407 to 28393118 reverse strand)
gatcttcaattcttccaacagcttagagatattgagtatgcttttctaccccttttatttgctaaactaattttagttctatatttacattatttatttacaatgttaatttcttatgtcttatggaatagtgtgttctcctaattttgatgtagctagtaggtggaaatttaaaaataaacaactttttcaattggatggaaaaaaggctagtaagaaaatctttaggtattcctaacactagtgatgatgattataataatcaaattagcaactcaattctttgctttgattttaaatagagtcttatctagtcgacgatggattgatcttttaaattagttgataattaggttagataccgagttttttaatatcaaaaggaaattagtcactcgaattatagtgactagtaatataatttttaatattaacaaaactttaaagtgttctccaaagtaaatttgatcacattagtcattctaaaagaatttcagggcaaaaatgtccatttattgatgattttcaatttcttggatcatttgaaaatttcttcgttgattgattttaaataccaaacatgatttactatataaatgatagtgatcatcaaacatgatatttcacacttcctaggtgatttttaagaaaaactaatgtgcttcaatcttaattatgtgtttatttgacaattgagcagggtctttgggac

SEQ ID NO: 35359 - DNA, 661 bp, Medicago truncatula
  Intron number 2 from transcript Medtr8g132790.1 (locus Med tr8g132790) derived from phytozome v7.0 (chr-ID MtChr8; po s 31452315 to 31452975)
cctcctggctttgattcgagtacttgccgcagtgtgtgagtattaatagacacttcattatattttacatttaaaaaaatatattctactgttctttctttttttggctaaatttgtatgtttggtccctttctcttattttagtttttaagttggtctcctgtgttttgaaagtttcaatttggtaccttatgatatactgatgtttgcataagttttccctttttgtcaaattttgaattaaacttgtataaagcgtccatgtggcacccccaaagttatccgcgcgttcatctctgttagccacgtggatgttttaaacggaaatttgactaaaatactaaacttattgtaatgtaagagaccaacatcaaactttttaaaatagggaccaacttgaaatttcaaataaatgtaagggaccaaacatgcaatttaaccttagttttttgtttatctagtgatttttcctagtttagcagccttaagtgacttgttgatttcattgcctcgaaaataatctttagtgtaaattgtttctacttttttgtagttagtgggattcaattttttttttttgtccgcaggctccttgagttcttctttgtttttatattttgtgttttgtatatctaataatcacttttggggaaatgcagtt

SEQ ID NO: 35360 - DNA, 988 bp, Medicago truncatula
  Intron number 1 from transcript Medtr7g111040.1 (locus Med tr7g111040) derived from phytozome v7.0 (chr-ID MtChr7; po s 25982692 to 25983679 reverse strand)
aaattgaagatcaacctcaaaagagtctctaccaggtaccgtaaattcacgctttattatctcgcctctgcaaattttcatttcgctcttattctcagaatatttttggcgtgtgaatgtgatttatgttggttttctgttccacaatagtgatttgattctttttttcttcgtttatatatgaccatcttgaacaaagtttgtatttgtctgtgtgtgttagggtaagggtttatcaaatgagattttcagtgatttttgtaaaattgattcctttagattgagtttgaatttaagtgatttatgttttgatgtgtgaaattttcagtggaagacaattttttttttttttgattacttatagttaaatcgagctttggaataatcaattttgattcatatgaccgaatgtttgacattgaggcaaaattgtggtgaacatgtcttaaaaacaggatttttatggtttctggcatggaagattccaatcatgcttctgttttttgtctcgtgatggtttttgcataaggggattccgatcatagtaaagtttttttaatgttgatttggatcccaactggttttttgccttgttataaaagctgaagttgcaggatggtgaatcagaatgtgaaagtgcagaaaagaggttttatgggttgagagtgacattgggttggaaacacattgtaaacaccttgggtaattaagaatcattcgaggaaggattcaatgtttttctattgaatcgtagagtgataatatttggaattgcacttgcacataggttctagatttgttctcggttgaatattttttttgctagatcatttagtttgcttgctgttggtatttgttccactcttcttgttgaatcattaacaaaaataaattttgacattttcaactgtgcatttaaacacatgctaaatctgttgttggtttgattgtaggttcttggtttggagaaaacggcctctcaacaaga

SEQ ID NO: 35361 - DNA, 557 bp, Medicago truncatula
  Intron number 1 from transcript Medtr8g096590.1 (locus Med tr8g096590) derived from phytozome v7.0 (chr-ID MtChr8; po s 21236105 to 21236661)
ggctacaaagctgtgtttggatcaacaagttaagggtaagtcataatcccttttatttaggaatttttcatgttcttatgctattatgcttattataaagatttgtttagttatagttatctagaaaagattgttgaaatttgctaacattgaagaattttcagttattatcctgttttgaaaggcatatcatataagtgtttatgcagaagctaattgtattaaaaaaaagttaaaataaactcaaactgtttctatataagttataagttgtttacataagccatattgcagagtttataaagataagctgaaaacaacttcagcttatagtcatgttttcaataagttctcccaaatagtcggtcacaagtgcttatgccaaacatgggctgtttttgataaatttatcataaaattttgttgttgttgtgaaattaataccggtacacaatcatatgtatgcattattgtaggagatatgaaatattatgggcttattgttttcttttgattctttaggcaaattcaaggaaaacattatatttgtaaccttc

SEQ ID NO: 35362 - DNA, 937 bp, Medicago truncatula
  Intron number 1 from transcript Medtr8g148630.1 (locus Med tr8g148630) derived from phytozome v7.0 (chr-ID MtChr8; po s 36768678 to 36769614)
cgttatctgcagaaattgaaccactgcccacccaagtaattttcatagcttgctctatcggcggtaatgaggtgacagttataatgtctctgtgtctggtcatcaatgagagtgattattttgcgctttcctttcagaattgttcttgacacctcgtttgggaaatgctaaacaggaaaataactgcaatattagtctaatgcatatttacatgtataagatgtatgcaaatatagttacatataatttataaaataaaggtagcataactgattttaagctaaagaaaatgtagcatgacttataatttatcttgatattatcttcctataaagtctagataaatgcatgcatgaacattatatgtaccccgttgaccaattaacattgttgaaataaatgaaaattaagcatcacttccgcatgtgcatatacaactagaacaatttgacattaatgtcttcgaacatttggtgcaactctcataatacaatccaaactggttaggattgaatttagttgtttttcaaatagtgatgcagtatgtttcctaacacaaattatgcgcatgaaataaagaataatgcaatatgtatttttaatttgtgcctaaaaaaactcaaagcatgtttgtgcataaaaaaaaagtaaacattgactaagtttataaattcagcaattggcctaacctgagacagtttggaaaaatcgttgtacgaagtacgttgagaagaagtcgaactctgacttaagttctaactgaagctttgactctgagcttgagaagtgttaaggtcacgacaacaattcaagaaacatggtaaaaaaacaatcaaatcggattgtgaaattataagttactctaacactgtactgtgaaatcataatgcaaacttactaagtcttaaacttctcaacaaccggatgatgtaggttg

SEQ ID NO: 35363 - DNA, 567 bp, Medicago truncatula
  Intron number 1 from transcript Medtr7g083790.1 (locus Med tr7g083790) derived from phytozome v7.0 (chr-ID MtChr7; po s 17975999 to 17976565)
tgcagtcctacaaagctccattttttaagacaatgatcacttgtgtagaaaatatatattttaagtcaattttataggcaagtatcttaaaatgttttgatatcgtagtatgagtgacacctttagattaaatcttctcctacccttgttctccccttctcccttttcacaaaattgtatcgtctctctctagattttagagaaaagatcaagagaaagggaaaataaaaaaatttagaaataagatcgagtgagagagatggatagacacaaattagaaaaggagggagaagaagagaatgatggcaaggagatgatccattaaacaccttttaagccggacagtttcaaattgtcttaaaaaactcatgttttaagttggtttctattaactactggctcaaaatattatttttaaaaaataattattattataattttgtctagagttaattagaaaaattacataatattgtagtcaaatgtataagacacagctaaccatgtatatatcttattagtttagttataatatacatctataactaaactaggaaaagtaggaat

SEQ ID NO: 35364 - DNA, 812 bp, Medicago truncatula
  Intron number 1 from transcript Medtr8g106460.1 (locus Med tr8g106460) derived from phytozome v7.0 (chr-ID MtChr8; po s 23870772 to 23871583)
aaaattctcctttgcttcattttgttaattacattgtccattgtttcatttctgtccctttattatttgctattgtgaaagcttgctagttttaattttgattcatttgagtgcttagagttaattgcttatatgatttgctgcttcagttgataggcgtctaggactaggttttcaatcaccgttgtgtcacaatatttgatattgcggtaagttgcagtgtaatgtgcttgatgatataatctaaattttttgtcgtgttgcggtcatgttgactaggaaacccatgattttacggttacaattgcacagacagttttccagaattcaaactccgggtttgtttctttgtgtttatttgttgatattgaattgtatgttctttttgtattgatttgcatttcattgcaattaatgaaatgatcactaaactcaagcctccaacttttttttttgttcctgtgatttattatcttcagctattcagtttcaatttcaaatatattatttttaaaatgatagttttgaggaagaatagagagtaccctgaaatttatcctagtagattgcttagtctagacatttgctgatcaatattttgcaagttaaaaatgatcattcaaagaaacttccaagaacaggacacttgtgaatgcatttgattttacagaaattcaattgacagagtcaagtttagctaaatttagtaatagtttcacagtgttgaaagagtcaagtttagctaaattagtatagtttcactgtcttgacagagtcaagtttagttaaaataattcagcagtgttgcgaaa

SEQ ID NO: 35365 - DNA, 460 bp, Medicago truncatula
  Intron number 1 from transcript Medtr8g044590.1 (locus Med tr8g044590) derived from phytozome v7.0 (chr-ID MtChr8; po s 10054247 to 10054706)
gggtatttcggagacttgaatatagtctcatattggtaggcttttgcactatgccgttttatgctattaacatggatgttgtgagtttgtttgcagattcgtcctttttgtttttggcgaatttgcattgtatcgatgtactctatcaatttgaatgaatgaatgtcatttatttttgtcaaaaaaaaaatgacataggccaagttgtgggtaattttatgatggtatttttcacttcgtctacttaaaataaataatgaaatgaagtacaaatacaaatagtgtaatttcatatgataaactaaatttaaagtgtgcatgttctttaaacttattttttcattgataaacattttttttttctatttttgagaggaaacattattttatttgataagcaagttcttcaaactattaataactagggtcgacgtaagagaactacactaggtccttactc

SEQ ID NO: 35366 - DNA, 306 bp, Medicago truncatula
  Intron number 1 from transcript Medtr7g124590.1 (locus Med tr7g124590) derived from phytozome v7.0 (chr-ID MtChr7; po s 29283818 to 29284123)
gaaaggtaatttgttgactattgttgattttctttttgattttagaatttaaaggtgtttgtttgttgttgtttgctactaagattggttgttgtttgataatttttgattgatgattgctattattactaagtttgaatgttaattaattttcttatttgttgttcttgtttgttgattgttggtatttgataattgaattttgaaactgcaatgttttcatatttttgttgttatgcacatcttgagcaaccttgcatttgttatgtgattctcttctcttgttatggcagattggcagtagca

SEQ ID NO: 35367 - DNA, 718 bp, Medicago truncatula
  Intron number 1 from transcript Medtr7g103300.2 (locus Med tr7g103300) derived from phytozome v7.0 (chr-ID MtChr7; po s 23124477 to 23125194)
taggaagttatctgttgttgatcttgttggaattggtaattcattcttaatttttcaatttcaatttataagaaagaagtgaaaaatttgaataattagtgattatgacttaatgaattgagtttaaaatttttcaattcattcttgatgattgattttgctttttatctttttaaaattttaatgttggttaatgaagtgatttaacattagtctttatgttgattttgacttgatatggttttgctgtcagttaaaagagtgagaatatctatatgtatgaaagttttgcttaggtgtgtcatgtgggaagtaaatttgtcttttttgtcttttgtgaaacataaagaagtagaaacatgaaaatgtttctttctcaccggcaatgatgcaagttgaggataatatggtcgtaaaattagaaaaatgaagaaacaccacaccagaacttttattaaaatttgtcgtttgattgaactgaatttcatcaaaaccataagagatagttgccgaaattgattgagtttctgagtatacgtaagaatgacggtggcctattcattataacatgcacaattgtcaagttccaatttatgttatctgtaatatatgtagattttagcttccttttactagacgtttatctactttaccaaaggtaattgattattcttgaaaatcaggggttggagctacaataggagctggagtatatatt

SEQ ID NO: 35368 - DNA, 387 bp, Medicago truncatula
  Intron number 1 from transcript Medtr7g143300.1 (locus Med tr7g143300) derived from phytozome v7.0 (chr-ID MtChr7; po s 34371780 to 34372166 reverse strand)
aaagttacaacagcaccaaaaaagcatccactatgattgtgaaaaatacgctctagaacgtttatcttcttgtcgtatttttttgacaaaatcttcttgtaattttgcgtcatctactttgatttacatacataattaagggaaaatgtcaatgagtatttttcttaaacacttgttaaagaaataaataaaaaagcttgatgttaaaaagtggtatgttcacctttatgaaagttcgaaaattatcatttcaaatgcaaggggtgatcatttttgattcgagatcggaaatcagttctttggctcaaattgatttttggacttttgtttttgtgctcttttggtggatcagaggtcgagaggttgtggaagttgcttgttcattgg

SEQ ID NO: 35369 - DNA, 566 bp, Medicago truncatula
  Intron number 1 from transcript Medtr7g089110.1 (locus Med tr7g089110) derived from phytozome v7.0 (chr-ID MtChr7; po s 19505888 to 19506453 reverse strand)
aagagaacggcatattgtttggctgttcaaaggtgttgcaattggatttgtttaaataattcctaactcttgcattttttttttcttttctttcagcaactttattagggtgctaatactttctaaggtcattcatgatttggtaaaaaagcattttggatatcccatcccataaagtataccgaataaataaaatcaataactctaatcggggaagtcactattcaatgccaatgaccaaaaacagtctcgtaaaaccactataaaagccttaaatgtatttgttttaaagttttgcaatattattcctaagaaagtgaaataaaggcaacattttcaatgtttgtttcccgttttaacaaattatttattttcaaatggtttgctcacacctcatgtgaatcatagcagtttttgattttatgacgggagagaaatgctgacactatgtacaagtgtagtttctgaaacctggtatatttgcatcaaaaccaacagactgggtttttacatgttataaatctaatcgaaaatcatatattagttggtagtgaaaataattacat

SEQ ID NO: 35370 - DNA, 972 bp, Medicago truncatula
  Intron number 1 from transcript Medtr8g026620.1 (locus Med tr8g026620) derived from phytozome v7.0 (chr-ID MtChr8; po s 5770072 to 5771043 reverse strand)
ctttccctgttaccgctcaaaatattaaccctcaggttttgtttttaattgcccttttattcttgtttttcagtggtttttagtgatgccctttttgtttttaggtctgttttagtttaaagttttgaattttatcaatttttttatgtgggttttttatcatgatttatttgatgcttatgtgattgatttcagtgatttttagtgatgtcctttttgttatttttggtttttaggtgtgtgtttgagtttaattttttgagatttatttgatttgggtttttgatcatgatgaatttgatgcgtctgtgattacacaagggttttgggtttggttcgtttgttttttcttactttataatttgtttgtctgtttgcatgcaaaattgaggtgtggtgtggttgttgatcaaagggtaaacttttgattgaattattgggtttttaattttttggtttataatgactgaggtttggctctgatattttgattttgctttggtttctgtttggttgtgtgactgaggactggttcatagctaatttatgtagtattatgctcaattaagtcctttttgctttgtttttgttttctaccatgggatcagtgaatagtttgtggcagaagacatgttatggttaaaattttatgcaaatttgataaatagtttgatggcttagtgtatatttgagttcggtgaaatcatggtaagtctctgaagcgcagtttttgctaaaattgcggtggcacaccgtgattttgttgaacccgttgccaatttaaacatgcatatgcacttaagctatttaagtaaattttctgaaacttttcttatatcaacaaaaactgttctttatttgtaacgtacaatgtttttgggtctgaatacttgctccactttacttacaccaatatttgatcttcagttacatgtctgaaacaatggttttttttcctgcataggttctgaa

SEQ ID NO: 35371 - DNA, 848 bp, Medicago truncatula
  Intron number 1 from transcript Medtr8g105970.1 (locus Med tr8g105970) derived from phytozome v7.0 (chr-ID MtChr8; po s 23533375 to 23534222)
ttcaggtcattctcattttcttttttctctctatttttttttttttacattgtcgtgaagtactagattctgttgtgatcttgcattattttcatgatgacatgttagatgatttggagttatttaaaggagtgaattactattttcgacctctagggatcaaacaattagtgtcaaataacaaattagttccggtgacaccgaatcagacatgaaaattgtttgaaactaacacaaacaccaacatatgttgccttttggagtagaaatttttagaattctttgttctcattgagacgatgacttaattggtgtcagtttgacataaaaacaagggaaaagaagtatgcttagaccaattagattagcgtctcagccataagaacgagaaggactgcaaagtttaacttccgaatgatgtcttcaatcttcattagagtagtttcaaatgatttttaagtaatggtccattggggacatagaacttgccagttcatgaaattaaacaacactataaattgctgaatagagatcaatataagttataaacaaattattagatacatgctggagctaaatgtcataacatgttaactcaatatttctgatctattaaacgacagaatgactgaattgattgacgatctttaagttcaaggactaattttcatttcgtgtaatttgggaccaattgtctagtatttacaattttgaggatgatctaaatgtttattaattcaatgttgtttggaatgaaaaataaaagtgatgactttttgatgatttctgtggtcactatagaaagggagaaagtttgaagtgtgaaataaagtgttattggtgcaggc

SEQ ID NO: 35372 - DNA, 697 bp, Medicago truncatula
  Intron number 1 from transcript Medtr7g117210.1 (locus Med tr7g117210) derived from phytozome v7.0 (chr-ID MtChr7; po s 27340199 to 27340895 reverse strand)
aaattgttattgaagctcagggatcgcattcataggtgacatttccactcttcaaatattactaacactattattgttacatttccactcttttaaatccatgattttgatcacattttcaaaatatttgatttcatttcacatatacattctgagactgaacttttgatgatgaagcaactgatatgtttgtaacagctaagtttatgacatgacactatctaatatacactaatttatatcacgaaaccaacgaaatttgatataagacatcgtctaagttaaatctaacttaataactcattttcatttcatcggtaatgttgtaacaactcagttaatgacatgacactatctcagtgggaagacatttgtaatgcagtgaccataatgttaaaaataaaaaagaataagactaaaactaaccgagcagggcccctttcctaggtggaacaattcttggccaagctttacatacctccatgccaaactctggattaccaggggcccttttccctgagaaccggagggttaacaccggaaaaagaaagaaaaaaaagactaaaaatgcatttaagtctttttattgttgatttctcctgcatcataaagatgcgctaacgttttcattttcaactcacatgcatttcatttcatcccagagttggaattaatcttcctacaatcgaagtccgat

SEQ ID NO: 35373 - DNA, 623 bp, Medicago truncatula
  Intron number 1 from transcript Medtr8g013000.1 (locus Med tr8g013000) derived from phytozome v7.0 (chr-ID MtChr8; po s 2322751 to 2323373 reverse strand)
gtgtgtgaagaggaaaatagtttattgctaccctctccccactttgctatattttgcttctatttatactccaaaaattaggtcaaagtgtgaggattatgacaaaaaatacaagactggagatggtgccaaagtaagtttatgtgtgacctcaaaacagttaaaccaaaaaagcaagtggtaaagagaagttgaattgttgttgaaaataaaagaataagttgagaaaaagcaagtagtaaagagaagatggaatgttgcttaaaatagaagagtatgttggggggtgctatagaaacatgtttaattagtttttgtatttataccacttttgtattttttttttttgcaattaaagaatatttttttgcaattaaagaatattaatacaaatgaagggtattttttgcaaatactacactgtgattgactactttttattcttgaaatttttttgatgttatttttctagagatatagcattgctctttttagaatttacaaggaaattacaaatgatggtaaatataataaaattatcctttatttttagtttttttatttgttcggatgaaattaaggccctaggttaaaatatttgacaagaaaatctcacacgtatc

SEQ ID NO: 35374 - DNA, 403 bp, Medicago truncatula
  Intron number 1 from transcript Medtr8g102990.1 (locus Med tr8g102990) derived from phytozome v7.0 (chr-ID MtChr8; po s 22848269 to 22848671 reverse strand)
atcttttgagcggcaagcatattcccccaagccatgtatgtttccgttcttccaaaatcatttgaagttgttcatttgttaacaagagatttttctgttttctatcaaatccatgtagaaacttaatccactgttttacatccgcataagcatgtgctatatatcctctatgtttcattcttagttctattttttaagcatgctgagaatcatatatttctgttcactttctggaggctttcatatcgtataacgtataaaaaatatttatgtattccgtggttttgatttcatggtgcatagttgtattggcatagtgttgaatatgccatgttgcaagagtatggaagttgttagtaagtttgatttgtcgttcaggctttggacctaattagagggaaaa

SEQ ID NO: 35375 - DNA, 968 bp, Medicago truncatula
  Intron number 1 from transcript Medtr8g089220.1 (locus Med tr8g089220) derived from phytozome v7.0 (chr-ID MtChr8; po s 19121543 to 19122510)
gtcgaagataaccgtgttcgtctccgatttgtgagtttgttgcaattttgttcattaagctttgcattcagttctttctaatttgtgagtttgatgtaatctgaatgttaggttttgagttcctttgatctaatttgagttttaggttacgtttggggttgctttgatctatttttgctatcatttgaaattgaaatcatcaatttgttgatttgacaattattgaatgaaattgatgttttaatttgagaatttattttcgttatatagcatttaggatttaggcactgtttggattaaaatcttaattgcagcttatagcatacgtgcttatcaatatagcataagcttatcttgagtttctcgtaaaagaatcaaattttgaattgatttccttaaaataagttaagttaataactgactatgaaaactccaatcatttatgtgatagtttaaagttcaaaccataataatcatgcatggtaatccctccaataagaaacctacacaatagaaagctttaacactgatcatcagaggaagaggtcctgacacactgactacagagagagatggtgtgtgtgtgtgtgctgtgcagtgtggtccatgagaaaacttattgattttagtctcatttttggtgcaatggagatggaagttcccctgcaccagacatggatgtataataggcttcatcctggctgaaaaggacatatatatgagtttttaggcaattattttgttagaaatattttcttcatgttgtgggaaattgattttttaactagccttttggatcaaataacaatgcaagactgttgtgcttgtggttttatgattttacattttgaattaatatctttaaggtttcggaacatgtttggatgagttttttcctgagaaactattggtggtgcaggtagttagttgtgtttgtaatttcagacccttgagttaatattttggat

SEQ ID NO: 35376 - DNA, 629 bp, Medicago truncatula
  Intron number 1 from transcript Medtr8g032020.1 (locus Med tr8g032020) derived from phytozome v7.0 (chr-ID MtChr8; po s 7032684 to 7033312)
ttgagtccaaaaggctaagaatcagaggtactcaattgaagcaacttctctgtttttttcttttgtgattgttcatttattactaaatgacatgaatagtggcttaatttagatgcattatccataatctaccaaactgttcaattcttgtttatattaattaatttaatagcaaatatatcttattttcgcatgattgttcttttttgtcttttgtgctataagtagttgtgattttgatgatgatctgtgagactaagttttagacctctctgcatggaataagctatctgcattttttttaataggaaaatgttagggagttagtggttgttacttttgaggatttgaaccctagatctacatgaattgatttgataaatgtgttcgcatgaagaaattagttttttgtgttatgcatgtgcatatattcatcgaatcatttgtccttttgttatggtgttataaatggactatggttttttggaggcattagagagagtgatgataggctttttgtttgcatttactgcgtttatttgttgaatgtgtttgttaatctatcaggattgcaatcttgcctttgatgtgtagaccgaaacaaccttagaactgttagaaaaagagga

SEQ ID NO: 35377 - DNA, 753 bp, Medicago truncatula; identical to SEQ ID NO: 32647
  Intron number 1 from transcript Medtr8g047620.1 (locus Med tr8g047620) derived from phytozome v7.0 (chr-ID MtChr8; po s 10756539 to 10757291)

SEQ ID NO: 35378 - DNA, 744 bp, Medicago truncatula
  Intron number 1 from transcript Medtr8g043110.1 (locus Med tr8g043110) derived from phytozome v7.0 (chr-ID MtChr8; po s 9213511 to 9214254 reverse strand)
tgtgacccaatattttgtatgcctctaaatactttttatgtttatttatgttattttttatgtaatgaataatatcggaacttttttagcttcttcatttttaatgtcccgggcgttagcacgggtaaaagtcctagcatgtacaatcttttcagaacctttaatgatatgtgttggttgttcaaatggtagactgtcacataaaatgaactttaattggattgcttatattccctgcatgcatttttttacaagttgctgccatcttgcaaagtctggtttgaactttatagggacttcattgcaatatgtgttggagcattattcttcattggaatgatactgccactatataaagctatagaactagaaacctatgtttactcaaatagtcataaagcagcctgcagtagcaattggttttgtttcacaaaacttttgacaacactttttcccttatgacccttaatttgtttgaaaaatcttgcacattctgcttaaagctattatcgcattatctagtgttctaatgtttgaggattctgaagaaacaaattttaaagtgttgttgttatgagcaggtgaatcatgactacaagtgcttatgagccatttttcagcatcaataccatttcgaaagaaaactttttatgggaaagttttttcaaacaacagaagaactgaagctgtaaaggggtctgtctaccaggtgtcaaaggagcttcaagttttctcaaccgtgtt

SEQ ID NO: 35379 - DNA, 695 bp, Medicago truncatula
  Intron number 2 from transcript Medtr7g107470.1 (locus Med tr7g107470) derived from phytozome v7.0 (chr-ID MtChr7; po s 25130690 to 25131384 reverse strand)
gaagggtaaggcggatctttcaactaatcatgttttttatattatgtagatacaatgaactatgttctaaattatggccaaaattatttataaaaaaagttatagtacgtcaaattaactttcgattaattgcataatatattaacaactactactttaattaatacagttatactagtataatagatgaatatttagacaaagttgagaagacccgataaagcaaggatagttttccttacattcatcttaaaggaattaattgtgaatcacctatagctgtcacaagatgcattggctgcaagtgattcaagttcctttgtatcctccattttttcgtatacacataaaacatgcaaataacacacatatgaactcaaaccaacaacataaattgttttgggtttgtatgatggaatgattgagtaatgaatttcaagaccttctagcattagaggcgtgaatatgttgggtttaagtatgattggttagtcgtatatcaattataaacgagtaaaacattggatatatgagagaaatgattaatatatctaatgactaaagggtttttgagttgagagacaatgtctccatctcttgttatcatgaaacattggttcatacttgcttctcatgctcattcaaactctttaataagaggtatcgacttgacgggggagcgtgagtcaaatttc

SEQ ID NO: 35380 - DNA, 719 bp, Medicago truncatula
  Intron number 1 from transcript Medtr7g090050.1 (locus Med tr7g090050) derived from phytozome v7.0 (chr-ID MtChr7; po s 19985406 to 19986124 reverse strand)
tgactatagtaggggatcctgtttactatagcacggttgagttatctactccaagtcttttcacctttgactttgtttgttatgagggtattcctgttttgaaactatgtaggagcaaaatcaacctctcttctgtcaaacatgtaaatattgaggtaagaatgtggacagattatgccgatgcttcgttggttcttctcaactggttagctgagcttgctaatatcaaatcattgacactcaatcatactgctctaaaggtaccttaggccatgtttgatttgagagaatattagttaattcattttcaattttcacttttgattatttttctcagtatgctttcttttttattttagttatattttttgtcaaaaaatatgatttgcattaaattgttcctgattgacaatcatccctcattgattaggttctctcgttagttcctgatttattgaaggttgagttccattccttgtgtaacttgaagttacttaaagtgaaaatgcgcataccctcatccatgcctaatggaacgttgtactttttacttcaaaactcaccctcagcaaaggttgaaatcgtagattggaggtaaatgtgcttacaacctgttgaacaaaaattttctggtttaatttttgcaatgcagttagtttagttgctgaaagttattttttattagcttgtggctattatgtgctccagtttgaacttga

SEQ ID NO: 35381 - DNA, 719 bp, Medicago truncatula
  Intron number 2 from transcript Medtr8g118760.1 (locus Med tr8g118760) derived from phytozome v7.0 (chr-ID MtChr8; po s 26764259 to 26764977 reverse strand)
tagctcttgctggcagactaggacctggtttgcaggtttactaagatttttaattgcattgaacaaatcctaataccgttcctgtatgtatggtcactcaactaatatgccaacagcatagaaattcttgccagtcacactgtttaattatgcagcaaactatgcagtacagaatgattgttaaaaacttgactgtaaaaagaaacaatgtaaaacaatacgtgagtcagttgtacataaagtttattttgaaaataactatcaatccctcgttttctattcgaccagtagcgttattttgtatatcttttgtactagagaaagaatgcttagaccgaggccacaataggctgtttggaaattggaattaatgagaacaactctctcgattctttatagcttgagacactatttttggtgttttgctacactctgcttggatttatctctcgtagtattagatgcggaatagcatcatttagtataaaaacatcggtcataagtagaatggaaggctgaagtgaccaactagactgcactccactcctttatggaaatataatttttttgtgcatgggtgccttctccatttgattcagatgatgatttctaaatagattaaatagtgacctatacttactgtactagtatactacgatcctggatttaagacttggttttcttcgcatctaatttttgttctttcactccctttgaag

SEQ ID NO: 35382 - DNA, 829 bp, Medicago truncatula
  Intron number 2 from transcript Medtr7g092340.1 (locus Med tr7g092340) derived from phytozome v7.0 (chr-ID MtChr7; po s 20300758 to 20301586 reverse strand)
gggcgagaattcttaagggaaccaagaaaataaaggtaagctaaattgatgcatggcttgtatgttcttagatagatgaaaagtagtattagttcttattacatattggattatattatccatagagcatatattcttttttcttcttacatagattttttctttcgaaagtattcaattatggaaaacaccttcaagtagaaaggcattttttggataacattttgttgtgttatatatttttttatactattgcattaacctagtcccccatattatcaaaattccgaagtgatccttggaattgcaaaatatatgttttttttaagaaggaattgcaaaaaattaatgaagtttgttcctttatctggatatgatatcaaatgcatccctaacattattcacttcgtttcaaattcatccccgataataccaacttaatgtcgatctagtccctgaaacacgaatggagggatgaatatgatttaaattttgcaatttcaatgttcattttgcaatattgataatgtgacagtcctacaatttcaaggaccaatttggatatttactctttcaattgtaatgtattttaaaacataatatatcttaatattgttgattatattaattttgaaaaagtcttactgttgtatcaaatataggaagccagtacattttctgggcccaacacatttaagatgcatttcttcacgagacattagaaaagaaggcaatagtttctgacagtttaatttctcatatagatatagacagcattaatttttgtatatattaaggctaattgtgttggacttcacatcaggtttca

SEQ ID NO: 35383 - DNA, 561 bp, Medicago truncatula
  Intron number 1 from transcript Medtr7g087780.1 (locus Med tr7g087780) derived from phytozome v7.0 (chr-ID MtChr7; po s 18892106 to 18892666)
tttcacaggtacataaaacatgttttttcattacaaatactttgtttcttaattggtgactgtgatgctgtaactgttttgcattggctggctttcttgtttctagtgttcactcatatcatgccacgtgtatggccaaaatatttctctatccaacttcattacccaaaattcaagaaatttttttgtacagatgctagtagatctaaatgattatatcataattttgttttagcaaaattttaaagttattatgtatccaattttgttgatgttctgctacatgttatgttaatagaatcattagatgtatacaaaaggaaatgttaaaagagaatttaatttcagcttttactgaactttttctgtcagttcactttttatcaaaaggaaccaaagtttgaagaacaaacattttatgaaataataatcaatgtttctatttttgttttttaaaccttttttttattggagtatattttcacttgttcaatgaaaatctgaattagaacaatttatttttcagcttattggtaggaccccactggtttatcttaacaa

SEQ ID NO: 35384 - DNA, 788 bp, Medicago truncatula
  Intron number 1 from transcript Medtr7g134910.1 (locus Med tr7g134910) derived from phytozome v7.0 (chr-ID MtChr7; po s 31977439 to 31978226 reverse strand)
ctcggcatttttcagtgtgagtttaacttatgctgacgcttttaagattggttgaaccggcgtaaaaagtgattgaaccgatctaaaaagtgtcagcgtgagttaacatccgctgaatgggaatgaacaattttaaaagggtgaagagtaattttctcagttgttgaatttagcatgttatctctcattgaatgttgtggaccattagagcattcacggtgaaggtccatgtgcgtgtgcacatatgtgaacgttgaaacagtattcacaattagtgttaggatatagagagacgttatttctctaaatattcatcaagtctttttcttttttttgaggagattcatcaagtcttttattgattgtaaaatggaattggatataaaatacaatagagattatgtttatacttatatatatagccatcggttactggggaagaaaataacttttgagttattccaagtaaacaaactaaaacatatggataagattcaagtaactaccgaaaggaaaaactttggtgaaaggggaataactgagtatcaatacaggataatccggtcaagaaagaaaggtgaaacattcgaacaaatcacacaattgtacatttccttttgctagcactctttggtatacaaaaatttattggttaggggttccaaggttgttgtttccactttaggcgagataagttagtaaagggttcgttgttgatttgacactctaatctttatgtattctagcgcattcgcaaccatttttttccttccagaattacattgagg

SEQ ID NO: 35385 - DNA, 964 bp, Medicago truncatula
  Intron number 1 from transcript Medtr8g006170.1 (locus Med tr8g006170) derived from phytozome v7.0 (chr-ID MtChr8; po s 585334 to 586297)
aacatccacaacaccaacgtacgaaattctgttgggtatgttctttctctatcctattctttctatttgatttctagggttcagatctgtttcgattgaattagggttttgatcaattttttcaatctccgtgttccttagatcccaaattttatcatccattcaattagggtttagatcaattttgatcctttcataatttttttacttaaagtttcaaaattttgttggttttctgatagggtttcgatttttatattgaatttttaggttttagatgataaaaataatattttgcaccaaaagttgtaattttattttctggggaaagagtagtaattgttacttaatcgtgtgttgatgttttttttttttttttttttaatttcagtcttgtttatagttataatggtattgaaattagcttgggtagattttgttgtatgaaatttgttaaatatgtagtatattgtgcttgatttgagctggtaaaactgtaactcgtagtcgcaatgcatgctaatgagtgacataattgaatgtaatcacatgttgacggtggtgaagtgtgcttcgagtgggtggtagtgaaggagagtttgcgagagggaggaagagatgattgaatttaacctgggtagatattttggatgaaaattgtgaaccatgtagtatattgtgcatgatttgagctggttcgcctgtaatttgttagtttcaatggagtttacggttgtggagtgttgttctttttgtgtaggatacatttatcagttctgatagattctcatgtaatgttagtatgtgagatgctctgtgcttgattcggaaaaattcacattataaagtttttggttgtagatttcttttatttgaaattttataatcccttattttttgtattttatttgtaagtttataattccttcttgtttttgtgtagtgtttttaaggtgtatcaatc

SEQ ID NO: 35386 - DNA, 950 bp, Medicago truncatula
  Intron number 1 from transcript Medtr8g109940.1 (locus Med tr8g109940) derived from phytozome v7.0 (chr-ID MtChr8; po s 24795908 to 24796857 reverse strand)
aaagcccgagaagcttctaaaagaaaccgtaaacggtatacttatttacatcctccatcaactttcctttatttccattcatttaaacaaatttcgtattaatagtttagttgttcttgttcatgttaggatttgaaagatatgcacgtcagtgcaaactaattttacactgccattcaataaaaacttattattttgtttcatcgcctcactttgatgttatgacattaaaaaatagagttctctctttcagtatcagtgtaaaactgtaatgttattatttgtgattggatttgtctgtagtaatcctgatccaataattaataattattgttttgaattttttttttatcgtacttgtattttgtggtcaagaacaaacacgaaaaataatttaagtgtagcagagatgatcatgttgggttggatgtgtggtaagattagacaggataggattagaaatgacaacattagagagttgaggtagcgcctatagtagaaatgatggtggaaactaaggaggttagatcacatgaagagtagtcaaattactagaggcagaagaagacttacaaaaactatgaaagaaactattgagaaagatctagagtttaataagttggatagagatatgatggattattatggttttgtttgatccatatagccaacaccacttagtgggataatgtttggtttgtgttgttgttgcacttgtattttgtgccctttttgtgtgatgtgattcaagttttcttttaatgtactcttggtatctatctagagtgtaaatggggattagttttaaatctacacagctttttctttgctatgaaactgatatttgtgttaaaaggaaactattgtgtatttattggcaagcactgtccattattaatttgctctcatggatatcaggaggccgtatattcctcctgcacgggataaat

SEQ ID NO: 35387 - DNA, 678 bp, Medicago truncatula
  Intron number 4 from transcript Medtr7g105800.1 (locus Med tr7g105800) derived from phytozome v7.0 (chr-ID MtChr7; po s 24326050 to 24326727)
tagtcagttatattttacttgccactgcagtaatgttttttatttatttatttatttatttattgaagctagtgcagcactgctaaatattacagcatttacatatttttattttcttttacattagatgataacttttgatgacaaatgacttgtttctactttctatatatggttatcattttaatggttactttgaaagtttttctaaatatccttatcatgtttgtttcattgtttagccacaaggaagagttttaaatttctcttcattcacattttaatatattaccttgcaaaatgctaacaagggtatttgttaagcatcaaagacattgtgatcaaacaattagctcacttaaaaatgctataactatttataaatcttttaggattcaacattattttataaattatgatcaaacaattagattgcttaaaaatgctaacttgagtatttgttaagggatcaactatggtaaaagtatcttgaaaattgtgtagttattttctttaaagtctaaaaagttgtgtacttaacgtgatccaagtttatccaaaattcaaaccatcattttcctgttttattagttagtcacaatggttagtttttgaagaagtcacttggttgtacgattttcttcatctttgtggtactaggttggagacttgacataa

SEQ ID NO: 35388 - DNA, 470 bp, Medicago truncatula
  Intron number 1 from transcript Medtr7g139210.1 (locus Med tr7g139210) derived from phytozome v7.0 (chr-ID MtChr7; po s 33243630 to 33244099)
attcagagaaggaggcatatttggttttccacaatgtaatcctatcacatgtagctgcagtatatatttataaaactaaataccaggtactctttagtttattacatcctagacattaaaaaattccaacttcaaatctactaaaacaaacttcttcacaagtgttaatgataagggtgagaaagggatctcaccttaaaatgaaagaatcaattggaaacactgattcaaactgtgatgaacgatatatgcagaccgagcaagatagtaaaattggcattatcaggcactcgtaacctttcaatgctaaacaagttggccacggaaaagagaaggataattcaccctaaactggtaaccttttcttcaacaaatgaccattttatgtttttgatcgactgaggcacacagctaacaagctcattctctgagtatgcatttaatgattaactataatccaaagcagcatc

SEQ ID NO: 35389 - DNA, 287 bp, Medicago truncatula
  Intron number 1 from transcript Medtr8g145120.1 (locus Med tr8g145120) derived from phytozome v7.0 (chr-ID MtChr8; po s 35212517 to 35212803 reverse strand)
gttgctgcactgtatgtaacaactaactgctctctcttctcttcgaatctatctttttaatctcactttctaacaccccttttccttcttttttcctttttcacattcaaaatccaatttttcatgattttttagttatgggtcaaaacggaatgaatacaatggtgaatctcaaatttatgatgatagcatgattagtttattataattgagacagactttgatttgaataatatatattttttgttgcagaatcaattcctgatctgcttgctgcttacaatact

SEQ ID NO: 35390 - DNA, 295 bp, Medicago truncatula
  Intron number 1 from transcript Medtr8g129620.1 (locus Med tr8g129620) derived from phytozome v7.0 (chr-ID MtChr8; po s 30698288 to 30698582 reverse strand)
ctatctgtaatggtatgttctctctctgtttctcattttgtttttctttcttttctgtttaagaggcgcgtggatcaaataccgtactttatgcttcttttgggtcaattaatgaactgctccatataccgtagtacttgtttaatgttccttttcattttcattttcattttcatttttgggtacactcaattttcataaactttataacaacctgtagaaactaatttaagttgggtgttaactatgtattactaaaggcaaccgaagggaagaagcagcccaaaattgttct

SEQ ID NO: 35391 - DNA, 983 bp, Medicago truncatula
  Intron number 2 from transcript Medtr8g120980.1 (locus Med tr8g120980) derived from phytozome v7.0 (chr-ID MtChr8; po s 27873775 to 27874757)
cattggtaatatgccaatattaaatttactgatttaactaaacaaccgaaatattatattttctcattgtctactaccaactatcaatggtggatggcagttcaaggtggacagcctaaattctgccataataatatggttgatgacgttgctacccatggtgtaagcgtggcggtcataataaataaacacacacacacacataccaaaaaatctgtggagtatagtttaaaaaacaaaaaatcaacagaagtggataaacgaaagggtaggaagtgtgatatactcaaatcaaaagcgtactagttgaacaaaaacagaaccatgagagcaaaatgaagataacaaaatgctcaaataaaaattggaccggtggagggaaaaaaacaaaataacaaaccataaaaacatatttaagataacagaaagaagagaacagagtgacaaagataaggaaataacagaagtgtttttttttaagatcatgaagaaaatgagaggttagtttaaagtagatggaagattgaggcttaagagttctgatggagagtggaggctgaaggctttcatgaggctactgctggttgacagtgtaagcaccttagggtttgtatgggtcacattgattttaggttggctttcatgaatctagaagaaaaaaaattgcgtcaagactaaaatacccttgtgaaaaagtaaaacatcacattaattggactagttgaaagtagtagttgtagagtagtctggtggatagactatttaaataaatgagggtatcattgaaagaaaaatattgtcttgtattttttgaagtattgtcttagtattttgaagtaacatataatttgaaacagcaagatattcttcacatgacccttataatgagacggagggagtaattactactcttgtataaatataaattatatcagctctttatttattttcagtgtttcattaaatatctgcaggcactgcaa

SEQ ID NO: 35392 - DNA, 766 bp, Medicago truncatula
  Intron number 1 from transcript Medtr7g143050.1 (locus Med tr7g143050) derived from phytozome v7.0 (chr-ID MtChr7; po s 34261517 to 34262282 reverse strand)
agttcctgcgttcttgaattcatcatccacttcaggtcacgatcatactaccatttcacttcactcagtgttaaattttcgatttagttttcagattgcgattaattactcaatttaatcactaattataaaaaattgcactgtctgaataatgcgtttattttttggttacttcactcagtgttcagttttttttttctttcttctttctattaagctatcagattgcgcttaattactcaatttcattgctaattagaaaaaaatgcactgtctaaatgcatgcatctatgttttgttcactttacttagtgtttggtttcaatttagttatcagcttacgattaattactctatttgatttcgaattagaaaaaattgcactgtcttaatgcatctatgttttggtcacttcacttagtgtttcattgtcgatgtccattttgctatctgattgcgtttaattacttaatttgattgttaattaggaaaaaatgcactctctcaatgcatctatgttttggttacttcacatagtgcctcgtttcaaatttcaattaagctatcatattgcgattaactactctattggattgctaattagaaaaaattgtactgtcttaatgcatctatgtttcggtctctttaattattgatttgtttcaatttagttatcaaattgcgattaattactcagttccattgctagttactaattagaaaaaaattgaactgtctgaataatgcgtttgctttgtttttgtag

SEQ ID NO: 35393 - DNA, 681 bp, Medicago truncatula
  Intron number 1 from transcript Medtr8g044460.1 (locus Med tr8g044460) derived from phytozome v7.0 (chr-ID MtChr8; po s 9969630 to 9970310 reverse strand)
attgtgtgtcgatctcacgggtatgttccattgacatcctgttttgtactaccgctattgttgccattaacacgacacccttaagtaccattttgcattagatttctgcagaaagagtaaatcccctaatctaggtgtatatcttcaatcattaagtcattctgtgacaatttcaaggatcaaattgacaaacttgaaaagattaattgaatatcttcaatcatattcggcatttgtgaccatttctagagttaacttggctaactttataagactaatactgtgtttgacgattttaaattgtgatcattctgaaattgggttaatgtcagaaaccaaattaccctatcttacaatttcaataactaagttggtgattcccttaaaataaaacattaggaatggaacctaaaactttccatagttggattttgtttgcgctctcttgaatcttttatgcaaatcaaaacataattttagcatttattagttacttttattttcctcgttgtttagttagatagaagactgtattctttacacttgatgattcccaaatctcatgtttgctcatcttcacaattataatttggctaattgaatcttctagataaatattcattcaattcagttctgtttttaacagggaaagggtactctgaagcagcaattagctaacat

SEQ ID NO: 35394 - DNA, 839 bp, Medicago truncatula
  Intron number 4 from transcript Medtr8g073400.1 (locus Med tr8g073400) derived from phytozome v7.0 (chr-ID MtChr8; po s 14311608 to 14312446)
gttgtaacagctcaataatttattggtggaagtatgtttgaacaacttatgttcaacttctcttattccattagtacatacatgataaatagaacaatataggataatctttcaataagaataaggctaggttagactcctatgtgcatgtattatagaaaagtctcattggctgcatacatgtgtttgtaatgttaatgagctagtagtcactatcatggttctgaattgtggttatgtgtaatgttaatgaacttgatgttgcagcaaaatgcgagcaaatgcaaccgcaattgctgttgtgaagtcgttgtagagacctctaaaacatttatattgcatcttcaatagcagttgctgcaatttagaacttctctgagcattgactcattgactacatgtatgtgtgtgtaatgtgtgtgagctagtattcaccaaatggttctaaattatggtcgtgattgtggttatgctgcaaatcttgatgttttggtgcagctgcaataccgttgaagagatatcttaaatcttaagatattgtaggtataattgctgttgcggactgcaatttagaattatggtaaccaataatgtaaaacattcttgtaacaatggcacatcaaatgtttacatgaaaaagacatcatggaaatgaatttgaaatccctaaggaagcatataggtcttgtgcaataagaaccaacattatttgcaacatcagttttcaaaaacattctttatggaaaagaagaatttgaatcagaagtgattaaagttgctaaactagccaatgttcatgattagattggtgcacttcttgaagggtactcaacaaaagc

SEQ ID NO: 35395 - DNA, 463 bp, Medicago truncatula
  Intron number 1 from transcript Medtr8g011690.1 (locus Med tr8g011690) derived from phytozome v7.0 (chr-ID MtChr8; po s 1622387 to 1622849)
ttgacttgtattttggtctagtccccaatacttttgtatctttattttctttttatttaataatatttatagagtattgcaaattatatatgatagccaaaacgtgtcaacatagttaggatgccttagtttgtcataagatgctattgcatttttttttttttgtttttttaaaattgaaataagagtctgactagaaattttcacaagtagtcttcttgtgttgagttctaactggtggatggacattagttttgactttatcatattgctagaccatatattagtttggattttgttatctttttttatcatttgagtctcttcaatattttcatttggtcgaaaaaagttttttcaatagaggactataattaagaggctcaagagtttggagcttatttgacaattctagttctaattgctggatagttgtgaagatttgtccattgtttgacttgga

SEQ ID NO: 35396 - DNA, 836 bp, Medicago truncatula
  Intron number 1 from transcript Medtr8g139630.1 (locus Med tr8g139630) derived from phytozome v7.0 (chr-ID MtChr8; po s 34117526 to 34118361 reverse strand)
gtttctgctaagtggcattacctttctgcctttgtgtaagttcttgtttccttcttaattatgatgcttaattttgtgtaaaaataaaggaaaataaccacaatacttaggttgctttattattatctatagatattcttttataaacgtattggatggatatccgtgttccattaaaaatatgacaatggatgggattgaattggattttttagaaaaattttaatggattaatatattatttttatccaatcaaatccatcaaatctagtcattttgccatctttagatttcctattcgaaggaatgaccgtattagatgctcattcttaactgccagaatatgtatagtttatgagttactcaaacttttatgggtgaatatatatctttttacttagtatcaatgtgtagttagtttgagtgagagtaaacaattgtgtgctgttcatttatttaatatcaaactagatagatatctatgaaagatggacagcccaactgatttaaactaagggattaggagttgatggttctgcatttaaatccgaagaaagaaaaaagaaactaattattaatatctttcatttaaaaaaaaaaaaactaaatatacacacttattatgaagtgggagttaaaaaacaaactggtacacttattgtgaagtgggagttttaggtgtttatgaaaatggtgtactgtatgtggtagaatcacacttgacacaagactaattgaaaatccaaaatttacatgtttgtttgtttagttatttatttcagtagtgactaagaataattttttttttacatgtacaagttactttctggtggcaa

SEQ ID NO: 35397 - DNA, 909 bp, Medicago truncatula
  Intron number 1 from transcript Medtr8g106600.1 (locus Med tr8g106600) derived from phytozome v7.0 (chr-ID MtChr8; po s 23946229 to 23947137 reverse strand)
cttagccaacttgttgagcaatctctttccccgatgtcataaaaggaatattgtgattctgtgtgtttgttttaagagaaataggcaagagagagtaagagaagagagaaagagaagttataaatttctcttgtttgattagaagagaaatagggaaaagagatacaaaatagatggaccacacaaattttttatttcttcgctcaattgcgaagaaatgctcttccttttttacatgttcattatactctttttccaacaactcgatgtaagcaaatttttatgtgtttaatttgctggtatcgaatattgatcccatttttagtgacaaattataagagactaatccacaaatctttaatatttaagcaacttccgacgacaattgagaattttcagatgcattttttttttttgttgcagtcatgtgagtcaatctttctttgtttctttctaacctatcatagatttaggtcatttgagcttattattagactaatcctcaaatcttatcggaatatttgatctttttataccgaagctaaactacctataaattgatgattcaatgagcgaatcatgattcttttcttagaagagagtgacataatcaattctctctcaagatagtgctagtaactgcattcaatttttatatatcatatcctatcatatctatattatatttttgagcaaacataatatgtagaataaactcgaagtcaagttgtggatatgttttggaatcaacctgaattttttttgctccttgtttagaattaactcgaacttaaagactcttaattaaattaccttgacgattaaatggatttttatctcatatgaaaatgaccatattactcctttgttgaagtttcaaaacacagaactacattccctatccgctgt

SEQ ID NO: 35398 - DNA, 636 bp, Medicago truncatula
  Intron number 3 from transcript Medtr8g088380.1 (locus Med tr8g088380) derived from phytozome v7.0 (chr-ID MtChr8; po s 18699836 to 18700471)
aaacaggctgatctgggacatagacccatcacaaggtgaggatgatgcaatttcttgttttgtttttgttgttgttgggaaacatttgatcaaaattggtgtcaattttgaaatttaatgtcatggaccatgttactttattgtcaagtgaaattataggattttcaatttcaaacatgtagattgatgctggttgaggatgatgcattgtttttgctttgtttttgttcttgttaagaattatgtgatcaaaactggtgttaaattttgaaattgaatgtcatggaatggtaccttatgtcgaatgaaattatggtgttttcaattgtagattggtgcagattaaggatgagactttttagtgatttttgtttatgttttcttttgttgttgttaggaaatatgtaataaaattgttgcaaaattttgaaatttaatgccatagaccatggtactgaattgtcaaatgaaattatgttgttttcaatttcaaactagttgattgatgctgatttttggggtgctttcatttcttgtccccatgatttatgtaatgaaaggaagaattaatgaaactttatgttgatctattgttaattaggaggtttgctgcacaaattgctggctcacagcaat

SEQ ID NO: 35399 - DNA, 618 bp, Medicago truncatula
  Intron number 1 from transcript Medtr8g012950.1 (locus Med tr8g012950) derived from phytozome v7.0 (chr-ID MtChr8; po s 2307682 to 2308299)
aaggttagaacaattttttcttaataattgttccataattttttttagcaacatagaatcacatgtttcgtttaatagataacacttcattgttgtcagcattgtgctcaatttttttttcctattcattttgcatcattgcacaaaacatggatctcaaagcttagtatgaacccttaccctagcaacaattctgactgttcgacgattgacaaataggctccttatcttgattcgatgatagacgaataggttccaattttgactgttctttacaattttagttttggcttgttttttcctctctatttgtttgattttatttttgcttcaattgattctgtctttaatcctgattcattatttttcttcttccattcttgtatttttttttctattctcactgtaatgtaatctgacttcatgtcgctgaaatattcatttcatttttttttttttaattcagttcttagatttcgtttaaatgagatttgtttcttcttctgagttcgtattcttttgcagccacaaataaatattttaaacaactatgagtaaaaactgcatggagacacacatgcagagcattcaaacttctgcaacgtaccaaatctcgtt

SEQ ID NO: 35400 - DNA, 999 bp, Medicago truncatula
  Intron number 1 from transcript Medtr8g140110.1 (locus Med tr8g140110) derived from phytozome v7.0 (chr-ID MtChr8; po s 34327083 to 34328081 reverse strand)
ttgaattcttgtcaagccaaactgttgttgatgtatgatatgaaacctctcttagttttttttttcttttctttctagctctcactgtgattgcagtcatagactcatagttgatattgtgaatgactgtggacaaacgggtctgatgctgccaaattatggctgtggtgtggttatgaagaaaaatctttacattttggccacaattatggttttggactgcaatttaattttgctgagcatttagataataaccttcctaggttgaattattttttgtaatgtttgttattatctacttattagaaatcgtatcatctatgaatggtatacaagttgcaattgaagactttgacttgaaaatcagaataaaactgatgttttctgtgtgcaattatgttaatggtttatggttattcggtattgtcaaataaactgtaaagacttttcttatagaagagctctacaccaagcgaaataccattccatttttacttttataattgatatatatatccccatggggtaatatacaaacatcggttaggttccttgtttagcataactatggttcatttaccaggtagttgtgcaaatgtaattgaaataagagagtgcaagaaaaattgtttgtcacaatcatatgggtgtgacgtaagtttatccaaagtccatctgttaattaggtctatccatttatcatttgtattaacttttggaatcatctgaatcttaattctaaatagcatatgatgaaaaaatgccaattgccaattcgtttaattggaagttatttgttcagtagagaaatgtaaaaacttgccctgcttgctgctggtcatccctaacccgttgcaatactgtagaaactgatttcgatgtttacttccctgttgcattactgtgtagaattttaactctggcaggactccccttcttatcttgataaatatgtgttttatttgattctgtaggcagctagatatacagatcctcgtg

SEQ ID NO: 35401 - DNA, 503 bp, Medicago truncatula
  Intron number 1 from transcript Medtr8g093580.1 (locus Med tr8g093580) derived from phytozome v7.0 (chr-ID MtChr8; po s 20607746 to 20608248)
ttcggtttgattgtaaggttgttgtttagtggcatttgatcctcatctcgtccataaataaggaactaagttggactgaaaaattaaaactaggttgacatgaaacattgacgtagtattctttcaaaattaggtaaatgtagacaaaaattgaaataaaattttaaccactgtaaaatattcctatgataatattctgtaaaaaaataatgataaattaacactttttttaaagaattaagtcacgcatttctttgcaggttttattaggttctcatttttttgttttttcacctgtttttcttggttcatggatcctatcaagaagatgataagggctcctcggatctcccaagaatcacataccagtgattcaaaacaaactgaataaatatatgcctagcatttgtatttgagaactttaagattcaggcctatagttcaagcatgcaaagtagggaggaaccctttgcagggggctttagccatttctttggctcttc

SEQ ID NO: 35402 - DNA, 426 bp, Medicago truncatula
  Intron number 1 from transcript Medtr8g089740.1 (locus Med tr8g089740) derived from phytozome v7.0 (chr-ID MtChr8; po s 19348932 to 19349357 reverse strand)
aggtagtataaaaaaaaacctaatgggtgctactttttccatatcctctatttttgctttttcacctttccattttctttgactatgcttttcaccttgtctgttgttcccttatttattttttaaatatgaaatatgaaaaatattttgatattttgtagtagaaacctttctattatatattcaaatcatggtcatattgttcttgtcatcgtccccatcctcatgagcatcatcatagtctccctttcctagagtaaacttaaaaaataattaaaccaatagaatcaatgacattaggttaaccaaactaattataaaacaaagaatgaattaatttcaaaaagctattgttctacttttggtaccaaattaaacaagctgatctgctgctgatgcaaaactttattaaagaatgaagagtgc

SEQ ID NO: 35403 - DNA, 565 bp, Medicago truncatula
  Intron number 1 from transcript Medtr8g026370.1 (locus Med tr8g026370) derived from phytozome v7.0 (chr-ID MtChr8; po s 5628123 to 5628687)
agttttttttgagaaatctttttcattgtttgttggtgtgttgctgaaaatcgaagatgcacccatatccatagaagtgatagagaaatatgaagtatgatcttgccattagttatcagctataaattataagttatcagctaacttaatagttatatgttatttttatcaaacaaaacatatattattgtaagggacatgattgtctttttttagttatttcaggaatctaattgtctatttttaaatgaaagagagaaaataattaaattgacattgtacatatgaaggtgttctattccacatataaattttaagccttttaatcaatatttgtgttctaataatgttatgttatttctcaaaatattttaacattgaatataaacaaaaaaaactatagggtccattttcaagaaattcaaaatattacaaatatcaacaaaataaacaaatcgcaggaatccgaagaaatacctgcggaatttcctaaggaaacgtagaaataatattggataataattccgcaggaaaattctcagcgatataatagttacctgcggat

SEQ ID NO: 35404 - DNA, 718 bp, Medicago truncatula
  Intron number 2 from transcript Medtr8g137680.1 (locus Med tr8g137680) derived from phytozome v7.0 (chr-ID MtChr8; po s 33037228 to 33037945)
ctcgtaaccctaaggtagtaataacatgtcacttgatttgtcttctgaattaattgttttcattaaagattcgcattatgaattaagtgtatgttcggttccacttctggtggagaaaaaattgattctagaggtgtagaattgattttgacatgcttgggtgatgtttattagatttgcttttgccatacattttttagcttttgacttcaaatgcgagtttttacacacttttcaacatttttacgaggacgtatccaaacatagaccactttgcattcaactcacttttaactaaaatcaactcatttaaaatcaatttttgtcaccacggaacaaacatgcacttggatgaattgaatagttttgaaaattgaaattacggttcttcaatttttggtagctgaaatcagtatttgcaaaagcttcttctggtgtcctttgtataactttgtaagtttatgctagcaacatactctatatctaattgctgaaatttcatttgagtcccacgaaatcatgtacataccatataaatttaatgggacccatttgaatttcaatcaattagaaagtgtattgatagcaccctcaacttcaaaatattcaatctcaagaagtttactccatatatgataaagcaactatatttccttcagataaattggtattaacttctaaagcttcttatctatccgttatcagtgcatgcaggaca

SEQ ID NO: 35405 - DNA, 648 bp, Medicago truncatula
  Intron number 2 from transcript Medtr8g136980.1 (locus Med tr8g136980) derived from phytozome v7.0 (chr-ID MtChr8; po s 32746062 to 32746709 reverse strand)
cataataacttttgcctccggggggtgtcagattatactaaattatttttagtttagttgataatatatttacttctattatgaagttagttattccgtcctattttattttttctagtattcttgctagttagttgcataatgtatatactactatttaattttataaaaaaaaaataaataaaaaaataaaaaaaactgggaaaagtaaattactaataattaaagtggacgaacggtcattttacaataatatttgagggaatttgaacttcgtctcataagattataatatcaaattcttgtaagtgaattgacacttcatggactttttctttgaaaaattggagaataggaccaaaaaaaaaattaacagtctaaattggcaatagggaaggtgtcttcaaaatcaaaagaatttgaatcatgtctcttgaagttattagaccaaactcttaccattgagttgacactcatagataattgcatcatgtatataaagaatactttggctcgatagaatctgagttcatctttttcttattcttcttctcacacaacattttatgtatgatctacattgtatgtgtgatatgttaaaatgcaatgtaaaatatttatataaaaagtatctcaacttaagtcttg

SEQ ID NO: 35406 - DNA, 770 bp, Medicago truncatula
  Intron number 1 from transcript Medtr7g089670.1 (locus Med tr7g089670) derived from phytozome v7.0 (chr-ID MtChr7; po s 19804368 to 19805137 reverse strand)
aatctgacttcaatagggagcttggtgtgtttcaggtatgcgtttttgtctctcagatttcattgaattacacatgtgagttgtgatatggtttttgaatgaatttgtcctttttagtgccaatataatgaggggagaatgcaattttgtgtaaaatgccaacaaccatcagggaagatgttcttgttataataaatttcctttttttagggagttatctttagacatgcagggagatacatatgttttagattccttggacatgcttgatttcatgcaatttattacataattattgtttgtcattaattcgtaggtcctgaatgctgataattatcctagctcagccctactgagtccttagtaatgtgtcaagggaactatcttatgattctgttaataataactatgccattaacttccattttctttattagtgtgtcaaccttcttaatgtgtgtttggttatgcggttacaaaaattgattttgaagcaaaggtgagttgaatacataaaagtgagttgaactaattgaagttaaaatttggagcttttgcctctagaattgatgaatcaattggatatgattattttaaagtcttgtttcaaattgtgtaacaaggagaatatagaaggtaaaaagaaacaaaaacaaatatgtgatcaatgattacaatacaacaaacatggataaacttgacccagcttctttttccttaagagttaataagatttgttttacagttgacagcagagctcctatcagtaa

SEQ ID NO: 35407 - DNA, 689 bp, Medicago truncatula
  Intron number 1 from transcript Medtr8g081930.1 (locus Med tr8g081930) derived from phytozome v7.0 (chr-ID MtChr8; po s 16964262 to 16964950 reverse strand)
gctggtaggttgagaccatcaatcaagatccatcataattcagaagaagaaaaaaaacaccatcctaccagccatagaatttaatataatatcaacaaagcaatacaaagccaccatcataatatctatatatttgaacaaaacctgtgagaaaaagtaatcatatgcaaacatatattcactttagattcaagcataaacaaaaatatagatagatcatatttagtggactcaaatttaagaaaaaaaaaatcatatttagtggactcaagtataagaaaatcaaattctaactaacttcatcatatttaatgtttttattctaaaaatatcattcaaattttttcggtgaactcgtttaattaatgctctcataaaacaattcttagagaaaactaattaagagaaattgtagtttggagaatattagcactttttattaggaaaatgtttcataaacacatcaatagatagcacttttagtataagtaaaagtaatgcataaatgtgataagaataaattgatagaaagaaaataatgtgttgaatgtgtgttggaaaaaattaaagaaaatcgttgttgtttttaaacaaaaacacattttttaattatatgtgtatcattatttttacttatactaatgtttttgtatttaatttgcagcacaaacatattggggtggactgtc

SEQ ID NO: 35408 - DNA, 632 bp, Medicago truncatula
  Intron number 2 from transcript Medtr8g128280.1 (locus Med tr8g128280) derived from phytozome v7.0 (chr-ID MtChr8; po s 29935169 to 29935800)
tgagcaggctggggattacggtttagcagctcacggttgggtctcttgggtatgctctagtgttcagattgctactactggggagtttgtgttttttctgttaagtggcggggtgctgttagcgcctcagcggtcttctcccatttccttttggctgcttttttttgtgtttgattaaattttttttaaaagaatttatgtagtgtttgatgttacgcgtctataagcggcatcagtgtatttatgtagtaagtgcgtcttgtacaagtttgctttaataaaattagccgtttaaaatattaaatattaaatattgcgtaataaagatatcctacgcttaactttgaattattcgaattcaaatgcgacatataagatcaaatcatttctcaaaaaaagaaagatcaaatcattatgcacgacccaatcaatggatcaagttacacactcttatactccattcttttttggagagttccattcaactatttgttggtccttgcatatttttttcatacacataggtccaatctccaaatctttttgttaaggttagagattgaacttctaaaccaaattatcaacacttaggcctgcatatgttatggtgtacggatgagttggaggaaaac

SEQ ID NO: 35409 - DNA, 906 bp, Medicago truncatula
  Intron number 1 from transcript Medtr8g026400.1 (locus Med tr8g026400) derived from phytozome v7.0 (chr-ID MtChr8; po s 5636459 to 5637364 reverse strand)
ccaaaattgtgcctgaaattcaccatagtacactgtactatttaatccttatctgccaaaatcgtggcctgaaattcaccacagtatataatacaagttaagttttttttttttttttttaaacaattgaatagatcttcatattaaaaaattgtaattagttcctaagtgttcgattaataataattactccctccacccttcgaaattataagaaaaaaatcattttatattcattaaaaaaactaaaacataataatttagatatagtttttgggttctttttgaaatagatttcatagaaagatgtaaaaataattttttttttttacaaaaaataattttatttgttattggttgtagaaaacaattttgcttataatttaggaaaaaattagtttttaacttagatttacactccaaaatcacaccattttattaagggttttgctaacaaaccgttataaagacacttgtttagtatttaaaaataaaatcaattgataatatttttcatgtaggaaaaaagttgttttttgaagtttcaatatattgaatacataaattccaagataaaatttccatttttccctaaaggcatttctcttttattaactctggaaaggtcagttgaacatcaaaatcatcataagcagtataattaaacctccataaagtaatcaaagcttatttccattcaattctatttcaagcatttaaacaaaaaaaattatagattaaaaggaactataataatcaaggacaataatgtataatcacttaagtgtcatagttaaattgttaaaagttatatatccataatcaaattgaagaacatgtaattttttttctagcttcataatgagttgagggccacgtaattcttcctgctactggtattgaagc

SEQ ID NO: 35410 - DNA, 700 bp, Medicago truncatula
  Intron number 1 from transcript Medtr8g073640.1 (locus Med tr8g073640) derived from phytozome v7.0 (chr-ID MtChr8; po s 14429371 to 14430070)
gcgttcatcatcgaatctgcttggcaggttcgttcgttttctctactctcttccttatttccaaattattacatgcattttatttttatcataaacaatcttacttattgttattattattctctgttttttcttgattattcattttgatgtaatggaattggattattttattattctgattttcacttcattcttgtccaaattctgcagacgaattaagcagattcacttgataccaattttcactaaattcattttccatttctttgattattccctgttttcttgcatgttcttttgtatatatattccagtagattgtttggttgaagagtacctgagttaaaatcagtcatgttaagcgcaaatcatagaaaataatggtttatgaagcacaaacacggacaccaaacacgacacacacacgccacaccgataataatttgagaaaataagataattcaatgcaatcatatatgtcattaatagtgccaatatttaacaacaatttgtacatgcatacaattaattgacagcattggttagaaacttagaattgaattggctatttatgttagaataaaaatgatgtttgttcgtttttgtactcaaattttagttagatatataattatctgtttctttttggttttttggtgcagtacttgatcacaaatttcagtgactttcaattggc

SEQ ID NO: 35411 - DNA, 842 bp, Medicago truncatula
  Intron number 2 from transcript Medtr8g073640.1 (locus Med tr8g073640) derived from phytozome v7.0 (chr-ID MtChr8; po s 14430152 to 14430993)
gctctcaaagtacaaaattcaggtttacccattttcaatttcattgccttcttaaactttattattgttatttttgtatttcaatctagattaagttagggatgtcaatcatagattttggaaaataacggtttgttcaaattccactatgctacaatgatatagcgcaggtatttgacaacacttagtattaaatatcctattgttgaacgatagcgatttgctcaaattacgctatgctatagcagttatttgacaatactggattagccactttatgttttcttccccatatttccttttaaaggacttgtggcatgtttgaaggacacacttatcgtcatgcttttataatcattagagcaattccatttacttgatatcaatcattcaacttttccttgtcttctgtgttttactaaaacgattttaaacgatgtgtcatggtatttaaaagcgaaaattatagtggattttcctttttaaacagtaatagatgtttttgtaatcctgcaaaacatatcaatttatttacatcaacgtagcaaccaattttatataaaatgttatatagcaatattttgaactcgtgcatcctgtttctgcttgtgtttgagatctggtgtgttggtcatcattcccatctctcttggtccttttcctacaccagcatatattatatatgagtattgctcctgtagcttaattttttttccagtcatccatcaatttagagcatagtatcatcatactatgagtatagtatgatcaatatgtaagattagattgctaattctcactttcatgtaggcaaaaactaacagccgtgaatctgaggagag

SEQ ID NO: 35412 - DNA, 682 bp, Medicago truncatula
  Intron number 1 from transcript Medtr7g081200.1 (locus Med tr7g081200) derived from phytozome v7.0 (chr-ID MtChr7; po s 17529339 to 17530020)
atccaggtcaggaataagcctttctattttgaaaatcttaggacttcatttccttataaacaaattaaaggctaaattacaccaaaaagtcttttaagttatttaattataataacaagttagtcctttaagtatttttcataccacttaggtcatttaagtacttttcataccacttaggtcctttaagttgtttaattgtaactttaaaacaacaaataacttacatttttaagatatgaaatcccccttattccctgtccctctctctaagttttccgctctgccctctctctaactttttcaaaccgacttccttcttctacctccccaaccaattcaaataattgagttgcaatgtagctctcctgtttagtggtgcgacgagtgactttcgtcctccacatcaccattttgccatcctttccaacagtcggttattaatgtgtgactttggcctcttttgatgtggattggtttcaaaaacctgaaagggtatgactctgctaatctgaaagggtctggttattaacgtattgaactcatccctcgatctgagttcttacgatgtctgtttgaatctcgttgtgtttggtggcctgactacttcgactctctgatgttttcaagtatgttgagatctgcaggtttcaagttgtcgtgtctgcatacactttggttt

SEQ ID NO: 35413 - DNA, 1057 bp, Medicago truncatula
  Intron number 1 from transcript Medtr8g105630.1 (locus Med tr8g105630) derived from phytozome v7.0 (chr-ID MtChr8; po s 23373363 to 23374419)
cgtaacttctaggaactgtcaatcgctttctcagggtactctctgctgcacctctcccggactctaatgttttctttttcaaaattattcacacactgtgagttgctttcttgcttcttacgttcaacttttcatcaaattttccgcattcaaaatcaacttttcaagttaacaaataaataaaaaatcaattttttattctatttgtctgtttaatttaattgcaatttaattgatattatgcttattgatattgctgcattataccatgttaagttattgcgacgtttgtcctactggtgatgctgttatatcttgtatgaagtgttgttagcaattttagtagttacagaaatgtagtataactaatttacaaaataaataaacagagaatttagacttaataaaacatggttgtaacgaagatgccggaaggttattgtatacacttgggtccaacttggataaaactaagggcttgtagcataagtttttttttttttaatttttttttttttttatcatacaagtgtttatgtaaaaactattttgataacaaaggataaaataaagtcaaatggttcttatataagctataagctgctctaataagccattttggagatcttttgataataagctgaaaatagcttatgcacatgtcataagctctcccaaagagtctcacaaacacttattatagtagataagctcatagaccctagatccgtgtggcccttagtttgtagaatattatcttgtttttcaattttcaattcgttacctttcacctgtatactttgcaaagccattggaaactctattgattgatagcataatctcaatacattgagtcttccagagcctcctttggtcttgttgtctcttcgggtttctaggcacgtgtaggttggttttgtgggggaaaaaataaaattatttggcggctgtgagtacaaagtgaaagactaactggaaaatttggttcctgcaggcacatagttaattgggagtatgcggaaccagccaattaaggccttcttcttcgttatcaagt

SEQ ID NO: 35414 - DNA, 878 bp, Medicago truncatula
  Intron number 1 from transcript Medtr8g132850.1 (locus Med tr8g132850) derived from phytozome v7.0 (chr-ID MtChr8; po s 31482681 to 31483558)
aaatcatcatcgtcgccgacaccatcaccgcagcggttaccgtttgattgcggtggttgaattggagtttgcttaatctagatttagatttatgtttatatgattttgtatatggttttgtaaattaatcagtgatataaaagtagtttaaaatttgcatgactattcaaatttgttatggtgattatgaacggcggcggtctctctcactggtggtggtgattgacgagctggagaagaaaggttgcgattcggtggtggattaggacggcgggttggtgactgatgtcgacggctgaaaaatgcggtggtaaggtctgaactgtgtttacagttcagagatgggagagaaaaaagaggaagacgataaagaggggttgcagctgaaaaatcaattatacccctagattttattggaaattacgagtttgcccctgatgtcatttttgtgtcaaaaaatgtgtgtttatatatcattcctcgtttcttttgtgctgcgtattaacaagtcgtgtatttcttcgactcaacgaattggagatgcaactaaaatttatccattccttcggtgtataaatagacatctcatctcattaatatagttttgatgtataacatttataccacattcttctttaaaaaaaaagcatttatactccatttatacaccgatattggtaccattatattcatttaggaggcgtttgttttggggaaacacaaattattcccatgaataacatacatgggaatgaaaatatgaaaatttgattcatgagtatttattaaaataagtgtttggcaactaactaacttgacatttttaggaaaattggaagttacatttttttttttaatctaggcagaatatcgtggga

SEQ ID NO: 35415 - DNA, 940 bp, Medicago truncatula
  Intron number 2 from transcript Medtr7g118350.2 (locus Med tr7g118350) derived from phytozome v7.0 (chr-ID MtChr7; po s 27910777 to 27911716 reverse strand)
agcccaattggtaactgcaagtgcacgctatatatgttcgtgtattattctgctgttaaaaacataaaaatgcagtgtttgattttgatggatttatcatgattccatagtattaaactataactttagcattctgacattgtaaagtaaatatttcatttccttagttttgcactttattgaacaataagatagatacaatgattactgatgcaattgtggactctagattgataagtactgtaaaaaaagaaaagaagttgtaactaagtagtggtttgtgaaacattcagcatttctgagttattttgatagcatatgattagttgattttaaataagattatagggcacttatttagtacaaaatatgaccctaatcaacattttgattgaatttttgttgaatcttagacacacctgtcagcagtgactacatggaggcttggactaataatactatttttttctaatgaagagtttagtgaactctaagcatctcacacatatatatagtaattaattatgttccgggattcataaatcacattttgatttcggcttagagtgagtttttgtttttacagttcatatgctttttcaattatttgagagtagtccttaaagattttattcatctaaagaaattatccttatattccatgaaggattggccctgtagtttaacttgttaagatattagacctagagaaaacataacctaaatcaatgacaacaataaagtaccctcaaaaactctccatttgatggttgactatcatttatgggcgcttatacttgttcacagttctgccttttttaacaccatttgggttttactttatatgaatgtgtatatggctgaataatatatgcatgcttgaccattgagcgactgttatgcaggtatacgttggttccggcttctgtttatcttgggt

SEQ ID NO: 35416 - DNA, 981 bp, Medicago truncatula
  Intron number 1 from transcript Medtr8g118990.1 (locus Med tr8g118990) derived from phytozome v7.0 (chr-ID MtChr8; po s 26869068 to 26870048 reverse strand)
aaggagacagcttccaagtatctattgagtgtattgtttgtttctttctgcttccgtttcttacgttgtttttggttcttatttgtatgcatgcatgcatatccaatagaaaaaacgtgtcttgttttaatactggctttatgattgcaccacgacgatggcagcttttgcagaatatatgaatgttttttattgtgaaagcttgctgacttggtcaaaattaggtcaagtttaggagtattaattatgtattgtcattgaatggttttttttatgattcgattcaaaactacgtcctgcttaactaaaagtcaaataccgagaacagcaattcatgcaaatatgaggcatgaatatttaccacccaccatagcaaaatatttattacctacttgctgtaacacctaaacatcatcccttatgatctcaacttagcaccactcccaataaccagaccaatagaagtttcataatttaaccagcctccactacatctaagtgtttgaacttgtagtatattaacttgagaaattacatgagtttaattacacttttaattacccatcttgtctcgaatgcgagtaacaataatgcaaagccacttagactctgtttgaaaaaagaaaacaattcgtcaaattctttcaatatttcattttaaagacattttttatattttaaattttttttgaagaaaatttggtgtagttatagtcactccaaactttatagtagatcaatcctgcacatcattcattgttttttattttacttttggcttgtgataactataaacatttattttatggatcccaaaatcccacatttcaccatatgcaaaaactttaatgggtcactctctaaaacattgacctatgtttttgtgaagacacgatatgaataatcatgctctgagagcactatcagtggtgtcttttgaatttgtgtcaaccattgtcggttaggctactattattcgag

SEQ ID NO: 35417 - DNA, 950 bp, Medicago truncatula
  Intron number 2 from transcript Medtr7g130200.1 (locus Med tr7g130200) derived from phytozome v7.0 (chr-ID MtChr7; po s 30386896 to 30387845 reverse strand)
attttcacacgtgggaattcttcaactctatcaaggttacattacatgtcttttctctaatcattactactttctgcatgttttttctacttgtcttaattatttattatcaaagtttggggttttcctctcaattttcgtaataaaccccattgttattgcttctgtcattacttcactttgttagtataattatatatcaaagtttgtttttttttatcactcactgtgaagttacttcgtatttcgttttctaattcgattttttatttttttaattgtttttttctttagtgtttaatcactataaagtggaaatttgatttacttttgaaattatcgttagctgtgaatgtctagtgccttttttgcgtgattggattttcagaaatcagaatgttctcttttatctctgtaaagattcacatccattttttttgtattctagcaacggaataattattttatttattggaaatatgtatgaattacattttctgcagtaatgcataaatatatttatcaattttctgatgtgagtaaaatatgaatttaattattatttttttgaaaaaataatatttttaatttaacatacaagattttcctttagttttgtttatgaatttgaattggttaccaattcacttattgtgattgaataaattgttgtgcttaatgctttgcaattgcaatgaggggcaagctatgtagtatccacacttcagattgaagacgtgttcagtgtccgacatatgcgtgtcttacacggacacaacatgaactttgataataatttgagaaaatgacataattcaatgtaatcacatgtgtttgtgttgtgttggtgtcactgacacgtgtcggacacgtgacataacttcaatcagaagtgtccgtgcaagaataatgaatgatgatattgctgctttaaattagaaaagcttgtt

SEQ ID NO: 35418 - DNA, 570 bp, Medicago truncatula
  Intron number 3 from transcript Medtr8g105240.2 (locus Med tr8g105240) derived from phytozome v7.0 (chr-ID MtChr8; po s 23191035 to 23191604)
tagagcaatctgatcttgttccagttgctgtcaaggtaatttaacttcctaaatttctactaatgaaattatttaccgttaattttcattaagtaaaaatgtcacacctaaatcacacaatgatatttgttagaatttgttaaatatattgtttaatgtaattacaagttagttatgattggttgcaagttggttatattagttgtcttaggatcactatataaagtgtatcctatggtcgtgtatcaagttttttcattctattaatttcaatttcaatttattcttctatttgttgggttctaccatacttttcaacaatgtttgtaaagcacaaaggccgcacgttggcgaaaaagttcaatatctctcaaagtttactttgaagttgatgaaattaactcaaagaaacattcacaaaatgactagcaaatttgatcaaattttgtaggaaatttttcagtctttactctttatttagttaaaattttgttttcgctagttgaagtgttactgaatctatgaggtaactagactcattttggtctcaggaaggttttcaataccacc

SEQ ID NO: 35419 - DNA, 568 bp, Medicago truncatula
  Intron number 1 from transcript Medtr7g139800.1 (locus Med tr7g139800) derived from phytozome v7.0 (chr-ID MtChr7; po s 33540476 to 33541043)
gaaggtatccatttttccagatttgatgatttttttttgtgttcttatgtgttccattatcatttatgaatcaaacacaccgggcacacttttaccggaaattcgacacagataataattttataaattgaatgtagttacatgtgtccaagttattttgatggtatatattgcagttttggtttgggatcggtcctgactgccgaagcatttctgtgatgtattatactacttgttgttgtgttgtctgtcgattttctgggtgagttgtaatggtttgatttgaggtttgttcgtgttaagagttaatttgtactcttaaagaattgatactttctgtcaagtagtcccttgagagaaaataaagtgccttgagcagtgaaataatgaaactgggcactttttttttttttttaaggaaagttcttatagcatatcattagtaagaagagtttcgatacaatcggatattttaaaatagacattggaactagctgcaaaatgcatgtgctgatgcgattcagaatttgtaggcagaattgcagtttgccggcttgctaaaccagtg

SEQ ID NO: 35420 - DNA, 716 bp, Medicago truncatula
  Intron number 1 from transcript Medtr8g109560.1 (locus Med tr8g109560) derived from phytozome v7.0 (chr-ID MtChr8; po s 24594442 to 24595157)
tgaaagtctcgaacaaatcaacgccgtttctgaaggtaataaattctccttttcattcttaatattcatgctatatgaatctgttatgtaataggggttgtttaactggtactggttttaatgttgtaaaaatatcattttttttaatgggtatagttttttatttttctgttgtaatgcatcaactaagttttgaacgttgtttatgaagctgtagttgttattgttattattgttattatgttgatgttgtaacttgaaactttgtttcaatatgcgtggttggatagacgctgtgtcattactagtgaactgaactcaaatgcgtttgtttcagctcaaaaatagattatgtgttaaaaaaaaagctatttctgtttgtttactactcatgaaaataactactttttttaaaagatggtttttaacttgttcatgtgttacgtttttgaagaaatatagattttgggaaaagctaatcctaatagccattcattttagagtcaaacaatttttttaatatcctaaataaacacccaaaaatgtcaaaggtgatattttttataaaagaaatagatttgttaaggaatttgtttttttttctgcgttgtttgtttggtttcgatatgttatgttttgagggaactcaagcttttgtttcgattttgtcagtttcttaagttgtttttgtttgttggtggtgatgtaaaggtatt

SEQ ID NO: 35421 - DNA, 749 bp, Medicago truncatula
  Intron number 1 from transcript Medtr7g092790.1 (locus Med tr7g092790) derived from phytozome v7.0 (chr-ID MtChr7; po s 20515131 to 20515879 reverse strand)
tgtatgcatttgtaccttgccgttttatgctattaacatagatgttgtgagtctgttcacatattcatccttttgtttttagcgaatttgcattatatcgatgtactctatcaatttgaatgaatgaatatcatttatttttataaaaaaaaaataaattaattgatgcacacatttctataaaaggaaatgcttttttttttttttttttatagaaaatcataaattcgcggaacatcacgacacaattgtttttttgtcaccgcatgaaagtgggagctgtttttttgttttttgtaacaacattttagcattcgggatatatttggaagacttttctcgggaactataacactactcttctacaaaatcttactattttaaactcttgaagagtgtcctaactccttaccattttccattagattaacacgttttcgttaagcaaactttttttaagcaaatgtgtgattttctccataaattaataatctataaaaatttattttcatgcttgatataataacatactatttaaaaaaaaaatatatatatatatatatatatatatatatatatatatatatatatatatatatatatatatattcccactacacaataccacatgattgagacacgctatttgatgccccgtccaatttaatttcaattttcttttaaccaatttttttttttttttttttcacgtagccttgtggctagaactcatacaatttaattgtgga

SEQ ID NO: 35422 - DNA, 261 bp, Medicago truncatula; identical to SEQ ID NO: 32252
  Intron number 2 from transcript Medtr8g005210.1 (locus Med tr8g005210) derived from phytozome v7.0 (chr-ID MtChr8; po s 127731 to 127991)

SEQ ID NO: 35423 - DNA, 291 bp, Medicago truncatula
  Intron number 2 from transcript Medtr8g122490.1 (locus Med tr8g122490) derived from phytozome v7.0 (chr-ID MtChr8; po s 28709245 to 28709535)
gcttttggtggttttgtgcaggtttcattttctgtcctcttgttttagccttataggattattagaattagttcttcttgattttggtgttaggtgggggtttctcatgtatacggtagtcatattcacatctgggtgtaccgcatatatacggcaccttgtatttatcttttaaaaaatataaatagaacattgctcttttaaaaaaaaaatacgttttgattttaatttatcactggtctcttttcactcccagagccgagcctccgaattctcagggacggccctgct

SEQ ID NO: 35424 - DNA, 741 bp, Medicago truncatula
  Intron number 2 from transcript Medtr8g016500.1 (locus Med tr8g016500) derived from phytozome v7.0 (chr-ID MtChr8; po s 3201982 to 3202722 reverse strand)
acaataatcccccaagaatcacatctttgtaagtttacaatcccttaaattaaccatatgcataaatttcaaaaactttaattatcctctgaaattatttggaaacacaaccaggaatttgtcttcaagtggattgacaggagagatatcatcttccatatcaaagctaactatgttacaatacttgtgagttcctaatcttatttcattaaagaaactaagaggagattacagtctgtttggaattgagggaaaaccttatttttattttctaaattaagaaaattataaaacgttttaaaaaaataaaccaagtgtgattgaaatgttttatgatcatttatcatgttattacttcttttttttccttttttttttttgtgttacccttcggattttcagggaaaaggtccctagtaatccgaagttggtctggagataagtaaagtttgacctaggaatcaaacttgttctcttgaatccttgaggagctcattaaccacttgatcccatcagcttgatttattacttcaactcttcaaaatatcaaatatataccaaaatatagattggacgttaggcttgccaacgaatagtctgtttcatttggttaaatgatgaaaccaaatccattcgaattggaaattattctctctttattggggattcaaatttgtaactctacatttaaattgttttctttcagggatttgtcaaacaatagcttaaacggtcctttac

SEQ ID NO: 35425 - DNA, 537 bp, Medicago truncatula
  Intron number 1 from transcript Medtr8g088750.1 (locus Med tr8g088750) derived from phytozome v7.0 (chr-ID MtChr8; po s 18907385 to 18907921 reverse strand)
gcttgttctcggtgtgtggtaaacaaaattttcattagtcatcacctagtttgcattctcttcatgccacattacccctttatacttttagttgtctcaatatattaggatgttggaaaaatttgggatccacaataatttgagttatagataagttagctatttggattttcaaattttcaaaagtgatggcaatgggattaatacgtgtgcatttataaaattgcattggtgcagagtatgtaccaacttagatctgtaacgtaactacataaggtatgaccacgtcaagattagtctttttcttaaggaacatcaagattagtctagtggtgaaggatttggataatatacataagatcttatatttaaaccttatagcctttaatatatacacaaaaacaaaacaaaaataaagatagtttttcgttttggtctatataaataattttggaaaaatttattgaaattattgtaaatttaatatagatcacttgaacaggggcgagccaccccagctagtctgggcacaggctc

SEQ ID NO: 35426 - DNA, 515 bp, Medicago truncatula
  Intron number 1 from transcript Medtr8g118820.1 (locus Med tr8g118820) derived from phytozome v7.0 (chr-ID MtChr8; po s 26807587 to 26808101)
tgctcatccaccttaattacgtgataaaagcatttgtaagctcttttttattacactagtaatctatctatattatacggtatctttttttgttgaagagtgtatatatattattttataaatttcattcgtaattattgtaaataaaaaatgaatttcatttgtatgagaatattgaaagaaaaaaaaaaatcaaaatctcacgttaaatatataaagacttttgatacaaatttataaagaaaatcaagatgtgtgaagtgttcatacaaaattatagaatctattagtattattatattgtatattgtatattgtataactaaaattagtttaaaagatgtcgagagtcggtggaaagctgattgatctttataatagtggcttagtttaggtgttgaggacggagcgtttcgtttagagggattttattttaggatgagtagtggcgatatgtggttatgaatatcgtttttcagtggtcgcttcatgaaggagtctgtttttaggaggtg

SEQ ID NO: 35427 - DNA, 878 bp, Medicago truncatula
  Intron number 1 from transcript Medtr7g087360.1 (locus Med tr7g087360) derived from phytozome v7.0 (chr-ID MtChr7; po s 18712103 to 18712980)
tgccgtccacgtgatgctgatatgtatttcgtttcaccgttggagtatcaaaatttataatttgaatttgtttgatgataaatattggtttttaataaatttattttagaacaaaaatgaggaaatataaacattttcataaattttatgtttagtacgcccacactttttggtggagacactaaaaacccacaataggtcttacatttcgttaaatatgaaacaataaagttgagagaccaattagttacatctttagatcagtaatagtacaaaaaataatgtgtgatcattattccttttcatatgtgaggttaaaaatctcgactttgtgggcatactagaatatagctagttaattttctccagtaaaaaattagttaactggctttactgttttatatttattataatttttgagcgattaatattttaatttttataagcaaaattacacaattcgtccattaacttaatctcatgtaatattttttttataatcggctaacactttcgtcttttattttttctttcgatttagtcgtttatgttataaaaaaccaacattgttattcttttttatcaaaacataattaaaaattcacaaaaaaatcatcaaactcgtaaacaaactaaaatctatacaaatctagaaaccaaatttcatcaaactcgtaactcagttcttaccgaagttacatttcttccacatacgtgcacattcacttccctaagtcaattagtttatttttacatatatcatccctctttaacttgtttaatcacttgaagatgtttcagttatttatatttatatttatattcatgtttatgatgacatttttttaaaagcagcatctctcttcttactagctact

SEQ ID NO: 35428 - DNA, 491 bp, Medicago truncatula
  Intron number 1 from transcript Medtr8g029660.1 (locus Med tr8g029660) derived from phytozome v7.0 (chr-ID MtChr8; po s 6580747 to 6581237)
tttagttttttcctgttaattatacaaagtagtttgaaaaacatagaacatgaaaaacaaagttctatgaaatatttgagtatgttgtatacatgaaatacaaatttgtgaaaatatgaatttttttaattgtattttcaatcaaaccgatcaattgaaccgatccaaaccaactagtttggtttcgattttttttttgaaaaatagtaaaaaccaaaaccaaaccaaaccgatgaagatttcattggttttgacattttttttgtaccaaaaaccaatccaaaccgaaccgtcatacccctagttatcatttttatcgtaggaacaaaagacaatatatttttttttttttacaaaagaaaagacaatatgattagaaatattgacaatatccatatatgttgagtgttttaattggttaaagagatttttttttattttttattgatcgaccaggccttggtcccattccgaaaagtggaggggagttt

SEQ ID NO: 35429 - DNA, 570 bp, Medicago truncatula; identical to SEQ ID NO: 31973
  Intron number 2 from transcript Medtr7g087540.3 (locus Med tr7g087540) derived from phytozome v7.0 (chr-ID MtChr7; po s 18799980 to 18800549 reverse strand)

SEQ ID NO: 35430 - DNA, 707 bp, Medicago truncatula
  Intron number 1 from transcript Medtr8g008520.1 (locus Med tr8g008520) derived from phytozome v7.0 (chr-ID MtChr8; po s 955914 to 956620)
tcaagtctccagctttctttgtgtttgaggcgctggttcgagtcatgtcttgctgatttttttatttttttatactcatcttcttcgcccgtcaactgtaaatgggttattttgacccgctattcgatccgatcggatctccctttctacgtaatgaaatgcaacgatttttacatatttttgttcggaattaaatggcaagatgaaagcacatacttcttttgcatatccacaagccaatcacatattatatttttaaggttcttgcataaaaaaacttgattaaatataatttttttcacgaaagttacaaatttgtttttgtttattctatgaaagtcaaattgtagatttgtaattagcatgatgcaaggctgcacccacacaataacaatcacagaattttggtaggacatcaattttaaaataattgcttatatgagaaacacaaacaaatcaaccctctggagttacacaatatcacgacaaaattagaaacaattaatctgtcattgtattgtacatatgctcgtactgtgttttaggggtgtttccacaagctcaacaaagtcttgaattggtatgataagtgaaccctaaaggaagatgaagatgaagaagtttttcagattttcttttaattttacaattaacaatttgattttgatgttttgatgcataagttttactaaagaattttggagaga

SEQ ID NO: 35431 - DNA, 528 bp, Medicago truncatula
  Intron number 1 from transcript Medtr8g034320.1 (locus Med tr8g034320) derived from phytozome v7.0 (chr-ID MtChr8; po s 7379831 to 7380358 reverse strand)
attttctcagtaagtagtaatatatatgcaaaattatataattacaatattcgcaattttatattaaaattttatcagttgcttgatcgctagtatacttttaaggtccttattgatatgctattaaagatactccgttgtttataatatatcttcttttaacttgttcatatacatgaattattttcttacaccgattattattatatctttatataataaagacatttgtggttgaatttgaaacatatgcgtgataaaagtctttttttttctttcttttcgtcattgtaatttgcttgccaccattacctaaattaagccactcaaattaatcaaagttcttatttcttgataactagccaaacgagttgtttaatatgaaaatatatgtttgaaaaagttggttaattttgtttgtcaccacataattaaacttagaaattcaaattattttccaatagtttgattcttatttgtttcttgacaattaaacagaaaacgtagagccggtagtcattcttaagt

SEQ ID NO: 35432 - DNA, 549 bp, Medicago truncatula
  Intron number 1 from transcript Medtr8g115290.1 (locus Med tr8g115290) derived from phytozome v7.0 (chr-ID MtChr8; po s 25854010 to 25854558)
aagtgagtaatatttttgttgtaaataattgattgttgaactactcttttacagttgaagaattgttctgtgatatggtaatttttcaataatacgtattgtttgcactaattactgcagttagtgtagatctaggaatatttctgaatgggttatatttctgagtgatgaggtttgtggccgaagatctatggctcaaactattgttttttgttctaaagatggctcagagctaatgctatcaatcatcgtgatacgtttttgcatcgattctttataaaacaagccttgtttctcatgcaaccaaatcatcttgaataactggtgcattagacattgaatagttttccacaaaaactggcaaatatataccatcctagtagtttcattatagtactaaattgtatctttactgtagtatttcacatgtagtttatgaactgtaacatttaggtatcatttttgaattgttttggatactgaatgacattttataatgtttgttggttcctaggttgtggaattgaaggttccagggagattgttttg

SEQ ID NO: 35433 - DNA, 657 bp, Medicago truncatula; identical to SEQ ID NO: 32728
  Intron number 2 from transcript Medtr8g137220.1 (locus Med tr8g137220) derived from phytozome v7.0 (chr-ID MtChr8; po s 32858386 to 32859042)

SEQ ID NO: 35434 - DNA, 676 bp, Medicago truncatula; identical to SEQ ID NO: 32930
  Intron number 2 from transcript Medtr8g005420.1 (locus Med tr8g005420) derived from phytozome v7.0 (chr-ID MtChr8; po s 269421 to 270096)

SEQ ID NO: 35435 - DNA, 544 bp, Medicago truncatula
  Intron number 1 from transcript Medtr8g138810.1 (locus Med tr8g138810) derived from phytozome v7.0 (chr-ID MtChr8; po s 33657853 to 33658396)
cttggccttcactttttcatcatcacatctatttggtaagtgtttactctttttctttgctttccgtaatgcatttttgtttgaaattttagtttctttgtatttttggaaacttatgtttaatttgtgatatcctatgaagcactgacacggacaccggacacgatttggacacaaccacgccaaccccgaaaaataatttgagaaaatgatataatttagtgtaatcataggttttggtgtcggacaccgacacgtgcccgacaacttagcgcacctaatccaaggagtgttcgtgcttcattggtgatatccccatgttttgaagtttggactatcattgtttgatttgtcttgttaattcatgtataatttgagacccttacaaaatatgggaaatctttcatcatgttttccatatgatgataaggtggctttctagtgtaatgaaattattttgatatgggtggttacattttatagtttgttgtatttttcttgttattgaaatgtatagactatagtgatgttgatagtgttgaga

SEQ ID NO: 35436 - DNA, 849 bp, Medicago truncatula
  Intron number 1 from transcript Medtr8g021710.1 (locus Med tr8g021710) derived from phytozome v7.0 (chr-ID MtChr8; po s 4124749 to 4125597)
tgtaagataagattatatatacgataattacttatacacaaaatcaatcaattcatgaacgataaaattaaataatgacatcattattactaaaaaatgatattacaaatattacaatatccttgtatattacaagatattaaagagaccttaacacatacaaattgtaattttcttttttttgaaagaatgtacaaattataattgttttctacttgtctttatattttgaaaatgttgaagaatttttcatttttaatactatatatcaatgtcgccaagactcaactctaatattaaaaacgaaccctaaaaaaaatagagctaatatgaacaatttacaaattaacaaatagaaaatcttacttggcaattaaaatcataaattaacaataagcattattttaatttcagtttgttttgttgattatttattgttgacgttgatggtggatgtgtgtaggttgggttgggtctatcttgtccatttactctctttttgtattagatgataagtgctaggtttggacctatataccataaattttatgatacacctcaacaattatgctcctatctctacaaatatttgagtcccccataaattagaggtccaacgtcataaagcttattgcacatgcttatcaacaacagtactgatacgttgacaccctctcatgtacaactcacacaaccactctctttctctctcatctccaactttctctctcactcatcatatgttcccagaacctgcttgttgtgctttctttcaatcatctctatttctctctccctacatgttgatggtcagatcggtggtggtggtggttagatttgtgggtgaag

SEQ ID NO: 35437 - DNA, 513 bp, Medicago truncatula
  Intron number 2 from transcript Medtr7g134150.1 (locus Med tr7g134150) derived from phytozome v7.0 (chr-ID MtChr7; po s 31604646 to 31605158)
gcctttaattttcgtgctcttgcaattggtgtgaggttaaccaattcaattttctttagatccttcttttggtttacgagttgatggatttatgtgtagattaatggagtgtggggatagtcaaattgaatttttgagagatagatgatgaaggatgaatgtagatgaagatgaaggaagaagaagaagaaagtaaataaattaggtgttagtgatacactataaaatctgatagaccttcgtaatccaacggtctctttttttaggggattaaaattatcaaaattggaccaaagtaaataaaagaaataagttaagggacgtgtttgcaaaagttaagagttatgagaccaaatcaaaataaacaaataagttaagggaccggcagatcaattaaaccaaacttttttttataatctaaaatctatgttattgaggtttacactccctgtgtttgagtgatgttttccgatgttagtgcatattggaagtactaaagttactcatcattca

SEQ ID NO: 35438 - DNA, 779 bp, Medicago truncatula
  Intron number 1 from transcript Medtr8g029540.1 (locus Med tr8g029540) derived from phytozome v7.0 (chr-ID MtChr8; po s 6550119 to 6550897 reverse strand)
tttgggtatcgactgacctttacttctgtttccttcattatatgactgactgttttaggggtgacacttttagtacatcttgtatttaggtgactcactgccgttgttaatatatttcatttttatgtcttaaaaaaaattaattactaagatggattatttatttaatatttcacatataaaataaaatcaaacaatccaactacttgtttattattgcgattgcgtgtactctaacttgcataactgaaaggcacgaagctctttagtttgagtcatggcatggactttccattctaagtttattttttgactcaattttttcattctaaattattagttcaattaattgaaaataatgtcgacccaagtataaaatgtctcagttgaataaaagggtgacacattctaaatgtgaaaatttaaaatttcttataaaacttgaaccaaaaaaaaataaaaaaaatcttataaaacatcctcttgtttacaactttgcattcacatcatatcaactttctatttatttggtcatttttttttccctggctagctaagatgacgtttgagaatatttaattggtttttttccagagatgacttcagattccactatatcaatatatacgtgctagccaacttttacaatctacttcatttttgttatttgttttaaatttaattcttttgtcttcttttgacaatttttttggatcgttgctttcaattggtcaaattttcaaaattcagaaagacaccgttcaaaagactcggtataa

SEQ ID NO: 35439 - DNA, 946 bp, Medicago truncatula
  Intron number 2 from transcript Medtr7g088840.1 (locus Med tr7g088840) derived from phytozome v7.0 (chr-ID MtChr7; po s 19347201 to 19348146)
aaggttttcagattgtattttccaaatagaatatttataagttttggtaaaattaattctttccttgaatttttagggttttagattatataaactaaaaaagacgttcagattatataatctgaacataaatatttccaaaatttaatgaagtgcataagacgagagtaggatagaaaaagaaagggtcttgctaaccattgtcctcagggcaataaccattgctctgaggacaatgattaaggaaaccaaaagtattatgtttgcattggtttcaacaacattttgatttatgtattgaacttttttggtcttactcttacctctaattttttggttcatgctcaaccacggctaacaacgaaaaaattacattaattattttcacgtaaatgtttctaaccataaatcaattcacgttgcatgtttaaatcaattctcactatcgaagaaccaaacacaaggtaagagaagttgttagtcttttgtttggctaccttctgcctcaagcacttttaattttcacatccatgtgtttcatcctggacctcatttcctcccaatccttatgtttgatctgcttttcttgacatgaaaagttgtctctatgagcgatccgaaacctcctaacattaaatgccggaaaaagtagataatatagacgatctataaatttattcttcgaggaatataaggttgacttgatgactgaagcgaaagagataagaaatggagtggtaaaaaaaagtagagtgtttgattccactttcagtatataatactaacaaattaaaataacaatttctggtttaaaaaaataattaaatgatataagtttttttgcttatactatagtctacgagatcactgtcaaaatttaattatcaatgtgatgcaattttctttttcagtgtgattattatcaaggtacagcaaaagaacaaca

SEQ ID NO: 35440 - DNA, 967 bp, Medicago truncatula
  Intron number 2 from transcript Medtr8g133980.2 (locus Med tr8g133980) derived from phytozome v7.0 (chr-ID MtChr8; po s 32133653 to 32134619 reverse strand)
gctataagtggcgcctccttttgtcttacgatggaacccgatatgcaggcaatcatcatttttctcttttcattttcacttccttgttccattatacaaacattttcatatcactcattaattatcttgtttctggctcattaattatgtctttgggtttcgaattcattttctgttatacttttttcactattatttgctacctaatcacaatatcagagggacactcatttcttttaaaacaaaattaaaataattgtagccttataatacttgaaatcctttcactgcttattaggtttttatattgctcataaataaacggtggatgaccctatcgataggctctaataccatattaaatttttatattcggtgtaactcaccttacaaaaccaacttgtaaagtgagtggtgtcacgctttataaactcttatcaaatgttctatcttttctatgtgggtttttcccgatactgcttgcatattgcgtatcttcaattttctgtttctttcaacaatctcaaaccattgtaatcatggggttttgattcttctcattctatagacctaattactttgagaaaaatgtttttttaaatgttttttgctttcactcttattccaaccttaagtttccaacacccttttttttggggcattgtctgttttgagtcttatgtaagttcgcacgagtttgtccttacttaaaaataccaaatcctagttggataaagctcaaagtctcaaactattgaattaagttttcagcttgatctaatagtgtaccataaaaaaataccaaatccctgcattgactcttgatccatatagaaaggtgtagttttccagcatttaatgaataaaaactaagttaaatagttgaattctttctttttctccattattttgacccgtgactgtgttttcaggctggcaatatcaggagtccccccctactgtacaa

SEQ ID NO: 35441 - DNA, 676 bp, Medicago truncatula
  Intron number 10 from transcript Medtr7g135580.1 (locus Me dtr7g135580) derived from phytozome v7.0 (chr-ID MtChr7; p os 32273701 to 32274376 reverse strand)
gaacgaacgtaataacaggcttttcaatattgttgtaactcctattcccaggttgttagataaagttaaatatatgtctttagcctggttgaaagcaaaaaaaaactgtttttaggtttggttcagataggtggtgctcaagtcccttccaatgcttgggcatcgcgtgatagtttttgttcatatgtatgactttgtgtttgtaaagtagctcttttggcacaccttgtgctacaggagctgcttttggtggttaatatatattccatttttggttgttcaaaaaaaaaattccaaaaagctattgatctaactctttttacatcttccacacatgaaaatgtaaattcataaaaaccttttcgtagtgaaatcactccccacttaccaagatctttccacaaagtagcaagtttgttacgcaaggcaaacatagtgaggggagatgcgccttttagccatatgatcctagcatgaagattatgcttgcatgcttcaatacctacccaatactcatcttctgggatggaaataaagatattattacctttgatgatgggttacggaagttgagaagagggtatattgcataaattacttacaacttgagtaaaggttttaacttgagtaacttgttgtatcatgtaggatagggcagggtatcttgaaggttagc

SEQ ID NO: 35442 - DNA, 549 bp, Medicago truncatula
  Intron number 8 from transcript Medtr7g135580.1 (locus Med tr7g135580) derived from phytozome v7.0 (chr-ID MtChr7; po s 32274928 to 32275476 reverse strand)
cgctttccttcttaaaagctccatcaagtataatctcttccattgattctttatttattaatttttttttttttttttttggggggggggggggggagtgaggaccatagaaaaatatcttggataggttggcatgatgtgtgttttccagggagtttggaggtgagacggttgaaagaatttaatgtggctttgttaggtaagtggtgttggaggatgctagttgataggagtggcttttggtatcgagtcttagtcgcccgttatggcgaagtaggtgggaggttggaggttgggggccggagttgttcttcttggtggagggaggtagggcggattagggacggtggaggtgacattggtggaggctggtttggggagtgtgtgtctaagaagttgggggatggttcagatactttgttttggtttgataggtggttaggttcggtttctttctgtgagaggtttcctaggttgtatgatctttttgagaacaaatacattacagtggcaggtctattctctcttggtgtggagcggggtggggag

SEQ ID NO: 35443 - DNA, 518 bp, Medicago truncatula
  Intron number 5 from transcript Medtr7g135580.1 (locus Med tr7g135580) derived from phytozome v7.0 (chr-ID MtChr7; po s 32277173 to 32277690 reverse strand)
tttgggatactgaggaggtggaggtgtggtctacggtttcttttgatcattctttaattattcatgggaaatttctgaaatccaatgaggaattttatttgttgaacgtttatgctccttgcgacgctagagatagggttgttctttgggattctttaactgtccggttacagtcgttgagggggaagaatgtgtgtgtttgtggggattttaatgctattcgaagtagggaggaaagacgttcagtgtctgttggtcaggttgcttcagactttagtcactttaattctttcattgataataatgttctggtggatcttcctctagggggccgtaatttcacgtggtttaagggagatggtaagtcaatgagtcgtcttgataggtttttgttatcagaggattggtgtctggtttggccgaattgtttgcagattgcccagatgcgtggtttgtcagatcattgtcctttaattttgtctgttgcagaagagaactggggtcctaggccatctcgc

SEQ ID NO: 35444 - DNA, 1047 bp, Medicago truncatula
  Intron number 1 from transcript Medtr7g094130.1 (locus Med tr7g094130) derived from phytozome v7.0 (chr-ID MtChr7; po s 21265141 to 21266187)
gcctccaccactctcttctttcaatctcttctagggtttgctttctctctctatctcttcctttttctatcactttttcaatattccttcatatttttttcatgattatttatctgtttatttgattttcaattaacctagatcgtgttatctgaatcttgttctacctctatttgttttcgatttaatttatatttttgtttgatgagttttgattttaatcgatgatatatgattgagatctgaatgttttcgactatgattttgttgcgttgttgtgtgtaacgatatttcgttaagcttaatctggtgataaaggtttttgtatttgaattgaaaaattgttttgtatcattgtttgcttgattaactgttatttctttttggattttggatttttttttattgtgttaggtttaggttattatttattatttatttatgaatgattaggtttaaattacggtgtttgtatatgctttaatctggattgatctggtttaggtttaggttgtataagattgattaggttttaggtttaggttatatttagatgttttttatagagctgaattatttttgcagattactgtgtgtttgtaaatgatttaaggcctggttatcattgttttgttcatttgattataatatgcttaaatgattaagctattttcaagctgattttggcaaaatattgttatttttggctgcagatggttacaattagttattattaactatttccaactttgtcgttttcgatacttgtttgtgcttttctaaccgtcatttgctatgtgttattcagtcattaatatgcgctaatattgtcggtttattgtgttttattgtgtttccgtaacgttgatcattttactgttcattaaggcattaatgttgggtttttaactacttttgcctgctgttattttgtcgtttatcggaagtgttttaattatcaaatatttcacttttgtaaccaaattaatgtagcttgtggttgttgattcaggattcctgctagttctgcggtggcagattctgagg

SEQ ID NO: 35445 - DNA, 808 bp, Medicago truncatula
  Intron number 2 from transcript Medtr8g133920.1 (locus Med tr8g133920) derived from phytozome v7.0 (chr-ID MtChr8; po s 32086894 to 32087701 reverse strand)
gacgcagaaggtaaattagcaaattgcttttgggttgattcaaggtctagaatggcttacaaatattttggtgatgtggtgacttttgatccaacatacttaacaaataaatacctaatgccctttgttccattcactggagttaatcatcaccaacagtctatactttttggttgtgctttgttatgggatgaaactgaagagagttttgtttggttgctacgtacttggttagaagcaatggatggagttagtcctaaaactattatcactgattaagacacttctatttctaatgcagttgcaaaggtttttccaaaggtgaatcatcattattgtatgtggcatatcgagaataaagttccagagtacttgaaccaaatctatcatgaacatggcgagtttaaaaatcaatttcacaagtgcattcaccaaactatcacttatgatgactttgattctgatttcgggagcaatgataaataagtacgagttgcaagataacaaatggctaaagaatatctactccattcgagaaaaatgggttccttcttatgtacgtcggagtttttgtgctggaatgtccaccacccaaaggagtgaaagtatgaataaattttttaagggctttttgaattcaagtactccattgagcaagtttgtgatacagtatgagaaggctcttgacacacattataacaagcaaagagagaagaatgtcaagacaaggaattcaaaaccacttttgcgtactttatatcccatggaataagaggctttaaaaatttatacaagaaaagtgttcagg

SEQ ID NO: 35446 - DNA, 924 bp, Medicago truncatula
  Intron number 2 from transcript Medtr7g094230.1 (locus Med tr7g094230) derived from phytozome v7.0 (chr-ID MtChr7; po s 21305578 to 21306501 reverse strand)
ctaatccatcatttgaacttgaaatatatttcaaggtattctatgttcatcattgtctattaaatgcaccatgcttgcataatttctgttaacagtttttgcttccaaaattatggtgtctgattcactttttgttttcaaaatcaccactggcatatgattgttaccttagacctgtttgatgcattatataagataggggttacagtataagggtcacttgctgatataagataagccatctatcgggtaaacttctgaattactgtgttcattgtggatcacatgtcatatttttttaactggttaacataatcatggatcaagttgaccttgttgaatatgtatttttaccttacaataatgtgttaggtcaattacaggtgtagcactagcatggttaaaatgtaatgtgaaaaaaatgagtttgtactttatataaagatccttattcattagcttcatcttattgaatttcaatttttgtcattggtcatatttgactgtttcttatgtttggttggaatttttttatgtttcgttatattgttttcttctgcttacacaacagaggacattgagttttaactttggttaaaatctagttcttaataatgataccatgtagaaacaaatcaccaaagtagagagagaaagagggagaaacacagaggaaaaggtttcttgtatatttatctaaagtagcacaagcccggtgctgaatacttcgtgtgtgtgtgtgtgtgtatttccagaaataaaaagactggatcaaattataaatcaaaagaactccacattaggaagtcccaggaaatattttccaatcaattaaagcagggatttctagtttattcaattaacctttggtatatcatttttgtctcaggaaaagtggttggaggttttggggtgtggagtgac

SEQ ID NO: 35447 - DNA, 919 bp, Medicago truncatula
  Intron number 1 from transcript Medtr8g037230.1 (locus Med tr8g037230) derived from phytozome v7.0 (chr-ID MtChr8; po s 8020291 to 8021209)
aagtacagggtgtatttggtaagtggtgtcaaaccaaagagaacatatgtctatttataggctaagtactactacattcatgtattacatcataagcatcatattaaatagcaattacatcaaatcattcaagtgttcaaacaaaaatccaacaagcatgagctttgtagttgttacggcaatagccccccattacagctagtcgtaacaacttatgttttgaaagcgtgatcatttggcttctcccatcattaggtgatggtttcccacttcttactcgtttgaaattgtcttaattgaattaggtattgacttggtcaacaaacatttgtcctttagattgaacatattatcgtggccgaccagggttattgattctctccttctctcttatcttttgatacaactaaaaataataaataattgttgactgtgattattgctttttgtttttaatctgcaagcatgtgtttgtttcagtttgattttcctttcttttcttctttttagtcaacgtctcagtttattccccaatttcctttacaattctcttatggtgtttccttcaaattatgttattaattttattttttttgctttacagaacaaggtggtttttagaacatctgatgtcttcggtagaacttaaggttcgggttcgtaaacagaatttctcatcaattgaattattaaaattcagtgtttttttctcttttttatattgcaaactattctttttgtttgcgtgagtttttaaattaatgcaatttccatgtatcattatagaggaaacttgattactgaatatgtgaaattgaagcaaggttaactgatgccctcaatcaagcaaataacctaaaaaaattactacatcccatttgtagaatattgctaaattgaagcgacaaagtgaagcggc

SEQ ID NO: 35448 - DNA, 678 bp, Medicago truncatula
  Intron number 1 from transcript Medtr7g118210.1 (locus Med tr7g118210) derived from phytozome v7.0 (chr-ID MtChr7; po s 27780343 to 27781020)
ctctccgccaacctaaagtcatagccgagatcgttgtatgtacatctgcattcatttaatcacattaaaagttatactaacaaatgtctacaaaatatcccttaagatttcatagaaaaaaactttatcttaaaaatagaagttgataactaatcaaagttgtaaattcatacatcatgttctaacggttgaaaatgctaacaaatgtcatttccttaaattaattatgcatgtagagttatttataatccatactccctttgtttttcactttccccttgttccttaatataagaccctacctcttgcaattatgtattttttgcattactccctctgttttttatttatacatatcaaacaatagctatgaataattttgacaaaacaatatttattactgaaattaaacttttaaaacgacaattgaaaatgaagacttttaatatcgtgatttttttttggattagatagtctagtggtgaggaattcatttttaaagtgaataagtggggagtctgagttcgaacccaacccttgttcctatcaattgagttatgctcacgggtactaccgtgattttattataggttgagagtgattttttttttttttgttttctttttgaactgcacgtttgtagggtggaattcttttaggaccatcagctctaggaag

SEQ ID NO: 35449 - DNA, 836 bp, Medicago truncatula; identical to SEQ ID NO: 35396
  Intron number 1 from transcript Medtr8g139540.1 (locus Med tr8g139540) derived from phytozome v7.0 (chr-ID MtChr8; po s 34085496 to 34086331)

SEQ ID NO: 35450 - DNA, 506 bp, Medicago truncatula
  Intron number 2 from transcript Medtr8g005200.1 (locus Med tr8g005200) derived from phytozome v7.0 (chr-ID MtChr8; po s 122661 to 123166 reverse strand)
gccacaacacagagacaaataaacaggtacgtatggtttttgttttctgaattcttatcatcaaaatgcatctgattgaaacatattcaatatcacaattcaatactgctatagtttattattataaagatgtttattttagatataattaagggatggatagatatatcatattctccctcttgctcttgtattatattttatccataagttctttctagcttgtctgtggaacccacttgaaccttaggaattagaactgacatatttttgctgctttactcctacccttgttttgccggcttaataatggaatacatatataaccttttcttagcttcaaagttagggttaaacttgatctcaacttgcacactactcttctgtctttgatgtgtcaaacattgatcgatcacaaatatatatataatcacaatgtggtccaatacatgcatacacactctggctgggtaacatatggaagcaatattcaagagatttcaatt

SEQ ID NO: 35451 - DNA, 678 bp, Medicago truncatula
  Intron number 1 from transcript Medtr8g093130.1 (locus Med tr8g093130) derived from phytozome v7.0 (chr-ID MtChr8; po s 20358225 to 20358902 reverse strand)
gcatcggccacgaagaaagaaaatttcgtgattcttttctgttctaactttcttgtttgccagttttatccaaccttaaactatgttttctcactccttttttaggtaaattaccaattgtggttaatttagaggaagtagataatttgaaaggtttgtggatcatttggcatgcaactatttgggctatttggcaagcgaggaatcatttgatttttcgtaatgaggtgaaacatgtggatgatcttttggcggaaattgtggttaattcatggcggtggagtttgtgtaggctgaatatacaagcatgtttattttatgaatggaattggaatcctcaagaatgtctatcgaggaagtagctaattggggtgtagtgacagtactggtgagtctgtcgagattttcttctcacgtgaagtaactggcggtgcttttgggcttgtgtaccggctgtgagtttttaggagcgcatattacagatgcacagttctagctggatggttttgaggcttcggtatgcagtgatgaagtacataggatcaattgtataggcagtgcttaagggctgttctgtgttgttgttttcccttttcctgtgctgcatgtattagcatcataatttcctattttgggcttttagtgtgctgttttctatttggggaggtggcttttggt

SEQ ID NO: 35452 - DNA, 885 bp, Medicago truncatula
  Intron number 2 from transcript Medtr7g118380.1 (locus Med tr7g118380) derived from phytozome v7.0 (chr-ID MtChr7; po s 27929815 to 27930699 reverse strand)
aatcggggatctagtgattttcttggtttgagattgttgcagctttaaacttcgtctttaaggtatttttcaatatcatcttagtttgattagatctgactcatattcatagtttgatcatttagctaagaatgctgatgattatgaaaatggtgtcataatttattgttatgtatgtgtcggtgaaatttacatgcaatcatttataaattgtgaactatatcttcatgtcatgtaacatttgtttgagctagctaggttcggggtactaattctagcttgtaggttttcatgcacattgaacataaacatctaatgtgaagtatattttaggctttttacaaatcttagttcaaaacataagctgaagaaaaatttattttatctggatattcatattacacatgtagattatcatttcaaattgtcgttaataaaaaccagtgagttcttattatgggcttgtttaaattgacttacttgagcttatctagtgatatatgctttgtgagagactgtttgagagagttttatgaaaacatcttctgacattgttcataatttgaaaacaacttattatcataaattttccaagcgagcttatatgaaagcattttgactattttatattttactatagaaatagcatttacataagcgctcagcacgattattgcttgtgctataggctgcaagttgtatatttatccaattaggtctgaactgttcgctgttctagtaactctgcaatgatgtcttctgtttttttccgtaatcaagaagtcaatatagccaaaatattacagatttatatttctgttggtttaatttttcaatgttcatcatgcagattagtgatagttcctaatagtctgatatactcta

SEQ ID NO: 35453 - DNA, 774 bp, Medicago truncatula
  Intron number 1 from transcript Medtr7g083870.1 (locus Med tr7g083870) derived from phytozome v7.0 (chr-ID MtChr7; po s 18019491 to 18020264)
atatagaacaggtaatttctgtatgcaccctccttttgtcttgtttttgcttataatcatcacttggttttgagcactttgctcagtttttttttatgaaaattttatcactaatactataatctcaaatttgtttggtcatgatgagtcctagattataaatctgatccaatacttggaagtatatatgaaataaggacatctacaattttttgttgctttttaatatctgactctaatgcaaatgctgcattctgtttccagaaaacaataatttaacttttctatataattatacactcatatgtatataaccaagtggttgagttcaagttgttaataagtttcaattaaacacgaattgttcgatataatccgagtttgaatcctggctgagataatctttgaccatattttacttactgaacgaattccgtattaagagggctccatttccctgagaaccagaaggtttaagaccaaaaaaaattatgtatgtttgatgtatgaactgttttctttagctatgtggtcagaatcataagatagtatgttttagcttctcaattcttccttacagtgaatagttttcactgtaaatatatcatataatttctagtatatgaattataattttttctgacctttcaaacaatagctgacagcatgaaaatataatgtctgattcataatttggtttgtgtcattttgcaacctatcatggtttggtgcttcaaatttaattttccattgtttcctgatagccagaacacc

SEQ ID NO: 35454 - DNA, 459 bp, Medicago truncatula
  Intron number 2 from transcript Medtr8g147240.1 (locus Med tr8g147240) derived from phytozome v7.0 (chr-ID MtChr8; po s 36204704 to 36205162)
caggaggtacgctttgtcatgcttaaagatatgaatttttcactaaagaaaattttatcttaaagacattgttacttttgtcaaacaataattacataatttttataaacttactgcttttaatactttaatcaatattttaaatacactttttaactttctccaggtatattcatatttattgttcttaaagaaaatggaaactaaaataaatgatgttattattaaaattaaaatttaaaacaagttaacgttaataaatgtggataagtgagtaatgaatgtccccaaaaaataagtgagtaaatgaatgagcatagttgttgctcgttgttgttaggaaaattcaagaagaacagcaacagcagcattgtgaactcctcaatcaaacaaacagtgtgtcggcaaagtgacatgtggcgtatggtaacggctatttctcatgattgtttgcaggga

SEQ ID NO: 35455 - DNA, 607 bp, Medicago truncatula
  Intron number 1 from transcript Medtr7g134230.1 (locus Med tr7g134230) derived from phytozome v7.0 (chr-ID MtChr7; po s 31635919 to 31636525)
agcgaaaggttgcaaagacaagactaaaatattaaaaaaaaagtgaaaaaatattgtttgttcatctttgctccatttgtctttgctcaatttatcccatttaccatcatggatgtgtgacacgtgttaaaataatatccaacggttgaaataaaaaaggcaacaataaacaaacacccatgtgattgcttttagaaacacaatctcagtatcttttattcataaaaaaaaaaaaaaaaaaaaaaaactttgtatctttttgaatttataatgctacagcgtcttctctgaattgcaatgatacatcaaaattaatcatccaccatttttcagaaactataatcatcaacccatcttcacccattttcaatttctatctttttccttttttgattttatattccgatcggagaaaaatgaatccataaaaggaattaataaaacaacgatgtgatttgaataattttttgcaattgcatcaagacatgtaacctgaaaatcaatcacgtatgcataataacaaatctaagatttgtaacatgtttgaatctaagatttgaatctggaaaaaggttgtgtgtgaatcagaaaaaggagcgtgctgcca

SEQ ID NO: 35456 - DNA, 678 bp, Medicago truncatula
  Intron number 4 from transcript Medtr7g092560.1 (locus Med tr7g092560) derived from phytozome v7.0 (chr-ID MtChr7; po s 20409201 to 20409878 reverse strand)
acaataaattcacaactgtgcaatttactggagaggtataaactgcttgtttctcttaccagtatactttatttcagagttaaatgtgaaattctgtatgtgattcatttctcttgtgaatatatcttgaatgtatctgctggttcgtgacttggtcctagaaacattgtaattctaaatgggtcagacctttgtaatatgctcacttttactcttgagagctttatgttgtagtggttaacatagaattgggttaatcagtggcttgtcttttaatacgatgtcttctaaattataatagtgaatagataagaaaataacaatcatttaaacacatctaaattattgttaaataacagtacttcaatcatgaatgcattgcttctcaagtaacttattgaatgataaattttatactatgtatttgtttttcgaggggtaacttatatagaagggactttggttgtataatatcaggttattcctaccgtgattccaaacaggctctaacttaatatgatttctttatctcctcctaccaatctatccttgtgtattgattattgaattctttttctttttgattccttgactttctgttgataagttcaactgttgactcacattttctctctcttaatatgctcacaggtgttaaaaactcctgtatcactggac

SEQ ID NO: 35457 - DNA, 859 bp, Medicago truncatula
  Intron number 2 from transcript Medtr8g012730.1 (locus Med tr8g012730) derived from phytozome v7.0 (chr-ID MtChr8; po s 2235170 to 2236028 reverse strand)
ttacggagttgcagattggcgttaaggtaaattgtaattgtaaattttatagctcattttcaataaaataaatggagatttttttttttttttgcatgagttgcactgatttttgttatcaagctgattttaatttgagaaaatgacataattcaatgtttatgaagctgataataattggagaaaacgacacaattcaatgtagtcacatgtgtcggtgtcatgttggtctcggacaccggacacacctttgattaaaagtgtctatttttggtatttttaagttgtgttggcgtgttccctttttttgaatgttgaagaagtatgggacatatacaaaatgttaaattgatcttttcttaggaatccattttcatatttatgttaatttgtgtgttgggttgccttgatgattcccaactgttggaacgtagaaaagatttgattgttatgcagcggatacatggacatccactttttgttggaatggattgaatcattaatttttaagaaatataataacttgtgtaattataagagtattcttaaatgtgctaaattgatgaaacaagcttctttaacatctgtgatatgtttttataacctgatttggtaaagtgcggcaaaagccttgctagcaaggtcacgagataatgttgactgattgttaataggcatagtaatgtaaatgtgagttagtttttttgttgagattacaacgggaaaattaaaagcatgcatctaatccctcatcaataataatgcataagctattttgtgtgtaagaaaaagaaaatgagtttatcctctttattgctcattgtttatactctttgtcattgcagtataaaccaaaatc

SEQ ID NO: 35458 - DNA, 890 bp, Medicago truncatula
  Intron number 1 from transcript Medtr7g090110.1 (locus Med tr7g090110) derived from phytozome v7.0 (chr-ID MtChr7; po s 20021091 to 20021980)
cccctccctcgtcctcatcaccggtgacctcacaggtacaatcatcttcacatttcatttctcaattttcatggtactagtaatattcaatttttgtatttctaaaactacgcatcaaataaaattatatcataaaatatctatatggtagatagtgcatgccatttttatttgattacgttggtgcataaaaatcaacatgatagatgttgcattgatgtgtggtaagaccaaatatggtaggattagaaatggcattagagagagtcggggtagcacctatcataaaaaaaatggtggaagctcggcttagatggtttgggcatgtagagagaagtgtggattctgtagtaaggagagtagattagatggacagtaaccaaagacataggaagacctagaaaaaaaatataagcgaaaaagatctagaaattaataagttggatagaggtacaatactacaatagaacattatggtattgtttgatccatgcaacttagccgaccccacttagtgggataaggtttgattgttgttcttgttgtagtgcataacaatcaatctctttgcttttttgtttgatagaaaaaacttggtttattaaagtacgagtgaatcactaatttagtcccgaaaattactatatttcaaaatagtttctgaaattgaatttttttttagtcctcgaaattctcttgtacagattaatgttgtagagacttttaaaattcactggtcattttgaaatttcgtcagtttaattggtcaaattatcagtgtcctatagtctcatggattaagttggtgattcgacggtgtataagtgttttagaatttgaatcttatggtatacggtgtagtaattttcgtggatgttatggtttagcag

SEQ ID NO: 35459 - DNA, 605 bp, Medicago truncatula
  Intron number 4 from transcript Medtr7g117540.1 (locus Med tr7g117540) derived from phytozome v7.0 (chr-ID MtChr7; po s 27467401 to 27468005)
tcaaataagtggatagaaaaggtggttcaaaaaaggtttgatttcaactccatccaaatctcattgttctcatcaaaattttacatgctttgttcatggttcaaaaatcaatcgaataagctttataatcaatgaaatatattagcatggtacatataagtaattagatactcttagttgatcatcgtccgttttaagcttaaaatgagattgatgagagagaacaaaataacaattggtttgtggacaatcgaaggatacatagatgaaacagtgtataaggatggatttgagttcactatgatacaaaactgcaactgttatgatggagtacataaataagaacctgttttttttttttttacagtttatgcttaagagtaaataggtatgccatttaacagtattagatttacactgatattgacttttgattttatttgctacaggtgcatttctggatatattttagatcttgccttttctgccatgaaatttctcttctttttcatctattttgaaaatttattgacacttaattatatttgaacatttgttgtgtgtgtgcaggttaacttgcctccttcttaatcttagtgtggaag

SEQ ID NO: 35460 - DNA, 1009 bp, Medicago truncatula
  Intron number 1 from transcript Medtr7g120930.1 (locus Med tr7g120930) derived from phytozome v7.0 (chr-ID MtChr7; po s 28358398 to 28359406 reverse strand)
gctagggtttcctctcttcacatttcaacactcttgtaagtttaccctcttcacattttccttttcttttgggtagtttagtttattgttctgcattattgtagtttctgtacttagtacacttgtgttatttattgttatggttgaccagtttgttaaatgctttctttcttactagtatagtgatgttttttttttttttccatcacctttttatgagccaggtttgtgttgttatgacatgaacaaagatacattatctttgtttcaaaatctggattttgtttttgctatttattattatattattaaagattaaagacaacaattttgagtttatttattttgttttttagttgtttttttttttttgtttaaagttgcttggtgctttctctagtcaacacaacatgcagacaaattttcctatttttttgggtttctttcttagaagtatagtagcttgcttttcatgttgttgtaacagaatctatgttttatttttcctttatgcattttattattcgttctgttcagttgttttgttttcaaagtacttgtagatctgggtcaaagttggtcaaaaaaatggaacctttcaaacttgtgtattttcttagctctagatagaaaaacagggaagttcaaaatgaaagttagaaaagttgaagattgtttcttttgttaaatttatttaaagatgatagttatttaaggattttggtgtgagggttgtgtttatttattttacctatttatgtgtgttttgaatttggttggtggtagtggagtttgtttacttggagtttccttgaagggattatatacattttgtttgttgcccttttttgttgaatgctgattcaatggggtcacataagctgcaaacaattgctttttctagtactatataaagaataaatcaaattccttattctttttatttcttacttaatcttagattcttattgcaggaatagtaggtcaggggatttgaagaggtactctc

SEQ ID NO: 35461 - DNA, 707 bp, Medicago truncatula
  Intron number 1 from transcript Medtr7g146220.1 (locus Med tr7g146220) derived from phytozome v7.0 (chr-ID MtChr7; po s 34945551 to 34946257 reverse strand)
agtttgattcaaccatcttaagcttaaaaatacaagttagtattgattattccattatatagctacaattatgaatattttattttggagttggtctagcgaatgaaaacttttcaatgaaatgttggattagtaaaatatatttaatcgattcgctaattggttgattaattttaaattttcttttgattcttttaatttgtatcataatcgaaaatcagtcaagtaagctctatagacatctttttgatgacattttcggcgcttccatgcctaagaatgtttgactaatttcctagttttcttttgaaccattgaccttcttttgtaaaaaaaaaaaataataataatgattaaaatgtatctaacctaatttatccctctaatctaacgtttataaggaggaggaatgctaacaacactctctctaccgcttattcttttattggatgagatcaatgtagaacctgcactttaaaaaagaaacccacgttaagtggtggaacatatattgatttcatcggataaaaaaaagaataaatgacgaagagagtgtttaaaaagagtgttgcatcatttctctatgcaaggagcgataattggagttagtggatgataagacatataaatatatgtatgtatgtatatagggcaaaggacagtaatgtgtgtggaagcgaacaagagcactgagagagtgaatcgga

SEQ ID NO: 35462 - DNA, 369 bp, Medicago truncatula
  Intron number 1 from transcript Medtr7g112240.1 (locus Med tr7g112240) derived from phytozome v7.0 (chr-ID MtChr7; po s 26564448 to 26564816)
tccgtagagacgacgttgttcttcagattaccgaggtaaggcccttttcgataagtcaatttaatccttaatatcagacatgttttgattaacttattttaacttgagctttgtgagactgattgggacttgagaattgcgacaacttttgaaaacaacttatcacattgatcagcttgtaaaaacagtttatatctttgtaacttctaattcaagataaccgcaatcattttctcttaacagttccttagttttaggtacaattttttttcttccttttttgggttttttaggggctaaagttttgtttgtgtttgtgtacgatttaacaaggaattaatgttggataggttgaagcatatagatcaa

SEQ ID NO: 35463 - DNA, 914 bp, Medicago truncatula
  Intron number 1 from transcript Medtr7g110920.1 (locus Med tr7g110920) derived from phytozome v7.0 (chr-ID MtChr7; po s 25919978 to 25920891 reverse strand)
tagctcaacacttccaaatcgttgctcgctgtcaggttttgttacttttccccccttttctctcaagttcgtttctttttcagttttaaacactttttgatttgatgctaatcgtgggttgtgcttggatttcaattaaattgtgaaatgatgatgacgctggtggtggtggtttttttcttagggttgattgatttcactttttgctgtttgattgaatgaatttgtttctgcatgctgttttgatacattatttgctaggtagattgacacattcacatgcatgagtatggtaatgagtgtttttaggtcaaaacctaggtcaaaatacttatataagtttatagatttttataaaactataagaccttaacatgtgtttataattagaggctgtcctcaccttacaaaccggtttgacagatgctctagagtgttacggtcaatggaaaaaaagccgatcggatttgggagtcacaatatgataaatcaaggggcttttgagctaaattgagggggagcaattataaaacggttttgtaaggtttagttaggcccaacccaagttccaatagaaacctagatgaatgagcttgaggtgttaaaggagatttcaacttatgcattatcaatttgacttctttttttgtttttattattggtagtgtttttaaataaagtttatctaaattggctctaagtagttggtaggctagtgaacattttgattgatgtacttgattactgtaaggtggacttacgatttactgtattttgcaagatttggtttcatttggtgttggtgtgtgatttttttagtcccaccctcttccttgacattattatctaacactcctttattcatgttattttgcactgatgatttgtgatgatattttttcagggtggagcta

SEQ ID NO: 35464 - DNA, 398 bp, Medicago truncatula
  Intron number 1 from transcript Medtr8g105250.1 (locus Med tr8g105250) derived from phytozome v7.0 (chr-ID MtChr8; po s 23197480 to 23197877)
accctttcctcttctcccctccctcttcttctatcgtaagtttctctctcttccattttccattgatccttctctctcttaataatctatctgattaaagtttttcggatgtcattgagataattattattaggtaatttcattataatttcaacctcaattgcattttctctgtaaaacccccatcataataattgaaacgatttcaataaagttttgttttttctctcctcaaaaatccaatcccagattttctacccaaaaaaacaaaaccccagatgaaaattttggatttttaatctacccttttgttaaaaattatatatttgtagatgggttatttccaattttgatatatattattttggacaatgtttttaggctttgagggaagaaga

SEQ ID NO: 35465 - DNA, 1012 bp, Medicago truncatula
  Intron number 1 from transcript Medtr8g039850.3 (locus Med tr8g039850) derived from phytozome v7.0 (chr-ID MtChr8; po s 8440461 to 8441472)
ctgaggctctccaaaaggcctttaaaggtaatacaaaaatcatcttcaattaattattttggttattgtttaatttgatgcttttatatgatacactagttacttttataatttttctttattttaatttatttattgtctaaaacaacacttaatgtgttgaattttaaatatgatgttcaattcaaatgaagaaaatataacttgtattagcaaaaataaaatattttgtactaaaacagcttatgtaaggtcttagcattgataactcattcaatattgtcaagggagaaccaactcatcactcatttcaaataccaacaaaagggaacaaaaaaaatatagccaccgattcttcaatatcctactcatatagtaaatgttttatttttgacaaattgatataaatgttcaaaactccaaaatagacactgactatatatagaagatatttgtattgccttttttttcttttcaaattaaaatgtattctctaagcaaatttggacaactgaaaccatagttcatagctgtagagcaatacatattacataggtacaaatttgacatgatagttaaaactttattaattttagaagatttttacgtttctcaaaaaaaaaaacttaccattgttaaaaaagttactgtatagattattaattgtactctatatattgaagagctaggaagttaaacttcaactatttaagcatcatagttaggaaaataaatcaattatggctacccttattgctcccatcaaccattctcctgttgctgatgcagaagctcttcatggagctttcaaaggttgtataatttctttaatttgctttctttaatttactcgtaaaaatattgcgaagaacaattgtggttgcattgcgttctttgatattgctacgaacacatggtaacatttgtggccatgacacaaaaaatattgatgctgcggtccaaatcgtgtatgtgaatcttggttataatccatgattttgaattgtgtagg

SEQ ID NO: 35466 - DNA, 723 bp, Medicago truncatula
  Intron number 2 from transcript Medtr8g050400.1 (locus Med tr8g050400) derived from phytozome v7.0 (chr-ID MtChr8; po s 11343774 to 11344496)
ccgaagactctcctcgacctgtttatttcgggttagaccccttttgttatttttgattgtctatattttagaaatattgttactaattatgccatgatttcaatgttcaaggttacattatgtttttagtcaaatgacaccctgagaccgatccagacataattaatattttagtgtggttaaattatgaaaataactgtcccgtgaacatagctcagttggtaggataatgcattattatatgcaggggccggagttcgaaccccggacaccccaattattcaccttataaggtgaattatagccactaggatacctgacaaaaaaaaaacacaagaaaatgtcttcatcttatagagcagaacaccggtgcctgtctccagagaagtcacttggttgcaaggtttgccctacaatctagaggaactcggttcgagacccgacacgaagaacgtaataaaagacaaaatccgagagttgaactgctcaactacaaagcacatactttagaaacttaacgaattgaagtaatgctgtcttaaaaatcgagcacttaatgtttcaaaagtaaaaaaagtattcatatcatcgcaaaattgctttttaaaaatctttaacatgtgttctcaagatacgagtaagcgagaactttatcgtaaccgtctaaatatcttattcaggaaataatactttttatttttaatggtgcagacatcgaaacta

SEQ ID NO: 35467 - DNA, 580 bp, Medicago truncatula
  Intron number 2 from transcript Medtr7g138680.1 (locus Med tr7g138680) derived from phytozome v7.0 (chr-ID MtChr7; po s 32974865 to 32975444)
cagacagttgatattggtgtggcaaaatttgcaaagtaactatatatattaacaaagtaaagctttaacaacttaaaaactatagcaaagtggtttgggtgagagcattttaccatggtgttgcaggttcgattctcctcaacaccatttttaatattaataatttcaaaaaaaaaatcaaaaattgcaactcgccgagagttgaacacaagatctgcaagccaaccatcaaatgtatatcgctagactaacaaagaaactttgatgcattgatgacttatgttatatatatacttagcgtatatttggtgtggcaactgccacaccatgtttcatagtagctccgcccctgattgcagtgaatctgaatccaaattcaaccctttttctctttgaccctcttctaccctttttctctttgaatttagattcagactccaaagaaagaacttgagtaggaactcggatttaaactcagattcaattggtgaaaatgagggaagaaaattagttagtgtggttttgttgctgtggtggttctgttgatggtaaaaatgtgatgtttaggattggaaagttt

SEQ ID NO: 35468 - DNA, 424 bp, Medicago truncatula
  Intron number 1 from transcript Medtr7g143440.1 (locus Med tr7g143440) derived from phytozome v7.0 (chr-ID MtChr7; po s 34420374 to 34420797 reverse strand)
ttcttgtttcttcaagcgcacctctttcaattcaagtatgtttgattcgattatgttcaattctgagtttgattcgattttatttgattctgtgtttgggtttcatgtcatgattttcttgctctattattgttcaatttccattcaaactatgccattgatgagtattaaactcaaagtgaattgataggtataaaagtaaaaacagaaatctgaatgtgaagagtgaaaaaacctaacttgtattcagaaaacagaaatctgtattaaaccgttgtattctccttctgtattgtacttttattggtcatatgaaatttcgttatgtgtttaattaggtaatggttaattatgttcagactgagtcattcggttaactcaaatgttctgacgtcgattgcattgtttttgttggtgtgtgaag

SEQ ID NO: 35469 - DNA, 843 bp, Medicago truncatula
  Intron number 1 from transcript Medtr7g106320.1 (locus Med tr7g106320) derived from phytozome v7.0 (chr-ID MtChr7; po s 24554913 to 24555755 reverse strand)
ttctcaaaacactctccattacttctggttcaccggtaattcattccaataacaccctttttctaaattctcaatttttgttactctactgaatcatcattttagttattgaaattgtagttattgcataatttggtatcaaaatttactctttcatcatttagactcggtgtagattgacttatctgagcttatctagtgggataaatatttgtgagactgtttgtagagcttaggaaaacaacttgcaacttatataaaaatagtttcaccttatgggcacgtttgaattggcttatttttgagcttataaaaaatagcttatgcaaataaataagcttttatgttagttcataagttctcactaacgaaaagtgtatcttcacaagctgtttttttttataaactaccttgacaaacttatgaataatacataaaagcttatttatttgcataagttgttttgcgttagctgaaaaataagccaatccaaacgggctatatatatgacaagcacttatgctataagaggttaattaagttgtttatccaaataggactttaacatatcagaaagactaagttgatgcattgtttatggcatagttagtgggagtgtgtttccataaatttgtttagtgctttcgtttatctttagtttatgatataggttcatcataattaattgattgatattcttcaattttaagactaatttgttatttcgtaaatttggacacgaattttgaagacacttatgattttttagtgcaaaatgatgacttactcgagtttttttgttaaaatgtattgattttgagttttctcaggttctggtcaaga

SEQ ID NO: 35470 - DNA, 467 bp, Medicago truncatula
  Intron number 2 from transcript Medtr8g106430.1 (locus Med tr8g106430) derived from phytozome v7.0 (chr-ID MtChr8; po s 23863022 to 23863488 reverse strand)
actttgagacaagttctaattcaggtgattcagttataatatatgatgtagaatactataatctctatctttaagagaaaaaaaaaaattgatatacaaaactattgtaaattatagagtggtatagtatagtatagcttagtatcatatatgaagccacgtgtcatgatacaatattatggcgtctaatgatccttactgtcgagcgaaacttatttgatgttgtcaagataggtattttctttcgatgttttcttctaaaaacataaccaagaaaacatagttttaagtgatttctaactatcaacaagcatactgtttctgataatttaggcttcgagaactgttgacatgtctattcaatcaaaaggatattcaattgatattcctggtctgttcattcatgtatcctacaatcataataacaaaatttggtggatttttttgggtataaacagggagtagac

SEQ ID NO: 35471 - DNA, 642 bp, Medicago truncatula
  Intron number 1 from transcript Medtr7g117010.1 (locus Med tr7g117010) derived from phytozome v7.0 (chr-ID MtChr7; po s 27209765 to 27210406)
gagcttattgttagcttagtatcatctcatgagatgaattatcataaaaatttgatttgttagattaaaaaatagtgcagtatgtatgaaatatgctgtgcatcaataaacgaacaaaacaattgatcgagttaattggcctagtaattgtttttggtttgcatatttgaacaggtcagtatgatcattaatgaaacacttcggctctatcctccaactgcaagtatttattttcttttgaatttttctttgattttcaattgtgttgtcaagataaatttcaatttaatgcttttaattttcttttcatttcaaacaaacctattcttccttacttgcataaaacctaatcaaaataaattttctactatcctaagacaattagaatgtatgcaatgactaaattacaagaatcatttaaccaattagtgactaactaactgaaagtgaaatacacaataataagataatttatgaacataaactaaatttttatatgcaaatttcgcaaatttactccaaagaataagaaactgaagagacattacatgattcttacacatcaagtacttttataacacattcaccggttggtaagatattgcaggcactaaagggaatagtgaagcttcaagttatcat

SEQ ID NO: 35472 - DNA, 187 bp, Medicago truncatula
  Intron number 4 from transcript Medtr7g080080.1 (locus Med tr7g080080) derived from phytozome v7.0 (chr-ID MtChr7; po s 16820638 to 16820824 reverse strand)
ataatcttgtaaaggtaaatgccattgcagcgattatctttcatgtatttatgtagttatgttttactgaatactgtatctatgttatacatatgtggttgttggtttcctctgatagaagataatgatctcactgatttgatttttgttttcttacgattgttctttttctgcagtttatcggagc

SEQ ID NO: 35473 - DNA, 245 bp, Medicago truncatula
  Intron number 2 from transcript Medtr7g080080.1 (locus Med tr7g080080) derived from phytozome v7.0 (chr-ID MtChr7; po s 16821534 to 16821778 reverse strand)
ctagctacttttaagggtaggggaaagaagaaatttattatggattattattttaatgttcatctatgatgtaataacaataaagtttgtatttttataattttattattgtttttggttggtaaagtttgaattttgaacaagttatgcttttggggtttcatttgtggaaaacaagattaagggcaagtttgttttttgttttctatttttttgttgtagctgaaaattttgtggtgattgaa

SEQ ID NO: 35474 - DNA, 911 bp, Medicago truncatula
  Intron number 2 from transcript Medtr8g121150.1 (locus Med tr8g121150) derived from phytozome v7.0 (chr-ID MtChr8; po s 27945676 to 27946586)
ccacaaggtgtctagctgaattggataacattaaggtcagataagtgtttctttacatgattagaataccaagatatagagaatgcatctataattgcaagttttgaatcaatctcgaccaaactataatttaatattgaggatagtagctgcagtttagcatgtggcacctgaaaaattaagaatactgcacagtttcccatttctttacagtgctagctcttatttgcagctctcccatcttttcctacacccactttcactaatctttcggagtagtttagaaaatttccctcgttctctagttttagcagtttttttgtgaatgcttttgttatttgatgatatagatttcattggaacaaattcttcccctgcaacacttctgcaattatgtatgtggctacaaaattataaatttgaaaagttcctaataatctattcgttaagtttcattcatgcagatttaaataaatacacgtcttttttataaagtgttttgaatggtaaaataataaaggcaaggaagagcaaatctgtatttattttaggtgttttccaaaacatgtgtatgcttgcatatacgtttataatgtctgtagtacgaggcccaaaatggattggtgaatctatgtggtcgatggactgactacatgaaataatttgatccatcctattagctaagctagccagttctttgtgatataatttttagaacttatgaagacgggggagccggtattcaagtcctgagttgttagcatgtagctaaagtagttcagtgctatttcagaaaccaccccgtttccatgcatagataatgtgatttatagtgcctgagctgcatgaccttttttgtgtttccggttgtggaaataagctcaaatctttaagttttttctgcagggaaa

SEQ ID NO: 35475 - DNA, 802 bp, Medicago truncatula
  Intron number 4 from transcript Medtr8g129120.1 (locus Med tr8g129120) derived from phytozome v7.0 (chr-ID MtChr8; po s 30379738 to 30380539)
gcagtggagagtatcttgtatgttaccttttctttacgggattgtatgttgccttattgtattgcatttagtactatacttggttaatgtgtaatcaggttttatactttctatgtaagtaaggataggaataggctggaccgaccgacctagactttacaaacaccaaacatggcttggactaacacttcaaggcataggactgatctgtagtctgtcatagtcataaacttaaatttaggcttgagtctgcaattattttatgaacatatttaaataagcaatattatctatatctaaacaaactaatgcgctaatagaagaacaagattgaactccattttgatattacaatcacccttgtcggttagcctgacttattctcatccctacctgtaagtatagaaaagactaacaagaaaagttacttattttaaccacttttttatgctttctcatccgcctcttcttagcactggtaagttttaccaggctaattgatttaaaattaaatgttaaatgctgaatttttttccataaaagagaaaggaaagaaatatatgatatactgatatagtcgactttctttttcgtttttttatctttctgttaatgtacacactactgattattttgcattgaggtggcctgtaaaattgtagttgcctcctcctttttttttgctcaaccaagtgagctacccatcccccctcccaaaatagttgctccctctggtttattgatttatcgtacaaattagattcatataatacgaactaaaattccattttcattgttagga

SEQ ID NO: 35476 - DNA, 926 bp, Medicago truncatula
  Intron number 1 from transcript Medtr7g120790.1 (locus Med tr7g120790) derived from phytozome v7.0 (chr-ID MtChr7; po s 28277806 to 28278731 reverse strand)
ggacgatcaatctcaaacaaacgccgataacagtatttttctacaattactgtttttattcttcacttcagccagcatactacaagagaacttgatacatgcatttttttcatttatgatatatgaaaagcatttcttcatttttatatgatccctttttattttttacgagtctattcaaaaatatatgaattatacgttcaacattattatagtaattaaagttctctatttttcaaagatcctctaaaatgcgacgtgtttttcgttcgttagtcatagttatatcagtgtatttataggaagggtgttagttccagtggatcttctgcctacttaattagatgagcctatttagcttgttgcataagttagttgttgattcagttataacttactttgtaaaaggataatgtgagatacatttcatagaatcattgatcaagagacaaaatacagtgatttccttcctagaaagtaatctgcatgatcatcgtgcagaggttgtaggattcaaattgttatgaatctcgataaatcaatgcacgttcgtctgtctactttgtgcaatcttttattccgcgaatttcagtttctatttcaatccggtttcaagaatcttcttgttgtgtccaatttcgatcaaatgtttcatacagaggtagttagttaaattaagtatgtttataatgacgaggatgcaatgattttgtcaaagttctaaattgtagcttttgcaaaaatcaaagcgacacactctgtaattttgcaaaattcgcatagtcactgttgtcaactcatctgcactacagacatgtaatcttcctgttaattagtttgagtttcattcttgtattacattcgattgactataactcttcgttcaatgtctcaggtgataaatcatcaacggattgggacaaggc

SEQ ID NO: 35477 - DNA, 268 bp, Medicago truncatula
  Intron number 2 from transcript Medtr7g138200.1 (locus Med tr7g138200) derived from phytozome v7.0 (chr-ID MtChr7; po s 32733987 to 32734254)
gacccaaggtatattttttttttttacccatttcatcattttgtatcttataatgattaatttccattttctctatttttcaaaacaaacaccaatttgatatattattcactttcttagcttattgatatgattgttttattttgtccatgtttattaatttgattaaagggttttttgattttaatatgaatagatttgttttgatgatttttttttgttgggtgatgtagacgttgtgcaacgcttgtggaataaggtatagaaa

SEQ ID NO: 35478 - DNA, 1040 bp, Medicago truncatula
  Intron number 2 from transcript Medtr7g143680.1 (locus Med tr7g143680) derived from phytozome v7.0 (chr-ID MtChr7; po s 34541400 to 34542439 reverse strand)
gtgctggtaacaattgggctagtggctaccatcaggtatgcttactttaatccatgtctgtcagtgatgctccatttctttgttatttctagttttctacattcatagagataatgtttaaatgcttgtgtgcttcattgcttgcaaagacacttatgatagttgtccatgttgcctccttacaagaccaagttacaaaatattctacaaaaataacgagtccctaaattagtagtgaatggatagataggacccaagttagtcacaattcctgaaaatatgtgtaagggcgaggtgtataagagaaggaatagagatcagagagggtgtggattatgtgaggatcattattcttcaggtcatgcttgttaaggatttaaaagaggaaattattgatgagttttatgtagaaaaagttgtttttcaaagtctaaaatgcccttattcattccccttgaactttctcctcttggtttccttctttattcttctagttctccttcatttactcagtctcaagtgtcttttgcttgtaagttggttgcaattccttcttagtttatacaccgggagttggcttaactactcatattcaataaaacactaacaattgtcttcattacaaactatatccattacacgatgggttttaatcaataactgtgatctattggatgactaacagtaaccggcacttggtaaatcactgaaaattaatgcttcacatgaaataacataaaggcctgagggaaaacattttgtgcatgcattttttttttacgatagaactagaaaagcctcagatggtctgactctgactggatattgtcaaccttccgtacctgggtagtttttttacagaacctgattttagtttttttacaggacctgatttttgttttttagatgactttgcaaatgataatcatgataaatcacttcgtaggagtcattatccactattttaaaatgtaagggaagttcttgatgtgaagtaattgtttaacatttttgattgttaatatctgatcagggaaaga

SEQ ID NO: 35479 - DNA, 726 bp, Medicago truncatula; identical to SEQ ID NO: 32749
  Intron number 1 from transcript Medtr8g008950.1 (locus Med tr8g008950) derived from phytozome v7.0 (chr-ID MtChr8; po s 1132005 to 1132730)

SEQ ID NO: 35480 - DNA, 363 bp, Medicago truncatula
  Intron number 1 from transcript Medtr8g119140.1 (locus Med tr8g119140) derived from phytozome v7.0 (chr-ID MtChr8; po s 26928590 to 26928952)
gtgataaagatttatctgtgttttttgtttgtttgttttttttacatttatctattataaaatcttgtgccttgtttgttgcatatttatttgcgataaaattctatctcttattctatttttactcgtgagtgacaaacacttgtccgctatattcaatttctttatagatgattaatatttattagcggaaaaaagcttgtgtcagtgtttatttttttatttttatatttatcaattataaacaatattagaactatttgattttaatcaaactaaaatattatatgatagggccataaaaaaaaaaaggacttactgaagtaaataattatattcgaagagaaggttggggagaagaga

SEQ ID NO: 35481 - DNA, 958 bp, Medicago truncatula
  Intron number 1 from transcript Medtr7g102800.1 (locus Med tr7g102800) derived from phytozome v7.0 (chr-ID MtChr7; po s 22917980 to 22918937 reverse strand)
ccttaaacaacagtcattcacccagcaagattgtgggtccagtttcaaaattttggttttgatcattattgtccaaaattagaaatatctggattttcacgcaagacaaaattcacttacctttgcacattgcatcagatgaaataatgtcaaaaacttgtttccaggtgtagttattactttttgacatgaaaatggttagacctgtccatggttcgactaataattgaaccaaaagtagcccccttcatttgtttctgaaccatattctcaccatcatgtcaagtataatgtatatataggactaatttccacaacattaataggaaacaaaactttctttgcttaataaatcattcttctatcaaatttcattgattatgtgttattcctttttcaaaagagtggtgatacatgtaaacccccatgtgacaatacacctcttacacccatacaaaatcctgatatgtggcaaggaaaagggagaggagatgaaagagaaagtatgtttgtgagatgaatttaccaaaatgtccctaatgcatggagtatacaataggggtgtatgattaaatgatgttcatgtaacattttccttttcaaaatgcattcttttctatccatctttttccaagggatgaatccccttccttcattgttcttctacgatcacaaattttgtgtgctcctgaaagtcatgtgttctcaacatcttccaataaatagattttcaatgcattctcattttatatatatttgaattttaatcaacatatatgaagcacggatacgaatacagacactggacacgacacgaacacaccgacaccgttaataatctgagaaaatcctataatttagtgtaattatatgtgttggtgtggtgtcggacaggtggaagtgtcagtgcttcatagatcaacatacattttaataaacattttaaacagagaaggaa

SEQ ID NO: 35482 - DNA, 374 bp, Medicago truncatula
  Intron number 1 from transcript Medtr8g115550.1 (locus Med tr8g115550) derived from phytozome v7.0 (chr-ID MtChr8; po s 25983280 to 25983653)
actccctcattttcaaacacttgtctaccacccaggttcaatttgtaacttcattatgatgaatttttttttaacgacaaaatttgttgaattgagagaatggaaaatagtacaaagtagtagtacatccaaaatttgaaaagtccaatgtttttggtctaaattttgcaccggatacattttactttttgaatcttttgacgacggagaagattattctttttaaataattacataaaattttatttcttccattgtttttatcaagcaaaaacggatagataattgatggttattgttttgtggtgtttttatttttttatttttttacttttgcaggctgggtgttgtaagccaccggtgtactgtggatt

SEQ ID NO: 35483 - DNA, 571 bp, Medicago truncatula
  Intron number 2 from transcript Medtr8g005480.1 (locus Med tr8g005480) derived from phytozome v7.0 (chr-ID MtChr8; po s 291588 to 292158)
gccacaacacagagacaaataaacaggtacgtatggtttttgttttctgaattcttatcatcaaaatgcatctgattgaaacatattcaatatcacaattcaatactgctatagtttattattataaagatgtttattttagatataattaagggatggatagatatatcatattctccctcttgctcttgtattatattttatccataagttctttctagcttgtctgtggaacccacttgaaccttaggaattagaactgacatatttttgctgctttactcctacccttgttttgccggcttaataatggaatacatatataaccttttcttagcttcaaagttagggttaaacttgatctcaacttgcacactactcttctgtctttgatgtgtcaaacattgatcgatcacaaatatatatataatcacaatgtggtccaatacatgcatacacactctggctgggtaacatatggaagcaatattcaagagatttcaattatgtgttatttcctttctcatttttctcactatttttactcaaacctgcagctcaactgcatttg

SEQ ID NO: 35484 - DNA, 836 bp, Medicago truncatula; identical to SEQ ID NO: 32703
  Intron number 2 from transcript Medtr8g125400.1 (locus Med tr8g125400) derived from phytozome v7.0 (chr-ID MtChr8; po s 29237348 to 29238183)

SEQ ID NO: 35485 - DNA, 684 bp, Medicago truncatula
  Intron number 1 from transcript Medtr7g117680.1 (locus Med tr7g117680) derived from phytozome v7.0 (chr-ID MtChr7; po s 27536073 to 27536756)
ataattttctctcttcactctaagtctaagccaaggtaagtgaaatagtcaattgattctctactttctcattcattctacaattgcttttttagggttttagaattgtgaattggggatttgttttttttttttagggtttgaattggggttttaaaattctgcaatgaatgaatttaagcaactttagggtgatgtgaactatgatttcaacctgtatgtgcaagtttaacaattcatcattttcgttgtttattttgctactgccggtgccgagttttatggctttgtttgttttgttttattaataatacaagttaaaaattgcttgtttatgataattgattaattattgtacaatggtgtttataaattataggatgaagaaattcttccctgtgttgaacgtgttttttcagctatgaatattgtgatcaatggttaaatgatcggcttgtaacttttattgaaagagatgttcttttcacaattagcactgatgttattctagctcattttcaacaaatggatggcagacgattttcattgtaatttaacaaatgtatggttaaatgtttatatattatttttagtataattgtattatagtttctttaaaaaatttgccacactaatatgcaatgtctagatccgcccctgatctgagggcttcaacacaatcgg

SEQ ID NO: 35486 - DNA, 1067 bp, Medicago truncatula
  Intron number 2 from transcript Medtr7g117680.1 (locus Med tr7g117680) derived from phytozome v7.0 (chr-ID MtChr7; po s 27537098 to 27538164)
tcgacttgtgcaagcaactccaaccagatttggtcgtctgattctttctacttataatatcagttacatctagctgttgttacattttgaattttatagttttgatttgcagaacatgcgtttcagtgtgatcgatatttggctagcttaggcatattttgtacttgagattttggtttctttattcactaaataagtttatttcttcttataaattaagggcatcaaacagtatttcaattttggttttttagatacataatccataccgaaatatctcaggtaattatgactgaaacaaaataagtactaacattgttattttgcaaaggctattaatcatgttcatagggtggttcaatattacaacaaaatagtagaggaaaattcattatgtatcaggttaatccttctattttacttttttttttttttttcaaatacaaagtcaccaacgataataactaactcactttaatcggtcacaaacaaaacataagttagttaattagtttgaaaataatccaaagtcagtttccacctaactaaccttcttttttcttttccttctaaaagaacctcacacatttttgggggtggcaaaataaatggatatggatttggacccaaaggaagggacaaaaaaaatcctttagtcctttaaaatccccctttttttttttgaaaaaaaaccatccaatccatccattattaaatttaaatggatggattatccatccgatccgtttaataaaatgtattatttattttttaattttttttaacataattctttagttaattaattggttttacttaattattttgttaataaattggtgctgaaagtaatgacattcataattccttttttaattaagcccaatgcttatttttgtataagcacaaaacatattttttttaaagtccaaagctgaaaataaaataaataaataaaaggtggtgttgcaccgacgttgactaccggacaccaccgttgaccggcggtctctggcgaccgacacggcggaggacggtggcgatattgccaaaaatccagattttac

SEQ ID NO: 35487 - DNA, 348 bp, Medicago truncatula
  Intron number 2 from transcript Medtr7g107760.1 (locus Med tr7g107760) derived from phytozome v7.0 (chr-ID MtChr7; po s 25257269 to 25257616)
gtcgaatcagtgaatccggtgagtgattttcatggcaaaaattatgggtccactggccacatcaaaaaagacgatcattgacactacaaaattacatggaaattgcaaaattgttgttgaacaccatttggccatgtgatgaatggttacttctagaaacccagaatctcaattctatcttcttcaattgaactcagttttaagtgctggtttcattctaatttcatacattgttccatcagcacatacatgaatgctaataacatttttcccgtattatttgtctgtgtattaatcttttatgtgacaccagtcctgcttgagaattgcaaccaggttcacaaccct

SEQ ID NO: 35488 - DNA, 893 bp, Medicago truncatula
  Intron number 1 from transcript Medtr7g124130.1 (locus Med tr7g124130) derived from phytozome v7.0 (chr-ID MtChr7; po s 29087969 to 29088861)
accctgcctttactcactccttcccttgtaggaaagtttgttacaacccaaatctttattctgccttgtctcttatatcccaaatgtggtctaccacaggagtgtaactaaagtttgtatatcactgtagtattagtggagtattctatctgtcattaatttaacagatattggaaagagagaatggatatgcataaatcttcctaacgagaaaaggaaaataaagaataagaataatactccctccggtccttattataagaaaaagttgactttttaggttcatagaataattaatgtatcttattgtaaatatagactagatacatcacttacacaatgaaccaaaaaaatcaattgtttcttataataaggaccggagggagtatgattttagactcttcaatgtgttttctctcccttcatgcagtgctcctaaccattattcccttgctttccgttccccttttcatttaggtaacaaggttataacctaaatccacattatgtccattactcatattgtacttaatgtcttaagtttctattccccgcccttccttcaaaacttctaagaacggatctctttccttttccttttataagattcaattatattcagaatttatctgacctatttgtagatcaatatatgctttggttgaacaatcacttaatttgcatcagaacttgacaatagcgtagacaaaaaggaaaaagttcctttggttgaacagtcatttagtttgtattcaaacatgacaaaagtgcatccacaatgaatagtcattacttttttccaacattgaatttgattcagaacatgtctgacctctttgtaacttgtatcatttgcaggatactttcattgttctctgatagttacagaacag

SEQ ID NO: 35489 - DNA, 951 bp, Medicago truncatula
  Intron number 1 from transcript Medtr7g140060.1 (locus Med tr7g140060) derived from phytozome v7.0 (chr-ID MtChr7; po s 33647429 to 33648379)
atcattccttctcttctctctgggggtttcctgaggtatgcatgcatcaatcattctattcctaatttcttcatttttatttaaccttttctctctgatttttttttttttttgtttatttacgatcaatcgttcgcactttttttttttttttttttttttttgttataagattgatcaatcacttgctttcatcctgatttgattattcttgaaacctaagctatctcgtggatctgtatctttttctccaaaaatttaattgttttgtttatttattaatttttcaattaatgattatgttgaattgaatcttttccatggatgccaatgggatttggaagaatccgagtcagttagtatctgttttgattgacctatttgagtttatgtactgtctgtttcagagaacgtgtgaaaacagcttacgactttaagtcataataagttttcaacttattttcacaagttctccaagatagcttatgaaaacaacttataaataatttaattttatctttgttatagaaatgacttgtattaagcgtttatcatgataagcgcttatgttataagctataaatcaagctgggtcgtaactagactggatctatctagtgatcaattaacttaacagcgttgaatttggagttctgcttttgggcttgataaccatattttacttccagttaaatcatctaattccttatattattggcaatttgcacgagatgctttagtaattgaacaaaattttattttgattgtaattttttaatgttttggaagatttttttggtgctgttgttagatttctgtgaaactcaatcggccaatttgttttgaatagtctgattttgatactttctattgtttatctaacaaatgttatttgtcttcgcgcattatatttatcacctagctgttttgttcttcagatcacattgaaca

SEQ ID NO: 35490 - DNA, 876 bp, Medicago truncatula
  Intron number 1 from transcript Medtr7g135750.1 (locus Med tr7g135750) derived from phytozome v7.0 (chr-ID MtChr7; po s 32368139 to 32369014)
taggtctcctggataccccgggtatgggatagatagttttcagtattgatatcgagtgtatatcacattgatactagggcagagatttgattgtttagccataaagattatacctttatcctgttttctggtccaattttatcgtaatgcaatgagtatatgatgtcaaatgctatatattgctattgatatgattgtatggaaagtaaaaagatattggttctgtcaatgataattaactcaagagatttgttcctcgttttacggtaatccaactttggtattttcaaaattcattaggttgtaaacatgcaagtggttataatgcattacactgttctgtgataccattaatgatgatatagatttataagtgagttcattcttgaaattgtccattcttctaatcttttaatgagggtgaatgtgtgtggacttcaattgtgtgcaaactgtaacatttacatttatgctttttatcatttgcctatttcatttttgtcaactgcgtaaaccttttgcgatgagttcggtcaacatgtatgtgtgttgcatgtaatctatttggaaaagaaaaattcagtgctttcaagtatttaccttaaaacctttttgagtatacttttttattttccttgtgggattagatttcaggaggtagtattagtgagtgtatatctttctggtcagcacgtttttttttctttcttttgatttactttgaagcatacacgcttaaatttgcatttgaatgtgtggattggattaaaatatagcatgtgttgctcttttatgaattattcactcaaggtattctacattaccaactttctcactcatcttacttgatttgataaactgaatcagctggctgca

SEQ ID NO: 35491 - DNA, 861 bp, Medicago truncatula
  Intron number 1 from transcript Medtr7g089620.1 (locus Med tr7g089620) derived from phytozome v7.0 (chr-ID MtChr7; po s 19784117 to 19784977 reverse strand)
ttgggttaggtcataggtgtggtttacggctatagtttcttttttagtagaaatgaaatagagtctgagtgatgagattagatgatgagagaaagtgaatggaagtagtattttatgccgaaatttaatttttggcctaatcataagtgagtgtgaggagggataaaatagggagtggagttagcatcgattcagttcatcagtttcttggatttcaaaatgaaaatacgagaaccgaactagacaaggtcggatgcattttttgtttggtttggtttcgacttccagtttcgtcgattttgtccaaaccgtttacacccctacataatcacatgtttggatcaccacatattagttattttttacttccaaacctaaaattattccaaccctaaatcaattctacccaaaggcttacatttcctactttttcggtgacatgatatcaagtctcatatatttttttaaaagtagcatacacacacaatcaaaagcttgacccaaactatccaaacaagtcacttttttccgcaaatagttttatgtttatttcctttcgatatggatcaattcaatcaaaatcaattttcataagcacataacgaaacacaatttgtgaagaatagggagcaaacttttgtgactttttgtaatttaagcgtttttgacgtagatgataaccattaagatttataggcatagttattgaacaatagaaacacttaaacatgaagataataccaaatttaaacaaacatcccattcagtcctataagctatatttttctcatacactgtccaagatatgaaagctttctaactaagtgatattttggttaccttgaattcaccaggtttcta

SEQ ID NO: 35492 - DNA, 776 bp, Medicago truncatula
  Intron number 1 from transcript Medtr8g090220.1 (locus Med tr8g090220) derived from phytozome v7.0 (chr-ID MtChr8; po s 19620173 to 19620948)
ggaagcatcgcccgcaaccgatccagatcaatctcgtaagttcttatttttccctctctctttcgtttctgaaattctctcgattaaaatttgtagtagcttgtatgaaattatgaatcaatgaatcctcttatgccgtgaaatttatgatgaacttgttaggttgaaaaaataacgttacactgttttttgtatataccataagttgtttcaatagggccgtttggattggcttatttttttgcttatgaaaaatagcttatgcaaataaataagcttttatgttattttataagttctcactaatgaaaattgtgtcttcttattcttatgctgttattttcataaactaacctgacaagcttatgaataatacataaaagcttatttatttgcataagcttaaaaataagtcaatctaatcaggcccataagctatattggagaacttatgaaatcaagctcaaataagctatattggaaaacttatgaaaattgtcataagctgttttcataatctcacaaaacttatatcagtatataagctcaaataagacaatccaaacaggggcttagttgctccatactcaatgctgaagaaatagacctaaaatttatacatgagatgatctactcccttgtattgcataattgcagtatttttcgtgtttgtagttttgattcgtagcagtatagaagattgttttttgttttagtatatgttctttgattgtgtaacagagaagaagaaattattagctagtgctaccactgca

SEQ ID NO: 35493 - DNA, 374 bp, Medicago truncatula; identical to SEQ ID NO: 33200
  Intron number 2 from transcript Medtr8g137340.1 (locus Med tr8g137340) derived from phytozome v7.0 (chr-ID MtChr8; po s 32903689 to 32904062)

SEQ ID NO: 35494 - DNA, 704 bp, Medicago truncatula
  Intron number 1 from transcript Medtr7g126780.1 (locus Med tr7g126780) derived from phytozome v7.0 (chr-ID MtChr7; po s 29525612 to 29526315 reverse strand)
aagaagaaactaaacgtcttgctaccattcgtgaggtttatattttcaacctttttttttttttttttagatttatcttgaatttcattttcactcaaactttgaaaccctttttatttttggaaaaaaaatattaatttttttgaaaaaaataaattgaccaaacataagtacaaaaatttaaggattcaatacgaggaagtagttgttgtgttggaatctggtgaacaagagtttgttggaataaattaaattttattttatttatttatattttctttaattgaactatttatttatttttgcaaaaacaacaaggtacttgggtcattttcttgcatattattcttaataaatcaagttttgttgtaataattagattaatttaggcttgtagaacatgcagagcacttgattaagcccgatctgttgttttgttctaaaaacagagtgaatttgaattcaaaaataattatatttttcttttctcttgtcttttatgattcccctggatttgttcttgtcagaaagtagtattagtatatgaaacaaataattaataatttgtctttaaataatatattcatccattaatttttttttccttccataagcatgttgatatattgatatgtaattgaacaaattgcaaactttttgttatttgaggaatatcaggagcttgaagcccttgcagatccaat

SEQ ID NO: 35495 - DNA, 866 bp, Medicago truncatula
  Intron number 1 from transcript Medtr8g065760.1 (locus Med tr8g065760) derived from phytozome v7.0 (chr-ID MtChr8; po s 12470403 to 12471268)
aagcaagattttgggctgattttgtcaacaaaaaggtaagttttgttaggtaccaaagtttgttgtgtcccattcaatggtttaacatatttttaccaatcaggaaataaataaaaatatctaatatctttcttgttagtagtaacttttgattcaaagttttcctttttcttgtattgtttttgcttttgaatggatcaagatttgttcatgaattaaataacatgatggttaccttcttttttattgttttctctaatattcaatggatggaattttttttgaaggattcaatggatggataattattagttaatcagacatcatgaatattaaataataggtgaaatacatctaaatgtccgtttttcgtttttttcaaagtgatcctttaagtttcaaaagtcccaaagtggtccttttagtttttgaatcgtttcagaatcatattttccctttgaaagctaggcaacaatggtctatgaataaattcttctccattaccttcttcactttgttcagttggttgaattttgatatgaggatgtgatctaatcaactcatgaccataatcataaagcctcctaaactgctccttaaatgacagaaagtatgattctgaaacgattcaaaaactaaaaggaccactttgagacttttgaaacttaaatgaccattttgagaaaaacaaaaaacttaaaggacctttaaatgcatttcacctaaataatacttgtatcccttccttcctagtgagatatgagtataggaaacattcttcatatttcatcaatggatggatttatcattcatcttattgttattatattattaaagactaggttgtattaatgtgcaggttggtg

SEQ ID NO: 35496 - DNA, 786 bp, Medicago truncatula
  Intron number 1 from transcript Medtr8g012980.1 (locus Med tr8g012980) derived from phytozome v7.0 (chr-ID MtChr8; po s 2318929 to 2319714 reverse strand)
catagctggttgagtttaaaaaacaataagtaatgcatatacctattttgatagaatatctaagtaacctaatcgtatctaatacaatctgcaacacattatattattcatatttagactgattacctacacaatctaatttaaaaatgctactgttgaacaattagtgtaatttcttgggacagatctcagaggcatccttgatgattgggcttctaaaaatattagggtctcaaatatttttttagatttatgaatgactctattaagcgtacataaaatatcaaattgcttgcgatgtccgagtgaagtgagcaatgaatataacctatgacatgatctatactattgactattgtccattttaccagcaaaacacatattgaggttttctcttatgatgaatttcatgcctccattagtcattggaagtacctacagaataatcaagagtgttgataggactgagcctattatcaattcatcaattattaactaagcgggagaaaaaaaaaatacttggtctatgtttagtactattttagattagatgaagatatattgatcctagaggtctccaaaatagtcgctaattcacttagtgatcgattttctccatttagtgaccaatttttcggtttctaaaactagttttcttgtagtgcctcattaaaatgaaactatatacatcggttggatgccacctaatttgattggttgagttaagctcaattgtgatgatgtttggaaggaatttggtactcttgtgagattgaaaaatttacc

SEQ ID NO: 35497 - DNA, 813 bp, Medicago truncatula
  Intron number 1 from transcript Medtr8g081940.1 (locus Med tr8g081940) derived from phytozome v7.0 (chr-ID MtChr8; po s 16970189 to 16971001 reverse strand)
actccgtcatcgccggcttttgcttaggcatcacggtaatatcaaaaacctaatatcgaaaataatcagcaaaactatgtttcgtataatttcattaattttttttttttctttgtttgaattatttcttgtttttttttttctttttcttttggacgttttattgtagttttcatttgtaactgagattgacaatgatcacgaaaactctagtataacttttttcgttaaaaaaatattagtataactttatcaactcaattctctttttcttctcgtaaggctatgactaatcattcaatacgacaaaaaaaaaattaaaaaagtaattaaggagcaaaatttaatttattaaagaataataaaaattgcaaaatttgatatagtcatttaaaaaagtaagttatttgatcggataaaatatgataaagttataaataaaatagtttatatatatagtgacatcataaatttgaaattctctttatatcttagtagagataccccatggataccactgctaatcattttttgtttaaatttatttatttattttatcattccattgtaactaaataaaaactacaaatgagctcgatcgaaaactcaaaactaatcgatgaagtatattaacttagtggtaagagattaacattgtaattctaaataaacaaaagttcatattccctctaaaaatgtttaaaaatatatattaatgtcattttaattaataatattttcatcttcgctatttatttaaaaaaaaaaaaaaacaaataaaactgtgtttgaatcggactgttttgtttccag

SEQ ID NO: 35498 - DNA, 760 bp, Medicago truncatula
  Intron number 3 from transcript Medtr7g105040.1 (locus Med tr7g105040) derived from phytozome v7.0 (chr-ID MtChr7; po s 23975561 to 23976320 reverse strand)
agtatatttaccggaagagaagaattattctaccagtaataaatctttctcattaaatctgttcataatgcattgttgtgctctagcttctcacttgtcctcaatctcctgatgtgtttagtatgaagaaaatataccattgttcctcaatcttcagcagtatataaataaacttcaattcatttcatcaaaaagttgtcagtttaaaatgcacttatcttcgatgttataaaactgtaaaaaataatagtgtttggtatgtttagccttccggtttgaggacaagcttattgtgttctcctgaaactggtaataacccttgctttattcataaacaaataagactcaaggagctcattttaagggaccggattgacgccaacctaattattagggactaaaagggtacttcactaaaataaagtatgaacttgcggaaaaagtgtttgtcaaaataacattactcaatttttctgttgtttctcttgatttaaatcttctagatttctcaccaatttttttaccttcggaagttttctttatcaaaatattgaagattcactaagatttttcttctttctgttgagcttgctgagtatggatgatttattttgtggtaatatgaggagaataagcatgagtctacacaaaatttctagtgagctttggtttctcaatattttggaaatttcttagtatacttattgatgttttgaattcattaggtcagcaagatctctgtccaagagtcatacgccaa

SEQ ID NO: 35499 - DNA, 712 bp, Medicago truncatula
  Intron number 2 from transcript Medtr8g018550.1 (locus Med tr8g018550) derived from phytozome v7.0 (chr-ID MtChr8; po s 3385277 to 3385988 reverse strand)
tgccggccctctcttctattttcctcccttagtgagtactacttattgcttataaattatagacattctaacaaaatttgtttgtctctaattacattttaatgcttacctttcttattcaaaaaattaatgcttacttttctattatgtcccttacttccttcaaaaaaaaaaaaaatattatgtcccttactatttattgctttatcttttttcagttattttaatttatgttttccataccacaaacaaataacttttttgtaaaataattcgcaattgttcatttctatacaccatttcatgaaatgatgcttatatgtttagtaagctataccagttcaacatttcatgaaacattcagccatcaatgatagaaatgaacaaagaaattcaaagtttgaaaattttatgttattgtttatgaaattgaaaaacaagactaccaagtaattcaaaattattttcagaagaaattctcaattgtttttaatacgtgtgaaattaaaatcacataagatgtatattcttattaagcactaaaacattgcatattctgctaaaaaaacaatgcatactctctcaaaaaagaaatgcataccgcctgctttatatacaaattctttgctaatgcactaatcaagattgatttatccacttactcaaaacactacatgtcttttgtatgtacgttataggacatcttgatttg

SEQ ID NO: 35500 - DNA, 943 bp, Medicago truncatula
  Intron number 1 from transcript Medtr7g143510.1 (locus Med tr7g143510) derived from phytozome v7.0 (chr-ID MtChr7; po s 34452133 to 34453075 reverse strand)
gaagaggagaagagaggacgtcaagaaaaagagtataaactaatatttccctccaaaaccctaaactttgtgttttttatttttatttttccattttctttgtcctcttattaattagagaatgaaaaggatcttaacaccaatctatttgggccactaatggcgaggtatctacctcctccagaggttctgatgatacctacttacttcggattttcattcaacgatactaatttctcacatagaatcttcaaattgatgtcatagatgatccaattgaagctagttctaatgctgatggataatgaattaaaatgtaaaactatgatcagatcaaccatattagggttcccacaaacttaaaagaaacatttttctttgttaaatgaaatgcaataccatcaaacatagatacgcctttcaaaggtgacaaattgttttgggttatcgcccgttttttaaagtacacgataccgaaattagttgtatgtggatttgtttttcaaaacggtatgtgggttagttgtccaatattcatacgttttttttgacacattaccaaactggtttgtcaagggacgtcatttcgaacttaacggtatatgattagttgtcaaacactcatttgatgtttgtgacacattgtcgaaccaaaccttccggtaaattgattatttctcaaatattcattggtcattcgcaacgaatcctgtacttttattgtaaagatcagccaccaatcaatggttgacaaatcatcccaatttttgttatttaagaggagaatcagggcaccggagtaacgcacacatctttctctcttaaaaccctgatttactttggcctagcggcgctttcaaatctgaatgtaaattgagtaatagtcatgtgttatttgatcctgccatggctcaacgatcggagttgttgctgtgtgattaga

SEQ ID NO: 35501 - DNA, 883 bp, Medicago truncatula
  Intron number 1 from transcript Medtr8g086300.1 (locus Med tr8g086300) derived from phytozome v7.0 (chr-ID MtChr8; po s 17610004 to 17610886 reverse strand)
aaccaacgtggttcagcaggaacaaactattcaaggttttattagatgattctgtaacttcttttgagattatatgctattgatactttttaccagagggaaatatgcagaagaaatgaaaatttagcatatgactatgtccaagttttagatgttatgttctctttcaaatatctttgaattaagaccctatttgatccttgttcggggtccaatttagtaccacgaaaaaaatgaataccccaattagtactcattacaactgagggactaatttgagcctgtattaaaatgccaggctgcaagcaaattgtgagggaccataatagattttttttttttttgtcaagtaacccagtgtttggagctcacacattttaaatatggagaagtagggtttccggggttcgaaccccggcccctgcatatattatgcatcgtctcttccaactgagctaagctcactgggagtctgggacagtggctcttttttctttcctaccacgttcttcacatttgttaactatgttctttattttatagtatgttgcacggaaactttgtattaaaggtgtgtcaatgtttgacatgtgccaatgtctgacacatgtgttacatttaatcacatacatttttatattaataccagtgtttgtttacttgtcgatgccgtgttggtgttcatgtacgagtcagtgtttcctatagtcaatgctttttgaaattagtgttcatttttaatggttttgattattaatattaccagtttagttatctggtaatgaaagtcgagcaggatttgctgctgtcataaaatggtgtgtgtggtcacaggaatcaccaaattgtgatttgtggttttatattttatttatgattgcag

SEQ ID NO: 35502 - DNA, 477 bp, Medicago truncatula
  Intron number 1 from transcript Medtr8g021190.1 (locus Med tr8g021190) derived from phytozome v7.0 (chr-ID MtChr8; po s 3850029 to 3850505)
attcattcaaacctagcacccaattccgtttcaaggtataatctactttctattcttcgattattttattattattagctactatcgtttaatcgatcttttcttttgatccgtcaaatttaaattcaattagggttttgttcttttctttcatctgattgaaatccttctgaattgaaccgtttacttgattttactgtttattgtatgatttaatcctttgtttttcaaagacagtctttagattgtgattaggggttcatataaatttttagatttggatttttgtattgtatgattcaaaaaatacgtcctttaattagattagtacatggatattttttacccgatttattgattgtcagggagaatttgatgagcaagtttttttgatgtctgttgtaaattgaattgattataattgctgatctgctgcttccagttttcataacccatattcttttaaccttgttgtac

SEQ ID NO: 35503 - DNA, 715 bp, Medicago truncatula
  Intron number 1 from transcript Medtr8g077400.1 (locus Med tr8g077400) derived from phytozome v7.0 (chr-ID MtChr8; po s 15418933 to 15419647 reverse strand)
cattactgtcgcttttttggtactctctaatctcaaatcacaaatgttgttttattctttagtgatatgcacatttcttttctgatatgatttatttcaaacaaattggtttccatcaggcaatgatgttgttatcagcttttatagatcaaacaatatattaatgtaagaaccttagtggcattggcttggtgtttttagtatctgtttcaaaaaatatcattttttgtggtttatttattctacagatattgataatgcagccatgtttgagaaaaaaagttgaatctgagccttcctttcaaatcctaaagttagggtttttaaactcattaatcgttagtttaagtatgaggctctacattcacagatataaggttgttttgagaaatgttacctttgtgttaatgtggttgccaatgattcgtctccggagaattttgttaacatctctcaacacacatatacttcctctttccttcaatatatgataattgttcttctcccaacacattttgctcgcttccagctgaatttcccaaaatacccatgtttgagttaactcacgctggttttctttctttgataacaagggaaattcttgtttacttcatctttttcttcttcttattcttcttttgataacaaggcagtgatgatgttttatgctattgtatcagacattgggtgaaaagttgattcattggcgaggcga

SEQ ID NO: 35504 - DNA, 705 bp, Medicago truncatula
  Intron number 1 from transcript Medtr7g107550.1 (locus Med tr7g107550) derived from phytozome v7.0 (chr-ID MtChr7; po s 25175627 to 25176331)
tttcactcttcactccattttcgcattctcttcaggttagttaccctccatttcaatttatattcttcttcgcttgaattgttctgctgtgttccatttttgcataattttatgaagtgggcatggattgaattgtgtttagagtcttttgagcatgtaaaggttataactttattttcatagttcattttctttatgtgggtcaagtcctttttgttgattttcagaatcattacttgtgtttgggtggactattgttattggaattaaagctttattttaaattaatggaaattcgagataaatttgatttggttaaaattaagttctgaagcggttaggaatggaggtaatttcagtaaaaaaaaaaaagggaaaaggaggtaatgaaaaatggttaaatttgtagaacttcacagtgattttataccctagaaaattgataaggttcaaaattgcttatcttccatttctcaaagcgcgtctgtttcttatgttgattttcattcacacaattgttgagtgttgatgcctgatgatgaaattattagtctttgcttttggttacttgttcttgatatacaatgttggacattaagttagtgagtctcttactcaattgcgctacgaactatgtatattgttgaccggattttaactcttgttccaggaacgtgtttgaagtagttagaggaacctctgatc

SEQ ID NO: 35505 - DNA, 657 bp, Medicago truncatula
  Intron number 1 from transcript Medtr8g078460.1 (locus Med tr8g078460) derived from phytozome v7.0 (chr-ID MtChr8; po s 15969420 to 15970076 reverse strand)
gccgcacctacattgcaggtaactgtctacagatggtttttgttaagtagtgatgcctcaaaattatgcatcgcaccatttcttactacactgtgatgtgttacctgccagtttaggaccatgtcctctgatagttcactgacacatgtactgaacctcaccatcccaaaaaggagtatttcttattttccagaaacactgcatccctgtcaaatggactcaacaaatgaggactcttgctgcgtgtcaagaggttccataataaccctcaacacctccaacactgatttcgcatgaaaaatactgttttaacctaacttctttttttaagaagagaattcaaactcttttatatgtttttgttgattgcaattggcgggtatccaccagtaactaaatttatataacattatataggtgatatctgtttgatggcaaaggctacggtgggagacctcgttaggtctcctaccgtaggagacttgaattattttttgtttgttttttgcaaaatgaatgttaaccattggatgtaatttaaaacttttgaatgactgagatttacatgttatatgatccattaggattgtgttattgaaacatctatattcattataaaaagggtgtttttggcattggtaaaattggaaaaaaaat

SEQ ID NO: 35506 - DNA, 562 bp, Medicago truncatula
  Intron number 1 from transcript Medtr8g146550.1 (locus Med tr8g146550) derived from phytozome v7.0 (chr-ID MtChr8; po s 35845245 to 35845806)
aatttcactcctgaggaacacattaacctatatacgtaagaatatatcatatctttttctcttttactttgcatatgacatgatattcttttctgcttagaaactatattaatattaagtttgtagtgtatctgggattagttgctgtggattttatgttaattttcattattttaagtatttagggttagttttgagtttttgtttggataaagataaggcctgaaagagtttataaagactatcaatctttacgccggttttgtaaggatgtgttagacccaatatccaccaaactcaatagtgttgggcgtgggaaagtgtactcttagaaatcgtagttggacatatggccgatggatcttgaggaggctctgatactatcttaccccaaacccaagttccacataggacatagataaaaggcggattcaactagtttaagggtggtctcttgactttgtatttgctcaatctcggcactccttgtgttaattcattttgccttttctaaaaattaattattttcccacttaaattgtaatgcaggactgtgtacaat

SEQ ID NO: 35507 - DNA, 906 bp, Medicago truncatula
  Intron number 2 from transcript Medtr8g146550.1 (locus Med tr8g146550) derived from phytozome v7.0 (chr-ID MtChr8; po s 35845872 to 35846777)
tgagtacattgtatcaaaagtgagtaacactctcatttggctatcctactcatgaatcatactcttaagtgtttacctaaacttgaaattatgtatcacatactattattttgggatgacaatctatatatagccttatatttaattcaatgacagactttattttcattctccatagccttgtaagctttgtaaacttgtaacaagcaatgaagctttgattaaatctgaagaatatattaattcctcattaagtctaatttctaatactaaaccatagttgtttccttactcacatgcatcaataggttaaaactagtacatctttcttattaataggttctgccatctttgggagaaaagaaggatgaccttttgttgagagaactgcttagaagatagtcagattacatagttatgaccaggcgcctctcaaaagttttttggtatcttgaacgacgcgacattccaagatataaacttccttctcttgaagaaaccggcttcatatccttttaccacctggttagtgatgagattctttagaaatgttgcagtggtaaagatggtaaaaatacccgtaccctttatataattggaacttatacagtgggaacttatttggattgacaaaccaagagatgcttgaattcattcgacaactatctaatggtgttacacttgcatttgaaaaaaatgtttctatatatgtgaatttctttaatgatgccatacgtgtcttgacctaattatgtatgaattgtgcagttgaatggtggtaatttaactatctttctgatgctgctatatttaatccaaattaggccttgtgttttaatctttgttattttcatttgatatttgcctgtagtttttgtcttcatttgttggtatccagattgatcc

SEQ ID NO: 35508 - DNA, 591 bp, Medicago truncatula
  Intron number 3 from transcript Medtr8g047850.1 (locus Med tr8g047850) derived from phytozome v7.0 (chr-ID MtChr8; po s 10877562 to 10878152 reverse strand)
ttggaacaagattcagaacaagaagggaaaacaaggtaattttactaagttttttttttaatgtttggtttttctttgatgagtttctatgaagcacgaacagagacacgtataccagatatgatacagacactaacacggaaaataatttaagaaaatgacataattcactataatcattggtgtcgtgttggtgtcggtgtcggacacgcgacaccgggacacaattaatccaatccaaggagtgcccctgcttcatagatgagttttttagtgtattttttttccggtgaattttttattatttgattgtggtggccgggatttgaaccccgaactttgcaaatattatgcattgtccataccaactgaagtaagaacattatttatttggttagtaatatgtgattaaattaagccagaaaaaattaatattaaaaaaatagagaagacaagttagagaaaatcaaggagatctgttatgtttttattattactttaattttaacttttttgattttaattattttaatggtgattattttctatttgtgagtttctgactttgttttattctttgcaatctctgtc

SEQ ID NO: 35509 - DNA, 679 bp, Medicago truncatula
  Intron number 1 from transcript Medtr8g092760.1 (locus Med tr8g092760) derived from phytozome v7.0 (chr-ID MtChr8; po s 20083576 to 20084254 reverse strand)
ttgatttgcccgccttctctattctgcggctgtaaaatctcactttctgtttgttttacttcatccctgttacttacatgttggctaagttaattaattagtgggtaattagagaataagacatgtttactatataaaagagagtttgatggaagctttacattttacagaattagagaaccttgaggttgcagagtgtagcaaatcatgttgtgaatttgaactgtccattttttaatcgaaagattaatattttaactgtcctttgtttcaaaaaaaaaaaaaaaactgtcctttgatttgttttgcgaatccaattaatatcggactattaagatgtgattgtcaatgcgggtgatacaaaagtgaagttaacttggacacagtttaagcattcttttgcggcttttaattcaatcaaggcattattatttacaacagtcaaagactaccagaaatataaaatgctgaaccaaaacaagacaacttttgttgaagagtctactattatccttgaaacaagtaagtaggtcactgaatatacctaatccttcaccatattgcatcacaaaattttctaatattcaatttcctttactattttgttgaactgttcacatactctaacacattaaaacatatagaaaatcagacacattctcatttaagttgaaaggct

SEQ ID NO: 35510 - DNA, 629 bp, Medicago truncatula
  Intron number 1 from transcript Medtr8g074880.1 (locus Med tr8g074880) derived from phytozome v7.0 (chr-ID MtChr8; po s 15000281 to 15000909)
ttgctagattctgggctgcttatatagatcaaaaggtagcttctttctctttgctttttcgtttttattttcttgtttgaaatgaattcatttgatttaatttagaagttcaagattatgtttggagcttattattgtaacataaaaaagtaaaggcctaactgactcatgaaaaaattaagttatttgatcatgagatattaaaagtgtcaatttaatcggttcttgaaagtaccaattgttagtcaaaattggacctcttcagatcaacttatttgagtttatgacatgagaacttgtgagactgtatcgaatagcttatggaaacaacttatgacttgtctatgaactccctataatagtttataacaacattgacagcttatatgaaaatattttgactttatttcatcttttgttatagaaatagctttagatgtaagcacttatgctataagcttttaaataagttatttattgaaacacggataaacaaagctatagtgctaatgacaaacaaacatctatctaaaactcatcttaaaaatgactgaacatttgagattttccagaagtttaactttataattttattattttgtgtggaaatggaacagtggtttcctcct

SEQ ID NO: 35511 - DNA, 416 bp, Medicago truncatula
  Intron number 2 from transcript Medtr8g088580.1 (locus Med tr8g088580) derived from phytozome v7.0 (chr-ID MtChr8; po s 18787797 to 18788212 reverse strand)
gatcagaattttgtggtcttttgtgaaacttccatgtaagttgttcatgaccttcttagtattagtacaagtataaaagtaaaaatcattgtcttcatgaacattaaaaacagaaataaaaacattgtaaaatcaaaccttgttacttgcatacttctacgactcatttttttctcaccctgtatttatttctcgcgcgccctatattgtttggttatataatccgaatagcataaacactacataaaaattttcaaaacacattaaaatattttagataaccagagagaatcgaacctgagatcaggaggagcacacttccagattccaagtcaataccactatgtcaatccaggtgggtttacatttctaaatgttgttggacttattttaattttatgggctgatgttgcagg

SEQ ID NO: 35512 - DNA, 313 bp, Medicago truncatula
  Intron number 1 from transcript Medtr7g134970.1 (locus Med tr7g134970) derived from phytozome v7.0 (chr-ID MtChr7; po s 31999951 to 32000263 reverse strand)
caaggttacaaccccctttcggtcagctacttttggtaattaacttaaatctcctcaacactaaacaatatgcctttaattagtgtcacattttttatttcatttcaatatatgctgaccatttgataaacaaagatcgacaacagagactaaagaagataatcatctttattaataataagaattagttttacagggactaaaataaaaacattaatatctaccgagtactaaaaacaacacatataacaacatttgattttcactcttgtgaaatgcagtggtaaagggcaaaagattcatctgcaaagat

SEQ ID NO: 35513 - DNA, 1054 bp, Medicago truncatula
  Intron number 2 from transcript Medtr8g121650.1 (locus Med tr8g121650) derived from phytozome v7.0 (chr-ID MtChr8; po s 28236018 to 28237071 reverse strand)
tggtggatctcttacaacaatttacaaggtattttatattaattatatacatttttttgaataattaattactatattatatttatatgtgtttatatgtgagaggacaaagctactacataaacacacacacacactgtcagaaagaataagagaacccctcaacatttctcagaaagcatatgccagctgttatgagcaaatcatttgtattgtgtataatttttagaataaacaagagaattgtaattaaaataataataattatgtccaacaccttatacaatacactccggcctactactaagaattgtatgtttatatgatgtcgaatgtgtgtacaaaaatatttctgttaaagaaaacaacaaatacataatgaaatatgaatttagctctggtgtaaaatgagcgaatcaatgattgttattcaataaactcatttatttgttattgtatccttgcaatatttgaatttgatttgttaattttgtttacattaactttagaggagctggatctctaaaataccttagtaaccttaccaattgaaaactataattttattagcagaaattctgaaaactaaataaatttggaacagggcttatgtctgcattttgttattgcttaacacactcaaagcaaacatgagatgaaaatggtttcttggcttcatgcacacacgtttgattataaaataaataaagttagttaacaataacaactagatcttggggaatcggtttaaattcaagtttaggtaaccgtcctgttgacaaaaccaatagtactaaagtttctatgtagtttgtcgtggacatgtaattaacttgaacaaggatacttagcaaaattgctttttacattatctattccaatattagcttctagttttgttttttgtgtttgtttttatattattcaatttgaatgaagatttttattaggtgaaccgtctagctaatagcatagtgtctcttaccacaattctcaactaattttgcatattatctttttgtacataggtctatctcttcaggtggtgaaaaaa

SEQ ID NO: 35514 - DNA, 978 bp, Medicago truncatula
  Intron number 2 from transcript Medtr8g147430.1 (locus Med tr8g147430) derived from phytozome v7.0 (chr-ID MtChr8; po s 36298621 to 36299598)
actacaggtcattatttattctcaatataaatcacgcacgtctcttattttaaattgcggtttgaacctttatattgcgagaaaatgtagttgatacggtcaaaattacgattatgatgataaaaaatactttttattgtggttgcataatgcaatttaaaaccatgatctaggtatatttttatgtacgtttggtcacataaacttttttgtgttattaattttaggaagataatgaaggaatttgcagtggaacttgagaacctggctgagctacttcttgactttctgtgtgagaatcttgggctagagaaaggttatttgaagaaagtctttcatggatccaagggaccaaattttgggaattctgctcattatccaaacattatcgctcattttcaaagtaaaagtcgaaaatgcccctacgcatgttaacttgtgtatcttgagttaacatgcgctagttataaggagaacatgacttaagtcacgcagcgtgagttaagtcacgtagcgcatgttaacttgcgttaagtactattttcgttcaaaacccagtaggcaaccacaaagctccattttttctttccctccacctgcaaaaaccccaaaagtgcgaaattttgggtaaaaatcttcattccaaatcattgtaaatcgtcaggaaacaagtttctacgctcatcaagcatcaaagaatatgtaatgaacgttcaaaactttttcatttttgctggtagtttcgtttttcatttcagtaggtgtagggctcagcgtgagttaactcacgctaggtgtaagggcaacatgacttaagttgcgtaggtagatagcactagcgtgagttaactcacgctactgacagtagctcagaatttaaaattttgtgccattttttttatttgctttgcttgctgcacaagtcacttatttattttttctttgttttttattttatttttattgagtagccattga

SEQ ID NO: 35515 - DNA, 615 bp, Medicago truncatula
  Intron number 1 from transcript Medtr8g138460.1 (locus Med tr8g138460) derived from phytozome v7.0 (chr-ID MtChr8; po s 33432421 to 33433035 reverse strand)
ctagtaagtacgtttctctgcttattttttttttttcattgcttttcttttcataactatgaaccaaattcatttcaacttgaaatattaattagattcttgatttttcgtttcattcataaagggttcaattctatgctattgtttatatttatttgattctatttgaatttgttattgttccttttactgtcaacattgatcactgttgataccagcttcagttaaaatctatatgatctgatatatttgcaaattttcatttgaattggtattcttcaaatttttcaatggtttcaattctcaacttttgatcaattgtttaaaattcattaagaactagtttctcattcaattcaatccccgagcattatcgtttttgctatgagctcctttaatttctgctatattaattgttggcttatgaattcaattgaaatgaattatttttaacaaatgaaagaaataattcccttgtctctatgaactatttgattttgaactgctgtataagaaagatatctcatgaggtgataaggataattcaattgtttaattgtgttcttaaatttacttttaggtggcattggtcttgctgctgctggcattgagcaa

SEQ ID NO: 35516 - DNA, 734 bp, Medicago truncatula
  Intron number 2 from transcript Medtr8g087810.1 (locus Med tr8g087810) derived from phytozome v7.0 (chr-ID MtChr8; po s 18366183 to 18366916 reverse strand)
agcgcagttacatacaatacctaacatttttactagttacacctaatattttctttgattacacccctacgcgtcccaattagtacctcaatagctgcgtcattgtcccaatcgccaagattttgatgtcaaaatgaaaatagttttgacaaattaaaaagcttgcttaataggagtcatttttgggtttcaaaaattaagtaatgtttgttcgatgttgtcctcgatggtttttagaagatggttagaaaaattcaactcgagttgtgtaactaatgatagaacttgaatttcgtttgattagttgcttagcataataaatgctcattgtatagttacgagtgtctactctgagacaatgagaaagaattgtgaaagccaaatttattatgataggtttaattgaagataataaagttgtgaatttgaaaagtagatgattttatggattttgtgagagttgaaaaggaaaatgatgaagacggtaagttgaaaagaataataaaattctactaaaatttgataactggcaaaggaaagatatgaaaattatgaatctgaatagtagaaaatttccttgagtttgatagagttgcggatgaagaatatgaatcaagctcaaacttggaaaaagtgtcagattctcttgattttacgggagagttggatgaaaaggaagaagaagaagacgatgaattggaaataataaaactaaatttttgaggcagttgcag

SEQ ID NO: 35517 - DNA, 608 bp, Medicago truncatula; identical to SEQ ID NO: 32803
  Intron number 2 from transcript Medtr8g119960.1 (locus Med tr8g119960) derived from phytozome v7.0 (chr-ID MtChr8; po s 27340132 to 27340739)

SEQ ID NO: 35518 - DNA, 709 bp, Medicago truncatula
  Intron number 2 from transcript Medtr8g134090.1 (locus Med tr8g134090) derived from phytozome v7.0 (chr-ID MtChr8; po s 32174811 to 32175519 reverse strand)
gagctgttgctttttttcttgtccgggtttttaaggtatgtatctcattttattcttacttacttttttggtgtttatgctcaatttcattcattcttcacatcccacatgcccaactgcttgtttgtttttgataacatttaacatactagtctgatgttgattgttgatgtaacaattactgtcctctttatttgattcaattctttgatcttttgattgcatcttatgtagcaccgatgacattgacacgataacaacattattacattcaattaattcatttttttaaattcttattaatgtcactatgtctggtgtccgtgttagtgctttagagtttgcatctcctttaccaatctaaagggaaacactctaccttatatttatcgccaactctatggtgcacaagcaagataagtcttgcaccatgcacaaggttgtttccactattggatcaataaattccactattaagtttaataaaataggatgagatttattgatcctgtggtagaaaacagacttttgcatggtgcaagagtaatttgtttgtgcatgtaagacaaatcctatatttatttgtgtacatacatacatgtctgtgtttcactttcattaggatattgttacttgaacttttattgcctaccatccttgcttgatcaaatttttattgtctgatttgcaggttgtatctcctgtaaaa

SEQ ID NO: 35519 - DNA, 683 bp, Medicago truncatula
  Intron number 1 from transcript Medtr8g128410.1 (locus Med tr8g128410) derived from phytozome v7.0 (chr-ID MtChr8; po s 29974591 to 29975273)
agatcttatcagagaaaagataggctctaaggaaggtacaaaaatttctaatttgatcaacaaatcttctttaatttactcatttaagattttagggcttttcataaagaaaaaatttcaaataaaaaattataggtttcgtatgtttttgatggaactaattcctgtataaaatttatttatagatacatctaatcaaatcacacttacttcacaaacattaagtgttagcaagtgaaaaattacttattcgaacccgcaccccaacatattaaatgtgcatatactctttttaccattatatgaatatgtaagaacaaattgttatttataaaaactaaattcaattttctagtagtgattacttcatcatatgaaacttgaatgaattaatttatttccctaatgtggaatcttgtaactatatcttaaaaaaaaattgaattctacactaaaatgtattttcaacaaatgggtgcagatgcatatgagacaccctaaatagaataaaataaaattaaagagtgcaaagtgtcggaggatataatgtacaaatatgtccatgtataaaattgaacgttcttttttcgccaaatgtatgctaaatatcatttgagtagagtagaggatcattaatctacaatttataagaatttgatttgttctttcttgtcttacagtcg

SEQ ID NO: 35520 - DNA, 553 bp, Medicago truncatula
  Intron number 1 from transcript Medtr8g133430.1 (locus Med tr8g133430) derived from phytozome v7.0 (chr-ID MtChr8; po s 31802474 to 31803026 reverse strand)
cgttttttgctgtgcttctgctttctttttaccatgtttttctaatatatacaagccggttttgtaaggatgagttaggccccaaatttcaacatataattttgtgaaatttgagccttagagtattgattccgcgcaaatttattgtactatactgcatgcgttttttgctgtgcttctgctttctttttaccatgtttgtctaatatatactatatattaaatcggggaagggagaaatttttattaattagaatggaataacacaaccgtccccgagggcattcaaactcggcacctcgaggttacaaggccaagctcttaccattgagctaacacctcaagtgtaataatttatttaggtgctgtggttatagaaccatctttgctatcggaagatatttattatattctaatgttctcagtcttctttttctctctttgatattaacatgcttatatatttcttctctcttccttttttttgcaatttttgatttctcatttatcttgttcagtacacggcgagcctttgctggcagttatcagagtt

SEQ ID NO: 35521 - DNA, 806 bp, Medicago truncatula
  Intron number 2 from transcript Medtr7g112160.1 (locus Med tr7g112160) derived from phytozome v7.0 (chr-ID MtChr7; po s 26515193 to 26515998 reverse strand)
tgaatttcatatttatctctctaaagttttctgaggtatatatgttatattcatacatttgctcatactatcatagtttgcagtcaatgtaatggccaagtccaggtgcaaaggaccttgtctggattatagtattcatattagggagtaggtgttaattgacggtttatcaattgtgatggcacatatatatacatctatgtcattgttaattgtttaataattagtgactgtgaatctagcttaatcactttttgattagatgcacaaaatccataaaattaatactatatcagtagctaggaagaaacttcgaaattgctaggaatttccggctagagatttactttaaaattattgcggcaatatactagccaaatagttacgaaacttaaatcttgaatagtattttgctaggtattagtttgacagtagctaggaatttctaaattttagtttccatttagctaggagatattttgctatgtaattttccgcccaatccatgctacggccagtatgacagctaaatcacaactaaatggtagctaaatgtgttttgctagtatttagcgacgcattggctacgatttgtttcgtagcaaatcagtgattttcttgtagtgaaaacacaaaaaagaacacttactaagattgaaaccaaaaaatagtataatttccggaactttaatcatatttaaacctatataatattttaaaaatgaaccccatatattattcattattcatgtatagtaatagtatttaattatgttttaaaattcttttttgcctagttgtctcgt

SEQ ID NO: 35522 - DNA, 830 bp, Medicago truncatula
  Intron number 1 from transcript Medtr7g084050.1 (locus Med tr7g084050) derived from phytozome v7.0 (chr-ID MtChr7; po s 18101328 to 18102157)
tgccgccaaactggaaggacgatcccgaaaccaaagtaatatttttcatcatttaatttcttcaaatcagttgaagtcctactttcattttaccttttttttgacaatactttcattttatcttggaattaagttgtagtttgtaattttcttattttctttaattcctttttctgatgttcctttgatcctatttgttcttgcttttgctgaattatttttgagaaaatagatttggatattgaatttatcttttgaggacaaaaatcggctcatgacataaggaacacaagaacacaaagatggatcatggagttacgtcttcgacaactgtgtgcctgtcatagttttttttttttttgctatactttagggttgcattgtagaagctatgacagaatattacaatcaagattgcgcttgtagcttccctctcttgcgctcaagtgtccgtccacttctggatgaacatgagtcatacttagcaaatcaattaatttttgttatatacatggaatagaaatttcattatgtttgaattcaaagctcaaatccaatttttttactgaatcaatgctcagatctatcaatcaattatgttgattctttaatatgtttgtaacgtaattaagaatataattgtggatatgttgcttaagaaagaaagcattttattttgcagtttgctaacaagtgatcaagattatgtgtttgatggtatatctggtttagctattaaaattgtaagaatgttatataaattttttaatgttgaatttgaatttatgattgcagtgtttcataaatttggacacaggaagaatattccg

SEQ ID NO: 35523 - DNA, 767 bp, Medicago truncatula
  Intron number 3 from transcript Medtr7g143410.1 (locus Med tr7g143410) derived from phytozome v7.0 (chr-ID MtChr7; po s 34412388 to 34413154 reverse strand)
ataccaatttcatcaatttctccattcagaataaagtatgtgttattttatttttttaatttcctttttgatgtattttttattgtgaattttatatctttttttgaataggtaagtgatttttgttcaatcttatagtgtatgatgccaatgatgtttgtgattgtattttggctacgtacttatgatagtatgatacttatgagcgtttcctcaaagcattggaatgataaatttaacaaatttctagtggaaaattaaaacatgcggataaatctgtggaaaattaaaacaacacggataaaataagcctagaagaaatgaggatgttagaattagaaatgacaacattagagagagagttggggtaacacctatggtggaatctaggcttaggtggtttgcgcatgtagagagaagacttgtagattctgtagtaaggagagtagatcatatggtggatagtcaaatcattataggcagaggaaggcctagaaaaactataagagagatcgttaagaaagttgtagagtttaatgagttggattgaaatatggtttatgttagaacattgtggtgcaatttgatccatgcagtcaacccccttggttggataaggtttggttgttgttgttgttgtaaatcattttaatgtttgattgatctaattcaaacagtgtgagttttataattttatttttgaagtttctttattggtgtggctgacctaaaggactttttttctgcagttggatttggagaaagga

SEQ ID NO: 35524 - DNA, 881 bp, Medicago truncatula
  Intron number 1 from transcript Medtr8g139460.1 (locus Med tr8g139460) derived from phytozome v7.0 (chr-ID MtChr8; po s 34041013 to 34041893 reverse strand)
gcggtggagagaaaaggaagagagatatgctcagatttcaatttttttctttgttttgttatgagctggcacttttttttatttatgtttttattattaaatttgccacctaaggtggtacaagagtggtatgtccatctaagggggtctacctatcagaactcttttttatcaaacgagacttgaaattgcaaaacctaactcgatctagtctaatcttactcctagtaataactatcttccttaattactttatatttttaattccaattttttataaaaaaaaataataataataatacgacaaaaatggatatttctaatccaataccaatcatgtacacatgtatcaagatatgaaaccctaatactccaataatagagtcataccttatcggataccaattttctgtagatagaattattatttttttagaaaaaattctagatactttgagatacatgcggatatgtatcctaaaatagacaaagggtataaaaacggtgacacaatgttttgagttgtctcttgatgaatttatcgatgatacttaaaactttgagttatataatgatattttatggataacataatatagggatgaaaatatattaaaatttataccaagaattttacactgtgtttttatgatgtatagtcgtttcctatatattggatccagctctagagtgtgatatcaaagacatatattctaggtatatcattataaatcacaaatttgttataataaaataacctttgattttttttttcccacttaaaggattcaaatgtgcttgtaatacgtttaaaatgcctacaaatttgtacaatatcacgtcctggagagaaaaaggagttagattgaggcacaaaggac

SEQ ID NO: 35525 - DNA, 836 bp, Medicago truncatula
  Intron number 3 from transcript Medtr8g147020.1 (locus Med tr8g147020) derived from phytozome v7.0 (chr-ID MtChr8; po s 36084205 to 36085040 reverse strand)
atttcactgatcgtggtggaggtgacaatctaaaagtatgtccactgcctctagcatcataattgaaaatattcaactataaatttttaagattttgaaaaattatttcttattttcaaatgaattgtacaccagttgatatacaacacgttgtacgttgttataataggcagacccaaattgtaatgagacttgatattttgcagttcaaccccatttttatgcattccttgtagttttgagctggtttaattaagtgtaataggattgattgcacattgtgtcatgccgaatttgaactctctaattagttagttctctggcaaagcaatagaaaactctatgtttggatatgtatgccacattcactgtcaatctaaacatgcacttatagacactttgttaagttacactactaaaaaaacaaaaattagtgagggaaatttagtgagggaaaacgtaaaatccctctctaattccgtcactaaattttgcgaccaaggaatttgtgaggaatttcatttttttccgtcactaatttccctcgctaattttgctttttctagtagtgttagattatatttgataaaccacataaaatcgttgtgtgcattcttcttctgtgttcttctatagtttctgtttactcttgtttctatcttaacaatagtttacagaacaaactgatttagctatagttatcactttcctatgtaactcaacatgctcacttcacacgcttcctttacaccttttgctggttggttctttccctatattccaataagaggcgatttacgtttttcgttttcaggatttcatcactgctggggtga

SEQ ID NO: 35526 - DNA, 790 bp, Medicago truncatula
  Intron number 3 from transcript Medtr8g026990.1 (locus Med tr8g026990) derived from phytozome v7.0 (chr-ID MtChr8; po s 5981775 to 5982564)
ttactggtgttgaagtcgtttacccatcaaggttggtgtttaatcatagtgtggatgatatatttggttaatcatagtttactaattcagttttttaagatgttattgattttccccttcaaaaatagaagaaaaaaaaggatgatgttattgaatttttgttcacttatttgatgtttaacatggaactgtatgcaatgtgatatgagaggcatgggacttgtttggataaacaacttaatttgcaacttatagtataagcgcttatcaattatcatgatatgtatgtaggtataagctattttctataacaaaacataaagataaatattttttcgtatgagcagagtcacctttggctagtagacttagcaggtagcgagcgtgtgagaaaaactgaagctgagggagaaagactaaaggaatcttattttcataagttgactttggagaaattgtgaaaataagctgaaaacaacttataagctattttcttaagttctcccaaactgtctcacagttgcttattccagtagataagctaaaataagtcgatttttaaagtgatttttccctggtcaaaacttcattttaaatgtagcggttattcttgtttgacagaaccagctttgcttttatgtacttgttgaagttgtaaatcctatgggataatttccatttgaaaatcacatgtgggaacgtaatgcggatgaacaagaacaagatttgtcattacatttttgcttcttttagctttaatttatgaaaattgtgattttttttttgcagt

SEQ ID NO: 35527 - DNA, 332 bp, Medicago truncatula
  Intron number 1 from transcript Medtr7g100320.1 (locus Med tr7g100320) derived from phytozome v7.0 (chr-ID MtChr7; po s 22606642 to 22606973 reverse strand)
ggtttcaggggtcttgtgttggatatatcttacaggtcatttctttctttcattattttgtttcttaatttctgagctaagaaattgtaataattctgatttattttccaagcttatataattttacatacataaaaacaaaattgataatgagttggttaattatgcatgaaatagtgtttttttttttttatcctcagtgttgtgtgtgtgtgtggataatgtgaaattataacatgctattttttcttttatagtcaccaatattcaagacttctgctgagttgtttgcttatggttctgactgctatcatcatgctccaggccagtta

SEQ ID NO: 35528 - DNA, 814 bp, Medicago truncatula
  Intron number 2 from transcript Medtr8g081620.1 (locus Med tr8g081620) derived from phytozome v7.0 (chr-ID MtChr8; po s 16781327 to 16782140 reverse strand)
ggctgagactctcgctggaaatacttggcaacattgtacgttttctgttcatcttatgttcttggttcgtcgtcgtaatgtgtttagttatcaagtaggtgcaagttgaattttacattggaataaccaatttagaaactaatttttagagttatataaatttaagtacgattgagattgttatatgtatttgtcagaaatgtgcattttgtgattaagacccgcattgtggttcatcgttttatgggaattagctgtttttctagactcagctatcgttggaacttggaaccttttaaacatgaataatcaaaagtttatgataaaataattgccggtaatactaataatgtggtcccgtaatactaataatgtggtccgttctttaacttgtatgggggtctatgatttcttgagttattttggcgtgttttcaaaagttcatgatcgttttagtgattttctattatgaattttgggttggtttcaaatatccacagaaatgctagtgaagaattttccattgagtataccaaacgatcctttgttgtacattgaccttatatgctgttttctgatgctgtataactttattgaatatttgctttgagtcagcatcatgatgacaaccggtggttgtattgagcgtatcatttcgctctttctgttttatcaatcaatgtaattgacctatcttctgtgtcttatactcttttgtttccaccctctcattatctgcattgaatcttctatgataaataactgaaacgtgcttgttgtgttatgttataatgaagtgaaaacaagccctagc

SEQ ID NO: 35529 - DNA, 740 bp, Medicago truncatula
  Intron number 3 from transcript Medtr7g103960.1 (locus Med tr7g103960) derived from phytozome v7.0 (chr-ID MtChr7; po s 23450780 to 23451519)
caagacggcctgaaaattctggaaaacttataacggtgagttaatttcttaaaatattttacctttcttttttgttgttttcaatggtcgtctcctatgcaatgtgtgtgtataatagatgttactttaacgttgatattggtggaataaaatgaagctttatgatttttttttcctagtagcaaacaggtgttgtgcctagatatatagttttctgtatatttcgtgttctttagttcttgcgtttagttagcttgagtagtagaatgttgaagcacttagtagtcctgtttgcactcaaatcatcatcttggtaatcttatcgtcttggtaagatggcttcttgcaaaatgaatctcttatgagcaagatctcattagagccatatgcttctatctctaaattttcttaatgaaatatcttttgggtttagatgaagagtggtttctgtgctccccttcacagaagtggcaaatgatgataaggtaaatagggtgacaaatacgggcttaagcaaatttgacattgatgttgccccataattagcttatagcctagggtgtggaattttggaatatagaagtgtgtacataatgcatgtattttgatgttctattttactacttcacatgattaattgttcccatgttcataatgcttcctaatgctgacacttccttcccctcttattttgaaaatttgaaggttatttttcctagttttggtgagaggtatcttac

SEQ ID NO: 35530 - DNA, 158 bp, Medicago truncatula
  Intron number 1 from transcript Medtr8g105640.1 (locus Med tr8g105640) derived from phytozome v7.0 (chr-ID MtChr8; po s 23380147 to 23380304)
cttcttctcctaccctttgtcttgtattttgaaaggtattttctctcttctttttgttagtttctattgttgttattttgagatggggttatggaggatttttgaactttgatgatgatgattatttttatttgggtatgtttctattgcaggagtaa

SEQ ID NO: 35531 - DNA, 924 bp, Medicago truncatula
  Intron number 2 from transcript Medtr8g105640.1 (locus Med tr8g105640) derived from phytozome v7.0 (chr-ID MtChr8; po s 23380330 to 23381253)
ttgattgttcaatttttgctccttgcttttggagggtaaggaaatcttgttactattatacatttttagtgtttagccattgaattgtgtttgcgaatgtttggattgatatgaattccacgaaatagaacaatctactcttttgagtttcaataaaatgacgatgttactctgatttcgattttcaacttcaatgttttaaaatatcaaattttaatcttgttaatgaattgatattaagaaaaatgagggtttagaaaatgtttttgaatttgttggattgagttcatccatgcatccctgcaaatgttgaagaatacaagagactaattttagagaatttttgggggtgaatccattatcatagattttagggaaatatttgattcctaggatctctctcaagataatccaatcatatattcttggtttggttaggtactaaaattatccttaaacaccatgttttgtgctaattaatcctcctattaagagcaaggcttaccttatccttttctttttagacagaaaatgctttctttttgccttttataatgaacggtgggtaatattttaaggaatttgagagtgaaaaaacataccgtacttatgtagaacactacaagtactagacatgttctaataaaaaataagagaaatcaaatctaggtttaactgcttattcactccacattctttaactaccttaacttcatccatgtgagatgtatatacattggtaatatgttgacaattctaaatcattgatgatcctgtacaatttctacatgtttgcttactaatactgaaattcgtcgaaagaatgacggttaaatactagctttcggatttctatattttgatcattggtatgaatgaacttatgcagtgtaactctgttccaatctttattcctgaaaggaa

SEQ ID NO: 35532 - DNA, 1035 bp, Medicago truncatula
  Intron number 1 from transcript Medtr8g088670.1 (locus Med tr8g088670) derived from phytozome v7.0 (chr-ID MtChr8; po s 18834772 to 18835806)
aaaccaccggtatatttgttattctattttcgtatttagataattggatatatttaattatatggagagaaaggaaaaattgattcatatttaaataatatatatattaacgttaaattaaataagtaatataattatcttaatacaccaacaaactataataccaatgagtttaatggtctttttaattaaatagacttcaagtcttagtattctctattttttccaaatctaacctaaacttcacatagactatatcgtattccctgttagtcgagcttggtctattcttactacattgtgaagataataagccaactattttatctaattgaattagataatttaatccctttgtttttaataaaatattaagaaaataatttcttttttgctaatagaaatatagggtaaagagatggactagggtcctagacaatgaagattttatatgattgaaagaatatacctcccttcaaaaggtagcaagggctcgaacccggaatactttgagtccggaacatacatgtctttttactattggatcaaacttatgaagtatgttaaacatcataagtgatataagatctcttttaaactaaaatagtctcctaagatatttaatgaattttgaatgccgtacagatttataaatacagtttttttagggtgatctatatataaatagagttattctcttgatctctcttttttacaggggtattctcttgatctcttatcattagaaattttacatgatttttttattttcaaaattaatttatgataacgtaatgagttagattttcgttattaatgtgcgagatcgtacgttgaactgatttccatgaaaccacacgtttgttggtaagtgtcggtatagataatcagatatatttacatgtcatattcatacatttaaattcatgaaaaaagtcacgattaatcttgtttgtgtggcaaaaccatagaggataaaattaactgatgtttatgaacatgcaggagggtggccaagtgcaccagacggaccat

SEQ ID NO: 35533 - DNA, 930 bp, Medicago truncatula
  Intron number 1 from transcript Medtr8g087360.1 (locus Med tr8g087360) derived from phytozome v7.0 (chr-ID MtChr8; po s 18156002 to 18156931 reverse strand)
cgttatctgcagaaattgaaccactgtccacccaagtaattttcatagcttgctctatcggcggtaatgaaatgacagttatattgtctctgtgtctggtcatcaatgagagtgattgttttgcgctttcctttcagaattgttcttgacacctcgtttgaaaaatgctaaacaggaaaataactgcaatattagtctaatgcatatttacatggataagatgtatgcaaatatagttacatataatttataaaataaaggtagcataactgattttaagctaaagaaaatgtaacatgacttctaatttatcatcctattatcctcctataaagtctagataaatgcatgcatgtacattatatgcaccccgttgaccaattaacattgttgaaacaaatggaaattaagcatcacttccgcatgtgcatatatagccaacaccatttgcattgatgtcttcgaacatttggtgcaactctcataatacaattcaaactggttatgattgaatttagttgttttccaaatagtgatgcaatatgtttcctaacacaaattatgcacatgaaataaagaataatgcaatatgtatttttaatttgtgcgtaaaaaaactcaaagcatgtttgtgcataaaaaaagcagacattgactaagtttataaattcagcaattggtcgaacatgtgacagtttggaaaaatcgttgtacgaagtacgttgagaagaagtcgaactctgacagttttaactgaagtttgactctgagcttgagaagtgttaaagtcatgacaacaattcaagaaacatggtcaaaaaacaatcacatcggattgtgaaataataagttactctaacactgtattgtgaaatcataatgcaaacttactaagtcttaaacttctcaacaaccggatgatgtaggttg

SEQ ID NO: 35534 - DNA, 767 bp, Medicago truncatula
  Intron number 1 from transcript Medtr8g115430.1 (locus Med tr8g115430) derived from phytozome v7.0 (chr-ID MtChr8; po s 25919199 to 25919965 reverse strand)
gctctccaagaaaacactcaagcttgttaaaagaggtatttatctatgcttcttaacactatagcttgttgaatttgtggcttctgagcattgcagtgtttcttgggtttttggagttggtaagaaaaatcacaacttttctttcatttcaaaattttacatgtataatgcatcgagtttcttatgtatgttatgtaattagagtataaacttaaaaaatgaacttgttatggaattaagggcctgtttggataaacaacttatttgcagcttatagctcaagcgcttatcacacttatgtataagcttgcataagctatgtttatagcaaaagattaattaacgttaatttgtttttgtatatgccgaagttgtttttataagctataaactatattggagaattcttgaaaataattggacaaaagcttatgaaaattgttatcagctgtttttgaaacaggccccaagaatgttatgttatgaatctaagtattatatttttgctgtctgctgttgcctttttgctgtctgctgttgcctttttgctgtctttttaccatacaaatttgctttccgtttttttttttttggtaatagctaatgttaatttgttgattctataaatttaaaaaaaaaaaaaattaaaaattaggttgaatgttttgtcaattcggattacataaatctttgtcttatgggactatactaatctatgtatgttcttttcagctgctgaaaacaagtgcataaagagaggagttaag

SEQ ID NO: 35535 - DNA, 609 bp, Medicago truncatula
  Intron number 1 from transcript Medtr7g105560.2 (locus Med tr7g105560) derived from phytozome v7.0 (chr-ID MtChr7; po s 24208028 to 24208636 reverse strand)
ttctggctgctcatctcgaacaacagaagattcatgtaattctttttctcttcttcatccttcatttttttaatttttttttagttcagtttttggttgattatagtttgatgtcaaagtcattggtttagtttttgggatttgtctttatttatctgctgacccttttgtgggtttttttatttttttatttatcttttgggctattgagtactctatgaaatgatttagggttttagatgttaatttttttcttttatttacatatttttgaaatcagggtttttggatttgaatgaccatgtcatgattgaatgaataaattgaaaggttaatttgtaattaaatgttacattgaatcaatgggataacttgattgttagaaacaaatgaacatgtgtatctgtgtatctatagaggaatttaatcactgttcttgtagtaaattgtaactggttatttatttagcaaatagtttgctggtttttacagttaagtttgctcttatgattactaagtattgattgtaaacttataagtgtagtggctgaagaatttttttgctgcatttttaatttgctgtctttgactgtattttctttttgcagc

SEQ ID NO: 35536 - DNA, 851 bp, Medicago truncatula
  Intron number 1 from transcript Medtr8g102230.1 (locus Med tr8g102230) derived from phytozome v7.0 (chr-ID MtChr8; po s 22395812 to 22396662 reverse strand)
catgtcagtaccctttgacattcttttagggtttcaattcgcatattcgaatgatttgtgctgatgcgtctcatatatttggttaattttggtttcgtttttttaatttatcaatatgaatgtggaattttaattttgatatgcttcgagctgatttgattctttttttggtggtcgagctgatttgattcgagattgagtaatttttctctgttgaaatgaatttttgcatagatttgtgtttttaggttaattagcgtgtttgaatgtttatccgcagtgtttagtattcagaaatggtgaattatattttaaatcttattattgaatccattaaatttgcatttgaattgatggattttagatcactagatttgtatttgcattgataatatatgtatgctcacaagttattttgttgtagatatatgatacgtgaatactttattcatattaagtaaaagtaatatcattttatgttgtccatgaggcctagctcaattgacaatgccgagattgttagattggacattttccgtggttacctgtgtttgaaacaaacccgaggtctccccctttgtgtgcgtgagttttcaggtggtgtttgccaccccgtcttcaaaccccaaaataatataattttatgtttcactttatcttcttaaaatgtaaaacattaattttgatacataccttcaaatagggtattttctgtttaataatattatgtagctgttccaggttgagattaatggattttctctcgcttaataagcgtatattgttctttgcatgctttctatttgaatattttgtgttgtattgaatttttatcttctcctttgtatcag

SEQ ID NO: 35537 - DNA, 586 bp, Medicago truncatula
  Intron number 2 from transcript Medtr7g117550.1 (locus Med tr7g117550) derived from phytozome v7.0 (chr-ID MtChr7; po s 27469484 to 27470069)
atttgggtaagttttgcaattaattgcggtttttcgtcgttattttagttattatagttcctatatgagagaccaaaatatttggaacaattaaaataaattatggtatgtattgttccctctattatttttgttttgtttttagcattgtcttcattatgttgtgttcaacaaaaagcatagtatgcatatgactttcgatgattagatttatgaaaatgtctccctctgtaataataataatgtatgtgacaatttgtggttttttaaattgtggagcattaagttacccagcaccatagatttgtgcaaattcaggcgaactgtacaagttgaccctgttcaaattttttcaggtagattactcatcaatgacagtttattatttgattctatcatgaatggtgcaattgctttcccacagttttgtatcaatctcaatttttcttccctggcaataatttatgttgttgtgattctacttgctatttttatataaggatggaatgaagtgtcacatttttctgcatatttttatatactcttaacaggttttgtagtcgcgaggcatccttggcctgggagc

SEQ ID NO: 35538 - DNA, 618 bp, Medicago truncatula
  Intron number 1 from transcript Medtr8g147370.1 (locus Med tr8g147370) derived from phytozome v7.0 (chr-ID MtChr8; po s 36273801 to 36274418 reverse strand)
agcagtgtagtgtagtggtggtggtaggtaggtgcatgagtgaggaatggaggagagagaatgttgatgaatgatatagtgtgggcagaccattataaaatatgtgctcctctttgatctaatggtgaaaaaaaaaaaatttcccatggtggaaaaactttataccttatcatgtgaaataccaccattaatattcctcgaagagacccggtggcatttaacatggaccaatgtaaaacttgcccatgatggaccacttatgattattggttagattttagtggtctattaaatctcatcatacaccttccacaccacatgaattctctttcttcttccctctctccctccttgctccacaccaccaccaccaacccactctcacaatggcttccaatgtaaacgcaaattaaagtttcaagatttaatggatgttgtttcaaacacttataatatatcatccattttttaaaaaaaaacttaaaataattcattaaattcaattgggagtttttcgctcatactaaggtaagagataaggtttgaattcttcaattttacttaaagggttataaggaaggtaagtcagcgatttgagcttttccatttcttcaggta

SEQ ID NO: 35539 - DNA, 497 bp, Medicago truncatula
  Intron number 2 from transcript Medtr8g012500.1 (locus Med tr8g012500) derived from phytozome v7.0 (chr-ID MtChr8; po s 2090104 to 2090600)
ctcattacaagtgtgtgtaagttgtaccctggcaagttgatgtattattttcttgcaagcaaacaaagaaggtttatccatactcttctctgttctcttttcccttcaaatgcaaggaactgaaactgtagagggattggttttgaaggtgcaaagaactagtagggttttttggagtactgatactttcaaggagatgaagaaactgatactcttacaacttgatcatgcagtcctcacaggagactatcactatctttccaaagaactgagatggattcattggcaatgatttaccttcaactatatgcccgatgacttttatcagggaaatctcgttgttatcgtcgtaaaatacagcagtatccaataagtgtggaaggaaaacaaggtttcagtttcatattttcttttcaaactcaaaggttgatggaagtagtatttgttcccacctctctaatttttcttttgaacatttatcttcctgcagttgttgg

SEQ ID NO: 35540 - DNA, 417 bp, Medicago truncatula; identical to SEQ ID NO: 35285
  Intron number 2 from transcript Medtr8g015580.1 (locus Med tr8g015580) derived from phytozome v7.0 (chr-ID MtChr8; po s 2788391 to 2788807)

SEQ ID NO: 35541 - DNA, 545 bp, Medicago truncatula
  Intron number 1 from transcript Medtr7g105440.1 (locus Med tr7g105440) derived from phytozome v7.0 (chr-ID MtChr7; po s 24151798 to 24152342)
gtcattcttgtcgtaaacaaaaaatattgctttgactttgtccataaagttagttagggtgtgttggaagagtaccttaagatatactccctccgtcctaaaatataagcaaaaacaaattttgaacaaaatacattaacttttattgaccaaattttgcttacatgttaggacggaggacggagggagtaagcatttttataattcagagaacttgtacaatttgtatttttggtagattgaagaaatgacaatagccattagaaactcacacacgtataagtgcaggagccggagttcgaactctggagtctggaatgagcacagtcagcttataatagtttagcctactctatctatagaagatcaaacccgttgtctccacgctcactaccaaaatggggtggtggagaggaaacttagacaagttgttgaactcggactcgtgtttatgtttgagtgattgatgttatggtgttatatgagataaatgatggttttctaatgtctttatttgtttcagcattgcgaagaagaccgagcct

SEQ ID NO: 35542 - DNA, 361 bp, Medicago truncatula
  Intron number 1 from transcript Medtr8g133820.1 (locus Med tr8g133820) derived from phytozome v7.0 (chr-ID MtChr8; po s 32017946 to 32018306 reverse strand)
ttgtagcttttggcactagtagtagcacaagaaaggtgagaaatttatatatgaatttgtttcatttgcttttaaagtgcatggaatgtgttttttttcttttcttcatttgttttgtagccttcaagtgtgttaattcattcattaggatcatttaatcaatcattgtttgattggaaatttggaattaccttagttttagagtgttaacttgtatggtgattacaaaattgagatcaattatttgtttttatatgcctaaaatgtcatctatctcaaactgcttccttagcaatgaatctgatttttgtttttcttgaatgaagaaggagccaattggagaacgccagagtcctaaatt

SEQ ID NO: 35543 - DNA, 263 bp, Medicago truncatula
  Intron number 2 from transcript Medtr7g103980.1 (locus Med tr7g103980) derived from phytozome v7.0 (chr-ID MtChr7; po s 23468335 to 23468597 reverse strand)
attattcatttgcaagctcttcttggtaacaagtaataatcttcacatctcataattataattatcttcactcaaaaacaaaataaaatggagaaaaagaaaattaaaccttgcaatgataatgataaaattaaacaacaaatgatatatatgaattgatattaattttgattgaatgttacataaaaaaaaatattatgaattatatttttatttattatgatgaaaatgatgtgtatgaattaattaaatttgttgagcag

SEQ ID NO: 35544 - DNA, 818 bp, Medicago truncatula
  Intron number 1 from transcript Medtr8g146140.1 (locus Med tr8g146140) derived from phytozome v7.0 (chr-ID MtChr8; po s 35680842 to 35681659 reverse strand)
tgtttggagtctgatatgtattagtgtccgatgcaactttgacgcatgtcatgtgttagtgtatatttatgcttcataggttataagtcttccagtgcccgaatgtctaccactaaagctacctactcacacatatatcggttgacaattttcttgattttaaatacataaattcattcttttgtcaagactgttctgggagtgtttgttttggcttaaaataaaattattttgtttttgtaaaatgtaaatattatttttgagatttataaaaaaagatgaagtttttgtcaaaaaaaaaaaagacgaagttaatttccgtttatttactatcatatatatatatatttttttaaagatttaaagtacttacacttgagttccttgtttttcttaaaagaaaaatagattttgaaaaaacttttcgaataacttttcgttttgaggctaaaaattaatccatttttttaacaaaatattaaaaaaaaaatctgaaacaaacactataaaatcatataagtatttttttggttaaaaaaatagaatttttgtcttcaaaaaatcaaaaacaaaagggtcatctgttttctctacttctaaagttgaaattttaaactttttaaagattattactgttttattgggctgacatatttagtgctttttttgtttattttttctgaatggcaaaagaaaattttattaaaaaatatgagttaagtacaagtagtaggatacaagtaatactcactaaatcactagcttgattcttggttgttgcagttactacaactacgaaacctgtggaagcgctagaa

SEQ ID NO: 35545 - DNA, 747 bp, Medicago truncatula
  Intron number 4 from transcript Medtr8g137700.1 (locus Med tr8g137700) derived from phytozome v7.0 (chr-ID MtChr8; po s 33043701 to 33044447 reverse strand)
tgctcgttttggacatagaagaatcgcagattcatgtaagatggtgtttgttatataggttactttttaactatgttgtgtttaagtggattggttttgccatccaaaaaggattaggggcactgcttgttggtcgcttgcctgccattcctccatgatttttttttttcctttccaaattcaattaaggattgaatagtgctgtacatttgactttgtgtgacctattaaagtgacctatctagcattccatgaatcttgtttttttatgcaagagatgctctacaagtaaaagaaaagtaatttccctttatataataggattgatatcgtatttatagtcgtgtcattagtcgacttttgtgtaggaaatactcgcacttaagtatagtcatatgtcaaatgggaatggaatgcttgttttcttgccatttgaggggcgttaggacttaggatatgcaacttagataacacttatagtattagagcctatgcatatgttgtttctacaatggaatagaaaatgaggataaactctgcataagctgaaatcagttttattcttacgaaaatgagttcataagttgtttcataaactatttttttaagctttttcatgtgcttgaacaagtttcagttaactcttttgaacccctcttaatagtatttatcacaaccactgaagattcatactttgttttgatggaagaagattatctctcactacttggctgatttaaatttctt

SEQ ID NO: 35546 - DNA, 867 bp, Medicago truncatula
  Intron number 1 from transcript Medtr8g120520.1 (locus Med tr8g120520) derived from phytozome v7.0 (chr-ID MtChr8; po s 27578622 to 27579488)
agaatacagttactgagtcttggttgatggtatccactttagatcgcacattgcctgggttttactttgtatcactggaatgttatattctgtttgttgtaggtttattttcatgtattttttcatttttttcaattgtaataacaatcaagcgtgttaaaacgcataaattctgaataaagagttagcttattttcattatgtttctctgttattttgcaattcaattttaataaggcttggtaatgtcatgctcaagggctttcgtttggtctgccacaacaacctgttttttgggttgttttcttttaaatcaagtctttgttcttgcaggtttatgtttatcttgcttatgaactgtgctattttgttccgtaatcatgttattggtgtgaagtatccaccgactttggtcaatggttaatctcccctctcaaccatattttttcgatcttatgaatggtactctgcagactacttcggctattctatgatgatggaccttgaatggttttcaattagccatatttcgcaatagttccttttgtaaagttatgttccttttaaggtaaaaaataaaaaaaattattgaatgaataaccattttagctcttgaaattattggggtgtataatttgatcttctactccttgaaatgaaaagctgtcaatcaattcaatctatgtgttatctaatagctgtatctagctgattattttgataaatcagtagtattttgagtatgtcatggtttcatatattgaatgcatctacatcacatgttgaacagtttttgtttttaatcaatatatacaagttaacttcacttgcttaatttgttttgtaggatataaagccccaatttta

SEQ ID NO: 35547 - DNA, 997 bp, Medicago truncatula
  Intron number 2 from transcript Medtr8g079190.1 (locus Med tr8g079190) derived from phytozome v7.0 (chr-ID MtChr8; po s 16429113 to 16430109)
gggtaattctgtttaccccgtagtgcctgggtatgttatgtttcttctttctcaaataataataacatattccattatctacattttttttaacggaactaattaagtactgttaaacagttaattttgtgcaacttttaaaatataaaccattgtcaattgttattgggttattttcaaataatctaatttgcttaaatttgataatgaaatcatgtgttaaaattatgtgagatatattaaaataaaaagaataatttatttgtggttttctaaaaatttaatatcaataatgtttgagaagagattaagcatattttcaaatgagcactgaaatcggtaaaattacgatgtcaccgtagttttgttgaagctgcatagtgtagcttctccgaaagtcacggtggttcgtcctaattctatcattctcgccgtaactctaaacatacactaaataaatgaataatacgtaattgttctttttcaatttgattgtcctattttttatagactgatcagggtcggtctaacagattaagaggcctaaagtaaaaaaaattatgtggcctttttttttttgttacaattttttgtgaccttaaaaaatatattttttttaacagaatatttatataaaatcaattttgtggagaccaaaatttaaattcattaccaagagtaattgaggccttcttggtaaccagttaagttatgtaaatgtcttaaatttatctatcatatattatatttataaccaaattaattttttaaaggcttttttttttcatccaaaattttgaggcctaaagcccttgcttgggttgcttggcccttaggtcggccctgaggctgatccagtggaagttatgtttttgttcatttaacaaaaaacttttgtaagtgtctgagcaaaatagtaacaagaatacactgaattctaatttgacaaaaaaaaaatgtaggcacgagattgtaggtgaagtaacagaggtgggag

SEQ ID NO: 35548 - DNA, 432 bp, Medicago truncatula
  Intron number 1 from transcript Medtr8g044470.1 (locus Med tr8g044470) derived from phytozome v7.0 (chr-ID MtChr8; po s 9972839 to 9973270)
ctcgattcgctgttgatcaacacaacgccaaacaggttcctttcttttctttaatttcgttttatcataagaattgtgattataataaggtactgtttggatgaacaactaaaggaaggacttatcatataagtgcttatgaataagctctttttttaaaaaaaaaaaaaaccgtatacgctatttctatacaaaattgatattgcaacaaaactatgatttcttacacctgtgcattaaatatcaacaagttaagattacacactttcagtgtctaaagtgaattgatgaatgaagtgatcatttcatcgaagctaaatgaagtggtatgtggtttgattctctaaagaccgtttttatgtgagctaaaactgttgactttttttgaatcatgaagaattcacttctggagttcgcaagggtggtgaaagc

SEQ ID NO: 35549 - DNA, 798 bp, Medicago truncatula
  Intron number 2 from transcript Medtr8g044470.1 (locus Med tr8g044470) derived from phytozome v7.0 (chr-ID MtChr8; po s 9973427 to 9974224)
atcatttaccacttcagatcttggtgtgataaagggtatgccattttgtgtaaaccacttatttcttgatatgattaacatgctagccattaataggggtgtttgaaggggtgtagtcaagtactccctttgtccctttctaattgtcaaattttattttttagcaaatatttctttctatttatcatttcttttcaaatttcaaggttatattactatttttattgtttaattatactcttactttatcaattattttacaattaaattaatgaaaagagattaaattagtgactggaccaatgaaaggtaatattatcttttaaatttgtttttatcaaacatatttctttatttgtcacgtcaaccttaaaatccgtgcttttgagtgatcagaagaaggcctgcatattgccaaaattgctgcgcatcatcataaatcctgctttaaagtgaacttggagataagcagggtagtgaatttatgatatcatatttagtgcaacatcaggatgcgagcattggtatttatccatgcgccatttccattggaaatgtagaaaaaggcttgtaggagtgaggcctaaattttatctggaatttaccgtatggttcctgttattttataagtaaaaaagacaatctaaccattataatcatagttattaactgataagtgatgcattgagttcctggacataggttatgattgcttaatttgtcttgtatttcttgttgaacatttgaacttcaggtgtttgctaataccatcttctgctgttctgtttttgttattag

SEQ ID NO: 35550 - DNA, 583 bp, Medicago truncatula
  Intron number 1 from transcript Medtr8g021980.2 (locus Med tr8g021980) derived from phytozome v7.0 (chr-ID MtChr8; po s 4262548 to 4263130 reverse strand)
tcttccacaaattttggttttggtcttcattgtaggtaacttcctcttcctttgatcaattgaaaatcatgattggattatttttgtgttatttgttcaatcagtgttttgcatgtcgaatattttaattttccagaaattttgtgggttttggtttgaaatttgcttgcatgttttcagaaaagggtttttttgattttaattgaggttttgattccttggttttgtgttgttgtttattgattctgttttgtaaaaaatttgagagaaatttccagaaaattatgttttcagaatttttttacaaaatatatgttatttagaaaagggttttaaaaatttgagtgaaaagaaatacttggtttgttgtgagagataaatttgtgttgttgttcttagaataaaaaagaagcaatttactcatctttaattacaatttggatcggtttttatgagttgaagaaattttaagctatgtgtggctgatttgatagtttacttatttgaattgtttggattattattcattttatttaattttttgttgaaatttgttgattgttgtaggctcggtgtgatcaaa

SEQ ID NO: 35551 - DNA, 928 bp, Medicago truncatula
  Intron number 1 from transcript Medtr8g093710.1 (locus Med tr8g093710) derived from phytozome v7.0 (chr-ID MtChr8; po s 20680416 to 20681343 reverse strand)
gtttaaggtatttaaatgtgactgttatctactatttcacatattatttatagcctatatcataataacacgacatacacttaatattacttctgtccatattgatctccaagcatggtttatatggtatttaaacgtgactgcattttttttggttatgacatatcaatgaaacagtgaattttagtttaaaaatattgttcataaaactacatgtaataataaccaaacatgcatgctgaaaattaatacaatgcgcatatggatatcttttggcaggaacagtgatttaaattctcctttttactactattttgaagcatcaatatcatatggatcagaagtagaaattttaaagtgccaatattgtattttgaagcatcaatattacatggatcagaagtgaaaaataagaggtgttgtgtaattgtgttatatggttatggttcggttcggttcagtttggtttggataactgtggttattaatagttcggttctggttaattaactgttatcaaaataatgattcagttcaaaaattagtgaaatggttcagttaattttggtggttattgatttatctttaatggatctggatacagttttaatcggtttttatggtgaattttgatgcttaattcttggattggtgttcatattttatatttaattttgtattggttgattgaggcaaaaaaatgaagaattgtgatgaccgataacattaatcttatttgctttatttcaatcatgatatggttgttgttttttgcattggagttttttcgtgtttaagtaaggctggtgtatagagaaaatagattaaattggttggtgctatttctactggtgtgctcaattgggtgtttctgggtatgctaattggataagggagattgctgagagttctagatttaggtatacaa

SEQ ID NO: 35552 - DNA, 986 bp, Medicago truncatula
  Intron number 1 from transcript Medtr7g084690.1 (locus Med tr7g084690) derived from phytozome v7.0 (chr-ID MtChr7; po s 18336684 to 18337669)
ttgttaaagacttttctgtttggtttttctttagggtctgtttggttcgcgggttttgaaggggaggggaggggaagggagggaatattttaaaaattttgtgttttggttcaatttttagaaggggaggggagcaaaatccctcataagttaatttattgctccccctcaaattggagttttttggaggggaggggagggaaagagagatgagttaatgcaattttaattacattgacataattatcctcatgtttatttttaaatgataaatccgtccttattaaaaatttaagtgttttcaacatattacttattaccatcttttttgtaacatgccaatgtcaattttttttttataccgagaactgcatattcttgtcttctaatttttttttttacgtgaattcacttttttgactaacgttgcttttattttttttattttgatatatttattttatagtttttaattgtattatatattaaaacataattaataaaatttgtagaagatttttttataaatatattttaaaaataatttctaacaataaattttttataaatatttttatattgtactagattattttagaagtgctctaatatttatgaatacctaatattttgttaaaacttttgtgtttgattatttatggagtttttggttacgagtttttatgtttaaatttttatgaagtgaataatataaaaatcataatattgttttaaggttagagggataaaaaagtaatttggttttaaaatccctcccctccccgtacgaaccaaacacatatttaattaaaatctcttcactccccttccctcccatcatttgaatcaaacatatatttaattgatatatctccccttccattccttccctttccatccgttccattaaaactcctcccctcccctccattgaaccaaacggagtcttagtttattcatagttcacaaaagtgggaaaagagaga

SEQ ID NO: 35553 - DNA, 506 bp, Medicago truncatula
  Intron number 3 from transcript Medtr7g084690.1 (locus Med tr7g084690) derived from phytozome v7.0 (chr-ID MtChr7; po s 18338156 to 18338661)
cttaggtcaattgtacctaagatcagcaaggtgattcaatatatataatgtctatgttttatgttgtctggctccgacacttcagattgaagatatgtctggtgtttgacacgacaccgatatatataattatgttcagttattcttttttgtcaaattattatcggtgtcaagcattagtgttgtgtttggtgttaatgtaaatgctcatagtatgtatatgcatgtgtgttttatttttggtacaaatgttagtgtttttttaccttattcttatgatgttatatctcattgaatagaagtcaattaagcttctcaacaggtatttggtgtttgattttgatataaatgtatttgagctaacaagaaaatgtgacatcaattcttggagatacaattgattacatgaaagagcttctagaaaggattagtaagttacaagaagaaatggaggaataaggaacaaatcagataaacattttaggaatttctaaggagttaaagcc

SEQ ID NO: 35554 - DNA, 663 bp, Medicago truncatula
  Intron number 1 from transcript Medtr7g102760.1 (locus Med tr7g102760) derived from phytozome v7.0 (chr-ID MtChr7; po s 22893551 to 22894213)
gtcaggtaaattaatacaaagaaccttaccgtaattcacattttgaacccatgccatttggtatttggttcatgtaaatatattacttttgcttttagtttctataatttttgttttcgtccttgcaaatttatataccatattttattttcgttcctcgatattatgtttcagttcttgcaaaatttgtcatattagaattagtctccacaatatgaaaatttgattttccttgctctaatatgagtgaaaaaatgactaaaataaatactgcatgaatatcatagaaactaatatttataggaataaattttgtagggattgaaacataaatattgaatatatttttgtaccaaaaaaaaaacataaatactgcatgcatatcatagcaactaatgtttgtaggaataaattttatagggattaaaacaaaacaatagagacaaaaataaaacaaaatatatttagctagaagactataaataaaataaaaattttacaagactaacagccagccttttcaaaataaaaataaaaattatgtttgcaaggatcaaagtatatttaattaaaccagtatcttaagttaattaaattaaacagtgaattattaattttttgctgactatgttgcagataagaaagacacattgtgactatttc

SEQ ID NO: 35555 - DNA, 733 bp, Medicago truncatula
  Intron number 2 from transcript Medtr8g005850.1 (locus Med tr8g005850) derived from phytozome v7.0 (chr-ID MtChr8; po s 478016 to 478748)
acctcactaattgggtttgtttccattctctctctaagtattaatcattttaaagttttataagtaatgatctctcaattatgctcatatcagatattcaactatttgagctgatttgatttgtttcaaagaagaaaactatttgggctgatttggttgccataattgtgctgatattaatgtagacgctcaataatatatctttgacctttttttgtttgactaaataaattatctgactattctttcaacaatttgacaaagaatataaattgtttttaagaggaatatgacaaagaatagttaaaattacattggatacaagtttatagttaaatattgtaaaaaaaatatctgatttataaaaagagtagatgaattgggagtctcgatttgcttaattgggattcctcacttatgctcagtttatagagagacacagtatcttaaagttttgagtgactatgcgtatgctatgctgtgcttataaactcatttggaatcccaacatatactaatggataaatatgaatatgacaaatattaaagaatacctataaattctatatgatgaaaagtagaaaaatgtttacacttatatatagataaaatggtgtgcaaggttcaataatcattatttgagattgattagaaatattttcacactcttttgttgtttctgttgggatatattgcagcattacattgaatcaaaatttatattttgagggtc

SEQ ID NO: 35556 - DNA, 892 bp, Medicago truncatula
  Intron number 1 from transcript Medtr7g140890.1 (locus Med tr7g140890) derived from phytozome v7.0 (chr-ID MtChr7; po s 34004477 to 34005368)
attggctttcaaaaaggaaagtggggtatgtcactatgtttctttttccatcatatttttttggtttgggaatttattacaaaaataaaatgtcggtaatttggaaagcgggagaaattcaagaaacataaatgaaaatttttaatagttagatcttcaagaggaacataaatttaacatctttggccctaaaaaaaaaaaaaacttcaacttttttgagagaacttaaaattctttttgaaaggaaaacttaaaattcttctcttgtaaataattgaattttcatctctaataattttcttgattttttaaattgtacgttatagagaaaatttttaatttgtattttttttattagaattacatatttttttagcaaaaattcaattcataaaagccatgacttacaagaacagacaaaaattttaaacaaaatatttataagaaaactaaaacctgtattataagaatcttaagtgtattttttttaactcgatatacgatgtaatgatcaattaatcttaggagtttaatcacatcatctgcatcaataacgcaaacttgccaatagggacaaatgaaattatataagtttgctttgcataaaagcaaaaacaaaaccagaaagaagaaaaaatatagaaatgagatttttttttttgagggatatagaaatgagaatattgttctacggcttaataggagaaatcaaattataaaattacttattttttcccaaaaaataaaaaagaagaatgaatggtagtaagctccattatatgtaatgagagaaaggggtggtaacacgtcagaccatgcataaaagctcggttagtcttttaggatgtggcagacttctccgtgatagtaatgaaaattgttagaaatagtc

SEQ ID NO: 35557 - DNA, 988 bp, Medicago truncatula
  Intron number 2 from transcript Medtr7g126720.1 (locus Med tr7g126720) derived from phytozome v7.0 (chr-ID MtChr7; po s 29497950 to 29498937 reverse strand)
gtcaggttatgtttgacgcttgtttgacatggcgcttgtatgacatgttgtctagcggactatttggaactctcacaatgatctaatctttgttgggatgatctatttatgttgagttcttgttggatagggcaaagtttgatcgatagggcaaaattttgatcgtggaagtgtttctcggtaaaatcttggcagtgcatacttcttctatgagtgggagacacatccagccgtgagttggaaccgtagaatcttgtgtgagtgtctgtgttggggtctcagcgggcttgggtggtttgtcttccaatcctcgacagcccattaggtttggtccctctccctgttcccctagggaatgggcaacttccgacgggtagtctggttttgtaggttattctcaggtttttgggatgttttgtcgttgatgattttgtcgtttattcatttcttttcttcatttgttgttttttccttgtttgggtacccctggggctcaggctgctactttctgtttgttttgtagcactcttgcacaacctctttattttgttaatatatttatctttgccataaaaaaatagtaaagtatgaacatgatgcaccttaagaaattgtaaatacttatgcttattatattatcaatactgatgtgtattttttttaatggcaaacaaagaaatattattgaaaattggaggagaaaagtacaagagttaacaaaactcttaaaacccgtgagtgattttttctttctttcttaatttactctttttgaggtgtttctctttgcaatgatgttggtttatgatgcagattccttgtttttttagtcatgtcccgttttttttatctctggtttcacacaggcacacatacaaacactaaaattaaatagagtgctaatagttattggtgaaccaagtattttctttctctgtgcaattgaggttagggttcttaattagtttttattttattttattttcag

SEQ ID NO: 35558 - DNA, 497 bp, Medicago truncatula; identical to SEQ ID NO: 33197
  Intron number 1 from transcript Medtr8g005230.1 (locus Med tr8g005230) derived from phytozome v7.0 (chr-ID MtChr8; po s 139611 to 140107)

SEQ ID NO: 35559 - DNA, 852 bp, Medicago truncatula
  Intron number 1 from transcript Medtr8g119130.1 (locus Med tr8g119130) derived from phytozome v7.0 (chr-ID MtChr8; po s 26926155 to 26927006 reverse strand)
ttcatcatatatcctgaaactaacgatacttacaggtttgtagatatagctttcatttatatttgtaatgtggtttagatttttgttgtggtagtatttggtggtgaagaaacactcaacatggtttatggatgaatttgataatgatgatgttggtgcttgcaaatattgcaacggaaactatgaattgagtttattttgtaagatgtttccgatataataactgtgaaaactaactggaaagtacaagcactatagttagcatgagaataggaaaaaggcttagttcaagtctggttcttattctagtttaaagttattttttatttttctattttagattttaggttagtattgtggaaactcaaaaattgaagttcagttttctttttttcttggttcaatgtgtttttaaaaattaagttcaaatttaaataaaatatgtattgttagtcaatataacaaaaaaaaacctataattggtagtttaattgttgcttagtcaatataacaaaaataattaagaatcggtagttaattttaaaacaacctttttttgggtagaaatcaaactctctttaaattggtatagctaataactttaaaatggtaaagataactgcaattttgaagtttaatttgcccaattaacaaaagctagatatgttgatatatttattcccaatttttcgggttaataattgacacgcaatattttttaggctgtatgtgatcacaactgcgtatcaaatttatttcattcttgtgtactatcttatttttttattttcattgttatcatctttcaatcaaacttgttaagttattattcaaattttgtttatttgcagg

SEQ ID NO: 35560 - DNA, 979 bp, Medicago truncatula
  Intron number 2 from transcript Medtr7g127710.1 (locus Med tr7g127710) derived from phytozome v7.0 (chr-ID MtChr7; po s 30003089 to 30004067 reverse strand)
gacaaacagcttcaaagtaagtttctttctgctaactttgtttgttttttttacatcaaattaggttttttgttgtttgtgtgatgatggagtgtttaatagaattgcaaaaatataatttttaaactgaatttttggctttcactgtgtttttactattgctatgagttcagtggtttctagtgacaagattgtgtgttaaggagtttgatttttgatcaattaatagctgaagattgttatgttcaacttgtaatatttaagcatgatccaattaatagaagaagtggttaagaatgtatgagtgtctgtatgtgagagcttttactggctgcaaacattccttggattacagagaaaaagtgtggcatgtcttttttaccgattgatacttttaatgtaatttctcttgcttatactgtcatttggattaatttggcatcataaagtggagttgaaggaggtcgattactcaattttagcttaatcattatatcttttatccgtttttcattcctttacgaattggggtattacgcttatattatttggcatcataaagtgaagttcaaggaagtcaattactcaattttagcttaatcattattttttatccgttttttattcctctatgaattgggggtttatgcttattagtgattgtttgaactcatataaatctttctatgggtttgtttagggaaaatgttttagtgattgtgtgaattattcatataaatctttctacgtctttgtttagggataagcttattagtgattgtgtgaactattcatataaatctttctacgggtttgtttagggatagccatgtttgtttagtacttgtgaatttttaaactgtctgtctgtttaacatgtgagtatatggatatcggtgcttctttgctgaaaacatgtcttacgatttagttgaggaattatactgaagtatgtggtattatcttgcagtcaagctga

SEQ ID NO: 35561 - DNA, 760 bp, Medicago truncatula
  Intron number 3 from transcript Medtr8g137000.1 (locus Med tr8g137000) derived from phytozome v7.0 (chr-ID MtChr8; po s 32752714 to 32753473)
tgttcttccacacggtaagatattaccttcatgcaatttgaggactttgtagttattatgtgaagttttgtcaaataggggtactatagtggagcagattttgacgaatgcttttgaaaactgcgacactatcctagtttcgcagttgggtaatagtggctgctatttcatttttgtcatatcagatgtagctgcaaaagcaggaaaaagtcaactttatggtttttcttgttctatttttaaaatataaaaactgaagtatcggtgaatattactcctctaatcgccaataatactttgcctgcaattgtactctgcctgcattctctttcaacatgtcttccatcttcagcaaattttaatgtttaagctttttaatattgtttccagtattcactagccagaattatgaattatcggtattcttttttaaaatgattgatcttttgagttaatattatgccacttttttattttattttaatgttaagcaaatttttatttgtatactgtaaatcctcatgataaacatttgtctatcctatgctcttgcctcttagaactcaatttggcacctaatggattcttcagtgttttgaatcttgttgtagcagctatctgctcaattaagttttaaaacaaaagcaactagaactgggttgtattttgtggatatgtttattggggaaatagttatttgctaactgatggaatttgttctacaggtaatatttccatctactctactcggaaccggtga

SEQ ID NO: 35562 - DNA, 785 bp, Medicago truncatula
  Intron number 1 from transcript Medtr7g089830.1 (locus Med tr7g089830) derived from phytozome v7.0 (chr-ID MtChr7; po s 19865111 to 19865895)
cttgtttgggaggttagatctttttcacattttctataatttaatgttgtttaccttttgcaacatttttttattaagttagatttgttcacaagcctaggatttcgctccttgcagtatttgtattattaaaaacgaaaaaaataaattgtgtggacacttttacttataagttttatagtgatccttgtatttcttttgtattttctcttgatcaagcagagcattcccatgcttgctctgcaagtttatatgattttttacacggtagcctatgtaggcactgacgcttaagatcaaaggtgtgtctggtgtcggacatatttggttaaatttaatcactttttctgaagctaataccggtgtatgtgttgtgtctagtgtcagagttgtagacaccgatccttatccataattctgtacatagtttactatgtatgacaatctcttctatttgcttacatcattgtgcattgaggatctaatattttattttgctgagatctcttggtgaaaatatgatgaatggttcatgtcttgaatgatctcagttgtgcttgcctacccattttgtgattttgaaagaccacaatagttaaaactgatttggtaaaaattgagtttgtagcaaaacaatttaattttgtagctatgtctagacaattgcaattgttgatacttgctatttggttttttcggttgattgcttttaatggtatttttcatgcttctgtttatcatacattgcagaacttttgttctagagaagatacaatattctgtgg

SEQ ID NO: 35563 - DNA, 853 bp, Medicago truncatula
  Intron number 2 from transcript Medtr8g134320.1 (locus Med tr8g134320) derived from phytozome v7.0 (chr-ID MtChr8; po s 32278967 to 32279819)
tgcagagtgtctaaagaagtatgtgttagtactaataggtcctctttgctattcacgttgtagtgatatcactggaaattttcttttgtgtatatctttatatttcgttttagtttataaatatttttgtttgtgtgctgcatatattatgctctaaaaattttgtttgaaatgaaataataggatttgaagtgtgactcatgttgcatttgtgcgattgttaaggtgagctgactttgtttttaattgtcttgacatgtatgcgaagggatttagatagcatttttacattcacagacttgattttagaggtagtgtcttacaattctatagttctgcataaatttcagactccagttttgatcttcgtcctgtttttgaatttcatatctatcttgctattttctcttattagaatagcaatactactttgcttaatttaaaaggtttttctcttttgttgaatagcattgtatcttagtccataaattagattatatcttttatttatgtactatagaggtggtgcttatgcatatgcaaatttaattagttttatcgggaatagcaactatgcaattcaaatgttctgtaacgatttagtttacgtagagatgttaatttcctccaccatttctttcatttttttttttttacttttgatttataaattttgttaaatttgacaggtttattttttatttatttatgaagtttgtgctgtggttttttttcttcttattttagggatggtggaataaccacacaacttgacaccgcctctaaaacgtggtcgtaatcgttgtaactgcttcaaggaaaacagctccaacaaagaccatttgcatctctc

SEQ ID NO: 35564 - DNA, 914 bp, Medicago truncatula
  Intron number 4 from transcript Medtr8g144940.1 (locus Med tr8g144940) derived from phytozome v7.0 (chr-ID MtChr8; po s 35112298 to 35113211 reverse strand)
tctgaacatcaaagaaaggttaccaatctttctcctgctccttctatgctttctgttatgtgtgtgaattggcctttcactgtcacttttcatcttatttactatagagaatgtccaatttctatttagagttcctttcaaatcgattttgggaatttgatgtttcaaaggatgatcgacaattgaatttgatgtttcaaaggatgatccacggtggactggtacttaaaaaatgattaaaactccaacgacgagaaacatcgtctcttggtagtagatgttaatcatcctcctcatttttacgattgaaataatggcttaattgaaaaaacggaaaataaatttgtagctcttattaaactgacatcaatcaagtcactgtcttagccgtaaatatgagaaatgtcacgagtttttatttcggaatagtgtagtcttcagtcgttgaaattttctgataatttgaagtacttatccatggtggaccacttatgaaggtggtccaccgaagaactcacctcaaataataacatgagtatgtgcctatttatggaattatactcggagaagctgaaaaactaagcaaaagacactatgtaaccttggaagatgagataaagctttttttaaaactcttactgattgtactcttcctgtccctttaaaatacatgtcattgagtatgtgtgcgtgtgtgtgtgtgatatcagtgtgtgtatttgtgattgaaaatatgtaaatcaggttgagaatggagactttattggaggatatcagttttcttactattgttatttagcatttcaatttcccaaaataatgagggatgattttgtctgcttataacagcttgtgatgtgttctgttttgtacatacaggaagttctggcacaggtccttgaggaagctggtta

SEQ ID NO: 35565 - DNA, 862 bp, Medicago truncatula
  Intron number 1 from transcript Medtr8g115600.1 (locus Med tr8g115600) derived from phytozome v7.0 (chr-ID MtChr8; po s 25998646 to 25999507)
caaacttcaattcttgttctcaatctttcaactaggtgagttttcaattcaaatcttagaaatggttttgggaatgagaaatagatgatgttgaaattgggatttttagagattcttatgagtttagtaattgcatgtgtaggaaaagtgatgcatattgctgttagtaataagaatttcaaattctgaaagtgaaacagtgcgtaatgtatgcatggaggaacacaagttccaattgagacagtagaaaaaatgaaaggaatcaattcaaatcataatgaaagaaagataatgaagtttatttatctcaaatttatttatttaatttcttaaaaaaaaaattttaaaaaaaacttatttatttaagtgaaataaaaacatgggccaaaaaaaacttgcatcccgaattgggtttgactgggtaaccgattttgtaaaatttctataacttgtcaggtttttgacttagggccgttgatattcactcacatcactcccgatcacgtttctaaattctaattttggttcgtttcttcttcttaattgagattttgtttaagagaatctgtgaaattgagtgtcttgtcatgtaattttaaactcttcatgacttttattttttgttgctttttcaattctagttgatagttcaatcttttatgaaatttttgggggttatggtttaaaacctttttttttttgttacaatgatttaaaacctttgaattagggcttttattattattaaatattaaaataaagtagatttgtttttaatttttggcgcttttacaaattttgttctttcttagttttggaatttgaaggagcgtcgctagcagcagtcgaatcacgcaagttc

SEQ ID NO: 35566 - DNA, 375 bp, Medicago truncatula
  Intron number 2 from transcript Medtr8g115600.1 (locus Med tr8g115600) derived from phytozome v7.0 (chr-ID MtChr8; po s 25999513 to 25999887)
ggtaactcaaataatctattttatatattggttaacatgcacttcatccatctgttatgatgtacattttgagtttaaaaccatgtgaagataaaattcttgttgttttcctgttttatgaaaatgcaacctcttgattgagtgttaatatgcacatgatttggttatgttttttttatcttgattcagtccatttcattctctattattatatccaatgccgttcttctattctgttagttgctattgttgttgtgccttgttccttttttaactttcaatcaaccatattaaaataacctcaccctttcattttttatttgatcaaaacattaaacagaatttgctaaggagcattgtttaaatacaaacaaa

SEQ ID NO: 35567 - DNA, 704 bp, Medicago truncatula; identical to SEQ ID NO: 32576
  Intron number 1 from transcript Medtr8g068450.1 (locus Med tr8g068450) derived from phytozome v7.0 (chr-ID MtChr8; po s 13132646 to 13133349)

SEQ ID NO: 35568 - DNA, 662 bp, Medicago truncatula
  Intron number 4 from transcript Medtr8g121400.1 (locus Med tr8g121400) derived from phytozome v7.0 (chr-ID MtChr8; po s 28125392 to 28126053 reverse strand)
tgggttctttgtcaacaacatttgaagctactcaggtacttgtttactttctttaagaacttatgaagtggttgttcttatactgggtcatacacgttttttaaacaaaatagatagaaaaacttcatctttctaatagtttttattggtataatgattttcctatgggccgtttttaatgtgttttcttaccaagttaactggcttatcatgaaatcagcattctgatacacaaatttggggataaatcctcatattgaaatagaattcgagcttatgcttgacccttgcctatttctagctgtctgatagctttgcattattgcatatctgcggaaacatcgtgtccactatgagccattaagatgaccgaaaatggagtctcagatttaggaagttatcatataaatttaacttatcttctattctctttgccttttttatcaaaatatttttttgtcttaaaatttattacagagagaaccaaagatcatcatttgtattattattcatcaacaatgccactgactaactaaaaatagacttttatgcatgcctggctatgttgctctggatctcctttgtgtttattatttgaattcatattaaagtgtagaaatttcttttgataaccaatttcaacctttcgtcggcaggctata

SEQ ID NO: 35569 - DNA, 643 bp, Medicago truncatula
  Intron number 1 from transcript Medtr8g134070.1 (locus Med tr8g134070) derived from phytozome v7.0 (chr-ID MtChr8; po s 32163611 to 32164253 reverse strand)
gagtacctaccagccactctcactacctttctagtttctacattcctctcacctcatgtttaacttgcactctccaattaactttcaaacataccattaccaaccacttaaccataattctagaaaacgtttttcttttcattttgtaattttttcccactgtatccttcaaaaaataatgaataaactattaatttaatctttaaacagtctttctcttcaattttatatataacctatataaggatcataagtatatgaaaatcctccaacttagtctttaaaatcttaatagaagtgactaaattaatagagtttacatactataaagactattttgtatttatatagtttaaagactagattgaagggtgtatactaattttataaccaaacaaaaaataaggttgtaataataattgatgatttattcaaaaagtaataatatacacaaatttatttgattttactagtattagtgtaatttgtattgaaaatgtttttttttgttttttaatttctatcaaaaatatgtatctgcatatttttgtaaaaaaaaaaaaaaagtatctgcataaatttacaccacccatcaaagcttaatttttttcttttaaatcggaggaggcggttaggggatcta

SEQ ID NO: 35570 - DNA, 839 bp, Medicago truncatula
  Intron number 1 from transcript Medtr8g026310.1 (locus Med tr8g026310) derived from phytozome v7.0 (chr-ID MtChr8; po s 5599922 to 5600760 reverse strand)
tcaggtggtaagtcgcctcttatgctgattagatatacatgtatatatttgatttgctaagaacaccaacttatttttaagaaagagtaatttaattaattatagttaaaaaaagtatctaaatcctaaggtgcatgttattaaagccgtctttcttaaaaacaaatagtgtaagttaacaactcctaaagagatttgctagaatatgcatccacttataaaatgaataaagacacatatgcctaattcaaatcacatgctcagtaactgaaaaacactgattttaaggcatattctcaacataaacgaaatgataaaacacaaacaatgaaatgcgatatttggtaacgaagttcagttaaatatgctcttgtcattgagtagagaggagttgtagtattgttttattattagtgaaaacaattaaagtttacaatgttacaactcatatttaaagactacattcatattacatcaatattctcgagccatgtcgtgggaggtttggtctcctactacaaacatttggaccaaaaatttgtgggactaagcgcattgacatagtctcgttggctttgctcattcgtccctgcccacccgtcaatacctatgagccacggttttccatccaacaaattgaatatcatgaaaacttggcatctaactttaaattgactctcattactagacactgagattgaacctccagatcatttgattgttgagtcaaatattgagttttaaaaagaaatttaaagagaaatatttgtagacatataatttgatattaatttgtaggtaatgtcctttttgataaattctgacgaataggagtatca

SEQ ID NO: 35571 - DNA, 892 bp, Medicago truncatula
  Intron number 1 from transcript Medtr7g097260.1 (locus Med tr7g097260) derived from phytozome v7.0 (chr-ID MtChr7; po s 21955164 to 21956055)
acattggcaaatcttattggtataattctgtatatgcccttttgaatttctttttatgttgtgttgaattcatatttgtagaagcatgtttagggtatactgttttgtaatttttggttgttattgttgttatagtgattaatgattagccttcaatgaaagagcattgtagcatacctttaaaaacaaaattgtgatgaaatttactgaaatttcctaccttttgtacgatttagtttttgcatgctgttatgtagttcagtttttgatatagggttttatgaaaaaatgtttgggattgtgatatgggtcgcaacgtcgtggttgtgatgtctctacgaccataattgaggttgctttagctgcatttgactgtaattttcagcaatatctaggataacaatacaactgtaaccattactgcgaccacaatttaaaaccttatttatcaacagtttgtaccaccatatggatttagccctttgcaattgttgaatgcagacaaatacaaacaattggatgaaataacactttgtattgaattcactaaataagaggaattgatagaagaagactaagttcaaagacataagttattactcgcaaggagagtaccaaagggagagaggagagacttcatcaattttcttcataacccggccctcagtgatcatcatttctctatttatgcacaatccaagcttccttgattttaggatcactaactacatgtccatttgcctcaaccaataatattatgccaagcgtatttcctcatattctattttgaatcataacttcttgaattcattgttgttattctattgtggcttgagttgtttctgtatgttatgcagagcatagttccgaccgagctgagtttttgaagctc

SEQ ID NO: 35572 - DNA, 727 bp, Medicago truncatula
  Intron number 1 from transcript Medtr8g096790.1 (locus Med tr8g096790) derived from phytozome v7.0 (chr-ID MtChr8; po s 21350321 to 21351047)
aacaaatcaagggtaagtggtaaaatcttctttggttttctcatgcatgttaattatgggctgacttgtttttctttgtgcatctttggattagcggtgtgtcaaacacaatcgcgttgtaccactataacttgaaacttaaacaaaaatcacagtggcatcgtgattttgtgaaactctccgtgattacaaacatatctatcatgtttctatgtgcattatacaatttgtctacaaaaggttcgttgtagtccatataacatcataggaacacattgtagacatcttatattatctacaaagtttgattataatataaaaaccgaattggactatttaaccttgaaccatcatttacaatggttcaattaatttggtggtttgatagctgtttcatcccgattcaaacagtttaacatggttgaaccataacctattggtcttgccaattcaatgtctggttcaattttaaaaactttggttttaacatattaaagaagcattttactttgcttggttaaaattgattttcttttttgatgagtattcatttagttgagcatgtaaaatgtagtaatatattattttgtggtagcacataaacataatgatggttaccttcaacacatgcattttaaaatggtacaaggcatcaaattctcttgtcttacaattgtcctttgttttaacaggaaaattcaaggaaaatattatatttgtcacctta

SEQ ID NO: 35573 - DNA, 741 bp, Medicago truncatula
  Intron number 1 from transcript Medtr7g135760.2 (locus Med tr7g135760) derived from phytozome v7.0 (chr-ID MtChr7; po s 32373913 to 32374653)
tcccgtctcttcatcggctctcaattggaggtaaggtaatcctctctctatcttttgaagataactaatttcactgtaatgaatgcaattgtgaatattattagtcaatacgatactgacacgttgacactggtagagatttaagtatattacataattgaatgtaatcatatgtgtctgtgttgaacaccgagcacacttttgattagaagtgtcagtgctacaaatgtgaattgataacaagagaaagctattgtgaagaagtacagataactaatattttttgcaattgacaacactgatagctacgttgtatagcacgctgtagcggaattgtgtagcacgctgtagcggaattgtgtagcggtagtagagctcggcacggctctgttgcggctctgaactgctgttgcgtccgctgttagggtttctgggcgaaatttcctaaatctctttttttataagcgttgtcgattagaacccttttaaggatattgttgtgtttttcattttattgtgttcttgctcacaaacaatcgttatgttctgcttcctgcttttagttcactggtttagcattttaggtggtcggtggtacgggacactatctgtgattaacaacatagatataattcatggcttttatttgaatgttatttcgattcgattatttgacgagctttgctgactttggtatattgatttgtttgtcacttttcctcaaatcgaatctcaggcaac

SEQ ID NO: 35574 - DNA, 373 bp, Medicago truncatula
  Intron number 1 from transcript Medtr7g097360.1 (locus Med tr7g097360) derived from phytozome v7.0 (chr-ID MtChr7; po s 22035705 to 22036077)
taaataactcattaattccggtattatcatcttcttttcgatcttttccgcaacacaaccaccactacattaacataagtactttttttttaattcacaaatttgacattaaaatgtggttgttgtgtacgaattcaataatgcgtatacaaattgtgtattttgcttcttttatttgagtttgtgctctattcttttatttatgttttaagttatggaaggctaatcctcctatttatgttttcttcacgttagctctcctatttctcctccttggtcagtgtttgtttggtccacgcataactacacaccaatattattcaatatatatgaaataatgaccaaaactaattttgtgcagaaaaaagcaata

SEQ ID NO: 35575 - DNA, 953 bp, Medicago truncatula
  Intron number 1 from transcript Medtr8g093640.1 (locus Med tr8g093640) derived from phytozome v7.0 (chr-ID MtChr8; po s 20655102 to 20656054)
tctcactggattaggtttgggacaatttatgttataagatgactcatctgacaactatgtgcatttctggataaccttttttaatatattttttttataactcatttgggttcatctgttgatattggtttgagatctgagagtatgctcctactcgaggtttcaatgtcaatttgaataaactaatttaatttgacgcattacaaacatcgatcacgacatcaaaccttacaattccattattcttattaattgagttatgacatgtagaatgaaggattgataaagttaactattatgtggtactcttttggacttgcatatacatatttttgtctcaaaaataagttatttcagccttaaaaattactaattctggttttagttatgaaaatcaaaatcataaataaaataaaaatgactaaaagtgtctgtaaagataagaaatgacaatggatattctatgactagggtgctataatgcttatccctattatgcgtttttaaaaaatgttcatattaagttcgtatttttgtgggtatcaactttaataactatactcgtatttattatcctcactttaactatgaaaaaacagtaaaaaaaacatcacaattgaaataaaaccatgatctaatttttttcatatcaacatataaaataatacgaatgtagtagtatttagccaaataaaaaacatccaaaatgtctctaaaaaattgtgcacatgagggagcagttactctattaagcaattttaggtttaggttcctgctaaaatagctaaataaattgattaatagtacacaaaaataaataaattatttatcatattatataaatatgtatatacaggttacggggctgaacaatatagtgtctgatctggaaagctgaaagaaacggaaaatattcagtgaagagtgcttaccgcttgtgtgtcgaggaactc

SEQ ID NO: 35576 - DNA, 866 bp, Medicago truncatula
  Intron number 1 from transcript Medtr7g080500.1 (locus Med tr7g080500) derived from phytozome v7.0 (chr-ID MtChr7; po s 17138081 to 17138946 reverse strand)
caactcagttgcattgcatcgatccaacaatccatgtcagatgtccttagaccactttttctcttttgaaccaaaccaactcttttcctttttctgctcttgtttggattatcacatctttcaatttcaaccgactaagtaacttgaggattcatagccacattactgcatggtaatagtagtaacttgcataaaattcttttatttaaattttagtacagctgcaaattttgatttgaattagcaaatcatgctattaataacctattgtgtaactgtttgagtaatgaatattattgaagccataattccagcatttggttttggccatttcaaaatccaaacccaataaagcatagtgagtgatacatgtatgtacactcctatttgcacattttaccattgcatatttgcactaatcagtcttttgtaacgtcccaaaaggccaatagtgacagttatatatcacgtttgaatataaagcatatactcactatacaatacaatatatagtgtatagtgatagtgataagagtgttatatttataaatttataataaagggaagaaacaaaagcagccaaaaagcaaaagaagactacacacacaggccttgccatgttatgaaaatgaaaagaaaaagttgtgttagtgtatatggcatttgtgaataattgattgctatgtgttgagcgtcttttagggtgtttatttcaaaatattcttgaacctgcaatcaaccgtacacattattggatgatagtgtaatcatccatagctataggctacagtttgtgttgcttttactgaaacatttaacatacacatgcagacacacctcagacacaaggaggaggagcttctttt

SEQ ID NO: 35577 - DNA, 1051 bp, Medicago truncatula
  Intron number 3 from transcript Medtr7g077180.1 (locus Med tr7g077180) derived from phytozome v7.0 (chr-ID MtChr7; po s 16045401 to 16046451 reverse strand)
agtggacaaagttgttttttcaaggtgatccccgaagttgtttttaatgcatcatctatatttacaaacttgggcatatcgtctttctcttaattttaagtagcgctttcgattctttgtcaattttttgtttttaacgttgttttgttctttaagattctttttatttttttgagagaaaaagaaaaaattggttatcccaattggctatcccagagccacgtgtaatggaactggaccaaccttaaatactaatatttcggctttacatccgttaaatcttttctgtttattgatacaaaaatccaaataagtatatatacgttgatatttttatataatatgcaatacataatacaataacgatgcgttatattaatttcctcaaaaaaaatgatgtgttatattgatatattatgtataaaataatcaaggatcaatgtgtgtttaattaggtttaataaaaaaaagaaaaattaattgtaattctaacccgtgtttggcacggttttcaaattagttataaacaaatgacttcacaaaatgcaaaagtacacgtgtccatatatggtgtgtaaggtcattaaatgttatcaaagtaatccacatcagcatgcatcacttattgtcaatttgaaagagtcttctctaaccaaattaacactcacgttttcaggttttagtgagaaaggaaagcattaatgtatggatatttaagatcagatatttatcttatgaaattatcaactatgcatttatctcatcaaatattcatgcatttattatatcacaaaattaaaggggaattgatgttttttatttgattttttttctataaatattgtttctaacttcaacattttcacatcatttcaaagttcattctaaaatttaaaattcttctcaaattctcaaattcctcttttgctgacccctcttttgtttattcaaacttttttatgcgattgttattttatacttctttcttcttcattctttagttattttatatatgatggcaggtggtgccatcaagtttttgcactcattt

SEQ ID NO: 35578 - DNA, 430 bp, Medicago truncatula
  Intron number 3 from transcript Medtr8g065530.1 (locus Med tr8g065530) derived from phytozome v7.0 (chr-ID MtChr8; po s 12361311 to 12361740 reverse strand)
gatataaacgtagtaatcattttgtatccatgtttacatggaagctagtggtgtaagtgaaacaaaaaggcatattagcttccttgcattatgttaggcattgtagttataagtaatgaacaccgctgaaaaatatatgaaaagtatgagaatttagagcagaggaatcaatatatttttgttttttttttggttcaaaaatatcttttttttcttttcttataacaacctgatttttactactctctgcaaatagattgtattcaacaaatgaagaaaaaacacttgtaaaagaggatgaatcctaaacttcctcacaaccaagttcgtcctagacggagaagactctctcattatttatcacatattcttacatcactttttaatataagcagaaggtgagtttcctgcggttcctaaaatcctcagg

SEQ ID NO: 35579 - DNA, 731 bp, Medicago truncatula
  Intron number 2 from transcript Medtr7g084460.1 (locus Med tr7g084460) derived from phytozome v7.0 (chr-ID MtChr7; po s 18239244 to 18239974 reverse strand)
ttgttattcttgggaccagtcttttgactgccagggtacgtgattatcctattgctttgcttttcatcctttcctttgatttttgactagctgaagagtttcttctagtgtttttgttcattataaaagcaactgttcatgttttctgtaatattatcttagaataatttaagacaaattagaaggctaacaaccaaggtttgattgtttggtttaagcactactctgaaaacggaacaaactggtcggaccagctcaatgtgaactgctccagtagtttatccagtcaagcctgtatactgctccagtagctaatccagtcgagccttcatcattgtaactagagaactagtgtcatgaccgatcaaacctctataattgaaacttttatagaacttgtctcaccagtgaattagatattgactgcttaaattaattacattttgaaaatttaacttgttcagatttttaaccacaagatgcaccagttatggtgttgtttgaaccacaagaaattcaatatttttttaaacttcaacactgttaaatgttaattatataaaaaatgataatattcatgtgtgtgtgtcttcttgttagaccatcaaccataacccgactcgatgactggtctaatgctcaaaacttagggtttaagttcattacttgttgtgtccattagcccgactttgacattttgtccttttttcttataacaggcaggactttcc

SEQ ID NO: 35580 - DNA, 956 bp, Medicago truncatula
  Intron number 2 from transcript Medtr8g105620.1 (locus Med tr8g105620) derived from phytozome v7.0 (chr-ID MtChr8; po s 23369851 to 23370806 reverse strand)
caaagaaaggggacgtcatttttatcgtaagttaattcactaacgctttgttttgtgtttgctaactaaaaatggtaccttgacatgtatgtatgatttttttgtctagtacagttctgattttcattgcaccaaaacttgagtcattgtcattttttagtattaattttgaaagcatattttttgatgatttgttagttgttgatgtatgaggctttatatgcctaatggtaattttagactaatttcaaggagccttgtaagcctccatgttgctatgtgctggtttttctctcttcagttataaaaagaaaaataataataataataatatcttgactgctttaggatagattacatgatcagtaggttaactagagaccgatgcaaatctgccatgaggtttgttggctgcagagacatttttatccactcattacctccccttaacatgatgctatgatgtgatctttctggtgatttccatcttgcatatgatttagatgatttatcaatactatcatgttacgtggtatgaaaacttaccttgtgagatttttagtgtgtgtcttcatcgttttcattacaaatcattcaaaatatgaaaggaagttaaattgatacttttgtggttagcaaaaacgggaaatgaaaatagaaaagatgaattcagtggctctcttctatcactgtattttgattgatgaatgctcctttctaattatgttatatatattgcttcaaagccggactagtgtgaccctgttgaaagaggctttcatggccccttccatttcattgctatgagaaaatttaagtgttccattttatactttgttttatttacccatagacaatttgttaatattgggatcaatcattttagttttctacatcacatgtcactttctatctcattatggtaattggataatgtagctgctatacgtgagcgc

SEQ ID NO: 35581 - DNA, 998 bp, Medicago truncatula
  Intron number 3 from transcript Medtr7g099820.1 (locus Med tr7g099820) derived from phytozome v7.0 (chr-ID MtChr7; po s 22362724 to 22363721)
gactgatattccaggaaccactgaagtcactttcggtatgtacactttatacataatctgttacttgttaggtcaaatgatataacaagaactcagttattttaaaaaataaagttaattatgtcatagaattcaatggggaactattatttcatttgtggctgttttcaaataaaattagaggatatgtgaagcgtttgggtaatcacattacttaagattgtatttggatgaggtaattagaaatgtcatagaaactagaataatataattctcacttcttaaactttgttggattatttttatgaaatttcaaaaaaaaaaattgagggatttaccttcaaaatatgaaaaagggctaatgtacaaatttttaaaattatagggaccaatttgcaatttataaaaaaaactcataggaaccaatttacagattttgaaaatttaaatggaccaatttgtatttttttaaatatagggaccaaatttcaatattttattaatatatagggactcatatgtaaatttcttaaaaatataggaaccaatttgcataatttgaaatagttaaaaaatcaatcttaaatttacattgtatagactatagagcaaggaagacattttaaatttctagattttaagtgttattcaaaattccataaatttaactttgaattgaagttgagtttaacataatcacgatatgtcattatgatttttgtaaaaaccatgattatacctacagcaaaacattgtgttggcatagttttgtaaaattcaatgtcaatctcaacatgcaagaaatgaaagataaatcaattgaagtaatatttgaataacaaattaagaacaacactagaattatcttcatagtttttacttattaaagagaaagtcctcatgggtatgcctattggtagaatcgttcatttggaaagttacattttccaccctaaccagctagctaattttgaatttgattgttttgcacataggca

SEQ ID NO: 35582 - DNA, 841 bp, Medicago truncatula
  Intron number 1 from transcript Medtr7g118360.1 (locus Med tr7g118360) derived from phytozome v7.0 (chr-ID MtChr7; po s 27919627 to 27920467 reverse strand)
actgtttttcatcgacaacgacaaaccgttacgaagtacgttcagattttccttttttttttttctttcgattttctttccactctcgacgatgcgattccggcgcgtttcccggccgttatgaacgacggtgcgcgggaaattccttttgagaagagatccactccgcaacgcaattctgagattgtgcgatttgcgatataaactgattcaattatcgttatttttgtattccaataataccagttttattgttaatggttaatttgaatcagctaattagatgtagatgattcacttgattttcagtttatgattatcatcggtttagtgtgattctaatttacaattccgcgagatttgactattgtagagaattttgatatgaaattgtgtttaactgttattattgttttttttttttttattttgattatcgctattttcagttaatctgctcagctaattatattacacgaagatgatggcttagcatgattcttattatgaatatcatcaccttatcgtgattgtaatttacaatcttttggcgttttttcctagagaattttcatatgaatatctgtttgattgttattttcgcttaaatttctgctacatttagtggcaatttcacttgatgtcttagtttatgaatgacattggtttaacgtgattcaaatctataatcttgcgagatttacaatttttctagataattctgatgtgaatttgtgttttacagttgtttttggattacattttgtttcattattattttttaattttcattatcactctctcttatttacagggagttgaatttttgtgaatttgcaat

SEQ ID NO: 35583 - DNA, 804 bp, Medicago truncatula
  Intron number 1 from transcript Medtr8g042890.1 (locus Med tr8g042890) derived from phytozome v7.0 (chr-ID MtChr8; po s 9115125 to 9115928)
ttgctgatcacatgtatgttttgctgattgtggatatggattttcatttctttcttgttttgtaagtaatgtgtgttttgatcaagaaataaagtgcaaaatatctttgaaaatgtgtcatgattcttggcttgaatgtgtcctatttgttcccacattatagctcaaaattaaacccctttaacattgctataatgaggggattataggtcatgtgcatgtctaagtgtcataaccaattttaggtatattttgccattttatttcatttcattacttttttttctctcttgctattctattcaattttgtttacctttctactatttttatgccttatgatactaaccatttcatctcacatttcattcatcccatagttttagcatcatttttttatttttattcatttctatatcaattgggtttgtaataattttagatagattggttcttttttaattccttgcaagaccatagcatgtatttaggactcaatgtaaaggactatggacactataagtgatgtacaccgacacgagcaccgacacatgcacacaccccacatggatgttctagatgcatgattagggaatgtatgtttagatgtatgcttaggttttacaacgcttagacaaaaaaatcattttttcaaaaaatgtgaataacctcacttgaaaaccttttttttaaaaaaataggagtcaaaactcctcattttccttttgttttcttaagaaaaatcccaatgaattttaatcatacttagactttattttgcaaaataactacttccacctcaca

SEQ ID NO: 35584 - DNA, 508 bp, Medicago truncatula; identical to SEQ ID NO: 32620
  Intron number 1 from transcript Medtr7g134670.2 (locus Med tr7g134670) derived from phytozome v7.0 (chr-ID MtChr7; po s 31851713 to 31852220 reverse strand)

SEQ ID NO: 35585 - DNA, 569 bp, Medicago truncatula
  Intron number 1 from transcript Medtr7g093880.1 (locus Med tr7g093880) derived from phytozome v7.0 (chr-ID MtChr7; po s 21139727 to 21140295 reverse strand)
tcaaggaattggttacagttttgattatcagacacgtaagtctgcaaaatctaggaagagtttttctgatactaacaaaaccattgtttttcagttatgattgtagttttttcattgtttcccaaacattgtcttattatgcttttgttttttgcttttgttgttgaattgtggaaaattgattgtccagcggcacatttgtacaatatgagatgatatggtttatttgatttgatttaatccatgaaccttgaacctgatgctgatattttatcagaacaaccggtaccacataaaaaaactcaataattttacacccttgcaatagcttcattttattttagcaaacatttgttatagttttatttataaatctgcttgcttctcttctaattggaaatgatcaagaatggtcggtcaagcttgaataacaatctccgagttggaaattgggtatacctgcaaagtgcatacaatctgacgctcaagtcaatactaacagagcaagagtgagaggtttttaagtagagattaatgtacattgctttgtagtgaaggggtatatttat

SEQ ID NO: 35586 - DNA, 926 bp, Medicago truncatula
  Intron number 2 from transcript Medtr8g106180.1 (locus Med tr8g106180) derived from phytozome v7.0 (chr-ID MtChr8; po s 23634670 to 23635595 reverse strand)
aaagcacacaaggtaagtgctttttcccatacgtccatactaagtattaggatgatgttgtgaattagaagtagaaattcttgtctcttgaaaagataaacaattcaaatatatatttacatggtaaagtttttattttttttgtcaaatagcatagtggttggagctcatggagaagtgaggtgtctgtaaactttaatcatctataaaagtgattatctttatttatgttttatatgatggttgtatatgagaatgtgatgtggaatgatatattttattttatttcattctgatttatatgtttatgtgttgttggaaaaagaaatgttacattttttatgaattaaaaagaaaagaggaagatgaaaatgtgagtttatttgattgagaagttttgatgtgttataagttaaatagataatataagttaaattttataagttaaataatgatgtgttaatatttgattgtgtgttgcctaagtggcgggtatcttatttgactttgtaattacctaagtggtgggatttaactttcattttcatcatcatgacattgcatatgcatataagtgtggtgccttagtggctggttaaaatcatatctctttgtggtgccttagtggtaggttgattatatccgatttatatagttacaagagcatgcatgttacgcataattgcattgaatcttttatatatttgtgattgataattgagtaaactcttttattccaaaagaaatgtgcgtgaactttttcttaaagtgcgtgaatttttttaaaaaagtgtgtgacttggttgtatctctcttatttctttttgattgagaagttttgatattatctatttcgtgacattatttcttgtgctttgagtatgaactaatttggataattaatataatgttgtaggtacgaagga

SEQ ID NO: 35587 - DNA, 1034 bp, Medicago truncatula
  Intron number 3 from transcript Medtr8g147170.1 (locus Med tr8g147170) derived from phytozome v7.0 (chr-ID MtChr8; po s 36170575 to 36171608 reverse strand)
ccactgtgacgaatattaatcgctttacttctcaggtaaagtggtaatgaaaggatctgaagcatgcaagtgttgaattgaatgaactccttctatttaattattgaattaaatgattagaggtatcctagaattattaaaatttgctgcttatgttgtgccgttaatgaacttatgcgcccaactttgatccatttgaagatctttactctttggaaaactgtgttaagttgtagttgtgaatagttaagtagttagttaggtctcactttccctctatcaactagtcaatatgattttggtcctcaatcaatccttcatgtttttaagtttgtttgaaaacttttgaaattttcatattctctttaaaatctttacaaattgaaatatttaaatccacataaaattcaccaacctaaaagcaaatttcgatcaaaataaaaaaattaacacttcccttcaactttatcaaattttcattaaatttttttctttctgaacttctggaattgtttcatgttccaaatccagagcagacccctgtatatttagatagaaaatgaaaatatgagtttcaggtagaagaatattgactgcaggaaagtttggttccttgactggcttgaaaaaagccgagggacagaaatctcacttagtccaaaatagagaaatcaaattgcaattattctaaatattatattgaaaaggatctaaataattgagttgtagcgttggtttcctggataagcttcaaagtagccagtaagctgtaagcctatgtttggaagtataaaaacaataaggagtttttgtattataaactacaatttaatcactcaataaattctattgcatttcataatacacatcttgtttgaatttgattattaattcaagtaactggaaagtgatctgaatagcctccacttggtttgcttcccatggctctgatatgtatttaccagaaaagagaaattccttttatgggtgcattactaatatgtctttacagttgaaatcattaggattctcat

SEQ ID NO: 35588 - DNA, 1009 bp, Medicago truncatula
  Intron number 1 from transcript Medtr8g133870.1 (locus Med tr8g133870) derived from phytozome v7.0 (chr-ID MtChr8; po s 32062044 to 32063052 reverse strand)
tctccatctccacaacattatattctgtaagagtgtcatccacatggactgttacaacaataatcttcccattagaggtaaattttatgaataagctacggtctgttgtccctgagtgtagtgtacccttttccttttactgattgggtcaacttttcaaactaaacccgtgtagattgtttgagtccatagagtggctattggtattttacacacatttcaaccaaatttgttttcaaatcctggaggactatccatgtatacatcttcatataagtccattggcgaaagcatgcctcacatcaatctaagtttagtgctaaaaaattagaatttgttacctggtgcaaaggagttgggttggactcttgactgtgtcttgattcaggattgacctaaagtctttcctgatcaccaaatttttccaaaacatttatccacttgaagaagaaaagtccccttgactcaaaagctttaatgtcatgtgaaaactatgcaggcaaaatcttttctgaacatgcttcagtgaattagcacccagcagagtgcttaatttatacacataacgattaggaggaaaataaatgcacaatgtccaagatgagttattatgccatcttgattccctaagatgcatttgaccttttctattgttgtacaatgaatctccactacctggggactataatgaggtctcatttccaaaagtcatgtttatgaattatgaagcaccatacttaaaacttcaatggatgttatgctagtgtttgacatgtatcatgtcaggctgttagatacttctagcttattcctattaactgtttttttttttaaaaaaaattggggtgccacaatgatttgataatgctgatttaaaattatgatttaggatttttgtatgttaatattatatccatttcatatgttctatctaagtgatactacgtctatgtcagtgtgtttctaactatacttggtaaaaatttattcttgtagggaggcagtttac

SEQ ID NO: 35589 - DNA, 563 bp, Medicago truncatula
  Intron number 1 from transcript Medtr7g080850.1 (locus Med tr7g080850) derived from phytozome v7.0 (chr-ID MtChr7; po s 17324849 to 17325411)
ttgaagcatatccaacatactctttgttgaagcatgtaactactggccttatatataattccttcccatccaattcatattttttatactcttccattcctttggtagcagcaatatataattttctcctcaaaccatcaaaccatctccactcctttcaacacatcaaccaaaaacccagttctatgaaacctttcccatttgtatttattggtcttcttttagttaaagttgcaccaccttaaattgaaaacgcaactaaatatttatatagatcctttgatcaagttcagtaatttaagttctattaattttttttatatgtttcctatatcatttcttgatagatctctcacatatcaactttttcatactttatgctgaaataagcaagtcctgtaatgaatccatcataatcttccatttactcaaacctaaaatataatttttagttatagataattttcttgctatatatcactagtaactacattagttctaatatgtttcataattttttgatttcagtctagcaactgtagtttacggcctttaagggtcat

SEQ ID NO: 35590 - DNA, 287 bp, Medicago truncatula
  Intron number 1 from transcript Medtr7g135730.1 (locus Med tr7g135730) derived from phytozome v7.0 (chr-ID MtChr7; po s 32351207 to 32351493)
aacaactccattatcggttagtttttctcttttcttctcctaatttttgaaaatgattatgattataacctcattacttattattagggcatgatttctttctaattgttttgaagagttaaatatatgtaatgtagccacaaaatcataatttacttaccctaatgttttatttatgtcactttgatttttagtttcttatgctaagttctgataatgttattaatattaattatggtttggattatgaagatccgttgcaaggtgattttcctgaagtgatagag

SEQ ID NO: 35591 - DNA, 728 bp, Medicago truncatula
  Intron number 2 from transcript Medtr8g148360.1 (locus Med tr8g148360) derived from phytozome v7.0 (chr-ID MtChr8; po s 36690237 to 36690964 reverse strand)
ggtctggtagtagtgttaggtatatatatatatatatatatatgaaacttctcatgtgtaatgtttttagtggatccttaaaaaagaaaaatatgttaaaaaacaaatctgaacacgtagtatttatttattatatactaaacacaacgcaacagtcatgagacaaatgtaaaataacagggttttcaaagattagggtttcaggctttcttcatttgagggaagcttcctcttcagcagagtttttttttttttttttgctttcgcaccggtttccgacccaccaaaggtgagcgattaatccggctcatacgtagaggcatgcgcactgaccaagtgttgttccccctgggaatcgaacccggtattccccgggtgcgtccttggaaggagctccttgccactggagcccaagcaacttggtttcttcagcagagttctgctcgtggttaaacttttgacctttaaggattaatcattaaagtatcattttttttttctcttccctttgattttatgcaacaaattttgattttagggatctatattttgacgttaattgcatcaatgtttctagtctagtaattaaaggtaacacaaatcacatatcagtgttacccaacaatatattgcaaataatttttaaaagaattatttctgtttaatttatatttatatttatatagaactcaacatcttaaacatcttttatcgttgattcagtgata

SEQ ID NO: 35592 - DNA, 792 bp, Medicago truncatula; identical to SEQ ID NO: 32720
  Intron number 1 from transcript Medtr7g104230.1 (locus Med tr7g104230) derived from phytozome v7.0 (chr-ID MtChr7; po s 23580899 to 23581690 reverse strand)

SEQ ID NO: 35593 - DNA, 450 bp, Medicago truncatula
  Intron number 1 from transcript Medtr8g096620.1 (locus Med tr8g096620) derived from phytozome v7.0 (chr-ID MtChr8; po s 21241390 to 21241839)
aatcggttttgagacaaaaactcatctgatccaaagttaaattacctgcggttcagtttttgacgactcgtttaaaaaattggatctgaattgatccaatttaatgcatattattttggattggttcttgaatatgcaaattacaaattgtaaataataagtttgatgcaaaatataacacataatatgttgatgaaaattttcgattatatttcaaacatagaaaatagtaaaaagtataataaattaaattgggatataggtggaagattggagatggctcccagatcaaagtttggtccacatcatggattcattcactttctactcttcgaccctcaacaacgccacctccacatctggaacatttattggttcgtgatttaataaatcctgatttgcatacttggaatagttcgctcattagtaacatcttttccatctcagaag

SEQ ID NO: 35594 - DNA, 643 bp, Medicago truncatula
  Intron number 2 from transcript Medtr8g096620.1 (locus Med tr8g096620) derived from phytozome v7.0 (chr-ID MtChr8; po s 21242040 to 21242682)
ttgccttccaacccgcactcgcttgatccagaaaggtttatctattgacgatacttgtgttcattgcgatgtcctggatgaatcccacatctagtcattctttgtgtgcccaaaagcaatcaattgtttgaacaagtccaattggatggtattgtgcgagagttaccacgtgatgctattgatttcagatctcttcttttttatttctttagcaggttacaaacacatacccaggcaacaacatctattattctatggagtttgtggaaaaatagaaactctaaattatggcaagcagggacacaccctcctcatcattgatcgttcagcgagcgcataattcccttcatgaatgaccctgtttacaaagagcaagacaatctaaccaaaatatttcagtttaaaatacaatgtagattgtgccctcttcaacaacaataccatcacatggctcgtcatctgctatcgagactcttcaggggcattacattatggatcatctaactactctttatatacttcttccccttcagaagccgaggctctaagccttaaccttcgctgacaatcaaggcattgagtctgtcatatttgagtctgattgtaagctagttcttttattctatttggcaagtatttggaa

SEQ ID NO: 35595 - DNA, 729 bp, Medicago truncatula; identical to SEQ ID NO: 30247
  Intron number 1 from transcript Medtr8g042550.1 (locus Med tr8g042550) derived from phytozome v7.0 (chr-ID MtChr8; po s 8874497 to 8875225 reverse strand)

SEQ ID NO: 35596 - DNA, 328 bp, Medicago truncatula
  Intron number 3 from transcript Medtr8g077210.1 (locus Med tr8g077210) derived from phytozome v7.0 (chr-ID MtChr8; po s 15329513 to 15329840)
atgtgagtgctaaacaaacttgctactaagttgtttgcatgagataggtggtgtatgacaatatatatacggactagttttctaaatgttaaaacataacatgataaacactatccttatcattttacctcagttattatctttcatttcatatgctgaattcattttggaaaatgttgcatgcattttatctaggtcacgtccaaaagtagctgtcttttctttttcctctttccattccattaatgtctcttcatttccagttgtgttttgattaactctccttttcatctaaagcttcccctcccagaggaactagacacagaag

SEQ ID NO: 35597 - DNA, 1058 bp, Medicago truncatula
  Intron number 1 from transcript Medtr7g103220.1 (locus Med tr7g103220) derived from phytozome v7.0 (chr-ID MtChr7; po s 23085575 to 23086632 reverse strand)
ctgataaatcaacaacaccttccacttctcaaagggtacatttttgcttaattcattgaattcttgtgttcttttcttgcttggtggcttcagttgtattaacttgttactatttactcatgctaatattgactctttgatatatgtcccttattggataaacaacttatttgcagcttattgcacaagcacttaccatgataagcgcttatgtataagctatttctataatgaagtataaaatgattgttttcataagctatcttagagaacttatgaaaataagcataaaacaatttctgatttgtcataagctgttttcgtaagttctcccaaacagtctttgaaagcttatgacagtagataagataaaaaaaagccaatccaaacatgcctatcctatagttagaaactgttacagatttggttagttatatgtgttagttattagtctacctagtgtttagtggctgaagtgtacagaaatttaacaaactgctattgttccgcaatacaaaatttcttaaactgttgtcgaatagcggctattgtagtgtagtgagagaaatttgaatgaagaaggaggagagaggaatcctctttgtttggtgatatttggcctaaatattaaaaagattcaatacttggccacaagtttcttgaagaaggaggagattcaatactctttttaatacttgttcccccctcctctccattgttcccaaccaaaaactatgtaagtgttttgatgactttaaactaataccaccacccttctactacgaagaagcttagcagatatttgtcgatgttgttgtctatcgttctattttggtttttatggtaacttcttttttggcaactaaattttaatggtgtacatatgcttgaaacccatggatcaacaacttctaatgatcctcatgtgttaaaaacccacagatcaatgtttctgttgcatttttaagcgtgaggattttctgttgtcattaatgatgctgtttctatcgtttactttttcagtcatctttgtcctcacttggatctgtgtacaacaa

SEQ ID NO: 35598 - DNA, 274 bp, Medicago truncatula
  Intron number 2 from transcript Medtr7g116900.1 (locus Med tr7g116900) derived from phytozome v7.0 (chr-ID MtChr7; po s 27166654 to 27166927 reverse strand)
ctcagtttctgtatcaggtaaattgttttttccttctgtttcaatctatagctctcaatcgttgaaaatctgattgtagtagccaacttgttgaattttacatgcttttttcattgcttatttcataataataaactaaacaaatcatattctttttcaacacaaaaacttggatttattagtgcatacaaaactattggtgaagaatgcaaaattgatgttgttttgagttttgacagtgcaaacaagaccgtgaaggagcagaggaatatta

SEQ ID NO: 35599 - DNA, 298 bp, Medicago truncatula
  Intron number 1 from transcript Medtr8g109190.1 (locus Med tr8g109190) derived from phytozome v7.0 (chr-ID MtChr8; po s 24417328 to 24417625 reverse strand)
tcttcatccatttctcatgtgttaatgtcacttcttctttttgttttactgcaggaacctacccttgcaattaaacaggcaagattattttctcaaattttcattattcattgctcactaaagttttgttttttaaattaaaaatggtcacaaaatttctgtcactgtagacaacttatggtgctcatcataatctaatttttatattttaatgtttaactatttggtctaataatcaatcattgttttttttttttttttgtttagtcctatattgtatacttaggatcacattctc

SEQ ID NO: 35600 - DNA, 715 bp, Medicago truncatula
  Intron number 1 from transcript Medtr8g106750.1 (locus Med tr8g106750) derived from phytozome v7.0 (chr-ID MtChr8; po s 24033431 to 24034145)
gaggttcctttcctttctctccaatcgcttcccaggtactctctttctctcaattctcataaatattctgtggctctgaatttcgattttgatcatttcatttcgttttgtgcttgctaattttcaatcatttaatcgatcttcatatcttcgtgtttaactcaattagttttaatcatgtttagtttattttatcgattctgtatttgataattcgtgaattggtgattatttttttgttttgcttaaatcgttctacgaactatgatgattctgttgttgtttgaaatgagtatttcgcttctgaactttacaggtattttaatatttggtaaaaaataatttggaagattacgataagggtttgctgatattgaattattctttgaaattgtgtttgaattgaatccttttattagtgttatgaaatttagggtttatattatattatttgcggttgtgatttagttatcttaaatgcgcgatgtaccttggtgaatattgcacttagaagtatttaatattttgagaataataacaaaatgtagcttatttggaagattataggaagggtttgttcatattgtattattctcttgaattgcatattttattgctggctgtatggtttatacgttatttgtggttgtgatttagttgtcttaaatgccatttgtacttccagtgatcgctgcacttgagtttgaacggcaga

SEQ ID NO: 35601 - DNA, 712 bp, Medicago truncatula
  Intron number 3 from transcript Medtr7g090120.1 (locus Med tr7g090120) derived from phytozome v7.0 (chr-ID MtChr7; po s 20031170 to 20031881 reverse strand)
tacagcgtgaactgcaaacagaaacaattgccattgtaagtgttgttttgattctgtttatattgtttatagctccaattacttcttactcggtgatgctttcacttgtagtgaaattgcgttttctacatactttaacttgaaaattccaaatttccattacatttgttcgaaggtactacctctgtccaaattattagtcagttttggaaaaaagtttgtcccaaatttaagtcattttacaatatcaaaatgaaacatcaatgattcttttcctattataccctttaatatttattactcttttttacaatttttatttatcttttccataccataaatgaagtgtaattttgtaaggtactacctcataatttctcttttctatacaatattaactacattccttaatttgtgtgaaatggtaaaatgacttataatttgggatggtgggattaatatcgaaaccaaaaagccaaaagtatttgcacgacgttgaggtaggattggaaattaacttgcggacaacattatgataatccattgcattagatagtaattattagagcctagttgatatattcattcttaatttttgcttcttcattcatctaatgaaaataattcattttgagagttgacaattttccttttctccgactgcctcattgttctaggaaacaagttcaaagttgtcccaaggtgaggcaaa

SEQ ID NO: 35602 - DNA, 337 bp, Medicago truncatula
  Intron number 1 from transcript Medtr8g090560.1 (locus Med tr8g090560) derived from phytozome v7.0 (chr-ID MtChr8; po s 19796239 to 19796575)
aggttataattttttttaggagaagggaaaattattattaatatattatagtatatgttttatttttattttttagtttgatctaaaatacagttagttatatattaactgatttactatgtcacatattctttcttccatcaaataattaataacttgtttctaattgcaatttttaatttgtactattatactgatcctttttctttttattatattttcttaaaatttctgtcccaaaaaagtaaaaaaatacttaaaactatattgtttagttcttgagagagtgattaattttgtagattggaggggtagaaaaatcagcccaaaactcttt

SEQ ID NO: 35603 - DNA, 808 bp, Medicago truncatula
  Intron number 3 from transcript Medtr8g090560.1 (locus Med tr8g090560) derived from phytozome v7.0 (chr-ID MtChr8; po s 19796966 to 19797773)
tgttctcattttttcttcttggaactttccaatcagtaagtcacaacatttcctaccccaccgattttatttatttttttggtatactccttcgtcctaaaaaacaattttgatatataaatttttgatttaatacattaacttttgtttagatacatcaactttgtttttatatttggtgttgtttaaggtgatgtctttacttcgttaaaacattagttacaattataaggtacaatcatttttgttgactgaaatatccttaatgttgtggaagttaggtgggaggactaattaatgtaggatagttgagatgcaaattatttaagctactaacaagaaaaataattaatcccttaaaaaaattaatactcccgcacgatattctaaagtgattaaataatttttctatgaggaaaaagtgatgaataatttgaaacatactactccctcctgtttttattataagaaaaaaaattcacttttttattgaatgattgatgtatctagtctataatagatcaaatacatcaattatttaataaaattaaaatgtgaatttttttttataacaaaatgagtacttgttaccgccactatgctgcagaattgttcttgtacatgtctttaaatcttctaacaaaattagtatttgttagagggaagaaattgtgattgctttttatttttacattgtgattgcatatatacacacaaaaattgagtagaaaatattagttaattaaatgttaatacaaagtttgtaaacctttctattactacactaatacatttacaatatgcagtg

SEQ ID NO: 35604 - DNA, 412 bp, Medicago truncatula
  Intron number 1 from transcript Medtr8g127680.1 (locus Med tr8g127680) derived from phytozome v7.0 (chr-ID MtChr8; po s 29602635 to 29603046)
tcgcattaatccatcttgataccccttggtttgtaattaactttatttcttgttaattaattaatgtttgtttagttttgattcttatgtttcttgtaagttagtgtttgaataaaaaacttaattaagttcttagagataatgtatgtgtttagataggtggcgagtttgataaattgtgattctgaaataatgaaaagttaatttatttatttatttttacataaactatttttcataaaccatgaacttatagaaaaataagaaatcagctataaacatcttgtgaacatatcataagttgtttgtttctataagctcgctcttcgaaagagtcttacaagtgtttatgttagttgataaactcaaataaatcaaaacgtgtactaattctatgtattgtttttcttag

SEQ ID NO: 35605 - DNA, 198 bp, Medicago truncatula
  Intron number 3 from transcript Medtr7g105270.1 (locus Med tr7g105270) derived from phytozome v7.0 (chr-ID MtChr7; po s 24089368 to 24089565)
tgattgtggaaaaaagaattattgtgatgtgtgtttttcttatgtatttcttttgaagataatgtgattgttctttgctaagatatattaacacttcaaattaagttcaggattttgttcttttcttcttctaattgaatcaaagtaatatgatgcccttctttttctgttaaatcttttgactgaccaagaaactac

SEQ ID NO: 35606 - DNA, 782 bp, Medicago truncatula
  Intron number 1 from transcript Medtr7g118030.1 (locus Med tr7g118030) derived from phytozome v7.0 (chr-ID MtChr7; po s 27696454 to 27697235)
ttcttcattgagcagttaacctcaagcaaattcaggtattcaactttaatacatttttattggttactattcagttcttacattttttttttttgaagaatattcagtccttacaatttattatacatttttaatcaaaaaattacttttagtagttttagttgagtttatttaagcttttaaaatcaatcataattaaaaaaaaaaaaatgttttccttattaaaattagaagctgattttagtagcttttgaaaaagaaaaaaagattttgatgaaagtggtaaatgaaagagaatattaatttataagtaataatccacattaaaatctctaaaagtaattttatgagtattttatctaataatcattgttattttattcttaaacaagcagacctaatatcttccttgggaagagcttgacttttaaatgacaagtttttccatttacatgaattgaaatttccttgaaattttacttgtaaaattcaactagtgttcaaacaattttttttatggatagggaaatatattgatttaaaagtgatgcacttaatataaaactaaaggataactgaaaagcaaatgaaaaagcaaataataatgttatgttgaaaattgaaattcatgttaggacaatttctttatgtcaatgtgacactcataatgagattcagtattagtttacattgttttcgttttaataccagtttctaaaagtgattgatttttcttaacactctctgcacagaccataaaattcttgctttcgcttccccaa

SEQ ID NO: 35607 - DNA, 518 bp, Medicago truncatula
  Intron number 1 from transcript Medtr7g103620.1 (locus Med tr7g103620) derived from phytozome v7.0 (chr-ID MtChr7; po s 23295384 to 23295901 reverse strand)
catttccacgactgttttgtcaaagtaagaactaacttgttaaatatattctaaattctagcttgtgaatttgtataattagtttctgctaagaatatgattcttatctaacaaaaaagaaatcattttaagtttcaacagtcatacaaaagttacatgagaaaacttggtgaaaatggtaattgttacttgtacaaaaagttttagtttaaaaatcaaagctttgatcatgtattacttaattggtttgtcaaacgatcaacctaccaaataggcataagaagattgggatctattaaaaaattgttttgatttaattttcgatagtttttattcaaaagtttatttgtatcgataacatacatttccatcaatgtgtaggggttgtgatgcatctcttctcatagctcaacaaatagcacgaaatcagagaaataaaatgacgcaaacgaaactgttagaggctatgatctaatagacgagccgaaggaaacaatcgaagttatttgtccttcaac

SEQ ID NO: 35608 - DNA, 482 bp, Medicago truncatula
  Intron number 1 from transcript Medtr7g083300.1 (locus Med tr7g083300) derived from phytozome v7.0 (chr-ID MtChr7; po s 17745569 to 17746050)
agtctttgttcttctgtttcttaactcacaacaaggtatgattcttcttctgtttttgttgttattctttctaagagaataatttcttgttgttatttctatttgcttcatttatcaaatttcttgacaatcattttgcttcaagaatatggttcaagaatatgcttgtgttacttcattttgttttcttgtaaaaaaatgtagaaactatagaaaagtagtctacgtcatgctataccttttctggcatttgtaatgttatttcatatgataatttcatccaaaatgacccgatattactcgcttgattcctagcatattaattgttcatgaatttgcgtgttatggatctgtaaaaagaatgaatctttattggctaatgcctccatctagggtgatctatgatgatattgcttatcaaaatcacataattgtattatgttacaggaatctgaaattttgagctgcgtgtgatataagaa

SEQ ID NO: 35609 - DNA, 1013 bp, Medicago truncatula
  Intron number 1 from transcript Medtr8g034300.1 (locus Med tr8g034300) derived from phytozome v7.0 (chr-ID MtChr8; po s 7364531 to 7365543 reverse strand)
tcacttgtactgttgtcgccaaaccacctatctgtgtaacttccttttctcttttctttcattttttacttaatgttattaatgttatgttgttattgttgaagagtttttgtgtattggaaaaaagttactgataggaagacttataagctgaaaaattcactgtttagtaattttgaaccttctggttgtgaatttgtcattttggttattatatgagaattcactttttaggttcattgaacaactgacaactgacaaatacattattcattattcagcgaacataaaaagtgaattttcttataataaggaatagaggtaataattttgaatcttcaaatagacgatacaatgccaatacatagacaccaataataatttaagaaaataaaagtgattgaatgggccgatgtcagacaatagacaccactttaaagtaaattgtattggttgtgaatctatcttattatgtatccatcgattttaaattgtgctacacacactctatctacggtctgcgctgggctaggagaaacgtatctaccgataggtttgtcccatcgggagaaacattgcgataaattgagggcttttgagcaaacattaggggattgcagaatgactcttggattcaaatcagatcgttcacaaaatctgtaggttttgatttttttggaaatccgaaatgacaaacttgaaattctaactgttttatcttggtccaacagtcacctatgtgctaattgtgggattttagggtatcttaattgcatgtaatcttgatccaagtttgacaaccttgtatgctttattagtttactttaaacttagctgattctgtcaccttagaaaagtcaatttgaactttaggctccagctcaggctaagtgaatctgctacttttcttggttcaaagttaaaaatttgtctgaaaattgagtgtataataacttaaaatgtaatgtatttggagactggaattttctcattttctttgtcggaattgcaga

SEQ ID NO: 35610 - DNA, 831 bp, Medicago truncatula
  Intron number 1 from transcript Medtr7g092810.1 (locus Med tr7g092810) derived from phytozome v7.0 (chr-ID MtChr7; po s 20525644 to 20526474)
tcacaagtagcattttttctttctcctcaataaaggttcgttttttttcaactgggttctcttctttcagctcaatttgaaaattttttgtttctggattttgctattgttttgagattattaagcttactttttgtgctgtacttgctttgaattctctgtttatgttaaattggtgatatttacatggtttaattttaaaattgagctagtttaaattatggattttaatatcaaaatgtttgagaagtttaaattatcattattattgccctgtttggataaactgtttaattaagtgcttatgtataaactatttcaaccacaaaagataaaataaagtcaaaatattttcatataagctataagctgttttgataagctgagagcatactatgagtctgttttcgttgacttaattgagcttatctactgtcataagcaattgtgagactgtttggatgagcttataaaaacagcttatagcttatacgaaaataatacaactttattctatcttttgttataaaaataaaaatagcttacacataagcgcttatgctataagatgcaaattaagttgtttatccaaacaggtgctatggacatgtcataagttgtttttataaactttctcaaacagtctcataattactattgctcgtggatagacttaaataagtcaatttaaccaggctctatgttttcaagtgattgtctgacttactgttacgtggcacgatcctaagtgcttattagttattacagttgttgacttggactttttgtaagccaggtcttcagattgtggcttccttagtttatcgttct

SEQ ID NO: 35611 - DNA, 840 bp, Medicago truncatula
  Intron number 1 from transcript Medtr8g112490.1 (locus Med tr8g112490) derived from phytozome v7.0 (chr-ID MtChr8; po s 25267030 to 25267869 reverse strand)
gctaaggggtgtattggattgagattttaaaagactgttttgataaaaaaaatcttaaagattttaaaagactttgtttgtattgattttatggaattttaaaagactttttttgaaagactttctacaatcaagattctttaaaaatctcaaaaaacaaaggtacagttataaatcaagcaaccgaaaaaaaaaacattgaatcaatgagtgtaatatttcttcaaaaagttatgttagtttattgattataataatttgattgaaaaatgcatgttataagtagaaaaatgcaagtagaaaaattattataatatcaatgaacgtaaaagttatattaagaaaagtgcaagttagaggcatgatgatttcgacaataagtttgtcaaacaaaatatataacctgccattgttatagtagaacagaaaagaatttggaagaaacgtaaaaaaaataaaaataaaaaaaatttggaagagtattacaaaatctcaaggctatgtgtgggagatagaaaaatctcaaggctaggtgtgagattgttagtaggtacattttacactaaacaatctcacaaaatcctttactcacaacaatccattaaaatccgtagagttttgaatacccgtagacaatttttaagttatgcaaaatctcaattgaataccactgaatttcattgctcattaaaaaatcttgaaaatcctaattgaataccacaagaatattttatattccttaaaaatcttgattgaataccacaagacttttataaaacaaaaaagtattttaaaatcttttaaaatctcaatccaatacaccccctaagtccattcacc

SEQ ID NO: 35612 - DNA, 156 bp, Medicago truncatula
  Intron number 1 from transcript Medtr7g108510.1 (locus Med tr7g108510) derived from phytozome v7.0 (chr-ID MtChr7; po s 25568609 to 25568764)
tttccttggaccatctttctctttatcacttttgtgtaagcatctttaatcttaaccttctttcttcaactactgatttgttgtttttatttcctctgtttgtcttctactattttgctttgtgttgattttcttttcttattttttcagattctt

SEQ ID NO: 35613 - DNA, 545 bp, Medicago truncatula
  Intron number 1 from transcript Medtr8g015980.1 (locus Med tr8g015980) derived from phytozome v7.0 (chr-ID MtChr8; po s 2975482 to 2976026)
tatttgcgccatcaccatcttcaaataacgtattttctacggtagcaccatgaatagcgcatagtagggcagcgcccaatacaccagcaactcccatcatatgaaatgggtttaatgtccaattatgaaacccttggaaaaatagaatgaatcgaaatatagctgctacaccaaaactaggcgcaaagaaccaaccagactgacccagtggataaatcaggaatacagaaacaaaaaacaagcaattggaccggagaatgcgattgcattataagggcgcaattgaacagatcgagcaagttcaaattgacgtaacataaaacctattaatccgaaagcaccgtggagagcaacaaaagtccacattttattacttaccttccataagtcatattattacttaccctggtgtgttctattaatcacccatttttttgttgtatggaaatccaatcttttgatactgtaagacggaaactgcttcacagcattcgtatatttgttcatattaattaagttattgtctattgttctgcctggcaggt

SEQ ID NO: 35614 - DNA, 1031 bp, Medicago truncatula
  Intron number 1 from transcript Medtr7g129970.1 (locus Med tr7g129970) derived from phytozome v7.0 (chr-ID MtChr7; po s 30254554 to 30255584 reverse strand)
tttcgaagttctttgcccttttctgggctaatcaggtgactaattcacgtttctttttactaattttggtttccattagattttaatttttattacattgagtttgacggttataattataagtattgtttaaatatatgtttcttaatcctatgttacaataatcaaacaggattaaaatacctaatagaaattgtatattgtgaaacaatagcgattaattcagattaagctaagctatagctgatatttgacaacattggttcaaatcagctttcttagaaattcttgaattttccgtggctttaaaaataggtttagctcaactaaatcactttagaggtaaatatactaatctcaagaccaacatgatattgcttgttgcacgagcggtacatacttgaatttcttaagcacgtggttaagagtttgatctctggcaagttgtgaaggaataacatcggatgggtgatgttagcctcttaagaaactcaaggaatgtctgagagttggattttggagggctatgtccatattttaaagtagatttgatatttttaaaaaattgaatgcactgtatgataaatgatcatataatatttcattcacatttaattgattttaaaaactattttatagtatccgtaatttaaaagagaaacgaaaagtaagttctcccctctaaacatacccttagactagctcatgagattagtcttcgtagttacagaaaataatgagtaatctcaattgttattattcaactgatgacattgcatgtatgttcataacaaacattatatgttagcagttaattttctcatgaactgttaaaatgtctcattttattctcttaaacaagtatatgctcattgctcaataggaaactagtccatgaaaatgaatgtatggttaggtagtgatagaatatggaatgtagagcaattttgtgaaaatggggcctggggaagttttttattgcttatgtaattcagaattgtttttattttgtgacagagagcttgagaaag

SEQ ID NO: 35615 - DNA, 818 bp, Medicago truncatula
  Intron number 1 from transcript Medtr7g105450.1 (locus Med tr7g105450) derived from phytozome v7.0 (chr-ID MtChr7; po s 24158263 to 24159080)
gtcattcttgtcgtaaacacattttttacttaataatttagttttttttttttttttttttggttagggtgtatttggtagagtatcttaatcttatgacatgcacttgtataaagagaacttatggcatgtttgaatttatctactgacataagcactctttcagagaacttctgaaaacaaattatcacatgtttataagatgtttttaaattgttttcttaagctcttcgagcgcttatcataataagtgttaatgctacaagctgcaaattaagctttgtatctaaacaggaccttattaaaatagcttatgaaatcttcagcttatttaaataagcgcatttgattattttatgcaaataactaaaaatttatatgtaagcagtttaaccacattggttatttgattataaagtagcttatatgttagcacttactttttttttttttttggtgaataagcacttgtatgataagcattgaaaaacttattgaaataagtgtttaatttagttatttatctaacacactcttaatttaagataaaggctagtatttgtgatgtgcaatgatatgtagtagacagacatataaacagtgtatcagcagttaccagtaacaatatgtttttttatgaagaatattaattttcccatgttcataacttcatcttttttgtaacacatatattgcatggtcttcctgatagtattaacaattatgtcaaatgctagaatgaatacacatcaagtaattggttttcaactcattgaacatgattttggaaatgtaacatgacactttactacaggtac

SEQ ID NO: 35616 - DNA, 672 bp, Medicago truncatula
  Intron number 1 from transcript Medtr8g118690.1 (locus Med tr8g118690) derived from phytozome v7.0 (chr-ID MtChr8; po s 26716094 to 26716765)
cctcttcaagtggttgaggttgctttttatcttttttcccatctaactatagacccagatctcagtttttcccacccattattgctgtttatgttaagtttcaaaatttctgttcatttttgccatgttatttttctagatttttactttttttcttcttcatatgattttcaaaatttgttgagatgacttgttctggctttgtattagaaacagtgtatcttcccttgttgtttgttgttgaaaaattactatgattcatacaaatgtactcaattttgccatgttacttagaacaaatagatacacagttgttagatctggctagaattttgtactcaaaacatatcttcatatatcatatttcaattatactatgttttgaactatcctcaatttctttagcatgtccttgtgcaaagagtagtgttttctgtcttgatcttgtctcacacagcttgtatccatacaattattctgtcttgcacaagattttgtttgatttcattctttagttctcttatgtttgccccttttgttgttttagctattacattaatgaatttataggatttgattttgagcttctaaatatcggtagatttattctattaaccgatgtttgatgaattggatgcaggtgttgtaggttaggcttgtagcattgccaca

SEQ ID NO: 35617 - DNA, 637 bp, Medicago truncatula
  Intron number 2 from transcript Medtr8g101670.1 (locus Med tr8g101670) derived from phytozome v7.0 (chr-ID MtChr8; po s 22109866 to 22110502)
gaggatcaacttcttatcaacccagaagtaaattctctctgtttatcatttttctttcactgcttgtttagatattgttttactagttttagaactcgaattatttattatttttccctaacaagtttgatgtttctgcgctggatatctgttgtctggattaggattctctcatgtaggaaaaacactaggaaataatgtggaatatctatatcattgaaatataatgggtgaagagttttgaaatttataataatgaagagttgagatttgaaacttaagaaaatttgagagaaaaaaaatggagaggatgcatttccctgttgtccatatatctcgatttttgacaaatttcttatcgaaattcattcataaaagcggaacttatgctatcattgacattacatttcctgcacatgtggaaattttcagagttttaatcactatgttattttacatatgttatgattcttcctgggcatctctaagtagtttaaggagttgctagttgtttcagtataatatcctgaatttatactttaattctttaactgatcttattgttaaatttgtaatacctaataatagtttaatttgtactgtgaactaatatgtctataggtgggaaaatccactg

SEQ ID NO: 35618 - DNA, 826 bp, Medicago truncatula
  Intron number 2 from transcript Medtr8g043560.1 (locus Med tr8g043560) derived from phytozome v7.0 (chr-ID MtChr8; po s 9446798 to 9447623 reverse strand)
aagtcgtagagcctttgccaaaggccgaaagtcaagtaagttaatctttgattccctgcatatagacaaacacatagttacatgcattatgggtctgtttggatcggtttatttgagcttatctaatttttgtgagattatttgatagaacttgtgaaaaacgacttatgacatgtttataagatgtttacagcttgttttcataaattctccaagatagctaatgaaaacagtttatctcttatatggaaaaaaatgaactttattttgtattttgctatagaaataggttacacataagcgtctataatgataagtgcttgtgctatatacataaacgttcgttcaagttggttgtttatccaaacagggcttaattgatatcagtcttagattaaaattgttcgattccaacccgtctttaaatgatcttcatcattgaattgagattgtacaaccaagatcaataattgtgtcatgtggtttggaatccaaatccaatgtagggcctgtttggaatggcttataatagcttatctactgtcataaacatgtgtgacactgtttggcagaacttacataaacaggttatgacatgttcataagctggcttgttttcataagatatccaggataacttatgaaaatagcttaaagattggacaaaaacagtttgactttattttatgttatgttctataaatagcttattcataagctcttatactgtaagctgcaaattaagcttattatccaaacataatttaattgactcattttgtaatgctggttttgtaatggtcgttgttttgtacaattttagagg

SEQ ID NO: 35619 - DNA, 837 bp, Medicago truncatula
  Intron number 1 from transcript Medtr7g111670.1 (locus Med tr7g111670) derived from phytozome v7.0 (chr-ID MtChr7; po s 26302520 to 26303356 reverse strand)
agaatccccttgaaatttcctttcagagaactaaggtaatttttttttaatttctttgtatgtagcttttaattttttactccatctgaattatatttgaaatgatatatgttgtgctttaacttgtttaattatattagattagtgctgtccaaagaaagttatattggattagtcctttaagtaatctttgtgcactcataacttctttaattatagtattagattagattagtcctttaagtatttcatggattttgtttttttttaatggtttcatctatttgtgaatggtgaattgtgttgggttgatggtgttatggacaataagaaggtgatataatatgagattgaaattaatgttttgatttttcttccataaatgcaatgaatctaattatgaaatttagggttttgtgaaggggacaataatgaattggggaggaatcagataacataatgagtcaattgtaattttagaggcaacataagcacataaagtgcacattaacattaagacaaccacataaacatcgatttatcggagttggacggaaaactaaaaggactagtatgatactattagatcgattaaaagggtcgcaggatgtattttgcctaaagtgatacatgtgcgaaaacacgaggattttactagtaatctatatttattctggttaagtgctactgctaagtgctaacctaacaagttctccaactcatcaattaaaagcaattgtaatctatgccttcttatttgtttttttctttctaataagctacaatccatgactttctatagtcaggctcatctacaaaatcacaaaagcagactcc

SEQ ID NO: 35620 - DNA, 503 bp, Medicago truncatula
  Intron number 1 from transcript Medtr8g087520.1 (locus Med tr8g087520) derived from phytozome v7.0 (chr-ID MtChr8; po s 18201404 to 18201906)
cttcctagtgggatgaccctccttattttttttacctcaaagatagcctatgggttcatatgtgtgtgtgatgtaaaccttcacaattaagtttgcttttttttaaaataaaaataaaaatgttctattttatttcataaagattactccctttaatccttattataagaagaaaaataaaacaaaaatatcaaaatcaatacaataattatttcttgtaagtatttaaatattttgacaaatatacccttataaaaaattgtgaaacattaaatatatccactaatattaaaatgacaaacaataatggtggataaaaaagccatttagataaaaactacaccttaaaaagtatgacattatcatataaatagaaccaaaattttgtttgaaaatcttcttataattataacactaccagaaactctcggttttcccgaggcttttcgttcgaaaaataatctgcaggaatacctgaggattttgctgcggtttctattagt

SEQ ID NO: 35621 - DNA, 653 bp, Medicago truncatula
  Intron number 1 from transcript Medtr8g090310.1 (locus Med tr8g090310) derived from phytozome v7.0 (chr-ID MtChr8; po s 19667322 to 19667974)
tgaaaggtctttgtatccaacaacctattcatttggtatgaagaggcttatgttacaaatccatccattgatttatttacttggtgtttgtactttatataagagcttgtcatagatcaaaaattcaaaatgctgatgaattttgactgaaaaccaacaatttttctatttaaaaataaattaacgaaaacatgcacttatttaatttaattcctagttacattgccgcctgagtcgcatatactttcacttgtttgaatgttttatttatttataagattaggctgattaacttggagaataaagtggcaattcaccataattaatgtcgaatcacaaaagtttctggaatgttacgagcttccaacaaggccttaaaatcacgcctggatatttgttgtcttgcatattatgtagtcgagattttctgcattgaaggaaattatgtaatatcataatcttgttgtattaaacatggaggtggaaggttgtttaatgttgttttggttaaggaagtttaacaagaccatgtctggcttttagttcatcagatctcaaaattttaaaaagtctatttgcttccttcttttgatccaccttcatttcttttcactgtagaccgagtttttaggactgattgccccacaaggcaa

SEQ ID NO: 35622 - DNA, 686 bp, Medicago truncatula
  Intron number 2 from transcript Medtr8g078640.1 (locus Med tr8g078640) derived from phytozome v7.0 (chr-ID MtChr8; po s 16098481 to 16099166 reverse strand)
aatcatctatttcgttcacattgtttgaattttgttttgaaattctatgtgtttaattttcgtttcacaatttaactcaaattcttcttgttctgtttggcatttgtgatttataatttctttgaaattcatatgtttgatgttgccaaagaataagaaattatcctagagtggattggtggatttgttataaattgaaatttaactcaattttttgagttatgaatcgaaataaacttcacagtcgctgcagatccatgattttcattcgcaatttaactcaatttttgttccagtggatttgtgattgaaaaaaaagttgtttagaatttgctgattactcttcaaactcaattttgtgattttttgaactgagttttttcgaatttcgtatgaataagaaattgaactgattttcctaacaataattagggagtggatttgttattttgctcacagttttgtatttttttttaaatctgcgtttgattgatgttgccgcgtgcgtaagtataagaaatttaactgaagttttgtgttgagaagtagtagtaattaatgagtagtgtgtcgacatgttagtgtttgttgttcatagaaatgagtttgtaattttaagctttgttacatgaggcagaaaatgaattagttttagatatagtgatgaattgttctagatttagact

SEQ ID NO: 35623 - DNA, 851 bp, Medicago truncatula
  Intron number 1 from transcript Medtr8g078640.1 (locus Med tr8g078640) derived from phytozome v7.0 (chr-ID MtChr8; po s 16101157 to 16102007 reverse strand)
gggagctagatctggacctctggattcatccaacggtccagattaaatcctgctgagcttttttttaattgctttttaattgtgttttaaatacttttttttacattttcttggtgttttatgcttctaaaaagtttctaaaaatatttccctatcattttaatttttcctctaagtattagaatttatttgcttatttttgcatttattttctttactttgttctttaatttttgctcattaaattccatatatgttcttgatgcatttttacatattgtgatatttttgcatgcgaaataatgtgtggaaatatccctaggaatatgatataatgcttggcttgtgtgtactcctatgatcctcacattgtagcttaaattcaaacctttcaaaaatggctataatgagggaattataggtcatatgcatatatgagtgttatacctaaattctaggtgtattttttaccactttgtttcattgcattatcttctttctcttgtgctattcaattctatattgcttgcattcttttttatcattttgtacttgtgttactaactcttatgcttcatatctcactcattccataagcacctaatctttgtaccctcattgctcctagtttaggtcttctttttgtattcatttctatgccaattggtttgtaataaatttagttagtttagtttagtttacattcttgcaagcccatagcatgtatctaggactcaatgtaaaggactatggacactataagtgatgtacaccgacacaagcaccgacacgcacacacgttgcatgcttaccgtttagatgtatgcttaggaaacgcgatttttagacaa

SEQ ID NO: 35624 - DNA, 538 bp, Medicago truncatula
  Intron number 1 from transcript Medtr8g148500.1 (locus Med tr8g148500) derived from phytozome v7.0 (chr-ID MtChr8; po s 36734267 to 36734804)
gaagaaggaaggtaagatggagattgtttctgtatttgtttcaagcctccaccgccgtggcccttttcaatcaaaatgaattttggatttccatggttgctcgtttaatatttgctaaactttaattactaattcactttaattattaatctgtcacaatcattattttatttttttacgaaacactttgattccaaagctctgtttcaccgtggaaataaaactcatatattattgggtatctattccttttcacttgtctcttttgttctctatggtgtgtttcttttgattcattattgggtatctttttcttcaattgaaatgaagaaaaacaaaaggatttggaaagctttcaacaatagcaggaatatcaatggtttcgtggagaaagactactatcactcatcatatataattttaactcaaaaaagtaatgattgttagttttaacggacagttagcaggaatttctcagtctctatatttgctttgtttgtattcagttacttttccttctacatacactctgatcaga

SEQ ID NO: 35625 - DNA, 994 bp, Medicago truncatula
  Intron number 1 from transcript Medtr8g086430.1 (locus Med tr8g086430) derived from phytozome v7.0 (chr-ID MtChr8; po s 17703978 to 17704971)
ccagctgatcaattgctatcaattattatcctcaggtaatttttcttctgaaaacaaacaactgatcaattgagtttgtctctgtttctttgttttcttctcctattgggttgttgtattgaattttagagggttgaattttcttgatttcatttttgatcaactgaggttgcatgttttcaggaagtttttcttattatttgaaggttttgattttggtgttttggtttgtgtttggttgattctggttggagatttttaggtttagttgttgttggatgtttttgttttgggctgttgttttgtctttgttgtttgaggttatgagatgtttattgttttgttttgttgtttgcatgttttatgtctgtttttgagtttttgtttgataccttttttcatgcatgcatgtggattgtgggaagttggtgtgttgctatatttttttgtctgtttgattttacctggtctttgtgtctctgaataatttctgcacatgctacaaaaagttctttgattatggaatggttatgatacaaaaaattctcccaatgatacacaaaatttggttgctttctcatttgatgtctcaacaattgatgatgtagatgggtgctatttcatgacaggaaccacaactccaaaagttattaatgtaagagaaattaagcaattgttgtaagagaaattatcaactttgttgggtgctattcaacttttgatgattaatgttagagaaattatcattgaatattcaattgtttatctttatccatgggcactctgattttgttgttaatgtaattgaagccttgtaagagacatcacaatcatcattacagaaaactctcacaattgaatattttcagccttttgattgcaatcacttggttatatataacttggctgagagtaatttctctcaagcaattcaaatcatttcattcaacaattatgaaaagtgattaatttgatgacatttatgaggtgatag

SEQ ID NO: 35626 - DNA, 776 bp, Medicago truncatula
  Intron number 4 from transcript Medtr8g065830.1 (locus Med tr8g065830) derived from phytozome v7.0 (chr-ID MtChr8; po s 12515403 to 12516178)
gggaggagtctcgctcctcactctaagtctctacggtatgttttatttcttttgtaatttatcttttgttaccttgcgtaactaattctttttagggtagggttctaagacgaaccttcattttatttgttggattatttaatttaaatgatttattcatttattttaggaatcctatttaatttttctatatgatgacagttcatcttatgttattcttagcatgtttttcaataggttttagcagcaaaaaggaagaatattagaactattgcttattgtaacaacccaattttctctagaattattttaattatttagtgtgtgcgtttatatgtgcttctatgtggttatttatctttttgtatattttggttgggattagtagattttagctttagaaggatatttttagtcattttggactcagtggtattttgatcattctgtaggcaagggtaaattagtaatttcacggtgaggattatttttagtgttttggtggcaataattaattttactaagttactagtgagttggggtaattaaataagaaacggtaactattcgttatttttaagtgaatagaaacttggtgaattagttagtgtgaactttgagcacattaagacaattgagggttgagccaattaatgtagagcctatataaattcttgtcttaagagaaactaggtcatttatatactcattcacacattgcaaaacattttggagaaagaggtagaaacagaaagtgaggcaacaagggttagaag

SEQ ID NO: 35627 - DNA, 362 bp, Medicago truncatula; identical to SEQ ID NO: 32432
  Intron number 3 from transcript Medtr8g144570.1 (locus Med tr8g144570) derived from phytozome v7.0 (chr-ID MtChr8; po s 34953746 to 34954107)

SEQ ID NO: 35628 - DNA, 623 bp, Medicago truncatula; identical to SEQ ID NO: 32431
  Intron number 4 from transcript Medtr8g144570.1 (locus Med tr8g144570) derived from phytozome v7.0 (chr-ID MtChr8; po s 34954172 to 34954794)

SEQ ID NO: 35629 - DNA, 864 bp, Medicago truncatula
  Intron number 1 from transcript Medtr8g146130.1 (locus Med tr8g146130) derived from phytozome v7.0 (chr-ID MtChr8; po s 35670416 to 35671279 reverse strand)
caagtatagttcgttgcctttctttttcatttggtcaatttgattctccatttatgatgctttcatgttttcacttactattcttctctcatgcaatgatctaaacatataattggaagtatctttgatataacaaacccttttttttccctttttattttattttatcggcaagtgttagttgttagtgattagtgagtgactattttagtttctagggtttcaacaatgacttcttggttataagcaagctataagaatgtttggactccgacatgtgttaattagtatcgggcacaactcattcaatcacttacattttctcaaattattataagtgtgatgtgtataggttataaatttataatgttatgtaagttttccggtgtgggtgtggttatggtgcataaggaaatccttatgcaccctgcataaatccaaaaatggtttctgtgagttgtatttcaaaaccattagatgtacttaatggtttccagcaccctgcataaaattatgccaaaaccattttgctgtggaaatggtttctgtgagttgtactccaaaaccatttctggatttatgcagggtgcataaggattttcttatgcaccataaccgcacccttccggcgtccctcacatcagctacatataggttatatacacacatcagtacagttttcatgaatttagatacaaaaattcattcttttgcaatatggttgtgttttaatcgtgttctcctaaagttgaaacttacatcttttaaagattacttctattttaaatatctctcactgaatcactactttgattcttggttgttgcagttactacaactacgaagtcagtggaagcgcttgaa

SEQ ID NO: 35630 - DNA, 537 bp, Medicago truncatula
  Intron number 1 from transcript Medtr8g101700.1 (locus Med tr8g101700) derived from phytozome v7.0 (chr-ID MtChr8; po s 22127156 to 22127692)
gtttctgaagagaagaagaaagcgaaaatttccaggttcgttatttttcttctgaatttacgaaatcagggtttatagcttttgtgtttttgatcttaagcttccatttttgtctgaatttgaacttattttagatttcgttttcatttttcatctccaatttacgaaattagggtttacgaattcggtatacgtatctggtttcatgtttttcttcctttctaattcgaatgtttattatgttgcattttatattagaataaatgaatgctattgttcaatatctttttatcaaaattgtttctggtttcatatattcatgtttgattatggaggagaagaaaccaaaaaattgtatttttgttacattcatccatgttttaggaaaaagaagtagcaattgaagctcagttaggctaatttatcttatttttaggttgatttgcttgtgattatttgttgaagattaagttttagttattaggttaagctatgattttaggggaaattgttctgattatcttgtttgggttttaa

SEQ ID NO: 35631 - DNA, 914 bp, Medicago truncatula
  Intron number 1 from transcript Medtr8g119860.1 (locus Med tr8g119860) derived from phytozome v7.0 (chr-ID MtChr8; po s 27289701 to 27290614)
gatagagttcttcaaccacctttggtaattttcttttaagcttttctaatccatttttattactagtttatattttatatatgtcatttcatgttacttactgatctaattgttgagttttgccatgcttaatgtgctgtttagaaagagctttagataaaaaaaaaattgatcttaaaatgagctgaagtattgacttttttaaggttgttgtggggatgaaggaaagagtttaggggttgtttttgaagaagttgattgttttaaggtgttgagattttgttctattgaaattttagtgccatttactcattgaattttccttatgttaccctcctatgttcaatatgtatcatgttctttgaatcattgtgatgcatcttcctttaggtttctggacttttaattgatgagaaatgcttacaattaaatttatgttataatcgagctgttcagatagggataatgttttgcttaattctcggaaatttgagatggttcatgagccatgcttaagtgcaatgttccttctgtatttttgggattcatttgtgaggcttgaggtctgtgtgctatgatgtattcgcatggacttctgcaggtcttgtgtaaatgccttttcatattgtgcacgtaaaacacatgcagatcaattttcatcaaaatgtcacaaagctgattatagtttttatttctcatggtttatctattaacgacgagccgatatgtatgtattttatctgaactggaatgactgtcctcatcaaccgatgtccaatttattagtgaacaagattctctatctaccgattcttttagtttgtttgtatgagatacagagatatagatatctcgtgtttgagttgagttcataaatcataacttcatttgtctttgcaggttgatactactgc

SEQ ID NO: 35632 - DNA, 578 bp, Medicago truncatula
  Intron number 1 from transcript Medtr7g143470.1 (locus Med tr7g143470) derived from phytozome v7.0 (chr-ID MtChr7; po s 34436632 to 34437209)
tgtttggttgcacagaggaatagccatatcagcaggtaacagtgaaaaaaagagaagaaaaaaaaaaactactctatgattagtggtagtttatatagtgtaatcagactttgatggacggtggagattctcctggaaaatttagagtcaaatttagcaacattttttcccatgctttgggactattatgtagtaattcagtccctattatcttttgttgttgtagtaaagtagagtacactacactacactctgttttcaagttttttacttgttgctttttagtaattcaatcattcaaaaatacataataaagtttagaaggacaattttccatgacaatactagtgagaagttttaaattttgatggtggtttaactagtaaaatcacaagccaaatttgtcaattcatacgcaatgttatttattagccttcctaaaccgcaatgtttttagtagcttcctagtcctactaaaaaaattgcttcctactccgccaacaatagcgggtcgtacaagaaggggttagacatccacaacaaatacgatgaatcaatgtttgatacaggctctttag

SEQ ID NO: 35633 - DNA, 278 bp, Medicago truncatula
  Intron number 4 from transcript Medtr8g105360.3 (locus Med tr8g105360) derived from phytozome v7.0 (chr-ID MtChr8; po s 23258335 to 23258612)
gaatccttattttggaaaatactgtaagttttatcaactttcaaataatgtacttttctgcatgttactaaggccctgtctactcatagtatatgtttgactataccaagaactttgctctttttttttcctctttgcgagtgtattgcttgtgtcagtttgagcattcaaatttacattcttttcttttttctattgttaaaaaacagttttgaatttaaatattcttctcatgttccacaggtcagctggcaaagagttgttgtctttaatcgccc

SEQ ID NO: 35634 - DNA, 920 bp, Medicago truncatula
  Intron number 1 from transcript Medtr7g139720.1 (locus Med tr7g139720) derived from phytozome v7.0 (chr-ID MtChr7; po s 33490421 to 33491340)
acctggattcgtactccctgtgctcctcctaacaggtttcattctattatccctcactttattatgctaaatgcgtctcaatattgccgttttaattctatgagacacaatactcacttgtaataattttaaaaaattagaaatgatggaatgtaacaccacacgtcagtgtcatgtcgttgtttgacactcatatgtgtaggaagacacactttcaatctgaaatctcagtatgtagcttgaatttgaatgtttgcgaggaagtttaattatgtttggttgaaactaggtttaagtggtttgggtatgtagagagaagaccgatagatgctataataacaagagtgaattagatggaggatagtcagatcaccagagatagaccttgaaaaactgtaagagaaactattaataaacatctagagattaatgagtgggataaggattgattgctgtcgtatagttttcttcaagcttgattttaacttggcaaaaaaatagcagattgtgtatttaataataataatagtgtcggacttgcatgaacttggttctcaaatggtgatgctacatttgaatgtatgtttattcaagttgtcataaactcatatcatggtgttttattaaaagtggtcaagtatgattacacgatactttaccaaaacagtaacattggttgaataggacagtgccatttaggaacttccacaacacttgtttatagttacaacttacaactgtgtgatttagactagtgattccatcttaagtttgagtgggattgcttgaattcacatgaagctctttgtatggttgtccatagttgtttacttttgatttttgcatcaactttcactctctaaattgcaatcgacactttttctctgtttcatgcagcatctatacttaactggagtttg

SEQ ID NO: 35635 - DNA, 998 bp, Medicago truncatula
  Intron number 1 from transcript Medtr7g139140.1 (locus Med tr7g139140) derived from phytozome v7.0 (chr-ID MtChr7; po s 33208486 to 33209483 reverse strand)
gacaacaattggcattacttagtatagaggtattggacatagtattgtcataatttttcttctattttatttacagaaaatacgtgacaacgtcttctagatttcttttatgcctctgagatttccatatctggttctgatttgaagaccttattttaggtatataacaactttttcctagcattttgtaagaatttgattcttaatattgggtgacagtcacactctctctctttcactcacatacagaaaaaaaaaacatcaatccccattatcagtcgtgctttgaaagtgatgctgttgataactcaatagctaactgcactgttgatttattctttggttaatgctttcttttatattagttattagcctgcgtcatatgtatatgcccgcgtcattactcttttggtgtgttcctttttatggggtggtttttaaggggtttttgttcgagccggtgtttatgtggcaaccgatttccccttgtatgtattttttttctccacccgagcttgttagtgcttcttgcacgggcttgttggttaataatattttgccgattcaaaaaaagaagaagttattagcctgtttttattgttgttagatgctctgtggcgatccatgatcatgcttcttttgttgtcaaattagtgtgttgtagttatagttctccaattccagattcttatacattatttttgaatgatatttatcaaaacccaaagatactaatcactgttaccttctgagacctgttcttgcaacaagtgatcaatatcatatttgttctaggaactggggcatgcttttattgctttttagtgaagattacatgtttacttgttttatgttttaattatatcttaaaactttaaataagtttcttttgttgtcttttttagttgacatttctatagtcttggcattcatgtcagtctgacttgattgcaacattggtaggtgcttgcagaatctagaggagaccttttacctga

SEQ ID NO: 35636 - DNA, 710 bp, Medicago truncatula
  Intron number 3 from transcript Medtr8g074280.1 (locus Med tr8g074280) derived from phytozome v7.0 (chr-ID MtChr8; po s 14724969 to 14725678 reverse strand)
ttggaaagttaaacattgctagattagagctgaatgtacgttaacaaattacctttattcattgcttacttcaatttttctattgtaatttttgtcgtttaagtttaattgttctaaaagtgtctctattatttgagtaattttaaatgtataaaaactaaagaagatggaaattgaaacttttgagcttgtctataatttgtctttaaattaaaaaactgtaatttgcaattaaattcttttaagctattaagtctcttttataaattttaaacttcaaagatgcaattaaatttttagtggcaagaattcaattacaattattaacttggcttgggagttaggaccttggagtgtgctcttccacatggtctcaagttcgatgctccccgatgccaatttaggtggactacttaagcttcttcaattaggtttataaacgactacatttaatttcaggtggattttgatgctaagaaagaatcaattccaccatgtgactattattgtgacactctctatcttttgctgtactctacatttgctaaattttgaccaggtttaatttcatcttcagacacatttattaaccatacttatttttcaattttacatttatttttcaaattttcatcccttctcatttcattacaaatttgcaattcagaaaacaaggacattcctagtgagacttcctcaatagtctcttc

SEQ ID NO: 35637 - DNA, 1049 bp, Medicago truncatula
  Intron number 1 from transcript Medtr8g121320.1 (locus Med tr8g121320) derived from phytozome v7.0 (chr-ID MtChr8; po s 28061012 to 28062060)
ttcaaattcaaagtggaaaaactgaggcaagaagggtgtgtgcgcgcgtgtgtttgagagagagagagagagagagagaccatgaggaaagatttcacctcaaccatgacaacaaaattacgtgaagttacgttagaagtatgagggaaggaagcgtcgtgtttgagtagtggagagggtgagccgttttgtatttttctttaataacaaagagtgttttagtattttccttattggaaaaaattgttttgtttttggatgggtataccgcggtccatctcagccgatacaatgctccgccaccgtaggaacgggaagagacgagcaatcactatctctccctattgacatccctaattctcaaactattgaatgtatatgtgtttgagcaacatcatcttaccaagtcatagagaatgaaattcaaatatacttatcaataggttccgtacatatacggttaagttaataaatcatacatcatacatgatgaaagttttatcttgtgcaagaaaaagcatttgtacagttttctctgttgtgtttgacatttgagaagatggcaaaggttaaaattaagattgatacgatagtggtatggtataatatccgtaccatcacatatcattagatgccttgggtgctcgtgcacctgactttgtcaagcatacaaaattgacagtgaggagtgatttgatttcatattataattcataaaattgtaaataaagtatatggtatgggccatgtcatccattgctgatttggaagatagcttacgtgggaccaaatttccaattcatgcaattatcactatgcattgcatgccatatatatggtaactagtaaatatataattaaaaaaattgaagtcatatcatatgatatgaataatgcataaagtaattattatttaataaattaattccatatatccttccttctcattctgtgcttttcccagtgctggcatttgtcctatttttcttcagtgtctttctgtgcactctgtagtctgcagtggtctgttctctctggcactgcactct

SEQ ID NO: 35638 - DNA, 638 bp, Medicago truncatula
  Intron number 1 from transcript Medtr8g086840.1 (locus Med tr8g086840) derived from phytozome v7.0 (chr-ID MtChr8; po s 17918848 to 17919485)
tctattcttgctcccatcgcttttttccgtgaaaggtattcattcctattaactttacaatgtcattgtgtttagggtatgcttatgtttgttattatctgtgttcaataaaccaagtaattatgctcaactgcttgatgagtttcaccaaaacacgaaccaattgtttatgagaacctgagttcgattcctaggtggaagcagttggtggctgttatagtctacttttagtgtggaacatgaccaacatgaattaggtcgtggaacaatagtgatttgttcaaattctgctatgttatactgtgccactaatataaataaatatatagctcctatttgatgatactgatcaatgatcatgtcaagtttgatcctaggactgctcttcttattgctacgctatagtcatagttgtcaattaagaaggtggctgctaattttgttttctggctggcgttgtgtacatttaactctgcaactgttacatattcaaacttcagtagtgatattttgacttgcaactactttatatcctattcttgtcatatgcactttattgtaatgcatgagtatcctaatattgccatgttgtattgtatctagacgtacaaggccacccctaaccaagagcttagtga

SEQ ID NO: 35639 - DNA, 619 bp, Medicago truncatula
  Intron number 1 from transcript Medtr8g078380.1 (locus Med tr8g078380) derived from phytozome v7.0 (chr-ID MtChr8; po s 15889210 to 15889828 reverse strand)
gccgcacctacattgcaggtaactgtctacagatggtttttgttaagtagtgatgcctcaaaattatgcatcgcaccatttcttactacactgtgatgtgttacctgccagtttaggaccatgtcctctgatagttcactgacacatgtactgaacctcaccatcccaaaaaggagtatttcttattttccagaaacactgcatccctgtcaaatggactcaacaaatgaggactcttgctgcgtgtcaagaggttccataataaccctcaacacctccaacactgatttcgcatgaaaaatactgttttaacctaacttctttttttaagaagagaattcaaactcttttatatgtttttgttgattgcaattggcgggtatccaccagtaactaaatttatataacattatataggtgatatctgtttgatggcaaaggctacggtgggagacctcgttaggtctcctaccgtaggagacttgaattattttttgtttgttttttgcaaaatgaatgttaaccattggatgtaatttaaaacttttgaatgactgagatttacatgttatatgatccattaggattgtgttattgaaacatctatattcattataaa

SEQ ID NO: 35640 - DNA, 319 bp, Medicago truncatula
  Intron number 1 from transcript Medtr8g106510.1 (locus Med tr8g106510) derived from phytozome v7.0 (chr-ID MtChr8; po s 23899460 to 23899778 reverse strand)
ggttggaccctatctcattgacaaggtttgtacctttttcttctcaagtgtttgtttttttatttggattgttttgtggaattcagggctttttccgttgttaagttttgttttttagaatgaagattatgcactgcttttgcatataacatgtaacttgcattgaaattgaaaattttgcttgcagtgaaagcaatactttgctctcaattagtttaatgtattggttatagtaattttgagtaaatgaatgtctaatgggttgcataattttaatttttcaggaggtgattccaataataaattgggagacagagac

SEQ ID NO: 35641 - DNA, 687 bp, Medicago truncatula
  Intron number 2 from transcript Medtr8g109820.1 (locus Med tr8g109820) derived from phytozome v7.0 (chr-ID MtChr8; po s 24717077 to 24717763 reverse strand)
cagaagaatcttcaattaaaaaaattgctgttcaggtacattatagagtagaaatatcgacaccatgtttgttcccaaatcatccttgatgtgaaacggacattagctattaaatatgctgcttaatctatattagttgaagcttttattgtaaaaagtaaagaacaatttggttttataatcaggggatagaacattgtaaaaattttgccaggtcattttgttgcacattgaagttaaaatcacgtgattgagaatatgcaaagaagttaacccaggaaactaagggggaaggaaaattgttgtttttaagggatttgtaaatttcattgattctttttggcaaatctgtgtttttctgtgtagcgtaatattgcacttttgaatttcacactaactaaaatatgaaaattcaagtctcttttatctatgagttttgtggcagtggcagaccttcatttataactcattaacagattagtagatggaaattggttcacacaaattagtgtttttaaataaggccacgccaattgatgtatacatataaacaatatttatagtcatggaacaagcaggaaatagcttgttaatattttaggctgatacctttttatcactaaatatatattcttgtgcctggttatggtaggcttttccagaagaactgttttctatacttcggac

SEQ ID NO: 35642 - DNA, 741 bp, Medicago truncatula
  Intron number 2 from transcript Medtr7g133150.1 (locus Med tr7g133150) derived from phytozome v7.0 (chr-ID MtChr7; po s 31067179 to 31067919)
tcactgtaagagtttgtattcctgttagatgtaatagttagtttcaactacaacagtagttagttacattagttatttaaattagactagttagttgttcttactggctatataagtcttgttgcatctgtttatgtaatcaacaattaccttgttaatctatgtatttttctctcaacgatgagttttatcaagaattgtaatagtgtgtgcatacaattttattctgtcatttgttctgtatttgattttgattttgatttcgaactctaattatttcgcacagtaattataatgttaatctggcttggagtcttcgggcatgtttggattgacttatttgagtttatctcccgacataatttcttctggcactgtttgggagaacttgttcataagctattttcagcttatttgtataagctctttaggttgacttatggattgtataatctctttaggatggtttatggaaacaacttatagattatacaaaaacagtttgactttgctttatcctgtgttatagaaacaacttatttataagcgcttatgctttaagctgcaaaataaactgtttatttgctgtattttggtatcttgttgttcctactgggaggaggatggagtgcaagtatattcctattgtttattagatatgatttaatagtctctattctcaacttgtgttgaccaacatttaatggatttttctattgtaggttgagcttcaaacggtag

SEQ ID NO: 35643 - DNA, 767 bp, Medicago truncatula
  Intron number 1 from transcript Medtr8g093280.1 (locus Med tr8g093280) derived from phytozome v7.0 (chr-ID MtChr8; po s 20442837 to 20443603)
ctgaggtttgtcatcattaagaatctctattagctttcaaattgacttcttcctagtctctccatatttggcatcaactgtcacattctgagcagactctgatattttagtggcttggatcttaaactcaaccagaaaatagaaaaagatttgtcaagggtaatccaactaagaaacagaattttacagcaacatattatggttataggcaccatggatagttgtagaaaatatttctgatattattttagttgtaaatagattacagacactaatatgtttatatagattactctacacacctatttgagcctgattaatggttggatgcacctattacagacataattacagtgtatacgtctattcacaacaatggttatcgtgaaacttggatataaatggtctattttagacatgattcgtaacaggatatgacatcatttaatccctgcagcagtccacctactggccaaaggtttttgattgctgttgctattgtatctactagttgattgttgaaaagactatttcctaattaaatttattcctaaccaaataataaaaacgacttgaaatatcttataaatagtaataattttagttcataaaaaacaaaagacggataagacaataagtggttcttctcttttccgacttccccttccccgcccttttcgttatattttctgctgaggttctaaccacctgcgatattctgtattcttataggtctctcagttgttgatcaaaaactctagcactgt

SEQ ID NO: 35644 - DNA, 575 bp, Medicago truncatula
  Intron number 1 from transcript Medtr8g089750.1 (locus Med tr8g089750) derived from phytozome v7.0 (chr-ID MtChr8; po s 19353092 to 19353666 reverse strand)
ctttctcgttttctttttctttcattccttaagaggtgattttctcattcacaactactagatatatcatatcatatcataactacttgttctatttctcatgcatgtggcaaaaaggcctagtcctataacaaattcaaaacatttaagcttgtgaaaataccataggacatttattgagagaccaaagtccctaattaccctcatgttatgaaaaaaaatccatgttacacacaatttaaaattgtagatatatatttttttataaacgcatacattttttatacatgcatacactaaaatttaaaaatagataatgttcatggtaaatattaattaagaggcaccaagcatttgatatgttgagtcctagttcgaaccaatgagtaattcttcttttctcatcatttgatatgtgattttcgcagctagattctttaaaaaaaacaaatatcaacatattctagctgccaattatttttaaaataatgtagttttatatactctaagaatttaatgataattggtttgtttgtgcaggtttaaattcagccacatttacaattgtaaacaag

SEQ ID NO: 35645 - DNA, 797 bp, Medicago truncatula
  Intron number 3 from transcript Medtr8g128490.1 (locus Med tr8g128490) derived from phytozome v7.0 (chr-ID MtChr8; po s 30014643 to 30015439 reverse strand)
gttcattcctgggatttgggggccgttttggtcaggtagactactattttatcaattaaatctaaattctggatgtcattgtacttctttcttttgtgacatttgaagttattttagcccatgtactatttactctgggtagctaccatggaaaattacgtagttcagacgacagtaccacaaatgtttgaaaattgtagtttcaactttcaattgataagtgtaattttccttttcgataataactttaagtcagatcactagaggcagaggaagacctagaaaaactataagataaactattaggaaagacttggagattaatgagttggacaaaaatatggtttatgatagaacattatggcataatttgatccatatagccaaccccactgagtgggataagacttggttgttattgttgtttgtggttgataattcattaatagatcttgctatggttgaaacttgtatctgaaaggtattcatttgggctgagtatgtttcattctgcattgattcttttgtaattttttgattttattatcacaaatgtcattcatatgggcgtctttgtgaacatattttgcatggttacttattggttatcctatatggaacattgatattgacataaaaaagtaggaggtatctgacattggagtttacattcaacctgataacctgttcagtgtccatccttttctatttgatttaatattaattaaaatattcataattgtttatgttggatctgctatgttgtgatgcatttttgtttatctgaattttcagca

SEQ ID NO: 35646 - DNA, 247 bp, Medicago truncatula
  Intron number 1 from transcript Medtr7g096530.1 (locus Med tr7g096530) derived from phytozome v7.0 (chr-ID MtChr7; po s 21579056 to 21579302 reverse strand)
attgtatcacttgttcattttgcaaagacaaggtgcactgctacaaactttggtttaatctgaaataaaacaaaactcactgagaggaagatgcatcccagtaggtgaaagtcgagaaggatttgcatgttactattacacttgctttttagtcccacatcgtctgaaacagaaaatatttcagcgtttaaatacttcaagcgaaccagtaggcttgtcccttcggggacatccgataaaattggaa

SEQ ID NO: 35647 - DNA, 827 bp, Medicago truncatula; identical to SEQ ID NO: 35289
  Intron number 1 from transcript Medtr8g068430.1 (locus Med tr8g068430) derived from phytozome v7.0 (chr-ID MtChr8; po s 13126240 to 13127066 reverse strand)

SEQ ID NO: 35648 - DNA, 635 bp, Medicago truncatula
  Intron number 1 from transcript Medtr8g087470.1 (locus Med tr8g087470) derived from phytozome v7.0 (chr-ID MtChr8; po s 18185760 to 18186394 reverse strand)
agtaattgcatctctcatccttaaatctaattaattttttattattatgatgtcactgcacttctatggttaaaaatcctcaattttttcttttcctaatatttgtcattattttaatttttctttgcaatactctttatattctcatttctactccacttattggccattatttaaacttttctggcaatgattttcttacattcatttctacttagttttagtagaaaaaaacttgaaatagagacaatattaagagatagaaataaaaaaaatgtctatgaatttgtcaatagaagtgttagacatgtctagtttggtgatcagtttttgttttcgtttctaatacttattgttatttcaactttttaaattaattctttctacactttcatttcaacttcaattaaaccttcctaggttattaaatattaaatttttgtcaaaaaaggttattaaataatgtgcaagcattgattattgttgttgccttttttttgaacaatttattgttgttgccttaaaatttgatatttaatgttgtacttaactataaaagattttgattaaattcaaaatttataatagatatttaatgcatgtttttattttatttttgtcttagtttatttgtg

SEQ ID NO: 35649 - DNA, 598 bp, Medicago truncatula; identical to SEQ ID NO: 32707
  Intron number 1 from transcript Medtr8g078880.1 (locus Med tr8g078880) derived from phytozome v7.0 (chr-ID MtChr8; po s 16236076 to 16236673)

SEQ ID NO: 35650 - DNA, 854 bp, Medicago truncatula
  Intron number 1 from transcript Medtr8g144860.1 (locus Med tr8g144860) derived from phytozome v7.0 (chr-ID MtChr8; po s 35081922 to 35082775)
cgaagcacctttcctttattcaggtactataagaacttggaactttaaggggtattcaattgtacttcatgcttaaattttaatgcacatttttcgtttgaacatttcatctttgcttgctcattaatgtttgaaaatttatcaacgaaagtatgaagcgtcgcttttaaaattaagtggctgatggattgctggttcaggaaggactgatttggagatttgatctttaatcttcctcgagttgcatctctttcaaactcttgtttaacatgtcagaagattaatcccatgtttgaatttcagaaaatccaagtaggtatagttcaatttttatcatgggaagcactaggatttgattaagaatttttgtgcagccggtgtaaaaaaaattgtgggtactttagctctttattcttgatttattttttttttattgctttttactatccatgtaaattatggtttacttagtaaagcatttgatacttggatgtagatactcgcattgctttgttaagaatagtagatttcttgtgcttaattaagaattgtttcttctttccagggagagctcgttaaccacatgagttggtcacttgttcaaccaatatatttatataaagaacaaaaattaaaatttctttgataatataaaatgacatgacaatatttttggttaaaataaattatattgtggaatggatggagtagtttgttatgtccatttttcttttaaatgaatgtacagaaatgaatgttatattcttgacatgttaattcaattgtatcggggtgttattttaagaaatactaatttcatcttctcaaattttttatttagaaggaaaaaggag

SEQ ID NO: 35651 - DNA, 423 bp, Medicago truncatula
  Intron number 1 from transcript Medtr7g107990.3 (locus Med tr7g107990) derived from phytozome v7.0 (chr-ID MtChr7; po s 25335112 to 25335534 reverse strand)
tgaagtgttacagcggcggcgctctcttctccaaggtagttcgtagttccttaactggatttttacaaatcattcttcgttatttatcaatcaataacctataaccccctctttctctttatctacatcagtttgtttgctaattggttcattagttcccaaatttcttcgattgaagttgtaatttttaatatgaagttcatacgtcaaattttcattgttttatttaaagataggaactttttgtcttctagtgtttgattcatagtttcgcttttgcctcatacgatatctatccaattctgattttcaattgatgctgtaaattttaaattttaactggattaattaagtaaactgtcctataaatatcaatttacagggatagtttgtttattttctttcttacaactcaatgtagcc

SEQ ID NO: 35652 - DNA, 969 bp, Medicago truncatula
  Intron number 3 from transcript Medtr8g053130.1 (locus Med tr8g053130) derived from phytozome v7.0 (chr-ID MtChr8; po s 11860095 to 11861063 reverse strand)
gctgtccgattggaggctggtctttagagggcgtggtagtttttggttttgacgcaggggtctgcatgtgttttgttatttgtatatgcctgcgtcattactcttttgggtgttcttttgttttttgggtggtttttaggggtttcaaaataatatttgccgtttcaaaaaaaaagtgtttgttgttcatagaaatgagtttctgtgctaatctgaaaataacacacctaaatattacttggaaatttgaattaagaagagatgtgaaattggtcccagataactaacagtccctatagtgtatgttagtatatatccctttggatttgatcctgcaaacaacttcagtcctaaagattatgaaaggaaatagaaataattaaattagagagcatgacatggctacaatgaaatagaaacagagaaagtagacccattcatattaggaagtgacaaaaagataagcaaattcaatatccctacaactcagatttcagacagagaatgaaatagttttagatatagtaatgaattgttctagatttagtttatggtattaagctttgttactaacaaacgatctttatatatgactacaatgcagaggcagagagcatctataaggatggataataatatatatgatatgactgtgctctagttttcttgaggcttcttttgatttggaaattcacaatcatatagatgttattggttgtattggagttccttgctattgacttgtttcagcaatggttaataatatatacgatatggaattatgcatttttggttattaaagtttcttgtagattactgcatggctatgaaaaattggaacattcatccttgttttgttggattgcattatattgtttaagaactgatatgtttaagaacttttgatatcagctagcatgcattatattgtttattttggcaggacaaaaagttgaatattgtaaaagg

SEQ ID NO: 35653 - DNA, 999 bp, Medicago truncatula
  Intron number 1 from transcript Medtr8g026600.1 (locus Med tr8g026600) derived from phytozome v7.0 (chr-ID MtChr8; po s 5759936 to 5760934)
tccaccaacagacatagtactaaaaggtgagttcattgtcttaactccaaaatttgaactttttcattgtttgatttactttctttgttatttacaaactacacttttttttcttttttcttttttgtctttattgaattccaaatttttattatttcttctgaaaagtttttcatctttaatagtttcatttgctttaagtctcattctgattttggaacctcatatcaatataatgagtttattagttcccattgacttgacctaagagtgtaggtttgttgaagatgaaaaaaatttcaagtttattatctccttgtattctgagttatgtagcacttatactggcgtgtccggtgtcccacacgtatgcggttgtcacattataagaaaatcatttttgcaaattattaccagtaggatttagtcccacattggatagataggattcttgagaagagtttataaagaggagacacttctcactgtacaagccggttttgtaatgttgagttaggccccgtgacatcaattgtgtcggtgtgttcgtatcattggtagtgtcgggtcttgagttcgtgtttgtgttcatgattcatagatttcgagcttttgagtcagattgttagtgtctggcactagcccataatgaaaattggaagagaacccaacttcctcttgctatttggccatttaatgacaaggttttaacacagtcacgataatggttgcggtcgtgtcacaatctttgatattgcagagaatcacaccggatgtggcctcaatcgcaatcgcacttgtgttgccagcccatattgaggtggcgactttatttaaaaccctcttgaatgatgtaaataatgttgtgtatcacaataatcagctgtattgcaatccacaatccttgatatacaatgtatcacatttcaaattttattaattcaacaactggtttacactgcagataagtacacagacagcatagagccaattttacca

SEQ ID NO: 35654 - DNA, 807 bp, Medicago truncatula
  Intron number 1 from transcript Medtr8g025110.1 (locus Med tr8g025110) derived from phytozome v7.0 (chr-ID MtChr8; po s 4922112 to 4922918 reverse strand)
gactggcccgttttgacaactctactaatagcttttcattttaagatcaaaatagattttttttgataaaatgatttatctaaaaatcccaaacaaactcctaaaaatgaaaaaagtgatttttttaagatttttttttttttttttgaaaaaagtccaaaacaaacggagctagattttcataagcgaattgaaatgggtatatttatggggttcgaatcccagaccttacatatattatgcattgtccaaaccaactgagctatactcacgaggactattaatctgcactttggtggaactcattaacaatttgaatcaattgtttgattcgttataaaatatttttaattaaaatgaagtgtgattgaattgttatatgatcaaatattatcgtatttttttcaagaaaaaataaataaaatttatctccgaccttacttgaagtctttttaaaagcaaaaatatataagtcaatggtcttccacttaatattattattattattttttatcggtcaactcttttttgtttgagaggtggataggccaacttattcttgatttttaacggttaaagtcttctcaatttgccaagatcccgcttgcaaacgacaagataactttcaagttgtaagaaaaataagttgaacctaattaagtttaaattttacttttaaattaatcattgattgaacctatttctttaaatagtaaaacaagttgaagtttaataactaagcaagcttaaacaagagtttgcttgattatagagaggtgtatttttcgtccgcaagtcctagctcaa

SEQ ID NO: 35655 - DNA, 726 bp, Medicago truncatula
  Intron number 1 from transcript Medtr8g016150.1 (locus Med tr8g016150) derived from phytozome v7.0 (chr-ID MtChr8; po s 3068568 to 3069293 reverse strand)
taagttggaagagtctgctgcaaaagtgtacacgcgtgagatattaaatatgcttatcccaatatttaataggttgtgtatatgcagggtgagagccagaaaacaaagtggttcgttggttaaactcttatttacaattttgctgtaagtattttttttctttatatattgttatccgtttctcaatattttaatcggtttttcactgtttgccttaacagcatggatgatgtcatgatgataaagactcaataaagcgcagtattgtgactgagttgcgacatatattagacacatgtaactcttatgtcaaatcttatcgaatggttcgagacacatatgcaaaacaacactccaaatattaaattgtgtatactcagcaaaagaggttacgatgggcttcaatataatcttccaacgaaattgttttgggttgtctttgtaagaacatactctgccgttgtttcaaagattaaaccgaattatgtttcaggagcatatgggattgtactttgtaattggaagtcttcctgttccttatgcacatgatcttaggaactttacatatagttttgtcaagtttttttgtgaggatgatgcacaataagattttttggtattaattattttgaaaatcatcatctatatcaaacaaatattaccgtgcatctatgatattctaacaagttagtatttttgtatttccttcattgcagacgctaactt

SEQ ID NO: 35656 - DNA, 1024 bp, Medicago truncatula
  Intron number 1 from transcript Medtr7g121220.1 (locus Med tr7g121220) derived from phytozome v7.0 (chr-ID MtChr7; po s 28486383 to 28487406 reverse strand)
tcgttactcaaccgcttccgcttcttcaccgattcgtaagtcacctttatctttctgattctattctattctatcaattattctatattctcgacgatcatcgttttctgtttctttgttttttggtatgcatatcttgatcactttcagattttcgattatattgtttcatctgcataatcaatcaccgttttcaccttttttattttttttaatatttttgtgaattgatgatgttactgaccctccgattgcttgtttggttgattgagatttttggatttcccaggaaatctaatcgtttattattattatttatttttatttttattatagctgaaacacacttacatgtcgaaaccgttaataatttgagaaaatgaactattggaatacaattacatctgacacgcctttgatcagaggtgtcggtgctacaaagacatcgttttgatgccatctttatatgtatgtttggtgtgcttgtttatttgttcataaaggaatctcattgtggtagtgggttgtttaagtctttatatattttcctgccccattacaattgctaattgggtgctgattttgtttttaagtgttgatatattttgctgtgaatcacccaattttggctgattttgctatgtgatggaaggacagcacataaagctttttacttgatatctctttgtcagagaagtggaaaaacaattaattattaatgtcgtttacgctacagaatgtacatgatgttcattttatgcagtttatacttcatatactaactcttcgttagaaattcatcaattgactcgtatatggaatgggaaaatattattttggtctgtgtttatatcatagttcatgatttttactctgtatttttgtccatggtttgatattttataccagttgtatatcaaaaataatagttatttattaggtattcttagaatcaattaggtttagatggttttttttttatcatgcaggtttcttgttgctgttggtgtgttgtacatatcac

SEQ ID NO: 35657 - DNA, 975 bp, Medicago truncatula
  Intron number 3 from transcript Medtr7g126820.1 (locus Med tr7g126820) derived from phytozome v7.0 (chr-ID MtChr7; po s 29552614 to 29553588)
ttcaaatctccttttgatcttcactttactgaacggtaattttctactcttctctctttctagttctaatcattttatttttgacttgtaacgaaataaaatactgctactagtagctttgttttaatcaagtggatgattttctagtagttaatgagtttagtaaagattatatttctaagaagtacttctcatctaattaattatgttgatttgatataagctttgttttttgagaagggtgagtgattgctagtatttgtgtagtgggacatcatttacttgaacaactttttttctttgtcttttgtcatcttctttttaagatgggttcattgacttgcaaaaagtaagtttgaatttgatgcataataaccaattgaacaaataattgaagaaagatcagtaattggctcactcagcattgtgactgagatacggacccccaatgagggagcatggccaatatgtctcatatactttgcaaaataatgaagcctttggatttggctcaaataatccccaaccgtttctttctaaaactaaatttagaaatcatcaatcacgccgtccgtccatatgaactcttgagacttaagagtccaatgtagtacaataatatatatagtatgactagtaatttataagtgggacataattcaccatacaaatggttttttttataggattgtggcttaaattaatttttatgatggtacaaagtctgtcttaaatttgttggacaccattattaatacctttcaacaactctaaccatgcaagtcctttttatagagttgagttattatcgtattaagatggtttgcacataatagaaaaaatactgaactcaaatttgaagaggcacatttgtttttattattattataatttgtccttgcttgatatttatgctgtctcattactgggccccatgcagctccactgggaccaaaattgaagagaagagcttat

SEQ ID NO: 35658 - DNA, 949 bp, Medicago truncatula
  Intron number 1 from transcript Medtr7g116970.1 (locus Med tr7g116970) derived from phytozome v7.0 (chr-ID MtChr7; po s 27197909 to 27198857 reverse strand)
caaaagaaatttcgctgtggaagcagaaaagagcggtgcgtaattcaaactatataagaaggagcgtcacactgctaaggtttgcgacaacatgataaccccctgtcttatttttctccctctctctaaatctcctcctctcctttgtttgtctctttttacttccgaaatttagttgacaacaactttgtaacatgatgaggacaccatgcatgaatcaaccgctgtcaatattcagtttttctttttaattgatttttttcacgttgaagtttttacttatttattcaatttagttttgattctaaatctaactaaatgttttttttgttattttcttcttcttttgttgtgtctagatttttgtttttggtttttaattatatgtgaatttgtggaaagtttcccttttgtaaccaccgttttttggataatacaacatttgtgatttgaacggttatgtacaccattaatctcaccctgtaaacttctttttcattccattattatttaacttctttctctgcttccatgtttctttgttattcttttatcattaattgacttttattctttaattcggtttggtttttactacacatcttgcttatatgttttcatcttccacatggtgtgaacctaaaaaaggcataaagaaaaggactgcatttttgtggtagtggtggtgactaagttgtagggataaacgtaatactttagtagtttatacttttttctcttaattaattgatcggtttcattgaagcaaaaagcattgagcggcttcattattttttgtcaaggaaaaaaatcagacgacaggagcagagagatgacaattgcaatgcaatttatcatttttacaagtttttaaatgcaagtcttattttcaattacattgaaccaatgatcatggttcaaggttatcttttcttctttcagggagtag

SEQ ID NO: 35659 - DNA, 590 bp, Medicago truncatula
  Intron number 3 from transcript Medtr7g143160.1 (locus Med tr7g143160) derived from phytozome v7.0 (chr-ID MtChr7; po s 34302048 to 34302637)
gatatataatatctgaatataagaagattttgagggtaaattactctctttttcatagcatgtgatccattatttgatttgatttgatttgatttatttcacggtcaaattatataaataattggttagtagtatcaatcatggatatatggcgtagaagtcagataaattttgtatcaaacataagattggataaaaagtgacatgatgtaatgtggagtgtgcagtgcatggtaggtgcccttgtctgtctcatagattaactgctctttttcttcgttttgttttatgatagagaaagagaagtgttctttttatctcatctcatagatctcaataaatgaggcatttcggatgtaatgttaatgtagtgtatggtgggtatgttagaatcacgaccattcacacctaccatgatactaaacacaaacatatatagttttttttttgttgttgttgttgtatgaagtagttagctagcgtgttgattgatatatatgttagaataataataacatttgaattttgaaatattgttgtgatgtttaatatcagagactatacgatcttggagcacgtagggtgatagt

SEQ ID NO: 35660 - DNA, 701 bp, Medicago truncatula
  Intron number 1 from transcript Medtr8g122790.1 (locus Med tr8g122790) derived from phytozome v7.0 (chr-ID MtChr8; po s 28833099 to 28833799)
acgttggtatttcaggtttgtcttaatcccttcactctcaaaacttcattccaaatttagttttgatttcattttctggaatagattctctttctcttgttattatgttagaaaacttccactacttgtttgttttttataataagatgtttttgaaagctgaaaagggaaatacatatgagttgaatttcaccgacagacataacacactttgagttgatgagaataaggaaagaaaaaaaatgttctttcatgtctgtttctcagaatttaaatctgtccttgtctgaaatctgttcaatctcaagtgcttaaaagctctcatcctttattcttctaagatgcaaattcccaattatataattgacaaatctaccattaaattgcattatataagttattttgacttagatccaattccttgtgctccaacatggatatatcaaattatttgaatcatcttttgggggggacaagacatggtataatatattatgatgtaatttaatgcattctttctctttatgggacccaaaatgaagcttttttatgatggctcgtatttttcattttcacattatcagagtatgaaataaagttgtaaccaaaaaaaaaggagtatgaaataagcgcaatctttatggtcatttattataagataattgacgcatgtgtcatggttaacaggaggagttgcttcc

SEQ ID NO: 35661 - DNA, 738 bp, Medicago truncatula
  Intron number 1 from transcript Medtr8g118870.1 (locus Med tr8g118870) derived from phytozome v7.0 (chr-ID MtChr8; po s 26821578 to 26822315 reverse strand)
gagaaagagggaatcaaagagtctgacattaaggggtactcatgtgcttgtagcatggtttaagaacctcttactgagtgttctttaattgtacgaatttaaaaattacccatacaaaagatgattctccttactgttacctctttttttcttctttactctcctttttatcttccttgttgtactacttttattttatgttggctttcttttcataagaggtgtgtgtgtgtaaatgagattcatattctcctacaatttcaaatcaaaacctcattaatggttaatatcttttcctgcctttcttttctttcctttatatatttttcttcttttcatgagatctaatatgctttattacccacatatccatgagtttttggttcaaaagtctttgaggattaagtacaatataaggatgcatacatatcctttatctaatgctctaactactctttctcatagataaaatttacattgctctctcttgagactcatatttgttactaagcctatcgacactcgagcgtagcagagcggagtaaatttgtaaattggacgataatatatgaataaaaaaattatactatgttgtcaaagacgtgagtacaattgatcgaacttcttgatgaatttttgtgttcttagtttatttatcggctttcttactaaaccataacatatcctttgttactaattgatatgttatggttgcatatatgcatgcatgaagttact

SEQ ID NO: 35662 - DNA, 954 bp, Medicago truncatula
  Intron number 2 from transcript Medtr8g053110.3 (locus Med tr8g053110) derived from phytozome v7.0 (chr-ID MtChr8; po s 11840875 to 11841828)
tctctcttccctaattcatctctaccaaacaaaccgtaagagacaaacttgccttgtacattatatggtggaaaatgcaatttgattaaaaaaaaagattgaaaaagaagttctttcactacaacaattatgatgtaatgcaactccattttgaaaggactaaaaataaaaaaaccgttatctagtacgacaaagtcaacacaatattaatggatagtctcgggttattatattcgataataacaaaaaaacggtcataatattaatactatttagttattttatttttactttttaattattttatatttacttttcgagtgttgctagcattcctcttttatagaaatagaatccaaatgtaatctcacaatcgcttcatctcataatcacttcatcataattgtttaatcataatcgtttaatcacatcacttcatcagaatcactactcatcatatctactttatcgcgatcacttttacatccttatcacagtcgcttcatcacaaccgttctaatcaaatttatttcacaagacctagaactcaaataaaataaaaaagtgtcaaagggatatatttctattgctcaatgattattttttatttttgttgaaacaaaggggctaagaaaaccccaaaagaactagaaaccacgaggaaaagctacagctgaagactccgcaacaaccagtaataaagaaaaatccggaacacgatcaaaaatacgataatgattatctaaggacaatccaaattttgccaagatgtcatggtagaaacaatagccaaatgattccaaaaagtcatatttataaatgaggattttgaagttgaagtattagggtttggcatcaagatatgaccaacaaaattaaatgtttgagatgaatatgcttatatcacaattcaaattgattttgtatagtcaatgcaggtataaaaaggtggat

SEQ ID NO: 35663 - DNA, 932 bp, Medicago truncatula
  Intron number 2 from transcript Medtr8g132600.1 (locus Med tr8g132600) derived from phytozome v7.0 (chr-ID MtChr8; po s 31364045 to 31364976)
gatctttgtctaggaaggaagcagcattggttgaggttcagttccttctttatttacatgcaatgcatgtcatcatttttattggaaaaaccaagtcccacatagattaaagatatgatctcactagagaataaagagagacacccctcaacttacaagccggtgccggttttgtaagtatttacttggttgaatatgaaatcctaataattatcaccatcatgtttagtatgacttgagtagattagtagtagaattgtaaaatcttgtttaattggtggtgagttgcgaaaatttcgaaccgttcatcttgggtgatggttgagtttgttttcttaaacattcatgtgtagtcattgattttatttcaatgataggatttgactcaaatttgcatgagatagctagaatttagaagaggactattgtagctcatgttatgttgggtcaggtagaaaatggtatcagtcgtttcgcaatattccatattgtaatgtactagtactactaatgaatattttatcttgtaattcatgttatgggctgcagtaggcaacacccagcctctctaatctaactgaggaaaaaatattccgagaaaaagaataaatgttaatatgagagaaaatttctcatagtttttctttttttgttctttttaatatgaaacatgcgactcagactatttttcaagagttgtcaatgatgtttgtcagttattttgggttgcttttttcagttatgagtttccaatgcatgaatttcatttcagttgtttttattatcaagtatgacctgtgtagtggtgcttatcagaagaatgtatgaccagtgtagtggattgtgaaaaatgctctctatcacttgttcttgcttgttttgtgaaaagatcattttgttcatcataaaacttcttttttttctagttttac

SEQ ID NO: 35664 - DNA, 843 bp, Medicago truncatula
  Intron number 1 from transcript Medtr8g026410.1 (locus Med tr8g026410) derived from phytozome v7.0 (chr-ID MtChr8; po s 5638977 to 5639819 reverse strand)
tacaggtatataactatgtacttgccaaactcttttataccctgatatattttatctaaacatcacgtatttcttttatacccttgtttattttaaaaacaacttaatattaatttctttttgagcactcttcattagtctttgatgattcggtcatttctttgatttacaaaacgagtagaacgagtaattatttataccatcatcgcgattcataagtcgagtataattttctacaaaattcgacacatttgaatcacttgatgattatagtttcaaattagccgcggtaactatcacacatgcctcatgaaatgatccatgatactgcaataaaatgtgactaaagcaatttcaatttactggaaatggatttcttgtagtcaaatataatcactgcacgtgaatctcctggccatccgaatttgatcgatactatttttaatttatttgtacgtgttaaatatattctggtccatcttatttcaattgaaatatctacaatgcattgattgcgcgactccatcattttacgactgcagtaaatccaaatcccaattgaggttgtgtaaacacaaatataaaaaatcttgatgtttgcagccaagaatgcagtcctagtcctagacataacccatgatctaacctttctagaaataattctatcaaatccatactaaaaataagatgatattagcatctagtgtcatttttttttcttctatttatatcttttaatttttttaattaacatctcatacatttaaccttgatctgatgaaacattatgttggtaattattatgcaggggagatcaaggtttctgcagtatagagtgcagga

SEQ ID NO: 35665 - DNA, 467 bp, Medicago truncatula
  Intron number 2 from transcript Medtr8g026650.1 (locus Med tr8g026650) derived from phytozome v7.0 (chr-ID MtChr8; po s 5816676 to 5817142)
tgtcattctcacgggtatgttccattgacatactatggaacctaaaactttccatagttgaattttgtttgctctctctttaaatcttttatgcatttattagttacttttattttccttactgtttacttagatagaagactgtactcttaactctttattatacatatgcatatgtgcagttatttatgaaattgaacttcacagatgcattttttttttctttttcattttttctaatattgtgtttctttgtgctgtaatcattatcagattcgttgattaattatgtccttctattcttttgagttaataactgcaatccctgtttgatgattcctgaatctcttgtttgctcttcttcacaattagaatttgacgaattgaatcttcctgataaatattcatccaacttagttctgcttttgacagggaaagggcactctgaagcagcaattagccaacat

SEQ ID NO: 35666 - DNA, 969 bp, Medicago truncatula
  Intron number 3 from transcript Medtr8g053290.1 (locus Med tr8g053290) derived from phytozome v7.0 (chr-ID MtChr8; po s 11949516 to 11950484)
gctgtccgattggaggctggtctttagagggcgtggtagtttttggttttgacgcaggggtctgcatgtgttttgttatttgtatatgcctgggtcattactcttttgggtgttcttttgttttttgggtggtttttaggggtttcaaaataatatttgccgtttcaaaaaaaaagtgtttgttgttcatagaaatgagtttctgtgctaatctgaaaataacacacctaaatattacttggaaatttgaattaagaagagatgtgaaattggtcccagataactaacagtccctatagtgtatgttagtatatatccctttggatttgatcctgcaaacaacttcagtcctaaagattatgaaaggaaatagaaataattaaattagagagcatgacatggctacaatgaaatagaaacagagaaagtagacccattcatattaggaagtgacaaaaagataagcaaattcaatatccctacaactcagatttcagacagagaatgaaatagttttagatatagtaatgaattgttctagatttagtttatggtattaagctttgttactaacaaacgatctttatatatgactacaatgcagaggcagagagcatctataaggatggataataatatatatgatatgactgtgctctagttttcttgaggcttcttttgatttggaaattcacaatcatatagatgttattggttgtattggagttccttgctattgacttgtttcagcaatggttaataatatatacgatatggaattatgcatttttggttattaaagtttcttgtagattactgcatggctatgaaaaattggaacattcatccttgttttgttggattgcattatattgtttaagaactgatatgtttaagaacttttgatatcagctagcatgcattatattgtttattttggcaggacaaaaagttgaatattgtaaaagg

SEQ ID NO: 35667 - DNA, 636 bp, Medicago truncatula
  Intron number 4 from transcript Medtr7g104950.1 (locus Med tr7g104950) derived from phytozome v7.0 (chr-ID MtChr7; po s 23933890 to 23934525 reverse strand)
cagcaaggggggattgacaggttgaggtaacatctttgtttgagctgaggattattgagtgccttttagttgatccttggctcatttttattttttgatttcatcggttaatacggcatggttgtaaacaaatacttgcagtaccacattattttaaatattttcatgtggtgctccgtctcttatggtactcaatcccctttacacggtcatgttgtcttttcatcgagttgtccttttgtacgttatatttagaagttggtaggttagaatagaattttagaagggattgtagtcagcagccgagcgctgtcacatactgttctacttgtgagttctcttctcagggctgatgttatataaacataagtagattttttcagaaaatattattcactttgatgaaaatactaaaagtgttctttcaataaaatatttcaattttctgtaactgttaccaaagcgtgaattgtattgtagtttcttctcatttaaataaattgaaacatatcattccaaaaacaaggttccattgagagttgggttaattttagccgtatatttacatgagatttcgaaatctgtttgcattgaacggaaggaggcaaggattcgttagaaggtttgtgcagagtg

SEQ ID NO: 35668 - DNA, 733 bp, Medicago truncatula; identical to SEQ ID NO: 35555
  Intron number 2 from transcript Medtr8g006200.1 (locus Med tr8g006200) derived from phytozome v7.0 (chr-ID MtChr8; po s 600770 to 601502)

SEQ ID NO: 35669 - DNA, 360 bp, Medicago truncatula
  Intron number 1 from transcript Medtr8g112840.1 (locus Med tr8g112840) derived from phytozome v7.0 (chr-ID MtChr8; po s 25486052 to 25486411)
ctttagtaattggacctggtgctggatacaacctggttagttgttttgactttcatcatttcatattgcttaaattttaggaacaacatttatctgataagatgttaatcttctttctctgacatttagtttcaagattatatgcacttgtttttcattttactttgcggaagttaatctgttgtacttgtatgtattaagcatcctgtttgctcatttttttaaaacttgggaagttttttggttttagaaggatgtaaattcagtctatgttttcaattggaagatacctttataaaccattgtattgtgtgtttatatacagaagtcgaatccattacctaaagaggaaagtccaac

SEQ ID NO: 35670 - DNA, 945 bp, Medicago truncatula
  Intron number 2 from transcript Medtr8g089410.1 (locus Med tr8g089410) derived from phytozome v7.0 (chr-ID MtChr8; po s 19209942 to 19210886)
tgttaatttcatacaccagcaataccttccccactgtgagcttttcattttcccttcttatgtttatgtgtattcaaattaatgatataatctttttctttatctcttttggaattgaaattcaaatttcagtaatttggatttaattttttatgttgttatttttatgatctttttgtgatatgtgattgttggattctagctatgagaaattcagttataaatgttgacatatggttaatgatgtttacggaaatttgagttggttttcattttgttttaaagaaacttacatttagagatgtaacaattgacttaatttatttgaaatgttgtgtggtaaaacatgagaaaattgaaaattatctcaattcaaaggaaattctagcctagtggctataaattcacctcttaaggtgaataagtggggaatccgaggtttgaaccccggctcctacatattgcaacatccctgccaattgagctatgctcacaggactggttcatccttttattatttggggttaaacatatttgtataatgtttcaagcttttagattgggtaatttgtttcctttgaagtttttgcgataaaagatgaggatatcagtgtttttggtgctttgatttgattcacgtgcatgcagtgttgtgatcttcccctttttatctgtttttgtttaaattcttcaatttttttgtatgttttttaagagtatgaaaattactatgaatgatgaggataataataaaaaaaccgtgacaaaggaaataattagattctggcactaaatgtattcttttatgtgtcattagattctggcattgtggtccaatgcaaatgtggttgttgaaaaatgccttaatatcacatatgtgcgcttgttgaaaaagatatatgattgttatttttgcatcttttcactttgtttggaaacaggact

SEQ ID NO: 35671 - DNA, 1017 bp, Medicago truncatula
  Intron number 2 from transcript Medtr8g120430.1 (locus Med tr8g120430) derived from phytozome v7.0 (chr-ID MtChr8; po s 27532336 to 27533352)
gaggaggtttgcgtgctacggcttggaaggtgataactccatcatgttcatttaactggtttgaattttcaactttggtgcttactttgcatattaatgtgatagtgtgatgccttaggactttgacaacttacaatattgaggaatataatatgtattgtatgtttaggacttccatttcatcatcagaattagactataagagtagagaaagaaaagaatgtaacactagaattggagatatgttagtactggtggggcatcggttgaagttagaggggaagttaaatatttgttgctcactgtgattagcagttgaatgtgttggcagtggcgtaattgagccgttggagtgtttggtttttgcaattttaatatatgcaggtttctacaattggtgtaaagaactgcattctgtatttgaatttgctgagttattgtaatgtcatattgatttagttagtgaaggagggacaagcacgaataatgcgggaaaaggaaaaatcgtgctaaatatatggcctgctgcgttggtggtggaacaaagaaatggtgtgttaatataggatcgggtaatgatgaataaaacatatatgaattgtttgatatgcataaggagggtatgagagctctgtcatgcttaattcacattataagaggggatggataaataaatcgaaggagcggtaacctagagagatatgatgcactggaggtggaggaaggcttgatgttgataagtactttagcagtaggagcacacaaagtaactaaaattgtgcttctgatgtacacaaatggtgttggtgtccaattgatacggacaatgttgtcataaattttgtgctaatcttacctagcgtttattatgctttgattagcttgttcaacaagaaaagaaataagattaactttgcaaaagtataaagctctctgattgtggctatgtctgcacacaagcaactgattgtcctgttatgattttcatatccagctactcttgggctacttaccttt

SEQ ID NO: 35672 - DNA, 605 bp, Medicago truncatula
  Intron number 1 from transcript Medtr8g144710.1 (locus Med tr8g144710) derived from phytozome v7.0 (chr-ID MtChr8; po s 35038208 to 35038812)
agggaaattggtgggaaccgggtgtgggattttaggtggagaagagagttattctagcggtaagcggaattgcttcatcgcatgattgaggaattagaaaaggttatcatcatggagggtagaaaaagattgtatagtttgggtggaggactcgtcaaatttctattctgttaagtcggcttacaatgtcttaatggaagatagcaatcctggatcaaccactcaacaataaggcgtagcataaattcattctgttgaaagttgtggtgtttgtgtgccaagtatttcaaaaccgtattccaatcaaagataatttatctagaagagtaatcctaagcggagattagctaaattgtgtaggtggctgtggtgatagagtcaacatcccatttattttttgaatgctatgtttatttctaaagtgtggatggatatggctaaatggctagagtgagtgtggtgtatcataataattgcaattctcatctcaattatttctctggagtaagtattggaggaaaaggaacggagttgggtttaagaacaaatttggtttgcctgctagtggaggagtatttggaagtctagaaacgcacaaaaaaaaa

SEQ ID NO: 35673 - DNA, 516 bp, Medicago truncatula
  Intron number 1 from transcript Medtr7g138580.1 (locus Med tr7g138580) derived from phytozome v7.0 (chr-ID MtChr7; po s 32916493 to 32917008 reverse strand)
ggggcacgtggtgctcaaattcttactactttgtggtctaaggtaataccattttatcgatgagcacctgtgggtcatcttaatgctgtgaaaattgatacttgttatgttaatatatgaatataaggcatggtgtaccatttgtagactggaatgcagtagtgatggatgagttgcaatctaaaagctggatcaccttgattaagaactaatggcaccagctattgcaatccaatgctgttaaaattcaaaatctattcaacataatctgtgttctaattcttgggttatacttatactcctctcctctttagggtttctcttattgttgtagtggcttgttaattacatcttccccttagtttctccaaagtatcaataactgcgagctttagattctgtagcagttgttcagacttgtgatatttgcttttcactattctgaatgctaaattgagttgttggttgaaatattttgcaggtcattgtcaagatcagaatctgcacgttcatctg

SEQ ID NO: 35674 - DNA, 414 bp, Medicago truncatula
  Intron number 1 from transcript Medtr8g129280.1 (locus Med tr8g129280) derived from phytozome v7.0 (chr-ID MtChr8; po s 30474508 to 30474921 reverse strand)
ttttttcaagaacgctgttaacaaggttcaaactggtaattgctttactctttctctttctctttctctttgttttatttcgttgagtgtttatgaacaatgggtagtgaaaacaaaatgaaatgaattcttgtagtagtagtagtgatttggattatttgaattttgaattgagttgttgaaaagtgtgattgtgaagagtgagtgagtcttctttttctatttttagaattatttttgtttgatttgatttgattaactaaattcagaatatgtagcttagcaattattttaatgcatgatttagtttgttgggaatttttttattttttatttttaattggggtactttgattaattatgttgtttattttactaattaaatggtttattttacagctcactcaagtttgg

SEQ ID NO: 35675 - DNA, 413 bp, Medicago truncatula
  Intron number 2 from transcript Medtr8g045350.1 (locus Med tr8g045350) derived from phytozome v7.0 (chr-ID MtChr8; po s 10415745 to 10416157)
gtttgttgacatttgaatcattggtactgcctcaggtatggtctgatgtgggagttttttcagagtgtttttatctgcttagtgggtctgtttgttgctggtagcagcgtgagtattgtgttggttttgaggccagtatgtgtctttttgtaacagggggcatttggcttttcttttgattttctcttattttggttgaataccgatatcatctaattttgattatgcagaaccagaagattaatttgagtaaaattgagcagcttgtgattttcatttgttgataatatgtacgtatttttgctcaaagtcttgtggtttgaattggtatcaatattttcaacatttttatgctattggcttactatttttgtatctgcagcttttgttaagcctgccattgctctctattg

SEQ ID NO: 35676 - DNA, 915 bp, Medicago truncatula
  Intron number 1 from transcript Medtr7g133820.1 (locus Med tr7g133820) derived from phytozome v7.0 (chr-ID MtChr7; po s 31400664 to 31401578)
atcactaactatattaccattccattacccgctaggtaacatctcatctcttctaatctctcttcatctcttcgttattattattattattattattattatattttgtttttctttcgatttcttctcgttattcccccactctcaatctcacttaatttttaattacgattttgttttctgtttttctgaattcagcattgtattattaaatcgaagaaactttattcgtagtttataagctttgaatccacacacataacgaatcatacagtaacctcgttccacttttagttataaggtcgcttgaatgaatgaatgaatgttggtcggtacacatacgttaggattaatgttttcaactatgtttttcctaatttgagttaaccactttagttcatgctttacactttttccacattggtaaataaaataaaaataaaacaaaatcatataactatcaaagctaagtaattccgcttgctgttggtaacgagcttcctaggacgaatttgctgtctatttgggttccacaaggcttgtgggattagtttacggcttttgcagttgtgcgcagtacacctaaaaaataagcaatttttgtttctgtctatttcattatttttaatgtttcttaaaagttctaatctttggttgaagtgagtttaattgtttattgattcaaggatacatgagagtaaacgaaaaatttatttaaaggtatgatcattgctttctcatgttttcatcatgatttttgtctcattccctttgatactaacatgggtctttgaagaaaaatttcatttttaatcaagtcggttgtatcacggtgataataatcagtgataacttgtgtttttatgtctggagatctttcacatactagattgcattatgttttgcaggatcaat

SEQ ID NO: 35677 - DNA, 417 bp, Medicago truncatula
  Intron number 1 from transcript Medtr7g140550.1 (locus Med tr7g140550) derived from phytozome v7.0 (chr-ID MtChr7; po s 33877783 to 33878199)
gctgcgaagaaagttatttagcctgttaattttaaaagcaatattctgattaagaaaaaatatattttcttccaattagttgagtccttacacttaagtgaggtgtgtggataccatatagaagcttccaaaggggaggaaaaacaaaatggacacacggctattttcatgtatgcatttgaattgcaaaaaaaaaattaaaattaaaattcttactatatttctattcattaataagctttgtaggtttggacaggtaacaataaataagattgggaattttcacgtgaactcaatctctatgaaccaaaaataattataaattaataaatttgaatcctaagaatttttttcaatcaattataacatggtggtttattgatagattcaattcagtcaacatacaatttgcagaac

SEQ ID NO: 35678 - DNA, 587 bp, Medicago truncatula
  Intron number 1 from transcript Medtr7g099460.1 (locus Med tr7g099460) derived from phytozome v7.0 (chr-ID MtChr7; po s 22186728 to 22187314 reverse strand)
ccaggtgaaatgaaatttcttctattttattgatgcattttagttactttctagttgtaaatttgtttgaatacatattttctgtttttgtaagttagtaaaattcaaactttaggaattaatcaaaaagggaatatcaatgtgtttgaaaagacttttcttttataatttcatcataaaaagaaccgacaaagacacaaacatcagacacgatattgacattgacactatgtagacattgctaaaaaaacatttgaaaatagacgtgattggatgtaaccacatgtgtttgtgtagtttaagtgtcgacactgacacatgtaggacactcagacgcaacatcactctaaagggtttatgctgtatagcttaaaagtttaatcttgagtggtcgattttggattagacttgtgtaaatgccaaaagtccaaatgcaatgagtgatgaagtaaattgatttgacaactcagattgtcaatatatatatatatgttgatttttctttttctggtttgttatgataagaaaaaattgtgttgtttataagtttagtctatttgctaatgcagggacaaacttcacagttg

SEQ ID NO: 35679 - DNA, 662 bp, Medicago truncatula
  Intron number 1 from transcript Medtr8g130320.1 (locus Med tr8g130320) derived from phytozome v7.0 (chr-ID MtChr8; po s 31046331 to 31046992 reverse strand)
ggaagaagtctaaccaacaaggtatccgataattttttttcatatatatatatttatatactattataaggaagatgcttccatttattaggatattataatattgttgcgtttgatttgtcatggttctaactcatgatcacatgcatttcacacggagctaaactaatccaatcgactaaataacattgattttggtgggtcatggccaatttttaagataatgctcacatggttcagccttgtctgtctactactttactaaatttattttcatatttaaaaaaaaaaaaaaaaaccaaacaaacgtccatgaaaattttaaaataagagttcaattttaattcacttttaaggcaaatttttacgtacaatgtcaagaaaatacattcaattatatgtgtggttttatttacaatgtcaagaaaatttaatatcctaattaattaaccatcgaagtcatttcatatctactatactgttgtttaactgaaccggcaggtagataaggaaaaaacatacttggtaatattaaactaatattaatatcgcaaacttaaagacccgaaccagttagatacaagttcgttggcatatagttatcgacctaccataaaaaccaatatatgacacagttttatatagccttgatttggttggtc

SEQ ID NO: 35680 - DNA, 532 bp, Medicago truncatula
  Intron number 2 from transcript Medtr7g093720.1 (locus Med tr7g093720) derived from phytozome v7.0 (chr-ID MtChr7; po s 21089055 to 21089586 reverse strand)
cccctttgcttatcaggtaattcgaaactcaaaataaactatcaatttagtttctgaactttcactatattaattttacttcgtcttgcgagtaaataaaaataacaagtagctcgtatctaacactttgtcacacgtttctttatagtcctactggaaccacagtcaaagaacgggcttgatgttttcaccaaaacatggaaatttgcaaaaaatagtattgtattagagattgtgttttgatttgattttttttggtagagtcttctaacataaacgtatctgcaaagtttagtagcattctaatatagccttaattgattttttttccttcactatagtactattttcatttataggagggacaatgtaggagaaatggtttaaattttgaaaagaaattgatgatttattctttcaaattatattttgatgccaatacattattattgactagttaagtaaattaacatttcaaaattcatgaaaaactgcaggaatttgtaaaggcagttgttgcttatcagaagag

SEQ ID NO: 35681 - DNA, 726 bp, Medicago truncatula; identical to SEQ ID NO: 32979
  Intron number 2 from transcript Medtr8g116100.1 (locus Med tr8g116100) derived from phytozome v7.0 (chr-ID MtChr8; po s 26246414 to 26247139 reverse strand)

SEQ ID NO: 35682 - DNA, 844 bp, Medicago truncatula
  Intron number 1 from transcript Medtr8g146950.1 (locus Med tr8g146950) derived from phytozome v7.0 (chr-ID MtChr8; po s 36047108 to 36047951 reverse strand)
agaaaaggggtaaaattattattattattattattattattattattatttatgatttataaataatagtaattatcattctgtacacttgctaaaagtttatcattatgtaccaacattttcttatggtccttcaaaaaaaataaaaattcttatggtaaataagaaccctccttatatattgttataggtggcatttagtttcgttataattattggaaaatgttacatgaacatcctttaatcatacactctattgtacaccccatgcattaaggatattttggtaaattcatctcacaaccatactttctctttcatctcctctcccttttccttgccacatgtcaggattttgtgtgggtgtaagaggtgtattgccacatgggggtgtacatgtatcaccactcataattatttacctcccttattttcataggttttctccaccagagtatgtcgacaccggtcccaaccgaaacataaaacatgttttgttctcttgcgtgaacaacattttgtgtgttattgtgtgttatttgaacaacaatttgtgtaaagtaaaaatataagagagaaagttgttacaaaatggtgtataaatgtcatttctattttttttggtagtgtaattgtcatttatcttctaaaatatctcaactgtttttgacaaacgtttatattgagaacagtattattatgttttgacataattgatggtatgccacgtttgacacgttggcttataaaatattaatatgtgtgaactttttgattataaaatgtagcaaaaactagcaataagatagttatccttaccgacagacatcccacactcactctc

SEQ ID NO: 35683 - DNA, 536 bp, Medicago truncatula
  Intron number 1 from transcript Medtr8g025350.1 (locus Med tr8g025350) derived from phytozome v7.0 (chr-ID MtChr8; po s 5054134 to 5054669 reverse strand)
ttgccattttcaacttcctccaattcatcaatcaggtttcttcatttctcttttcgtttttccctaatttttgaattttagggtttttagggtttcaatgtttcttcatgttcgtcaggttcctttttttctcattttttttcaattttttttcttaattgattaatcgagtgattctctgttcaatgcttcagttcaattcccatctaaaattatcgaattttaacgtaaaaatcgaaattttacatcaatttttattatttttattgtttattttctctcatcattgtaatttgagcttaatagttgatttataccttaaaatggtaaaaagatagaatttttttggtgggttttttatttgatttataattgaattgaaaatgaaggattttgaaatttgaagttggatggattgagaatttgggaatttttttcactgttatctgctgtggattttttgcaacaaagttttgattgttttgtaattttgggatttttgttaaagggagaggttaatcatggcaactgcaaca

SEQ ID NO: 35684 - DNA, 504 bp, Medicago truncatula
  Intron number 1 from transcript Medtr8g115790.1 (locus Med tr8g115790) derived from phytozome v7.0 (chr-ID MtChr8; po s 26094133 to 26094636)
ggatttcaacacttaactcaggtaaagtaaatcaacgtttttctcttaatttcttgtaagataacccttttctaatgataatgtattaagcaattttttttactctaaattaattgtgtttgaagaaaaattagaccttgttttgatatagagcttaattgaagtccttatagcataatcacttgtcatgtaaattgtaaaagctattttagtatttttataattttagatgaaataaagtcaagccatttttatacttgctataaactgttttcataagctatgattgagagcttatagaaataagctgaaaacaacttatgagtatatcataagttgttttcataagtgcctatgctagtagataaactcaaactagtcaattcaaagagttcttaagtagagtggattatggcttatagggtgtggtatgttagagatagaattgaccagtttgttcttgatgtagattcaagcaagagcgattccaccacttttgagtgg

SEQ ID NO: 35685 - DNA, 774 bp, Medicago truncatula
  Intron number 2 from transcript Medtr8g115790.1 (locus Med tr8g115790) derived from phytozome v7.0 (chr-ID MtChr8; po s 26094763 to 26095536)
ccctactagagagcttgccattcaggtattatatttcgtgcgctatacttatcataaactttgctgttggaattatggtgcaatttggatcagtttctagcttatgatttctgagagcttctcaattaaaatatgtttttggtcttgacaagcttgtgggtgtgcatggacaagttaagttttagatatacaatttggaccagtttataggttggaagattctcagttaaaataactttactttactgttctttctcatatggaaattccgtacggagaagtttacagtttgtaagtatatatgaagaagtttaataaagtgcttttgaaaaataatagagatacagaagatcattttgacttacatgagaaactattaattaaaagcctcaatagtttttacaagattcttataatatttaaattttcaccagtcttgttgtgaagtttaatcaaactgactcagggtttctgaaaatattgggatttggaagataatctcaacttatacgggaaactgttttttgaaaaactcattattgcaagatattattttctattttcaaaattgcttgttttgcagtttatccaaactgttttttttctttctttcttttctttgcttgatgttcctcagatttcgttattctttctattctcttgggtgttttatcatgtttgaagtatacgaattttatcatctaattctccttatttgctgattgtctatttctttaagacacacgaggttgctcagaagcttctaaagcatca

SEQ ID NO: 35686 - DNA, 847 bp, Medicago truncatula
  Intron number 1 from transcript Medtr7g088100.1 (locus Med tr7g088100) derived from phytozome v7.0 (chr-ID MtChr7; po s 19037945 to 19038791 reverse strand)
ctactataggtgctgcccccactctctctcgagtgtcattcctaatcctatatatagtaatttatgtcttactatcttcattttgttaaggttgtgcttacttacttgattctcaaataatcaagtaagtaagtaagcacaaccttaacaaaatgaagatagtaagacataaattactatagtttgaagctcaaataattagtatttggactacttactctttggttgaattgcttaagcacttacgtgatggatcaatttggtagcgtgtattgttggaattcatacactgttttgaattgaaacaaagtacatgcactgtttgtttgagtgtgtttggctgtgcattaactttttctaatttttgccttttgtagaagttaaggtttagtaacaaattgtaatgtttgggtcacaggatttaaatgaaatgttcaatgagataggaagaccaaaatgttaaaattctgcactagcagttgataggtaatttaaggttttctttttatgttgaaggttcatgttaaactcaattcaaggaaggcaaagccaaatgagatttaagaaaactggtttttgatatataaatgatatttaagaaaataaaatttctattggttataagcattgatattgatacttcattattgctcttgttagtatacatgtgcagctgatgattgaaggacgatcacttgagttggactctacaactatatttggactctgcacaatttagtccttaaacccgaagttgatgatactatattaaatgggtttgattgatctcatttcaaaggctagtttaaaagtcgtgtatatccaacacaacttcagtaaaaactac

SEQ ID NO: 35687 - DNA, 842 bp, Medicago truncatula
  Intron number 1 from transcript Medtr8g106350.1 (locus Med tr8g106350) derived from phytozome v7.0 (chr-ID MtChr8; po s 23827854 to 23828695 reverse strand)
cacttgccttggttaataactttgcctccaagcatcgttaactatttacatatatacttgtgaaaagtgacataagccgtatgatagtttgttgtttaatttgttcaattttatgttcatggtttgtatccccttttgtgttctcccaataatactatatttagttcttggaagtgttttttttgcaactgtaaccgtgtcgtgcaagatcatattttgtttgtttgtgtgtgtgtttttattattgtgttttatcattaatgtatttatttatattgttgaaggtatttcatttgtgattgtataatggttatatagttaatgcggtggatatttttcgaaggggaaggggcactcataatctcaagttcgactaatgttgtttcaattttactatttccttctcacacaatttatactcagcatattttttttgtttctttaggaactgtaacttctcttatagttagtgtgactaggtttgagttcatatgttgaagatgatgatggagagtgaagctttgatgagaaggtgatgctttgacaagtttctttccccttcatgtttttcacttttaactctttcctttttctgtcctgttttttgaaacattgtgtttgcatcaggcttgccttgatttgaagctgtatatattttgttgttttccacttctttgtctatagtacatcctctgtcgctgatatttgttgtagtatcttatcttgcttgataacatgtaattacctcttaattatttaacatatgatattggtttttgaaatgaacatatgaatctgctattatttttcattatgtgttgctaattatctggcaggaacat

SEQ ID NO: 35688 - DNA, 590 bp, Medicago truncatula
  Intron number 2 from transcript Medtr8g105490.1 (locus Med tr8g105490) derived from phytozome v7.0 (chr-ID MtChr8; po s 23314948 to 23315537 reverse strand)
attgggtaggtgtcttttttcctttggattcctctcataatttgatttcgccaaatttgacaattgtttgagtgttaatatttttaattcttacatttccttatcttttgtttattagttggaaaaattaaaatgaatttatttagtaaaaataaatttcaaatggcttcgacccataaaggttcacccatataatagatgatgatgatttataataataggataacctagtgtcacaaagctctcatctccgcaaagaaaaaacattcttgcttaatctcctgatatatttcacagttctccttctgcaactgattaattccctttcgtaattccagcttcccttaaacatttgatagccgtctattaccttgaaatatgaaataatccaaggccatatcaaagtattcaacaacttccatttatatgacatattgcgggctctctatgacacttttttttatgattactgaacaatgaaaaacgcttcagcgaacctgtgcttttcttgaaattttcaaaaacatctctttcttatatgcctcttgtttgaaactccgatttgcagggtccttacacagtgactgaac

SEQ ID NO: 35689 - DNA, 886 bp, Medicago truncatula
  Intron number 2 from transcript Medtr7g133720.1 (locus Med tr7g133720) derived from phytozome v7.0 (chr-ID MtChr7; po s 31369258 to 31370143 reverse strand)
cccagtccccttctagttccactggcgaaactcaggtatttatgtattgcagcattattctggattgtctgttgcacccatgctcatgtacgcagtccttatactcacactcaccctccatgactgggatttcgtgattttctgtagaaattctgggtatttttctgaaactacaaatgttttttattgtggttcttagaatttgtggaactgtcttaatttgtcatgctgaggtcgacgggttgacactaaacttcttctttagtcatacatgacgagaaaccaaaatataataatgctcaagaatatctgatattctgatgggtgtgtggttcttaggaagatctgacaagaggtcagaggaggggaatggaattcatttgcttctgcttccttttgacataccgcacatgggaggtctttagttagtataaggggatggggaagtggtgtgcctgagactaactgaacagtacataatattttgtactgtcagaaaaaacattaagttgagtattttgatcatccttaccaatcctggtttaaattgcatgcctattaatggctgcgtgtgtgatgaaaatattcatcagacttgaggatagaatttaatgctgagaaattccatgatggtatttccttaggtttcagaaataaatggcgcctgcttgtttttgcttgcagaaatttgtgttgtaactacctatgcaggaccttgttttcatgtatgaaattgcattctggttctagctcctaatgtttgcttcaatgacacccttatatatgttgaatttatactatcctgagattgtcatgattcaactgctaatttgtttgtttccaccatttagaatcgcacggatcggattgtttttaaactcttcgg

SEQ ID NO: 35690 - DNA, 832 bp, Medicago truncatula
  Intron number 1 from transcript Medtr8g008880.1 (locus Med tr8g008880) derived from phytozome v7.0 (chr-ID MtChr8; po s 1110758 to 1111589)
caggtatgtttatgcatatgtgtaaaatttatttgctccttgaaatttggtcattatcatttgtagcaccgaaatttcagattggatgcgcgttgagtgtctaacatgtgtttgtgtctgtttaaataatatgtaatggttcttttgttataattgagataagggtagttacgtctatttatatttcactatatattttgagagtaacatttgtattttgaagattttgctcattctaatgaaactttaatcgcgtttgttattttgttctcttcattagttctctagatggttaagagtgttgtcggtctctgacacgacactcatacacgtggttacattcatttataccatattttcaacttttagcgttaatgtgtcgaaatcgtctccaatacttagccacttttttttttttggactagtcgaagtaacaacttaacaaggactaaatttcagtgaatcgtggcagtaaggccattctacgacttacaatacttcgcagcgtatttaagtcgtactcaagcctttttctaatatctctaattttgtcttatatataagaaaatgtgttttcatttgtgaaattgctttcatatccttattttgaggtgtattaatcggtgaaatagctttgatatatccttttcatattcactagaattgcatctatttcacatgagatgaaaggtctatttataagaaacaaatcacatatagtagtataaaaaccaactgatacaaactatgaaaagtatgaaactgaatttaatccataattttttttctctctgattgactgcttattcttgcagagatatactgttacaat

SEQ ID NO: 35691 - DNA, 503 bp, Medicago truncatula
  Intron number 1 from transcript Medtr8g139040.1 (locus Med tr8g139040) derived from phytozome v7.0 (chr-ID MtChr8; po s 33818568 to 33819070)
ctactactaataatattcaagatagaggaaattaatttcttgtcttaagggccaaggttttcttaatgtgtcatgattccacaactaggaagttaattacttgttttgtttgttgttgattactacatcttaatctaaattacatgtacttttgtcatttgtaatcagcatgctttagttgatttgctgaacttgagatcccttgactttgtatatttagaattgaaagtgttgaacttgttcacatcagagtatattcatcatcctgacctcttcttctaccgaagttcacaacaagacgtatatatctatcattttatctgagtttcttggaaaagaattcatgaatcatgaatttgctaacactttcattttcattggtaaattcccaaaagtccatattattaaaccgtttgatttcatcttaattaagtttccatgttcattacatatagttctaaattgcagttgcgattacagcattacgctgcagactttcagag

SEQ ID NO: 35692 - DNA, 610 bp, Medicago truncatula
  Intron number 2 from transcript Medtr8g089200.1 (locus Med tr8g089200) derived from phytozome v7.0 (chr-ID MtChr8; po s 19111925 to 19112534)
cccgaagttctgcatttgcttctgcgttggcttcggtgtgttcactttcttctttttgtttagtcttttgtcttgtgactcaagttaagttgttttgtagattgtttgtgattattttgatgattacctattgagttcagtgtgatttccatgatatgttaaggccttgtttgaattatcagcttaattaagcgcttataacataagtgcgctaatgtataagctatttctgtactaaaagataaaatcatgtcaaattacgtttcatataagctataagctgttttcataagctgtccttgagagtttatggaaataagctgaaaacagcttatgcacatctcttaagctatttccatgatatgtgaggatgataattgatcttcaattaaaaaacactgtctctctcaattcattatttcattgatattttagtttaaaaaatctcaggaattggtatatatggtgggattctttggcatacttaagttacttttgatgctcacacatcttaagctatgatatgttaaatatattatactatcctgtgtttttgaatggaatgaattattattgtggcaggactttgaccttagtgtatataatccta

SEQ ID NO: 35693 - DNA, 821 bp, Medicago truncatula
  Intron number 1 from transcript Medtr7g105320.1 (locus Med tr7g105320) derived from phytozome v7.0 (chr-ID MtChr7; po s 24115727 to 24116547)
actactcgtgattccttctctcacactccttacaggtctttctctctcttctttctttttcttcatttcttaattgggtttgtttaatttactctatttttttatttttttttattttaaaaagattaagggatgtttttggtgattagacatttgattgttgaaatgatggttcaattatgagattagggatatactagattttaatgaattgtaataattattatacattattgattaataattagtaatagaaaaataatagtatttctatttctatttcaatttttcattattggacacaattatttgttagaaggttgagttgagctatgaaatagtgacacagacacaatcgctggacacgacactattgatatgaataataatcaagaaagaataatggtggcaacagactctcttctatcggttgaaattcatgtggctccatgtaaatttggcgggactcatgaatttcaacgaataggaaagagtgtattggaatgtgtctcgctttgctagtattcctctttaagaaaatatatcagtgatttaatgtaagtgatggattggtgaactgagtgttttatgaggtagagaaatgcggagacacttgacaccttcacatttgttttttgttcttttcatgtgttgaggtttgagtgatttatgttcagggtgtcgtgcttatatgagatgaatggtggttttctagtgtatggccgtagttttgttgatagaattctatattggcggattattgagccgtggtttcactatagtctttaactgttttcagcattgcgaaaaagttagagcct

SEQ ID NO: 35694 - DNA, 681 bp, Medicago truncatula
  Intron number 1 from transcript Medtr8g145750.1 (locus Med tr8g145750) derived from phytozome v7.0 (chr-ID MtChr8; po s 35505572 to 35506252 reverse strand)
gagttccaagtctttgggtatgaccatttccatacttttttttgcggtcaatagtaataattagttgttagattaatatttttttctctttcaactgagtttaattcgggtcctccaactcatttaactctaaacatagtttaaataacactaatcataagtgactcaatgaagaagtctttgtgttgcatctcattcatgatttgatgtaaaaaaaaaaaaacatatgtaactttagcaaaatagccatcccataacttgttgctaattagcacataattcttgatatgtttcataagtgtaaaataaatatgtactataacagatttgaatcaattaattaactaacctgactcaattttttttcatttttccatctaacatatgttatcttagtgaacgccatgcatcagcttcacaagcaggaggaatagtttagctcttaatattaaggttccaaccaagaagagggataaatttatccaatttctatggcacagcatatcaaatgtatgcaatgcacattggtagatgaaacttctgcactaaaaggtgtcttttgggtttgcatttcactcttcacagttttgaaaccattgcatttaaaaaagggtaattcggtgcactaaagctcccgcatacgcagggtccgggaaggggttccatcattattggtgtatt

SEQ ID NO: 35695 - DNA, 863 bp, Medicago truncatula
  Intron number 1 from transcript Medtr8g119680.1 (locus Med tr8g119680) derived from phytozome v7.0 (chr-ID MtChr8; po s 27190552 to 27191414)
ctaccccttgtcacccttcctcactcagttaatttgtacgatgacatttagtttcgacgatggtttgtgtgaaaatttgaattttaagtgtggagagattttatggttttaaacattagttttttttaatttttgaaggaaaggttttttaacattagtttttaaggttcttattgattctctaatgatttaattaatttactgagagtttgattaaacttgttttgaatcaaatattcaatgaattgaaataatctttgtctaaattgcgttgaaatttgtttggtgattattttcttcgtgttccaatttccgaacaagaatctttactttttattttgaagtagagaatctttcaacttagcaacgtttaaaattgattttaagatctctagtttagctacgcatttatactgaatttatatccaagatacttataaatgcacatggaaaccattagtcatacatttaaaggaaggttgcatttaatggttagagaagtcccacatcattcgcaacctattcgcgataataagcatttctcttttcatatatagcattaaaacatagacttcccatagcgccaaagacgagaaggtgacacaaacttgcaaaaaattatttagtgatattaagtttttatgatattgataactttagtatatttaattgataaataaaagattaaaataaattatttaattaatttgataaaagagaatgattcgtagctttttgtgtgtttgataaagctgatggttatgattaatagatgttctttgtttggttctttgatggatggatgaagaagataatggttaatgttgacatgcacaacctttgttttctttttttaggccttt

SEQ ID NO: 35696 - DNA, 956 bp, Medicago truncatula
  Intron number 1 from transcript Medtr8g043460.1 (locus Med tr8g043460) derived from phytozome v7.0 (chr-ID MtChr8; po s 9386326 to 9387281 reverse strand)
gaaaggtaactaaccaatttatctgaatgttgctcatctcacatcaaaaattactcttttaacatctaaaaatcacaactttcaatccaagtggcagcttgtgctttgtcgcatgctagggatatttaggtaatttttggatgttaaagagtaacttttgaagttaaaagatcaattttcgtcttctcttaatattttttttatgatataaaacctctataaagcctatataattgatacgatacaacagtgaaattgatacagtaaatttcaaaatttaatatacgatatggtcgggataatttaataaaaataacttttataattaaatatccaaataccaatatataaatgtaactaatattctcctaaacaaaatataaataatattaataataaaaaagtgacaattaatcaattactatctcaaaaagagaatatcatcccaatggaacatcattacctaattgtatgttataaggttctttttttctcatttttcttaattttttaaagaataaaaaaattagaaaagtcatgtttcctctttttccttttaaagaaaaaatagaaaagaaaataatagaaaattcatgtatcccgtgcgtatcagttcccacagatgtatctttcttgcattttgggtgtgtcttgaaatgtatcgtacatttgtttttttaaaaattaaaatttaatcactacaatctctcccggtacatatttgagcgtatcgacaagtatcgatgcaagatacgtaacagatgcaaatgcaagtacatcatcaattttaaaatttatgggcttcgtagagaatatctcgtatacttatttcatcttctgatttgtaacaataaccggatgcaaaaatactctgaggaaaccttgttataaatttcataggacaagacattgatattatgccttttctttaattgggggcagggcaaagggtatat

SEQ ID NO: 35697 - DNA, 466 bp, Medicago truncatula
  Intron number 1 from transcript Medtr7g102600.1 (locus Med tr7g102600) derived from phytozome v7.0 (chr-ID MtChr7; po s 22835430 to 22835895)
cgaagcatcatcattattcactactacaggtacaggtactattaatgttacctttatcttacttttcttctattttcatcatacatatctgcattcaaattagaattagatcgatgtatctggatttaaattcagatttgattgtttgtacaaaaaaatcttagactttgtagacagaggtttgaagaatgtagctaacatatcaaggtgtaacgttgattgacatcttttttttttttttgcttggatggaccatggaaaatctttgattattgtttcagatccgatcttgttgtatatattccaaccaaactttcagaaattattttgttccatatatattgtcgtacaattcggttcaacttgattaccggttctttttatgagttttttgtatgtcaaagaatagtgaaattaacaagttttatttacatatatttatgtagatatcactgtgtcaagcaag

SEQ ID NO: 35698 - DNA, 717 bp, Medicago truncatula
  Intron number 1 from transcript Medtr8g031970.1 (locus Med tr8g031970) derived from phytozome v7.0 (chr-ID MtChr8; po s 6997808 to 6998524 reverse strand)
ctacaaggcctggttgtgagaataactttgttctggtaccaaattttttattctttatatatcaattgtataaatagtttaaaaaaatgttttttttttgtgtggattttgatcttggttttgtttcttgcttgcttagaaactgttggaacagtgaagagatttggaaatcatagtaaaaattcattttttaattgaggaaagaaaaattggactgtttggtgagattaattcttttataattgtttttggtacttgatttttgagttttcagttttgtaagggctatttgaattggcttatttgagcttatctactgatataagttcttgtgagactatttgggagaacttatgaaaatagcttgtgacatgttaatatcttgttttcagcttattttcatagattctctaaaatagcttaagaaagcatcttatagcttatatcaaaataattagactttattttatccttgtgtgatgtatgctcaattgatttttttcttcttctatagtttcccttttgtatccaaaatttaaccaagaacgaggtgataatagttaggtaattggaacaatatatttcatgtactgactctgaaaaacaaaatctgcaaatgtattggcttatggtttcttgaatttgaagtaaacttctatgcaatgtggtctgttgctaacaaaatgttttgttaggtcaaagtcccaacttggattg

SEQ ID NO: 35699 - DNA, 503 bp, Medicago truncatula
  Intron number 1 from transcript Medtr7g105430.1 (locus Med tr7g105430) derived from phytozome v7.0 (chr-ID MtChr7; po s 24149548 to 24150050)
attctgtaagtacaaactgggtcttctcttatctctcaatccttaattctttagtttttctttagttttaatatcaatgtattgtaacttgtaattaactttatgtatgaattggatcttttctcaaaaaaaaaaatgtatgaattggatctatatatgattggactatatggttaatgaattgaaaaattgttgcaatcctcaatgttatctttgatttgttcttaaatatgcttgtgtttataattgatttcaataaaatcctatctagaaaatattctccccattcatctaatgtattttaaacttattttttttggaagagggttcaatgtgaatttggtatgacctgaaaattgcttcccgtgattctttgatgcttgtcatacagttgagatacattatgaaactacagaaagagactaaccacttctgattatgctgtaggagtgttgtatatgcctctgttcatatgttgatggaacagaactgtatcgccttcc

SEQ ID NO: 35700 - DNA, 805 bp, Medicago truncatula
  Intron number 1 from transcript Medtr8g034430.1 (locus Med tr8g034430) derived from phytozome v7.0 (chr-ID MtChr8; po s 7452742 to 7453546)
cttccggaccttgtaggattgggctttggtttgggcttgtttctttttacgtttttttgttaatttcttgctatttgcaccgcctttcttgctatctgaacctgctacttgcttacctttttttttataaaaattcctgaaaaatcctagttgtttcttggtatatttttggcatttttatggtgttttcttgcatgtaaaaaatgttaaaatggcatgaactaatttccatgtgtttttacacttttgatgtactttttgctatgtttttgttcttgatactttgatatgtgttatgaataaatgatgccatatcttatgatgaatatgcctctgaacatgtgtttcttttgctgttttgaatatgattttatggatttcttgttttacaagcaacaagtgtttgttttagggaataaagtgtcaaatttctctatgaatttggtgtgataccttgcttgcatatgtttccattaatttcatgtcatggcttgaaacaaaatttctttcaaaattgccatgatgtgatgattatgggttacaagcacctttaggtatcacatcaaagtttttaggtttattgccactttattaccttttctttgccatttttatgcatttccttttgaatatttcctattattttgtgctttatggttactaaccatttcatctcatgtttcatgcatctcatttagcattccctccactttttagcctagcatttgttttttttgcaagttttaattcatttggtaatgtaatttgttatcattggtttgtagcttggcaaaggggccataga

SEQ ID NO: 35701 - DNA, 496 bp, Medicago truncatula
  Intron number 2 from transcript Medtr8g015300.2 (locus Med tr8g015300) derived from phytozome v7.0 (chr-ID MtChr8; po s 2659001 to 2659496 reverse strand)
ctatccttcctcttctggtacgttccggaccttgtttgaagcctaaaatttggtattttgatgtttatacttggattatattgtatcttccattaagttcaaacaaggacttattagccttaccgaaaatgaaaagataatttagtagtataatattataaatctaagtgttctatttgcatgaattacgatagttattcacacgcaaggggcagtgggcacaaattattaacattagttttgatgtttatttgtagaattactgtatataatggagaatcaattacattttaaagtagtagttgtatgaggtctttgtcaaggtagcccgaaatgcataaatgttagtttgcaaatgactcttctggtgtgagtgaggttgaagaaggcttggcatacttgaatctcttttaacagcatatcctagtggtgtgaaattcgtatagttgtatttgtgacactattcttgcaggtattcatgcttcaattttcaggc

SEQ ID NO: 35702 - DNA, 657 bp, Medicago truncatula
  Intron number 1 from transcript Medtr8g015300.2 (locus Med tr8g015300) derived from phytozome v7.0 (chr-ID MtChr8; po s 2659527 to 2660183 reverse strand)
ggaccgcttatacttacaaaacccgccattttcaggttcctatcgatttcattcttcataattgtagcatgttagtttcaattttagatgataatgaataattgaatttcaaactgaatgtttctatgttgagaaatgaggactgttttttgttgctagttttggactctgttttgttattttagtttcaccccttttgttttattgacatgcaaccggaaaaaaaattaattttacgaagaacacataatattttagtaaaactaaaagaattcttttttattcctgtaaaaagaatagttaattttgttaaaaaaaatgtaaatttaactaaatggtatgtgatttctgtgactttaatatgttccgtagaacaaaaatgagttagcgtccgtttggattgagttatttgaatctatctattgacatagcatgtgagactgtttgagagagtttatgaaaactgcttatgacatgtgtataagctattttctataaactttctaggataacttacgaaaatagtttatagcttatatgaaaatagttcgactttacgaaaattgttgttgttgtaacttgtaactgtttatttatttattttttgatattgttttgctagagcagtggaataatttgcagtgggcacttacttcg

SEQ ID NO: 35703 - DNA, 1002 bp, Medicago truncatula
  Intron number 1 from transcript Medtr7g102770.1 (locus Med tr7g102770) derived from phytozome v7.0 (chr-ID MtChr7; po s 22906618 to 22907619 reverse strand)
cccgagtatgacaactctcttttcttatttttatagttttacaaatacatgcttgtctttttatataagaagcattggttttgtgactgtttcttatttaattctcaaaaatcaagatcataaggagtaattgtgtttattaacttgtaacgaatgatcattctacattttattttaatcactttgtgtacattaagcagtgaatggctgtttaactacttttccatgatctaagcttggattaattcagaaaatgattgaaaggtctgcttataaattttggtgaattttaaaactacatagcaaggaagttctggggttcatctttacggttttctatcatttaagtagtatttcattgatttatacccctttaaattgtatgagctgaaaaacgcagtgcaccgaaggaaattgcacaacaaaagatcttgttttcataaaaccatcaacactaacttctaaagaaacttagtatccttataagagttctttgtttttatggaaattatttattattcttcaccgttacaagtgactaacagcaacatttgcaaaatctgcgatgatcttcaaatttcaccacttggatttaagccttggtatggtaaatagttaataaactatgttaaaatgacctctaatataaatttttgaagtgccacttgcaatccaagattgatattaatctggattgtccaccttaattatttcctgaccattgataccgaggaaggtggtattcttgtttgcaactctggtagtcataatgtcatatcatttttattcatctggcttactaattttttggtattgtttaattatctaatcattgtccacagtagtctcattgttttgcattgattcattcaaatatttagaccagaaaattttcattatttcatagtgcttatataccgaagggaagttataatttaggagaaactagctattgctttatccctttagtctattaatggtgaaacttattttattttcagg

SEQ ID NO: 35704 - DNA, 583 bp, Medicago truncatula
  Intron number 1 from transcript Medtr7g127580.1 (locus Med tr7g127580) derived from phytozome v7.0 (chr-ID MtChr7; po s 29938873 to 29939455)
tcggggaaaaggaaaaaaaagtcgaaatcatcgtaagttctcttctcttaatccctaacctaaccccatacgtattattattattgctagggtttatatatatcttaccactctcaattttgttcaacaaattaattggttgcactgacttcaattttttggtttaataatggttgtgcttactgttaagtgataatgtttgataaatgtatgattcctgtctccaattcggttaaatttttcacgtttcatctatatttcagattggttacaccatgaccagctttattgtgaattaactcaaacatttttaagttgatgattgtggagtttacatgtacattcgttcaatgtcaagcccactgttactgttctgtttacttttaaatttgagagtttagattgataaacatatttggtgggatggatttttatagttaaaaagttttgacttttttaatcttcccttcctgctagctaacttcatttcttcaattttacaactttattcttgcacatgtatatctaatacttattttattaagtagaatcaaagacaatagaagagctgctgtaaaaagtg

SEQ ID NO: 35705 - DNA, 713 bp, Medicago truncatula
  Intron number 1 from transcript Medtr8g106900.1 (locus Med tr8g106900) derived from phytozome v7.0 (chr-ID MtChr8; po s 24114089 to 24114801)
ggttcctttcctttctctccaatcgcttcccaggtactctctttctctcaattctcataaatattctgtggctctgaatttcgattttgatcatttcatttcgttttgtgcttgctaattttcaatcatttaatcgatcttcatatcttcgtgtttaactcaattagttttaatcatgtttagtttattttatcgattctgtatttgataattcgtgaattggtgattatttttttgttttgcttaaatcgttctacgaactatgatgattctgttgttgtttgaaatgagtatttcgcttctgaactttacaggtattttaatatttggtaaaaaataatttggaagattacgataagggtttgctgatattgaattattctttgaaattgtgtttgaattgaatccttttattagtgttatgaaatttagggtttatattatattatttgcggttgtgatttagttatcttaaatgcgcgatgtaccttggtgaatattgcacttagaagtatttaatattttgagaataataacaaaatgtagcttatttggaagattataggaagggtttgttcatattgtattattctcttgaattgcatattttattgctggctgtatggtttatacgttatttgtggttgtgatttagttgtcttaaatgccatttgtacttccagtgatcgctgcacttgagtttgaacggcaga

SEQ ID NO: 35706 - DNA, 370 bp, Medicago truncatula
  Intron number 1 from transcript Medtr7g108030.1 (locus Med tr7g108030) derived from phytozome v7.0 (chr-ID MtChr7; po s 25343929 to 25344298 reverse strand)
ttaccgattatcatcatcgtataacgaaaaacaacgttagtttctttccttttgcttttattcattcttcagtttttgcatggattactctttgatgtcaaactgtttttattttctcttttccttttaatttgtatcgatgcataagttgaaatcttatcgtgacacattttaaacaaaaccctatctcattaaattggttagtgttatatgcaacttatcatacatgaaactgttttgattatggtgttatattttgatcttataatgtcttgattttggctatgttcaagtagatatatcaattgattctatttattcttttttgctaacagataattggttaccaacagtgcctttgtgggaaaag

SEQ ID NO: 35707 - DNA, 774 bp, Medicago truncatula
  Intron number 1 from transcript Medtr7g081130.1 (locus Med tr7g081130) derived from phytozome v7.0 (chr-ID MtChr7; po s 17470855 to 17471628)
atactctgtcaataccactattagagctgatccaggtgaattactcttttttattataatattttcacaaaagaaatgtgtatttaattaactatattgtgtgtttgatttgtggaatattggaagaatcaaaactattttttgtttaacttgaccaggttttactctatttgtgaatggtttattagtcttgatttaggtttttactccttatagttgtttctatatctgtcatatatatttgagtttacggtaaatttagctaaaatcaccacgtgtcacagtaattgtggtaaaaacttctttggaatatcaaagaaattacactgccattataattttgtcaaatttattgtaattctaaacatactcacggaacaacttgtgctaattgattcatttcgcatataaaggaaaagtgataaaatatgtaactttggtgttaggccaaaaaatttatcgctctagaacattttctgcctctcaagctaaatttcagtcgttgaattaatctaactttagagagcgttgtatctctatgttagacgaatccagcaaccaattttatgctagagagagaaactgcaaaggattcagttttgtatcagattttctaaaaagtgaataaacatagttcactttgtttcaaactcaatttaaaaaaaaaatcaacttttcaaaatcatcatttaattcaaaatcattttatatacactagtccaacaaatgcttataatttccctgttttctttacattaacagaacgtaagaggg

SEQ ID NO: 35708 - DNA, 449 bp, Medicago truncatula
  Intron number 1 from transcript Medtr7g132810.1 (locus Med tr7g132810) derived from phytozome v7.0 (chr-ID MtChr7; po s 30870547 to 30870995 reverse strand)
cttctttgtgggaggctattggacgggtgagattttattttctcttcaactaacttgtacgaaccatttgcacaaagtacacttcttatttattattattataattagaatgatgcacaacttaattaatactatagagaaattggaaaatcaacatcttactttgatagttaaaaaaaaatgtaccaaaattcttgattttttttattaaggtaccctagaagcttcctacttacaaagtgttatttggtggttaagttgagtgaatctaatttttcaatggacaatattaaaagaaaataaacaatataaaatgtgtcatagtctttttctgttatattataatatatccagactaaagtagtacttgacttttgcttttatattttttgtcaagatctattttttctttttgtttttactgatattctgttcagttgataagatag

SEQ ID NO: 35709 - DNA, 929 bp, Medicago truncatula
  Intron number 3 from transcript Medtr7g139390.1 (locus Med tr7g139390) derived from phytozome v7.0 (chr-ID MtChr7; po s 33341838 to 33342766)
caggtattttctaagtgctttttcgtttttctttttaatcttcattagcttctagatgcattttaccactctttcaatcatattaataactgatccaattttgatatttgatctgtactatgtgtgtgtaagaatgtgctttcacttctccatcattgtgctagtcatcgtgaaattaattttctcaatgggggtaatagttgctatgcctgaggtttttagttgaatgaattgttagagataacaacatgtgtcatgtttggataaacgatttcattaagcacttacttctataaaaaaagataaaataaagtcaaattgttttcatataagccataaaccgttttcataagctatcttggagtgcttatgagaaataagctaaaaaacaactcgtggacatgtcataagttgttcccataatttctcccaaatagtcttacaagaccttatggtagtcgataagttcaaataagccaattcaaacaggtccatggtagaggagatgacctcaaagggacttgggttttagttttactgatgttggagatactcgacaggatttgaattattgttgtaccaagtaacacgcaactgagtctagcttgcactttatgaacttgtttattcttttattattaatcatcatatttacttgatatgcacgggccatattatcttgttaagttctttgtgtgattgtctgatggaatttagaaagatgtgactggaagaaggaactgtgagggaaacatgggttgtttatgcttactatttacaacactgccttttgtgcttctagaaattttatggtttaagttatgatgtttaattagtttcctttgttatcattctgacatgtttatgttgaaccgtgtgactcattttatgcagattcattttcaaaacctgcatctggttcttctgat

SEQ ID NO: 35710 - DNA, 822 bp, Medicago truncatula
  Intron number 1 from transcript Medtr7g105740.1 (locus Med tr7g105740) derived from phytozome v7.0 (chr-ID MtChr7; po s 24303627 to 24304448 reverse strand)
acgaggaggcatccgaacattacctttcatccttggtcagtcctcacaataataaactcttaatttccattaattattgtttatacttctgcttatattataaacttagttgctaccagtagcttttaacttctgcatattcattttctccccttccttgttgtccaaccaagtccaacgatcttgtgttagctgttcaatcagtttgtttgctgaaattggatatgtcaatgagattgaagagtgctagcaaacacacactaattacttgtttggtttcgcagtgaagacaatatcacatgtcttttgacgttatttttgaaaaagcacgtcatgaacattattttttttttttttcagaagctagtaacaatagagtttgaaaaaacgtaaatcatagacgtgactttgcgtttttccaaacactcacgaaatcatgtgtttatatatgatgggatcaagataaattttaaaccaataaaaattaatgtgttgaatgtgtgtttaaaagtgcgttgatttcaaatgtcaattaaaataatttttgagtcaaaaacatttctaaaagttgtcctaaaaggaattaatttgactgatatacgtatttgatatttttgaggactaataagttaatatttttatttctcagagaccaattatatgtccgtgtatttttattctcaaggatcattttgtacttttacgctaatcttaatttaattaaaaaactcgtatgagttagttagtatgttgctgtctagttgcatagtattctgtataaactaataaacttattttggatgattatatgaaatgcagcaa

SEQ ID NO: 35711 - DNA, 269 bp, Medicago truncatula
  Intron number 2 from transcript Medtr8g089150.1 (locus Med tr8g089150) derived from phytozome v7.0 (chr-ID MtChr8; po s 19081694 to 19081962)
tgaatcattcttaagtgttgaggaatttagaagtcagcctcaaaaattatatacagcaagctttactcttacttatactcctcagaactctcacaaaatttacatttttttgtttttagccactagaaattacatcgactaaaactaaaattcgagataattaaagagactaaaaatatatataacccttcaatttaatgtacttaattactggtttttctttgttcttggcagaagttaggcttctttcagcagtaaagcacaagaat

SEQ ID NO: 35712 - DNA, 544 bp, Medicago truncatula
  Intron number 1 from transcript Medtr8g129850.1 (locus Med tr8g129850) derived from phytozome v7.0 (chr-ID MtChr8; po s 30822758 to 30823301)
tcaggtggacttggcttgacccttcattcttccaggtgatattttgcttaatcaataacaataatactaagtacatgtttggattcacagtgagttagacagaaccaaagttatttgtgtatccaaacatgcactaaccttttagtaacataacatgtgttcttaattttgtttgatttaagatataaaaggtttcataatgacatattaaatgcaaccaaaaaagaaaggtaaacataagtacataaaactaaaagtgttgtctagttctgatggtgtttttgaaaggtgattaatttgttgaggattatgtacggttactgagctatggcagaacacatgctaaaagcattgttggttggtagtaaggcaaatatatgaagaagagtctttcttttctgcttcactttagtttgtcagtatagtaacagaaaagcattttctgagtagtatgtatgtttaaaactcaacagtgcctatttatttgcttaattctagatgttaatttcttttgtacttaatttgcagtgtccttgattccaag

SEQ ID NO: 35713 - DNA, 1027 bp, Medicago truncatula
  Intron number 1 from transcript Medtr8g012650.1 (locus Med tr8g012650) derived from phytozome v7.0 (chr-ID MtChr8; po s 2184583 to 2185609 reverse strand)
ttggatcaccagtaacattacttgaagtaattaaggtttgaatacgtaaatgaaattcaaataccaatttcttgcaatttaccagacgcctaatataataaagctctaaatgaagttgactgaattttgcattggagtgttattgaaagtaggcacgattccagtcccacaacatccaagagcttttgcaacaatcaaacaatatgtgatcaattcatgtcatgtgaaattgtggtatgttaccaccaggggcggagccatgttggctcttgtgcaagcaagtgcccccactaattttgaaattttcatatccatcctatataatactacatcatagatttccagcaccagcacatacatatacacagtattataaatatgatgatatagtatgataactagattgtatattataaataatacatgcacctcttctctatgtgttgtttctttttttttagcttcatttttcggtaacattacttctaggtgctgctaatttacacccacctaaatcactaaggtgtaaattagcaagctacacccacctaaaaatactaaggtgtaagttagcaacctacacccacttgattatatacactcatttttataaattttatcaaattgtttacaaccaccttactaatttacactatcactttcatctcattctaaatattgtttccttaaaagtttgtctctattacatgttttataccttaagcatgtcatgtttttttgtttctttttttaaggatcttacttaagatagttaagaaattgcccttctatttaaatttaattagaatagaaacaaaaaggtgttttagtaaaatataagtgtgtgtaatttacatgttagtgtatttaggtgggtgtaaattagcagttcccaatattatatgatttatttattatttgaaataataataacaattataatacttctttctttctaaaagaaaatgttctggtcaatatatttttgtaacacttattttattccatttttattttagaaatttat

SEQ ID NO: 35714 - DNA, 541 bp, Medicago truncatula
  Intron number 1 from transcript Medtr8g068360.1 (locus Med tr8g068360) derived from phytozome v7.0 (chr-ID MtChr8; po s 13093148 to 13093688)
aggtactatctccaatctctgcatctgtaaatctcttagctcattctttctttttctaatcttattatgctcttctgattttatcacataagcttgtaatcgcgttttctgttttcatcgattcaagtttatttttttccttatcttttcaattgatttggtatctttaccgatttgttacttaccctttgaatttaattttttttttccctgataaaaaagacttttttactaaattaagacaaaacgttgaaagtaaatgttagtggcatcttgaaattgataattaaatcatgcctctatagtaattgatgtagattgtgatggcaattatcaactttgatctgtaatttgttttttagggtttaattgtgcttttttgtatatgattatttggtttgttcatctccaattagatgtagttttgttattgtagctgttttaaaatggatgtgttggttttgatttatatgcttattggtttatcgttgtactgtatgatgcagtcgccatcctgaggttaagtgggcacagagagaag

SEQ ID NO: 35715 - DNA, 605 bp, Medicago truncatula
  Intron number 1 from transcript Medtr8g102750.1 (locus Med tr8g102750) derived from phytozome v7.0 (chr-ID MtChr8; po s 22699061 to 22699665)
ggtatttattgttttaaaattttaactagcttgtttgatgtacttgataacttttattttattcttccttcaaaaaaacttttgttttattatatttctaattaagtatttatctttatattagtaaaattatacaattgatcccttaatatttttttgtgttaaattggtcctttaatttaatttaggtaaaatttacgttctatatttttttcttgatttactcttttacgttataaaatataacaatttattatcatttcttttaaacaaaaaactcatcaaaataataaacaaactcaaatattcatcctacaaacttagaaacctaaattacattgaaaaaaatcccagaaaaatgatacgatattgacctctcacgacacaaatgattaaatcaagggaaaaaaatgaaaaacaaaagttttgctttaaattaagttaagagacaaattgtataatttttcccttagtattttatatttgagcaaaaaatttgttcaaattgtaaatttattaattattgaatagtttatgataatgaatgagcttacaacacgaaagttgcagctaaaaacttaactgcacagttaaagatattcttc

SEQ ID NO: 35716 - DNA, 971 bp, Medicago truncatula
  Intron number 1 from transcript Medtr7g093580.1 (locus Med tr7g093580) derived from phytozome v7.0 (chr-ID MtChr7; po s 21033892 to 21034862 reverse strand)
cagttcaccattgcccttatcctcaagtatgtaaatattatcactttctcaaactcctatatatttttgtttctacaactaagctgtaatattgcaacttatcccctaatgtgttaggaaattgcttaatgtatagtgaaaggtatcatcctgaaagtttctttattttgttcttacatattgacacccatgttttcatggctttcgcgaatcttttgtatagcgagatatagcactgctcaatggcttaagcgtagagttaagtagtaattagactttttttttggtccttatgatcgggagcaattgctcgatcacaacatcaaataaaattgatttggacacacatatataaaaatgagtcatactagctctggttttgataataagcacaaataactaactcctcacttattagaaaatatagtcaagtgaaatagttgtgctaatctcataaaaagtaagtgtattttcaacgtattcttatgtgagcttgttctagataaattggaagagtcatcgaaaataaaacttatattgattgagtgtcactttagaaatgacaataacatagattcaaagtatatgtttcaacaggttgtgcattgtccaaagactagagtttttcttctctgttagaggaacaaagtagttatatgtttctatagattgtgcatttgtccaaagcctgcggtctttcttttctgttttccctatcaaaatcaacatgaatttgttgttcaacattgcttttaccccaaaaacatccaaaatttgctcttcatcaaagcctacaatagtggcatgtataagatttttggaggctatttgtcttctttgctgctaaaaaatgcaaagcaatgagagaataaatgtgcatttctctactaaacaatgaatgtataagttctatctaatttgatttttgaaatgtagggtcaaaacgggacaggaggttaattgtgattggt

SEQ ID NO: 35717 - DNA, 751 bp, Medicago truncatula
  Intron number 1 from transcript Medtr7g121340.1 (locus Med tr7g121340) derived from phytozome v7.0 (chr-ID MtChr7; po s 28547519 to 28548269)
tttggcgtcatccacgttgcagatccagagacgttattccggagatttaaatatagtcatatgtgtagacaattgtactttgccgttttatgctattaacatggatgttgtgagcatgttcacatattcatccttttttttagcgaatttgcattatatcgatgtactctatcaatttggatgaatgaatatcttttattttgtaaaaaaaaaaaaaaaaaaaaaaatttagtgtatgtggtggtggatagggaaaaaacatttagtgtctttgagtttgacgaatagtctatttaaatgaacaaaactaaaaagaataaattataactaaaattaaaaataaatcaatttctaccaaaaaaaaaaattaatagactaaacataaacaaaattaaaattatctaaaacatgaaacttccttcctattcccgtagtgagacgcagtggaggtggcagattgtgattagtgcatgatttgcatcaagcaagtcgtggcaagttctgattagtggctagttttacacgtggcaataatcgagaaagagtatcgtaaaataaattccacgtgtgatataatcattggtagaaactacgtgtgatgacatgtcaacgtggaaagctacaacgtttttattttcccctttccaaatgtttcaatttttaagaatcaaataacagtgtcttcttcttcttcctacgcgaatgtgttaacatcaaaatatagaatttcgaatcattgaggaaaatctca

SEQ ID NO: 35718 - DNA, 755 bp, Medicago truncatula
  Intron number 3 from transcript Medtr7g089840.1 (locus Med tr7g089840) derived from phytozome v7.0 (chr-ID MtChr7; po s 19873733 to 19874487 reverse strand)
aacgtatgctaaataatactaaccttaatatttatttatgtcactctcattaaaaattttaattcttcaactgccccctgtatgggcggggcacatataatagttgtcactaattgacctaattactacccttgttggattcatagtcctatgcaacatttgaatttcaaacatgttttatcacttttaagttttaataacatgtcctaatcatttctgatcttgacattagcttacataaatgttttcttttttcttcaacattgttacctttactaaaaggatatagatttatgtagacttctttaaaaaacttattcaatcccatttgaaccatttctagattagatcaatcaagattcaaccgagttaaacccgttaaaatgtgaccgtctcataagagaaaaaccaattatagtactcaaacacctgattaattgtgtttgaattgattgaaccaatttaatccgaactaccccaatcaaaatatgatatagagatcatgctgatttgacctcttctccagttttaaaagactgaaaaagtgtcggttttaacaatgcattccatacattgaaaggaaaatttaatgttgagtcaatgacatagtagtacataacactttatcgttttctcggttctttcatcacgttgaataaatgtagttaataattaattaatttatttatatatgtgactgtgaaatatgaatgtatgcagggccattcaactttgaggctgcaaaatcaaaaggg

SEQ ID NO: 35719 - DNA, 749 bp, Medicago truncatula
  Intron number 3 from transcript Medtr7g084230.1 (locus Med tr7g084230) derived from phytozome v7.0 (chr-ID MtChr7; po s 18160438 to 18161186 reverse strand)
gtaaacagacaggtatggtttaaatcaaacttgtaaatctatgttttctagtaaacattgtcaatatacgtgtgtgtgtgtgtgtgttgaatacatattgtatggctattttaatacgttcatgtattgcttttaaatggtaagagaccaaattgctctagattttgaatgggcgaacttcttttttccttatacttcaatcatttttctctgttttttcttttcaattttttgaagaaactgtattatttatgtattggtttatttatttttgtttaattttgatttcatttcttattttatttttttaatgtgttcgagatacggtgacaaatagtgttacctagaactaaaagtctaacttaatgagtttcttttcaagttattataatgagactcatcaaatagaaggttattttttcctttctttattttttaattgtttaattttccttaatatcttaatatttattactgagagtctgagacaacattgggttcatagttcttacattcctctatgtttataattatcatttgcatttataactttgatttagtcaatgctaaacttggtaaaacactacagatacatcaaaactcttttccattccttgtcattggttgtctgttcggtttgatgtatttccttgcattttgttccataatagggacttgaaaatagtattttcattttttataatatatattcaggttgccacaattgcttggcttgaagctgattcagt

SEQ ID NO: 35720 - DNA, 905 bp, Medicago truncatula
  Intron number 1 from transcript Medtr7g084720.1 (locus Med tr7g084720) derived from phytozome v7.0 (chr-ID MtChr7; po s 18345138 to 18346042)
gttaccgtaacacctacatcagccagtttgatcctgtaagtttatcttcaatttcttcatctattctctatttttatttttctaaacaaatgacaagatttgggtacatatttgtctaccaaatgagattttgtgtgggtacatgaaattaaggttgtaaccttctgttcatatagaggagccaatttctcacatacaaatgaaaatcaaccaaaagggtagtaaactattttttgaataaaatctaagtttaaggggataatgaggtaggttttttctttctttcttttttctgagctttataaacaaataaaaatatagatattgagagtgtttctttgttagtattgaatagtctatcgttgatttaataaattgaatgtcgctataacattttatcatctaagctacacatacgagaaaaaataatgttaagagagttttatcttttttaacgagtgcgtttgatttgatttagattagtcaagttcatttgaggtttcacacttgataaagtgttttgtctaaattctaaatcattttaatgataacgttttactcgcttcattttttttccaaagcttttgttcttctttatttggtttttcaaaattttaactagtattaatgattattttgtcaaaagcatctaattgcttattgtagagaaaaaaatatttaaaataagataataaataattaagtatttataggaaaaagagtaagaatttcataataaacaacaaaaattattagttttcgataatcatttttaagtttgtctttttaactaatgtccttggacactatttaacatttctctaacgttaattagatagcaaagtcattttacatcttttctttgatcagttcaaaacaaaaagcacttcaccttccaaaattac

SEQ ID NO: 35721 - DNA, 598 bp, Medicago truncatula
  Intron number 1 from transcript Medtr7g124010.1 (locus Med tr7g124010) derived from phytozome v7.0 (chr-ID MtChr7; po s 29033079 to 29033676 reverse strand)
actggtcagtaatttattctatcattctaatgtcttttctctgcttttatatatcttctcattttcactctttctgttgcaattggaaaaataaataataaatcatcaattttaggattataatgttatgatgttgctgagcccaattactgagaatatactttgattgttatgttaatgttgtattaatcagaaaattttaaaatcattattgtacaaacaatgttgtcaaatggcggctatagcagtattatagtatatcagaatttgaacaaattgttatttagtacaaagttttgtcaaatagcggctatattgttgcgtagtagaatttgaattaattgccattgtcatgcgatacactatttgagcattctgttattttcgcgttgtctccctgttggagtttggactctgcggaaaagaaactatactttaggtttagtattgcaatattgctattgttatttcttttgtaaatgttagttgctattactcgtacctacctctcccataaaaggagggaaccatccttttcttcctaacttttatttatttcataggtactactgcttcttagtgccattgactctcccta

SEQ ID NO: 35722 - DNA, 317 bp, Medicago truncatula
  Intron number 1 from transcript Medtr8g011450.1 (locus Med tr8g011450) derived from phytozome v7.0 (chr-ID MtChr8; po s 1522236 to 1522552 reverse strand)
gaaaaagtgagtgagtttattaaacaaacgttatgattggttggtttttgtttattttgtattattttaaattgatttaaatcatttaatttattgaatttatacggacacacatcacacaatgggatttgattcaatacaagaagaaagctgctgctcctactgctgatgaatatgatggtaatactattctcaaatacaattaattagatgaaggtttttattttcttgtgccattcaatttattgaattgattgatattgttaccattcatttggccagctagatatatcattccactcagcaaatacaagaag

SEQ ID NO: 35723 - DNA, 292 bp, Medicago truncatula
  Intron number 2 from transcript Medtr7g087490.1 (locus Med tr7g087490) derived from phytozome v7.0 (chr-ID MtChr7; po s 18777868 to 18778159 reverse strand)
tcagttattaaacccgaggtatgatacctcacttcttccacattactttttgaattcttgaataagttcaatgttgtctcttttatagcattcaaagctaaaccaaattggttttttttttaatcattgttgtatgtattgtggggtgaaacagaaaccctaggaaaatttatttaattcttttctctttgcctgcattatccggaaaatcaaaactataacacttgaaccgaattaaacagctctactaaagaaccaataccttgctttgctaattaattttcattttcag

SEQ ID NO: 35724 - DNA, 1004 bp, Medicago truncatula
  Intron number 1 from transcript Medtr7g087490.1 (locus Med tr7g087490) derived from phytozome v7.0 (chr-ID MtChr7; po s 18778447 to 18779450 reverse strand)
caattccctctttctctctctctccgtcttctcaggtacttcaccctcaaccccttttcctctctctctagaaatgtatttaacgtttggattggtttgctccattttaatgtttaccctttttttgcaatacctatgctgttttcacctagcctcgttgtatagaatcgtgggttgtcttcaaaatgtgtttttttaatgttcttttgttgttgtttttgaattttgtttttgttttgcttgctagaaatgatgatgttagcaaaaatggtgggtgctaatagtttttttgtttgtttttgtaataggaatgattaaacttaacttattatttactctacaatgtgtgtttaatagaggggattagtgttattggaatgcttaaggccgtttggattggcttatttttgagtttatggaaaacaacttatgcaaataaataatctttgatgtattattcataagcttgtaaaggtagtttatgaaaaacaacttatgaagatacaattttcgttagctagaatttatgaattaacataaaagcttatttatttgcataaactatttttcataagctcaaaaataagtcaatccaaacagtagtttgttccttattagataactgctgttttgtctgtaagacctagttcaactgaaaagctgatattgctaggctggataccttcatccaggttccaacccgatacttcacattgtgtttgagtttcagatattgcttgccacgtcgtctacataacagacaaaaaaaaagataactaggatccttatattatttttatttcaaggagcctagtggagaaactcacatgcacttagttatgaaaagtggggaattgtgggttatagccatgccccaacatattaaatgtcactgtacccttttaccatctgaattgtacttagggggcgcttgcatccttactgaatttgcaaacatagtgacttttttatttgtgactatgcagcttccacttaaaatttgg

SEQ ID NO: 35725 - DNA, 749 bp, Medicago truncatula
  Intron number 1 from transcript Medtr7g089560.1 (locus Med tr7g089560) derived from phytozome v7.0 (chr-ID MtChr7; po s 19736650 to 19737398)
caataagtctcttcctatctcttttacgtgctaatcacaacattaattatttgcattacttcccttaattttatttagctagtaaaataaatataataagagaaacacaaacacgtttaattatcgatcggttcacacgtttaattgtggatttgaatttagtgcagtcgataaagggctttgattctctctcccacggtacatcggtgcaacaaaaaatttcttgtgtgaaaaagttttgccatgtggtggtatgctaccctagatttctagataaaaataagttgttgcatcattgaattgtgagagaagatccgagtccgtttataaacaacaccattagaacggtcaatatgtagatttcactttccgtcattggataaagtttattgatattactagaatgtatttttaaatttgatttggtgaagtcaaaatatgaacgatgtattttcatccaatggtcaaatttgttgtatgcatcaataatgtagttcttccattctttgtgatatacatattgtcttcccttaaacaagtataggtcatgagaaaatatatcaaaagaatgtcgtgggaaaatagttggcatttgatattaatttttccctaatttcttaggttatatatattactagttaatcacgatatatttaaatttatttatatgtttgtctatgatctgttactaattatgtgatatgataagattagaaggatctaaaggagtcgaggattcggagattttg

SEQ ID NO: 35726 - DNA, 715 bp, Medicago truncatula
  Intron number 1 from transcript Medtr8g119850.1 (locus Med tr8g119850) derived from phytozome v7.0 (chr-ID MtChr8; po s 27282726 to 27283440)
acgatcgtattagaaggtaacaatattccaagttcactttaatgtgtaacggtttttttagttgtatttataaacggctgctgctagttaatttgtctcgatgttcatttatttatggcttttctttattgtaccaaagatagtagcaggaatttgtttgtttaggtgtttaggaacatgttgaatattttagttatatagagctgcttaactgttatagtcttgcgttacttataagttgaatgtcttaccaactgtgaagctcccagcattgcgagctatcaacgttggcggatgtgtaagaataattgtcgacattcatttataacacgacaaaaaaaattaaagggaaaccaaaacattatactatgtatagattaagataaacagtatccgacggatgatatgagttatcagcttgacataatgtttaccatgtatacattaagataaacagtatccgacggatgttttgaagtgaatcggtggatatatgtaccttccctctttcctattatataagtacccggtttggtgaagtataagatgagtgtttccgtacctgtttgacgatatcaaaatttgaaataatgaaggaatcttctaatttattgttgtcgtgatgcttagagatctaatgcttgactttatatcaatatcggagttttcataatcttctccttagttctattgcagactgcctctatatcttggg

SEQ ID NO: 35727 - DNA, 723 bp, Medicago truncatula
  Intron number 2 from transcript Medtr8g016200.1 (locus Med tr8g016200) derived from phytozome v7.0 (chr-ID MtChr8; po s 3097120 to 3097842 reverse strand)
agtttctagagtgcttggtggtggtcttgtaccaggtttaatccattttcttatctatattaatatgccagaaaccaaattcattgaggttggtttttttgctttttgtttctctgtgtatgattgattttgcaacccaaaatgatcagattcatgatgcagtgtaggggcctaagtctaacaacagtctcttgattataaacaatagaagaaccacataccactcttatctatttccatcaaatgtggttcttctattgtttatacaaatttttttgctcgaacgtgtttgatttgtatattatttctggtgcttttagtgatgggtacattatttcttgtgctttttttcccatgatcctaatattttaaagatttaattcatatacactgtcagtataaaaatttatacattgtcgatcaatcgtaattgtcatatcctgaaagacattgacttcaatcatgactactttttaagtcccacacatgatttggttgtgatttgttgaccatgtaaaactttttacactgacgatatatcaaaatttaaactcgttttaatgctcatataaataaatgcttccatgtacacattatcacgtctttcttaattgcagttcactaatacacgcactacaaagcgtattgagtgttaatggtaactttatttataattttgggtttgaaggttcattgactttagttggcggggatcctggtgtt

SEQ ID NO: 35728 - DNA, 934 bp, Medicago truncatula
  Intron number 2 from transcript Medtr7g103340.1 (locus Med tr7g103340) derived from phytozome v7.0 (chr-ID MtChr7; po s 23153096 to 23154029)
acgaagaggtgactaacaagtataatgttttatgtgttagtggtttatcaaaatatgcttatgcttttagagatgcaaatgactgttacattgtttttggctaacctattttcagattttgaacatcgtctttttggtagatgtgcaaatagaagctaattatttttcgttcattacaagtcttttttttttttttttttaatattttgattctgattttttggtttggtggggtagtgtttttttagtatgtaatatgttgtcaataagtcctgaatcagattttaaattctagtccatgcaaagcatataatattcaaagtagtctatgtggaatggataacttgcagggggactacttgaataacttataatggataacttgcatttcactatgaggctgtacaaaactgtatataaagagagaatctctttgagaaagaaaaaaataggaaagtataaccaatgataataaatagtgagaatgatcatcattatgactacaatcaaattgtgttctttatctagttctatctcccatttctcatgggccatgagtcatggccatcatatttttcttccctttcttgctatctggtgcttaaaatttagggattgagatttgaatccaacatccaacaaaaatgaacttcatcctcaattatgccaaagtggtttggttgattattacaaatggttgttttttctagaagttaatataaatttgattcaagattttgggattctattgttcttgaagcttaatgcttctcatgtccaaatttacttttgtttgttgctagacatttgaaattttttcattttgatgttgctttgaattacacaaaagaatgcatatttgtgtctgcgctattgtattaccgtcatgcataacacactaactattcttgatgttaaaatgctacttaggttg

SEQ ID NO: 35729 - DNA, 499 bp, Medicago truncatula
  Intron number 1 from transcript Medtr7g092900.1 (locus Med tr7g092900) derived from phytozome v7.0 (chr-ID MtChr7; po s 20563495 to 20563993)
tttaatcctagcaattcaactacatctctctactggtaagccttttttatttttattttttattttatatcatttgtacaagtactttatccaagaaacttgcactaaatcctcaaattattcacttcacttaagtgaatgttttagtagtcgttgggagacttcctatacatacaaacattttattttgactaaactattatattttattttttctttcaacgagaaatgctgtttatagcgacaacatactttaagaaattatttcgacttgtttttcctttttatttttgttactattgcaattagccttttgtgaggatttcgtgggaaattttctcgtgatgtttagcatcactcttcgttcaacaatcttattcatttagcttctcaattgcattgatacaatctttatatccttgttcatatgattgactaataatccattttttttggtttgttttgaattatacaggcattggtgtcaactttgggagga

SEQ ID NO: 35730 - DNA, 335 bp, Medicago truncatula
  Intron number 3 from transcript Medtr7g092410.1 (locus Med tr7g092410) derived from phytozome v7.0 (chr-ID MtChr7; po s 20331742 to 20332076)
agcttgagcccaacgttgtctgtgcttttcttaaggtaccgtcttctctatctgttggtgtgtattggtttttctgtatctatgttacacacatgtataaataaaatataggtggactaaaacagcagacaaattcacaatgcttacagataggtttggatcttatgatgacacctcacatttgattacctaatgattgctttaagttggttactactaataactaagcccacttgcttcttattagggtaatgtttgttgataattggatgacatgagaacttatattaacttttcatttgttttaattcagtacaaaatttatctccaaaaga

SEQ ID NO: 35731 - DNA, 627 bp, Medicago truncatula
  Intron number 1 from transcript Medtr7g089070.1 (locus Med tr7g089070) derived from phytozome v7.0 (chr-ID MtChr7; po s 19493291 to 19493917)
acgaaaagttcctgcaaaattggttgctgcctcaggtatatttgtctactctaaaccctcttcaagaacaactttaaaaaagtataggttttagtgaaatagtggattttacattttagcatagctagttaggtttgaaattatgggttttagttcaaagaagaaaaataggaagaaatataattatagtgaaatttactcaatactaacttgatacaaagactaaactctaacatctatttacagaaatacatagaatcaatcctagataaataggaaaatcagaaaataaataatcataataatgagtaatatgtaaattaatcctaagagataatctaaaatacgctaagattatacactgatcctaagaaataatctaacatgctctaatataatatcaaatatattataagctgtgttttcttatatttctaattgttagtaaggatacaggtaggtagataaggctagaatgtttaaaagtaatgccttagctatgcagacatcttgcaaggcttttagtggaataaacatagtacttttctgtttgctattgaatataaggatgtttcttgctagtcacggcaaccaactgaatttgaaaaaataactgtatttgcaggt

SEQ ID NO: 35732 - DNA, 478 bp, Medicago truncatula
  Intron number 1 from transcript Medtr7g138030.1 (locus Med tr7g138030) derived from phytozome v7.0 (chr-ID MtChr7; po s 32664970 to 32665447 reverse strand)
tttcaaatttgcttccaggaaagccgaagaagcttgtatatatcctttttctcttcttcttcttcttcttttatttttccttcaagatttttatttttattttcattatatttatgatcatttatgtgattaattcaactttttgtgaaatttatatttttattgggatttctctaaggctttctttgaataaacaacttaattatatttatgcttttattgcatattaaatgtttatatcatataagtgcttatgtaaaagctatttctataacaaaatataaaataaagtcgaaaccttttcatatgattcataatattttcataggctatctcacaagtaattatattagtagataagttcaaataagccaattcaaagagatcctaaatcaaatggttcgcaccatgcagcggccttagaagaccttaaaataactgagatagaatctgtctcttattgcagctctgagaaggt

SEQ ID NO: 35733 - DNA, 771 bp, Medicago truncatula
  Intron number 1 from transcript Medtr7g107530.1 (locus Med tr7g107530) derived from phytozome v7.0 (chr-ID MtChr7; po s 25164651 to 25165421 reverse strand)
gtgaagaaggttaaacaattgatttcatgggtaaacttatttgtttcatgaggagattagaggaagaaacacaaaggaattgaattgattgcttccgaaaattttgtttaaattgttgtaacctgcgatggaagcactttgtagtcatttccatgtgtcattaggaaacatctaatgtcagaaaagcaattttcttcaactacatgccataccaagaggtggactggtgggcaagcccgtctaacatttttttccaaaactttttttggataaatgttattaaaaaaatatgctagcaatataaaaagttatttttattttcttataatcattttatcctcattataattccatctaaagagaaaaacaattgtctaacaaagaattatccaattgtttttggggaaaacctaaaaattagtcatttagtccttttaaaaaaataggtcatttattatttattagtgtaataaaaattaaataaatattttttaacaaacccgttggccatcccttcatgacttatttttcagcaggctaaacgggagagaccaactacataaagtgagttcaaaaccttatcttaacctacttaaaataacgggttaagcgagtcgattcagacccgatttaccatgataccatccctaattttaatagacaaactaaatttgattgtttttttaatttaaaaaattcaagttctattttacaattttaaggattaaattgacagacaaccattaaaatttttaaggacttcaatctctg

SEQ ID NO: 35734 - DNA, 690 bp, Medicago truncatula
  Intron number 2 from transcript Medtr8g138550.1 (locus Med tr8g138550) derived from phytozome v7.0 (chr-ID MtChr8; po s 33543711 to 33544400 reverse strand)
aagaacaaagcagcacaaatccatcaaagcggaaggtactcactcgcacccttagctcagctttacacaaaattagtgtctgttttgtgaaatgtcggtctaacttaaggtcctatatctttcactgtatagtcattttttcttttagatacaacacatttggggaagtcttaaaataacttaaattaagaccgttattttttctataattggagttacctcaactttttcattcctaatctcgtatagaataattaacttgttttttttttctcatacaatattaaaacattttatagataattttgttattaagtatatattgtcattttattatttgttcaaaaatatttcatattaagtctgaatatcaaacttgttacttggttgattttgggtcaaaatatagatacatcaagtaaaaacgatagaaaatatattcttctaacaagaatactcacgttcgaatgtaaatagattgaacccgaacctaactaataactcgtagaatgaaaattggaaactaaaccaagattaattacatacgaatggaaagatttatagtctctcaagccttcccacacaggttactgttttgttgagatttttctaaacaaaaatggtgatcattgcacttctttacagtgagataaacacttttttgtcctataaattttatactttgcagag

SEQ ID NO: 35735 - DNA, 608 bp, Medicago truncatula
  Intron number 1 from transcript Medtr7g106150.1 (locus Med tr7g106150) derived from phytozome v7.0 (chr-ID MtChr7; po s 24471088 to 24471695)
cctgacatagactttacaactcaagcagttaccacgtccaaaacattctgattcttcatgatcttctttttcgtacatcctctcatctcttcaataaaaattaggctaaaatattgttttcatccttgtaaatatgtttatttttggttttagtttatgtaaaaaaaaattgtagaaatttttttttgcaaatttttttgttttttaaaatagtccataatcccattttttggatggtgtttcattgcagggactattttaaaaaacaaaatattttacaaggattttttcctacagaatggatacagtcatcatgtaccacatatacacaaatgcgacaaatcgtcacaaaagtagggccaaaaactaaaaaaacaaaaaaatttgcattttgtagaaatatacatgaattaaaaccaaaatatttacctaaaaattaatctaccgaaataggaccatttcgtcattcaacacaagggcatatctgtcccatcataatttctttgcttcaataacagacaaaacccaaatcaaaatttaaataatcaaatcttcaatctacaccgtccaaaggtttccatccaacgatccacatcacttctcattac

SEQ ID NO: 35736 - DNA, 549 bp, Medicago truncatula
  Intron number 1 from transcript Medtr7g084760.1 (locus Med tr7g084760) derived from phytozome v7.0 (chr-ID MtChr7; po s 18373817 to 18374365)
accgttgtttttgttgctgacttaaaaacaccaaggtatacgtttcatctaccttctcctcttcacttgttgctcatttattttttcatgtgaaacatttttctgatttttagcttttgagtacttgcatgtatatatagtcttcaaagtttcaatctttggatgaaatacgttgcttcactttaaatattgatgcatcatacagaaactagttgactcctaattatggtttttttttttttgagatgtttgaaactagttttatgttttttctttttcttaataaaactactttgtttgtcttataagtttgagtttctatgaagatttcaagttcgattctcccaggtatcaatttcgatagaatagtttgatttcttaagaaaaaacttgagtttctattttcacttctagtttaacaccctctcctccttcttttgaaaatacagaatcattgggagttcatgtattaatccttaattttcttttgaatttttttactttgtattaagatcattctccctgtattgagcagagtacaaggagtct

SEQ ID NO: 35737 - DNA, 458 bp, Medicago truncatula
  Intron number 1 from transcript Medtr7g124020.1 (locus Med tr7g124020) derived from phytozome v7.0 (chr-ID MtChr7; po s 29034278 to 29034735)
gttgtagatttctattttgcaatccttttatattcctagttctttatctatttactaaaactgttatttgatcagtaggattgcaaaatatccttttactgtgtatgtggttggttacattcaaatgttccactttctcaaattattatcactatcgacgtgtcagtttacgtaatatcaaatttgaagttttttaagatgttatttgatataagtactgcattatgaaatttcgtcttcattttatcaaaggcacattctctttcatgttctaagtaacttttgcagcaattgcattgcctatactttgctactcatattatctagtatgctaaaagtaaaccagatgtgtaatgtaaacagatatcttatgggagattctcaaggaaaaatagaggaaaatctgagattgacttgttaatcattcaaggcaaaaatctttgtcattgcgtcttaag

SEQ ID NO: 35738 - DNA, 906 bp, Medicago truncatula
  Intron number 1 from transcript Medtr8g101780.1 (locus Med tr8g101780) derived from phytozome v7.0 (chr-ID MtChr8; po s 22161163 to 22162068)
aacggttaattttgaacccacgccattttaaggtatgaatatttcttttttaatgaatgaattatattcttaacaagtggatcgattatccttggcggtaaatttacctttcagctgtttaggattatatgaaatagagtacttttaaaattttaaataatgttatgttaattatatagtttttttgaaaagagtaaatgaatgtgttaaaaatgagtgaaaaaaaaaagaattgaaacagatcacttaatagagtgaagggattcattctatgtaaaatcaaggagttaaacgattcacttatttttgactgaatcaattcactcatgtaaatttttaaagttccaaacacaaaatgtagtgaatgaattcacattttaaaaaacatgcaagtatgaattcacataaatatacttctttattttctctcgtattttttttctttctatttatctcttattaaacaacaatctcctatttttttcccgtcttctttcttactttctttcacaaaccaattatattttttaatctagtaaaggcaaaacaacaagtgaaaaaagtgatgaatagacaagtaaataaaccaatcctttaattttgttctatggtcaattatttataaaacagacattcaactaacaagtaatgcaagagtactagatccaatcatatgtttaaggctttgattgatcaagccctctaacaaaagagaacaatgtcatgattttcaaaatatttttttaaatgaagggaaagttctcattgataacagtcacgataactatcagaaatactacttgttcaaataaaaaaaacatcagaaatgctatatgaactaattccatacaaggtgtaaactatatacaagatcaagcttccatctggtgccaagaagattgtgcc

SEQ ID NO: 35739 - DNA, 824 bp, Medicago truncatula
  Intron number 1 from transcript Medtr7g105600.1 (locus Med tr7g105600) derived from phytozome v7.0 (chr-ID MtChr7; po s 24224776 to 24225599 reverse strand)
gaggaacggtaccaaggggttggaggaacggtgacaattgtggaagatgaggagatgatagcgtgcttcagttttttattattaaacaaagacttatttttttaattttaaatgtcatcctttggatgttgttttgccacatgtcttaaatccataccctaaatggactaaatggagcattgagtaaatggagcatacctggactcaagtttgaaaacgaaaaactaatttacaactctgaattctgatggtctttgtgaaagctgaaaatatatcaacatggatatgaccatgttggatttttcttaggatgcgatttgttatatctggctataaaaggtgaaacttaagttatatatactgtgcaaagattagttcagtatgtggcaaacggtggtgtgaatttatatatatagatagcctgtgactatgttttggctggaaaagtatacatccttatctgcctcatttctgttgtataagatgtgatgtaataataacaattacttttgggcttctctcactgtaatcaaagttcggagttgtgtctaagatggggtaaatactcaaatgaactgaggttgagagtctgaaggttccggtttggtggttacatacggaaataatggggcttattttcgattttggttttagttagctagtttaaatgatggtggagttttactgtttggtccctatttgctctgcagtgtgattgttggtatagagtttgcattcttttgcctttgttttttgtttacctgtttctggtgcttaatatatttcatgttgtttttgctgttatatgaatttttttattccag

SEQ ID NO: 35740 - DNA, 392 bp, Medicago truncatula; identical to SEQ ID NO: 32473
  Intron number 1 from transcript Medtr8g088080.1 (locus Med tr8g088080) derived from phytozome v7.0 (chr-ID MtChr8; po s 18570952 to 18571343 reverse strand)

SEQ ID NO: 35741 - DNA, 439 bp, Medicago truncatula
  Intron number 1 from transcript Medtr8g134150.3 (locus Med tr8g134150) derived from phytozome v7.0 (chr-ID MtChr8; po s 32195672 to 32196110 reverse strand)
ctccatacacaaactctgcaatttctaacaaacaggtatgtgtgtctttgtcatctttccaaacacagaaacttcttttgttgttgccttttttgttttctttttcttttcaccaatcaacgcgttggaaactttatcaaaagaatattaacgcgtatatgattatttataattattattctttggttgtttaagttctctcaatcactcacataaattccaaactctatctgctaaactttgctttctacacaattcttatttccagtggttagttttacttatacttctttgtttcttcatttacttttcttttcttatcgttaacatgttatgtgcctagtcctattgatatttctatatataaaagtttttttttttttatttgatttaatttaacatttcatattgtaaattgtcttcagaacataataggatc

SEQ ID NO: 35742 - DNA, 295 bp, Medicago truncatula
  Intron number 4 from transcript Medtr8g047830.1 (locus Med tr8g047830) derived from phytozome v7.0 (chr-ID MtChr8; po s 10865710 to 10866004 reverse strand)
caaccttgaattttcaggtatatttattaattttcctattcataatattagactaaaaatcttaattggtcaattaaattttaaatcaaaatagtcatatttaagaagattttcaaagttattgccatctttaagttatattttgactgatatttgaaaatttaaaaaataaataaatatcacttttagtttttgaagaactaaaagaattaaatttaataaaatgattttgtatattttttccatcaattaatttttaaaattgtggtgttcaattatgtgcagatagaaactt

SEQ ID NO: 35743 - DNA, 313 bp, Medicago truncatula
  Intron number 2 from transcript Medtr8g047830.1 (locus Med tr8g047830) derived from phytozome v7.0 (chr-ID MtChr8; po s 10866310 to 10866622 reverse strand)
ttggaacgacattcaaaagaagaagggaaaacaaggtaattttactaagttttttagtatttgattttttggtgaattttttaatatttgtttttttattggttgattatttagtatttggctatggtgattaaattaagtcatgaaaacccaatataaaaaacaaaatagagaagaaggttggagaaaaaaaatgaacgagatatattattgtttgtttattatttttaattttaattattttactagtgattattatttatttatttatttatgagtttttgaccttgttttattctttgcaatctctgtg

SEQ ID NO: 35744 - DNA, 887 bp, Medicago truncatula
  Intron number 2 from transcript Medtr8g044020.3 (locus Med tr8g044020) derived from phytozome v7.0 (chr-ID MtChr8; po s 9680566 to 9681452)
tagcttctgaaaatgctttaacctagcatgagtatgctttgcattttagcaaagtccagtggaaattgaatgctctattctgtttttgcattccaaatttcaccatatttatctttatcattggagccaaaacaaaatggttccgcacaactctataagcatgaacctgttatagtagggtaagggctactattttctttgaggtttacatatgtttttggtccctctaaatataccactttttggtattagtcccattaaaaaagaattttattttgttccgtgcaaatatactacttttttacttctggttcttgctgttttggttaagcagtttaggccctgtaaaaaaaattagttcgatccttgcaaatatactactttttacatttggtctttgttgttttggtttagtctctgtaaaatttgatcatgttgaaactagtccctgtaataagtatgtaatattcattttagtccttatgtatcctgtattggagggactaaaatcaaatagtgtacatattgcacggactaattcaaaggtgaacaaagacaacaaggatctaaagtaaaaggtgcagtatatttgcaaggattcaaaacaatattttttttttacagggattttaaagcaaaaagtggtagatttgttggcactgaaaacatatttaaacatgtatttaatgatgattgtggtatgaaaatgatcttatattttaaatattgcatacaaaaatatacttaacagagacattcaattctcactggctaccataggcatgaaattaattcaatttatatgatatgactgcgttatcttacagtcttcatatgttttacataatgcagggattcgatactagaagattttccctgtgctgaaa

SEQ ID NO: 35745 - DNA, 987 bp, Medicago truncatula
  Intron number 1 from transcript Medtr8g132840.1 (locus Med tr8g132840) derived from phytozome v7.0 (chr-ID MtChr8; po s 31476558 to 31477544 reverse strand)
cccaattcaggagaaggtgtgttctctctttctatctatttgagcttttgtcttctatttatttatttatttatttttccaatcaaacatgatcctgctcagttacttgattattttcaaggaagatgctaattatatgttgtcaaattgatttaatagttttttcatggagaaaaaaatatgcatatgttttctttgatgtgatgaaggcaataattgactaatttttcttctgaaaattgatgaagggaacttttttccatctcaattctcttgttactgatgtttactttaatttttcttaattcaccatgatttgagtaattttggttcatggtctagtcattagtctttaatcgttgtatattttttcctttcattgttctttatgtcatattttattctcttctgaattgaagtaaaagtctaatttgcttttgattaatgtccttgtgtgacttgtttacgtattattaaaaagcagcatattagtttggtttgcaatagagtgtagtaacagaaaattgtgaaaaatggtcaattgttgctgtcttagtttcattggaagaaggaaaagcattcatatgtttgtgtggtagctttctgtgagaatctgattctgatttatatgtagtcagaatttgaaaaagaaaaggattttcacctgaatttgatgaccttcttagcatattctttatggatctactgataatatgctactaataatgcaagatctgtttctctttttggcactgaagaactttgtttctttgtattttttatatttctccgtgaagttgtgtttctctgagttcttgaaactgtattttattgtgttttataaaacatggcttctatagttatgtctttattctttctgtctaatcgtacaaataaagagaaagcctatctgtatgtgtctgctcaaaggagtaacattatgtttattttgacaataggggaaaggaagaccatcaattcagaatt

SEQ ID NO: 35746 - DNA, 776 bp, Medicago truncatula
  Intron number 1 from transcript Medtr8g089350.1 (locus Med tr8g089350) derived from phytozome v7.0 (chr-ID MtChr8; po s 19183313 to 19184088 reverse strand)
tggttttgcttcctgcatctttgctgaagtttcatgtatgttgctttgcttgtaaacaatatttcacacacttctgttgacatgtgaattgaagccaatcatgtcaccatgactttcttgtgcatcgaatttaagtctctaaaattaagatacttaagcttgtaatgatagatccatttatctctacttgcagcagttgccaagcatttatgatccgtcacatcaaggcctgtcttggatgttttattccttaacatatgtgctttcagaatcaatcttccttaacatacttaagcttgcaaggttttcctcttcttcttgtggatctttcttactggaagattaggtgagaatgcaatgtaaagtttgggacagatttaggaactttcttaatgtaaagtttcattagtaagatagtttcttatcttggaatataagattaggaatggattatatgcttttgactttataaaactgcaaattccttattatgttgcatttgttttctctcctaattatgatcaagctttctattactctatcagtatagatgaaacaacacatctaatattgtatccaatgcttggcatgctaggcttatcctgtccatgcctcaaattaaattgtctctactgctttaaacctcttcaacttattgaaaatcaaattggacttaaaatttaggtttttcaaactgatagcggtaaggaatatttttctttgtccaaatttcttattaacggtggcatctctcagagtaagttatccttattctg

SEQ ID NO: 35747 - DNA, 628 bp, Medicago truncatula
  Intron number 1 from transcript Medtr8g021230.1 (locus Med tr8g021230) derived from phytozome v7.0 (chr-ID MtChr8; po s 3879105 to 3879732 reverse strand)
gcacactcaaacccacaagtaagcagtgttttatgattttgtttcagatatttatgaatcaaggttttaacaacggtcaaggtcgtggtagcgttatgtattttgtgatttcggctgttaaggatgctgcattacatattgcggtcgttgtggtgtgagttaatcacaacaatgcacaaatcttatcaaaagtatttgtgctatcctataatgtttaatgactcaatttcttattgtttcttcgtaagttcataattgtcattcctttcataattgtttcttctaaaaacattaaaacctagatttattagtggttaatttggtttttagaagaaacaaattcatcaataagttatgaaaagaatttaaattacgaaatagggtagaaacaatgggaaattaagtttttccgcggcgtgacgacattttgttggggctgtttccatgatttttgttcactttggtaaaacaggaaaaaaccgtaaggagcactgcagaaatcaaccgtttgttagaatcttgtttatgatgattagtttaattatttttttctttctttctgtggtttattcttttatttatttatgttatgctagggaagaatctatcctcatcgacaaaattgtga

SEQ ID NO: 35748 - DNA, 655 bp, Medicago truncatula
  Intron number 1 from transcript Medtr8g133600.1 (locus Med tr8g133600) derived from phytozome v7.0 (chr-ID MtChr8; po s 31919695 to 31920349)
gagctgctgctaaaggagctggtattccttttatacatgttcctctatgcatttaccatttactcatagattatagatactactatgttttgttccttaatgtgttttttctaatgttgttttcgaagcatattatttgttttgtggatactgatttattgaattgaagaatgaagaagaaatatattcttcatttctaaagcatagctattagtgtgtgtttggtttggcgttgacaattgattttgcctacaattcagttgaatgtaaaacaatttatgtaaaaaagggtttaacaataaattcaaggttaaaaatcaattttgtatagacaaaaactcacatttctagcttcaaattagaatcaattccatgttagaacattcaatccaaacatgtcaaaaccaattctacacctccaaaatcaattagtttcttttttacacgtttcctgctttagttgagatctggagagatgatgaaaatcaaacttttcttgattatatagctgactttatatgtgatatgggccctttcattatttagaatcattgatatgcaactcacagctgtaaagacataaaagctatcagataattgctcaatgtgattgttattttttttttttttttttttttttttgtagtctgccttg

SEQ ID NO: 35749 - DNA, 438 bp, Medicago truncatula
  Intron number 1 from transcript Medtr7g117910.1 (locus Med tr7g117910) derived from phytozome v7.0 (chr-ID MtChr7; po s 27647390 to 27647827)
gcgtcgttgaatttcccagttccatgtatatctgcttccttttgttttgtttgtttttgaattctgcttaaatttaatcctccgtctctgctttgtcctgcttcctttgttgttagaaaggaagcgaaacaaagcagggatgaaggataaaattcaagcagaatttagaaacaaagaaagcggaaggaagcagatatacctggaactgggaaattcaacgacgccgtggatagaagaaaggaagtagacggcagagcaggacaagtctggtcggagatcacgacggtgatgacagatttagagtgaggtgagtggctattatattgtagaagatgtggagacacgagttaattaacctagttttcgttcttcctttttttatttttgggtttttttgtgttagaccgtgtcctatttgacgagcaccgcagtgtcggg

SEQ ID NO: 35750 - DNA, 925 bp, Medicago truncatula
  Intron number 1 from transcript Medtr8g119230.1 (locus Med tr8g119230) derived from phytozome v7.0 (chr-ID MtChr8; po s 26963599 to 26964523)
gtttatccgtgtttgtctcttccctgaactaagtagtgagtcttcttccttttctcttttatgctttcattattcagatgactttcaatctttgcacaacttagagattattggtatagtttagaagcataacttgttgttctttttttattaatttcattcaattggtaattttttatgagtgaacaatatctaaacacatggtatgaaattatttgcataaattgaaccttgtttttgcgtgtattattgtggagtattttaggtctgtagtgtacttgcattagatgatatgtggaggtggtggtatgcatttatgcatgttgattcattatttgaataatagagcatatgtgatgtgaatgtttctttggaatctctgttctgatttttgtgaaggcctggtgtggagttattgcattgttacatgatttagtgttccttatatttagatatgttattgtgaaggtggttgatgactggtctttatttgtagctctagttttttatttagccgttgccttatcatctaagtgggtgagtgtttgctttgagcaaaaggtgttgttttggcagcttattctcttggaccttggagtagtgttagctttgatcatatatccattatgagacacgtttcaaatatatattaggtgattatctaatggaattgtgatgtccttgaattatatatatattggtgtttgtgatctgggcgtttttattttgtacacatttagccttatgtggtttatctttgtattatctttctctggcatatcttatatcttatatcttatgccaatttatcaataaatttatcctttgttgactgtttataaaaagaaaagaaaacaaataatgcagttttatgttaaaatctgtaacagggcttgttacggagaacaaagtcgtatctgaagat

SEQ ID NO: 35751 - DNA, 809 bp, Medicago truncatula
  Intron number 1 from transcript Medtr8g146330.1 (locus Med tr8g146330) derived from phytozome v7.0 (chr-ID MtChr8; po s 35748259 to 35749067 reverse strand)
tggctagcgaatccaaggtttatctgagtgaacttcttaatttgcttctcaatatccaatgcaatttaaactcatatttggtctagaaagaaagcatgaatatgttaactctttcaaaaaataaaaaacatgaaaatgttaacagaaaaaaaaacacacatgaatatgttgaaacattgtgaaattcttagtgcaaagttgaatgtcttatttggcttgtattttgaccatgaatttataattatatagttgcaataccatgactatatatataagcttattttgctacaaataaatataactttttgttagattgaagctggttcaatatttgtgacctatacttcaatggttggttacttgggtccactgtatcaaggcccctccattaacattttctttgctcccatttcagtgtacatgggaatagactatttatagaaccaacaactttatacttgtgcatgccattgattaagagttctttttagtgtaacaatactttttttttttctccgccaaatagcctagcggctagagaaattcaccttggggtgtcggggttcgaaccctggcctctgcataaatgatgcattatcccttattaagtgtaacaatacttctactacacgtaaaaatatatacttaattacatcaaaataaataaataaacttcaatcgaaaccaatccacttaaattcaatacagtaatatagggcttatgcatcatcatttgtaaaaagttagtttatgtaaaaccaatatgtttccatatgatgaatgtgaatatgggatagtgcagttgaaaa

SEQ ID NO: 35752 - DNA, 881 bp, Medicago truncatula
  Intron number 1 from transcript Medtr7g090080.1 (locus Med tr7g090080) derived from phytozome v7.0 (chr-ID MtChr7; po s 20000910 to 20001790)
acttagtcctcaacatgtaccgatcaatatattattatttgagcattcttatcaatctgctttgattcaacatgttcaaatgtaaactctactttcactgtaagaaagacagtatttcaaatgagcactaaattatggtagattttttcttctttttctttttatcatacgacttgttcgaagttccaactcaatgagtcgttgaattttttccctctacaaagccctaaaaaggtaattctctcaacaaaaaaaaagttgaaggattttctttagagtggattgaggtggaaaagattgtttgagtgaattggaatgtcaaaaataggtgagttgggtttgagagacttagagttgtttaacatagctcttttgggaaaatagaaatggaaactactagctgagagagaagctttaatagataagagcaaatagaaatttctctacaaaatggtcattgactatgtgtcttctgcaaattgtgaattggaaacaactaaatcatctattcttcacttgtcctataacgtattggatctggaagcattgtttagcaatctaggaaatttgaactcagttctgctttgtcatgggaaaacacatcactgttttttttattggtttgacaacaatcaagaagtataaaatgacatttggcaacttgtttagatttgcacctgtggtctatatggatacatagaaaccatatttattttaagtcctcaaatctgaatactgaggtgttagaaatgattaagcttaaagattggtcatgaataaaagctaattttgaaaatgagtcattaatggttaaacccaacttctcttgtttagcttgatatcattttctttaattgcatttcatgtaatttggcataggt

SEQ ID NO: 35753 - DNA, 973 bp, Medicago truncatula
  Intron number 3 from transcript Medtr7g117100.1 (locus Med tr7g117100) derived from phytozome v7.0 (chr-ID MtChr7; po s 27274190 to 27275162 reverse strand)
ttttaagtttaattacttacttttctcaattaattgacctttgcttgtttgtttttatttactcattatttgtcatactttgtttttggtcattatgtctgccataaaatcaccttccctacctctcaaaatgaatgtttacatttgagttgtgcgcggtttttaagaaattaattagttgtgtttgttttaatagtaaaattagtattaatcacttaaacactcttattaagcgtaatttgtggactagttaaatcgagtgaaattcaataaataaagttatatttgtgggaaaaaaataacaaatattgtattgatattctaaagtgataattattttaagactgagaaaatgtgcaaatgtgacaattatgggacggaagggatattaagaagtcgagtgctaagagtactcgctttttaacactcttctcttattggttggaacccttctgagtgggacccatttccaaagtaggggtgctacatgattttcaactaataagagaatgagttctagagggagtgttgaaaaaagggtgttgttattacttctataaaatatcattgtcaaatatgtagttgatggggccttaatcgcagtcatgcaaatataaaaaaccttggtgtgtatttggatgggcttatgaacatcttatttcagtttatctatggaagcatttgacagagattgagagtgcttggggaacacaatttatgacatgttaataagctgttagtttccggctaattttgatatgcgtttttgtttttgaatagcttatgaaaacaacttaaagcttatatgcaaacaatttgaccatatcatatggtaggtgtttaattaagttgttcatccaaatgagcactaacatgagatgattaatccctctttctcaagcacggatgttttcttttggggaatgactgatatttttttttcttcttctttttcctcgctttcttgtcgtag

SEQ ID NO: 35754 - DNA, 737 bp, Medicago truncatula
  Intron number 1 from transcript Medtr8g128190.1 (locus Med tr8g128190) derived from phytozome v7.0 (chr-ID MtChr8; po s 29893784 to 29894520 reverse strand)
tcttgaagcaaccaagttcactcgtaccaaagaatgtgagtgtgtgatttttgaataagattctcaaatggtggtggcatctctaaaagacaagcatcatggagcttttgatttttttattgtttcttatattatttatgagttagctttacatttcaacttcgaggtaaaaattattagacgataaacgaacatgactactcatactttgcacgggcggcatgttcttgggttagtcaccatattttttttttagatttagcctacttgtattgaatatttgtttattaatgatatcagttacgtctgtttcgttaaaaaaattacgcgagttttttaaagtaatattatccctacatgtatatattaatgaatatattttcaatgaaataataaaaataattagagttaaatatatttttagtccatataaaattatataaataagttaaatcatttaaaaaatattattcacatttagtctattctttccttaaatttggtctaaaaaataatcaatgaattgatctaaacagtaagatatttaaacttcttaatcaagtgatcaaagctcgatacacaacttgtgtatcaaaaagatcggtgaagatttgataaaatatttgtagactctaaaaaatagtgaattttatagtaactaaaatatatttaacctaaataattacacctttcataaatctaaagacaaaactgatttttatagcaacatttgagcc

SEQ ID NO: 35755 - DNA, 735 bp, Medicago truncatula
  Intron number 1 from transcript Medtr8g119270.1 (locus Med tr8g119270) derived from phytozome v7.0 (chr-ID MtChr8; po s 26980321 to 26981055)
ttcttattgtgagctatttgaagaattttcttatctataattaaagaactgtgcaagaatttaattctcttggtggaaaaactttgcagattgcatggtgttaaatcttgatttaacatcatcttaatagcagcgaggtacgtcatcttggttcaaattgaagttgtcaacttagtttaggtacgtgaacttgagtcttgattgaaggttatattgtgtgtgcattctttattatttcttttatattttgatttatcactttctttgatttgggtccacataaaattttgtgatatgtaatgttttttaagtttttatcttaataatgggttgaaaaatctgaattcaaggtcatgtttatatttgttcataactagtatagtatatgtatatatgtttattaattgataaaaaaattctactatgccagttcgtacattgaattgttatgaaaaattccaaaagttgtgtctttttgcgactatgaactattgttttctgccatgcagtgtggaattctgtatattcatattattttctttttcttttcctttcttctttcatttctttagcaatttattagtcatgtttagttaatgtacatataatgtacttcataaggtcgatttgtttatttatatattagtagtatattatatgttatggtgttcaattttggattgaatttcaagtatataagattgcataatttaatatatttcaggtaaaatataa

SEQ ID NO: 35756 - DNA, 715 bp, Medicago truncatula
  Intron number 1 from transcript Medtr7g089680.1 (locus Med tr7g089680) derived from phytozome v7.0 (chr-ID MtChr7; po s 19808405 to 19809119 reverse strand)
cattcaaatttgcagatccattttctcatccatcggtatttatatctcttgtacaaatcatttcatagatctcgatagcttgattttcgattttacaatttataattacttgattttcttttgttcttattttccttttcttctatatattattcactcaccatgacgttaattctattatatttcatatgaatttatcataccatatacttttgattcctgcttttcctatatgcaaatgtaagctagtttgtatatatcatatatacatacatacatgtgtaattaagtttttccaatcaaattgatttgagtttataattctttgcttatgaaaatgtttcttaaattagagatcaaacgttatgatttgcatgctttcatatcaattatatgtttgattaattgatttcaatttctaatataaacagtaatacaaaccaggtgtgctttgtcataaatacaatttctacaaagtatatagttgtgtatgaaattgaaacaattgaaatcaaacaaaaatgagaaatttgagatacaaaagttagtttctatttgtataagaagctattgtattgcaggattcttttagtatatttttcctatgggtttctggatttcttttcttttatctaaattcgatcataatcttcaatttcgtttgtgaatctgaaagtgtttttaatgtgtgttgttgcaggttccttgaagtaaa

SEQ ID NO: 35757 - DNA, 391 bp, Medicago truncatula
  Intron number 4 from transcript Medtr8g073830.1 (locus Med tr8g073830) derived from phytozome v7.0 (chr-ID MtChr8; po s 14525242 to 14525632)
agaaaacctgttgcaattttaggggttatctcggtgtaagtatatatgtcattgatgttttcttcgaatagacgtatgtatttgagtttgtgtactcgtaggactgtttgagagatcttatggaaactacttatgacatgtgcgtcagttgttttcagctaatttccataagttgtgcacgatagcttatgaaattttttgactttattttatcttttgttgtaaaaatagcttgtgcataagtacttatatatatcaagcgtttatgctataagtgctaaactaagttgtttatccaaatagagcgaatatagttttccattacatcattgatgatgatgattactttatttcagtatcattttcaacacactatttggccttagcacaa

SEQ ID NO: 35758 - DNA, 578 bp, Medicago truncatula
  Intron number 1 from transcript Medtr8g129360.1 (locus Med tr8g129360) derived from phytozome v7.0 (chr-ID MtChr8; po s 30533357 to 30533934 reverse strand)
tagattcgtcatttaccgtgttggtggttggatccactctccactcattaatgcttgctgtcgtgcagggagttgatgaatcttgaattgtttctgtgttggcagaaaattcattcgccaacttaagatctgtcgttcactttgtttgatttggactttgaggcttgaaatggttggttagcttgttgtcattgttgcatgaagttgatggtatatgaactgcctccgtgttgacagaaggtttaatcaccgcatcgaagatatttagttagttttagattaattagaggttgatacacgctatgttgtttcatttttgtatcatccatctggccgacttagacgcccgtgtaattttactgggttaggtttatgtccctggtttttatgtattttctttttcttttttgaatatctatgaacattcgacgaatataaaaaaatattttaaaaaatcaaattgatttgggaattttttttttcgttccgttttgacctttgatattttaaatttttgttttttttgttcttttattgtaagttttatttcttcttttcctataacgattagtttaagg

SEQ ID NO: 35759 - DNA, 700 bp, Medicago truncatula
  Intron number 2 from transcript Medtr7g146080.1 (locus Med tr7g146080) derived from phytozome v7.0 (chr-ID MtChr7; po s 34867227 to 34867926 reverse strand)
gtggaaaatagataaactgtccaaaggccacggttagtattactaatcaattctctttgctattaataactatcacaaagacaaacaaacactaacatatccgtctatctgtttttctattgtgcttccttgtgtattgtttttcattatataatgctcgttttgtccaaatttcagtttcaaatataaatttagaaaagagttgtattgttgaggacaagtttgtatagaaaaatgttgaaccaaaaactggtacttactttagagtttctatatatattatgctaattggagtagattcatatgcttagtacttggaacatttcaagtcatgtcggttataataataagaaacagaaataacctcattcatatacatgcattgatgctctagtttgttggtaaaaacggtacatccaattattctttgactttgttatgccatggcccatgtaggttttgatggtggaataaaacctatgcaagcagtatccaatttttcagatagtgatgaagttaatataattgccgctagcttggcacgaaagtagtctcttctcaagttctccatcagatttgtttagcaggaaacgtaagttttcttttcaaaattgtatgctaaagtttcttgtcaaaactattgactaatatgctatgtctttgtatgcttcagttcgtacagtgcgattatctgtgaata

SEQ ID NO: 35760 - DNA, 692 bp, Medicago truncatula; identical to SEQ ID NO: 34349
  Intron number 2 from transcript Medtr8g034750.1 (locus Med tr8g034750) derived from phytozome v7.0 (chr-ID MtChr8; po s 7587990 to 7588681)

SEQ ID NO: 35761 - DNA, 640 bp, Medicago truncatula
  Intron number 4 from transcript Medtr1g093680.3 (locus Med tr1g093680) derived from phytozome v7.0 (chr-ID MtChr1; po s 19137839 to 19138478 reverse strand)
catcagctgtaagtaaatctgtattttaatcttgatttcacctaagttttatgaataaagcattatagcgtatcagttgatttgttttacttagttagtataagcgtttctgtaaataatacatgatagccaatgatctctaatgatataatcatgtctttgatctgactcttttaactgcaatgaaatgttcgatgccaatataggaattttgctagagaggttacatcaggaaaatttctgagttaatttctgaattaattttagatcgatcatctggaaatgacaaatggaatgacatggttttcattgatatcatactactgattttttcgctcgcttgcatcataagcttggctctttattttttccgttagatgatcttactggctattcctacgaacttattacccaattcactaagaatgagatttgcttagaaatgttaacattctttttgtcatatgttgaaatctacttccatgcctcttctttttctataagttcccatctatgtctcctgttacctggttcttgttactactttatagtttctccttcttgtattatatgcaaacaaaagtttctttttgttggtttttcaggcactcggtgttcctgtggataggcttgtcgaagc

SEQ ID NO: 35762 - DNA, 651 bp, Medicago truncatula; identical to SEQ ID NO: 28116
  Intron number 2 from transcript Medtr1g093680.3 (locus Med tr1g093680) derived from phytozome v7.0 (chr-ID MtChr1; po s 19139174 to 19139824 reverse strand)

SEQ ID NO: 35763 - DNA, 394 bp, Medicago truncatula; identical to SEQ ID NO: 28425
  Intron number 1 from transcript Medtr3g142660.2 (locus Med tr3g142660) derived from phytozome v7.0 (chr-ID MtChr3; po s 36631620 to 36632013)

SEQ ID NO: 35764 - DNA, 660 bp, Medicago truncatula; identical to SEQ ID NO: 28142
  Intron number 1 from transcript Medtr2g013730.1 (locus Med tr2g013730) derived from phytozome v7.0 (chr-ID MtChr2; po s 3180497 to 3181156 reverse strand)

SEQ ID NO: 35765 - DNA, 822 bp, Medicago truncatula; identical to SEQ ID NO: 29532
  Intron number 1 from transcript Medtr2g013660.1 (locus Med tr2g013660) derived from phytozome v7.0 (chr-ID MtChr2; po s 3126250 to 3127071)

SEQ ID NO: 35766 - DNA, 390 bp, Medicago truncatula; identical to SEQ ID NO: 30532
  Intron number 2 from transcript Medtr5g021490.1 (locus Med tr5g021490) derived from phytozome v7.0 (chr-ID MtChr5; po s 8207177 to 8207566)

SEQ ID NO: 35767 - DNA, 300 bp, Medicago truncatula; identical to SEQ ID NO: 28609
  Intron number 1 from transcript Medtr3g138480.3 (locus Med tr3g138480) derived from phytozome v7.0 (chr-ID MtChr3; po s 35409332 to 35409631 reverse strand)

SEQ ID NO: 35768 - DNA, 920 bp, Medicago truncatula; identical to SEQ ID NO: 30663
  Intron number 1 from transcript Medtr5g021500.2 (locus Med tr5g021500) derived from phytozome v7.0 (chr-ID MtChr5; po s 8209534 to 8210453)

SEQ ID NO: 35769 - DNA, 568 bp, Medicago truncatula; identical to SEQ ID NO: 28415
  Intron number 1 from transcript Medtr2g005140.3 (locus Med tr2g005140) derived from phytozome v7.0 (chr-ID MtChr2; po s 107127 to 107694)

SEQ ID NO: 35770 - DNA, 944 bp, Medicago truncatula; identical to SEQ ID NO: 28547
  Intron number 4 from transcript AC235665_38.3 (locus AC235 665_38) derived from phytozome v7.0 (chr-ID AC235665; pos 201812 to 202755 reverse strand)

SEQ ID NO: 35771 - DNA, 300 bp, Medicago truncatula; identical to SEQ ID NO: 28609
  Intron number 1 from transcript Medtr4g041980.3 (locus Med tr4g041980) derived from phytozome v7.0 (chr-ID MtChr4; po s 10040616 to 10040915)

SEQ ID NO: 35772 - DNA, 906 bp, Medicago truncatula; identical to SEQ ID NO: 31779
  Intron number 1 from transcript Medtr4g152090.1 (locus Med tr4g152090) derived from phytozome v7.0 (chr-ID MtChr4; po s 37605762 to 37606667)

SEQ ID NO: 35773 - DNA, 726 bp, Medicago truncatula; identical to SEQ ID NO: 32749
  Intron number 1 from transcript Medtr8g008960.2 (locus Med tr8g008960) derived from phytozome v7.0 (chr-ID MtChr8; po s 1132005 to 1132730)

SEQ ID NO: 35774 - DNA, 335 bp, Sorghum bicolor
  Intron number 3 from transcript Sb01g040390.1 (locus Sb01g 040390) derived from phytozome v7.0 (chr-ID chromosome_1; pos 63739097 to 63739431 reverse strand)
aaggtcattcttagtgataatttgatttttctagattaaatatcttcgttcatgagctagtcacatgcatgttttgagttttcttcgaccactttgatcatctttaattctgtgcctgaacgatttctgcaaaatgacatctatcgacacaaaatagcttttgtgatacccatttttagccgacacctgctcctttttttcttctagaagttagatttgctgtccatctttatatcccaaatttagcttgtttgtaggtaagagtacacagtaatattagttggcgacataaacattggtttattcaaaatattccccggcaggttctaattagg

SEQ ID NO: 35775 - DNA, 576 bp, Sorghum bicolor
  Intron number 1 from transcript Sb01g027040.1 (locus Sb01g 027040) derived from phytozome v7.0 (chr-ID chromosome_1; pos 46404057 to 46404632)
acgctttgctgcttcatctccaacctactccgcaggtactctttgtcttctcttacccagctgttgtgctttctgatgcttactcagtagtttttgttttggttctttgtgcccttgtaatcttcttgttcagccgtaccctcttgtttgctatatatattttcgtcgataatagaatattgtataaattttttcaagaaaaatacatccagataatacaaattcttcgaacaagcttctaataacctcttctcaaacataatagtaataaagatgacacataataaagtgagtgttaatcctaagattaggcctgtgattccacacaatttagggtttgtttggttatcagggaatgataacatggaaagaatccagctggaacagttagattaatttgtataagcaagtaaacttggtcgaacatagtgagtatccatcctaagattaattaaacctcttgtttgctatatagagtctataatataaaaaattagggaggggcctctcctgcttccaaaacaaaaatctgatgtgctatggtgatgcaggctgtagcctcggagtacgcaagtg

SEQ ID NO: 35776 - DNA, 858 bp, Sorghum bicolor
  Intron number 2 from transcript Sb01g047400.1 (locus Sb01g 047400) derived from phytozome v7.0 (chr-ID chromosome_1; pos 70480629 to 70481486)
actgggacatcttctacaagcgccacgaggacaaggttactctgctgtccttgtttctcgctcgtttaaagtagatattgatgctttagcttgagaacgagagtagttgaatttcgaatctagatcgttatcgggtaggataagttcaaggtgttaggaagcattagttgaggagggcaacctcactcttttgtttatgggcaacgatatgaggtagcatatggttctagagtaaaggtctgagccctgcacaacaaagtttgaagcaaggatgcatgacctatgacctatttatactaaataaatagatacccttgcctttcgtttgcggagtgccactggtatcacttgttgagccttgagacatcctaggaagaagctacgggttctggaagatgggtggtctggaaaagattgatctgtcaggtggcatgtagaggctgaagtttaatgtcaggtggtatgtagaggttgaagttgaaggcttagtagtttttgttttctctgatggtgttagagtttctggccagaaggcccaaactgtgagtggtggtgtacactgaatgctgtgaacagtctgctggtcttggttattctagcactggggtttgatccctgtaattctaaaaaaagtatgttgtaagaaactgctcaagtccttattcccccctgaattatatagaacaatcttttggatctttgaaccttgtttcacatgctactgatgctctcattttctacttcaagcactttctcatatcataaacttgtcctcgtttagatctgttttgtcatgcatttgatttgtgtccttgtactttggcagttcttcaaggatcgacattacctggataaaga

SEQ ID NO: 35777 - DNA, 886 bp, Sorghum bicolor
  Intron number 3 from transcript Sb01g049360.1 (locus Sb01g 049360) derived from phytozome v7.0 (chr-ID chromosome_1; pos 72369320 to 72370205 reverse strand)
tttaagtcaaccaaggtaaaaaaaaaaatggctccttccttttttggttccccatactgttttactgttccccatacgctggcaaaagtaatactctaaaaaatgttggaagaacaataccccatgtttttttcagctgacaatttgagtagcattgcagcagcaaagatttcctgggttcatgatttccttttcacctgtaccttctacacatggtctttttgtttttgttttagaagaaatatagttgctttctgcgagcaaaaagtaaaagaaatatagttcttgatatttcggtgcagtctgaaactttgtacacaattaggatagctattgaagacaaggtacactggtatacctggaaatgtccaatatgagagtccagcatcagatttgatgttttggttaggtgccaaactagccagaaatgtcatgtatctttctgctttaggtacgaatactacttctctggccacaatgagaataactggacaggcaggataacattgttgatagatatgattagcacgttttggccccttctttactaagcatatgtctattttaaaaattcttcgcaactacggtttgatttgatttctgtatgtaagtgactgaatttcaagaaaaaaacaatgtatattagtacagtaataatagaaccttttaatttctcgtcatttgtgataaaacacaaactcctgtcaatgttcataatgatatataattgcaaaggaacattttgagaagaaatttaatataccgaactgtatattcttacccgcgattagtacattccttacttttctttgacataataagtaatacaatagaggcattaatctgtttctcttttgtcatcatcaatcatcaggttctaccggtg

SEQ ID NO: 35778 - DNA, 841 bp, Sorghum bicolor
  Intron number 2 from transcript Sb02g036080.1 (locus Sb02g 036080) derived from phytozome v7.0 (chr-ID chromosome_2; pos 70469811 to 70470651 reverse strand)
tgcggagagccaatctcggatcttgcttccttcaggtacggataacccattcaccagagaatgagcatatttcgtccattttctgctgttattactttcttgtccataacgtgtagtcatattgctgtacaggtatgttatgtaagctgtaagtgactatgtttattgttgtgttcgccaccatgctatttggacaaccataggaaagctgccattttctcagccttgtgcttatacaatgtagtggctgatgtgtagctcgtttgaattgacttgtcaatgtgaacagcattttggataatcccttattcctgtggcatgtcttagacctggtctagcctgtcttttttttattttagctgcatagagtgtatgctccagtaaaatgtgcgcctatcattctaaatattctatgtcggagggaatcagactgcatcttggaagaccaacttgattttatctttagctcagtcagtgtttctttcataaaattgtcgttggagtttcttcagcatcgattatgtgcaatattatgttattatatggtcagtttgttatccttaacaaagtgattaaaggagattatactcttcttcaacatatctcctggcatatatattaagggtgaggacactgattctcgcctaaactagatggctctaacctctctgtctgctatatacatccatagttgcggtgttgtgacaatcttgttgccattgattttaagtttttcttgtttattacaactttatttgagtgtagctccctcttatgttgttaattttaatgtcttactcttattcaccttgctgatgctagatgaaatttctttcaggga

SEQ ID NO: 35779 - DNA, 838 bp, Sorghum bicolor
  Intron number 1 from transcript Sb02g036530.1 (locus Sb02g 036530) derived from phytozome v7.0 (chr-ID chromosome_2; pos 70940731 to 70941568 reverse strand)
tccggacccgctccccgtgcaccttctcgcccgaggtacacactccgcaccctgtcgaaccctaggtcgtgtttacagctcgagaccgactcggattcggattagggcatggccctagggccccaccggcgcggaataactgtctcgagctaatatcgaggctagggttccgtggccctacctctgggaatgcttgaatttgcaatgtccatagagctgtgggattctataaatgctggatatatgtgattgtagatggttggttcctaagtaggctgtgattggatttgatttactatgcaataattttgagttgaacaaagggaagcccagtaacaaccatgtaggcaataatgaagtgcgatacagtaattagcaacaccatgacaatgcacattgcatggtttgtgcacaaatttctgcttacatgttcttgtagccattgaaatgatgtgcattatttgagcattttcaagttcacacacggggagcacattattaggtgacagctattttctttgaaacaagatagtttcccaggcagccttccccaacttgcttgggactaaaaggctctgttgttgctgccgtataatttcctaggcatttttggggtgctactactatgttgccttttttccaacagtgaaatgtagtagaaccttgagcctagcaatgtgcgttttttgtgcagtttgtttttttgcgtcacattgtttctgattgcattgcaattcaactgttttattatcatctggaagttatggcagactgatcaagtggttgctattagagttgcataccagttctttgcttacagttgttaatatctgcagga

SEQ ID NO: 35780 - DNA, 903 bp, Sorghum bicolor
  Intron number 2 from transcript Sb02g043160.1 (locus Sb02g 043160) derived from phytozome v7.0 (chr-ID chromosome_2; pos 76910649 to 76911551)
gccaccggtagcggcaagtccatctggtacagtcggtctccctcgcttgttttttttggtgttttattatgacgaaatgactgtgcggcgcttgtttatttatttatttattttgggtgcggtgttgtcgatggtacaacctaagttccaatgcggcatttattggatgatgagttgtacctctgggcgctttctagatctattttctgtgaatcgttgagatatttcttgacattggttgattgatgggttgcaatggagcacattttgttggtagaaatagaaatgtagcctttaagctataacggccaggtagtttttgttgcagtgtgcatatcattacattttctgccagggaatcgtcaggtcagctggagtttaactgcaccgaggagatcatgattagagaggattgtgcagagaccggcaaaattatcttctcaaaaggacctgaccacatttttctctgtttcataattgttgtcatctgcaaaaccttttagagctgttttgtttaccaatttctacaaaaatctacagtaggttgttgacactagagctgtgggtttgcagcaggatttcaagtgaaatgcttcctatttgctaatttgttttttgtaagtatagatatagatatatatttatattttttctccttaaattgtttgttgatctctcacatttcttcagagaaaaagaaatatgtttttgtcgaactcatttatattaagtaaatattttatagtagcctctacagttggctcctggtatatccggacaataggttggaacatagactgaaagattcaattattttcttttatatacaaaaattactgtttgattatggcaattcctcttctggcagctatcaaattcccccactggttacaaagaagacag

SEQ ID NO: 35781 - DNA, 815 bp, Sorghum bicolor
  Intron number 1 from transcript Sb02g020830.1 (locus Sb02g 020830) derived from phytozome v7.0 (chr-ID chromosome_2; pos 51195097 to 51195911)
agaagccaaggaaggctacttcttcccctaataaggttagttagacaagaagcagaaaagatgcctcgatgtgtgtagtatgcaatgcatccatgttttgcttgcttgagagatagatgagctgcatgaatccaagatcctttctgcgtatttgcttcgtttgtaaccctcatcaagcaactctcagccaacacgcatagctctgaaatttgaattttgtgtatacagtttctgtcaggttttgtgtacgtgttcaccgtactttgcatgcatgcatgcataggagctattacttttgttttgagtttgactcatctttaggttcaaacgtgcatgctgcttcttacgtacgtaggtacgttttctttttaatttgaaacgttaccttgatagatcaagtggagttgatgagtgacatgttatcttgttgcgtgcttttggtcgtcctttaacttacatgcatggcttctgtcatcctagatataataagttactttcaaattagttaaaggcttcctagacacggagtaaattataaaagattttattttaaattaaccaagcgtcactttctctgcctccgacactatttcactgttgagctctttaattaattaattaattaattaattgcatacctctagctagctcgttgccatcattaagtacaagtaataacaatagtaataagggacttgatgcatgtattaaccaatataatagctccatattatcacctaaatttgattaattttatttacatgactgctttttactcagagctcaacgaatcataccggtcccaagagcccggt

SEQ ID NO: 35782 - DNA, 1062 bp, Sorghum bicolor
  Intron number 3 from transcript Sb02g012410.2 (locus Sb02g 012410) derived from phytozome v7.0 (chr-ID chromosome_2; pos 20916524 to 20917585)
cacgtgttcatcgtagaaccctcaagatagatagggtatgtgatttgtgcttttgtcttttccctccaattctgtactgacataccatagtagttagacaaatgaggaaagtatgggggaactgcaagtctttctaaattaataaggtaggaggtcggccttgagcggttgattctatgaccttggtcaccacaccaaactgcttcagcaccatgtacctggcttttgtgacgacgtaggtcttttatttttataatgcacgatccatttaacgcgagtcatcaagttgtgaattggaagaatgtattctttgtggataattagtttgttcccaagtcaaaattctcattgttattcatttccttttctgatagtgctgaaagtctggccgagttgtagtatatatggattcttatgattgctggttatagtttctgttttctgataagtactcttgtaagaatcatgccctagtggtcttgtacgagtcttcttagactcccaccttttcttcttataatatactgatgcctggctctcctgctaattcaagaaaaaaaaaagactgggtggttcacttatttgtgagaagaatttttttttggttagtttgagacccatcactagttggctacccacatctatgacaaggccacgtcagatatagtctgacattcaaaaggagacttttcacttttatgaaatttgggatatccatgactcctcagctgtccgataatctataggaagtttagcacaacaacctaatataatcacgaaatcgcttactaacttgtatcttgaatggttgaaagccttcagtccctgtgtagtgttaagtttttttctcagtcacactagtttaaacatcttagcagtatgcaactttaaacgatggtaaagtagtgtttgttgattgttgtcatactgaacttcatttattccactaagtcatttttttcctatgaaactgctcctccatcacattaccatacattggcatgacatatttgttcatgctctgcaggattttcccaagaatagagaccttctcgctgcatt

SEQ ID NO: 35783 - DNA, 345 bp, Sorghum bicolor
  Intron number 1 from transcript Sb02g007800.1 (locus Sb02g 007800) derived from phytozome v7.0 (chr-ID chromosome_2; pos 9810126 to 9810470)
gacattccagacttctacaaactgaggtttaaaaggtcagtgattatttctagatcaacatattttcacagactcaaactattcttcacgcagaaaagaaaacaaaagaaaagtctggttcccaaaagttggacatgagttgacggccggaatgtttcttgtgtacatgtaactaataatactaaatatgtttcttgacttgtgatcaaacagcatagcatatacatatgtattcaacgctgtttaattttgcttatagtatattagtttcactacaccacatactagcttgcgtaggaacaacttaactagttattagtatcatcatcttctactttctcaggt

SEQ ID NO: 35784 - DNA, 893 bp, Sorghum bicolor
  Intron number 1 from transcript Sb02g006090.1 (locus Sb02g 006090) derived from phytozome v7.0 (chr-ID chromosome_2; pos 7383539 to 7384431 reverse strand)
gggcggtaccgcgtactcgtctgcgcgcccgacacgtaactgccctccctccctcactcgcctcgcgatccctctcgcttccttgcgatttcctgcttgcttggttgttcgatcggtgccttgcgtagattctgtggaatgatcacgggatttctctcgagaggatgtagtaggcttggaaaagaactagaattgtggggaattttttttaccccttctggcattctgcgaagaagaggaatttgggatagcaaatttctatttggaaatacagtaagtggcacctagtctctaaattgaataatgaaataaaataaattattttgttttggtacatttctggatgtgaattcgtgagggctaattttgctgtaaacaaattaaggaacaggaaagacgagcttgtccttgagaagcaaacttatcaattaatcctgttttcctgcgatgtttagaggcgttttgggcatagctgaagtttcttttttaaacccattggctgcaaatgcactattcaagttgcctgtttgtttccaacgaaaagtgcctttgtgggactagtttgatgcaaaagcaatgatatgggtgtacctaaaccaaagggagaaaagagatgcaattacaatccatgtagttaatatttttcttcacagaaatggatttgtcatttaaccttattataaacatggttgctcagaaggaaactgaaatgaaaattgagcgttattatttattcacgtgaaaatttaaaactgtctttggtctttaattagttgtagttggccaagagtcatgctcatcctatggcagcaatcctcttcctaactatttttatttttgtcctacttctcataaaaatgcagagacaaatcgggtgtgagccacagcatcac

SEQ ID NO: 35785 - DNA, 1054 bp, Sorghum bicolor
  Intron number 3 from transcript Sb04g004250.1 (locus Sb04g 004250) derived from phytozome v7.0 (chr-ID chromosome_4; pos 4048700 to 4049753 reverse strand)
aggcctcggcgtccgtgacctcgtctggctctcaggtgcccacctcgatctacatgactaatctcctcttcacatgcatggcagtaacaaataaacgaaacatttgtcactactacatttgtattttttactccttaagtacatatcagtaaaaaagattagggggattattcctgtaactagatcaaacgtgaatttcacaaaagttcgattgtcacagaaagcagactggtgtggttcagacttcagataggcgtagtaggccggacactgagctgagatagcctggttctgattgcccattccttacatgttgattgggcaacaacagtacatgcaaaagcagcacgaataatggtttgctttcgctgcccttcttaaaccggatcgccagattccttgagcgaaatgttccaaattttactttcagctccgatccactcatgcctgctagcttcgttcctgtcctctcgatacgtccgcatcagatgctcctttcactatatatttcataatatagctgagcactcaccattcctgattcctctcaaatgaaattcctgaactaaagctgttttttttttttgtgaggaagccgggagggaggcccctacctaaattgtattaaaaatgcaaactgtacaaatgtaggtgcaaagccacataaggctcagagagaaaaaaaagaagataaaatacaaaagggaagaataagaacagaaaagcagctgaactaaagctgttcttgaatttagttttttttcttacatagaaaacagtgcagcccgccaaaattgtgactgtgcataggtcactacattaacttgtccatttttactgttttttcctccaagaaatcaaactgttcatcagcatttcagcaacatgaaaatcagctgtaaaaatgaatagagacaagtgctcaaatcttgcatgcagttcaggctgttttgtagtcgttgtactctccgtcgtccaccatttgttttctgacatgtggaatgcgactgatcgagcaggcgcgcacacgatcggcatcgcgcactgctcctcc

SEQ ID NO: 35786 - DNA, 923 bp, Sorghum bicolor
  Intron number 2 from transcript Sb04g029070.1 (locus Sb04g 029070) derived from phytozome v7.0 (chr-ID chromosome_4; pos 59104169 to 59105091)
gaggagaagtgctcgcccaaggagatttgtgacaagtgagtcagcaggcccttgacctcacctcgaatcgctgcctttcagtgcgggctggcggtacttcccttctagttggaaatttgatcaatcgttgtgtaatttttgagcaagatgattcgatttggtgttatatagttgtgctcgagctgtccgatttggggggattttgtacatggtgaacttgaggcgaggtgaattgcctgggtagtagggtaggtgctgcgttcaatactatagttaagttaattttttcagcgttttgacgttcctcactgccttgagtgtgacttactgcgtttactttctttcacttattgatcttgatttcggttagactttcttattcctaaatcacaatgaacatgagtgtccatgctgcaatagtgaatcaagtgatttggtttttgcaatagttgactgatgacttaatcgtgatcctgccagttctgtgcattatatcttcgttggctataatttgattagaaccactgatttttactttgtctttattgtacacatgaagcattctgttcatatgctagatacattaatgaaacacgggcctatatgtgcctgatcaagaaaaaaaaagatgcatgtattaaaaaaacacactttcttctttctttcttttttgaaacactcctatgaacacacgaatatggaccttggagacactaggctaatttcttggcgttgacgaaatcaccacatgcatctactaattagtggcaaaaaaacgtgagctcccgtttaaggttgcagagttgaacctcccccttttttttaactgaaccttccaccacaaggaacctaactaattgtagttggggaaacaaagctttcttcatataaacctttccttgctgatgaaaactgcaggtacc

SEQ ID NO: 35787 - DNA, 822 bp, Sorghum bicolor
  Intron number 1 from transcript Sb03g045680.1 (locus Sb03g 045680) derived from phytozome v7.0 (chr-ID chromosome_3; pos 72899624 to 72900445)
aaccgtcgtccgcatcgtcggcaagttcttcccgggtgcgcgaatccaccacgtagtcttcgttaatcggcctccttacagttgcagtccttccactgctcttttaggggtttttgtcaattcatgattggggatgcttcatgcgcttatagtatttgatgatttatttaggtgtgagcttaccagtaacaattgcttcaaactagatctcttcccggccgatagtttatacctgacttgaggtgaatttttaggtgaaatcagaatcccatccagcaagtacctacagtaacgattgctgttgcagattgaggactgcgtaccaaccaacctttattcaatggatgatagatcatatgctacctttttaactcaactcggatctgtgttatccaaaaacaaaattcagatatgtggatcgtttgattgaatttatcataaatttaggttcccagcgtaacatccacaccctatttacatgtttgaagtacaagatctgatgtaggatgtagcttatattttattgtattgaagctcctctaccagcgaagtgcatatgttcttatggcccttctaaattaagaatggatgaaggatgataaatctgcttagttccagccaatatttcagtagacccgatcaatgttctgattctttcactattgctattaacaagccaacaagctgaataaggcttctatattttcattatcctcgtgctttgtcgctacaagcttagtattattgtttcccaggctattcttggtgtcaatgtttacatggcatttactttggaatttgggttttcagcttcagtagttg

SEQ ID NO: 35788 - DNA, 482 bp, Sorghum bicolor
  Intron number 2 from transcript Sb03g035240.1 (locus Sb03g 035240) derived from phytozome v7.0 (chr-ID chromosome_3; pos 63403454 to 63403935 reverse strand)
tttgaagttgtaagtcagattctatccttagcttgagaagaatcaaatataggaaaggacttgtaagtcagattctatccttagcttgataacaatgaaatatagtaaaggacgttttctcatgtggacaatgttctcctcatagatgtaggttagatgaatatagcaaaaaacttagtaaacacgtacatgtagatgtaggttagatgagaacaggtaattgtaatacaaataattccagaaatctttctagcatcctttcaatccttcatattgtctcgaaaaccctaatttctgagtctctgcatacctttacaaacctatacagtgtgtcattgttttgacctccaagttcaagtcaccccacctccctttttaaatacaaagaatgtactgttgttcatttttcttccagctgggcatcttgtgtatatacttatccacctgaaatctttttatggttccttttacaggtactgtga

SEQ ID NO: 35789 - DNA, 452 bp, Sorghum bicolor
  Intron number 1 from transcript Sb04g038330.1 (locus Sb04g 038330) derived from phytozome v7.0 (chr-ID chromosome_4; pos 67768448 to 67768899 reverse strand)
accgtctgccagatcgtcgacaccgccgtgcgcgagtaataatctctatttaatttaatatacataattatccattatcctcccttccttccttatatgcaagttattactgagcgagcgtgcgagcgatcaatctgttctgtttgtttaccaactatactggttgctggttgtaagttagggttttcgaatcaaggattttcccccaaatataagctgaaccggatcagctagggtcttcttgtttagtctgtttgatgtatcctctgtaataggttgtgcacagctcaggaattagggcactgcctgtttttattctcgatttctcagagcatgtatgttttttttttttcagtatataggggagcagagctggaatttgaattaactttattattatgttccctcgtctcacagggtgcaggctttgatactctcgcctactagggagc

SEQ ID NO: 35790 - DNA, 378 bp, Sorghum bicolor
  Intron number 4 from transcript Sb09g030646.1 (locus Sb09g 030646) derived from phytozome v7.0 (chr-ID chromosome_9; pos 59195627 to 59196004 reverse strand)
agaaggtgagttctatgagattttatttcttgtgctgtgtgcgtgttgatcttgctgtatggtatgggattctgctgcattcctttggttgtagtgttttatatgcctttgtactttattatattgtagtgccacgagcccacaacaaacttgtttaatctgtgaggttgatctggtattctggtcatcagtgctatccctttgctgatttggcagctttgatgtgcataagtgcatgcatttcatatttcttcatcactatacttggttttggcaacataggctagggctatgttttgttttctgctagtgtttctttgagcaaattttctaattaagaaaacttaacgctttgcagtgtcacatatttgcggctgg

SEQ ID NO: 35791 - DNA, 398 bp, Sorghum bicolor
  Intron number 1 from transcript Sb10g009780.1 (locus Sb10g 009780) derived from phytozome v7.0 (chr-ID chromosome_10; pos 11602823 to 11603220 reverse strand)
gggagaggaggctggacagttgtacgtatatgatggggagagaagggagcagggaagggattgtatgtgtagttgttgttcctggtacagtgggcatgtgtcacgtttctgtacatatacagtaatatgtgagaggggtggtggtatacaagaataagggtatgtggtagattaccagtaatatattgtgctttacattctcttttcaatatcaagtactgataatgttattaattgcagagcaagtttgaaacggataaaacttcaccccatgtgaaaaaagcatgttttgctatgctgaagagagctgttcgccagcagcgctataagctaaaaagaagttttttgatgcttttccactacatcaggtgcccaagaaatctcctgtgccatcatca

SEQ ID NO: 35792 - DNA, 747 bp, Sorghum bicolor
  Intron number 8 from transcript Sb10g001310.1 (locus Sb10g 001310) derived from phytozome v7.0 (chr-ID chromosome_10; pos 1087058 to 1087804)
tcagcgtggatattttcaccgtgaccttaagcctggtatgcgagtttgcatttggtttttacatataatgttgcaatggttggtccattgttgctgtttgttgtgaaacaagttattagctccagttattttcacatgacatttcggacaacaaaattgttctataggcatttcaatcttgatgtctaaaacaccgtgtatgttttgactggagggactatcacttataagctcaggaacagctgccttgcaatttttctatatgaaatgcatcttctgaggctacataacgttcaagaaaccttttgttagctataaattgctgtagatgaataagtgttcatgatgtggttgccctctgtggttattttcaaatttgttgagtagcttatctatcattatacactgatgaaacttgcaacattagtaaatgttgtttgttcattctgtgcatgatgtagttgcagagtgattcaatttcagaaccaggaaatgtataccattgtagtgggtaatggattctagttcttttcatagtagctgttgacataagaccatataagaggaaaaaagagagtagaagtaatgaaatctttcagtaccattctttatttaacttattacatgtactgtgttccatgtgggaatgtgttcagtgttgttagcaaatggtgacaatcataattgatcttggtaacttatgcaatttcagaaaatttgcttgttacaaaggagctcatcaagata

SEQ ID NO: 35793 - DNA, 593 bp, Sorghum bicolor
  Intron number 5 from transcript Sb06g030030.2 (locus Sb06g 030030) derived from phytozome v7.0 (chr-ID chromosome_6; pos 58468629 to 58469221)
tggggattggtacgagactgggcttcatatcttttgtaagttacagttctggtcctcaaggttctcttcatgatatttaatgttcttgattatttctattagaaaaaatacagttagtatgatggtttctacacatattaacaacctgttacttgttcaaaaaaaaaaactgttgaggcacaccatcacacaaactcctaaagcacttttcttgtatcatgctttttgattttcctaatgcgcaggagtttctttcaagaataatctgtaaatatctgtgcaaaatcattattgtgaaacggactttgttaagttactagtagtgacaaaatagcctgaaagtttgcagactactaaaacatacagcagcacatgtttcaatgtcacataaaccatgttaacccatgggcaatcgtatccataatgccatagtcaaatatatgttcttcggtccacatgagcagttgagcattggattgctactattcccttcctagcgtaaatgacactttattgtgtacgtgtatgtaaccatgtattttggatttttggtttcagttggagcttatcccaacatacagaatctgtttggt

SEQ ID NO: 35794 - DNA, 993 bp, Sorghum bicolor
  Intron number 1 from transcript Sb09g029750.1 (locus Sb09g 029750) derived from phytozome v7.0 (chr-ID chromosome_9; pos 58404841 to 58405833)
gaggtcttcggccccgtcacgcccggacaggtgcgacctccttccgttttgcttgcttagcgtcatgggtgggagtgggatccggcgcagccgtgctccttcgtagcttccttcgcttcgcttcgctctgctctgctctgctctgatccggggagtagctgccactgcgcgagagcaatttgaatcccaattcccaaggcgaccaaatttggccgtaatctccgacttcgtgcacgtggatgcactccttaactcaagcagctgcctgctgctctgcacgttggcgttggattgaagcgaagtagtagttgcagtattaatgccatggtttaaggtagctccagggttcgagggagaattcagtgcccactaagcaatgcccctgcacatgaccccgtacgtacctaaccagtttggtgggttggtggtctggtggacttctgctcctagggggagctttcgtagcaagtagcattggagctggataccagttcttccttacgacttacgcgaaacatacataattctttctctatggttgtggtttggtataagtacggagaacaaaactaacattgggcatacacggtccttgtacctttttttttatctgttcatcatcgtaaaaatgaagtgcagttgagctgtgatacgaaacaaggatgtttgtttgtctgctgaaaagtgaaaactgctaatatggagcagatttgcccttattttaaatccgttatgacaggatgtagggataaaactttctttcctggactgaaatcatcaaatttagagcacatatttctgggtagctgagtgtggctacaacctcaatggaataaaagctatcctaattttgttttcctagtttggtgcttcgatgaactaattggtacctaggcttgtttctcatggatccatggtagcatgcacttgtggaactcaatgttttgctttcttgcaggtgtcatttttgctaggtctattccctgtcctcat

SEQ ID NO: 35795 - DNA, 765 bp, Sorghum bicolor
  Intron number 2 from transcript Sb09g019630.1 (locus Sb09g 019630) derived from phytozome v7.0 (chr-ID chromosome_9; pos 48483474 to 48484238)
tctcctcttgcaggattcgaagcgccgattctgaggtatcactccttgtgacggacttcccccctgaccctgtgttctttattattatcaatattattatttattttttgcaaacgcccttgcatccaaagattgtgaatcttggtgaatctttattaggggatatgtgatatcaatgacagttgattatgtgctgctagtacagtctaggctggtagtaaaaactgttgattattttgctcgacttctagttgacactgaatagtggtgaaacttgtaccatgttgctgcgttgctgtatccaactcggagcctatgccagtgggtgttaagtcaccatctcctgctggttctgggagtttgttgtgacaagatggaaaaaaaatcctgtaaatcagataacagtacagctacagcaactattcaccgttcactattagtaagtagcctattaaatagctaaatagcttattgcttcatatattacacgtgcactcttcctgtgtgtttttgcaaatggatcattggattgttattcagaaactttggaaccagatgacgtgtgttcttactgtgttgtatttttagaatcattcccaaagtccaatactaaagtttaatgatgacctcctgttgtgtcctcttttaaatgctaccaaattttatcataatcactgagtgccacctgcaaacagattttgattgtattttcttgtcttatctcatgtaggaagatagccgacaaggttgcttcgtcagggtact

SEQ ID NO: 35796 - DNA, 886 bp, Sorghum bicolor
  Intron number 4 from transcript Sb10g028940.1 (locus Sb10g 028940) derived from phytozome v7.0 (chr-ID chromosome_10; pos 58766422 to 58767307 reverse strand)
ctttctcgtggtttcaaggatcaggtaaactcttctatatgatttctactttctctattcttgatcattgtacctgtcaaagttcagctaggcgctaggtggattctaggtggtaatcctccgcctagcgcctaggcaggagtaatcgcgcctaggcgttcttggcgtttccctaggcgctgggaggaacaggggaggggagaggaagtggagcaggggaggaggagctaccggtggcggaggggagatgagcaggggaggagttgccggcggtgggagagaagatgagcaggggaggggactgaccttggggcggggtagcagccggcggtggagcaggaggacggaggattttgcgtgatttcccacagccgaagccatctgcgcgcgtgcgaaaggccgcttcgtccgcctccgcgccgcgctgcgccatcagcctgcgggggtgaaatttcgtggcttgcccagtgcctagatgccgcctacccctctaaccgaggcggttacccctcgcccagcgcctaatcgcacctaggtgccgcctagcggaactatggtacctgtactatttgctagtaaattgcagagatgaagtttaaatggactttgctagatttgatttcatttgttagtttccttttgtttagctttaaccttcgctagtttccttgtgtttagctttaaccattgatatgcttcagtcacgaaattttgtgccaaaccagtcgtgtaattctattattttttgtagcagcgaccttaaaagcaattcgataatgcactatctatttattatgtttctctgatcgattgatgcccctgctgacttcctttctttggtgaaaatgcagatttacgacatcttccaacttcttccagccaagat

SEQ ID NO: 35797 - DNA, 734 bp, Sorghum bicolor
  Intron number 1 from transcript Sb02g022900.1 (locus Sb02g 022900) derived from phytozome v7.0 (chr-ID chromosome_2; pos 56163582 to 56164315 reverse strand)
tgcgtcgacctcctcagctgctccctcgtctgcaagtgagttgccccctccctcgcctctcattctccccgcgcgcgcgcggtggtcgacggaatgcccccgtgccgtggccttttgtcttgggtgtctcagtgcttctggaacggttcatcctgatcctgtagtaacctggttgatcaacctgttcagtggactgtctatagctacatcctctttgatgctgttggagagagtatcttgattctgtggcaaccgccagcaattaataatcagagctggatcatatcatagtagattgtatagctttctttcttgtgcatgctaactagatgaaaaagctggtgttacgttattatgccacactcctctcttctgaattggacatgcctccacacactccaattctgcatatccttccagagaccagctgtgagttgttgggtcctgaactgaacttttcttttcatgttcaattcgattagtatgactgtcttgattgttttttcacaatttatttactggctgcggtgtacgtcggtctagtattggttcgcttggcaaaaaccacggaatgtgttttgttgttgccagaattagaaacagtctcactctacaaatgctgcaccaaatcctgatctgctctgttaccttttcctgcaaatgagctagtgaaatggtcagtggctcacacttgtgttctcaaacctgctcatccttctgtggatcaccaggca

SEQ ID NO: 35798 - DNA, 386 bp, Sorghum bicolor
  Intron number 1 from transcript Sb04g038210.1 (locus Sb04g 038210) derived from phytozome v7.0 (chr-ID chromosome_4; pos 67671601 to 67671986 reverse strand)
agtgcaaacccctcctggcagtgcgccaacactaggtaatttgatttccttcaccctgccctgttcttcgtccctgttttttctttatgaaatctgacttgtgatatgtgaatttgaattgtcattttatttccttcacccctgccctgtcatttgtagttctaattaactgattaatgcactgcagcagtgattgttttgaattttgattaatcgattaatgcagcagtgcagtagtgataattttgttctgaacttctaattaactgtttaattttagtagtagaccagcagtagtgataattttgttctgaaattctaataaacttgttaattatgtccactttgtaggcttatctagcactgcatctacagccaaccaagta

SEQ ID NO: 35799 - DNA, 979 bp, Sorghum bicolor
  Intron number 4 from transcript Sb09g020360.1 (locus Sb09g 020360) derived from phytozome v7.0 (chr-ID chromosome_9; pos 49651098 to 49652076)
ctgcttccgcacactgaagctcaccactcctagctgtaagctcatctgttccaccaagtttgatcgcctttgcctacatgtatttacagtttgattacccttacctggttctaattgcatcatgtgattttgtttaataataaagctttgttctgtgcttttggtgcttcaaattatgatccagcctcctagacataatgacatcttgtagtcatgtttattttgattaaaatgaacgaatacatttgttgccattgccaaacttaatgacctttgccttaggtgttggaagcctactgtcagaaatgttctcaggggacttggaacccattcctgattggctggtattggtagctgcttgaaatgctagttttcaatatattggtagctgcttgaaatgctagttttcgatttatcctattcctgatcagttgcttgtatatgaactgctagtttcgtccactggaaatggtagttattgtggatggcttattaattgatcactaaatcatgacattttaacatttgtagcaagtctaatgcattgttgcctgatgagggggtgctgaaatgtaagcaggtaacatgtgttaggaatgtcagggataggactccttctgcaccttgcataactcttgtcatatggaaaatgtaactatcattgtgtttacctgaagaaaaatgtatgctaataaagaaatattgaagtgtatcagtacaacatttcagaaaatgactgtaacccaaatcctctgtgcagctttggttgtaatcaatcattgtttctacatgctatgtttagtactgtactgatctttttctattatcctcaatcaattctttttgtatgatatttttttcacgagtaatgagcaagatcaattgatagatataaattcaaactgacctcttgctgtcttgcactgatgtgaatcttccttggttttgtctgcagttggtgatctgaaccacttgatca

SEQ ID NO: 35800 - DNA, 717 bp, Sorghum bicolor
  Intron number 2 from transcript Sb04g034610.1 (locus Sb04g 034610) derived from phytozome v7.0 (chr-ID chromosome_4; pos 64445396 to 64446112)
ccgtagtcgtcaacgtgtacaaccaccagtggcggagcgagaatttgaatcttgagtattcctttgttggtgtttagtgggccaccactcaactgttatctataacctcatgaccgatgtgcgtcttcaccggtcgctatgtaggcgtagcatagagacagaggccgcgcccgcgctgcacgccccgcgccgctaggagcttaggacactgggaaccagcagtgccgctaccacgttatgcctagtcagctagggttagagatttaggaaggaggattatgaaattgtctcctactcatgcctcgttcactcacacaaaaagaatactttgttatacatgttgccatgtgcaagacaaataagatatgatttgtactaatatttggtggcacgagtcgatatgtatgtgatctggagataaataattagattttcatttgcagaaacaacaaaatagaataatgttggcaatcgagctaacatagaacctatgtgtaaaaagaaatacaaggatagactaaaaagaatgagaaaaaaattttatttgctaaatataaaaaggctaatatattagatataaatatatatatataaatatgtacctatatatacttagtgcataaaaagttgggtattcgtggaaataccacgaatacccacggtatccgcccatgacaaccagggcagcaagaacatcaccctccactggcacgacgt

SEQ ID NO: 35801 - DNA, 664 bp, Sorghum bicolor
  Intron number 2 from transcript Sb09g021390.1 (locus Sb09g 021390) derived from phytozome v7.0 (chr-ID chromosome_9; pos 50846585 to 50847248 reverse strand)
ggaggttggagttacattgttattgttcttctgttgatgcttttactaaaactttgctgatgcaactatgcaagtatgcagctatgtgagtgggcacatgataattcaattttagctacgcaattctgtgttttatggctgttgcacaaagtccaaaaaaagttaggtactccacctggtccaatttatagttcacattagttttgtcctaagttaaacttctctaattttgaccaaaattttagaaaaaatatattaacatcttcaagttcaaatagtggtcatatcaagacatattacattatgaatttaatgaaactaattccatggtgtatgttaagttagtttgacttatgacaaagttaaagaactataatttggcacggagggagtattacataagtgtgaacatattatgtatgtagggaggcaaaagctgtttttcatatgtccagaaaatgtttgactctcattgtttcgtttcagtaatctgcaatttatggccatacagtgcaacatatcagcttttttttaaattggggccttacagtacaagataaaaactgcgatgctatagagttttatgactatggttatctttcacagtgattcgacaatttatattgcaggcagctgtacactgttcgtgacggtgggaccattg

SEQ ID NO: 35802 - DNA, 801 bp, Sorghum bicolor
  Intron number 1 from transcript Sb02g010770.1 (locus Sb02g 010770) derived from phytozome v7.0 (chr-ID chromosome_2; pos 16935035 to 16935835)
acgtcaatcaccagctccagaccaagttctcgcaggtaatcgtccaagccatcctaggatctggttcatcttccccaaatcaggtttgattgaatcgggtttgtcctggcgattcgtagcatcccggtgtaccaatttttttttgtggaaatcagggccatcatctatattgcatatgatgtatccgcgcatatgtgtactgtgtagaccgaaacatgttttaataggtcggtgaaaacccaggtttttgcacctgcatttctgcaggcaagataaaaataaaacccaggtctgtgaactacttgctactaatacataatcatcagacaatgccgaatgtagtatgttctggggtaaaatttccattttgtgcgaaggctgcccaaataccttctgattttgttttgctttcattgtatctcagtatgcttgttattgttattagtacaaacagaaaaaaaaggtacaggtcaatggctgatttgcttctgatgcatgtaatccattggtataaatgattaaatattgtttagatgtccatcaacaacactgcagagatttctattacacattgacaagcagcatttgcttgccagttcaagaagacaagtggcattgtccttattaaatagatagtcctcttatatctgttaaatgcccatagtcctacctcattgtagttgtgcattgagtttggttgatatgctcttggcaacattgaaatcacgggccatctcttctaagtatttcttcaattattttgcaggaaccccagccaattgattgggagtactacaaaaa

SEQ ID NO: 35803 - DNA, 628 bp, Sorghum bicolor
  Intron number 4 from transcript Sb02g008411.1 (locus Sb02g 008411) derived from phytozome v7.0 (chr-ID chromosome_2; pos 11156812 to 11157439)
agcaggtgctcggcactacgaaaaggtttgtggctaaccttttgagttgtgagatacttcatctcaggtattctttacacatcctttcttccttttgatgacccatgtctataagaattactctgtagttattgtagttgaaataatactatggcatatgtaagaaaatttagcaccacacagatggtggaaactgggtaagagcttagaagaatacatgctttggttgtatatcctcttgaatattctgggtactggcttgaaaggcactttgtcccgggtttgttatgatgagtgccacatttgggttcacattgaatgtgacctgacatgcaacaacgtggaggttatttccttactattgtatgatgacattttgatgtccttattgcttgatatctatatgcaactatttgataaataccttttcttaacttggcattgtgtcataggatttagaaaagacagattattactgtctgaaatgcaaactaaaacgcaaaacagttctagcaacagcaaaaatgaatacttccaatagttcagagtaagtcatttactgctctctaacttatggagtatgatatgagtaaataagcacttcaattcgtaatgtatttctccacag

SEQ ID NO: 35804 - DNA, 925 bp, Sorghum bicolor
  Intron number 1 from transcript Sb05g000340.2 (locus Sb05g 000340) derived from phytozome v7.0 (chr-ID chromosome_5; pos 151579 to 152503 reverse strand)
ggccctcctcaccaggttggttgcctcttgcctggcgcctgctgtctcctgcctctccctcctctccacctaatcccacgactggactaatcactgcttactacttacctccatttttgtcgatcatcatcgatgctgattgattgcccgctacatgattaattagctacctccatctccatgctcatgattccatttctgtctgctgttaagctacgattaacagtcttacaacactactgatggttgactgcaatagcactaactttccccgaggtcaactgtcaaatcccgcctccctcccacctcaaaaagattgcaattttggcaggacttctgccaggcaaatatattaatagaggagggaaaaaaagatttcaattttacctgtctctgtctttcaatccatggaattgttggagtacatgggagcttcgctccattcagttccccgaacatgcttcaatgctacattcagccattacctgccactcatgactcatctcattcagctattgcctgtctttttctccaacaccggtcattgcttgtcactgtcctcctctctctgtagggatgctgcaatccaattcaattttggacgctactgctgcatttcctactatttgttgtactctgccttcacattgtagccaccaaatactaatagatagccgagtagaaataccaacagtcttcttctcaaaatggtataaaagatgcggctttggattactttctactatcaattgttgatttgatttcaaagctcgtgaaccataactctttgcactgtttgtgaatgtgatgtgctttagcctcttgtacaaaagacgtgcaaaatattgttcatcaataccgataaattgtttttttgcctcttgtctcaccattgtctaaaatctttgtccaggttcaccaggac

SEQ ID NO: 35805 - DNA, 1059 bp, Sorghum bicolor
  Intron number 1 from transcript Sb03g039650.1 (locus Sb03g 039650) derived from phytozome v7.0 (chr-ID chromosome_3; pos 67321409 to 67322467)
ggcagattccatctactcagttgggcccttgagaggtattggttataagcatttttcaagttttgtttgtgtttcttctttctggaattagttttatatgagagcatgagaagtgacaaccttattgaattcaatattcatgatcctagaaaagggctaggcttggtgtatgaccttcaccagcaatggtcttggaaggcagcggcgatttaatatccatggggctgccactaagaaacttggtacctatggcagtgctcagcacttagcattatgctctgtcagtatattctatatgagcacaaagttgtactagccttgcaccttcctgtcgtgtgcccatctgcgcaagtgatctgagagtgtgttgggacttgggagttttggagcattcaccaaattttgagacctgaggagtggaagaatgaacaaactctgcaactctggttcacagagatgacgtacggaggcgacagtgctgcacacactggcaatcctggcgctctggatgctctggagtaagagtgaccacatttttcagcactgagagggcagctgaagctccattttttatttagttgatgaatgcaacttgtagaagctggtgggtgctaaggtcctcggcaggattattgccttaacaaaccgcaagtaatcactttagtttctttccccacatcagcactctgctgcttgtgggtttactggcacgccttgcacatgtcttatgtaactctgctttccctacattattaatatatgctggcaatgccagatctttctaaaaaaacaaacaaaaaacttgtaccagaagagctatttgtcttgtcagaatagaagctgctgaaaacgggacatgattaggctacaaaggactttttctagccttgttttgtattgtgcttagccaatacatgcgctatttaagaaatatctgtaatggcaaatataagttgttatagaagctagaacagtacagttttaattatagccttacaccttactggtttcttctacctaacaggtgctgctgtcaaaccgtttggatcatttttatca

SEQ ID NO: 35806 - DNA, 497 bp, Sorghum bicolor
  Intron number 3 from transcript Sb01g010150.1 (locus Sb01g 010150) derived from phytozome v7.0 (chr-ID chromosome_1; pos 9006329 to 9006825 reverse strand)
gagtatcctgttatttaagcattatttttgtttattttataggctgccaaagctatttagttgattagttctgaactagccgtgttgctggtgcatatttacacttattgcttgttaatgggttggagatgcaaaaccagtctgttaggagctgaaattggatttgtgttaccttttctttgcacttggttgttgctctgtgagactgatattttgagtttcaacatttattgcatatttttttaaagggcaccgttcatttgtttgatcattagacataagccctgtagatcgtggccatgcaatcattggatgttcactgatatgacagagaatgttgcaggatggattgactcaagaactaatctagctaacttatggcaacgtaattcatgatgatattgctccttatgttcgtggagtttgttttgctaggattttatactttcaatttctgtttctttaacaaaacctcaggcacctagaagacagcttgg

SEQ ID NO: 35807 - DNA, 601 bp, Sorghum bicolor
  Intron number 1 from transcript Sb09g028560.1 (locus Sb09g 028560) derived from phytozome v7.0 (chr-ID chromosome_9; pos 57429120 to 57429720 reverse strand)
aaggcccagatctgggacaccgccggccaggaaaggtacatacaatccccagatccagctgtgctccgcgagccgcgtcgacccctttcctcgtatctgatctccgattggtccgttcgttagcgattgctatgcctgcgtcgtatcgtatggatctctgtagcttggtttggtccgtgaccccctaattggctgttacacatggacgcaaatgaactgcttcgatcatcattgaaagaaaacggaaagaatctgcactcattcaatgcacatcttccgtgattgcacctgcacgtaccattttcaatctatcacatttcgagctatcggaatatgcagtttgtgcaggtgcagggccaggcagccctgttttgccagatgtgaagttgtggacgttgaaattgtggatagaaatccatatctctagccctgtgctgaactgtttgattgatgcaggcgacgtctactgtgtttgatataggagtgccattattcttgtggcttttgccgttcaactacttgctgcactgcagattacttatatcatttggtcgatgcttctgcaggtaccgtgctatcacaagtgcctattaccgtggag

SEQ ID NO: 35808 - DNA, 954 bp, Sorghum bicolor
  Intron number 1 from transcript Sb04g028960.1 (locus Sb04g 028960) derived from phytozome v7.0 (chr-ID chromosome_4; pos 59025178 to 59026131 reverse strand)
agcaccggaaggctctacgagttctccagcaccaagtacgaatcattttgcctatttatttacgtcactctctctactagacatatctctctatctctctctagatatatgttacaaatttcctactgatcagacttggtttaacttctaagagatctgtttaatttgctatatatctgatcttcttgtttcagtgtttagcgtaggtacctagttggccagctctctagatgtatgagcagattaatgaaatagctgagggtcctattattttttgcgaaaaaaactaacatagatggtctcctttattcaactaattaagttcaattattaataacaaaatgtatatatgtggtctgggattccttagtttttgttctcttacataactaaggctggagaccaatatttctgcttcatatgttcatattattgcgaatctgataataatctcatatatcatgaaatgggaggttttgattcttttttttcatggaactgctgtttcgtcaccatctaaacaagcaaaatgaagtagtatctattttatagaaatcagtatgcaagcttagaggaaattacttttagtagagcaatctgagcaatgcaaagtcaatcgacaagaggttatatatatctgttgacaatgtaaaatgagaagagattatataaatcattattgacaattataaattggaagagctattaatgaatgaatcgtgcaataatattgagtctccgtgtgtactaactatttgaagaattactacctttcaaaaaaaatatattaaggggtatgctaagaaacatttatagagttaataaaagtaggaacgggcatatatacgtttgtatgctatagtatgtcatattacgttacttacaaattcagatacaaattaataataagcactaacctatactattttgttccacttttattttctttctagc

SEQ ID NO: 35809 - DNA, 662 bp, Sorghum bicolor
  Intron number 2 from transcript Sb04g024370.1 (locus Sb04g 024370) derived from phytozome v7.0 (chr-ID chromosome_4; pos 54113969 to 54114630)
cttatcgatcatcaggtgcgttcgattatgctttcgattgctgcaatgggagtttaattgatcgaactgtgaaccaactactttaaatttcacgtgatgtgggggtacagtggcaatgcataagtcttcgaagtttgccacctcgaagatttttttttttttaagttcaaaaaaaaaataagtcttcgaggtggcaaactgacattgcaactgaataccctgttgatgtggctatggctatggtatacgcagagttgtagattagatagcttatttaatccgaggcacttgtatttttcttgttccttggcagtttgtgtgatccttttgcccaccacctgtaactagtttgtgaatcacaaccaggcagaaatatgggcttacatagttgcatctgaactagtgagcagaatttctgctcatcgtgaaggaggcttgttgcagagttcagtgtgtcggtttaggccacagtgagcataatctacataattttgtgtacatttacaaaacttcgagtggtttacagcatttacatttcactagcagagcatatccttgcttgcctttgctttgatatgctgttctgctctccattcagttgtgttgcagcatggatgttgacccggcattatctgtgcacttgaaatttgccaatgcagaag

SEQ ID NO: 35810 - DNA, 528 bp, Sorghum bicolor
  Intron number 2 from transcript Sb02g007270.1 (locus Sb02g 007270) derived from phytozome v7.0 (chr-ID chromosome_2; pos 9310598 to 9311125 reverse strand)
gagtatagggttgaccttttcaatcggtgagtgatatttctttgattctatcttaaactagatcaggagttctgaacttcgatgcagcaactgaagttcagttttctatttatatcactggaatttgtcttctatgtgacattgtcttttgttcttaaataaaatcatattcgaagtcatttctggaagaagcattacactttgaactatagaatggataaatttatgctgccagtttatctgatattccatctttggccttgtttagatccgaattttttttggattttgacactgtagcacttttgtttttatttgacaaacattgttcaatcattgagtaactaggcttaaaagattcttctcgtgatttataggtaaattgtgcaattagttttgttttcatctatatttaatgctccatgcatgtgccgcaagatttgatgtgacgaggaatcttgaaaaatttttggtttttggggtgaactaaacaaggcctttgtttcactattacaggcttacacatac

SEQ ID NO: 35811 - DNA, 908 bp, Sorghum bicolor
  Intron number 1 from transcript Sb02g007270.1 (locus Sb02g 007270) derived from phytozome v7.0 (chr-ID chromosome_2; pos 9311153 to 9312060 reverse strand)
cgggtgctgcgccgaccaatttgcagaaggagcaggtgtgcgccttgtttgcagattaccttgcccgagttcaaattatatctttgctgtacacggtgctctgaggaaaggaggattttcttatttcgctcgaacgaacaagcatgccaaattagttggtttgacaagtaaatttatgccttaagatcgatttgtcaccttgtgttgcctagatttgtcagcctgtaataaactaagaggaaagcatgactatgattttaaagaaatgaagtatacgagttgggaatgttgattgggaaggtgacttccatcagatttagggtaattttgaaaggggaacaatgtcaaatgaactgtgatattgcttagatggccttacacttaaattactttaggttatactgaatagttacaactattctagggacttggatattcttctatactgatattaagtagagaatattttttccccttcatatttgcctttccatcgatgagcattgcacattgtgaccaaataactgcataccttatactagtacaatttttaagagagaaatttatttctgcgctactcaggaatttttgtcagctgatggttccaagtggtgagaagctaagcatgctagcatgagtggatgtgcagggtggtatgctattaaatttgtgtgtacaaatggaaatacagttatagttgtcattctaagaacaagcaagatttgtagcaattagcatgaccgttgatctccaaagttttctgatattcagtttcgaatttgttttacttgggatgctttattctatcttttctctggttatttcttgtacatgtaaacaattgcattcagattttttattatcaattgaagcttttctgagataattcgttttatacatctcaatag

SEQ ID NO: 35812 - DNA, 642 bp, Sorghum bicolor
  Intron number 1 from transcript Sb06g025550.1 (locus Sb06g 025550) derived from phytozome v7.0 (chr-ID chromosome_6; pos 54502113 to 54502754)
ggagcaaagctagctgcagtaccagggagagtgaggtacagagaagaaacaaactcactcgaattcttttttcctgttaaaaatatatttatatatctgcctcactgtatgtttgtgtcatcatatacgagagtagtctgcgggggtgtgggtgtttgcgagcttttgttgttttgcttttttacttgttttgagtgcaactgtttgtttggatttccctgtccactttgttcttttgttaatctcggaagagtcctaagcggccgatgccttggagtttttctcggctgcctgtcgatttgtttcttgtttcagatcaattccaatccaagcacatacatatgagaaaggtctagccatcaggaattttggggcctccttctctcctctcctttcggtagtttttgtctccttggttctgtcgggctcctcgctcctcgatttgtctccggatcggaggaacaggcagcgaaatctgtctcgtctcgctcccatggtcgtcggcgtcgctcgcatgctgtgtgtgtctttaatttcttggagatatatgccgttgttgattgccatgtcatcggtctcacttggaaagtctcttgctttgtttcagcgaagaaagagggggaaggacgaagagcactgccg

SEQ ID NO: 35813 - DNA, 849 bp, Sorghum bicolor
  Intron number 1 from transcript Sb10g004360.1 (locus Sb10g 004360) derived from phytozome v7.0 (chr-ID chromosome_10; pos 3833283 to 3834131 reverse strand)
ccatcaaggtagagtaacctgttcgttgctgatccttgtctttgtcagctttgtattgtattcctgcactgcacactgcacaggggctgtgcgtggcaaaaagagcttcaattcaagcctgtcagttttgaaaccccttgttactagatgaatgagtgtaggatgcaattcaacgcactggtagataagctagcatatactgtgcatctatagcagtaacagagtaacaagtaacaacgtggccgtagcatcctactacagttttgcaggattccaatatataccttgaacaatagtaacttggatctttgcgtattgcaaggtggcgttctattaatttagatcaaaacataattcgtgccgtcggtttaggttccaccatcttctggattgaagaagcatatacaggaaatgtcgcaaactctgaagtcagtctcttcaaatctccttgagcgattcatagacagagcttacagattctctgagcagccttctctgaatgaggtaaaaaaacgtactcttttctccctgcattccttgatactactttcaagttcaacttaaaaatgttatcgttaatcgtgtcttgtggcatttggggaaacagctatagctaggttgcactggctcttttcagcatatttttgttactctgttgtaattatgcagtactttctccatctactgacagtgccaaaggtgcttctgttagttaatacccaatttgcaatgtctatatatgagtaaattttcccaactcatgatgttactgaactcatgcatattactcgctacaattagacaaataaaaccgaccaagtcctctacaggggaattttcgacctgtca

SEQ ID NO: 35814 - DNA, 673 bp, Sorghum bicolor
  Intron number 2 from transcript Sb05g024260.1 (locus Sb05g 024260) derived from phytozome v7.0 (chr-ID chromosome_5; pos 57408969 to 57409641 reverse strand)
gcgtgttctgcgctttccccaacggctgcaggtatgcaccctcaccccctcggatcatatcctttgggtttgtaccctgcgctgcgtgctaatgtattggttggttctgtattctgatatgcacaaatgatccgaatgtcatttgtcgcctccattcattgtctagtctagataatgggtggtattcaatataaactactccatctgcgaagataacatctaatgtggaatcttgctagtaacaagtgacatgacctgaagcgaaggtatttgtgaattgtcttgtatatagtagccgaagccatgatattcaagaagatagcttatctactgttgatacttgctagtaaaaggtggtattttgggcgtgcttgattattttctgtttccttagtaggagtaattaaatcccttacaatctggtttttgtggtctaacatgaagtatactttgagatttcttagttgttacttgttagtatagatgtgtttctggttcagaaagtatcagctacaaaatgtaccttatatgctttgccatcatcttatattctacaacaagataatgctgcattgttttgtattcctgtgaacaataaataattgaacttggctgaaaagtttgttttttttcataatttttaactacgaaaacactcatgtaggttgtaccg

SEQ ID NO: 35815 - DNA, 501 bp, Sorghum bicolor
  Intron number 1 from transcript Sb09g023670.1 (locus Sb09g 023670) derived from phytozome v7.0 (chr-ID chromosome_9; pos 53300797 to 53301297)
gctcgctcgccgccaccgcgcgcctctccgcctcggtactgccctccccggcttcccctattttttttgtgatttcagcaaaataaattccgtcgcggtgcttggttagcgcggacctgtcacgaattcgagaatcaagtacagcctcacttgaatccgagcgcttgctagatcactaacgcggttaggaggttcagcgctagattactaaagcagcgagggggttgattggttccttacttccttgcaatttgagtttagcgtgaattaagatccctgtggcggattatctagtagaccgttagtgccccgtctcagttaattagttttttctcttagcaatccggacctaatccttggtttagttgaacatttgaatctgttatttccttcttcctttttttcacctgttctgtttgaattgtgtagcctgtggccctgtattcgaaatagtgaaatgatctcataagtttcttccatttttacatccaggggtatttg

SEQ ID NO: 35816 - DNA, 389 bp, Sorghum bicolor
  Intron number 1 from transcript Sb01g026580.1 (locus Sb01g 026580) derived from phytozome v7.0 (chr-ID chromosome_1; pos 45090289 to 45090677)
atatttgtcatcccctttgctgccatccttgagaagttagctccatctccaaaaatatatatgtcctagttatatattattgtctcattgttactttctttgatccatgtggtcatctccatatattatgttcagtagcagaaaatcttgttttgcgcacaataataatactgtagtacattttttctaatataaagattgcaatgtccttcagttagcatgaacaaaagaagatatatacaactgtgctaagttcttattaatatttgcccctgctttgatttgattatgtttcctcacaaaagaagatatatactgaatacgatagtgttgattttgattgtgttgatgtagagggaagtggaaggagattaaactgaaagcattca

SEQ ID NO: 35817 - DNA, 741 bp, Sorghum bicolor
  Intron number 3 from transcript Sb01g037200.1 (locus Sb01g 037200) derived from phytozome v7.0 (chr-ID chromosome_1; pos 60756387 to 60757127)
ccttaggggtaaggaggatgccaaatttgtccacaatttcttggaaacctttatggtgatgtagcatccagtttaattgttcatggtatgatttagaatgatatgtagtgtctgtgttgcatttagtgtatcttttgtatgttgtgttctatttaaacaaatcaattattgctgaaattggtatcaccagtctttatttgcccggatattttccagcaaggcattacgtttatcagctagccatgcagtattgtaagtttgttacatcagtattgtaagtttgttacattattcattctatttccacaagttatcttctgtgcaagtatgtgttggagttgcatgtgacatgatcggtttagtaaagggtgtctcttgctttgacaaatctgccaattatgacgactttgatagtgtttcaacaaagcagcatatagctcctaatctttctgtcatttgtttcctgagctcgctgagttaatgatctagttgagtgatctgtctgattgtgttgcttctgtacattaatgtaagcccaatgattggtaggttaatcaaaatatgcagtcataaatttaagaagagagttgctgctcatattaagttctctccagtaagaaagaagtgctgttttgggcatacatgatctctaatacactttgtctcagcaaaattgtgttgtaatttgtaaataaaacatagcaataacaaatgtgctgataacacggcgacaggaccccc

SEQ ID NO: 35818 - DNA, 945 bp, Sorghum bicolor
  Intron number 1 from transcript Sb10g006460.1 (locus Sb10g 006460) derived from phytozome v7.0 (chr-ID chromosome_10; pos 5952384 to 5953328 reverse strand)
aatcgcactccccacgtccggtctcccaccccgctgtaagcttggataaatcgccccagttttttaagcttttgcctagctatcttggtttcaagtttccttttgtttagatctagttttgctgcagagatagagatttacgaagggtggatacctggttatttgttgcaagtagctgtagccggtggccgttttgtggattattagggtggcaatttgtttgatggtggatttgtttctagagctccatgcttcagagtttgtttagtttatatcagaagtggcatgaattcgttcagataaattcatgatctgatgccgcgtgaactgttagtggcacattcggatcttcaaaatggtttagtccttggaaagacagccaaatgagcctttttttggctatggcatagctgcagattctttaggcatttagttctgcacttagtaattcaggttctaccaagtgattgagaaatgcaaattgctgccaatagcttcatgatggttcctgacacttgtcttatctagaataatacttgatcgtgatcctaacttcaaaattcagtcataccttattgttacagtgaaaattgaggtttgggtttttatgggcttgctgttcttttcaattagaagatatccttactttctttatagcttataggagctaccatgtatgatttccatgcccctaaattggatggttaaaaggattggcatcaaccatcagtaacctgttatttgaacaagttttcatgtaaccttgcagctggatcctgctcattctaaactataaagatgcttgacttgctgagcatatctactaaaccttgattgtacccatggttgatcttgatttgtctgcattatttttccctaattcactaatgttatgttccaatcgttgtagataaggttgaccgtgccgtgagtagtgccatctat

SEQ ID NO: 35819 - DNA, 661 bp, Sorghum bicolor
  Intron number 2 from transcript Sb10g008780.1 (locus Sb10g 008780) derived from phytozome v7.0 (chr-ID chromosome_10; pos 9196350 to 9197010)
cttcagttcaagcctatatttctcggcaaggtgcgacttgcatattgtgttcagtgaaggctagtgtgcttgtgaaatgcggcactgcataagaacaaacacttgtgatttatgaattacgctttgaatgtggtcaatagaattggaaatgttgcacaaaatggctaggtatcaatgacgccacctacagggatgtctgattttggggttggggatgcgagagcttgctgggaattttctggtatgaaccaaccaatagatccttagaaatcaaaagattaacctcactcatctcctcctggttcaaagttgcacatattttcatagaaaattgttaggtccattcttgactttcttttatgacacatgcaagttatttccaaacaattaaaaggtgaaacttcacggttggaagggtgtttactaactatttatacacaaacagttaatagaatcagtagaataagccattgagcatgatcctatattttcttttctactagatctgtaacaataataatatgccacctatgatcaatagagtcgtgactttcagactcgaattaagcttctgacaacctggactggaacaaacatggtttcgttttactttgttctcaggtccttcgttttgctacttacaggaacctaggcgtgtgcc

SEQ ID NO: 35820 - DNA, 905 bp, Sorghum bicolor
  Intron number 2 from transcript Sb06g020530.1 (locus Sb06g 020530) derived from phytozome v7.0 (chr-ID chromosome_6; pos 49964830 to 49965734 reverse strand)
cgccgcggtgcctcggcgtccgttgcttccccaccgtacgccacatctctctctctctctctctctccccatttgcttttcttcttcctgtgcatatgtatgcctgccatgtagtactagtatctagattctagaagaagactttcacctcagctctgaagcttgcattcagtcgatgtaacctgactggtgcagggtttgacacgaagcaactcgcagatactaaaagaacttctaggatgtttgcaaaggaaaaaaacactagtaactttagtttgatgccaagaatattcttttttcatctgtacgtaaaagagaaaaatggaaaaccctttcacctattcaatgcaacaataataacaaccacccatcagtagacggcaaaaatgctcgtccatcttgattaaggctgcagcctgcagcgaccaacaaggcaacaatcacaggcactatgagcaagtggagtggagcagcatcgtcccctgcccacagcccaattgccatgttcagaaactgaattagctgcatgcgttcgaaaatccacagttccttgctcagattctgaaattgttctgtttctttttttccagagctccttcttctgaacattcagtattcgtagaacgtcagcaattgctgtcgccactagtactctgaaaattcagtattctgaacttgttctgaatattatctcaatctctctactcaaccgtagtactctttgcattgcatctgcactgcacacacaagttatcactgcaactgctgccggttcctagctaacggtgttgttgttcttggttgtacatgtgccgggggcatggatggcgacggacggacggacggacggacacgggctacgccaagcagaacatccactgcggcgagagcgtgacgatcgaagg

SEQ ID NO: 35821 - DNA, 949 bp, Sorghum bicolor
  Intron number 1 from transcript Sb03g030560.1 (locus Sb03g 030560) derived from phytozome v7.0 (chr-ID chromosome_3; pos 58783820 to 58784768 reverse strand)
gccaagaactccggcgttgaagcccgggcctacaagtatgttgttcgtcagctctttgtatagatttgcagtcagttggtgcagatgttgtatgactatttgattgtagttttgggtggaattgattaacctgtggcgatctcttggtttaggaattcgatgccctagattagattgttattatgagagctttggtaaaagatggggaacaaatagcccctttcaggataaaaacatatccgtaatttatatctgcaaggactttagaaccccccaaaacaatatttggttgcattttgcagtttttgcttgccaaagattttatatgtagcatatagaaaactaagaaaataagtatttcttcatatcagtattagatgcttgttaccttgtcaacttgtgtactccaataggatggtcgagcactaattagcctgattactctcggcagcatgatgatttcaggcaatgtgattcacattatttattgaatgagaactgaacactttttaagaatttcttagtaataaacacacagtccagtttttctctggcagtttagaacaccctgttcagctggccggaaaaaacggctgatgctgatttgttgtgtgagaaaaatactgttataaactaaggagatagaatgaaatattttatatcttaaaaaaaaaactgatgtcgttctctttctccgttccagttaactgctaccctggtcacaattttttgttgctttgcagttaagcatttccattcaacataagtcctgttgttttttactcgttatacagcatttccatctgccatagtttcaatgcaactgtttttccttttctaatttagttttcagtctcatgtatcataagtctttttgcatggactaaatgcctcctctgtcatgtttttttggggcacagagataagctggagcttaaagctgtgaaag

SEQ ID NO: 35822 - DNA, 713 bp, Sorghum bicolor
  Intron number 1 from transcript Sb04g025370.1 (locus Sb04g 025370) derived from phytozome v7.0 (chr-ID chromosome_4; pos 55138065 to 55138777 reverse strand)
gcttctgcaccgtcggcgccgggaacctcgtgagcctcctcctcctccttctctgtacccaccaccgtctctaggttctcgtgtgctcgtcccctttttctttttccttttcttccgtatctcctccttttcttgatgattggttaagctcgcgtgggattgggaaagcttcggttttattctgctcctcgcttgatcatcacaacactaaaatcgttcggtttcatggcaagaaaggctaagcagtgcagcagcgatcttgtaggaatctgcgatagggacggaagtgagtgatcgctccctggatttatcctcctcggttgtatcgttatattttttttttccttcctcttccctctacctattattttattctgtttcctgctactaaaaaaactcgaccagtgtttggatatgcacagcacggctgtacaagtaatgccccgttgaccgccatcttagatagacctgaaatttatgctgatcctgtgagatcgttttgttattattatctagtataaacacgaggtgtcatcgttatattagcatgttctcttcgtttctccttgcaatttcgtaaatttccgtctcctttttgggttcatgcgtcgtgctgttagtaggtttgattattgtttcatacggactgacagactaatttatgcttttcgttcacaggctcctgttgcgccaaacaagcagatcagtaagat

SEQ ID NO: 35823 - DNA, 908 bp, Sorghum bicolor
  Intron number 2 from transcript Sb02g029060.1 (locus Sb02g 029060) derived from phytozome v7.0 (chr-ID chromosome_2; pos 64229249 to 64230156 reverse strand)
ccggggacgtgacggaactccagatcggcgtcaaggtacccctactaggactttttttaaaactatgtttcattccctcccttcttgtcggattgggctgggccaagcagagcggttgttttaatcagactggagattctgcttacgatggaagggtagattttgcaacagattgaaaattgtagaaacaagatttttgcaaccgtctaaggaattgtggggaaagtaagctgtgcaggaaaattctcagtcatttcggtggggattgactgggccattgggcgaaagatttattgtttgctcgatataaaaatcgtgtgtttatttcggtgaatgcatggagattgtgatttggatattgttctttaatggaactcaacattttgttgtttcccagtgcaacaagtcacagtttaattctggttgtttttttaatgtttataataaatggatttattaatgcatagttcaagtttcagttctctttccatactgagtaagtgcatgaatcgtatggaaaccatagactgagttggcacctgaaaacctttttgattcggcttcaaagcaacataaaatgctttgtaaactctcttcaatttttcgtcagccagaaaatcaagttttcgtacaactggtactttcaaagtgtcatgttgtaacttgtaagaaagaaactctgtcattctcttaaagaacaaaatatctagttggacaagcagaagtgaatgtgtctatgcttactaaaccattaaccatgttgtaagcaaattgccatggagtgtggataatcgcatgtgctgccatcatttgcagcaattattttcagcagtttcttatattgatgctatgcttgggtattttgaaatgcagtacaagccggaatcttgcagcattcaagctcacaa

SEQ ID NO: 35824 - DNA, 664 bp, Sorghum bicolor
  Intron number 2 from transcript Sb02g033680.1 (locus Sb02g 033680) derived from phytozome v7.0 (chr-ID chromosome_2; pos 68237317 to 68237980 reverse strand)
gctcttcgcctacggcaccttgaaggactacaagagtaagatcgtggattgcgcctttgcaattctcgcattgtttgtcctttgcggctttgcgtctcgtgtatgcgtgttgttctgtgggtttttccttgttgcgctgtttggtctgtctgttttgactactcccagcaacaatacctgtggctttcaatcaataaaagctggaccatgggctttcttgtctaaaaaatatgagtatgaactcggaaattttactctggatgaaggccattgggtgggtgatggagctctgatgttgagaccacacattttagagaatgttgctgatgactcaaatttaaaattctgtttctagtcagcaaactgagaacacatcacatgccacattgtcatgctagcgaacagcggttgcgctattaagatgttcacctttttaccaactactatgaatgagcatttgactgttcataaataacagtatgaattatttatgcttgtttgatctaccattgcttcagcgtgcatattatttagtggttaatgtccaagtttggcttacttattggtacttctatatagcaagatatgcacattgttttgttctctaatgtatcttcatgcaagtgtaggtaattctggatcccttccagcattgttgcctgac

SEQ ID NO: 35825 - DNA, 863 bp, Sorghum bicolor
  Intron number 1 from transcript Sb03g040940.1 (locus Sb03g 040940) derived from phytozome v7.0 (chr-ID chromosome_3; pos 68429878 to 68430740)
ggtggcccggcgaggcggcgtcggctttcacgaatgtaagttcccgtcacacaaggggtggtggtgagtggtttttggtttggtttcgatgttcgtaggtttcggagggtttgtctggtcggtcagtgtgtgtggcgagtgaagctgtggtgaaggcgggggcgttcctggccagatcggtaggtcgcatgctctgattcgctggatgcagtgttgtgcagggcagatttctgggaggaatctggacttctaagccttttatttattactacttctgagtcttgcttcgctggttacattgcgctgtggacgagccaaaccttccgatttctacgcttttaccgcgcgtagttcgtgtccaaatttataccagctcgcatacccgaagtataagctaaacatctcccgaaatagagtcgtagcttgtacgcttgtaccgttggttctgtacacgccggtatttcctcggcgaaatggtatgtcaatcaaccactgtgtttaatatggttctgctgctactatgtccagaacctcccatgggaattaggcactcatatgtgcccatgtttgtttagcttattaaatcccatatttcttcggttcaaagtgatgctccggacctaacatagggtatggagtcaagtcaaaggtctctgcttgcatcccgaccaatgatggatttggaatctgatttagtttcttgtttggctatgcccggtagttatgatgtctatgtttaatcaactaaaagttgtgatgatgcgaccatatgccagtcaattccatccatgttaaacattctctcattaattcttttttttttcttttgcaggggcagcttgtagcggctctttcttttgcat

SEQ ID NO: 35826 - DNA, 988 bp, Sorghum bicolor
  Intron number 1 from transcript Sb02g002750.1 (locus Sb02g 002750) derived from phytozome v7.0 (chr-ID chromosome_2; pos 2860888 to 2861875)
cgacaccacctactggaacgagttccagtgggacggtacgtacgtttgcgtgcttcttcttggttcaggatctcgtactcaaattttcttcctgtactcttagttagctgcaagattacatgctaggcgcgacagcctctttccaggaacaagaattattacagttctgaaatttccaccaacttataaatgccataaaaatcagcattgttttagtatagcccctgagtttctgaatcctccagccttctacctgaatcacgaatcctgcagggcaaaacatttctttacgagctaaggttgctgcagctttggaattcgcttcagattagtatgacatttcagaaacaagcgtactggtatcggttggtagttggtacacctgtcctacgatactgaagcttcatttcgttcagatttctctctctctctctctctctctctctctctctctctctctctctctccaaattttagctaaaattttataaatatcttgaaaaattcaaccatattttgaccgattttcggtcctaccggtgctctccggtatttatgtctcaaccgcggtaggctgaacccttacaagtgtattggtatgatgggttggtgctactagtctacttcgatactgaagttgaaatcacacggtgaaactgaaacccatcccaggatccagggccagaaagtgtggtaaaccatcctacacttgtgctccttattcctagcatctcgttggaagaaattttagttggcctgaaattctggtcatacttccagtgcatatgaaatgcctgctgctttgaccaaaatccaaatcaacctgatataattgtcaaaactggcatttccttgttttaaattagatgctcttcagctcagaatacttcacattacaaaacgttggaatgactgccttttgatatgagtgaacactctcaaacaaataccagataggaaactgaaggccgctaaaggagcatttgac

SEQ ID NO: 35827 - DNA, 876 bp, Sorghum bicolor
  Intron number 1 from transcript Sb10g025270.1 (locus Sb10g 025270) derived from phytozome v7.0 (chr-ID chromosome_10; pos 54509410 to 54510285)
tcggctccggtcacccgtcgatccacgcaaccgtaagcgagcctcttcccgtctggttaaggttcgagcctttctcgtctggttaaggttcgtacgcggatctaggcgcaaactctgtagaggtgcgggttcctcggagcgtagatttgcgtggaaaaattgttgattggagcttatgccctgagggctgccacatcgcaaccgtgatttgtcattcgctgaattagttgactgcaattcgtcgaagaatgtagtgacgtgccggggtaattttgttgcgaatctaatcaagatttgtcagccttgtagctaaagatgtttagctgtcaaatgcaatatttgagatgtgctgttaaaactgcggaagtattgatctgagtaaaaaactaaaaactactactttcgaacttacagttagagatgctgattacctcctatgctgattacctgggattttgcttgggtttgaattattcatgaagctgggatatgttctgcaaggatgatggttcaaaatatacatcctgaatctagtcttgttttagttcttgaattgatttaattactatactgagactgatttgctgttgaatcgcttctaagttttcgctcaaaacaatttctagttaactttttcttagtgtaaatccattgacaggatatttattcttactgtattgtgctcagttagtatggtcttttgatactgttagactcttaaaatcacagctagtgttgaagtatatcaactcaggttcactcgttgtgcacggtgaaattgtttctggtggtggttaacatgagtaggttcaatttcatctgatagtagtatatgttgcagtcgaggaggaagaccagggagcccaaggaggagaa

SEQ ID NO: 35828 - DNA, 981 bp, Sorghum bicolor
  Intron number 1 from transcript Sb02g025575.1 (locus Sb02g 025575) derived from phytozome v7.0 (chr-ID chromosome_2; pos 60538718 to 60539698)
agagggtgcggcggctccccagtcactaccccaaggtgaaagtttctgctctcttgggatgcttatttgttgcgcacttaatttgagggcgttaagagtaaattcacaattcacaaggagctccttacttaacagaactagaaacttgcagtcacttttaggtgctcactgcttgttgtataggaattcactttaacatctcaatacgtgttcattgcttgaattgctttacctaaattgtgattgttcgccctcaatgccaggcgttactaatgtatatgttcagtttaaaactttaaactaatatgccacatatatgctattataacttctgtccattatgaagatgtcttaaataaagttcagacgaaatattgcttgttcaacctagcaattgtgatcgctttaatgcaacaaaaaaataattggaaaagtccactgtacagattgatgccgatggagtaccatgactaattcagataataattgtacatgtttctgacactgaaaactctaacaacatgggaacaccatggatccattattgtcagtcatgcactccaaaactgttgtattaatgcacccatcatattatttactctgttccaaattataggttaatttagctttttcttaagtcaaacttttctaattttgacaattttagaaaatatattaacatctacaagttcaaataaatgcaataccaactaccaaacatatttcatggaggatttaatgaaacaaacttgatgttgtagatgttgatgcatctttctgtaaacttggtcaaagataagtttgacttaggaaaaactaaagtgacctctcattcggaacctatggagtacttcattgcatttgcataccttttgatgtttgtacataagttttgaggtgtggcagtgatggatatctgttcgaaattgtagggcttctaaactacctgcttatgtaggttatttacagcagctgacagtg

SEQ ID NO: 35829 - DNA, 663 bp, Sorghum bicolor
  Intron number 2 from transcript Sb09g026100.1 (locus Sb09g 026100) derived from phytozome v7.0 (chr-ID chromosome_9; pos 55431246 to 55431908 reverse strand)
cctgctgtgcacagcagcaacccccacctgacgaggtgagcactgaggacaggcttgttttacttgctttcccgtctttttgtgcccccagctgggggagctatgcttgtttgttttttgtcatcgcatatgcgtgatcttgggaaaggattacatagtctaatgttccagtccacttcattttgaccttttgatcctggctctcagaatcaaatctgataagtgataggcaagcgagcttagataagaaaatagttatgaagtttccagtttcaaggagtaaccttggtcacgcaaattccctagtctgctataatagaaaattgcctatcaatcaaccgtatggttattttctatgacacaggttagtttttgtcctaaactttttcttgttagttctgactatcctttccggccagtgaactgattcacattcaaatcagctatagtatacatcctactgccaaaacaaaaaaactgtgggatatttaacagcttctcaaatttaagtcacatcacatgagatgcgtatacatatttcagatattttagtttgttaacacgactgtgatttgattaacctaaaaaaggactgcaaacttactcaactcgctcaaattcaatgtagaggctctgttcttccagtggttggttggcctccag

SEQ ID NO: 35830 - DNA, 762 bp, Sorghum bicolor
  Intron number 3 from transcript Sb01g047920.1 (locus Sb01g 047920) derived from phytozome v7.0 (chr-ID chromosome_1; pos 71001482 to 71002243 reverse strand)
tcctgctccacctcccattgctagctgaggataaggtactgattatttgccctttccccttttgttttgtttcatgtccgtgactgtttgttacatgtaaattaattataagctgaacatacagcaggcaaaacacacaaatggacgtttcaaggaaaattgatatccatgccacagaggttaatataacatatagaaaagggtctggttcacctaaatatgggcacatagcaatagcatccaatgtaaagcttgcatctaagtcgaactgataatggacctgttttttgatcttaagttgggcttcaaatcaattgtccttttcttcctcggcgttgagatttatattattgaaagcatagccaactggaacaccataggatcttgagttacttagttgaggtaaataacaatatgaacccaaataatcagagaagctatttgaatgtcttcagaaacacaaggtgtcacaatataaccctaaaatcaatgatacaaaaattggctgagaggaatagctcactgtaattttgtgctttcccaattctgagtcccttccctcctctgtcagtgcagtcctgttagctgatttaccttgcgtttagttagttatacatgcttctttgtgctccctttatcctgcttggttgatgacatgaactacctgtatacatcacttctgttagcagacttcttaatgaatttgacaacattcaccgttggctaattaatttgctctatcctatttgcagaacgtgccat

SEQ ID NO: 35831 - DNA, 791 bp, Sorghum bicolor
  Intron number 5 from transcript Sb01g019510.1 (locus Sb01g 019510) derived from phytozome v7.0 (chr-ID chromosome_1; pos 21075549 to 21076339)
gagaaccagttctctgtaatgcttctatcttgtattgctgttgcttgctattagactttggattgctgtatgatatatgtgtgctatgctttctgtattcttgaatcttgatgtgtatgaagatatatgtccctttgagtaccatagatgctaaaagtatcacttaaacaaacacattttaagttccactcgcaaatgggttatcatattttaatagtatgtgagcactgcatttttttttgggagtgagataagatgatatttcttagctaagatggcataatgctgccttttctcaatggttgcatgcaaccaaaggctatgatgtcggggaaggttgcttaatcttcacagttggcacttgatggtgggctggtgacactttcttttttcactgatatatgaactatggttgctgggggcattttttgtctagctatgcttcttgaccttttgctatgcatatctttgataatgcattttatttctttagtaggtatagtaactttaggtcgtgttcatttcatgtacctacttccattctttgataatgcatttcgtttctttagtagacacaataactttagacatacctattctaatgtctctacacacttaattaaaatcttatgattgattgtgctatatttcaggtagattacaattttactagtgctgcaatttttttttgtattttggccttattaacactataagtattaatttttcacattaaggctcaatgcatgaacagttaaatatactgcttttccagatatttgtatctcgag

SEQ ID NO: 35832 - DNA, 890 bp, Sorghum bicolor
  Intron number 1 from transcript Sb03g031680.1 (locus Sb03g 031680) derived from phytozome v7.0 (chr-ID chromosome_3; pos 60085957 to 60086846)
ggcgggcaacccgtactgcaaacacatcgcatcaagtaagcccttaataaacctaccgaaagatttatttattttttcgtctaaaaaccgaatgtgttcgatctgcactctgcagccagccattccactcggacttccgataccacgcctgtgtgtctttctaattaatttatatatattgaggcttcgcttcaggctaaaatgagtttcaggattaggcttcctattgacaaagtaaacaaaaaacaaagaactcaaagctcttgaattttcagatgaatcaaagacaatgagcacgatgggttttgcataggccacctactgaataaatttagggtctccccaccagcccattacgaatccattacttggccaagcttccatcattttgaatggcgctgcgaaaatccgttgaacgggcatgccatcttagagtagattgccaccattgctaggaacctcaattatgaaggaaatcgttctcaatatgcttataaccgttttctcaaggaaaaatgaagtacaacttgtgggcccacctgtctcattaagtactccctcccgaaaatgaaaatcctgcttcaatgaagagtgatcattccaattttgataaagtatatacaaaaacactatttataatgcgttaattatggaatatatttttcataagaagcctatttaaagatgcaaacgttgatattattttctattaacctagtcaaactgacattatcttttgtaatacatctgtgctttgtgtttctgtttgacgtgaatcagcataatcttgctcaaatctgaccttttcttaaacaagctcaaatctgacattgtcttttgttcgttggcatacaggatcaaaagggaaaacggcaattattgctggtaag

SEQ ID NO: 35833 - DNA, 979 bp, Sorghum bicolor
  Intron number 2 from transcript Sb09g028410.1 (locus Sb09g 028410) derived from phytozome v7.0 (chr-ID chromosome_9; pos 57300717 to 57301695 reverse strand)
aagatttccagagaaattgctgacgccagtgggtgagtgcctgccttctctgtcttagcattgtttatactcttgttgcttaataatattttttgaaattaaacttcaatgcaatagatagatactagatagaagacgccttaaaattgtttgagtaaacaagatgaactgatctttaccggatttatgcttggtcaatttctgctgttgaattcatagctgaacctgcatgtatgtgtagtagacacttccgttcaatttagtgatacttgttatccatccaccttcggatactctgtcggtcccaaaatgagttcaattctagatttgaatcatgttataaactttcttaaatttggccaagttatagaagatagtatcaatgtttatgtctctgagtaggcttactatgccatgattaacctgatgacctttaaattgtttttttactcttcaaccaggtacaattgtaccttgtttttagacatggggagtagttgtcatttttttcatttgatggtgtgttaaactaaaccaagtttcatctaaccattggagtagtggttagaggtcacgtgacagttaatttggtttgtggggatcggaatgcttttgtctaaggaccagttctttcttgctagtttccacctgccatcgtaggtgggtggatcaacccgtccgactacgtgtggtttgagctttactgctttagcatcggtagctcactcagttgaattgatttgcatttgccatttggatgtgtcagctttactgattcagcatcggtggctcagttttgatttgcatttgccatttggatgtcttgttcggtctgtcggtccatgaactagctccacaacaactacttacaaaacaagaaagctgagcttcatttgcagcttgtgtgctgaccactgctaccttctctgtgtgtgtgtgtgcaggaagacaatcccagtggaagagatcctaacgatcg

SEQ ID NO: 35834 - DNA, 846 bp, Sorghum bicolor
  Intron number 2 from transcript Sb03g041100.1 (locus Sb03g 041100) derived from phytozome v7.0 (chr-ID chromosome_3; pos 68642723 to 68643568)
cttggttttgccgtgagtattcaaaagacactgacgcccctgttttgcagctgcatctgcgtctgcatctgcatctgcatggagtgtattcatcattcatgcaagcttatataggaagtagtagaagaagattgttcttatatactctccgtatttgtcttcccgtggaaaatatactctccgtatttaaatatatatatatgacgtttagattaagctagttagtttttttagctaattagctttgtcttaaacattacatttaaaatggagatagtatatcttttagagttaacagaagcaatatcgtctttcaaattgaccgaaataattagagtagtaatgcacaccatcgatctctggtattatatatattattagcaaaaataatatagtatagtttggcaataaagcatagccattcaatatttgtgatagctgctactgccgtagcaggatatggcggtcgctgttacccgtgaagtttgcatcttcacatgtttccgctccagatgaaatttcagtagggaaaaagaaaaggaatgataggtgaaagaaaattgttaacgctcaaaataaaagatttactcacttattttggacccgaaataaaatactcaattactcctgctagttagcaatctccccaaaaaataaattatatagattgtctaattcatgcatcatttttgttatatggaaagctactagtacgtgtatgcattattgtttgatttgaagccaaaaggtagctctataagttcaaacgaggattttaattattagcactggtcttgaacatgcatggcaggcatcgctgcttggagaggccatcaccgggaaggg

SEQ ID NO: 35835 - DNA, 882 bp, Sorghum bicolor
  Intron number 1 from transcript Sb08g016060.1 (locus Sb08g 016060) derived from phytozome v7.0 (chr-ID chromosome_8; pos 42402619 to 42403500 reverse strand)
gccagggcttctaactgtttcttccttcttgtttggtatgctgccgcggtcccttaaacatttattatgatgtttcatcatgcttgtttcgaatagttttcaacgttggatgaatgttccctgttttgaaattcagttatttggctgaaatatgctctttgtcgtgtgagactgcatgatgatttgctgtggtccgtcggaggacttctctttgtgtgcatactgtaggccttcagattattggtttttacagaactgaacaccatgtctgaaaaacaaaatattctgtgttaaacttacaatactgtgttgtgttatgaacatttttgagttgcaggcttgtaactatgcactcatacttgccttttgagttgcagctcgtatatattgctttggattcagagtttctctgtttatctccttttgtcttccaaaaagcaggttcagagtttcccagtcaaaaaacggcaggcagatgagtggtgcattttattacagcttatatataggaatttcaccttgacatattttgttcttcttgcagcgttcataggatcttagatctctacaaacagcatgctgcaaccaattattaatatttgacagcaagggagaagctattcttatacatgttagacctgtcttcttggcagctcatggacagtagtaacatcttccatagtttgactagaattctttaggacgatttcattagatatatagccctgcgttctctgacttctttttgcctaaaatgctacatctacctttgcctttcgtttgtgtggtgagatcagtaagcttgagtgcgtgactgacgaagtttgtttgtttttgttgcattcggttgcgctgcaagaacagaagggaacagacgccgag

SEQ ID NO: 35836 - DNA, 385 bp, Sorghum bicolor
  Intron number 3 from transcript Sb06g027780.1 (locus Sb06g 027780) derived from phytozome v7.0 (chr-ID chromosome_6; pos 56617770 to 56618154)
ggtatattttatttactgatttaattcttgtcttgctgccaattttgatatatctttcagtaattttctttacaaaaaatagtttgttacattactaaatatggactttagattacaagcgcaaccaaggctctgaaattctacattctgttcttttatcagagttgcttttgatgaagagaagatgcacagtgatgcatgtatattcaattagtttcctttaaacaatactaatatagataaaacttgggaaaaaacttgaagcagactgagtggagttagttcctttatcttagcttggtggcccctcatcttttattgaccttactaaagtggtaaatcttgtttaggtacccgaacttgaagagtgtcagggagttgatct

SEQ ID NO: 35837 - DNA, 632 bp, Sorghum bicolor
  Intron number 2 from transcript Sb04g020775.1 (locus Sb04g 020775) derived from phytozome v7.0 (chr-ID chromosome_4; pos 48855015 to 48855646)
agggaaacaatactgagttttgagtgagaggttagtctttgtttttatccagtaagagcttagacagttattgcacaaaatttatattttgtgatgccatctgtctaagcattcagcagatggtttcccaaagtttatattttgtactaatatattataggtttctaggtgttgtgccaattcgaccaagatcacttgaaatgttaggcttgaatctataaaatgcatcagtacttgaaatgttctggctcagattacatatttttgtactaatctattttggagcacacatttagcattactgctggtacatcatgactagctattgcacaaaatttgctggaattatttaaggatctgtttgcatgtactagtctactgttacttgaattttctgtcttttttgtatcaagtactaactcttggctgatatctcttctctgtttgctctcatggcttaggctcttagcaactaatctatttttggacccttctttaatatagaacattagtgcatatttgatttttttgatgatgataaaatggcttagtagttgacattgacatatatccattggcagttcctgacacatatgttcactgtgactttacaggtctgaggaggtcgagtt

SEQ ID NO: 35838 - DNA, 787 bp, Sorghum bicolor
  Intron number 2 from transcript Sb02g038365.1 (locus Sb02g 038365) derived from phytozome v7.0 (chr-ID chromosome_2; pos 72642933 to 72643719 reverse strand)
gcaagaccctggtctccaggacacagggcaccaaggtatgcgcactcttcaccttctcactctgtttgggtatcgtactatcgccttcgtgtattgtggtgaagtagtgattgattagttgctgagacatattgctgaaccttacatatccatccatttatcagggcactttttcagtcaggttagaccttttcttgatcttgtgcagtgctatataaatttgtatgccagaatggttgcactgatacatgtatcttgacttcactgctgtgaaattataccaacaaccaagtgtatatggcatttctagcggtaattttgatttagacattgttccaatttacagtagtactatttcactcagaccttgctgtgtagtatttgctctgtaagatgagacctctgtaggatgtcacatttgttttttgttcatatgataagttagaagccctgtggttatttactctttggtctgttttctctttgtatcactattctaacaaagaatcaattatttttttaggtagctttaaaaatgttttatgttgactttctaagatatagatcatttgttggaccgaattattggaatgtgttctagacttgagttgaggactagtaatcttcgatgacccagttggttcctttgtagctttatcggaatcttcagttaatcaattcaaagtatctgttttatccttttttgtgattccatgactgcatgtaactcagtttcttctgtttgttttcagattgcatctgagggtttaaagcacagagtatttga

SEQ ID NO: 35839 - DNA, 978 bp, Sorghum bicolor
  Intron number 1 from transcript Sb05g005350.1 (locus Sb05g 005350) derived from phytozome v7.0 (chr-ID chromosome_5; pos 7140147 to 7141124 reverse strand)
gacctcgcccgctgctccgccgtctgcggcacgtgagctcctcctcctcccctctttccctttccgttcagttgtccgcctgcgcctggttgctacattcagccggtcccttcgttacaggatgtcttctttagctccacggctaatctcagtagtagttagttcatccatgattttgactgtaaatttgtgcctgttgttagtgaactcattcggggatttctgttctactccagttctatcttctttggagagggaaaaaagattaattttgatggtagcaaggtatcaatttcacctggaagctgggtgatgaactaatgatggtgggcaggtgcctactcgtcatagatggagatttgttattttactggaattatttgctactcatcatagacagagatttgttattttagtggaattgtttgctactcaccacgctggactattttctatctgtgttttatgtgctattatgatgcaccctgtttgctgcaagagaacacctgaaccattagattgtctatcttgtgctccaaagtagatcatgcacctgcaagtgcatgattttgagtaactggatcacagatggagtaggcgtagctatgagcttgtagctctctgagatgcattttggtctgaccatttatttctgatcctgatctgaaccgtgataccttgatgatgctaacttgtgttatgtattaataaagatgtactccgtatgtgcatagtctacaactcttaagtcaatgttatttctggttcttggtaccaattttttgtaccataaattcttgcgatagagtattagaccatattttttgtttgaccttttctgtttcttgcatttcttctatttcgattgttggatgggtattctcaaaactctgatgctatgtatctgtgttgattaacgtttgcagtatgtttttctccttggtttataggaataggataattgaaacagctcatctc

SEQ ID NO: 35840 - DNA, 778 bp, Sorghum bicolor
  Intron number 1 from transcript Sb07g019370.1 (locus Sb07g 019370) derived from phytozome v7.0 (chr-ID chromosome_7; pos 49913023 to 49913800)
ccaccgacgaggagagcaagctgcccctcttcaacgtaagggacaccagaaaataaaacttccctctcctccttccgattattctcccgctatctcgtctgcaacagcggatcaagtgctgatcttggtgtctatggcgtgggagcgtttgattgactcttcaacaatcggatcgtgcgttttccgtgcggcagagttcttggttgtctggtcaactagaatatgctatgtgatgggtagtagttgcaaactttgtagatgtttaagaggaatctttgtgcccacggtttggtaatcgccaaatcagtggagggttttagcataggtacgaatttttggccggaggagtggtgagttcgttggttacatctgctaattcatagaagaaagttccttgttttttcttctgcagtcttatcgtgcgttggtgatgatttagtgtaatgtccacatatggatagcatttctctttttagttctttttatgtttctgtctattttcttcccttccatccgtgttagtacattgtgaattgtctaactggtcgatctgtatgtggagtactacaagttattgtagtttcgttccttcactaatgtttagctgcaaaaaaaaggaaggaaagataaaaggatgatccagtgctaggctagtgactagtgtatcctgactcctgatggttggaatgagtaaaactaggaaaaatgcttatagtttgctaaaaggatatttcagcaagtaaaatttcttcctctctttcaggttcacccggtgttg

SEQ ID NO: 35841 - DNA, 497 bp, Sorghum bicolor
  Intron number 1 from transcript Sb07g026895.1 (locus Sb07g 026895) derived from phytozome v7.0 (chr-ID chromosome_7; pos 62063654 to 62064150)
gagctccgccgcgccgccgcggattcgcggaggaggtgagactgattggttcttgttcttggaccacgtgctgtttggtgcgtttttgtcggcgggaatctcttgtcttgttcttagccgggcggagctattgctcatcttctcccgttggttctcgtatggtcgggttttgttttcgtcttctgatgattatgacgagagggaaaaaaatctgtcttttgccaacgaaacaatgcaataactaagagttaatgcttccaattggattacggtatcaagaaataaatcattgaaaattggcgtatctgattaatggttgttttattgttcacgtggctatgaattttgatgagagaaaagtgccgctgaactggtcatttacgtatgtatataattgggggactggttcctccttgctgaagttgtcaacttgtcatcttcatgattggacccatggttctttcaactgacgaaggtgtttcttgtttcttgtagat

SEQ ID NO: 35842 - DNA, 355 bp, Sorghum bicolor
  Intron number 1 from transcript Sb08g019580.2 (locus Sb08g 019580) derived from phytozome v7.0 (chr-ID chromosome_8; pos 50379867 to 50380221)
gtccagtctagcgcgagacgctagcagcagcaaaggtgaagtgttcttgcgttctctttgccgagcaatctctagaaaatgttgccgatttccggttttccccccttttctgaatgtttgatgaggaagaaaaggtggcgaactttgagtgctgctccggccatcggtttctttttgctgctttctccccctcgtgaatcgcttgaaattacttgcatctttttaattcgcaaatcggagtaattaatagtaggaagcttccaggaaaggggtggagcattttaggtttataatttcgattcctctttctcctgttgcagcagtccagtcggagaagcggaagttcgcgtgtcgt

SEQ ID NO: 35843 - DNA, 676 bp, Sorghum bicolor
  Intron number 1 from transcript Sb02g000850.1 (locus Sb02g 000850) derived from phytozome v7.0 (chr-ID chromosome_2; pos 691096 to 691771 reverse strand)
aagatagggctggtcttccaaggctatgtaagcctttgttcttcttccaaattacccatgtcaattgtctgctggaaattaaactattctacacccatggggtccaaaaattatttttttagagaaatcagtgctgaattgttacttgagttaacttgcttgtcttgttaaatttacttcactttcttaagggagttcagtttagaatgttgcatgaatgtgaatgcaagggcttggaaggtgcattggttcctatatattgcccaaaggggtttagccgttatttatcatgttaccatatgtggtggtgggattggggttcatgttctttagctgtactagaaattttcttgatataattatgtatatatcccgagcgccagatgaatcaaataacgtgcccttactaccatgtgctacgtataaaattttcaattagcttggcatgtactaccagattgatgtcagactggatcgtaatggacatgaccaatttaaaaaagcaaaaaaaaatcatggtgtgtttctatgacttgaaagacttgtttgacctatatctttgttgcttccctttcaaatgcacatctctattaagagaagtgctcaatatacatagacataactaagcacactatactcattggactcttttggggtaacataattctatttcaga

SEQ ID NO: 35844 - DNA, 486 bp, Sorghum bicolor
  Intron number 2 from transcript Sb02g033460.1 (locus Sb02g 033460) derived from phytozome v7.0 (chr-ID chromosome_2; pos 68086546 to 68087031 reverse strand)
tggcacacactgttctggagaaaggtatggtcaggaatcgcgctccgcaaaagtcagtgcatttgaatttattagtgatgtacaggttcgtttcgttagatataatggagcaagcatttacagttgattttgaatttcacgtagaccatgcttgggcggtagctcttgcattttctttgcagcttttttgcacagaaactgttaaaatgagtacagaagcatgtaaggaactctgctgacattgttctttttttttaccgactattgtggcatccaaactattttctttcatgttcatgaaaatccaagaaaaagaattggtgaagcatgttctcttttctgcaaacaaggaaacttatgtgcctatttagttcaactatttatatttagccagttccttgaggcaatacttatgattaacaattgcttatttcactttgtattggtgcagaccaagaacgccttgatttcgataccaagaaactg

SEQ ID NO: 35845 - DNA, 817 bp, Sorghum bicolor
  Intron number 1 from transcript Sb10g022230.1 (locus Sb10g 022230) derived from phytozome v7.0 (chr-ID chromosome_10; pos 49752781 to 49753597 reverse strand)
ggttgtgttatcctgtcttttcttgaggtacattctttgtgctttgcaaatgatttagctaagcttcaaataattctctcctcttgtaattattctagtgacatgtctcagagacttaattactgttgtgtaattcaagatgccctggtgcgaaatattgtaatgaatggctcatggtagtttattatatcattatattaatcagttctgcggtccccttcagcctcttcatgcattccttttaaacctaatggttctatgctttgtttctgaatgatcagctgctcacttgtatttgataattcagtggctgctctctgattctttgttcatgagttaactattgtgtgctttgccactaccagtgagactgaagctgctctttttcaagacagcaactcttaaaactatttcactgcgtcacttactgttacttggacactggcatgagtatatatgtctgcaaacattttggacttaataaatatctcttgcattttgaattgggtgtggtgtgtctaatatggtgaaggtttttaggacccaagactctgggtacactggttttgtcactatttttcatctgcaaccttgatttggcgtttggtgatggtgcatttttctttttgtgtggtagtccttaagtttttttaatgtaggttcactgttagaggctgtcatatgatagaattaggctcatcctaccatgaaaatagggaccccccccccctgctcatccacagtatgttttgggccttttggcacattgatatgtttccgcacattctttttcctttgcagaaactgtatagacgtt

SEQ ID NO: 35846 - DNA, 884 bp, Sorghum bicolor
  Intron number 2 from transcript Sb09g026920.3 (locus Sb09g 026920) derived from phytozome v7.0 (chr-ID chromosome_9; pos 56086185 to 56087068 reverse strand)
cctgcagcttgacagggcaaaggtatgaactttgctcaatcccagatttgagctttttatgttaatatatatagctttaggaccacgggaactaatgtgcaatgagaactatctatcctagaatttagaaagcatgctgactctgcttcaagccacatttctgttttttattggcatggcatactgaaactctggaactatatatagcgaacaaaaaacaccagtactccacactatggattttctttttgaggaaacacactatggaatttcaatattaacacggtgtcgttgtgatattcagttcagtacgtttctcgtctcagtaaactataatcatcatttgttggtaggcatgcatgtttcctgaacttacccagtcagacagacggttttcatttatgcagaacaattctgattaattcttcagaaattcaaatgcaaaacagtcctgatcagttgtgcacatgcatgctcttaaaaccctgtgtttgcaaactacaagacaacccactacacacatctgtcaccctaacattcagtatctttccatgcctaaatgctgcttattttccactgagaccaaaccactatacacaattttgtccatctctacctgatagcctgctactccagttctgttcttttgtccataggagtaccctttttcatactatatggtttggtttgcaacgtgcgcggtccacgcacggttcaaacaacacgagttacacgtgtgtctgtatatatgtgtcttcatcgggcacataggagtactcttcttcaccatttgcgagcttgaacagctaatgagttggttctttgctgcgttgcctgtggacaacccagtgctgcttccctgccaacctggcggcgcacgtgtg

SEQ ID NO: 35847 - DNA, 944 bp, Sorghum bicolor
  Intron number 1 from transcript Sb09g025590.1 (locus Sb09g 025590) derived from phytozome v7.0 (chr-ID chromosome_9; pos 55057210 to 55058153)
ggggcagcgcaccttctccagccccgaggagatcggtacgtacgctaagctacgcaatgcgaccttcgccttcccccccttcggtttgcaatttagttcggcggcgctttcgacggacggcttagggtagggtttactagccccttttctggctcgattgtcgccatcggcgcggcggggttggagtggagagcggccttggtcagttggttggcccttgttggcttgtttggtcgcggtacaagctgcttatagcgtcagaatgttgtgtttatgtagggagggcgattgggggcgggagttgttttctcccttgcactctgttctacttgatcaggccttggcgttcccttgcggcgttttgaatgcttgtactacgtcgatcataggatgacctttttttactttgtggggagtagttgattggttgtggtagcagtgtacttgaaattgaggacaaccatgatcgaggttttactgctcgatttgttggttgttcactgttccattcagatccattgtgcagagtggatgtagatagatgctcaggggctgtggctaactatatgactaatgaacaactcttggctgaatttcctcttgattaaccatttttacataatctgtctacatggaatgttttctgataagtacatcttccttctggaagatatttctgtgtggttcaaccagtagatgtttaacacttcattgattctgatattgaggtgggactgttgaacagtttgttgttgagcacaccaatcttagctcctcctcattaataaacaaagtaacttggtggaacagatattaaacagtttgttatgcttaatttgacatttcagcctagcgagccttttattttttttacaatctctcatatgattcatgtggaattgaatgcagcggctggtacttcagcagaccgtccaaggaccttt

SEQ ID NO: 35848 - DNA, 1051 bp, Sorghum bicolor
  Intron number 2 from transcript Sb08g002220.1 (locus Sb08g 002220) derived from phytozome v7.0 (chr-ID chromosome_8; pos 2337070 to 2338120 reverse strand)
gacatcaacgctgctgccgtgtcaggtgttattgatgcatttggctccatcatatattcatacgtagtagtaatgcttttttttggtttcttttctggggctggaaactattctttgcatgagcttcctctgtctataaaaatatgtaattatggtaaccgtatcagttaaattagttcaaatttaaccaaatttataataaatagtattattatatatatctataaaaaaattattctgataatatatattttataataaatctaatggtacttatcaatgtgtttgttcgacttctcgaaaaacttgagtttatttgacactaatttcatgcataggtacattattttggtttcctttcctcatgatatatgtggtgcactggtgcgagctagctaactagctagctagtttgccttttaagttttaattgtttgactgctgactagttattaataatgaagttcttcctgtgaacatgttcgtagttggataatatataaattggcttgtcaggactcagagcaaggcagtatgctgtggtgatatttcaactgggatgctacaacgcttcctggaacgatacatgatgaaactaggctataagtaggccgagcgcataaagttgtcttgcatcaaactgaaactagaaacatgctatcgtataactgttttcatactatatatctgccttcagatcctctctgatattccttacatttttaacaaaaacattcaaagatgctaacatacaattgttttcatactatctaggactctggctattaattatgagctgaaatctacaatatgtactttatttacaaagcacgtagaactgatgcaaaatgtctatgcaatgcatcaactcaatatgctattgttatttcaaagctttagatttatatttcatttgtttacagccatgttgtgataggtaataaactcactgtgaattcctattgattattatgagaagacttgattttgtaaactttatttgtattatttcgtaggtcaaacacctctcagttacgcagtttgttctgac

SEQ ID NO: 35849 - DNA, 479 bp, Sorghum bicolor
  Intron number 1 from transcript Sb01g027370.1 (locus Sb01g 027370) derived from phytozome v7.0 (chr-ID chromosome_1; pos 47066306 to 47066784)
agcaccaccacctccggctccggcgacaaataagggtatgtcagtatgtgtggcgaagttcaagctatttttatgtttctgtctaaataaatgcatgttctgttctgatgttcccaaacaacaaagttaggccttatttagttcaaaaaattttgaattttgacactgtagcaatttcgtttttatttaataaacattgtccaatcttagagctggacttacaagattcgtctcgcgatttaactatgcaattagtttttgtttttatctatatttaatgatccatgcatatgccgcaagattcgatgtgatagagaatcttaaaaagtttttggtttttgaagtgaaataaacaagcccttaattagaagattattatgactacttgctgatgatcagacacacaatgtctggacctgattataattgtgacctgattattcatgcatgctcgtttgtctaggatctggggtgaaggc

SEQ ID NO: 35850 - DNA, 872 bp, Sorghum bicolor
  Intron number 1 from transcript Sb08g020750.1 (locus Sb08g 020750) derived from phytozome v7.0 (chr-ID chromosome_8; pos 52039774 to 52040645 reverse strand)
cgcttcgtcccggatctctctggtggctcagtcaggtgagcaagctcttgcaactgggctggagctctatcctggctcagcttccacagcttcagtcttctttgctcctcgatcggttgggaatcggaatggtgggatagatgcctctctggtcagtgcaatgtcgctcgagtggcttaggtgtgtgttcttggagttggtgactctgctttgctcctcgcccctcctccaaaaaagaagatttcgattttgggttgcttggattcggggatcatacattctgaacatttcttgttgctgcatattggagttggcatttcggattcagtcaatcaaatcaactcccgctgctagaatatttcagcgaagggttggtggtaggagctggggggactgattttctcccatccccctcaatcacgaacgcactcccgacgccgacatctcggctcgcagctcattcttttctagccccctcctttggttttcagaagcggttttaggggttgtcggcaggttttgtcaccgagcgctttggcgtccgtaatttcaggccgcttgtcctttcttgcatttttctccttttctttcatgtggcctcacgttttcgaaacccacaccttttccattttattttccccgcggagtagtttttttttactcaaattgtaccggaaccaaggtttaatggatgcggttgcttatcttctcaggatagctactcttgactctttgagataggcatgtgctgacattagacttgtggggagtagtacttgattgcacttgttagttcagcttcaccaaattctcaacagcatgtttattcttctccaggacagtagatagaaggaaaaggaaataagcttgct

SEQ ID NO: 35851 - DNA, 823 bp, Sorghum bicolor
  Intron number 3 from transcript Sb01g006700.1 (locus Sb01g 006700) derived from phytozome v7.0 (chr-ID chromosome_1; pos 5654824 to 5655646 reverse strand)
ctccaattcggtatgtgatagtgaagtttgatctgctctcatcagtaattgcttggcctgcttttgacattgcgctcagtcgctcagatgctcaacatagcaacttttcgaaatcttcatctcagcttggattcttccctagaccctaacttctcatttcttgcttccctagaaatgatgctctgaaagaccaaaccaccaactaattttattatgaattgcttcaataggagtgtctcgtgctttggacagttgttaaaacaatgctacggagtacttgacatatacaaactactggtagctggtactagcctagtagggatactggcatctaaagggccaatgagcagcttttgttcagtctgtactatagctaacccgtgatgtagacttactgttaggtctaatgcagatgtcttcaaagcagtagttttgttgtactattgaattttgaattattgatcactatgacccttgaacttcaattcagatgtttcttcgaccgaatgtataccaggactggaagcatgtgttaaactgacccaacaaatcagttgcttgaacttttgttaatcttctaggtttacgaattaattatatttttttgtgaggacagaatattacaaggaatataaataaattgcttattcctatagtataaaatgtaggctaatcctactctgggtgattacacacttgtgcttgccagctaattactgggacacgtcacatgttcttgtactttacacacatcacattttcattattgtgatcttattcatgttcaggacgtgtataggaatatatcctctacaattgctgg

SEQ ID NO: 35852 - DNA, 860 bp, Sorghum bicolor
  Intron number 1 from transcript Sb04g009770.1 (locus Sb04g 009770) derived from phytozome v7.0 (chr-ID chromosome_4; pos 12408702 to 12409561 reverse strand)
ggtaggtcttggtaacccgcatccgcccactcgatcatgttcggtacgccttgcctatgcgggctcctctatccccatttttttgattggacaagattccgtgtttctactgggtgcttgggtaggggtttggtgagatctgagtgtgatgaatagtttggtgagcaatctaggttggtgggggtgtactgccatgttgcttattcaggtggctgttcaagcggttgtgttgatctaagctggtaacccgagcagtgactagtttttaagctttctgggccaaggtctttttggtctaaaaatgaaaagagcgtccattctttgaccctgcttaggggattaaaacttcgaacattcctatttatttgtttgtgagtgaatagaaaatttgtatggtccagctagtacttttatcttatgagaaactatttcgatccaaactatacaactttgccatccacactccacagtgcaaaaaaaatatagcacacatatattaagccgcattatatttgagtgtacttttccctaaacactagaagttttacaaaaatatggagatcgagattgaattgtgatcatctatctacttgttgcatcagcattgagtagagtcagaatggcttgttctgatatattctgtatatgtgttgcaatgaaatttctagtgtgcatatgactcagttgaatgtgtttatctatcacgtcctttttatacatgtaccctttccctcttgcaatattgtgctaaatgtttcagcactgaattcatgctatcttctctatgttgattgttgaagtctgagcagaggactattctttcagggtactccttatttcttgctctagtgattgaccgg

SEQ ID NO: 35853 - DNA, 646 bp, Sorghum bicolor
  Intron number 2 from transcript Sb09g016460.1 (locus Sb09g 016460) derived from phytozome v7.0 (chr-ID chromosome_9; pos 41347248 to 41347893)
ccagaggaaggtattgcctctgcctccgaagctaggtgagatctgtcaactaatcatgagccgaaacaattttagtttttttttcgagaattcccagttttggactgttcccctaaataaagtgttcatggctcgaacattagaggcattattaggcagattctcataggccctggtcagttctctcttcttttttttctttttttttttgaccaatactacctgcaaagccagtaccgaatcagctttgacttcttccatgtaggcatgtagcagatgacacattttcagcacgaggcctccacttcaattttcacctgaaaacagcaaatttaaaaaaatcaaagcggatcacctaaagtctgtccacaaatattcggcacaccgagatatctaccttcctgtatcacttttcacaaactgcacgtaccaactatagtagatagacacaagggcgatcttggaatcatccattggctgtcaggaattgacagctgaaccaccaagcagacccagatgaagagatgatggtacatcgcctctttgtcagattgttctgcgcctcttgtgctcacacacacccctttttgcctccgatcaattattggcaggataaagataataatccacggtgaccgtagcagga

SEQ ID NO: 35854 - DNA, 594 bp, Sorghum bicolor
  Intron number 1 from transcript Sb06g018660.1 (locus Sb06g 018660) derived from phytozome v7.0 (chr-ID chromosome_6; pos 48247759 to 48248352 reverse strand)
atccttggggacacctgcacgcgcggctgcaggtgagagattcgtcgtgctcattaattttttttttctgcttgtttgtggtaccgtggattcaatgtattagaaattagaatgtgctcttcacttgcttctgtatggtagacatttagactaacatgctgcagtgtgctctatcttgatccatgaactgtttgaattcatatgatctaactttgcatcctcatatgtttagatgtttcttctggactttttaggcactttgatactgctctagctgttgcgtcgcaagaattttcttgatatctaaatttacaaattcatagccgccaccgtgtagtaataagaacgaatgcttttctgtatgaagcagttctatataaaatatgcttattctattgtgtgtgatgtccattttcgggatacatgcaggtttgttgtttagatcacacgcttcaccaatagttttgttttgtgtaagcctataaagcattggatgtttgttgtttgtgatgtggaattgaccttttgaagaaatgaacttaaggcccatagttgcttacaaatttgagaaattactgatttgcagattctgta

SEQ ID NO: 35855 - DNA, 632 bp, Sorghum bicolor
  Intron number 2 from transcript Sb01g001710.4 (locus Sb01g 001710) derived from phytozome v7.0 (chr-ID chromosome_1; pos 1509193 to 1509824 reverse strand)
ttcaggaaccctacttcactcaactcagaggtaattccaaatctttatcttctgggtaaatggccttttttttttacttcgtttcatttccaaacatcaaactgatattcacatttctcttttcttgtatgtatcatgtgtatctatgtactaatggtgcttcattctttaaacttgaaaaaaaaagtttgaccttttattttccttctgtgcacttcacacaaccaatggtttgaatgataaatatcacttgaatgattccctaattccttctccattctcatgtatttggaacatgatagaaattacggtcaatagtttaaacagctattataaggcaaaccttctgtatgttaagatgaaccaacatacattaaaattaaacccagttagttcatactcctatataaatgtacttctcatacaggcacatgacaaggtattgagatgtattactacgtttaatatattgtactttctgctatttattgaacttgtcgatgacaactgattttcgacgaagtttgtattttaattacactttgctttgaccctcttgaggaccacctttctaacttgatgtatgtatacctgtagctggagccaagaaggttgaagggagattagcgact
